United States Patent Application Publication US 2005/0244851 A1 - sequence listing, part 56

SEQ ID NO: 2173916 - DNA, 25 bp, Homo sapien
tctcttggctcccatgagatacgcc

SEQ ID NO: 2173917 - DNA, 25 bp, Homo sapien
tcagaacgactctgcccgtggatga

SEQ ID NO: 2173918 - DNA, 25 bp, Homo sapien
catgagatacgcctctgggtttcag

SEQ ID NO: 2173919 - DNA, 25 bp, Homo sapien
gggaactcttatcagcattgtcaaa

SEQ ID NO: 2173920 - DNA, 25 bp, Homo sapien
tcggcagcccgctgggtttttccat

SEQ ID NO: 2173921 - DNA, 25 bp, Homo sapien
atcttgggtcttcgctgtcgaattc

SEQ ID NO: 2173922 - DNA, 25 bp, Homo sapien
gtatcttgggtcttcgctgtcgaat

SEQ ID NO: 2173923 - DNA, 25 bp, Homo sapien
agtatcttgggtcttcgctgtcgaa

SEQ ID NO: 2173924 - DNA, 25 bp, Homo sapien
gaagtatcttgggtcttcgctgtcg

SEQ ID NO: 2173925 - DNA, 25 bp, Homo sapien
cacattctccacaatctggattttt

SEQ ID NO: 2173926 - DNA, 25 bp, Homo sapien
catccccagggtgggattgaaatcc

SEQ ID NO: 2173927 - DNA, 25 bp, Homo sapien
tgtttttgaaagcatcacacgatgt

SEQ ID NO: 2173928 - DNA, 25 bp, Homo sapien
accacgcctggtccctgtgttttct

SEQ ID NO: 2173929 - DNA, 25 bp, Homo sapien
gcgcctggccgacactgtttttgaa

SEQ ID NO: 2173930 - DNA, 25 bp, Homo sapien
tctttatctgctgtctcatcctgtt

SEQ ID NO: 2173931 - DNA, 25 bp, Homo sapien
ttctcagcactctgcggatttagtc

SEQ ID NO: 2173932 - DNA, 25 bp, Homo sapien
agagcttgctctccgacaggagcca

SEQ ID NO: 2173933 - DNA, 25 bp, Homo sapien
ggatttagtctaaagagcttgcaga

SEQ ID NO: 2173934 - DNA, 25 bp, Homo sapien
agaagagcttgctctccgacaggag

SEQ ID NO: 2173935 - DNA, 25 bp, Homo sapien
tttcttgtggccgaaatgaagtgaa

SEQ ID NO: 2173936 - DNA, 25 bp, Homo sapien
gaaggcagccatttttcggaaaatg

SEQ ID NO: 2173937 - DNA, 25 bp, Homo sapien
tgtgattatcgcttccatcccattc

SEQ ID NO: 2173938 - DNA, 25 bp, Homo sapien
tctcccaagttagcttcaatagata

SEQ ID NO: 2173939 - DNA, 25 bp, Homo sapien
ggtatcttagctacatagggcacaa

SEQ ID NO: 2173940 - DNA, 25 bp, Homo sapien
atagggctgagtctgtgcatacggc

SEQ ID NO: 2173941 - DNA, 25 bp, Homo sapien
aaccacctgcgtttctaagggagca

SEQ ID NO: 2173942 - DNA, 25 bp, Homo sapien
cacacaggcatcttcgtagcttgag

SEQ ID NO: 2173943 - DNA, 25 bp, Homo sapien
gaagagcacatggtctcactgctac

SEQ ID NO: 2173944 - DNA, 25 bp, Homo sapien
taaggtctgcacaactattgcacag

SEQ ID NO: 2173945 - DNA, 25 bp, Homo sapien
tcactgctacgtggaatctaaaaaa

SEQ ID NO: 2173946 - DNA, 25 bp, Homo sapien
cacagcacggtgacataattaataa

SEQ ID NO: 2173947 - DNA, 25 bp, Homo sapien
cagtaagggttcaagtgtaagaagc

SEQ ID NO: 2173948 - DNA, 25 bp, Homo sapien
gaaagagtgagagaggcgggcagtc

SEQ ID NO: 2173949 - DNA, 25 bp, Homo sapien
tgacaatggtatcctgcagggtgga

SEQ ID NO: 2173950 - DNA, 25 bp, Homo sapien
tttaaaataagaatgtcggtgcgcc

SEQ ID NO: 2173951 - DNA, 25 bp, Homo sapien
aattgaacactctcaggcaagcgca

SEQ ID NO: 2173952 - DNA, 25 bp, Homo sapien
ttaaatccgatacgcacagttcagg

SEQ ID NO: 2173953 - DNA, 25 bp, Homo sapien
tagctggtatatgactcctgcctga

SEQ ID NO: 2173954 - DNA, 25 bp, Homo sapien
gagattagcctgaaaacccagaagg

SEQ ID NO: 2173955 - DNA, 25 bp, Homo sapien
tgtggatgcactctggctacaattc

SEQ ID NO: 2173956 - DNA, 25 bp, Homo sapien
ctccagcagggagttgacaggcaca

SEQ ID NO: 2173957 - DNA, 25 bp, Homo sapien
ggctgttattcagcatcccgcagca

SEQ ID NO: 2173958 - DNA, 25 bp, Homo sapien
cccgcagcattgttttgtggatgca

SEQ ID NO: 2173959 - DNA, 25 bp, Homo sapien
tctgctcttaagcaatttcatttaa

SEQ ID NO: 2173960 - DNA, 25 bp, Homo sapien
gccaacaatatggatattatttaag

SEQ ID NO: 2173961 - DNA, 25 bp, Homo sapien
gtttcggcaatgagagtctggtgcc

SEQ ID NO: 2173962 - DNA, 25 bp, Homo sapien
aaacatttatctgctcttaagcaat

SEQ ID NO: 2173963 - DNA, 25 bp, Homo sapien
ggacttggagctgccctttgaaaaa

SEQ ID NO: 2173964 - DNA, 25 bp, Homo sapien
cttgttttacggttccatctggact

SEQ ID NO: 2173965 - DNA, 25 bp, Homo sapien
aagccacagctgctgtgtcaagtct

SEQ ID NO: 2173966 - DNA, 25 bp, Homo sapien
tgctgtgtcaagtctggtgaacgtg

SEQ ID NO: 2173967 - DNA, 25 bp, Homo sapien
aaattctaggtgtcttcttgcccca

SEQ ID NO: 2173968 - DNA, 25 bp, Homo sapien
tgaggtagattgtctcgggagccac

SEQ ID NO: 2173969 - DNA, 25 bp, Homo sapien
tgatgatgaagaccagtagacacct

SEQ ID NO: 2173970 - DNA, 25 bp, Homo sapien
tctacccaatccgaaagtctacagg

SEQ ID NO: 2173971 - DNA, 25 bp, Homo sapien
cagcagcaagtgtaccatttgaagg

SEQ ID NO: 2173972 - DNA, 25 bp, Homo sapien
tttaacggcctcataagaatgcaga

SEQ ID NO: 2173973 - DNA, 25 bp, Homo sapien
tgaatgccttcaggacagcagcaag

SEQ ID NO: 2173974 - DNA, 25 bp, Homo sapien
gctccagattgatggttgaatgcct

SEQ ID NO: 2173975 - DNA, 25 bp, Homo sapien
tgcttacaacttgtttggctttgct

SEQ ID NO: 2173976 - DNA, 25 bp, Homo sapien
tttgcttacaacttgtttggctttg

SEQ ID NO: 2173977 - DNA, 25 bp, Homo sapien
ttgcttacaacttgtttggctttgc

SEQ ID NO: 2173978 - DNA, 25 bp, Homo sapien
gggttgacggactgcgatcctgtct

SEQ ID NO: 2173979 - DNA, 25 bp, Homo sapien
tccagcacgggttgacggactgcga

SEQ ID NO: 2173980 - DNA, 25 bp, Homo sapien
actgcagtccagcacgggttgacgg

SEQ ID NO: 2173981 - DNA, 25 bp, Homo sapien
gacggactgcgatcctgtctcagaa

SEQ ID NO: 2173982 - DNA, 25 bp, Homo sapien
cgtcactatagcgacacggtcaggt

SEQ ID NO: 2173983 - DNA, 25 bp, Homo sapien
aagtctcgccagatgcttcgctgta

SEQ ID NO: 2173984 - DNA, 25 bp, Homo sapien
tatgataacatgcatgccaagtctc

SEQ ID NO: 2173985 - DNA, 25 bp, Homo sapien
tagaatagccaatgccatctgtccc

SEQ ID NO: 2173986 - DNA, 25 bp, Homo sapien
cagtgtgaccggcagaaaggtctgc

SEQ ID NO: 2173987 - DNA, 25 bp, Homo sapien
gaatgtattaaagtggattcgcccc

SEQ ID NO: 2173988 - DNA, 25 bp, Homo sapien
gcagaacggataccctttacagagg

SEQ ID NO: 2173989 - DNA, 25 bp, Homo sapien
tacagaggcgagcaagaatcctgga

SEQ ID NO: 2173990 - DNA, 25 bp, Homo sapien
gcaatcatggctcgctgaagcctcg

SEQ ID NO: 2173991 - DNA, 25 bp, Homo sapien
ggactcaaatgatcctcctgcctca

SEQ ID NO: 2173992 - DNA, 25 bp, Homo sapien
ctcctggactcaaatgatcctcctg

SEQ ID NO: 2173993 - DNA, 25 bp, Homo sapien
aatcatggctcgctgaagcctcgac

SEQ ID NO: 2173994 - DNA, 25 bp, Homo sapien
atctcctccatcaaagaggttcctg

SEQ ID NO: 2173995 - DNA, 25 bp, Homo sapien
catctcctccatcaaagaggttcct

SEQ ID NO: 2173996 - DNA, 25 bp, Homo sapien
tctcctccatcaaagaggttcctga

SEQ ID NO: 2173997 - DNA, 25 bp, Homo sapien
ataaagactgcaaaccggccacgtg

SEQ ID NO: 2173998 - DNA, 25 bp, Homo sapien
cttaaagtaagattgacagcaaagc

SEQ ID NO: 2173999 - DNA, 25 bp, Homo sapien
cagctggagcttcatatagttacac

SEQ ID NO: 2174000 - DNA, 25 bp, Homo sapien
tctaggagtattggactgcagagga

SEQ ID NO: 2174001 - DNA, 25 bp, Homo sapien
gaaggccgcactctcagcttgccta

SEQ ID NO: 2174002 - DNA, 25 bp, Homo sapien
ctcgaacatcaagaccccagggtct

SEQ ID NO: 2174003 - DNA, 25 bp, Homo sapien
agtggcgggatctctagccttcatc

SEQ ID NO: 2174004 - DNA, 25 bp, Homo sapien
tcgtgtgagtcaattatcctagtaa

SEQ ID NO: 2174005 - DNA, 25 bp, Homo sapien
tcttcagtgaagacggagcacgtgt

SEQ ID NO: 2174006 - DNA, 25 bp, Homo sapien
tcagtcccagggtgcaatgatcaca

SEQ ID NO: 2174007 - DNA, 25 bp, Homo sapien
gatcacacctcggagctttccaaaa

SEQ ID NO: 2174008 - DNA, 25 bp, Homo sapien
cacggcttccggctgtcttcagtga

SEQ ID NO: 2174009 - DNA, 25 bp, Homo sapien
gacgttccctaagaatgtggacagg

SEQ ID NO: 2174010 - DNA, 25 bp, Homo sapien
ggactgccgctgtgtaggcactgaa

SEQ ID NO: 2174011 - DNA, 25 bp, Homo sapien
catgtacaaactgaagacgttccct

SEQ ID NO: 2174012 - DNA, 25 bp, Homo sapien
tgccgctgtgtaggcactgaagaca

SEQ ID NO: 2174013 - DNA, 25 bp, Homo sapien
agtctacacgaatataaagaaacac

SEQ ID NO: 2174014 - DNA, 25 bp, Homo sapien
tcctcccaagtctacacgaatataa

SEQ ID NO: 2174015 - DNA, 25 bp, Homo sapien
tcatcctcccaagtctacacgaata

SEQ ID NO: 2174016 - DNA, 25 bp, Homo sapien
cccaagtctacacgaatataaagaa

SEQ ID NO: 2174017 - DNA, 25 bp, Homo sapien
ggaagacattccctaataatgtggc

SEQ ID NO: 2174018 - DNA, 25 bp, Homo sapien
atgcggccaacggactgccactgtg

SEQ ID NO: 2174019 - DNA, 25 bp, Homo sapien
taatgtggctaagggaccactgcca

SEQ ID NO: 2174020 - DNA, 25 bp, Homo sapien
tgccactgtgtacgcgcggaagaca

SEQ ID NO: 2174021 - DNA, 25 bp, Homo sapien
agtgaagacgttccaaaggtccagt

SEQ ID NO: 2174022 - DNA, 25 bp, Homo sapien
gggacggccgtcatgtacacattga

SEQ ID NO: 2174023 - DNA, 25 bp, Homo sapien
tgtacacagtgaagacgttccaaag

SEQ ID NO: 2174024 - DNA, 25 bp, Homo sapien
tccctgagcatgtggccaagggacg

SEQ ID NO: 2174025 - DNA, 25 bp, Homo sapien
ttggaggctgccgagagctatgaac

SEQ ID NO: 2174026 - DNA, 25 bp, Homo sapien
aactaggtgaggtgatataggtcag

SEQ ID NO: 2174027 - DNA, 25 bp, Homo sapien
aataaattccaagatctatcacacc

SEQ ID NO: 2174028 - DNA, 25 bp, Homo sapien
catcgcgtctttcacaatgactaaa

SEQ ID NO: 2174029 - DNA, 25 bp, Homo sapien
aaaatgttagattagtgtcttagga

SEQ ID NO: 2174030 - DNA, 25 bp, Homo sapien
gacttcacgacaccaacgttgagtg

SEQ ID NO: 2174031 - DNA, 25 bp, Homo sapien
cgttgagtgtcaaaaggattccttt

SEQ ID NO: 2174032 - DNA, 25 bp, Homo sapien
gaggcaggacttcacgacaccaacg

SEQ ID NO: 2174033 - DNA, 25 bp, Homo sapien
gtaccacgacttagcatccactgca

SEQ ID NO: 2174034 - DNA, 25 bp, Homo sapien
tgcctagctttagccagtttgttca

SEQ ID NO: 2174035 - DNA, 25 bp, Homo sapien
aaagctccatggtgcctagctttag

SEQ ID NO: 2174036 - DNA, 25 bp, Homo sapien
aagaatgggtaccacgacttagcat

SEQ ID NO: 2174037 - DNA, 25 bp, Homo sapien
aacagggacaaagtcgacaccacat

SEQ ID NO: 2174038 - DNA, 25 bp, Homo sapien
gacaatgtgcgggacgccaaaaacc

SEQ ID NO: 2174039 - DNA, 25 bp, Homo sapien
tgtaacagggacaatgtgcgggacg

SEQ ID NO: 2174040 - DNA, 25 bp, Homo sapien
acagggacaaagtcgacaccacatg

SEQ ID NO: 2174041 - DNA, 25 bp, Homo sapien
aagaatgtggccaagggactgccac

SEQ ID NO: 2174042 - DNA, 25 bp, Homo sapien
taagaatgtggccaagggactgcca

SEQ ID NO: 2174043 - DNA, 25 bp, Homo sapien
ctaagaatgtggccaagggactgcc

SEQ ID NO: 2174044 - DNA, 25 bp, Homo sapien
caagagacggcagggaatatgttcc

SEQ ID NO: 2174045 - DNA, 25 bp, Homo sapien
attaggactagggactgccaccgtg

SEQ ID NO: 2174046 - DNA, 25 bp, Homo sapien
taagcttgtggctaagggaccacca

SEQ ID NO: 2174047 - DNA, 25 bp, Homo sapien
tgttccgtaagcatgtagccaaggg

SEQ ID NO: 2174048 - DNA, 25 bp, Homo sapien
tcgcactgaagacgctccctaagaa

SEQ ID NO: 2174049 - DNA, 25 bp, Homo sapien
ctaagaatgcgtccaggggactgct

SEQ ID NO: 2174050 - DNA, 25 bp, Homo sapien
aatgtgggtaagggaccgccgccat

SEQ ID NO: 2174051 - DNA, 25 bp, Homo sapien
gaagatgttccctaagaatgtgggt

SEQ ID NO: 2174052 - DNA, 25 bp, Homo sapien
catgtggcgcaagggactgatacca

SEQ ID NO: 2174053 - DNA, 25 bp, Homo sapien
gcagccaaggaacggccaccatgta

SEQ ID NO: 2174054 - DNA, 25 bp, Homo sapien
cgttctgtaacaatgcagccaagga

SEQ ID NO: 2174055 - DNA, 25 bp, Homo sapien
acatgtacacactgaagacgttctg

SEQ ID NO: 2174056 - DNA, 25 bp, Homo sapien
cggcacagtcagctctccacacggg

SEQ ID NO: 2174057 - DNA, 25 bp, Homo sapien
gcacaccaaacaccagaaacaggag

SEQ ID NO: 2174058 - DNA, 25 bp, Homo sapien
tgtaacagggacaacgtgcggcaca

SEQ ID NO: 2174059 - DNA, 25 bp, Homo sapien
aacgtgcggcacaccaaacaccaga

SEQ ID NO: 2174060 - DNA, 25 bp, Homo sapien
tctctgatgcgatgggggcatctcc

SEQ ID NO: 2174061 - DNA, 25 bp, Homo sapien
gggaagaaggatgtggaccgggcag

SEQ ID NO: 2174062 - DNA, 25 bp, Homo sapien
cagaccatttcttggtagcaagggt

SEQ ID NO: 2174063 - DNA, 25 bp, Homo sapien
tcaggacgctggctggagaatgtct

SEQ ID NO: 2174064 - DNA, 25 bp, Homo sapien
ctgacagaggaaacggataccacat

SEQ ID NO: 2174065 - DNA, 25 bp, Homo sapien
gaatgggtaccacaacttactgtcc

SEQ ID NO: 2174066 - DNA, 25 bp, Homo sapien
tggatcaagaatgaaaggcgccgcc

SEQ ID NO: 2174067 - DNA, 25 bp, Homo sapien
gttacagggacaacacgtgggacgc

SEQ ID NO: 2174068 - DNA, 25 bp, Homo sapien
gcaggacttcacgttgccaacatga

SEQ ID NO: 2174069 - DNA, 25 bp, Homo sapien
cgtgtacgcactgaagacattccgt

SEQ ID NO: 2174070 - DNA, 25 bp, Homo sapien
aagcatgtggctacgggaccaccgt

SEQ ID NO: 2174071 - DNA, 25 bp, Homo sapien
ttccgtaagaatatggccctgtgca

SEQ ID NO: 2174072 - DNA, 25 bp, Homo sapien
ccatgtgcacactgacgacattccg

SEQ ID NO: 2174073 - DNA, 25 bp, Homo sapien
ggacttttagggctgagacaccgaa

SEQ ID NO: 2174074 - DNA, 25 bp, Homo sapien
caatgctacagaatggagcccacgg

SEQ ID NO: 2174075 - DNA, 25 bp, Homo sapien
taaaccggctcaggacgtaaggata

SEQ ID NO: 2174076 - DNA, 25 bp, Homo sapien
cccagcttgtcttcacggaggcaga

SEQ ID NO: 2174077 - DNA, 25 bp, Homo sapien
catgatgatcgggaaaggctccttc

SEQ ID NO: 2174078 - DNA, 25 bp, Homo sapien
caagcagaagcgttggcagttccca

SEQ ID NO: 2174079 - DNA, 25 bp, Homo sapien
caagaggtccctgcttgcacgagaa

SEQ ID NO: 2174080 - DNA, 25 bp, Homo sapien
tatctgtgaaggaaggaacagctcc

SEQ ID NO: 2174081 - DNA, 25 bp, Homo sapien
gctgtccctaatgccaaagaaaccg

SEQ ID NO: 2174082 - DNA, 25 bp, Homo sapien
aagaaaccgccgctgacgccatccc

SEQ ID NO: 2174083 - DNA, 25 bp, Homo sapien
ccactccgggcgttctcatacagaa

SEQ ID NO: 2174084 - DNA, 25 bp, Homo sapien
agctgctgtccctaatgccaaagaa

SEQ ID NO: 2174085 - DNA, 25 bp, Homo sapien
cgttgaggccaagcaccttctggga

SEQ ID NO: 2174086 - DNA, 25 bp, Homo sapien
tgggtacagcccctcgcagatgagg

SEQ ID NO: 2174087 - DNA, 25 bp, Homo sapien
tagagatgtacttccggctgggcag

SEQ ID NO: 2174088 - DNA, 25 bp, Homo sapien
gaagacctcatagagcactcgcgtg

SEQ ID NO: 2174089 - DNA, 25 bp, Homo sapien
ccaccggagcctgcctgctggacgg

SEQ ID NO: 2174090 - DNA, 25 bp, Homo sapien
ttctccaccggagcctgcctgctgg

SEQ ID NO: 2174091 - DNA, 25 bp, Homo sapien
tgcttctccaccggagcctgcctgc

SEQ ID NO: 2174092 - DNA, 25 bp, Homo sapien
tccaccggagcctgcctgctggacg

SEQ ID NO: 2174093 - DNA, 25 bp, Homo sapien
gctccgctttcaaccaaagggcact

SEQ ID NO: 2174094 - DNA, 25 bp, Homo sapien
ggaacctagcgcaggaatacgctct

SEQ ID NO: 2174095 - DNA, 25 bp, Homo sapien
gcgatgccgcacgtgtcaacataca

SEQ ID NO: 2174096 - DNA, 25 bp, Homo sapien
ttccacgttaatccgactgcagcga

SEQ ID NO: 2174097 - DNA, 25 bp, Homo sapien
caaaatgcccattgtgtccagtcac

SEQ ID NO: 2174098 - DNA, 25 bp, Homo sapien
gatctgtaagcacgtctgaagaagc

SEQ ID NO: 2174099 - DNA, 25 bp, Homo sapien
gaagaagcatggatttctcaatccc

SEQ ID NO: 2174100 - DNA, 25 bp, Homo sapien
tcacaggtgcatccgtgatctgtaa

SEQ ID NO: 2174101 - DNA, 25 bp, Homo sapien
cagagccgcctgatgtcttgggcgc

SEQ ID NO: 2174102 - DNA, 25 bp, Homo sapien
gggctgcttggttggagcccgaccc

SEQ ID NO: 2174103 - DNA, 25 bp, Homo sapien
gtcactggccgaccgcaggcggcag

SEQ ID NO: 2174104 - DNA, 25 bp, Homo sapien
ggccatggcccggaggtgtcagggt

SEQ ID NO: 2174105 - DNA, 25 bp, Homo sapien
ggcgcctaccgcgtagacccgcagg

SEQ ID NO: 2174106 - DNA, 25 bp, Homo sapien
tgcgccaggatcaccgcggcgccta

SEQ ID NO: 2174107 - DNA, 25 bp, Homo sapien
cagctgcgccaggatcaccgcggcg

SEQ ID NO: 2174108 - DNA, 25 bp, Homo sapien
cccgcgccgcagacaatggcgacat

SEQ ID NO: 2174109 - DNA, 25 bp, Homo sapien
cccggccgcgccgccgccgcttccg

SEQ ID NO: 2174110 - DNA, 25 bp, Homo sapien
gccccggccgcgccgccgccgcttc

SEQ ID NO: 2174111 - DNA, 25 bp, Homo sapien
ccggccgcgccgccgccgcttccgc

SEQ ID NO: 2174112 - DNA, 25 bp, Homo sapien
ggctgccccggccgcgccgccgccg

SEQ ID NO: 2174113 - DNA, 25 bp, Homo sapien
cctggttctttatgaatgagttcag

SEQ ID NO: 2174114 - DNA, 25 bp, Homo sapien
caaagtcctggttctttatgaatga

SEQ ID NO: 2174115 - DNA, 25 bp, Homo sapien
gttgacaaagtcctggttctttatg

SEQ ID NO: 2174116 - DNA, 25 bp, Homo sapien
ccaggaagttgacaaagtcctggtt

SEQ ID NO: 2174117 - DNA, 25 bp, Homo sapien
tacttggtgagggaaagcgtttaca

SEQ ID NO: 2174118 - DNA, 25 bp, Homo sapien
aaatttccatatcactggtagctga

SEQ ID NO: 2174119 - DNA, 25 bp, Homo sapien
gcgtttacaacacctgtctactgga

SEQ ID NO: 2174120 - DNA, 25 bp, Homo sapien
ctactggatttaaacatgcagctgc

SEQ ID NO: 2174121 - DNA, 25 bp, Homo sapien
cactttaccattggcatccaagctt

SEQ ID NO: 2174122 - DNA, 25 bp, Homo sapien
tgatcttcaagtgacatgctttctg

SEQ ID NO: 2174123 - DNA, 25 bp, Homo sapien
ggcatccaagcttgacttcttgatc

SEQ ID NO: 2174124 - DNA, 25 bp, Homo sapien
agcttgacttcttgatcttcaagtg

SEQ ID NO: 2174125 - DNA, 25 bp, Homo sapien
tgcctttattctttcttctccaaaa

SEQ ID NO: 2174126 - DNA, 25 bp, Homo sapien
tctgcctttattctttcttctccaa

SEQ ID NO: 2174127 - DNA, 25 bp, Homo sapien
ttctgcctttattctttcttctcca

SEQ ID NO: 2174128 - DNA, 25 bp, Homo sapien
tattctttcttctccaaaattccca

SEQ ID NO: 2174129 - DNA, 25 bp, Homo sapien
gcagaagctatgacaacactgaggt

SEQ ID NO: 2174130 - DNA, 25 bp, Homo sapien
ctggaatagccataatatctcagct

SEQ ID NO: 2174131 - DNA, 25 bp, Homo sapien
gccctctctccacacggaggaggca

SEQ ID NO: 2174132 - DNA, 25 bp, Homo sapien
gaatagccataatatctcagctctg

SEQ ID NO: 2174133 - DNA, 25 bp, Homo sapien
taatgggagcgtttaggagactgta

SEQ ID NO: 2174134 - DNA, 25 bp, Homo sapien
acagaataatgggagcgtttaggag

SEQ ID NO: 2174135 - DNA, 25 bp, Homo sapien
caaaacagaataatgggagcgttta

SEQ ID NO: 2174136 - DNA, 25 bp, Homo sapien
ggagcgtttaggagactgtagaaaa

SEQ ID NO: 2174137 - DNA, 25 bp, Homo sapien
cagggtgcatacagacaggatgggg

SEQ ID NO: 2174138 - DNA, 25 bp, Homo sapien
gcagagagtccttcacggctgctgg

SEQ ID NO: 2174139 - DNA, 25 bp, Homo sapien
ggcagggcccgcctccatcttcatc

SEQ ID NO: 2174140 - DNA, 25 bp, Homo sapien
acagcagagagtccttcacggctgc

SEQ ID NO: 2174141 - DNA, 25 bp, Homo sapien
gggcagggcccgcctccatcttcat

SEQ ID NO: 2174142 - DNA, 25 bp, Homo sapien
gtgatgagattgagaatgtgcctta

SEQ ID NO: 2174143 - DNA, 25 bp, Homo sapien
agtgatgagattgagaatgtgcctt

SEQ ID NO: 2174144 - DNA, 25 bp, Homo sapien
aagtgatgagattgagaatgtgcct

SEQ ID NO: 2174145 - DNA, 25 bp, Homo sapien
tgatgagattgagaatgtgccttac

SEQ ID NO: 2174146 - DNA, 25 bp, Homo sapien
tagggcgatgctgttcttccaagac

SEQ ID NO: 2174147 - DNA, 25 bp, Homo sapien
acatcccgtaggtctggcggtcacg

SEQ ID NO: 2174148 - DNA, 25 bp, Homo sapien
gcaaagtgcctagtctgtatctgta

SEQ ID NO: 2174149 - DNA, 25 bp, Homo sapien
ggcggtcacgaatgcgagatttgct

SEQ ID NO: 2174150 - DNA, 25 bp, Homo sapien
tgcacacagaaggaagccatttgca

SEQ ID NO: 2174151 - DNA, 25 bp, Homo sapien
aagccatttgcactggatggagtct

SEQ ID NO: 2174152 - DNA, 25 bp, Homo sapien
tgcactggatggagtctgtatgaag

SEQ ID NO: 2174153 - DNA, 25 bp, Homo sapien
cacagaaggaagccatttgcactgg

SEQ ID NO: 2174154 - DNA, 25 bp, Homo sapien
gttacccagtgatggcttggcagga

SEQ ID NO: 2174155 - DNA, 25 bp, Homo sapien
tggagtcctggcctactggtagctt

SEQ ID NO: 2174156 - DNA, 25 bp, Homo sapien
gatgctcttacaactccttggcttg

SEQ ID NO: 2174157 - DNA, 25 bp, Homo sapien
gttcttcagagaagggccaagctgt

SEQ ID NO: 2174158 - DNA, 25 bp, Homo sapien
catgcaggcaaactgaagactccac

SEQ ID NO: 2174159 - DNA, 25 bp, Homo sapien
ctggcatgcaggcaaactgaagact

SEQ ID NO: 2174160 - DNA, 25 bp, Homo sapien
tgcaggcaaactgaagactccacag

SEQ ID NO: 2174161 - DNA, 25 bp, Homo sapien
ggcaaactgaagactccacagccac

SEQ ID NO: 2174162 - DNA, 25 bp, Homo sapien
ctgtagccacatagctgtgttcccc

SEQ ID NO: 2174163 - DNA, 25 bp, Homo sapien
tggagtactaggtggggctgtagcc

SEQ ID NO: 2174164 - DNA, 25 bp, Homo sapien
ggctgtagccacatagctgtgttcc

SEQ ID NO: 2174165 - DNA, 25 bp, Homo sapien
ggggctgtagccacatagctgtgtt

SEQ ID NO: 2174166 - DNA, 25 bp, Homo sapien
tgtctttccatgagactgacgccca

SEQ ID NO: 2174167 - DNA, 25 bp, Homo sapien
gggttgccaccttcacaaaagcatc

SEQ ID NO: 2174168 - DNA, 25 bp, Homo sapien
tactgcaagaggtgtaaacataccc

SEQ ID NO: 2174169 - DNA, 25 bp, Homo sapien
gagagtactctttcggctggcctta

SEQ ID NO: 2174170 - DNA, 25 bp, Homo sapien
atgtggcccggacttctgttatacc

SEQ ID NO: 2174171 - DNA, 25 bp, Homo sapien
ttttacggcatgtggcccggacttc

SEQ ID NO: 2174172 - DNA, 25 bp, Homo sapien
gctgttttacggcatgtggcccgga

SEQ ID NO: 2174173 - DNA, 25 bp, Homo sapien
tgccagctgttttacggcatgtggc

SEQ ID NO: 2174174 - DNA, 25 bp, Homo sapien
tgtttaagcttccaagtttgcggtc

SEQ ID NO: 2174175 - DNA, 25 bp, Homo sapien
cacagagggacgaccctgtgtgtac

SEQ ID NO: 2174176 - DNA, 25 bp, Homo sapien
tcaagccttgaatgaaaccatactc

SEQ ID NO: 2174177 - DNA, 25 bp, Homo sapien
tgtgggagaatcaatgcctgttgct

SEQ ID NO: 2174178 - DNA, 25 bp, Homo sapien
ctggagcacacgcagtacttcaaaa

SEQ ID NO: 2174179 - DNA, 25 bp, Homo sapien
ggagcacacgcagtacttcaaaaat

SEQ ID NO: 2174180 - DNA, 25 bp, Homo sapien
cttcaaaaatattggtccgttctgg

SEQ ID NO: 2174181 - DNA, 25 bp, Homo sapien
ttctggtgtcagagagtctttttgg

SEQ ID NO: 2174182 - DNA, 25 bp, Homo sapien
cccggcacacttggtgtagggcaaa

SEQ ID NO: 2174183 - DNA, 25 bp, Homo sapien
aaacttgcccggcacacttggtgta

SEQ ID NO: 2174184 - DNA, 25 bp, Homo sapien
ggtgtagggcaaagcctcatccttg

SEQ ID NO: 2174185 - DNA, 25 bp, Homo sapien
gtgtagggcaaagcctcatccttgt

SEQ ID NO: 2174186 - DNA, 25 bp, Homo sapien
cagtgtgagaaaggcaaaccgcctt

SEQ ID NO: 2174187 - DNA, 25 bp, Homo sapien
cctggtgtgccatagcgcattggac

SEQ ID NO: 2174188 - DNA, 25 bp, Homo sapien
tgtttcccattgctccctagaggtg

SEQ ID NO: 2174189 - DNA, 25 bp, Homo sapien
tggccgtggataacgctcactctgt

SEQ ID NO: 2174190 - DNA, 25 bp, Homo sapien
aaagcgcccgcacgagcgcactcac

SEQ ID NO: 2174191 - DNA, 25 bp, Homo sapien
tctctgcacgcgcatctgccgcttc

SEQ ID NO: 2174192 - DNA, 25 bp, Homo sapien
gctccgtgaatcctcgggttcagtc

SEQ ID NO: 2174193 - DNA, 25 bp, Homo sapien
ttcagtcccgcgtccggattccgcg

SEQ ID NO: 2174194 - DNA, 25 bp, Homo sapien
gatgccgtggtcacagtccacatcg

SEQ ID NO: 2174195 - DNA, 25 bp, Homo sapien
cacagtccacatcgcggcagatgta

SEQ ID NO: 2174196 - DNA, 25 bp, Homo sapien
cgtggtcacagtccacatcgcggca

SEQ ID NO: 2174197 - DNA, 25 bp, Homo sapien
tcagatgccgtggtcacagtccaca

SEQ ID NO: 2174198 - DNA, 25 bp, Homo sapien
tcaccggcgagatgagagactgcat

SEQ ID NO: 2174199 - DNA, 25 bp, Homo sapien
cagaggatcacgtagaggatgagga

SEQ ID NO: 2174200 - DNA, 25 bp, Homo sapien
gatgaggaggatggcgaagatgaag

SEQ ID NO: 2174201 - DNA, 25 bp, Homo sapien
agggccaccaggatcgccttggtca

SEQ ID NO: 2174202 - DNA, 25 bp, Homo sapien
catggattcagatgacgaaaacaac

SEQ ID NO: 2174203 - DNA, 25 bp, Homo sapien
gggaacacaacgttggccatgcatt

SEQ ID NO: 2174204 - DNA, 25 bp, Homo sapien
gaaatgtgcacaaactctcacagtg

SEQ ID NO: 2174205 - DNA, 25 bp, Homo sapien
taaaatagcagagtgggagccagtc

SEQ ID NO: 2174206 - DNA, 25 bp, Homo sapien
tgtgcggacctgaccaaattctcag

SEQ ID NO: 2174207 - DNA, 25 bp, Homo sapien
gctgtttcggaagactatgtgatag

SEQ ID NO: 2174208 - DNA, 25 bp, Homo sapien
catgatggcgctgaagaatgatgat

SEQ ID NO: 2174209 - DNA, 25 bp, Homo sapien
ttgactggctgtttcggaagactat

SEQ ID NO: 2174210 - DNA, 25 bp, Homo sapien
gcagggaatatgctgcctgcctctg

SEQ ID NO: 2174211 - DNA, 25 bp, Homo sapien
tctgaggttttcaccgaggctgggt

SEQ ID NO: 2174212 - DNA, 25 bp, Homo sapien
agttaatgcttatctgactgcgcca

SEQ ID NO: 2174213 - DNA, 25 bp, Homo sapien
gagggagctgtgatttagttaatgc

SEQ ID NO: 2174214 - DNA, 25 bp, Homo sapien
agtgtaagacttagggacccctgag

SEQ ID NO: 2174215 - DNA, 25 bp, Homo sapien
gaagggtcacaggaattttggcaca

SEQ ID NO: 2174216 - DNA, 25 bp, Homo sapien
gagagggaaccgcaataatagccga

SEQ ID NO: 2174217 - DNA, 25 bp, Homo sapien
atagccgacatcacatttcccaggg

SEQ ID NO: 2174218 - DNA, 25 bp, Homo sapien
tttgcaggccccttagaagtgttgc

SEQ ID NO: 2174219 - DNA, 25 bp, Homo sapien
tgcaaacaaagtgctcacgctatat

SEQ ID NO: 2174220 - DNA, 25 bp, Homo sapien
taagggtaatgacaaccactttcag

SEQ ID NO: 2174221 - DNA, 25 bp, Homo sapien
taccattttgagcatgtaactgaaa

SEQ ID NO: 2174222 - DNA, 25 bp, Homo sapien
tcaggccagtgactgcaatgagagc

SEQ ID NO: 2174223 - DNA, 25 bp, Homo sapien
tgagaccgtgattttaccgcaaagc

SEQ ID NO: 2174224 - DNA, 25 bp, Homo sapien
caatgggtggtgtattcggctcttc

SEQ ID NO: 2174225 - DNA, 25 bp, Homo sapien
actcagggtcatcccaccggaagag

SEQ ID NO: 2174226 - DNA, 25 bp, Homo sapien
aagaacagcctacaacatgtggttt

SEQ ID NO: 2174227 - DNA, 25 bp, Homo sapien
cataaattaaaccttaccattatag

SEQ ID NO: 2174228 - DNA, 25 bp, Homo sapien
tgtggtttccgttatcactggtcaa

SEQ ID NO: 2174229 - DNA, 25 bp, Homo sapien
caactatggctgaaaatactaagat

SEQ ID NO: 2174230 - DNA, 25 bp, Homo sapien
gggaagccataaactcagtaatgaa

SEQ ID NO: 2174231 - DNA, 25 bp, Homo sapien
gaagccataaactcagtaatgaact

SEQ ID NO: 2174232 - DNA, 25 bp, Homo sapien
cataaactcagtaatgaactagact

SEQ ID NO: 2174233 - DNA, 25 bp, Homo sapien
gccataaactcagtaatgaactaga

SEQ ID NO: 2174234 - DNA, 25 bp, Homo sapien
acctcggaaggactctctgacctta

SEQ ID NO: 2174235 - DNA, 25 bp, Homo sapien
ggtcactttcaccttaccctcatgg

SEQ ID NO: 2174236 - DNA, 25 bp, Homo sapien
ggttcttctttagcataggccataa

SEQ ID NO: 2174237 - DNA, 25 bp, Homo sapien
gaccttaccctgaagcaggtcaggg

SEQ ID NO: 2174238 - DNA, 25 bp, Homo sapien
gccaacatggtaagagtcgcttgaa

SEQ ID NO: 2174239 - DNA, 25 bp, Homo sapien
tttgtccaatagtcatacttctcca

SEQ ID NO: 2174240 - DNA, 25 bp, Homo sapien
aaaagtaagcatatcacatctgtaa

SEQ ID NO: 2174241 - DNA, 25 bp, Homo sapien
cattcctgtaacgtttttgtccaat

SEQ ID NO: 2174242 - DNA, 25 bp, Homo sapien
ctgccattacgacaggccacaggca

SEQ ID NO: 2174243 - DNA, 25 bp, Homo sapien
gccccatcatgtcaacaggtttaga

SEQ ID NO: 2174244 - DNA, 25 bp, Homo sapien
gctgctccgtggatgtgctgcaact

SEQ ID NO: 2174245 - DNA, 25 bp, Homo sapien
tcagaatggtcaggaatagagccca

SEQ ID NO: 2174246 - DNA, 25 bp, Homo sapien
aaggaaagtgcttcctaggatagag

SEQ ID NO: 2174247 - DNA, 25 bp, Homo sapien
tgcttcctaggatagagtttgtaaa

SEQ ID NO: 2174248 - DNA, 25 bp, Homo sapien
gtcttcttgcgtccggtccatgcca

SEQ ID NO: 2174249 - DNA, 25 bp, Homo sapien
ggtccatgccaatgcgcaatttcat

SEQ ID NO: 2174250 - DNA, 25 bp, Homo sapien
tgtttctcctgaatctacagagacg

SEQ ID NO: 2174251 - DNA, 25 bp, Homo sapien
gaatctacagagacgtaaatcccca

SEQ ID NO: 2174252 - DNA, 25 bp, Homo sapien
tctggaactgtatgcatgagatgtt

SEQ ID NO: 2174253 - DNA, 25 bp, Homo sapien
ctctggaactgtatgcatgagatgt

SEQ ID NO: 2174254 - DNA, 25 bp, Homo sapien
gccgtggctgcctgtcaaggcctac

SEQ ID NO: 2174255 - DNA, 25 bp, Homo sapien
tcggacgctccagaaaggaccaggg

SEQ ID NO: 2174256 - DNA, 25 bp, Homo sapien
gcgggtatccgcagtgtgtctcaaa

SEQ ID NO: 2174257 - DNA, 25 bp, Homo sapien
ccctgtctctgagcttgcggcagaa

SEQ ID NO: 2174258 - DNA, 25 bp, Homo sapien
cagcggtttctcttggctccaggta

SEQ ID NO: 2174259 - DNA, 25 bp, Homo sapien
gggtttcactttgctctagttggcg

SEQ ID NO: 2174260 - DNA, 25 bp, Homo sapien
tagagagggagggacccgcactttc

SEQ ID NO: 2174261 - DNA, 25 bp, Homo sapien
tctagttggcggcatcctggcgacg

SEQ ID NO: 2174262 - DNA, 25 bp, Homo sapien
ctgagaagggaaggagggcgtcccg

SEQ ID NO: 2174263 - DNA, 25 bp, Homo sapien
tgtggatatcctgctttttgtaact

SEQ ID NO: 2174264 - DNA, 25 bp, Homo sapien
tctgtcaatgggtttctaaagtgtt

SEQ ID NO: 2174265 - DNA, 25 bp, Homo sapien
caccatgccggcctgagctttttct

SEQ ID NO: 2174266 - DNA, 25 bp, Homo sapien
tgctattgtcccttctcttcagaga

SEQ ID NO: 2174267 - DNA, 25 bp, Homo sapien
tcttacggtctgccttgctgaaggt

SEQ ID NO: 2174268 - DNA, 25 bp, Homo sapien
ttacggtctgccttgctgaaggtgt

SEQ ID NO: 2174269 - DNA, 25 bp, Homo sapien
acggtctgccttgctgaaggtgttg

SEQ ID NO: 2174270 - DNA, 25 bp, Homo sapien
tacggtctgccttgctgaaggtgtt

SEQ ID NO: 2174271 - DNA, 25 bp, Homo sapien
cagagctttactatgaacagaccga

SEQ ID NO: 2174272 - DNA, 25 bp, Homo sapien
gagtaactcgttaaagtctcctctg

SEQ ID NO: 2174273 - DNA, 25 bp, Homo sapien
gattcagagtcccaactgggtccag

SEQ ID NO: 2174274 - DNA, 25 bp, Homo sapien
gacttagcagatgcctttggtgagg

SEQ ID NO: 2174275 - DNA, 25 bp, Homo sapien
gataatagcacttcctggttcacag

SEQ ID NO: 2174276 - DNA, 25 bp, Homo sapien
tagaacttcctaatttgcagggaca

SEQ ID NO: 2174277 - DNA, 25 bp, Homo sapien
tgtagcacttcttagtttgagggac

SEQ ID NO: 2174278 - DNA, 25 bp, Homo sapien
cataacgacatttggaaccgtctag

SEQ ID NO: 2174279 - DNA, 25 bp, Homo sapien
ggactccttgttcccagggtccaca

SEQ ID NO: 2174280 - DNA, 25 bp, Homo sapien
gatgcactttgcgactctttgggca

SEQ ID NO: 2174281 - DNA, 25 bp, Homo sapien
tcggtcaccgatcttcacattcagg

SEQ ID NO: 2174282 - DNA, 25 bp, Homo sapien
tctttgggcaacctctggactcctt

SEQ ID NO: 2174283 - DNA, 25 bp, Homo sapien
cattccttggtgttacgcgtgtctc

SEQ ID NO: 2174284 - DNA, 25 bp, Homo sapien
gatgaagttctaaccacagtgccat

SEQ ID NO: 2174285 - DNA, 25 bp, Homo sapien
gctctgaatgctcttagaaggcacc

SEQ ID NO: 2174286 - DNA, 25 bp, Homo sapien
ttattgagaaatgccagccgtcatc

SEQ ID NO: 2174287 - DNA, 25 bp, Homo sapien
gcagaaggcgaagatgattcaaagg

SEQ ID NO: 2174288 - DNA, 25 bp, Homo sapien
gggcaccggtaacatcagctccagg

SEQ ID NO: 2174289 - DNA, 25 bp, Homo sapien
cacgctttggtgcaaggatgcatgg

SEQ ID NO: 2174290 - DNA, 25 bp, Homo sapien
tcaggaaagtgtagaagggagctcc

SEQ ID NO: 2174291 - DNA, 25 bp, Homo sapien
caacagttcagcaccgtggtgcggt

SEQ ID NO: 2174292 - DNA, 25 bp, Homo sapien
gcggtacagggtcccattagcaggt

SEQ ID NO: 2174293 - DNA, 25 bp, Homo sapien
caccgtggtgcggtacagggtccca

SEQ ID NO: 2174294 - DNA, 25 bp, Homo sapien
tacagggtcccattagcaggtctca

SEQ ID NO: 2174295 - DNA, 25 bp, Homo sapien
caggggctggggatgtcttgtcaag

SEQ ID NO: 2174296 - DNA, 25 bp, Homo sapien
atcagcaggctcaatccacaagtca

SEQ ID NO: 2174297 - DNA, 25 bp, Homo sapien
catcagcaggctcaatccacaagtc

SEQ ID NO: 2174298 - DNA, 25 bp, Homo sapien
ctggggatgtcttgtcaagaattcc

SEQ ID NO: 2174299 - DNA, 25 bp, Homo sapien
ttcttcgcatcccagtctctacgat

SEQ ID NO: 2174300 - DNA, 25 bp, Homo sapien
aaaggcactgtgctctcctgtgccc

SEQ ID NO: 2174301 - DNA, 25 bp, Homo sapien
gaccgtgttcgtgggtttcacattg

SEQ ID NO: 2174302 - DNA, 25 bp, Homo sapien
tctacgatgttgaccgtgttcgtgg

SEQ ID NO: 2174303 - DNA, 25 bp, Homo sapien
ttgacataccagaaagaatatgcat

SEQ ID NO: 2174304 - DNA, 25 bp, Homo sapien
gacataccagaaagaatatgcatga

SEQ ID NO: 2174305 - DNA, 25 bp, Homo sapien
agaatatgcatgaaccacagtgaca

SEQ ID NO: 2174306 - DNA, 25 bp, Homo sapien
aatatgcatgaaccacagtgacaaa

SEQ ID NO: 2174307 - DNA, 25 bp, Homo sapien
gaagacttgtaggagcgctgtgacc

SEQ ID NO: 2174308 - DNA, 25 bp, Homo sapien
gcacacgggccaagttaatcatgga

SEQ ID NO: 2174309 - DNA, 25 bp, Homo sapien
tcagaagaggatagaatgggttgcc

SEQ ID NO: 2174310 - DNA, 25 bp, Homo sapien
taagaagggcatgcacacaagtaac

SEQ ID NO: 2174311 - DNA, 25 bp, Homo sapien
cttttccattccttattaggctcat

SEQ ID NO: 2174312 - DNA, 25 bp, Homo sapien
atggcttttccattccttattaggc

SEQ ID NO: 2174313 - DNA, 25 bp, Homo sapien
cttcctggagaagaaatggcttttc

SEQ ID NO: 2174314 - DNA, 25 bp, Homo sapien
gcttttccattccttattaggctca

SEQ ID NO: 2174315 - DNA, 25 bp, Homo sapien
aatgtgcaggtgtcctgatctgacc

SEQ ID NO: 2174316 - DNA, 25 bp, Homo sapien
gtgacgagaacctgcaaacagaatg

SEQ ID NO: 2174317 - DNA, 25 bp, Homo sapien
gatttgccggtgacgagaacctgca

SEQ ID NO: 2174318 - DNA, 25 bp, Homo sapien
taaaattcggttcattgatttgccg

SEQ ID NO: 2174319 - DNA, 25 bp, Homo sapien
atttgctaagtcaatgtttattgga

SEQ ID NO: 2174320 - DNA, 25 bp, Homo sapien
ttgctaagtcaatgtttattggata

SEQ ID NO: 2174321 - DNA, 25 bp, Homo sapien
tatttgctaagtcaatgtttattgg

SEQ ID NO: 2174322 - DNA, 25 bp, Homo sapien
tctgtaacactctatttgctaagtc

SEQ ID NO: 2174323 - DNA, 25 bp, Homo sapien
ggtatcttttcacatctctagagac

SEQ ID NO: 2174324 - DNA, 25 bp, Homo sapien
tgaatttcctgttcagtattctttc

SEQ ID NO: 2174325 - DNA, 25 bp, Homo sapien
tagtatgactcagggttgccaccat

SEQ ID NO: 2174326 - DNA, 25 bp, Homo sapien
tttgtccaactgacggtatcttttc

SEQ ID NO: 2174327 - DNA, 25 bp, Homo sapien
tgaatggtgtcgtgggctggggtgg

SEQ ID NO: 2174328 - DNA, 25 bp, Homo sapien
ttgaatggtgtcgtgggctggggtg

SEQ ID NO: 2174329 - DNA, 25 bp, Homo sapien
actttgaatggtgtcgtgggctggg

SEQ ID NO: 2174330 - DNA, 25 bp, Homo sapien
tcaactttgaatggtgtcgtgggct

SEQ ID NO: 2174331 - DNA, 25 bp, Homo sapien
gagtaaagctgttgctccaaagcgc

SEQ ID NO: 2174332 - DNA, 25 bp, Homo sapien
taaaagctgataatagtgtatctgg

SEQ ID NO: 2174333 - DNA, 25 bp, Homo sapien
tgtatctggttgagctaacagccct

SEQ ID NO: 2174334 - DNA, 25 bp, Homo sapien
gctccaaagcgctgtttaaaagctg

SEQ ID NO: 2174335 - DNA, 25 bp, Homo sapien
aggaggcagcagactggccagaggg

SEQ ID NO: 2174336 - DNA, 25 bp, Homo sapien
cttgaggaggcagcagactggccag

SEQ ID NO: 2174337 - DNA, 25 bp, Homo sapien
tgaggaggcagcagactggccagag

SEQ ID NO: 2174338 - DNA, 25 bp, Homo sapien
gaggcagcagactggccagagggtt

SEQ ID NO: 2174339 - DNA, 25 bp, Homo sapien
caaaattattgtccaaatgcaccct

SEQ ID NO: 2174340 - DNA, 25 bp, Homo sapien
gtttgcccaggtagcctgactcttg

SEQ ID NO: 2174341 - DNA, 25 bp, Homo sapien
cctggcaagcattgatccacgaggg

SEQ ID NO: 2174342 - DNA, 25 bp, Homo sapien
tattgtccaaatgcaccctggcaag

SEQ ID NO: 2174343 - DNA, 25 bp, Homo sapien
cgtttctgcacgatggactggaaca

SEQ ID NO: 2174344 - DNA, 25 bp, Homo sapien
tctgcacgatggactggaacacgat

SEQ ID NO: 2174345 - DNA, 25 bp, Homo sapien
gctttcgtttctgcacgatggactg

SEQ ID NO: 2174346 - DNA, 25 bp, Homo sapien
gcacgatggactggaacacgatgga

SEQ ID NO: 2174347 - DNA, 25 bp, Homo sapien
ttttataactactgccagaacccaa

SEQ ID NO: 2174348 - DNA, 25 bp, Homo sapien
tttagggccaatggacttggaggca

SEQ ID NO: 2174349 - DNA, 25 bp, Homo sapien
aatattgccagtcggcctcttctgc

SEQ ID NO: 2174350 - DNA, 25 bp, Homo sapien
actactgccagaacccaaatattgc

SEQ ID NO: 2174351 - DNA, 25 bp, Homo sapien
ctgcattcctgatttctgagtgatg

SEQ ID NO: 2174352 - DNA, 25 bp, Homo sapien
gacctagatccgaggttctcagctt

SEQ ID NO: 2174353 - DNA, 25 bp, Homo sapien
tcttgctgacctagatccgaggttc

SEQ ID NO: 2174354 - DNA, 25 bp, Homo sapien
tgcttgaccaccctccagtagctct

SEQ ID NO: 2174355 - DNA, 25 bp, Homo sapien
agtagctcttgctgacctagatccg

SEQ ID NO: 2174356 - DNA, 25 bp, Homo sapien
tccacgttagccttggggggtgatc

SEQ ID NO: 2174357 - DNA, 25 bp, Homo sapien
cacgttagccttggggggtgatcac

SEQ ID NO: 2174358 - DNA, 25 bp, Homo sapien
ccacgttagccttggggggtgatca

SEQ ID NO: 2174359 - DNA, 25 bp, Homo sapien
agggatgggatctgggctggcatct

SEQ ID NO: 2174360 - DNA, 25 bp, Homo sapien
tgtagggatgggatctgggctggca

SEQ ID NO: 2174361 - DNA, 25 bp, Homo sapien
tcagtttcctgtagggatgggatct

SEQ ID NO: 2174362 - DNA, 25 bp, Homo sapien
cagtttcctgtagggatgggatctg

SEQ ID NO: 2174363 - DNA, 25 bp, Homo sapien
gacacccaggccagtggcgggtctt

SEQ ID NO: 2174364 - DNA, 25 bp, Homo sapien
cagatgagtactggagtggccagca

SEQ ID NO: 2174365 - DNA, 25 bp, Homo sapien
ctgaaagtttcgtgtttagtgggct

SEQ ID NO: 2174366 - DNA, 25 bp, Homo sapien
tggggctgagtgaattggacatttt

SEQ ID NO: 2174367 - DNA, 25 bp, Homo sapien
taccctgtcccggaaacatctggag

SEQ ID NO: 2174368 - DNA, 25 bp, Homo sapien
ttcacatttgtagccccggaggtcg

SEQ ID NO: 2174369 - DNA, 25 bp, Homo sapien
ttccgccttgccctgatgagccatt

SEQ ID NO: 2174370 - DNA, 25 bp, Homo sapien
tgcagagaggctgaatgccgtaaac

SEQ ID NO: 2174371 - DNA, 25 bp, Homo sapien
tgtctgcagtaccagattccaccag

SEQ ID NO: 2174372 - DNA, 25 bp, Homo sapien
gtgtctgcagtaccagattccacca

SEQ ID NO: 2174373 - DNA, 25 bp, Homo sapien
ggtgtctgcagtaccagattccacc

SEQ ID NO: 2174374 - DNA, 25 bp, Homo sapien
gtctgcagtaccagattccaccagg

SEQ ID NO: 2174375 - DNA, 25 bp, Homo sapien
gagcagtgggtttggacactcagtg

SEQ ID NO: 2174376 - DNA, 25 bp, Homo sapien
ttggacctccgtcggctgagcttgg

SEQ ID NO: 2174377 - DNA, 25 bp, Homo sapien
ttgttgtcttggacctccgtcggct

SEQ ID NO: 2174378 - DNA, 25 bp, Homo sapien
ctcagtggtgacgtcagccgtagtc

SEQ ID NO: 2174379 - DNA, 25 bp, Homo sapien
ggggaagttggcaatccaggcttgc

SEQ ID NO: 2174380 - DNA, 25 bp, Homo sapien
aggggaagttggcaatccaggcttg

SEQ ID NO: 2174381 - DNA, 25 bp, Homo sapien
gctcctgcgggttgttcttggaccc

SEQ ID NO: 2174382 - DNA, 25 bp, Homo sapien
ctgttgtggaactggacacacttcc

SEQ ID NO: 2174383 - DNA, 25 bp, Homo sapien
ctgcgggttgttcttggacccctcg

SEQ ID NO: 2174384 - DNA, 25 bp, Homo sapien
ttgtggaactggacacacttccggt

SEQ ID NO: 2174385 - DNA, 25 bp, Homo sapien
gcttttcttcagtgcgccagagatg

SEQ ID NO: 2174386 - DNA, 25 bp, Homo sapien
cgccaggtgcttcctgacggttgag

SEQ ID NO: 2174387 - DNA, 25 bp, Homo sapien
gatggccagccacgttgaagtagca

SEQ ID NO: 2174388 - DNA, 25 bp, Homo sapien
cagttgaccaaacagtccaagtcga

SEQ ID NO: 2174389 - DNA, 25 bp, Homo sapien
tccatggggccactccttccttctt

SEQ ID NO: 2174390 - DNA, 25 bp, Homo sapien
ctgtctccatggggccactccttcc

SEQ ID NO: 2174391 - DNA, 25 bp, Homo sapien
ttctgcagctcttcctgtctcccgc

SEQ ID NO: 2174392 - DNA, 25 bp, Homo sapien
tgcagctcttcctgtctcccgctcc

SEQ ID NO: 2174393 - DNA, 25 bp, Homo sapien
gtgggaggtgcccttagtcttacag

SEQ ID NO: 2174394 - DNA, 25 bp, Homo sapien
ggaggtgcccttagtcttacagcct

SEQ ID NO: 2174395 - DNA, 25 bp, Homo sapien
cttcttggcccttgggaacaaccat

SEQ ID NO: 2174396 - DNA, 25 bp, Homo sapien
ggtgcccttagtcttacagcctcca

SEQ ID NO: 2174397 - DNA, 25 bp, Homo sapien
gaatttcaacttggtccaggcaaca

SEQ ID NO: 2174398 - DNA, 25 bp, Homo sapien
caggagaaaatcatgtgcaggcaga

SEQ ID NO: 2174399 - DNA, 25 bp, Homo sapien
tctaatgagatcctggtcaagctga

SEQ ID NO: 2174400 - DNA, 25 bp, Homo sapien
gatgactttgacttaggagatgctg

SEQ ID NO: 2174401 - DNA, 25 bp, Homo sapien
gagaaggtacagttatcttgttttc

SEQ ID NO: 2174402 - DNA, 25 bp, Homo sapien
gatggcgtttcaggtggagaaggta

SEQ ID NO: 2174403 - DNA, 25 bp, Homo sapien
cttgcggatggcgtttcaggtggag

SEQ ID NO: 2174404 - DNA, 25 bp, Homo sapien
tgcggatggcgtttcaggtggagaa

SEQ ID NO: 2174405 - DNA, 25 bp, Homo sapien
gaatcactacagggtctaaactgtc

SEQ ID NO: 2174406 - DNA, 25 bp, Homo sapien
gctgccccgtagaggttcggtcctc

SEQ ID NO: 2174407 - DNA, 25 bp, Homo sapien
ttcggtcctcggagaagagttcagg

SEQ ID NO: 2174408 - DNA, 25 bp, Homo sapien
tcagccatctctgtgggaactccgc

SEQ ID NO: 2174409 - DNA, 25 bp, Homo sapien
ccaaaccttcccattgcagacgttg

SEQ ID NO: 2174410 - DNA, 25 bp, Homo sapien
gtagagtgtaagaagcaggacccca

SEQ ID NO: 2174411 - DNA, 25 bp, Homo sapien
ttgaccccaaaccttcccattgcag

SEQ ID NO: 2174412 - DNA, 25 bp, Homo sapien
ccccgtagagtgtaagaagcaggac

SEQ ID NO: 2174413 - DNA, 25 bp, Homo sapien
tcaatcacgatgctgtgtgcttcct

SEQ ID NO: 2174414 - DNA, 25 bp, Homo sapien
tgcaaatcggtcagctcaggcgtct

SEQ ID NO: 2174415 - DNA, 25 bp, Homo sapien
tatcattctcggcatgcttcctttg

SEQ ID NO: 2174416 - DNA, 25 bp, Homo sapien
tgcaccgtgcgtgtctcaatcacga

SEQ ID NO: 2174417 - DNA, 25 bp, Homo sapien
tttagctcttgccttccctcttgca

SEQ ID NO: 2174418 - DNA, 25 bp, Homo sapien
atttagctcttgccttccctcttgc

SEQ ID NO: 2174419 - DNA, 25 bp, Homo sapien
ttagctcttgccttccctcttgcat

SEQ ID NO: 2174420 - DNA, 25 bp, Homo sapien
gcaacctcgcgggttcaagcaattc

SEQ ID NO: 2174421 - DNA, 25 bp, Homo sapien
tgacctcaggtggttcccccccgca

SEQ ID NO: 2174422 - DNA, 25 bp, Homo sapien
ggcagtggtgcaatcttggctcact

SEQ ID NO: 2174423 - DNA, 25 bp, Homo sapien
cgctctatcgcccagaatggagggc

SEQ ID NO: 2174424 - DNA, 25 bp, Homo sapien
taactctttctgtgatcagtgttcc

SEQ ID NO: 2174425 - DNA, 25 bp, Homo sapien
tgcacttcctatgaagcagttctta

SEQ ID NO: 2174426 - DNA, 25 bp, Homo sapien
agtgttccaaacaggtacacacctt

SEQ ID NO: 2174427 - DNA, 25 bp, Homo sapien
tccaaacaggtacacaccttggttc

SEQ ID NO: 2174428 - DNA, 25 bp, Homo sapien
gaaacgcatggccacagattcgatg

SEQ ID NO: 2174429 - DNA, 25 bp, Homo sapien
tgaaggcatttgaaccacagatggg

SEQ ID NO: 2174430 - DNA, 25 bp, Homo sapien
tgaaaacgtgggtgttccttcacac

SEQ ID NO: 2174431 - DNA, 25 bp, Homo sapien
tattgatctgtgcatctcttacgcg

SEQ ID NO: 2174432 - DNA, 25 bp, Homo sapien
tctgagggaggtagaaggggggaca

SEQ ID NO: 2174433 - DNA, 25 bp, Homo sapien
cattctgagggaggtagaagggggg

SEQ ID NO: 2174434 - DNA, 25 bp, Homo sapien
tctgcattctgagggaggtagaagg

SEQ ID NO: 2174435 - DNA, 25 bp, Homo sapien
ctctctgcattctgagggaggtaga

SEQ ID NO: 2174436 - DNA, 25 bp, Homo sapien
tgggttatctgttgcactgagcctc

SEQ ID NO: 2174437 - DNA, 25 bp, Homo sapien
ccaacgcagagccagctggtaagaa

SEQ ID NO: 2174438 - DNA, 25 bp, Homo sapien
tctcatccaagcaataggagcgtcg

SEQ ID NO: 2174439 - DNA, 25 bp, Homo sapien
gaacgatggcttgcacacgtggcca

SEQ ID NO: 2174440 - DNA, 25 bp, Homo sapien
atttggttgcatggctttgaatgtc

SEQ ID NO: 2174441 - DNA, 25 bp, Homo sapien
cacattctcaaatttggttgcatgg

SEQ ID NO: 2174442 - DNA, 25 bp, Homo sapien
tctcaaatttggttgcatggctttg

SEQ ID NO: 2174443 - DNA, 25 bp, Homo sapien
tcctgctcacattctcaaatttggt

SEQ ID NO: 2174444 - DNA, 25 bp, Homo sapien
tgctgggcggatgatgtttactaac

SEQ ID NO: 2174445 - DNA, 25 bp, Homo sapien
cccatgggatgtgaaaggctggcca

SEQ ID NO: 2174446 - DNA, 25 bp, Homo sapien
tgtccatcgagcacgtctgaaaccc

SEQ ID NO: 2174447 - DNA, 25 bp, Homo sapien
ggaggccttctgttcacggcggatt

SEQ ID NO: 2174448 - DNA, 25 bp, Homo sapien
ggtactccctacatccagatactgt

SEQ ID NO: 2174449 - DNA, 25 bp, Homo sapien
gcctgcttccagatactcctctgta

SEQ ID NO: 2174450 - DNA, 25 bp, Homo sapien
ctctgtatccagatactcctctaaa

SEQ ID NO: 2174451 - DNA, 25 bp, Homo sapien
cctaagatgtacaagatgtaccgca

SEQ ID NO: 2174452 - DNA, 25 bp, Homo sapien
ttcccaacactgaagacttgaccac

SEQ ID NO: 2174453 - DNA, 25 bp, Homo sapien
cccaacactgaagacttgaccacag

SEQ ID NO: 2174454 - DNA, 25 bp, Homo sapien
tcccaacactgaagacttgaccaca

SEQ ID NO: 2174455 - DNA, 25 bp, Homo sapien
tttcccaacactgaagacttgacca

SEQ ID NO: 2174456 - DNA, 25 bp, Homo sapien
aataaccaagaggtgcccgccactg

SEQ ID NO: 2174457 - DNA, 25 bp, Homo sapien
gcccgccactgtgttcacccaattt

SEQ ID NO: 2174458 - DNA, 25 bp, Homo sapien
gcaatgaaagggtaagataaataac

SEQ ID NO: 2174459 - DNA, 25 bp, Homo sapien
cctataggtatttgctaaaggaagc

SEQ ID NO: 2174460 - DNA, 25 bp, Homo sapien
tatcactagtgtcaaaatcagaaga

SEQ ID NO: 2174461 - DNA, 25 bp, Homo sapien
tggctgtgcccttcaatatcctgag

SEQ ID NO: 2174462 - DNA, 25 bp, Homo sapien
gaaaaggtgtcgaatcctcaacagc

SEQ ID NO: 2174463 - DNA, 25 bp, Homo sapien
ggagactgcttggatgactcccacc

SEQ ID NO: 2174464 - DNA, 25 bp, Homo sapien
tcctgaacaaccgtctctgctgaaa

SEQ ID NO: 2174465 - DNA, 25 bp, Homo sapien
aaaatgcctcttggaagtcactgag

SEQ ID NO: 2174466 - DNA, 25 bp, Homo sapien
gatgtgtacattaaccccacactgg

SEQ ID NO: 2174467 - DNA, 25 bp, Homo sapien
accattgtgaaagcaggagtcatca

SEQ ID NO: 2174468 - DNA, 25 bp, Homo sapien
gatgcccattggtgcttgggaacca

SEQ ID NO: 2174469 - DNA, 25 bp, Homo sapien
caagtgtgccggcttccagaagcct

SEQ ID NO: 2174470 - DNA, 25 bp, Homo sapien
ctggctccgacacacgactgagtgt

SEQ ID NO: 2174471 - DNA, 25 bp, Homo sapien
gagtgtgcctacactggtcccacag

SEQ ID NO: 2174472 - DNA, 25 bp, Homo sapien
taatgcacgcccgaggtaagaggca

SEQ ID NO: 2174473 - DNA, 25 bp, Homo sapien
tgtgttttctaatgcacgcccgagg

SEQ ID NO: 2174474 - DNA, 25 bp, Homo sapien
gggacttccctgtcttgcgttcctg

SEQ ID NO: 2174475 - DNA, 25 bp, Homo sapien
ccctgtcttgcgttcctgtgttttc

SEQ ID NO: 2174476 - DNA, 25 bp, Homo sapien
tctccaattcggtgatgtgtcattc

SEQ ID NO: 2174477 - DNA, 25 bp, Homo sapien
tgtgctctccaattcggtgatgtgt

SEQ ID NO: 2174478 - DNA, 25 bp, Homo sapien
caattcggtgatgtgtcattcactc

SEQ ID NO: 2174479 - DNA, 25 bp, Homo sapien
tgctctccaattcggtgatgtgtca

SEQ ID NO: 2174480 - DNA, 25 bp, Homo sapien
cagtgcctcattgcatggtctgcgg

SEQ ID NO: 2174481 - DNA, 25 bp, Homo sapien
gcatggtctgcggtattttcctcga

SEQ ID NO: 2174482 - DNA, 25 bp, Homo sapien
tcgagttttccttgcaccaaagatg

SEQ ID NO: 2174483 - DNA, 25 bp, Homo sapien
tctgcggtattttcctcgagttttc

SEQ ID NO: 2174484 - DNA, 25 bp, Homo sapien
agagaaaaggagagtggatcgtggg

SEQ ID NO: 2174485 - DNA, 25 bp, Homo sapien
ttaggagcatgcctatggtgatgga

SEQ ID NO: 2174486 - DNA, 25 bp, Homo sapien
gtctcatgtgtcagggcagtaagga

SEQ ID NO: 2174487 - DNA, 25 bp, Homo sapien
ggaattctccctggggaatcggcca

SEQ ID NO: 2174488 - DNA, 25 bp, Homo sapien
gaggggcaggacatgagatgatgtt

SEQ ID NO: 2174489 - DNA, 25 bp, Homo sapien
acatgagatgatgttggaggattct

SEQ ID NO: 2174490 - DNA, 25 bp, Homo sapien
caggacatgagatgatgttggagga

SEQ ID NO: 2174491 - DNA, 25 bp, Homo sapien
gggcaggacatgagatgatgttgga

SEQ ID NO: 2174492 - DNA, 25 bp, Homo sapien
gcagcaggcagacacgacagcctga

SEQ ID NO: 2174493 - DNA, 25 bp, Homo sapien
aggcagacacgacagcctgagcttc

SEQ ID NO: 2174494 - DNA, 25 bp, Homo sapien
tatgaggccacactgcagacgttct

SEQ ID NO: 2174495 - DNA, 25 bp, Homo sapien
caatgatgtggaccgtgatgacgga

SEQ ID NO: 2174496 - DNA, 25 bp, Homo sapien
tggagggtccactgaaacacttgcg

SEQ ID NO: 2174497 - DNA, 25 bp, Homo sapien
cagagttggtgacgagcagacgata

SEQ ID NO: 2174498 - DNA, 25 bp, Homo sapien
tcccaatgagctggacagaccaaca

SEQ ID NO: 2174499 - DNA, 25 bp, Homo sapien
gacacgttcacacgacttgttgcca

SEQ ID NO: 2174500 - DNA, 25 bp, Homo sapien
gtgttggcatgagttttcccacggg

SEQ ID NO: 2174501 - DNA, 25 bp, Homo sapien
tcactctttggagctctcttggcag

SEQ ID NO: 2174502 - DNA, 25 bp, Homo sapien
agaaaatagcaggtagccctgtggt

SEQ ID NO: 2174503 - DNA, 25 bp, Homo sapien
aactgccagaaaatagcaggtagcc

SEQ ID NO: 2174504 - DNA, 25 bp, Homo sapien
gccagaaaatagcaggtagccctgt

SEQ ID NO: 2174505 - DNA, 25 bp, Homo sapien
cagaaaatagcaggtagccctgtgg

SEQ ID NO: 2174506 - DNA, 25 bp, Homo sapien
tgtggcttcctggttcaatgccggc

SEQ ID NO: 2174507 - DNA, 25 bp, Homo sapien
tgaaattccgaaggtgcgctcagac

SEQ ID NO: 2174508 - DNA, 25 bp, Homo sapien
gcaagactataagcatgacggttgg

SEQ ID NO: 2174509 - DNA, 25 bp, Homo sapien
tcacaggcgagtcaggaaaaatacc

SEQ ID NO: 2174510 - DNA, 25 bp, Homo sapien
gatcccctgattactttgagaaaaa

SEQ ID NO: 2174511 - DNA, 25 bp, Homo sapien
tctcctaaatctagagcaagagtct

SEQ ID NO: 2174512 - DNA, 25 bp, Homo sapien
tgtctgaagatgttaagatcccctg

SEQ ID NO: 2174513 - DNA, 25 bp, Homo sapien
gaaccgtgtttatcactgttgtgga

SEQ ID NO: 2174514 - DNA, 25 bp, Homo sapien
tgctggacctgtgctaaattcttca

SEQ ID NO: 2174515 - DNA, 25 bp, Homo sapien
cccacaagcagggtttgatcatcct

SEQ ID NO: 2174516 - DNA, 25 bp, Homo sapien
gagatcttcagctacctcatggtgc

SEQ ID NO: 2174517 - DNA, 25 bp, Homo sapien
tagttcctaaggcaccaacattgca

SEQ ID NO: 2174518 - DNA, 25 bp, Homo sapien
caggagtggtgatgtctgatgctca

SEQ ID NO: 2174519 - DNA, 25 bp, Homo sapien
tggaaagcacttgaaagggctcccc

SEQ ID NO: 2174520 - DNA, 25 bp, Homo sapien
tacctcggagttgcgggtctcaaat

SEQ ID NO: 2174521 - DNA, 25 bp, Homo sapien
gtattaggtcctgcaacacttttca

SEQ ID NO: 2174522 - DNA, 25 bp, Homo sapien
caagcttggcgacatatcgagactc

SEQ ID NO: 2174523 - DNA, 25 bp, Homo sapien
ttgagaccaagcttggcgacatatc

SEQ ID NO: 2174524 - DNA, 25 bp, Homo sapien
gcttggcgacatatcgagactctgt

SEQ ID NO: 2174525 - DNA, 25 bp, Homo sapien
gagaccaagcttggcgacatatcga

SEQ ID NO: 2174526 - DNA, 25 bp, Homo sapien
gaattctaaaggcttccaccacaac

SEQ ID NO: 2174527 - DNA, 25 bp, Homo sapien
caccacaactttgatctgagcccag

SEQ ID NO: 2174528 - DNA, 25 bp, Homo sapien
ctgagcccagttatgaacttcatac

SEQ ID NO: 2174529 - DNA, 25 bp, Homo sapien
ggcttccaccacaactttgatctga

SEQ ID NO: 2174530 - DNA, 25 bp, Homo sapien
ctgctgccaagctctccatggcttc

SEQ ID NO: 2174531 - DNA, 25 bp, Homo sapien
ctggagaccaacacacacaggaaca

SEQ ID NO: 2174532 - DNA, 25 bp, Homo sapien
tggagaccaacacacacaggaacag

SEQ ID NO: 2174533 - DNA, 25 bp, Homo sapien
gagaccaacacacacaggaacagaa

SEQ ID NO: 2174534 - DNA, 25 bp, Homo sapien
ggagaccaacacacacaggaacaga

SEQ ID NO: 2174535 - DNA, 25 bp, Homo sapien
agatactggcgtccgggagcgcagg

SEQ ID NO: 2174536 - DNA, 25 bp, Homo sapien
ggcgcgggcagaggcagcccaagct

SEQ ID NO: 2174537 - DNA, 25 bp, Homo sapien
gcagcccaagctcggaggaggtgca

SEQ ID NO: 2174538 - DNA, 25 bp, Homo sapien
gaggtgcagatactggcgtccggga

SEQ ID NO: 2174539 - DNA, 25 bp, Homo sapien
cagctgctgacaccgctgaggtcgg

SEQ ID NO: 2174540 - DNA, 25 bp, Homo sapien
cctggccagagggcacgaggctgac

SEQ ID NO: 2174541 - DNA, 25 bp, Homo sapien
cagccgagggtgtcgagactgccac

SEQ ID NO: 2174542 - DNA, 25 bp, Homo sapien
caaggaggaagtgcggggcgtggag

SEQ ID NO: 2174543 - DNA, 25 bp, Homo sapien
gacatggagtgggtaggaggccggg

SEQ ID NO: 2174544 - DNA, 25 bp, Homo sapien
gcgtggaggtcgcaggggcatcggg

SEQ ID NO: 2174545 - DNA, 25 bp, Homo sapien
gtggcgaggaagtccacccactgct

SEQ ID NO: 2174546 - DNA, 25 bp, Homo sapien
tgctcccgggcgcaggtctgcaggt

SEQ ID NO: 2174547 - DNA, 25 bp, Homo sapien
gaaatccacgcggattcccggagac

SEQ ID NO: 2174548 - DNA, 25 bp, Homo sapien
cctctgctctgcgggttcgtggcga

SEQ ID NO: 2174549 - DNA, 25 bp, Homo sapien
ccccttactgcctcgcccaggtctc

SEQ ID NO: 2174550 - DNA, 25 bp, Homo sapien
ttgggtgacagattggtctgcactg

SEQ ID NO: 2174551 - DNA, 25 bp, Homo sapien
gaaccccactttgaccgcaggattg

SEQ ID NO: 2174552 - DNA, 25 bp, Homo sapien
tttgaccgcaggattgccccaaacc

SEQ ID NO: 2174553 - DNA, 25 bp, Homo sapien
tcttgatggataagttcttcctggc

SEQ ID NO: 2174554 - DNA, 25 bp, Homo sapien
gatggtgccctttcaaaaactgctg

SEQ ID NO: 2174555 - DNA, 25 bp, Homo sapien
tgccagccataggacttgccttgca

SEQ ID NO: 2174556 - DNA, 25 bp, Homo sapien
ggatgggagccatattcattcttgt

SEQ ID NO: 2174557 - DNA, 25 bp, Homo sapien
tgcattctctacagaggacacggtg

SEQ ID NO: 2174558 - DNA, 25 bp, Homo sapien
tcatgaggaggtgatccacgaaaaa

SEQ ID NO: 2174559 - DNA, 25 bp, Homo sapien
gaatccacacggacaaagctctttg

SEQ ID NO: 2174560 - DNA, 25 bp, Homo sapien
tagccgaatgtggtgtcgcacaccg

SEQ ID NO: 2174561 - DNA, 25 bp, Homo sapien
gaactagaacagaggataccagagg

SEQ ID NO: 2174562 - DNA, 25 bp, Homo sapien
agtaagaactagaacagaggatacc

SEQ ID NO: 2174563 - DNA, 25 bp, Homo sapien
gaaatgcatagaactgtttacttct

SEQ ID NO: 2174564 - DNA, 25 bp, Homo sapien
ctagaacagaggataccagaggtca

SEQ ID NO: 2174565 - DNA, 25 bp, Homo sapien
ccagcctagggatgcacttgattcc

SEQ ID NO: 2174566 - DNA, 25 bp, Homo sapien
cctattcgcagagccgtccacaggt

SEQ ID NO: 2174567 - DNA, 25 bp, Homo sapien
ttcccaagaaatgcaactgtcctat

SEQ ID NO: 2174568 - DNA, 25 bp, Homo sapien
cactgccagcctagggatgcacttg

SEQ ID NO: 2174569 - DNA, 25 bp, Homo sapien
tggtcaacgcaagtcagaggctcag

SEQ ID NO: 2174570 - DNA, 25 bp, Homo sapien
caggagcccgttagtcaactgaagc

SEQ ID NO: 2174571 - DNA, 25 bp, Homo sapien
cttcccagggagcttaaagatagca

SEQ ID NO: 2174572 - DNA, 25 bp, Homo sapien
caggtatcccaagtctagggcaggg

SEQ ID NO: 2174573 - DNA, 25 bp, Homo sapien
tgcaaagacctcgatagatggactg

SEQ ID NO: 2174574 - DNA, 25 bp, Homo sapien
tgcttcaagagaaagggatgccctt

SEQ ID NO: 2174575 - DNA, 25 bp, Homo sapien
catgctgaggtctgaaggtggctcc

SEQ ID NO: 2174576 - DNA, 25 bp, Homo sapien
taaagcgatgcgtcaaaaacctcag

SEQ ID NO: 2174577 - DNA, 25 bp, Homo sapien
aggctgggtaggtgtctaactccta

SEQ ID NO: 2174578 - DNA, 25 bp, Homo sapien
cagctgtgcgccacgacatctagct

SEQ ID NO: 2174579 - DNA, 25 bp, Homo sapien
acagctgtgcgccacgacatctagc

SEQ ID NO: 2174580 - DNA, 25 bp, Homo sapien
cctccgctatgtgagagtaggaaca

SEQ ID NO: 2174581 - DNA, 25 bp, Homo sapien
gaaagggaaaccctacatgggcgca

SEQ ID NO: 2174582 - DNA, 25 bp, Homo sapien
gaagacacatggacagagaccctaa

SEQ ID NO: 2174583 - DNA, 25 bp, Homo sapien
cattggcacaatgacgaaccctgag

SEQ ID NO: 2174584 - DNA, 25 bp, Homo sapien
ccccatcctcgtggcatgaacagaa

SEQ ID NO: 2174585 - DNA, 25 bp, Homo sapien
catcctcgtggcatgaacagaacgg

SEQ ID NO: 2174586 - DNA, 25 bp, Homo sapien
gccatccccatcctcgtggcatgaa

SEQ ID NO: 2174587 - DNA, 25 bp, Homo sapien
agggtctgccgatgctccgacaccg

SEQ ID NO: 2174588 - DNA, 25 bp, Homo sapien
gtaatgaaccttccagacgcttcca

SEQ ID NO: 2174589 - DNA, 25 bp, Homo sapien
ggtctgtgatgggtcacgccctccc

SEQ ID NO: 2174590 - DNA, 25 bp, Homo sapien
cttgctatcacggcgtggtacaggg

SEQ ID NO: 2174591 - DNA, 25 bp, Homo sapien
atgggcagacgcctcggccgtagca

SEQ ID NO: 2174592 - DNA, 25 bp, Homo sapien
tcagcttgcaaagtcagagcatgtg

SEQ ID NO: 2174593 - DNA, 25 bp, Homo sapien
ggcaaagggactcattgcagagcgc

SEQ ID NO: 2174594 - DNA, 25 bp, Homo sapien
acgcaggtgtgaacgcagaacgcag

SEQ ID NO: 2174595 - DNA, 25 bp, Homo sapien
ggccctgtggtatcagcatgaacct

SEQ ID NO: 2174596 - DNA, 25 bp, Homo sapien
gtttatctacctttcatccatctat

SEQ ID NO: 2174597 - DNA, 25 bp, Homo sapien
ccatgaactgattctactttttatc

SEQ ID NO: 2174598 - DNA, 25 bp, Homo sapien
atctatcatctatcctacatatcta

SEQ ID NO: 2174599 - DNA, 25 bp, Homo sapien
catccatgaactgattctacttttt

SEQ ID NO: 2174600 - DNA, 25 bp, Homo sapien
aacaggaactcatgtgccgagcgtg

SEQ ID NO: 2174601 - DNA, 25 bp, Homo sapien
ctcatgtgccgagcgtgcctcagct

SEQ ID NO: 2174602 - DNA, 25 bp, Homo sapien
gcgtgctgcgtgaagatgctgccca

SEQ ID NO: 2174603 - DNA, 25 bp, Homo sapien
cgtgctgcgtgaagatgctgcccac

SEQ ID NO: 2174604 - DNA, 25 bp, Homo sapien
gggtaccaggctgtggccatcaatc

SEQ ID NO: 2174605 - DNA, 25 bp, Homo sapien
cagcaagggtaccaggctgtggcca

SEQ ID NO: 2174606 - DNA, 25 bp, Homo sapien
gtaccaggctgtggccatcaatcac

SEQ ID NO: 2174607 - DNA, 25 bp, Homo sapien
aagggtaccaggctgtggccatcaa

SEQ ID NO: 2174608 - DNA, 25 bp, Homo sapien
aacaggcagccttatctccacgtac

SEQ ID NO: 2174609 - DNA, 25 bp, Homo sapien
cagggaacaggcagccttatctcca

SEQ ID NO: 2174610 - DNA, 25 bp, Homo sapien
ggaacaggcagccttatctccacgt

SEQ ID NO: 2174611 - DNA, 25 bp, Homo sapien
agggaacaggcagccttatctccac

SEQ ID NO: 2174612 - DNA, 25 bp, Homo sapien
caccagctggaccacagtagggaac

SEQ ID NO: 2174613 - DNA, 25 bp, Homo sapien
tctccaatcactcggccggccggga

SEQ ID NO: 2174614 - DNA, 25 bp, Homo sapien
gggaacacgtccatcaggctcgtgg

SEQ ID NO: 2174615 - DNA, 25 bp, Homo sapien
cccggccagtggaagatcccgggca

SEQ ID NO: 2174616 - DNA, 25 bp, Homo sapien
gcctctaaatgtcctccatggtcag

SEQ ID NO: 2174617 - DNA, 25 bp, Homo sapien
taactggctgtgtccatctcttgcc

SEQ ID NO: 2174618 - DNA, 25 bp, Homo sapien
tcttcgatggcattaagaaccttac

SEQ ID NO: 2174619 - DNA, 25 bp, Homo sapien
ccatggtcagaggtgaaatacgtga

SEQ ID NO: 2174620 - DNA, 25 bp, Homo sapien
tgctgcggagggagtagcttctcac

SEQ ID NO: 2174621 - DNA, 25 bp, Homo sapien
aaaagtgtgcggctcttcctctcct

SEQ ID NO: 2174622 - DNA, 25 bp, Homo sapien
tgtcatcctcagaatcggcggtggg

SEQ ID NO: 2174623 - DNA, 25 bp, Homo sapien
tctatcacgatgcttgtctcaggag

SEQ ID NO: 2174624 - DNA, 25 bp, Homo sapien
ttcagattctgcaagaattttaatg

SEQ ID NO: 2174625 - DNA, 25 bp, Homo sapien
tcagattctgcaagaattttaatgt

SEQ ID NO: 2174626 - DNA, 25 bp, Homo sapien
cctgaacattaactttatcgcttca

SEQ ID NO: 2174627 - DNA, 25 bp, Homo sapien
ttcttgaaggccatagaaggaagac

SEQ ID NO: 2174628 - DNA, 25 bp, Homo sapien
tcactttcggtaacttctgatgatg

SEQ ID NO: 2174629 - DNA, 25 bp, Homo sapien
agacagcgtgtctgcattgtcctga

SEQ ID NO: 2174630 - DNA, 25 bp, Homo sapien
tcctccacattatcaccatataagc

SEQ ID NO: 2174631 - DNA, 25 bp, Homo sapien
aggaatgcactcgtggtcacaaggg

SEQ ID NO: 2174632 - DNA, 25 bp, Homo sapien
tatcaccatataagccatgctgact

SEQ ID NO: 2174633 - DNA, 25 bp, Homo sapien
gggaatgtgcacatgcagcaaagaa

SEQ ID NO: 2174634 - DNA, 25 bp, Homo sapien
ggatacagttccagcgtcgcacaaa

SEQ ID NO: 2174635 - DNA, 25 bp, Homo sapien
agaaccatgggttgctccgtgacgt

SEQ ID NO: 2174636 - DNA, 25 bp, Homo sapien
aagggcatgccgtagaaatagtcaa

SEQ ID NO: 2174637 - DNA, 25 bp, Homo sapien
gcacaaacccgaaggaggagtacca

SEQ ID NO: 2174638 - DNA, 25 bp, Homo sapien
taatgtgaggctcccacatatccac

SEQ ID NO: 2174639 - DNA, 25 bp, Homo sapien
tcccaaccaccgtataatgtgaggc

SEQ ID NO: 2174640 - DNA, 25 bp, Homo sapien
ttatcacgaatattcccaaccaccg

SEQ ID NO: 2174641 - DNA, 25 bp, Homo sapien
gggatcttttttatcacgaatattc

SEQ ID NO: 2174642 - DNA, 25 bp, Homo sapien
tgaggccggttgcatagccatgctg

SEQ ID NO: 2174643 - DNA, 25 bp, Homo sapien
ctatgaggccggttgcatagccatg

SEQ ID NO: 2174644 - DNA, 25 bp, Homo sapien
gagtccacctgagcctgcgttccac

SEQ ID NO: 2174645 - DNA, 25 bp, Homo sapien
cggttgcatagccatgctgctgcaa

SEQ ID NO: 2174646 - DNA, 25 bp, Homo sapien
tttctccatcatctccgtgacacca

SEQ ID NO: 2174647 - DNA, 25 bp, Homo sapien
catttctccatcatctccgtgacac

SEQ ID NO: 2174648 - DNA, 25 bp, Homo sapien
tctccatcatctccgtgacaccaac

SEQ ID NO: 2174649 - DNA, 25 bp, Homo sapien
ccatttctccatcatctccgtgaca

SEQ ID NO: 2174650 - DNA, 25 bp, Homo sapien
ctgagtgagcctcacaccttcctct

SEQ ID NO: 2174651 - DNA, 25 bp, Homo sapien
gctgagtgagcctcacaccttcctc

SEQ ID NO: 2174652 - DNA, 25 bp, Homo sapien
tgctgagtgagcctcacaccttcct

SEQ ID NO: 2174653 - DNA, 25 bp, Homo sapien
tgagtgagcctcacaccttcctctg

SEQ ID NO: 2174654 - DNA, 25 bp, Homo sapien
acatcatcaccaatagcaacaacca

SEQ ID NO: 2174655 - DNA, 25 bp, Homo sapien
catgatcagtaggatatttggttta

SEQ ID NO: 2174656 - DNA, 25 bp, Homo sapien
gccatgatcagtaggatatttggtt

SEQ ID NO: 2174657 - DNA, 25 bp, Homo sapien
atccgccatgatcagtaggatattt

SEQ ID NO: 2174658 - DNA, 25 bp, Homo sapien
ccgccatgatcagtaggatatttgg

SEQ ID NO: 2174659 - DNA, 25 bp, Homo sapien
ataaaaacagtagcaccggcaaaga

SEQ ID NO: 2174660 - DNA, 25 bp, Homo sapien
cttcagaagcaagcataaaaacagt

SEQ ID NO: 2174661 - DNA, 25 bp, Homo sapien
aaacagtagcaccggcaaagagtcc

SEQ ID NO: 2174662 - DNA, 25 bp, Homo sapien
taaaaacagtagcaccggcaaagag

SEQ ID NO: 2174663 - DNA, 25 bp, Homo sapien
gggaacctaaggctttccatgccga

SEQ ID NO: 2174664 - DNA, 25 bp, Homo sapien
actgcagtggataggtggtgtctta

SEQ ID NO: 2174665 - DNA, 25 bp, Homo sapien
tttccatgccgacttcctagaagta

SEQ ID NO: 2174666 - DNA, 25 bp, Homo sapien
ggtggcgagaggcacggcagtgctg

SEQ ID NO: 2174667 - DNA, 25 bp, Homo sapien
gacccggcgcatctgaggaagtgca

SEQ ID NO: 2174668 - DNA, 25 bp, Homo sapien
atggaggcggcacaaggccaaggcg

SEQ ID NO: 2174669 - DNA, 25 bp, Homo sapien
gggcgcaaatgaagctgggaatgca

SEQ ID NO: 2174670 - DNA, 25 bp, Homo sapien
ccagagggaagtaacggccgcgctt

SEQ ID NO: 2174671 - DNA, 25 bp, Homo sapien
gtcccctccgcgcggcggatcgcat

SEQ ID NO: 2174672 - DNA, 25 bp, Homo sapien
cgcgtcccctccgcgcggcggatcg

SEQ ID NO: 2174673 - DNA, 25 bp, Homo sapien
cgtcccctccgcgcggcggatcgca

SEQ ID NO: 2174674 - DNA, 25 bp, Homo sapien
gcgtcccctccgcgcggcggatcgc

SEQ ID NO: 2174675 - DNA, 25 bp, Homo sapien
ccgggcgccgctagtgccaaggctt

SEQ ID NO: 2174676 - DNA, 25 bp, Homo sapien
ccgagcgctggcccagagcgcagga

SEQ ID NO: 2174677 - DNA, 25 bp, Homo sapien
ttgccctgcgcactccgcgcccggg

SEQ ID NO: 2174678 - DNA, 25 bp, Homo sapien
gggcgccgctagtgccaaggcttcc

SEQ ID NO: 2174679 - DNA, 25 bp, Homo sapien
gcttggtgtttgaaatgtctgttcc

SEQ ID NO: 2174680 - DNA, 25 bp, Homo sapien
gagcaatcaagttgcgatttcagtt

SEQ ID NO: 2174681 - DNA, 25 bp, Homo sapien
ccggatgctggacttgtactctaag

SEQ ID NO: 2174682 - DNA, 25 bp, Homo sapien
tcaagttgcgatttcagtttctcaa

SEQ ID NO: 2174683 - DNA, 25 bp, Homo sapien
gaagtggaactaccggtgtgcacca

SEQ ID NO: 2174684 - DNA, 25 bp, Homo sapien
tgtcaagggtgaggctgtcaccgcc

SEQ ID NO: 2174685 - DNA, 25 bp, Homo sapien
ttttttgctagagactaggtcccac

SEQ ID NO: 2174686 - DNA, 25 bp, Homo sapien
gcttaggtcctcttccactggtcag

SEQ ID NO: 2174687 - DNA, 25 bp, Homo sapien
tttgaggacatgttcttgaggcggt

SEQ ID NO: 2174688 - DNA, 25 bp, Homo sapien
tatgcacagcctgaattcttggagg

SEQ ID NO: 2174689 - DNA, 25 bp, Homo sapien
aaatgttatgcggaggcagggtctc

SEQ ID NO: 2174690 - DNA, 25 bp, Homo sapien
catcttagtgccctaaagtgctggg

SEQ ID NO: 2174691 - DNA, 25 bp, Homo sapien
ctaggcttggaagagtgggaggagg

SEQ ID NO: 2174692 - DNA, 25 bp, Homo sapien
gagtgggaggagggacctgttgctt

SEQ ID NO: 2174693 - DNA, 25 bp, Homo sapien
gggaggagggacctgttgcttgaat

SEQ ID NO: 2174694 - DNA, 25 bp, Homo sapien
tgggaggagggacctgttgcttgaa

SEQ ID NO: 2174695 - DNA, 25 bp, Homo sapien
ctggagacagaaagagctattggaa

SEQ ID NO: 2174696 - DNA, 25 bp, Homo sapien
gagctattggaaagacctccttact

SEQ ID NO: 2174697 - DNA, 25 bp, Homo sapien
attggaaagacctccttactcccag

SEQ ID NO: 2174698 - DNA, 25 bp, Homo sapien
gacagaaagagctattggaaagacc

SEQ ID NO: 2174699 - DNA, 25 bp, Homo sapien
gccctattccaataggagtggggtc

SEQ ID NO: 2174700 - DNA, 25 bp, Homo sapien
ttccaataggagtggggtccttata

SEQ ID NO: 2174701 - DNA, 25 bp, Homo sapien
cctattccaataggagtggggtcct

SEQ ID NO: 2174702 - DNA, 25 bp, Homo sapien
ggtcacaagagtgggccctattcca

SEQ ID NO: 2174703 - DNA, 25 bp, Homo sapien
tggccagctggtttgtttcaatttg

SEQ ID NO: 2174704 - DNA, 25 bp, Homo sapien
tttgatcacgggagtgatcctcctg

SEQ ID NO: 2174705 - DNA, 25 bp, Homo sapien
gctggtttgtttcaatttgagtgac

SEQ ID NO: 2174706 - DNA, 25 bp, Homo sapien
ctgggatgacaaccaccatggccag

SEQ ID NO: 2174707 - DNA, 25 bp, Homo sapien
tattgtgggtcatcttccctaaggc

SEQ ID NO: 2174708 - DNA, 25 bp, Homo sapien
ttattgtgggtcatcttccctaagg

SEQ ID NO: 2174709 - DNA, 25 bp, Homo sapien
attgtgggtcatcttccctaaggca

SEQ ID NO: 2174710 - DNA, 25 bp, Homo sapien
ttgtgggtcatcttccctaaggcac

SEQ ID NO: 2174711 - DNA, 25 bp, Homo sapien
ctgtccagctgcagaggaactgggc

SEQ ID NO: 2174712 - DNA, 25 bp, Homo sapien
gctgcagccacggtctccagatgtt

SEQ ID NO: 2174713 - DNA, 25 bp, Homo sapien
ctgggctgagtgtccgctggtgttc

SEQ ID NO: 2174714 - DNA, 25 bp, Homo sapien
tgagtgtccgctggtgttcccacac

SEQ ID NO: 2174715 - DNA, 25 bp, Homo sapien
ggctggaacacaggcgtcacaaagt

SEQ ID NO: 2174716 - DNA, 25 bp, Homo sapien
tggaacacaggcgtcacaaagtgga

SEQ ID NO: 2174717 - DNA, 25 bp, Homo sapien
ctggctggaacacaggcgtcacaaa

SEQ ID NO: 2174718 - DNA, 25 bp, Homo sapien
tgtgggtctcagaagggtctcttga

SEQ ID NO: 2174719 - DNA, 25 bp, Homo sapien
tgtcccgttgatgccacctggctgc

SEQ ID NO: 2174720 - DNA, 25 bp, Homo sapien
gcagaaggtcttggccgtcaatcac

SEQ ID NO: 2174721 - DNA, 25 bp, Homo sapien
tggctgcgtgcagaaacctctcaca

SEQ ID NO: 2174722 - DNA, 25 bp, Homo sapien
caataatgcatcaggaactcgtggt

SEQ ID NO: 2174723 - DNA, 25 bp, Homo sapien
cacggtggggaacacgtccatcaga

SEQ ID NO: 2174724 - DNA, 25 bp, Homo sapien
gggaacacgtccatcagactcgtgg

SEQ ID NO: 2174725 - DNA, 25 bp, Homo sapien
ggtggggaacacgtccatcagactc

SEQ ID NO: 2174726 - DNA, 25 bp, Homo sapien
cggtggggaacacgtccatcagact

SEQ ID NO: 2174727 - DNA, 25 bp, Homo sapien
accatactgggtgtttccaagttga

SEQ ID NO: 2174728 - DNA, 25 bp, Homo sapien
tgatccgacgtaaaataaatgaggg

SEQ ID NO: 2174729 - DNA, 25 bp, Homo sapien
aaccctccacgtccaaagtgtcaag

SEQ ID NO: 2174730 - DNA, 25 bp, Homo sapien
ccaagttgattctctagggaaccgc

SEQ ID NO: 2174731 - DNA, 25 bp, Homo sapien
tgtccccatacagcccgtggagact

SEQ ID NO: 2174732 - DNA, 25 bp, Homo sapien
ttgtccccatacagcccgtggagac

SEQ ID NO: 2174733 - DNA, 25 bp, Homo sapien
cagtccatctcctctacgttgtccc

SEQ ID NO: 2174734 - DNA, 25 bp, Homo sapien
tctcctctacgttgtccccatacag

SEQ ID NO: 2174735 - DNA, 25 bp, Homo sapien
gatgtgaacgtgtagaaaggaaaca

SEQ ID NO: 2174736 - DNA, 25 bp, Homo sapien
ggatgtgaacgtgtagaaaggaaac

SEQ ID NO: 2174737 - DNA, 25 bp, Homo sapien
agggatgtgaacgtgtagaaaggaa

SEQ ID NO: 2174738 - DNA, 25 bp, Homo sapien
tgtgaacgtgtagaaaggaaacaaa

SEQ ID NO: 2174739 - DNA, 25 bp, Homo sapien
ttaggatgcgttttcattccaaagc

SEQ ID NO: 2174740 - DNA, 25 bp, Homo sapien
caaagctgagtgcttggaggaagct

SEQ ID NO: 2174741 - DNA, 25 bp, Homo sapien
tcattccaaagctgagtgcttggag

SEQ ID NO: 2174742 - DNA, 25 bp, Homo sapien
tggaggaagctgacccttttctgct

SEQ ID NO: 2174743 - DNA, 25 bp, Homo sapien
aaagggctgaccagatgaccggcat

SEQ ID NO: 2174744 - DNA, 25 bp, Homo sapien
tgctaccagtgtgagggcaaccaag

SEQ ID NO: 2174745 - DNA, 25 bp, Homo sapien
aatcggcatggacaatcagagcacc

SEQ ID NO: 2174746 - DNA, 25 bp, Homo sapien
ttttgagaaaggacgcaacctcctg

SEQ ID NO: 2174747 - DNA, 25 bp, Homo sapien
ccgcgcctgaccagagtcacttttg

SEQ ID NO: 2174748 - DNA, 25 bp, Homo sapien
gctgacagggaggtactaaatctag

SEQ ID NO: 2174749 - DNA, 25 bp, Homo sapien
gcaacttggtctcctctcaaggaac

SEQ ID NO: 2174750 - DNA, 25 bp, Homo sapien
catggcctacgagaacattgtttga

SEQ ID NO: 2174751 - DNA, 25 bp, Homo sapien
ccttgcctgagctggtatttcttga

SEQ ID NO: 2174752 - DNA, 25 bp, Homo sapien
cttgcctgagctggtatttcttgag

SEQ ID NO: 2174753 - DNA, 25 bp, Homo sapien
accttgcctgagctggtatttcttg

SEQ ID NO: 2174754 - DNA, 25 bp, Homo sapien
catttgttggaagacctccagatgc

SEQ ID NO: 2174755 - DNA, 25 bp, Homo sapien
gaagaacacggtaaccaatgctgga

SEQ ID NO: 2174756 - DNA, 25 bp, Homo sapien
tctcatttgttggaagacctccaga

SEQ ID NO: 2174757 - DNA, 25 bp, Homo sapien
tgagtccagtggcatagcctttctc

SEQ ID NO: 2174758 - DNA, 25 bp, Homo sapien
ttcacgccgtcctctgcaaggcggt

SEQ ID NO: 2174759 - DNA, 25 bp, Homo sapien
tgatcgcacagggtatctgcccgtg

SEQ ID NO: 2174760 - DNA, 25 bp, Homo sapien
cagagatgtgttgggtcagcttcac

SEQ ID NO: 2174761 - DNA, 25 bp, Homo sapien
gggtgcacaaagatgcggcagagat

SEQ ID NO: 2174762 - DNA, 25 bp, Homo sapien
ctgcattgggggcaccaggtgagta

SEQ ID NO: 2174763 - DNA, 25 bp, Homo sapien
ttcttctggtgtctgcattgggggc

SEQ ID NO: 2174764 - DNA, 25 bp, Homo sapien
tcttctggtgtctgcattgggggca

SEQ ID NO: 2174765 - DNA, 25 bp, Homo sapien
gaagctgatggtgccaaacttagca

SEQ ID NO: 2174766 - DNA, 25 bp, Homo sapien
aaacttagcagtacagcgagcatcg

SEQ ID NO: 2174767 - DNA, 25 bp, Homo sapien
gttgttgccatagcagccaatgtcc

SEQ ID NO: 2174768 - DNA, 25 bp, Homo sapien
atgccaaggtcgtccgccatcagaa

SEQ ID NO: 2174769 - DNA, 25 bp, Homo sapien
tgataccgttgatggctttatttgg

SEQ ID NO: 2174770 - DNA, 25 bp, Homo sapien
catttgcagaacttgtgtatggggg

SEQ ID NO: 2174771 - DNA, 25 bp, Homo sapien
ttaaactcatgattaacagaaagcc

SEQ ID NO: 2174772 - DNA, 25 bp, Homo sapien
tttttctctggttacaattaactga

SEQ ID NO: 2174773 - DNA, 25 bp, Homo sapien
taaagatgtaatctgagtctccaag

SEQ ID NO: 2174774 - DNA, 25 bp, Homo sapien
tctttcatcgatgccaccctgggaa

SEQ ID NO: 2174775 - DNA, 25 bp, Homo sapien
gggttggtgacatacagcctgccac

SEQ ID NO: 2174776 - DNA, 25 bp, Homo sapien
cacctggccgatggtagcggttgat

SEQ ID NO: 2174777 - DNA, 25 bp, Homo sapien
gagcacatctattaatcacgggtct

SEQ ID NO: 2174778 - DNA, 25 bp, Homo sapien
ggcaacatcaaatcaagggagcctg

SEQ ID NO: 2174779 - DNA, 25 bp, Homo sapien
tcaagagatccagaagcggtcaggc

SEQ ID NO: 2174780 - DNA, 25 bp, Homo sapien
cacgggtctcatgcttcattctcca

SEQ ID NO: 2174781 - DNA, 25 bp, Homo sapien
taagacataaagatgtccacaatca

SEQ ID NO: 2174782 - DNA, 25 bp, Homo sapien
agacataaagatgtccacaatcaca

SEQ ID NO: 2174783 - DNA, 25 bp, Homo sapien
ctgtaagacataaagatgtccacaa

SEQ ID NO: 2174784 - DNA, 25 bp, Homo sapien
gtaagacataaagatgtccacaatc

SEQ ID NO: 2174785 - DNA, 25 bp, Homo sapien
gaaacctgaccaaggatagacacag

SEQ ID NO: 2174786 - DNA, 25 bp, Homo sapien
aggacacactggagccagcaggcac

SEQ ID NO: 2174787 - DNA, 25 bp, Homo sapien
gccgtggtgtctgtccaggtgaaac

SEQ ID NO: 2174788 - DNA, 25 bp, Homo sapien
gccacttttagaagggccgagcggc

SEQ ID NO: 2174789 - DNA, 25 bp, Homo sapien
caaaggaagcaagcgtgaaggcaga

SEQ ID NO: 2174790 - DNA, 25 bp, Homo sapien
tccttcctgaatccccgatcaagaa

SEQ ID NO: 2174791 - DNA, 25 bp, Homo sapien
cccaaaggaagcaagcgtgaaggca

SEQ ID NO: 2174792 - DNA, 25 bp, Homo sapien
gaatccccgatcaagaagaggaagg

SEQ ID NO: 2174793 - DNA, 25 bp, Homo sapien
ttacaagtggacggttttggtggca

SEQ ID NO: 2174794 - DNA, 25 bp, Homo sapien
tacaagtggacggttttggtggcat

SEQ ID NO: 2174795 - DNA, 25 bp, Homo sapien
tgggatgaggagctgacacgctggc

SEQ ID NO: 2174796 - DNA, 25 bp, Homo sapien
gggatgaggagctgacacgctggca

SEQ ID NO: 2174797 - DNA, 25 bp, Homo sapien
gagcttcagccccgggctgcgagcc

SEQ ID NO: 2174798 - DNA, 25 bp, Homo sapien
gattctcttccggggagaaggaatc

SEQ ID NO: 2174799 - DNA, 25 bp, Homo sapien
ttgattctcttccggggagaaggaa

SEQ ID NO: 2174800 - DNA, 25 bp, Homo sapien
ctttgattctcttccggggagaagg

SEQ ID NO: 2174801 - DNA, 25 bp, Homo sapien
gcttcgcctgggccctgttcccaaa

SEQ ID NO: 2174802 - DNA, 25 bp, Homo sapien
acgcttcgcctgggccctgttccca

SEQ ID NO: 2174803 - DNA, 25 bp, Homo sapien
caacgcttcgcctgggccctgttcc

SEQ ID NO: 2174804 - DNA, 25 bp, Homo sapien
tcaacgcttcgcctgggccctgttc

SEQ ID NO: 2174805 - DNA, 25 bp, Homo sapien
gtctcttcgatgttcagtgcacgtg

SEQ ID NO: 2174806 - DNA, 25 bp, Homo sapien
gatgttcagtgcacgtgccttcagc

SEQ ID NO: 2174807 - DNA, 25 bp, Homo sapien
ctccggtgtctcttcgatgttcagt

SEQ ID NO: 2174808 - DNA, 25 bp, Homo sapien
ttcagtgcacgtgccttcagcatct

SEQ ID NO: 2174809 - DNA, 25 bp, Homo sapien
ctagtgtggatgcaatgtctcccat

SEQ ID NO: 2174810 - DNA, 25 bp, Homo sapien
gtgtggatgcaatgtctcccatttg

SEQ ID NO: 2174811 - DNA, 25 bp, Homo sapien
tagtgtggatgcaatgtctcccatt

SEQ ID NO: 2174812 - DNA, 25 bp, Homo sapien
agtgtggatgcaatgtctcccattt

SEQ ID NO: 2174813 - DNA, 25 bp, Homo sapien
aagaatatcccctggagcgtctctg

SEQ ID NO: 2174814 - DNA, 25 bp, Homo sapien
tttagcataaaagaatatcccctgg

SEQ ID NO: 2174815 - DNA, 25 bp, Homo sapien
gaaaagacgcagtttagcataaaag

SEQ ID NO: 2174816 - DNA, 25 bp, Homo sapien
aacattgacagggacttgtttgaaa

SEQ ID NO: 2174817 - DNA, 25 bp, Homo sapien
ctgtctcggcggcactgaacggctg

SEQ ID NO: 2174818 - DNA, 25 bp, Homo sapien
ggcactgaacggctggctcacgcat

SEQ ID NO: 2174819 - DNA, 25 bp, Homo sapien
cagctgtgtaagggcgacactggct

SEQ ID NO: 2174820 - DNA, 25 bp, Homo sapien
gccaaaacagacacgcactggctgt

SEQ ID NO: 2174821 - DNA, 25 bp, Homo sapien
tgactggagaacacttaattacgat

SEQ ID NO: 2174822 - DNA, 25 bp, Homo sapien
ctggagaacacttaattacgatcat

SEQ ID NO: 2174823 - DNA, 25 bp, Homo sapien
ggtgactggagaacacttaattacg

SEQ ID NO: 2174824 - DNA, 25 bp, Homo sapien
gactggagaacacttaattacgatc

SEQ ID NO: 2174825 - DNA, 25 bp, Homo sapien
gtgtagtaaaaagagctaaatccca

SEQ ID NO: 2174826 - DNA, 25 bp, Homo sapien
tcaaaatttggcataaggcttacaa

SEQ ID NO: 2174827 - DNA, 25 bp, Homo sapien
cctctgacagatattataaggtgtc

SEQ ID NO: 2174828 - DNA, 25 bp, Homo sapien
tataaacccagcaacccagcatgaa

SEQ ID NO: 2174829 - DNA, 25 bp, Homo sapien
tatggagccctcttcatcccataat

SEQ ID NO: 2174830 - DNA, 25 bp, Homo sapien
tctgattctctttcggtgagatggt

SEQ ID NO: 2174831 - DNA, 25 bp, Homo sapien
gatggtttatggagccctcttcatc

SEQ ID NO: 2174832 - DNA, 25 bp, Homo sapien
ggtgagatggtttatggagccctct

SEQ ID NO: 2174833 - DNA, 25 bp, Homo sapien
gctggtgctgaacgtagtgcagata

SEQ ID NO: 2174834 - DNA, 25 bp, Homo sapien
agatacttgatcagcctagcgcacc

SEQ ID NO: 2174835 - DNA, 25 bp, Homo sapien
aggtcaccaagctggtgctgaacgt

SEQ ID NO: 2174836 - DNA, 25 bp, Homo sapien
ttgatcagcctagcgcaccatagcc

SEQ ID NO: 2174837 - DNA, 25 bp, Homo sapien
gctgcagattagcaacgggaaccat

SEQ ID NO: 2174838 - DNA, 25 bp, Homo sapien
gaacattcagcgtcagcaagaaagg

SEQ ID NO: 2174839 - DNA, 25 bp, Homo sapien
ggtcgtcccagataagaacattcag

SEQ ID NO: 2174840 - DNA, 25 bp, Homo sapien
gatgaatggctttggtggtcgtccc

SEQ ID NO: 2174841 - DNA, 25 bp, Homo sapien
ctgggtgagcctagcagggaccagc

SEQ ID NO: 2174842 - DNA, 25 bp, Homo sapien
gagcctagcagggaccagccctccc

SEQ ID NO: 2174843 - DNA, 25 bp, Homo sapien
ggtgagcctagcagggaccagccct

SEQ ID NO: 2174844 - DNA, 25 bp, Homo sapien
gtgagcctagcagggaccagccctc

SEQ ID NO: 2174845 - DNA, 25 bp, Homo sapien
gagacatctgcaggttagcactcaa

SEQ ID NO: 2174846 - DNA, 25 bp, Homo sapien
tcagatacaagagagggccccttga

SEQ ID NO: 2174847 - DNA, 25 bp, Homo sapien
cagcagcgaggtgctctgtttagca

SEQ ID NO: 2174848 - DNA, 25 bp, Homo sapien
ctgtttagcactaggagtcactgtc

SEQ ID NO: 2174849 - DNA, 25 bp, Homo sapien
gttctttttggcttacaagagcatg

SEQ ID NO: 2174850 - DNA, 25 bp, Homo sapien
cgagagaggattaaggcttctgctt

SEQ ID NO: 2174851 - DNA, 25 bp, Homo sapien
tggcttacaagagcatgcagggatg

SEQ ID NO: 2174852 - DNA, 25 bp, Homo sapien
ttgcctctgtccaaccttgacccaa

SEQ ID NO: 2174853 - DNA, 25 bp, Homo sapien
tcagaatcaatgactggtgacacct

SEQ ID NO: 2174854 - DNA, 25 bp, Homo sapien
gcaggctctgtagggacctttctca

SEQ ID NO: 2174855 - DNA, 25 bp, Homo sapien
tcgtagcctgcacttatatttggaa

SEQ ID NO: 2174856 - DNA, 25 bp, Homo sapien
tatttggaatccatataacctcctt

SEQ ID NO: 2174857 - DNA, 25 bp, Homo sapien
gaagtgtgtcttgcacagaggataa

SEQ ID NO: 2174858 - DNA, 25 bp, Homo sapien
ggagacacggaacgtgtgtcctgca

SEQ ID NO: 2174859 - DNA, 25 bp, Homo sapien
gcacagggcaggaacgggaagtgtg

SEQ ID NO: 2174860 - DNA, 25 bp, Homo sapien
ctgcacatgggagtcacaagaagtg

SEQ ID NO: 2174861 - DNA, 25 bp, Homo sapien
aggtcataggagtgtttatgcagac

SEQ ID NO: 2174862 - DNA, 25 bp, Homo sapien
cctggacgactcatggacagctcag

SEQ ID NO: 2174863 - DNA, 25 bp, Homo sapien
ctggacgactcatggacagctcagt

SEQ ID NO: 2174864 - DNA, 25 bp, Homo sapien
atgcagaccccagagtggcttccta

SEQ ID NO: 2174865 - DNA, 25 bp, Homo sapien
tctggaaatggagcgaatcagctga

SEQ ID NO: 2174866 - DNA, 25 bp, Homo sapien
gctctggaaatggagcgaatcagct

SEQ ID NO: 2174867 - DNA, 25 bp, Homo sapien
tggaaatggagcgaatcagctgaat

SEQ ID NO: 2174868 - DNA, 25 bp, Homo sapien
ggaaatggagcgaatcagctgaatc

SEQ ID NO: 2174869 - DNA, 25 bp, Homo sapien
ggtcaaatcctacatgttccattgt

SEQ ID NO: 2174870 - DNA, 25 bp, Homo sapien
gttctggcggttcctctatcaatgt

SEQ ID NO: 2174871 - DNA, 25 bp, Homo sapien
tatcaatgtctaggcattcctgcct

SEQ ID NO: 2174872 - DNA, 25 bp, Homo sapien
acattctcattagtggttctggcgg

SEQ ID NO: 2174873 - DNA, 25 bp, Homo sapien
ttaaaattccacatgtataactgac

SEQ ID NO: 2174874 - DNA, 25 bp, Homo sapien
gcagggtaaccccattgggcagcag

SEQ ID NO: 2174875 - DNA, 25 bp, Homo sapien
cctcggagaacagttccattgctta

SEQ ID NO: 2174876 - DNA, 25 bp, Homo sapien
tccattgcttagagaacttagcagg

SEQ ID NO: 2174877 - DNA, 25 bp, Homo sapien
cagggtaaccccattgggcagcagg

SEQ ID NO: 2174878 - DNA, 25 bp, Homo sapien
gggctggggagactttgatgaggac

SEQ ID NO: 2174879 - DNA, 25 bp, Homo sapien
ggacacaggctcagttgggttctgt

SEQ ID NO: 2174880 - DNA, 25 bp, Homo sapien
ctggggagactttgatgaggacaca

SEQ ID NO: 2174881 - DNA, 25 bp, Homo sapien
ctgtttggcagatacacttaaggag

SEQ ID NO: 2174882 - DNA, 25 bp, Homo sapien
catggaaaacgtagaggtggtcttc

SEQ ID NO: 2174883 - DNA, 25 bp, Homo sapien
gcagcaatactaatgtggccatgga

SEQ ID NO: 2174884 - DNA, 25 bp, Homo sapien
cacctgccaacaggacccttcttcc

SEQ ID NO: 2174885 - DNA, 25 bp, Homo sapien
atgtggccatggaaaacgtagaggt

SEQ ID NO: 2174886 - DNA, 25 bp, Homo sapien
gggtgcaggatcttctttgctgcgt

SEQ ID NO: 2174887 - DNA, 25 bp, Homo sapien
ttttagggggcgctgcagacatctc

SEQ ID NO: 2174888 - DNA, 25 bp, Homo sapien
ctgcagacatctcagtatggtccat

SEQ ID NO: 2174889 - DNA, 25 bp, Homo sapien
tgtatgggtgcaggatcttctttgc

SEQ ID NO: 2174890 - DNA, 25 bp, Homo sapien
caatattcccgaggcaatacaagaa

SEQ ID NO: 2174891 - DNA, 25 bp, Homo sapien
ggccattcgtgggtatattttagcc

SEQ ID NO: 2174892 - DNA, 25 bp, Homo sapien
ctttatcccaacaatattcccgagg

SEQ ID NO: 2174893 - DNA, 25 bp, Homo sapien
aaaggtgtatccgtttcctggccat

SEQ ID NO: 2174894 - DNA, 25 bp, Homo sapien
gccacttggcttcttcctgacattt

SEQ ID NO: 2174895 - DNA, 25 bp, Homo sapien
acagctgggccacttggcttcttcc

SEQ ID NO: 2174896 - DNA, 25 bp, Homo sapien
ctcaacagctgggccacttggcttc

SEQ ID NO: 2174897 - DNA, 25 bp, Homo sapien
gctgggccacttggcttcttcctga

SEQ ID NO: 2174898 - DNA, 25 bp, Homo sapien
tgctcccagccagtacatgactatt

SEQ ID NO: 2174899 - DNA, 25 bp, Homo sapien
tattactgggatcattgcttaagcc

SEQ ID NO: 2174900 - DNA, 25 bp, Homo sapien
acctgcgtaagaatcccccttgaag

SEQ ID NO: 2174901 - DNA, 25 bp, Homo sapien
ttatttggaaaggtgcatggtagaa

SEQ ID NO: 2174902 - DNA, 25 bp, Homo sapien
gtattccacgctgttaaaattaatg

SEQ ID NO: 2174903 - DNA, 25 bp, Homo sapien
caaagtgtacgttgaattgagtttc

SEQ ID NO: 2174904 - DNA, 25 bp, Homo sapien
gagtttcggaagaacaggtcactga

SEQ ID NO: 2174905 - DNA, 25 bp, Homo sapien
cagcaaacttgatttaatggagatt

SEQ ID NO: 2174906 - DNA, 25 bp, Homo sapien
ctctggggaatgttgtgtttggaat

SEQ ID NO: 2174907 - DNA, 25 bp, Homo sapien
gccagcgagtttgttgtgttcccat

SEQ ID NO: 2174908 - DNA, 25 bp, Homo sapien
tgtacacgcatacatcagccctata

SEQ ID NO: 2174909 - DNA, 25 bp, Homo sapien
acatcagccctatatcagctctggg

SEQ ID NO: 2174910 - DNA, 25 bp, Homo sapien
tacaatgatcacatggatgacacat

SEQ ID NO: 2174911 - DNA, 25 bp, Homo sapien
ttctctgacatagacattttgcttg

SEQ ID NO: 2174912 - DNA, 25 bp, Homo sapien
atctgttttcggagaaccttctctg

SEQ ID NO: 2174913 - DNA, 25 bp, Homo sapien
gatgacacattcactctctttatga

SEQ ID NO: 2174914 - DNA, 25 bp, Homo sapien
ccccagagctgattgctgtatcggg

SEQ ID NO: 2174915 - DNA, 25 bp, Homo sapien
ggtttctctcggcaaagcattctcc

SEQ ID NO: 2174916 - DNA, 25 bp, Homo sapien
ttccaggccaaattctaggtgtggt

SEQ ID NO: 2174917 - DNA, 25 bp, Homo sapien
gctgattgctgtatcgggccctgtc

SEQ ID NO: 2174918 - DNA, 25 bp, Homo sapien
cactcatggcataagatgccaaaaa

SEQ ID NO: 2174919 - DNA, 25 bp, Homo sapien
cctcagtggcctgcgagtgtcaatg

SEQ ID NO: 2174920 - DNA, 25 bp, Homo sapien
aggagtcatggtttaaggtcctcag

SEQ ID NO: 2174921 - DNA, 25 bp, Homo sapien
gttgctacctttggctgtacctaca

SEQ ID NO: 2174922 - DNA, 25 bp, Homo sapien
cagcactttacgcagcctccatggg

SEQ ID NO: 2174923 - DNA, 25 bp, Homo sapien
ggaacatgcagccagcactttacgc

SEQ ID NO: 2174924 - DNA, 25 bp, Homo sapien
cacaggaacatgcagccagcacttt

SEQ ID NO: 2174925 - DNA, 25 bp, Homo sapien
atgcagccagcactttacgcagcct

SEQ ID NO: 2174926 - DNA, 25 bp, Homo sapien
caagaaaccctgatattgcaaaaca

SEQ ID NO: 2174927 - DNA, 25 bp, Homo sapien
agaaaccctgatattgcaaaacagc

SEQ ID NO: 2174928 - DNA, 25 bp, Homo sapien
ctacacaagaaaccctgatattgca

SEQ ID NO: 2174929 - DNA, 25 bp, Homo sapien
cacaagaaaccctgatattgcaaaa

SEQ ID NO: 2174930 - DNA, 25 bp, Homo sapien
ctgttctaaaacatgggtgggctga

SEQ ID NO: 2174931 - DNA, 25 bp, Homo sapien
ttctaaaacatgggtgggctgacac

SEQ ID NO: 2174932 - DNA, 25 bp, Homo sapien
gttctaaaacatgggtgggctgaca

SEQ ID NO: 2174933 - DNA, 25 bp, Homo sapien
tgttctaaaacatgggtgggctgac

SEQ ID NO: 2174934 - DNA, 25 bp, Homo sapien
gcaactgcagacctcacaactatag

SEQ ID NO: 2174935 - DNA, 25 bp, Homo sapien
tccaggactctcagcaactgcagac

SEQ ID NO: 2174936 - DNA, 25 bp, Homo sapien
tccctgattctttacatgagttcct

SEQ ID NO: 2174937 - DNA, 25 bp, Homo sapien
tgtttctgaactgtactgacaatcc

SEQ ID NO: 2174938 - DNA, 25 bp, Homo sapien
tgatatggaaatggtcgtgtagatt

SEQ ID NO: 2174939 - DNA, 25 bp, Homo sapien
cagtagatatgtccaaccagttgat

SEQ ID NO: 2174940 - DNA, 25 bp, Homo sapien
caaggcacatgcagtggacttcttt

SEQ ID NO: 2174941 - DNA, 25 bp, Homo sapien
gtagatttaactgtaggaccaaggc

SEQ ID NO: 2174942 - DNA, 25 bp, Homo sapien
cattgacaataacatctgagcttgg

SEQ ID NO: 2174943 - DNA, 25 bp, Homo sapien
gagcttgggttgcttggctttcctg

SEQ ID NO: 2174944 - DNA, 25 bp, Homo sapien
caatttcagcattgacaataacatc

SEQ ID NO: 2174945 - DNA, 25 bp, Homo sapien
tggaagaaattagatcaatttcagc

SEQ ID NO: 2174946 - DNA, 25 bp, Homo sapien
tgtagattggctcttcgtgtctccc

SEQ ID NO: 2174947 - DNA, 25 bp, Homo sapien
tctgtgtagattggctcttcgtgtc

SEQ ID NO: 2174948 - DNA, 25 bp, Homo sapien
gccatctgtgtagattggctcttcg

SEQ ID NO: 2174949 - DNA, 25 bp, Homo sapien
aatttttagccatctgtgtagattg

SEQ ID NO: 2174950 - DNA, 25 bp, Homo sapien
tgtggcccaatgacccctgtataga

SEQ ID NO: 2174951 - DNA, 25 bp, Homo sapien
cataaacggtttcactcaggagaca

SEQ ID NO: 2174952 - DNA, 25 bp, Homo sapien
ggaatcactgaatcctagagcggcc

SEQ ID NO: 2174953 - DNA, 25 bp, Homo sapien
cctgggacttgtagctgactgagcc

SEQ ID NO: 2174954 - DNA, 25 bp, Homo sapien
tctgtctgctttcttaaaccctggg

SEQ ID NO: 2174955 - DNA, 25 bp, Homo sapien
tcagcaggatacttgacgatctcaa

SEQ ID NO: 2174956 - DNA, 25 bp, Homo sapien
ggataatggaatcttttcacgcctc

SEQ ID NO: 2174957 - DNA, 25 bp, Homo sapien
aaggctgtgtgtatccagacccgca

SEQ ID NO: 2174958 - DNA, 25 bp, Homo sapien
tctttgtgagtctttgtcgtgaata

SEQ ID NO: 2174959 - DNA, 25 bp, Homo sapien
tctctttgtgagtctttgtcgtgaa

SEQ ID NO: 2174960 - DNA, 25 bp, Homo sapien
catctctttgtgagtctttgtcgtg

SEQ ID NO: 2174961 - DNA, 25 bp, Homo sapien
ccatctctttgtgagtctttgtcgt

SEQ ID NO: 2174962 - DNA, 25 bp, Homo sapien
tgtatttgctatatttaaggctccc

SEQ ID NO: 2174963 - DNA, 25 bp, Homo sapien
taaggctccctatgtagattaattc

SEQ ID NO: 2174964 - DNA, 25 bp, Homo sapien
gctaattaccctaatgtgatcagta

SEQ ID NO: 2174965 - DNA, 25 bp, Homo sapien
gaagagtgacctattaaacacaaag

SEQ ID NO: 2174966 - DNA, 25 bp, Homo sapien
gccttgggcagcaacgttgcagcca

SEQ ID NO: 2174967 - DNA, 25 bp, Homo sapien
tccctctgcagacaacaccatatgg

SEQ ID NO: 2174968 - DNA, 25 bp, Homo sapien
caatgggacaggttagcaggagttt

SEQ ID NO: 2174969 - DNA, 25 bp, Homo sapien
ggaggacatccccaacagagcttct

SEQ ID NO: 2174970 - DNA, 25 bp, Homo sapien
ccagctatatgcagtggttttccca

SEQ ID NO: 2174971 - DNA, 25 bp, Homo sapien
caaagctccgtggttaggcacaaca

SEQ ID NO: 2174972 - DNA, 25 bp, Homo sapien
caaagccttgttgatcggccatgct

SEQ ID NO: 2174973 - DNA, 25 bp, Homo sapien
gatgacatctacactaccacagcta

SEQ ID NO: 2174974 - DNA, 25 bp, Homo sapien
tctggacaaactggtttaaatggct

SEQ ID NO: 2174975 - DNA, 25 bp, Homo sapien
tgacaatggactgttagctagggat

SEQ ID NO: 2174976 - DNA, 25 bp, Homo sapien
gattctgtttaatgatccgctcaaa

SEQ ID NO: 2174977 - DNA, 25 bp, Homo sapien
cagagtcagtttgtgctggccatcc

SEQ ID NO: 2174978 - DNA, 25 bp, Homo sapien
aagcaggctgtccaaatgaacgtgt

SEQ ID NO: 2174979 - DNA, 25 bp, Homo sapien
ccacatcatgcgctgaagcaggctg

SEQ ID NO: 2174980 - DNA, 25 bp, Homo sapien
cacatcatgcgctgaagcaggctgt

SEQ ID NO: 2174981 - DNA, 25 bp, Homo sapien
gaagcagccaccttagaccagatgg

SEQ ID NO: 2174982 - DNA, 25 bp, Homo sapien
tacaaggaaatctaatatcgcagcc

SEQ ID NO: 2174983 - DNA, 25 bp, Homo sapien
caggttaactaggtgatgcgtcttc

SEQ ID NO: 2174984 - DNA, 25 bp, Homo sapien
cctatggacgcttatgaaggcagtc

SEQ ID NO: 2174985 - DNA, 25 bp, Homo sapien
cacttgtagaagccggcatctctct

SEQ ID NO: 2174986 - DNA, 25 bp, Homo sapien
tctgtgtggcatgctggatggtcag

SEQ ID NO: 2174987 - DNA, 25 bp, Homo sapien
ctgtgtggcatgctggatggtcagt

SEQ ID NO: 2174988 - DNA, 25 bp, Homo sapien
ctctgtgtggcatgctggatggtca

SEQ ID NO: 2174989 - DNA, 25 bp, Homo sapien
tctcccgcgctgttcctgaccaagc

SEQ ID NO: 2174990 - DNA, 25 bp, Homo sapien
tggtggcgggcgctgtcaccacctt

SEQ ID NO: 2174991 - DNA, 25 bp, Homo sapien
gcatctttgtccgtcactgatttca

SEQ ID NO: 2174992 - DNA, 25 bp, Homo sapien
atccccacttcgttaaagtagagtg

SEQ ID NO: 2174993 - DNA, 25 bp, Homo sapien
cctcatccccacttcgttaaagtag

SEQ ID NO: 2174994 - DNA, 25 bp, Homo sapien
catctttgtccgtcactgatttcac

SEQ ID NO: 2174995 - DNA, 25 bp, Homo sapien
cggcagcctccagaggatgcgcggc

SEQ ID NO: 2174996 - DNA, 25 bp, Homo sapien
cagcctccagaggatgcgcggccag

SEQ ID NO: 2174997 - DNA, 25 bp, Homo sapien
cttggacggcagcctccagaggatg

SEQ ID NO: 2174998 - DNA, 25 bp, Homo sapien
ttggacggcagcctccagaggatgc

SEQ ID NO: 2174999 - DNA, 25 bp, Homo sapien
gcgttggctgctgcacgctgcacgt

SEQ ID NO: 2175000 - DNA, 25 bp, Homo sapien
ggtgaccgaaagcaagaccaccatc

SEQ ID NO: 2175001 - DNA, 25 bp, Homo sapien
ggctgcattgctggccacgcactta

SEQ ID NO: 2175002 - DNA, 25 bp, Homo sapien
tacttgaaccttccgtatcactaag

SEQ ID NO: 2175003 - DNA, 25 bp, Homo sapien
cttggatccggacgctcttgagctc

SEQ ID NO: 2175004 - DNA, 25 bp, Homo sapien
taaatgcatcctggtcggaagaggg

SEQ ID NO: 2175005 - DNA, 25 bp, Homo sapien
catggtggatgacggagcaactttt

SEQ ID NO: 2175006 - DNA, 25 bp, Homo sapien
tgtctaggagggtaccaactgtggt

SEQ ID NO: 2175007 - DNA, 25 bp, Homo sapien
attgcaaggcaatgtcaccgactcc

SEQ ID NO: 2175008 - DNA, 25 bp, Homo sapien
cagtcttctcggaaaggtcatcaac

SEQ ID NO: 2175009 - DNA, 25 bp, Homo sapien
tctgggtcatccatgggcgctttca

SEQ ID NO: 2175010 - DNA, 25 bp, Homo sapien
cttctagactcaaggatggaggact

SEQ ID NO: 2175011 - DNA, 25 bp, Homo sapien
caatcgcaggtccacggatttccct

SEQ ID NO: 2175012 - DNA, 25 bp, Homo sapien
gattctccagaagcggcatgttccg

SEQ ID NO: 2175013 - DNA, 25 bp, Homo sapien
tcattaagttagagagaccctggag

SEQ ID NO: 2175014 - DNA, 25 bp, Homo sapien
tgttctctgctaagtagaggtgcct

SEQ ID NO: 2175015 - DNA, 25 bp, Homo sapien
gaagagagctgaggtctcttaaagc

SEQ ID NO: 2175016 - DNA, 25 bp, Homo sapien
gaatcataagtagctccaacttggt

SEQ ID NO: 2175017 - DNA, 25 bp, Homo sapien
gatgcttgggatctcattgccgtga

SEQ ID NO: 2175018 - DNA, 25 bp, Homo sapien
tgaggtctcttaaagctccatcggg

SEQ ID NO: 2175019 - DNA, 25 bp, Homo sapien
tctgacagggcctgtatgctattaa

SEQ ID NO: 2175020 - DNA, 25 bp, Homo sapien
tgacagggcctgtatgctattaaac

SEQ ID NO: 2175021 - DNA, 25 bp, Homo sapien
gaggtttctgacagggcctgtatgc

SEQ ID NO: 2175022 - DNA, 25 bp, Homo sapien
atgaggtttctgacagggcctgtat

SEQ ID NO: 2175023 - DNA, 25 bp, Homo sapien
caggaggctatttggtgtgtccatc

SEQ ID NO: 2175024 - DNA, 25 bp, Homo sapien
ccgggaaaatccacggcattggaat

SEQ ID NO: 2175025 - DNA, 25 bp, Homo sapien
taataaagagggacacgtggctagc

SEQ ID NO: 2175026 - DNA, 25 bp, Homo sapien
ctgctaaggaacattcatggagaac

SEQ ID NO: 2175027 - DNA, 25 bp, Homo sapien
agagccctgtgtgggttaaaggaca

SEQ ID NO: 2175028 - DNA, 25 bp, Homo sapien
gacataatgtctgtagccactcaga

SEQ ID NO: 2175029 - DNA, 25 bp, Homo sapien
tgtgggttaaaggacataatgtctg

SEQ ID NO: 2175030 - DNA, 25 bp, Homo sapien
taaaggacataatgtctgtagccac

SEQ ID NO: 2175031 - DNA, 25 bp, Homo sapien
ccgcctcagttaatcgtccctgaat

SEQ ID NO: 2175032 - DNA, 25 bp, Homo sapien
caaggtaaagctttggtctcaagat

SEQ ID NO: 2175033 - DNA, 25 bp, Homo sapien
gactgtgtattcttggatgcattca

SEQ ID NO: 2175034 - DNA, 25 bp, Homo sapien
tagatattgatagcctctcccgcct

SEQ ID NO: 2175035 - DNA, 25 bp, Homo sapien
tgcgcctggccgccatttttatttt

SEQ ID NO: 2175036 - DNA, 25 bp, Homo sapien
ctacaggcgtgtgctaccccgcctg

SEQ ID NO: 2175037 - DNA, 25 bp, Homo sapien
tcactgcgcctggccgccattttta

SEQ ID NO: 2175038 - DNA, 25 bp, Homo sapien
gagtcactgcgcctggccgccattt

SEQ ID NO: 2175039 - DNA, 25 bp, Homo sapien
cctcagaattgttcagaggtttttg

SEQ ID NO: 2175040 - DNA, 25 bp, Homo sapien
agggtatgtttgcggatggcatcct

SEQ ID NO: 2175041 - DNA, 25 bp, Homo sapien
gtatgtttgcggatggcatcctcag

SEQ ID NO: 2175042 - DNA, 25 bp, Homo sapien
ttgcggatggcatcctcagaattgt

SEQ ID NO: 2175043 - DNA, 25 bp, Homo sapien
tgacagtgggaaggttcgggaagaa

SEQ ID NO: 2175044 - DNA, 25 bp, Homo sapien
cactgacagtgggaaggttcgggaa

SEQ ID NO: 2175045 - DNA, 25 bp, Homo sapien
gcactgacagtgggaaggttcggga

SEQ ID NO: 2175046 - DNA, 25 bp, Homo sapien
ctgacagtgggaaggttcgggaaga

SEQ ID NO: 2175047 - DNA, 25 bp, Homo sapien
ttccacgtgtttagcaatgccagcg

SEQ ID NO: 2175048 - DNA, 25 bp, Homo sapien
acggaagccagggatcggaacgtgc

SEQ ID NO: 2175049 - DNA, 25 bp, Homo sapien
ttagcaatgccagcgggcacggaag

SEQ ID NO: 2175050 - DNA, 25 bp, Homo sapien
gattctttccacgtgtttagcaatg

SEQ ID NO: 2175051 - DNA, 25 bp, Homo sapien
ctcgctggggacgtagcaggcacaa

SEQ ID NO: 2175052 - DNA, 25 bp, Homo sapien
ggcaggccagcgccactcgcggatg

SEQ ID NO: 2175053 - DNA, 25 bp, Homo sapien
tggggacgtagcaggcacaaggatg

SEQ ID NO: 2175054 - DNA, 25 bp, Homo sapien
ccccccagtgcgcgcgcttgggcat

SEQ ID NO: 2175055 - DNA, 25 bp, Homo sapien
cttgtcggggtgcctgattctcgga

SEQ ID NO: 2175056 - DNA, 25 bp, Homo sapien
ttgtcggggtgcctgattctcggat

SEQ ID NO: 2175057 - DNA, 25 bp, Homo sapien
tgtcggggtgcctgattctcggata

SEQ ID NO: 2175058 - DNA, 25 bp, Homo sapien
gtcggggtgcctgattctcggatac

SEQ ID NO: 2175059 - DNA, 25 bp, Homo sapien
gcgcgcgagtcacggccgggagttt

SEQ ID NO: 2175060 - DNA, 25 bp, Homo sapien
ggaagccgccgcacacgggagcggt

SEQ ID NO: 2175061 - DNA, 25 bp, Homo sapien
gggcgcgcgagtcacggccgggagt

SEQ ID NO: 2175062 - DNA, 25 bp, Homo sapien
tgcgccgggagcatccaccgagccg

SEQ ID NO: 2175063 - DNA, 25 bp, Homo sapien
gggtaggtccctattccaggaggca

SEQ ID NO: 2175064 - DNA, 25 bp, Homo sapien
gcgacctggcgacaaggcaaaaagt

SEQ ID NO: 2175065 - DNA, 25 bp, Homo sapien
cctaagcagcgctgggaacgtttcc

SEQ ID NO: 2175066 - DNA, 25 bp, Homo sapien
ttcccagaccgtgtgcaagcaggag

SEQ ID NO: 2175067 - DNA, 25 bp, Homo sapien
aagcaggtgccctcaatcaggtatg

SEQ ID NO: 2175068 - DNA, 25 bp, Homo sapien
cactctacccaatgtgccgtctttg

SEQ ID NO: 2175069 - DNA, 25 bp, Homo sapien
ttcaataagtattggggagcaggtg

SEQ ID NO: 2175070 - DNA, 25 bp, Homo sapien
ccctcaatcaggtatggtttattta

SEQ ID NO: 2175071 - DNA, 25 bp, Homo sapien
tgatttaacgcaggtgtggtctaca

SEQ ID NO: 2175072 - DNA, 25 bp, Homo sapien
gcagggtcaatcagggatggtctat

SEQ ID NO: 2175073 - DNA, 25 bp, Homo sapien
gcagggtcaatcaggtgcggtctat

SEQ ID NO: 2175074 - DNA, 25 bp, Homo sapien
taaagaaggtgagatatagcaggca

SEQ ID NO: 2175075 - DNA, 25 bp, Homo sapien
gtggtagcatcacggccgctttcca

SEQ ID NO: 2175076 - DNA, 25 bp, Homo sapien
ccacggtggcgcgtggtagcatcac

SEQ ID NO: 2175077 - DNA, 25 bp, Homo sapien
acttgaatacgctgttgtggcggtg

SEQ ID NO: 2175078 - DNA, 25 bp, Homo sapien
ggaaatacttgaatacgctgttgtg

SEQ ID NO: 2175079 - DNA, 25 bp, Homo sapien
ttccaggagggcgagagacaagcca

SEQ ID NO: 2175080 - DNA, 25 bp, Homo sapien
tgggcccctgccaaaaagactgcat

SEQ ID NO: 2175081 - DNA, 25 bp, Homo sapien
catccaagtggcttcaccggtaata

SEQ ID NO: 2175082 - DNA, 25 bp, Homo sapien
ctggctggcccttcacatccaagtg

SEQ ID NO: 2175083 - DNA, 25 bp, Homo sapien
gggctcgtgctttgctgacagggtg

SEQ ID NO: 2175084 - DNA, 25 bp, Homo sapien
ccagccctgctactggtggcagtgt

SEQ ID NO: 2175085 - DNA, 25 bp, Homo sapien
gggaagggctcgtgctttgctgaca

SEQ ID NO: 2175086 - DNA, 25 bp, Homo sapien
ttctgcataggctctgggttgagta

SEQ ID NO: 2175087 - DNA, 25 bp, Homo sapien
gcagacaagatcattgtgctctctc

SEQ ID NO: 2175088 - DNA, 25 bp, Homo sapien
agcagacaagatcattgtgctctct

SEQ ID NO: 2175089 - DNA, 25 bp, Homo sapien
catgtcacgtccttagttgcagctg

SEQ ID NO: 2175090 - DNA, 25 bp, Homo sapien
gctgctcctcgaacaggaattggct

SEQ ID NO: 2175091 - DNA, 25 bp, Homo sapien
gcattgacggtaagccatgtcacgt

SEQ ID NO: 2175092 - DNA, 25 bp, Homo sapien
tattccgtgaggagaatatgctggt

SEQ ID NO: 2175093 - DNA, 25 bp, Homo sapien
ttcctcaagctgtccactagggtcc

SEQ ID NO: 2175094 - DNA, 25 bp, Homo sapien
cagaagtcgcatccattttagaaga

SEQ ID NO: 2175095 - DNA, 25 bp, Homo sapien
aaatggagagaaaacgaagggctga

SEQ ID NO: 2175096 - DNA, 25 bp, Homo sapien
tcctggtggtcatccctgaaaccgt

SEQ ID NO: 2175097 - DNA, 25 bp, Homo sapien
caaagcggccagtgggtgaaacatt

SEQ ID NO: 2175098 - DNA, 25 bp, Homo sapien
tctgtttgggccttcagacccttgg

SEQ ID NO: 2175099 - DNA, 25 bp, Homo sapien
ccagattaggggtttcaccttctgc

SEQ ID NO: 2175100 - DNA, 25 bp, Homo sapien
cagattaggggtttcaccttctgct

SEQ ID NO: 2175101 - DNA, 25 bp, Homo sapien
agattaggggtttcaccttctgctg

SEQ ID NO: 2175102 - DNA, 25 bp, Homo sapien
tccagattaggggtttcaccttctg

SEQ ID NO: 2175103 - DNA, 25 bp, Homo sapien
aaatgaacatatgaggtccccacgc

SEQ ID NO: 2175104 - DNA, 25 bp, Homo sapien
tggtcccaggtaatttccgctgctg

SEQ ID NO: 2175105 - DNA, 25 bp, Homo sapien
aagactgaagctcttactccaaaga

SEQ ID NO: 2175106 - DNA, 25 bp, Homo sapien
ctccaaagacattgaacacccctgg

SEQ ID NO: 2175107 - DNA, 25 bp, Homo sapien
taaagcacatcattggaagtccatg

SEQ ID NO: 2175108 - DNA, 25 bp, Homo sapien
gaggtagttaccatgactccttgct

SEQ ID NO: 2175109 - DNA, 25 bp, Homo sapien
tcatgccacattctacagttcttgt

SEQ ID NO: 2175110 - DNA, 25 bp, Homo sapien
tccattgctcacctagagcaaaatc

SEQ ID NO: 2175111 - DNA, 25 bp, Homo sapien
gagcttcaatcaacccgtaaagtga

SEQ ID NO: 2175112 - DNA, 25 bp, Homo sapien
gagttgcatatttgactgggagagc

SEQ ID NO: 2175113 - DNA, 25 bp, Homo sapien
tttctctatggcaaagagctctgag

SEQ ID NO: 2175114 - DNA, 25 bp, Homo sapien
cagactcctggagcttcaatcaacc

SEQ ID NO: 2175115 - DNA, 25 bp, Homo sapien
tttgtgtttggcctgaatgtaacag

SEQ ID NO: 2175116 - DNA, 25 bp, Homo sapien
tttggcctgaatgtaacagccttca

SEQ ID NO: 2175117 - DNA, 25 bp, Homo sapien
cggtttttgtgtttggcctgaatgt

SEQ ID NO: 2175118 - DNA, 25 bp, Homo sapien
tgtgtttggcctgaatgtaacagcc

SEQ ID NO: 2175119 - DNA, 25 bp, Homo sapien
agcaatcattgatctgaacttcttc

SEQ ID NO: 2175120 - DNA, 25 bp, Homo sapien
tctgcaaagcaatcattgatctgaa

SEQ ID NO: 2175121 - DNA, 25 bp, Homo sapien
caaagcaatcattgatctgaacttc

SEQ ID NO: 2175122 - DNA, 25 bp, Homo sapien
gcggcttttccaactgtaacttcaa

SEQ ID NO: 2175123 - DNA, 25 bp, Homo sapien
tttcgatgagccttgcgttccacag

SEQ ID NO: 2175124 - DNA, 25 bp, Homo sapien
gaagattcagggaactgtcacagtc

SEQ ID NO: 2175125 - DNA, 25 bp, Homo sapien
cagacaggctcaaagacacgtgctc

SEQ ID NO: 2175126 - DNA, 25 bp, Homo sapien
agtcaaccggcaacacagacaggct

SEQ ID NO: 2175127 - DNA, 25 bp, Homo sapien
cactgcgcgcgtgtagaactgaagc

SEQ ID NO: 2175128 - DNA, 25 bp, Homo sapien
caaaatgaccaagaaccgcttgctg

SEQ ID NO: 2175129 - DNA, 25 bp, Homo sapien
tttgcaagggttcactgaggtctct

SEQ ID NO: 2175130 - DNA, 25 bp, Homo sapien
gaactgaagcgggtctttgctgcat

SEQ ID NO: 2175131 - DNA, 25 bp, Homo sapien
cagtcgtagagaatccactcttacg

SEQ ID NO: 2175132 - DNA, 25 bp, Homo sapien
ccactcttacgtcagcgagatccat

SEQ ID NO: 2175133 - DNA, 25 bp, Homo sapien
gtggtgacagcatagtgcagtcgta

SEQ ID NO: 2175134 - DNA, 25 bp, Homo sapien
gcatagtgcagtcgtagagaatcca

SEQ ID NO: 2175135 - DNA, 25 bp, Homo sapien
agagcagaaggcgaatggggacgca

SEQ ID NO: 2175136 - DNA, 25 bp, Homo sapien
tggcagagcagaaggcgaatgggga

SEQ ID NO: 2175137 - DNA, 25 bp, Homo sapien
aaggcgaatggggacgcaggcacat

SEQ ID NO: 2175138 - DNA, 25 bp, Homo sapien
cagaaggcgaatggggacgcaggca

SEQ ID NO: 2175139 - DNA, 25 bp, Homo sapien
cacagagcttgctgcatgaccaaac

SEQ ID NO: 2175140 - DNA, 25 bp, Homo sapien
gaaaaacatcgcaggaaggtcacac

SEQ ID NO: 2175141 - DNA, 25 bp, Homo sapien
gaagtgtgcagctgtcctgtcggat

SEQ ID NO: 2175142 - DNA, 25 bp, Homo sapien
aaacccaggcggctgtcgtgaagaa

SEQ ID NO: 2175143 - DNA, 25 bp, Homo sapien
gcctccggggagttgcattcgccac

SEQ ID NO: 2175144 - DNA, 25 bp, Homo sapien
agttgcattcgccacagagatcctc

SEQ ID NO: 2175145 - DNA, 25 bp, Homo sapien
ctcccagaacaagcgggaaaacatg

SEQ ID NO: 2175146 - DNA, 25 bp, Homo sapien
gaaaacatgtccagggttctcagaa

SEQ ID NO: 2175147 - DNA, 25 bp, Homo sapien
ggcgaaaagcgactgcttccctgct

SEQ ID NO: 2175148 - DNA, 25 bp, Homo sapien
gaaaagcgactgcttccctgctcat

SEQ ID NO: 2175149 - DNA, 25 bp, Homo sapien
aaagcgactgcttccctgctcattt

SEQ ID NO: 2175150 - DNA, 25 bp, Homo sapien
ctggcgaaaagcgactgcttccctg

SEQ ID NO: 2175151 - DNA, 25 bp, Homo sapien
aatacgagcaaatggccgatgaggg

SEQ ID NO: 2175152 - DNA, 25 bp, Homo sapien
ctgcaaagaaggctgaaatacgagc

SEQ ID NO: 2175153 - DNA, 25 bp, Homo sapien
aaggctgaaatacgagcaaatggcc

SEQ ID NO: 2175154 - DNA, 25 bp, Homo sapien
gctgaaatacgagcaaatggccgat

SEQ ID NO: 2175155 - DNA, 25 bp, Homo sapien
agcttttggatggtccagattttac

SEQ ID NO: 2175156 - DNA, 25 bp, Homo sapien
cagcttttggatggtccagatttta

SEQ ID NO: 2175157 - DNA, 25 bp, Homo sapien
tcagcttttggatggtccagatttt

SEQ ID NO: 2175158 - DNA, 25 bp, Homo sapien
aaaatctatgctatccaggaccatg

SEQ ID NO: 2175159 - DNA, 25 bp, Homo sapien
aaaacatgctcctccaatagcgtgt

SEQ ID NO: 2175160 - DNA, 25 bp, Homo sapien
tggacaacctgcatttttctgcggt

SEQ ID NO: 2175161 - DNA, 25 bp, Homo sapien
taggatcatatcgtctggcagaagc

SEQ ID NO: 2175162 - DNA, 25 bp, Homo sapien
attctgacccctgggctatttccca

SEQ ID NO: 2175163 - DNA, 25 bp, Homo sapien
gtgacatcaattaatttcggcctca

SEQ ID NO: 2175164 - DNA, 25 bp, Homo sapien
gacatcaattaatttcggcctcaac

SEQ ID NO: 2175165 - DNA, 25 bp, Homo sapien
ggtgacatcaattaatttcggcctc

SEQ ID NO: 2175166 - DNA, 25 bp, Homo sapien
catcaattaatttcggcctcaactc

SEQ ID NO: 2175167 - DNA, 25 bp, Homo sapien
tgtcattggtcagagccttcccgtt

SEQ ID NO: 2175168 - DNA, 25 bp, Homo sapien
attggtcagagccttcccgttctga

SEQ ID NO: 2175169 - DNA, 25 bp, Homo sapien
cacagccctggcaaaggcggggttc

SEQ ID NO: 2175170 - DNA, 25 bp, Homo sapien
tctgtcattggtcagagccttcccg

SEQ ID NO: 2175171 - DNA, 25 bp, Homo sapien
cttctcctctgtgggtgtgtcaggt

SEQ ID NO: 2175172 - DNA, 25 bp, Homo sapien
gtgtcttcttcacattaggatccat

SEQ ID NO: 2175173 - DNA, 25 bp, Homo sapien
tcttcttcacattaggatccatgtc

SEQ ID NO: 2175174 - DNA, 25 bp, Homo sapien
tctgtgggtgtgtcaggtctccttg

SEQ ID NO: 2175175 - DNA, 25 bp, Homo sapien
cctccacatacccatatttgtaaga

SEQ ID NO: 2175176 - DNA, 25 bp, Homo sapien
cacatacccatatttgtaagagttt

SEQ ID NO: 2175177 - DNA, 25 bp, Homo sapien
tctcctccacatacccatatttgta

SEQ ID NO: 2175178 - DNA, 25 bp, Homo sapien
tccacatacccatatttgtaagagt

SEQ ID NO: 2175179 - DNA, 25 bp, Homo sapien
gaccataaaagttgtcattggcagt

SEQ ID NO: 2175180 - DNA, 25 bp, Homo sapien
cattagccaacgcattaagattgcg

SEQ ID NO: 2175181 - DNA, 25 bp, Homo sapien
ttgttctgcccgtcattagccaacg

SEQ ID NO: 2175182 - DNA, 25 bp, Homo sapien
taagattgcggtatatgtcaccacc

SEQ ID NO: 2175183 - DNA, 25 bp, Homo sapien
tgggcaccaccaactggatgccact

SEQ ID NO: 2175184 - DNA, 25 bp, Homo sapien
atatgagatgggcaccaccaactgg

SEQ ID NO: 2175185 - DNA, 25 bp, Homo sapien
caggcataggcacagatgaaaagcc

SEQ ID NO: 2175186 - DNA, 25 bp, Homo sapien
gaaccaggcataggcacagatgaaa

SEQ ID NO: 2175187 - DNA, 25 bp, Homo sapien
tacgtcatgtgtggcttaggctggc

SEQ ID NO: 2175188 - DNA, 25 bp, Homo sapien
ttacgtcatgtgtggcttaggctgg

SEQ ID NO: 2175189 - DNA, 25 bp, Homo sapien
caagccctggcgttgcaactgatag

SEQ ID NO: 2175190 - DNA, 25 bp, Homo sapien
tgggagccttctgcaacatcgatga

SEQ ID NO: 2175191 - DNA, 25 bp, Homo sapien
gatgactccagtacaaatagccttt

SEQ ID NO: 2175192 - DNA, 25 bp, Homo sapien
aaagacatgtgcaggcttcaagccc

SEQ ID NO: 2175193 - DNA, 25 bp, Homo sapien
gagacagctgtttgcggttaaaggc

SEQ ID NO: 2175194 - DNA, 25 bp, Homo sapien
agacagctgtttgcggttaaaggca

SEQ ID NO: 2175195 - DNA, 25 bp, Homo sapien
cataacgacatcatctaagatcaga

SEQ ID NO: 2175196 - DNA, 25 bp, Homo sapien
taggcacagtctcagccataacgac

SEQ ID NO: 2175197 - DNA, 25 bp, Homo sapien
tatagtttaggcacagtctcagcca

SEQ ID NO: 2175198 - DNA, 25 bp, Homo sapien
aatagaggctttggcagtatatagt

SEQ ID NO: 2175199 - DNA, 25 bp, Homo sapien
ccaacgtccacccagatcttccatg

SEQ ID NO: 2175200 - DNA, 25 bp, Homo sapien
tggctacagagtcatcggccgccag

SEQ ID NO: 2175201 - DNA, 25 bp, Homo sapien
tcatcggccgccagaagcttacaca

SEQ ID NO: 2175202 - DNA, 25 bp, Homo sapien
ccatgagagttggaagtctctcaaa

SEQ ID NO: 2175203 - DNA, 25 bp, Homo sapien
ggaaaagagaatccatccaactggc

SEQ ID NO: 2175204 - DNA, 25 bp, Homo sapien
gaatccatccaactggcatcgcaaa

SEQ ID NO: 2175205 - DNA, 25 bp, Homo sapien
tggcatcgcaaactagctcataaaa

SEQ ID NO: 2175206 - DNA, 25 bp, Homo sapien
atccaactggcatcgcaaactagct

SEQ ID NO: 2175207 - DNA, 25 bp, Homo sapien
tctagatgttcaggcattctggtca

SEQ ID NO: 2175208 - DNA, 25 bp, Homo sapien
ctagatgttcaggcattctggtcat

SEQ ID NO: 2175209 - DNA, 25 bp, Homo sapien
ctctagatgttcaggcattctggtc

SEQ ID NO: 2175210 - DNA, 25 bp, Homo sapien
acaagatgagcctgactcctaggaa

SEQ ID NO: 2175211 - DNA, 25 bp, Homo sapien
taccctcggaagaaggttatctgat

SEQ ID NO: 2175212 - DNA, 25 bp, Homo sapien
ccatctctgcaaagcgatacccgag

SEQ ID NO: 2175213 - DNA, 25 bp, Homo sapien
gatacccgagacagcctcttgttaa

SEQ ID NO: 2175214 - DNA, 25 bp, Homo sapien
ccagggacagcttggtcataagtaa

SEQ ID NO: 2175215 - DNA, 25 bp, Homo sapien
ctgaaccagaccctgaacagccata

SEQ ID NO: 2175216 - DNA, 25 bp, Homo sapien
tacagaaactcccgagtggtccctg

SEQ ID NO: 2175217 - DNA, 25 bp, Homo sapien
acagccataccagcccacgggaaga

SEQ ID NO: 2175218 - DNA, 25 bp, Homo sapien
gttagactaattagaaggcctgctt

SEQ ID NO: 2175219 - DNA, 25 bp, Homo sapien
tattgccaactcgtaaaattacatg

SEQ ID NO: 2175220 - DNA, 25 bp, Homo sapien
gaaagaattcagctacgacagttga

SEQ ID NO: 2175221 - DNA, 25 bp, Homo sapien
tgctattaggaagggactgttctgc

SEQ ID NO: 2175222 - DNA, 25 bp, Homo sapien
ctgcaccgtgattgtttcgtgatca

SEQ ID NO: 2175223 - DNA, 25 bp, Homo sapien
gtgatcatccatgcggacatttcgc

SEQ ID NO: 2175224 - DNA, 25 bp, Homo sapien
catgcggacatttcgcaccgtgatt

SEQ ID NO: 2175225 - DNA, 25 bp, Homo sapien
ccgtgattgtttcgtgatcgtccat

SEQ ID NO: 2175226 - DNA, 25 bp, Homo sapien
ctacatgacattgggccatttaaac

SEQ ID NO: 2175227 - DNA, 25 bp, Homo sapien
accaggtagcttgtgtcacttcaaa

SEQ ID NO: 2175228 - DNA, 25 bp, Homo sapien
tgcctggccaggtaaactattttaa

SEQ ID NO: 2175229 - DNA, 25 bp, Homo sapien
agtgattgctccatgtttatagctc

SEQ ID NO: 2175230 - DNA, 25 bp, Homo sapien
tatggaatgctgcatgaatctgcag

SEQ ID NO: 2175231 - DNA, 25 bp, Homo sapien
tagtatacctgctgccgaagtcagc

SEQ ID NO: 2175232 - DNA, 25 bp, Homo sapien
gcagatcttcctcgcgcagggggcc

SEQ ID NO: 2175233 - DNA, 25 bp, Homo sapien
gaatgctgcatgaatctgcagatct

SEQ ID NO: 2175234 - DNA, 25 bp, Homo sapien
agatgtccttatgccgtgaagaaga

SEQ ID NO: 2175235 - DNA, 25 bp, Homo sapien
ctgaaggtagacctccccatgatat

SEQ ID NO: 2175236 - DNA, 25 bp, Homo sapien
ggtagacctccccatgatattttct

SEQ ID NO: 2175237 - DNA, 25 bp, Homo sapien
gaaaagtggagatgtccttatgccg

SEQ ID NO: 2175238 - DNA, 25 bp, Homo sapien
taatcgctcgttgctgaaaatgcca

SEQ ID NO: 2175239 - DNA, 25 bp, Homo sapien
tagtttctaagctgccctcaagtgc

SEQ ID NO: 2175240 - DNA, 25 bp, Homo sapien
caaacaaagatgaacggctacagca

SEQ ID NO: 2175241 - DNA, 25 bp, Homo sapien
taaaattcctgcaactaatcgctcg

SEQ ID NO: 2175242 - DNA, 25 bp, Homo sapien
gttggtaaagttacacgctctcatg

SEQ ID NO: 2175243 - DNA, 25 bp, Homo sapien
gccatgccatggagacaggttatct

SEQ ID NO: 2175244 - DNA, 25 bp, Homo sapien
tacatccatgtaaacacctgcccag

SEQ ID NO: 2175245 - DNA, 25 bp, Homo sapien
caggttatcttctcgaggtcatagc

SEQ ID NO: 2175246 - DNA, 25 bp, Homo sapien
tctgtttcgaatggtgttggttagc

SEQ ID NO: 2175247 - DNA, 25 bp, Homo sapien
aatggtgttggttagccaattggct

SEQ ID NO: 2175248 - DNA, 25 bp, Homo sapien
gccaattggctttccacttcacata

SEQ ID NO: 2175249 - DNA, 25 bp, Homo sapien
tttggtgtctgtttcgaatggtgtt

SEQ ID NO: 2175250 - DNA, 25 bp, Homo sapien
tgtcgccgtcaccagctatcttggg

SEQ ID NO: 2175251 - DNA, 25 bp, Homo sapien
agtgtcgccgtcaccagctatcttg

SEQ ID NO: 2175252 - DNA, 25 bp, Homo sapien
tcgccgtcaccagctatcttgggca

SEQ ID NO: 2175253 - DNA, 25 bp, Homo sapien
gtgtcgccgtcaccagctatcttgg

SEQ ID NO: 2175254 - DNA, 25 bp, Homo sapien
gatgcttcacatcattcgccccgtt

SEQ ID NO: 2175255 - DNA, 25 bp, Homo sapien
gcggaaccaccgatgatgcttcaca

SEQ ID NO: 2175256 - DNA, 25 bp, Homo sapien
gttttctctgcggaacagcttccca

SEQ ID NO: 2175257 - DNA, 25 bp, Homo sapien
agcttcccagtccacggagcggaac

SEQ ID NO: 2175258 - DNA, 25 bp, Homo sapien
aaatgtgggacagcagaagaaataa

SEQ ID NO: 2175259 - DNA, 25 bp, Homo sapien
aattaaatgtgggacagcagaagaa

SEQ ID NO: 2175260 - DNA, 25 bp, Homo sapien
ttaaatgtgggacagcagaagaaat

SEQ ID NO: 2175261 - DNA, 25 bp, Homo sapien
taaatgtgggacagcagaagaaata

SEQ ID NO: 2175262 - DNA, 25 bp, Homo sapien
taaagaggaatacgtccacaaccat

SEQ ID NO: 2175263 - DNA, 25 bp, Homo sapien
ttaaagaggaatacgtccacaacca

SEQ ID NO: 2175264 - DNA, 25 bp, Homo sapien
catgtttcctaatcgccttgttctg

SEQ ID NO: 2175265 - DNA, 25 bp, Homo sapien
atgtttcctaatcgccttgttctgt

SEQ ID NO: 2175266 - DNA, 25 bp, Homo sapien
cttcatgtttcctaatcgccttgtt

SEQ ID NO: 2175267 - DNA, 25 bp, Homo sapien
tcatgtttcctaatcgccttgttct

SEQ ID NO: 2175268 - DNA, 25 bp, Homo sapien
gacagtaccaagatggtcgctgctg

SEQ ID NO: 2175269 - DNA, 25 bp, Homo sapien
gtaccaagatggtcgctgctggttc

SEQ ID NO: 2175270 - DNA, 25 bp, Homo sapien
tcagacagtaccaagatggtcgctg

SEQ ID NO: 2175271 - DNA, 25 bp, Homo sapien
ttagatcagacagtaccaagatggt

SEQ ID NO: 2175272 - DNA, 25 bp, Homo sapien
gataaatgccaaacgggttgtcatc

SEQ ID NO: 2175273 - DNA, 25 bp, Homo sapien
tgataaatgccaaacgggttgtcat

SEQ ID NO: 2175274 - DNA, 25 bp, Homo sapien
tgccaaacgggttgtcatcaaaaaa

SEQ ID NO: 2175275 - DNA, 25 bp, Homo sapien
aaatgccaaacgggttgtcatcaaa

SEQ ID NO: 2175276 - DNA, 25 bp, Homo sapien
tctgtacttgtaactgagactgggt

SEQ ID NO: 2175277 - DNA, 25 bp, Homo sapien
agactgggtagtctgcaaagctgac

SEQ ID NO: 2175278 - DNA, 25 bp, Homo sapien
ctgagactgggtagtctgcaaagct

SEQ ID NO: 2175279 - DNA, 25 bp, Homo sapien
gtctgtacttgtaactgagactggg

SEQ ID NO: 2175280 - DNA, 25 bp, Homo sapien
ttgccccaagaaaaccatttcttga

SEQ ID NO: 2175281 - DNA, 25 bp, Homo sapien
tgccccaagaaaaccatttcttgac

SEQ ID NO: 2175282 - DNA, 25 bp, Homo sapien
agctctttgccccaagaaaaccatt

SEQ ID NO: 2175283 - DNA, 25 bp, Homo sapien
gaagctctttgccccaagaaaacca

SEQ ID NO: 2175284 - DNA, 25 bp, Homo sapien
atgtccgtggcacaagttgtacttc

SEQ ID NO: 2175285 - DNA, 25 bp, Homo sapien
tttctcatattgatcaggacagata

SEQ ID NO: 2175286 - DNA, 25 bp, Homo sapien
ggcacaagttgtacttctgagattt

SEQ ID NO: 2175287 - DNA, 25 bp, Homo sapien
catattgatcaggacagatactcat

SEQ ID NO: 2175288 - DNA, 25 bp, Homo sapien
taagactaaacaagcgcagaagtga

SEQ ID NO: 2175289 - DNA, 25 bp, Homo sapien
ggttacagaaatgccgagtggacga

SEQ ID NO: 2175290 - DNA, 25 bp, Homo sapien
tcaaggttacagaaatgccgagtgg

SEQ ID NO: 2175291 - DNA, 25 bp, Homo sapien
tacagaaatgccgagtggacgaatg

SEQ ID NO: 2175292 - DNA, 25 bp, Homo sapien
ttttcaaggttacagaaatgccgag

SEQ ID NO: 2175293 - DNA, 25 bp, Homo sapien
gctaggtactcgggtgttccacaga

SEQ ID NO: 2175294 - DNA, 25 bp, Homo sapien
gggctaggtactcgggtgttccaca

SEQ ID NO: 2175295 - DNA, 25 bp, Homo sapien
ctaggtactcgggtgttccacagag

SEQ ID NO: 2175296 - DNA, 25 bp, Homo sapien
taggtactcgggtgttccacagagg

SEQ ID NO: 2175297 - DNA, 25 bp, Homo sapien
ctgactgcgtgaatgaatatgagat

SEQ ID NO: 2175298 - DNA, 25 bp, Homo sapien
cctgtctccttttgctcacctggct

SEQ ID NO: 2175299 - DNA, 25 bp, Homo sapien
tatgtcgagaccactggtctgggca

SEQ ID NO: 2175300 - DNA, 25 bp, Homo sapien
tgctatggagagatgctgactgcgt

SEQ ID NO: 2175301 - DNA, 25 bp, Homo sapien
agcgctcgtcatgccacgtccagaa

SEQ ID NO: 2175302 - DNA, 25 bp, Homo sapien
tgtagacgatctctttggagtgcag

SEQ ID NO: 2175303 - DNA, 25 bp, Homo sapien
gcacgtactccatgagcatgtagag

SEQ ID NO: 2175304 - DNA, 25 bp, Homo sapien
tccgtgagcttaatgtggccatccc

SEQ ID NO: 2175305 - DNA, 25 bp, Homo sapien
tagctacgactgaccagccaaggtg

SEQ ID NO: 2175306 - DNA, 25 bp, Homo sapien
taaatttcttcagggcgcaaggtgg

SEQ ID NO: 2175307 - DNA, 25 bp, Homo sapien
gcatgtagaatacgcaagccctgac

SEQ ID NO: 2175308 - DNA, 25 bp, Homo sapien
tgtcacaatgtagcagcaggtcacc

SEQ ID NO: 2175309 - DNA, 25 bp, Homo sapien
gcagcacttttccatccgcgaagct

SEQ ID NO: 2175310 - DNA, 25 bp, Homo sapien
ttccatccgcgaagctgatctgcag

SEQ ID NO: 2175311 - DNA, 25 bp, Homo sapien
ctcatctttagctgacagcagcact

SEQ ID NO: 2175312 - DNA, 25 bp, Homo sapien
tgacagcagcacttttccatccgcg

SEQ ID NO: 2175313 - DNA, 25 bp, Homo sapien
tccagagcccgccataaagctgggc

SEQ ID NO: 2175314 - DNA, 25 bp, Homo sapien
ctccagagcccgccataaagctggg

SEQ ID NO: 2175315 - DNA, 25 bp, Homo sapien
ccagagcccgccataaagctgggct

SEQ ID NO: 2175316 - DNA, 25 bp, Homo sapien
cagagcccgccataaagctgggctt

SEQ ID NO: 2175317 - DNA, 25 bp, Homo sapien
aatggggaccacactcaagtctgca

SEQ ID NO: 2175318 - DNA, 25 bp, Homo sapien
ctccatggagaaacgagcggtcatc

SEQ ID NO: 2175319 - DNA, 25 bp, Homo sapien
gcggtcatccaggaactagaaggat

SEQ ID NO: 2175320 - DNA, 25 bp, Homo sapien
ctagaaggatgtggcccggagtgga

SEQ ID NO: 2175321 - DNA, 25 bp, Homo sapien
caaataacagctcacattcgactgt

SEQ ID NO: 2175322 - DNA, 25 bp, Homo sapien
gaggagccggtgagctgtacgggca

SEQ ID NO: 2175323 - DNA, 25 bp, Homo sapien
tacgggcaaaggacaacccatgaag

SEQ ID NO: 2175324 - DNA, 25 bp, Homo sapien
actgtaaccagcactcggaggagcc

SEQ ID NO: 2175325 - DNA, 25 bp, Homo sapien
ttttccgggcagagatacttggttc

SEQ ID NO: 2175326 - DNA, 25 bp, Homo sapien
tgccgagagctatagatgcagaacc

SEQ ID NO: 2175327 - DNA, 25 bp, Homo sapien
tcaacggggtatctctcatccacag

SEQ ID NO: 2175328 - DNA, 25 bp, Homo sapien
gaagtgtgtgggctgcatctcaacg

SEQ ID NO: 2175329 - DNA, 25 bp, Homo sapien
ttgctcctgctttaggcggatgacg

SEQ ID NO: 2175330 - DNA, 25 bp, Homo sapien
attgtgtacgtgttgctcctgcttt

SEQ ID NO: 2175331 - DNA, 25 bp, Homo sapien
gttgctcctgctttaggcggatgac

SEQ ID NO: 2175332 - DNA, 25 bp, Homo sapien
tcaaagcagacagaagtggcatgct

SEQ ID NO: 2175333 - DNA, 25 bp, Homo sapien
tatcagcttaagtgcacagaagaca

SEQ ID NO: 2175334 - DNA, 25 bp, Homo sapien
catttaatggtgctggtagatcttc

SEQ ID NO: 2175335 - DNA, 25 bp, Homo sapien
ttccccgcttggtgttggaaggctc

SEQ ID NO: 2175336 - DNA, 25 bp, Homo sapien
tccatcccaggtcacacacttgccc

SEQ ID NO: 2175337 - DNA, 25 bp, Homo sapien
aagttctaaatgagcatcagaaaca

SEQ ID NO: 2175338 - DNA, 25 bp, Homo sapien
agttctaaatgagcatcagaaacac

SEQ ID NO: 2175339 - DNA, 25 bp, Homo sapien
gcccaccatcccacaacttccaaag

SEQ ID NO: 2175340 - DNA, 25 bp, Homo sapien
atgcgtccccatgcgtggctgactt

SEQ ID NO: 2175341 - DNA, 25 bp, Homo sapien
gcgtccccatgcgtggctgacttgt

SEQ ID NO: 2175342 - DNA, 25 bp, Homo sapien
gtccccatgcgtggctgacttgttt

SEQ ID NO: 2175343 - DNA, 25 bp, Homo sapien
gcatgcgtccccatgcgtggctgac

SEQ ID NO: 2175344 - DNA, 25 bp, Homo sapien
tggatgcctattctgccatcatggg

SEQ ID NO: 2175345 - DNA, 25 bp, Homo sapien
caaatgcatctaatgtgtttttggg

SEQ ID NO: 2175346 - DNA, 25 bp, Homo sapien
attgctgggaggcttcaaatgcatc

SEQ ID NO: 2175347 - DNA, 25 bp, Homo sapien
tgagtctcctggatgcctattctgc

SEQ ID NO: 2175348 - DNA, 25 bp, Homo sapien
ggatgcaagagcaccgagaactcga

SEQ ID NO: 2175349 - DNA, 25 bp, Homo sapien
gagaactcgaaacctctctgtcaag

SEQ ID NO: 2175350 - DNA, 25 bp, Homo sapien
gctccataaagcagcgcgtgtccgg

SEQ ID NO: 2175351 - DNA, 25 bp, Homo sapien
gttgggatattctgacccactcagg

SEQ ID NO: 2175352 - DNA, 25 bp, Homo sapien
agagcacaggcggtgtcaggacatg

SEQ ID NO: 2175353 - DNA, 25 bp, Homo sapien
agaggcacaagacgaagagcacagg

SEQ ID NO: 2175354 - DNA, 25 bp, Homo sapien
ggaaacggataaagcgtccgataca

SEQ ID NO: 2175355 - DNA, 25 bp, Homo sapien
caagaattacccatttcagaggcac

SEQ ID NO: 2175356 - DNA, 25 bp, Homo sapien
ctgccgtcctcgtccccacagcgcc

SEQ ID NO: 2175357 - DNA, 25 bp, Homo sapien
gccaccttgcgggagtcgctctccg

SEQ ID NO: 2175358 - DNA, 25 bp, Homo sapien
aggctgtacacaggcggctccggcg

SEQ ID NO: 2175359 - DNA, 25 bp, Homo sapien
agcgtgtcaaagtcctgcaggctgt

SEQ ID NO: 2175360 - DNA, 25 bp, Homo sapien
acggtggccagcgtgtcaaagtcct

SEQ ID NO: 2175361 - DNA, 25 bp, Homo sapien
ggagccgggcttcccgggacgcagc

SEQ ID NO: 2175362 - DNA, 25 bp, Homo sapien
agcgctcggggagccgggcttcccg

SEQ ID NO: 2175363 - DNA, 25 bp, Homo sapien
ggacgcactcaggtccggggcaccg

SEQ ID NO: 2175364 - DNA, 25 bp, Homo sapien
gggccaggccggagcgctcggggag

SEQ ID NO: 2175365 - DNA, 25 bp, Homo sapien
cctcctggtgcgcggtccggcgcgg

SEQ ID NO: 2175366 - DNA, 25 bp, Homo sapien
cccatgcgcgctctcgcctcctggt

SEQ ID NO: 2175367 - DNA, 25 bp, Homo sapien
cgcctcctggtgcgcggtccggcgc

SEQ ID NO: 2175368 - DNA, 25 bp, Homo sapien
catgcgcgctctcgcctcctggtgc

SEQ ID NO: 2175369 - DNA, 25 bp, Homo sapien
ctgacggagcgacggggacaatggc

SEQ ID NO: 2175370 - DNA, 25 bp, Homo sapien
gggacaatggctgggcggcgctcac

SEQ ID NO: 2175371 - DNA, 25 bp, Homo sapien
ggggacaatggctgggcggcgctca

SEQ ID NO: 2175372 - DNA, 25 bp, Homo sapien
gagcgacggggacaatggctgggcg

SEQ ID NO: 2175373 - DNA, 25 bp, Homo sapien
gcagcaacggccccgagtgggagca

SEQ ID NO: 2175374 - DNA, 25 bp, Homo sapien
agcagcaacggccccgagtgggagc

SEQ ID NO: 2175375 - DNA, 25 bp, Homo sapien
tcgcgcccgccgcctcctccagctc

SEQ ID NO: 2175376 - DNA, 25 bp, Homo sapien
ggtctcgcgcccgccgcctcctcca

SEQ ID NO: 2175377 - DNA, 25 bp, Homo sapien
tccgggtctcgcgcccgccgcctcc

SEQ ID NO: 2175378 - DNA, 25 bp, Homo sapien
gtctcgcgcccgccgcctcctccag

SEQ ID NO: 2175379 - DNA, 25 bp, Homo sapien
cagtccctcagtccgcaggtcaggg

SEQ ID NO: 2175380 - DNA, 25 bp, Homo sapien
tctcagcgattctgcgattggaggg

SEQ ID NO: 2175381 - DNA, 25 bp, Homo sapien
ccgaccacagtttgagcagcaaggg

SEQ ID NO: 2175382 - DNA, 25 bp, Homo sapien
aggctgccggttcgccgaccacagt

SEQ ID NO: 2175383 - DNA, 25 bp, Homo sapien
gactgtttgtgccatgtttggtctt

SEQ ID NO: 2175384 - DNA, 25 bp, Homo sapien
gggcggtcttcccacatgggactgt

SEQ ID NO: 2175385 - DNA, 25 bp, Homo sapien
ctaaaccacgtgcaaaaatgcaggc

SEQ ID NO: 2175386 - DNA, 25 bp, Homo sapien
gcaggcctggtgacttctgcccctt

SEQ ID NO: 2175387 - DNA, 25 bp, Homo sapien
agggactcatttccacgtgcctgtt

SEQ ID NO: 2175388 - DNA, 25 bp, Homo sapien
cagggtcaaagggactcatttccac

SEQ ID NO: 2175389 - DNA, 25 bp, Homo sapien
ggagatactttgagtacagggtcaa

SEQ ID NO: 2175390 - DNA, 25 bp, Homo sapien
cagcaaatggctggattccctgttt

SEQ ID NO: 2175391 - DNA, 25 bp, Homo sapien
aaaagtagacaaaatgtcagttctt

SEQ ID NO: 2175392 - DNA, 25 bp, Homo sapien
ttcctaaaagtagacaaaatgtcag

SEQ ID NO: 2175393 - DNA, 25 bp, Homo sapien
tttcctaaaagtagacaaaatgtca

SEQ ID NO: 2175394 - DNA, 25 bp, Homo sapien
cctaaaagtagacaaaatgtcagtt

SEQ ID NO: 2175395 - DNA, 25 bp, Homo sapien
ctgtagtgatgggactttttcagca

SEQ ID NO: 2175396 - DNA, 25 bp, Homo sapien
tgtcatgtgattgcgtcaagaagtc

SEQ ID NO: 2175397 - DNA, 25 bp, Homo sapien
tcagcaattttgatgtcatgtgatt

SEQ ID NO: 2175398 - DNA, 25 bp, Homo sapien
tagtgatgggactttttcagcaatt

SEQ ID NO: 2175399 - DNA, 25 bp, Homo sapien
ctgtttagtcctctcaggcactaat

SEQ ID NO: 2175400 - DNA, 25 bp, Homo sapien
tacaatgcagaatcggtcaccacat

SEQ ID NO: 2175401 - DNA, 25 bp, Homo sapien
tttttacaatgcagaatcggtcacc

SEQ ID NO: 2175402 - DNA, 25 bp, Homo sapien
ggcactaatttggacgtcatcttta

SEQ ID NO: 2175403 - DNA, 25 bp, Homo sapien
cagtgaaacatcaaggtttccattc

SEQ ID NO: 2175404 - DNA, 25 bp, Homo sapien
gtggttctgaaagcggcattcttct

SEQ ID NO: 2175405 - DNA, 25 bp, Homo sapien
gactgtcactgttaggcaaattagc

SEQ ID NO: 2175406 - DNA, 25 bp, Homo sapien
aggtttccattcaagtcgattctct

SEQ ID NO: 2175407 - DNA, 25 bp, Homo sapien
gggcaagcctctttggccagtgacc

SEQ ID NO: 2175408 - DNA, 25 bp, Homo sapien
acctcaccccagaattgcaagtccc

SEQ ID NO: 2175409 - DNA, 25 bp, Homo sapien
agaattgcaagtccccctgaaccca

SEQ ID NO: 2175410 - DNA, 25 bp, Homo sapien
ttcagagctgggcaagcctctttgg

SEQ ID NO: 2175411 - DNA, 25 bp, Homo sapien
tcgggggccgatagatactgcaatt

SEQ ID NO: 2175412 - DNA, 25 bp, Homo sapien
cacaatcaggcagcgtttcgggggc

SEQ ID NO: 2175413 - DNA, 25 bp, Homo sapien
ccatggagaaagaaggtttttcatt

SEQ ID NO: 2175414 - DNA, 25 bp, Homo sapien
tcaatgcatgcagtcgattagagga

SEQ ID NO: 2175415 - DNA, 25 bp, Homo sapien
agctcccaatgcaagctcaatattg

SEQ ID NO: 2175416 - DNA, 25 bp, Homo sapien
tattgattttatctggattgtggac

SEQ ID NO: 2175417 - DNA, 25 bp, Homo sapien
atctggattgtggactactgaatgc

SEQ ID NO: 2175418 - DNA, 25 bp, Homo sapien
tcccaatgcaagctcaatattgatt

SEQ ID NO: 2175419 - DNA, 25 bp, Homo sapien
aaacagcatggccacaaaggcttgc

SEQ ID NO: 2175420 - DNA, 25 bp, Homo sapien
acagcatggccacaaaggcttgctg

SEQ ID NO: 2175421 - DNA, 25 bp, Homo sapien
taaacagcatggccacaaaggcttg

SEQ ID NO: 2175422 - DNA, 25 bp, Homo sapien
aacagcatggccacaaaggcttgct

SEQ ID NO: 2175423 - DNA, 25 bp, Homo sapien
tgaggtcttctatgacttggtaagg

SEQ ID NO: 2175424 - DNA, 25 bp, Homo sapien
gaggtcttctatgacttggtaaggg

SEQ ID NO: 2175425 - DNA, 25 bp, Homo sapien
aggtcttctatgacttggtaagggt

SEQ ID NO: 2175426 - DNA, 25 bp, Homo sapien
ggtcttctatgacttggtaagggtc

SEQ ID NO: 2175427 - DNA, 25 bp, Homo sapien
gggacatccctgattatggacccgc

SEQ ID NO: 2175428 - DNA, 25 bp, Homo sapien
cctgattatggacccgcaagtggcc

SEQ ID NO: 2175429 - DNA, 25 bp, Homo sapien
cccgcaagtggccttttcagtggga

SEQ ID NO: 2175430 - DNA, 25 bp, Homo sapien
tatggacccgcaagtggccttttca

SEQ ID NO: 2175431 - DNA, 25 bp, Homo sapien
tgcgtctggttattaatatgatgcc

SEQ ID NO: 2175432 - DNA, 25 bp, Homo sapien
ttgaatgtgcgtctggttattaata

SEQ ID NO: 2175433 - DNA, 25 bp, Homo sapien
ggttattaatatgatgcctcagttc

SEQ ID NO: 2175434 - DNA, 25 bp, Homo sapien
tctggttattaatatgatgcctcag

SEQ ID NO: 2175435 - DNA, 25 bp, Homo sapien
ttatttgcagttgcaccaatacctt

SEQ ID NO: 2175436 - DNA, 25 bp, Homo sapien
aaggagtcagattgttaaatatggg

SEQ ID NO: 2175437 - DNA, 25 bp, Homo sapien
gccaatgttttggttaaattatatc

SEQ ID NO: 2175438 - DNA, 25 bp, Homo sapien
ccaatgttttggttaaattatatct

SEQ ID NO: 2175439 - DNA, 25 bp, Homo sapien
caatgttttggttaaattatatcta

SEQ ID NO: 2175440 - DNA, 25 bp, Homo sapien
ccataattatgggagaggcctccca

SEQ ID NO: 2175441 - DNA, 25 bp, Homo sapien
tgtgtgctatattcaatgagatttc

SEQ ID NO: 2175442 - DNA, 25 bp, Homo sapien
tcctcatcacgatacttattcttgt

SEQ ID NO: 2175443 - DNA, 25 bp, Homo sapien
catctgggctgcagcacgcatatgt

SEQ ID NO: 2175444 - DNA, 25 bp, Homo sapien
gctgtgcctaactgtaatctgtgat

SEQ ID NO: 2175445 - DNA, 25 bp, Homo sapien
aactgtgccctttgcagattggttg

SEQ ID NO: 2175446 - DNA, 25 bp, Homo sapien
gattggttgtgtgctcttgggttca

SEQ ID NO: 2175447 - DNA, 25 bp, Homo sapien
tcttgaggaaggactgtgccccaaa

SEQ ID NO: 2175448 - DNA, 25 bp, Homo sapien
ttcgctttacatccgaatctgacac

SEQ ID NO: 2175449 - DNA, 25 bp, Homo sapien
tgtccatctgtctgtagaaggtctg

SEQ ID NO: 2175450 - DNA, 25 bp, Homo sapien
tcagcatttcgctttacatccgaat

SEQ ID NO: 2175451 - DNA, 25 bp, Homo sapien
gtctgcgtgggagaggaaccaagcc

SEQ ID NO: 2175452 - DNA, 25 bp, Homo sapien
gcctcattcccattggcataattag

SEQ ID NO: 2175453 - DNA, 25 bp, Homo sapien
gcaactggcgaatgggtttctttgt

SEQ ID NO: 2175454 - DNA, 25 bp, Homo sapien
taattagcagaaaaatcttgcaact

SEQ ID NO: 2175455 - DNA, 25 bp, Homo sapien
tatgggcattcagtgactggcaaac

SEQ ID NO: 2175456 - DNA, 25 bp, Homo sapien
gaaagaataaagagttgtactattc

SEQ ID NO: 2175457 - DNA, 25 bp, Homo sapien
tactattcaaaatagtaacctgcat

SEQ ID NO: 2175458 - DNA, 25 bp, Homo sapien
ttgtactattcaaaatagtaacctg

SEQ ID NO: 2175459 - DNA, 25 bp, Homo sapien
taaagagttgtactattcaaaatag

SEQ ID NO: 2175460 - DNA, 25 bp, Homo sapien
tgtttttctctgccacacacctcca

SEQ ID NO: 2175461 - DNA, 25 bp, Homo sapien
ctgtttttctctgccacacacctcc

SEQ ID NO: 2175462 - DNA, 25 bp, Homo sapien
gtttttctctgccacacacctccat

SEQ ID NO: 2175463 - DNA, 25 bp, Homo sapien
tgaggtctgaatggcatttggatga

SEQ ID NO: 2175464 - DNA, 25 bp, Homo sapien
tcgaagggccccttgctccctgagg

SEQ ID NO: 2175465 - DNA, 25 bp, Homo sapien
agggccccttgctccctgaggtctg

SEQ ID NO: 2175466 - DNA, 25 bp, Homo sapien
ccccttgctccctgaggtctgaatg

SEQ ID NO: 2175467 - DNA, 25 bp, Homo sapien
catgactcttatcgtgtttagcagc

SEQ ID NO: 2175468 - DNA, 25 bp, Homo sapien
gcctctgaggttgtctacttcatca

SEQ ID NO: 2175469 - DNA, 25 bp, Homo sapien
cagctttcaagcgaccttcaggata

SEQ ID NO: 2175470 - DNA, 25 bp, Homo sapien
tccaacagccgagttgcctctgagg

SEQ ID NO: 2175471 - DNA, 25 bp, Homo sapien
agcggttggctatatctccactgaa

SEQ ID NO: 2175472 - DNA, 25 bp, Homo sapien
tgtcctgctggagtccaatgcagga

SEQ ID NO: 2175473 - DNA, 25 bp, Homo sapien
aatgcaggaacgagggagaaaattc

SEQ ID NO: 2175474 - DNA, 25 bp, Homo sapien
ctagagattccccattttctgtgaa

SEQ ID NO: 2175475 - DNA, 25 bp, Homo sapien
attgcaacaggcatcagagattttg

SEQ ID NO: 2175476 - DNA, 25 bp, Homo sapien
gcaacaggcatcagagattttgtat

SEQ ID NO: 2175477 - DNA, 25 bp, Homo sapien
gtatggacgtagatcaagtattgcc

SEQ ID NO: 2175478 - DNA, 25 bp, Homo sapien
caaattatatggtgtagacgtatgg

SEQ ID NO: 2175479 - DNA, 25 bp, Homo sapien
gactggagtcgatagtgcctttggt

SEQ ID NO: 2175480 - DNA, 25 bp, Homo sapien
ttgggagactggagtcgatagtgcc

SEQ ID NO: 2175481 - DNA, 25 bp, Homo sapien
tgagaattaacctgaagtgccggtt

SEQ ID NO: 2175482 - DNA, 25 bp, Homo sapien
cggtttctgaatgctcgatgcttct

SEQ ID NO: 2175483 - DNA, 25 bp, Homo sapien
ttagttggtcgtcaacaatctctgg

SEQ ID NO: 2175484 - DNA, 25 bp, Homo sapien
gatttagttggtcgtcaacaatctc

SEQ ID NO: 2175485 - DNA, 25 bp, Homo sapien
tagttggtcgtcaacaatctctggc

SEQ ID NO: 2175486 - DNA, 25 bp, Homo sapien
tttagttggtcgtcaacaatctctg

SEQ ID NO: 2175487 - DNA, 25 bp, Homo sapien
catccgaaattgagaaaccagagcc

SEQ ID NO: 2175488 - DNA, 25 bp, Homo sapien
aaaccaccaaacatacttgtcctag

SEQ ID NO: 2175489 - DNA, 25 bp, Homo sapien
ctttccagtgtgcatccgaaattga

SEQ ID NO: 2175490 - DNA, 25 bp, Homo sapien
caaacatacttgtcctaggttccat

SEQ ID NO: 2175491 - DNA, 25 bp, Homo sapien
ccatgtaagtaatgtctcttcattc

SEQ ID NO: 2175492 - DNA, 25 bp, Homo sapien
ttccatgtaagtaatgtctcttcat

SEQ ID NO: 2175493 - DNA, 25 bp, Homo sapien
ttttccatgtaagtaatgtctcttc

SEQ ID NO: 2175494 - DNA, 25 bp, Homo sapien
tttccatgtaagtaatgtctcttca

SEQ ID NO: 2175495 - DNA, 25 bp, Homo sapien
gcattcttcacttcacacatggtag

SEQ ID NO: 2175496 - DNA, 25 bp, Homo sapien
caaatccatcgggacaatccagacc

SEQ ID NO: 2175497 - DNA, 25 bp, Homo sapien
gtgctcttcggccactgcacggact

SEQ ID NO: 2175498 - DNA, 25 bp, Homo sapien
tgcagtgctcttcggccactgcacg

SEQ ID NO: 2175499 - DNA, 25 bp, Homo sapien
cagcaggatattctgtccatgttta

SEQ ID NO: 2175500 - DNA, 25 bp, Homo sapien
tttgtgtctatactgggacaggtga

SEQ ID NO: 2175501 - DNA, 25 bp, Homo sapien
aggaggtttggacccatcgatgcca

SEQ ID NO: 2175502 - DNA, 25 bp, Homo sapien
tagactagtcataaaacagcaggat

SEQ ID NO: 2175503 - DNA, 25 bp, Homo sapien
caggtgtcccaggggatgcagaaca

SEQ ID NO: 2175504 - DNA, 25 bp, Homo sapien
gatgtctgcaccgttgctattttct

SEQ ID NO: 2175505 - DNA, 25 bp, Homo sapien
tgtctgcaccgttgctattttctgc

SEQ ID NO: 2175506 - DNA, 25 bp, Homo sapien
tgagatgtctgcaccgttgctattt

SEQ ID NO: 2175507 - DNA, 25 bp, Homo sapien
tattcattggtgataagcacttcaa

SEQ ID NO: 2175508 - DNA, 25 bp, Homo sapien
gatttgaagatcagttttatgttcc

SEQ ID NO: 2175509 - DNA, 25 bp, Homo sapien
tttatgttccctcttcctgtattca

SEQ ID NO: 2175510 - DNA, 25 bp, Homo sapien
aatttttagcatcttctgaactggc

SEQ ID NO: 2175511 - DNA, 25 bp, Homo sapien
ggcaacatcaacgtacaccccatag

SEQ ID NO: 2175512 - DNA, 25 bp, Homo sapien
atgctaccctggcaacatcaacgta

SEQ ID NO: 2175513 - DNA, 25 bp, Homo sapien
catgtgggtgctctgttccatagaa

SEQ ID NO: 2175514 - DNA, 25 bp, Homo sapien
ctgtcacagaaacttgagtcttgcc

SEQ ID NO: 2175515 - DNA, 25 bp, Homo sapien
gcaagatatttactaccgcttggta

SEQ ID NO: 2175516 - DNA, 25 bp, Homo sapien
agatatttactaccgcttggtagac

SEQ ID NO: 2175517 - DNA, 25 bp, Homo sapien
tatttactaccgcttggtagacaca

SEQ ID NO: 2175518 - DNA, 25 bp, Homo sapien
aaagcaagatatttactaccgcttg

SEQ ID NO: 2175519 - DNA, 25 bp, Homo sapien
ggaacaatgacagccttcaagcagc

SEQ ID NO: 2175520 - DNA, 25 bp, Homo sapien
cagagtgtatttgtagactgcgggt

SEQ ID NO: 2175521 - DNA, 25 bp, Homo sapien
tattatttagttcttgggctctggt

SEQ ID NO: 2175522 - DNA, 25 bp, Homo sapien
gactgcgggtgaaaattggcttcca

SEQ ID NO: 2175523 - DNA, 25 bp, Homo sapien
tgccttctccagctagaacactaga

SEQ ID NO: 2175524 - DNA, 25 bp, Homo sapien
tgtagatgtagttacacgttttgcc

SEQ ID NO: 2175525 - DNA, 25 bp, Homo sapien
aacactagagggcataagaccagga

SEQ ID NO: 2175526 - DNA, 25 bp, Homo sapien
ttgactggcgccaacatgtgaggga

SEQ ID NO: 2175527 - DNA, 25 bp, Homo sapien
cactgcccctctatgggattttaaa

SEQ ID NO: 2175528 - DNA, 25 bp, Homo sapien
tatcaaagcattcacgatctcattt

SEQ ID NO: 2175529 - DNA, 25 bp, Homo sapien
ttcaaaactcactgcccctctatgg

SEQ ID NO: 2175530 - DNA, 25 bp, Homo sapien
aatcttccggtagaatatcaaagca

SEQ ID NO: 2175531 - DNA, 25 bp, Homo sapien
cagccgacactggcgggaccaccat

SEQ ID NO: 2175532 - DNA, 25 bp, Homo sapien
gaatggctgatagcagccgacactg

SEQ ID NO: 2175533 - DNA, 25 bp, Homo sapien
gcagccgacactggcgggaccacca

SEQ ID NO: 2175534 - DNA, 25 bp, Homo sapien
taccaagctgggagtctccacttaa

SEQ ID NO: 2175535 - DNA, 25 bp, Homo sapien
tacagagaaccacctgagtttacag

SEQ ID NO: 2175536 - DNA, 25 bp, Homo sapien
gtccttgacttattggcaactgcca

SEQ ID NO: 2175537 - DNA, 25 bp, Homo sapien
tacagcatttacagagaaccacctg

SEQ ID NO: 2175538 - DNA, 25 bp, Homo sapien
tctctactggcttcaaaggggactt

SEQ ID NO: 2175539 - DNA, 25 bp, Homo sapien
tctggaacctcagccattgagggtg

SEQ ID NO: 2175540 - DNA, 25 bp, Homo sapien
gcagtactcctagcatttgtttagt

SEQ ID NO: 2175541 - DNA, 25 bp, Homo sapien
ggaccaaatctcagtgtagttttcc

SEQ ID NO: 2175542 - DNA, 25 bp, Homo sapien
gcactaaagccagaatacctgggat

SEQ ID NO: 2175543 - DNA, 25 bp, Homo sapien
actaaagccagaatacctgggatgc

SEQ ID NO: 2175544 - DNA, 25 bp, Homo sapien
taaagccagaatacctgggatgcat

SEQ ID NO: 2175545 - DNA, 25 bp, Homo sapien
ttgcactaaagccagaatacctggg

SEQ ID NO: 2175546 - DNA, 25 bp, Homo sapien
aataagtttcataaattgcattcat

SEQ ID NO: 2175547 - DNA, 25 bp, Homo sapien
agaaaggagagcgacagaaacacag

SEQ ID NO: 2175548 - DNA, 25 bp, Homo sapien
agagaaaggagagcgacagaaacac

SEQ ID NO: 2175549 - DNA, 25 bp, Homo sapien
ggagagaaaggagagcgacagaaac

SEQ ID NO: 2175550 - DNA, 25 bp, Homo sapien
aaaggagagcgacagaaacacagac

SEQ ID NO: 2175551 - DNA, 25 bp, Homo sapien
tgtagacactcaggttgaggtgagc

SEQ ID NO: 2175552 - DNA, 25 bp, Homo sapien
ttgaggtgagcatgcaatgggcaca

SEQ ID NO: 2175553 - DNA, 25 bp, Homo sapien
ggaacatagaattgtagacactcag

SEQ ID NO: 2175554 - DNA, 25 bp, Homo sapien
cactcaggttgaggtgagcatgcaa

SEQ ID NO: 2175555 - DNA, 25 bp, Homo sapien
acagcgaaccagtttctgctgttgc

SEQ ID NO: 2175556 - DNA, 25 bp, Homo sapien
gttgctgtgattccactgatccttc

SEQ ID NO: 2175557 - DNA, 25 bp, Homo sapien
cattcagtaacttccaattgatacc

SEQ ID NO: 2175558 - DNA, 25 bp, Homo sapien
caattgataccaataactacagcga

SEQ ID NO: 2175559 - DNA, 25 bp, Homo sapien
gaaatctgcttgaatcataggtgct

SEQ ID NO: 2175560 - DNA, 25 bp, Homo sapien
cataggtgcttccattgagagtctc

SEQ ID NO: 2175561 - DNA, 25 bp, Homo sapien
tgctgcaaagaagtatccgataagg

SEQ ID NO: 2175562 - DNA, 25 bp, Homo sapien
aggagagggaagatgtcgaaccaac

SEQ ID NO: 2175563 - DNA, 25 bp, Homo sapien
attcatctgtggaaggactccaaga

SEQ ID NO: 2175564 - DNA, 25 bp, Homo sapien
atgacagctcggtacattgttttcc

SEQ ID NO: 2175565 - DNA, 25 bp, Homo sapien
agaatgacagctcggtacattgttt

SEQ ID NO: 2175566 - DNA, 25 bp, Homo sapien
tgacagctcggtacattgttttccc

SEQ ID NO: 2175567 - DNA, 25 bp, Homo sapien
aatgacagctcggtacattgttttc

SEQ ID NO: 2175568 - DNA, 25 bp, Homo sapien
ttaaatggtcactaaaacaactagc

SEQ ID NO: 2175569 - DNA, 25 bp, Homo sapien
cactaaaacaactagctttgtctct

SEQ ID NO: 2175570 - DNA, 25 bp, Homo sapien
atggtcactaaaacaactagctttg

SEQ ID NO: 2175571 - DNA, 25 bp, Homo sapien
aaacaactagctttgtctctttaat

SEQ ID NO: 2175572 - DNA, 25 bp, Homo sapien
cctctaacatttcaagcgatctgta

SEQ ID NO: 2175573 - DNA, 25 bp, Homo sapien
tttgagagtgagagatatcgccatc

SEQ ID NO: 2175574 - DNA, 25 bp, Homo sapien
tgcacatccagatccccttttgaga

SEQ ID NO: 2175575 - DNA, 25 bp, Homo sapien
tctccctcgttgatgattttcttgg

SEQ ID NO: 2175576 - DNA, 25 bp, Homo sapien
cgtgagtcccgtagtggtgccaata

SEQ ID NO: 2175577 - DNA, 25 bp, Homo sapien
tataacctccagctcagatgtaaag

SEQ ID NO: 2175578 - DNA, 25 bp, Homo sapien
ggtgccaatacacatctcaagcttg

SEQ ID NO: 2175579 - DNA, 25 bp, Homo sapien
cacatctcaagcttgtaggtggcca

SEQ ID NO: 2175580 - DNA, 25 bp, Homo sapien
tgtgcttaaattctggctcaatcat

SEQ ID NO: 2175581 - DNA, 25 bp, Homo sapien
acaagttccataaataagcgacgtt

SEQ ID NO: 2175582 - DNA, 25 bp, Homo sapien
ctttggtgtggtcacgtgaacatgg

SEQ ID NO: 2175583 - DNA, 25 bp, Homo sapien
agttccataaataagcgacgtttgg

SEQ ID NO: 2175584 - DNA, 25 bp, Homo sapien
tcccagaacttaaggtagtgagaga

SEQ ID NO: 2175585 - DNA, 25 bp, Homo sapien
aaagccatgtttctcgtatataaaa

SEQ ID NO: 2175586 - DNA, 25 bp, Homo sapien
ccagatgtctgaataaaagccatgt

SEQ ID NO: 2175587 - DNA, 25 bp, Homo sapien
tggatggaagatgcaaagttcccag

SEQ ID NO: 2175588 - DNA, 25 bp, Homo sapien
tttgcttcctctcacggtactttgt

SEQ ID NO: 2175589 - DNA, 25 bp, Homo sapien
ttgtttaccaagctgcagatattca

SEQ ID NO: 2175590 - DNA, 25 bp, Homo sapien
aatggtaactggctgtctatgtctt

SEQ ID NO: 2175591 - DNA, 25 bp, Homo sapien
tctcacggtactttgtttaccaagc

SEQ ID NO: 2175592 - DNA, 25 bp, Homo sapien
catctccttaccctgatgattatct

SEQ ID NO: 2175593 - DNA, 25 bp, Homo sapien
ccttaccctgatgattatcttcacg

SEQ ID NO: 2175594 - DNA, 25 bp, Homo sapien
taccctgatgattatcttcacgagg

SEQ ID NO: 2175595 - DNA, 25 bp, Homo sapien
gatgattatcttcacgaggtttcat

SEQ ID NO: 2175596 - DNA, 25 bp, Homo sapien
aatttgatcgttcacagcactgctg

SEQ ID NO: 2175597 - DNA, 25 bp, Homo sapien
tggcatctagccaagacctggacat

SEQ ID NO: 2175598 - DNA, 25 bp, Homo sapien
gttcattcaggtgcccagttgtgga

SEQ ID NO: 2175599 - DNA, 25 bp, Homo sapien
ctgccttgagttcattcaggtgccc

SEQ ID NO: 2175600 - DNA, 25 bp, Homo sapien
tgtcttgcttgtgcaaaccgtcttc

SEQ ID NO: 2175601 - DNA, 25 bp, Homo sapien
cctgcattcccctgcttgaaggatg

SEQ ID NO: 2175602 - DNA, 25 bp, Homo sapien
ccctttgtaagaagaagtgcaatta

SEQ ID NO: 2175603 - DNA, 25 bp, Homo sapien
caagctcacaagagtgtggctgaca

SEQ ID NO: 2175604 - DNA, 25 bp, Homo sapien
ctaacagtaggtggttaagtcactg

SEQ ID NO: 2175605 - DNA, 25 bp, Homo sapien
gtcaggctttgtggtgagcagttta

SEQ ID NO: 2175606 - DNA, 25 bp, Homo sapien
ggctttgtggtgagcagtttatatt

SEQ ID NO: 2175607 - DNA, 25 bp, Homo sapien
ttatttgtcaggctttgtggtgagc

SEQ ID NO: 2175608 - DNA, 25 bp, Homo sapien
tatttgtcaggctttgtggtgagca

SEQ ID NO: 2175609 - DNA, 25 bp, Homo sapien
ttgtcttcactgtaatttgctacag

SEQ ID NO: 2175610 - DNA, 25 bp, Homo sapien
ttcactgtaatttgctacagatgac

SEQ ID NO: 2175611 - DNA, 25 bp, Homo sapien
gctacagatgacacagattcacaca

SEQ ID NO: 2175612 - DNA, 25 bp, Homo sapien
cagatgacacagattcacacacaca

SEQ ID NO: 2175613 - DNA, 25 bp, Homo sapien
tctggtgggcaggtgtggatctcac

SEQ ID NO: 2175614 - DNA, 25 bp, Homo sapien
ataagacaaataaaacaaaatagtg

SEQ ID NO: 2175615 - DNA, 25 bp, Homo sapien
aggggatgcgatggcctggcctggg

SEQ ID NO: 2175616 - DNA, 25 bp, Homo sapien
tctctggtgggcaggtgtggatctc

SEQ ID NO: 2175617 - DNA, 25 bp, Homo sapien
ttttagtttcctgaatcagggcatg

SEQ ID NO: 2175618 - DNA, 25 bp, Homo sapien
tggggcaaatcctccagcctgatgt

SEQ ID NO: 2175619 - DNA, 25 bp, Homo sapien
tacggttttggatgatttgagaagc

SEQ ID NO: 2175620 - DNA, 25 bp, Homo sapien
agtttcctgaatcagggcatgttga

SEQ ID NO: 2175621 - DNA, 25 bp, Homo sapien
gcagcggctgcacacagacatgatg

SEQ ID NO: 2175622 - DNA, 25 bp, Homo sapien
gcggctgcacacagacatgatggct

SEQ ID NO: 2175623 - DNA, 25 bp, Homo sapien
cggctgcacacagacatgatggcta

SEQ ID NO: 2175624 - DNA, 25 bp, Homo sapien
cagcggctgcacacagacatgatgg

SEQ ID NO: 2175625 - DNA, 25 bp, Homo sapien
ttagacacactcagcaacgcctggg

SEQ ID NO: 2175626 - DNA, 25 bp, Homo sapien
cacactcagcaacgcctggggttgg

SEQ ID NO: 2175627 - DNA, 25 bp, Homo sapien
acctagcttggcgtggagaggaggg

SEQ ID NO: 2175628 - DNA, 25 bp, Homo sapien
ggaagattagacacactcagcaacg

SEQ ID NO: 2175629 - DNA, 25 bp, Homo sapien
gagagcgtaaagacacggagggaag

SEQ ID NO: 2175630 - DNA, 25 bp, Homo sapien
aaaagagagcgtaaagacacggagg

SEQ ID NO: 2175631 - DNA, 25 bp, Homo sapien
agagcgtaaagacacggagggaagg

SEQ ID NO: 2175632 - DNA, 25 bp, Homo sapien
agagaaaagagagcgtaaagacacg

SEQ ID NO: 2175633 - DNA, 25 bp, Homo sapien
gttcttgatgggaagtcactcctgg

SEQ ID NO: 2175634 - DNA, 25 bp, Homo sapien
tcatagttcttgatgggaagtcact

SEQ ID NO: 2175635 - DNA, 25 bp, Homo sapien
gtttgcaggtggaacaaaagtcttc

SEQ ID NO: 2175636 - DNA, 25 bp, Homo sapien
caaaagtcttcagttgcaggaaatc

SEQ ID NO: 2175637 - DNA, 25 bp, Homo sapien
aggtggctgaagaataattttttca

SEQ ID NO: 2175638 - DNA, 25 bp, Homo sapien
ggtggctgaagaataattttttcaa

SEQ ID NO: 2175639 - DNA, 25 bp, Homo sapien
gtggctgaagaataattttttcaaa

SEQ ID NO: 2175640 - DNA, 25 bp, Homo sapien
tggctgaagaataattttttcaaaa

SEQ ID NO: 2175641 - DNA, 25 bp, Homo sapien
taaagtagataatgccccggagaca

SEQ ID NO: 2175642 - DNA, 25 bp, Homo sapien
ttcttgcattggtacacagatggca

SEQ ID NO: 2175643 - DNA, 25 bp, Homo sapien
gcaactgcgtgtgccaagtgatctc

SEQ ID NO: 2175644 - DNA, 25 bp, Homo sapien
aagtgatctccttcccgcggtaaag

SEQ ID NO: 2175645 - DNA, 25 bp, Homo sapien
tatagacaccaggagctgaaccgac

SEQ ID NO: 2175646 - DNA, 25 bp, Homo sapien
gagcagaattgatccaatcctattg

SEQ ID NO: 2175647 - DNA, 25 bp, Homo sapien
tggtagtcgatacagcaagcttgca

SEQ ID NO: 2175648 - DNA, 25 bp, Homo sapien
aacaatttggaacagacagagcaga

SEQ ID NO: 2175649 - DNA, 25 bp, Homo sapien
ttctgagcaggttgacttcttcatc

SEQ ID NO: 2175650 - DNA, 25 bp, Homo sapien
tctgagcaggttgacttcttcatca

SEQ ID NO: 2175651 - DNA, 25 bp, Homo sapien
ctgagcaggttgacttcttcatcat

SEQ ID NO: 2175652 - DNA, 25 bp, Homo sapien
cttcaatcttgcaatactctcagtg

SEQ ID NO: 2175653 - DNA, 25 bp, Homo sapien
tctgaagacatgtacatcataattg

SEQ ID NO: 2175654 - DNA, 25 bp, Homo sapien
tgcaatactctcagtgttgcagtaa

SEQ ID NO: 2175655 - DNA, 25 bp, Homo sapien
cagtgttgcagtaattatatttcag

SEQ ID NO: 2175656 - DNA, 25 bp, Homo sapien
tcttcaacgtcaggcataagcaatg

SEQ ID NO: 2175657 - DNA, 25 bp, Homo sapien
gacagtgcctagtccaaggtttctg

SEQ ID NO: 2175658 - DNA, 25 bp, Homo sapien
tgcctatgctacctcaatcctgacg

SEQ ID NO: 2175659 - DNA, 25 bp, Homo sapien
tgacctctactaaggccatggaaac

SEQ ID NO: 2175660 - DNA, 25 bp, Homo sapien
ggctgcactttgctgtgatggtgcc

SEQ ID NO: 2175661 - DNA, 25 bp, Homo sapien
gctgcactttgctgtgatggtgcca

SEQ ID NO: 2175662 - DNA, 25 bp, Homo sapien
gcactttgctgtgatggtgccaatg

SEQ ID NO: 2175663 - DNA, 25 bp, Homo sapien
tgcactttgctgtgatggtgccaat

SEQ ID NO: 2175664 - DNA, 25 bp, Homo sapien
tttagtttcagacgcataactttcc

SEQ ID NO: 2175665 - DNA, 25 bp, Homo sapien
ataatttagtttcagacgcataact

SEQ ID NO: 2175666 - DNA, 25 bp, Homo sapien
tttcagacgcataactttccaatac

SEQ ID NO: 2175667 - DNA, 25 bp, Homo sapien
tagtttcagacgcataactttccaa

SEQ ID NO: 2175668 - DNA, 25 bp, Homo sapien
cttttataattaaattgccctgaag

SEQ ID NO: 2175669 - DNA, 25 bp, Homo sapien
aattgccctgaagaaagttcccagt

SEQ ID NO: 2175670 - DNA, 25 bp, Homo sapien
aaagttcccagtcacaatcttcatt

SEQ ID NO: 2175671 - DNA, 25 bp, Homo sapien
tctttgagggtttatatcttttata

SEQ ID NO: 2175672 - DNA, 25 bp, Homo sapien
tttgccaccgaaatatctctctccc

SEQ ID NO: 2175673 - DNA, 25 bp, Homo sapien
actcctgcgtattgaaatgagccag

SEQ ID NO: 2175674 - DNA, 25 bp, Homo sapien
gccaccgaaatatctctctcccctt

SEQ ID NO: 2175675 - DNA, 25 bp, Homo sapien
ttgactcctgcgtattgaaatgagc

SEQ ID NO: 2175676 - DNA, 25 bp, Homo sapien
cgttgttacagagggagtcactatg

SEQ ID NO: 2175677 - DNA, 25 bp, Homo sapien
cctcagtgtctacgttgttacagag

SEQ ID NO: 2175678 - DNA, 25 bp, Homo sapien
gtcactatgtttctcgctgtccgtc

SEQ ID NO: 2175679 - DNA, 25 bp, Homo sapien
gagggagtcactatgtttctcgctg

SEQ ID NO: 2175680 - DNA, 25 bp, Homo sapien
tgtaactgagttgatatggttaggc

SEQ ID NO: 2175681 - DNA, 25 bp, Homo sapien
gtatcatcaatgcaactaaattagt

SEQ ID NO: 2175682 - DNA, 25 bp, Homo sapien
tacacaattgagagctactatacct

SEQ ID NO: 2175683 - DNA, 25 bp, Homo sapien
taacagttattgctctagatgaaat

SEQ ID NO: 2175684 - DNA, 25 bp, Homo sapien
tgaggcgactctcaacatcagcaaa

SEQ ID NO: 2175685 - DNA, 25 bp, Homo sapien
tttgaggcgactctcaacatcagca

SEQ ID NO: 2175686 - DNA, 25 bp, Homo sapien
aacaagttttgaggcgactctcaac

SEQ ID NO: 2175687 - DNA, 25 bp, Homo sapien
aagttttgaggcgactctcaacatc

SEQ ID NO: 2175688 - DNA, 25 bp, Homo sapien
tttgtaggacattttgtcaccttct

SEQ ID NO: 2175689 - DNA, 25 bp, Homo sapien
tgtaggacattttgtcaccttctgc

SEQ ID NO: 2175690 - DNA, 25 bp, Homo sapien
taggacattttgtcaccttctgccc

SEQ ID NO: 2175691 - DNA, 25 bp, Homo sapien
gcccaaaggtatctgttcttctcat

SEQ ID NO: 2175692 - DNA, 25 bp, Homo sapien
gggccatgtgacctgtacagccagt

SEQ ID NO: 2175693 - DNA, 25 bp, Homo sapien
tctctgcctgatgtgtagacaggaa

SEQ ID NO: 2175694 - DNA, 25 bp, Homo sapien
gtgtatccactggtgaagggagtgg

SEQ ID NO: 2175695 - DNA, 25 bp, Homo sapien
ctctgcctgatgtgtagacaggaag

SEQ ID NO: 2175696 - DNA, 25 bp, Homo sapien
tgtatccactggtgaagggagtggt

SEQ ID NO: 2175697 - DNA, 25 bp, Homo sapien
ctcctgcgtggaatacatgtaaaat

SEQ ID NO: 2175698 - DNA, 25 bp, Homo sapien
tatttaaactctgagcacacgtgga

SEQ ID NO: 2175699 - DNA, 25 bp, Homo sapien
cacacgtggatctgtttgcgttttg

SEQ ID NO: 2175700 - DNA, 25 bp, Homo sapien
tcctttataagcttttgtataagca

SEQ ID NO: 2175701 - DNA, 25 bp, Homo sapien
tgacccaactgctgtctgagccaac

SEQ ID NO: 2175702 - DNA, 25 bp, Homo sapien
tggtaaaggattgagtccagctggc

SEQ ID NO: 2175703 - DNA, 25 bp, Homo sapien
tgctgtctgagccaactgtggctcc

SEQ ID NO: 2175704 - DNA, 25 bp, Homo sapien
gattgagtccagctggcgttctcca

SEQ ID NO: 2175705 - DNA, 25 bp, Homo sapien
gagaacagataatgtccttgaccaa

SEQ ID NO: 2175706 - DNA, 25 bp, Homo sapien
tttggataagaccagcacagtttga

SEQ ID NO: 2175707 - DNA, 25 bp, Homo sapien
tgtctgccgtaacctgagtcaggat

SEQ ID NO: 2175708 - DNA, 25 bp, Homo sapien
tctcagtgtgttttagttgtctgcc

SEQ ID NO: 2175709 - DNA, 25 bp, Homo sapien
atgacggtcttcaccctctctgagg

SEQ ID NO: 2175710 - DNA, 25 bp, Homo sapien
ggtcttcaccctctctgaggctgac

SEQ ID NO: 2175711 - DNA, 25 bp, Homo sapien
acggtcttcaccctctctgaggctg

SEQ ID NO: 2175712 - DNA, 25 bp, Homo sapien
tgacggtcttcaccctctctgaggc

SEQ ID NO: 2175713 - DNA, 25 bp, Homo sapien
agttcctttgcagatctggtgatca

SEQ ID NO: 2175714 - DNA, 25 bp, Homo sapien
gctctcacgctgacaacacccagtt

SEQ ID NO: 2175715 - DNA, 25 bp, Homo sapien
agatctggtgatcaaacccagcctt

SEQ ID NO: 2175716 - DNA, 25 bp, Homo sapien
tcttgctttcagagatgaagggcac

SEQ ID NO: 2175717 - DNA, 25 bp, Homo sapien
gagctcactcttgcagtaggactct

SEQ ID NO: 2175718 - DNA, 25 bp, Homo sapien
agagctcactcttgcagtaggactc

SEQ ID NO: 2175719 - DNA, 25 bp, Homo sapien
agctcactcttgcagtaggactctg

SEQ ID NO: 2175720 - DNA, 25 bp, Homo sapien
agtccatgaactgtgagaggcacaa

SEQ ID NO: 2175721 - DNA, 25 bp, Homo sapien
gggagccgtcatcaacagtgctttg

SEQ ID NO: 2175722 - DNA, 25 bp, Homo sapien
agaggcacaaaaagggtgttcacct

SEQ ID NO: 2175723 - DNA, 25 bp, Homo sapien
cagtgctttgcacccatcgtaggtt

SEQ ID NO: 2175724 - DNA, 25 bp, Homo sapien
cctcagggtcttccgctggtggtct

SEQ ID NO: 2175725 - DNA, 25 bp, Homo sapien
ctgccctcagggtcttccgctggtg

SEQ ID NO: 2175726 - DNA, 25 bp, Homo sapien
cactgctgccatggctcctgccctc

SEQ ID NO: 2175727 - DNA, 25 bp, Homo sapien
cagggtcttccgctggtggtctgac

SEQ ID NO: 2175728 - DNA, 25 bp, Homo sapien
tgtgtcgttctaagctttcatttgc

SEQ ID NO: 2175729 - DNA, 25 bp, Homo sapien
tctgcttgcattgtgtcgttctaag

SEQ ID NO: 2175730 - DNA, 25 bp, Homo sapien
ttcactaggtgtggcagcatcaggg

SEQ ID NO: 2175731 - DNA, 25 bp, Homo sapien
gagcaatcacaagccctggaggatc

SEQ ID NO: 2175732 - DNA, 25 bp, Homo sapien
caaatgtgtatcctgccattaatag

SEQ ID NO: 2175733 - DNA, 25 bp, Homo sapien
aatgtgtatcctgccattaatagtc

SEQ ID NO: 2175734 - DNA, 25 bp, Homo sapien
cttacaaatgtgtatcctgccatta

SEQ ID NO: 2175735 - DNA, 25 bp, Homo sapien
tgtgtatcctgccattaatagtcat

SEQ ID NO: 2175736 - DNA, 25 bp, Homo sapien
tgaatgccctgggatgacacgtcat

SEQ ID NO: 2175737 - DNA, 25 bp, Homo sapien
gacacgtcattgttagatccagaaa

SEQ ID NO: 2175738 - DNA, 25 bp, Homo sapien
gggtgggaaacttgacgatcgttca

SEQ ID NO: 2175739 - DNA, 25 bp, Homo sapien
tcagtgttcgtgaatgccctgggat

SEQ ID NO: 2175740 - DNA, 25 bp, Homo sapien
gaagtcagatggtgtcctaactccc

SEQ ID NO: 2175741 - DNA, 25 bp, Homo sapien
tggccttccaatcgaaaccgtctgc

SEQ ID NO: 2175742 - DNA, 25 bp, Homo sapien
tgagctgactcacaatgcagaagtc

SEQ ID NO: 2175743 - DNA, 25 bp, Homo sapien
ccttgcatgtcaggtgtacaccaga

SEQ ID NO: 2175744 - DNA, 25 bp, Homo sapien
ggttttagttctataatgtctgtta

SEQ ID NO: 2175745 - DNA, 25 bp, Homo sapien
gtcgctgttacattgaacaagaatc

SEQ ID NO: 2175746 - DNA, 25 bp, Homo sapien
ttaacaacttgatattgtcgctgtt

SEQ ID NO: 2175747 - DNA, 25 bp, Homo sapien
tctataatgtctgttaacaacttga

SEQ ID NO: 2175748 - DNA, 25 bp, Homo sapien
tcatacaggatggtcttcctaggaa

SEQ ID NO: 2175749 - DNA, 25 bp, Homo sapien
tggtcttcctaggaagcgcagacat

SEQ ID NO: 2175750 - DNA, 25 bp, Homo sapien
caggatggtcttcctaggaagcgca

SEQ ID NO: 2175751 - DNA, 25 bp, Homo sapien
tcatcatacaggatggtcttcctag

SEQ ID NO: 2175752 - DNA, 25 bp, Homo sapien
gaagaggatgctaccttcagtctct

SEQ ID NO: 2175753 - DNA, 25 bp, Homo sapien
aagaggatgctaccttcagtctctt

SEQ ID NO: 2175754 - DNA, 25 bp, Homo sapien
gtctcttccagaagaggatatgtac

SEQ ID NO: 2175755 - DNA, 25 bp, Homo sapien
ttgaagaggatgctaccttcagtct

SEQ ID NO: 2175756 - DNA, 25 bp, Homo sapien
atgagatagtggaggaactctgaaa

SEQ ID NO: 2175757 - DNA, 25 bp, Homo sapien
gagatgtagggttggggacacacac

SEQ ID NO: 2175758 - DNA, 25 bp, Homo sapien
caggaatatccagggagttggagat

SEQ ID NO: 2175759 - DNA, 25 bp, Homo sapien
gcaaaatgagatagtggaggaactc

SEQ ID NO: 2175760 - DNA, 25 bp, Homo sapien
ctcgttgtgaatgtcttgatgccaa

SEQ ID NO: 2175761 - DNA, 25 bp, Homo sapien
aatttctcgttgtgaatgtcttgat

SEQ ID NO: 2175762 - DNA, 25 bp, Homo sapien
tttctcgttgtgaatgtcttgatgc

SEQ ID NO: 2175763 - DNA, 25 bp, Homo sapien
caaatttctcgttgtgaatgtcttg

SEQ ID NO: 2175764 - DNA, 25 bp, Homo sapien
ttcctaaatggacaagcagagtcct

SEQ ID NO: 2175765 - DNA, 25 bp, Homo sapien
taaatggacaagcagagtccttttc

SEQ ID NO: 2175766 - DNA, 25 bp, Homo sapien
gaagggtttcctaaatggacaagca

SEQ ID NO: 2175767 - DNA, 25 bp, Homo sapien
tgagagacagccatccacaaaaata

SEQ ID NO: 2175768 - DNA, 25 bp, Homo sapien
cagcctcattgattggagatgtggc

SEQ ID NO: 2175769 - DNA, 25 bp, Homo sapien
gaaagtttccaagctgttccacatt

SEQ ID NO: 2175770 - DNA, 25 bp, Homo sapien
ggtaaaacatggctatgctgcttgg

SEQ ID NO: 2175771 - DNA, 25 bp, Homo sapien
gcattcctttctcgtgcatgaataa

SEQ ID NO: 2175772 - DNA, 25 bp, Homo sapien
tttgcttcccatcctcgaggtgcac

SEQ ID NO: 2175773 - DNA, 25 bp, Homo sapien
ttgcttcccatcctcgaggtgcaca

SEQ ID NO: 2175774 - DNA, 25 bp, Homo sapien
gtgtccatgtggtgatatgtggcag

SEQ ID NO: 2175775 - DNA, 25 bp, Homo sapien
tttttaggcaccatgcatctggaga

SEQ ID NO: 2175776 - DNA, 25 bp, Homo sapien
catctggagacccactcatatggct

SEQ ID NO: 2175777 - DNA, 25 bp, Homo sapien
tgtgttgctttccatcgccccttgt

SEQ ID NO: 2175778 - DNA, 25 bp, Homo sapien
gaaatacaattgagcctccgcaatg

SEQ ID NO: 2175779 - DNA, 25 bp, Homo sapien
aaaacgaatgcttttggtcaccagg

SEQ ID NO: 2175780 - DNA, 25 bp, Homo sapien
tcaagaaaaacgaatgcttttggtc

SEQ ID NO: 2175781 - DNA, 25 bp, Homo sapien
ctgtgaagtgatggcagtaatttac

SEQ ID NO: 2175782 - DNA, 25 bp, Homo sapien
tcttttaagtaatagctgtgaagtg

SEQ ID NO: 2175783 - DNA, 25 bp, Homo sapien
ttttgttcgttggtcatagttgttg

SEQ ID NO: 2175784 - DNA, 25 bp, Homo sapien
ttagacagcgtgaattctgtacttt

SEQ ID NO: 2175785 - DNA, 25 bp, Homo sapien
cttgttttgttcgttggtcatagtt

SEQ ID NO: 2175786 - DNA, 25 bp, Homo sapien
tgttcgttggtcatagttgttgttt

SEQ ID NO: 2175787 - DNA, 25 bp, Homo sapien
tgataggttcccatccaaggtctgg

SEQ ID NO: 2175788 - DNA, 25 bp, Homo sapien
catctttgataggttcccatccaag

SEQ ID NO: 2175789 - DNA, 25 bp, Homo sapien
acctaggaggtacatctttgatagg

SEQ ID NO: 2175790 - DNA, 25 bp, Homo sapien
ggttcccatccaaggtctggtgagt

SEQ ID NO: 2175791 - DNA, 25 bp, Homo sapien
tcttctccttctgcatgaagtgtag

SEQ ID NO: 2175792 - DNA, 25 bp, Homo sapien
tcattttcatgctctgttgctttag

SEQ ID NO: 2175793 - DNA, 25 bp, Homo sapien
catgctctgttgctttagatcttga

SEQ ID NO: 2175794 - DNA, 25 bp, Homo sapien
tgcacagggtccattaggtttcttc

SEQ ID NO: 2175795 - DNA, 25 bp, Homo sapien
attcctggggatctctgatgtttca

SEQ ID NO: 2175796 - DNA, 25 bp, Homo sapien
ctcttcagagggattttgacttcca

SEQ ID NO: 2175797 - DNA, 25 bp, Homo sapien
caacaccagattcctggggatctct

SEQ ID NO: 2175798 - DNA, 25 bp, Homo sapien
tctgatgtttcaggctcttcagagg

SEQ ID NO: 2175799 - DNA, 25 bp, Homo sapien
cctcatttctatgcttggtgttctt

SEQ ID NO: 2175800 - DNA, 25 bp, Homo sapien
aggttttgttagcttatgatctaca

SEQ ID NO: 2175801 - DNA, 25 bp, Homo sapien
ggttttgttagcttatgatctacat

SEQ ID NO: 2175802 - DNA, 25 bp, Homo sapien
gaaattttgatgtagcacccttctt

SEQ ID NO: 2175803 - DNA, 25 bp, Homo sapien
tttagcctgtgccaaaacgttgcat

SEQ ID NO: 2175804 - DNA, 25 bp, Homo sapien
tcccagtcggtacatgaaaatgcat

SEQ ID NO: 2175805 - DNA, 25 bp, Homo sapien
tttcctgtgaaactaccgtattagc

SEQ ID NO: 2175806 - DNA, 25 bp, Homo sapien
actaaattctgtgcactcaacacat

SEQ ID NO: 2175807 - DNA, 25 bp, Homo sapien
tggggatgaccggcagcaacaaatt

SEQ ID NO: 2175808 - DNA, 25 bp, Homo sapien
gggatgaccggcagcaacaaattgc

SEQ ID NO: 2175809 - DNA, 25 bp, Homo sapien
ggggatgaccggcagcaacaaattg

SEQ ID NO: 2175810 - DNA, 25 bp, Homo sapien
cagtgagggctggtgtatactgata

SEQ ID NO: 2175811 - DNA, 25 bp, Homo sapien
ttattatgagcatgattgtccacgg

SEQ ID NO: 2175812 - DNA, 25 bp, Homo sapien
tgagcatgattgtccacggtttctc

SEQ ID NO: 2175813 - DNA, 25 bp, Homo sapien
agcaaattgtcggactgggtattat

SEQ ID NO: 2175814 - DNA, 25 bp, Homo sapien
aaggtcaaatatccatccaaactga

SEQ ID NO: 2175815 - DNA, 25 bp, Homo sapien
aaacaacagaatgtcacgtaaaact

SEQ ID NO: 2175816 - DNA, 25 bp, Homo sapien
cagaatgtcacgtaaaactcatcac

SEQ ID NO: 2175817 - DNA, 25 bp, Homo sapien
ctgccaaccagggtattataagact

SEQ ID NO: 2175818 - DNA, 25 bp, Homo sapien
acgatgaacaattggtccattacac

SEQ ID NO: 2175819 - DNA, 25 bp, Homo sapien
cgatgaacaattggtccattacaca

SEQ ID NO: 2175820 - DNA, 25 bp, Homo sapien
ctacgatgaacaattggtccattac

SEQ ID NO: 2175821 - DNA, 25 bp, Homo sapien
tacgatgaacaattggtccattaca

SEQ ID NO: 2175822 - DNA, 25 bp, Homo sapien
tgatggaaaaactatcgttgtactt

SEQ ID NO: 2175823 - DNA, 25 bp, Homo sapien
atggaaaaactatcgttgtacttca

SEQ ID NO: 2175824 - DNA, 25 bp, Homo sapien
gatggaaaaactatcgttgtacttc

SEQ ID NO: 2175825 - DNA, 25 bp, Homo sapien
tggaaaaactatcgttgtacttcaa

SEQ ID NO: 2175826 - DNA, 25 bp, Homo sapien
ctcagagaaaaagcactccagcttc

SEQ ID NO: 2175827 - DNA, 25 bp, Homo sapien
agaaaaagcactccagcttcaccat

SEQ ID NO: 2175828 - DNA, 25 bp, Homo sapien
cagagaaaaagcactccagcttcac

SEQ ID NO: 2175829 - DNA, 25 bp, Homo sapien
acacccaaagctgagattctttttt

SEQ ID NO: 2175830 - DNA, 25 bp, Homo sapien
gctgcttggtgaaagaatttcagta

SEQ ID NO: 2175831 - DNA, 25 bp, Homo sapien
cagagaatatgaaggcatgaagatc

SEQ ID NO: 2175832 - DNA, 25 bp, Homo sapien
tccagaatgtatttgcataagatgt

SEQ ID NO: 2175833 - DNA, 25 bp, Homo sapien
aagacagagtccagtgattgacaca

SEQ ID NO: 2175834 - DNA, 25 bp, Homo sapien
ttcaaccagataccacaaatgtctg

SEQ ID NO: 2175835 - DNA, 25 bp, Homo sapien
ggcaatttcaaccagataccacaaa

SEQ ID NO: 2175836 - DNA, 25 bp, Homo sapien
ttctgcagttggcaatttcaaccag

SEQ ID NO: 2175837 - DNA, 25 bp, Homo sapien
cagttggcaatttcaaccagatacc

SEQ ID NO: 2175838 - DNA, 25 bp, Homo sapien
cctgcatcaccatctataatctttg

SEQ ID NO: 2175839 - DNA, 25 bp, Homo sapien
gagtcctgctttgattgtccttttc

SEQ ID NO: 2175840 - DNA, 25 bp, Homo sapien
cagaatggaatagctttatctcctc

SEQ ID NO: 2175841 - DNA, 25 bp, Homo sapien
taccgtagcctcagtaatttctctg

SEQ ID NO: 2175842 - DNA, 25 bp, Homo sapien
tttgcataaccatgctccctcttca

SEQ ID NO: 2175843 - DNA, 25 bp, Homo sapien
catgacctgtgttcatggtaaactt

SEQ ID NO: 2175844 - DNA, 25 bp, Homo sapien
gaactatgttcatgacctgtgttca

SEQ ID NO: 2175845 - DNA, 25 bp, Homo sapien
tggtaaactttgcataaccatgctc

SEQ ID NO: 2175846 - DNA, 25 bp, Homo sapien
tcatccatgaagtgtagtgtagtat

SEQ ID NO: 2175847 - DNA, 25 bp, Homo sapien
gctgctgtaggtacttcaaggaaga

SEQ ID NO: 2175848 - DNA, 25 bp, Homo sapien
gcatctgttagggttttgccaacta

SEQ ID NO: 2175849 - DNA, 25 bp, Homo sapien
cctcatcaatttaggttggcatctg

SEQ ID NO: 2175850 - DNA, 25 bp, Homo sapien
gccgttgcctagtgttagtgttgca

SEQ ID NO: 2175851 - DNA, 25 bp, Homo sapien
caagaatcgttttcctaacaggagc

SEQ ID NO: 2175852 - DNA, 25 bp, Homo sapien
taggaatgcactgaaatgccgttgc

SEQ ID NO: 2175853 - DNA, 25 bp, Homo sapien
tacacacgtctgtgtgagattctgg

SEQ ID NO: 2175854 - DNA, 25 bp, Homo sapien
ggcagccgctaaggcatactggcct

SEQ ID NO: 2175855 - DNA, 25 bp, Homo sapien
agctgcacaggcagccgctaaggca

SEQ ID NO: 2175856 - DNA, 25 bp, Homo sapien
cacaggcagccgctaaggcatactg

SEQ ID NO: 2175857 - DNA, 25 bp, Homo sapien
gctgcacaggcagccgctaaggcat

SEQ ID NO: 2175858 - DNA, 25 bp, Homo sapien
agagatccaccccagttattaaact

SEQ ID NO: 2175859 - DNA, 25 bp, Homo sapien
gacagagatccaccccagttattaa

SEQ ID NO: 2175860 - DNA, 25 bp, Homo sapien
cagagatccaccccagttattaaac

SEQ ID NO: 2175861 - DNA, 25 bp, Homo sapien
acagagatccaccccagttattaaa

SEQ ID NO: 2175862 - DNA, 25 bp, Homo sapien
aaggaagcaatgtaaccttgctttt

SEQ ID NO: 2175863 - DNA, 25 bp, Homo sapien
cgaaggaagcaatgtaaccttgctt

SEQ ID NO: 2175864 - DNA, 25 bp, Homo sapien
tccgaaggaagcaatgtaaccttgc

SEQ ID NO: 2175865 - DNA, 25 bp, Homo sapien
ctccgaaggaagcaatgtaaccttg

SEQ ID NO: 2175866 - DNA, 25 bp, Homo sapien
ccatggctttaaaattagctaaaat

SEQ ID NO: 2175867 - DNA, 25 bp, Homo sapien
catggctttaaaattagctaaaatc

SEQ ID NO: 2175868 - DNA, 25 bp, Homo sapien
ctaatcagaatccatggctttaaaa

SEQ ID NO: 2175869 - DNA, 25 bp, Homo sapien
cagaatccatggctttaaaattagc

SEQ ID NO: 2175870 - DNA, 25 bp, Homo sapien
cgcatatgttggtctgaataatagt

SEQ ID NO: 2175871 - DNA, 25 bp, Homo sapien
ttcagattgtgagacacgtacataa

SEQ ID NO: 2175872 - DNA, 25 bp, Homo sapien
cctcaaacactccttcggcttataa

SEQ ID NO: 2175873 - DNA, 25 bp, Homo sapien
gtctgaataatagttgatctttcag

SEQ ID NO: 2175874 - DNA, 25 bp, Homo sapien
ctcagatgcgccatcagtcaagaaa

SEQ ID NO: 2175875 - DNA, 25 bp, Homo sapien
tctgcctcagatgcgccatcagtca

SEQ ID NO: 2175876 - DNA, 25 bp, Homo sapien
gccagactgggacagcgcagtgcat

SEQ ID NO: 2175877 - DNA, 25 bp, Homo sapien
cagactgggacagcgcagtgcatat

SEQ ID NO: 2175878 - DNA, 25 bp, Homo sapien
ggtggagaactcagaaacctcaggg

SEQ ID NO: 2175879 - DNA, 25 bp, Homo sapien
tggagaactcagaaacctcagggag

SEQ ID NO: 2175880 - DNA, 25 bp, Homo sapien
ctggtggagaactcagaaacctcag

SEQ ID NO: 2175881 - DNA, 25 bp, Homo sapien
tggtggagaactcagaaacctcagg

SEQ ID NO: 2175882 - DNA, 25 bp, Homo sapien
aaattcaattggcatttagagattg

SEQ ID NO: 2175883 - DNA, 25 bp, Homo sapien
ctgggaaattcaattggcatttaga

SEQ ID NO: 2175884 - DNA, 25 bp, Homo sapien
tcaattggcatttagagattgaaga

SEQ ID NO: 2175885 - DNA, 25 bp, Homo sapien
gggaaattcaattggcatttagaga

SEQ ID NO: 2175886 - DNA, 25 bp, Homo sapien
ggacatggaacatcaactcgacacc

SEQ ID NO: 2175887 - DNA, 25 bp, Homo sapien
acccgtaagtgttgctctagccaaa

SEQ ID NO: 2175888 - DNA, 25 bp, Homo sapien
tatacgaagtgcctgacagcaaaaa

SEQ ID NO: 2175889 - DNA, 25 bp, Homo sapien
ggtatcaggtctttatacgaagtgc

SEQ ID NO: 2175890 - DNA, 25 bp, Homo sapien
agtgcatcagaagtgcactttttaa

SEQ ID NO: 2175891 - DNA, 25 bp, Homo sapien
gcagctcgcaactgggaggaatagc

SEQ ID NO: 2175892 - DNA, 25 bp, Homo sapien
gatgcagtgagaagtgcatcagaag

SEQ ID NO: 2175893 - DNA, 25 bp, Homo sapien
gaaaatctgagggaccattctgatg

SEQ ID NO: 2175894 - DNA, 25 bp, Homo sapien
tcttcaaaccagttttgtcccacaa

SEQ ID NO: 2175895 - DNA, 25 bp, Homo sapien
tggtgacagtaggtggccattgcac

SEQ ID NO: 2175896 - DNA, 25 bp, Homo sapien
ccctgcttaagaacatctccaatgt

SEQ ID NO: 2175897 - DNA, 25 bp, Homo sapien
gaacttgaagtgaagtccagtccca

SEQ ID NO: 2175898 - DNA, 25 bp, Homo sapien
ccctgtggtttcttaatgcggatga

SEQ ID NO: 2175899 - DNA, 25 bp, Homo sapien
caaataaccgtaccaactgctcaga

SEQ ID NO: 2175900 - DNA, 25 bp, Homo sapien
tactaggttgcaaccacaattcggg

SEQ ID NO: 2175901 - DNA, 25 bp, Homo sapien
tgaatccttcaactctttccgagag

SEQ ID NO: 2175902 - DNA, 25 bp, Homo sapien
tttctggagcttcctagagcatgca

SEQ ID NO: 2175903 - DNA, 25 bp, Homo sapien
tctactgatggagtcactgagcact

SEQ ID NO: 2175904 - DNA, 25 bp, Homo sapien
tatccagattccttgcaatgcacaa

SEQ ID NO: 2175905 - DNA, 25 bp, Homo sapien
tagcatacggatgcccttttgtcct

SEQ ID NO: 2175906 - DNA, 25 bp, Homo sapien
gtttacgctgactatctacatatgt

SEQ ID NO: 2175907 - DNA, 25 bp, Homo sapien
taactggctacccatgacgtaatgt

SEQ ID NO: 2175908 - DNA, 25 bp, Homo sapien
gaccaagaagtttacgctgactatc

SEQ ID NO: 2175909 - DNA, 25 bp, Homo sapien
catgacgtaatgtgaccaagaagtt

SEQ ID NO: 2175910 - DNA, 25 bp, Homo sapien
accaaatacatataattgagagccg

SEQ ID NO: 2175911 - DNA, 25 bp, Homo sapien
gccgttggatgctaccgaggaatag

SEQ ID NO: 2175912 - DNA, 25 bp, Homo sapien
gctgatcaatgaaggaaccaaatac

SEQ ID NO: 2175913 - DNA, 25 bp, Homo sapien
tactggaaacgctgatcaatgaagg

SEQ ID NO: 2175914 - DNA, 25 bp, Homo sapien
cagacaaatcatttcacgttgctgc

SEQ ID NO: 2175915 - DNA, 25 bp, Homo sapien
tgcctcctgttttgactcaatttcc

SEQ ID NO: 2175916 - DNA, 25 bp, Homo sapien
aatcatttcacgttgctgcctcctg

SEQ ID NO: 2175917 - DNA, 25 bp, Homo sapien
tattacaccctctttcagacaaatc

SEQ ID NO: 2175918 - DNA, 25 bp, Homo sapien
tattcgtagcagaatcaaacgcagc

SEQ ID NO: 2175919 - DNA, 25 bp, Homo sapien
caaacgcagctgcatgtacaacgaa

SEQ ID NO: 2175920 - DNA, 25 bp, Homo sapien
ccacaggaatcatgagtgttggaaa

SEQ ID NO: 2175921 - DNA, 25 bp, Homo sapien
tattgttttattcgtagcagaatca

SEQ ID NO: 2175922 - DNA, 25 bp, Homo sapien
tggtatctgtgaggattcgtaaccc

SEQ ID NO: 2175923 - DNA, 25 bp, Homo sapien
tctgtgaggattcgtaacccaaatg

SEQ ID NO: 2175924 - DNA, 25 bp, Homo sapien
gaggattcgtaacccaaatgaatca

SEQ ID NO: 2175925 - DNA, 25 bp, Homo sapien
ctatttggtatctgtgaggattcgt

SEQ ID NO: 2175926 - DNA, 25 bp, Homo sapien
ccactggaagtgtgcaaatagcaat

SEQ ID NO: 2175927 - DNA, 25 bp, Homo sapien
ggtccattgttcctcgtagccccaa

SEQ ID NO: 2175928 - DNA, 25 bp, Homo sapien
gaaatggagaaactcagactggacg

SEQ ID NO: 2175929 - DNA, 25 bp, Homo sapien
gcagtactccttcttcgctcaagca

SEQ ID NO: 2175930 - DNA, 25 bp, Homo sapien
gaatgatgttactaattcacaatgc

SEQ ID NO: 2175931 - DNA, 25 bp, Homo sapien
tgtgtttaaggcataaggtaacaac

SEQ ID NO: 2175932 - DNA, 25 bp, Homo sapien
ggtaacaacaattctgtgaatgatg

SEQ ID NO: 2175933 - DNA, 25 bp, Homo sapien
gcttaggctgtttaacccgctccat

SEQ ID NO: 2175934 - DNA, 25 bp, Homo sapien
attccttcagtgattgaggaaggct

SEQ ID NO: 2175935 - DNA, 25 bp, Homo sapien
ccttcagtgattgaggaaggctcat

SEQ ID NO: 2175936 - DNA, 25 bp, Homo sapien
tccttcagtgattgaggaaggctca

SEQ ID NO: 2175937 - DNA, 25 bp, Homo sapien
ttccttcagtgattgaggaaggctc

SEQ ID NO: 2175938 - DNA, 25 bp, Homo sapien
gttgctgagcatttgacttgtctga

SEQ ID NO: 2175939 - DNA, 25 bp, Homo sapien
tgtctgaagtggtacttaaacccaa

SEQ ID NO: 2175940 - DNA, 25 bp, Homo sapien
tgagcatttgacttgtctgaagtgg

SEQ ID NO: 2175941 - DNA, 25 bp, Homo sapien
tgacttgtctgaagtggtacttaaa

SEQ ID NO: 2175942 - DNA, 25 bp, Homo sapien
ttttctccagccgatccccatcagc

SEQ ID NO: 2175943 - DNA, 25 bp, Homo sapien
tgtggcaccacggacagggtcacaa

SEQ ID NO: 2175944 - DNA, 25 bp, Homo sapien
tcgactcttcccaggttaaccaggc

SEQ ID NO: 2175945 - DNA, 25 bp, Homo sapien
tcacaatttttcgactcttcccagg

SEQ ID NO: 2175946 - DNA, 25 bp, Homo sapien
gatcttctactagggcttgatcatt

SEQ ID NO: 2175947 - DNA, 25 bp, Homo sapien
gggatcttctactagggcttgatca

SEQ ID NO: 2175948 - DNA, 25 bp, Homo sapien
ttgggatcttctactagggcttgat

SEQ ID NO: 2175949 - DNA, 25 bp, Homo sapien
ttcctcacccacttgggatcttcta

SEQ ID NO: 2175950 - DNA, 25 bp, Homo sapien
aaagtagatgtttgtaaagggctgg

SEQ ID NO: 2175951 - DNA, 25 bp, Homo sapien
cactcacttccattctttgatttaa

SEQ ID NO: 2175952 - DNA, 25 bp, Homo sapien
cagggttggcttgactatactaatt

SEQ ID NO: 2175953 - DNA, 25 bp, Homo sapien
gggtttcaggatcaattcactcact

SEQ ID NO: 2175954 - DNA, 25 bp, Homo sapien
tacgaacgctgcacaattggtgaag

SEQ ID NO: 2175955 - DNA, 25 bp, Homo sapien
tgcagagttcctgacgttggagcac

SEQ ID NO: 2175956 - DNA, 25 bp, Homo sapien
tgtggtcccgctctatgagaagtgt

SEQ ID NO: 2175957 - DNA, 25 bp, Homo sapien
cacgatgtccagctctagaaagatg

SEQ ID NO: 2175958 - DNA, 25 bp, Homo sapien
agcaggtccaggttttgtcaatagc

SEQ ID NO: 2175959 - DNA, 25 bp, Homo sapien
caggtccaggttttgtcaatagcaa

SEQ ID NO: 2175960 - DNA, 25 bp, Homo sapien
ggtccaggttttgtcaatagcaaac

SEQ ID NO: 2175961 - DNA, 25 bp, Homo sapien
gcaggtccaggttttgtcaatagca

SEQ ID NO: 2175962 - DNA, 25 bp, Homo sapien
gaatttctggaggactttatagaat

SEQ ID NO: 2175963 - DNA, 25 bp, Homo sapien
ggaatttctggaggactttatagaa

SEQ ID NO: 2175964 - DNA, 25 bp, Homo sapien
ctaaggctgtgtctcgggtacgtcc

SEQ ID NO: 2175965 - DNA, 25 bp, Homo sapien
gcagattcactgaaccagactaagg

SEQ ID NO: 2175966 - DNA, 25 bp, Homo sapien
cagactaaggcagaagtaagtattc

SEQ ID NO: 2175967 - DNA, 25 bp, Homo sapien
taagtattcctttacccctgtctca

SEQ ID NO: 2175968 - DNA, 25 bp, Homo sapien
ggaacgtcccgcagagggtctctgt

SEQ ID NO: 2175969 - DNA, 25 bp, Homo sapien
ggagcaatcccagtttatcagcttg

SEQ ID NO: 2175970 - DNA, 25 bp, Homo sapien
tggacagggtacttccggagcaatc

SEQ ID NO: 2175971 - DNA, 25 bp, Homo sapien
gcagaccacagaggatgactttatt

SEQ ID NO: 2175972 - DNA, 25 bp, Homo sapien
atgtcaaatccaacagctgaccagt

SEQ ID NO: 2175973 - DNA, 25 bp, Homo sapien
gactatgagggtagcatactggtca

SEQ ID NO: 2175974 - DNA, 25 bp, Homo sapien
tctgcctttgatgtttacaataggc

SEQ ID NO: 2175975 - DNA, 25 bp, Homo sapien
gatgtttacaataggcctcaatttt

SEQ ID NO: 2175976 - DNA, 25 bp, Homo sapien
tttgaagatactcaaggggactatg

SEQ ID NO: 2175977 - DNA, 25 bp, Homo sapien
ctgtgaaatcttaactgtgtaaaat

SEQ ID NO: 2175978 - DNA, 25 bp, Homo sapien
tgtgaaatcttaactgtgtaaaatt

SEQ ID NO: 2175979 - DNA, 25 bp, Homo sapien
tgaaatcttaactgtgtaaaattta

SEQ ID NO: 2175980 - DNA, 25 bp, Homo sapien
gaaggaagggccgtgcttttgttca

SEQ ID NO: 2175981 - DNA, 25 bp, Homo sapien
caagatgcgacctttaaccgtttga

SEQ ID NO: 2175982 - DNA, 25 bp, Homo sapien
gcttttgttcacagccaacgtttat

SEQ ID NO: 2175983 - DNA, 25 bp, Homo sapien
gatactcctgacgaggctgcacagt

SEQ ID NO: 2175984 - DNA, 25 bp, Homo sapien
gaatagtgctgaacatgacgcaaaa

SEQ ID NO: 2175985 - DNA, 25 bp, Homo sapien
gaacatgacgcaaaaatatccccgg

SEQ ID NO: 2175986 - DNA, 25 bp, Homo sapien
cggatgtagccacactgaaccaatg

SEQ ID NO: 2175987 - DNA, 25 bp, Homo sapien
tcaagggataacctcgggcaaagaa

SEQ ID NO: 2175988 - DNA, 25 bp, Homo sapien
ttaggtagctaaggagtaaaggaga

SEQ ID NO: 2175989 - DNA, 25 bp, Homo sapien
gctggtcgcaacgtccttcaaggca

SEQ ID NO: 2175990 - DNA, 25 bp, Homo sapien
caggtaacatcttgagcaaccagat

SEQ ID NO: 2175991 - DNA, 25 bp, Homo sapien
caagaagttgggagagcaagatgtc

SEQ ID NO: 2175992 - DNA, 25 bp, Homo sapien
catagggctgtccatagcatgggtt

SEQ ID NO: 2175993 - DNA, 25 bp, Homo sapien
tctttaggttgggacttggtgagca

SEQ ID NO: 2175994 - DNA, 25 bp, Homo sapien
catttgagactgaacttgagctgga

SEQ ID NO: 2175995 - DNA, 25 bp, Homo sapien
tccaaaggacaactatggtgatgct

SEQ ID NO: 2175996 - DNA, 25 bp, Homo sapien
acgagccttgtcgacaccttgatct

SEQ ID NO: 2175997 - DNA, 25 bp, Homo sapien
atgggttctacaagccagggagaga

SEQ ID NO: 2175998 - DNA, 25 bp, Homo sapien
aggcctcaggaagcacgagccttgt

SEQ ID NO: 2175999 - DNA, 25 bp, Homo sapien
gaagatgggttctacaagccaggga

SEQ ID NO: 2176000 - DNA, 25 bp, Homo sapien
gacaaatcgtggtgcctggacaagg

SEQ ID NO: 2176001 - DNA, 25 bp, Homo sapien
tctcagtactagctttttggtgaca

SEQ ID NO: 2176002 - DNA, 25 bp, Homo sapien
gaaacccaatcactaactcttctgt

SEQ ID NO: 2176003 - DNA, 25 bp, Homo sapien
tcttcatagaattcagcactgctct

SEQ ID NO: 2176004 - DNA, 25 bp, Homo sapien
gaacaaaatgagaaagttgacatgg

SEQ ID NO: 2176005 - DNA, 25 bp, Homo sapien
ctgaacaaaatgagaaagttgacat

SEQ ID NO: 2176006 - DNA, 25 bp, Homo sapien
tgaacaaaatgagaaagttgacatg

SEQ ID NO: 2176007 - DNA, 25 bp, Homo sapien
aacaaaatgagaaagttgacatggg

SEQ ID NO: 2176008 - DNA, 25 bp, Homo sapien
ggaaaacagtgaagactagagcaag

SEQ ID NO: 2176009 - DNA, 25 bp, Homo sapien
ttgctacactactggtgtccttcca

SEQ ID NO: 2176010 - DNA, 25 bp, Homo sapien
caagatatgcatcatgagaaattgc

SEQ ID NO: 2176011 - DNA, 25 bp, Homo sapien
ggattaagtatagggaataggcatt

SEQ ID NO: 2176012 - DNA, 25 bp, Homo sapien
taggtcacaaatctaacaacaactg

SEQ ID NO: 2176013 - DNA, 25 bp, Homo sapien
ggtcacaaatctaacaacaactgct

SEQ ID NO: 2176014 - DNA, 25 bp, Homo sapien
aggtcacaaatctaacaacaactgc

SEQ ID NO: 2176015 - DNA, 25 bp, Homo sapien
ttaggtcacaaatctaacaacaact

SEQ ID NO: 2176016 - DNA, 25 bp, Homo sapien
ccatcggatgtaaaacgttgtcggt

SEQ ID NO: 2176017 - DNA, 25 bp, Homo sapien
catcggatgtaaaacgttgtcggtt

SEQ ID NO: 2176018 - DNA, 25 bp, Homo sapien
cggatgtaaaacgttgtcggttgag

SEQ ID NO: 2176019 - DNA, 25 bp, Homo sapien
caccatcggatgtaaaacgttgtcg

SEQ ID NO: 2176020 - DNA, 25 bp, Homo sapien
cacccaaatccatatcggttggaca

SEQ ID NO: 2176021 - DNA, 25 bp, Homo sapien
ggaactggcacccaaatccatatcg

SEQ ID NO: 2176022 - DNA, 25 bp, Homo sapien
ggcacccaaatccatatcggttgga

SEQ ID NO: 2176023 - DNA, 25 bp, Homo sapien
aactggcacccaaatccatatcggt

SEQ ID NO: 2176024 - DNA, 25 bp, Homo sapien
aaggccattggccactgttgagcct

SEQ ID NO: 2176025 - DNA, 25 bp, Homo sapien
tccatagaaggccattggccactgt

SEQ ID NO: 2176026 - DNA, 25 bp, Homo sapien
gatatatttgctaacttctccatag

SEQ ID NO: 2176027 - DNA, 25 bp, Homo sapien
ccactgttgagcctcatctctgaaa

SEQ ID NO: 2176028 - DNA, 25 bp, Homo sapien
tggctcgtatatctaggttcacaac

SEQ ID NO: 2176029 - DNA, 25 bp, Homo sapien
gggataactgcatcctcttgtcatt

SEQ ID NO: 2176030 - DNA, 25 bp, Homo sapien
ggttcacaactgctatggtagggtc

SEQ ID NO: 2176031 - DNA, 25 bp, Homo sapien
gggtccagcctcttcgctaactgtt

SEQ ID NO: 2176032 - DNA, 25 bp, Homo sapien
caaagcccgggagagatgcttggtt

SEQ ID NO: 2176033 - DNA, 25 bp, Homo sapien
caccttcttggaacgcatgacagca

SEQ ID NO: 2176034 - DNA, 25 bp, Homo sapien
ccagctttgtgataccagcggagga

SEQ ID NO: 2176035 - DNA, 25 bp, Homo sapien
gcaaggcgttttccactgagtaggc

SEQ ID NO: 2176036 - DNA, 25 bp, Homo sapien
tcctctaccttttgtgtcaaggtca

SEQ ID NO: 2176037 - DNA, 25 bp, Homo sapien
caaaagagtcttgatgccagttacc

SEQ ID NO: 2176038 - DNA, 25 bp, Homo sapien
gccagttaccaagtgtaaatatttc

SEQ ID NO: 2176039 - DNA, 25 bp, Homo sapien
cactgaaaggtattaggagtatact

SEQ ID NO: 2176040 - DNA, 25 bp, Homo sapien
agtgagcatctgcaatgaagcctcc

SEQ ID NO: 2176041 - DNA, 25 bp, Homo sapien
gcagtctaaatcgagctctgagtga

SEQ ID NO: 2176042 - DNA, 25 bp, Homo sapien
aaagcagtctaaatcgagctctgag

SEQ ID NO: 2176043 - DNA, 25 bp, Homo sapien
tctaaatcgagctctgagtgagcat

SEQ ID NO: 2176044 - DNA, 25 bp, Homo sapien
ctgccaggtcccctgcatgagctag

SEQ ID NO: 2176045 - DNA, 25 bp, Homo sapien
aggtcccctgcatgagctaggacac

SEQ ID NO: 2176046 - DNA, 25 bp, Homo sapien
ctggactgccaggtcccctgcatga

SEQ ID NO: 2176047 - DNA, 25 bp, Homo sapien
ccaggtcccctgcatgagctaggac

SEQ ID NO: 2176048 - DNA, 25 bp, Homo sapien
ctcttctgcggataaacactcttca

SEQ ID NO: 2176049 - DNA, 25 bp, Homo sapien
agctcttctgcggataaacactctt

SEQ ID NO: 2176050 - DNA, 25 bp, Homo sapien
tcttctgcggataaacactcttcat

SEQ ID NO: 2176051 - DNA, 25 bp, Homo sapien
gctcttctgcggataaacactcttc

SEQ ID NO: 2176052 - DNA, 25 bp, Homo sapien
caagacagaatttgtgtagggaaac

SEQ ID NO: 2176053 - DNA, 25 bp, Homo sapien
aattgactcacagtaacagtgagtt

SEQ ID NO: 2176054 - DNA, 25 bp, Homo sapien
ttctgcagcattgaaaatcccatac

SEQ ID NO: 2176055 - DNA, 25 bp, Homo sapien
tcacagtaacagtgagtttggctca

SEQ ID NO: 2176056 - DNA, 25 bp, Homo sapien
ttctgttgtcctgagtctcccatca

SEQ ID NO: 2176057 - DNA, 25 bp, Homo sapien
tctgttgtcctgagtctcccatcac

SEQ ID NO: 2176058 - DNA, 25 bp, Homo sapien
tttctgttgtcctgagtctcccatc

SEQ ID NO: 2176059 - DNA, 25 bp, Homo sapien
caccaacaacttgggtctcctcaaa

SEQ ID NO: 2176060 - DNA, 25 bp, Homo sapien
ctccaccaacaacttgggtctcctc

SEQ ID NO: 2176061 - DNA, 25 bp, Homo sapien
caacaacttgggtctcctcaaaatg

SEQ ID NO: 2176062 - DNA, 25 bp, Homo sapien
acttgggtctcctcaaaatgttcca

SEQ ID NO: 2176063 - DNA, 25 bp, Homo sapien
cagggtgttacatgcttcactatct

SEQ ID NO: 2176064 - DNA, 25 bp, Homo sapien
catcaaggatattcccatgccccag

SEQ ID NO: 2176065 - DNA, 25 bp, Homo sapien
ctatcccagggtgttacatgcttca

SEQ ID NO: 2176066 - DNA, 25 bp, Homo sapien
cttcactatcttctcatcaaggata

SEQ ID NO: 2176067 - DNA, 25 bp, Homo sapien
aatgacagtccttactccaatgctc

SEQ ID NO: 2176068 - DNA, 25 bp, Homo sapien
gacgagctttttcttgaatccagtg

SEQ ID NO: 2176069 - DNA, 25 bp, Homo sapien
catactgtcatgcaatagttgggca

SEQ ID NO: 2176070 - DNA, 25 bp, Homo sapien
tatctttagtcggttggctctcaca

SEQ ID NO: 2176071 - DNA, 25 bp, Homo sapien
acagaagcgatttctcaagacaggg

SEQ ID NO: 2176072 - DNA, 25 bp, Homo sapien
tctgtcttttcacatgacagtctct

SEQ ID NO: 2176073 - DNA, 25 bp, Homo sapien
tcctctgtcttcttacgatgttctc

SEQ ID NO: 2176074 - DNA, 25 bp, Homo sapien
cgctgcctagacagaagcgatttct

SEQ ID NO: 2176075 - DNA, 25 bp, Homo sapien
agctgatgaaagctatatacctttt

SEQ ID NO: 2176076 - DNA, 25 bp, Homo sapien
gctgatgaaagctatataccttttc

SEQ ID NO: 2176077 - DNA, 25 bp, Homo sapien
taagctagttcagcgttcaccagaa

SEQ ID NO: 2176078 - DNA, 25 bp, Homo sapien
ggtaagctagttcagcgttcaccag

SEQ ID NO: 2176079 - DNA, 25 bp, Homo sapien
tccaggtaagctagttcagcgttca

SEQ ID NO: 2176080 - DNA, 25 bp, Homo sapien
cttccaggtaagctagttcagcgtt

SEQ ID NO: 2176081 - DNA, 25 bp, Homo sapien
tcagggtcattcataaatattggag

SEQ ID NO: 2176082 - DNA, 25 bp, Homo sapien
gaaccagaagtcgtctggagggttc

SEQ ID NO: 2176083 - DNA, 25 bp, Homo sapien
ccagaagtcgtctggagggttctga

SEQ ID NO: 2176084 - DNA, 25 bp, Homo sapien
aaccagaagtcgtctggagggttct

SEQ ID NO: 2176085 - DNA, 25 bp, Homo sapien
ctaactatagggaaccagaagtcgt

SEQ ID NO: 2176086 - DNA, 25 bp, Homo sapien
gtggacatgcagagagtaacccagc

SEQ ID NO: 2176087 - DNA, 25 bp, Homo sapien
ggtggacatgcagagagtaacccag

SEQ ID NO: 2176088 - DNA, 25 bp, Homo sapien
ggacatgcagagagtaacccagctt

SEQ ID NO: 2176089 - DNA, 25 bp, Homo sapien
tggacatgcagagagtaacccagct

SEQ ID NO: 2176090 - DNA, 25 bp, Homo sapien
agtgagctcggatttgcagctgctg

SEQ ID NO: 2176091 - DNA, 25 bp, Homo sapien
gcagagagtgagctcggatttgcag

SEQ ID NO: 2176092 - DNA, 25 bp, Homo sapien
gctgctgaagtccagtccttccaca

SEQ ID NO: 2176093 - DNA, 25 bp, Homo sapien
agagagtgagctcggatttgcagct

SEQ ID NO: 2176094 - DNA, 25 bp, Homo sapien
aaagtgtgtcatctttagccagtgg

SEQ ID NO: 2176095 - DNA, 25 bp, Homo sapien
ttatcattcttactgacggtcaaag

SEQ ID NO: 2176096 - DNA, 25 bp, Homo sapien
tgggaactcgtgtcttttatcaaac

SEQ ID NO: 2176097 - DNA, 25 bp, Homo sapien
gatagtcttgaattcttaggaacca

SEQ ID NO: 2176098 - DNA, 25 bp, Homo sapien
tacttaaagggtattctggaggcca

SEQ ID NO: 2176099 - DNA, 25 bp, Homo sapien
cttaaagggtattctggaggccaca

SEQ ID NO: 2176100 - DNA, 25 bp, Homo sapien
gggtattctggaggccacacggatc

SEQ ID NO: 2176101 - DNA, 25 bp, Homo sapien
taaagggtattctggaggccacacg

SEQ ID NO: 2176102 - DNA, 25 bp, Homo sapien
ctccatcacactccagtcgttattg

SEQ ID NO: 2176103 - DNA, 25 bp, Homo sapien
ttcaaccgtgtactgtctcttcctc

SEQ ID NO: 2176104 - DNA, 25 bp, Homo sapien
ccatcacactccagtcgttattgac

SEQ ID NO: 2176105 - DNA, 25 bp, Homo sapien
aaaatttcaaccgtgtactgtctct

SEQ ID NO: 2176106 - DNA, 25 bp, Homo sapien
tcagagccgattggaaactggtctc

SEQ ID NO: 2176107 - DNA, 25 bp, Homo sapien
acagtcagagccgattggaaactgg

SEQ ID NO: 2176108 - DNA, 25 bp, Homo sapien
ggcacagtcagagccgattggaaac

SEQ ID NO: 2176109 - DNA, 25 bp, Homo sapien
agagccgattggaaactggtctcca

SEQ ID NO: 2176110 - DNA, 25 bp, Homo sapien
tgtgggaggttggtgacagtagaaa

SEQ ID NO: 2176111 - DNA, 25 bp, Homo sapien
ggtgtgggaggttggtgacagtaga

SEQ ID NO: 2176112 - DNA, 25 bp, Homo sapien
gtgggaggttggtgacagtagaaaa

SEQ ID NO: 2176113 - DNA, 25 bp, Homo sapien
gtgtgggaggttggtgacagtagaa

SEQ ID NO: 2176114 - DNA, 25 bp, Homo sapien
gaaaagagcagatgtcaactgatag

SEQ ID NO: 2176115 - DNA, 25 bp, Homo sapien
gtgtgtgcttgtgtaacctttggca

SEQ ID NO: 2176116 - DNA, 25 bp, Homo sapien
aaaaagcaaactgtgggtgtgtgct

SEQ ID NO: 2176117 - DNA, 25 bp, Homo sapien
aaacattgtgtgtgtaagtggagcg

SEQ ID NO: 2176118 - DNA, 25 bp, Homo sapien
gacctggctcagctttgcaacttca

SEQ ID NO: 2176119 - DNA, 25 bp, Homo sapien
ttttaagctaccattccctccacat

SEQ ID NO: 2176120 - DNA, 25 bp, Homo sapien
caggatgataaggtcattgacctgg

SEQ ID NO: 2176121 - DNA, 25 bp, Homo sapien
ggtcattgacctggctcagctttgc

SEQ ID NO: 2176122 - DNA, 25 bp, Homo sapien
cacacccaggaatatatatatgagc

SEQ ID NO: 2176123 - DNA, 25 bp, Homo sapien
cataaaagttacgtgagtgtggcct

SEQ ID NO: 2176124 - DNA, 25 bp, Homo sapien
cctgaaactgcagaatgtgattgca

SEQ ID NO: 2176125 - DNA, 25 bp, Homo sapien
acagttgtccacagtacctgaaact

SEQ ID NO: 2176126 - DNA, 25 bp, Homo sapien
cccttagggctactgcgaatgtcaa

SEQ ID NO: 2176127 - DNA, 25 bp, Homo sapien
caaaacacagtgacgcaagaaggca

SEQ ID NO: 2176128 - DNA, 25 bp, Homo sapien
tgaggagcttcaccaaacagggctt

SEQ ID NO: 2176129 - DNA, 25 bp, Homo sapien
gaattgacaaatgagctcccattgg

SEQ ID NO: 2176130 - DNA, 25 bp, Homo sapien
tcaagagtaaaagcctaggacagga

SEQ ID NO: 2176131 - DNA, 25 bp, Homo sapien
tgtccggccatatatatcttctatc

SEQ ID NO: 2176132 - DNA, 25 bp, Homo sapien
taaaccctgcgtgcctttgaagatc

SEQ ID NO: 2176133 - DNA, 25 bp, Homo sapien
aagtttatacatatgtgtccggcca

SEQ ID NO: 2176134 - DNA, 25 bp, Homo sapien
caagcctgacgcgttactgtacata

SEQ ID NO: 2176135 - DNA, 25 bp, Homo sapien
gatcataatcccctgtaaaagctaa

SEQ ID NO: 2176136 - DNA, 25 bp, Homo sapien
gaaatgttgcttcacgtgtgctaag

SEQ ID NO: 2176137 - DNA, 25 bp, Homo sapien
ttacagacagacgaaaccaacatgg

SEQ ID NO: 2176138 - DNA, 25 bp, Homo sapien
taacccacaatggagccgaggaaca

SEQ ID NO: 2176139 - DNA, 25 bp, Homo sapien
gggaatgtccactttagcggagaga

SEQ ID NO: 2176140 - DNA, 25 bp, Homo sapien
ggctactgtttcttggtaatgcaat

SEQ ID NO: 2176141 - DNA, 25 bp, Homo sapien
ccaggcagctggacaatttttatgg

SEQ ID NO: 2176142 - DNA, 25 bp, Homo sapien
ccttataacactcaaaactttcctg

SEQ ID NO: 2176143 - DNA, 25 bp, Homo sapien
ttccttccaccttataacactcaaa

SEQ ID NO: 2176144 - DNA, 25 bp, Homo sapien
cagtgaagttatcctaatttcccag

SEQ ID NO: 2176145 - DNA, 25 bp, Homo sapien
caaatctctgatccctaggtcacca

SEQ ID NO: 2176146 - DNA, 25 bp, Homo sapien
ccagaaaacccatgcaaagcagttt

SEQ ID NO: 2176147 - DNA, 25 bp, Homo sapien
cattcaatgtcttctcagtgaagtt

SEQ ID NO: 2176148 - DNA, 25 bp, Homo sapien
gaccgtctgggtcttctgtgggaca

SEQ ID NO: 2176149 - DNA, 25 bp, Homo sapien
tcatgaaggctaacacgtacaagtc

SEQ ID NO: 2176150 - DNA, 25 bp, Homo sapien
tgagcaggtacttcatcggccaaac

SEQ ID NO: 2176151 - DNA, 25 bp, Homo sapien
taaacatattcaaagggccagagct

SEQ ID NO: 2176152 - DNA, 25 bp, Homo sapien
atatttatatacgtacagagcacaa

SEQ ID NO: 2176153 - DNA, 25 bp, Homo sapien
tatatatttatatacgtacagagca

SEQ ID NO: 2176154 - DNA, 25 bp, Homo sapien
atatatttatatacgtacagagcac

SEQ ID NO: 2176155 - DNA, 25 bp, Homo sapien
tatatttatatacgtacagagcaca

SEQ ID NO: 2176156 - DNA, 25 bp, Homo sapien
taagtcagtgggacaaaaacattcc

SEQ ID NO: 2176157 - DNA, 25 bp, Homo sapien
gaaccgtacagatttcgctgcacag

SEQ ID NO: 2176158 - DNA, 25 bp, Homo sapien
taaggagagccatccattgtgtggc

SEQ ID NO: 2176159 - DNA, 25 bp, Homo sapien
ccaacgataagggtctgccgggatg

SEQ ID NO: 2176160 - DNA, 25 bp, Homo sapien
cttctctctttccttccctcttcta

SEQ ID NO: 2176161 - DNA, 25 bp, Homo sapien
ccttctctctttccttccctcttct

SEQ ID NO: 2176162 - DNA, 25 bp, Homo sapien
tctctctttccttccctcttctatg

SEQ ID NO: 2176163 - DNA, 25 bp, Homo sapien
ttctctctttccttccctcttctat

SEQ ID NO: 2176164 - DNA, 25 bp, Homo sapien
cagagggataggaagggaaataggg

SEQ ID NO: 2176165 - DNA, 25 bp, Homo sapien
gcgggtagggcagagggataggaag

SEQ ID NO: 2176166 - DNA, 25 bp, Homo sapien
gagggataggaagggaaatagggca

SEQ ID NO: 2176167 - DNA, 25 bp, Homo sapien
ttgctgagcgggtagggcagaggga

SEQ ID NO: 2176168 - DNA, 25 bp, Homo sapien
gtgcaaaggctgcatccccgtcagt

SEQ ID NO: 2176169 - DNA, 25 bp, Homo sapien
tgagcctcagtgtgtcgtgtgcctg

SEQ ID NO: 2176170 - DNA, 25 bp, Homo sapien
taagtgggatgtcatctggcgaccg

SEQ ID NO: 2176171 - DNA, 25 bp, Homo sapien
ccccgtcagtgtgtttggaatcatg

SEQ ID NO: 2176172 - DNA, 25 bp, Homo sapien
tgtgagtctcatggcgcctcttgtc

SEQ ID NO: 2176173 - DNA, 25 bp, Homo sapien
ttttgtagtacagcgccgcaaaagc

SEQ ID NO: 2176174 - DNA, 25 bp, Homo sapien
cacactcgtgatcgtgttccagctg

SEQ ID NO: 2176175 - DNA, 25 bp, Homo sapien
acgccccgacggcaatggtgacact

SEQ ID NO: 2176176 - DNA, 25 bp, Homo sapien
tgggattatacttggaccaggccac

SEQ ID NO: 2176177 - DNA, 25 bp, Homo sapien
gttgtgcaaatgaggaacgagttcc

SEQ ID NO: 2176178 - DNA, 25 bp, Homo sapien
ttcgttgcccggtagtgatctctca

SEQ ID NO: 2176179 - DNA, 25 bp, Homo sapien
gccaatatgcagatagagctggtct

SEQ ID NO: 2176180 - DNA, 25 bp, Homo sapien
tcattgatcagcttggacgaaccct

SEQ ID NO: 2176181 - DNA, 25 bp, Homo sapien
ctgaatttcattgatcagcttggac

SEQ ID NO: 2176182 - DNA, 25 bp, Homo sapien
agattccccactcctttttgtccat

SEQ ID NO: 2176183 - DNA, 25 bp, Homo sapien
tcagcttggacgaaccctttttctc

SEQ ID NO: 2176184 - DNA, 25 bp, Homo sapien
aaacacatgcgccatcgagagactg

SEQ ID NO: 2176185 - DNA, 25 bp, Homo sapien
tgtagtgacagacacgctgggagct

SEQ ID NO: 2176186 - DNA, 25 bp, Homo sapien
tccttgcgggcatcagtttggttca

SEQ ID NO: 2176187 - DNA, 25 bp, Homo sapien
gaacgcttgacttaacgcccactga

SEQ ID NO: 2176188 - DNA, 25 bp, Homo sapien
caatatccgagtgtacttggccggc

SEQ ID NO: 2176189 - DNA, 25 bp, Homo sapien
aagtcaaagtcgttgggcgtcacac

SEQ ID NO: 2176190 - DNA, 25 bp, Homo sapien
tcagggtagccgtaaaggttgtcca

SEQ ID NO: 2176191 - DNA, 25 bp, Homo sapien
tggttgacgcccagcatgatgtcgt

SEQ ID NO: 2176192 - DNA, 25 bp, Homo sapien
aatgaaaacccacaggacagaaatg

SEQ ID NO: 2176193 - DNA, 25 bp, Homo sapien
gacagggtcaacaggctgacacagg

SEQ ID NO: 2176194 - DNA, 25 bp, Homo sapien
ttttgctgcctggtcaccggtactt

SEQ ID NO: 2176195 - DNA, 25 bp, Homo sapien
gagtagtgggacagggtcaacaggc

SEQ ID NO: 2176196 - DNA, 25 bp, Homo sapien
gctgcctggtcaccggtacttaaaa

SEQ ID NO: 2176197 - DNA, 25 bp, Homo sapien
aagatatttttggtggccaaataga

SEQ ID NO: 2176198 - DNA, 25 bp, Homo sapien
tgcatacgtgtctctgctatttgaa

SEQ ID NO: 2176199 - DNA, 25 bp, Homo sapien
ggccaaatagaaaaagtgcatacgt

SEQ ID NO: 2176200 - DNA, 25 bp, Homo sapien
aagatatctcatagcttgtcttctt

SEQ ID NO: 2176201 - DNA, 25 bp, Homo sapien
gaatcgggagtcactatctcctgca

SEQ ID NO: 2176202 - DNA, 25 bp, Homo sapien
aactgcgaggttggatacttaagac

SEQ ID NO: 2176203 - DNA, 25 bp, Homo sapien
aagagaggcagcgtcgcaactgcga

SEQ ID NO: 2176204 - DNA, 25 bp, Homo sapien
aaatggcctggctccaaagaaagtc

SEQ ID NO: 2176205 - DNA, 25 bp, Homo sapien
tgtctccatcactatatctttgaca

SEQ ID NO: 2176206 - DNA, 25 bp, Homo sapien
cactatatctttgacacgatcgttc

SEQ ID NO: 2176207 - DNA, 25 bp, Homo sapien
tttgacacgatcgttcataaaaggc

SEQ ID NO: 2176208 - DNA, 25 bp, Homo sapien
tgacacgatcgttcataaaaggcat

SEQ ID NO: 2176209 - DNA, 25 bp, Homo sapien
ttagtgaggcggtctcaggctttcc

SEQ ID NO: 2176210 - DNA, 25 bp, Homo sapien
tactgttaatatcacaggcgaagct

SEQ ID NO: 2176211 - DNA, 25 bp, Homo sapien
cacataatgggaagggtctgtcttt

SEQ ID NO: 2176212 - DNA, 25 bp, Homo sapien
tgaaggctgccgtgacacataatgg

SEQ ID NO: 2176213 - DNA, 25 bp, Homo sapien
cctgaagtctgtacaaacagagatt

SEQ ID NO: 2176214 - DNA, 25 bp, Homo sapien
aacatcttgttctctaatggttgca

SEQ ID NO: 2176215 - DNA, 25 bp, Homo sapien
gagattatggatgaaagtttcaaca

SEQ ID NO: 2176216 - DNA, 25 bp, Homo sapien
gattttgtccaagtctgtggtgtcc

SEQ ID NO: 2176217 - DNA, 25 bp, Homo sapien
gttttgaatgaggtggttctgtctc

SEQ ID NO: 2176218 - DNA, 25 bp, Homo sapien
tttcctgttttgaatgaggtggttc

SEQ ID NO: 2176219 - DNA, 25 bp, Homo sapien
tgttttgaatgaggtggttctgtct

SEQ ID NO: 2176220 - DNA, 25 bp, Homo sapien
tcctgttttgaatgaggtggttctg

SEQ ID NO: 2176221 - DNA, 25 bp, Homo sapien
atttttattacaactctcagctccc

SEQ ID NO: 2176222 - DNA, 25 bp, Homo sapien
ggagaaatccgtaatgcaatatttt

SEQ ID NO: 2176223 - DNA, 25 bp, Homo sapien
gcagaagccacaagctaagcggctg

SEQ ID NO: 2176224 - DNA, 25 bp, Homo sapien
tcagctcccttttcgatggttcgtt

SEQ ID NO: 2176225 - DNA, 25 bp, Homo sapien
gggtcctcaataactacatgcctga

SEQ ID NO: 2176226 - DNA, 25 bp, Homo sapien
tagtgctgaggctaccaaacctgac

SEQ ID NO: 2176227 - DNA, 25 bp, Homo sapien
tgcacagctcataaatgggtcctca

SEQ ID NO: 2176228 - DNA, 25 bp, Homo sapien
aaaacggctggtgcattgctcttgc

SEQ ID NO: 2176229 - DNA, 25 bp, Homo sapien
gagctaaaatacactgactactggg

SEQ ID NO: 2176230 - DNA, 25 bp, Homo sapien
catttagccatgcaaacagagtttc

SEQ ID NO: 2176231 - DNA, 25 bp, Homo sapien
tatcacagtgaaacggcagaaactc

SEQ ID NO: 2176232 - DNA, 25 bp, Homo sapien
gaaaccacgattgcaaatttcaagg

SEQ ID NO: 2176233 - DNA, 25 bp, Homo sapien
tctaagatggcttgcaacaaggaca

SEQ ID NO: 2176234 - DNA, 25 bp, Homo sapien
gggtgaaatatgtggccgccttctc

SEQ ID NO: 2176235 - DNA, 25 bp, Homo sapien
caaggacacacgcacaatagggcat

SEQ ID NO: 2176236 - DNA, 25 bp, Homo sapien
gcagaatggtttccctatccctgaa

SEQ ID NO: 2176237 - DNA, 25 bp, Homo sapien
ctaatcattcagaaactgcttattg

SEQ ID NO: 2176238 - DNA, 25 bp, Homo sapien
gaaactgcttattgtccggtagaca

SEQ ID NO: 2176239 - DNA, 25 bp, Homo sapien
cagaaactgcttattgtccggtaga

SEQ ID NO: 2176240 - DNA, 25 bp, Homo sapien
cattcagaaactgcttattgtccgg

SEQ ID NO: 2176241 - DNA, 25 bp, Homo sapien
tctcaggtcctaatgacaaagcact

SEQ ID NO: 2176242 - DNA, 25 bp, Homo sapien
agcactcatccttaatttcccctga

SEQ ID NO: 2176243 - DNA, 25 bp, Homo sapien
cactgcagtcgtccccatctctgct

SEQ ID NO: 2176244 - DNA, 25 bp, Homo sapien
gagagtccttatcccactgcagtcg

SEQ ID NO: 2176245 - DNA, 25 bp, Homo sapien
catcctgaataaatccaatgaatgc

SEQ ID NO: 2176246 - DNA, 25 bp, Homo sapien
tcctgaataaatccaatgaatgcag

SEQ ID NO: 2176247 - DNA, 25 bp, Homo sapien
cacatcctgaataaatccaatgaat

SEQ ID NO: 2176248 - DNA, 25 bp, Homo sapien
atcctgaataaatccaatgaatgca

SEQ ID NO: 2176249 - DNA, 25 bp, Homo sapien
tagaggttgccctatcttctgcaat

SEQ ID NO: 2176250 - DNA, 25 bp, Homo sapien
atgtgttcactctattgctgtgtta

SEQ ID NO: 2176251 - DNA, 25 bp, Homo sapien
tcactctattgctgtgttatctact

SEQ ID NO: 2176252 - DNA, 25 bp, Homo sapien
ggattagaggttgccctatcttctg

SEQ ID NO: 2176253 - DNA, 25 bp, Homo sapien
catgttggttgcttttatatcaaac

SEQ ID NO: 2176254 - DNA, 25 bp, Homo sapien
gaccatgacgcaatctaccctcaga

SEQ ID NO: 2176255 - DNA, 25 bp, Homo sapien
attcaattatgactccaaagcgtct

SEQ ID NO: 2176256 - DNA, 25 bp, Homo sapien
ccaaagcgtctaataggtttattca

SEQ ID NO: 2176257 - DNA, 25 bp, Homo sapien
tggccattcccaactataatatcac

SEQ ID NO: 2176258 - DNA, 25 bp, Homo sapien
ccaaatatgtgttcattgtacaggt

SEQ ID NO: 2176259 - DNA, 25 bp, Homo sapien
tataatatcaccaaatatgtgttca

SEQ ID NO: 2176260 - DNA, 25 bp, Homo sapien
aagatctatggccattcccaactat

SEQ ID NO: 2176261 - DNA, 25 bp, Homo sapien
gctgccgtcaatcatgttgccggtg

SEQ ID NO: 2176262 - DNA, 25 bp, Homo sapien
gatgacgtttccgtagcttgccaaa

SEQ ID NO: 2176263 - DNA, 25 bp, Homo sapien
acgatgacgtttccgtagcttgcca

SEQ ID NO: 2176264 - DNA, 25 bp, Homo sapien
acgtttccgtagcttgccaaaatgc

SEQ ID NO: 2176265 - DNA, 25 bp, Homo sapien
gcttcttactgttctgatcatgaat

SEQ ID NO: 2176266 - DNA, 25 bp, Homo sapien
cgggcttcttactgttctgatcatg

SEQ ID NO: 2176267 - DNA, 25 bp, Homo sapien
gacgggcttcttactgttctgatca

SEQ ID NO: 2176268 - DNA, 25 bp, Homo sapien
gggcttcttactgttctgatcatga

SEQ ID NO: 2176269 - DNA, 25 bp, Homo sapien
gtcattactcgttatatcatctgcg

SEQ ID NO: 2176270 - DNA, 25 bp, Homo sapien
accacggtcattactcgttatatca

SEQ ID NO: 2176271 - DNA, 25 bp, Homo sapien
cattactcgttatatcatctgcgtt

SEQ ID NO: 2176272 - DNA, 25 bp, Homo sapien
cggtcattactcgttatatcatctg

SEQ ID NO: 2176273 - DNA, 25 bp, Homo sapien
gccaaacatgctcaaagcagcatgc

SEQ ID NO: 2176274 - DNA, 25 bp, Homo sapien
tggtgaggacgtgcaccactccacc

SEQ ID NO: 2176275 - DNA, 25 bp, Homo sapien
tgcaggtgacttggatgtaggcctc

SEQ ID NO: 2176276 - DNA, 25 bp, Homo sapien
catctaaaatgaggtaggtggtccc

SEQ ID NO: 2176277 - DNA, 25 bp, Homo sapien
cagcccacgctgatgatgttgtctt

SEQ ID NO: 2176278 - DNA, 25 bp, Homo sapien
cgtcagcccacgctgatgatgttgt

SEQ ID NO: 2176279 - DNA, 25 bp, Homo sapien
ctgacagcgtcagcccacgctgatg

SEQ ID NO: 2176280 - DNA, 25 bp, Homo sapien
acagcgtcagcccacgctgatgatg

SEQ ID NO: 2176281 - DNA, 25 bp, Homo sapien
ttctgattgggctctttgtttttgc

SEQ ID NO: 2176282 - DNA, 25 bp, Homo sapien
ggctttgtctagtttttctgattgg

SEQ ID NO: 2176283 - DNA, 25 bp, Homo sapien
cttccagtcctacaggtggctttgt

SEQ ID NO: 2176284 - DNA, 25 bp, Homo sapien
ttcttccagtcctacaggtggcttt

SEQ ID NO: 2176285 - DNA, 25 bp, Homo sapien
gcaggcatatgggaaccatctgctc

SEQ ID NO: 2176286 - DNA, 25 bp, Homo sapien
tccctacaaggtccatatccacggg

SEQ ID NO: 2176287 - DNA, 25 bp, Homo sapien
caaggtccatatccacgggaattgg

SEQ ID NO: 2176288 - DNA, 25 bp, Homo sapien
tacaaggtccatatccacgggaatt

SEQ ID NO: 2176289 - DNA, 25 bp, Homo sapien
agtaggtcaatcactgccaggttgg

SEQ ID NO: 2176290 - DNA, 25 bp, Homo sapien
tcgctaccgagtaggtcaatcactg

SEQ ID NO: 2176291 - DNA, 25 bp, Homo sapien
tctgacttctcctgatgtctagcaa

SEQ ID NO: 2176292 - DNA, 25 bp, Homo sapien
tgatgtctagcaactcgctaccgag

SEQ ID NO: 2176293 - DNA, 25 bp, Homo sapien
ttcttctaggtcacagacttctttg

SEQ ID NO: 2176294 - DNA, 25 bp, Homo sapien
caagaaaaatccattctcgcctact

SEQ ID NO: 2176295 - DNA, 25 bp, Homo sapien
ctcgcctactcataaaggtgacata

SEQ ID NO: 2176296 - DNA, 25 bp, Homo sapien
tctttgaggagacactcctctccaa

SEQ ID NO: 2176297 - DNA, 25 bp, Homo sapien
cacaaaattagagcccactttcatc

SEQ ID NO: 2176298 - DNA, 25 bp, Homo sapien
catggtaatgagcacggattaatcc

SEQ ID NO: 2176299 - DNA, 25 bp, Homo sapien
taatccaatggtcagcttgttccct

SEQ ID NO: 2176300 - DNA, 25 bp, Homo sapien
tttgcagcctaacttagaaagcaga

SEQ ID NO: 2176301 - DNA, 25 bp, Homo sapien
gtgtttgtcacttcctaatggctac

SEQ ID NO: 2176302 - DNA, 25 bp, Homo sapien
tgtatgcgtacaattggactttgtg

SEQ ID NO: 2176303 - DNA, 25 bp, Homo sapien
tcgtttttcacctatattttgtgac

SEQ ID NO: 2176304 - DNA, 25 bp, Homo sapien
gtgactgtatgcgtacaattggact

SEQ ID NO: 2176305 - DNA, 25 bp, Homo sapien
ttttgtgactgtatgcgtacaattg

SEQ ID NO: 2176306 - DNA, 25 bp, Homo sapien
aatgaaacggccacaccgtttgtgg

SEQ ID NO: 2176307 - DNA, 25 bp, Homo sapien
cagggaggctattgattctttttca

SEQ ID NO: 2176308 - DNA, 25 bp, Homo sapien
tcaataccgaattgcaatgaaacgg

SEQ ID NO: 2176309 - DNA, 25 bp, Homo sapien
cacaattgtacatacagggctctgc

SEQ ID NO: 2176310 - DNA, 25 bp, Homo sapien
ttacagatgattcaggtataacatg

SEQ ID NO: 2176311 - DNA, 25 bp, Homo sapien
cagatgattcaggtataacatgcaa

SEQ ID NO: 2176312 - DNA, 25 bp, Homo sapien
gatgattcaggtataacatgcaaca

SEQ ID NO: 2176313 - DNA, 25 bp, Homo sapien
tacagatgattcaggtataacatgc

SEQ ID NO: 2176314 - DNA, 25 bp, Homo sapien
ttttctgttccagtgaggtactcac

SEQ ID NO: 2176315 - DNA, 25 bp, Homo sapien
tctacacactgcacaagaggtattg

SEQ ID NO: 2176316 - DNA, 25 bp, Homo sapien
tagcaaatctctctacacactgcac

SEQ ID NO: 2176317 - DNA, 25 bp, Homo sapien
ctctctacacactgcacaagaggta

SEQ ID NO: 2176318 - DNA, 25 bp, Homo sapien
gtaaggatctctcatccaggtgctg

SEQ ID NO: 2176319 - DNA, 25 bp, Homo sapien
catgtcatgcagtaaggatctctca

SEQ ID NO: 2176320 - DNA, 25 bp, Homo sapien
agcatgtcatgcagtaaggatctct

SEQ ID NO: 2176321 - DNA, 25 bp, Homo sapien
catgcagtaaggatctctcatccag

SEQ ID NO: 2176322 - DNA, 25 bp, Homo sapien
cttggctgtcaatgagggtgaactt

SEQ ID NO: 2176323 - DNA, 25 bp, Homo sapien
ggtgaacttgatggcaagagcagtt

SEQ ID NO: 2176324 - DNA, 25 bp, Homo sapien
tcaatgagggtgaacttgatggcaa

SEQ ID NO: 2176325 - DNA, 25 bp, Homo sapien
gaacttgatggcaagagcagttaac

SEQ ID NO: 2176326 - DNA, 25 bp, Homo sapien
cacaggaggacattggagtttaaca

SEQ ID NO: 2176327 - DNA, 25 bp, Homo sapien
acaggaggacattggagtttaacat

SEQ ID NO: 2176328 - DNA, 25 bp, Homo sapien
gcagaccggggtgaacaacaaagga

SEQ ID NO: 2176329 - DNA, 25 bp, Homo sapien
cgcagaccggggtgaacaacaaagg

SEQ ID NO: 2176330 - DNA, 25 bp, Homo sapien
gacgcagaccggggtgaacaacaaa

SEQ ID NO: 2176331 - DNA, 25 bp, Homo sapien
acgcagaccggggtgaacaacaaag

SEQ ID NO: 2176332 - DNA, 25 bp, Homo sapien
ccacagctgtcccagtgatgtggct

SEQ ID NO: 2176333 - DNA, 25 bp, Homo sapien
agctgtcccagtgatgtggctccaa

SEQ ID NO: 2176334 - DNA, 25 bp, Homo sapien
gctgtcccagtgatgtggctccaag

SEQ ID NO: 2176335 - DNA, 25 bp, Homo sapien
gagcctgaggttaagaacaagcaca

SEQ ID NO: 2176336 - DNA, 25 bp, Homo sapien
tcttggcagcccattgcaaggaggc

SEQ ID NO: 2176337 - DNA, 25 bp, Homo sapien
gcaactgcaatgctccaaggaagct

SEQ ID NO: 2176338 - DNA, 25 bp, Homo sapien
tcagactgatcacagacagagcctg

SEQ ID NO: 2176339 - DNA, 25 bp, Homo sapien
gaattcagtgggtggacttcttcca

SEQ ID NO: 2176340 - DNA, 25 bp, Homo sapien
caagggcatctgtacacttactagg

SEQ ID NO: 2176341 - DNA, 25 bp, Homo sapien
tactaggtctagattgggcattcac

SEQ ID NO: 2176342 - DNA, 25 bp, Homo sapien
cagtgagcgattatgaagcagcagc

SEQ ID NO: 2176343 - DNA, 25 bp, Homo sapien
tggtgggctttggaccaatacacgg

SEQ ID NO: 2176344 - DNA, 25 bp, Homo sapien
ggcgccttctgagagttggataaaa

SEQ ID NO: 2176345 - DNA, 25 bp, Homo sapien
gaatgtgaaggaactccactcagga

SEQ ID NO: 2176346 - DNA, 25 bp, Homo sapien
caatacacgggagagcgtaggcaaa

SEQ ID NO: 2176347 - DNA, 25 bp, Homo sapien
ttcatcagtattttgtctctataaa

SEQ ID NO: 2176348 - DNA, 25 bp, Homo sapien
catcagtattttgtctctataaaaa

SEQ ID NO: 2176349 - DNA, 25 bp, Homo sapien
gaaatataaactctaaccaggctgg

SEQ ID NO: 2176350 - DNA, 25 bp, Homo sapien
aatataaactctaaccaggctggag

SEQ ID NO: 2176351 - DNA, 25 bp, Homo sapien
tccccagaggccagtatgtcagtgc

SEQ ID NO: 2176352 - DNA, 25 bp, Homo sapien
accgacgtaatgtcccgcgtggagc

SEQ ID NO: 2176353 - DNA, 25 bp, Homo sapien
gataaaacagtcctcgccaaggcct

SEQ ID NO: 2176354 - DNA, 25 bp, Homo sapien
tgggaatcctatcgctccaacatgt

SEQ ID NO: 2176355 - DNA, 25 bp, Homo sapien
ccttgtaggattttggaggggaatg

SEQ ID NO: 2176356 - DNA, 25 bp, Homo sapien
tgtaggattttggaggggaatggtc

SEQ ID NO: 2176357 - DNA, 25 bp, Homo sapien
cttgtaggattttggaggggaatgg

SEQ ID NO: 2176358 - DNA, 25 bp, Homo sapien
gaaaaacagtaatctctcaaagtct

SEQ ID NO: 2176359 - DNA, 25 bp, Homo sapien
cgtcttgataatggatatgtctgcc

SEQ ID NO: 2176360 - DNA, 25 bp, Homo sapien
taaacatctctgtcagtctcatgtg

SEQ ID NO: 2176361 - DNA, 25 bp, Homo sapien
accatgcccctctgaaaacgtcttg

SEQ ID NO: 2176362 - DNA, 25 bp, Homo sapien
cgtcaagctgtttgacaaaccataa

SEQ ID NO: 2176363 - DNA, 25 bp, Homo sapien
tctcaggtcaacagaaagcatctcg

SEQ ID NO: 2176364 - DNA, 25 bp, Homo sapien
accactgacaaggtcgtcaagctgt

SEQ ID NO: 2176365 - DNA, 25 bp, Homo sapien
agcatctcgataaaagctgtgactg

SEQ ID NO: 2176366 - DNA, 25 bp, Homo sapien
gtttgactcttaatctaatgaaggt

SEQ ID NO: 2176367 - DNA, 25 bp, Homo sapien
tcgtggagcctctttgcctctaggc

SEQ ID NO: 2176368 - DNA, 25 bp, Homo sapien
aagagggtcgtggagcctctttgcc

SEQ ID NO: 2176369 - DNA, 25 bp, Homo sapien
ggtcgtggagcctctttgcctctag

SEQ ID NO: 2176370 - DNA, 25 bp, Homo sapien
aaggtaacaatagcactgtccctgg

SEQ ID NO: 2176371 - DNA, 25 bp, Homo sapien
ctttccaaattggaagtggataaca

SEQ ID NO: 2176372 - DNA, 25 bp, Homo sapien
tcctgtcctgtctactcccagtgaa

SEQ ID NO: 2176373 - DNA, 25 bp, Homo sapien
tgtcctgtctactcccagtgaagtg

SEQ ID NO: 2176374 - DNA, 25 bp, Homo sapien
gggaggcttatcaattgagatatca

SEQ ID NO: 2176375 - DNA, 25 bp, Homo sapien
catgacagactgaatcatagtacac

SEQ ID NO: 2176376 - DNA, 25 bp, Homo sapien
gtacacaaccactgtcacacaaatt

SEQ ID NO: 2176377 - DNA, 25 bp, Homo sapien
ggttattttactggtgaaattgtca

SEQ ID NO: 2176378 - DNA, 25 bp, Homo sapien
gctgctaaacccattagtacaggag

SEQ ID NO: 2176379 - DNA, 25 bp, Homo sapien
ttagtacaggagactttaaggccat

SEQ ID NO: 2176380 - DNA, 25 bp, Homo sapien
tgctctgtgtcaacagaagtattct

SEQ ID NO: 2176381 - DNA, 25 bp, Homo sapien
aagaaccctaagttatccgtcacag

SEQ ID NO: 2176382 - DNA, 25 bp, Homo sapien
tggaaaatggcaccgcatgcaactt

SEQ ID NO: 2176383 - DNA, 25 bp, Homo sapien
tgagttcttggacttgcccgtccca

SEQ ID NO: 2176384 - DNA, 25 bp, Homo sapien
tcagttgcagcgagcttcttctgcc

SEQ ID NO: 2176385 - DNA, 25 bp, Homo sapien
gaacagctctgaccattggagtcac

SEQ ID NO: 2176386 - DNA, 25 bp, Homo sapien
caatgcattcgctcaacaagttgca

SEQ ID NO: 2176387 - DNA, 25 bp, Homo sapien
aatggcttttaaagagacccctgca

SEQ ID NO: 2176388 - DNA, 25 bp, Homo sapien
ggaggtcattccctcgtgcacttga

SEQ ID NO: 2176389 - DNA, 25 bp, Homo sapien
aaagcaagtctctgttgcggagtca

SEQ ID NO: 2176390 - DNA, 25 bp, Homo sapien
aaagcttcgggtgcggcccaggaga

SEQ ID NO: 2176391 - DNA, 25 bp, Homo sapien
cgggggcgcaaagcttcgggtgcgg

SEQ ID NO: 2176392 - DNA, 25 bp, Homo sapien
gcaaagcttcgggtgcggcccagga

SEQ ID NO: 2176393 - DNA, 25 bp, Homo sapien
ggcgcaaagcttcgggtgcggccca

SEQ ID NO: 2176394 - DNA, 25 bp, Homo sapien
ctcggaggggcgaaagagccaggtc

SEQ ID NO: 2176395 - DNA, 25 bp, Homo sapien
agccaggtcaggttgagggacagga

SEQ ID NO: 2176396 - DNA, 25 bp, Homo sapien
gatgagagtgtcctccggggtagcg

SEQ ID NO: 2176397 - DNA, 25 bp, Homo sapien
gtgtccaggagactgactgaaggat

SEQ ID NO: 2176398 - DNA, 25 bp, Homo sapien
acctcatccccgctcgcgcttccgc

SEQ ID NO: 2176399 - DNA, 25 bp, Homo sapien
acgcatcatctgcagccgagcggca

SEQ ID NO: 2176400 - DNA, 25 bp, Homo sapien
cttccgcaggtcaggccacgcgggt

SEQ ID NO: 2176401 - DNA, 25 bp, Homo sapien
cacccacgcatcatctgcagccgag

SEQ ID NO: 2176402 - DNA, 25 bp, Homo sapien
tctctctctgcgtggtctcgaagcc

SEQ ID NO: 2176403 - DNA, 25 bp, Homo sapien
ggggtcaggactgaagttcactctc

SEQ ID NO: 2176404 - DNA, 25 bp, Homo sapien
gcgcttggcggatcttctccatcag

SEQ ID NO: 2176405 - DNA, 25 bp, Homo sapien
gagccgcgcgggaattgggaggcgg

SEQ ID NO: 2176406 - DNA, 25 bp, Homo sapien
gcgcctggatcgttccctagccaag

SEQ ID NO: 2176407 - DNA, 25 bp, Homo sapien
catcttatccgaggcccggagatga

SEQ ID NO: 2176408 - DNA, 25 bp, Homo sapien
gttatttcgtgcatcacccaagccg

SEQ ID NO: 2176409 - DNA, 25 bp, Homo sapien
gccaagccaggtctaatcaatcacg

SEQ ID NO: 2176410 - DNA, 25 bp, Homo sapien
cttagctttggaagagctgcatcgg

SEQ ID NO: 2176411 - DNA, 25 bp, Homo sapien
gaagagctgcatcggccgttaagag

SEQ ID NO: 2176412 - DNA, 25 bp, Homo sapien
tttggaagagctgcatcggccgtta

SEQ ID NO: 2176413 - DNA, 25 bp, Homo sapien
tagctttggaagagctgcatcggcc

SEQ ID NO: 2176414 - DNA, 25 bp, Homo sapien
gaataagagctctgtgctaagagac

SEQ ID NO: 2176415 - DNA, 25 bp, Homo sapien
ccaatagtctgtggacgggcagaac

SEQ ID NO: 2176416 - DNA, 25 bp, Homo sapien
gaggaaattcgttgtttctgccgcc

SEQ ID NO: 2176417 - DNA, 25 bp, Homo sapien
caacaccgcctagtttggaggaaat

SEQ ID NO: 2176418 - DNA, 25 bp, Homo sapien
cttgtggtgtgacattcttttcatc

SEQ ID NO: 2176419 - DNA, 25 bp, Homo sapien
gtggtgtgacattcttttcatcctt

SEQ ID NO: 2176420 - DNA, 25 bp, Homo sapien
ttgtggtgtgacattcttttcatcc

SEQ ID NO: 2176421 - DNA, 25 bp, Homo sapien
tgtggtgtgacattcttttcatcct

SEQ ID NO: 2176422 - DNA, 25 bp, Homo sapien
cattcagcattaattgggccccttt

SEQ ID NO: 2176423 - DNA, 25 bp, Homo sapien
gcaaatactattggcttcttctgag

SEQ ID NO: 2176424 - DNA, 25 bp, Homo sapien
cagctgtggtgagtgtatgcaactt

SEQ ID NO: 2176425 - DNA, 25 bp, Homo sapien
tgtggaattccatcagaacaggttt

SEQ ID NO: 2176426 - DNA, 25 bp, Homo sapien
ctactcatcaaccgcaattcctctt

SEQ ID NO: 2176427 - DNA, 25 bp, Homo sapien
tactcatcaaccgcaattcctcttc

SEQ ID NO: 2176428 - DNA, 25 bp, Homo sapien
tccttgagagacaatcagggacatg

SEQ ID NO: 2176429 - DNA, 25 bp, Homo sapien
cagctgtaggtggagttccttgaga

SEQ ID NO: 2176430 - DNA, 25 bp, Homo sapien
gtaagatcctcaaagagcagttcag

SEQ ID NO: 2176431 - DNA, 25 bp, Homo sapien
gcagttcaggatcaaaattctttcc

SEQ ID NO: 2176432 - DNA, 25 bp, Homo sapien
gcttctctatcaatactatgaactc

SEQ ID NO: 2176433 - DNA, 25 bp, Homo sapien
tatcaatactatgaactccagtccc

SEQ ID NO: 2176434 - DNA, 25 bp, Homo sapien
gaatgaatgctttatgaccttttgt

SEQ ID NO: 2176435 - DNA, 25 bp, Homo sapien
gctttatgaccttttgttcttccca

SEQ ID NO: 2176436 - DNA, 25 bp, Homo sapien
gatcaccagggaaatttcctggctc

SEQ ID NO: 2176437 - DNA, 25 bp, Homo sapien
attccttggagttagcaggtacaag

SEQ ID NO: 2176438 - DNA, 25 bp, Homo sapien
tggctccacgccctgttcagaattc

SEQ ID NO: 2176439 - DNA, 25 bp, Homo sapien
gtacaagaatttactgtccttgatg

SEQ ID NO: 2176440 - DNA, 25 bp, Homo sapien
cagtccctactggaaacctggctac

SEQ ID NO: 2176441 - DNA, 25 bp, Homo sapien
ggtaacacacgcgactgagtgagtg

SEQ ID NO: 2176442 - DNA, 25 bp, Homo sapien
gatgacagcaggcatcacgtcgttt

SEQ ID NO: 2176443 - DNA, 25 bp, Homo sapien
tatgcaacctacgtccaaccttctg

SEQ ID NO: 2176444 - DNA, 25 bp, Homo sapien
gtaactggtgcgttgtttttgaagc

SEQ ID NO: 2176445 - DNA, 25 bp, Homo sapien
tcttgctggaagtaactggtgcgtt

SEQ ID NO: 2176446 - DNA, 25 bp, Homo sapien
cctttgatcttgaattgggtctatc

SEQ ID NO: 2176447 - DNA, 25 bp, Homo sapien
gggtctatcaggtaaacacactgac

SEQ ID NO: 2176448 - DNA, 25 bp, Homo sapien
ttgaatccttgcctggatggtacct

SEQ ID NO: 2176449 - DNA, 25 bp, Homo sapien
cagctctctaccagccgctttgaat

SEQ ID NO: 2176450 - DNA, 25 bp, Homo sapien
cttcttagcagccaattgctggtga

SEQ ID NO: 2176451 - DNA, 25 bp, Homo sapien
tccacagcttgtgtccatccaggag

SEQ ID NO: 2176452 - DNA, 25 bp, Homo sapien
ctccttgccccagtgaccttttctt

SEQ ID NO: 2176453 - DNA, 25 bp, Homo sapien
gcctttcttcacataatcgctccat

SEQ ID NO: 2176454 - DNA, 25 bp, Homo sapien
tggcaccggtaaagagaacagcctt

SEQ ID NO: 2176455 - DNA, 25 bp, Homo sapien
ttcttggcaccggtaaagagaacag

SEQ ID NO: 2176456 - DNA, 25 bp, Homo sapien
gatctgacttgggtgggcctgcttg

SEQ ID NO: 2176457 - DNA, 25 bp, Homo sapien
atctgacttgggtgggcctgcttgg

SEQ ID NO: 2176458 - DNA, 25 bp, Homo sapien
tctgacttgggtgggcctgcttggg

SEQ ID NO: 2176459 - DNA, 25 bp, Homo sapien
ggctctgcttggctattgccggcat

SEQ ID NO: 2176460 - DNA, 25 bp, Homo sapien
cacagggctctgcttggctattgcc

SEQ ID NO: 2176461 - DNA, 25 bp, Homo sapien
cagggctctgcttggctattgccgg

SEQ ID NO: 2176462 - DNA, 25 bp, Homo sapien
ctgtgccaggaagagaacaggcaca

SEQ ID NO: 2176463 - DNA, 25 bp, Homo sapien
tttctgtctgcataacaaaatgcat

SEQ ID NO: 2176464 - DNA, 25 bp, Homo sapien
tgtttctgtctgcataacaaaatgc

SEQ ID NO: 2176465 - DNA, 25 bp, Homo sapien
catctatttccaaatttcttgtttc

SEQ ID NO: 2176466 - DNA, 25 bp, Homo sapien
cttccaccttttacatctatttcca

SEQ ID NO: 2176467 - DNA, 25 bp, Homo sapien
agatgaggtaattcgacaatatggg

SEQ ID NO: 2176468 - DNA, 25 bp, Homo sapien
gatgaggtaattcgacaatatgggg

SEQ ID NO: 2176469 - DNA, 25 bp, Homo sapien
aagatgaggtaattcgacaatatgg

SEQ ID NO: 2176470 - DNA, 25 bp, Homo sapien
aaagatgaggtaattcgacaatatg

SEQ ID NO: 2176471 - DNA, 25 bp, Homo sapien
aatattcactttagactgagccagg

SEQ ID NO: 2176472 - DNA, 25 bp, Homo sapien
tcaatattcactttagactgagcca

SEQ ID NO: 2176473 - DNA, 25 bp, Homo sapien
ctaaagcatgccaatttcatcaata

SEQ ID NO: 2176474 - DNA, 25 bp, Homo sapien
tattcactttagactgagccaggtg

SEQ ID NO: 2176475 - DNA, 25 bp, Homo sapien
tgctttggaattctccttttgttac

SEQ ID NO: 2176476 - DNA, 25 bp, Homo sapien
catctgtgacatcagaatggtgctt

SEQ ID NO: 2176477 - DNA, 25 bp, Homo sapien
tgatagaatttctgtggagtccttc

SEQ ID NO: 2176478 - DNA, 25 bp, Homo sapien
tgaacagtcctcaactcttgaccat

SEQ ID NO: 2176479 - DNA, 25 bp, Homo sapien
tctgaacacagcagttgttgaatac

SEQ ID NO: 2176480 - DNA, 25 bp, Homo sapien
ttctgaacacagcagttgttgaata

SEQ ID NO: 2176481 - DNA, 25 bp, Homo sapien
gaacacagcagttgttgaatacata

SEQ ID NO: 2176482 - DNA, 25 bp, Homo sapien
atattctgaacacagcagttgttga

SEQ ID NO: 2176483 - DNA, 25 bp, Homo sapien
tgcactcatcaaaagcacatgtaga

SEQ ID NO: 2176484 - DNA, 25 bp, Homo sapien
ttgcactcatcaaaagcacatgtag

SEQ ID NO: 2176485 - DNA, 25 bp, Homo sapien
cactcatcaaaagcacatgtagatg

SEQ ID NO: 2176486 - DNA, 25 bp, Homo sapien
aattgcactcatcaaaagcacatgt

SEQ ID NO: 2176487 - DNA, 25 bp, Homo sapien
aatgtgggaattagaagtccttata

SEQ ID NO: 2176488 - DNA, 25 bp, Homo sapien
ttagaagtccttatacactcagtgt

SEQ ID NO: 2176489 - DNA, 25 bp, Homo sapien
ccttatacactcagtgttctggcga

SEQ ID NO: 2176490 - DNA, 25 bp, Homo sapien
tatacactcagtgttctggcgaatc

SEQ ID NO: 2176491 - DNA, 25 bp, Homo sapien
gacttatgtctaatgttaaactccc

SEQ ID NO: 2176492 - DNA, 25 bp, Homo sapien
cctagatttgacttatgtctaatgt

SEQ ID NO: 2176493 - DNA, 25 bp, Homo sapien
ttgacttatgtctaatgttaaactc

SEQ ID NO: 2176494 - DNA, 25 bp, Homo sapien
tgctcctagatttgacttatgtcta

SEQ ID NO: 2176495 - DNA, 25 bp, Homo sapien
tgttttcaaaagaaatggctttgat

SEQ ID NO: 2176496 - DNA, 25 bp, Homo sapien
cagccaagataatttaattttaatg

SEQ ID NO: 2176497 - DNA, 25 bp, Homo sapien
aatgttttcaaaagaaatggctttg

SEQ ID NO: 2176498 - DNA, 25 bp, Homo sapien
ggcagccaagataatttaattttaa

SEQ ID NO: 2176499 - DNA, 25 bp, Homo sapien
cacttgttggtgctgtctctctccc

SEQ ID NO: 2176500 - DNA, 25 bp, Homo sapien
gagaaaccagcctgttttatgtgga

SEQ ID NO: 2176501 - DNA, 25 bp, Homo sapien
tcactctcaagttgactgtgagtcg

SEQ ID NO: 2176502 - DNA, 25 bp, Homo sapien
ttccatgtgtcttagcaacttctca

SEQ ID NO: 2176503 - DNA, 25 bp, Homo sapien
tgagccatgcaggattccagctcca

SEQ ID NO: 2176504 - DNA, 25 bp, Homo sapien
attgatgagcttatctgccagacac

SEQ ID NO: 2176505 - DNA, 25 bp, Homo sapien
ggcattgatgagcttatctgccaga

SEQ ID NO: 2176506 - DNA, 25 bp, Homo sapien
ctaggtggcattgatgagcttatct

SEQ ID NO: 2176507 - DNA, 25 bp, Homo sapien
aggtggcattgatgagcttatctgc

SEQ ID NO: 2176508 - DNA, 25 bp, Homo sapien
aatggtcttgatgttccggaaggga

SEQ ID NO: 2176509 - DNA, 25 bp, Homo sapien
tcagcaatggtcttgatgttccgga

SEQ ID NO: 2176510 - DNA, 25 bp, Homo sapien
cagcaatggtcttgatgttccggaa

SEQ ID NO: 2176511 - DNA, 25 bp, Homo sapien
gcaatggtcttgatgttccggaagg

SEQ ID NO: 2176512 - DNA, 25 bp, Homo sapien
acagtcctggctcgcccaatgcgtg

SEQ ID NO: 2176513 - DNA, 25 bp, Homo sapien
acatggcgcagtggggacacgtcca

SEQ ID NO: 2176514 - DNA, 25 bp, Homo sapien
gtcctggctcgcccaatgcgtgtgg

SEQ ID NO: 2176515 - DNA, 25 bp, Homo sapien
atggcctgattcacatggcgcagtg

SEQ ID NO: 2176516 - DNA, 25 bp, Homo sapien
gttgatgatgcaccaggacttgcag

SEQ ID NO: 2176517 - DNA, 25 bp, Homo sapien
atgatgcaccaggacttgcagaggg

SEQ ID NO: 2176518 - DNA, 25 bp, Homo sapien
tgttgatgatgcaccaggacttgca

SEQ ID NO: 2176519 - DNA, 25 bp, Homo sapien
tgatgatgcaccaggacttgcagag

SEQ ID NO: 2176520 - DNA, 25 bp, Homo sapien
caggtgtatgatctcgaaggcatac

SEQ ID NO: 2176521 - DNA, 25 bp, Homo sapien
gagcaggtgtatgatctcgaaggca

SEQ ID NO: 2176522 - DNA, 25 bp, Homo sapien
gtgagcaggtgtatgatctcgaagg

SEQ ID NO: 2176523 - DNA, 25 bp, Homo sapien
ttgcctgtgagcaggtgtatgatct

SEQ ID NO: 2176524 - DNA, 25 bp, Homo sapien
tcaagggtctgtgccaccgctggtg

SEQ ID NO: 2176525 - DNA, 25 bp, Homo sapien
tcccaaaaagcttgatgtcaagggt

SEQ ID NO: 2176526 - DNA, 25 bp, Homo sapien
agcgtttgggggcataccaccctga

SEQ ID NO: 2176527 - DNA, 25 bp, Homo sapien
agttgttgcggccatgcatcatcat

SEQ ID NO: 2176528 - DNA, 25 bp, Homo sapien
catagcctgagaatctctgtcgctc

SEQ ID NO: 2176529 - DNA, 25 bp, Homo sapien
gcccatggttgagctaggacagtag

SEQ ID NO: 2176530 - DNA, 25 bp, Homo sapien
ccatggttgagctaggacagtaggc

SEQ ID NO: 2176531 - DNA, 25 bp, Homo sapien
gtgcccatggttgagctaggacagt

SEQ ID NO: 2176532 - DNA, 25 bp, Homo sapien
tggttgagctaggacagtaggcagc

SEQ ID NO: 2176533 - DNA, 25 bp, Homo sapien
tatgggtgccggctaatcagggcca

SEQ ID NO: 2176534 - DNA, 25 bp, Homo sapien
tgccttttccttgtgcatgctcgga

SEQ ID NO: 2176535 - DNA, 25 bp, Homo sapien
tccttgtgcatgctcggaggtggcc

SEQ ID NO: 2176536 - DNA, 25 bp, Homo sapien
ttttccttgtgcatgctcggaggtg

SEQ ID NO: 2176537 - DNA, 25 bp, Homo sapien
tggtgtagataagcgtatcccaggc

SEQ ID NO: 2176538 - DNA, 25 bp, Homo sapien
tcttcacacttagtctccaccttga

SEQ ID NO: 2176539 - DNA, 25 bp, Homo sapien
accatgccatggtgtagacaactct

SEQ ID NO: 2176540 - DNA, 25 bp, Homo sapien
gtagataagcgtatcccaggcacca

SEQ ID NO: 2176541 - DNA, 25 bp, Homo sapien
tgcttttggaagagtcaccctcgta

SEQ ID NO: 2176542 - DNA, 25 bp, Homo sapien
cacagtcatcaatattcagtaagcc

SEQ ID NO: 2176543 - DNA, 25 bp, Homo sapien
cctcgtattctctggagggccttgg

SEQ ID NO: 2176544 - DNA, 25 bp, Homo sapien
catttgcacagtcatcaatattcag

SEQ ID NO: 2176545 - DNA, 25 bp, Homo sapien
atgctgccattttcatccaagctgc

SEQ ID NO: 2176546 - DNA, 25 bp, Homo sapien
atgcccagatgctgccattttcatc

SEQ ID NO: 2176547 - DNA, 25 bp, Homo sapien
tgcccagatgctgccattttcatcc

SEQ ID NO: 2176548 - DNA, 25 bp, Homo sapien
ctgccattttcatccaagctgccat

SEQ ID NO: 2176549 - DNA, 25 bp, Homo sapien
gcggctgggcctgaacttagtcgct

SEQ ID NO: 2176550 - DNA, 25 bp, Homo sapien
tgggcctgaacttagtcgctgctct

SEQ ID NO: 2176551 - DNA, 25 bp, Homo sapien
tatcttcagaatggcaagcaccccg

SEQ ID NO: 2176552 - DNA, 25 bp, Homo sapien
cttagtcgctgctctcggagatagg

SEQ ID NO: 2176553 - DNA, 25 bp, Homo sapien
actcggtagttcttccatctcgctc

SEQ ID NO: 2176554 - DNA, 25 bp, Homo sapien
cacactcggtagttcttccatctcg

SEQ ID NO: 2176555 - DNA, 25 bp, Homo sapien
cactcggtagttcttccatctcgct

SEQ ID NO: 2176556 - DNA, 25 bp, Homo sapien
ctacacactcggtagttcttccatc

SEQ ID NO: 2176557 - DNA, 25 bp, Homo sapien
gactcagtggttcttccacctcgct

SEQ ID NO: 2176558 - DNA, 25 bp, Homo sapien
tgactcagtggttcttccacctcgc

SEQ ID NO: 2176559 - DNA, 25 bp, Homo sapien
ctgactcagtggttcttccacctcg

SEQ ID NO: 2176560 - DNA, 25 bp, Homo sapien
tccgcctcaggtgccgtcacggccg

SEQ ID NO: 2176561 - DNA, 25 bp, Homo sapien
tcctccggcggcagctcgtgctgag

SEQ ID NO: 2176562 - DNA, 25 bp, Homo sapien
gggtcgtgctgggtcccctcgctca

SEQ ID NO: 2176563 - DNA, 25 bp, Homo sapien
catctttgtcgcagcccctttcttc

SEQ ID NO: 2176564 - DNA, 25 bp, Homo sapien
acagggacgtgtcctcagaagcggt

SEQ ID NO: 2176565 - DNA, 25 bp, Homo sapien
ggaacagggacgtgtcctcagaagc

SEQ ID NO: 2176566 - DNA, 25 bp, Homo sapien
aacagggacgtgtcctcagaagcgg

SEQ ID NO: 2176567 - DNA, 25 bp, Homo sapien
gggacgtgtcctcagaagcggtggg

SEQ ID NO: 2176568 - DNA, 25 bp, Homo sapien
tcccgaggctctcggctttggactc

SEQ ID NO: 2176569 - DNA, 25 bp, Homo sapien
gaggtcccgaggctctcggctttgg

SEQ ID NO: 2176570 - DNA, 25 bp, Homo sapien
ggtcccgaggctctcggctttggac

SEQ ID NO: 2176571 - DNA, 25 bp, Homo sapien
tggccttggccggaggtcccgaggc

SEQ ID NO: 2176572 - DNA, 25 bp, Homo sapien
gattggtcaacactccactacccag

SEQ ID NO: 2176573 - DNA, 25 bp, Homo sapien
acgagacaatcacgcccctgagctg

SEQ ID NO: 2176574 - DNA, 25 bp, Homo sapien
gctgtgattggtcaacactccacta

SEQ ID NO: 2176575 - DNA, 25 bp, Homo sapien
ctctcgcgatcccaggacgagacaa

SEQ ID NO: 2176576 - DNA, 25 bp, Homo sapien
attcctctgctacaccttgaggatc

SEQ ID NO: 2176577 - DNA, 25 bp, Homo sapien
aatccctccatgctaactgggatgg

SEQ ID NO: 2176578 - DNA, 25 bp, Homo sapien
tccatgctaactgggatggatggag

SEQ ID NO: 2176579 - DNA, 25 bp, Homo sapien
tacaccttgaggatcattcacttct

SEQ ID NO: 2176580 - DNA, 25 bp, Homo sapien
atttgactcaatacatagatggaca

SEQ ID NO: 2176581 - DNA, 25 bp, Homo sapien
tcaatacatagatggacaaatccat

SEQ ID NO: 2176582 - DNA, 25 bp, Homo sapien
aattgttacttatttgactcaatac

SEQ ID NO: 2176583 - DNA, 25 bp, Homo sapien
gactcaatacatagatggacaaatc

SEQ ID NO: 2176584 - DNA, 25 bp, Homo sapien
tatgctagtgcaagtaatattattt

SEQ ID NO: 2176585 - DNA, 25 bp, Homo sapien
aagtaatattatttggccctgggca

SEQ ID NO: 2176586 - DNA, 25 bp, Homo sapien
tagtgcaagtaatattatttggccc

SEQ ID NO: 2176587 - DNA, 25 bp, Homo sapien
tgcaagtaatattatttggccctgg

SEQ ID NO: 2176588 - DNA, 25 bp, Homo sapien
ttgcaatgatgtgagttcttgtaga

SEQ ID NO: 2176589 - DNA, 25 bp, Homo sapien
tgcaatgatgtgagttcttgtagat

SEQ ID NO: 2176590 - DNA, 25 bp, Homo sapien
cttgcaatgatgtgagttcttgtag

SEQ ID NO: 2176591 - DNA, 25 bp, Homo sapien
gcaatgatgtgagttcttgtagatg

SEQ ID NO: 2176592 - DNA, 25 bp, Homo sapien
tcccagcaaaagtcctgattccggc

SEQ ID NO: 2176593 - DNA, 25 bp, Homo sapien
cagcaaaagtcctgattccggccat

SEQ ID NO: 2176594 - DNA, 25 bp, Homo sapien
ctatcccagcaaaagtcctgattcc

SEQ ID NO: 2176595 - DNA, 25 bp, Homo sapien
tatcccagcaaaagtcctgattccg

SEQ ID NO: 2176596 - DNA, 25 bp, Homo sapien
gagacaccatcaataacatcaacag

SEQ ID NO: 2176597 - DNA, 25 bp, Homo sapien
tctaaattgatagtcagagacacca

SEQ ID NO: 2176598 - DNA, 25 bp, Homo sapien
taactcctggcttcatcagggtccc

SEQ ID NO: 2176599 - DNA, 25 bp, Homo sapien
cagggtcccttttgcaatgagtttt

SEQ ID NO: 2176600 - DNA, 25 bp, Homo sapien
ctgaattttcaaacgcattgtcatt

SEQ ID NO: 2176601 - DNA, 25 bp, Homo sapien
tgaagacatcaaaaggtcgcggagc

SEQ ID NO: 2176602 - DNA, 25 bp, Homo sapien
aactcaacagagtgctctgatgagc

SEQ ID NO: 2176603 - DNA, 25 bp, Homo sapien
tcaggtaatccgcaggcattgcaac

SEQ ID NO: 2176604 - DNA, 25 bp, Homo sapien
caaataatcaagtgtgacccaaaat

SEQ ID NO: 2176605 - DNA, 25 bp, Homo sapien
gatgattgcgatatcacaaacaaga

SEQ ID NO: 2176606 - DNA, 25 bp, Homo sapien
gattcctgtcataatcctcaatttg

SEQ ID NO: 2176607 - DNA, 25 bp, Homo sapien
gcaggcactcgaactcttaacaaat

SEQ ID NO: 2176608 - DNA, 25 bp, Homo sapien
agctgtccggtcattgcctgaggag

SEQ ID NO: 2176609 - DNA, 25 bp, Homo sapien
tccggtcattgcctgaggagagact

SEQ ID NO: 2176610 - DNA, 25 bp, Homo sapien
gctgtccggtcattgcctgaggaga

SEQ ID NO: 2176611 - DNA, 25 bp, Homo sapien
tgtccggtcattgcctgaggagaga

SEQ ID NO: 2176612 - DNA, 25 bp, Homo sapien
tgttgccattagagtcacaagcagg

SEQ ID NO: 2176613 - DNA, 25 bp, Homo sapien
tcacaagcaggagcaagtacctcca

SEQ ID NO: 2176614 - DNA, 25 bp, Homo sapien
tgccattagagtcacaagcaggagc

SEQ ID NO: 2176615 - DNA, 25 bp, Homo sapien
acaagcaggagcaagtacctccacc

SEQ ID NO: 2176616 - DNA, 25 bp, Homo sapien
taaggattggaaggctagtacagca

SEQ ID NO: 2176617 - DNA, 25 bp, Homo sapien
gcaatagacgttcattttccaggaa

SEQ ID NO: 2176618 - DNA, 25 bp, Homo sapien
tagtacagcatgaagaagtcaggct

SEQ ID NO: 2176619 - DNA, 25 bp, Homo sapien
ccaggaaagggttaatctctacgtg

SEQ ID NO: 2176620 - DNA, 25 bp, Homo sapien
taaagaataatgacctgctatggaa

SEQ ID NO: 2176621 - DNA, 25 bp, Homo sapien
ctttacacagaaggacgagatcatg

SEQ ID NO: 2176622 - DNA, 25 bp, Homo sapien
tctgggattagtgctcggtgccata

SEQ ID NO: 2176623 - DNA, 25 bp, Homo sapien
taagcaacggcataatgtctccaac

SEQ ID NO: 2176624 - DNA, 25 bp, Homo sapien
tggctgaggcatgcttattagtagc

SEQ ID NO: 2176625 - DNA, 25 bp, Homo sapien
actgtgtggttgaatcagatagcca

SEQ ID NO: 2176626 - DNA, 25 bp, Homo sapien
gaagtctcagtatctttccccggct

SEQ ID NO: 2176627 - DNA, 25 bp, Homo sapien
tagctataaatgacacagagccact

SEQ ID NO: 2176628 - DNA, 25 bp, Homo sapien
tatccaaagctgtttgaaaatctcg

SEQ ID NO: 2176629 - DNA, 25 bp, Homo sapien
gctgtttgaaaatctcgtcataaag

SEQ ID NO: 2176630 - DNA, 25 bp, Homo sapien
ccaaagctgtttgaaaatctcgtca

SEQ ID NO: 2176631 - DNA, 25 bp, Homo sapien
gaaaatctcgtcataaagcatccag

SEQ ID NO: 2176632 - DNA, 25 bp, Homo sapien
tgcatgtggtgtctactgagagcct

SEQ ID NO: 2176633 - DNA, 25 bp, Homo sapien
taaacagttggctaacacatacgtg

SEQ ID NO: 2176634 - DNA, 25 bp, Homo sapien
ttatccattggccagctatgtaggc

SEQ ID NO: 2176635 - DNA, 25 bp, Homo sapien
cagttctggaagctgcgcagtccaa

SEQ ID NO: 2176636 - DNA, 25 bp, Homo sapien
gtagtcgcaaccattcaggaggctg

SEQ ID NO: 2176637 - DNA, 25 bp, Homo sapien
tgggtgatagagagagatccagtcc

SEQ ID NO: 2176638 - DNA, 25 bp, Homo sapien
agtctgggtgatagagagagatcca

SEQ ID NO: 2176639 - DNA, 25 bp, Homo sapien
ctgtagtcgcaaccattcaggaggc

SEQ ID NO: 2176640 - DNA, 25 bp, Homo sapien
aactgtggagaagcacctatcatca

SEQ ID NO: 2176641 - DNA, 25 bp, Homo sapien
tcactgttaattttcgacgaagctc

SEQ ID NO: 2176642 - DNA, 25 bp, Homo sapien
taatccatattattttccacggttg

SEQ ID NO: 2176643 - DNA, 25 bp, Homo sapien
cacggttgagccctgtttcacaatg

SEQ ID NO: 2176644 - DNA, 25 bp, Homo sapien
tcaatctacagcatgtgcagcattc

SEQ ID NO: 2176645 - DNA, 25 bp, Homo sapien
gctctctggctggagttgactcatc

SEQ ID NO: 2176646 - DNA, 25 bp, Homo sapien
ggagtcagcatactcgggctctctg

SEQ ID NO: 2176647 - DNA, 25 bp, Homo sapien
gcatgtgcagcattcaatgtttctt

SEQ ID NO: 2176648 - DNA, 25 bp, Homo sapien
ccgggaagggactgtcgggcactgt

SEQ ID NO: 2176649 - DNA, 25 bp, Homo sapien
cactgtggatccatagattgaagcc

SEQ ID NO: 2176650 - DNA, 25 bp, Homo sapien
gattgaagccgtctccagatggaaa

SEQ ID NO: 2176651 - DNA, 25 bp, Homo sapien
tctttcttggctgacacaaccaggc

SEQ ID NO: 2176652 - DNA, 25 bp, Homo sapien
gtaggagagaatgcaagtactgtgc

SEQ ID NO: 2176653 - DNA, 25 bp, Homo sapien
caagtactgtgctattggctcattt

SEQ ID NO: 2176654 - DNA, 25 bp, Homo sapien
cttcggtaggagagaatgcaagtac

SEQ ID NO: 2176655 - DNA, 25 bp, Homo sapien
gcaagtactgtgctattggctcatt

SEQ ID NO: 2176656 - DNA, 25 bp, Homo sapien
tacttctccaaaggtttagatttgc

SEQ ID NO: 2176657 - DNA, 25 bp, Homo sapien
aaaaggaagaagtctcgccaaagct

SEQ ID NO: 2176658 - DNA, 25 bp, Homo sapien
ttctccaaaggtttagatttgccca

SEQ ID NO: 2176659 - DNA, 25 bp, Homo sapien
agaagtctcgccaaagctgagggct

SEQ ID NO: 2176660 - DNA, 25 bp, Homo sapien
gtcatgacctggtagaaactgtgca

SEQ ID NO: 2176661 - DNA, 25 bp, Homo sapien
tgcaggcagcattgtagtaaacatc

SEQ ID NO: 2176662 - DNA, 25 bp, Homo sapien
aattctcaaatacggtgcaggcagc

SEQ ID NO: 2176663 - DNA, 25 bp, Homo sapien
gcagaactagcagcagagaacgtaa

SEQ ID NO: 2176664 - DNA, 25 bp, Homo sapien
gatctctgaacactggacactatca

SEQ ID NO: 2176665 - DNA, 25 bp, Homo sapien
tcagtggcagtttggttattaaccc

SEQ ID NO: 2176666 - DNA, 25 bp, Homo sapien
gcactatcggcttcacaaaaacact

SEQ ID NO: 2176667 - DNA, 25 bp, Homo sapien
gactggctaacttcaggtagatggg

SEQ ID NO: 2176668 - DNA, 25 bp, Homo sapien
tttgcccacgatgggatatagcagc

SEQ ID NO: 2176669 - DNA, 25 bp, Homo sapien
tcatagcaggtatcctttgcccacg

SEQ ID NO: 2176670 - DNA, 25 bp, Homo sapien
caggtatcctttgcccacgatggga

SEQ ID NO: 2176671 - DNA, 25 bp, Homo sapien
tgggatatagcagcgcagtcattcc

SEQ ID NO: 2176672 - DNA, 25 bp, Homo sapien
cagtgaagaaagattcaaatttgct

SEQ ID NO: 2176673 - DNA, 25 bp, Homo sapien
ctggagtatgttagaactcagtgaa

SEQ ID NO: 2176674 - DNA, 25 bp, Homo sapien
agtgaagaaagattcaaatttgctt

SEQ ID NO: 2176675 - DNA, 25 bp, Homo sapien
gtgaagaaagattcaaatttgcttg

SEQ ID NO: 2176676 - DNA, 25 bp, Homo sapien
ggcacagtgctcgaaatgtcacata

SEQ ID NO: 2176677 - DNA, 25 bp, Homo sapien
tgatacagccacaacgaaagtagca

SEQ ID NO: 2176678 - DNA, 25 bp, Homo sapien
gaaaaggccgccataccattgaaac

SEQ ID NO: 2176679 - DNA, 25 bp, Homo sapien
cattttgtacatagagaaggcgctc

SEQ ID NO: 2176680 - DNA, 25 bp, Homo sapien
ccactcgaggggctttctgctcaat

SEQ ID NO: 2176681 - DNA, 25 bp, Homo sapien
gaatggatcttgaacacagtgtgta

SEQ ID NO: 2176682 - DNA, 25 bp, Homo sapien
ccaaagataagccactcgaggggct

SEQ ID NO: 2176683 - DNA, 25 bp, Homo sapien
ccatgtgtctcccagcgagtctgtg

SEQ ID NO: 2176684 - DNA, 25 bp, Homo sapien
agtctcctgcatcctgaaagccctc

SEQ ID NO: 2176685 - DNA, 25 bp, Homo sapien
gtgaataaacaggtcaatttttctc

SEQ ID NO: 2176686 - DNA, 25 bp, Homo sapien
gaataaacaggtcaatttttctcat

SEQ ID NO: 2176687 - DNA, 25 bp, Homo sapien
aataaacaggtcaatttttctcatt

SEQ ID NO: 2176688 - DNA, 25 bp, Homo sapien
aaggcagaacaatcttatcaggtaa

SEQ ID NO: 2176689 - DNA, 25 bp, Homo sapien
caatcttatcaggtaaggtcattcc

SEQ ID NO: 2176690 - DNA, 25 bp, Homo sapien
gaacaatcttatcaggtaaggtcat

SEQ ID NO: 2176691 - DNA, 25 bp, Homo sapien
ttatcaggtaaggtcattccagatg

SEQ ID NO: 2176692 - DNA, 25 bp, Homo sapien
gacagaatgtcgtgacgtggctcat

SEQ ID NO: 2176693 - DNA, 25 bp, Homo sapien
gaagacacaaatcctctgggtcaga

SEQ ID NO: 2176694 - DNA, 25 bp, Homo sapien
agtaatagcagtaggcagagcagcc

SEQ ID NO: 2176695 - DNA, 25 bp, Homo sapien
caaagggttgggattgtcactaggc

SEQ ID NO: 2176696 - DNA, 25 bp, Homo sapien
actggctccacacgaggtgtaagtc

SEQ ID NO: 2176697 - DNA, 25 bp, Homo sapien
gcagcaagacaccttgatgtaagtc

SEQ ID NO: 2176698 - DNA, 25 bp, Homo sapien
cacacgaggtgtaagtctgcatcct

SEQ ID NO: 2176699 - DNA, 25 bp, Homo sapien
taagtcacatagaactggctccaca

SEQ ID NO: 2176700 - DNA, 25 bp, Homo sapien
gaaagctcctgtgtgatataaaaac

SEQ ID NO: 2176701 - DNA, 25 bp, Homo sapien
tgtgtttgctttacccaagttaatc

SEQ ID NO: 2176702 - DNA, 25 bp, Homo sapien
cttttctcctacatgtgcaattact

SEQ ID NO: 2176703 - DNA, 25 bp, Homo sapien
cctcaggcatgagtataggatggga

SEQ ID NO: 2176704 - DNA, 25 bp, Homo sapien
tctgcagccaacctacagcacttgg

SEQ ID NO: 2176705 - DNA, 25 bp, Homo sapien
actttgcaaggccaatcgggctgat

SEQ ID NO: 2176706 - DNA, 25 bp, Homo sapien
gctgatgcatactcagcatcccttt

SEQ ID NO: 2176707 - DNA, 25 bp, Homo sapien
cctgtcagggtaagatcaactttgc

SEQ ID NO: 2176708 - DNA, 25 bp, Homo sapien
gaatggatctagttgtgcaattatc

SEQ ID NO: 2176709 - DNA, 25 bp, Homo sapien
gtcgctatgtctgaggtgatgggtc

SEQ ID NO: 2176710 - DNA, 25 bp, Homo sapien
actgaggctgggttgggtcgctatg

SEQ ID NO: 2176711 - DNA, 25 bp, Homo sapien
agacaacgactatatcagggatccc

SEQ ID NO: 2176712 - DNA, 25 bp, Homo sapien
gagtcaactttctcaaccaagtcaa

SEQ ID NO: 2176713 - DNA, 25 bp, Homo sapien
caactttctcaaccaagtcaacttc

SEQ ID NO: 2176714 - DNA, 25 bp, Homo sapien
gtcaactttctcaaccaagtcaact

SEQ ID NO: 2176715 - DNA, 25 bp, Homo sapien
cgagtcaactttctcaaccaagtca

SEQ ID NO: 2176716 - DNA, 25 bp, Homo sapien
gttgctgattgaactttgctcctgt

SEQ ID NO: 2176717 - DNA, 25 bp, Homo sapien
gcactcagcacagttgctgattgaa

SEQ ID NO: 2176718 - DNA, 25 bp, Homo sapien
agttgctgattgaactttgctcctg

SEQ ID NO: 2176719 - DNA, 25 bp, Homo sapien
gctgattgaactttgctcctgtttc

SEQ ID NO: 2176720 - DNA, 25 bp, Homo sapien
ctatttcacttcggattcctggatg

SEQ ID NO: 2176721 - DNA, 25 bp, Homo sapien
tttcacttcggattcctggatgcca

SEQ ID NO: 2176722 - DNA, 25 bp, Homo sapien
tcacttcggattcctggatgccaac

SEQ ID NO: 2176723 - DNA, 25 bp, Homo sapien
tatttcacttcggattcctggatgc

SEQ ID NO: 2176724 - DNA, 25 bp, Homo sapien
ctgagatcctcatggtcaatgcctg

SEQ ID NO: 2176725 - DNA, 25 bp, Homo sapien
tggtagtgcactttctcacagctgc

SEQ ID NO: 2176726 - DNA, 25 bp, Homo sapien
aataaatccaaccacggctctcttc

SEQ ID NO: 2176727 - DNA, 25 bp, Homo sapien
gtcaatgcctgtccatccctgactg

SEQ ID NO: 2176728 - DNA, 25 bp, Homo sapien
gcaaaccctattgtggaagacatgg

SEQ ID NO: 2176729 - DNA, 25 bp, Homo sapien
gctggaaatggtccagctccttcct

SEQ ID NO: 2176730 - DNA, 25 bp, Homo sapien
ttcttggcttcccctgaggcactag

SEQ ID NO: 2176731 - DNA, 25 bp, Homo sapien
aaccctattgtggaagacatggctg

SEQ ID NO: 2176732 - DNA, 25 bp, Homo sapien
gatgtcaggcaggaaaacctctctc

SEQ ID NO: 2176733 - DNA, 25 bp, Homo sapien
tgatgtcaggcaggaaaacctctct

SEQ ID NO: 2176734 - DNA, 25 bp, Homo sapien
gccactaaatcagggccacccagta

SEQ ID NO: 2176735 - DNA, 25 bp, Homo sapien
tcagggccacccagtacaatacaac

SEQ ID NO: 2176736 - DNA, 25 bp, Homo sapien
cgcatgggcttctttggggattcca

SEQ ID NO: 2176737 - DNA, 25 bp, Homo sapien
tacaaccatagcatgcccgcatggg

SEQ ID NO: 2176738 - DNA, 25 bp, Homo sapien
gatcactagggtccttgggagttta

SEQ ID NO: 2176739 - DNA, 25 bp, Homo sapien
ccagaccacagagcccgaagtatgt

SEQ ID NO: 2176740 - DNA, 25 bp, Homo sapien
ggtagcattcatatggcatcttcag

SEQ ID NO: 2176741 - DNA, 25 bp, Homo sapien
gttcttcaaacagccatcgcccaag

SEQ ID NO: 2176742 - DNA, 25 bp, Homo sapien
gattttgagaagtggaaaactgtct

SEQ ID NO: 2176743 - DNA, 25 bp, Homo sapien
cctttgcataggagtcagcgtggat

SEQ ID NO: 2176744 - DNA, 25 bp, Homo sapien
gcgtggattttgagaagtggaaaac

SEQ ID NO: 2176745 - DNA, 25 bp, Homo sapien
ttggtctaaaggcttggttatcctc

SEQ ID NO: 2176746 - DNA, 25 bp, Homo sapien
aaatgatccgcccacgtcagccttc

SEQ ID NO: 2176747 - DNA, 25 bp, Homo sapien
acctcaaatgatccgcccacgtcag

SEQ ID NO: 2176748 - DNA, 25 bp, Homo sapien
ctcaaatgatccgcccacgtcagcc

SEQ ID NO: 2176749 - DNA, 25 bp, Homo sapien
caaatgatccgcccacgtcagcctt

SEQ ID NO: 2176750 - DNA, 25 bp, Homo sapien
gaaaggtccgtgagaacataaagag

SEQ ID NO: 2176751 - DNA, 25 bp, Homo sapien
tggcgatgggtaatttggacgtcat

SEQ ID NO: 2176752 - DNA, 25 bp, Homo sapien
gagccagtacatgcgttcataatga

SEQ ID NO: 2176753 - DNA, 25 bp, Homo sapien
caaagaaacgccaaaccagagtcct

SEQ ID NO: 2176754 - DNA, 25 bp, Homo sapien
ggacctgggtgtcattgtttattga

SEQ ID NO: 2176755 - DNA, 25 bp, Homo sapien
ggaattattattagcgccaggacct

SEQ ID NO: 2176756 - DNA, 25 bp, Homo sapien
tattagcgccaggacctgggtgtca

SEQ ID NO: 2176757 - DNA, 25 bp, Homo sapien
gccaggacctgggtgtcattgttta

SEQ ID NO: 2176758 - DNA, 25 bp, Homo sapien
tagaactccagactttggccctgta

SEQ ID NO: 2176759 - DNA, 25 bp, Homo sapien
aagatagcgaagttggaggcctgac

SEQ ID NO: 2176760 - DNA, 25 bp, Homo sapien
gaggcctgactagaactccagactt

SEQ ID NO: 2176761 - DNA, 25 bp, Homo sapien
gactttggccctgtaattcatcact

SEQ ID NO: 2176762 - DNA, 25 bp, Homo sapien
taagaactatgatggagtacctgct

SEQ ID NO: 2176763 - DNA, 25 bp, Homo sapien
agaactatgatggagtacctgctgg

SEQ ID NO: 2176764 - DNA, 25 bp, Homo sapien
tgattaagaactatgatggagtacc

SEQ ID NO: 2176765 - DNA, 25 bp, Homo sapien
ttaagaactatgatggagtacctgc

SEQ ID NO: 2176766 - DNA, 25 bp, Homo sapien
tttatttctaattcaattccatctt

SEQ ID NO: 2176767 - DNA, 25 bp, Homo sapien
tcaatttatttctaattcaattcca

SEQ ID NO: 2176768 - DNA, 25 bp, Homo sapien
tatttctaattcaattccatctttg

SEQ ID NO: 2176769 - DNA, 25 bp, Homo sapien
ttctaattcaattccatctttgttc

SEQ ID NO: 2176770 - DNA, 25 bp, Homo sapien
tctcagtctatcacataagctggag

SEQ ID NO: 2176771 - DNA, 25 bp, Homo sapien
cagggtctcagtctatcacataagc

SEQ ID NO: 2176772 - DNA, 25 bp, Homo sapien
gggtctcagtctatcacataagctg

SEQ ID NO: 2176773 - DNA, 25 bp, Homo sapien
acagggtctcagtctatcacataag

SEQ ID NO: 2176774 - DNA, 25 bp, Homo sapien
aggatccaagagaatacagctctgc

SEQ ID NO: 2176775 - DNA, 25 bp, Homo sapien
agtccatttgagtggccgctttgca

SEQ ID NO: 2176776 - DNA, 25 bp, Homo sapien
gagctctgagaggatccaagagaat

SEQ ID NO: 2176777 - DNA, 25 bp, Homo sapien
cacctatgccgtgaaaatgtcccca

SEQ ID NO: 2176778 - DNA, 25 bp, Homo sapien
aacccaatctcacaacggggaccag

SEQ ID NO: 2176779 - DNA, 25 bp, Homo sapien
aggaagaacccaatctcacaacggg

SEQ ID NO: 2176780 - DNA, 25 bp, Homo sapien
caacggggaccagagactgccgcct

SEQ ID NO: 2176781 - DNA, 25 bp, Homo sapien
cggggaccagagactgccgccttac

SEQ ID NO: 2176782 - DNA, 25 bp, Homo sapien
gccaggaaaaagaggctctaccagc

SEQ ID NO: 2176783 - DNA, 25 bp, Homo sapien
ccaggaaaaagaggctctaccagct

SEQ ID NO: 2176784 - DNA, 25 bp, Homo sapien
atctggcctggccataggaagctcc

SEQ ID NO: 2176785 - DNA, 25 bp, Homo sapien
catagacaatgcatgagctagctcc

SEQ ID NO: 2176786 - DNA, 25 bp, Homo sapien
aggaagctccgccatggcagagaaa

SEQ ID NO: 2176787 - DNA, 25 bp, Homo sapien
aagtccttcacatggtccagccctg

SEQ ID NO: 2176788 - DNA, 25 bp, Homo sapien
tggagacgttttgagacattaatga

SEQ ID NO: 2176789 - DNA, 25 bp, Homo sapien
cctttgtagatcatgtatccttgga

SEQ ID NO: 2176790 - DNA, 25 bp, Homo sapien
ggcactctgtggtcctttgtagatc

SEQ ID NO: 2176791 - DNA, 25 bp, Homo sapien
agtttttcaacccaattctgcaggg

SEQ ID NO: 2176792 - DNA, 25 bp, Homo sapien
taggaaatgccatgtaatgttcttt

SEQ ID NO: 2176793 - DNA, 25 bp, Homo sapien
tggtttttgtgctaagtcccatctt

SEQ ID NO: 2176794 - DNA, 25 bp, Homo sapien
gatggtttttgtgctaagtcccatc

SEQ ID NO: 2176795 - DNA, 25 bp, Homo sapien
cccatcttcagtaggaaatgccatg

SEQ ID NO: 2176796 - DNA, 25 bp, Homo sapien
tcattgccaatctcagacctgttaa

SEQ ID NO: 2176797 - DNA, 25 bp, Homo sapien
tctgcatccgaatatccccaaagca

SEQ ID NO: 2176798 - DNA, 25 bp, Homo sapien
tgccaatctcagacctgttaagttg

SEQ ID NO: 2176799 - DNA, 25 bp, Homo sapien
tctcagacctgttaagttgcttcat

SEQ ID NO: 2176800 - DNA, 25 bp, Homo sapien
caaactggactgtgggcaccatctc

SEQ ID NO: 2176801 - DNA, 25 bp, Homo sapien
taaaggaggaactctgtcttctacc

SEQ ID NO: 2176802 - DNA, 25 bp, Homo sapien
taagaatccatactgaaggaagggc

SEQ ID NO: 2176803 - DNA, 25 bp, Homo sapien
aaggaagggcatggtccgaagtcca

SEQ ID NO: 2176804 - DNA, 25 bp, Homo sapien
tgttttaaccatgccaagagaagtc

SEQ ID NO: 2176805 - DNA, 25 bp, Homo sapien
ctgttttaaccatgccaagagaagt

SEQ ID NO: 2176806 - DNA, 25 bp, Homo sapien
aaaggtgatgcagcacatgatgatc

SEQ ID NO: 2176807 - DNA, 25 bp, Homo sapien
gcacatgatgatctcagagcccttc

SEQ ID NO: 2176808 - DNA, 25 bp, Homo sapien
cagagcccttctgtatgtgtttgag

SEQ ID NO: 2176809 - DNA, 25 bp, Homo sapien
atgtgtttgagatgtccgagcttac

SEQ ID NO: 2176810 - DNA, 25 bp, Homo sapien
aatattgcatgaagtacatcctgtt

SEQ ID NO: 2176811 - DNA, 25 bp, Homo sapien
atattgcatgaagtacatcctgttt

SEQ ID NO: 2176812 - DNA, 25 bp, Homo sapien
caatattgcatgaagtacatcctgt

SEQ ID NO: 2176813 - DNA, 25 bp, Homo sapien
tattgcatgaagtacatcctgtttc

SEQ ID NO: 2176814 - DNA, 25 bp, Homo sapien
ctgtggccagcctgtcagagcacgt

SEQ ID NO: 2176815 - DNA, 25 bp, Homo sapien
gaactgttgtaggtgttcttcctgc

SEQ ID NO: 2176816 - DNA, 25 bp, Homo sapien
gagcacgtcctcttctttcgggcat

SEQ ID NO: 2176817 - DNA, 25 bp, Homo sapien
ggatttcttcagtcttccataagag

SEQ ID NO: 2176818 - DNA, 25 bp, Homo sapien
catccacccagcgtgcctttcttga

SEQ ID NO: 2176819 - DNA, 25 bp, Homo sapien
acccagcatccacccagcgtgcctt

SEQ ID NO: 2176820 - DNA, 25 bp, Homo sapien
gggaagtggcacccagcatccaccc

SEQ ID NO: 2176821 - DNA, 25 bp, Homo sapien
tggcacccagcatccacccagcgtg

SEQ ID NO: 2176822 - DNA, 25 bp, Homo sapien
caaacctgatcttgctacatttgtg

SEQ ID NO: 2176823 - DNA, 25 bp, Homo sapien
gttcaggacaggttactcccatcca

SEQ ID NO: 2176824 - DNA, 25 bp, Homo sapien
ctgctactgcagggctcttcacaca

SEQ ID NO: 2176825 - DNA, 25 bp, Homo sapien
taggggcgccactgagttttcaaag

SEQ ID NO: 2176826 - DNA, 25 bp, Homo sapien
caggaagcgagagtttggatctgaa

SEQ ID NO: 2176827 - DNA, 25 bp, Homo sapien
ctggaatcttatgcagagtgacagg

SEQ ID NO: 2176828 - DNA, 25 bp, Homo sapien
cctggaatcttatgcagagtgacag

SEQ ID NO: 2176829 - DNA, 25 bp, Homo sapien
agcgagagtttggatctgaagtact

SEQ ID NO: 2176830 - DNA, 25 bp, Homo sapien
tccctcatgtcacagcaaacttcaa

SEQ ID NO: 2176831 - DNA, 25 bp, Homo sapien
agctccgttttgacctgtagtgaca

SEQ ID NO: 2176832 - DNA, 25 bp, Homo sapien
tctgtcaactctctttgaatccctc

SEQ ID NO: 2176833 - DNA, 25 bp, Homo sapien
ctgcaagctccgttttgacctgtag

SEQ ID NO: 2176834 - DNA, 25 bp, Homo sapien
ctctgatctccaatggtccctgcat

SEQ ID NO: 2176835 - DNA, 25 bp, Homo sapien
tgtccaagccacaggtgaccctcat

SEQ ID NO: 2176836 - DNA, 25 bp, Homo sapien
aaatgcaatataaatcatggacaga

SEQ ID NO: 2176837 - DNA, 25 bp, Homo sapien
gaaatgcaatataaatcatggacag

SEQ ID NO: 2176838 - DNA, 25 bp, Homo sapien
gccaggcttctggtctagcttgcag

SEQ ID NO: 2176839 - DNA, 25 bp, Homo sapien
tatgctcagattcaagctccccagt

SEQ ID NO: 2176840 - DNA, 25 bp, Homo sapien
ctctttccaggtgcatatgctcaga

SEQ ID NO: 2176841 - DNA, 25 bp, Homo sapien
aacatacttgattcctggcagtgag

SEQ ID NO: 2176842 - DNA, 25 bp, Homo sapien
gaatatccaatgctttaatacaagg

SEQ ID NO: 2176843 - DNA, 25 bp, Homo sapien
tgtgaaggatgaattcaccatccct

SEQ ID NO: 2176844 - DNA, 25 bp, Homo sapien
tcatcttcgctcagagattagggaa

SEQ ID NO: 2176845 - DNA, 25 bp, Homo sapien
tgactctgaatatggaatactgcca

SEQ ID NO: 2176846 - DNA, 25 bp, Homo sapien
caataaactatggatgacgtggcac

SEQ ID NO: 2176847 - DNA, 25 bp, Homo sapien
tccaaaaagtgcagcccatcagtgt

SEQ ID NO: 2176848 - DNA, 25 bp, Homo sapien
tcaggaggctaaaatcacagcgcag

SEQ ID NO: 2176849 - DNA, 25 bp, Homo sapien
gagtagctcaaggacatcaaagggc

SEQ ID NO: 2176850 - DNA, 25 bp, Homo sapien
cggctcaagtttccgtcaggaacca

SEQ ID NO: 2176851 - DNA, 25 bp, Homo sapien
tcggctcaagtttccgtcaggaacc

SEQ ID NO: 2176852 - DNA, 25 bp, Homo sapien
atctcggctcaagtttccgtcagga

SEQ ID NO: 2176853 - DNA, 25 bp, Homo sapien
cctgcagggaattcagcaccagggt

SEQ ID NO: 2176854 - DNA, 25 bp, Homo sapien
gggagaggtttctgttgcagccaaa

SEQ ID NO: 2176855 - DNA, 25 bp, Homo sapien
ttaaaggggagaggtttctgttgca

SEQ ID NO: 2176856 - DNA, 25 bp, Homo sapien
gaggtttctgttgcagccaaagcat

SEQ ID NO: 2176857 - DNA, 25 bp, Homo sapien
gagaggtttctgttgcagccaaagc

SEQ ID NO: 2176858 - DNA, 25 bp, Homo sapien
ttctccggggattctgaagctttgt

SEQ ID NO: 2176859 - DNA, 25 bp, Homo sapien
cttctccggggattctgaagctttg

SEQ ID NO: 2176860 - DNA, 25 bp, Homo sapien
aaacagccatgggtgatctcagccc

SEQ ID NO: 2176861 - DNA, 25 bp, Homo sapien
catgtggccgctttgctaacagctg

SEQ ID NO: 2176862 - DNA, 25 bp, Homo sapien
aatgggatacatgacacccctggca

SEQ ID NO: 2176863 - DNA, 25 bp, Homo sapien
tgtccatgtgagtaagtaaaaccct

SEQ ID NO: 2176864 - DNA, 25 bp, Homo sapien
gatggaatttgaaaacggaacctga

SEQ ID NO: 2176865 - DNA, 25 bp, Homo sapien
tgtccgctaacgagaattccatttg

SEQ ID NO: 2176866 - DNA, 25 bp, Homo sapien
gacatttgccggactcttacacttc

SEQ ID NO: 2176867 - DNA, 25 bp, Homo sapien
tcgatgatggaaacgtgccaggaaa

SEQ ID NO: 2176868 - DNA, 25 bp, Homo sapien
tgtcctgaagcacctattaaaaatg

SEQ ID NO: 2176869 - DNA, 25 bp, Homo sapien
ttataaagcagaacaactactgtgt

SEQ ID NO: 2176870 - DNA, 25 bp, Homo sapien
cagcctgcacgtgggaaatgattcg

SEQ ID NO: 2176871 - DNA, 25 bp, Homo sapien
tggtgctaggcccagatggcaactg

SEQ ID NO: 2176872 - DNA, 25 bp, Homo sapien
tgtcctgggtacaggacttagagcc

SEQ ID NO: 2176873 - DNA, 25 bp, Homo sapien
tgagcactgatgaacgtctgctaaa

SEQ ID NO: 2176874 - DNA, 25 bp, Homo sapien
gatgaacgtctgctaaattagtgaa

SEQ ID NO: 2176875 - DNA, 25 bp, Homo sapien
gtacaggacttagagccacaaaggg

SEQ ID NO: 2176876 - DNA, 25 bp, Homo sapien
ctctccttggtcctttccatactga

SEQ ID NO: 2176877 - DNA, 25 bp, Homo sapien
tggcaatgcagaggcctctcttcgg

SEQ ID NO: 2176878 - DNA, 25 bp, Homo sapien
ttccatactgacacccgttgtgcat

SEQ ID NO: 2176879 - DNA, 25 bp, Homo sapien
gctggcaatgcagaggcctctcttc

SEQ ID NO: 2176880 - DNA, 25 bp, Homo sapien
gacaggcataatcgcacatgatgta

SEQ ID NO: 2176881 - DNA, 25 bp, Homo sapien
catgatgtatgtagccactgggaaa

SEQ ID NO: 2176882 - DNA, 25 bp, Homo sapien
gagttcatggtctccaaggcaggaa

SEQ ID NO: 2176883 - DNA, 25 bp, Homo sapien
cataaagtactgtcttgggcaggca

SEQ ID NO: 2176884 - DNA, 25 bp, Homo sapien
gatggcctcatgcaaactgtcattc

SEQ ID NO: 2176885 - DNA, 25 bp, Homo sapien
gctacctgctattaagatggcctca

SEQ ID NO: 2176886 - DNA, 25 bp, Homo sapien
ggaaccagagaaaccacttagcagt

SEQ ID NO: 2176887 - DNA, 25 bp, Homo sapien
tcagatgggttggttacatgctacc

SEQ ID NO: 2176888 - DNA, 25 bp, Homo sapien
gatgtgcttccgtaaccagctggac

SEQ ID NO: 2176889 - DNA, 25 bp, Homo sapien
gaacagaacgtgaacagaaggctct

SEQ ID NO: 2176890 - DNA, 25 bp, Homo sapien
tcttacaagatggaagagcccactc

SEQ ID NO: 2176891 - DNA, 25 bp, Homo sapien
tacattccgaggtcgtgaacagccc

SEQ ID NO: 2176892 - DNA, 25 bp, Homo sapien
gattaaactatagacatgcagctca

SEQ ID NO: 2176893 - DNA, 25 bp, Homo sapien
gaataagctagggatacaagatcca

SEQ ID NO: 2176894 - DNA, 25 bp, Homo sapien
caaataatactctggatgagccaca

SEQ ID NO: 2176895 - DNA, 25 bp, Homo sapien
gaaaaggttactgatagggcttcaa

SEQ ID NO: 2176896 - DNA, 25 bp, Homo sapien
acaatggcaggtgacggtcctcacc

SEQ ID NO: 2176897 - DNA, 25 bp, Homo sapien
gctgtgcccgtaactcagtgttgca

SEQ ID NO: 2176898 - DNA, 25 bp, Homo sapien
cccacagagggtggcaaacaatggc

SEQ ID NO: 2176899 - DNA, 25 bp, Homo sapien
aaaccagaggtccagcaaagctcag

SEQ ID NO: 2176900 - DNA, 25 bp, Homo sapien
ccatgtttccgcaggtggatgatga

SEQ ID NO: 2176901 - DNA, 25 bp, Homo sapien
ggatgccatgtttccgcaggtggat

SEQ ID NO: 2176902 - DNA, 25 bp, Homo sapien
gcggcttgtcttcatatcgaacgac

SEQ ID NO: 2176903 - DNA, 25 bp, Homo sapien
tcttcatatcgaacgacgcggaccc

SEQ ID NO: 2176904 - DNA, 25 bp, Homo sapien
aaaaaatagcatccggttatccgag

SEQ ID NO: 2176905 - DNA, 25 bp, Homo sapien
tctcatgaagcggttagcattctcc

SEQ ID NO: 2176906 - DNA, 25 bp, Homo sapien
tggaaaatgtgtacccagagagcac

SEQ ID NO: 2176907 - DNA, 25 bp, Homo sapien
cagacgtcgctgttgtggtatagca

SEQ ID NO: 2176908 - DNA, 25 bp, Homo sapien
ttcggtcatcaatggacagtcaggg

SEQ ID NO: 2176909 - DNA, 25 bp, Homo sapien
tgttggcacttcacaatgcaaggac

SEQ ID NO: 2176910 - DNA, 25 bp, Homo sapien
tttacgtgggcaacttggcaagtcc

SEQ ID NO: 2176911 - DNA, 25 bp, Homo sapien
gatctcacaagggtaccatgttctg

SEQ ID NO: 2176912 - DNA, 25 bp, Homo sapien
tccaatttcatagacttatagcaga

SEQ ID NO: 2176913 - DNA, 25 bp, Homo sapien
ttagattaaaatggaaagccaggga

SEQ ID NO: 2176914 - DNA, 25 bp, Homo sapien
ggcaattcaaaccactgatcaatgc

SEQ ID NO: 2176915 - DNA, 25 bp, Homo sapien
ttatcagtatcactgatggcacagc

SEQ ID NO: 2176916 - DNA, 25 bp, Homo sapien
tctgatcaggacacacttagttcac

SEQ ID NO: 2176917 - DNA, 25 bp, Homo sapien
ggcactgaacacttccaaagggtca

SEQ ID NO: 2176918 - DNA, 25 bp, Homo sapien
gactttatgatcgtcaggagcctcc

SEQ ID NO: 2176919 - DNA, 25 bp, Homo sapien
gatctctgtagccagctgtcaatgg

SEQ ID NO: 2176920 - DNA, 25 bp, Homo sapien
tcttctaggctgcaggcgttgtgtg

SEQ ID NO: 2176921 - DNA, 25 bp, Homo sapien
ggcgttgtgtgccacaaacccagag

SEQ ID NO: 2176922 - DNA, 25 bp, Homo sapien
ttctccccaagtgcaggttgcattc

SEQ ID NO: 2176923 - DNA, 25 bp, Homo sapien
ggttgcattctgacacgcctccttt

SEQ ID NO: 2176924 - DNA, 25 bp, Homo sapien
tcccactgaggacatcgtaggccca

SEQ ID NO: 2176925 - DNA, 25 bp, Homo sapien
actgaggacatcgtaggcccaccca

SEQ ID NO: 2176926 - DNA, 25 bp, Homo sapien
ccactgaggacatcgtaggcccacc

SEQ ID NO: 2176927 - DNA, 25 bp, Homo sapien
ttcccactgaggacatcgtaggccc

SEQ ID NO: 2176928 - DNA, 25 bp, Homo sapien
aatgtgatgatagcaaataggcagc

SEQ ID NO: 2176929 - DNA, 25 bp, Homo sapien
gatgtgcgagtgcatcagggccact

SEQ ID NO: 2176930 - DNA, 25 bp, Homo sapien
tgcctcgtctttcaagtccattagg

SEQ ID NO: 2176931 - DNA, 25 bp, Homo sapien
catagagagggccttccagaaatgt

SEQ ID NO: 2176932 - DNA, 25 bp, Homo sapien
tacacttctataccatgatcaagcc

SEQ ID NO: 2176933 - DNA, 25 bp, Homo sapien
cataatcagggcaaagatacacttc

SEQ ID NO: 2176934 - DNA, 25 bp, Homo sapien
gatacacctctgcaccataatcagg

SEQ ID NO: 2176935 - DNA, 25 bp, Homo sapien
taccatgatcaagccaaagatacac

SEQ ID NO: 2176936 - DNA, 25 bp, Homo sapien
tgcagcataatcaggctgattccct

SEQ ID NO: 2176937 - DNA, 25 bp, Homo sapien
taatcaggctgattccctggttatt

SEQ ID NO: 2176938 - DNA, 25 bp, Homo sapien
tcaggctgattccctggttattggt

SEQ ID NO: 2176939 - DNA, 25 bp, Homo sapien
ctgcagcataatcaggctgattccc

SEQ ID NO: 2176940 - DNA, 25 bp, Homo sapien
taattggactgattcctcggtgatt

SEQ ID NO: 2176941 - DNA, 25 bp, Homo sapien
acacacccctgcagcataattggac

SEQ ID NO: 2176942 - DNA, 25 bp, Homo sapien
ccctggttattggcccaggtagtca

SEQ ID NO: 2176943 - DNA, 25 bp, Homo sapien
gattcctcggtgattggccaagaca

SEQ ID NO: 2176944 - DNA, 25 bp, Homo sapien
tgctgttttttttctcccctagcac

SEQ ID NO: 2176945 - DNA, 25 bp, Homo sapien
ctgctgttttttttctcccctagca

SEQ ID NO: 2176946 - DNA, 25 bp, Homo sapien
tggcatgagcgcagccgtggggaac

SEQ ID NO: 2176947 - DNA, 25 bp, Homo sapien
ggcatgagcgcagccgtggggaaca

SEQ ID NO: 2176948 - DNA, 25 bp, Homo sapien
ctggcatgagcgcagccgtggggaa

SEQ ID NO: 2176949 - DNA, 25 bp, Homo sapien
gcatgagcgcagccgtggggaacac

SEQ ID NO: 2176950 - DNA, 25 bp, Homo sapien
tttcttgtcatagcgattacatatt

SEQ ID NO: 2176951 - DNA, 25 bp, Homo sapien
ttcttgtcatagcgattacatattt

SEQ ID NO: 2176952 - DNA, 25 bp, Homo sapien
atttcttgtcatagcgattacatat

SEQ ID NO: 2176953 - DNA, 25 bp, Homo sapien
aacaccactgaatacagccgttcag

SEQ ID NO: 2176954 - DNA, 25 bp, Homo sapien
caccactgaatacagccgttcagta

SEQ ID NO: 2176955 - DNA, 25 bp, Homo sapien
cttgaaacaccactgaatacagccg

SEQ ID NO: 2176956 - DNA, 25 bp, Homo sapien
tgaaacaccactgaatacagccgtt

SEQ ID NO: 2176957 - DNA, 25 bp, Homo sapien
tagcactgaaaccttcccacagggt

SEQ ID NO: 2176958 - DNA, 25 bp, Homo sapien
aaccttcccacagggtgtggagcag

SEQ ID NO: 2176959 - DNA, 25 bp, Homo sapien
acctgttctagatttagcactgaaa

SEQ ID NO: 2176960 - DNA, 25 bp, Homo sapien
gcagcattagcaggacgtagtctac

SEQ ID NO: 2176961 - DNA, 25 bp, Homo sapien
ttgaatctgtacagctggacccaac

SEQ ID NO: 2176962 - DNA, 25 bp, Homo sapien
cttgaatctgtacagctggacccaa

SEQ ID NO: 2176963 - DNA, 25 bp, Homo sapien
tgtacagctggacccaacaagaagt

SEQ ID NO: 2176964 - DNA, 25 bp, Homo sapien
atctgtacagctggacccaacaaga

SEQ ID NO: 2176965 - DNA, 25 bp, Homo sapien
ggcctttaactgtcccacaatgaca

SEQ ID NO: 2176966 - DNA, 25 bp, Homo sapien
gatctcaatggcctttaactgtccc

SEQ ID NO: 2176967 - DNA, 25 bp, Homo sapien
ctgaaaagagcaggcgatctcaatg

SEQ ID NO: 2176968 - DNA, 25 bp, Homo sapien
gagcaggcgatctcaatggccttta

SEQ ID NO: 2176969 - DNA, 25 bp, Homo sapien
gatggatactctggttttgactgct

SEQ ID NO: 2176970 - DNA, 25 bp, Homo sapien
tctggttttgactgctaacagcaac

SEQ ID NO: 2176971 - DNA, 25 bp, Homo sapien
gatactctggttttgactgctaaca

SEQ ID NO: 2176972 - DNA, 25 bp, Homo sapien
cacctcctgatggatactctggttt

SEQ ID NO: 2176973 - DNA, 25 bp, Homo sapien
ccgtgattgtaagcctcttgaggac

SEQ ID NO: 2176974 - DNA, 25 bp, Homo sapien
ccaccgtgattgtaagcctcttgag

SEQ ID NO: 2176975 - DNA, 25 bp, Homo sapien
attgtaagcctcttgaggactcccc

SEQ ID NO: 2176976 - DNA, 25 bp, Homo sapien
ccgtccaccgtgattgtaagcctct

SEQ ID NO: 2176977 - DNA, 25 bp, Homo sapien
tctgctgtgaggcacatccgactgg

SEQ ID NO: 2176978 - DNA, 25 bp, Homo sapien
caacccttccggtggctcatttggg

SEQ ID NO: 2176979 - DNA, 25 bp, Homo sapien
tggctcccaagaaaatcgagttgtc

SEQ ID NO: 2176980 - DNA, 25 bp, Homo sapien
catttgggatgcgtttgctctgctg

SEQ ID NO: 2176981 - DNA, 25 bp, Homo sapien
cacctcatgcaaatacacctgggcc

SEQ ID NO: 2176982 - DNA, 25 bp, Homo sapien
gaactctgcgatttcaccctcatga

SEQ ID NO: 2176983 - DNA, 25 bp, Homo sapien
tgggccccagaactctgcgatttca

SEQ ID NO: 2176984 - DNA, 25 bp, Homo sapien
cctcatgagcatcaaaaccccacag

SEQ ID NO: 2176985 - DNA, 25 bp, Homo sapien
tgcaaacgtggaagagaacctacat

SEQ ID NO: 2176986 - DNA, 25 bp, Homo sapien
gatattttacacctgcatgcctaga

SEQ ID NO: 2176987 - DNA, 25 bp, Homo sapien
gaacctaccaccagagttgctttga

SEQ ID NO: 2176988 - DNA, 25 bp, Homo sapien
aactaggatcactgcacgttctggg

SEQ ID NO: 2176989 - DNA, 25 bp, Homo sapien
tgacagcaggcataatctggtagat

SEQ ID NO: 2176990 - DNA, 25 bp, Homo sapien
gggctacatagacaaacagaacttc

SEQ ID NO: 2176991 - DNA, 25 bp, Homo sapien
acttccccaagtatgcaagtattgg

SEQ ID NO: 2176992 - DNA, 25 bp, Homo sapien
ctgaagtgaggtgctaaagaatgac

SEQ ID NO: 2176993 - DNA, 25 bp, Homo sapien
tatggttgcatagggcactcctgtg

SEQ ID NO: 2176994 - DNA, 25 bp, Homo sapien
tctacactgttgacggcgcgggata

SEQ ID NO: 2176995 - DNA, 25 bp, Homo sapien
tatagatatatgaagcctcctggtg

SEQ ID NO: 2176996 - DNA, 25 bp, Homo sapien
taatgcctcggattgatagagcagc

SEQ ID NO: 2176997 - DNA, 25 bp, Homo sapien
gatgaggtgggtgacgggctgcggg

SEQ ID NO: 2176998 - DNA, 25 bp, Homo sapien
gtgggtgacgggctgcgggggcgcc

SEQ ID NO: 2176999 - DNA, 25 bp, Homo sapien
aagatgaggtgggtgacgggctgcg

SEQ ID NO: 2177000 - DNA, 25 bp, Homo sapien
gtcaaagatgaggtgggtgacgggc

SEQ ID NO: 2177001 - DNA, 25 bp, Homo sapien
tctgggtctgggtgggggcgaggag

SEQ ID NO: 2177002 - DNA, 25 bp, Homo sapien
ggtgggggcgaggaggaagtgcgcg

SEQ ID NO: 2177003 - DNA, 25 bp, Homo sapien
ggtggcgccttctgggtctgggtgg

SEQ ID NO: 2177004 - DNA, 25 bp, Homo sapien
ggggcgaggaggaagtgcgcgcgca

SEQ ID NO: 2177005 - DNA, 25 bp, Homo sapien
gccgaggccctcgtctggggacaaa

SEQ ID NO: 2177006 - DNA, 25 bp, Homo sapien
ctcgtctggggacaaattcagtgct

SEQ ID NO: 2177007 - DNA, 25 bp, Homo sapien
cttgagtttggatcaggggtgtgaa

SEQ ID NO: 2177008 - DNA, 25 bp, Homo sapien
cgcagagccgaggccctcgtctggg

SEQ ID NO: 2177009 - DNA, 25 bp, Homo sapien
aggttgcagacaaatggccttggtc

SEQ ID NO: 2177010 - DNA, 25 bp, Homo sapien
tctagccatcaggttgcagacaaat

SEQ ID NO: 2177011 - DNA, 25 bp, Homo sapien
ttgaagatgctcagggtggtatcac

SEQ ID NO: 2177012 - DNA, 25 bp, Homo sapien
ggtggtatcacttctagccatcagg

SEQ ID NO: 2177013 - DNA, 25 bp, Homo sapien
caggctggtgcattgtcccagagca

SEQ ID NO: 2177014 - DNA, 25 bp, Homo sapien
caacctccgtgcctgcatctctgag

SEQ ID NO: 2177015 - DNA, 25 bp, Homo sapien
tgcggtcctggaccgcgacttgaac

SEQ ID NO: 2177016 - DNA, 25 bp, Homo sapien
cagtgtgcggagaggctgcacaacc

SEQ ID NO: 2177017 - DNA, 25 bp, Homo sapien
caagcccagtgagctctggaaggga

SEQ ID NO: 2177018 - DNA, 25 bp, Homo sapien
tcagaggcactgaatattctcaccc

SEQ ID NO: 2177019 - DNA, 25 bp, Homo sapien
tagatagctggctttgcaacgctga

SEQ ID NO: 2177020 - DNA, 25 bp, Homo sapien
gatggctgaattcgccactcctggc

SEQ ID NO: 2177021 - DNA, 25 bp, Homo sapien
tggtatttttgtgtggggagggtca

SEQ ID NO: 2177022 - DNA, 25 bp, Homo sapien
tgctgcttggtgcaagctaacatct

SEQ ID NO: 2177023 - DNA, 25 bp, Homo sapien
agggaacagaaagctggttgcacag

SEQ ID NO: 2177024 - DNA, 25 bp, Homo sapien
caagcctcgatctttgctcatgtga

SEQ ID NO: 2177025 - DNA, 25 bp, Homo sapien
gtgcccttcttctgtgggactccag

SEQ ID NO: 2177026 - DNA, 25 bp, Homo sapien
cgagtctttgagagtaagtgttccc

SEQ ID NO: 2177027 - DNA, 25 bp, Homo sapien
gattcagggccctaattatcaagcc

SEQ ID NO: 2177028 - DNA, 25 bp, Homo sapien
tgccaacccgagcagattgagttgg

SEQ ID NO: 2177029 - DNA, 25 bp, Homo sapien
cagattgagttggaggaatgttaga

SEQ ID NO: 2177030 - DNA, 25 bp, Homo sapien
agttttgtcttctgtgccaacccga

SEQ ID NO: 2177031 - DNA, 25 bp, Homo sapien
ttatcagagtatcaacatatttcat

SEQ ID NO: 2177032 - DNA, 25 bp, Homo sapien
acacaggtaacagaggatgtggcaa

SEQ ID NO: 2177033 - DNA, 25 bp, Homo sapien
caggtaacagaggatgtggcaatga

SEQ ID NO: 2177034 - DNA, 25 bp, Homo sapien
ccactgagtcaacaagcacttcccc

SEQ ID NO: 2177035 - DNA, 25 bp, Homo sapien
taacccctgtcaaacttggccactg

SEQ ID NO: 2177036 - DNA, 25 bp, Homo sapien
tgtactctttaagctttagaataac

SEQ ID NO: 2177037 - DNA, 25 bp, Homo sapien
gcttccattatgtaaaacctccttc

SEQ ID NO: 2177038 - DNA, 25 bp, Homo sapien
gctgtgtcatttggttctgggccca

SEQ ID NO: 2177039 - DNA, 25 bp, Homo sapien
ttatggtatcatcatgtgcttctgt

SEQ ID NO: 2177040 - DNA, 25 bp, Homo sapien
tccttccactcacagtagggtttat

SEQ ID NO: 2177041 - DNA, 25 bp, Homo sapien
tgggcagtgagggtcctccttccac

SEQ ID NO: 2177042 - DNA, 25 bp, Homo sapien
cttccactcacagtagggtttattt

SEQ ID NO: 2177043 - DNA, 25 bp, Homo sapien
caactgggcagtgagggtcctcctt

SEQ ID NO: 2177044 - DNA, 25 bp, Homo sapien
agttggtgagctgaatctgctcctc

SEQ ID NO: 2177045 - DNA, 25 bp, Homo sapien
aagactctctgagttggtgagctga

SEQ ID NO: 2177046 - DNA, 25 bp, Homo sapien
ccaagactctctgagttggtgagct

SEQ ID NO: 2177047 - DNA, 25 bp, Homo sapien
gttggtgagctgaatctgctcctca

SEQ ID NO: 2177048 - DNA, 25 bp, Homo sapien
gcctgcctgttttccgcttgagcac

SEQ ID NO: 2177049 - DNA, 25 bp, Homo sapien
tgaaggttgagggtatatccaggtc

SEQ ID NO: 2177050 - DNA, 25 bp, Homo sapien
cagcaatacctgagggacagaatgg

SEQ ID NO: 2177051 - DNA, 25 bp, Homo sapien
gggtctgagggcataaccaggtctc

SEQ ID NO: 2177052 - DNA, 25 bp, Homo sapien
tgatcagctgcagcaatacctgagg

SEQ ID NO: 2177053 - DNA, 25 bp, Homo sapien
ggttgagggcatacccaggttcatc

SEQ ID NO: 2177054 - DNA, 25 bp, Homo sapien
ctggtggagttgaaggttgagggca

SEQ ID NO: 2177055 - DNA, 25 bp, Homo sapien
catacccaggttcatccctgcagga

SEQ ID NO: 2177056 - DNA, 25 bp, Homo sapien
tcccctgatggaggtgagggcatac

SEQ ID NO: 2177057 - DNA, 25 bp, Homo sapien
ggaagagctcctccccctggtggaa

SEQ ID NO: 2177058 - DNA, 25 bp, Homo sapien
ccctggtggaagtgagggctgaggg

SEQ ID NO: 2177059 - DNA, 25 bp, Homo sapien
caggtccctccctgcaggaagagct

SEQ ID NO: 2177060 - DNA, 25 bp, Homo sapien
tgcaggaagagctcctccccctggt

SEQ ID NO: 2177061 - DNA, 25 bp, Homo sapien
ctcttttcgctgatgggaggtgagt

SEQ ID NO: 2177062 - DNA, 25 bp, Homo sapien
tttcgctgatgggaggtgagtgtgc

SEQ ID NO: 2177063 - DNA, 25 bp, Homo sapien
gagctcttttcgctgatgggaggtg

SEQ ID NO: 2177064 - DNA, 25 bp, Homo sapien
cttttcgctgatgggaggtgagtgt

SEQ ID NO: 2177065 - DNA, 25 bp, Homo sapien
ttctcaacagtaatccactcgcaag

SEQ ID NO: 2177066 - DNA, 25 bp, Homo sapien
tgaacactgatctagagactttcag

SEQ ID NO: 2177067 - DNA, 25 bp, Homo sapien
ctgtgctttagggaactgcgccaga

SEQ ID NO: 2177068 - DNA, 25 bp, Homo sapien
gatgtgggagatccgctgtgcttta

SEQ ID NO: 2177069 - DNA, 25 bp, Homo sapien
cacatggccctaggccaggtgcttc

SEQ ID NO: 2177070 - DNA, 25 bp, Homo sapien
cagactccatggacaacggaagaag

SEQ ID NO: 2177071 - DNA, 25 bp, Homo sapien
gcatgtgtggtacccagactccatg

SEQ ID NO: 2177072 - DNA, 25 bp, Homo sapien
aaaatagacttttgggcaattgcac

SEQ ID NO: 2177073 - DNA, 25 bp, Homo sapien
ctgtttgcagcctgactgctcactt

SEQ ID NO: 2177074 - DNA, 25 bp, Homo sapien
ttgccctggatttggtcattccaaa

SEQ ID NO: 2177075 - DNA, 25 bp, Homo sapien
tcttgccctggatttggtcattcca

SEQ ID NO: 2177076 - DNA, 25 bp, Homo sapien
tgctcacttgttgggtttttgaagg

SEQ ID NO: 2177077 - DNA, 25 bp, Homo sapien
tgcagacagcccaggtctggagacc

SEQ ID NO: 2177078 - DNA, 25 bp, Homo sapien
ggcatgagaagaatgtatctgcttt

SEQ ID NO: 2177079 - DNA, 25 bp, Homo sapien
cttgaacaggggcatgagaagaatg

SEQ ID NO: 2177080 - DNA, 25 bp, Homo sapien
atgtatctgcttttgctgcagacag

SEQ ID NO: 2177081 - DNA, 25 bp, Homo sapien
cttggattgaacgaagctgcttttc

SEQ ID NO: 2177082 - DNA, 25 bp, Homo sapien
ccccatcgagcaaatagatcaggaa

SEQ ID NO: 2177083 - DNA, 25 bp, Homo sapien
ttaataagccttcttccccatcgag

SEQ ID NO: 2177084 - DNA, 25 bp, Homo sapien
tgtttgtcgtgcaagtttttctctg

SEQ ID NO: 2177085 - DNA, 25 bp, Homo sapien
ttaaagtttctgttacgtaagcaca

SEQ ID NO: 2177086 - DNA, 25 bp, Homo sapien
taaagtttctgttacgtaagcacat

SEQ ID NO: 2177087 - DNA, 25 bp, Homo sapien
tggcaagtcttcatctttagatgga

SEQ ID NO: 2177088 - DNA, 25 bp, Homo sapien
tctttcaaacaagaatggcaagtct

SEQ ID NO: 2177089 - DNA, 25 bp, Homo sapien
tggtagcttggcatcccctgttggc

SEQ ID NO: 2177090 - DNA, 25 bp, Homo sapien
catttgtcgttcagttgctcaggat

SEQ ID NO: 2177091 - DNA, 25 bp, Homo sapien
gcatccaaaggaaggtcacggcaga

SEQ ID NO: 2177092 - DNA, 25 bp, Homo sapien
agcatccaaaggaaggtcacggcag

SEQ ID NO: 2177093 - DNA, 25 bp, Homo sapien
gcacataggtatgtggattttcagt

SEQ ID NO: 2177094 - DNA, 25 bp, Homo sapien
agtaggatcaccaaacttattgatg

SEQ ID NO: 2177095 - DNA, 25 bp, Homo sapien
tctgcttggagaccatgaattgggt

SEQ ID NO: 2177096 - DNA, 25 bp, Homo sapien
aagttttgctagcagggagtgtcac

SEQ ID NO: 2177097 - DNA, 25 bp, Homo sapien
ggcagtggaatttgagtgattagca

SEQ ID NO: 2177098 - DNA, 25 bp, Homo sapien
tgggcagtggaatttgagtgattag

SEQ ID NO: 2177099 - DNA, 25 bp, Homo sapien
cagtggaatttgagtgattagcaac

SEQ ID NO: 2177100 - DNA, 25 bp, Homo sapien
agtggaatttgagtgattagcaaca

SEQ ID NO: 2177101 - DNA, 25 bp, Homo sapien
gtggaatctcatctgtatccaggtg

SEQ ID NO: 2177102 - DNA, 25 bp, Homo sapien
ggaatctcatctgtatccaggtgta

SEQ ID NO: 2177103 - DNA, 25 bp, Homo sapien
ctcatctgtatccaggtgtacagcc

SEQ ID NO: 2177104 - DNA, 25 bp, Homo sapien
aatctcatctgtatccaggtgtaca

SEQ ID NO: 2177105 - DNA, 25 bp, Homo sapien
tttgttgcaggctgtaaggcatggc

SEQ ID NO: 2177106 - DNA, 25 bp, Homo sapien
tggaattcctttgtccaggagaaac

SEQ ID NO: 2177107 - DNA, 25 bp, Homo sapien
gaatgcctatttgtgtctagaacca

SEQ ID NO: 2177108 - DNA, 25 bp, Homo sapien
gagttgcatatccaaaccttagtga

SEQ ID NO: 2177109 - DNA, 25 bp, Homo sapien
ctaggatcggctctcattcgatcga

SEQ ID NO: 2177110 - DNA, 25 bp, Homo sapien
ggctctcattcgatcgagctattct

SEQ ID NO: 2177111 - DNA, 25 bp, Homo sapien
gatcggctctcattcgatcgagcta

SEQ ID NO: 2177112 - DNA, 25 bp, Homo sapien
taggatcggctctcattcgatcgag

SEQ ID NO: 2177113 - DNA, 25 bp, Homo sapien
gagacaaagtgagctctgtagcaca

SEQ ID NO: 2177114 - DNA, 25 bp, Homo sapien
agtgagctctgtagcacatcccatt

SEQ ID NO: 2177115 - DNA, 25 bp, Homo sapien
gagctctgtagcacatcccattgca

SEQ ID NO: 2177116 - DNA, 25 bp, Homo sapien
acaaagtgagctctgtagcacatcc

SEQ ID NO: 2177117 - DNA, 25 bp, Homo sapien
tcttttttataggacgatgtcttat

SEQ ID NO: 2177118 - DNA, 25 bp, Homo sapien
ttttttataggacgatgtcttatct

SEQ ID NO: 2177119 - DNA, 25 bp, Homo sapien
cttttttataggacgatgtcttatc

SEQ ID NO: 2177120 - DNA, 25 bp, Homo sapien
tttttataggacgatgtcttatctt

SEQ ID NO: 2177121 - DNA, 25 bp, Homo sapien
ctttacttgcatgggtttattttca

SEQ ID NO: 2177122 - DNA, 25 bp, Homo sapien
tgatgctagtgctttcttctgttga

SEQ ID NO: 2177123 - DNA, 25 bp, Homo sapien
ttttcattctgttgtcgtttcttga

SEQ ID NO: 2177124 - DNA, 25 bp, Homo sapien
tggtctttggtcttaacctctttga

SEQ ID NO: 2177125 - DNA, 25 bp, Homo sapien
tgacctaaaacatcaccatgacctc

SEQ ID NO: 2177126 - DNA, 25 bp, Homo sapien
tctgacctaaaacatcaccatgacc

SEQ ID NO: 2177127 - DNA, 25 bp, Homo sapien
agtgttcttgctccatgtgaccaat

SEQ ID NO: 2177128 - DNA, 25 bp, Homo sapien
ttgctccatgtgaccaattctcttc

SEQ ID NO: 2177129 - DNA, 25 bp, Homo sapien
ttgatggttcttcatagcctacatg

SEQ ID NO: 2177130 - DNA, 25 bp, Homo sapien
tcagagaaagtgaggtttgctaaca

SEQ ID NO: 2177131 - DNA, 25 bp, Homo sapien
atagcctacatgtctggaaccctca

SEQ ID NO: 2177132 - DNA, 25 bp, Homo sapien
gtctggtttccttgttgatggttct

SEQ ID NO: 2177133 - DNA, 25 bp, Homo sapien
ttgaatattcactaccaagacctgc

SEQ ID NO: 2177134 - DNA, 25 bp, Homo sapien
tttgtgtgcagcattctgagaggag

SEQ ID NO: 2177135 - DNA, 25 bp, Homo sapien
ggaagacaagaatgccttagttact

SEQ ID NO: 2177136 - DNA, 25 bp, Homo sapien
gcttcaaaatcattggcccgttctt

SEQ ID NO: 2177137 - DNA, 25 bp, Homo sapien
gaagcctttcaatgtttgtgcatgt

SEQ ID NO: 2177138 - DNA, 25 bp, Homo sapien
agaagcctttcaatgtttgtgcatg

SEQ ID NO: 2177139 - DNA, 25 bp, Homo sapien
tcttgttttgggcaccccagtttgc

SEQ ID NO: 2177140 - DNA, 25 bp, Homo sapien
gtttgcagtcctccaatatggagta

SEQ ID NO: 2177141 - DNA, 25 bp, Homo sapien
ttcgctggtcctgttgctcatagat

SEQ ID NO: 2177142 - DNA, 25 bp, Homo sapien
catagatttcgactcttctttccat

SEQ ID NO: 2177143 - DNA, 25 bp, Homo sapien
ctgtaacaacctattctcagctgcc

SEQ ID NO: 2177144 - DNA, 25 bp, Homo sapien
aatgtgcatgggatccttatggcta

SEQ ID NO: 2177145 - DNA, 25 bp, Homo sapien
ggatccttatggctactctgtaaac

SEQ ID NO: 2177146 - DNA, 25 bp, Homo sapien
cccgtccttatctgaggaagtgcta

SEQ ID NO: 2177147 - DNA, 25 bp, Homo sapien
tagattcttatcagcgtaaatgtgc

SEQ ID NO: 2177148 - DNA, 25 bp, Homo sapien
cattctcttgcttctctagagcttc

SEQ ID NO: 2177149 - DNA, 25 bp, Homo sapien
ctcttgcttctctagagcttccatt

SEQ ID NO: 2177150 - DNA, 25 bp, Homo sapien
ttgcttctctagagcttccattgac

SEQ ID NO: 2177151 - DNA, 25 bp, Homo sapien
ttctcttgcttctctagagcttcca

SEQ ID NO: 2177152 - DNA, 25 bp, Homo sapien
ctccttcttcttcttgctttgtgcc

SEQ ID NO: 2177153 - DNA, 25 bp, Homo sapien
tcctccttcttcttcttgctttgtg

SEQ ID NO: 2177154 - DNA, 25 bp, Homo sapien
cctccttcttcttcttgctttgtgc

SEQ ID NO: 2177155 - DNA, 25 bp, Homo sapien
cttcctccttcttcttcttgctttg

SEQ ID NO: 2177156 - DNA, 25 bp, Homo sapien
ggatgaccaatgtgggctatgtcag

SEQ ID NO: 2177157 - DNA, 25 bp, Homo sapien
atgaccaatgtgggctatgtcagtg

SEQ ID NO: 2177158 - DNA, 25 bp, Homo sapien
gatgaccaatgtgggctatgtcagt

SEQ ID NO: 2177159 - DNA, 25 bp, Homo sapien
aggacttcaggcagaaatgcagaag

SEQ ID NO: 2177160 - DNA, 25 bp, Homo sapien
gggtaattgatgtccagtagcttga

SEQ ID NO: 2177161 - DNA, 25 bp, Homo sapien
gtgggtaattgatgtccagtagctt

SEQ ID NO: 2177162 - DNA, 25 bp, Homo sapien
taattgatgtccagtagcttgacca

SEQ ID NO: 2177163 - DNA, 25 bp, Homo sapien
tggaaggtacttcaccaagaaacca

SEQ ID NO: 2177164 - DNA, 25 bp, Homo sapien
gggcaagcaagcaatggaaggtact

SEQ ID NO: 2177165 - DNA, 25 bp, Homo sapien
cagagagcttgctttgtctgtaacc

SEQ ID NO: 2177166 - DNA, 25 bp, Homo sapien
gagagcttgctttgtctgtaaccat

SEQ ID NO: 2177167 - DNA, 25 bp, Homo sapien
ttgtctttctccagcaagaaggacc

SEQ ID NO: 2177168 - DNA, 25 bp, Homo sapien
gaaattgtctttctccagcaagaag

SEQ ID NO: 2177169 - DNA, 25 bp, Homo sapien
aattgtctttctccagcaagaagga

SEQ ID NO: 2177170 - DNA, 25 bp, Homo sapien
ctgaaattgtctttctccagcaaga

SEQ ID NO: 2177171 - DNA, 25 bp, Homo sapien
catgaactgtagtttccgtaattcc

SEQ ID NO: 2177172 - DNA, 25 bp, Homo sapien
tgaaagagggctaatacaatgggta

SEQ ID NO: 2177173 - DNA, 25 bp, Homo sapien
aatgggtattcttcagtcttggtta

SEQ ID NO: 2177174 - DNA, 25 bp, Homo sapien
gtgcctgtttcaccttccgcaatga

SEQ ID NO: 2177175 - DNA, 25 bp, Homo sapien
ttacagattttgtgacttcaggtgg

SEQ ID NO: 2177176 - DNA, 25 bp, Homo sapien
caaaattatgttgcaggctctatac

SEQ ID NO: 2177177 - DNA, 25 bp, Homo sapien
cttgccttagatatataaacccttt

SEQ ID NO: 2177178 - DNA, 25 bp, Homo sapien
tttaggttgttgatgcagcagatta

SEQ ID NO: 2177179 - DNA, 25 bp, Homo sapien
tggttttccagagcctttcactgaa

SEQ ID NO: 2177180 - DNA, 25 bp, Homo sapien
ccagttgttttctgtggattgcaat

SEQ ID NO: 2177181 - DNA, 25 bp, Homo sapien
tcacaatattctcacagccagttgt

SEQ ID NO: 2177182 - DNA, 25 bp, Homo sapien
caatgtgttttggttttccagagcc

SEQ ID NO: 2177183 - DNA, 25 bp, Homo sapien
gcaatagttgcttgggtacctttcc

SEQ ID NO: 2177184 - DNA, 25 bp, Homo sapien
gcaatagttgcttgggtacctttac

SEQ ID NO: 2177185 - DNA, 25 bp, Homo sapien
tacttgggcgcctttcccatagcaa

SEQ ID NO: 2177186 - DNA, 25 bp, Homo sapien
ccatagtagtagttgcttgggcacc

SEQ ID NO: 2177187 - DNA, 25 bp, Homo sapien
cactggaaggatcttgtcgaaatct

SEQ ID NO: 2177188 - DNA, 25 bp, Homo sapien
tcaattgtccactggaaggatcttg

SEQ ID NO: 2177189 - DNA, 25 bp, Homo sapien
tgtccactggaaggatcttgtcgaa

SEQ ID NO: 2177190 - DNA, 25 bp, Homo sapien
gaaggatcttgtcgaaatctgtgtc

SEQ ID NO: 2177191 - DNA, 25 bp, Homo sapien
cacagcaatggccagtctccatgaa

SEQ ID NO: 2177192 - DNA, 25 bp, Homo sapien
acagcaatggccagtctccatgaaa

SEQ ID NO: 2177193 - DNA, 25 bp, Homo sapien
caggggagcagtgaaaaaatcctca

SEQ ID NO: 2177194 - DNA, 25 bp, Homo sapien
ccgctgggagagtgatatctctgga

SEQ ID NO: 2177195 - DNA, 25 bp, Homo sapien
ttgtcataaggaactctagcgccgc

SEQ ID NO: 2177196 - DNA, 25 bp, Homo sapien
tatctctggagagtgatattccacc

SEQ ID NO: 2177197 - DNA, 25 bp, Homo sapien
gatctgccatatcaaccatcaaggt

SEQ ID NO: 2177198 - DNA, 25 bp, Homo sapien
tgtgtctttccaatagtgggtgcag

SEQ ID NO: 2177199 - DNA, 25 bp, Homo sapien
gaagtctgtctcagtcctatgctgg

SEQ ID NO: 2177200 - DNA, 25 bp, Homo sapien
cagtattgtgagtctcaagagggca

SEQ ID NO: 2177201 - DNA, 25 bp, Homo sapien
cagcgagacgttgccacacagaata

SEQ ID NO: 2177202 - DNA, 25 bp, Homo sapien
catcgactatgttggctgcagtttg

SEQ ID NO: 2177203 - DNA, 25 bp, Homo sapien
caggtcccctgataaaagtgctaga

SEQ ID NO: 2177204 - DNA, 25 bp, Homo sapien
gagaagtgatattaactactggcat

SEQ ID NO: 2177205 - DNA, 25 bp, Homo sapien
ccttctctgtaatcagtaggtggtg

SEQ ID NO: 2177206 - DNA, 25 bp, Homo sapien
tgcacaataagagcacaacagggtg

SEQ ID NO: 2177207 - DNA, 25 bp, Homo sapien
cttgtggtctttgcagcatatcgca

SEQ ID NO: 2177208 - DNA, 25 bp, Homo sapien
aattttacttattcctccacgagca

SEQ ID NO: 2177209 - DNA, 25 bp, Homo sapien
tggcatttgctgattatgggtttca

SEQ ID NO: 2177210 - DNA, 25 bp, Homo sapien
ggcatttgctgattatgggtttcaa

SEQ ID NO: 2177211 - DNA, 25 bp, Homo sapien
gcatttgctgattatgggtttcaaa

SEQ ID NO: 2177212 - DNA, 25 bp, Homo sapien
ttgatatagcaaatatcacatcctg

SEQ ID NO: 2177213 - DNA, 25 bp, Homo sapien
tcctgtttatctactctatgccaga

SEQ ID NO: 2177214 - DNA, 25 bp, Homo sapien
gatgctgttcctcacacccttggag

SEQ ID NO: 2177215 - DNA, 25 bp, Homo sapien
tatgccagatgttgagctgcagaat

SEQ ID NO: 2177216 - DNA, 25 bp, Homo sapien
tttgcacactatcatgacaattaaa

SEQ ID NO: 2177217 - DNA, 25 bp, Homo sapien
gcacactatcatgacaattaaaact

SEQ ID NO: 2177218 - DNA, 25 bp, Homo sapien
cacactatcatgacaattaaaactc

SEQ ID NO: 2177219 - DNA, 25 bp, Homo sapien
tgcacactatcatgacaattaaaac

SEQ ID NO: 2177220 - DNA, 25 bp, Homo sapien
catcaggagggcatgtcaagagaag

SEQ ID NO: 2177221 - DNA, 25 bp, Homo sapien
tggtcacagattttcagggagagaa

SEQ ID NO: 2177222 - DNA, 25 bp, Homo sapien
cacggttctgatgggcatgaggttt

SEQ ID NO: 2177223 - DNA, 25 bp, Homo sapien
gagagaacacggttctgatgggcat

SEQ ID NO: 2177224 - DNA, 25 bp, Homo sapien
actcgagttagaccctgacagttta

SEQ ID NO: 2177225 - DNA, 25 bp, Homo sapien
gaagggttttgcactaatgaggaac

SEQ ID NO: 2177226 - DNA, 25 bp, Homo sapien
taatgaggaactcgagttagaccct

SEQ ID NO: 2177227 - DNA, 25 bp, Homo sapien
taggaataggaatagtaggagtaac

SEQ ID NO: 2177228 - DNA, 25 bp, Homo sapien
gagttgatcttggttggtgtgagag

SEQ ID NO: 2177229 - DNA, 25 bp, Homo sapien
agttgatcttggttggtgtgagagg

SEQ ID NO: 2177230 - DNA, 25 bp, Homo sapien
agagttgatcttggttggtgtgaga

SEQ ID NO: 2177231 - DNA, 25 bp, Homo sapien
cagagttgatcttggttggtgtgag

SEQ ID NO: 2177232 - DNA, 25 bp, Homo sapien
tcaacagatacatgggccactgctg

SEQ ID NO: 2177233 - DNA, 25 bp, Homo sapien
caacagatacatgggccactgctga

SEQ ID NO: 2177234 - DNA, 25 bp, Homo sapien
caggtcttcgtgaattgtgatcatc

SEQ ID NO: 2177235 - DNA, 25 bp, Homo sapien
tgcactcaatgcaggtcttcgtgaa

SEQ ID NO: 2177236 - DNA, 25 bp, Homo sapien
gtaggatatgtcaggggtattgtta

SEQ ID NO: 2177237 - DNA, 25 bp, Homo sapien
ctgacgttggtaggatatgtcaggg

SEQ ID NO: 2177238 - DNA, 25 bp, Homo sapien
gtattgttagggtcatcgacaccat

SEQ ID NO: 2177239 - DNA, 25 bp, Homo sapien
atatgtcaggggtattgttagggtc

SEQ ID NO: 2177240 - DNA, 25 bp, Homo sapien
gatattgtagaacatacagttatag

SEQ ID NO: 2177241 - DNA, 25 bp, Homo sapien
ttttgatattccgttgattcctcac

SEQ ID NO: 2177242 - DNA, 25 bp, Homo sapien
tgatattccgttgattcctcactga

SEQ ID NO: 2177243 - DNA, 25 bp, Homo sapien
actgagctggtggagcacagatatt

SEQ ID NO: 2177244 - DNA, 25 bp, Homo sapien
cattcttcaatagtgggctgtgtca

SEQ ID NO: 2177245 - DNA, 25 bp, Homo sapien
tcaataagcagttgtcggcgggcag

SEQ ID NO: 2177246 - DNA, 25 bp, Homo sapien
ctgtgtcatggattgagagcgcctg

SEQ ID NO: 2177247 - DNA, 25 bp, Homo sapien
tatgagtactagcaaaaggcaaggt

SEQ ID NO: 2177248 - DNA, 25 bp, Homo sapien
gccagggtttctattggtgctgtca

SEQ ID NO: 2177249 - DNA, 25 bp, Homo sapien
ccagggtttctattggtgctgtcat

SEQ ID NO: 2177250 - DNA, 25 bp, Homo sapien
cgaaaggtcttgtgaaaaataatgg

SEQ ID NO: 2177251 - DNA, 25 bp, Homo sapien
cttaagagcgaaaggtcttgtgaaa

SEQ ID NO: 2177252 - DNA, 25 bp, Homo sapien
gagcgaaaggtcttgtgaaaaataa

SEQ ID NO: 2177253 - DNA, 25 bp, Homo sapien
aggtcttgtgaaaaataatggtgtt

SEQ ID NO: 2177254 - DNA, 25 bp, Homo sapien
tccacaaagggttgggccatgactt

SEQ ID NO: 2177255 - DNA, 25 bp, Homo sapien
gagtatccacaaagggttgggccat

SEQ ID NO: 2177256 - DNA, 25 bp, Homo sapien
aaagggttgggccatgacttgagct

SEQ ID NO: 2177257 - DNA, 25 bp, Homo sapien
cactgagtatccacaaagggttggg

SEQ ID NO: 2177258 - DNA, 25 bp, Homo sapien
agttcaccatcaactgtgtcccctg

SEQ ID NO: 2177259 - DNA, 25 bp, Homo sapien
tttctctagattgactcagttcacc

SEQ ID NO: 2177260 - DNA, 25 bp, Homo sapien
gttttccttagagtgacacagtcat

SEQ ID NO: 2177261 - DNA, 25 bp, Homo sapien
tcaagtgtcggctgtcttcccaggt

SEQ ID NO: 2177262 - DNA, 25 bp, Homo sapien
tttggtcatcgattcttttgcctgg

SEQ ID NO: 2177263 - DNA, 25 bp, Homo sapien
ttggtcatcgattcttttgcctgga

SEQ ID NO: 2177264 - DNA, 25 bp, Homo sapien
attgatttggtcatcgattcttttg

SEQ ID NO: 2177265 - DNA, 25 bp, Homo sapien
gatttggtcatcgattcttttgcct

SEQ ID NO: 2177266 - DNA, 25 bp, Homo sapien
cctggactgattggtcatcaactct

SEQ ID NO: 2177267 - DNA, 25 bp, Homo sapien
ccccggatttactcggtcattgact

SEQ ID NO: 2177268 - DNA, 25 bp, Homo sapien
ttccctggactgacttggtactcaa

SEQ ID NO: 2177269 - DNA, 25 bp, Homo sapien
tggtactcaactgatttcccctgga

SEQ ID NO: 2177270 - DNA, 25 bp, Homo sapien
tagggacatctcagttaaaattgct

SEQ ID NO: 2177271 - DNA, 25 bp, Homo sapien
taaaattgctgatggatcttcatgg

SEQ ID NO: 2177272 - DNA, 25 bp, Homo sapien
tcaagatttggtctccttagggaca

SEQ ID NO: 2177273 - DNA, 25 bp, Homo sapien
aaatgaagtcttggcaatctccctc

SEQ ID NO: 2177274 - DNA, 25 bp, Homo sapien
gacatcattaacaggtccctttgcc

SEQ ID NO: 2177275 - DNA, 25 bp, Homo sapien
tttctgtcagctgaactctccgggt

SEQ ID NO: 2177276 - DNA, 25 bp, Homo sapien
ggacatcattaacaggtccctttgc

SEQ ID NO: 2177277 - DNA, 25 bp, Homo sapien
ctgtcagctgaactctccgggtgag

SEQ ID NO: 2177278 - DNA, 25 bp, Homo sapien
cagatacgggatgcccaataaatgt

SEQ ID NO: 2177279 - DNA, 25 bp, Homo sapien
gctttaaacagccagccagatacgg

SEQ ID NO: 2177280 - DNA, 25 bp, Homo sapien
tgttcatagagtaaatccgtgcata

SEQ ID NO: 2177281 - DNA, 25 bp, Homo sapien
taaatccgtgcatactgttagggca

SEQ ID NO: 2177282 - DNA, 25 bp, Homo sapien
ggacatcttcaagggtgctatggga

SEQ ID NO: 2177283 - DNA, 25 bp, Homo sapien
cgtatgccggacatcttcaagggtg

SEQ ID NO: 2177284 - DNA, 25 bp, Homo sapien
gccggacatcttcaagggtgctatg

SEQ ID NO: 2177285 - DNA, 25 bp, Homo sapien
tcttcaagggtgctatgggattgga

SEQ ID NO: 2177286 - DNA, 25 bp, Homo sapien
gaaatttagcacgatatctataggc

SEQ ID NO: 2177287 - DNA, 25 bp, Homo sapien
ttcgatgaccatgcagataaaacca

SEQ ID NO: 2177288 - DNA, 25 bp, Homo sapien
gcacgatatctataggctcagcaga

SEQ ID NO: 2177289 - DNA, 25 bp, Homo sapien
taggctcagcagacattcgatgacc

SEQ ID NO: 2177290 - DNA, 25 bp, Homo sapien
tattctgaagggcagctaaacttca

SEQ ID NO: 2177291 - DNA, 25 bp, Homo sapien
gctggggtccggaagccatgcaaaa

SEQ ID NO: 2177292 - DNA, 25 bp, Homo sapien
tctgaagggcagctaaacttcagct

SEQ ID NO: 2177293 - DNA, 25 bp, Homo sapien
gaagggcagctaaacttcagctgaa

SEQ ID NO: 2177294 - DNA, 25 bp, Homo sapien
cacaccagactcattccaatgatca

SEQ ID NO: 2177295 - DNA, 25 bp, Homo sapien
tcagtcctgttgaaagtagccctcc

SEQ ID NO: 2177296 - DNA, 25 bp, Homo sapien
gatagcagccactcgtctttcaaag

SEQ ID NO: 2177297 - DNA, 25 bp, Homo sapien
cccgcatagcagttaaggatagcag

SEQ ID NO: 2177298 - DNA, 25 bp, Homo sapien
tgggtctgttttctagtccaagaag

SEQ ID NO: 2177299 - DNA, 25 bp, Homo sapien
tccagcgagctagtccctactgctt

SEQ ID NO: 2177300 - DNA, 25 bp, Homo sapien
tcaaatgacatggacgacttaagtc

SEQ ID NO: 2177301 - DNA, 25 bp, Homo sapien
gacgacttaagtcctgaatcctctc

SEQ ID NO: 2177302 - DNA, 25 bp, Homo sapien
tcagtcctgacagcaacttggaact

SEQ ID NO: 2177303 - DNA, 25 bp, Homo sapien
ttggaactcaatggtattactcccc

SEQ ID NO: 2177304 - DNA, 25 bp, Homo sapien
ctgagtcagtcctgacagcaacttg

SEQ ID NO: 2177305 - DNA, 25 bp, Homo sapien
ctgacagcaacttggaactcaatgg

SEQ ID NO: 2177306 - DNA, 25 bp, Homo sapien
tgttgggacaccctccgtgtgcact

SEQ ID NO: 2177307 - DNA, 25 bp, Homo sapien
gtgttgggacaccctccgtgtgcac

SEQ ID NO: 2177308 - DNA, 25 bp, Homo sapien
accctccgtgtgcactccagtctag

SEQ ID NO: 2177309 - DNA, 25 bp, Homo sapien
caatttcgtggaggttcagattcta

SEQ ID NO: 2177310 - DNA, 25 bp, Homo sapien
tttcgtggaggttcagattctatga

SEQ ID NO: 2177311 - DNA, 25 bp, Homo sapien
aatttcgtggaggttcagattctat

SEQ ID NO: 2177312 - DNA, 25 bp, Homo sapien
ttcgtggaggttcagattctatgac

SEQ ID NO: 2177313 - DNA, 25 bp, Homo sapien
ctgtctttcagggttgagggaataa

SEQ ID NO: 2177314 - DNA, 25 bp, Homo sapien
tcagggttgagggaataagagacat

SEQ ID NO: 2177315 - DNA, 25 bp, Homo sapien
tctttcagggttgagggaataagag

SEQ ID NO: 2177316 - DNA, 25 bp, Homo sapien
atcactgtctttcagggttgaggga

SEQ ID NO: 2177317 - DNA, 25 bp, Homo sapien
attgaaggagaaattgtgatgcttt

SEQ ID NO: 2177318 - DNA, 25 bp, Homo sapien
tgaaggagaaattgtgatgcttttt

SEQ ID NO: 2177319 - DNA, 25 bp, Homo sapien
caatgatgaagttgtgtttctccac

SEQ ID NO: 2177320 - DNA, 25 bp, Homo sapien
gaagagaggagtcaatgatgaagtt

SEQ ID NO: 2177321 - DNA, 25 bp, Homo sapien
gacaggcttgttcaaagatcagggc

SEQ ID NO: 2177322 - DNA, 25 bp, Homo sapien
gacttgaccagtgttcgggcttatc

SEQ ID NO: 2177323 - DNA, 25 bp, Homo sapien
tgtcaggcagaaccggacaggcttg

SEQ ID NO: 2177324 - DNA, 25 bp, Homo sapien
gatcagggcaacaacttcaaaatgg

SEQ ID NO: 2177325 - DNA, 25 bp, Homo sapien
ggggtaggagattctttctgaagat

SEQ ID NO: 2177326 - DNA, 25 bp, Homo sapien
gacagtgctagaaataaccaagcta

SEQ ID NO: 2177327 - DNA, 25 bp, Homo sapien
aaaaaatccatgacagtgctagaaa

SEQ ID NO: 2177328 - DNA, 25 bp, Homo sapien
gtgctagaaataaccaagctataag

SEQ ID NO: 2177329 - DNA, 25 bp, Homo sapien
aataaccaagctataagtagccagt

SEQ ID NO: 2177330 - DNA, 25 bp, Homo sapien
tgctgagggcatgtcttttcatgcc

SEQ ID NO: 2177331 - DNA, 25 bp, Homo sapien
aatgctgagggcatgtcttttcatg

SEQ ID NO: 2177332 - DNA, 25 bp, Homo sapien
atgctgagggcatgtcttttcatgc

SEQ ID NO: 2177333 - DNA, 25 bp, Homo sapien
caatgctgagggcatgtcttttcat

SEQ ID NO: 2177334 - DNA, 25 bp, Homo sapien
ggcttgcttgttccggaagctgttt

SEQ ID NO: 2177335 - DNA, 25 bp, Homo sapien
gccaccctttttcgttcaatctcca

SEQ ID NO: 2177336 - DNA, 25 bp, Homo sapien
gggacaccagtttctgctgacctct

SEQ ID NO: 2177337 - DNA, 25 bp, Homo sapien
gaagctgtttattatgtttccaatc

SEQ ID NO: 2177338 - DNA, 25 bp, Homo sapien
aggtcatgtctggacccctattggg

SEQ ID NO: 2177339 - DNA, 25 bp, Homo sapien
taacccaggtagcagttgatggcca

SEQ ID NO: 2177340 - DNA, 25 bp, Homo sapien
cttttgccagcttgtaagaggtcat

SEQ ID NO: 2177341 - DNA, 25 bp, Homo sapien
ctacacagtctccttcagtgaaatg

SEQ ID NO: 2177342 - DNA, 25 bp, Homo sapien
ctgtggatgttgtctgcttctgcat

SEQ ID NO: 2177343 - DNA, 25 bp, Homo sapien
tctgtggatgttgtctgcttctgca

SEQ ID NO: 2177344 - DNA, 25 bp, Homo sapien
ctctgtggatgttgtctgcttctgc

SEQ ID NO: 2177345 - DNA, 25 bp, Homo sapien
tcatgaacaacaggtgatctgaaat

SEQ ID NO: 2177346 - DNA, 25 bp, Homo sapien
tgacagcagtcatgaacaacaggtg

SEQ ID NO: 2177347 - DNA, 25 bp, Homo sapien
aaggaggatccccttgacagcagtc

SEQ ID NO: 2177348 - DNA, 25 bp, Homo sapien
ggaggatccccttgacagcagtcat

SEQ ID NO: 2177349 - DNA, 25 bp, Homo sapien
gatgctgttctgacggctctgtgtg

SEQ ID NO: 2177350 - DNA, 25 bp, Homo sapien
cagagcattcttactccaaggtagt

SEQ ID NO: 2177351 - DNA, 25 bp, Homo sapien
gcttttacacaaatgaacacgaatg

SEQ ID NO: 2177352 - DNA, 25 bp, Homo sapien
tggcacccacccgaagaactgtgct

SEQ ID NO: 2177353 - DNA, 25 bp, Homo sapien
tgttttaaattgcagacgataagta

SEQ ID NO: 2177354 - DNA, 25 bp, Homo sapien
gaagtgcccgtatccaattttcaaa

SEQ ID NO: 2177355 - DNA, 25 bp, Homo sapien
ttctgccatgaagtgcccgtatcca

SEQ ID NO: 2177356 - DNA, 25 bp, Homo sapien
gacgataagtattaattctgccatg

SEQ ID NO: 2177357 - DNA, 25 bp, Homo sapien
gacttccctggtgaatattgagcta

SEQ ID NO: 2177358 - DNA, 25 bp, Homo sapien
acttccctggtgaatattgagctat

SEQ ID NO: 2177359 - DNA, 25 bp, Homo sapien
tgacttccctggtgaatattgagct

SEQ ID NO: 2177360 - DNA, 25 bp, Homo sapien
ctgacttccctggtgaatattgagc

SEQ ID NO: 2177361 - DNA, 25 bp, Homo sapien
cacctcaagaaatttacaccagtgt

SEQ ID NO: 2177362 - DNA, 25 bp, Homo sapien
tcaagaaatttacaccagtgtcaat

SEQ ID NO: 2177363 - DNA, 25 bp, Homo sapien
aatttacaccagtgtcaatggccat

SEQ ID NO: 2177364 - DNA, 25 bp, Homo sapien
gaaatttacaccagtgtcaatggcc

SEQ ID NO: 2177365 - DNA, 25 bp, Homo sapien
catgattttgcctgagaaagcttcc

SEQ ID NO: 2177366 - DNA, 25 bp, Homo sapien
ctgagaaagcttccctgttatattc

SEQ ID NO: 2177367 - DNA, 25 bp, Homo sapien
tcatgattttgcctgagaaagcttc

SEQ ID NO: 2177368 - DNA, 25 bp, Homo sapien
agcttccctgttatattccttgaac

SEQ ID NO: 2177369 - DNA, 25 bp, Homo sapien
attccaggactgtgtttaatatagc

SEQ ID NO: 2177370 - DNA, 25 bp, Homo sapien
caagactcttttgccttcaacgata

SEQ ID NO: 2177371 - DNA, 25 bp, Homo sapien
caacgatacttgtattaccactttg

SEQ ID NO: 2177372 - DNA, 25 bp, Homo sapien
gaagctctcctattcccttgtctca

SEQ ID NO: 2177373 - DNA, 25 bp, Homo sapien
tatagaaagtatgaaccaaatctat

SEQ ID NO: 2177374 - DNA, 25 bp, Homo sapien
tagaaagtatgaaccaaatctattt

SEQ ID NO: 2177375 - DNA, 25 bp, Homo sapien
agaaagtatgaaccaaatctatttt

SEQ ID NO: 2177376 - DNA, 25 bp, Homo sapien
aaagtatgaaccaaatctatttttg

SEQ ID NO: 2177377 - DNA, 25 bp, Homo sapien
cactagtgctggttgtagactggat

SEQ ID NO: 2177378 - DNA, 25 bp, Homo sapien
cacaggtcaggtgatcagagtccat

SEQ ID NO: 2177379 - DNA, 25 bp, Homo sapien
cagtgacatgactcaaaccttaggt

SEQ ID NO: 2177380 - DNA, 25 bp, Homo sapien
gatgtgtacccttgcttctgccata

SEQ ID NO: 2177381 - DNA, 25 bp, Homo sapien
gaaattgtcaagagatagttctgac

SEQ ID NO: 2177382 - DNA, 25 bp, Homo sapien
cagtagagctaaattgcctagttcc

SEQ ID NO: 2177383 - DNA, 25 bp, Homo sapien
gatagttctgactgaggttgatcag

SEQ ID NO: 2177384 - DNA, 25 bp, Homo sapien
gtgattggcgctagtaacccccttg

SEQ ID NO: 2177385 - DNA, 25 bp, Homo sapien
agtgatcaccccttcgaccatttta

SEQ ID NO: 2177386 - DNA, 25 bp, Homo sapien
gaacatgtgtcatcctgagcctttc

SEQ ID NO: 2177387 - DNA, 25 bp, Homo sapien
tcctcttgtgagtggtgggtgtcca

SEQ ID NO: 2177388 - DNA, 25 bp, Homo sapien
ccacagtgtcaataagcccagtgat

SEQ ID NO: 2177389 - DNA, 25 bp, Homo sapien
ctggaaggtcatgttgcaaagccat

SEQ ID NO: 2177390 - DNA, 25 bp, Homo sapien
gctggaaggtcatgttgcaaagcca

SEQ ID NO: 2177391 - DNA, 25 bp, Homo sapien
agctggaaggtcatgttgcaaagcc

SEQ ID NO: 2177392 - DNA, 25 bp, Homo sapien
catggaacctaagtggtggccctcc

SEQ ID NO: 2177393 - DNA, 25 bp, Homo sapien
cacaggagaatttggtgcaccagcc

SEQ ID NO: 2177394 - DNA, 25 bp, Homo sapien
gagcgcctagtgtgcaccaagtatg

SEQ ID NO: 2177395 - DNA, 25 bp, Homo sapien
gatatctgcccctaactgcactggg

SEQ ID NO: 2177396 - DNA, 25 bp, Homo sapien
tggttgagtctcaccaggtttgcca

SEQ ID NO: 2177397 - DNA, 25 bp, Homo sapien
cttggttgagtctcaccaggtttgc

SEQ ID NO: 2177398 - DNA, 25 bp, Homo sapien
ttggttgagtctcaccaggtttgcc

SEQ ID NO: 2177399 - DNA, 25 bp, Homo sapien
ggttgagtctcaccaggtttgccag

SEQ ID NO: 2177400 - DNA, 25 bp, Homo sapien
taacatacagatctagctgcccttt

SEQ ID NO: 2177401 - DNA, 25 bp, Homo sapien
aagagcgttggtgaggcctccgtcc

SEQ ID NO: 2177402 - DNA, 25 bp, Homo sapien
gagatgtccagtcgtccactgaagg

SEQ ID NO: 2177403 - DNA, 25 bp, Homo sapien
tcctgcttggcgatattaacataca

SEQ ID NO: 2177404 - DNA, 25 bp, Homo sapien
tctcacgtcagcacacgtcaacaac

SEQ ID NO: 2177405 - DNA, 25 bp, Homo sapien
acgtcagcacacgtcaacaacacat

SEQ ID NO: 2177406 - DNA, 25 bp, Homo sapien
gtggaaagaaacatctcacgtcagc

SEQ ID NO: 2177407 - DNA, 25 bp, Homo sapien
tggaaagaaacatctcacgtcagca

SEQ ID NO: 2177408 - DNA, 25 bp, Homo sapien
atgggcacaaaactgctggctagga

SEQ ID NO: 2177409 - DNA, 25 bp, Homo sapien
agcttcagtcctgcataaatgggca

SEQ ID NO: 2177410 - DNA, 25 bp, Homo sapien
gccctttgtattccactagcttcag

SEQ ID NO: 2177411 - DNA, 25 bp, Homo sapien
tgggcacaaaactgctggctaggag

SEQ ID NO: 2177412 - DNA, 25 bp, Homo sapien
gctgctgtagttcaaattcaaagac

SEQ ID NO: 2177413 - DNA, 25 bp, Homo sapien
cttcctcagtttttccaagataatg

SEQ ID NO: 2177414 - DNA, 25 bp, Homo sapien
ttatcttcctcagtttttccaagat

SEQ ID NO: 2177415 - DNA, 25 bp, Homo sapien
gataatgaccaatcttaaattcagt

SEQ ID NO: 2177416 - DNA, 25 bp, Homo sapien
cgtgcagtcggttctgggccagctc

SEQ ID NO: 2177417 - DNA, 25 bp, Homo sapien
gaggaagaatcgactccatcccact

SEQ ID NO: 2177418 - DNA, 25 bp, Homo sapien
tgatggatacgtgcagtcggttctg

SEQ ID NO: 2177419 - DNA, 25 bp, Homo sapien
aaagtggagactaagtgattttctc

SEQ ID NO: 2177420 - DNA, 25 bp, Homo sapien
gttactgccccgaaagactgccttc

SEQ ID NO: 2177421 - DNA, 25 bp, Homo sapien
ccatgaagtcataaccgggcgttac

SEQ ID NO: 2177422 - DNA, 25 bp, Homo sapien
tcataaccgggcgttactgccccga

SEQ ID NO: 2177423 - DNA, 25 bp, Homo sapien
cttagtcgggccatgaagtcataac

SEQ ID NO: 2177424 - DNA, 25 bp, Homo sapien
aacagaagcaaccaacgatcccgca

SEQ ID NO: 2177425 - DNA, 25 bp, Homo sapien
tggtaaatgcccagaaatccacacg

SEQ ID NO: 2177426 - DNA, 25 bp, Homo sapien
agttttttgccatgtctgcaaagtg

SEQ ID NO: 2177427 - DNA, 25 bp, Homo sapien
gtctgcaaagtgcagatgctgcccc

SEQ ID NO: 2177428 - DNA, 25 bp, Homo sapien
ctgcaaatgataggttgatgtgctt

SEQ ID NO: 2177429 - DNA, 25 bp, Homo sapien
caaatgataggttgatgtgcttcat

SEQ ID NO: 2177430 - DNA, 25 bp, Homo sapien
gcaaatgataggttgatgtgcttca

SEQ ID NO: 2177431 - DNA, 25 bp, Homo sapien
tgcaaatgataggttgatgtgcttc

SEQ ID NO: 2177432 - DNA, 25 bp, Homo sapien
gggtcaagccccagttttgattcca

SEQ ID NO: 2177433 - DNA, 25 bp, Homo sapien
tccgcgtaggctgagtcccagtcat

SEQ ID NO: 2177434 - DNA, 25 bp, Homo sapien
ggctgcgctggcgtccgcgtaggct

SEQ ID NO: 2177435 - DNA, 25 bp, Homo sapien
gctgagtcccagtcatcgatccggg

SEQ ID NO: 2177436 - DNA, 25 bp, Homo sapien
cagccccgggacacttccgtgttga

SEQ ID NO: 2177437 - DNA, 25 bp, Homo sapien
gggccgtcactcaacgccattccgc

SEQ ID NO: 2177438 - DNA, 25 bp, Homo sapien
ccattccgccaccaaggccgcgcta

SEQ ID NO: 2177439 - DNA, 25 bp, Homo sapien
cacttccgtgttgaacgagtccctt

SEQ ID NO: 2177440 - DNA, 25 bp, Homo sapien
cgcgagccggcccaggaaagtcctg

SEQ ID NO: 2177441 - DNA, 25 bp, Homo sapien
cgcctcccgcgcaggtatgtgacgt

SEQ ID NO: 2177442 - DNA, 25 bp, Homo sapien
ctcccgcgcaggtatgtgacgtcat

SEQ ID NO: 2177443 - DNA, 25 bp, Homo sapien
gttggtaccgcctcccgcgcaggta

SEQ ID NO: 2177444 - DNA, 25 bp, Homo sapien
gcaactgacctttaataatcctcat

SEQ ID NO: 2177445 - DNA, 25 bp, Homo sapien
gcgagcaactgacctttaataatcc

SEQ ID NO: 2177446 - DNA, 25 bp, Homo sapien
ctgcgagcaactgacctttaataat

SEQ ID NO: 2177447 - DNA, 25 bp, Homo sapien
gagcaactgacctttaataatcctc

SEQ ID NO: 2177448 - DNA, 25 bp, Homo sapien
tggagtctgactggattgccaccct

SEQ ID NO: 2177449 - DNA, 25 bp, Homo sapien
gtctgactggattgccacccttgtc

SEQ ID NO: 2177450 - DNA, 25 bp, Homo sapien
ggtggagtctgactggattgccacc

SEQ ID NO: 2177451 - DNA, 25 bp, Homo sapien
tgactggattgccacccttgtctgg

SEQ ID NO: 2177452 - DNA, 25 bp, Homo sapien
aaattccacatgtcctacttttaca

SEQ ID NO: 2177453 - DNA, 25 bp, Homo sapien
ccacatgtcctacttttacatccat

SEQ ID NO: 2177454 - DNA, 25 bp, Homo sapien
catcaaattccacatgtcctacttt

SEQ ID NO: 2177455 - DNA, 25 bp, Homo sapien
tccacatgtcctacttttacatcca

SEQ ID NO: 2177456 - DNA, 25 bp, Homo sapien
tcatttaaggtgatgccttctattg

SEQ ID NO: 2177457 - DNA, 25 bp, Homo sapien
atttaaggtgatgccttctattgac

SEQ ID NO: 2177458 - DNA, 25 bp, Homo sapien
catttaaggtgatgccttctattga

SEQ ID NO: 2177459 - DNA, 25 bp, Homo sapien
tgtgctcccttggataggaggtttt

SEQ ID NO: 2177460 - DNA, 25 bp, Homo sapien
gacagctcagtaggatgctccctgc

SEQ ID NO: 2177461 - DNA, 25 bp, Homo sapien
aggaggtttttgttcgacagctcag

SEQ ID NO: 2177462 - DNA, 25 bp, Homo sapien
tttgttcgacagctcagtaggatgc

SEQ ID NO: 2177463 - DNA, 25 bp, Homo sapien
tgggtcccagtaatttgttctggct

SEQ ID NO: 2177464 - DNA, 25 bp, Homo sapien
ccctggctctgctgtataatattgg

SEQ ID NO: 2177465 - DNA, 25 bp, Homo sapien
ccagtaatttgttctggctctccat

SEQ ID NO: 2177466 - DNA, 25 bp, Homo sapien
gctgtataatattgggtcccagtaa

SEQ ID NO: 2177467 - DNA, 25 bp, Homo sapien
tcagggaaagctgacgttacatcca

SEQ ID NO: 2177468 - DNA, 25 bp, Homo sapien
tgacgttacatccacagtccagtcc

SEQ ID NO: 2177469 - DNA, 25 bp, Homo sapien
tcaggttggtaattccagttcatca

SEQ ID NO: 2177470 - DNA, 25 bp, Homo sapien
ggaaagctgacgttacatccacagt

SEQ ID NO: 2177471 - DNA, 25 bp, Homo sapien
tcttgatatacagtggaaatcgtgc

SEQ ID NO: 2177472 - DNA, 25 bp, Homo sapien
tcctgactttgaaagcggtttggag

SEQ ID NO: 2177473 - DNA, 25 bp, Homo sapien
aggacgtctctgggccgctgcagtt

SEQ ID NO: 2177474 - DNA, 25 bp, Homo sapien
atttcctgttctacaaaattgtaat

SEQ ID NO: 2177475 - DNA, 25 bp, Homo sapien
tgaagtcttgttctatgatttcaaa

SEQ ID NO: 2177476 - DNA, 25 bp, Homo sapien
tcaaaatactgtgttagctttcgac

SEQ ID NO: 2177477 - DNA, 25 bp, Homo sapien
ttgtgaagtcttgttctatgatttc

SEQ ID NO: 2177478 - DNA, 25 bp, Homo sapien
tgtgttagctttcgacagcttggga

SEQ ID NO: 2177479 - DNA, 25 bp, Homo sapien
aatgcctttgtaagaacttcttgat

SEQ ID NO: 2177480 - DNA, 25 bp, Homo sapien
gattgtgtcttttggaaaatagaaa

SEQ ID NO: 2177481 - DNA, 25 bp, Homo sapien
actcatcaaactgaaatgcctttgt

SEQ ID NO: 2177482 - DNA, 25 bp, Homo sapien
ttctttcctgaaaactcatcaaact

SEQ ID NO: 2177483 - DNA, 25 bp, Homo sapien
taacccttttcctggtcaattgcca

SEQ ID NO: 2177484 - DNA, 25 bp, Homo sapien
ccttttcctggtcaattgccatttt

SEQ ID NO: 2177485 - DNA, 25 bp, Homo sapien
cccttttcctggtcaattgccattt

SEQ ID NO: 2177486 - DNA, 25 bp, Homo sapien
aacccttttcctggtcaattgccat

SEQ ID NO: 2177487 - DNA, 25 bp, Homo sapien
ttcatgagggcattactttgtacaa

SEQ ID NO: 2177488 - DNA, 25 bp, Homo sapien
agttcatgagggcattactttgtac

SEQ ID NO: 2177489 - DNA, 25 bp, Homo sapien
tggataagttcatgagggcattact

SEQ ID NO: 2177490 - DNA, 25 bp, Homo sapien
atggtggataagttcatgagggcat

SEQ ID NO: 2177491 - DNA, 25 bp, Homo sapien
ggagggagatcaaagtatatgttcc

SEQ ID NO: 2177492 - DNA, 25 bp, Homo sapien
tgtcagctttactcacatccacatc

SEQ ID NO: 2177493 - DNA, 25 bp, Homo sapien
tatgttcctactgtcagctttactc

SEQ ID NO: 2177494 - DNA, 25 bp, Homo sapien
gctgtaccccgaggagggagatcaa

SEQ ID NO: 2177495 - DNA, 25 bp, Homo sapien
tgtggcttcccgctagccacaaagt

SEQ ID NO: 2177496 - DNA, 25 bp, Homo sapien
tcccgctagccacaaagttactact

SEQ ID NO: 2177497 - DNA, 25 bp, Homo sapien
caaagttactactttctgcattcat

SEQ ID NO: 2177498 - DNA, 25 bp, Homo sapien
tagccacaaagttactactttctgc

SEQ ID NO: 2177499 - DNA, 25 bp, Homo sapien
ttatcgacagcccttatcagagagg

SEQ ID NO: 2177500 - DNA, 25 bp, Homo sapien
cattgggagaggaccgatgacacct

SEQ ID NO: 2177501 - DNA, 25 bp, Homo sapien
cagcattaaaggctccattgggaga

SEQ ID NO: 2177502 - DNA, 25 bp, Homo sapien
taaacaggcagatcccgtggctgag

SEQ ID NO: 2177503 - DNA, 25 bp, Homo sapien
gcaagggagtagcttcttctctctg

SEQ ID NO: 2177504 - DNA, 25 bp, Homo sapien
gtattctgattagcacctgcacaaa

SEQ ID NO: 2177505 - DNA, 25 bp, Homo sapien
ttccctcattgcatatccatggctc

SEQ ID NO: 2177506 - DNA, 25 bp, Homo sapien
aaatatgcaatgcagaacgtaaaca

SEQ ID NO: 2177507 - DNA, 25 bp, Homo sapien
gggccttgtgatatacaggagagct

SEQ ID NO: 2177508 - DNA, 25 bp, Homo sapien
gggggccttgtgatatacaggagag

SEQ ID NO: 2177509 - DNA, 25 bp, Homo sapien
ggggccttgtgatatacaggagagc

SEQ ID NO: 2177510 - DNA, 25 bp, Homo sapien
tcctttcctgtatagcgtttaccca

SEQ ID NO: 2177511 - DNA, 25 bp, Homo sapien
gcagaactccaaaccacacacttta

SEQ ID NO: 2177512 - DNA, 25 bp, Homo sapien
aatgccctataacgcagaactccaa

SEQ ID NO: 2177513 - DNA, 25 bp, Homo sapien
gagtaggacaaatgccctataacgc

SEQ ID NO: 2177514 - DNA, 25 bp, Homo sapien
gcgttctttaatggagttcagtgaa

SEQ ID NO: 2177515 - DNA, 25 bp, Homo sapien
gatccgtgagatcattgtgcgttct

SEQ ID NO: 2177516 - DNA, 25 bp, Homo sapien
tcaagacagtttgatccgtgagatc

SEQ ID NO: 2177517 - DNA, 25 bp, Homo sapien
gatcattgtgcgttctttaatggag

SEQ ID NO: 2177518 - DNA, 25 bp, Homo sapien
caactaattgaattgtacaggtgac

SEQ ID NO: 2177519 - DNA, 25 bp, Homo sapien
tcaaagcacaactaattgaattgta

SEQ ID NO: 2177520 - DNA, 25 bp, Homo sapien
agcacaactaattgaattgtacagg

SEQ ID NO: 2177521 - DNA, 25 bp, Homo sapien
ctaattgaattgtacaggtgacttt

SEQ ID NO: 2177522 - DNA, 25 bp, Homo sapien
tccagactagcaggctctagcagca

SEQ ID NO: 2177523 - DNA, 25 bp, Homo sapien
tgagtgtggttccagactagcaggc

SEQ ID NO: 2177524 - DNA, 25 bp, Homo sapien
catatagattagcagcatgggaccc

SEQ ID NO: 2177525 - DNA, 25 bp, Homo sapien
tctagcagcattcgcagagtcgcag

SEQ ID NO: 2177526 - DNA, 25 bp, Homo sapien
catataactgcgaagtattttgagt

SEQ ID NO: 2177527 - DNA, 25 bp, Homo sapien
tttgggaacatataactgcgaagta

SEQ ID NO: 2177528 - DNA, 25 bp, Homo sapien
tgggaacatataactgcgaagtatt

SEQ ID NO: 2177529 - DNA, 25 bp, Homo sapien
gaacatataactgcgaagtattttg

SEQ ID NO: 2177530 - DNA, 25 bp, Homo sapien
atcttgaaatccagacatttcacag

SEQ ID NO: 2177531 - DNA, 25 bp, Homo sapien
tttcacaggaatgagctgcattaat

SEQ ID NO: 2177532 - DNA, 25 bp, Homo sapien
catcttgaaatccagacatttcaca

SEQ ID NO: 2177533 - DNA, 25 bp, Homo sapien
tccagacatttcacaggaatgagct

SEQ ID NO: 2177534 - DNA, 25 bp, Homo sapien
ctcctgtgttgaggtacttggggtc

SEQ ID NO: 2177535 - DNA, 25 bp, Homo sapien
atcctcctgtgttgaggtacttggg

SEQ ID NO: 2177536 - DNA, 25 bp, Homo sapien
caggtgcagccccttttaatatcag

SEQ ID NO: 2177537 - DNA, 25 bp, Homo sapien
ttaatatcaggaagatctcttatgt

SEQ ID NO: 2177538 - DNA, 25 bp, Homo sapien
tatgtgtattaagatcatgtagaca

SEQ ID NO: 2177539 - DNA, 25 bp, Homo sapien
tcaaatgtagactctgattccagca

SEQ ID NO: 2177540 - DNA, 25 bp, Homo sapien
cagggcacgtcagtgctcatgttgc

SEQ ID NO: 2177541 - DNA, 25 bp, Homo sapien
ttagtcacagggcacgtcagtgctc

SEQ ID NO: 2177542 - DNA, 25 bp, Homo sapien
tgtaaccaaaatggggtagccaggc

SEQ ID NO: 2177543 - DNA, 25 bp, Homo sapien
tgatggtagtaattttgtaaccaaa

SEQ ID NO: 2177544 - DNA, 25 bp, Homo sapien
atggggtagccaggctctacccagc

SEQ ID NO: 2177545 - DNA, 25 bp, Homo sapien
ctgatggtagtaattttgtaaccaa

SEQ ID NO: 2177546 - DNA, 25 bp, Homo sapien
gcttttaccgaagtctagttcactc

SEQ ID NO: 2177547 - DNA, 25 bp, Homo sapien
tcatagatgcttttaccgaagtcta

SEQ ID NO: 2177548 - DNA, 25 bp, Homo sapien
tagatgcttttaccgaagtctagtt

SEQ ID NO: 2177549 - DNA, 25 bp, Homo sapien
tgcttttaccgaagtctagttcact

SEQ ID NO: 2177550 - DNA, 25 bp, Homo sapien
tcaacccaggttgcttgggtgaact

SEQ ID NO: 2177551 - DNA, 25 bp, Homo sapien
agaacacttgcatgcggtagctgct

SEQ ID NO: 2177552 - DNA, 25 bp, Homo sapien
aacttcactgcgtgtatgatgagca

SEQ ID NO: 2177553 - DNA, 25 bp, Homo sapien
gctgttggctatgccagaatcagaa

SEQ ID NO: 2177554 - DNA, 25 bp, Homo sapien
tccgtatctgatgagtggtcacaca

SEQ ID NO: 2177555 - DNA, 25 bp, Homo sapien
tcacacagttgttgtggcacggagt

SEQ ID NO: 2177556 - DNA, 25 bp, Homo sapien
tctgaggaggccagacatattgtct

SEQ ID NO: 2177557 - DNA, 25 bp, Homo sapien
catactgatcatgggaaagagacaa

SEQ ID NO: 2177558 - DNA, 25 bp, Homo sapien
gagaagaacttgcatgagttttgaa

SEQ ID NO: 2177559 - DNA, 25 bp, Homo sapien
gcctctgagtatgggtgttggatta

SEQ ID NO: 2177560 - DNA, 25 bp, Homo sapien
gggtgctgggatcctacaaatacat

SEQ ID NO: 2177561 - DNA, 25 bp, Homo sapien
gcctccataagggaaagactggctc

SEQ ID NO: 2177562 - DNA, 25 bp, Homo sapien
caggcagtgtggtcgcagtgaggca

SEQ ID NO: 2177563 - DNA, 25 bp, Homo sapien
agtgtcgagcacaaatgcagcagcc

SEQ ID NO: 2177564 - DNA, 25 bp, Homo sapien
agtgaggcagcagtgtcgagcacaa

SEQ ID NO: 2177565 - DNA, 25 bp, Homo sapien
ggtggtcttggttctaaggctgcca

SEQ ID NO: 2177566 - DNA, 25 bp, Homo sapien
agattccagcccacacggcatgggt

SEQ ID NO: 2177567 - DNA, 25 bp, Homo sapien
ccagattccagcccacacggcatgg

SEQ ID NO: 2177568 - DNA, 25 bp, Homo sapien
cagcccacacggcatgggtgcctgc

SEQ ID NO: 2177569 - DNA, 25 bp, Homo sapien
attccagcccacacggcatgggtgc

SEQ ID NO: 2177570 - DNA, 25 bp, Homo sapien
tgtgtcagccaaatggtgtcctctc

SEQ ID NO: 2177571 - DNA, 25 bp, Homo sapien
ggagccctcgtaggtgtctgtgtca

SEQ ID NO: 2177572 - DNA, 25 bp, Homo sapien
catgttccagactaaatgagcagac

SEQ ID NO: 2177573 - DNA, 25 bp, Homo sapien
tcccagttgaatgaggtgagtaaag

SEQ ID NO: 2177574 - DNA, 25 bp, Homo sapien
tattatcttcagaatggcaagcacc

SEQ ID NO: 2177575 - DNA, 25 bp, Homo sapien
ccccgctggtgagatctctgaggtc

SEQ ID NO: 2177576 - DNA, 25 bp, Homo sapien
tatcttcagaatggcaagcaccccg

SEQ ID NO: 2177577 - DNA, 25 bp, Homo sapien
agaatggcaagcaccccgctggtga

SEQ ID NO: 2177578 - DNA, 25 bp, Homo sapien
tccgcctcaggtgccgtcacggccg

SEQ ID NO: 2177579 - DNA, 25 bp, Homo sapien
tcctccggcggcagctcgtgctgag

SEQ ID NO: 2177580 - DNA, 25 bp, Homo sapien
gggtcgtgctgggtcccctcgctca

SEQ ID NO: 2177581 - DNA, 25 bp, Homo sapien
catctttgtcgcagcccctttcttc

SEQ ID NO: 2177582 - DNA, 25 bp, Homo sapien
acagggacgtgtcctcagaagcggt

SEQ ID NO: 2177583 - DNA, 25 bp, Homo sapien
ggaacagggacgtgtcctcagaagc

SEQ ID NO: 2177584 - DNA, 25 bp, Homo sapien
gggacgtgtcctcagaagcggtggg

SEQ ID NO: 2177585 - DNA, 25 bp, Homo sapien
aacagggacgtgtcctcagaagcgg

SEQ ID NO: 2177586 - DNA, 25 bp, Homo sapien
tcccgaggctctcggctttggactc

SEQ ID NO: 2177587 - DNA, 25 bp, Homo sapien
ggtcccgaggctctcggctttggac

SEQ ID NO: 2177588 - DNA, 25 bp, Homo sapien
gaggtcccgaggctctcggctttgg

SEQ ID NO: 2177589 - DNA, 25 bp, Homo sapien
tggccttggccggaggtcccgaggc

SEQ ID NO: 2177590 - DNA, 25 bp, Homo sapien
gattggtcaacactccactacccag

SEQ ID NO: 2177591 - DNA, 25 bp, Homo sapien
acgagacaatcacgcccctgagctg

SEQ ID NO: 2177592 - DNA, 25 bp, Homo sapien
gctgtgattggtcaacactccacta

SEQ ID NO: 2177593 - DNA, 25 bp, Homo sapien
ctctcgcgatcccaggacgagacaa

SEQ ID NO: 2177594 - DNA, 25 bp, Homo sapien
attcctctgctacaccttgaggatc

SEQ ID NO: 2177595 - DNA, 25 bp, Homo sapien
aatccctccatgctaactgggatgg

SEQ ID NO: 2177596 - DNA, 25 bp, Homo sapien
tccatgctaactgggatggatggag

SEQ ID NO: 2177597 - DNA, 25 bp, Homo sapien
tacaccttgaggatcattcacttct

SEQ ID NO: 2177598 - DNA, 25 bp, Homo sapien
gagaatttggtgtggtccagtccaa

SEQ ID NO: 2177599 - DNA, 25 bp, Homo sapien
tgagtccctcctgaacaatagacaa

SEQ ID NO: 2177600 - DNA, 25 bp, Homo sapien
gatattgcctgagtttgagtccctc

SEQ ID NO: 2177601 - DNA, 25 bp, Homo sapien
gagcagtaaatccacatggagaggc

SEQ ID NO: 2177602 - DNA, 25 bp, Homo sapien
gtagacataaataagatccatgtcc

SEQ ID NO: 2177603 - DNA, 25 bp, Homo sapien
gaggatgacgtcagttgtccaggta

SEQ ID NO: 2177604 - DNA, 25 bp, Homo sapien
gggcgaggatgacgtcagttgtcca

SEQ ID NO: 2177605 - DNA, 25 bp, Homo sapien
gtgagacgacctgctaggtgttggg

SEQ ID NO: 2177606 - DNA, 25 bp, Homo sapien
gggcttggggcgaggatgacgtcag

SEQ ID NO: 2177607 - DNA, 25 bp, Homo sapien
gaatgttactgcagttagaacttaa

SEQ ID NO: 2177608 - DNA, 25 bp, Homo sapien
agagaatgttactgcagttagaact

SEQ ID NO: 2177609 - DNA, 25 bp, Homo sapien
cttgagtggaaggtgcatggatggt

SEQ ID NO: 2177610 - DNA, 25 bp, Homo sapien
catggatggttgagggactgagaga

SEQ ID NO: 2177611 - DNA, 25 bp, Homo sapien
ctggtaacgtttgatgggttcagct

SEQ ID NO: 2177612 - DNA, 25 bp, Homo sapien
gatgggttcagctgtccaatatgat

SEQ ID NO: 2177613 - DNA, 25 bp, Homo sapien
ccaccattctggtaacgtttgatgg

SEQ ID NO: 2177614 - DNA, 25 bp, Homo sapien
tgtagttttcttgtcgtcttctatt

SEQ ID NO: 2177615 - DNA, 25 bp, Homo sapien
gaaggctctggctgatcctgaattc

SEQ ID NO: 2177616 - DNA, 25 bp, Homo sapien
aggctctggctgatcctgaattcat

SEQ ID NO: 2177617 - DNA, 25 bp, Homo sapien
cagaattttatcctggaaggctctg

SEQ ID NO: 2177618 - DNA, 25 bp, Homo sapien
atttcccagaattttatcctggaag

SEQ ID NO: 2177619 - DNA, 25 bp, Homo sapien
tttttctgagatgaccattctgggt

SEQ ID NO: 2177620 - DNA, 25 bp, Homo sapien
ttttctgagatgaccattctgggtg

SEQ ID NO: 2177621 - DNA, 25 bp, Homo sapien
ttatctctcgtagacttctgagttc

SEQ ID NO: 2177622 - DNA, 25 bp, Homo sapien
tctcgtagacttctgagttcattgc

SEQ ID NO: 2177623 - DNA, 25 bp, Homo sapien
gtagacttctgagttcattgcaggc

SEQ ID NO: 2177624 - DNA, 25 bp, Homo sapien
tatctctcgtagacttctgagttca

SEQ ID NO: 2177625 - DNA, 25 bp, Homo sapien
tgaatttaacctcaaagacaaaggc

SEQ ID NO: 2177626 - DNA, 25 bp, Homo sapien
tgtgtacactgaatgaatttaacct

SEQ ID NO: 2177627 - DNA, 25 bp, Homo sapien
tagagaccacaagatcttcacccca

SEQ ID NO: 2177628 - DNA, 25 bp, Homo sapien
agacaaaggctgtggtttaggatga

SEQ ID NO: 2177629 - DNA, 25 bp, Homo sapien
ctttgtgatgtgagttcttgagcct

SEQ ID NO: 2177630 - DNA, 25 bp, Homo sapien
tcaatacggatgtagaatcctctac

SEQ ID NO: 2177631 - DNA, 25 bp, Homo sapien
tcatgacaatatcgatcctggcggt

SEQ ID NO: 2177632 - DNA, 25 bp, Homo sapien
tgtgggtctctgtcaatacggatgt

SEQ ID NO: 2177633 - DNA, 25 bp, Homo sapien
tactgcccacccaaattagtcaaga

SEQ ID NO: 2177634 - DNA, 25 bp, Homo sapien
aagatgtatgcataagaggcttccc

SEQ ID NO: 2177635 - DNA, 25 bp, Homo sapien
gtgacaacatgtaggctgtgtagga

SEQ ID NO: 2177636 - DNA, 25 bp, Homo sapien
ggctgtgtaggattcccatcttggg

SEQ ID NO: 2177637 - DNA, 25 bp, Homo sapien
tctggtcactagcaaggaaacaccc

SEQ ID NO: 2177638 - DNA, 25 bp, Homo sapien
cacccactgttaggaagtgggtcct

SEQ ID NO: 2177639 - DNA, 25 bp, Homo sapien
aacacattctggtcactagcaagga

SEQ ID NO: 2177640 - DNA, 25 bp, Homo sapien
tgggaagaaccggaacacattctgg

SEQ ID NO: 2177641 - DNA, 25 bp, Homo sapien
aattctatcacaaaagcagggctta

SEQ ID NO: 2177642 - DNA, 25 bp, Homo sapien
cttaattctatcacaaaagcagggc

SEQ ID NO: 2177643 - DNA, 25 bp, Homo sapien
tctatcacaaaagcagggcttatct

SEQ ID NO: 2177644 - DNA, 25 bp, Homo sapien
taattctatcacaaaagcagggctt

SEQ ID NO: 2177645 - DNA, 25 bp, Homo sapien
taatcatgagtaagaaacagtccgt

SEQ ID NO: 2177646 - DNA, 25 bp, Homo sapien
gagcaagtcctacatcttcaccatc

SEQ ID NO: 2177647 - DNA, 25 bp, Homo sapien
cgtagatgtccacaattacactgct

SEQ ID NO: 2177648 - DNA, 25 bp, Homo sapien
tacatcaatacgattatcatcacaa

SEQ ID NO: 2177649 - DNA, 25 bp, Homo sapien
agtcaaataaggctgtgagcgagtc

SEQ ID NO: 2177650 - DNA, 25 bp, Homo sapien
ggctgtgagcgagtcacacagacca

SEQ ID NO: 2177651 - DNA, 25 bp, Homo sapien
cacacagaccaatacatccaaagag

SEQ ID NO: 2177652 - DNA, 25 bp, Homo sapien
gtcacacagaccaatacatccaaag

SEQ ID NO: 2177653 - DNA, 25 bp, Homo sapien
catatggccacacccaaaaggcagg

SEQ ID NO: 2177654 - DNA, 25 bp, Homo sapien
tcttcatgtagaccctcaaagtctc

SEQ ID NO: 2177655 - DNA, 25 bp, Homo sapien
tcagggacatatgcaaggccctcca

SEQ ID NO: 2177656 - DNA, 25 bp, Homo sapien
gggacatatgcaaggccctccaaga

SEQ ID NO: 2177657 - DNA, 25 bp, Homo sapien
caggctgttgcaatcatgatttctc

SEQ ID NO: 2177658 - DNA, 25 bp, Homo sapien
tattagtggtactgttttcctccag

SEQ ID NO: 2177659 - DNA, 25 bp, Homo sapien
attagtggtactgttttcctccagg

SEQ ID NO: 2177660 - DNA, 25 bp, Homo sapien
ttcctccaggctgttgcaatcatga

SEQ ID NO: 2177661 - DNA, 25 bp, Homo sapien
ggccctgcggaagctcagacaggct

SEQ ID NO: 2177662 - DNA, 25 bp, Homo sapien
ctggcttcttgttttggccctgcgg

SEQ ID NO: 2177663 - DNA, 25 bp, Homo sapien
gtaacaccaccgtcttcaacataca

SEQ ID NO: 2177664 - DNA, 25 bp, Homo sapien
gctcagacaggctctgtaacaccac

SEQ ID NO: 2177665 - DNA, 25 bp, Homo sapien
gccatgctcagatgtccagtcacta

SEQ ID NO: 2177666 - DNA, 25 bp, Homo sapien
agtcccagagaccaaggtgctgctc

SEQ ID NO: 2177667 - DNA, 25 bp, Homo sapien
tgagacatagggcagaccacagacc

SEQ ID NO: 2177668 - DNA, 25 bp, Homo sapien
ccagtcactagtggatcctgagaca

SEQ ID NO: 2177669 - DNA, 25 bp, Homo sapien
atggttatgagtaagctcagctgac

SEQ ID NO: 2177670 - DNA, 25 bp, Homo sapien
gtcaacagggaaacctctctatggt

SEQ ID NO: 2177671 - DNA, 25 bp, Homo sapien
caaggattagaggaacctgcagcat

SEQ ID NO: 2177672 - DNA, 25 bp, Homo sapien
ctactcaaggattagaggaacctgc

SEQ ID NO: 2177673 - DNA, 25 bp, Homo sapien
ccagataggtaagtaatacacactc

SEQ ID NO: 2177674 - DNA, 25 bp, Homo sapien
tcccctgagccatgtggttggttgt

SEQ ID NO: 2177675 - DNA, 25 bp, Homo sapien
cacagaaccaccttgctgactccct

SEQ ID NO: 2177676 - DNA, 25 bp, Homo sapien
cctgagccatgtggttggttgttgt

SEQ ID NO: 2177677 - DNA, 25 bp, Homo sapien
ttgcctgtttccaagagcacagagg

SEQ ID NO: 2177678 - DNA, 25 bp, Homo sapien
tttgcctaacaacggtcttcccatc

SEQ ID NO: 2177679 - DNA, 25 bp, Homo sapien
caatgtccatgatgacactgccctt

SEQ ID NO: 2177680 - DNA, 25 bp, Homo sapien
agaggccactttgcctaacaacggt

SEQ ID NO: 2177681 - DNA, 25 bp, Homo sapien
cttcagggacaacagggcctcatat

SEQ ID NO: 2177682 - DNA, 25 bp, Homo sapien
ggcctcatatttccgtaggaaaata

SEQ ID NO: 2177683 - DNA, 25 bp, Homo sapien
gatgattaccttcagaggttattgc

SEQ ID NO: 2177684 - DNA, 25 bp, Homo sapien
taataggtagtagatgattaccttc

SEQ ID NO: 2177685 - DNA, 25 bp, Homo sapien
tcacgtgaatccttacccagaactt

SEQ ID NO: 2177686 - DNA, 25 bp, Homo sapien
catatcacgtgaatccttacccaga

SEQ ID NO: 2177687 - DNA, 25 bp, Homo sapien
acagagtaaattcatccaaagatgt

SEQ ID NO: 2177688 - DNA, 25 bp, Homo sapien
tgaatccttacccagaactttctcc

SEQ ID NO: 2177689 - DNA, 25 bp, Homo sapien
caccaacatcaaccgtgtgggagaa

SEQ ID NO: 2177690 - DNA, 25 bp, Homo sapien
catcaaccgtgtgggagaattgagg

SEQ ID NO: 2177691 - DNA, 25 bp, Homo sapien
gaatagcacaccaacatcaaccgtg

SEQ ID NO: 2177692 - DNA, 25 bp, Homo sapien
tgcagcaaggaatagcacaccaaca

SEQ ID NO: 2177693 - DNA, 25 bp, Homo sapien
ctgttgtcttcactgagaactgtgc

SEQ ID NO: 2177694 - DNA, 25 bp, Homo sapien
cttggtgtcaatgtgttcgtctgtt

SEQ ID NO: 2177695 - DNA, 25 bp, Homo sapien
gttgtcttcactgagaactgtgctg

SEQ ID NO: 2177696 - DNA, 25 bp, Homo sapien
caatgtgttcgtctgttgtcttcac

SEQ ID NO: 2177697 - DNA, 25 bp, Homo sapien
gagcagagctgccttctgcacgggc

SEQ ID NO: 2177698 - DNA, 25 bp, Homo sapien
ctgagcagagctgccttctgcacgg

SEQ ID NO: 2177699 - DNA, 25 bp, Homo sapien
agcagagctgccttctgcacgggca

SEQ ID NO: 2177700 - DNA, 25 bp, Homo sapien
gcagagctgccttctgcacgggcat

SEQ ID NO: 2177701 - DNA, 25 bp, Homo sapien
tgtaagaattgtttgatttcatggc

SEQ ID NO: 2177702 - DNA, 25 bp, Homo sapien
cacattgtaagaattgtttgatttc

SEQ ID NO: 2177703 - DNA, 25 bp, Homo sapien
atttcacattgtaagaattgtttga

SEQ ID NO: 2177704 - DNA, 25 bp, Homo sapien
tcatttcacattgtaagaattgttt

SEQ ID NO: 2177705 - DNA, 25 bp, Homo sapien
ctttgtttacctggacatgagcata

SEQ ID NO: 2177706 - DNA, 25 bp, Homo sapien
gatcgctttgtttacctggacatga

SEQ ID NO: 2177707 - DNA, 25 bp, Homo sapien
agaagacacgatcgctttgtttacc

SEQ ID NO: 2177708 - DNA, 25 bp, Homo sapien
gacacgatcgctttgtttacctgga

SEQ ID NO: 2177709 - DNA, 25 bp, Homo sapien
gatgctctgaccacttctgagttgt

SEQ ID NO: 2177710 - DNA, 25 bp, Homo sapien
caacctcaagttggaagtcaaggct

SEQ ID NO: 2177711 - DNA, 25 bp, Homo sapien
ccagaagaaactcgccaacctcaag

SEQ ID NO: 2177712 - DNA, 25 bp, Homo sapien
gttgtcatttatgtctccccggtat

SEQ ID NO: 2177713 - DNA, 25 bp, Homo sapien
tgggctaaaccagttatccactctc

SEQ ID NO: 2177714 - DNA, 25 bp, Homo sapien
ggtgggctaaaccagttatccactc

SEQ ID NO: 2177715 - DNA, 25 bp, Homo sapien
acaggtgggctaaaccagttatcca

SEQ ID NO: 2177716 - DNA, 25 bp, Homo sapien
ccactacccttcaccaggaactcac

SEQ ID NO: 2177717 - DNA, 25 bp, Homo sapien
tctggtgttgattccctggagcagc

SEQ ID NO: 2177718 - DNA, 25 bp, Homo sapien
ctggtgttgattccctggagcagcc

SEQ ID NO: 2177719 - DNA, 25 bp, Homo sapien
gcagcctttctgaactccaaggtca

SEQ ID NO: 2177720 - DNA, 25 bp, Homo sapien
ttttctggtgttgattccctggagc

SEQ ID NO: 2177721 - DNA, 25 bp, Homo sapien
gatgaaggtttgagcctggctgcct

SEQ ID NO: 2177722 - DNA, 25 bp, Homo sapien
tgctgtcacagtaggaagacgaccc

SEQ ID NO: 2177723 - DNA, 25 bp, Homo sapien
tgcagaaatgaagtcatgccaggga

SEQ ID NO: 2177724 - DNA, 25 bp, Homo sapien
ccattgttgacggtgagctgattca

SEQ ID NO: 2177725 - DNA, 25 bp, Homo sapien
gagcctaggattgagataagcccct

SEQ ID NO: 2177726 - DNA, 25 bp, Homo sapien
tttgctggacaaggaataatgcgca

SEQ ID NO: 2177727 - DNA, 25 bp, Homo sapien
gaagagattctaacaggagcctagg

SEQ ID NO: 2177728 - DNA, 25 bp, Homo sapien
gcaacgtgggtgtcaagattttcaa

SEQ ID NO: 2177729 - DNA, 25 bp, Homo sapien
ggtattttattgctccatctgcctc

SEQ ID NO: 2177730 - DNA, 25 bp, Homo sapien
tcacttgagagttaaagacataacc

SEQ ID NO: 2177731 - DNA, 25 bp, Homo sapien
ggagcatgacaccatatccaattaa

SEQ ID NO: 2177732 - DNA, 25 bp, Homo sapien
cttctgaaggacaagactgcctatt

SEQ ID NO: 2177733 - DNA, 25 bp, Homo sapien
tgagggccacacactgtactgagtt

SEQ ID NO: 2177734 - DNA, 25 bp, Homo sapien
gcggatttgtgttgaagctggcttc

SEQ ID NO: 2177735 - DNA, 25 bp, Homo sapien
ggtgtcacatgaaaagcggatttgt

SEQ ID NO: 2177736 - DNA, 25 bp, Homo sapien
tcccattgaagaagccatttgtgtc

SEQ ID NO: 2177737 - DNA, 25 bp, Homo sapien
agctggaatcactaagacgccctcc

SEQ ID NO: 2177738 - DNA, 25 bp, Homo sapien
tgccaccttgcggaagagataggca

SEQ ID NO: 2177739 - DNA, 25 bp, Homo sapien
caccttgcggaagagataggcagct

SEQ ID NO: 2177740 - DNA, 25 bp, Homo sapien
ataggcagctggaatcactaagacg

SEQ ID NO: 2177741 - DNA, 25 bp, Homo sapien
aaggcggctccctgctgcagtggac

SEQ ID NO: 2177742 - DNA, 25 bp, Homo sapien
agcccagtaccaccatggcaggaag

SEQ ID NO: 2177743 - DNA, 25 bp, Homo sapien
accatggcaggaagcaaaggcggct

SEQ ID NO: 2177744 - DNA, 25 bp, Homo sapien
tggacagcattgcagagccactatc

SEQ ID NO: 2177745 - DNA, 25 bp, Homo sapien
tatttccctcgttcccacacctaga

SEQ ID NO: 2177746 - DNA, 25 bp, Homo sapien
ctcgttcccacacctagacgaccat

SEQ ID NO: 2177747 - DNA, 25 bp, Homo sapien
ctagacgaccatggggccacgacag

SEQ ID NO: 2177748 - DNA, 25 bp, Homo sapien
gttcccacacctagacgaccatggg

SEQ ID NO: 2177749 - DNA, 25 bp, Homo sapien
gcaactgaatgaagctgatgttttg

SEQ ID NO: 2177750 - DNA, 25 bp, Homo sapien
tggctttgggccttgctagagaaag

SEQ ID NO: 2177751 - DNA, 25 bp, Homo sapien
caagcaccttggcaggactcagaat

SEQ ID NO: 2177752 - DNA, 25 bp, Homo sapien
gactcctcggtgtcttcttcacttg

SEQ ID NO: 2177753 - DNA, 25 bp, Homo sapien
aggtggaccaccctacgaaggaatg

SEQ ID NO: 2177754 - DNA, 25 bp, Homo sapien
ccaccctacgaaggaatgtaagatg

SEQ ID NO: 2177755 - DNA, 25 bp, Homo sapien
tgtaagatgcttcctattattcata

SEQ ID NO: 2177756 - DNA, 25 bp, Homo sapien
tattcataatgaagcccattgcata

SEQ ID NO: 2177757 - DNA, 25 bp, Homo sapien
gccttcaagcccgatctctgggtca

SEQ ID NO: 2177758 - DNA, 25 bp, Homo sapien
gatctctgggtcagtagccccagcc

SEQ ID NO: 2177759 - DNA, 25 bp, Homo sapien
taaaagaatgtgaaggaagttggat

SEQ ID NO: 2177760 - DNA, 25 bp, Homo sapien
ctgtggtgtagctcaagaagtaaaa

SEQ ID NO: 2177761 - DNA, 25 bp, Homo sapien
tattattgaaccagtatgtacaaac

SEQ ID NO: 2177762 - DNA, 25 bp, Homo sapien
tactttattattgaaccagtatgta

SEQ ID NO: 2177763 - DNA, 25 bp, Homo sapien
aagacagtcatgagaatcctctccg

SEQ ID NO: 2177764 - DNA, 25 bp, Homo sapien
gacagtcatgagaatcctctccgta

SEQ ID NO: 2177765 - DNA, 25 bp, Homo sapien
acaccgagtctgaccatgcaaaatc

SEQ ID NO: 2177766 - DNA, 25 bp, Homo sapien
ctgacaccgagtctgaccatgcaaa

SEQ ID NO: 2177767 - DNA, 25 bp, Homo sapien
gtctgaccatgcaaaatcacaggta

SEQ ID NO: 2177768 - DNA, 25 bp, Homo sapien
gaccatgcaaaatcacaggtaagag

SEQ ID NO: 2177769 - DNA, 25 bp, Homo sapien
tacaaagctgcaaaacattcctgga

SEQ ID NO: 2177770 - DNA, 25 bp, Homo sapien
tttgtatctatgcagagactcccag

SEQ ID NO: 2177771 - DNA, 25 bp, Homo sapien
tctccagggattcatgctcaaggta

SEQ ID NO: 2177772 - DNA, 25 bp, Homo sapien
ccattggtgagctacgaaaacgatt

SEQ ID NO: 2177773 - DNA, 25 bp, Homo sapien
cttgtagggaactggtgtctgtctt

SEQ ID NO: 2177774 - DNA, 25 bp, Homo sapien
ttctccatgcttgtagggaactggt

SEQ ID NO: 2177775 - DNA, 25 bp, Homo sapien
tgtctgtcttcaccaatctactgtt

SEQ ID NO: 2177776 - DNA, 25 bp, Homo sapien
ggtgtctgtcttcaccaatctactg

SEQ ID NO: 2177777 - DNA, 25 bp, Homo sapien
gtcacataggagagtccgggcctct

SEQ ID NO: 2177778 - DNA, 25 bp, Homo sapien
cctgcactaaagtcacataggagag

SEQ ID NO: 2177779 - DNA, 25 bp, Homo sapien
ggccgaagttcaacaagcttacaca

SEQ ID NO: 2177780 - DNA, 25 bp, Homo sapien
gtggccgaagttcaacaagcttaca

SEQ ID NO: 2177781 - DNA, 25 bp, Homo sapien
atttcacaaaatctttttgaacagt

SEQ ID NO: 2177782 - DNA, 25 bp, Homo sapien
gcaatttcacaaaatctttttgaac

SEQ ID NO: 2177783 - DNA, 25 bp, Homo sapien
ctgtgcaatttcacaaaatcttttt

SEQ ID NO: 2177784 - DNA, 25 bp, Homo sapien
tgcaatttcacaaaatctttttgaa

SEQ ID NO: 2177785 - DNA, 25 bp, Homo sapien
gagaaggcttgtaatgatgtggatg

SEQ ID NO: 2177786 - DNA, 25 bp, Homo sapien
ggcttgtaatgatgtggatgacgat

SEQ ID NO: 2177787 - DNA, 25 bp, Homo sapien
gcttgtaatgatgtggatgacgatg

SEQ ID NO: 2177788 - DNA, 25 bp, Homo sapien
ttctggagaaggcttgtaatgatgt

SEQ ID NO: 2177789 - DNA, 25 bp, Homo sapien
gagaccctggcaaatgttccttcct

SEQ ID NO: 2177790 - DNA, 25 bp, Homo sapien
tgttccttcctatgaccatgtcttt

SEQ ID NO: 2177791 - DNA, 25 bp, Homo sapien
gtctttcctattctgaatctgaatg

SEQ ID NO: 2177792 - DNA, 25 bp, Homo sapien
tatttgtagaaaaagcacgagaccc

SEQ ID NO: 2177793 - DNA, 25 bp, Homo sapien
tgggcactgttaggacataatgatc

SEQ ID NO: 2177794 - DNA, 25 bp, Homo sapien
tccggcgtccggaacgtcttgatgg

SEQ ID NO: 2177795 - DNA, 25 bp, Homo sapien
cagtcggtaaagagtagatggtctc

SEQ ID NO: 2177796 - DNA, 25 bp, Homo sapien
ggtcagcacttgcacttccagtcgg

SEQ ID NO: 2177797 - DNA, 25 bp, Homo sapien
tctagatggcagcttatgctacttc

SEQ ID NO: 2177798 - DNA, 25 bp, Homo sapien
cttggaccagagagacatgaggtta

SEQ ID NO: 2177799 - DNA, 25 bp, Homo sapien
ggtagccacctctgaaggtcagtaa

SEQ ID NO: 2177800 - DNA, 25 bp, Homo sapien
caaacagggcatgttcacttggacc

SEQ ID NO: 2177801 - DNA, 25 bp, Homo sapien
tgttctgtctgctttccgtagtgac

SEQ ID NO: 2177802 - DNA, 25 bp, Homo sapien
tgaaacccagtcatgggctgataga

SEQ ID NO: 2177803 - DNA, 25 bp, Homo sapien
aagcagaaaggttctcaggcttagc

SEQ ID NO: 2177804 - DNA, 25 bp, Homo sapien
aaacccagtcatgggctgatagaga

SEQ ID NO: 2177805 - DNA, 25 bp, Homo sapien
gctagcaccttagaaagaacatgac

SEQ ID NO: 2177806 - DNA, 25 bp, Homo sapien
gactttttcccactgcaagacaggg

SEQ ID NO: 2177807 - DNA, 25 bp, Homo sapien
caagacagggacattggcaaggaga

SEQ ID NO: 2177808 - DNA, 25 bp, Homo sapien
ggacatctttccaagcctgttaggc

SEQ ID NO: 2177809 - DNA, 25 bp, Homo sapien
tgagtataacccacgcagcaaaggg

SEQ ID NO: 2177810 - DNA, 25 bp, Homo sapien
ttccccttaagagcagagcatggtg

SEQ ID NO: 2177811 - DNA, 25 bp, Homo sapien
caccttatacttgcaggaaaatgac

SEQ ID NO: 2177812 - DNA, 25 bp, Homo sapien
ttcgcccaggcagccaacaggcttg

SEQ ID NO: 2177813 - DNA, 25 bp, Homo sapien
tattggttggacagtcaccttatac

SEQ ID NO: 2177814 - DNA, 25 bp, Homo sapien
cacatgatatcggttgacagtggga

SEQ ID NO: 2177815 - DNA, 25 bp, Homo sapien
gatccggttgttctgttgtgggcac

SEQ ID NO: 2177816 - DNA, 25 bp, Homo sapien
accaccgcacatgatatcggttgac

SEQ ID NO: 2177817 - DNA, 25 bp, Homo sapien
tgatgcctctgatccggttgttctg

SEQ ID NO: 2177818 - DNA, 25 bp, Homo sapien
ggatgttacattccaggtagcctgg

SEQ ID NO: 2177819 - DNA, 25 bp, Homo sapien
taatgccaaaacacgcaaacaaaaa

SEQ ID NO: 2177820 - DNA, 25 bp, Homo sapien
ctataatgccaaaacacgcaaacaa

SEQ ID NO: 2177821 - DNA, 25 bp, Homo sapien
gatgttacattccaggtagcctggg

SEQ ID NO: 2177822 - DNA, 25 bp, Homo sapien
atacttgacattcccgatctttctc

SEQ ID NO: 2177823 - DNA, 25 bp, Homo sapien
acctcttcatgtcctgggccagaag

SEQ ID NO: 2177824 - DNA, 25 bp, Homo sapien
cttcatgtcctgggccagaagtgtt

SEQ ID NO: 2177825 - DNA, 25 bp, Homo sapien
caatacttgacattcccgatctttc

SEQ ID NO: 2177826 - DNA, 25 bp, Homo sapien
cgtcgtctttgaaaagggagttgtg

SEQ ID NO: 2177827 - DNA, 25 bp, Homo sapien
gatagaagggagctccgacttccag

SEQ ID NO: 2177828 - DNA, 25 bp, Homo sapien
ttccagcgggcgagtgggtcgtcgt

SEQ ID NO: 2177829 - DNA, 25 bp, Homo sapien
tgcagttggccatcctgatagaagg

SEQ ID NO: 2177830 - DNA, 25 bp, Homo sapien
cgctctgtcgcccaacaaagatcaa

SEQ ID NO: 2177831 - DNA, 25 bp, Homo sapien
tcccgattcataaagcgtgttctta

SEQ ID NO: 2177832 - DNA, 25 bp, Homo sapien
accaatacaggagcatcccgattca

SEQ ID NO: 2177833 - DNA, 25 bp, Homo sapien
gctctgtcgcccaacaaagatcaaa

SEQ ID NO: 2177834 - DNA, 25 bp, Homo sapien
ttcagcaccgcttcatgcctaaaaa

SEQ ID NO: 2177835 - DNA, 25 bp, Homo sapien
attcagcaccgcttcatgcctaaaa

SEQ ID NO: 2177836 - DNA, 25 bp, Homo sapien
aattcagcaccgcttcatgcctaaa

SEQ ID NO: 2177837 - DNA, 25 bp, Homo sapien
tattcgttgcaacgtaggacaccac

SEQ ID NO: 2177838 - DNA, 25 bp, Homo sapien
taatgatggtgcaccggcagtgagc

SEQ ID NO: 2177839 - DNA, 25 bp, Homo sapien
gagcttgaccaaaggcatctgccca

SEQ ID NO: 2177840 - DNA, 25 bp, Homo sapien
tctgttcttcgaaaaagtggccaca

SEQ ID NO: 2177841 - DNA, 25 bp, Homo sapien
gagggcagggagtcattagcacaca

SEQ ID NO: 2177842 - DNA, 25 bp, Homo sapien
caagccatccaaggggaggtgctaa

SEQ ID NO: 2177843 - DNA, 25 bp, Homo sapien
ctaagtgggtggctgaatgcaggac

SEQ ID NO: 2177844 - DNA, 25 bp, Homo sapien
ttgcaactcaatgagacctccaggg

SEQ ID NO: 2177845 - DNA, 25 bp, Homo sapien
gctgcgtttgtgtggaatgatgtcc

SEQ ID NO: 2177846 - DNA, 25 bp, Homo sapien
agggatgatgtgactctcattcccc

SEQ ID NO: 2177847 - DNA, 25 bp, Homo sapien
ttctctgcccatgcaatgcgcttct

SEQ ID NO: 2177848 - DNA, 25 bp, Homo sapien
ctcttcaggacttcatgagggatga

SEQ ID NO: 2177849 - DNA, 25 bp, Homo sapien
atgtgtcgatgtgaagtgaagggac

SEQ ID NO: 2177850 - DNA, 25 bp, Homo sapien
catgtgtcgatgtgaagtgaaggga

SEQ ID NO: 2177851 - DNA, 25 bp, Homo sapien
agccgtgtctgtccccagtacgtta

SEQ ID NO: 2177852 - DNA, 25 bp, Homo sapien
tgtccccagtacgttatggcttgca

SEQ ID NO: 2177853 - DNA, 25 bp, Homo sapien
tttgcactcttcagccgtgtctgtc

SEQ ID NO: 2177854 - DNA, 25 bp, Homo sapien
tatggcttgcaattccacaacatag

SEQ ID NO: 2177855 - DNA, 25 bp, Homo sapien
cttgtaatgatgcacagggatgtcc

SEQ ID NO: 2177856 - DNA, 25 bp, Homo sapien
gagacttactgctgaccatccagct

SEQ ID NO: 2177857 - DNA, 25 bp, Homo sapien
ccttgtaatgatgcacagggatgtc

SEQ ID NO: 2177858 - DNA, 25 bp, Homo sapien
ctgaaatcccagtacaaagacacat

SEQ ID NO: 2177859 - DNA, 25 bp, Homo sapien
cacgataatgaaagctccctgagag

SEQ ID NO: 2177860 - DNA, 25 bp, Homo sapien
gcccgcctgcctagtttaagagatt

SEQ ID NO: 2177861 - DNA, 25 bp, Homo sapien
ctttgaacacagaccgaagggctgc

SEQ ID NO: 2177862 - DNA, 25 bp, Homo sapien
tcttggagaggaaaaccgcgatgct

SEQ ID NO: 2177863 - DNA, 25 bp, Homo sapien
gatgccaactccctccttatgatct

SEQ ID NO: 2177864 - DNA, 25 bp, Homo sapien
tttctgtttgatgccaactccctcc

SEQ ID NO: 2177865 - DNA, 25 bp, Homo sapien
gtttgatgccaactccctccttatg

SEQ ID NO: 2177866 - DNA, 25 bp, Homo sapien
actccctccttatgatcttcacaat

SEQ ID NO: 2177867 - DNA, 25 bp, Homo sapien
ccatgaggccataaagagagcaacg

SEQ ID NO: 2177868 - DNA, 25 bp, Homo sapien
catgtgcacatggagaacaatacct

SEQ ID NO: 2177869 - DNA, 25 bp, Homo sapien
tctcatgggaaaagaccacttctgc

SEQ ID NO: 2177870 - DNA, 25 bp, Homo sapien
taaaatcacttatcacccttggaga

SEQ ID NO: 2177871 - DNA, 25 bp, Homo sapien
ctagttttactgacactctgtaatg

SEQ ID NO: 2177872 - DNA, 25 bp, Homo sapien
catgcatggaataacatccagtgtg

SEQ ID NO: 2177873 - DNA, 25 bp, Homo sapien
gacactctgtaatgcatgcatggaa

SEQ ID NO: 2177874 - DNA, 25 bp, Homo sapien
tcagtgatgtctgctctagttttac

SEQ ID NO: 2177875 - DNA, 25 bp, Homo sapien
tcttcataagatcccttaaaagtgt

SEQ ID NO: 2177876 - DNA, 25 bp, Homo sapien
tgaacaaacatgcttgcccgctttt

SEQ ID NO: 2177877 - DNA, 25 bp, Homo sapien
gcccgcttttggcaacatatcaaaa

SEQ ID NO: 2177878 - DNA, 25 bp, Homo sapien
tgaagaacttggaatttagagggaa

SEQ ID NO: 2177879 - DNA, 25 bp, Homo sapien
agggcacaccagctcaacttctgaa

SEQ ID NO: 2177880 - DNA, 25 bp, Homo sapien
ttggatcacttcctaagtaaactgc

SEQ ID NO: 2177881 - DNA, 25 bp, Homo sapien
tgaggtgtgtgtgcttcacgctagc

SEQ ID NO: 2177882 - DNA, 25 bp, Homo sapien
cctccagcgaggagttctgaggtgt

SEQ ID NO: 2177883 - DNA, 25 bp, Homo sapien
agccactcgaaactggtaccatcgg

SEQ ID NO: 2177884 - DNA, 25 bp, Homo sapien
ccatcggctgggtcttatgtcagtc

SEQ ID NO: 2177885 - DNA, 25 bp, Homo sapien
gtcagttgaactcgctcgtctgtgg

SEQ ID NO: 2177886 - DNA, 25 bp, Homo sapien
tcttatgtcagtcagttgaactcgc

SEQ ID NO: 2177887 - DNA, 25 bp, Homo sapien
tgtaaatcgtaactcttttctgggc

SEQ ID NO: 2177888 - DNA, 25 bp, Homo sapien
gaaatattgaatttcgaggaccact

SEQ ID NO: 2177889 - DNA, 25 bp, Homo sapien
ctgtctgccagtgagtggcgtcatc

SEQ ID NO: 2177890 - DNA, 25 bp, Homo sapien
gtcatcttcgctaggatggattcca

SEQ ID NO: 2177891 - DNA, 25 bp, Homo sapien
aactcacagctggtcaagcattcgt

SEQ ID NO: 2177892 - DNA, 25 bp, Homo sapien
tgtgtccacacccattcgaacaaca

SEQ ID NO: 2177893 - DNA, 25 bp, Homo sapien
acacccattcgaacaacatttcttc

SEQ ID NO: 2177894 - DNA, 25 bp, Homo sapien
cagctggtcaagcattcgtagctct

SEQ ID NO: 2177895 - DNA, 25 bp, Homo sapien
ctgaaccaatgcaaaggccatccag

SEQ ID NO: 2177896 - DNA, 25 bp, Homo sapien
caaaggccatccagtgaagggctgc

SEQ ID NO: 2177897 - DNA, 25 bp, Homo sapien
tgcaaaggccatccagtgaagggct

SEQ ID NO: 2177898 - DNA, 25 bp, Homo sapien
aatgcaaaggccatccagtgaaggg

SEQ ID NO: 2177899 - DNA, 25 bp, Homo sapien
tcatgaatcagaaacgtcaaagtca

SEQ ID NO: 2177900 - DNA, 25 bp, Homo sapien
aggaatgtttcaacctaggaaaatg

SEQ ID NO: 2177901 - DNA, 25 bp, Homo sapien
agatgggagctgtttcattcagcaa

SEQ ID NO: 2177902 - DNA, 25 bp, Homo sapien
tccattgattgtgagaaaggaatgt

SEQ ID NO: 2177903 - DNA, 25 bp, Homo sapien
gatgccatgcatcagaaacgtcaaa

SEQ ID NO: 2177904 - DNA, 25 bp, Homo sapien
ctggagggttgaccgttgacaagcc

SEQ ID NO: 2177905 - DNA, 25 bp, Homo sapien
caagccattcgtctgaggagcctca

SEQ ID NO: 2177906 - DNA, 25 bp, Homo sapien
ctggcttccacacgtaactcttggg

SEQ ID NO: 2177907 - DNA, 25 bp, Homo sapien
aactcttggggacttactatctgcc

SEQ ID NO: 2177908 - DNA, 25 bp, Homo sapien
cagatttgggtcaagtgttttaagt

SEQ ID NO: 2177909 - DNA, 25 bp, Homo sapien
tcagatttgggtcaagtgttttaag

SEQ ID NO: 2177910 - DNA, 25 bp, Homo sapien
ggtcaagtgttttaagtaccactga

SEQ ID NO: 2177911 - DNA, 25 bp, Homo sapien
gtcaagtgttttaagtaccactgac

SEQ ID NO: 2177912 - DNA, 25 bp, Homo sapien
caaaagctttggcactggtgtttcc

SEQ ID NO: 2177913 - DNA, 25 bp, Homo sapien
aggtcccctgattccttgcagggct

SEQ ID NO: 2177914 - DNA, 25 bp, Homo sapien
tcacaaaagctttggcactggtgtt

SEQ ID NO: 2177915 - DNA, 25 bp, Homo sapien
aaaagctttggcactggtgtttcct

SEQ ID NO: 2177916 - DNA, 25 bp, Homo sapien
cttgcaagtagctgaatctctgccc

SEQ ID NO: 2177917 - DNA, 25 bp, Homo sapien
gaacaatccctagaccattactctt

SEQ ID NO: 2177918 - DNA, 25 bp, Homo sapien
ccctagaccattactctttggagta

SEQ ID NO: 2177919 - DNA, 25 bp, Homo sapien
tctctgcccgtgaacaatccctaga

SEQ ID NO: 2177920 - DNA, 25 bp, Homo sapien
tttcaaccgcaatcttctaatatgg

SEQ ID NO: 2177921 - DNA, 25 bp, Homo sapien
ttcctatttttcaaccgcaatcttc

SEQ ID NO: 2177922 - DNA, 25 bp, Homo sapien
cctatttttcaaccgcaatcttcta

SEQ ID NO: 2177923 - DNA, 25 bp, Homo sapien
caaccgcaatcttctaatatggcat

SEQ ID NO: 2177924 - DNA, 25 bp, Homo sapien
gcagtagggggaggccgtctttgtc

SEQ ID NO: 2177925 - DNA, 25 bp, Homo sapien
taacaatcaaagcagggcagtaggg

SEQ ID NO: 2177926 - DNA, 25 bp, Homo sapien
gggaggccgtctttgtccctgctgt

SEQ ID NO: 2177927 - DNA, 25 bp, Homo sapien
ctaacaatcaaagcagggcagtagg

SEQ ID NO: 2177928 - DNA, 25 bp, Homo sapien
cactccaaatttcacggcatgatga

SEQ ID NO: 2177929 - DNA, 25 bp, Homo sapien
catatccctcatggctaagcagcca

SEQ ID NO: 2177930 - DNA, 25 bp, Homo sapien
agaggcatggggctttcactccaaa

SEQ ID NO: 2177931 - DNA, 25 bp, Homo sapien
tgtgttttttctcgctggcttccca

SEQ ID NO: 2177932 - DNA, 25 bp, Homo sapien
aacatcgacgaagggagtccaggca

SEQ ID NO: 2177933 - DNA, 25 bp, Homo sapien
tgcaacatcgacgaagggagtccag

SEQ ID NO: 2177934 - DNA, 25 bp, Homo sapien
gctaggagctgagtgcaacatcgac

SEQ ID NO: 2177935 - DNA, 25 bp, Homo sapien
gctgagtgcaacatcgacgaaggga

SEQ ID NO: 2177936 - DNA, 25 bp, Homo sapien
gggacccataagtagtgtaatcctc

SEQ ID NO: 2177937 - DNA, 25 bp, Homo sapien
tcctcttgagacttgcaactttttc

SEQ ID NO: 2177938 - DNA, 25 bp, Homo sapien
ctgagctttgctaaaccattgcttt

SEQ ID NO: 2177939 - DNA, 25 bp, Homo sapien
tctgtttctgaggagatcctgaagc

SEQ ID NO: 2177940 - DNA, 25 bp, Homo sapien
cgtccttaacaccaatgcaaatcgc

SEQ ID NO: 2177941 - DNA, 25 bp, Homo sapien
aatgcaaatcgcctcccagaactgt

SEQ ID NO: 2177942 - DNA, 25 bp, Homo sapien
gaactgttcaatactcccatactca

SEQ ID NO: 2177943 - DNA, 25 bp, Homo sapien
aaaacacaccctgatcaaaagcaga

SEQ ID NO: 2177944 - DNA, 25 bp, Homo sapien
ctgaaaggagaactgaatacgttaa

SEQ ID NO: 2177945 - DNA, 25 bp, Homo sapien
tgaaaggagaactgaatacgttaag

SEQ ID NO: 2177946 - DNA, 25 bp, Homo sapien
ttcagcttcctaattcccaacagga

SEQ ID NO: 2177947 - DNA, 25 bp, Homo sapien
tcattgcagttgctttagatttggt

SEQ ID NO: 2177948 - DNA, 25 bp, Homo sapien
cttcattgcagttgctttagatttg

SEQ ID NO: 2177949 - DNA, 25 bp, Homo sapien
attgcagttgctttagatttggtca

SEQ ID NO: 2177950 - DNA, 25 bp, Homo sapien
cattgcagttgctttagatttggtc

SEQ ID NO: 2177951 - DNA, 25 bp, Homo sapien
ctttcatgatacgagtcagccatac

SEQ ID NO: 2177952 - DNA, 25 bp, Homo sapien
tacgagtcagccataccctgtccat

SEQ ID NO: 2177953 - DNA, 25 bp, Homo sapien
tcatgatacgagtcagccataccct

SEQ ID NO: 2177954 - DNA, 25 bp, Homo sapien
tgatacgagtcagccataccctgtc

SEQ ID NO: 2177955 - DNA, 25 bp, Homo sapien
gggttctgcgtataacaccacaggt

SEQ ID NO: 2177956 - DNA, 25 bp, Homo sapien
tagctagcctagaagggttgcagcc

SEQ ID NO: 2177957 - DNA, 25 bp, Homo sapien
ggttttcatcttcgcgggccatgca

SEQ ID NO: 2177958 - DNA, 25 bp, Homo sapien
gaccattaaggacacgctgagcaca

SEQ ID NO: 2177959 - DNA, 25 bp, Homo sapien
aagactcaataatttcaggctctac

SEQ ID NO: 2177960 - DNA, 25 bp, Homo sapien
gtttccaagactcaataatttcagg

SEQ ID NO: 2177961 - DNA, 25 bp, Homo sapien
gaatgggggtaatgagtttccaaga

SEQ ID NO: 2177962 - DNA, 25 bp, Homo sapien
ggtaatgagtttccaagactcaata

SEQ ID NO: 2177963 - DNA, 25 bp, Homo sapien
taaatgatagacagattaagatgga

SEQ ID NO: 2177964 - DNA, 25 bp, Homo sapien
gatggaaatgtaccaaagattttat

SEQ ID NO: 2177965 - DNA, 25 bp, Homo sapien
tgaatagggtcaataaggaatgctg

SEQ ID NO: 2177966 - DNA, 25 bp, Homo sapien
gaagacaagactcatgcaaatatca

SEQ ID NO: 2177967 - DNA, 25 bp, Homo sapien
gacactcatgtgagggcctcccgat

SEQ ID NO: 2177968 - DNA, 25 bp, Homo sapien
tcaggacacactactcaaaatacgg

SEQ ID NO: 2177969 - DNA, 25 bp, Homo sapien
ttgcaacagatactttatgggctgc

SEQ ID NO: 2177970 - DNA, 25 bp, Homo sapien
cgatgcagggcatacagcttaggaa

SEQ ID NO: 2177971 - DNA, 25 bp, Homo sapien
ttagaacattgcttgtgattctggc

SEQ ID NO: 2177972 - DNA, 25 bp, Homo sapien
tggcaccaaaccagggaaccattgt

SEQ ID NO: 2177973 - DNA, 25 bp, Homo sapien
cattgcttgtgattctggcaccaaa

SEQ ID NO: 2177974 - DNA, 25 bp, Homo sapien
ttgtgattctggcaccaaaccaggg

SEQ ID NO: 2177975 - DNA, 25 bp, Homo sapien
tatgtcccccatagagacagtaagg

SEQ ID NO: 2177976 - DNA, 25 bp, Homo sapien
ccccatagagacagtaaggtctgaa

SEQ ID NO: 2177977 - DNA, 25 bp, Homo sapien
gagttccgtacgtccacatctgggc

SEQ ID NO: 2177978 - DNA, 25 bp, Homo sapien
ctactgagttccgtacgtccacatc

SEQ ID NO: 2177979 - DNA, 25 bp, Homo sapien
tgtctgtaagacattagcaagggag

SEQ ID NO: 2177980 - DNA, 25 bp, Homo sapien
tctgtaagacattagcaagggaggg

SEQ ID NO: 2177981 - DNA, 25 bp, Homo sapien
ctgtaagacattagcaagggagggc

SEQ ID NO: 2177982 - DNA, 25 bp, Homo sapien
ctgtctgtaagacattagcaaggga

SEQ ID NO: 2177983 - DNA, 25 bp, Homo sapien
actacagcatgcaccactacaccag

SEQ ID NO: 2177984 - DNA, 25 bp, Homo sapien
agacgggatttcaagttggccaggc

SEQ ID NO: 2177985 - DNA, 25 bp, Homo sapien
tacagcatgcaccactacaccaggc

SEQ ID NO: 2177986 - DNA, 25 bp, Homo sapien
gagacgggatttcaagttggccagg

SEQ ID NO: 2177987 - DNA, 25 bp, Homo sapien
gagatgcgagtgatctgcaggctca

SEQ ID NO: 2177988 - DNA, 25 bp, Homo sapien
gcggagatgcgagtgatctgcaggc

SEQ ID NO: 2177989 - DNA, 25 bp, Homo sapien
gaaggcggagatgcgagtgatctgc

SEQ ID NO: 2177990 - DNA, 25 bp, Homo sapien
tggaagaaggcggagatgcgagtga

SEQ ID NO: 2177991 - DNA, 25 bp, Homo sapien
acgctcccggcagacagcgactcgt

SEQ ID NO: 2177992 - DNA, 25 bp, Homo sapien
agagggtcaggaccgcgccgggcac

SEQ ID NO: 2177993 - DNA, 25 bp, Homo sapien
tcccggcagacagcgactcgtccag

SEQ ID NO: 2177994 - DNA, 25 bp, Homo sapien
ggcagagggtcaggaccgcgccggg

SEQ ID NO: 2177995 - DNA, 25 bp, Homo sapien
gttcaatccttcaactccggccgga

SEQ ID NO: 2177996 - DNA, 25 bp, Homo sapien
gaaagttcaatccttcaactccggc

SEQ ID NO: 2177997 - DNA, 25 bp, Homo sapien
gactgagccggaaagttcaatcctt

SEQ ID NO: 2177998 - DNA, 25 bp, Homo sapien
gcagacgccgcgactgagccggaaa

SEQ ID NO: 2177999 - DNA, 25 bp, Homo sapien
ggctttgctagctcagttccgctaa

SEQ ID NO: 2178000 - DNA, 25 bp, Homo sapien
gctcagttccgctaaagctcttctt

SEQ ID NO: 2178001 - DNA, 25 bp, Homo sapien
ttgctagctcagttccgctaaagct

SEQ ID NO: 2178002 - DNA, 25 bp, Homo sapien
ttctcaggctttgctagctcagttc

SEQ ID NO: 2178003 - DNA, 25 bp, Homo sapien
tctgcacaagatgagacaacagcca

SEQ ID NO: 2178004 - DNA, 25 bp, Homo sapien
gctctgcacaagatgagacaacagc

SEQ ID NO: 2178005 - DNA, 25 bp, Homo sapien
ctttcaacactcgccagccgctctg

SEQ ID NO: 2178006 - DNA, 25 bp, Homo sapien
cagccgctctgcacaagatgagaca

SEQ ID NO: 2178007 - DNA, 25 bp, Homo sapien
agggcctctgaatgtaactaaggca

SEQ ID NO: 2178008 - DNA, 25 bp, Homo sapien
actaaggcatgaactaactgtttcc

SEQ ID NO: 2178009 - DNA, 25 bp, Homo sapien
tctgtatccactggagctaataaaa

SEQ ID NO: 2178010 - DNA, 25 bp, Homo sapien
gaatgtaactaaggcatgaactaac

SEQ ID NO: 2178011 - DNA, 25 bp, Homo sapien
aaatcaggtgtcagatcaaagatga

SEQ ID NO: 2178012 - DNA, 25 bp, Homo sapien
caaagatgaatttagtattagagag

SEQ ID NO: 2178013 - DNA, 25 bp, Homo sapien
gagagatacttcttaagtaaagcac

SEQ ID NO: 2178014 - DNA, 25 bp, Homo sapien
gatgaatttagtattagagagatac

SEQ ID NO: 2178015 - DNA, 25 bp, Homo sapien
aaaatataactaggactatgataag

SEQ ID NO: 2178016 - DNA, 25 bp, Homo sapien
cagccacaatatggggtttgaaagg

SEQ ID NO: 2178017 - DNA, 25 bp, Homo sapien
actaggactatgataagatttttac

SEQ ID NO: 2178018 - DNA, 25 bp, Homo sapien
taacagccacaatatggggtttgaa

SEQ ID NO: 2178019 - DNA, 25 bp, Homo sapien
gccatcgcggagagcgcgacaccag

SEQ ID NO: 2178020 - DNA, 25 bp, Homo sapien
cggactgagagtgcgccggtgctgc

SEQ ID NO: 2178021 - DNA, 25 bp, Homo sapien
tgccggccagcacctgggtacccgg

SEQ ID NO: 2178022 - DNA, 25 bp, Homo sapien
tgtgtgggtccggactgagagtgcg

SEQ ID NO: 2178023 - DNA, 25 bp, Homo sapien
gcagcaccccttccggggtcgagag

SEQ ID NO: 2178024 - DNA, 25 bp, Homo sapien
catctggtccctcacttgatctccc

SEQ ID NO: 2178025 - DNA, 25 bp, Homo sapien
ccagctcgcttacttagcagcaccc

SEQ ID NO: 2178026 - DNA, 25 bp, Homo sapien
ggtacccacccagctcgcttactta

SEQ ID NO: 2178027 - DNA, 25 bp, Homo sapien
ggcatagcagcgcaaccctccagga

SEQ ID NO: 2178028 - DNA, 25 bp, Homo sapien
gcatagcagcgcaaccctccaggaa

SEQ ID NO: 2178029 - DNA, 25 bp, Homo sapien
gcagtcccgcggagcggctagacgt

SEQ ID NO: 2178030 - DNA, 25 bp, Homo sapien
tcccgggctcatccgcagtcccgcg

SEQ ID NO: 2178031 - DNA, 25 bp, Homo sapien
cacgtccagtgtgggtatcacctcc

SEQ ID NO: 2178032 - DNA, 25 bp, Homo sapien
cgcatccagcgccttggcttcggag

SEQ ID NO: 2178033 - DNA, 25 bp, Homo sapien
ccagactggcggaagaatcctccat

SEQ ID NO: 2178034 - DNA, 25 bp, Homo sapien
gaagaatcctccatggtcgcatcca

SEQ ID NO: 2178035 - DNA, 25 bp, Homo sapien
cctgtccctgcgtctcttgtactcc

SEQ ID NO: 2178036 - DNA, 25 bp, Homo sapien
gcctgtccctgcgtctcttgtactc

SEQ ID NO: 2178037 - DNA, 25 bp, Homo sapien
ctgggacctccgaccaaggctcggc

SEQ ID NO: 2178038 - DNA, 25 bp, Homo sapien
ctccgaccaaggctcggcctcggtg

SEQ ID NO: 2178039 - DNA, 25 bp, Homo sapien
cctggcagcctgtaagcctgcctgg

SEQ ID NO: 2178040 - DNA, 25 bp, Homo sapien
ctggacaccgattctccttcttggg

SEQ ID NO: 2178041 - DNA, 25 bp, Homo sapien
tgagcacagccctatcctgggcctc

SEQ ID NO: 2178042 - DNA, 25 bp, Homo sapien
cgatgtgattctcgggtagattctg

SEQ ID NO: 2178043 - DNA, 25 bp, Homo sapien
agaagttgcatggagctgtttagta

SEQ ID NO: 2178044 - DNA, 25 bp, Homo sapien
gttgcatggagctgtttagtacatt

SEQ ID NO: 2178045 - DNA, 25 bp, Homo sapien
aagttgcatggagctgtttagtaca

SEQ ID NO: 2178046 - DNA, 25 bp, Homo sapien
catggagctgtttagtacattttaa

SEQ ID NO: 2178047 - DNA, 25 bp, Homo sapien
tatgcaagtcaatacctttggacaa

SEQ ID NO: 2178048 - DNA, 25 bp, Homo sapien
gagctttttattgtcactgtgcctt

SEQ ID NO: 2178049 - DNA, 25 bp, Homo sapien
tgccttctcagtttatgcaagtcaa

SEQ ID NO: 2178050 - DNA, 25 bp, Homo sapien
tatgggagccagtgtttctccttgg

SEQ ID NO: 2178051 - DNA, 25 bp, Homo sapien
aagagacaatgaagtgccaactctt

SEQ ID NO: 2178052 - DNA, 25 bp, Homo sapien
gagacaatgaagtgccaactcttcc

SEQ ID NO: 2178053 - DNA, 25 bp, Homo sapien
atgcccgtgctttctacgtttttga

SEQ ID NO: 2178054 - DNA, 25 bp, Homo sapien
cgtgctttctacgtttttgaaactg

SEQ ID NO: 2178055 - DNA, 25 bp, Homo sapien
tctgacacgattctttttaaaaaca

SEQ ID NO: 2178056 - DNA, 25 bp, Homo sapien
tgcaataattgtctttagtgtcctt

SEQ ID NO: 2178057 - DNA, 25 bp, Homo sapien
ggaagaaatgatgcaataattgtct

SEQ ID NO: 2178058 - DNA, 25 bp, Homo sapien
aattgtctttagtgtccttggcagc

SEQ ID NO: 2178059 - DNA, 25 bp, Homo sapien
aataattgtctttagtgtccttggc

SEQ ID NO: 2178060 - DNA, 25 bp, Homo sapien
tagtaattgctcaagtagcggcttc

SEQ ID NO: 2178061 - DNA, 25 bp, Homo sapien
attgctcaagtagcggcttcatctc

SEQ ID NO: 2178062 - DNA, 25 bp, Homo sapien
ctttagtaattgctcaagtagcggc

SEQ ID NO: 2178063 - DNA, 25 bp, Homo sapien
taattgctcaagtagcggcttcatc

SEQ ID NO: 2178064 - DNA, 25 bp, Homo sapien
gctcctaacacctgtaggttgttgc

SEQ ID NO: 2178065 - DNA, 25 bp, Homo sapien
aacacctgtaggttgttgccacctc

SEQ ID NO: 2178066 - DNA, 25 bp, Homo sapien
gtaggttgttgccacctcttctgtt

SEQ ID NO: 2178067 - DNA, 25 bp, Homo sapien
agcctccagctcctaacacctgtag

SEQ ID NO: 2178068 - DNA, 25 bp, Homo sapien
tccgagtatgtctataatcacgttt

SEQ ID NO: 2178069 - DNA, 25 bp, Homo sapien
tcttctactactattacttctgctg

SEQ ID NO: 2178070 - DNA, 25 bp, Homo sapien
ctctgcgatgtattctttaaggaca

SEQ ID NO: 2178071 - DNA, 25 bp, Homo sapien
ggacattcagcaacttccgagtatg

SEQ ID NO: 2178072 - DNA, 25 bp, Homo sapien
gacatttatcttatatgcagctgcc

SEQ ID NO: 2178073 - DNA, 25 bp, Homo sapien
tttatcttatatgcagctgccatat

SEQ ID NO: 2178074 - DNA, 25 bp, Homo sapien
catttatcttatatgcagctgccat

SEQ ID NO: 2178075 - DNA, 25 bp, Homo sapien
agacatttatcttatatgcagctgc

SEQ ID NO: 2178076 - DNA, 25 bp, Homo sapien
gcagcaaggccctttttaatgtcag

SEQ ID NO: 2178077 - DNA, 25 bp, Homo sapien
ttcctgtaagctgctttatctattt

SEQ ID NO: 2178078 - DNA, 25 bp, Homo sapien
ttgcagcaaggccctttttaatgtc

SEQ ID NO: 2178079 - DNA, 25 bp, Homo sapien
tgcagcaaggccctttttaatgtca

SEQ ID NO: 2178080 - DNA, 25 bp, Homo sapien
tatgttctagcttcatggtatgaat

SEQ ID NO: 2178081 - DNA, 25 bp, Homo sapien
gcaatatgttctagcttcatggtat

SEQ ID NO: 2178082 - DNA, 25 bp, Homo sapien
aatatgttctagcttcatggtatga

SEQ ID NO: 2178083 - DNA, 25 bp, Homo sapien
ctgcaatatgttctagcttcatggt

SEQ ID NO: 2178084 - DNA, 25 bp, Homo sapien
tcacattcatcacggactggatcct

SEQ ID NO: 2178085 - DNA, 25 bp, Homo sapien
ctcacattcatcacggactggatcc

SEQ ID NO: 2178086 - DNA, 25 bp, Homo sapien
cattcatcacggactggatcctttc

SEQ ID NO: 2178087 - DNA, 25 bp, Homo sapien
tcctcacattcatcacggactggat

SEQ ID NO: 2178088 - DNA, 25 bp, Homo sapien
taacttgagcttccaactgagcttt

SEQ ID NO: 2178089 - DNA, 25 bp, Homo sapien
ctgggaagttagaggcgatccctga

SEQ ID NO: 2178090 - DNA, 25 bp, Homo sapien
tgggaagttagaggcgatccctgaa

SEQ ID NO: 2178091 - DNA, 25 bp, Homo sapien
taacttgagcttccaactgagcttt

SEQ ID NO: 2178092 - DNA, 25 bp, Homo sapien
tgtcctgggaagttagaggcgatcc

SEQ ID NO: 2178093 - DNA, 25 bp, Homo sapien
tcctgggaagttagaggcgatccct

SEQ ID NO: 2178094 - DNA, 25 bp, Homo sapien
ctgtcctgggaagttagaggcgatc

SEQ ID NO: 2178095 - DNA, 25 bp, Homo sapien
tgggaagttagaggcgatccctgaa

SEQ ID NO: 2178096 - DNA, 25 bp, Homo sapien
cccgtgtatcctgtgggagcaggag

SEQ ID NO: 2178097 - DNA, 25 bp, Homo sapien
ctcctatccttcgtggcccgtccag

SEQ ID NO: 2178098 - DNA, 25 bp, Homo sapien
caggaggggtcggagaagatgccag

SEQ ID NO: 2178099 - DNA, 25 bp, Homo sapien
gcacacctgaatggcccctgcagga

SEQ ID NO: 2178100 - DNA, 25 bp, Homo sapien
ccaggcaacgatgccagggccattt

SEQ ID NO: 2178101 - DNA, 25 bp, Homo sapien
cgtgtgcaggtcagccggccgctca

SEQ ID NO: 2178102 - DNA, 25 bp, Homo sapien
ctcttagcacgtgcatggtggactc

SEQ ID NO: 2178103 - DNA, 25 bp, Homo sapien
tctcgggctgcccgtgtgcaggtca

SEQ ID NO: 2178104 - DNA, 25 bp, Homo sapien
gcaccacgacgctctcttagaaaaa

SEQ ID NO: 2178105 - DNA, 25 bp, Homo sapien
gacatcttctaggaggtttgccaca

SEQ ID NO: 2178106 - DNA, 25 bp, Homo sapien
ggtttgccacatcacgatggtcatc

SEQ ID NO: 2178107 - DNA, 25 bp, Homo sapien
ctaggaaggtgatgcgacatcttct

SEQ ID NO: 2178108 - DNA, 25 bp, Homo sapien
ccacatcacgatggtcatcacaacg

SEQ ID NO: 2178109 - DNA, 25 bp, Homo sapien
atgttttagggctggatttaggtgg

SEQ ID NO: 2178110 - DNA, 25 bp, Homo sapien
gggcttatcgtaggtctagaatgtt

SEQ ID NO: 2178111 - DNA, 25 bp, Homo sapien
gttatgctgacattagctattaggc

SEQ ID NO: 2178112 - DNA, 25 bp, Homo sapien
tatgtgagggaaacttaattgcggg

SEQ ID NO: 2178113 - DNA, 25 bp, Homo sapien
agccataggggcctgcagacaagtg

SEQ ID NO: 2178114 - DNA, 25 bp, Homo sapien
ctaaaatcgagctctcaggaagtta

SEQ ID NO: 2178115 - DNA, 25 bp, Homo sapien
tttgaaggtcataagcccctttctg

SEQ ID NO: 2178116 - DNA, 25 bp, Homo sapien
gacaagtgggtgataaatcccttcc

SEQ ID NO: 2178117 - DNA, 25 bp, Homo sapien
tgctgctacttggttcttaggtgat

SEQ ID NO: 2178118 - DNA, 25 bp, Homo sapien
ttcagataaaaagcccacatcactc

SEQ ID NO: 2178119 - DNA, 25 bp, Homo sapien
ccacggcactgttaggagcttcaga

SEQ ID NO: 2178120 - DNA, 25 bp, Homo sapien
tttcctgcacctgagatagttttgg

SEQ ID NO: 2178121 - DNA, 25 bp, Homo sapien
ctgactttatctggtataggtattc

SEQ ID NO: 2178122 - DNA, 25 bp, Homo sapien
tatgtccttactggtgaactctgac

SEQ ID NO: 2178123 - DNA, 25 bp, Homo sapien
actctcaggctgcatcgtcagggca

SEQ ID NO: 2178124 - DNA, 25 bp, Homo sapien
tcctgcaaactgtttcatagaacgg

SEQ ID NO: 2178125 - DNA, 25 bp, Homo sapien
gggtgtgaccattgagaaaatagag

SEQ ID NO: 2178126 - DNA, 25 bp, Homo sapien
cttggggtgtgaccattgagaaaat

SEQ ID NO: 2178127 - DNA, 25 bp, Homo sapien
ggggtgtgaccattgagaaaataga

SEQ ID NO: 2178128 - DNA, 25 bp, Homo sapien
tggggtgtgaccattgagaaaatag

SEQ ID NO: 2178129 - DNA, 25 bp, Homo sapien
ttcccatgaaagccaaactgtgacc

SEQ ID NO: 2178130 - DNA, 25 bp, Homo sapien
ctgcacactttacttttattctctt

SEQ ID NO: 2178131 - DNA, 25 bp, Homo sapien
catgaaagccaaactgtgaccttat

SEQ ID NO: 2178132 - DNA, 25 bp, Homo sapien
cccatgaaagccaaactgtgacctt

SEQ ID NO: 2178133 - DNA, 25 bp, Homo sapien
tttcttcttgctatagccagtgggc

SEQ ID NO: 2178134 - DNA, 25 bp, Homo sapien
agctttcttcttgctatagccagtg

SEQ ID NO: 2178135 - DNA, 25 bp, Homo sapien
cactgcttaatcgaagctttcttct

SEQ ID NO: 2178136 - DNA, 25 bp, Homo sapien
ttcttcttgctatagccagtgggca

SEQ ID NO: 2178137 - DNA, 25 bp, Homo sapien
caagcatcgggtttttagcagccac

SEQ ID NO: 2178138 - DNA, 25 bp, Homo sapien
tccaaggcacggcagtgtttctgag

SEQ ID NO: 2178139 - DNA, 25 bp, Homo sapien
tagcagccacattggcaagaggaga

SEQ ID NO: 2178140 - DNA, 25 bp, Homo sapien
tggagaggaactaagttccaaggca

SEQ ID NO: 2178141 - DNA, 25 bp, Homo sapien
ttctggtgacccagatcttgccctc

SEQ ID NO: 2178142 - DNA, 25 bp, Homo sapien
gctggatatgctggaagagggagct

SEQ ID NO: 2178143 - DNA, 25 bp, Homo sapien
ggctgacggggatgctcctccaagc

SEQ ID NO: 2178144 - DNA, 25 bp, Homo sapien
cccagctctgggcacttctctagga

SEQ ID NO: 2178145 - DNA, 25 bp, Homo sapien
tcaagcaggctggatatgctggaag

SEQ ID NO: 2178146 - DNA, 25 bp, Homo sapien
tcattcactggtccacatcctgttc

SEQ ID NO: 2178147 - DNA, 25 bp, Homo sapien
ctggtccacatcctgttcgtttcct

SEQ ID NO: 2178148 - DNA, 25 bp, Homo sapien
tcctgttcgtttccttcatgtccac

SEQ ID NO: 2178149 - DNA, 25 bp, Homo sapien
catcctgttcgtttccttcatgtcc

SEQ ID NO: 2178150 - DNA, 25 bp, Homo sapien
ttgacctctccgtcatcaggtgacc

SEQ ID NO: 2178151 - DNA, 25 bp, Homo sapien
tgacctctccgtcatcaggtgaccc

SEQ ID NO: 2178152 - DNA, 25 bp, Homo sapien
tgtgagtctgcctatcagtctgtca

SEQ ID NO: 2178153 - DNA, 25 bp, Homo sapien
gacaattggagtcaactcctcaggg

SEQ ID NO: 2178154 - DNA, 25 bp, Homo sapien
gaatcccaggccattaccgctgaga

SEQ ID NO: 2178155 - DNA, 25 bp, Homo sapien
caagaaggctatgtgagtctgccta

SEQ ID NO: 2178156 - DNA, 25 bp, Homo sapien
tacacatggagatcaagtaacaaat

SEQ ID NO: 2178157 - DNA, 25 bp, Homo sapien
atttgcatatacacatggagatcaa

SEQ ID NO: 2178158 - DNA, 25 bp, Homo sapien
tggccagtgcccaaagtatgatgat

SEQ ID NO: 2178159 - DNA, 25 bp, Homo sapien
ccagtgcccaaagtatgatgatgac

SEQ ID NO: 2178160 - DNA, 25 bp, Homo sapien
tgcttctactcatgtgcagagatca

SEQ ID NO: 2178161 - DNA, 25 bp, Homo sapien
gagggattcaggatgcttctactca

SEQ ID NO: 2178162 - DNA, 25 bp, Homo sapien
tcaggatgcttctactcatgtgcag

SEQ ID NO: 2178163 - DNA, 25 bp, Homo sapien
ctggtgagggattcaggatgcttct

SEQ ID NO: 2178164 - DNA, 25 bp, Homo sapien
taatggagctgtcaagacaaactac

SEQ ID NO: 2178165 - DNA, 25 bp, Homo sapien
gggcttgtgtacaccagagctagga

SEQ ID NO: 2178166 - DNA, 25 bp, Homo sapien
tgtcaccaagccaatagtcactgtt

SEQ ID NO: 2178167 - DNA, 25 bp, Homo sapien
gagctaggatacaacgtcagcctct

SEQ ID NO: 2178168 - DNA, 25 bp, Homo sapien
tctgtcctttcggtcctcataggaa

SEQ ID NO: 2178169 - DNA, 25 bp, Homo sapien
tgtcctttcggtcctcataggaaat

SEQ ID NO: 2178170 - DNA, 25 bp, Homo sapien
ctgtcctttcggtcctcataggaaa

SEQ ID NO: 2178171 - DNA, 25 bp, Homo sapien
cagagcagcaaaaccgatcaggcat

SEQ ID NO: 2178172 - DNA, 25 bp, Homo sapien
tgcagctgcatctaaaagtgtaacc

SEQ ID NO: 2178173 - DNA, 25 bp, Homo sapien
cagtgagagttatcgcacacagaca

SEQ ID NO: 2178174 - DNA, 25 bp, Homo sapien
gagatgctgactggccttccaagta

SEQ ID NO: 2178175 - DNA, 25 bp, Homo sapien
agctcaggggaatgagactggatcc

SEQ ID NO: 2178176 - DNA, 25 bp, Homo sapien
gccaacccatcattcttccagccgg

SEQ ID NO: 2178177 - DNA, 25 bp, Homo sapien
ttccagccggcctgtccaattggga

SEQ ID NO: 2178178 - DNA, 25 bp, Homo sapien
aatggttgaagcatctctatccaca

SEQ ID NO: 2178179 - DNA, 25 bp, Homo sapien
cgcagcccacccattcgttcttcag

SEQ ID NO: 2178180 - DNA, 25 bp, Homo sapien
ctcgcagcccacccattcgttcttc

SEQ ID NO: 2178181 - DNA, 25 bp, Homo sapien
gcagcccacccattcgttcttcagc

SEQ ID NO: 2178182 - DNA, 25 bp, Homo sapien
cagcccacccattcgttcttcagca

SEQ ID NO: 2178183 - DNA, 25 bp, Homo sapien
ctgccgttgtaggaagcaggacctc

SEQ ID NO: 2178184 - DNA, 25 bp, Homo sapien
gaaagttttgaaccgatgacagcat

SEQ ID NO: 2178185 - DNA, 25 bp, Homo sapien
tctgctgcgattgaagaaagttttg

SEQ ID NO: 2178186 - DNA, 25 bp, Homo sapien
aagtcagtagatctgggaggaatga

SEQ ID NO: 2178187 - DNA, 25 bp, Homo sapien
gcaaaagcgcatcaggtgcactggt

SEQ ID NO: 2178188 - DNA, 25 bp, Homo sapien
cctaaaactgtggattggaacctct

SEQ ID NO: 2178189 - DNA, 25 bp, Homo sapien
gacactgaggaaaggtcacctgcgt

SEQ ID NO: 2178190 - DNA, 25 bp, Homo sapien
tcacctgcgttaaccagcaaaagcg

SEQ ID NO: 2178191 - DNA, 25 bp, Homo sapien
tttccatgggaacacatcccacatg

SEQ ID NO: 2178192 - DNA, 25 bp, Homo sapien
gagatgtcagtgactatgagtttcc

SEQ ID NO: 2178193 - DNA, 25 bp, Homo sapien
cacatcccacatgaatgcaggcaaa

SEQ ID NO: 2178194 - DNA, 25 bp, Homo sapien
cccttgtgggtaccatgatctgaga

SEQ ID NO: 2178195 - DNA, 25 bp, Homo sapien
gaagacaatcccatctgcaagctcc

SEQ ID NO: 2178196 - DNA, 25 bp, Homo sapien
tgtctctgtggaagacaatcccatc

SEQ ID NO: 2178197 - DNA, 25 bp, Homo sapien
tagaaaggactcagactcatttccc

SEQ ID NO: 2178198 - DNA, 25 bp, Homo sapien
tggcattcgtgctgaggtctccttt

SEQ ID NO: 2178199 - DNA, 25 bp, Homo sapien
tcatcagaggaagaattgctgctgc

SEQ ID NO: 2178200 - DNA, 25 bp, Homo sapien
gcttgggaactaccactgctgcctt

SEQ ID NO: 2178201 - DNA, 25 bp, Homo sapien
tctgcaacttcttcttaactaggga

SEQ ID NO: 2178202 - DNA, 25 bp, Homo sapien
cttaactagggatttagatgtcttc

SEQ ID NO: 2178203 - DNA, 25 bp, Homo sapien
caggcagatatggagctgctttgtc

SEQ ID NO: 2178204 - DNA, 25 bp, Homo sapien
cagatatggagctgctttgtcagtt

SEQ ID NO: 2178205 - DNA, 25 bp, Homo sapien
agatatggagctgctttgtcagtta

SEQ ID NO: 2178206 - DNA, 25 bp, Homo sapien
ggcagatatggagctgctttgtcag

SEQ ID NO: 2178207 - DNA, 25 bp, Homo sapien
tggtactggctagcttggaaagagc

SEQ ID NO: 2178208 - DNA, 25 bp, Homo sapien
tttctcattagaggctcctggccac

SEQ ID NO: 2178209 - DNA, 25 bp, Homo sapien
tctgaggaattcttgctggtactgg

SEQ ID NO: 2178210 - DNA, 25 bp, Homo sapien
ttgagagttgcagctggctccgctg

SEQ ID NO: 2178211 - DNA, 25 bp, Homo sapien
ctgttggaatatgagctgtctgaag

SEQ ID NO: 2178212 - DNA, 25 bp, Homo sapien
tgtctgaagagctctctgctgcttt

SEQ ID NO: 2178213 - DNA, 25 bp, Homo sapien
tgttggaatatgagctgtctgaaga

SEQ ID NO: 2178214 - DNA, 25 bp, Homo sapien
gaagagctctctgctgctttctttg

SEQ ID NO: 2178215 - DNA, 25 bp, Homo sapien
acttgaatcagactcgtcgctgctg

SEQ ID NO: 2178216 - DNA, 25 bp, Homo sapien
tcagactcgtcgctgctgtcttcac

SEQ ID NO: 2178217 - DNA, 25 bp, Homo sapien
gaatcagactcgtcgctgctgtctt

SEQ ID NO: 2178218 - DNA, 25 bp, Homo sapien
ttgaatcagactcgtcgctgctgtc

SEQ ID NO: 2178219 - DNA, 25 bp, Homo sapien
ttaggtgctgcttgagctggagtac

SEQ ID NO: 2178220 - DNA, 25 bp, Homo sapien
tttaggtgctgcttgagctggagta

SEQ ID NO: 2178221 - DNA, 25 bp, Homo sapien
tagcccgagctttagctgctacaga

SEQ ID NO: 2178222 - DNA, 25 bp, Homo sapien
gctgggactttagcccgagctttag

SEQ ID NO: 2178223 - DNA, 25 bp, Homo sapien
ggactttagcccgagctttagctgc

SEQ ID NO: 2178224 - DNA, 25 bp, Homo sapien
tgtggctgggactttagcccgagct

SEQ ID NO: 2178225 - DNA, 25 bp, Homo sapien
ctcactactgtcactggatgaagcc

SEQ ID NO: 2178226 - DNA, 25 bp, Homo sapien
cctcactactgtcactggatgaagc

SEQ ID NO: 2178227 - DNA, 25 bp, Homo sapien
ttgcctggaacttttgctttgggga

SEQ ID NO: 2178228 - DNA, 25 bp, Homo sapien
catttatttgcctggaacttttgct

SEQ ID NO: 2178229 - DNA, 25 bp, Homo sapien
cactgatccatttatttgcctggaa

SEQ ID NO: 2178230 - DNA, 25 bp, Homo sapien
gaacttttgctttggggacttagca

SEQ ID NO: 2178231 - DNA, 25 bp, Homo sapien
atagacatccaagagggaagaggca

SEQ ID NO: 2178232 - DNA, 25 bp, Homo sapien
ggaagaggcattggcatcctgctgt

SEQ ID NO: 2178233 - DNA, 25 bp, Homo sapien
agggaagaggcattggcatcctgct

SEQ ID NO: 2178234 - DNA, 25 bp, Homo sapien
ctatagacatccaagagggaagagg

SEQ ID NO: 2178235 - DNA, 25 bp, Homo sapien
tctgctgctataggtgtggaatatg

SEQ ID NO: 2178236 - DNA, 25 bp, Homo sapien
atttgattttgtgtccggacagcaa

SEQ ID NO: 2178237 - DNA, 25 bp, Homo sapien
cggacagcaattccaagacagtcag

SEQ ID NO: 2178238 - DNA, 25 bp, Homo sapien
tcttttcctaggtctgttcttaggc

SEQ ID NO: 2178239 - DNA, 25 bp, Homo sapien
gggcccatcattgtaaagcagccaa

SEQ ID NO: 2178240 - DNA, 25 bp, Homo sapien
caaagggtttctgtggtccaaggct

SEQ ID NO: 2178241 - DNA, 25 bp, Homo sapien
gaagggcccatcattgtaaagcagc

SEQ ID NO: 2178242 - DNA, 25 bp, Homo sapien
ggaggaagggcccatcattgtaaag

SEQ ID NO: 2178243 - DNA, 25 bp, Homo sapien
atgaagcaagccaaagcctctattg

SEQ ID NO: 2178244 - DNA, 25 bp, Homo sapien
gaagcaagccaaagcctctattgga

SEQ ID NO: 2178245 - DNA, 25 bp, Homo sapien
gcaagccaaagcctctattggaagc

SEQ ID NO: 2178246 - DNA, 25 bp, Homo sapien
agccaaagcctctattggaagcaaa

SEQ ID NO: 2178247 - DNA, 25 bp, Homo sapien
ttacactgttcttctctttccccat

SEQ ID NO: 2178248 - DNA, 25 bp, Homo sapien
tttacactgttcttctctttcccca

SEQ ID NO: 2178249 - DNA, 25 bp, Homo sapien
ctgacctgagctttacactgttctt

SEQ ID NO: 2178250 - DNA, 25 bp, Homo sapien
acctgagctttacactgttcttctc

SEQ ID NO: 2178251 - DNA, 25 bp, Homo sapien
ggaattgcctctttatcctaatgag

SEQ ID NO: 2178252 - DNA, 25 bp, Homo sapien
gctcagttgccttaatcatttacag

SEQ ID NO: 2178253 - DNA, 25 bp, Homo sapien
aactggataaacaaagcactctaca

SEQ ID NO: 2178254 - DNA, 25 bp, Homo sapien
caaaagaacgcacagataagatagc

SEQ ID NO: 2178255 - DNA, 25 bp, Homo sapien
tgaagagacaactgggtaagtgcca

SEQ ID NO: 2178256 - DNA, 25 bp, Homo sapien
agttctgacatgattttatttaaaa

SEQ ID NO: 2178257 - DNA, 25 bp, Homo sapien
tctgacatgattttatttaaaaaca

SEQ ID NO: 2178258 - DNA, 25 bp, Homo sapien
gacatgattttatttaaaaacatgt

SEQ ID NO: 2178259 - DNA, 25 bp, Homo sapien
ttctgacatgattttatttaaaaac

SEQ ID NO: 2178260 - DNA, 25 bp, Homo sapien
tgtcacaaaggtcttcaaagtcctc

SEQ ID NO: 2178261 - DNA, 25 bp, Homo sapien
tcttcatcggaaaaaactctgtcac

SEQ ID NO: 2178262 - DNA, 25 bp, Homo sapien
aactctgtcacaaaggtcttcaaag

SEQ ID NO: 2178263 - DNA, 25 bp, Homo sapien
tcactgtcttcatcggaaaaaactc

SEQ ID NO: 2178264 - DNA, 25 bp, Homo sapien
cacttctatattgttgccacttctt

SEQ ID NO: 2178265 - DNA, 25 bp, Homo sapien
tatattgttgccacttcttctgttg

SEQ ID NO: 2178266 - DNA, 25 bp, Homo sapien
ctttacgaattggtcacgtagcagc

SEQ ID NO: 2178267 - DNA, 25 bp, Homo sapien
ttggtcacgtagcagcttcatctct

SEQ ID NO: 2178268 - DNA, 25 bp, Homo sapien
ctgctcgtctgtgatgtattcttca

SEQ ID NO: 2178269 - DNA, 25 bp, Homo sapien
ttcctctttctgctcgtctgtgatg

SEQ ID NO: 2178270 - DNA, 25 bp, Homo sapien
ttagcaacttcagagaatgtatata

SEQ ID NO: 2178271 - DNA, 25 bp, Homo sapien
catttagcaacttcagagaatgtat

SEQ ID NO: 2178272 - DNA, 25 bp, Homo sapien
agacgccaatatgtacaggatagtt

SEQ ID NO: 2178273 - DNA, 25 bp, Homo sapien
aaaatatgttgttcactagagacgc

SEQ ID NO: 2178274 - DNA, 25 bp, Homo sapien
ctagagacgccaatatgtacaggat

SEQ ID NO: 2178275 - DNA, 25 bp, Homo sapien
ttagagaacaatcaagtaaaatatg

SEQ ID NO: 2178276 - DNA, 25 bp, Homo sapien
tgttttgctgcaagttttatccatt

SEQ ID NO: 2178277 - DNA, 25 bp, Homo sapien
cttttttctcaaagcatgtttactt

SEQ ID NO: 2178278 - DNA, 25 bp, Homo sapien
tttaagttgcttttttctcaaagca

SEQ ID NO: 2178279 - DNA, 25 bp, Homo sapien
ttgttctttgttttgctgcaagttt

SEQ ID NO: 2178280 - DNA, 25 bp, Homo sapien
gcccaatgtattaggcagctcacaa

SEQ ID NO: 2178281 - DNA, 25 bp, Homo sapien
gaggatcaaagaccacccatcaggt

SEQ ID NO: 2178282 - DNA, 25 bp, Homo sapien
tgtatgaatcatcgctagagaagag

SEQ ID NO: 2178283 - DNA, 25 bp, Homo sapien
cccatagtgctgtgtttcagaaaac

SEQ ID NO: 2178284 - DNA, 25 bp, Homo sapien
gcagtatcttctggcttcttggtat

SEQ ID NO: 2178285 - DNA, 25 bp, Homo sapien
ctgcagtatcttctggcttcttggt

SEQ ID NO: 2178286 - DNA, 25 bp, Homo sapien
atcttctggcttcttggtattagcc

SEQ ID NO: 2178287 - DNA, 25 bp, Homo sapien
gtatcttctggcttcttggtattag

SEQ ID NO: 2178288 - DNA, 25 bp, Homo sapien
tcacattcatcacggactggatcct

SEQ ID NO: 2178289 - DNA, 25 bp, Homo sapien
ctcacattcatcacggactggatcc

SEQ ID NO: 2178290 - DNA, 25 bp, Homo sapien
cattcatcacggactggatcctttc

SEQ ID NO: 2178291 - DNA, 25 bp, Homo sapien
tcctcacattcatcacggactggat

SEQ ID NO: 2178292 - DNA, 25 bp, Homo sapien
agttcagaccccttggatgtcagga

SEQ ID NO: 2178293 - DNA, 25 bp, Homo sapien
tagcacgtgcacaatggactccaga

SEQ ID NO: 2178294 - DNA, 25 bp, Homo sapien
gagagcatctgtaaccctgctatga

SEQ ID NO: 2178295 - DNA, 25 bp, Homo sapien
tgtcaggactgcacccatggagaag

SEQ ID NO: 2178296 - DNA, 25 bp, Homo sapien
tgcatgcttcttcccccaggccgcc

SEQ ID NO: 2178297 - DNA, 25 bp, Homo sapien
catgcttcttcccccaggccgccat

SEQ ID NO: 2178298 - DNA, 25 bp, Homo sapien
ctgcatgcttcttcccccaggccgc

SEQ ID NO: 2178299 - DNA, 25 bp, Homo sapien
gcatgcttcttcccccaggccgcca

SEQ ID NO: 2178300 - DNA, 25 bp, Homo sapien
tcctgcccacaggatccgtggctgg

SEQ ID NO: 2178301 - DNA, 25 bp, Homo sapien
tgcccacaggatccgtggctggttg

SEQ ID NO: 2178302 - DNA, 25 bp, Homo sapien
ggctggttgtcctgggaagctagag

SEQ ID NO: 2178303 - DNA, 25 bp, Homo sapien
cacaggatccgtggctggttgtcct

SEQ ID NO: 2178304 - DNA, 25 bp, Homo sapien
aaaggaaagccattgggatcacagg

SEQ ID NO: 2178305 - DNA, 25 bp, Homo sapien
tcacacctgaactccacggcctctg

SEQ ID NO: 2178306 - DNA, 25 bp, Homo sapien
agctgcccctcacacctgaactcca

SEQ ID NO: 2178307 - DNA, 25 bp, Homo sapien
ccctgggtctcatgtgggagcagga

SEQ ID NO: 2178308 - DNA, 25 bp, Homo sapien
tgatgtggcgccctcaaagaacctg

SEQ ID NO: 2178309 - DNA, 25 bp, Homo sapien
tagaaaacgggtcctctcaggaagc

SEQ ID NO: 2178310 - DNA, 25 bp, Homo sapien
gaaaacgggtcctcagttctcgtga

SEQ ID NO: 2178311 - DNA, 25 bp, Homo sapien
gcggcaccactaggacctcttagaa

SEQ ID NO: 2178312 - DNA, 25 bp, Homo sapien
gtgacagcccgtggttgctgtggac

SEQ ID NO: 2178313 - DNA, 25 bp, Homo sapien
ccttcccctaagtgacagcccgtgg

SEQ ID NO: 2178314 - DNA, 25 bp, Homo sapien
ccctaagtgacagcccgtggttgct

SEQ ID NO: 2178315 - DNA, 25 bp, Homo sapien
tcccctaagtgacagcccgtggttg

SEQ ID NO: 2178316 - DNA, 25 bp, Homo sapien
ctctgcccaatcatctggtttcaca

SEQ ID NO: 2178317 - DNA, 25 bp, Homo sapien
tcatgctctgaaagccccagtagtt

SEQ ID NO: 2178318 - DNA, 25 bp, Homo sapien
gagactggtgcacggaagaacgaac

SEQ ID NO: 2178319 - DNA, 25 bp, Homo sapien
tagggagtttctcgagggcccctgc

SEQ ID NO: 2178320 - DNA, 25 bp, Homo sapien
agaaagccaggcctcccctaacaag

SEQ ID NO: 2178321 - DNA, 25 bp, Homo sapien
cccctaacaagccatgtggccagaa

SEQ ID NO: 2178322 - DNA, 25 bp, Homo sapien
taacaagccatgtggccagaaatcc

SEQ ID NO: 2178323 - DNA, 25 bp, Homo sapien
atcccttccaggtgcacagagaaag

SEQ ID NO: 2178324 - DNA, 25 bp, Homo sapien
cagagtatccatactccattccaaa

SEQ ID NO: 2178325 - DNA, 25 bp, Homo sapien
gatttggtttatgccgactatccac

SEQ ID NO: 2178326 - DNA, 25 bp, Homo sapien
accccaggatattacatgcagccac

SEQ ID NO: 2178327 - DNA, 25 bp, Homo sapien
caccccaggatattacatgcagcca

SEQ ID NO: 2178328 - DNA, 25 bp, Homo sapien
ttatgccgactatccaccccaggat

SEQ ID NO: 2178329 - DNA, 25 bp, Homo sapien
ggagacaatgaatatcttgggttga

SEQ ID NO: 2178330 - DNA, 25 bp, Homo sapien
aatgaatatcttgggttgagttcac

SEQ ID NO: 2178331 - DNA, 25 bp, Homo sapien
aagtgcaggagtcagaaccttgctg

SEQ ID NO: 2178332 - DNA, 25 bp, Homo sapien
ttcacagtgcagagcttcggggaca

SEQ ID NO: 2178333 - DNA, 25 bp, Homo sapien
aggcgttgccttccaaagtaaagca

SEQ ID NO: 2178334 - DNA, 25 bp, Homo sapien
cctggattttgaaggcgttgccttc

SEQ ID NO: 2178335 - DNA, 25 bp, Homo sapien
gcagctttccatatccactaattgg

SEQ ID NO: 2178336 - DNA, 25 bp, Homo sapien
cactaattggttttgcactggcaca

SEQ ID NO: 2178337 - DNA, 25 bp, Homo sapien
agtgatgctttgctcccccacgtcc

SEQ ID NO: 2178338 - DNA, 25 bp, Homo sapien
tccagtgatgctttgctcccccacg

SEQ ID NO: 2178339 - DNA, 25 bp, Homo sapien
ttcaaatgcctttccagtgatgctt

SEQ ID NO: 2178340 - DNA, 25 bp, Homo sapien
ccagtgatgctttgctcccccacgt

SEQ ID NO: 2178341 - DNA, 25 bp, Homo sapien
gcagatatgttgaaattgccagtta

SEQ ID NO: 2178342 - DNA, 25 bp, Homo sapien
ttaattggagataatgtgaccttgt

SEQ ID NO: 2178343 - DNA, 25 bp, Homo sapien
ttgatgcagatatgttgaaattgcc

SEQ ID NO: 2178344 - DNA, 25 bp, Homo sapien
gataatgtgaccttgttccttgatg

SEQ ID NO: 2178345 - DNA, 25 bp, Homo sapien
tgagatatgtctggggatagatctg

SEQ ID NO: 2178346 - DNA, 25 bp, Homo sapien
ctgagatatgtctggggatagatct

SEQ ID NO: 2178347 - DNA, 25 bp, Homo sapien
gatatgtctggggatagatctgaat

SEQ ID NO: 2178348 - DNA, 25 bp, Homo sapien
atgtctggggatagatctgaatgta

SEQ ID NO: 2178349 - DNA, 25 bp, Homo sapien
tcttcttggttaccccctgagggca

SEQ ID NO: 2178350 - DNA, 25 bp, Homo sapien
cttcttggttaccccctgagggcat

SEQ ID NO: 2178351 - DNA, 25 bp, Homo sapien
tcccctaataagatcaaggcccttg

SEQ ID NO: 2178352 - DNA, 25 bp, Homo sapien
ggcttgcaccaaggctttccagttc

SEQ ID NO: 2178353 - DNA, 25 bp, Homo sapien
gtagtgtcgtggatgtctttgctgc

SEQ ID NO: 2178354 - DNA, 25 bp, Homo sapien
caaggccatctggtaaaccacgcag

SEQ ID NO: 2178355 - DNA, 25 bp, Homo sapien
ttgtggaatgaagcaaaatgatgca

SEQ ID NO: 2178356 - DNA, 25 bp, Homo sapien
gtttcactaagcctccaggatatgt

SEQ ID NO: 2178357 - DNA, 25 bp, Homo sapien
atgttttgttgtattcgactctggg

SEQ ID NO: 2178358 - DNA, 25 bp, Homo sapien
gagagctggtttcactaagcctcca

SEQ ID NO: 2178359 - DNA, 25 bp, Homo sapien
gagacttctcatttgatgggaagag

SEQ ID NO: 2178360 - DNA, 25 bp, Homo sapien
aagatgggacctggcatttggaggg

SEQ ID NO: 2178361 - DNA, 25 bp, Homo sapien
ggagaccactgtgtagacccctgag

SEQ ID NO: 2178362 - DNA, 25 bp, Homo sapien
tgcagactgtcctccagaacagtca

SEQ ID NO: 2178363 - DNA, 25 bp, Homo sapien
gaaatgcacagagaatgcagactgt

SEQ ID NO: 2178364 - DNA, 25 bp, Homo sapien
tgtgatgtgattcgcaaggacagct

SEQ ID NO: 2178365 - DNA, 25 bp, Homo sapien
atgtgattcgcaaggacagctgcat

SEQ ID NO: 2178366 - DNA, 25 bp, Homo sapien
tgatgtgattcgcaaggacagctgc

SEQ ID NO: 2178367 - DNA, 25 bp, Homo sapien
gatgtgattcgcaaggacagctgca

SEQ ID NO: 2178368 - DNA, 25 bp, Homo sapien
cctctccattcgcttccagctgggc

SEQ ID NO: 2178369 - DNA, 25 bp, Homo sapien
ctctccattcgcttccagctgggca

SEQ ID NO: 2178370 - DNA, 25 bp, Homo sapien
tctccattcgcttccagctgggcat

SEQ ID NO: 2178371 - DNA, 25 bp, Homo sapien
tctcactgctaaaagtaggctgcgt

SEQ ID NO: 2178372 - DNA, 25 bp, Homo sapien
gagccacatggactctgttgcaaat

SEQ ID NO: 2178373 - DNA, 25 bp, Homo sapien
tctacagcagatgtcagcaagcttc

SEQ ID NO: 2178374 - DNA, 25 bp, Homo sapien
gcagaatgaagcaagcatgcctctt

SEQ ID NO: 2178375 - DNA, 25 bp, Homo sapien
tttcttcggtaagcgtgggaggcca

SEQ ID NO: 2178376 - DNA, 25 bp, Homo sapien
taacactttcccagtagaaggcctg

SEQ ID NO: 2178377 - DNA, 25 bp, Homo sapien
ttgtgattccccatgaaaaacgccc

SEQ ID NO: 2178378 - DNA, 25 bp, Homo sapien
gaacagactgctgacgttcgcaggg

SEQ ID NO: 2178379 - DNA, 25 bp, Homo sapien
tctggtctcctgtgccatcacccag

SEQ ID NO: 2178380 - DNA, 25 bp, Homo sapien
cagctgcaccctgatacctgtcaga

SEQ ID NO: 2178381 - DNA, 25 bp, Homo sapien
tgactgcacactccgcgatgcaggg

SEQ ID NO: 2178382 - DNA, 25 bp, Homo sapien
ctgtcagattcatgccgggagcctc

SEQ ID NO: 2178383 - DNA, 25 bp, Homo sapien
cagaggggtttggagccaggtgaca

SEQ ID NO: 2178384 - DNA, 25 bp, Homo sapien
ctgagggcgaatgtttgaccagagg

SEQ ID NO: 2178385 - DNA, 25 bp, Homo sapien
gccaggtgacagatgctctcccttc

SEQ ID NO: 2178386 - DNA, 25 bp, Homo sapien
tgagggcgaatgtttgaccagaggg

SEQ ID NO: 2178387 - DNA, 25 bp, Homo sapien
taggatcttatcaatgacttggaat

SEQ ID NO: 2178388 - DNA, 25 bp, Homo sapien
gcacaaaactaaaggccaaagagcc

SEQ ID NO: 2178389 - DNA, 25 bp, Homo sapien
ttgtaagcattggtgcccttgtgca

SEQ ID NO: 2178390 - DNA, 25 bp, Homo sapien
gaatcctggtccacaatgggtccag

SEQ ID NO: 2178391 - DNA, 25 bp, Homo sapien
aagttcgcaaagagattgcttctgc

SEQ ID NO: 2178392 - DNA, 25 bp, Homo sapien
tgtctgctgccatctaagttcgcaa

SEQ ID NO: 2178393 - DNA, 25 bp, Homo sapien
ctaagttcgcaaagagattgcttct

SEQ ID NO: 2178394 - DNA, 25 bp, Homo sapien
tctgctgccatctaagttcgcaaag

SEQ ID NO: 2178395 - DNA, 25 bp, Homo sapien
tactgggactttcaatatgataatc

SEQ ID NO: 2178396 - DNA, 25 bp, Homo sapien
ccactgtgccttccgatcaataact

SEQ ID NO: 2178397 - DNA, 25 bp, Homo sapien
cactttgaaaggagctggcaagagg

SEQ ID NO: 2178398 - DNA, 25 bp, Homo sapien
gcatttggcagctctattctttaaa

SEQ ID NO: 2178399 - DNA, 25 bp, Homo sapien
gtccaagtcgacaaattcaaaagct

SEQ ID NO: 2178400 - DNA, 25 bp, Homo sapien
gaaacagggctttcaacagcaagca

SEQ ID NO: 2178401 - DNA, 25 bp, Homo sapien
taaagatccaccttaaaaggcagga

SEQ ID NO: 2178402 - DNA, 25 bp, Homo sapien
tgcccaaatggtaaggaattgaccc

SEQ ID NO: 2178403 - DNA, 25 bp, Homo sapien
tatcaaggctgggactcgggttcca

SEQ ID NO: 2178404 - DNA, 25 bp, Homo sapien
gtgcagattctcacccagcgagggt

SEQ ID NO: 2178405 - DNA, 25 bp, Homo sapien
tgtataatgatgaaccaccagggtg

SEQ ID NO: 2178406 - DNA, 25 bp, Homo sapien
gccattgcatgttggagccggacca

SEQ ID NO: 2178407 - DNA, 25 bp, Homo sapien
aacaagggcctcttgaagacacagt

SEQ ID NO: 2178408 - DNA, 25 bp, Homo sapien
tctagaatagtaactatgattcagt

SEQ ID NO: 2178409 - DNA, 25 bp, Homo sapien
tttaacaagggcctcttgaagacac

SEQ ID NO: 2178410 - DNA, 25 bp, Homo sapien
agaatagtaactatgattcagtgat

SEQ ID NO: 2178411 - DNA, 25 bp, Homo sapien
catgctttaacacaatcagcttgtc

SEQ ID NO: 2178412 - DNA, 25 bp, Homo sapien
cacaatcagcttgtcctaacaccat

SEQ ID NO: 2178413 - DNA, 25 bp, Homo sapien
ttctgaaattaggtgtgtcacatgc

SEQ ID NO: 2178414 - DNA, 25 bp, Homo sapien
taatgagcggcgatttcccctctgg

SEQ ID NO: 2178415 - DNA, 25 bp, Homo sapien
ttattaagtaccaaaatgataactg

SEQ ID NO: 2178416 - DNA, 25 bp, Homo sapien
gagttattaagtaccaaaatgataa

SEQ ID NO: 2178417 - DNA, 25 bp, Homo sapien
agagttattaagtaccaaaatgata

SEQ ID NO: 2178418 - DNA, 25 bp, Homo sapien
tattaagtaccaaaatgataactga

SEQ ID NO: 2178419 - DNA, 25 bp, Homo sapien
tgcattgttacgaaaaaacacctgc

SEQ ID NO: 2178420 - DNA, 25 bp, Homo sapien
gggcaactcgaatctcaggcatgca

SEQ ID NO: 2178421 - DNA, 25 bp, Homo sapien
taccccatgacccattgtattagag

SEQ ID NO: 2178422 - DNA, 25 bp, Homo sapien
cagatgacaaaaattgaagaccgac

SEQ ID NO: 2178423 - DNA, 25 bp, Homo sapien
actcacggtagaaggtaaagcagga

SEQ ID NO: 2178424 - DNA, 25 bp, Homo sapien
tttgactcacggtagaaggtaaagc

SEQ ID NO: 2178425 - DNA, 25 bp, Homo sapien
gggctttgactcacggtagaaggta

SEQ ID NO: 2178426 - DNA, 25 bp, Homo sapien
ctcagggggctttgactcacggtag

SEQ ID NO: 2178427 - DNA, 25 bp, Homo sapien
cggcaacatgagtgcctgctcatag

SEQ ID NO: 2178428 - DNA, 25 bp, Homo sapien
cagtgcgtagttcacggcaacatga

SEQ ID NO: 2178429 - DNA, 25 bp, Homo sapien
ccagtactcagtgcgtagttcacgg

SEQ ID NO: 2178430 - DNA, 25 bp, Homo sapien
tagttcacggcaacatgagtgcctg

SEQ ID NO: 2178431 - DNA, 25 bp, Homo sapien
gcggagcgcacacctttcaatattt

SEQ ID NO: 2178432 - DNA, 25 bp, Homo sapien
gctccttctatcgacactgagtaaa

SEQ ID NO: 2178433 - DNA, 25 bp, Homo sapien
agttttgcaaactgcggagcgcaca

SEQ ID NO: 2178434 - DNA, 25 bp, Homo sapien
tgagtaaattagaatgtggaatacc

SEQ ID NO: 2178435 - DNA, 25 bp, Homo sapien
taggactacccttgctgcgtggctt

SEQ ID NO: 2178436 - DNA, 25 bp, Homo sapien
tgagcccatttctgtatctgcccca

SEQ ID NO: 2178437 - DNA, 25 bp, Homo sapien
tctcctttaatcaaaggtgccaggg

SEQ ID NO: 2178438 - DNA, 25 bp, Homo sapien
aatattctggacgatgcgaacagca

SEQ ID NO: 2178439 - DNA, 25 bp, Homo sapien
gttggtatctttggaactagctgat

SEQ ID NO: 2178440 - DNA, 25 bp, Homo sapien
gtgctatcgctattatttttccaaa

SEQ ID NO: 2178441 - DNA, 25 bp, Homo sapien
cacttccccggggatgttggtatct

SEQ ID NO: 2178442 - DNA, 25 bp, Homo sapien
ttgaatgactgtgctatcgctatta

SEQ ID NO: 2178443 - DNA, 25 bp, Homo sapien
tccgacacaaagactaaagctgcag

SEQ ID NO: 2178444 - DNA, 25 bp, Homo sapien
tgagccagattcttaccagaggact

SEQ ID NO: 2178445 - DNA, 25 bp, Homo sapien
ggtgcttttcggatccttctttcaa

SEQ ID NO: 2178446 - DNA, 25 bp, Homo sapien
aagttgccacaggaaaggtctcttc

SEQ ID NO: 2178447 - DNA, 25 bp, Homo sapien
ctgctgagtcactggctgtagttct

SEQ ID NO: 2178448 - DNA, 25 bp, Homo sapien
agttctgtcaggtaagtgctcctgg

SEQ ID NO: 2178449 - DNA, 25 bp, Homo sapien
gctgtggcaagaagggactgtttcc

SEQ ID NO: 2178450 - DNA, 25 bp, Homo sapien
ctggagcgagctgcagatgctgact

SEQ ID NO: 2178451 - DNA, 25 bp, Homo sapien
cagtaattctcaggacccatgtgtt

SEQ ID NO: 2178452 - DNA, 25 bp, Homo sapien
cccatgtgttcggtaggatgaaaac

SEQ ID NO: 2178453 - DNA, 25 bp, Homo sapien
ttagcccaagtttcaagcaatctgg

SEQ ID NO: 2178454 - DNA, 25 bp, Homo sapien
ggtttattctttgatacgcggcagt

SEQ ID NO: 2178455 - DNA, 25 bp, Homo sapien
tgggctgctccaaccaatgacagac

SEQ ID NO: 2178456 - DNA, 25 bp, Homo sapien
gcgcggttggatcgcattgctcaga

SEQ ID NO: 2178457 - DNA, 25 bp, Homo sapien
tgcaccttgattccacaacaatgtt

SEQ ID NO: 2178458 - DNA, 25 bp, Homo sapien
tccaaccaatgacagacttcagcag

SEQ ID NO: 2178459 - DNA, 25 bp, Homo sapien
aggcatgaaggatgattggaaaagc

SEQ ID NO: 2178460 - DNA, 25 bp, Homo sapien
catgcaaattagaggggaccaccag

SEQ ID NO: 2178461 - DNA, 25 bp, Homo sapien
cggggagaggagttcaatgaagagc

SEQ ID NO: 2178462 - DNA, 25 bp, Homo sapien
acagccagagttccagcagatggta

SEQ ID NO: 2178463 - DNA, 25 bp, Homo sapien
tcatgtggccccaactatattatca

SEQ ID NO: 2178464 - DNA, 25 bp, Homo sapien
ttttcttctgcgtgccttctccaac

SEQ ID NO: 2178465 - DNA, 25 bp, Homo sapien
gctgccgtattgtttctgcattggc

SEQ ID NO: 2178466 - DNA, 25 bp, Homo sapien
ttctccaactgcctgctgccgtatt

SEQ ID NO: 2178467 - DNA, 25 bp, Homo sapien
tgctgtgggtagttctcaggctcag

SEQ ID NO: 2178468 - DNA, 25 bp, Homo sapien
tcgaagacctgctcccactggattg

SEQ ID NO: 2178469 - DNA, 25 bp, Homo sapien
caatgtttcccttttgtccagagac

SEQ ID NO: 2178470 - DNA, 25 bp, Homo sapien
gtataaacaagacgggatgtgagct

SEQ ID NO: 2178471 - DNA, 25 bp, Homo sapien
ccctctctgctgtctacaagccaca

SEQ ID NO: 2178472 - DNA, 25 bp, Homo sapien
ctgcaggtctgcattgcctatgagc

SEQ ID NO: 2178473 - DNA, 25 bp, Homo sapien
attgcctatgagctccaagcagctg

SEQ ID NO: 2178474 - DNA, 25 bp, Homo sapien
catcttcatgcccacaccaatccct

SEQ ID NO: 2178475 - DNA, 25 bp, Homo sapien
ttcactctgaactatggggaactgg

SEQ ID NO: 2178476 - DNA, 25 bp, Homo sapien
caaactttgctgtcgacacatgtcc

SEQ ID NO: 2178477 - DNA, 25 bp, Homo sapien
tgtccaagactaaggccagtgccct

SEQ ID NO: 2178478 - DNA, 25 bp, Homo sapien
gaaagcaaactctagatcatacacg

SEQ ID NO: 2178479 - DNA, 25 bp, Homo sapien
tacacgagcaagagctgtgggacag

SEQ ID NO: 2178480 - DNA, 25 bp, Homo sapien
ggaaaccgcagaagtcatcagagca

SEQ ID NO: 2178481 - DNA, 25 bp, Homo sapien
atcagagcagacatcggcaaagcgg

SEQ ID NO: 2178482 - DNA, 25 bp, Homo sapien
gacatcggcaaagcggatgccaagc

SEQ ID NO: 2178483 - DNA, 25 bp, Homo sapien
gggaaaccgcagaagtcatcagagc

SEQ ID NO: 2178484 - DNA, 25 bp, Homo sapien
cagagagcagtgacgccaaagtcca

SEQ ID NO: 2178485 - DNA, 25 bp, Homo sapien
caggcaaagtcctctgctgaaagct

SEQ ID NO: 2178486 - DNA, 25 bp, Homo sapien
ttggcaacctcactacgcaggcctg

SEQ ID NO: 2178487 - DNA, 25 bp, Homo sapien
tctcgggcttcgacaggtacatcct

SEQ ID NO: 2178488 - DNA, 25 bp, Homo sapien
cgaaggtacattccgcacaggctgg

SEQ ID NO: 2178489 - DNA, 25 bp, Homo sapien
tggtggtcaattctggtggcgcttc

SEQ ID NO: 2178490 - DNA, 25 bp, Homo sapien
tctacgttgctgagaagcactccac

SEQ ID NO: 2178491 - DNA, 25 bp, Homo sapien
gtggcgcttccaaatgacgtgatgt

SEQ ID NO: 2178492 - DNA, 25 bp, Homo sapien
tcagatgtcggtgatgatctcggaa

SEQ ID NO: 2178493 - DNA, 25 bp, Homo sapien
tgtcggtgatgatctcggaagtcca

SEQ ID NO: 2178494 - DNA, 25 bp, Homo sapien
atctcggaagtccagggttcagggt

SEQ ID NO: 2178495 - DNA, 25 bp, Homo sapien
tgatgatctcggaagtccagggttc

SEQ ID NO: 2178496 - DNA, 25 bp, Homo sapien
tttttaaatagagcatcattcacac

SEQ ID NO: 2178497 - DNA, 25 bp, Homo sapien
tagataccacttttcaggttctctc

SEQ ID NO: 2178498 - DNA, 25 bp, Homo sapien
tcttctgagtttagataccactttt

SEQ ID NO: 2178499 - DNA, 25 bp, Homo sapien
tccccttgttcggtgcaattgccaa

SEQ ID NO: 2178500 - DNA, 25 bp, Homo sapien
gaattccgtaaaattttgcagctca

SEQ ID NO: 2178501 - DNA, 25 bp, Homo sapien
aggaattccatttgggctttctaca

SEQ ID NO: 2178502 - DNA, 25 bp, Homo sapien
cctgtgaggaattccatttgggctt

SEQ ID NO: 2178503 - DNA, 25 bp, Homo sapien
ctgtaagtactgaacatggagccct

SEQ ID NO: 2178504 - DNA, 25 bp, Homo sapien
ctttctacagttgaacctctcaccc

SEQ ID NO: 2178505 - DNA, 25 bp, Homo sapien
gatgaaatcttagagcacataagcc

SEQ ID NO: 2178506 - DNA, 25 bp, Homo sapien
gacttccgcctatataagctctgat

SEQ ID NO: 2178507 - DNA, 25 bp, Homo sapien
gcacaagggtaaatcttaattacag

SEQ ID NO: 2178508 - DNA, 25 bp, Homo sapien
cctcagtctggagtgatcggcaacc

SEQ ID NO: 2178509 - DNA, 25 bp, Homo sapien
cccctctgcatccagacgtgataga

SEQ ID NO: 2178510 - DNA, 25 bp, Homo sapien
ctaactcccggaaacgcatggaagc

SEQ ID NO: 2178511 - DNA, 25 bp, Homo sapien
ggaaacgcatggaagcccctctgca

SEQ ID NO: 2178512 - DNA, 25 bp, Homo sapien
tccagacgtgatagatgtatattta

SEQ ID NO: 2178513 - DNA, 25 bp, Homo sapien
ccttagcaggcaagtagacagctcc

SEQ ID NO: 2178514 - DNA, 25 bp, Homo sapien
ctctgaagtcttgggcgtgctgaaa

SEQ ID NO: 2178515 - DNA, 25 bp, Homo sapien
caggaggagttttcgaattgtgccc

SEQ ID NO: 2178516 - DNA, 25 bp, Homo sapien
tgcagcagcttaatagggtacagga

SEQ ID NO: 2178517 - DNA, 25 bp, Homo sapien
ttgccttcatcctggaaagtaagtc

SEQ ID NO: 2178518 - DNA, 25 bp, Homo sapien
tgccttcatcctggaaagtaagtcc

SEQ ID NO: 2178519 - DNA, 25 bp, Homo sapien
taattcatccgagccccgtaaatga

SEQ ID NO: 2178520 - DNA, 25 bp, Homo sapien
atgaataattcatccgagccccgta

SEQ ID NO: 2178521 - DNA, 25 bp, Homo sapien
agtttttaacaatatgaggaaagtg

SEQ ID NO: 2178522 - DNA, 25 bp, Homo sapien
caatatgaggaaagtggatgaataa

SEQ ID NO: 2178523 - DNA, 25 bp, Homo sapien
tgaatacactgaacgtttaaccacc

SEQ ID NO: 2178524 - DNA, 25 bp, Homo sapien
gaaataatttctcccgctttgtaca

SEQ ID NO: 2178525 - DNA, 25 bp, Homo sapien
atttctgatcaaagcaagtgtgaaa

SEQ ID NO: 2178526 - DNA, 25 bp, Homo sapien
taaccacctcaacacatttctgatc

SEQ ID NO: 2178527 - DNA, 25 bp, Homo sapien
gaaagctgtaatataaccgactctg

SEQ ID NO: 2178528 - DNA, 25 bp, Homo sapien
caccagtgggtcgtaattccttata

SEQ ID NO: 2178529 - DNA, 25 bp, Homo sapien
tgtgcagcccctacaagtgttaagt

SEQ ID NO: 2178530 - DNA, 25 bp, Homo sapien
tggtttagcgtctccttggccctag

SEQ ID NO: 2178531 - DNA, 25 bp, Homo sapien
tcaaagaaaggtaatggccaccgcc

SEQ ID NO: 2178532 - DNA, 25 bp, Homo sapien
tcgtattgatcttccgctaacaggc

SEQ ID NO: 2178533 - DNA, 25 bp, Homo sapien
cacgaagctttccataacaggagac

SEQ ID NO: 2178534 - DNA, 25 bp, Homo sapien
aggtaatggccaccgcctttctcgt

SEQ ID NO: 2178535 - DNA, 25 bp, Homo sapien
tattaaaacacagcccggatctgca

SEQ ID NO: 2178536 - DNA, 25 bp, Homo sapien
taagctggggcttccgaagcgtctc

SEQ ID NO: 2178537 - DNA, 25 bp, Homo sapien
cgccttcggacggagctaagctggg

SEQ ID NO: 2178538 - DNA, 25 bp, Homo sapien
gatctgcagcatccaaacggaggga

SEQ ID NO: 2178539 - DNA, 25 bp, Homo sapien
ccgcttcacccacacagacgcacct

SEQ ID NO: 2178540 - DNA, 25 bp, Homo sapien
catctccgcagcagcctaaatgatt

SEQ ID NO: 2178541 - DNA, 25 bp, Homo sapien
cacttaatagtgagttccggaaaag

SEQ ID NO: 2178542 - DNA, 25 bp, Homo sapien
ctaaatgattctgacagccatgggc

SEQ ID NO: 2178543 - DNA, 25 bp, Homo sapien
ttggatgtacagcatgcggcaaagc

SEQ ID NO: 2178544 - DNA, 25 bp, Homo sapien
atgccatcaccaacaaatgagtctg

SEQ ID NO: 2178545 - DNA, 25 bp, Homo sapien
aatgagtctgctagtcgaaacacag

SEQ ID NO: 2178546 - DNA, 25 bp, Homo sapien
tctgctagtcgaaacacagaagcca

SEQ ID NO: 2178547 - DNA, 25 bp, Homo sapien
ctctgaagatgggtcattaatgcca

SEQ ID NO: 2178548 - DNA, 25 bp, Homo sapien
tgcccacctcgtcttgagatacgtt

SEQ ID NO: 2178549 - DNA, 25 bp, Homo sapien
gcttgtcaagcgtccagaattctgg

SEQ ID NO: 2178550 - DNA, 25 bp, Homo sapien
ggatatgcgttcagttctcacgggc

SEQ ID NO: 2178551 - DNA, 25 bp, Homo sapien
gctcggcatttgtggtggtaccatc

SEQ ID NO: 2178552 - DNA, 25 bp, Homo sapien
ggaacagcagaaacagaatttgggg

SEQ ID NO: 2178553 - DNA, 25 bp, Homo sapien
tgcttgtttttagttgcggcgggag

SEQ ID NO: 2178554 - DNA, 25 bp, Homo sapien
aggaacagcagaaacagaatttggg

SEQ ID NO: 2178555 - DNA, 25 bp, Homo sapien
gctgtggttcccagaacgccgcgac

SEQ ID NO: 2178556 - DNA, 25 bp, Homo sapien
tgtggttcccagaacgccgcgacac

SEQ ID NO: 2178557 - DNA, 25 bp, Homo sapien
gtggttcccagaacgccgcgacact

SEQ ID NO: 2178558 - DNA, 25 bp, Homo sapien
ctgtggttcccagaacgccgcgaca

SEQ ID NO: 2178559 - DNA, 25 bp, Homo sapien
agaggggtcctgctgcgggggagcc

SEQ ID NO: 2178560 - DNA, 25 bp, Homo sapien
tgcgggggagcccttgagaaggcct

SEQ ID NO: 2178561 - DNA, 25 bp, Homo sapien
tgaaacaggaaaggggacggcagag

SEQ ID NO: 2178562 - DNA, 25 bp, Homo sapien
gtcctgctgcgggggagcccttgag

SEQ ID NO: 2178563 - DNA, 25 bp, Homo sapien
ttccccattgtgtagtcacataagt

SEQ ID NO: 2178564 - DNA, 25 bp, Homo sapien
cggtatcctaagttattccccattg

SEQ ID NO: 2178565 - DNA, 25 bp, Homo sapien
gtatcctaagttattccccattgtg

SEQ ID NO: 2178566 - DNA, 25 bp, Homo sapien
taagttattccccattgtgtagtca

SEQ ID NO: 2178567 - DNA, 25 bp, Homo sapien
accatgggtccgtctgttgccattg

SEQ ID NO: 2178568 - DNA, 25 bp, Homo sapien
tcctctgcaccatgggtccgtctgt

SEQ ID NO: 2178569 - DNA, 25 bp, Homo sapien
tgcaccatgggtccgtctgttgcca

SEQ ID NO: 2178570 - DNA, 25 bp, Homo sapien
tctgcaccatgggtccgtctgttgc

SEQ ID NO: 2178571 - DNA, 25 bp, Homo sapien
agaagatccattggtacactgagtt

SEQ ID NO: 2178572 - DNA, 25 bp, Homo sapien
ctccagggtgagatcttaggtgact

SEQ ID NO: 2178573 - DNA, 25 bp, Homo sapien
tgaacttggaaccacctcaacctgc

SEQ ID NO: 2178574 - DNA, 25 bp, Homo sapien
taaaggactgtcacgctaaacttgt

SEQ ID NO: 2178575 - DNA, 25 bp, Homo sapien
tgtcagtttctcagagtagggacct

SEQ ID NO: 2178576 - DNA, 25 bp, Homo sapien
ctctttgcatagagtcgcttttcat

SEQ ID NO: 2178577 - DNA, 25 bp, Homo sapien
ttttcataaggatcctaaggtgcag

SEQ ID NO: 2178578 - DNA, 25 bp, Homo sapien
gagtcgcttttcataaggatcctaa

SEQ ID NO: 2178579 - DNA, 25 bp, Homo sapien
cacgcattagctgcgtgtctctttg

SEQ ID NO: 2178580 - DNA, 25 bp, Homo sapien
caacagggggctacgcttggttaca

SEQ ID NO: 2178581 - DNA, 25 bp, Homo sapien
tgtccaacagggggctacgcttggt

SEQ ID NO: 2178582 - DNA, 25 bp, Homo sapien
tccaacagggggctacgcttggtta

SEQ ID NO: 2178583 - DNA, 25 bp, Homo sapien
tacagcttccacgagggaaggcctc

SEQ ID NO: 2178584 - DNA, 25 bp, Homo sapien
ccagtgcttatctgctttccccata

SEQ ID NO: 2178585 - DNA, 25 bp, Homo sapien
tccccatacagcttccacgagggaa

SEQ ID NO: 2178586 - DNA, 25 bp, Homo sapien
cagcacttcttgtttccactaccag

SEQ ID NO: 2178587 - DNA, 25 bp, Homo sapien
caccaaagagaacgccgtgagctct

SEQ ID NO: 2178588 - DNA, 25 bp, Homo sapien
gagaacgccgtgagctctccttcta

SEQ ID NO: 2178589 - DNA, 25 bp, Homo sapien
ctgggcaccaaagagaacgccgtga

SEQ ID NO: 2178590 - DNA, 25 bp, Homo sapien
gaactgggcaccaaagagaacgccg

SEQ ID NO: 2178591 - DNA, 25 bp, Homo sapien
tcgacagatccccagaaactgaagg

SEQ ID NO: 2178592 - DNA, 25 bp, Homo sapien
tcttggcaggcgtttgcgtagctta

SEQ ID NO: 2178593 - DNA, 25 bp, Homo sapien
aaggcactcattccttccgcgtttg

SEQ ID NO: 2178594 - DNA, 25 bp, Homo sapien
tttgcatgccccagtgcttgtagcc

SEQ ID NO: 2178595 - DNA, 25 bp, Homo sapien
tgatgggttgttcttatctttctct

SEQ ID NO: 2178596 - DNA, 25 bp, Homo sapien
ggcagagaaggtggtatcttcttgt

SEQ ID NO: 2178597 - DNA, 25 bp, Homo sapien
ctatattgtctattaatggttgtaa

SEQ ID NO: 2178598 - DNA, 25 bp, Homo sapien
taatggcaagaaccgtctggtaagt

SEQ ID NO: 2178599 - DNA, 25 bp, Homo sapien
gatgaaacctgaaaatcttatttga

SEQ ID NO: 2178600 - DNA, 25 bp, Homo sapien
agatgaaacctgaaaatcttatttg

SEQ ID NO: 2178601 - DNA, 25 bp, Homo sapien
cagcagtgtagtacaggactccact

SEQ ID NO: 2178602 - DNA, 25 bp, Homo sapien
tcactcatgcagcagtgtagtacag

SEQ ID NO: 2178603 - DNA, 25 bp, Homo sapien
catcctcactcatgcagcagtgtag

SEQ ID NO: 2178604 - DNA, 25 bp, Homo sapien
catgcagcagtgtagtacaggactc

SEQ ID NO: 2178605 - DNA, 25 bp, Homo sapien
agttctggacatgggggttgcccca

SEQ ID NO: 2178606 - DNA, 25 bp, Homo sapien
tttgtactcaagttctggacatggg

SEQ ID NO: 2178607 - DNA, 25 bp, Homo sapien
cacttggttttctattttgtactca

SEQ ID NO: 2178608 - DNA, 25 bp, Homo sapien
tttctattttgtactcaagttctgg

SEQ ID NO: 2178609 - DNA, 25 bp, Homo sapien
gagatgctcaaactccttggatgct

SEQ ID NO: 2178610 - DNA, 25 bp, Homo sapien
cagagatgctcaaactccttggatg

SEQ ID NO: 2178611 - DNA, 25 bp, Homo sapien
tggatgggtcccgaccaaagtccag

SEQ ID NO: 2178612 - DNA, 25 bp, Homo sapien
acccagagatgctcaaactccttgg

SEQ ID NO: 2178613 - DNA, 25 bp, Homo sapien
ggcatttggcaacggccttctctcc

SEQ ID NO: 2178614 - DNA, 25 bp, Homo sapien
tcaggaaattggtggctcagatcaa

SEQ ID NO: 2178615 - DNA, 25 bp, Homo sapien
aaattggtggctcagatcaagaagc

SEQ ID NO: 2178616 - DNA, 25 bp, Homo sapien
caagcgagacgatgctcagtgggtt

SEQ ID NO: 2178617 - DNA, 25 bp, Homo sapien
ggaccgggaacattcacgctattta

SEQ ID NO: 2178618 - DNA, 25 bp, Homo sapien
gctcactggtagcttatgcttgcaa

SEQ ID NO: 2178619 - DNA, 25 bp, Homo sapien
tcacagcctgaaacaagctcactgg

SEQ ID NO: 2178620 - DNA, 25 bp, Homo sapien
tattcgggagtactctggataaatc

SEQ ID NO: 2178621 - DNA, 25 bp, Homo sapien
gctaggtcaggtatctggaatcttc

SEQ ID NO: 2178622 - DNA, 25 bp, Homo sapien
tcgggttccggctgagaagaacacc

SEQ ID NO: 2178623 - DNA, 25 bp, Homo sapien
cacatcgggttccggctgagaagaa

SEQ ID NO: 2178624 - DNA, 25 bp, Homo sapien
catcgggttccggctgagaagaaca

SEQ ID NO: 2178625 - DNA, 25 bp, Homo sapien
cgggttccggctgagaagaacacca

SEQ ID NO: 2178626 - DNA, 25 bp, Homo sapien
gctaggtcaggtatctggaatcttc

SEQ ID NO: 2178627 - DNA, 25 bp, Homo sapien
caagctcactggtagcttatgcttg

SEQ ID NO: 2178628 - DNA, 25 bp, Homo sapien
tcacgctatttattcgggagtactc

SEQ ID NO: 2178629 - DNA, 25 bp, Homo sapien
tcacagcctgaaacaagctcactgg

SEQ ID NO: 2178630 - DNA, 25 bp, Homo sapien
actccagaaagtacaccaagcttgt

SEQ ID NO: 2178631 - DNA, 25 bp, Homo sapien
gagcgtattggatggaaggaacttc

SEQ ID NO: 2178632 - DNA, 25 bp, Homo sapien
cgtgaatgcgatcattgaactccag

SEQ ID NO: 2178633 - DNA, 25 bp, Homo sapien
gtacaccaagcttgtactgctcggg

SEQ ID NO: 2178634 - DNA, 25 bp, Homo sapien
cacatcgggttccggctgagaagaa

SEQ ID NO: 2178635 - DNA, 25 bp, Homo sapien
tcgggttccggctgagaagaacacc

SEQ ID NO: 2178636 - DNA, 25 bp, Homo sapien
cgggttccggctgagaagaacacca

SEQ ID NO: 2178637 - DNA, 25 bp, Homo sapien
catcgggttccggctgagaagaaca

SEQ ID NO: 2178638 - DNA, 25 bp, Homo sapien
tatttattcgggagtactctggata

SEQ ID NO: 2178639 - DNA, 25 bp, Homo sapien
gctaggtcaggtatctggaatcttc

SEQ ID NO: 2178640 - DNA, 25 bp, Homo sapien
tcacgctatttattcgggagtactc

SEQ ID NO: 2178641 - DNA, 25 bp, Homo sapien
tattcgggagtactctggataaatc

SEQ ID NO: 2178642 - DNA, 25 bp, Homo sapien
tggaacaggccaacgagagaacatg

SEQ ID NO: 2178643 - DNA, 25 bp, Homo sapien
ggttctgcccaagggttggactcca

SEQ ID NO: 2178644 - DNA, 25 bp, Homo sapien
taatcgaatagtgctggaggaatcc

SEQ ID NO: 2178645 - DNA, 25 bp, Homo sapien
tgtgctgcaacatgaagagggatct

SEQ ID NO: 2178646 - DNA, 25 bp, Homo sapien
gagtttcgagtgtcaggctgcacac

SEQ ID NO: 2178647 - DNA, 25 bp, Homo sapien
gatgaatgagtttcgagtgtcaggc

SEQ ID NO: 2178648 - DNA, 25 bp, Homo sapien
tgagtttcgagtgtcaggctgcaca

SEQ ID NO: 2178649 - DNA, 25 bp, Homo sapien
gaagatgaatgagtttcgagtgtca

SEQ ID NO: 2178650 - DNA, 25 bp, Homo sapien
caagctcactggtagcttatgcttg

SEQ ID NO: 2178651 - DNA, 25 bp, Homo sapien
tcacagcctgaaacaagctcactgg

SEQ ID NO: 2178652 - DNA, 25 bp, Homo sapien
tcacgctatttattcgggagtactc

SEQ ID NO: 2178653 - DNA, 25 bp, Homo sapien
tattcgggagtactctggataaatc

SEQ ID NO: 2178654 - DNA, 25 bp, Homo sapien
gagtttcgagtgtcaggctgcacac

SEQ ID NO: 2178655 - DNA, 25 bp, Homo sapien
gatgaatgagtttcgagtgtcaggc

SEQ ID NO: 2178656 - DNA, 25 bp, Homo sapien
tgagtttcgagtgtcaggctgcaca

SEQ ID NO: 2178657 - DNA, 25 bp, Homo sapien
gaagatgaatgagtttcgagtgtca

SEQ ID NO: 2178658 - DNA, 25 bp, Homo sapien
gagaagaacaccattgcttccagct

SEQ ID NO: 2178659 - DNA, 25 bp, Homo sapien
tccagctgtccttatccattgtcac

SEQ ID NO: 2178660 - DNA, 25 bp, Homo sapien
tatccattgtcacagcctgagtcat

SEQ ID NO: 2178661 - DNA, 25 bp, Homo sapien
cttatccattgtcacagcctgagtc

SEQ ID NO: 2178662 - DNA, 25 bp, Homo sapien
ttgtgcttgtgctgtgtccctccag

SEQ ID NO: 2178663 - DNA, 25 bp, Homo sapien
tcctatgccgtcattgctaaagtcc

SEQ ID NO: 2178664 - DNA, 25 bp, Homo sapien
gccacaagagtcctggtgctcaagt

SEQ ID NO: 2178665 - DNA, 25 bp, Homo sapien
cacggcttctgaacgccatgggcat

SEQ ID NO: 2178666 - DNA, 25 bp, Homo sapien
tcgagtgcagaagagggacttaagg

SEQ ID NO: 2178667 - DNA, 25 bp, Homo sapien
ctcgagtgcagaagagggacttaag

SEQ ID NO: 2178668 - DNA, 25 bp, Homo sapien
cgagtgcagaagagggacttaagga

SEQ ID NO: 2178669 - DNA, 25 bp, Homo sapien
tctgtggggtgcctgcacaattagg

SEQ ID NO: 2178670 - DNA, 25 bp, Homo sapien
ggtgcctgcacaattaggggcagag

SEQ ID NO: 2178671 - DNA, 25 bp, Homo sapien
tgcctgcacaattaggggcagagtc

SEQ ID NO: 2178672 - DNA, 25 bp, Homo sapien
cctgcacaattaggggcagagtcag

SEQ ID NO: 2178673 - DNA, 25 bp, Homo sapien
gggcgttttgccatgaaatggttta

SEQ ID NO: 2178674 - DNA, 25 bp, Homo sapien
gcgttttgccatgaaatggtttact

SEQ ID NO: 2178675 - DNA, 25 bp, Homo sapien
ggcgttttgccatgaaatggtttac

SEQ ID NO: 2178676 - DNA, 25 bp, Homo sapien
ttgggcgttttgccatgaaatggtt

SEQ ID NO: 2178677 - DNA, 25 bp, Homo sapien
tgctgaattgtttaaccacgaaatg

SEQ ID NO: 2178678 - DNA, 25 bp, Homo sapien
ggcttattagcaaagcgtactcttt

SEQ ID NO: 2178679 - DNA, 25 bp, Homo sapien
gaaatgtgtttgtcctgcaggctta

SEQ ID NO: 2178680 - DNA, 25 bp, Homo sapien
caccagtcaagcttgcaagagcaac

SEQ ID NO: 2178681 - DNA, 25 bp, Homo sapien
gcaagaaagatggttacagatgggt

SEQ ID NO: 2178682 - DNA, 25 bp, Homo sapien
gtagcgatggatggaatcagtcgat

SEQ ID NO: 2178683 - DNA, 25 bp, Homo sapien
tggcagatgggtagcgatggatgga

SEQ ID NO: 2178684 - DNA, 25 bp, Homo sapien
agtcgatggatagtaagaataggtc

SEQ ID NO: 2178685 - DNA, 25 bp, Homo sapien
agtagaccactgagacgtctcccca

SEQ ID NO: 2178686 - DNA, 25 bp, Homo sapien
tctctccgtagtttggttcccatca

SEQ ID NO: 2178687 - DNA, 25 bp, Homo sapien
tgtcatggccgctctcttaaagcag

SEQ ID NO: 2178688 - DNA, 25 bp, Homo sapien
gggactaactctgggcattctgtct

SEQ ID NO: 2178689 - DNA, 25 bp, Homo sapien
aaaggctgggtttgggatgtgatgg

SEQ ID NO: 2178690 - DNA, 25 bp, Homo sapien
cgaggttcccgtcccctcgaggcag

SEQ ID NO: 2178691 - DNA, 25 bp, Homo sapien
ggcagtcgtggaaaggctgggtttg

SEQ ID NO: 2178692 - DNA, 25 bp, Homo sapien
tttgggatgtgatgggggtagccct

SEQ ID NO: 2178693 - DNA, 25 bp, Homo sapien
cggctcggggcgcccgaacgctcca

SEQ ID NO: 2178694 - DNA, 25 bp, Homo sapien
ggctcggggcgcccgaacgctccac

SEQ ID NO: 2178695 - DNA, 25 bp, Homo sapien
gaactcctgtaggtgcaggtcgcca

SEQ ID NO: 2178696 - DNA, 25 bp, Homo sapien
gtgcccctttgtctgccgattcagg

SEQ ID NO: 2178697 - DNA, 25 bp, Homo sapien
aggagcctgaacaataccccgaggt

SEQ ID NO: 2178698 - DNA, 25 bp, Homo sapien
agcgctcggcttttcctccggtgcc

SEQ ID NO: 2178699 - DNA, 25 bp, Homo sapien
agtatggggagtgcgccttcgggag

SEQ ID NO: 2178700 - DNA, 25 bp, Homo sapien
ttccctaacgatgggaccggtgctc

SEQ ID NO: 2178701 - DNA, 25 bp, Homo sapien
ggagtcggcgctggccggatatgtg

SEQ ID NO: 2178702 - DNA, 25 bp, Homo sapien
accggtgctcggagtggagtatggg

SEQ ID NO: 2178703 - DNA, 25 bp, Homo sapien
gaaacatcgcccagtccctggttta

SEQ ID NO: 2178704 - DNA, 25 bp, Homo sapien
ctgaaacatcgcccagtccctggtt

SEQ ID NO: 2178705 - DNA, 25 bp, Homo sapien
tctcctgaaacatcgcccagtccct

SEQ ID NO: 2178706 - DNA, 25 bp, Homo sapien
tcctctcctgaaacatcgcccagtc

SEQ ID NO: 2178707 - DNA, 25 bp, Homo sapien
taactttattgtagacatacttaga

SEQ ID NO: 2178708 - DNA, 25 bp, Homo sapien
tctctgtcagtggttttaaagagga

SEQ ID NO: 2178709 - DNA, 25 bp, Homo sapien
aattatatcagtaccactggttctg

SEQ ID NO: 2178710 - DNA, 25 bp, Homo sapien
tgtagacatacttagaagtgaatgt

SEQ ID NO: 2178711 - DNA, 25 bp, Homo sapien
cacagcgagtcagaaggcgctttgt

SEQ ID NO: 2178712 - DNA, 25 bp, Homo sapien
gttcagaaacccacagcgagtcaga

SEQ ID NO: 2178713 - DNA, 25 bp, Homo sapien
tgctgggcgcctctgagtgattccg

SEQ ID NO: 2178714 - DNA, 25 bp, Homo sapien
attccggggagtgcggcagttctcc

SEQ ID NO: 2178715 - DNA, 25 bp, Homo sapien
ttatgaccccagatagcctgcacag

SEQ ID NO: 2178716 - DNA, 25 bp, Homo sapien
tttcctatcgtggtggatgtagccg

SEQ ID NO: 2178717 - DNA, 25 bp, Homo sapien
aaaacatgagagttttttctgcctg

SEQ ID NO: 2178718 - DNA, 25 bp, Homo sapien
cccttgagcctggaaccgattatga

SEQ ID NO: 2178719 - DNA, 25 bp, Homo sapien
ccttcgggtctgttgaaactgcatc

SEQ ID NO: 2178720 - DNA, 25 bp, Homo sapien
ggcatgtgtcccctttaggcttgac

SEQ ID NO: 2178721 - DNA, 25 bp, Homo sapien
ccatcatgtcggagcaagaagagaa

SEQ ID NO: 2178722 - DNA, 25 bp, Homo sapien
ccagcaccatcatgtcggagcaaga

SEQ ID NO: 2178723 - DNA, 25 bp, Homo sapien
agtgctgcgagcatttttgcttgtc

SEQ ID NO: 2178724 - DNA, 25 bp, Homo sapien
ctgcctgttgttaggatttagagtc

SEQ ID NO: 2178725 - DNA, 25 bp, Homo sapien
gcagtattgttcagtgctgcgagca

SEQ ID NO: 2178726 - DNA, 25 bp, Homo sapien
gatttagagtccatgtgaatgtgca

SEQ ID NO: 2178727 - DNA, 25 bp, Homo sapien
ctgatagaagggaatttggacaaaa

SEQ ID NO: 2178728 - DNA, 25 bp, Homo sapien
tgatagaagggaatttggacaaaaa

SEQ ID NO: 2178729 - DNA, 25 bp, Homo sapien
ggacaaaaagaagcttattgtacat

SEQ ID NO: 2178730 - DNA, 25 bp, Homo sapien
tttggacaaaaagaagcttattgta

SEQ ID NO: 2178731 - DNA, 25 bp, Homo sapien
gagaactgtcgccaaagtctgccat

SEQ ID NO: 2178732 - DNA, 25 bp, Homo sapien
tgagaaatgaagttgagtggagaac

SEQ ID NO: 2178733 - DNA, 25 bp, Homo sapien
catctatgtgaagatgagaaatgaa

SEQ ID NO: 2178734 - DNA, 25 bp, Homo sapien
tgaagttgagtggagaactgtcgcc

SEQ ID NO: 2178735 - DNA, 25 bp, Homo sapien
gtaaaaatcggtagtgccaatgtgc

SEQ ID NO: 2178736 - DNA, 25 bp, Homo sapien
caatgtgcaaaggtaattcccaggt

SEQ ID NO: 2178737 - DNA, 25 bp, Homo sapien
taaaaatcggtagtgccaatgtgca

SEQ ID NO: 2178738 - DNA, 25 bp, Homo sapien
gtgccaatgtgcaaaggtaattccc

SEQ ID NO: 2178739 - DNA, 25 bp, Homo sapien
aattcccaatttgattatgaagaaa

SEQ ID NO: 2178740 - DNA, 25 bp, Homo sapien
agaaaataccagattcagcttgcat

SEQ ID NO: 2178741 - DNA, 25 bp, Homo sapien
tggtttaattcccaatttgattatg

SEQ ID NO: 2178742 - DNA, 25 bp, Homo sapien
ttcccaatttgattatgaagaaaat

SEQ ID NO: 2178743 - DNA, 25 bp, Homo sapien
tcaggagaagtcgtggaacagattc

SEQ ID NO: 2178744 - DNA, 25 bp, Homo sapien
ttgtccctgagtgcattctgcaggt

SEQ ID NO: 2178745 - DNA, 25 bp, Homo sapien
ttcttcactcaggagaagtcgtgga

SEQ ID NO: 2178746 - DNA, 25 bp, Homo sapien
attctgcaggtacctccggtcaccg

SEQ ID NO: 2178747 - DNA, 25 bp, Homo sapien
tggaggattccaggctctgtaagga

SEQ ID NO: 2178748 - DNA, 25 bp, Homo sapien
gattccaggctctgtaaggaggctt

SEQ ID NO: 2178749 - DNA, 25 bp, Homo sapien
aggattccaggctctgtaaggaggc

SEQ ID NO: 2178750 - DNA, 25 bp, Homo sapien
caggctctgtaaggaggcttatctc

SEQ ID NO: 2178751 - DNA, 25 bp, Homo sapien
tcagctggtgtgagcgttttgtgga

SEQ ID NO: 2178752 - DNA, 25 bp, Homo sapien
tgcggtgtttgtgacttgtgccaga

SEQ ID NO: 2178753 - DNA, 25 bp, Homo sapien
gtctgcggtgtttgtgacttgtgcc

SEQ ID NO: 2178754 - DNA, 25 bp, Homo sapien
ggaggtctgcggtgtttgtgacttg

SEQ ID NO: 2178755 - DNA, 25 bp, Homo sapien
tgtaccaagacgttttgttgattga

SEQ ID NO: 2178756 - DNA, 25 bp, Homo sapien
tgttgattgattcatggcacggtga

SEQ ID NO: 2178757 - DNA, 25 bp, Homo sapien
cctttctgttcggtatgcctctgta

SEQ ID NO: 2178758 - DNA, 25 bp, Homo sapien
ctagaggcaacataagaaggaatca

SEQ ID NO: 2178759 - DNA, 25 bp, Homo sapien
tgttttcccacttgctatgctgtgc

SEQ ID NO: 2178760 - DNA, 25 bp, Homo sapien
tctaggaactctttatgctcaatgg

SEQ ID NO: 2178761 - DNA, 25 bp, Homo sapien
tctcaattccacttgccagaatgct

SEQ ID NO: 2178762 - DNA, 25 bp, Homo sapien
gcttcttatcagtgccatagggcag

SEQ ID NO: 2178763 - DNA, 25 bp, Homo sapien
tagcaaccaggtagttaagctcagg

SEQ ID NO: 2178764 - DNA, 25 bp, Homo sapien
taaacttgaaagctacattggccac

SEQ ID NO: 2178765 - DNA, 25 bp, Homo sapien
caaatacggtggtgtcattagcaac

SEQ ID NO: 2178766 - DNA, 25 bp, Homo sapien
agcaattagcaaaaggaaccctgac

SEQ ID NO: 2178767 - DNA, 25 bp, Homo sapien
gatcgagattagcgtgttcctccct

SEQ ID NO: 2178768 - DNA, 25 bp, Homo sapien
agatcgagattagcgtgttcctccc

SEQ ID NO: 2178769 - DNA, 25 bp, Homo sapien
gagatcgagattagcgtgttcctcc

SEQ ID NO: 2178770 - DNA, 25 bp, Homo sapien
ttgcacagtgctgagatctgagccc

SEQ ID NO: 2178771 - DNA, 25 bp, Homo sapien
tcttcgcgagtatctgacaagtctg

SEQ ID NO: 2178772 - DNA, 25 bp, Homo sapien
cagttaggttttgcgtgctgtccgc

SEQ ID NO: 2178773 - DNA, 25 bp, Homo sapien
gatccagctcttgccttcttcgcga

SEQ ID NO: 2178774 - DNA, 25 bp, Homo sapien
ttgcagttcagggagctaaggccaa

SEQ ID NO: 2178775 - DNA, 25 bp, Homo sapien
tgttgcagttcagggagctaaggcc

SEQ ID NO: 2178776 - DNA, 25 bp, Homo sapien
ggagctaaggccaaaggctactgca

SEQ ID NO: 2178777 - DNA, 25 bp, Homo sapien
aaggccaaaggctactgcagtggtg

SEQ ID NO: 2178778 - DNA, 25 bp, Homo sapien
cctgggctgagtcttgccacctgca

SEQ ID NO: 2178779 - DNA, 25 bp, Homo sapien
agggactttgagctttggaatgccc

SEQ ID NO: 2178780 - DNA, 25 bp, Homo sapien
gccacctgcaggtttgtgaacctca

SEQ ID NO: 2178781 - DNA, 25 bp, Homo sapien
tgacaaggaagggactttgagcttt

SEQ ID NO: 2178782 - DNA, 25 bp, Homo sapien
cagggaaagattgagttccgtgtca

SEQ ID NO: 2178783 - DNA, 25 bp, Homo sapien
ttccgtgtcaggttggagttgctga

SEQ ID NO: 2178784 - DNA, 25 bp, Homo sapien
gcgactgactatacggcttcctagc

SEQ ID NO: 2178785 - DNA, 25 bp, Homo sapien
tatttgaaaaaccagcgtggtcttc

SEQ ID NO: 2178786 - DNA, 25 bp, Homo sapien
gatttcctttcggagcatttaggga

SEQ ID NO: 2178787 - DNA, 25 bp, Homo sapien
taagtcattggaacgactgtcccct

SEQ ID NO: 2178788 - DNA, 25 bp, Homo sapien
ggaagcccatcgttttaagtcattg

SEQ ID NO: 2178789 - DNA, 25 bp, Homo sapien
cttggtgcaattgggtaaccagtct

SEQ ID NO: 2178790 - DNA, 25 bp, Homo sapien
tgcttctccaaatgccggaagggtt

SEQ ID NO: 2178791 - DNA, 25 bp, Homo sapien
gcactactcagtcaggattctgcag

SEQ ID NO: 2178792 - DNA, 25 bp, Homo sapien
tgggtagaagccacgagctgaagat

SEQ ID NO: 2178793 - DNA, 25 bp, Homo sapien
aaagccgtgtgcttttcagggcacc

SEQ ID NO: 2178794 - DNA, 25 bp, Homo sapien
ctgacccaggctttcagattgtaca

SEQ ID NO: 2178795 - DNA, 25 bp, Homo sapien
cagaggtggtgggtccggtagatgc

SEQ ID NO: 2178796 - DNA, 25 bp, Homo sapien
tccggtagatgcaggaactgaccca

SEQ ID NO: 2178797 - DNA, 25 bp, Homo sapien
gatgactaatgtgaaggtcttggtg

SEQ ID NO: 2178798 - DNA, 25 bp, Homo sapien
tggggagcagagagtgcgtgcttgg

SEQ ID NO: 2178799 - DNA, 25 bp, Homo sapien
gcagagagtgcgtgcttgggggtgg

SEQ ID NO: 2178800 - DNA, 25 bp, Homo sapien
ggggagcagagagtgcgtgcttggg

SEQ ID NO: 2178801 - DNA, 25 bp, Homo sapien
ggagcagagagtgcgtgcttggggg

SEQ ID NO: 2178802 - DNA, 25 bp, Homo sapien
ccatccccagcgactctgttgacat

SEQ ID NO: 2178803 - DNA, 25 bp, Homo sapien
tccatccccagcgactctgttgaca

SEQ ID NO: 2178804 - DNA, 25 bp, Homo sapien
ctccatccccagcgactctgttgac

SEQ ID NO: 2178805 - DNA, 25 bp, Homo sapien
ctgttgttggctgttctggaaacca

SEQ ID NO: 2178806 - DNA, 25 bp, Homo sapien
gctccttcgaaaggggaagcagctg

SEQ ID NO: 2178807 - DNA, 25 bp, Homo sapien
tcaagttacgagaaatggagaccag

SEQ ID NO: 2178808 - DNA, 25 bp, Homo sapien
ggagaccaggacactacctctgctg

SEQ ID NO: 2178809 - DNA, 25 bp, Homo sapien
ccagcatgatcaagttacgagaaat

SEQ ID NO: 2178810 - DNA, 25 bp, Homo sapien
gcttgtaaaactgctatcccatctc

SEQ ID NO: 2178811 - DNA, 25 bp, Homo sapien
cctcgcttgtaaaactgctatccca

SEQ ID NO: 2178812 - DNA, 25 bp, Homo sapien
catctcttgctcaatgcttttcttg

SEQ ID NO: 2178813 - DNA, 25 bp, Homo sapien
ctcttgctcaatgcttttcttgtac

SEQ ID NO: 2178814 - DNA, 25 bp, Homo sapien
ttgagggtgccttgtgtccagagcc

SEQ ID NO: 2178815 - DNA, 25 bp, Homo sapien
tctgatgagcctgaagtctgcatgc

SEQ ID NO: 2178816 - DNA, 25 bp, Homo sapien
aaggtgtttccgttctctgatgagc

SEQ ID NO: 2178817 - DNA, 25 bp, Homo sapien
ggaaaggttgcatggcccagtgcca

SEQ ID NO: 2178818 - DNA, 25 bp, Homo sapien
ctgtgagcaaggcagggtgggcgtt

SEQ ID NO: 2178819 - DNA, 25 bp, Homo sapien
gtgagcaaggcagggtgggcgttac

SEQ ID NO: 2178820 - DNA, 25 bp, Homo sapien
tgtgagcaaggcagggtgggcgtta

SEQ ID NO: 2178821 - DNA, 25 bp, Homo sapien
cctgtgagcaaggcagggtgggcgt

SEQ ID NO: 2178822 - DNA, 25 bp, Homo sapien
ccaacaaggacagaacagcttgaga

SEQ ID NO: 2178823 - DNA, 25 bp, Homo sapien
accaacaaggacagaacagcttgag

SEQ ID NO: 2178824 - DNA, 25 bp, Homo sapien
catccctctggaccaacaaggacag

SEQ ID NO: 2178825 - DNA, 25 bp, Homo sapien
ttccccatggctgcggaggcataga

SEQ ID NO: 2178826 - DNA, 25 bp, Homo sapien
gacgtgaatccgtgtgctgggattc

SEQ ID NO: 2178827 - DNA, 25 bp, Homo sapien
aaagtgagggcacgggacgtgaatc

SEQ ID NO: 2178828 - DNA, 25 bp, Homo sapien
gctgggattctggccgcctgtgcct

SEQ ID NO: 2178829 - DNA, 25 bp, Homo sapien
tcagagtgtggcccttcgtcttggg

SEQ ID NO: 2178830 - DNA, 25 bp, Homo sapien
gggtgtgcaagtgaccgctcctgcc

SEQ ID NO: 2178831 - DNA, 25 bp, Homo sapien
ctgccccttgatggctctcctgttt

SEQ ID NO: 2178832 - DNA, 25 bp, Homo sapien
ctcctgtttcgggtataagggatgt

SEQ ID NO: 2178833 - DNA, 25 bp, Homo sapien
gactcaaaagaaagggcgcttgttc

SEQ ID NO: 2178834 - DNA, 25 bp, Homo sapien
cagaaagttgttctcgctgtacaga

SEQ ID NO: 2178835 - DNA, 25 bp, Homo sapien
ttcgtaggtttaatgactcaaaaga

SEQ ID NO: 2178836 - DNA, 25 bp, Homo sapien
tggaatggagtttcgttatacagaa

SEQ ID NO: 2178837 - DNA, 25 bp, Homo sapien
cagagtcatccagagcatcgagcat

SEQ ID NO: 2178838 - DNA, 25 bp, Homo sapien
actctgctggctccagagtcatcca

SEQ ID NO: 2178839 - DNA, 25 bp, Homo sapien
tggctccagagtcatccagagcatc

SEQ ID NO: 2178840 - DNA, 25 bp, Homo sapien
tccagagtcatccagagcatcgagc

SEQ ID NO: 2178841 - DNA, 25 bp, Homo sapien
agggcactcatggagccagcgtgca

SEQ ID NO: 2178842 - DNA, 25 bp, Homo sapien
agagtgaaattggcccgttgaggaa

SEQ ID NO: 2178843 - DNA, 25 bp, Homo sapien
agcgtgcaccgccactgcagctgtt

SEQ ID NO: 2178844 - DNA, 25 bp, Homo sapien
atggagccagcgtgcaccgccactg

SEQ ID NO: 2178845 - DNA, 25 bp, Homo sapien
tccttctggtcggatggcagggcgg

SEQ ID NO: 2178846 - DNA, 25 bp, Homo sapien
cctgagcaggttgccctccttctgg

SEQ ID NO: 2178847 - DNA, 25 bp, Homo sapien
aggcaccgagcgctggaggcctcat

SEQ ID NO: 2178848 - DNA, 25 bp, Homo sapien
aaacccatctgtgtcgggagtgaga

SEQ ID NO: 2178849 - DNA, 25 bp, Homo sapien
gagtactggcaagttgccgcatgga

SEQ ID NO: 2178850 - DNA, 25 bp, Homo sapien
caagttgccgcatggactgagcctt

SEQ ID NO: 2178851 - DNA, 25 bp, Homo sapien
catggactgagccttccgatcggag

SEQ ID NO: 2178852 - DNA, 25 bp, Homo sapien
tccgatcggagtttgctgtcttgct

SEQ ID NO: 2178853 - DNA, 25 bp, Homo sapien
cagagccaggaatgagggttggatc

SEQ ID NO: 2178854 - DNA, 25 bp, Homo sapien
cagggacgacccaggacagatccca

SEQ ID NO: 2178855 - DNA, 25 bp, Homo sapien
ccagagccaggaatgagggttggat

SEQ ID NO: 2178856 - DNA, 25 bp, Homo sapien
agggacgacccaggacagatcccag

SEQ ID NO: 2178857 - DNA, 25 bp, Homo sapien
ctccctccacccttgggatcctggt

SEQ ID NO: 2178858 - DNA, 25 bp, Homo sapien
ctggatctcctctccctcgtcgggc

SEQ ID NO: 2178859 - DNA, 25 bp, Homo sapien
tccctccacccttgggatcctggtc

SEQ ID NO: 2178860 - DNA, 25 bp, Homo sapien
atctcctctccctcgtcgggcccac

SEQ ID NO: 2178861 - DNA, 25 bp, Homo sapien
gctgcactggtgatgcccgatgtag

SEQ ID NO: 2178862 - DNA, 25 bp, Homo sapien
cttgcgctgcactggtgatgcccga

SEQ ID NO: 2178863 - DNA, 25 bp, Homo sapien
ccagcccttgcgctgcactggtgat

SEQ ID NO: 2178864 - DNA, 25 bp, Homo sapien
gtagctgaaactctgccccgctcgg

SEQ ID NO: 2178865 - DNA, 25 bp, Homo sapien
ctttcatctcctttctgaaatgctg

SEQ ID NO: 2178866 - DNA, 25 bp, Homo sapien
catctcctttctgaaatgctgtgag

SEQ ID NO: 2178867 - DNA, 25 bp, Homo sapien
tttcatctcctttctgaaatgctgt

SEQ ID NO: 2178868 - DNA, 25 bp, Homo sapien
ctcctttctgaaatgctgtgagcat

SEQ ID NO: 2178869 - DNA, 25 bp, Homo sapien
cctgagacctgaggcttggatggca

SEQ ID NO: 2178870 - DNA, 25 bp, Homo sapien
tagcattggagttgccgctctcacc

SEQ ID NO: 2178871 - DNA, 25 bp, Homo sapien
ccaggtacgtgtctgagttctagca

SEQ ID NO: 2178872 - DNA, 25 bp, Homo sapien
tccagctgagatgggcaaccaaaat

SEQ ID NO: 2178873 - DNA, 25 bp, Homo sapien
tcttttgtagtcttcattttaagca

SEQ ID NO: 2178874 - DNA, 25 bp, Homo sapien
taatgtcaactccagttctttcttt

SEQ ID NO: 2178875 - DNA, 25 bp, Homo sapien
ccagttctttcttttgtagtcttca

SEQ ID NO: 2178876 - DNA, 25 bp, Homo sapien
ctaatgtcaactccagttctttctt

SEQ ID NO: 2178877 - DNA, 25 bp, Homo sapien
caaattgtaaggcagagcgttggct

SEQ ID NO: 2178878 - DNA, 25 bp, Homo sapien
gagtttgtaaccctccgtgcagcct

SEQ ID NO: 2178879 - DNA, 25 bp, Homo sapien
ggtcagcggccccaaaatggagaga

SEQ ID NO: 2178880 - DNA, 25 bp, Homo sapien
acaagctgcctttcgatcgcctggg

SEQ ID NO: 2178881 - DNA, 25 bp, Homo sapien
ctggcaatgtagtaaaaggtctcct

SEQ ID NO: 2178882 - DNA, 25 bp, Homo sapien
tccttgtctttgagatgtcgggacg

SEQ ID NO: 2178883 - DNA, 25 bp, Homo sapien
taacacgaagcatgacacgtgtcgc

SEQ ID NO: 2178884 - DNA, 25 bp, Homo sapien
tggattccaatctccctggcaatgt

SEQ ID NO: 2178885 - DNA, 25 bp, Homo sapien
ggaatgccagtcccgctctttcctg

SEQ ID NO: 2178886 - DNA, 25 bp, Homo sapien
agtgtggaatacttcgggatcgctg

SEQ ID NO: 2178887 - DNA, 25 bp, Homo sapien
cgggatcgctgatcgccggttgtat

SEQ ID NO: 2178888 - DNA, 25 bp, Homo sapien
gctctagtatgtcctcatgagcagg

SEQ ID NO: 2178889 - DNA, 25 bp, Homo sapien
tgtgtagaggaatgctcagtctgca

SEQ ID NO: 2178890 - DNA, 25 bp, Homo sapien
cagggctctggcatgcgcttgttgt

SEQ ID NO: 2178891 - DNA, 25 bp, Homo sapien
gataaaggcagaacgatgccaggca

SEQ ID NO: 2178892 - DNA, 25 bp, Homo sapien
tcattgggcaaatgcttggtaggga

SEQ ID NO: 2178893 - DNA, 25 bp, Homo sapien
ttttatgaccggatgctgggaagcc

SEQ ID NO: 2178894 - DNA, 25 bp, Homo sapien
ccataaggtaagcagcccagcatgc

SEQ ID NO: 2178895 - DNA, 25 bp, Homo sapien
tgcagacggcttcccatttttatga

SEQ ID NO: 2178896 - DNA, 25 bp, Homo sapien
ggtccatacatgaagtcaccataag

SEQ ID NO: 2178897 - DNA, 25 bp, Homo sapien
tctcaggcaggaagattccaagccg

SEQ ID NO: 2178898 - DNA, 25 bp, Homo sapien
gcaggaagattccaagccgagaagg

SEQ ID NO: 2178899 - DNA, 25 bp, Homo sapien
tcaggggcgttcactgttgaagttc

SEQ ID NO: 2178900 - DNA, 25 bp, Homo sapien
ccaagccgagaagggactaggcagt

SEQ ID NO: 2178901 - DNA, 25 bp, Homo sapien
ctctgaaatcttgggcacgtgcatc

SEQ ID NO: 2178902 - DNA, 25 bp, Homo sapien
tcttgggcacgtgcatctgtgttga

SEQ ID NO: 2178903 - DNA, 25 bp, Homo sapien
gctccgtggaagcagtagcatcagt

SEQ ID NO: 2178904 - DNA, 25 bp, Homo sapien
agtctgctctgaaatcttgggcacg

SEQ ID NO: 2178905 - DNA, 25 bp, Homo sapien
tctgccgttgacgtgcatgtgggct

SEQ ID NO: 2178906 - DNA, 25 bp, Homo sapien
gcattgtccggctcatgtgatgtgg

SEQ ID NO: 2178907 - DNA, 25 bp, Homo sapien
taggtggagcattttcaagagggct

SEQ ID NO: 2178908 - DNA, 25 bp, Homo sapien
tcctgtcaccatagcatctgccgtt

SEQ ID NO: 2178909 - DNA, 25 bp, Homo sapien
tgatagctagcatacaatccatgcc

SEQ ID NO: 2178910 - DNA, 25 bp, Homo sapien
gctagcatacaatccatgccgtgta

SEQ ID NO: 2178911 - DNA, 25 bp, Homo sapien
atccatgccgtgtattggtttctaa

SEQ ID NO: 2178912 - DNA, 25 bp, Homo sapien
gcatacaatccatgccgtgtattgg

SEQ ID NO: 2178913 - DNA, 25 bp, Homo sapien
tagagataagcgcagctaaacgccg

SEQ ID NO: 2178914 - DNA, 25 bp, Homo sapien
tgagccacttagagataagcgcagc

SEQ ID NO: 2178915 - DNA, 25 bp, Homo sapien
ataagcgcagctaaacgccgggaca

SEQ ID NO: 2178916 - DNA, 25 bp, Homo sapien
cacttagagataagcgcagctaaac

SEQ ID NO: 2178917 - DNA, 25 bp, Homo sapien
caagccattttttcagtccattctt

SEQ ID NO: 2178918 - DNA, 25 bp, Homo sapien
tgcccggcccaagccattttttcag

SEQ ID NO: 2178919 - DNA, 25 bp, Homo sapien
gcccaagccattttttcagtccatt

SEQ ID NO: 2178920 - DNA, 25 bp, Homo sapien
cggcccaagccattttttcagtcca

SEQ ID NO: 2178921 - DNA, 25 bp, Homo sapien
gcccctgaacgttttcctgcccatc

SEQ ID NO: 2178922 - DNA, 25 bp, Homo sapien
acagaagcccctgaacgttttcctg

SEQ ID NO: 2178923 - DNA, 25 bp, Homo sapien
agcccctgaacgttttcctgcccat

SEQ ID NO: 2178924 - DNA, 25 bp, Homo sapien
cagaagcccctgaacgttttcctgc

SEQ ID NO: 2178925 - DNA, 25 bp, Homo sapien
ttagccagacggatgcagcggattc

SEQ ID NO: 2178926 - DNA, 25 bp, Homo sapien
gacatgtagcatgaccgagctcgct

SEQ ID NO: 2178927 - DNA, 25 bp, Homo sapien
ggtactgcggttcctcatgtggcca

SEQ ID NO: 2178928 - DNA, 25 bp, Homo sapien
tcaacgtttgcgagggagaggtact

SEQ ID NO: 2178929 - DNA, 25 bp, Homo sapien
cacgtgctccggtaacctggagaca

SEQ ID NO: 2178930 - DNA, 25 bp, Homo sapien
gggccacggagcatgagctttgctg

SEQ ID NO: 2178931 - DNA, 25 bp, Homo sapien
gctggcttcttgaaataaacacaga

SEQ ID NO: 2178932 - DNA, 25 bp, Homo sapien
tggaactgtccggtgtgaaggacca

SEQ ID NO: 2178933 - DNA, 25 bp, Homo sapien
ataccaatacctgttagtttacgag

SEQ ID NO: 2178934 - DNA, 25 bp, Homo sapien
tcttagttctttgctcgttatctga

SEQ ID NO: 2178935 - DNA, 25 bp, Homo sapien
agttctattgttcgcataacataca

SEQ ID NO: 2178936 - DNA, 25 bp, Homo sapien
cacacccagtgccaatcttagttct

SEQ ID NO: 2178937 - DNA, 25 bp, Homo sapien
tggtcagatgcggacgactagctct

SEQ ID NO: 2178938 - DNA, 25 bp, Homo sapien
gactagctctcgaagtcccaagctc

SEQ ID NO: 2178939 - DNA, 25 bp, Homo sapien
caagctctctgccccgtaaggcatt

SEQ ID NO: 2178940 - DNA, 25 bp, Homo sapien
gcttgcatgggaagcgcagggttac

SEQ ID NO: 2178941 - DNA, 25 bp, Homo sapien
gacacggggctggttgtggaggtcc

SEQ ID NO: 2178942 - DNA, 25 bp, Homo sapien
tgatagtcagggttccggacacggg

SEQ ID NO: 2178943 - DNA, 25 bp, Homo sapien
gaagcctcatgatgatccttaataa

SEQ ID NO: 2178944 - DNA, 25 bp, Homo sapien
tgatgatccttaataagagggtggg

SEQ ID NO: 2178945 - DNA, 25 bp, Homo sapien
tccaggaagccgtcaacctgcagct

SEQ ID NO: 2178946 - DNA, 25 bp, Homo sapien
gacaggagtgagcagttgaagccat

SEQ ID NO: 2178947 - DNA, 25 bp, Homo sapien
cagtggaaagagaccggagacctga

SEQ ID NO: 2178948 - DNA, 25 bp, Homo sapien
gaggtggaacagatgctcgctccca

SEQ ID NO: 2178949 - DNA, 25 bp, Homo sapien
gatgccagtctgttatgagagcttc

SEQ ID NO: 2178950 - DNA, 25 bp, Homo sapien
gggccgtagcttgccgacttctcac

SEQ ID NO: 2178951 - DNA, 25 bp, Homo sapien
tgacaaacatcggtggagggctaga

SEQ ID NO: 2178952 - DNA, 25 bp, Homo sapien
tctgacccttcatgacgatgttcca

SEQ ID NO: 2178953 - DNA, 25 bp, Homo sapien
gaccagtttgtaccgatgaaacgcg

SEQ ID NO: 2178954 - DNA, 25 bp, Homo sapien
gaaacgcgcaactttgtaatcccaa

SEQ ID NO: 2178955 - DNA, 25 bp, Homo sapien
caaaggaggttcaaagaccagtttg

SEQ ID NO: 2178956 - DNA, 25 bp, Homo sapien
aatttggacactacaattgctctca

SEQ ID NO: 2178957 - DNA, 25 bp, Homo sapien
cctcaagggagcattggcagaacca

SEQ ID NO: 2178958 - DNA, 25 bp, Homo sapien
ccatgccggctggaagaagaacctc

SEQ ID NO: 2178959 - DNA, 25 bp, Homo sapien
cataaggtactgcagaagccgtcga

SEQ ID NO: 2178960 - DNA, 25 bp, Homo sapien
gaagaacctcgcatcttttggtgtg

SEQ ID NO: 2178961 - DNA, 25 bp, Homo sapien
tctgcttgctgtcataacccgacac

SEQ ID NO: 2178962 - DNA, 25 bp, Homo sapien
ttcagtgaatctggtgacctccatc

SEQ ID NO: 2178963 - DNA, 25 bp, Homo sapien
cccgacacggacttatttttgtcat

SEQ ID NO: 2178964 - DNA, 25 bp, Homo sapien
tgtcataacccgacacggacttatt

SEQ ID NO: 2178965 - DNA, 25 bp, Homo sapien
agcctgcggccgcaagcaaaaccaa

SEQ ID NO: 2178966 - DNA, 25 bp, Homo sapien
ttagtcttgatgaatgtgaaccatg

SEQ ID NO: 2178967 - DNA, 25 bp, Homo sapien
aaccaagcgcgagatgcagctagca

SEQ ID NO: 2178968 - DNA, 25 bp, Homo sapien
gaaccatgtcggaattgttaggtag

SEQ ID NO: 2178969 - DNA, 25 bp, Homo sapien
ggacaacaccatggacagccgtttt

SEQ ID NO: 2178970 - DNA, 25 bp, Homo sapien
ccatggacagccgttttcagagcct

SEQ ID NO: 2178971 - DNA, 25 bp, Homo sapien
cctccagcatttgcacaccactact

SEQ ID NO: 2178972 - DNA, 25 bp, Homo sapien
atatccatccccgttctcagcggga

SEQ ID NO: 2178973 - DNA, 25 bp, Homo sapien
gtcatccctgtaatcaagaaatggc

SEQ ID NO: 2178974 - DNA, 25 bp, Homo sapien
ttcacagtgaccgagagtcaggtcc

SEQ ID NO: 2178975 - DNA, 25 bp, Homo sapien
cctagagtgtttggtcgggttcaca

SEQ ID NO: 2178976 - DNA, 25 bp, Homo sapien
cgcgacaccgtaggacttgactttt

SEQ ID NO: 2178977 - DNA, 25 bp, Homo sapien
tcttaaaacatggtgaggaatgcct

SEQ ID NO: 2178978 - DNA, 25 bp, Homo sapien
attgtctgtgtcagacgtacagcca

SEQ ID NO: 2178979 - DNA, 25 bp, Homo sapien
ttgtctgtgtcagacgtacagccag

SEQ ID NO: 2178980 - DNA, 25 bp, Homo sapien
tgaagttttgcattctggcttgtgc

SEQ ID NO: 2178981 - DNA, 25 bp, Homo sapien
tattgtctgtgtcagacgtacagcc

SEQ ID NO: 2178982 - DNA, 25 bp, Homo sapien
tcaccttgtgtgttgtagctcattt

SEQ ID NO: 2178983 - DNA, 25 bp, Homo sapien
gtactcaccctcacgctctttgaag

SEQ ID NO: 2178984 - DNA, 25 bp, Homo sapien
caagagagaatcaacagatcatatt

SEQ ID NO: 2178985 - DNA, 25 bp, Homo sapien
tgttcagatgacagcgaccgccttt

SEQ ID NO: 2178986 - DNA, 25 bp, Homo sapien
gctgggagcagaacgcagtgacatg

SEQ ID NO: 2178987 - DNA, 25 bp, Homo sapien
gagcagaacgcagtgacatggcagt

SEQ ID NO: 2178988 - DNA, 25 bp, Homo sapien
tgtttaggattgctgtgtgagatag

SEQ ID NO: 2178989 - DNA, 25 bp, Homo sapien
tctgtttaggattgctgtgtgagat

SEQ ID NO: 2178990 - DNA, 25 bp, Homo sapien
ttctggggttcaccttctcattttc

SEQ ID NO: 2178991 - DNA, 25 bp, Homo sapien
tggggttcaccttctcattttcatt

SEQ ID NO: 2178992 - DNA, 25 bp, Homo sapien
gtgttttctggggttcaccttctca

SEQ ID NO: 2178993 - DNA, 25 bp, Homo sapien
tgttttctggggttcaccttctcat

SEQ ID NO: 2178994 - DNA, 25 bp, Homo sapien
ccaagtggagcaagtgtgttgccag

SEQ ID NO: 2178995 - DNA, 25 bp, Homo sapien
ggcaccctgaggggtactgcagaac

SEQ ID NO: 2178996 - DNA, 25 bp, Homo sapien
tgtgttgccaggtggtggatttggg

SEQ ID NO: 2178997 - DNA, 25 bp, Homo sapien
ctgccaagtggagcaagtgtgttgc

SEQ ID NO: 2178998 - DNA, 25 bp, Homo sapien
caggttaaagacatatgcatgagta

SEQ ID NO: 2178999 - DNA, 25 bp, Homo sapien
gtatcagctggtgatgcctggtgcc

SEQ ID NO: 2179000 - DNA, 25 bp, Homo sapien
tgcatgagtatcagctggtgatgcc

SEQ ID NO: 2179001 - DNA, 25 bp, Homo sapien
catatgcatgagtatcagctggtga

SEQ ID NO: 2179002 - DNA, 25 bp, Homo sapien
atttaactacttccccaaggatgtg

SEQ ID NO: 2179003 - DNA, 25 bp, Homo sapien
ccaaggatgtggaccttacacttac

SEQ ID NO: 2179004 - DNA, 25 bp, Homo sapien
tccccaaggatgtggaccttacact

SEQ ID NO: 2179005 - DNA, 25 bp, Homo sapien
tcagtcataactattttatttaact

SEQ ID NO: 2179006 - DNA, 25 bp, Homo sapien
tagtggcaactaaggctagagcagc

SEQ ID NO: 2179007 - DNA, 25 bp, Homo sapien
tacagccagcctcagaaaacttcct

SEQ ID NO: 2179008 - DNA, 25 bp, Homo sapien
gcaactaaggctagagcagctgtag

SEQ ID NO: 2179009 - DNA, 25 bp, Homo sapien
cagaaaacttcctagtggcaactaa

SEQ ID NO: 2179010 - DNA, 25 bp, Homo sapien
ccttcgggaagaagctctagctggt

SEQ ID NO: 2179011 - DNA, 25 bp, Homo sapien
tctagctggtgatgagagcaaggtt

SEQ ID NO: 2179012 - DNA, 25 bp, Homo sapien
gggccgctacacttcggcagtgcag

SEQ ID NO: 2179013 - DNA, 25 bp, Homo sapien
gcatgaaccctttctcctatcctaa

SEQ ID NO: 2179014 - DNA, 25 bp, Homo sapien
ataggtctccatgggttgggagagc

SEQ ID NO: 2179015 - DNA, 25 bp, Homo sapien
taggtctccatgggttgggagagca

SEQ ID NO: 2179016 - DNA, 25 bp, Homo sapien
cagtgtgaatttcaattgtgctggc

SEQ ID NO: 2179017 - DNA, 25 bp, Homo sapien
agtgtgaatttcaattgtgctggca

SEQ ID NO: 2179018 - DNA, 25 bp, Homo sapien
tggcttgtgatcaaggtctggactg

SEQ ID NO: 2179019 - DNA, 25 bp, Homo sapien
tcacatggtggcttgtgatcaaggt

SEQ ID NO: 2179020 - DNA, 25 bp, Homo sapien
gtgatcaaggtctggactgaggaca

SEQ ID NO: 2179021 - DNA, 25 bp, Homo sapien
caaggtctggactgaggacactccc

SEQ ID NO: 2179022 - DNA, 25 bp, Homo sapien
tgtggctttgaagaatttctagtgc

SEQ ID NO: 2179023 - DNA, 25 bp, Homo sapien
gctttgaagaatttctagtgctttc

SEQ ID NO: 2179024 - DNA, 25 bp, Homo sapien
gggtcctgtggctttgaagaatttc

SEQ ID NO: 2179025 - DNA, 25 bp, Homo sapien
tggctttgaagaatttctagtgctt

SEQ ID NO: 2179026 - DNA, 25 bp, Homo sapien
tttctccaattggtatttccattga

SEQ ID NO: 2179027 - DNA, 25 bp, Homo sapien
ctccaattggtatttccattgagtg

SEQ ID NO: 2179028 - DNA, 25 bp, Homo sapien
tcctccagtgttttctccaattggt

SEQ ID NO: 2179029 - DNA, 25 bp, Homo sapien
ccaattggtatttccattgagtgtt

SEQ ID NO: 2179030 - DNA, 25 bp, Homo sapien
tgaactatttgtaccagacggaaag

SEQ ID NO: 2179031 - DNA, 25 bp, Homo sapien
cagtaactctacagactaacagcag

SEQ ID NO: 2179032 - DNA, 25 bp, Homo sapien
gactgtcaaatatctgctcagccac

SEQ ID NO: 2179033 - DNA, 25 bp, Homo sapien
cagtacggtatcatggaatcaattc

SEQ ID NO: 2179034 - DNA, 25 bp, Homo sapien
ctaaggctttccaaggggagccctg

SEQ ID NO: 2179035 - DNA, 25 bp, Homo sapien
cagcagccgaggtggtcagtgattc

SEQ ID NO: 2179036 - DNA, 25 bp, Homo sapien
ttcagacagcatgctcagggcttcg

SEQ ID NO: 2179037 - DNA, 25 bp, Homo sapien
cagggcttcgtcagaagtctgccca

SEQ ID NO: 2179038 - DNA, 25 bp, Homo sapien
tgcatcctgtccagccgtagaaggc

SEQ ID NO: 2179039 - DNA, 25 bp, Homo sapien
tgatatctgtttgcatctcaagata

SEQ ID NO: 2179040 - DNA, 25 bp, Homo sapien
aaggctttcattgatgatattcgac

SEQ ID NO: 2179041 - DNA, 25 bp, Homo sapien
tcaaagaacctccattgatatctgt

SEQ ID NO: 2179042 - DNA, 25 bp, Homo sapien
ggctgcagttctgacaggtttcaaa

SEQ ID NO: 2179043 - DNA, 25 bp, Homo sapien
tcggatcttgatcacggctcccatc

SEQ ID NO: 2179044 - DNA, 25 bp, Homo sapien
atcctcctctcgttctccgtgtaaa

SEQ ID NO: 2179045 - DNA, 25 bp, Homo sapien
tcgttctccgtgtaaatgccttgtc

SEQ ID NO: 2179046 - DNA, 25 bp, Homo sapien
aaaaatcggatcttgatcacggctc

SEQ ID NO: 2179047 - DNA, 25 bp, Homo sapien
atttcctgtgctccacttcctgttt

SEQ ID NO: 2179048 - DNA, 25 bp, Homo sapien
tcatttcctgtgctccacttcctgt

SEQ ID NO: 2179049 - DNA, 25 bp, Homo sapien
cttgactcatttcctgtgctccact

SEQ ID NO: 2179050 - DNA, 25 bp, Homo sapien
tgactcatttcctgtgctccacttc

SEQ ID NO: 2179051 - DNA, 25 bp, Homo sapien
ttctgcagctgtgttctgctgatgt

SEQ ID NO: 2179052 - DNA, 25 bp, Homo sapien
tctgcagctgtgttctgctgatgtc

SEQ ID NO: 2179053 - DNA, 25 bp, Homo sapien
tttctgcagctgtgttctgctgatg

SEQ ID NO: 2179054 - DNA, 25 bp, Homo sapien
ctgcagctgtgttctgctgatgtct

SEQ ID NO: 2179055 - DNA, 25 bp, Homo sapien
ctggaggatgacaaatgaggtcaac

SEQ ID NO: 2179056 - DNA, 25 bp, Homo sapien
tggaggatgacaaatgaggtcaact

SEQ ID NO: 2179057 - DNA, 25 bp, Homo sapien
ggaggatgacaaatgaggtcaactg

SEQ ID NO: 2179058 - DNA, 25 bp, Homo sapien
gaggatgacaaatgaggtcaactgt

SEQ ID NO: 2179059 - DNA, 25 bp, Homo sapien
aacaggatggggttcgccacgagaa

SEQ ID NO: 2179060 - DNA, 25 bp, Homo sapien
ttttggaacaggatggggttcgcca

SEQ ID NO: 2179061 - DNA, 25 bp, Homo sapien
ggttcgccacgagaaccagcagcag

SEQ ID NO: 2179062 - DNA, 25 bp, Homo sapien
ggcaggtacatggtgacatagtggg

SEQ ID NO: 2179063 - DNA, 25 bp, Homo sapien
gaagaacgccggatttgtcctgagg

SEQ ID NO: 2179064 - DNA, 25 bp, Homo sapien
tatatatccttggaaagaccttggc

SEQ ID NO: 2179065 - DNA, 25 bp, Homo sapien
caactgagggttgcatggacaggaa

SEQ ID NO: 2179066 - DNA, 25 bp, Homo sapien
taaacttgaggaaatgcttgagaca

SEQ ID NO: 2179067 - DNA, 25 bp, Homo sapien
agtagagcatggcggctccctccac

SEQ ID NO: 2179068 - DNA, 25 bp, Homo sapien
gggtagtagagcatggcggctccct

SEQ ID NO: 2179069 - DNA, 25 bp, Homo sapien
gtagtagagcatggcggctccctcc

SEQ ID NO: 2179070 - DNA, 25 bp, Homo sapien
ctggacacggaagggtagtagagca

SEQ ID NO: 2179071 - DNA, 25 bp, Homo sapien
ctaggggacaagcacaacagcagcc

SEQ ID NO: 2179072 - DNA, 25 bp, Homo sapien
tgaactaatcactgttggatggaaa

SEQ ID NO: 2179073 - DNA, 25 bp, Homo sapien
ctggaaaggtcaggaaaatgtacac

SEQ ID NO: 2179074 - DNA, 25 bp, Homo sapien
gagaccccatatccattaattggtg

SEQ ID NO: 2179075 - DNA, 25 bp, Homo sapien
aatgtacacagaggaaagcccctcg

SEQ ID NO: 2179076 - DNA, 25 bp, Homo sapien
cctctggcatggaagcgaatccagg

SEQ ID NO: 2179077 - DNA, 25 bp, Homo sapien
catggaagcgaatccaggtggatct

SEQ ID NO: 2179078 - DNA, 25 bp, Homo sapien
ctgatcctctggcatggaagcgaat

SEQ ID NO: 2179079 - DNA, 25 bp, Homo sapien
gatcctctggcatggaagcgaatcc

SEQ ID NO: 2179080 - DNA, 25 bp, Homo sapien
tacatgcttcccgagaggagagcgg

SEQ ID NO: 2179081 - DNA, 25 bp, Homo sapien
ctgaagatggaagctctgcagagct

SEQ ID NO: 2179082 - DNA, 25 bp, Homo sapien
gcacagtctctagctttcatctttg

SEQ ID NO: 2179083 - DNA, 25 bp, Homo sapien
tccagatgccgcaggaagactgaag

SEQ ID NO: 2179084 - DNA, 25 bp, Homo sapien
ggggctggagctccatgggatgcat

SEQ ID NO: 2179085 - DNA, 25 bp, Homo sapien
ggcagaaatcccatttcctcggtga

SEQ ID NO: 2179086 - DNA, 25 bp, Homo sapien
gcagaaatcccatttcctcggtgaa

SEQ ID NO: 2179087 - DNA, 25 bp, Homo sapien
ctagggcagaaatcccatttcctcg

SEQ ID NO: 2179088 - DNA, 25 bp, Homo sapien
gaaatcccatttcctcggtgaatac

SEQ ID NO: 2179089 - DNA, 25 bp, Homo sapien
cgatctccggatcaccagataagca

SEQ ID NO: 2179090 - DNA, 25 bp, Homo sapien
gaagcaggcactgtacaacagctgg

SEQ ID NO: 2179091 - DNA, 25 bp, Homo sapien
ctcagtcctgccgatctccggatca

SEQ ID NO: 2179092 - DNA, 25 bp, Homo sapien
tgcatagcaaaacagccaccagaag

SEQ ID NO: 2179093 - DNA, 25 bp, Homo sapien
tcgggaagagcctgcatcaaaatgt

SEQ ID NO: 2179094 - DNA, 25 bp, Homo sapien
aatcgggaagagcctgcatcaaaat

SEQ ID NO: 2179095 - DNA, 25 bp, Homo sapien
ctgcaatcgggaagagcctgcatca

SEQ ID NO: 2179096 - DNA, 25 bp, Homo sapien
gcaatcgggaagagcctgcatcaaa

SEQ ID NO: 2179097 - DNA, 25 bp, Homo sapien
ttgggaatcctaaccacacggtgga

SEQ ID NO: 2179098 - DNA, 25 bp, Homo sapien
cagcaggccaaatttccgtgtggtt

SEQ ID NO: 2179099 - DNA, 25 bp, Homo sapien
gagacgctgtcaacaaaatttggga

SEQ ID NO: 2179100 - DNA, 25 bp, Homo sapien
tggttcatatccgagacgctgtcaa

SEQ ID NO: 2179101 - DNA, 25 bp, Homo sapien
cgatcaagttccaacccgagtggat

SEQ ID NO: 2179102 - DNA, 25 bp, Homo sapien
gatcgagttccaacctgcgggccat

SEQ ID NO: 2179103 - DNA, 25 bp, Homo sapien
gggcaccgatcaagttccaacccga

SEQ ID NO: 2179104 - DNA, 25 bp, Homo sapien
caacccgagtggatcgagttccaac

SEQ ID NO: 2179105 - DNA, 25 bp, Homo sapien
cgcggctggaagctcagcacgagct

SEQ ID NO: 2179106 - DNA, 25 bp, Homo sapien
agccgagaaggtcgcaggcagcggc

SEQ ID NO: 2179107 - DNA, 25 bp, Homo sapien
gcagcgcgcaggatgcggaccgagg

SEQ ID NO: 2179108 - DNA, 25 bp, Homo sapien
gggcagcagaaggtccctaggcgcg

SEQ ID NO: 2179109 - DNA, 25 bp, Homo sapien
tcgcggacgcggctcgggtgtgcca

SEQ ID NO: 2179110 - DNA, 25 bp, Homo sapien
tgtgttcgcggacgcggctcgggtg

SEQ ID NO: 2179111 - DNA, 25 bp, Homo sapien
acgcggctcgggtgtgccaggaccc

SEQ ID NO: 2179112 - DNA, 25 bp, Homo sapien
gggctgtgttcgcggacgcggctcg

SEQ ID NO: 2179113 - DNA, 25 bp, Homo sapien
gggggcggcatcatgtgccctgggc

SEQ ID NO: 2179114 - DNA, 25 bp, Homo sapien
ctgggggcggcatcatgtgccctgg

SEQ ID NO: 2179115 - DNA, 25 bp, Homo sapien
tgggggcggcatcatgtgccctggg

SEQ ID NO: 2179116 - DNA, 25 bp, Homo sapien
gctgggggcggcatcatgtgccctg

SEQ ID NO: 2179117 - DNA, 25 bp, Homo sapien
gatggcggtgctgaatatgaacttt

SEQ ID NO: 2179118 - DNA, 25 bp, Homo sapien
ggtacatctgtttttgcatgaaccc

SEQ ID NO: 2179119 - DNA, 25 bp, Homo sapien
caatcggtctttgagtacatgaagg

SEQ ID NO: 2179120 - DNA, 25 bp, Homo sapien
tttcgtagatatgggagatacaggg

SEQ ID NO: 2179121 - DNA, 25 bp, Homo sapien
tgagttcctgccacctgagcacgtc

SEQ ID NO: 2179122 - DNA, 25 bp, Homo sapien
gttcctgccacctgagcacgtcttc

SEQ ID NO: 2179123 - DNA, 25 bp, Homo sapien
tgggggtgggcacttcaacacccag

SEQ ID NO: 2179124 - DNA, 25 bp, Homo sapien
ctgggggtgggcacttcaacaccca

SEQ ID NO: 2179125 - DNA, 25 bp, Homo sapien
tctgtggtggttgttcggtattgac

SEQ ID NO: 2179126 - DNA, 25 bp, Homo sapien
ctgtggtggttgttcggtattgacc

SEQ ID NO: 2179127 - DNA, 25 bp, Homo sapien
ccgaatttgatgctaagtgcaactg

SEQ ID NO: 2179128 - DNA, 25 bp, Homo sapien
aactgtggtttcaaggaagtgtgtg

SEQ ID NO: 2179129 - DNA, 25 bp, Homo sapien
gcagttgcaggtggccgaatttgat

SEQ ID NO: 2179130 - DNA, 25 bp, Homo sapien
cttgaagtccacttttcagaaggct

SEQ ID NO: 2179131 - DNA, 25 bp, Homo sapien
cctcaggggcatggctgcggttaaa

SEQ ID NO: 2179132 - DNA, 25 bp, Homo sapien
gggcatggctgcggttaaagctgac

SEQ ID NO: 2179133 - DNA, 25 bp, Homo sapien
taacctcaggggcatggctgcggtt

SEQ ID NO: 2179134 - DNA, 25 bp, Homo sapien
attaacctcaggggcatggctgcgg

SEQ ID NO: 2179135 - DNA, 25 bp, Homo sapien
ttgtctgtgatgctcactagaacgc

SEQ ID NO: 2179136 - DNA, 25 bp, Homo sapien
tgcgccctgcggagacattgtctgt

SEQ ID NO: 2179137 - DNA, 25 bp, Homo sapien
tcaggagcatgcaaaggcactaaca

SEQ ID NO: 2179138 - DNA, 25 bp, Homo sapien
gaacgcacgtcaggatcaggagcat

SEQ ID NO: 2179139 - DNA, 25 bp, Homo sapien
atttgctgatcccctcgctcatgct

SEQ ID NO: 2179140 - DNA, 25 bp, Homo sapien
gtctttctgacagagctgcagtgct

SEQ ID NO: 2179141 - DNA, 25 bp, Homo sapien
cgctcatgctcagttggggtcctcc

SEQ ID NO: 2179142 - DNA, 25 bp, Homo sapien
gatcccctcgctcatgctcagttgg

SEQ ID NO: 2179143 - DNA, 25 bp, Homo sapien
gccgcgggctggacctctggacgcg

SEQ ID NO: 2179144 - DNA, 25 bp, Homo sapien
cgcgggctggacctctggacgcgct

SEQ ID NO: 2179145 - DNA, 25 bp, Homo sapien
ggccgcgggctggacctctggacgc

SEQ ID NO: 2179146 - DNA, 25 bp, Homo sapien
cgggctggacctctggacgcgctcc

SEQ ID NO: 2179147 - DNA, 25 bp, Homo sapien
ttaaatggctcctgcccggagtccc

SEQ ID NO: 2179148 - DNA, 25 bp, Homo sapien
ccttggacccgtgcctgtgatcact

SEQ ID NO: 2179149 - DNA, 25 bp, Homo sapien
cccgcgcctcgcagagtttaaatgg

SEQ ID NO: 2179150 - DNA, 25 bp, Homo sapien
gaggccagcgaaggaacgtgtcccc

SEQ ID NO: 2179151 - DNA, 25 bp, Homo sapien
tgacgaaattccacatctattggtg

SEQ ID NO: 2179152 - DNA, 25 bp, Homo sapien
catctattggtgttaattgtgcatc

SEQ ID NO: 2179153 - DNA, 25 bp, Homo sapien
cagattctgaagctgacgaaattcc

SEQ ID NO: 2179154 - DNA, 25 bp, Homo sapien
ggtgttaattgtgcatctgtttgca

SEQ ID NO: 2179155 - DNA, 25 bp, Homo sapien
ttagcttttgcgcatacatgttgtg

SEQ ID NO: 2179156 - DNA, 25 bp, Homo sapien
ctggatgtctcattgagcttaatta

SEQ ID NO: 2179157 - DNA, 25 bp, Homo sapien
cttttgcgcatacatgttgtgctgg

SEQ ID NO: 2179158 - DNA, 25 bp, Homo sapien
ggatgtctcattgagcttaattaca

SEQ ID NO: 2179159 - DNA, 25 bp, Homo sapien
tactttgacacgaatctctttggca

SEQ ID NO: 2179160 - DNA, 25 bp, Homo sapien
ctttggcaggttcttttgagacatg

SEQ ID NO: 2179161 - DNA, 25 bp, Homo sapien
cattttataaatggttctactttga

SEQ ID NO: 2179162 - DNA, 25 bp, Homo sapien
tcttttgagacatgtttcttaaagg

SEQ ID NO: 2179163 - DNA, 25 bp, Homo sapien
aaaaatctacatcatacatctcctt

SEQ ID NO: 2179164 - DNA, 25 bp, Homo sapien
cctcttcttctaaaaaatctacatc

SEQ ID NO: 2179165 - DNA, 25 bp, Homo sapien
aaatctacatcatacatctccttca

SEQ ID NO: 2179166 - DNA, 25 bp, Homo sapien
atctacatcatacatctccttcaag

SEQ ID NO: 2179167 - DNA, 25 bp, Homo sapien
ctaccccacacgtaaagccatgaag

SEQ ID NO: 2179168 - DNA, 25 bp, Homo sapien
taccccacacgtaaagccatgaaga

SEQ ID NO: 2179169 - DNA, 25 bp, Homo sapien
ccccacacgtaaagccatgaagaag

SEQ ID NO: 2179170 - DNA, 25 bp, Homo sapien
ccacacgtaaagccatgaagaaggt

SEQ ID NO: 2179171 - DNA, 25 bp, Homo sapien
tggcccgctcctcaactgttttttc

SEQ ID NO: 2179172 - DNA, 25 bp, Homo sapien
tgtgttctctaatctcctctttaaa

SEQ ID NO: 2179173 - DNA, 25 bp, Homo sapien
ccaaatcatcatggagtatcagaac

SEQ ID NO: 2179174 - DNA, 25 bp, Homo sapien
aaaatcaaacaggatgttggcccgc

SEQ ID NO: 2179175 - DNA, 25 bp, Homo sapien
cattttccttgtctttgccctttat

SEQ ID NO: 2179176 - DNA, 25 bp, Homo sapien
ggagccattttccttgtctttgccc

SEQ ID NO: 2179177 - DNA, 25 bp, Homo sapien
atacggagccattttccttgtcttt

SEQ ID NO: 2179178 - DNA, 25 bp, Homo sapien
agccattttccttgtctttgccctt

SEQ ID NO: 2179179 - DNA, 25 bp, Homo sapien
tgaatgtgcagagtttatgatgtgt

SEQ ID NO: 2179180 - DNA, 25 bp, Homo sapien
agtttatgatgtgtgtcaagcatgc

SEQ ID NO: 2179181 - DNA, 25 bp, Homo sapien
tgtgcagagtttatgatgtgtgtca

SEQ ID NO: 2179182 - DNA, 25 bp, Homo sapien
gagaatgaatgtgcagagtttatga

SEQ ID NO: 2179183 - DNA, 25 bp, Homo sapien
gatagccacaggctttataagaatt

SEQ ID NO: 2179184 - DNA, 25 bp, Homo sapien
tcgatagccacaggctttataagaa

SEQ ID NO: 2179185 - DNA, 25 bp, Homo sapien
ctcgatagccacaggctttataaga

SEQ ID NO: 2179186 - DNA, 25 bp, Homo sapien
tagccacaggctttataagaattac

SEQ ID NO: 2179187 - DNA, 25 bp, Homo sapien
tcacaatgtaacaatgtatcccacc

SEQ ID NO: 2179188 - DNA, 25 bp, Homo sapien
tggtgggataccttggaggccaatt

SEQ ID NO: 2179189 - DNA, 25 bp, Homo sapien
caatgtaacaatgtatcccaccaaa

SEQ ID NO: 2179190 - DNA, 25 bp, Homo sapien
gctgctttggcttgacatgcatatc

SEQ ID NO: 2179191 - DNA, 25 bp, Homo sapien
tagaactggtctgatatgctggggt

SEQ ID NO: 2179192 - DNA, 25 bp, Homo sapien
tgctggggttgacgttgacagacat

SEQ ID NO: 2179193 - DNA, 25 bp, Homo sapien
atcagacagggcatcttgtaataga

SEQ ID NO: 2179194 - DNA, 25 bp, Homo sapien
cagacagggcatcttgtaatagaac

SEQ ID NO: 2179195 - DNA, 25 bp, Homo sapien
gatttttggtgctggatctgaccca

SEQ ID NO: 2179196 - DNA, 25 bp, Homo sapien
gaattgtagagacctcactgagagg

SEQ ID NO: 2179197 - DNA, 25 bp, Homo sapien
cctgaaggcccctgttagagcccat

SEQ ID NO: 2179198 - DNA, 25 bp, Homo sapien
gggcagttcttcagtggccctgaat

SEQ ID NO: 2179199 - DNA, 25 bp, Homo sapien
ccagggcatgtagctggaaggcccc

SEQ ID NO: 2179200 - DNA, 25 bp, Homo sapien
ctgggctgaggagctagtggcagcc

SEQ ID NO: 2179201 - DNA, 25 bp, Homo sapien
tggcagcctgcaggttaggggaagg

SEQ ID NO: 2179202 - DNA, 25 bp, Homo sapien
ttcctccagggcatgtagctggaag

SEQ ID NO: 2179203 - DNA, 25 bp, Homo sapien
tcctggtgcctgaacacacgtgtgc

SEQ ID NO: 2179204 - DNA, 25 bp, Homo sapien
cacggcacagtatccgcatctggtg

SEQ ID NO: 2179205 - DNA, 25 bp, Homo sapien
tgcatctgtgcatgactgcttgcct

SEQ ID NO: 2179206 - DNA, 25 bp, Homo sapien
catctgtgcatgactgcttgcctct

SEQ ID NO: 2179207 - DNA, 25 bp, Homo sapien
gctgagcagggatcagtcctgggag

SEQ ID NO: 2179208 - DNA, 25 bp, Homo sapien
agcagggatcagtcctgggagtcct

SEQ ID NO: 2179209 - DNA, 25 bp, Homo sapien
tgccacgcaggtggcagctccagaa

SEQ ID NO: 2179210 - DNA, 25 bp, Homo sapien
tggatctgtgctcagtgccacgcag

SEQ ID NO: 2179211 - DNA, 25 bp, Homo sapien
cacttatggttgagtacctggcaag

SEQ ID NO: 2179212 - DNA, 25 bp, Homo sapien
gaatgcaagccagtggatctgtagc

SEQ ID NO: 2179213 - DNA, 25 bp, Homo sapien
ccgttgtgcccttttgaactgtgca

SEQ ID NO: 2179214 - DNA, 25 bp, Homo sapien
cacttgggcggctttctccctggga

SEQ ID NO: 2179215 - DNA, 25 bp, Homo sapien
tggtcatccgaagttgtgctcttca

SEQ ID NO: 2179216 - DNA, 25 bp, Homo sapien
tgcaagcgggtctgtggtcatccga

SEQ ID NO: 2179217 - DNA, 25 bp, Homo sapien
ccttgtttttgcacattggaatttg

SEQ ID NO: 2179218 - DNA, 25 bp, Homo sapien
tgaatgtgttatgccatcatgacct

SEQ ID NO: 2179219 - DNA, 25 bp, Homo sapien
tagagtcgctgatccaccacagcca

SEQ ID NO: 2179220 - DNA, 25 bp, Homo sapien
ccgacatagagcttgataattctta

SEQ ID NO: 2179221 - DNA, 25 bp, Homo sapien
catcctgatgaatttccgacataga

SEQ ID NO: 2179222 - DNA, 25 bp, Homo sapien
gggtcagctgaattggaagtggcat

SEQ ID NO: 2179223 - DNA, 25 bp, Homo sapien
caggtgtttaagagagtctggtcct

SEQ ID NO: 2179224 - DNA, 25 bp, Homo sapien
ttgcttcaggtgtttaagagagtct

SEQ ID NO: 2179225 - DNA, 25 bp, Homo sapien
aggtgtttaagagagtctggtcctt

SEQ ID NO: 2179226 - DNA, 25 bp, Homo sapien
tcaggtgtttaagagagtctggtcc

SEQ ID NO: 2179227 - DNA, 25 bp, Homo sapien
ttagtgtagtgacccgcagtctctc

SEQ ID NO: 2179228 - DNA, 25 bp, Homo sapien
tgctttgctcaggtgttgccaaggc

SEQ ID NO: 2179229 - DNA, 25 bp, Homo sapien
ctgagcctggaagcttcttcgcacc

SEQ ID NO: 2179230 - DNA, 25 bp, Homo sapien
gagccacgtacagcccacctgaagg

SEQ ID NO: 2179231 - DNA, 25 bp, Homo sapien
gagcctggaagcttcttcgcacccc

SEQ ID NO: 2179232 - DNA, 25 bp, Homo sapien
tcctgagccacgtacagcccacctg

SEQ ID NO: 2179233 - DNA, 25 bp, Homo sapien
cctggtcgtgtgcttgatctgctgt

SEQ ID NO: 2179234 - DNA, 25 bp, Homo sapien
tgtgctctgagaccgttccttgtct

SEQ ID NO: 2179235 - DNA, 25 bp, Homo sapien
ttggccaagtggagacagcaccagg

SEQ ID NO: 2179236 - DNA, 25 bp, Homo sapien
tgctgtactggggatgtcgcctcat

SEQ ID NO: 2179237 - DNA, 25 bp, Homo sapien
aataatgaaaactgcagtttctgac

SEQ ID NO: 2179238 - DNA, 25 bp, Homo sapien
taaataatgaaaactgcagtttctg

SEQ ID NO: 2179239 - DNA, 25 bp, Homo sapien
aataaataatgaaaactgcagtttc

SEQ ID NO: 2179240 - DNA, 25 bp, Homo sapien
ttctgacttgggccatctaacattc

SEQ ID NO: 2179241 - DNA, 25 bp, Homo sapien
tcctggtaaatcataagcatggtgg

SEQ ID NO: 2179242 - DNA, 25 bp, Homo sapien
cagcggctgacttgtcctggtaaat

SEQ ID NO: 2179243 - DNA, 25 bp, Homo sapien
gacttgtcctggtaaatcataagca

SEQ ID NO: 2179244 - DNA, 25 bp, Homo sapien
agggcacacagcggctgacttgtcc

SEQ ID NO: 2179245 - DNA, 25 bp, Homo sapien
gtggttggcgtctgccttccagaga

SEQ ID NO: 2179246 - DNA, 25 bp, Homo sapien
catgcttggctgatctgtggttggc

SEQ ID NO: 2179247 - DNA, 25 bp, Homo sapien
atctgtgccgcctctgagcccatgc

SEQ ID NO: 2179248 - DNA, 25 bp, Homo sapien
tgaacatggatttggcatctgtgcc

SEQ ID NO: 2179249 - DNA, 25 bp, Homo sapien
cgtgctgggttggaatgcagtgcac

SEQ ID NO: 2179250 - DNA, 25 bp, Homo sapien
tgctgggttggaatgcagtgcacac

SEQ ID NO: 2179251 - DNA, 25 bp, Homo sapien
gtgctgggttggaatgcagtgcaca

SEQ ID NO: 2179252 - DNA, 25 bp, Homo sapien
tagctgtgcgaatccaaatatggct

SEQ ID NO: 2179253 - DNA, 25 bp, Homo sapien
tccgacgaatgtaagagacatagtg

SEQ ID NO: 2179254 - DNA, 25 bp, Homo sapien
tcaacatactctccagattatcagc

SEQ ID NO: 2179255 - DNA, 25 bp, Homo sapien
tagtggttgtcacaatagctgtgcg

SEQ ID NO: 2179256 - DNA, 25 bp, Homo sapien
tcggaaaccgagcttctctcctgct

SEQ ID NO: 2179257 - DNA, 25 bp, Homo sapien
atgggagcgtggatctctgtgcctc

SEQ ID NO: 2179258 - DNA, 25 bp, Homo sapien
ccgtgggtctcctggaaggcactgt

SEQ ID NO: 2179259 - DNA, 25 bp, Homo sapien
tatctgggaatctatagtctggagc

SEQ ID NO: 2179260 - DNA, 25 bp, Homo sapien
tgagcggagactgacacttttgagg

SEQ ID NO: 2179261 - DNA, 25 bp, Homo sapien
tgctgtcacactggggagaactgaa

SEQ ID NO: 2179262 - DNA, 25 bp, Homo sapien
gaggtgagcaccctgaaccttgggt

SEQ ID NO: 2179263 - DNA, 25 bp, Homo sapien
ggagagaacactgctgcacctgagc

SEQ ID NO: 2179264 - DNA, 25 bp, Homo sapien
ttctccggtatgcagtggaaccaat

SEQ ID NO: 2179265 - DNA, 25 bp, Homo sapien
tccggtatgcagtggaaccaatcta

SEQ ID NO: 2179266 - DNA, 25 bp, Homo sapien
tctccggtatgcagtggaaccaatc

SEQ ID NO: 2179267 - DNA, 25 bp, Homo sapien
cggtatgcagtggaaccaatctaga

SEQ ID NO: 2179268 - DNA, 25 bp, Homo sapien
tatatagatgtatttcttgggtgct

SEQ ID NO: 2179269 - DNA, 25 bp, Homo sapien
gatgtatttcttgggtgctgacaga

SEQ ID NO: 2179270 - DNA, 25 bp, Homo sapien
cagtgggattgtggatggtttcctc

SEQ ID NO: 2179271 - DNA, 25 bp, Homo sapien
ctttacagccttgagagtgtgcttc

SEQ ID NO: 2179272 - DNA, 25 bp, Homo sapien
aacaaggctgctacggtttcagaaa

SEQ ID NO: 2179273 - DNA, 25 bp, Homo sapien
taggcacacgcttaactcagtgttg

SEQ ID NO: 2179274 - DNA, 25 bp, Homo sapien
tccttgacttgtacgaccatcgggt

SEQ ID NO: 2179275 - DNA, 25 bp, Homo sapien
tgcgccaggaagaagcgatgaaccc

SEQ ID NO: 2179276 - DNA, 25 bp, Homo sapien
acaatgcccagtgctcgaggctgta

SEQ ID NO: 2179277 - DNA, 25 bp, Homo sapien
cccgaaattccagattttcagctgc

SEQ ID NO: 2179278 - DNA, 25 bp, Homo sapien
tcagctgcattaaacacattgcaaa

SEQ ID NO: 2179279 - DNA, 25 bp, Homo sapien
aaaattcgtgcatcctggctgctca

SEQ ID NO: 2179280 - DNA, 25 bp, Homo sapien
cttttgcgttgctgctagaggcgag

SEQ ID NO: 2179281 - DNA, 25 bp, Homo sapien
atgatttgcgtgaggaagacggctg

SEQ ID NO: 2179282 - DNA, 25 bp, Homo sapien
ttttgcgttgctgctagaggcgaga

SEQ ID NO: 2179283 - DNA, 25 bp, Homo sapien
atttgcgtgaggaagacggctgcct

SEQ ID NO: 2179284 - DNA, 25 bp, Homo sapien
cggtcccgtccagttggcctgcatt

SEQ ID NO: 2179285 - DNA, 25 bp, Homo sapien
gcctgcattctgacgctgcagctct

SEQ ID NO: 2179286 - DNA, 25 bp, Homo sapien
tccagttggcctgcattctgacgct

SEQ ID NO: 2179287 - DNA, 25 bp, Homo sapien
aagaagactgtcaccccttgccaca

SEQ ID NO: 2179288 - DNA, 25 bp, Homo sapien
catgcctcatcctcgcgcctctcct

SEQ ID NO: 2179289 - DNA, 25 bp, Homo sapien
gcctcatcctcgcgcctctccttgc

SEQ ID NO: 2179290 - DNA, 25 bp, Homo sapien
atgcctcatcctcgcgcctctcctt

SEQ ID NO: 2179291 - DNA, 25 bp, Homo sapien
tcatgcctcatcctcgcgcctctcc

SEQ ID NO: 2179292 - DNA, 25 bp, Homo sapien
caaagctgtttcaatgtgtatcctg

SEQ ID NO: 2179293 - DNA, 25 bp, Homo sapien
tacaaagctgtttcaatgtgtatcc

SEQ ID NO: 2179294 - DNA, 25 bp, Homo sapien
aaagctgtttcaatgtgtatcctgt

SEQ ID NO: 2179295 - DNA, 25 bp, Homo sapien
aagctgtttcaatgtgtatcctgtt

SEQ ID NO: 2179296 - DNA, 25 bp, Homo sapien
tactccagcgaccttctagctgaaa

SEQ ID NO: 2179297 - DNA, 25 bp, Homo sapien
cagcgaccttctagctgaaaacttg

SEQ ID NO: 2179298 - DNA, 25 bp, Homo sapien
tccagcgaccttctagctgaaaact

SEQ ID NO: 2179299 - DNA, 25 bp, Homo sapien
aggtactccagcgaccttctagctg

SEQ ID NO: 2179300 - DNA, 25 bp, Homo sapien
cttccccaagcgccggtaccttcag

SEQ ID NO: 2179301 - DNA, 25 bp, Homo sapien
ccccaagcgccggtaccttcagatg

SEQ ID NO: 2179302 - DNA, 25 bp, Homo sapien
tcagtgtagatgcatgttctcagga

SEQ ID NO: 2179303 - DNA, 25 bp, Homo sapien
agtgtagatgcatgttctcaggata

SEQ ID NO: 2179304 - DNA, 25 bp, Homo sapien
gtggacaaggtgttctcatttattt

SEQ ID NO: 2179305 - DNA, 25 bp, Homo sapien
agagaaccttcagtgtggacaaggt

SEQ ID NO: 2179306 - DNA, 25 bp, Homo sapien
tgtcctcatcatgcagatattttat

SEQ ID NO: 2179307 - DNA, 25 bp, Homo sapien
cttgtcctcatcatgcagatatttt

SEQ ID NO: 2179308 - DNA, 25 bp, Homo sapien
tcagtgcttgtcctcatcatgcaga

SEQ ID NO: 2179309 - DNA, 25 bp, Homo sapien
tcctcatcatgcagatattttatct

SEQ ID NO: 2179310 - DNA, 25 bp, Homo sapien
tgtagtgatgagttcactcctccac

SEQ ID NO: 2179311 - DNA, 25 bp, Homo sapien
gcccatcagggtcgttgtccttgtc

SEQ ID NO: 2179312 - DNA, 25 bp, Homo sapien
gactataagacgagtcttccagaag

SEQ ID NO: 2179313 - DNA, 25 bp, Homo sapien
aagcagctgctgtagtgatgagttc

SEQ ID NO: 2179314 - DNA, 25 bp, Homo sapien
tcaagtgtactgttcagtgatgtgt

SEQ ID NO: 2179315 - DNA, 25 bp, Homo sapien
tcagccctagacacaattttaaagt

SEQ ID NO: 2179316 - DNA, 25 bp, Homo sapien
tcactcttatactgggtcaaaatag

SEQ ID NO: 2179317 - DNA, 25 bp, Homo sapien
tacacataatatgaaacttatcttc

SEQ ID NO: 2179318 - DNA, 25 bp, Homo sapien
gaagtagtgtgcgtggagaggaaca

SEQ ID NO: 2179319 - DNA, 25 bp, Homo sapien
agtagtgtgcgtggagaggaacaaa

SEQ ID NO: 2179320 - DNA, 25 bp, Homo sapien
caagtgaagtagtgtgcgtggagag

SEQ ID NO: 2179321 - DNA, 25 bp, Homo sapien
gtgaagtagtgtgcgtggagaggaa

SEQ ID NO: 2179322 - DNA, 25 bp, Homo sapien
cctgtactgtctcgttctgggctcc

SEQ ID NO: 2179323 - DNA, 25 bp, Homo sapien
gatggagacaccagcttagtcagca

SEQ ID NO: 2179324 - DNA, 25 bp, Homo sapien
ctgcagaggtaagacgaggagttat

SEQ ID NO: 2179325 - DNA, 25 bp, Homo sapien
ttaacttagtggaatgccggtggtg

SEQ ID NO: 2179326 - DNA, 25 bp, Homo sapien
ccaggataggattgcgatgggccac

SEQ ID NO: 2179327 - DNA, 25 bp, Homo sapien
gatgggccactttcacaaagcggtg

SEQ ID NO: 2179328 - DNA, 25 bp, Homo sapien
gaatagtggttcacggataaactcc

SEQ ID NO: 2179329 - DNA, 25 bp, Homo sapien
tcttgtttcacaggcatgggcaacg

SEQ ID NO: 2179330 - DNA, 25 bp, Homo sapien
ccaaatcgtggatagggttgattca

SEQ ID NO: 2179331 - DNA, 25 bp, Homo sapien
catccactaagcttgcattcaggag

SEQ ID NO: 2179332 - DNA, 25 bp, Homo sapien
tggcagccctaaaccctcttgtgaa

SEQ ID NO: 2179333 - DNA, 25 bp, Homo sapien
catgtgttgcgagtcattttgtggg

SEQ ID NO: 2179334 - DNA, 25 bp, Homo sapien
gtttgcgagaccatgtggtgtggtc

SEQ ID NO: 2179335 - DNA, 25 bp, Homo sapien
ctgcaagggtttgcgagaccatgtg

SEQ ID NO: 2179336 - DNA, 25 bp, Homo sapien
caagggtttgcgagaccatgtggtg

SEQ ID NO: 2179337 - DNA, 25 bp, Homo sapien
agggtttgcgagaccatgtggtgtg

SEQ ID NO: 2179338 - DNA, 25 bp, Homo sapien
catgcgtcccgtcttgggcattgct

SEQ ID NO: 2179339 - DNA, 25 bp, Homo sapien
gcgtcccgtcttgggcattgctaag

SEQ ID NO: 2179340 - DNA, 25 bp, Homo sapien
cccgtcttgggcattgctaaggtgc

SEQ ID NO: 2179341 - DNA, 25 bp, Homo sapien
aacatgcgtcccgtcttgggcattg

SEQ ID NO: 2179342 - DNA, 25 bp, Homo sapien
tgctactcgcaacggtggcagcagt

SEQ ID NO: 2179343 - DNA, 25 bp, Homo sapien
actcgcaacggtggcagcagtaagg

SEQ ID NO: 2179344 - DNA, 25 bp, Homo sapien
ggagctgctactcgcaacggtggca

SEQ ID NO: 2179345 - DNA, 25 bp, Homo sapien
cgggagctgctactcgcaacggtgg

SEQ ID NO: 2179346 - DNA, 25 bp, Homo sapien
gagattttgagagcagactctggga

SEQ ID NO: 2179347 - DNA, 25 bp, Homo sapien
ctctcttgagacttgagggcgcagg

SEQ ID NO: 2179348 - DNA, 25 bp, Homo sapien
cccagtttgctattggcttggaaag

SEQ ID NO: 2179349 - DNA, 25 bp, Homo sapien
tacactggttgaattcccagtttgc

SEQ ID NO: 2179350 - DNA, 25 bp, Homo sapien
ccccaactgcaagatgcgttcctac

SEQ ID NO: 2179351 - DNA, 25 bp, Homo sapien
tgtccccaactgcaagatgcgttcc

SEQ ID NO: 2179352 - DNA, 25 bp, Homo sapien
gtccccaactgcaagatgcgttcct

SEQ ID NO: 2179353 - DNA, 25 bp, Homo sapien
tccccaactgcaagatgcgttccta

SEQ ID NO: 2179354 - DNA, 25 bp, Homo sapien
gcaccacggagggtagttgtaccat

SEQ ID NO: 2179355 - DNA, 25 bp, Homo sapien
taactcgagtagttccgacgtccag

SEQ ID NO: 2179356 - DNA, 25 bp, Homo sapien
gtagcaacagttctctgcaccacgg

SEQ ID NO: 2179357 - DNA, 25 bp, Homo sapien
gtaaggtagccagcgtcatggacag

SEQ ID NO: 2179358 - DNA, 25 bp, Homo sapien
ttcttaatgttcaatgacatcctag

SEQ ID NO: 2179359 - DNA, 25 bp, Homo sapien
taatgttcaatgacatcctagcatt

SEQ ID NO: 2179360 - DNA, 25 bp, Homo sapien
taaagatttcattgaagcagttctt

SEQ ID NO: 2179361 - DNA, 25 bp, Homo sapien
ataaagatttcattgaagcagttct

SEQ ID NO: 2179362 - DNA, 25 bp, Homo sapien
ctacacccgggattgatgtccatct

SEQ ID NO: 2179363 - DNA, 25 bp, Homo sapien
atagaggcagggcacagctgcgact

SEQ ID NO: 2179364 - DNA, 25 bp, Homo sapien
tctgtccagggccaaagctaggaat

SEQ ID NO: 2179365 - DNA, 25 bp, Homo sapien
tcagtggctacacccgggattgatg

SEQ ID NO: 2179366 - DNA, 25 bp, Homo sapien
agtctttttccacgttgcctctgca

SEQ ID NO: 2179367 - DNA, 25 bp, Homo sapien
tcagtctttttccacgttgcctctg

SEQ ID NO: 2179368 - DNA, 25 bp, Homo sapien
tcctcagtctttttccacgttgcct

SEQ ID NO: 2179369 - DNA, 25 bp, Homo sapien
ctttttccacgttgcctctgcaggg

SEQ ID NO: 2179370 - DNA, 25 bp, Homo sapien
aggaggttgggcgacagctggggct

SEQ ID NO: 2179371 - DNA, 25 bp, Homo sapien
ggaggttgggcgacagctggggctg

SEQ ID NO: 2179372 - DNA, 25 bp, Homo sapien
gccaggaggttgggcgacagctggg

SEQ ID NO: 2179373 - DNA, 25 bp, Homo sapien
caggaggttgggcgacagctggggc

SEQ ID NO: 2179374 - DNA, 25 bp, Homo sapien
gcactgttcgtttggcacacgcgca

SEQ ID NO: 2179375 - DNA, 25 bp, Homo sapien
tgtttggcacgagcacgcgtgcgct

SEQ ID NO: 2179376 - DNA, 25 bp, Homo sapien
tgtttggctcgagcgcgcacgcgct

SEQ ID NO: 2179377 - DNA, 25 bp, Homo sapien
tgtttggcacgagagtgcacgtgct

SEQ ID NO: 2179378 - DNA, 25 bp, Homo sapien
tccggccgacaccacgcgaggtagg

SEQ ID NO: 2179379 - DNA, 25 bp, Homo sapien
gacaccacgcgaggtaggcacccat

SEQ ID NO: 2179380 - DNA, 25 bp, Homo sapien
cggccgacaccacgcgaggtaggca

SEQ ID NO: 2179381 - DNA, 25 bp, Homo sapien
tggtccggccgacaccacgcgaggt

SEQ ID NO: 2179382 - DNA, 25 bp, Homo sapien
cactgaagtgttgggaatgttcccc

SEQ ID NO: 2179383 - DNA, 25 bp, Homo sapien
ttgacggagcctgcgtgagcttgcc

SEQ ID NO: 2179384 - DNA, 25 bp, Homo sapien
agatgggaccggtttcaggacgcct

SEQ ID NO: 2179385 - DNA, 25 bp, Homo sapien
tgatgggaaatgcaagcggagcctt

SEQ ID NO: 2179386 - DNA, 25 bp, Homo sapien
tgaaagcacattggaactggaaggc

SEQ ID NO: 2179387 - DNA, 25 bp, Homo sapien
tacagctttgggattcacggttagc

SEQ ID NO: 2179388 - DNA, 25 bp, Homo sapien
aaatcagggtgcagattccggctcg

SEQ ID NO: 2179389 - DNA, 25 bp, Homo sapien
tatgtgtaagggcatgctcgccggt

SEQ ID NO: 2179390 - DNA, 25 bp, Homo sapien
ggcagcgatgaaaacttcaggaata

SEQ ID NO: 2179391 - DNA, 25 bp, Homo sapien
ccaaggcagcgatgaaaacttcagg

SEQ ID NO: 2179392 - DNA, 25 bp, Homo sapien
tttcagaggggtatgccaaggcagc

SEQ ID NO: 2179393 - DNA, 25 bp, Homo sapien
gatgagagtaatttcatttcagagg

SEQ ID NO: 2179394 - DNA, 25 bp, Homo sapien
ggtggggtgatgtcagggcaggact

SEQ ID NO: 2179395 - DNA, 25 bp, Homo sapien
gcaggactgggggagctgagggctg

SEQ ID NO: 2179396 - DNA, 25 bp, Homo sapien
gggagctgagggctgtgtggaggca

SEQ ID NO: 2179397 - DNA, 25 bp, Homo sapien
ggaggcaggggcagtgcaaggagac

SEQ ID NO: 2179398 - DNA, 25 bp, Homo sapien
tagcatgctgggtgactgagtacac

SEQ ID NO: 2179399 - DNA, 25 bp, Homo sapien
tgtctcgtcgtggaagcaaaaatag

SEQ ID NO: 2179400 - DNA, 25 bp, Homo sapien
caaaaatagagtaatgccagcagga

SEQ ID NO: 2179401 - DNA, 25 bp, Homo sapien
ggtttcggtcctgtcatagcatgct

SEQ ID NO: 2179402 - DNA, 25 bp, Homo sapien
cactttctcagtgggtctcttgctc

SEQ ID NO: 2179403 - DNA, 25 bp, Homo sapien
agcctgccgtccactttctcagtgg

SEQ ID NO: 2179404 - DNA, 25 bp, Homo sapien
tgccgtccactttctcagtgggtct

SEQ ID NO: 2179405 - DNA, 25 bp, Homo sapien
cagtgggtctcttgctccatgtcat

SEQ ID NO: 2179406 - DNA, 25 bp, Homo sapien
taagtccgtaacagacatgcctgcc

SEQ ID NO: 2179407 - DNA, 25 bp, Homo sapien
accgtcattggactgcagggttgcg

SEQ ID NO: 2179408 - DNA, 25 bp, Homo sapien
gaaaaggtgcttatcagatgcaggg

SEQ ID NO: 2179409 - DNA, 25 bp, Homo sapien
cagggttgcgggatcttctcaaaga

SEQ ID NO: 2179410 - DNA, 25 bp, Homo sapien
gggcaggagcataatgcctccaact

SEQ ID NO: 2179411 - DNA, 25 bp, Homo sapien
gttagaagcggccaggttacatctt

SEQ ID NO: 2179412 - DNA, 25 bp, Homo sapien
gaaatgccttggatggattttcccc

SEQ ID NO: 2179413 - DNA, 25 bp, Homo sapien
cagcctggacttcatagtctgtatc

SEQ ID NO: 2179414 - DNA, 25 bp, Homo sapien
tacataccaacagatatgtgggaag

SEQ ID NO: 2179415 - DNA, 25 bp, Homo sapien
catgtacccatagtacagtgtttta

SEQ ID NO: 2179416 - DNA, 25 bp, Homo sapien
tgtttgactcctttagcgctctttg

SEQ ID NO: 2179417 - DNA, 25 bp, Homo sapien
gatattgggctaatttctggacatt

SEQ ID NO: 2179418 - DNA, 25 bp, Homo sapien
gaaagagctgcaaggcattctggga

SEQ ID NO: 2179419 - DNA, 25 bp, Homo sapien
ctgcaaggcattctgggatgtgagt

SEQ ID NO: 2179420 - DNA, 25 bp, Homo sapien
cattctgggatgtgagtggccgccc

SEQ ID NO: 2179421 - DNA, 25 bp, Homo sapien
attctgggatgtgagtggccgcccc

SEQ ID NO: 2179422 - DNA, 25 bp, Homo sapien
ttctgtggggtcactctctttaccc

SEQ ID NO: 2179423 - DNA, 25 bp, Homo sapien
tgttgagctagcatagttctgtggg

SEQ ID NO: 2179424 - DNA, 25 bp, Homo sapien
gttggcttctgttgagctagcatag

SEQ ID NO: 2179425 - DNA, 25 bp, Homo sapien
ttctgttgagctagcatagttctgt

SEQ ID NO: 2179426 - DNA, 25 bp, Homo sapien
cccttgctcttccttaagaagcgtg

SEQ ID NO: 2179427 - DNA, 25 bp, Homo sapien
agagtccccccgtactggaactcat

SEQ ID NO: 2179428 - DNA, 25 bp, Homo sapien
catagagctgccactcagagtcccc

SEQ ID NO: 2179429 - DNA, 25 bp, Homo sapien
cttaagaagcgtgacccttcatacc

SEQ ID NO: 2179430 - DNA, 25 bp, Homo sapien
cggtgaatgctgacactcttggtgc

SEQ ID NO: 2179431 - DNA, 25 bp, Homo sapien
tatgtgaactcagagcgacagctca

SEQ ID NO: 2179432 - DNA, 25 bp, Homo sapien
catttctggcaagtccccggtgaat

SEQ ID NO: 2179433 - DNA, 25 bp, Homo sapien
tgggaaacattcctaacgagcgtct

SEQ ID NO: 2179434 - DNA, 25 bp, Homo sapien
tgtgtggtgatcaaaagaaggcctc

SEQ ID NO: 2179435 - DNA, 25 bp, Homo sapien
gtgaggacacgagccacctggagtt

SEQ ID NO: 2179436 - DNA, 25 bp, Homo sapien
tagaacctccacacggtaatatggg

SEQ ID NO: 2179437 - DNA, 25 bp, Homo sapien
taatatgggcaacgtaggacacgga

SEQ ID NO: 2179438 - DNA, 25 bp, Homo sapien
ccaccggaccgactggctgcagctg

SEQ ID NO: 2179439 - DNA, 25 bp, Homo sapien
atcgcctcttttccgcacacaaccg

SEQ ID NO: 2179440 - DNA, 25 bp, Homo sapien
tgagttgattcagggctcaaggttc

SEQ ID NO: 2179441 - DNA, 25 bp, Homo sapien
ggacaaccagacaccaccggaccga

SEQ ID NO: 2179442 - DNA, 25 bp, Homo sapien
gccgggacaggggtgcttgtgtccg

SEQ ID NO: 2179443 - DNA, 25 bp, Homo sapien
ggacaggggtgcttgtgtccgccac

SEQ ID NO: 2179444 - DNA, 25 bp, Homo sapien
cgggacaggggtgcttgtgtccgcc

SEQ ID NO: 2179445 - DNA, 25 bp, Homo sapien
ctgccgggacaggggtgcttgtgtc

SEQ ID NO: 2179446 - DNA, 25 bp, Homo sapien
gctttccgccaggtgacggtataag

SEQ ID NO: 2179447 - DNA, 25 bp, Homo sapien
gccaggtgacggtataagcccatca

SEQ ID NO: 2179448 - DNA, 25 bp, Homo sapien
gtgacggtataagcccatcaaatag

SEQ ID NO: 2179449 - DNA, 25 bp, Homo sapien
atagtttgagagtacaatatttggc

SEQ ID NO: 2179450 - DNA, 25 bp, Homo sapien
tccagcgttacagcccaagagagct

SEQ ID NO: 2179451 - DNA, 25 bp, Homo sapien
ttccagcgttacagcccaagagagc

SEQ ID NO: 2179452 - DNA, 25 bp, Homo sapien
cttccagcgttacagcccaagagag

SEQ ID NO: 2179453 - DNA, 25 bp, Homo sapien
gtttgcttgcatttagattttgatc

SEQ ID NO: 2179454 - DNA, 25 bp, Homo sapien
tttgtttgcttgcatttagattttg

SEQ ID NO: 2179455 - DNA, 25 bp, Homo sapien
tgcttgcatttagattttgatccat

SEQ ID NO: 2179456 - DNA, 25 bp, Homo sapien
ttgcttgcatttagattttgatcca

SEQ ID NO: 2179457 - DNA, 25 bp, Homo sapien
tcggccaggagaccacatagtcact

SEQ ID NO: 2179458 - DNA, 25 bp, Homo sapien
gagtatggggtcaactagatttacc

SEQ ID NO: 2179459 - DNA, 25 bp, Homo sapien
gtatggtgtttccaggcggcccgga

SEQ ID NO: 2179460 - DNA, 25 bp, Homo sapien
ctctgtcctgtggacgggtgcctgt

SEQ ID NO: 2179461 - DNA, 25 bp, Homo sapien
tggcaaagcagttgttaaggtaacc

SEQ ID NO: 2179462 - DNA, 25 bp, Homo sapien
cagtgggttccattagcaaccaggc

SEQ ID NO: 2179463 - DNA, 25 bp, Homo sapien
caaccaggctcaagaatgggaccag

SEQ ID NO: 2179464 - DNA, 25 bp, Homo sapien
ggtaaccggtgacctgactgaacag

SEQ ID NO: 2179465 - DNA, 25 bp, Homo sapien
tagaccactgatttctctatgctcc

SEQ ID NO: 2179466 - DNA, 25 bp, Homo sapien
gatagtgtgccgctttccactttta

SEQ ID NO: 2179467 - DNA, 25 bp, Homo sapien
ccttccacttggtaatagaccactg

SEQ ID NO: 2179468 - DNA, 25 bp, Homo sapien
tctctatgctcctccttgtgatagt

SEQ ID NO: 2179469 - DNA, 25 bp, Homo sapien
gagtaaactgcggtattgccattcc

SEQ ID NO: 2179470 - DNA, 25 bp, Homo sapien
attcccctgctttcgcatacatgtg

SEQ ID NO: 2179471 - DNA, 25 bp, Homo sapien
gctttcgcatacatgtgaatgagca

SEQ ID NO: 2179472 - DNA, 25 bp, Homo sapien
aactgcggtattgccattcccctgc

SEQ ID NO: 2179473 - DNA, 25 bp, Homo sapien
tggggaaggggatagcccagggctc

SEQ ID NO: 2179474 - DNA, 25 bp, Homo sapien
aagactttagtgcatttggggaagg

SEQ ID NO: 2179475 - DNA, 25 bp, Homo sapien
ctgaaagactttagtgcatttgggg

SEQ ID NO: 2179476 - DNA, 25 bp, Homo sapien
gaaagactttagtgcatttggggaa

SEQ ID NO: 2179477 - DNA, 25 bp, Homo sapien
gaactttttcccatgcgaaggtctg

SEQ ID NO: 2179478 - DNA, 25 bp, Homo sapien
tgcaggtacggatatgtggagtcac

SEQ ID NO: 2179479 - DNA, 25 bp, Homo sapien
cccatgtgatgtggacagacgtgaa

SEQ ID NO: 2179480 - DNA, 25 bp, Homo sapien
tctatcaatgactgtaaaccgtgca

SEQ ID NO: 2179481 - DNA, 25 bp, Homo sapien
tggttgagtgaggagactaaacagc

SEQ ID NO: 2179482 - DNA, 25 bp, Homo sapien
catgacgagcggtgttttgtgtcca

SEQ ID NO: 2179483 - DNA, 25 bp, Homo sapien
tctcttaggagtaaagccgatgtgc

SEQ ID NO: 2179484 - DNA, 25 bp, Homo sapien
gatgtgctttaggatcattctcagc

SEQ ID NO: 2179485 - DNA, 25 bp, Homo sapien
gatgcagacattagaacatcctgtc

SEQ ID NO: 2179486 - DNA, 25 bp, Homo sapien
tatgtactggctaccaccagtgcag

SEQ ID NO: 2179487 - DNA, 25 bp, Homo sapien
gatgccctcaatgatgcagacatta

SEQ ID NO: 2179488 - DNA, 25 bp, Homo sapien
gggaccctggactggatgccctcaa

SEQ ID NO: 2179489 - DNA, 25 bp, Homo sapien
ctctgtgtggatacgatctctccct

SEQ ID NO: 2179490 - DNA, 25 bp, Homo sapien
cctccacttgtgtaggttgccttcg

SEQ ID NO: 2179491 - DNA, 25 bp, Homo sapien
ggcctgcctgttttcgtgaaagggc

SEQ ID NO: 2179492 - DNA, 25 bp, Homo sapien
taggttgccttcgaggccaaaagtg

SEQ ID NO: 2179493 - DNA, 25 bp, Homo sapien
taagaacatccgtgccttgacctga

SEQ ID NO: 2179494 - DNA, 25 bp, Homo sapien
ttgtctgcatgagagtaggaaccca

SEQ ID NO: 2179495 - DNA, 25 bp, Homo sapien
gggtgaaactgctcaacaatggact

SEQ ID NO: 2179496 - DNA, 25 bp, Homo sapien
catttatgcttcgtagaacactggg

SEQ ID NO: 2179497 - DNA, 25 bp, Homo sapien
ggctccatcgttctggtgaactcca

SEQ ID NO: 2179498 - DNA, 25 bp, Homo sapien
cagcagggagccacgtctggcactt

SEQ ID NO: 2179499 - DNA, 25 bp, Homo sapien
ttagtcattgtgtgtgccggaggtt

SEQ ID NO: 2179500 - DNA, 25 bp, Homo sapien
ccggaggttgcagttaatgtcattc

SEQ ID NO: 2179501 - DNA, 25 bp, Homo sapien
ggtaacactgcctggccaccttgtc

SEQ ID NO: 2179502 - DNA, 25 bp, Homo sapien
ttgatggcagaagatgcttttgggt

SEQ ID NO: 2179503 - DNA, 25 bp, Homo sapien
tataatgtccctgagcactggcttg

SEQ ID NO: 2179504 - DNA, 25 bp, Homo sapien
tgtccctgagcactggcttgatggc

SEQ ID NO: 2179505 - DNA, 25 bp, Homo sapien
tctctgtagcctgcaagagtttgtg

SEQ ID NO: 2179506 - DNA, 25 bp, Homo sapien
aaactgcggagtgtgggtgctggaa

SEQ ID NO: 2179507 - DNA, 25 bp, Homo sapien
tctgagtattcgtctgctcttgcct

SEQ ID NO: 2179508 - DNA, 25 bp, Homo sapien
gaggagcgattgtctcttctgagta

SEQ ID NO: 2179509 - DNA, 25 bp, Homo sapien
ctgtccttttcccactagcatagtg

SEQ ID NO: 2179510 - DNA, 25 bp, Homo sapien
ctgcacaggtgctgcctgtcctttt

SEQ ID NO: 2179511 - DNA, 25 bp, Homo sapien
acacagggagcaaggccttcaccct

SEQ ID NO: 2179512 - DNA, 25 bp, Homo sapien
ggagacctccagcagtgtctgcaga

SEQ ID NO: 2179513 - DNA, 25 bp, Homo sapien
agtccaatcaaaggcctggcgagga

SEQ ID NO: 2179514 - DNA, 25 bp, Homo sapien
gcctgaggaagtccaatcaaaggcc

SEQ ID NO: 2179515 - DNA, 25 bp, Homo sapien
tgaggaagtccaatcaaaggcctgg

SEQ ID NO: 2179516 - DNA, 25 bp, Homo sapien
tggcgaggacgagactggccagagg

SEQ ID NO: 2179517 - DNA, 25 bp, Homo sapien
tgcacgtctccagtccccttggtgt

SEQ ID NO: 2179518 - DNA, 25 bp, Homo sapien
tgaagtgttcttgtcggtggagtcc

SEQ ID NO: 2179519 - DNA, 25 bp, Homo sapien
tggagattgcagttcgctgagtcat

SEQ ID NO: 2179520 - DNA, 25 bp, Homo sapien
tctggttcccagatgcggcggtgca

SEQ ID NO: 2179521 - DNA, 25 bp, Homo sapien
tacaaactcgtcctaagaatcggtc

SEQ ID NO: 2179522 - DNA, 25 bp, Homo sapien
tgcaggaaagctgcgtatcatacac

SEQ ID NO: 2179523 - DNA, 25 bp, Homo sapien
catggtccagtgaattgttacaaac

SEQ ID NO: 2179524 - DNA, 25 bp, Homo sapien
tgccacttctaatcataatgcgggt

SEQ ID NO: 2179525 - DNA, 25 bp, Homo sapien
ttttgacacctgaaatgcgaacgct

SEQ ID NO: 2179526 - DNA, 25 bp, Homo sapien
gctggaagacagaaacgaagtgagt

SEQ ID NO: 2179527 - DNA, 25 bp, Homo sapien
cgaacgctatgtgctaaatttgtca

SEQ ID NO: 2179528 - DNA, 25 bp, Homo sapien
ttcatgcagtagaacggaacttggg

SEQ ID NO: 2179529 - DNA, 25 bp, Homo sapien
gggcaacaaacaaccatccacactg

SEQ ID NO: 2179530 - DNA, 25 bp, Homo sapien
actgccggaccctaggctgttcagg

SEQ ID NO: 2179531 - DNA, 25 bp, Homo sapien
tatatgtgcccacaacagaggtggg

SEQ ID NO: 2179532 - DNA, 25 bp, Homo sapien
ctaaatgggagggattgaggctact

SEQ ID NO: 2179533 - DNA, 25 bp, Homo sapien
gcctgtgtccgcttttgcagctcaa

SEQ ID NO: 2179534 - DNA, 25 bp, Homo sapien
tgactagttcagactgccacgccaa

SEQ ID NO: 2179535 - DNA, 25 bp, Homo sapien
tatcagtccaaggagccctcgtgtt

SEQ ID NO: 2179536 - DNA, 25 bp, Homo sapien
gaaggacaccaagcgccctatgttg

SEQ ID NO: 2179537 - DNA, 25 bp, Homo sapien
ggccctccgggctgaaatcgacatt

SEQ ID NO: 2179538 - DNA, 25 bp, Homo sapien
tttctctggacacgaatgctccggg

SEQ ID NO: 2179539 - DNA, 25 bp, Homo sapien
catttcagccaagccggaatacgga

SEQ ID NO: 2179540 - DNA, 25 bp, Homo sapien
gaaaatccggtcacagaattccgtg

SEQ ID NO: 2179541 - DNA, 25 bp, Homo sapien
caaaggggtttagtgtgatgacgca

SEQ ID NO: 2179542 - DNA, 25 bp, Homo sapien
gtgatgacgcatctcttctaccaac

SEQ ID NO: 2179543 - DNA, 25 bp, Homo sapien
gggtttagtgtgatgacgcatctct

SEQ ID NO: 2179544 - DNA, 25 bp, Homo sapien
tcctctccacctgtcagccttgcag

SEQ ID NO: 2179545 - DNA, 25 bp, Homo sapien
ggacttgaacccctcttgaagctgc

SEQ ID NO: 2179546 - DNA, 25 bp, Homo sapien
gggacttgaacccctcttgaagctg

SEQ ID NO: 2179547 - DNA, 25 bp, Homo sapien
tctgggttgatttggctaaatatga

SEQ ID NO: 2179548 - DNA, 25 bp, Homo sapien
gagccttgcccgcagtttcgcgatg

SEQ ID NO: 2179549 - DNA, 25 bp, Homo sapien
ttcgcgatgcttcccgatgggctga

SEQ ID NO: 2179550 - DNA, 25 bp, Homo sapien
caacgctgtgtttccttatggggga

SEQ ID NO: 2179551 - DNA, 25 bp, Homo sapien
cccccagtgccctctccatggaggc

SEQ ID NO: 2179552 - DNA, 25 bp, Homo sapien
tgtaggagaaacgtggcccccagtg

SEQ ID NO: 2179553 - DNA, 25 bp, Homo sapien
cagtgccctctccatggaggcacat

SEQ ID NO: 2179554 - DNA, 25 bp, Homo sapien
gtaggagaaacgtggcccccagtgc

SEQ ID NO: 2179555 - DNA, 25 bp, Homo sapien
tggccctgggtccataggaagcctg

SEQ ID NO: 2179556 - DNA, 25 bp, Homo sapien
cgtggaacgaatggctgcatggccc

SEQ ID NO: 2179557 - DNA, 25 bp, Homo sapien
tcatcctatttccaacacgtgggct

SEQ ID NO: 2179558 - DNA, 25 bp, Homo sapien
ggtttcaacgtggaacgaatggctg

SEQ ID NO: 2179559 - DNA, 25 bp, Homo sapien
acctggctcccgtcactgtcagtgc

SEQ ID NO: 2179560 - DNA, 25 bp, Homo sapien
tggctcccgtcactgtcagtgcctt

SEQ ID NO: 2179561 - DNA, 25 bp, Homo sapien
ccaccacctggctcccgtcactgtc

SEQ ID NO: 2179562 - DNA, 25 bp, Homo sapien
cacctggctcccgtcactgtcagtg

SEQ ID NO: 2179563 - DNA, 25 bp, Homo sapien
tcgtccatgtgtgcggccctgcatg

SEQ ID NO: 2179564 - DNA, 25 bp, Homo sapien
tggttccaagttagccactaccgtg

SEQ ID NO: 2179565 - DNA, 25 bp, Homo sapien
atgggtcccacgctcatccccatag

SEQ ID NO: 2179566 - DNA, 25 bp, Homo sapien
gccagattgggttctgtgccacatc

SEQ ID NO: 2179567 - DNA, 25 bp, Homo sapien
ttatttttagctgccgtctgaccat

SEQ ID NO: 2179568 - DNA, 25 bp, Homo sapien
aaaagcagctcggtaaaggctgctt

SEQ ID NO: 2179569 - DNA, 25 bp, Homo sapien
taaaggctgcttgtgatgagtcact

SEQ ID NO: 2179570 - DNA, 25 bp, Homo sapien
ctctcgtaatccacaaggttggaag

SEQ ID NO: 2179571 - DNA, 25 bp, Homo sapien
taagggcaccctggaagtgacatgt

SEQ ID NO: 2179572 - DNA, 25 bp, Homo sapien
agtcgtttttagtgcatcccctgcg

SEQ ID NO: 2179573 - DNA, 25 bp, Homo sapien
cagaatgtgctagaagtcgaagtca

SEQ ID NO: 2179574 - DNA, 25 bp, Homo sapien
tcccctgcgattgcatgatgctcat

SEQ ID NO: 2179575 - DNA, 25 bp, Homo sapien
cttgggcagttgactgaagggtcct

SEQ ID NO: 2179576 - DNA, 25 bp, Homo sapien
gacctcactgtgtaggcggtgtcca

SEQ ID NO: 2179577 - DNA, 25 bp, Homo sapien
aagggtcctggactgcttgaagccc

SEQ ID NO: 2179578 - DNA, 25 bp, Homo sapien
ccttttggagaactgggccatctga

SEQ ID NO: 2179579 - DNA, 25 bp, Homo sapien
tttcttctgggcctatatgacatgc

SEQ ID NO: 2179580 - DNA, 25 bp, Homo sapien
tctgggcctatatgacatgcccgta

SEQ ID NO: 2179581 - DNA, 25 bp, Homo sapien
tatgacatgcccgtaattttgaggt

SEQ ID NO: 2179582 - DNA, 25 bp, Homo sapien
tgcccgtaattttgaggtaagtgac

SEQ ID NO: 2179583 - DNA, 25 bp, Homo sapien
gggaagcactgaaggacaggctttc

SEQ ID NO: 2179584 - DNA, 25 bp, Homo sapien
gatggcaattggtgatatctgttgt

SEQ ID NO: 2179585 - DNA, 25 bp, Homo sapien
agcactgaaggacaggctttctctc

SEQ ID NO: 2179586 - DNA, 25 bp, Homo sapien
tgtacataactctcatcatgggaag

SEQ ID NO: 2179587 - DNA, 25 bp, Homo sapien
gccagaggcagcataatgagtaggg

SEQ ID NO: 2179588 - DNA, 25 bp, Homo sapien
agtagccagaggcagcataatgagt

SEQ ID NO: 2179589 - DNA, 25 bp, Homo sapien
tgctcctagccactttggagtagcc

SEQ ID NO: 2179590 - DNA, 25 bp, Homo sapien
ttcagctctgctcctagccactttg

SEQ ID NO: 2179591 - DNA, 25 bp, Homo sapien
cagcggagagtgtaattgggcaaaa

SEQ ID NO: 2179592 - DNA, 25 bp, Homo sapien
tcatccagcgggtgttcatgccatg

SEQ ID NO: 2179593 - DNA, 25 bp, Homo sapien
catctcacagtatctatggctcatc

SEQ ID NO: 2179594 - DNA, 25 bp, Homo sapien
ctatggctcatccagcgggtgttca

SEQ ID NO: 2179595 - DNA, 25 bp, Homo sapien
cttccagagtagggtgtcaatatct

SEQ ID NO: 2179596 - DNA, 25 bp, Homo sapien
tccagagtagggtgtcaatatctat

SEQ ID NO: 2179597 - DNA, 25 bp, Homo sapien
cagagtagggtgtcaatatctatcc

SEQ ID NO: 2179598 - DNA, 25 bp, Homo sapien
gagtagggtgtcaatatctatcccg

SEQ ID NO: 2179599 - DNA, 25 bp, Homo sapien
tacgatcgaagctgcatagagagtt

SEQ ID NO: 2179600 - DNA, 25 bp, Homo sapien
atctgatgattcaaatccaatgcca

SEQ ID NO: 2179601 - DNA, 25 bp, Homo sapien
ctacgatcgaagctgcatagagagt

SEQ ID NO: 2179602 - DNA, 25 bp, Homo sapien
gagttgaggtttcatctgatgattc

SEQ ID NO: 2179603 - DNA, 25 bp, Homo sapien
gtttattctggacatcctggggcaa

SEQ ID NO: 2179604 - DNA, 25 bp, Homo sapien
ttctggacatcctggggcaagccct

SEQ ID NO: 2179605 - DNA, 25 bp, Homo sapien
taataactgataatgtttattctgg

SEQ ID NO: 2179606 - DNA, 25 bp, Homo sapien
gggcaagccctcccttgacatagcc

SEQ ID NO: 2179607 - DNA, 25 bp, Homo sapien
aggcaggaatgactaaggagagaaa

SEQ ID NO: 2179608 - DNA, 25 bp, Homo sapien
gagaaaggcatgtcctgttgtagcc

SEQ ID NO: 2179609 - DNA, 25 bp, Homo sapien
tcgtttgtggccctgttgataggca

SEQ ID NO: 2179610 - DNA, 25 bp, Homo sapien
gggtccttgcttctcgtaggcttcg

SEQ ID NO: 2179611 - DNA, 25 bp, Homo sapien
tgaacgtctttctttgctgatggcc

SEQ ID NO: 2179612 - DNA, 25 bp, Homo sapien
gatactccaaactgagccacccagt

SEQ ID NO: 2179613 - DNA, 25 bp, Homo sapien
ttccacagcccattttgtgtcttgc

SEQ ID NO: 2179614 - DNA, 25 bp, Homo sapien
gctgatggccttgttatttgtttca

SEQ ID NO: 2179615 - DNA, 25 bp, Homo sapien
ttttcaaaagtagaattctgatcat

SEQ ID NO: 2179616 - DNA, 25 bp, Homo sapien
atattttttcaaaagtagaattctg

SEQ ID NO: 2179617 - DNA, 25 bp, Homo sapien
ttttttcaaaagtagaattctgatc

SEQ ID NO: 2179618 - DNA, 25 bp, Homo sapien
tattttttcaaaagtagaattctga

SEQ ID NO: 2179619 - DNA, 25 bp, Homo sapien
cctttatctctgttagggtcgccct

SEQ ID NO: 2179620 - DNA, 25 bp, Homo sapien
tcagtgtaaatgggctcctttatct

SEQ ID NO: 2179621 - DNA, 25 bp, Homo sapien
gggtcgccctttactccgtatgtca

SEQ ID NO: 2179622 - DNA, 25 bp, Homo sapien
tcttttgaatgtctttccgaggatt

SEQ ID NO: 2179623 - DNA, 25 bp, Homo sapien
ggttaagaaggctataattccaaga

SEQ ID NO: 2179624 - DNA, 25 bp, Homo sapien
aagaaggctataattccaagaatac

SEQ ID NO: 2179625 - DNA, 25 bp, Homo sapien
tatggttaagaaggctataattcca

SEQ ID NO: 2179626 - DNA, 25 bp, Homo sapien
gctataattccaagaatacaacatt

SEQ ID NO: 2179627 - DNA, 25 bp, Homo sapien
tgcagctcagacaacaacaggcatg

SEQ ID NO: 2179628 - DNA, 25 bp, Homo sapien
taaggcgcccttacagctgaaacca

SEQ ID NO: 2179629 - DNA, 25 bp, Homo sapien
aacaggcatgccacccataaggcgc

SEQ ID NO: 2179630 - DNA, 25 bp, Homo sapien
tgttagtgtcagaaagctgtgcttt

SEQ ID NO: 2179631 - DNA, 25 bp, Homo sapien
tgagagcagccttaggcaaaaccaa

SEQ ID NO: 2179632 - DNA, 25 bp, Homo sapien
catactccctctctgcttggggtga

SEQ ID NO: 2179633 - DNA, 25 bp, Homo sapien
ccatactccctctctgcttggggtg

SEQ ID NO: 2179634 - DNA, 25 bp, Homo sapien
gtgagagcagccttaggcaaaacca

SEQ ID NO: 2179635 - DNA, 25 bp, Homo sapien
gaagacctctgagcagtgtgcatgt

SEQ ID NO: 2179636 - DNA, 25 bp, Homo sapien
caaaggagtctgtgtggattcatga

SEQ ID NO: 2179637 - DNA, 25 bp, Homo sapien
caagaagacctctgagcagtgtgca

SEQ ID NO: 2179638 - DNA, 25 bp, Homo sapien
tcccagagaattggtaggcctctga

SEQ ID NO: 2179639 - DNA, 25 bp, Homo sapien
tctaaagcgtcttccattgtgcctt

SEQ ID NO: 2179640 - DNA, 25 bp, Homo sapien
ttggaactgaccttgcagcagcctc

SEQ ID NO: 2179641 - DNA, 25 bp, Homo sapien
gaaggaggctccacatctactctaa

SEQ ID NO: 2179642 - DNA, 25 bp, Homo sapien
tcatctctgtagctgcatggactcc

SEQ ID NO: 2179643 - DNA, 25 bp, Homo sapien
ccatcttccacctttctcctctctg

SEQ ID NO: 2179644 - DNA, 25 bp, Homo sapien
ctttctcctctctggcggcctgcag

SEQ ID NO: 2179645 - DNA, 25 bp, Homo sapien
tttctcctctctggcggcctgcagc

SEQ ID NO: 2179646 - DNA, 25 bp, Homo sapien
cacctttctcctctctggcggcctg

SEQ ID NO: 2179647 - DNA, 25 bp, Homo sapien
aagctttggtggtgcgggctgtgac

SEQ ID NO: 2179648 - DNA, 25 bp, Homo sapien
ctggcaagctttggtggtgcgggct

SEQ ID NO: 2179649 - DNA, 25 bp, Homo sapien
ggtggtgcgggctgtgacgatccca

SEQ ID NO: 2179650 - DNA, 25 bp, Homo sapien
tggtggtgcgggctgtgacgatccc

SEQ ID NO: 2179651 - DNA, 25 bp, Homo sapien
attggtaagagcagccagtacttca

SEQ ID NO: 2179652 - DNA, 25 bp, Homo sapien
ttggtaagagcagccagtacttcat

SEQ ID NO: 2179653 - DNA, 25 bp, Homo sapien
cattggtaagagcagccagtacttc

SEQ ID NO: 2179654 - DNA, 25 bp, Homo sapien
cccagtgagttggacaatggctaca

SEQ ID NO: 2179655 - DNA, 25 bp, Homo sapien
gggacacgcagaatatggacccagt

SEQ ID NO: 2179656 - DNA, 25 bp, Homo sapien
ggacaatggctacatcatcaacaaa

SEQ ID NO: 2179657 - DNA, 25 bp, Homo sapien
gaatatggacccagtgagttggaca

SEQ ID NO: 2179658 - DNA, 25 bp, Homo sapien
gatggaattccacggtcactggagg

SEQ ID NO: 2179659 - DNA, 25 bp, Homo sapien
tggctgacccagtatcccaggtaaa

SEQ ID NO: 2179660 - DNA, 25 bp, Homo sapien
tgcgaagtgaaaacgcaggcccctt

SEQ ID NO: 2179661 - DNA, 25 bp, Homo sapien
gagcattaaatcaggcttagggccc

SEQ ID NO: 2179662 - DNA, 25 bp, Homo sapien
cagtgacttatgtttggatgtggta

SEQ ID NO: 2179663 - DNA, 25 bp, Homo sapien
taacttttgaggcatgaatctagca

SEQ ID NO: 2179664 - DNA, 25 bp, Homo sapien
ggagagcaaaatcaatccaaagtgg

SEQ ID NO: 2179665 - DNA, 25 bp, Homo sapien
tactagactatagagggacttctac

SEQ ID NO: 2179666 - DNA, 25 bp, Homo sapien
tttcacaggtctaaaggaactatta

SEQ ID NO: 2179667 - DNA, 25 bp, Homo sapien
ggagcgggaaataggagaactatta

SEQ ID NO: 2179668 - DNA, 25 bp, Homo sapien
aaaggaaggataaagtagattctat

SEQ ID NO: 2179669 - DNA, 25 bp, Homo sapien
tgtttatttactcagccccggagac

SEQ ID NO: 2179670 - DNA, 25 bp, Homo sapien
tcaattgcaatctcattcttaatgt

SEQ ID NO: 2179671 - DNA, 25 bp, Homo sapien
aaaatgactattttcaattgcaatc

SEQ ID NO: 2179672 - DNA, 25 bp, Homo sapien
cattcttaatgttcttccagaaccc

SEQ ID NO: 2179673 - DNA, 25 bp, Homo sapien
aatcaataggattcaaaatgactat

SEQ ID NO: 2179674 - DNA, 25 bp, Homo sapien
gcaaggtccgaggtccaaaatcaac

SEQ ID NO: 2179675 - DNA, 25 bp, Homo sapien
aaatgtggccaaaggattcagaacc

SEQ ID NO: 2179676 - DNA, 25 bp, Homo sapien
tatgggcctcttaatgtgcaaaacc

SEQ ID NO: 2179677 - DNA, 25 bp, Homo sapien
tgagccctatctgagccgatttcgg

SEQ ID NO: 2179678 - DNA, 25 bp, Homo sapien
cagacacttgttccacacggtgaag

SEQ ID NO: 2179679 - DNA, 25 bp, Homo sapien
tagagccgttatcatagtccagcag

SEQ ID NO: 2179680 - DNA, 25 bp, Homo sapien
ggcaaacaggctgcgcaaatgcgac

SEQ ID NO: 2179681 - DNA, 25 bp, Homo sapien
tagggagcccagtgataatcgtcag

SEQ ID NO: 2179682 - DNA, 25 bp, Homo sapien
catgcttcggggctgatttgtaagc

SEQ ID NO: 2179683 - DNA, 25 bp, Homo sapien
ctgatttgtaagcaagaccaatggc

SEQ ID NO: 2179684 - DNA, 25 bp, Homo sapien
tcttcccaatccattcatgcttcgg

SEQ ID NO: 2179685 - DNA, 25 bp, Homo sapien
tttgtaagcaagaccaatggcatac

SEQ ID NO: 2179686 - DNA, 25 bp, Homo sapien
ccaatctagcccagagcctagtggg

SEQ ID NO: 2179687 - DNA, 25 bp, Homo sapien
aattgcaaatgccaatctagcccag

SEQ ID NO: 2179688 - DNA, 25 bp, Homo sapien
catcctctggcaggatgttggaaca

SEQ ID NO: 2179689 - DNA, 25 bp, Homo sapien
taattttgccccactgcagctaaaa

SEQ ID NO: 2179690 - DNA, 25 bp, Homo sapien
tactgtcaagttatcatgggacacc

SEQ ID NO: 2179691 - DNA, 25 bp, Homo sapien
taatgccggccactatcaataaaca

SEQ ID NO: 2179692 - DNA, 25 bp, Homo sapien
tcgatgagcagatttgggatccagt

SEQ ID NO: 2179693 - DNA, 25 bp, Homo sapien
ggacaccttcagttttcgatgagca

SEQ ID NO: 2179694 - DNA, 25 bp, Homo sapien
cagctatcagccgaattacacagac

SEQ ID NO: 2179695 - DNA, 25 bp, Homo sapien
gcttgatgttgggtactatcatcca

SEQ ID NO: 2179696 - DNA, 25 bp, Homo sapien
tggccttgaccatgaagatgtactt

SEQ ID NO: 2179697 - DNA, 25 bp, Homo sapien
tgcagaccgtgcaccgtgtagtggt

SEQ ID NO: 2179698 - DNA, 25 bp, Homo sapien
caaagccaatcagacatggtgcagt

SEQ ID NO: 2179699 - DNA, 25 bp, Homo sapien
attctccctgccctgtatatccagg

SEQ ID NO: 2179700 - DNA, 25 bp, Homo sapien
tggtagtcatgtacgaaaaactgac

SEQ ID NO: 2179701 - DNA, 25 bp, Homo sapien
actaacgtagatgtggcagattgca

SEQ ID NO: 2179702 - DNA, 25 bp, Homo sapien
tgaaaaagccagcttgaagcaagaa

SEQ ID NO: 2179703 - DNA, 25 bp, Homo sapien
tgatccaatcaaagaagggtcattt

SEQ ID NO: 2179704 - DNA, 25 bp, Homo sapien
tcagcagagcaataagaggcacaat

SEQ ID NO: 2179705 - DNA, 25 bp, Homo sapien
tgcaggaaaacatccacaaatagtt

SEQ ID NO: 2179706 - DNA, 25 bp, Homo sapien
tgaacctatatgtggattaatacta

SEQ ID NO: 2179707 - DNA, 25 bp, Homo sapien
tttcatcaatatttagccagctgtt

SEQ ID NO: 2179708 - DNA, 25 bp, Homo sapien
ccatgtggtttgctagaggtcatta

SEQ ID NO: 2179709 - DNA, 25 bp, Homo sapien
taatgtagtacaagtgagtgctatc

SEQ ID NO: 2179710 - DNA, 25 bp, Homo sapien
taacgacgttggcttgtccggtgaa

SEQ ID NO: 2179711 - DNA, 25 bp, Homo sapien
ggtccaatgcacagtgatggtgtca

SEQ ID NO: 2179712 - DNA, 25 bp, Homo sapien
tgaactcatcatcggaggtccaatg

SEQ ID NO: 2179713 - DNA, 25 bp, Homo sapien
tgtactggagctcgtaggagaccac

SEQ ID NO: 2179714 - DNA, 25 bp, Homo sapien
caaatgtgtcattgaggttgatttc

SEQ ID NO: 2179715 - DNA, 25 bp, Homo sapien
tcttctctcgggaaaaatctaaggc

SEQ ID NO: 2179716 - DNA, 25 bp, Homo sapien
taaggtaatccagacattctagcag

SEQ ID NO: 2179717 - DNA, 25 bp, Homo sapien
ctaaggcaaaggtgtcaaatgtgtc

SEQ ID NO: 2179718 - DNA, 25 bp, Homo sapien
aaatgtcaagatgactttcaacatc

SEQ ID NO: 2179719 - DNA, 25 bp, Homo sapien
aaacaatgtttcagaaatgtcaaga

SEQ ID NO: 2179720 - DNA, 25 bp, Homo sapien
tgtttcagaaatgtcaagatgactt

SEQ ID NO: 2179721 - DNA, 25 bp, Homo sapien
cagaaatgtcaagatgactttcaac

SEQ ID NO: 2179722 - DNA, 25 bp, Homo sapien
tctcggtgatattcttagcagtctg

SEQ ID NO: 2179723 - DNA, 25 bp, Homo sapien
gcagtctgtaggaaacgcgcatgat

SEQ ID NO: 2179724 - DNA, 25 bp, Homo sapien
ctccttcagagagtgttccgcttgg

SEQ ID NO: 2179725 - DNA, 25 bp, Homo sapien
gagccagtttgcgaagcctcatcac

SEQ ID NO: 2179726 - DNA, 25 bp, Homo sapien
gaacgtcatttccaggcactttgtg

SEQ ID NO: 2179727 - DNA, 25 bp, Homo sapien
tgtcttacagacaaggctggcccaa

SEQ ID NO: 2179728 - DNA, 25 bp, Homo sapien
gagagtcgcctgtgaaaatatcgga

SEQ ID NO: 2179729 - DNA, 25 bp, Homo sapien
gaaggcatccagtacgcgcaggata

SEQ ID NO: 2179730 - DNA, 25 bp, Homo sapien
tgacctcgtcaattgcagaatttga

SEQ ID NO: 2179731 - DNA, 25 bp, Homo sapien
ttggtgacctcgtcaattgcagaat

SEQ ID NO: 2179732 - DNA, 25 bp, Homo sapien
gtgacctcgtcaattgcagaatttg

SEQ ID NO: 2179733 - DNA, 25 bp, Homo sapien
ggtgacctcgtcaattgcagaattt

SEQ ID NO: 2179734 - DNA, 25 bp, Homo sapien
ttgtcagaaggccccaccatccgtt

SEQ ID NO: 2179735 - DNA, 25 bp, Homo sapien
tccgttctttagactcaatgccctc

SEQ ID NO: 2179736 - DNA, 25 bp, Homo sapien
cccacttccaattgcttgtcagaag

SEQ ID NO: 2179737 - DNA, 25 bp, Homo sapien
caccatccgttctttagactcaatg

SEQ ID NO: 2179738 - DNA, 25 bp, Homo sapien
caaaattaggctgcgagttgttctt

SEQ ID NO: 2179739 - DNA, 25 bp, Homo sapien
gatgtttcaaaattaggctgcgagt

SEQ ID NO: 2179740 - DNA, 25 bp, Homo sapien
aattaggctgcgagttgttctttgc

SEQ ID NO: 2179741 - DNA, 25 bp, Homo sapien
ttcaaaattaggctgcgagttgttc

SEQ ID NO: 2179742 - DNA, 25 bp, Homo sapien
atgaagccttctatagcccatggca

SEQ ID NO: 2179743 - DNA, 25 bp, Homo sapien
gcttcaagaactatttatccacagg

SEQ ID NO: 2179744 - DNA, 25 bp, Homo sapien
caggcttcaagctaacaatgtgact

SEQ ID NO: 2179745 - DNA, 25 bp, Homo sapien
tatccacaggagctaaagccaaagc

SEQ ID NO: 2179746 - DNA, 25 bp, Homo sapien
gattccagatggacactcagtgctc

SEQ ID NO: 2179747 - DNA, 25 bp, Homo sapien
tcaggtggccatgtgtctgagaacc

SEQ ID NO: 2179748 - DNA, 25 bp, Homo sapien
gatgtgcacctatgatgcacgatga

SEQ ID NO: 2179749 - DNA, 25 bp, Homo sapien
cttccagaattaagagatgtgcacc

SEQ ID NO: 2179750 - DNA, 25 bp, Homo sapien
tgatcttggttccaataatctgtcg

SEQ ID NO: 2179751 - DNA, 25 bp, Homo sapien
tggttccaataatctgtcgtctttg

SEQ ID NO: 2179752 - DNA, 25 bp, Homo sapien
caatttggcttcttgacgtgatgca

SEQ ID NO: 2179753 - DNA, 25 bp, Homo sapien
gatcacactcctctgtcaatttggc

SEQ ID NO: 2179754 - DNA, 25 bp, Homo sapien
cttctctacatctagagtcagtttt

SEQ ID NO: 2179755 - DNA, 25 bp, Homo sapien
agtcagttttctttcgcgtcttgaa

SEQ ID NO: 2179756 - DNA, 25 bp, Homo sapien
tttctttcgcgtcttgaaatgcatc

SEQ ID NO: 2179757 - DNA, 25 bp, Homo sapien
tctctacatctagagtcagttttct

SEQ ID NO: 2179758 - DNA, 25 bp, Homo sapien
gccaatgactttctgatcctttaca

SEQ ID NO: 2179759 - DNA, 25 bp, Homo sapien
caatgactttctgatcctttacagt

SEQ ID NO: 2179760 - DNA, 25 bp, Homo sapien
gagttgctgacccactttctcctat

SEQ ID NO: 2179761 - DNA, 25 bp, Homo sapien
cctgtagggagttgctgacccactt

SEQ ID NO: 2179762 - DNA, 25 bp, Homo sapien
ctgtgatgaacattccagactctgg

SEQ ID NO: 2179763 - DNA, 25 bp, Homo sapien
cagactctggggcaaaagttagaca

SEQ ID NO: 2179764 - DNA, 25 bp, Homo sapien
atatgatgatatgagggtgctttgg

SEQ ID NO: 2179765 - DNA, 25 bp, Homo sapien
tgatgatatgagggtgctttgggtt

SEQ ID NO: 2179766 - DNA, 25 bp, Homo sapien
gccatttgcagagagctagccatga

SEQ ID NO: 2179767 - DNA, 25 bp, Homo sapien
catgactgagctccatagagtctgg

SEQ ID NO: 2179768 - DNA, 25 bp, Homo sapien
agagctagccatgactgagctccat

SEQ ID NO: 2179769 - DNA, 25 bp, Homo sapien
tttgggggccatttgcagagagcta

SEQ ID NO: 2179770 - DNA, 25 bp, Homo sapien
gacactggagagctgtacaataggg

SEQ ID NO: 2179771 - DNA, 25 bp, Homo sapien
ttacaatggcagtagaagggcaggc

SEQ ID NO: 2179772 - DNA, 25 bp, Homo sapien
gggctttgacaaaaggacagtgaag

SEQ ID NO: 2179773 - DNA, 25 bp, Homo sapien
gacagtgaagagcaaagctaatctg

SEQ ID NO: 2179774 - DNA, 25 bp, Homo sapien
gcaagagggtctactaagtgaacca

SEQ ID NO: 2179775 - DNA, 25 bp, Homo sapien
gaatagcgtcttgtaaattcaagcc

SEQ ID NO: 2179776 - DNA, 25 bp, Homo sapien
caaggctcaacatgttccctggcaa

SEQ ID NO: 2179777 - DNA, 25 bp, Homo sapien
tctaagcagagggttcaaaaggtct

SEQ ID NO: 2179778 - DNA, 25 bp, Homo sapien
gatattatccttggaaaacacaaca

SEQ ID NO: 2179779 - DNA, 25 bp, Homo sapien
ttctgctatgctgaggaatgtatca

SEQ ID NO: 2179780 - DNA, 25 bp, Homo sapien
tttaagccttccaccaaagcaccag

SEQ ID NO: 2179781 - DNA, 25 bp, Homo sapien
ggcttaggtaggagatgagaacatc

SEQ ID NO: 2179782 - DNA, 25 bp, Homo sapien
catacagaaatacagagatactcac

SEQ ID NO: 2179783 - DNA, 25 bp, Homo sapien
aggttggtgaggttactctctaagt

SEQ ID NO: 2179784 - DNA, 25 bp, Homo sapien
gacaggtttggatgagtttagccaa

SEQ ID NO: 2179785 - DNA, 25 bp, Homo sapien
gatgagtttagccaaaagggtctcc

SEQ ID NO: 2179786 - DNA, 25 bp, Homo sapien
caacatgttgacaggtttggatgag

SEQ ID NO: 2179787 - DNA, 25 bp, Homo sapien
tgctaaacaacagaagtcttccatg

SEQ ID NO: 2179788 - DNA, 25 bp, Homo sapien
tggtaccgttgagtctgaccccaag

SEQ ID NO: 2179789 - DNA, 25 bp, Homo sapien
tgtatacccatcattgcttagtccc

SEQ ID NO: 2179790 - DNA, 25 bp, Homo sapien
gaatattcaccggacaacccttctg

SEQ ID NO: 2179791 - DNA, 25 bp, Homo sapien
gcctttcccgagttccttcagtctc

SEQ ID NO: 2179792 - DNA, 25 bp, Homo sapien
tccttcagtctctactgcggaacag

SEQ ID NO: 2179793 - DNA, 25 bp, Homo sapien
ctttcccgagttccttcagtctcta

SEQ ID NO: 2179794 - DNA, 25 bp, Homo sapien
tcagtctctactgcggaacaggaag

SEQ ID NO: 2179795 - DNA, 25 bp, Homo sapien
gggcttcaagggataagcaccttac

SEQ ID NO: 2179796 - DNA, 25 bp, Homo sapien
agcaccttacgctgaagtctttggg

SEQ ID NO: 2179797 - DNA, 25 bp, Homo sapien
cattgctaggcatctccactggatt

SEQ ID NO: 2179798 - DNA, 25 bp, Homo sapien
tgtggacagcgttctaatggcatag

SEQ ID NO: 2179799 - DNA, 25 bp, Homo sapien
tgaaggtatttttgggagcctgtgt

SEQ ID NO: 2179800 - DNA, 25 bp, Homo sapien
cttgaacccagatgaacgagacttt

SEQ ID NO: 2179801 - DNA, 25 bp, Homo sapien
tgtgtcttttgtcctgcctaattga

SEQ ID NO: 2179802 - DNA, 25 bp, Homo sapien
tattgaaggttatcatgatccagga

SEQ ID NO: 2179803 - DNA, 25 bp, Homo sapien
tatgcctgttgcctgtcctataaag

SEQ ID NO: 2179804 - DNA, 25 bp, Homo sapien
tactagggtggagtgagcaaactta

SEQ ID NO: 2179805 - DNA, 25 bp, Homo sapien
gcagcctaggctatgttatgccaaa

SEQ ID NO: 2179806 - DNA, 25 bp, Homo sapien
aatctcaagtgcagaacttccctgg

SEQ ID NO: 2179807 - DNA, 25 bp, Homo sapien
tcagccctgacctacgaggcagttt

SEQ ID NO: 2179808 - DNA, 25 bp, Homo sapien
gagatacgtggttgttccaaggatc

SEQ ID NO: 2179809 - DNA, 25 bp, Homo sapien
ttctagaggtatggaagcagcccta

SEQ ID NO: 2179810 - DNA, 25 bp, Homo sapien
ccaagatccctaatgagcaggtatt

SEQ ID NO: 2179811 - DNA, 25 bp, Homo sapien
tgtgagtctaaaagcctgcccattt

SEQ ID NO: 2179812 - DNA, 25 bp, Homo sapien
gaccatgtcaaccaagagtgactga

SEQ ID NO: 2179813 - DNA, 25 bp, Homo sapien
caggccatactcagtgtgtgagtct

SEQ ID NO: 2179814 - DNA, 25 bp, Homo sapien
tggctttgaatctgaccatgtcaac

SEQ ID NO: 2179815 - DNA, 25 bp, Homo sapien
ttctaggcaccctgcacaactggca

SEQ ID NO: 2179816 - DNA, 25 bp, Homo sapien
gcacagagaacaaaacaccccaggg

SEQ ID NO: 2179817 - DNA, 25 bp, Homo sapien
ctattctaggcaccctgcacaactg

SEQ ID NO: 2179818 - DNA, 25 bp, Homo sapien
caactggcacagaagagagcacaga

SEQ ID NO: 2179819 - DNA, 25 bp, Homo sapien
tccagccccagtcgataccgaagtt

SEQ ID NO: 2179820 - DNA, 25 bp, Homo sapien
agccccagtcgataccgaagttcct

SEQ ID NO: 2179821 - DNA, 25 bp, Homo sapien
cctccagccccagtcgataccgaag

SEQ ID NO: 2179822 - DNA, 25 bp, Homo sapien
cagccccagtcgataccgaagttcc

SEQ ID NO: 2179823 - DNA, 25 bp, Homo sapien
gcccaggtgatgcttttgttgccca

SEQ ID NO: 2179824 - DNA, 25 bp, Homo sapien
tgttgcccaagtgacattgagaagc

SEQ ID NO: 2179825 - DNA, 25 bp, Homo sapien
taatagccttcgcaatttcttcaga

SEQ ID NO: 2179826 - DNA, 25 bp, Homo sapien
cactgttctggaaagcctgtcagcg

SEQ ID NO: 2179827 - DNA, 25 bp, Homo sapien
tcccagatgtggtccgttaatccca

SEQ ID NO: 2179828 - DNA, 25 bp, Homo sapien
caaatcccagatgtggtccgttaat

SEQ ID NO: 2179829 - DNA, 25 bp, Homo sapien
gccaaatcccagatgtggtccgtta

SEQ ID NO: 2179830 - DNA, 25 bp, Homo sapien
aatcccagatgtggtccgttaatcc

SEQ ID NO: 2179831 - DNA, 25 bp, Homo sapien
aaggaattctttcgtgaaacctgag

SEQ ID NO: 2179832 - DNA, 25 bp, Homo sapien
tcgtgaaacctgagattgtcagagc

SEQ ID NO: 2179833 - DNA, 25 bp, Homo sapien
gattgtcagagcactgaatttcacc

SEQ ID NO: 2179834 - DNA, 25 bp, Homo sapien
tgaataaagagcctacacgaaaagg

SEQ ID NO: 2179835 - DNA, 25 bp, Homo sapien
ttggcttaaggcggatcggactaac

SEQ ID NO: 2179836 - DNA, 25 bp, Homo sapien
ttctggcagaaaggggttggcttaa

SEQ ID NO: 2179837 - DNA, 25 bp, Homo sapien
ggttggcttaaggcggatcggacta

SEQ ID NO: 2179838 - DNA, 25 bp, Homo sapien
cattttctggcagaaaggggttggc

SEQ ID NO: 2179839 - DNA, 25 bp, Homo sapien
ggtgccgcccaaccagtttacacaa

SEQ ID NO: 2179840 - DNA, 25 bp, Homo sapien
ggtcatcggtcacacagtacatatt

SEQ ID NO: 2179841 - DNA, 25 bp, Homo sapien
tgtcatagcgctcactcaaagctgc

SEQ ID NO: 2179842 - DNA, 25 bp, Homo sapien
tttacacaaggcacagattaactgg

SEQ ID NO: 2179843 - DNA, 25 bp, Homo sapien
gaattggctcaatcagacgatggcc

SEQ ID NO: 2179844 - DNA, 25 bp, Homo sapien
gatggactccacagactcgttggtg

SEQ ID NO: 2179845 - DNA, 25 bp, Homo sapien
catggtgttggcgtcaaaggcccgc

SEQ ID NO: 2179846 - DNA, 25 bp, Homo sapien
gctttcaggcactcgtcacagtagg

SEQ ID NO: 2179847 - DNA, 25 bp, Homo sapien
aagagctccagacaaatagggcagg

SEQ ID NO: 2179848 - DNA, 25 bp, Homo sapien
ggtgggcgcagttgaagcagaggct

SEQ ID NO: 2179849 - DNA, 25 bp, Homo sapien
ggcaggtcagttctgactccagtgt

SEQ ID NO: 2179850 - DNA, 25 bp, Homo sapien
tccagacaaatagggcaggtcagtt

SEQ ID NO: 2179851 - DNA, 25 bp, Homo sapien
cttcaggcaaagctctcttgtgtca

SEQ ID NO: 2179852 - DNA, 25 bp, Homo sapien
tgtgtcatcagcaaaacccaaggaa

SEQ ID NO: 2179853 - DNA, 25 bp, Homo sapien
caggcaaagctctcttgtgtcatca

SEQ ID NO: 2179854 - DNA, 25 bp, Homo sapien
aaacccaaggaagctgatcagctat

SEQ ID NO: 2179855 - DNA, 25 bp, Homo sapien
tgccttcccatcaaaaagagtagta

SEQ ID NO: 2179856 - DNA, 25 bp, Homo sapien
tcccatcaaaaagagtagtagaaag

SEQ ID NO: 2179857 - DNA, 25 bp, Homo sapien
atctgccttcccatcaaaaagagta

SEQ ID NO: 2179858 - DNA, 25 bp, Homo sapien
ccttcccatcaaaaagagtagtaga

SEQ ID NO: 2179859 - DNA, 25 bp, Homo sapien
cccagttcattaagggtgaagaggc

SEQ ID NO: 2179860 - DNA, 25 bp, Homo sapien
gaatattacatgcagcccattgcag

SEQ ID NO: 2179861 - DNA, 25 bp, Homo sapien
ggcctgggaaccaagccgctttgaa

SEQ ID NO: 2179862 - DNA, 25 bp, Homo sapien
caagaccattagcagaggtctgcag

SEQ ID NO: 2179863 - DNA, 25 bp, Homo sapien
tcctgagacaagtactggtaacagc

SEQ ID NO: 2179864 - DNA, 25 bp, Homo sapien
atgcatgccaaagacagacagggaa

SEQ ID NO: 2179865 - DNA, 25 bp, Homo sapien
cagagtgagcccatatcgagaaaaa

SEQ ID NO: 2179866 - DNA, 25 bp, Homo sapien
catctatgtacttggtcctgagaca

SEQ ID NO: 2179867 - DNA, 25 bp, Homo sapien
tttttgaagaaacatcgccgtaggc

SEQ ID NO: 2179868 - DNA, 25 bp, Homo sapien
tgcgtcaacagtgaaacacaacagg

SEQ ID NO: 2179869 - DNA, 25 bp, Homo sapien
ggactgcacactagttctttttgaa

SEQ ID NO: 2179870 - DNA, 25 bp, Homo sapien
gacccacgaaatgatagacaggcca

SEQ ID NO: 2179871 - DNA, 25 bp, Homo sapien
agcagcttggccgaatgagacactg

SEQ ID NO: 2179872 - DNA, 25 bp, Homo sapien
cttggccgaatgagacactgtcctg

SEQ ID NO: 2179873 - DNA, 25 bp, Homo sapien
aatgccaccaataggagccgtcctg

SEQ ID NO: 2179874 - DNA, 25 bp, Homo sapien
gtggcagaaggctgaatgctagctt

SEQ ID NO: 2179875 - DNA, 25 bp, Homo sapien
tacttttatgacactggaaatccta

SEQ ID NO: 2179876 - DNA, 25 bp, Homo sapien
tctgtgtgccaggagctgctctagg

SEQ ID NO: 2179877 - DNA, 25 bp, Homo sapien
gtaaatatgagcataaaggcctgcc

SEQ ID NO: 2179878 - DNA, 25 bp, Homo sapien
gcccttggagagcttacattttaat

SEQ ID NO: 2179879 - DNA, 25 bp, Homo sapien
gaaaagccacgaacacttagtgagc

SEQ ID NO: 2179880 - DNA, 25 bp, Homo sapien
gaacagcgatttaggccaggtacgg

SEQ ID NO: 2179881 - DNA, 25 bp, Homo sapien
tttataaagaacagcgatttaggcc

SEQ ID NO: 2179882 - DNA, 25 bp, Homo sapien
aaagcaggaaccatgatgttttagt

SEQ ID NO: 2179883 - DNA, 25 bp, Homo sapien
agtgccggtactgccacaccgtggg

SEQ ID NO: 2179884 - DNA, 25 bp, Homo sapien
agttcccaagaccagttccgtcaag

SEQ ID NO: 2179885 - DNA, 25 bp, Homo sapien
aaagtgctgataaaggcacgctgtg

SEQ ID NO: 2179886 - DNA, 25 bp, Homo sapien
taggcaagttcctactcaaatggag

SEQ ID NO: 2179887 - DNA, 25 bp, Homo sapien
gcgtcgctccggctggttggagtcc

SEQ ID NO: 2179888 - DNA, 25 bp, Homo sapien
ggatccgcgtcgctccggctggttg

SEQ ID NO: 2179889 - DNA, 25 bp, Homo sapien
atccgcgtcgctccggctggttgga

SEQ ID NO: 2179890 - DNA, 25 bp, Homo sapien
ccgcgtcgctccggctggttggagt

SEQ ID NO: 2179891 - DNA, 25 bp, Homo sapien
atacttctctgatagaaccaaaggg

SEQ ID NO: 2179892 - DNA, 25 bp, Homo sapien
ttaatacttctctgatagaaccaaa

SEQ ID NO: 2179893 - DNA, 25 bp, Homo sapien
gggaaggtgggacatatgctcccca

SEQ ID NO: 2179894 - DNA, 25 bp, Homo sapien
gaaggtgggacatatgctccccaaa

SEQ ID NO: 2179895 - DNA, 25 bp, Homo sapien
tcaaagcacgatggcctaacataat

SEQ ID NO: 2179896 - DNA, 25 bp, Homo sapien
gtctgcaggcattaatgtcttctgt

SEQ ID NO: 2179897 - DNA, 25 bp, Homo sapien
ctaggtcaaagcacgatggcctaac

SEQ ID NO: 2179898 - DNA, 25 bp, Homo sapien
tctgcaggcattaatgtcttctgtt

SEQ ID NO: 2179899 - DNA, 25 bp, Homo sapien
tgacccctgcaggtagataactgaa

SEQ ID NO: 2179900 - DNA, 25 bp, Homo sapien
tgttccaaataagcagagcaattct

SEQ ID NO: 2179901 - DNA, 25 bp, Homo sapien
gatcttccgaccacgggaacttcaa

SEQ ID NO: 2179902 - DNA, 25 bp, Homo sapien
tccctgcagtgaagtccgctgcctg

SEQ ID NO: 2179903 - DNA, 25 bp, Homo sapien
tagcctatgcggtctacagccaagc

SEQ ID NO: 2179904 - DNA, 25 bp, Homo sapien
agcctatgcggtctacagccaagcg

SEQ ID NO: 2179905 - DNA, 25 bp, Homo sapien
gcctatgcggtctacagccaagcga

SEQ ID NO: 2179906 - DNA, 25 bp, Homo sapien
cctatgcggtctacagccaagcgaa

SEQ ID NO: 2179907 - DNA, 25 bp, Homo sapien
caaggcaagggcaattcattgcaag

SEQ ID NO: 2179908 - DNA, 25 bp, Homo sapien
tgctcctccgcaagtgtttttctgc

SEQ ID NO: 2179909 - DNA, 25 bp, Homo sapien
tcattgcaagcagacggcacttgct

SEQ ID NO: 2179910 - DNA, 25 bp, Homo sapien
agacggcacttgctcctccgcaagt

SEQ ID NO: 2179911 - DNA, 25 bp, Homo sapien
acttgccaagcctgcttgctgagcg

SEQ ID NO: 2179912 - DNA, 25 bp, Homo sapien
gaagggggctctgcttcatctccca

SEQ ID NO: 2179913 - DNA, 25 bp, Homo sapien
gagggtttgcgctgaccattcgaag

SEQ ID NO: 2179914 - DNA, 25 bp, Homo sapien
cctgcttgctgagcgaacaagcgag

SEQ ID NO: 2179915 - DNA, 25 bp, Homo sapien
ataaggaattttatcatcatgcccc

SEQ ID NO: 2179916 - DNA, 25 bp, Homo sapien
aacctcttcctggactgataaggaa

SEQ ID NO: 2179917 - DNA, 25 bp, Homo sapien
tccttggcttcctacatccactttt

SEQ ID NO: 2179918 - DNA, 25 bp, Homo sapien
tcctggactgataaggaattttatc

SEQ ID NO: 2179919 - DNA, 25 bp, Homo sapien
gccttctccgccagaaacacagtaa

SEQ ID NO: 2179920 - DNA, 25 bp, Homo sapien
gtaagtgctcagaatgcgaaaccaa

SEQ ID NO: 2179921 - DNA, 25 bp, Homo sapien
tttcaagctggttccgccttctccg

SEQ ID NO: 2179922 - DNA, 25 bp, Homo sapien
agggctgccttctcacgtccagaag

SEQ ID NO: 2179923 - DNA, 25 bp, Homo sapien
acaggagcccgcaagacaaaagcaa

SEQ ID NO: 2179924 - DNA, 25 bp, Homo sapien
aatcccatgacccatccggcaggga

SEQ ID NO: 2179925 - DNA, 25 bp, Homo sapien
agcccgcgtcgcagtcttcagagcg

SEQ ID NO: 2179926 - DNA, 25 bp, Homo sapien
tcttcagagcggaaacaccgaaccc

SEQ ID NO: 2179927 - DNA, 25 bp, Homo sapien
cactctgctcgagacaatgtcaagt

SEQ ID NO: 2179928 - DNA, 25 bp, Homo sapien
tatgaaaagtcggtcgcagggaagc

SEQ ID NO: 2179929 - DNA, 25 bp, Homo sapien
ccccagcctatgaaaagtcggtcgc

SEQ ID NO: 2179930 - DNA, 25 bp, Homo sapien
tctttgatctgttgctacacgcact

SEQ ID NO: 2179931 - DNA, 25 bp, Homo sapien
tgattggcatttcctgtttccacca

SEQ ID NO: 2179932 - DNA, 25 bp, Homo sapien
gattggcatttcctgtttccaccat

SEQ ID NO: 2179933 - DNA, 25 bp, Homo sapien
ctgattggcatttcctgtttccacc

SEQ ID NO: 2179934 - DNA, 25 bp, Homo sapien
ctctattttgggtacgtagcccata

SEQ ID NO: 2179935 - DNA, 25 bp, Homo sapien
cagtttccatcgtgcattgctttct

SEQ ID NO: 2179936 - DNA, 25 bp, Homo sapien
ccatcgtgcattgctttctccagct

SEQ ID NO: 2179937 - DNA, 25 bp, Homo sapien
tttgggtacgtagcccatattcttc

SEQ ID NO: 2179938 - DNA, 25 bp, Homo sapien
cttctgtggctcagctcgaatgtga

SEQ ID NO: 2179939 - DNA, 25 bp, Homo sapien
tattcaggaagtcgactgtcaggca

SEQ ID NO: 2179940 - DNA, 25 bp, Homo sapien
ggctcagctcgaatgtgatattcag

SEQ ID NO: 2179941 - DNA, 25 bp, Homo sapien
ctaatgctacttcagtgggtctatt

SEQ ID NO: 2179942 - DNA, 25 bp, Homo sapien
ctgccccagagaagagatctagcaa

SEQ ID NO: 2179943 - DNA, 25 bp, Homo sapien
taaggtattactcatgggcaaatgg

SEQ ID NO: 2179944 - DNA, 25 bp, Homo sapien
tttggtgaaatatgctccagttgac

SEQ ID NO: 2179945 - DNA, 25 bp, Homo sapien
ctctccttagtaggggcaagttgaa

SEQ ID NO: 2179946 - DNA, 25 bp, Homo sapien
tgttgaatttgaataccatcactag

SEQ ID NO: 2179947 - DNA, 25 bp, Homo sapien
gaataccatcactagctgaattata

SEQ ID NO: 2179948 - DNA, 25 bp, Homo sapien
gaattataatacttcagctcgtgtc

SEQ ID NO: 2179949 - DNA, 25 bp, Homo sapien
aatacttcagctcgtgtctgtccca

SEQ ID NO: 2179950 - DNA, 25 bp, Homo sapien
acacaatgtacccatctaatgtgga

SEQ ID NO: 2179951 - DNA, 25 bp, Homo sapien
gccccttgcaaccactaattgactt

SEQ ID NO: 2179952 - DNA, 25 bp, Homo sapien
tacccatctaatgtggacaatttaa

SEQ ID NO: 2179953 - DNA, 25 bp, Homo sapien
tatccccccaataaaagaaatgctg

SEQ ID NO: 2179954 - DNA, 25 bp, Homo sapien
tacaagcagatctctatacaaacaa

SEQ ID NO: 2179955 - DNA, 25 bp, Homo sapien
aaagtgaggctgtgtcggtatagaa

SEQ ID NO: 2179956 - DNA, 25 bp, Homo sapien
tgtcacagcgtacatgcagaccggg

SEQ ID NO: 2179957 - DNA, 25 bp, Homo sapien
gaaacctagatctttatacaagcag

SEQ ID NO: 2179958 - DNA, 25 bp, Homo sapien
cacagataaattgattaactgttat

SEQ ID NO: 2179959 - DNA, 25 bp, Homo sapien
gactgccagcattccgtaaacaatt

SEQ ID NO: 2179960 - DNA, 25 bp, Homo sapien
tcaggactcccaaattgactgccag

SEQ ID NO: 2179961 - DNA, 25 bp, Homo sapien
aactgttatctcacactcaggactc

SEQ ID NO: 2179962 - DNA, 25 bp, Homo sapien
tatttctaaggagacgctgctgtgc

SEQ ID NO: 2179963 - DNA, 25 bp, Homo sapien
gacggtttgatggatgagtttccca

SEQ ID NO: 2179964 - DNA, 25 bp, Homo sapien
tgaaacgaataaaccacagtggaga

SEQ ID NO: 2179965 - DNA, 25 bp, Homo sapien
tagtgaccctgcatagaatcagagg

SEQ ID NO: 2179966 - DNA, 25 bp, Homo sapien
aaagctctaatatctttctgactct

SEQ ID NO: 2179967 - DNA, 25 bp, Homo sapien
agctctaatatctttctgactctca

SEQ ID NO: 2179968 - DNA, 25 bp, Homo sapien
aaaagctctaatatctttctgactc

SEQ ID NO: 2179969 - DNA, 25 bp, Homo sapien
aagctctaatatctttctgactctc

SEQ ID NO: 2179970 - DNA, 25 bp, Homo sapien
tagaatttgactaatgtcccctggg

SEQ ID NO: 2179971 - DNA, 25 bp, Homo sapien
aaatatctggcatggcgtctgcggg

SEQ ID NO: 2179972 - DNA, 25 bp, Homo sapien
gattcagtgtggttgcttaaaagca

SEQ ID NO: 2179973 - DNA, 25 bp, Homo sapien
tgcctcagaggatgttccccaaatt

SEQ ID NO: 2179974 - DNA, 25 bp, Homo sapien
cacatactgactaatgccaattccg

SEQ ID NO: 2179975 - DNA, 25 bp, Homo sapien
tagactagttattgcctattgtacc

SEQ ID NO: 2179976 - DNA, 25 bp, Homo sapien
gacagatttttagcccttgaaggca

SEQ ID NO: 2179977 - DNA, 25 bp, Homo sapien
gccaattccgtttcatctccagtgt

SEQ ID NO: 2179978 - DNA, 25 bp, Homo sapien
gcttcactggaatcctgactcctat

SEQ ID NO: 2179979 - DNA, 25 bp, Homo sapien
cattggttagcttctccgtaggccg

SEQ ID NO: 2179980 - DNA, 25 bp, Homo sapien
ctaagccacacattggttagcttct

SEQ ID NO: 2179981 - DNA, 25 bp, Homo sapien
cctgactcctattacaggaaacaga

SEQ ID NO: 2179982 - DNA, 25 bp, Homo sapien
cggcatgagatctacgtgatgaatg

SEQ ID NO: 2179983 - DNA, 25 bp, Homo sapien
ccacggcatgagatctacgtgatga

SEQ ID NO: 2179984 - DNA, 25 bp, Homo sapien
cacggcatgagatctacgtgatgaa

SEQ ID NO: 2179985 - DNA, 25 bp, Homo sapien
acggcatgagatctacgtgatgaat

SEQ ID NO: 2179986 - DNA, 25 bp, Homo sapien
ttgttaaataatacgaaatcaaatg

SEQ ID NO: 2179987 - DNA, 25 bp, Homo sapien
ctgttggaatctgaaagcaggagct

SEQ ID NO: 2179988 - DNA, 25 bp, Homo sapien
gtgttgacacagttcaataaacgtt

SEQ ID NO: 2179989 - DNA, 25 bp, Homo sapien
aatctgaaagcaggagctcatcttc

SEQ ID NO: 2179990 - DNA, 25 bp, Homo sapien
agccgttctaaaggagagggtcaca

SEQ ID NO: 2179991 - DNA, 25 bp, Homo sapien
ctgcagacaaactgggagccgttct

SEQ ID NO: 2179992 - DNA, 25 bp, Homo sapien
aactgggagccgttctaaaggagag

SEQ ID NO: 2179993 - DNA, 25 bp, Homo sapien
cagacaaactgggagccgttctaaa

SEQ ID NO: 2179994 - DNA, 25 bp, Homo sapien
ttgtcctgctaaagcagaggctgac

SEQ ID NO: 2179995 - DNA, 25 bp, Homo sapien
tgtcctgctaaagcagaggctgacc

SEQ ID NO: 2179996 - DNA, 25 bp, Homo sapien
aaccgtgtctgccacggtaaatcca

SEQ ID NO: 2179997 - DNA, 25 bp, Homo sapien
tctgccacggtaaatccacggtgca

SEQ ID NO: 2179998 - DNA, 25 bp, Homo sapien
tgtccccagacaagttacagagcct

SEQ ID NO: 2179999 - DNA, 25 bp, Homo sapien
tggtgatgccatatgactgacggaa

SEQ ID NO: 2180000 - DNA, 25 bp, Homo sapien
tcaagaagtgaagatccagccaggg

SEQ ID NO: 2180001 - DNA, 25 bp, Homo sapien
gggttccgatgttgaagtaccatgc

SEQ ID NO: 2180002 - DNA, 25 bp, Homo sapien
taggccactgacaaagagttttttc

SEQ ID NO: 2180003 - DNA, 25 bp, Homo sapien
ctgtaggccactgacaaagagtttt

SEQ ID NO: 2180004 - DNA, 25 bp, Homo sapien
cactgacaaagagttttttcaggtc

SEQ ID NO: 2180005 - DNA, 25 bp, Homo sapien
gacaaagagttttttcaggtctcca

SEQ ID NO: 2180006 - DNA, 25 bp, Homo sapien
cactttcagcaggatgcttcttcct

SEQ ID NO: 2180007 - DNA, 25 bp, Homo sapien
cacctggagcgcctgtgacttctct

SEQ ID NO: 2180008 - DNA, 25 bp, Homo sapien
tcacataggcgcacaaatctggttc

SEQ ID NO: 2180009 - DNA, 25 bp, Homo sapien
gaaacgcttctggtgatctatgcca

SEQ ID NO: 2180010 - DNA, 25 bp, Homo sapien
gcctctaaacacaaagttcttttga

SEQ ID NO: 2180011 - DNA, 25 bp, Homo sapien
tcagatataagtgagatgcttccta

SEQ ID NO: 2180012 - DNA, 25 bp, Homo sapien
atttaaacccatgatccactgtgta

SEQ ID NO: 2180013 - DNA, 25 bp, Homo sapien
gcagagcagatcactaaacgtattc

SEQ ID NO: 2180014 - DNA, 25 bp, Homo sapien
aaagaagtattcatgtgtgagccca

SEQ ID NO: 2180015 - DNA, 25 bp, Homo sapien
gagaatggcttgtgaagacctccat

SEQ ID NO: 2180016 - DNA, 25 bp, Homo sapien
tgagcccagtttggtgtgcagatgt

SEQ ID NO: 2180017 - DNA, 25 bp, Homo sapien
ctgcccagacatgctaaagaagtat

SEQ ID NO: 2180018 - DNA, 25 bp, Homo sapien
catccgagatggtaggtgcgtacct

SEQ ID NO: 2180019 - DNA, 25 bp, Homo sapien
ccttgttcagggtgattggccagaa

SEQ ID NO: 2180020 - DNA, 25 bp, Homo sapien
tactagtagcttgcaccttgtgatc

SEQ ID NO: 2180021 - DNA, 25 bp, Homo sapien
aagtgctttgtgtaggccccgcatt

SEQ ID NO: 2180022 - DNA, 25 bp, Homo sapien
gaaatcatgagtcaacagtagtgct

SEQ ID NO: 2180023 - DNA, 25 bp, Homo sapien
gcaaacatgcaaaaacccacgttcg

SEQ ID NO: 2180024 - DNA, 25 bp, Homo sapien
gaagagcaagtcaccatcacaagat

SEQ ID NO: 2180025 - DNA, 25 bp, Homo sapien
gaatagaactttccatgccctgatg

SEQ ID NO: 2180026 - DNA, 25 bp, Homo sapien
caagtctctacccagttttgtgaca

SEQ ID NO: 2180027 - DNA, 25 bp, Homo sapien
gctgtgaagtcactagccagctgtg

SEQ ID NO: 2180028 - DNA, 25 bp, Homo sapien
ccacgtgactgggagcctatcaaaa

SEQ ID NO: 2180029 - DNA, 25 bp, Homo sapien
tgcctaagggtctggcaactgcgtc

SEQ ID NO: 2180030 - DNA, 25 bp, Homo sapien
gcatgaaatactgtccttccggctg

SEQ ID NO: 2180031 - DNA, 25 bp, Homo sapien
tccgttccagagagtgtacagcatg

SEQ ID NO: 2180032 - DNA, 25 bp, Homo sapien
tcttcaccagcatgcgagtcattcc

SEQ ID NO: 2180033 - DNA, 25 bp, Homo sapien
catctgagactggactttatgtccg

SEQ ID NO: 2180034 - DNA, 25 bp, Homo sapien
tactgggataacatcaatctgcagg

SEQ ID NO: 2180035 - DNA, 25 bp, Homo sapien
ttcccagcactgaagacatagttca

SEQ ID NO: 2180036 - DNA, 25 bp, Homo sapien
tagtgctgagtctactgggataaca

SEQ ID NO: 2180037 - DNA, 25 bp, Homo sapien
gaattggcctattctcggagactag

SEQ ID NO: 2180038 - DNA, 25 bp, Homo sapien
ctgggttaacgtgattctcgtgctt

SEQ ID NO: 2180039 - DNA, 25 bp, Homo sapien
aggcgtgcgccaccacgcctggcaa

SEQ ID NO: 2180040 - DNA, 25 bp, Homo sapien
cagccgcctgagtagctgggaatac

SEQ ID NO: 2180041 - DNA, 25 bp, Homo sapien
ccacgcctggcaatttttgtacttt

SEQ ID NO: 2180042 - DNA, 25 bp, Homo sapien
tacgtataggcatgtctccccaagc

SEQ ID NO: 2180043 - DNA, 25 bp, Homo sapien
cattcaatagctagtgatggtggcc

SEQ ID NO: 2180044 - DNA, 25 bp, Homo sapien
tacagccagtgagcaaacaacagca

SEQ ID NO: 2180045 - DNA, 25 bp, Homo sapien
caacacattttgcagcaggccgagg

SEQ ID NO: 2180046 - DNA, 25 bp, Homo sapien
tggactaacaacactccctttgtct

SEQ ID NO: 2180047 - DNA, 25 bp, Homo sapien
gctttcttctaattgcccactttca

SEQ ID NO: 2180048 - DNA, 25 bp, Homo sapien
caacactccctttgtcttattcttg

SEQ ID NO: 2180049 - DNA, 25 bp, Homo sapien
tttgctcctcctttcgtaaagatac

SEQ ID NO: 2180050 - DNA, 25 bp, Homo sapien
aattatggcattttcgcagtaacca

SEQ ID NO: 2180051 - DNA, 25 bp, Homo sapien
ttgatcccttagtcctgcacctgtt

SEQ ID NO: 2180052 - DNA, 25 bp, Homo sapien
tttatatatgggagatgggcttggc

SEQ ID NO: 2180053 - DNA, 25 bp, Homo sapien
ttgtggcttgcctcttcttgatccc

SEQ ID NO: 2180054 - DNA, 25 bp, Homo sapien
ctagggtatgtcaccctcggtctct

SEQ ID NO: 2180055 - DNA, 25 bp, Homo sapien
agagaccgagggtgacataccctag

SEQ ID NO: 2180056 - DNA, 25 bp, Homo sapien
cctgggtaagcagagaaacaaataa

SEQ ID NO: 2180057 - DNA, 25 bp, Homo sapien
taaacttttgcatagtctaaaactc

SEQ ID NO: 2180058 - DNA, 25 bp, Homo sapien
cattggactcattagtattatgtat

SEQ ID NO: 2180059 - DNA, 25 bp, Homo sapien
tgatttatgctaccaaaatacagcc

SEQ ID NO: 2180060 - DNA, 25 bp, Homo sapien
cttccttctccctaatttcagtctt

SEQ ID NO: 2180061 - DNA, 25 bp, Homo sapien
agtctgttggcagaagccttccttc

SEQ ID NO: 2180062 - DNA, 25 bp, Homo sapien
tctgttggcagaagccttccttctc

SEQ ID NO: 2180063 - DNA, 25 bp, Homo sapien
aagccttccttctccctaatttcag

SEQ ID NO: 2180064 - DNA, 25 bp, Homo sapien
tgtaatgtttgatatgttttctctt

SEQ ID NO: 2180065 - DNA, 25 bp, Homo sapien
tcattgattgtaatgtttgatatgt

SEQ ID NO: 2180066 - DNA, 25 bp, Homo sapien
ctctttgctgggaccttcactctgg

SEQ ID NO: 2180067 - DNA, 25 bp, Homo sapien
tgattgtaatgtttgatatgttttc

SEQ ID NO: 2180068 - DNA, 25 bp, Homo sapien
taaatatgcacactgagaagcaagt

SEQ ID NO: 2180069 - DNA, 25 bp, Homo sapien
cccaatctgggtgcatacagtaaaa

SEQ ID NO: 2180070 - DNA, 25 bp, Homo sapien
gacaaaatgggttgcctcccactct

SEQ ID NO: 2180071 - DNA, 25 bp, Homo sapien
gaagcaagtgcaatctagttatctg

SEQ ID NO: 2180072 - DNA, 25 bp, Homo sapien
ccatcttcatgggactttgctctct

SEQ ID NO: 2180073 - DNA, 25 bp, Homo sapien
catccttatccctttccttgtccca

SEQ ID NO: 2180074 - DNA, 25 bp, Homo sapien
gaaagaaatccatgacaaagcagta

SEQ ID NO: 2180075 - DNA, 25 bp, Homo sapien
tgctctcttacttagtcttaattgg

SEQ ID NO: 2180076 - DNA, 25 bp, Homo sapien
tttgttcctcagttctgatctggaa

SEQ ID NO: 2180077 - DNA, 25 bp, Homo sapien
ttgttcctcagttctgatctggaag

SEQ ID NO: 2180078 - DNA, 25 bp, Homo sapien
tgtgtgcttacacgcctctcagtca

SEQ ID NO: 2180079 - DNA, 25 bp, Homo sapien
tcagagttgatcagcctgcgtaggg

SEQ ID NO: 2180080 - DNA, 25 bp, Homo sapien
gcaaaaatccgccaaactcaggtca

SEQ ID NO: 2180081 - DNA, 25 bp, Homo sapien
ggctctttgcctcggatcagctgaa

SEQ ID NO: 2180082 - DNA, 25 bp, Homo sapien
ctttttataaagtcataacttactg

SEQ ID NO: 2180083 - DNA, 25 bp, Homo sapien
taataatcatatgtccagagaattt

SEQ ID NO: 2180084 - DNA, 25 bp, Homo sapien
cagaaagatcataaaatgagataga

SEQ ID NO: 2180085 - DNA, 25 bp, Homo sapien
tactgttaacatgactccctttaaa

SEQ ID NO: 2180086 - DNA, 25 bp, Homo sapien
catgattagactgggtagacccggg

SEQ ID NO: 2180087 - DNA, 25 bp, Homo sapien
ttacataggccaacagggagggcgc

SEQ ID NO: 2180088 - DNA, 25 bp, Homo sapien
aagtgaatctgtcgctcacgccgca

SEQ ID NO: 2180089 - DNA, 25 bp, Homo sapien
tagacccgggctgagccaaatcaga

SEQ ID NO: 2180090 - DNA, 25 bp, Homo sapien
aaatgtatgtagcacaaagcaatga

SEQ ID NO: 2180091 - DNA, 25 bp, Homo sapien
aatgtatgtagcacaaagcaatgaa

SEQ ID NO: 2180092 - DNA, 25 bp, Homo sapien
tggcttgaggggttttagataggga

SEQ ID NO: 2180093 - DNA, 25 bp, Homo sapien
gccttggcttgaggggttttagata

SEQ ID NO: 2180094 - DNA, 25 bp, Homo sapien
cttgaggggttttagatagggagag

SEQ ID NO: 2180095 - DNA, 25 bp, Homo sapien
cttggcttgaggggttttagatagg

SEQ ID NO: 2180096 - DNA, 25 bp, Homo sapien
ttgatattggaacacgtgactgtcc

SEQ ID NO: 2180097 - DNA, 25 bp, Homo sapien
caagatcatccctgtaaatattcac

SEQ ID NO: 2180098 - DNA, 25 bp, Homo sapien
gtgactgtccttcaagtgcccagaa

SEQ ID NO: 2180099 - DNA, 25 bp, Homo sapien
acaaattgcacccatctgggtttga

SEQ ID NO: 2180100 - DNA, 25 bp, Homo sapien
agagagagggatgaaacacagctac

SEQ ID NO: 2180101 - DNA, 25 bp, Homo sapien
tcaaagagagagggatgaaacacag

SEQ ID NO: 2180102 - DNA, 25 bp, Homo sapien
aaagagagagggatgaaacacagct

SEQ ID NO: 2180103 - DNA, 25 bp, Homo sapien
caaagagagagggatgaaacacagc

SEQ ID NO: 2180104 - DNA, 25 bp, Homo sapien
tcccctccaagggtgcgatcagcag

SEQ ID NO: 2180105 - DNA, 25 bp, Homo sapien
tccaagggtgcgatcagcaggacag

SEQ ID NO: 2180106 - DNA, 25 bp, Homo sapien
tggcacggccagaagaaaacatcaa

SEQ ID NO: 2180107 - DNA, 25 bp, Homo sapien
tcaaagacactccagacttcaaatc

SEQ ID NO: 2180108 - DNA, 25 bp, Homo sapien
tccaggtaggccagatgataagttc

SEQ ID NO: 2180109 - DNA, 25 bp, Homo sapien
caaggagacaagtaaccatgggcat

SEQ ID NO: 2180110 - DNA, 25 bp, Homo sapien
cattgcagaggtaggtggcttactc

SEQ ID NO: 2180111 - DNA, 25 bp, Homo sapien
caaggtgctaggatggtagagccac

SEQ ID NO: 2180112 - DNA, 25 bp, Homo sapien
tagctatgccaaatttggtcatcca

SEQ ID NO: 2180113 - DNA, 25 bp, Homo sapien
ctctggttccagaatagctatgcca

SEQ ID NO: 2180114 - DNA, 25 bp, Homo sapien
gcttttgcaccgctttaatttctca

SEQ ID NO: 2180115 - DNA, 25 bp, Homo sapien
tgcaccgctttaatttctcacaagc

SEQ ID NO: 2180116 - DNA, 25 bp, Homo sapien
tttcttgtagcacgaacaaggccaa

SEQ ID NO: 2180117 - DNA, 25 bp, Homo sapien
tccatttcttgtagcacgaacaagg

SEQ ID NO: 2180118 - DNA, 25 bp, Homo sapien
tgcgaatgagattttgctccatttc

SEQ ID NO: 2180119 - DNA, 25 bp, Homo sapien
attccttgagcaacaaggcaactgc

SEQ ID NO: 2180120 - DNA, 25 bp, Homo sapien
tatgtaagcattcaaaaggcactgg

SEQ ID NO: 2180121 - DNA, 25 bp, Homo sapien
tcttatgtaagcattcaaaaggcac

SEQ ID NO: 2180122 - DNA, 25 bp, Homo sapien
aaaggcactggagggatggtggcca

SEQ ID NO: 2180123 - DNA, 25 bp, Homo sapien
ctatcttatgtaagcattcaaaagg

SEQ ID NO: 2180124 - DNA, 25 bp, Homo sapien
tccctggatgtatcaagtccaacca

SEQ ID NO: 2180125 - DNA, 25 bp, Homo sapien
ttccctggatgtatcaagtccaacc

SEQ ID NO: 2180126 - DNA, 25 bp, Homo sapien
ccctggatgtatcaagtccaaccat

SEQ ID NO: 2180127 - DNA, 25 bp, Homo sapien
caaaatgctgacaaaccaagtccag

SEQ ID NO: 2180128 - DNA, 25 bp, Homo sapien
gtccttgataaacatcgatacaaaa

SEQ ID NO: 2180129 - DNA, 25 bp, Homo sapien
aaaatgctgacaaaccaagtccagc

SEQ ID NO: 2180130 - DNA, 25 bp, Homo sapien
aaatgctgacaaaccaagtccagca

SEQ ID NO: 2180131 - DNA, 25 bp, Homo sapien
ctggcaaaagaatgcattggctttc

SEQ ID NO: 2180132 - DNA, 25 bp, Homo sapien
cagaggcatctttgtgacataaaat

SEQ ID NO: 2180133 - DNA, 25 bp, Homo sapien
tgtgccttttgggtaatagacactc

SEQ ID NO: 2180134 - DNA, 25 bp, Homo sapien
ttgccttcaggtaagaatctctcca

SEQ ID NO: 2180135 - DNA, 25 bp, Homo sapien
aattttcgctggcaattgaagccca

SEQ ID NO: 2180136 - DNA, 25 bp, Homo sapien
tactgctgacactaatatatgcttg

SEQ ID NO: 2180137 - DNA, 25 bp, Homo sapien
gagtttcttgtaaattatgtcttct

SEQ ID NO: 2180138 - DNA, 25 bp, Homo sapien
tatgtcttctatggggctcggcaat

SEQ ID NO: 2180139 - DNA, 25 bp, Homo sapien
tcttgtaaattatgtcttctatggg

SEQ ID NO: 2180140 - DNA, 25 bp, Homo sapien
ttctatggggctcggcaatcaagtg

SEQ ID NO: 2180141 - DNA, 25 bp, Homo sapien
tgctggactgcgaactgtcatgcca

SEQ ID NO: 2180142 - DNA, 25 bp, Homo sapien
gaaagtcgctatggagcagcagaca

SEQ ID NO: 2180143 - DNA, 25 bp, Homo sapien
gagaacttcctttgggcaagtgcaa

SEQ ID NO: 2180144 - DNA, 25 bp, Homo sapien
tgtggctccttggatcaggcctgag

SEQ ID NO: 2180145 - DNA, 25 bp, Homo sapien
tgcaagtccacaaccctcagtctgt

SEQ ID NO: 2180146 - DNA, 25 bp, Homo sapien
ctatacaattcgatttccaattcat

SEQ ID NO: 2180147 - DNA, 25 bp, Homo sapien
gtacgtgagctggctaccctgccat

SEQ ID NO: 2180148 - DNA, 25 bp, Homo sapien
tgttcccccactggttctgcaagtc

SEQ ID NO: 2180149 - DNA, 25 bp, Homo sapien
aagtcaggctaagaaagagtaccca

SEQ ID NO: 2180150 - DNA, 25 bp, Homo sapien
tatcaatggccctactgaatgctca

SEQ ID NO: 2180151 - DNA, 25 bp, Homo sapien
gagtacccaagcaaccagtgtcata

SEQ ID NO: 2180152 - DNA, 25 bp, Homo sapien
gaaggattagcgaaggccaacatga

SEQ ID NO: 2180153 - DNA, 25 bp, Homo sapien
agtagcaccccacccctaaattgtg

SEQ ID NO: 2180154 - DNA, 25 bp, Homo sapien
ggatcattggtctaaaccctttagc

SEQ ID NO: 2180155 - DNA, 25 bp, Homo sapien
taaaccttgacacaaaataggagca

SEQ ID NO: 2180156 - DNA, 25 bp, Homo sapien
tactggcatctttgactatgaacct

SEQ ID NO: 2180157 - DNA, 25 bp, Homo sapien
caactagacttactgtgtgatgaga

SEQ ID NO: 2180158 - DNA, 25 bp, Homo sapien
tcttcctcatgcttcagtcaactag

SEQ ID NO: 2180159 - DNA, 25 bp, Homo sapien
atgctttcaagagcctggttgcacc

SEQ ID NO: 2180160 - DNA, 25 bp, Homo sapien
ggttgcacctgcttctaaagtgcca

SEQ ID NO: 2180161 - DNA, 25 bp, Homo sapien
ctggcggcagcacaaatagtaatta

SEQ ID NO: 2180162 - DNA, 25 bp, Homo sapien
gagaccacccgtaaagacagacaaa

SEQ ID NO: 2180163 - DNA, 25 bp, Homo sapien
ttcatggcattcatgagaccgtcag

SEQ ID NO: 2180164 - DNA, 25 bp, Homo sapien
ttcatgagaccgtcaggagaccacc

SEQ ID NO: 2180165 - DNA, 25 bp, Homo sapien
ctgctccatccctgcctttacccag

SEQ ID NO: 2180166 - DNA, 25 bp, Homo sapien
caaggtttgttcctcggttcctgct

SEQ ID NO: 2180167 - DNA, 25 bp, Homo sapien
tttgttcctcggttcctgctccatc

SEQ ID NO: 2180168 - DNA, 25 bp, Homo sapien
cctgctccatccctgcctttaccca

SEQ ID NO: 2180169 - DNA, 25 bp, Homo sapien
tctgtcttctgcttccggtcctgca

SEQ ID NO: 2180170 - DNA, 25 bp, Homo sapien
tcaaacatctggtctccactttctg

SEQ ID NO: 2180171 - DNA, 25 bp, Homo sapien
ggtctccactttctgtcttctgctt

SEQ ID NO: 2180172 - DNA, 25 bp, Homo sapien
ctgtcttctgcttccggtcctgcac

SEQ ID NO: 2180173 - DNA, 25 bp, Homo sapien
gtttgaactcactctggtacccatg

SEQ ID NO: 2180174 - DNA, 25 bp, Homo sapien
gatttttggcaccttgtcttagata

SEQ ID NO: 2180175 - DNA, 25 bp, Homo sapien
ggtacccatgaatctggctacccct

SEQ ID NO: 2180176 - DNA, 25 bp, Homo sapien
gttctctgcctgactagtgtatcca

SEQ ID NO: 2180177 - DNA, 25 bp, Homo sapien
caacacttcagctcctgcttcagca

SEQ ID NO: 2180178 - DNA, 25 bp, Homo sapien
tcctgcttcagcaggagcaccctgt

SEQ ID NO: 2180179 - DNA, 25 bp, Homo sapien
cagctcctgcttcagcaggagcacc

SEQ ID NO: 2180180 - DNA, 25 bp, Homo sapien
gctcctgcttcagcaggagcaccct

SEQ ID NO: 2180181 - DNA, 25 bp, Homo sapien
tagtcccatccgacaagacaaaagg

SEQ ID NO: 2180182 - DNA, 25 bp, Homo sapien
cctaaagatagttgttgactattcc

SEQ ID NO: 2180183 - DNA, 25 bp, Homo sapien
gcagcagctggataagatggccttt

SEQ ID NO: 2180184 - DNA, 25 bp, Homo sapien
gaaaaggcaggtcaagagcccaaat

SEQ ID NO: 2180185 - DNA, 25 bp, Homo sapien
tggaaaggcttttgacggttgcctc

SEQ ID NO: 2180186 - DNA, 25 bp, Homo sapien
gcttcctgtgagtgtacatctctga

SEQ ID NO: 2180187 - DNA, 25 bp, Homo sapien
gtttatccttgattaccagcgtcag

SEQ ID NO: 2180188 - DNA, 25 bp, Homo sapien
gagaggcaaccaaagtttatccttg

SEQ ID NO: 2180189 - DNA, 25 bp, Homo sapien
caggttctgttagctgaaggtcaca

SEQ ID NO: 2180190 - DNA, 25 bp, Homo sapien
ggtcacagcctagtcaggtagccct

SEQ ID NO: 2180191 - DNA, 25 bp, Homo sapien
caggtagcgtacctacacttgaggt

SEQ ID NO: 2180192 - DNA, 25 bp, Homo sapien
ccccagtgttgtagctgcaaagtga

SEQ ID NO: 2180193 - DNA, 25 bp, Homo sapien
ggccactcagcgttcctcagatgag

SEQ ID NO: 2180194 - DNA, 25 bp, Homo sapien
cacatttcagtgtaggttgcacaga

SEQ ID NO: 2180195 - DNA, 25 bp, Homo sapien
gatgagtcaggcaccagcgctctgg

SEQ ID NO: 2180196 - DNA, 25 bp, Homo sapien
tagaggtaggagtctccttgccttc

SEQ ID NO: 2180197 - DNA, 25 bp, Homo sapien
ttcccatgccagtgagagtgctgca

SEQ ID NO: 2180198 - DNA, 25 bp, Homo sapien
tccttgataggacaaatctcactgc

SEQ ID NO: 2180199 - DNA, 25 bp, Homo sapien
tgtctagcccaaggaatcaagcttt

SEQ ID NO: 2180200 - DNA, 25 bp, Homo sapien
tcaggtaagagggtaaatctggacc

SEQ ID NO: 2180201 - DNA, 25 bp, Homo sapien
ctgcttcagacagaagggaactgaa

SEQ ID NO: 2180202 - DNA, 25 bp, Homo sapien
ctgaagtaaattcttaagacacaca

SEQ ID NO: 2180203 - DNA, 25 bp, Homo sapien
aagaaagttctttgcgctgaaggcg

SEQ ID NO: 2180204 - DNA, 25 bp, Homo sapien
gcggttcgccaaggtgctaattcca

SEQ ID NO: 2180205 - DNA, 25 bp, Homo sapien
agtgctggcacagaaccaagtgaag

SEQ ID NO: 2180206 - DNA, 25 bp, Homo sapien
gtgctggcacagaaccaagtgaagg

SEQ ID NO: 2180207 - DNA, 25 bp, Homo sapien
ttaggccttagcaaagatcacagtc

SEQ ID NO: 2180208 - DNA, 25 bp, Homo sapien
caaagatcacagtctatgaagttca

SEQ ID NO: 2180209 - DNA, 25 bp, Homo sapien
caaagcactccttctgccgcataaa

SEQ ID NO: 2180210 - DNA, 25 bp, Homo sapien
cattgctacaattaaaaccgataag

SEQ ID NO: 2180211 - DNA, 25 bp, Homo sapien
tggatctccaccaccgaagttatgg

SEQ ID NO: 2180212 - DNA, 25 bp, Homo sapien
tatgggcacctactaacgtttcttg

SEQ ID NO: 2180213 - DNA, 25 bp, Homo sapien
gccaactgaagcagtgggagaggag

SEQ ID NO: 2180214 - DNA, 25 bp, Homo sapien
attagtcgtaaacactactgtactc

SEQ ID NO: 2180215 - DNA, 25 bp, Homo sapien
gctagccaactgaagcagtgggaga

SEQ ID NO: 2180216 - DNA, 25 bp, Homo sapien
tagtcgtaaacactactgtactcag

SEQ ID NO: 2180217 - DNA, 25 bp, Homo sapien
gagccgtgggctagagtcttctgac

SEQ ID NO: 2180218 - DNA, 25 bp, Homo sapien
caaagacttagtggtcaggatggct

SEQ ID NO: 2180219 - DNA, 25 bp, Homo sapien
gacggcctgctggtttactcctctg

SEQ ID NO: 2180220 - DNA, 25 bp, Homo sapien
cctctggcgagtggtcatggcctct

SEQ ID NO: 2180221 - DNA, 25 bp, Homo sapien
tggcttctagtaagtgaatccctgc

SEQ ID NO: 2180222 - DNA, 25 bp, Homo sapien
tcagcgtcaatgcttcctagttgct

SEQ ID NO: 2180223 - DNA, 25 bp, Homo sapien
tgggtgtacacttggttgatcctgc

SEQ ID NO: 2180224 - DNA, 25 bp, Homo sapien
tttaacttcatccatgtagggctgg

SEQ ID NO: 2180225 - DNA, 25 bp, Homo sapien
gaattcctgatcctgtatgcctggg

SEQ ID NO: 2180226 - DNA, 25 bp, Homo sapien
tcacatagccgtgggtcgaagttcc

SEQ ID NO: 2180227 - DNA, 25 bp, Homo sapien
gggatttctttcacatcgggcagca

SEQ ID NO: 2180228 - DNA, 25 bp, Homo sapien
gaaaacgctttcttggtagcactca

SEQ ID NO: 2180229 - DNA, 25 bp, Homo sapien
gggacattcagcgagaatgtcaaac

SEQ ID NO: 2180230 - DNA, 25 bp, Homo sapien
ttcagcgagaatgtcaaacagatca

SEQ ID NO: 2180231 - DNA, 25 bp, Homo sapien
catccaggggacattcagcgagaat

SEQ ID NO: 2180232 - DNA, 25 bp, Homo sapien
aggcatccaggggacattcagcgag

SEQ ID NO: 2180233 - DNA, 25 bp, Homo sapien
taccccagaaaccatggtctgccgt

SEQ ID NO: 2180234 - DNA, 25 bp, Homo sapien
gaaaccatggtctgccgtttgccat

SEQ ID NO: 2180235 - DNA, 25 bp, Homo sapien
tgggtaccccagaaaccatggtctg

SEQ ID NO: 2180236 - DNA, 25 bp, Homo sapien
cccagaaaccatggtctgccgtttg

SEQ ID NO: 2180237 - DNA, 25 bp, Homo sapien
tatttcggccctgaagcaaattagg

SEQ ID NO: 2180238 - DNA, 25 bp, Homo sapien
gcttaacaggaattgcgttgggcaa

SEQ ID NO: 2180239 - DNA, 25 bp, Homo sapien
tcactgagttgatgtcccaaagcca

SEQ ID NO: 2180240 - DNA, 25 bp, Homo sapien
ttaggcatctaaggcccacagagca

SEQ ID NO: 2180241 - DNA, 25 bp, Homo sapien
gctgtaggccttttaccaaatgtga

SEQ ID NO: 2180242 - DNA, 25 bp, Homo sapien
gaaacccgcttgtgcacattctaga

SEQ ID NO: 2180243 - DNA, 25 bp, Homo sapien
gaatttgatgtaacgtgggacggac

SEQ ID NO: 2180244 - DNA, 25 bp, Homo sapien
ctaaggctggctacgcaatggaacc

SEQ ID NO: 2180245 - DNA, 25 bp, Homo sapien
ttttctgcgtgacctgctgctctcg

SEQ ID NO: 2180246 - DNA, 25 bp, Homo sapien
tcactctcgctgaggtcgtgggcgc

SEQ ID NO: 2180247 - DNA, 25 bp, Homo sapien
cttggcctccctggtccgtgggtgt

SEQ ID NO: 2180248 - DNA, 25 bp, Homo sapien
ggttgtcggtcgacaggagctccca

SEQ ID NO: 2180249 - DNA, 25 bp, Homo sapien
ccacctggacgtggggcgtgctgca

SEQ ID NO: 2180250 - DNA, 25 bp, Homo sapien
tggacgtggggcgtgctgcaggcgc

SEQ ID NO: 2180251 - DNA, 25 bp, Homo sapien
gccacctggacgtggggcgtgctgc

SEQ ID NO: 2180252 - DNA, 25 bp, Homo sapien
gtggggcgtgctgcaggcgcgcgac

SEQ ID NO: 2180253 - DNA, 25 bp, Homo sapien
ggccccgctcttagggagctgcttt

SEQ ID NO: 2180254 - DNA, 25 bp, Homo sapien
caatttggggacaggttcccttgag

SEQ ID NO: 2180255 - DNA, 25 bp, Homo sapien
agaaagggagcagggccccgctctt

SEQ ID NO: 2180256 - DNA, 25 bp, Homo sapien
gggctgcggcctgagtcctccgagc

SEQ ID NO: 2180257 - DNA, 25 bp, Homo sapien
gaatgtaaggtagtgggtcccatac

SEQ ID NO: 2180258 - DNA, 25 bp, Homo sapien
ccactaacttgcaatactgatgaga

SEQ ID NO: 2180259 - DNA, 25 bp, Homo sapien
tagtgggtcccatacagcacaggag

SEQ ID NO: 2180260 - DNA, 25 bp, Homo sapien
aaaacactggcatacataaatagga

SEQ ID NO: 2180261 - DNA, 25 bp, Homo sapien
agccttgttatatttgacgcacttc

SEQ ID NO: 2180262 - DNA, 25 bp, Homo sapien
ttatatttgacgcacttccctgttt

SEQ ID NO: 2180263 - DNA, 25 bp, Homo sapien
tgttatatttgacgcacttccctgt

SEQ ID NO: 2180264 - DNA, 25 bp, Homo sapien
ccttgttatatttgacgcacttccc

SEQ ID NO: 2180265 - DNA, 25 bp, Homo sapien
taatacaaagttgcacagacagagt

SEQ ID NO: 2180266 - DNA, 25 bp, Homo sapien
taaaagaggctcctgaaagtgtaac

SEQ ID NO: 2180267 - DNA, 25 bp, Homo sapien
taagctatgattatgcactctgtgg

SEQ ID NO: 2180268 - DNA, 25 bp, Homo sapien
actctgtggaatacccctggccctt

SEQ ID NO: 2180269 - DNA, 25 bp, Homo sapien
agttccccagatatcgaaaggctcc

SEQ ID NO: 2180270 - DNA, 25 bp, Homo sapien
tctttggatccgctttttaatgttg

SEQ ID NO: 2180271 - DNA, 25 bp, Homo sapien
tttggatccgctttttaatgttgaa

SEQ ID NO: 2180272 - DNA, 25 bp, Homo sapien
cccagatatcgaaaggctcctctga

SEQ ID NO: 2180273 - DNA, 25 bp, Homo sapien
gactctgggaagctcaatcgctcac

SEQ ID NO: 2180274 - DNA, 25 bp, Homo sapien
taacagcagtaattgggtggcacct

SEQ ID NO: 2180275 - DNA, 25 bp, Homo sapien
cagagcaggtttgtgactcccagta

SEQ ID NO: 2180276 - DNA, 25 bp, Homo sapien
taggcgttcagcaggtactcggtaa

SEQ ID NO: 2180277 - DNA, 25 bp, Homo sapien
aagagaaggtccgaagagccccaca

SEQ ID NO: 2180278 - DNA, 25 bp, Homo sapien
agaaacatcaaataagggagagacg

SEQ ID NO: 2180279 - DNA, 25 bp, Homo sapien
catcaaataagggagagacgaagag

SEQ ID NO: 2180280 - DNA, 25 bp, Homo sapien
agacgaagagaaggtccgaagagcc

SEQ ID NO: 2180281 - DNA, 25 bp, Homo sapien
catgcaacaagaggagggtcgcttg

SEQ ID NO: 2180282 - DNA, 25 bp, Homo sapien
cacatgcaacaagaggagggtcgct

SEQ ID NO: 2180283 - DNA, 25 bp, Homo sapien
acatgcaacaagaggagggtcgctt

SEQ ID NO: 2180284 - DNA, 25 bp, Homo sapien
aactgccctggcactctgtaaagct

SEQ ID NO: 2180285 - DNA, 25 bp, Homo sapien
gcgtcctcttgcatagccagcaggg

SEQ ID NO: 2180286 - DNA, 25 bp, Homo sapien
gaaaaggaaacttccgactgcagca

SEQ ID NO: 2180287 - DNA, 25 bp, Homo sapien
gactttgacgacgacaagtggccca

SEQ ID NO: 2180288 - DNA, 25 bp, Homo sapien
ccctcctcaaaactggccctgacaa

SEQ ID NO: 2180289 - DNA, 25 bp, Homo sapien
tcctcaaaactggccctgacaacat

SEQ ID NO: 2180290 - DNA, 25 bp, Homo sapien
tctaccctcctcaaaactggccctg

SEQ ID NO: 2180291 - DNA, 25 bp, Homo sapien
taccctcctcaaaactggccctgac

SEQ ID NO: 2180292 - DNA, 25 bp, Homo sapien
ggtgactgaggccacagttaggaga

SEQ ID NO: 2180293 - DNA, 25 bp, Homo sapien
actgaggccacagttaggagaagga

SEQ ID NO: 2180294 - DNA, 25 bp, Homo sapien
tgactgaggccacagttaggagaag

SEQ ID NO: 2180295 - DNA, 25 bp, Homo sapien
cttggggtgactgaggccacagtta

SEQ ID NO: 2180296 - DNA, 25 bp, Homo sapien
ccttaagcaggatccagacaactga

SEQ ID NO: 2180297 - DNA, 25 bp, Homo sapien
tccagacaactgaatgtagtgtagt

SEQ ID NO: 2180298 - DNA, 25 bp, Homo sapien
cctcctctgtctgccttaagcagga

SEQ ID NO: 2180299 - DNA, 25 bp, Homo sapien
gacaactgaatgtagtgtagtccca

SEQ ID NO: 2180300 - DNA, 25 bp, Homo sapien
tcagggcgtaaacatgctggcaggg

SEQ ID NO: 2180301 - DNA, 25 bp, Homo sapien
cactgcagccggaagcacagaactt

SEQ ID NO: 2180302 - DNA, 25 bp, Homo sapien
ctgcagccggaagcacagaacttgt

SEQ ID NO: 2180303 - DNA, 25 bp, Homo sapien
ctgcactgcagccggaagcacagaa

SEQ ID NO: 2180304 - DNA, 25 bp, Homo sapien
tgcagccggaagcacagaacttgtt

SEQ ID NO: 2180305 - DNA, 25 bp, Homo sapien
atggaaaactccggttcaatcaccg

SEQ ID NO: 2180306 - DNA, 25 bp, Homo sapien
aatcaccggatggggcccgcccagc

SEQ ID NO: 2180307 - DNA, 25 bp, Homo sapien
caaatggaaaactccggttcaatca

SEQ ID NO: 2180308 - DNA, 25 bp, Homo sapien
aactccggttcaatcaccggatggg

SEQ ID NO: 2180309 - DNA, 25 bp, Homo sapien
gtccacgacatcaggatcggtctct

SEQ ID NO: 2180310 - DNA, 25 bp, Homo sapien
tcttctgagtaaatagtccacgaca

SEQ ID NO: 2180311 - DNA, 25 bp, Homo sapien
cagcacttcgttctggagatctggg

SEQ ID NO: 2180312 - DNA, 25 bp, Homo sapien
tctaacaggctgatcagcacttcgt

SEQ ID NO: 2180313 - DNA, 25 bp, Homo sapien
caataggattgtcagtcccagagaa

SEQ ID NO: 2180314 - DNA, 25 bp, Homo sapien
caggaccaggtgtcatggagtctta

SEQ ID NO: 2180315 - DNA, 25 bp, Homo sapien
tatgggtcataataaggacttctgc

SEQ ID NO: 2180316 - DNA, 25 bp, Homo sapien
cctgagtgccaggtattggatgctg

SEQ ID NO: 2180317 - DNA, 25 bp, Homo sapien
gcattatacacagtgggcagagtgg

SEQ ID NO: 2180318 - DNA, 25 bp, Homo sapien
caaacacgctttgatagagcaggca

SEQ ID NO: 2180319 - DNA, 25 bp, Homo sapien
gagcaggcaccttatccctttaatg

SEQ ID NO: 2180320 - DNA, 25 bp, Homo sapien
tgggatcaggtcacagcattataca

SEQ ID NO: 2180321 - DNA, 25 bp, Homo sapien
tccagaggaaaccaataggcagttt

SEQ ID NO: 2180322 - DNA, 25 bp, Homo sapien
caccccagagggtggtctactagaa

SEQ ID NO: 2180323 - DNA, 25 bp, Homo sapien
gctgaaactgcctgacttccaatga

SEQ ID NO: 2180324 - DNA, 25 bp, Homo sapien
tgactccaaaatgtgaccatggttt

SEQ ID NO: 2180325 - DNA, 25 bp, Homo sapien
gcagcaggttgggtccaaatatggt

SEQ ID NO: 2180326 - DNA, 25 bp, Homo sapien
catgaacagggcttcataattttca

SEQ ID NO: 2180327 - DNA, 25 bp, Homo sapien
ttttgcacaacagcgatgatggccg

SEQ ID NO: 2180328 - DNA, 25 bp, Homo sapien
gtctgatgacttctgcttgtgcagc

SEQ ID NO: 2180329 - DNA, 25 bp, Homo sapien
tagaaggtatatgaggagctgcaag

SEQ ID NO: 2180330 - DNA, 25 bp, Homo sapien
cggtggagggtgtcgcagttgcagg

SEQ ID NO: 2180331 - DNA, 25 bp, Homo sapien
ttgtcatcggcatgcctggccacga

SEQ ID NO: 2180332 - DNA, 25 bp, Homo sapien
atctttgctgatgttgtcatcggca

SEQ ID NO: 2180333 - DNA, 25 bp, Homo sapien
gagagtgttgatgaaagctgtgtac

SEQ ID NO: 2180334 - DNA, 25 bp, Homo sapien
ggctgccacatcatgaacactgtgc

SEQ ID NO: 2180335 - DNA, 25 bp, Homo sapien
cagagagacatcaatcccacggtca

SEQ ID NO: 2180336 - DNA, 25 bp, Homo sapien
tcaggaactctttcagcaaggctgc

SEQ ID NO: 2180337 - DNA, 25 bp, Homo sapien
atgaagccatcatgaacacaaatac

SEQ ID NO: 2180338 - DNA, 25 bp, Homo sapien
ttgccttttatgaagccatcatgaa

SEQ ID NO: 2180339 - DNA, 25 bp, Homo sapien
aactcttttctcaaaggatggtttg

SEQ ID NO: 2180340 - DNA, 25 bp, Homo sapien
tcaaaggatggtttgccttttatga

SEQ ID NO: 2180341 - DNA, 25 bp, Homo sapien
cacaggaacctattgttgaaggtct

SEQ ID NO: 2180342 - DNA, 25 bp, Homo sapien
tctaatatcaaacttcagttgcagg

SEQ ID NO: 2180343 - DNA, 25 bp, Homo sapien
ctgcctcatcacaggaacctattgt

SEQ ID NO: 2180344 - DNA, 25 bp, Homo sapien
tcagttgcaggaatgttgcacaggg

SEQ ID NO: 2180345 - DNA, 25 bp, Homo sapien
tacatccagacattttgctttcaag

SEQ ID NO: 2180346 - DNA, 25 bp, Homo sapien
tgcacgtggcacagatacatccaga

SEQ ID NO: 2180347 - DNA, 25 bp, Homo sapien
tcaagtgtttgatcctaactgtaac

SEQ ID NO: 2180348 - DNA, 25 bp, Homo sapien
cattttagtaaaagcgggtgctaca

SEQ ID NO: 2180349 - DNA, 25 bp, Homo sapien
gagcttccaactcggaatatcccca

SEQ ID NO: 2180350 - DNA, 25 bp, Homo sapien
ttttgagcttccaactcggaatatc

SEQ ID NO: 2180351 - DNA, 25 bp, Homo sapien
ttccaactcggaatatccccactgt

SEQ ID NO: 2180352 - DNA, 25 bp, Homo sapien
cttttttgagcttccaactcggaat

SEQ ID NO: 2180353 - DNA, 25 bp, Homo sapien
tatctattgacagagagaatgttac

SEQ ID NO: 2180354 - DNA, 25 bp, Homo sapien
aaatccagccttttctacatgaatg

SEQ ID NO: 2180355 - DNA, 25 bp, Homo sapien
cagggtagctggtactgccagcaca

SEQ ID NO: 2180356 - DNA, 25 bp, Homo sapien
gaatgttactgccttccctcactat

SEQ ID NO: 2180357 - DNA, 25 bp, Homo sapien
tcggtgatagaatccactgacatgg

SEQ ID NO: 2180358 - DNA, 25 bp, Homo sapien
taaagcttctagtagtcgagactga

SEQ ID NO: 2180359 - DNA, 25 bp, Homo sapien
ggacctgtctgtaaataggattcag

SEQ ID NO: 2180360 - DNA, 25 bp, Homo sapien
tgtccaccagcctagggacctgtct

SEQ ID NO: 2180361 - DNA, 25 bp, Homo sapien
caagtcctgcttgagtttataggcc

SEQ ID NO: 2180362 - DNA, 25 bp, Homo sapien
ggaagccacaaagtcagatgcatct

SEQ ID NO: 2180363 - DNA, 25 bp, Homo sapien
cattcggtgtttctgaggttgagct

SEQ ID NO: 2180364 - DNA, 25 bp, Homo sapien
caatgacttgggataagggcattcc

SEQ ID NO: 2180365 - DNA, 25 bp, Homo sapien
aacagacattcactttcagagactg

SEQ ID NO: 2180366 - DNA, 25 bp, Homo sapien
tggaatcaaaaaacagacattcact

SEQ ID NO: 2180367 - DNA, 25 bp, Homo sapien
aaaaacagacattcactttcagaga

SEQ ID NO: 2180368 - DNA, 25 bp, Homo sapien
ctggaatcaaaaaacagacattcac

SEQ ID NO: 2180369 - DNA, 25 bp, Homo sapien
tcctttgcatgagatgtaggtgtga

SEQ ID NO: 2180370 - DNA, 25 bp, Homo sapien
gacttggcatcctgccagcctttct

SEQ ID NO: 2180371 - DNA, 25 bp, Homo sapien
cctcctttgcatgagatgtaggtgt

SEQ ID NO: 2180372 - DNA, 25 bp, Homo sapien
ctcctttgcatgagatgtaggtgtg

SEQ ID NO: 2180373 - DNA, 25 bp, Homo sapien
ttttctcctttcctagtgaatccag

SEQ ID NO: 2180374 - DNA, 25 bp, Homo sapien
cctttcctagtgaatccagtttctt

SEQ ID NO: 2180375 - DNA, 25 bp, Homo sapien
ctcctttcctagtgaatccagtttc

SEQ ID NO: 2180376 - DNA, 25 bp, Homo sapien
tttcctagtgaatccagtttctttc

SEQ ID NO: 2180377 - DNA, 25 bp, Homo sapien
tcccaagatttagatgatcagcagt

SEQ ID NO: 2180378 - DNA, 25 bp, Homo sapien
ccaacattcagcttgcaggatacat

SEQ ID NO: 2180379 - DNA, 25 bp, Homo sapien
ttagaagagcacaagctgatctgcc

SEQ ID NO: 2180380 - DNA, 25 bp, Homo sapien
ggcacgaggctgtaatcaaaggcac

SEQ ID NO: 2180381 - DNA, 25 bp, Homo sapien
tacttgatcctgaaataattgtgag

SEQ ID NO: 2180382 - DNA, 25 bp, Homo sapien
actccatggccaatggatctacttg

SEQ ID NO: 2180383 - DNA, 25 bp, Homo sapien
tctgttactatcagcaggccaacct

SEQ ID NO: 2180384 - DNA, 25 bp, Homo sapien
gtgtatctgttactatcagcaggcc

SEQ ID NO: 2180385 - DNA, 25 bp, Homo sapien
gagagttctgcaatgctctttaaaa

SEQ ID NO: 2180386 - DNA, 25 bp, Homo sapien
gagctctctgagatgctgtaaatat

SEQ ID NO: 2180387 - DNA, 25 bp, Homo sapien
tattgcggagtttatgttcctccag

SEQ ID NO: 2180388 - DNA, 25 bp, Homo sapien
tatctactgaaaagccgagtttgaa

SEQ ID NO: 2180389 - DNA, 25 bp, Homo sapien
ctgtagatgccgacaccacgaggct

SEQ ID NO: 2180390 - DNA, 25 bp, Homo sapien
tcggctcagtgtgcatgcaggtagt

SEQ ID NO: 2180391 - DNA, 25 bp, Homo sapien
gcccgcctgcccgtgctcctcgctg

SEQ ID NO: 2180392 - DNA, 25 bp, Homo sapien
tagtggggccgtgtggggccacgcc

SEQ ID NO: 2180393 - DNA, 25 bp, Homo sapien
ctgttcccacaatattccagctcct

SEQ ID NO: 2180394 - DNA, 25 bp, Homo sapien
ttcccacaatattccagctcctcat

SEQ ID NO: 2180395 - DNA, 25 bp, Homo sapien
gctgaggacctagggggcaagggtg

SEQ ID NO: 2180396 - DNA, 25 bp, Homo sapien
ggtagctgaggacctagggggcaag

SEQ ID NO: 2180397 - DNA, 25 bp, Homo sapien
gcaaggagccgggaatggggagtgc

SEQ ID NO: 2180398 - DNA, 25 bp, Homo sapien
ggaagcaaggagccgggaatgggga

SEQ ID NO: 2180399 - DNA, 25 bp, Homo sapien
aatggggagtgctcggaatcctgtc

SEQ ID NO: 2180400 - DNA, 25 bp, Homo sapien
ggaatggggagtgctcggaatcctg

SEQ ID NO: 2180401 - DNA, 25 bp, Homo sapien
ttcctttgccaggatgaggagctgg

SEQ ID NO: 2180402 - DNA, 25 bp, Homo sapien
agtccacagctaccatgggtggtcc

SEQ ID NO: 2180403 - DNA, 25 bp, Homo sapien
ctggaatatcgtggggacagagacc

SEQ ID NO: 2180404 - DNA, 25 bp, Homo sapien
tggcctccattccttagggcagggt

SEQ ID NO: 2180405 - DNA, 25 bp, Homo sapien
ctgagggggagggcatgcctgcagg

SEQ ID NO: 2180406 - DNA, 25 bp, Homo sapien
tgctctcaagagaaccgaggaccca

SEQ ID NO: 2180407 - DNA, 25 bp, Homo sapien
cctcagaggagccttgtggtgccag

SEQ ID NO: 2180408 - DNA, 25 bp, Homo sapien
tgtgcactgagtcgaccaatcagcg

SEQ ID NO: 2180409 - DNA, 25 bp, Homo sapien
agtcgaccaatcagcgaggagtgcg

SEQ ID NO: 2180410 - DNA, 25 bp, Homo sapien
ttgtctggggcctgaatcagggcaa

SEQ ID NO: 2180411 - DNA, 25 bp, Homo sapien
gtgtcgttgtctggggcctgaatca

SEQ ID NO: 2180412 - DNA, 25 bp, Homo sapien
ccagtgtcgttgtctggggcctgaa

SEQ ID NO: 2180413 - DNA, 25 bp, Homo sapien
aaatggccccagtgtcgttgtctgg

SEQ ID NO: 2180414 - DNA, 25 bp, Homo sapien
cttgattgtccgaaacaggtgcaca

SEQ ID NO: 2180415 - DNA, 25 bp, Homo sapien
ttgattgtccgaaacaggtgcacac

SEQ ID NO: 2180416 - DNA, 25 bp, Homo sapien
ccttgattgtccgaaacaggtgcac

SEQ ID NO: 2180417 - DNA, 25 bp, Homo sapien
ggtgactcccactgagatagctggg

SEQ ID NO: 2180418 - DNA, 25 bp, Homo sapien
tgtctcaatggctccgcgaggatcc

SEQ ID NO: 2180419 - DNA, 25 bp, Homo sapien
cagggccgagctctgtctcaatggc

SEQ ID NO: 2180420 - DNA, 25 bp, Homo sapien
cggagttcaggtgtgcgcggcagct

SEQ ID NO: 2180421 - DNA, 25 bp, Homo sapien
gccaggacaggaggggatgctgaca

SEQ ID NO: 2180422 - DNA, 25 bp, Homo sapien
gccccagggacaggctgtacaggcc

SEQ ID NO: 2180423 - DNA, 25 bp, Homo sapien
ggacaggctgtacaggccaggacag

SEQ ID NO: 2180424 - DNA, 25 bp, Homo sapien
ccagggacaggctgtacaggccagg

SEQ ID NO: 2180425 - DNA, 25 bp, Homo sapien
gagtcacctctaacatccgaggaca

SEQ ID NO: 2180426 - DNA, 25 bp, Homo sapien
caaggttcaggagtcacctctaaca

SEQ ID NO: 2180427 - DNA, 25 bp, Homo sapien
ctaacatccgaggacaaccagccat

SEQ ID NO: 2180428 - DNA, 25 bp, Homo sapien
tcaggagtcacctctaacatccgag

SEQ ID NO: 2180429 - DNA, 25 bp, Homo sapien
ccaggaaatggagcatggagttaaa

SEQ ID NO: 2180430 - DNA, 25 bp, Homo sapien
ccagtggaggctcaggttacggcca

SEQ ID NO: 2180431 - DNA, 25 bp, Homo sapien
gagccggaagaaggtgcacgcccaa

SEQ ID NO: 2180432 - DNA, 25 bp, Homo sapien
cccaaggggacggtttgtctgctct

SEQ ID NO: 2180433 - DNA, 25 bp, Homo sapien
gatgcggtcctgacgtccaagggat

SEQ ID NO: 2180434 - DNA, 25 bp, Homo sapien
cagctcttctcgatggatgcggtcc

SEQ ID NO: 2180435 - DNA, 25 bp, Homo sapien
tccaagggatctgacacgtagtgcc

SEQ ID NO: 2180436 - DNA, 25 bp, Homo sapien
tactgggacttaaaccgcaaagagc

SEQ ID NO: 2180437 - DNA, 25 bp, Homo sapien
tctagctgacattaaaaagggtctt

SEQ ID NO: 2180438 - DNA, 25 bp, Homo sapien
ctagctgacattaaaaagggtcttg

SEQ ID NO: 2180439 - DNA, 25 bp, Homo sapien
tgtctagctgacattaaaaagggtc

SEQ ID NO: 2180440 - DNA, 25 bp, Homo sapien
gtctagctgacattaaaaagggtct

SEQ ID NO: 2180441 - DNA, 25 bp, Homo sapien
tccgagtgagttgctcttccatagc

SEQ ID NO: 2180442 - DNA, 25 bp, Homo sapien
catttttggctacatgtccgagtga

SEQ ID NO: 2180443 - DNA, 25 bp, Homo sapien
aactacatgactgttggacctgcta

SEQ ID NO: 2180444 - DNA, 25 bp, Homo sapien
tgataacaaatggtcactacctggt

SEQ ID NO: 2180445 - DNA, 25 bp, Homo sapien
tgtcctcagacccagtgtaggagaa

SEQ ID NO: 2180446 - DNA, 25 bp, Homo sapien
taaaattctactaggtggtcaccac

SEQ ID NO: 2180447 - DNA, 25 bp, Homo sapien
ggtcaccaccgtttatacacatatg

SEQ ID NO: 2180448 - DNA, 25 bp, Homo sapien
gggtcacctgtttcacgatagctgt

SEQ ID NO: 2180449 - DNA, 25 bp, Homo sapien
gccagccaacaaccaagaagctgta

SEQ ID NO: 2180450 - DNA, 25 bp, Homo sapien
gggactgacctcagccgtacactgc

SEQ ID NO: 2180451 - DNA, 25 bp, Homo sapien
tttgggaatggtgatctgacagctc

SEQ ID NO: 2180452 - DNA, 25 bp, Homo sapien
aggtcacagtcctgttgcaactgat

SEQ ID NO: 2180453 - DNA, 25 bp, Homo sapien
ctgttgcaactgataaaaagccact

SEQ ID NO: 2180454 - DNA, 25 bp, Homo sapien
ttagccactacaatattctggctgg

SEQ ID NO: 2180455 - DNA, 25 bp, Homo sapien
ttgttgcaagcttgtgagttgcccc

SEQ ID NO: 2180456 - DNA, 25 bp, Homo sapien
actacaatattctggctggttgttg

SEQ ID NO: 2180457 - DNA, 25 bp, Homo sapien
gttgcaagcttgtgagttgcccctc

SEQ ID NO: 2180458 - DNA, 25 bp, Homo sapien
catagaggggacatactggaagtcc

SEQ ID NO: 2180459 - DNA, 25 bp, Homo sapien
ggcaaaaacgtcagagcaaaaggtc

SEQ ID NO: 2180460 - DNA, 25 bp, Homo sapien
tagcatagaggggacatactggaag

SEQ ID NO: 2180461 - DNA, 25 bp, Homo sapien
gaacctttccagtggttagcataga

SEQ ID NO: 2180462 - DNA, 25 bp, Homo sapien
cacgataccttttgttgccagagac

SEQ ID NO: 2180463 - DNA, 25 bp, Homo sapien
tattgaatgtctgagaaatggccca

SEQ ID NO: 2180464 - DNA, 25 bp, Homo sapien
gctggcatagctgtgactcccacga

SEQ ID NO: 2180465 - DNA, 25 bp, Homo sapien
gacctccgctactgtgaatcttggg

SEQ ID NO: 2180466 - DNA, 25 bp, Homo sapien
tgaaccaaatacaactcgaaaagac

SEQ ID NO: 2180467 - DNA, 25 bp, Homo sapien
ctgaaccaaatacaactcgaaaaga

SEQ ID NO: 2180468 - DNA, 25 bp, Homo sapien
agcccagaggacttcatggttaggg

SEQ ID NO: 2180469 - DNA, 25 bp, Homo sapien
gagcccagaggacttcatggttagg

SEQ ID NO: 2180470 - DNA, 25 bp, Homo sapien
ccagaggacttcatggttagggtga

SEQ ID NO: 2180471 - DNA, 25 bp, Homo sapien
aagagcccagaggacttcatggtta

SEQ ID NO: 2180472 - DNA, 25 bp, Homo sapien
tgtgagacccaaactccctcagatg

SEQ ID NO: 2180473 - DNA, 25 bp, Homo sapien
tttaagggcctcagtaatatccctg

SEQ ID NO: 2180474 - DNA, 25 bp, Homo sapien
cctaaatgtcaggatgggagaacag

SEQ ID NO: 2180475 - DNA, 25 bp, Homo sapien
cagagaagccactgtataatgacaa

SEQ ID NO: 2180476 - DNA, 25 bp, Homo sapien
tgctgcctagctggtctttttctgc

SEQ ID NO: 2180477 - DNA, 25 bp, Homo sapien
tgctgctgcctagctggtctttttc

SEQ ID NO: 2180478 - DNA, 25 bp, Homo sapien
gctgcctagctggtctttttctgca

SEQ ID NO: 2180479 - DNA, 25 bp, Homo sapien
gcctagctggtctttttctgcacac

SEQ ID NO: 2180480 - DNA, 25 bp, Homo sapien
aagcatgctctgcccattcccgttt

SEQ ID NO: 2180481 - DNA, 25 bp, Homo sapien
ttcttccaatgactcagccctgtga

SEQ ID NO: 2180482 - DNA, 25 bp, Homo sapien
ccctgtgaggaaatagcctctatgt

SEQ ID NO: 2180483 - DNA, 25 bp, Homo sapien
ttccaatgactcagccctgtgagga

SEQ ID NO: 2180484 - DNA, 25 bp, Homo sapien
tgcggtggggtcaaagttacgatgt

SEQ ID NO: 2180485 - DNA, 25 bp, Homo sapien
tcaaagttacgatgtgtatcggaat

SEQ ID NO: 2180486 - DNA, 25 bp, Homo sapien
aagttacgatgtgtatcggaattca

SEQ ID NO: 2180487 - DNA, 25 bp, Homo sapien
gggtcaaagttacgatgtgtatcgg

SEQ ID NO: 2180488 - DNA, 25 bp, Homo sapien
aagatctgaagatcatacaactcca

SEQ ID NO: 2180489 - DNA, 25 bp, Homo sapien
cggtggttttgtgcctaagatctga

SEQ ID NO: 2180490 - DNA, 25 bp, Homo sapien
gttttgtgcctaagatctgaagatc

SEQ ID NO: 2180491 - DNA, 25 bp, Homo sapien
agatctgaagatcatacaactccaa

SEQ ID NO: 2180492 - DNA, 25 bp, Homo sapien
ctactgatttatccccaaagatcat

SEQ ID NO: 2180493 - DNA, 25 bp, Homo sapien
cctactgatttatccccaaagatca

SEQ ID NO: 2180494 - DNA, 25 bp, Homo sapien
ccctactgatttatccccaaagatc

SEQ ID NO: 2180495 - DNA, 25 bp, Homo sapien
tctggagccttaacagcaagggcca

SEQ ID NO: 2180496 - DNA, 25 bp, Homo sapien
cccaagagatcctagtatgaacagc

SEQ ID NO: 2180497 - DNA, 25 bp, Homo sapien
ttttgcccctatttgatctggagcc

SEQ ID NO: 2180498 - DNA, 25 bp, Homo sapien
gggccataggccgacatttagatat

SEQ ID NO: 2180499 - DNA, 25 bp, Homo sapien
tataggaaggtacaccagtgactag

SEQ ID NO: 2180500 - DNA, 25 bp, Homo sapien
tctcatttcatcgtgaaggaaggta

SEQ ID NO: 2180501 - DNA, 25 bp, Homo sapien
tctgaactttgcacatacatctcca

SEQ ID NO: 2180502 - DNA, 25 bp, Homo sapien
cagtgactagtggaccagcataggg

SEQ ID NO: 2180503 - DNA, 25 bp, Homo sapien
ggtgatccctgccacagggatgcag

SEQ ID NO: 2180504 - DNA, 25 bp, Homo sapien
cccttggttagcttctccacctgtt

SEQ ID NO: 2180505 - DNA, 25 bp, Homo sapien
ctttgtcatacagatggaaaacccc

SEQ ID NO: 2180506 - DNA, 25 bp, Homo sapien
cataggcaagattacccgtgttgct

SEQ ID NO: 2180507 - DNA, 25 bp, Homo sapien
ggccatatcaaagaacgcagtttct

SEQ ID NO: 2180508 - DNA, 25 bp, Homo sapien
catatcaaagaacgcagtttctttt

SEQ ID NO: 2180509 - DNA, 25 bp, Homo sapien
atcaaagaacgcagtttctttttct

SEQ ID NO: 2180510 - DNA, 25 bp, Homo sapien
gccatatcaaagaacgcagtttctt

SEQ ID NO: 2180511 - DNA, 25 bp, Homo sapien
tgccagctaccctgaagataggtgt

SEQ ID NO: 2180512 - DNA, 25 bp, Homo sapien
tcctccatagcacccgtgaagtcaa

SEQ ID NO: 2180513 - DNA, 25 bp, Homo sapien
cttggaaaattcagcttgtccccaa

SEQ ID NO: 2180514 - DNA, 25 bp, Homo sapien
tgataatcttgtagttgcatgccag

SEQ ID NO: 2180515 - DNA, 25 bp, Homo sapien
ttacatggatatacacatgccatag

SEQ ID NO: 2180516 - DNA, 25 bp, Homo sapien
tacacatgccatagtggttttctgt

SEQ ID NO: 2180517 - DNA, 25 bp, Homo sapien
agtggttttctgtacccatcaactc

SEQ ID NO: 2180518 - DNA, 25 bp, Homo sapien
ggatatacacatgccatagtggttt

SEQ ID NO: 2180519 - DNA, 25 bp, Homo sapien
gggtctcttattgtcccggtaggca

SEQ ID NO: 2180520 - DNA, 25 bp, Homo sapien
ggtctcttattgtcccggtaggcac

SEQ ID NO: 2180521 - DNA, 25 bp, Homo sapien
tgggtctcttattgtcccggtaggc

SEQ ID NO: 2180522 - DNA, 25 bp, Homo sapien
ggtctcatttccacatgggcccaca

SEQ ID NO: 2180523 - DNA, 25 bp, Homo sapien
ggttcccaggatgggatctggaggt

SEQ ID NO: 2180524 - DNA, 25 bp, Homo sapien
tgctgttgatttccctcttaaaggc

SEQ ID NO: 2180525 - DNA, 25 bp, Homo sapien
tcatttccacatgggcccacaagga

SEQ ID NO: 2180526 - DNA, 25 bp, Homo sapien
ctaggtaaaaggtggcagcgatccc

SEQ ID NO: 2180527 - DNA, 25 bp, Homo sapien
gatttagtcgaatctccctctcgtg

SEQ ID NO: 2180528 - DNA, 25 bp, Homo sapien
tctcctttgtggtactgaggtccct

SEQ ID NO: 2180529 - DNA, 25 bp, Homo sapien
gtctcagatcatacaggcttgcact

SEQ ID NO: 2180530 - DNA, 25 bp, Homo sapien
tctttaatgcgcagggaagcctttc

SEQ ID NO: 2180531 - DNA, 25 bp, Homo sapien
caagcaagctcttgagagtcacatc

SEQ ID NO: 2180532 - DNA, 25 bp, Homo sapien
ccattaacagtcaactggatggtgg

SEQ ID NO: 2180533 - DNA, 25 bp, Homo sapien
tacatacaccttagtgaagctctgc

SEQ ID NO: 2180534 - DNA, 25 bp, Homo sapien
gaagctctgcctatctatctacagc

SEQ ID NO: 2180535 - DNA, 25 bp, Homo sapien
cacagcccagtccattcgtttgcat

SEQ ID NO: 2180536 - DNA, 25 bp, Homo sapien
ttttctcccagagtaggagttggca

SEQ ID NO: 2180537 - DNA, 25 bp, Homo sapien
tctttcagctacaacatcagagttg

SEQ ID NO: 2180538 - DNA, 25 bp, Homo sapien
tacactcccctgtagactgtggaca

SEQ ID NO: 2180539 - DNA, 25 bp, Homo sapien
cacttggaagccaactccagtcctg

SEQ ID NO: 2180540 - DNA, 25 bp, Homo sapien
tcagaagtctgctggacccacagtg

SEQ ID NO: 2180541 - DNA, 25 bp, Homo sapien
caacgaggactccatttcccataaa

SEQ ID NO: 2180542 - DNA, 25 bp, Homo sapien
gctattaatactaggctgacttccc

SEQ ID NO: 2180543 - DNA, 25 bp, Homo sapien
ctgtcaaacagggttgtagaccaca

SEQ ID NO: 2180544 - DNA, 25 bp, Homo sapien
ttgtagaccacaagttgtgagagcc

SEQ ID NO: 2180545 - DNA, 25 bp, Homo sapien
tcaaacagggttgtagaccacaagt

SEQ ID NO: 2180546 - DNA, 25 bp, Homo sapien
cagggttgtagaccacaagttgtga

SEQ ID NO: 2180547 - DNA, 25 bp, Homo sapien
attgaaaccttttcttgctgaggaa

SEQ ID NO: 2180548 - DNA, 25 bp, Homo sapien
aatttgaaatgccacggcttttgat

SEQ ID NO: 2180549 - DNA, 25 bp, Homo sapien
gaaatgccacggcttttgatcctgt

SEQ ID NO: 2180550 - DNA, 25 bp, Homo sapien
gccacggcttttgatcctgttgtct

SEQ ID NO: 2180551 - DNA, 25 bp, Homo sapien
atagttcaggtcaatttgaaatgcc

SEQ ID NO: 2180552 - DNA, 25 bp, Homo sapien
ctgctaggagccctggacaacttca

SEQ ID NO: 2180553 - DNA, 25 bp, Homo sapien
gctgtctcaggtccggcactgctgc

SEQ ID NO: 2180554 - DNA, 25 bp, Homo sapien
ggaagcccttactgcaggggactta

SEQ ID NO: 2180555 - DNA, 25 bp, Homo sapien
gacttagtcacatgatgacagttag

SEQ ID NO: 2180556 - DNA, 25 bp, Homo sapien
tcaggcaggcacatctgcttctcca

SEQ ID NO: 2180557 - DNA, 25 bp, Homo sapien
gagtcagttggcaaagcaacaaggt

SEQ ID NO: 2180558 - DNA, 25 bp, Homo sapien
gcaacaaggtcaattcttgccctct

SEQ ID NO: 2180559 - DNA, 25 bp, Homo sapien
gaactgccttcaaccaattctgcac

SEQ ID NO: 2180560 - DNA, 25 bp, Homo sapien
gatgtcagtcctaatgtaggaccca

SEQ ID NO: 2180561 - DNA, 25 bp, Homo sapien
gcagtcatcaaaattgttattctct

SEQ ID NO: 2180562 - DNA, 25 bp, Homo sapien
taaacctatagcgtcaacatcattg

SEQ ID NO: 2180563 - DNA, 25 bp, Homo sapien
tcaaggtcccttctggctataaaca

SEQ ID NO: 2180564 - DNA, 25 bp, Homo sapien
ctagtgtacgccagactttcccctt

SEQ ID NO: 2180565 - DNA, 25 bp, Homo sapien
gactttccccttttagatgcttgag

SEQ ID NO: 2180566 - DNA, 25 bp, Homo sapien
ccccatgagtcacatttgttcctag

SEQ ID NO: 2180567 - DNA, 25 bp, Homo sapien
gtaattgcactgatttccccatgag

SEQ ID NO: 2180568 - DNA, 25 bp, Homo sapien
ctaattcacaaaacgtgagcatgtc

SEQ ID NO: 2180569 - DNA, 25 bp, Homo sapien
cacacctaattcacaaaacgtgagc

SEQ ID NO: 2180570 - DNA, 25 bp, Homo sapien
agcatcttgaaacacacctaattca

SEQ ID NO: 2180571 - DNA, 25 bp, Homo sapien
tgaaacacacctaattcacaaaacg

SEQ ID NO: 2180572 - DNA, 25 bp, Homo sapien
aatccagtgtaccattggtcttcac

SEQ ID NO: 2180573 - DNA, 25 bp, Homo sapien
tattgtcatgattggcagcttgtta

SEQ ID NO: 2180574 - DNA, 25 bp, Homo sapien
tcacactgaaaacaattcactcagc

SEQ ID NO: 2180575 - DNA, 25 bp, Homo sapien
aataaaagctagcaacacggagata

SEQ ID NO: 2180576 - DNA, 25 bp, Homo sapien
tttctttaagcacatttaaacacaa

SEQ ID NO: 2180577 - DNA, 25 bp, Homo sapien
gtacatccaaagttactgctagaaa

SEQ ID NO: 2180578 - DNA, 25 bp, Homo sapien
ggtacatccaaagttactgctagaa

SEQ ID NO: 2180579 - DNA, 25 bp, Homo sapien
atggtacatccaaagttactgctag

SEQ ID NO: 2180580 - DNA, 25 bp, Homo sapien
tcagtatgggaaagccaaggggttg

SEQ ID NO: 2180581 - DNA, 25 bp, Homo sapien
cagtatgggaaagccaaggggttga

SEQ ID NO: 2180582 - DNA, 25 bp, Homo sapien
actctttgcatctcccattgctaat

SEQ ID NO: 2180583 - DNA, 25 bp, Homo sapien
catctcccattgctaatctgtcttg

SEQ ID NO: 2180584 - DNA, 25 bp, Homo sapien
tgggtcagaggcaaagccgtcttcc

SEQ ID NO: 2180585 - DNA, 25 bp, Homo sapien
tcccattgctaatctgtcttgtccc

SEQ ID NO: 2180586 - DNA, 25 bp, Homo sapien
gctctggcatattaattggaaatcc

SEQ ID NO: 2180587 - DNA, 25 bp, Homo sapien
tctcctcgggaagatgtaagacagc

SEQ ID NO: 2180588 - DNA, 25 bp, Homo sapien
gacttgagtttacaacccaacttca

SEQ ID NO: 2180589 - DNA, 25 bp, Homo sapien
cattcctgcaggttggtatcctaca

SEQ ID NO: 2180590 - DNA, 25 bp, Homo sapien
ttgatttccaccctcagagacattt

SEQ ID NO: 2180591 - DNA, 25 bp, Homo sapien
gttctgtgccccgacctactcgttg

SEQ ID NO: 2180592 - DNA, 25 bp, Homo sapien
gacctactcgttgcttcaaaaccaa

SEQ ID NO: 2180593 - DNA, 25 bp, Homo sapien
tgctgacccggtttctattttcaac

SEQ ID NO: 2180594 - DNA, 25 bp, Homo sapien
tttaggcccacgattaacacatttg

SEQ ID NO: 2180595 - DNA, 25 bp, Homo sapien
tatcctcaaggagtagggacagaag

SEQ ID NO: 2180596 - DNA, 25 bp, Homo sapien
ggccggtctgtgtcattatcctcaa

SEQ ID NO: 2180597 - DNA, 25 bp, Homo sapien
gaagcaggcactctagtttctcact

SEQ ID NO: 2180598 - DNA, 25 bp, Homo sapien
gatgacagaacaactgcagtgtctc

SEQ ID NO: 2180599 - DNA, 25 bp, Homo sapien
tctcaacagtgcaaatcaattcaag

SEQ ID NO: 2180600 - DNA, 25 bp, Homo sapien
tggaagacacgaattccagacagtt

SEQ ID NO: 2180601 - DNA, 25 bp, Homo sapien
taaagttggcagtcagaacgtccag

SEQ ID NO: 2180602 - DNA, 25 bp, Homo sapien
tcctctgcacgcgtcaggacactca

SEQ ID NO: 2180603 - DNA, 25 bp, Homo sapien
ccagtggcgccccctgtgtcctctg

SEQ ID NO: 2180604 - DNA, 25 bp, Homo sapien
agtccccacccggagcggcccagtg

SEQ ID NO: 2180605 - DNA, 25 bp, Homo sapien
gagccccgactaccatcgcccctcg

SEQ ID NO: 2180606 - DNA, 25 bp, Homo sapien
cgccgcggtacaccgggtgccccat

SEQ ID NO: 2180607 - DNA, 25 bp, Homo sapien
gcttctcgccgcggtacaccgggtg

SEQ ID NO: 2180608 - DNA, 25 bp, Homo sapien
tctcgccgcggtacaccgggtgccc

SEQ ID NO: 2180609 - DNA, 25 bp, Homo sapien
cttctcgccgcggtacaccgggtgc

SEQ ID NO: 2180610 - DNA, 25 bp, Homo sapien
agtgctgtgcaaagcgcccctggca

SEQ ID NO: 2180611 - DNA, 25 bp, Homo sapien
gtctctctgagttccccgcacttca

SEQ ID NO: 2180612 - DNA, 25 bp, Homo sapien
cagcctggggtcacggtgtctctct

SEQ ID NO: 2180613 - DNA, 25 bp, Homo sapien
gcctccgggaggagtggcgcgcctt

SEQ ID NO: 2180614 - DNA, 25 bp, Homo sapien
tgggagtaaacatacgtggactgac

SEQ ID NO: 2180615 - DNA, 25 bp, Homo sapien
gcgccttaggcaaaactgggagtaa

SEQ ID NO: 2180616 - DNA, 25 bp, Homo sapien
catcagtgatcataggcgccttagg

SEQ ID NO: 2180617 - DNA, 25 bp, Homo sapien
gatgatttgtagctgactggcatca

SEQ ID NO: 2180618 - DNA, 25 bp, Homo sapien
ccgaagaaatccgttttacagcatc

SEQ ID NO: 2180619 - DNA, 25 bp, Homo sapien
ttctgctagtacttcctgaatgcca

SEQ ID NO: 2180620 - DNA, 25 bp, Homo sapien
actggttctgctagtacttcctgaa

SEQ ID NO: 2180621 - DNA, 25 bp, Homo sapien
tttacagcatcagattcatacactg

SEQ ID NO: 2180622 - DNA, 25 bp, Homo sapien
tgtttgtcccagattaacagcaagc

SEQ ID NO: 2180623 - DNA, 25 bp, Homo sapien
ttgtacagtgtagtaatggcgtcct

SEQ ID NO: 2180624 - DNA, 25 bp, Homo sapien
taacagcaagccttgggatgatgtg

SEQ ID NO: 2180625 - DNA, 25 bp, Homo sapien
gatgatgtgggaaagcgacctttgc

SEQ ID NO: 2180626 - DNA, 25 bp, Homo sapien
tctcccattagcattggtggatttc

SEQ ID NO: 2180627 - DNA, 25 bp, Homo sapien
cattagcattggtggatttctctct

SEQ ID NO: 2180628 - DNA, 25 bp, Homo sapien
ggtgtctcccattagcattggtgga

SEQ ID NO: 2180629 - DNA, 25 bp, Homo sapien
ttttaggtgtctcccattagcattg

SEQ ID NO: 2180630 - DNA, 25 bp, Homo sapien
tgagcttcatgtaaggagcaacacc

SEQ ID NO: 2180631 - DNA, 25 bp, Homo sapien
ctttagataaaatgcttctgtttcc

SEQ ID NO: 2180632 - DNA, 25 bp, Homo sapien
ttccttaactataatgagcttcatg

SEQ ID NO: 2180633 - DNA, 25 bp, Homo sapien
aaggagcaacaccaacatttatgaa

SEQ ID NO: 2180634 - DNA, 25 bp, Homo sapien
ggtgtctgccaagatgggtcccatt

SEQ ID NO: 2180635 - DNA, 25 bp, Homo sapien
tagactggacatggacaacaagttc

SEQ ID NO: 2180636 - DNA, 25 bp, Homo sapien
gtgctgcattcctgtttgggctcaa

SEQ ID NO: 2180637 - DNA, 25 bp, Homo sapien
taagaggccttgctaatagactgga

SEQ ID NO: 2180638 - DNA, 25 bp, Homo sapien
tctctcgggagctaaagctgaacat

SEQ ID NO: 2180639 - DNA, 25 bp, Homo sapien
ctatgattatagaaacccaagaatt

SEQ ID NO: 2180640 - DNA, 25 bp, Homo sapien
gccagcacttgaagtctctcgggag

SEQ ID NO: 2180641 - DNA, 25 bp, Homo sapien
cattttctcacatccggtttccctc

SEQ ID NO: 2180642 - DNA, 25 bp, Homo sapien
cctggaggcaccctaatgagtttgg

SEQ ID NO: 2180643 - DNA, 25 bp, Homo sapien
gagttggtgtcctgagatgttgacc

SEQ ID NO: 2180644 - DNA, 25 bp, Homo sapien
attcccgttctcacgtaagacctct

SEQ ID NO: 2180645 - DNA, 25 bp, Homo sapien
ggtgtcctgagatgttgacctctca

SEQ ID NO: 2180646 - DNA, 25 bp, Homo sapien
tcactcagggtggtctgttgctggg

SEQ ID NO: 2180647 - DNA, 25 bp, Homo sapien
ccacgttggcagaagtggtactggc

SEQ ID NO: 2180648 - DNA, 25 bp, Homo sapien
tcaagcccaagtggcatgaagaggg

SEQ ID NO: 2180649 - DNA, 25 bp, Homo sapien
gcatgggatgttgaagcctgaatca

SEQ ID NO: 2180650 - DNA, 25 bp, Homo sapien
ccatagagacaggtagcaggatgca

SEQ ID NO: 2180651 - DNA, 25 bp, Homo sapien
ggaattcgaaaccaggcaccagaca

SEQ ID NO: 2180652 - DNA, 25 bp, Homo sapien
caagggattggtgacttgaccatag

SEQ ID NO: 2180653 - DNA, 25 bp, Homo sapien
taaggtaaaaggtaatcaggaagca

SEQ ID NO: 2180654 - DNA, 25 bp, Homo sapien
tggacaatagggtcggattcctgag

SEQ ID NO: 2180655 - DNA, 25 bp, Homo sapien
gactgtgtttgtgttaccaactgcc

SEQ ID NO: 2180656 - DNA, 25 bp, Homo sapien
gggccccagacaagtaagcagagga

SEQ ID NO: 2180657 - DNA, 25 bp, Homo sapien
ggattcctgagggtatctgggcccc

SEQ ID NO: 2180658 - DNA, 25 bp, Homo sapien
tatcagtgtccctggtatctaccca

SEQ ID NO: 2180659 - DNA, 25 bp, Homo sapien
tgaaaactgggctcctcaacacagc

SEQ ID NO: 2180660 - DNA, 25 bp, Homo sapien
cacagcagtatggatgtttgggacc

SEQ ID NO: 2180661 - DNA, 25 bp, Homo sapien
tagacacaagtaacatgcctccctc

SEQ ID NO: 2180662 - DNA, 25 bp, Homo sapien
gacattcttccatgcgggtataatc

SEQ ID NO: 2180663 - DNA, 25 bp, Homo sapien
tcttccatgcgggtataatccccaa

SEQ ID NO: 2180664 - DNA, 25 bp, Homo sapien
tataatccccaaagttgtgcacaat

SEQ ID NO: 2180665 - DNA, 25 bp, Homo sapien
atacacgacattcttccatgcgggt

SEQ ID NO: 2180666 - DNA, 25 bp, Homo sapien
tgttttctcaacttcaggcaagcag

SEQ ID NO: 2180667 - DNA, 25 bp, Homo sapien
gggagtcattcatctttagtcagtc

SEQ ID NO: 2180668 - DNA, 25 bp, Homo sapien
gatgaaccctaatgtttattgcgga

SEQ ID NO: 2180669 - DNA, 25 bp, Homo sapien
tctaggttccctgacttctggttcc

SEQ ID NO: 2180670 - DNA, 25 bp, Homo sapien
tggacaagggccatctttacattct

SEQ ID NO: 2180671 - DNA, 25 bp, Homo sapien
gaggcattcagatttgccaagtgtg

SEQ ID NO: 2180672 - DNA, 25 bp, Homo sapien
cactgctggatgcaaatgggaagag

SEQ ID NO: 2180673 - DNA, 25 bp, Homo sapien
tacattctgaggcattcagatttgc

SEQ ID NO: 2180674 - DNA, 25 bp, Homo sapien
aacagtgactgagggtgtgcttgaa

SEQ ID NO: 2180675 - DNA, 25 bp, Homo sapien
agtgacacttgggatggacatggca

SEQ ID NO: 2180676 - DNA, 25 bp, Homo sapien
acacttgggatggacatggcagcac

SEQ ID NO: 2180677 - DNA, 25 bp, Homo sapien
tgtgcttgaataagaaagattccac

SEQ ID NO: 2180678 - DNA, 25 bp, Homo sapien
ggatttggccatgcgatagtatgga

SEQ ID NO: 2180679 - DNA, 25 bp, Homo sapien
tactcttttccgtgtcacagctatg

SEQ ID NO: 2180680 - DNA, 25 bp, Homo sapien
tgacatggtagccagcttgaggcca

SEQ ID NO: 2180681 - DNA, 25 bp, Homo sapien
gaggccacagatgcacttggatgat

SEQ ID NO: 2180682 - DNA, 25 bp, Homo sapien
actttcttgcatggactgtgggtca

SEQ ID NO: 2180683 - DNA, 25 bp, Homo sapien
ctttcttgcatggactgtgggtcat

SEQ ID NO: 2180684 - DNA, 25 bp, Homo sapien
aaaaaattcgaggccattgaattct

SEQ ID NO: 2180685 - DNA, 25 bp, Homo sapien
aaaattcgaggccattgaattctcc

SEQ ID NO: 2180686 - DNA, 25 bp, Homo sapien
ccattgaattctcctatggagtctg

SEQ ID NO: 2180687 - DNA, 25 bp, Homo sapien
ctatggagtctgcatctcttacatc

SEQ ID NO: 2180688 - DNA, 25 bp, Homo sapien
ggcgataaagcccataagctggaat

SEQ ID NO: 2180689 - DNA, 25 bp, Homo sapien
ctcatgggaattaaataacatcaat

SEQ ID NO: 2180690 - DNA, 25 bp, Homo sapien
taacatcaatatcaggtgcttgctg

SEQ ID NO: 2180691 - DNA, 25 bp, Homo sapien
tggagatgctgcctaccgcaatagt

SEQ ID NO: 2180692 - DNA, 25 bp, Homo sapien
gacagtaagtacgatccaagatggc

SEQ ID NO: 2180693 - DNA, 25 bp, Homo sapien
cagtaagtacgatccaagatggccc

SEQ ID NO: 2180694 - DNA, 25 bp, Homo sapien
ctgacagtaagtacgatccaagatg

SEQ ID NO: 2180695 - DNA, 25 bp, Homo sapien
taagtacgatccaagatggccctga

SEQ ID NO: 2180696 - DNA, 25 bp, Homo sapien
gagcagcttgaaaacagcgtccagc

SEQ ID NO: 2180697 - DNA, 25 bp, Homo sapien
ctgtgagcagcttgaaaacagcgtc

SEQ ID NO: 2180698 - DNA, 25 bp, Homo sapien
agtggggagccaaacagctgctgtg

SEQ ID NO: 2180699 - DNA, 25 bp, Homo sapien
gctgtacttgtctcctgagtgcctg

SEQ ID NO: 2180700 - DNA, 25 bp, Homo sapien
tgtggcttatccataacatctgggc

SEQ ID NO: 2180701 - DNA, 25 bp, Homo sapien
gatgtcggaggattgtcaacaggca

SEQ ID NO: 2180702 - DNA, 25 bp, Homo sapien
ccatcacgatacttagagaggagct

SEQ ID NO: 2180703 - DNA, 25 bp, Homo sapien
ttgactggaaagcttatgagagccc

SEQ ID NO: 2180704 - DNA, 25 bp, Homo sapien
tccccagcctatgactgtctcaggg

SEQ ID NO: 2180705 - DNA, 25 bp, Homo sapien
gatacctatattgcctcctttctgg

SEQ ID NO: 2180706 - DNA, 25 bp, Homo sapien
gaaagtcatcatctttcggccgata

SEQ ID NO: 2180707 - DNA, 25 bp, Homo sapien
catagtcatcgtcttgagggaccac

SEQ ID NO: 2180708 - DNA, 25 bp, Homo sapien
caaaagaacagaatgcgcctccaaa

SEQ ID NO: 2180709 - DNA, 25 bp, Homo sapien
accatgtatgtgcatccctagagaa

SEQ ID NO: 2180710 - DNA, 25 bp, Homo sapien
gctgccatgactcattaaaggccag

SEQ ID NO: 2180711 - DNA, 25 bp, Homo sapien
tactgtaaaaggtacgagactcagc

SEQ ID NO: 2180712 - DNA, 25 bp, Homo sapien
gtatagttctgagccattggttccc

SEQ ID NO: 2180713 - DNA, 25 bp, Homo sapien
gttttctctcttcacgaaaagattg

SEQ ID NO: 2180714 - DNA, 25 bp, Homo sapien
aaaagattgagctgtgctgctccca

SEQ ID NO: 2180715 - DNA, 25 bp, Homo sapien
tataagggtaactggtatagttctg

SEQ ID NO: 2180716 - DNA, 25 bp, Homo sapien
tgagaaggatttcggcaagctcttc

SEQ ID NO: 2180717 - DNA, 25 bp, Homo sapien
cttgcctctgagaaggatttcggca

SEQ ID NO: 2180718 - DNA, 25 bp, Homo sapien
ggatttcggcaagctcttcttgttt

SEQ ID NO: 2180719 - DNA, 25 bp, Homo sapien
cctctgagaaggatttcggcaagct

SEQ ID NO: 2180720 - DNA, 25 bp, Homo sapien
ttgtgtgccacagcctaaggttgat

SEQ ID NO: 2180721 - DNA, 25 bp, Homo sapien
gctattgggagtgaaagtacccagg

SEQ ID NO: 2180722 - DNA, 25 bp, Homo sapien
aataaatggtacaaggaggcatgag

SEQ ID NO: 2180723 - DNA, 25 bp, Homo sapien
cacccctgcctggaatagtaaattc

SEQ ID NO: 2180724 - DNA, 25 bp, Homo sapien
caatgctagtatactgttggtggta

SEQ ID NO: 2180725 - DNA, 25 bp, Homo sapien
taacaaatgcggatggaatgtggag

SEQ ID NO: 2180726 - DNA, 25 bp, Homo sapien
aatgtggagaaaaggcaatgctagt

SEQ ID NO: 2180727 - DNA, 25 bp, Homo sapien
agaactgtaacaccatatgatccag

SEQ ID NO: 2180728 - DNA, 25 bp, Homo sapien
tcctttgaaaagaatcgaagctccc

SEQ ID NO: 2180729 - DNA, 25 bp, Homo sapien
tgtatccaggaataagccgctcccc

SEQ ID NO: 2180730 - DNA, 25 bp, Homo sapien
taagtgtcgctaaaaatctgctacg

SEQ ID NO: 2180731 - DNA, 25 bp, Homo sapien
gacaaactagtaaaatggcaacctg

SEQ ID NO: 2180732 - DNA, 25 bp, Homo sapien
cactgggagacctcctgtgacctgc

SEQ ID NO: 2180733 - DNA, 25 bp, Homo sapien
actgggagacctcctgtgacctgcc

SEQ ID NO: 2180734 - DNA, 25 bp, Homo sapien
catccagtggttgggcaccctttga

SEQ ID NO: 2180735 - DNA, 25 bp, Homo sapien
taaataggtatcaccagaagaaaca

SEQ ID NO: 2180736 - DNA, 25 bp, Homo sapien
gagatagctaataacacaagtatgg

SEQ ID NO: 2180737 - DNA, 25 bp, Homo sapien
ttcccaagaggaagcaaaccagagg

SEQ ID NO: 2180738 - DNA, 25 bp, Homo sapien
tgcactgtggtttagcaacaaatta

SEQ ID NO: 2180739 - DNA, 25 bp, Homo sapien
gctgcactgtggtttagcaacaaat

SEQ ID NO: 2180740 - DNA, 25 bp, Homo sapien
caacaaattatcatgggacttcatt

SEQ ID NO: 2180741 - DNA, 25 bp, Homo sapien
cagctgcactgtggtttagcaacaa

SEQ ID NO: 2180742 - DNA, 25 bp, Homo sapien
tttaaggaccaaagactcagcttgc

SEQ ID NO: 2180743 - DNA, 25 bp, Homo sapien
gttttggaatcaaacgaaggcgcca

SEQ ID NO: 2180744 - DNA, 25 bp, Homo sapien
aacgcagcagttctcagttagggcg

SEQ ID NO: 2180745 - DNA, 25 bp, Homo sapien
cactgtatggaatagaagccaccca

SEQ ID NO: 2180746 - DNA, 25 bp, Homo sapien
aatgagaatccagcccctcctaaag

SEQ ID NO: 2180747 - DNA, 25 bp, Homo sapien
atccagcccctcctaaagaccaaga

SEQ ID NO: 2180748 - DNA, 25 bp, Homo sapien
cagcccctcctaaagaccaagagaa

SEQ ID NO: 2180749 - DNA, 25 bp, Homo sapien
caatgagaatccagcccctcctaaa

SEQ ID NO: 2180750 - DNA, 25 bp, Homo sapien
ttaaaggcggtctcctgaaactgcc

SEQ ID NO: 2180751 - DNA, 25 bp, Homo sapien
tccttgggccgtgggacgcgcagcg

SEQ ID NO: 2180752 - DNA, 25 bp, Homo sapien
tgggacgcgcagcgctggtccctac

SEQ ID NO: 2180753 - DNA, 25 bp, Homo sapien
taaaggcggtctcctgaaactgcct

SEQ ID NO: 2180754 - DNA, 25 bp, Homo sapien
ctcctaggagaagcgaagatgccat

SEQ ID NO: 2180755 - DNA, 25 bp, Homo sapien
caagcgagggccgagactctcggct

SEQ ID NO: 2180756 - DNA, 25 bp, Homo sapien
aaagtgaaagctgccggatggtgac

SEQ ID NO: 2180757 - DNA, 25 bp, Homo sapien
ctggaagcgcttcggctactggctg

SEQ ID NO: 2180758 - DNA, 25 bp, Homo sapien
gggcagtggagagcaaagcccagct

SEQ ID NO: 2180759 - DNA, 25 bp, Homo sapien
tcgggaaccgaaagggactcaggca

SEQ ID NO: 2180760 - DNA, 25 bp, Homo sapien
gcgccgccggtgcgctccaagtgcc

SEQ ID NO: 2180761 - DNA, 25 bp, Homo sapien
ccggtgcgctccaagtgccccggcg

SEQ ID NO: 2180762 - DNA, 25 bp, Homo sapien
gccgccggtgcgctccaagtgcccc

SEQ ID NO: 2180763 - DNA, 25 bp, Homo sapien
cgccggtgcgctccaagtgccccgg

SEQ ID NO: 2180764 - DNA, 25 bp, Homo sapien
tcaagggttgttccaagctcaaggt

SEQ ID NO: 2180765 - DNA, 25 bp, Homo sapien
cccaagacgcgaagagggtcaggaa

SEQ ID NO: 2180766 - DNA, 25 bp, Homo sapien
tgcccacggtgggatggaattcccg

SEQ ID NO: 2180767 - DNA, 25 bp, Homo sapien
tcttccgactgcagaggctcaaggg

SEQ ID NO: 2180768 - DNA, 25 bp, Homo sapien
gtaattgataatggtgacctcaagc

SEQ ID NO: 2180769 - DNA, 25 bp, Homo sapien
gacttctaaggcgaagccagatgga

SEQ ID NO: 2180770 - DNA, 25 bp, Homo sapien
tcagtgtcctggtttgacatttgct

SEQ ID NO: 2180771 - DNA, 25 bp, Homo sapien
caccctagagggatggagtaattga

SEQ ID NO: 2180772 - DNA, 25 bp, Homo sapien
cctctgatcctgcatcaggaatatg

SEQ ID NO: 2180773 - DNA, 25 bp, Homo sapien
gcctcctctgatcctgcatcaggaa

SEQ ID NO: 2180774 - DNA, 25 bp, Homo sapien
gaatatgaccaattactgttataac

SEQ ID NO: 2180775 - DNA, 25 bp, Homo sapien
gcatcaggaatatgaccaattactg

SEQ ID NO: 2180776 - DNA, 25 bp, Homo sapien
tcaatttgttaaatatggtgcaagc

SEQ ID NO: 2180777 - DNA, 25 bp, Homo sapien
tttgttaaatatggtgcaagctcac

SEQ ID NO: 2180778 - DNA, 25 bp, Homo sapien
aatttgttaaatatggtgcaagctc

SEQ ID NO: 2180779 - DNA, 25 bp, Homo sapien
caatttgttaaatatggtgcaagct

SEQ ID NO: 2180780 - DNA, 25 bp, Homo sapien
gatgcaaatctagttgagccaaaga

SEQ ID NO: 2180781 - DNA, 25 bp, Homo sapien
agttaggaggatgcaaatctagttg

SEQ ID NO: 2180782 - DNA, 25 bp, Homo sapien
gagccaaagagtccctggagctctg

SEQ ID NO: 2180783 - DNA, 25 bp, Homo sapien
agcctaggtggagggtcacctcaga

SEQ ID NO: 2180784 - DNA, 25 bp, Homo sapien
ttgactcctggccagttgtgccaca

SEQ ID NO: 2180785 - DNA, 25 bp, Homo sapien
tcttgactcctggccagttgtgcca

SEQ ID NO: 2180786 - DNA, 25 bp, Homo sapien
tgactcctggccagttgtgccacac

SEQ ID NO: 2180787 - DNA, 25 bp, Homo sapien
tttcttgactcctggccagttgtgc

SEQ ID NO: 2180788 - DNA, 25 bp, Homo sapien
agttcacaggcaggttcaccctggg

SEQ ID NO: 2180789 - DNA, 25 bp, Homo sapien
aggagcaatgctggctgtggaacac

SEQ ID NO: 2180790 - DNA, 25 bp, Homo sapien
tggagaacagaggagcaatgctggc

SEQ ID NO: 2180791 - DNA, 25 bp, Homo sapien
ggctgtggaacacccccctgcaggg

SEQ ID NO: 2180792 - DNA, 25 bp, Homo sapien
agaacagaggagcaatgctggctgt

SEQ ID NO: 2180793 - DNA, 25 bp, Homo sapien
ggggtgagtcttggatcaggccgta

SEQ ID NO: 2180794 - DNA, 25 bp, Homo sapien
gggtgagtcttggatcaggccgtac

SEQ ID NO: 2180795 - DNA, 25 bp, Homo sapien
gtgagtcttggatcaggccgtactg

SEQ ID NO: 2180796 - DNA, 25 bp, Homo sapien
gagtcttggatcaggccgtactgca

SEQ ID NO: 2180797 - DNA, 25 bp, Homo sapien
tccagtctgcagtagatcatggcca

SEQ ID NO: 2180798 - DNA, 25 bp, Homo sapien
cccaggtacagagagtcctccagtt

SEQ ID NO: 2180799 - DNA, 25 bp, Homo sapien
agtctgcagtagatcatggccaggg

SEQ ID NO: 2180800 - DNA, 25 bp, Homo sapien
tgagaatgccagtctgctctcgggc

SEQ ID NO: 2180801 - DNA, 25 bp, Homo sapien
cccagaaaagcatcatgctgaggcc

SEQ ID NO: 2180802 - DNA, 25 bp, Homo sapien
agcatcatgctgaggccaaagtcca

SEQ ID NO: 2180803 - DNA, 25 bp, Homo sapien
gctgaggccaaagtccagtgtttgg

SEQ ID NO: 2180804 - DNA, 25 bp, Homo sapien
gaaggaaatcgggatctgcatacac

SEQ ID NO: 2180805 - DNA, 25 bp, Homo sapien
gaggcaatgcctttggccaagctga

SEQ ID NO: 2180806 - DNA, 25 bp, Homo sapien
ggaggcaatgcctttggccaagctg

SEQ ID NO: 2180807 - DNA, 25 bp, Homo sapien
cacaggaccggaagttctgctttga

SEQ ID NO: 2180808 - DNA, 25 bp, Homo sapien
taattccttcatgaccaacactttg

SEQ ID NO: 2180809 - DNA, 25 bp, Homo sapien
tctgctttgagtaagtgctggaaca

SEQ ID NO: 2180810 - DNA, 25 bp, Homo sapien
tactgagtcttagggagcatcttct

SEQ ID NO: 2180811 - DNA, 25 bp, Homo sapien
ggatggcattgcagctgttgggact

SEQ ID NO: 2180812 - DNA, 25 bp, Homo sapien
taacatagttggagcaggcattctc

SEQ ID NO: 2180813 - DNA, 25 bp, Homo sapien
gggttccactgatctccaggatgtg

SEQ ID NO: 2180814 - DNA, 25 bp, Homo sapien
ttgacctcttttacttgcacggtgg

SEQ ID NO: 2180815 - DNA, 25 bp, Homo sapien
cagtatagggtgacacgcagcacca

SEQ ID NO: 2180816 - DNA, 25 bp, Homo sapien
ccacagtatagggtgacacgcagca

SEQ ID NO: 2180817 - DNA, 25 bp, Homo sapien
gtatagggtgacacgcagcaccagg

SEQ ID NO: 2180818 - DNA, 25 bp, Homo sapien
tttccacagtatagggtgacacgca

SEQ ID NO: 2180819 - DNA, 25 bp, Homo sapien
tcctcaatggtcaccttatagctca

SEQ ID NO: 2180820 - DNA, 25 bp, Homo sapien
ggtcaccttatagctcacacaggca

SEQ ID NO: 2180821 - DNA, 25 bp, Homo sapien
tcaccttatagctcacacaggcaaa

SEQ ID NO: 2180822 - DNA, 25 bp, Homo sapien
aatggtcaccttatagctcacacag

SEQ ID NO: 2180823 - DNA, 25 bp, Homo sapien
gagttactagcagggtgtgggttcc

SEQ ID NO: 2180824 - DNA, 25 bp, Homo sapien
tgcaggtccactgaaaccgtttcgt

SEQ ID NO: 2180825 - DNA, 25 bp, Homo sapien
acatcacaagaggtagagttactag

SEQ ID NO: 2180826 - DNA, 25 bp, Homo sapien
tcctctgcaggtccactgaaaccgt

SEQ ID NO: 2180827 - DNA, 25 bp, Homo sapien
tgtatattggcaacattggtgagga

SEQ ID NO: 2180828 - DNA, 25 bp, Homo sapien
gagcaagacctgcttaaggacacca

SEQ ID NO: 2180829 - DNA, 25 bp, Homo sapien
tgtccatcgacaccaccaaagagaa

SEQ ID NO: 2180830 - DNA, 25 bp, Homo sapien
aagataatggaccagtttgtgtcca

SEQ ID NO: 2180831 - DNA, 25 bp, Homo sapien
agcagctggactccacattccaaca

SEQ ID NO: 2180832 - DNA, 25 bp, Homo sapien
cagcagctggactccacattccaac

SEQ ID NO: 2180833 - DNA, 25 bp, Homo sapien
tccaacatgtactcactagcttcat

SEQ ID NO: 2180834 - DNA, 25 bp, Homo sapien
gcagcagctggactccacattccaa

SEQ ID NO: 2180835 - DNA, 25 bp, Homo sapien
tggtgagacaacgccatttgtggcc

SEQ ID NO: 2180836 - DNA, 25 bp, Homo sapien
tggtggtgagacaacgccatttgtg

SEQ ID NO: 2180837 - DNA, 25 bp, Homo sapien
gtggtgagacaacgccatttgtggc

SEQ ID NO: 2180838 - DNA, 25 bp, Homo sapien
ttggtggtgagacaacgccatttgt

SEQ ID NO: 2180839 - DNA, 25 bp, Homo sapien
ggtgggtctttacccacagcgcaaa

SEQ ID NO: 2180840 - DNA, 25 bp, Homo sapien
ggctctgttgtttgagttgcccaca

SEQ ID NO: 2180841 - DNA, 25 bp, Homo sapien
caactgctctgtctagtttggcgct

SEQ ID NO: 2180842 - DNA, 25 bp, Homo sapien
tgaataactaacaaggtggtgggtc

SEQ ID NO: 2180843 - DNA, 25 bp, Homo sapien
tgaaagtgctctgacacgacacttg

SEQ ID NO: 2180844 - DNA, 25 bp, Homo sapien
ctgacacgacacttgttactttgca

SEQ ID NO: 2180845 - DNA, 25 bp, Homo sapien
gaaagtgctctgacacgacacttgt

SEQ ID NO: 2180846 - DNA, 25 bp, Homo sapien
agtgctctgacacgacacttgttac

SEQ ID NO: 2180847 - DNA, 25 bp, Homo sapien
aaaagcaactatgttcacagtgaaa

SEQ ID NO: 2180848 - DNA, 25 bp, Homo sapien
ttcacagtgaaatattcgtggaata

SEQ ID NO: 2180849 - DNA, 25 bp, Homo sapien
cagtgaaatattcgtggaataggtt

SEQ ID NO: 2180850 - DNA, 25 bp, Homo sapien
cacagtgaaatattcgtggaatagg

SEQ ID NO: 2180851 - DNA, 25 bp, Homo sapien
acagtggttcctagaagttcctgca

SEQ ID NO: 2180852 - DNA, 25 bp, Homo sapien
agcaggaccagacagtggttcctag

SEQ ID NO: 2180853 - DNA, 25 bp, Homo sapien
tcatctggggctaacaccagcttat

SEQ ID NO: 2180854 - DNA, 25 bp, Homo sapien
ccagacagtggttcctagaagttcc

SEQ ID NO: 2180855 - DNA, 25 bp, Homo sapien
gagaattaatactgtgcacttagtt

SEQ ID NO: 2180856 - DNA, 25 bp, Homo sapien
ggttttggtgtctcatccggagtag

SEQ ID NO: 2180857 - DNA, 25 bp, Homo sapien
cttagttgctaagttagacgtgggt

SEQ ID NO: 2180858 - DNA, 25 bp, Homo sapien
gagtagtactcaggttcctggtagc

SEQ ID NO: 2180859 - DNA, 25 bp, Homo sapien
cttcacccttcccacgtgttcccag

SEQ ID NO: 2180860 - DNA, 25 bp, Homo sapien
tactgttttaaactgccatctgctt

SEQ ID NO: 2180861 - DNA, 25 bp, Homo sapien
cacccttcccacgtgttcccaggat

SEQ ID NO: 2180862 - DNA, 25 bp, Homo sapien
ccttcccacgtgttcccaggattct

SEQ ID NO: 2180863 - DNA, 25 bp, Homo sapien
gcttgctgctgtataactctgtggc

SEQ ID NO: 2180864 - DNA, 25 bp, Homo sapien
gagtttctatatcatgtctgggctt

SEQ ID NO: 2180865 - DNA, 25 bp, Homo sapien
cttaacactaggtcttgagggctga

SEQ ID NO: 2180866 - DNA, 25 bp, Homo sapien
gattctttacttggcttgcggcaag

SEQ ID NO: 2180867 - DNA, 25 bp, Homo sapien
catggccatggagggccataaaaac

SEQ ID NO: 2180868 - DNA, 25 bp, Homo sapien
ccaaaaggtggctgagatcatggcc

SEQ ID NO: 2180869 - DNA, 25 bp, Homo sapien
caagcgagtgaagccaaaaggtggc

SEQ ID NO: 2180870 - DNA, 25 bp, Homo sapien
tgctgagacctgacaagcgagtgaa

SEQ ID NO: 2180871 - DNA, 25 bp, Homo sapien
gaagctctgcacgtggcaactctga

SEQ ID NO: 2180872 - DNA, 25 bp, Homo sapien
tctgcacgtggcaactctgaggcct

SEQ ID NO: 2180873 - DNA, 25 bp, Homo sapien
agcagaagctctgcacgtggcaact

SEQ ID NO: 2180874 - DNA, 25 bp, Homo sapien
cacgtggcaactctgaggcctctgt

SEQ ID NO: 2180875 - DNA, 25 bp, Homo sapien
gtgacagtgacacccgctccaaccc

SEQ ID NO: 2180876 - DNA, 25 bp, Homo sapien
gaagagcagtgacagtgacacccgc

SEQ ID NO: 2180877 - DNA, 25 bp, Homo sapien
tgctgggagaagagcagtgacagtg

SEQ ID NO: 2180878 - DNA, 25 bp, Homo sapien
gcagtgacagtgacacccgctccaa

SEQ ID NO: 2180879 - DNA, 25 bp, Homo sapien
ggatgtaacacaacattcctggagg

SEQ ID NO: 2180880 - DNA, 25 bp, Homo sapien
gaggcacgggcctcttttcagggaa

SEQ ID NO: 2180881 - DNA, 25 bp, Homo sapien
agatgctcagtacttagttcaacag

SEQ ID NO: 2180882 - DNA, 25 bp, Homo sapien
cagggttgtgtataagaatctctta

SEQ ID NO: 2180883 - DNA, 25 bp, Homo sapien
cacctattggctggtaaactcttcc

SEQ ID NO: 2180884 - DNA, 25 bp, Homo sapien
ccctctacatgagaaggttatgtct

SEQ ID NO: 2180885 - DNA, 25 bp, Homo sapien
ttccattctccctctacatgagaag

SEQ ID NO: 2180886 - DNA, 25 bp, Homo sapien
catgagaaggttatgtctttgatct

SEQ ID NO: 2180887 - DNA, 25 bp, Homo sapien
tttgttgtctcatctctagttgtgg

SEQ ID NO: 2180888 - DNA, 25 bp, Homo sapien
tgtctcatctctagttgtggctttt

SEQ ID NO: 2180889 - DNA, 25 bp, Homo sapien
ttgttgtctcatctctagttgtggc

SEQ ID NO: 2180890 - DNA, 25 bp, Homo sapien
tcatctctagttgtggcttttgcct

SEQ ID NO: 2180891 - DNA, 25 bp, Homo sapien
gcttatagccgatcccaaggtgtca

SEQ ID NO: 2180892 - DNA, 25 bp, Homo sapien
tgtcaatgtatctgagtcgtggctg

SEQ ID NO: 2180893 - DNA, 25 bp, Homo sapien
tcgtggctgattgtttttcactgac

SEQ ID NO: 2180894 - DNA, 25 bp, Homo sapien
ttttcactgacctctggaccttttc

SEQ ID NO: 2180895 - DNA, 25 bp, Homo sapien
ggtgtcatgaactgttttggacagt

SEQ ID NO: 2180896 - DNA, 25 bp, Homo sapien
ggaggtgtcatgaactgttttggac

SEQ ID NO: 2180897 - DNA, 25 bp, Homo sapien
aggaggtgtcatgaactgttttgga

SEQ ID NO: 2180898 - DNA, 25 bp, Homo sapien
gaggtgtcatgaactgttttggaca

SEQ ID NO: 2180899 - DNA, 25 bp, Homo sapien
gctgtgcctgtgacggattcattcc

SEQ ID NO: 2180900 - DNA, 25 bp, Homo sapien
agctgtgcctgtgacggattcattc

SEQ ID NO: 2180901 - DNA, 25 bp, Homo sapien
ctgtgcctgtgacggattcattccc

SEQ ID NO: 2180902 - DNA, 25 bp, Homo sapien
gtgcctgtgacggattcattcccat

SEQ ID NO: 2180903 - DNA, 25 bp, Homo sapien
tcctcttttagacacgtcttcctgc

SEQ ID NO: 2180904 - DNA, 25 bp, Homo sapien
tgaagccttcccactcccagttagc

SEQ ID NO: 2180905 - DNA, 25 bp, Homo sapien
tctgccgtatgtgtgctgctccctg

SEQ ID NO: 2180906 - DNA, 25 bp, Homo sapien
gcctgctctgccgtatgtgtgctgc

SEQ ID NO: 2180907 - DNA, 25 bp, Homo sapien
gttctgactgggagccagtgccaga

SEQ ID NO: 2180908 - DNA, 25 bp, Homo sapien
agagcttggcgcctgccagagcttt

SEQ ID NO: 2180909 - DNA, 25 bp, Homo sapien
gccagaccttgagctgcacataaca

SEQ ID NO: 2180910 - DNA, 25 bp, Homo sapien
gagctttcttgcaacagctgtgcgt

SEQ ID NO: 2180911 - DNA, 25 bp, Homo sapien
agaatgagggacaagtgcaaggcaa

SEQ ID NO: 2180912 - DNA, 25 bp, Homo sapien
aagaatgagggacaagtgcaaggca

SEQ ID NO: 2180913 - DNA, 25 bp, Homo sapien
tgaagaatgagggacaagtgcaagg

SEQ ID NO: 2180914 - DNA, 25 bp, Homo sapien
aaatgaagaatgagggacaagtgca

SEQ ID NO: 2180915 - DNA, 25 bp, Homo sapien
cacagtcttcctagggtgagtgagt

SEQ ID NO: 2180916 - DNA, 25 bp, Homo sapien
atccctcttgatcttgtcctgttgg

SEQ ID NO: 2180917 - DNA, 25 bp, Homo sapien
tgtgggagtggaatccctcttgatc

SEQ ID NO: 2180918 - DNA, 25 bp, Homo sapien
tgaggtctgatagccaccagctcct

SEQ ID NO: 2180919 - DNA, 25 bp, Homo sapien
cttcagcacttgtggctgattcttc

SEQ ID NO: 2180920 - DNA, 25 bp, Homo sapien
ctgtatttgcactggcaaggggtcg

SEQ ID NO: 2180921 - DNA, 25 bp, Homo sapien
tttgcactggcaaggggtcgtcccc

SEQ ID NO: 2180922 - DNA, 25 bp, Homo sapien
cttcttcagcacttgtggctgattc

SEQ ID NO: 2180923 - DNA, 25 bp, Homo sapien
ttctgggccgttgagattctgtatt

SEQ ID NO: 2180924 - DNA, 25 bp, Homo sapien
tctgggccgttgagattctgtattg

SEQ ID NO: 2180925 - DNA, 25 bp, Homo sapien
attctgggccgttgagattctgtat

SEQ ID NO: 2180926 - DNA, 25 bp, Homo sapien
tgctcgccaactgctttagcaagca

SEQ ID NO: 2180927 - DNA, 25 bp, Homo sapien
tctgaaaagtcagggtaatgctcgc

SEQ ID NO: 2180928 - DNA, 25 bp, Homo sapien
acctttgtgcatgtgtctagctgga

SEQ ID NO: 2180929 - DNA, 25 bp, Homo sapien
tgtgcatgtgtctagctggacaatc

SEQ ID NO: 2180930 - DNA, 25 bp, Homo sapien
gtttcacatatttaacgtacacaaa

SEQ ID NO: 2180931 - DNA, 25 bp, Homo sapien
ccagcatacaataagtttcacatat

SEQ ID NO: 2180932 - DNA, 25 bp, Homo sapien
taacgtacacaaatttgatgagttt

SEQ ID NO: 2180933 - DNA, 25 bp, Homo sapien
ggtgtaaccagcatacaataagttt

SEQ ID NO: 2180934 - DNA, 25 bp, Homo sapien
gcgccgtttcttaagccggtctgaa

SEQ ID NO: 2180935 - DNA, 25 bp, Homo sapien
cttaagccggtctgaaaagcgcaat

SEQ ID NO: 2180936 - DNA, 25 bp, Homo sapien
cgcacggtgcgcacacacactggcc

SEQ ID NO: 2180937 - DNA, 25 bp, Homo sapien
cgcgcacggtgcgcacacacactgg

SEQ ID NO: 2180938 - DNA, 25 bp, Homo sapien
cagaacatgctgataatcgggaggc

SEQ ID NO: 2180939 - DNA, 25 bp, Homo sapien
ccgagacctcgagcaatggtggcaa

SEQ ID NO: 2180940 - DNA, 25 bp, Homo sapien
tcaaagaagggctaggatcagcaga

SEQ ID NO: 2180941 - DNA, 25 bp, Homo sapien
gccactgagagcagttgctagtcct

SEQ ID NO: 2180942 - DNA, 25 bp, Homo sapien
ctggggttgattggttgccagctcc

SEQ ID NO: 2180943 - DNA, 25 bp, Homo sapien
gttcgctctgtcattgggaaggcca

SEQ ID NO: 2180944 - DNA, 25 bp, Homo sapien
ttatgtagatctttaacaccccaca

SEQ ID NO: 2180945 - DNA, 25 bp, Homo sapien
tcagttgatgttgactgtctgtctc

SEQ ID NO: 2180946 - DNA, 25 bp, Homo sapien
tgccaggggtaaacgttctgtccag

SEQ ID NO: 2180947 - DNA, 25 bp, Homo sapien
ggcactctgcttaacttcttccttg

SEQ ID NO: 2180948 - DNA, 25 bp, Homo sapien
ggtcctctatatccccacttaggtg

SEQ ID NO: 2180949 - DNA, 25 bp, Homo sapien
cacttaggtgacataagtatgccct

SEQ ID NO: 2180950 - DNA, 25 bp, Homo sapien
tctttgatattgttacattcttggc

SEQ ID NO: 2180951 - DNA, 25 bp, Homo sapien
acattcttggcagggattggtgaca

SEQ ID NO: 2180952 - DNA, 25 bp, Homo sapien
ctaagagtaaggattggcctgtcag

SEQ ID NO: 2180953 - DNA, 25 bp, Homo sapien
attggcctgtcagtgggcacaggat

SEQ ID NO: 2180954 - DNA, 25 bp, Homo sapien
aagagtaaggattggcctgtcagtg

SEQ ID NO: 2180955 - DNA, 25 bp, Homo sapien
taaggattggcctgtcagtgggcac

SEQ ID NO: 2180956 - DNA, 25 bp, Homo sapien
tttggctgcagtgccagtctgctga

SEQ ID NO: 2180957 - DNA, 25 bp, Homo sapien
ctgcagtgccagtctgctgactcat

SEQ ID NO: 2180958 - DNA, 25 bp, Homo sapien
gttttggctgcagtgccagtctgct

SEQ ID NO: 2180959 - DNA, 25 bp, Homo sapien
ggctgcagtgccagtctgctgactc

SEQ ID NO: 2180960 - DNA, 25 bp, Homo sapien
taccgtagcccatgacagagaagtg

SEQ ID NO: 2180961 - DNA, 25 bp, Homo sapien
gataactgcataagtaccgtagccc

SEQ ID NO: 2180962 - DNA, 25 bp, Homo sapien
tattgagtataagcttcagtggagg

SEQ ID NO: 2180963 - DNA, 25 bp, Homo sapien
tgacagagaagtgggatataaggat

SEQ ID NO: 2180964 - DNA, 25 bp, Homo sapien
gaagcaagccaaagcctctattgga

SEQ ID NO: 2180965 - DNA, 25 bp, Homo sapien
atgaagcaagccaaagcctctattg

SEQ ID NO: 2180966 - DNA, 25 bp, Homo sapien
agccaaagcctctattggaagcaaa

SEQ ID NO: 2180967 - DNA, 25 bp, Homo sapien
gcaagccaaagcctctattggaagc

SEQ ID NO: 2180968 - DNA, 25 bp, Homo sapien
gtgtgccttagaataggcttgctcc

SEQ ID NO: 2180969 - DNA, 25 bp, Homo sapien
gttgtgtgccttagaataggcttgc

SEQ ID NO: 2180970 - DNA, 25 bp, Homo sapien
tgtgtgccttagaataggcttgctc

SEQ ID NO: 2180971 - DNA, 25 bp, Homo sapien
ttgtgtgccttagaataggcttgct

SEQ ID NO: 2180972 - DNA, 25 bp, Homo sapien
catgctcatctctcttcggatgcag

SEQ ID NO: 2180973 - DNA, 25 bp, Homo sapien
tcttctaccgccaatttagtcttgg

SEQ ID NO: 2180974 - DNA, 25 bp, Homo sapien
taatcacagaatccttcacagtgtc

SEQ ID NO: 2180975 - DNA, 25 bp, Homo sapien
ccctgtgctgatgcctctaatcaca

SEQ ID NO: 2180976 - DNA, 25 bp, Homo sapien
tggtcatcaacttggaaaccctcat

SEQ ID NO: 2180977 - DNA, 25 bp, Homo sapien
tgtgggggggaggtcccgatgctgg

SEQ ID NO: 2180978 - DNA, 25 bp, Homo sapien
gctggtcatcaacttggaaaccctc

SEQ ID NO: 2180979 - DNA, 25 bp, Homo sapien
gggaggtcccgatgctggtcatcaa

SEQ ID NO: 2180980 - DNA, 25 bp, Homo sapien
taagttctttgattcgtctgtgttc

SEQ ID NO: 2180981 - DNA, 25 bp, Homo sapien
agaatttcagtttggatgactgggt

SEQ ID NO: 2180982 - DNA, 25 bp, Homo sapien
gcttattggacttttctcctctaga

SEQ ID NO: 2180983 - DNA, 25 bp, Homo sapien
gtctgctaactccaacatctacact

SEQ ID NO: 2180984 - DNA, 25 bp, Homo sapien
agtcaaattcagtggtgagaagcgg

SEQ ID NO: 2180985 - DNA, 25 bp, Homo sapien
ggagtttaatctgtgaacagtcaat

SEQ ID NO: 2180986 - DNA, 25 bp, Homo sapien
taagactagtcaaattcagtggtga

SEQ ID NO: 2180987 - DNA, 25 bp, Homo sapien
caaggagtttaatctgtgaacagtc

SEQ ID NO: 2180988 - DNA, 25 bp, Homo sapien
ttgtgtgtatctggttgtcctgtct

SEQ ID NO: 2180989 - DNA, 25 bp, Homo sapien
tggttgtcctgtctccccgttcatc

SEQ ID NO: 2180990 - DNA, 25 bp, Homo sapien
gttgtcctgtctccccgttcatcta

SEQ ID NO: 2180991 - DNA, 25 bp, Homo sapien
ctgttgtgtgtatctggttgtcctg

SEQ ID NO: 2180992 - DNA, 25 bp, Homo sapien
gaagatcagaagatagccaccgcac

SEQ ID NO: 2180993 - DNA, 25 bp, Homo sapien
gagaagatcagaagatagccaccgc

SEQ ID NO: 2180994 - DNA, 25 bp, Homo sapien
tcacacgagaagatcagaagatagc

SEQ ID NO: 2180995 - DNA, 25 bp, Homo sapien
cacgagaagatcagaagatagccac

SEQ ID NO: 2180996 - DNA, 25 bp, Homo sapien
ggatgccaatgctcacccatctgtt

SEQ ID NO: 2180997 - DNA, 25 bp, Homo sapien
tttgatccccggttctccactggct

SEQ ID NO: 2180998 - DNA, 25 bp, Homo sapien
tggcttgcagacattatccagttcc

SEQ ID NO: 2180999 - DNA, 25 bp, Homo sapien
cagaaattcctatggccagcaggga

SEQ ID NO: 2181000 - DNA, 25 bp, Homo sapien
gccaaaggaaggaccagaactggcc

SEQ ID NO: 2181001 - DNA, 25 bp, Homo sapien
aaaggaaggaccagaactggccagg

SEQ ID NO: 2181002 - DNA, 25 bp, Homo sapien
ccaaaggaaggaccagaactggcca

SEQ ID NO: 2181003 - DNA, 25 bp, Homo sapien
cagccaaaggaaggaccagaactgg

SEQ ID NO: 2181004 - DNA, 25 bp, Homo sapien
tgcccggttgtgtgcatttcctagc

SEQ ID NO: 2181005 - DNA, 25 bp, Homo sapien
cactatgtaattaatcatgcccggt

SEQ ID NO: 2181006 - DNA, 25 bp, Homo sapien
gagttgacactagccaaacctcctg

SEQ ID NO: 2181007 - DNA, 25 bp, Homo sapien
cacccgtactgtatgttgctcactg

SEQ ID NO: 2181008 - DNA, 25 bp, Homo sapien
cacattcctgtgcaactcttctgaa

SEQ ID NO: 2181009 - DNA, 25 bp, Homo sapien
cctttcttaatggagagcatttgta

SEQ ID NO: 2181010 - DNA, 25 bp, Homo sapien
tgtaagggaggataacgagtatcct

SEQ ID NO: 2181011 - DNA, 25 bp, Homo sapien
ggaggataacgagtatcctctgcat

SEQ ID NO: 2181012 - DNA, 25 bp, Homo sapien
tttgtctccactttcgttgattgag

SEQ ID NO: 2181013 - DNA, 25 bp, Homo sapien
ctcaggttatggcattggcacaaac

SEQ ID NO: 2181014 - DNA, 25 bp, Homo sapien
tcaattttgcccatgagcaaagctg

SEQ ID NO: 2181015 - DNA, 25 bp, Homo sapien
tcgttgattgagacatcccagccct

SEQ ID NO: 2181016 - DNA, 25 bp, Homo sapien
gggctccactaccttcaatgaaacc

SEQ ID NO: 2181017 - DNA, 25 bp, Homo sapien
ttgggctccactaccttcaatgaaa

SEQ ID NO: 2181018 - DNA, 25 bp, Homo sapien
tccactaccttcaatgaaaccttca

SEQ ID NO: 2181019 - DNA, 25 bp, Homo sapien
gctccactaccttcaatgaaacctt

SEQ ID NO: 2181020 - DNA, 25 bp, Homo sapien
gctgtgcctctccatgtagtcgcgg

SEQ ID NO: 2181021 - DNA, 25 bp, Homo sapien
ttcccgggcctagacagaattatct

SEQ ID NO: 2181022 - DNA, 25 bp, Homo sapien
cagactgtggcttcgtgtcacacaa

SEQ ID NO: 2181023 - DNA, 25 bp, Homo sapien
tactgaggctcatggatgaatggcc

SEQ ID NO: 2181024 - DNA, 25 bp, Homo sapien
taatcccctcggagagctagactgg

SEQ ID NO: 2181025 - DNA, 25 bp, Homo sapien
tctctgttctttgcggtggccctgc

SEQ ID NO: 2181026 - DNA, 25 bp, Homo sapien
gccggtgggagagcacacacttagt

SEQ ID NO: 2181027 - DNA, 25 bp, Homo sapien
gctagactggaacactggctggatc

SEQ ID NO: 2181028 - DNA, 25 bp, Homo sapien
gactgttagaccagatccttcagat

SEQ ID NO: 2181029 - DNA, 25 bp, Homo sapien
gaggggtagcgttcacagttctcca

SEQ ID NO: 2181030 - DNA, 25 bp, Homo sapien
ctccagtgtgccatagactgttaga

SEQ ID NO: 2181031 - DNA, 25 bp, Homo sapien
gcggttgcacggctctccttcggct

SEQ ID NO: 2181032 - DNA, 25 bp, Homo sapien
cgctgtcgccgcgactcgagccccg

SEQ ID NO: 2181033 - DNA, 25 bp, Homo sapien
gcgactcgagccccgggcgcactga

SEQ ID NO: 2181034 - DNA, 25 bp, Homo sapien
tgtcgccgcgactcgagccccgggc

SEQ ID NO: 2181035 - DNA, 25 bp, Homo sapien
tcgccgcgactcgagccccgggcgc

SEQ ID NO: 2181036 - DNA, 25 bp, Homo sapien
ttcctgatttcagaatggataatct

SEQ ID NO: 2181037 - DNA, 25 bp, Homo sapien
cttcctaaaggatttagctttgatc

SEQ ID NO: 2181038 - DNA, 25 bp, Homo sapien
ataatcttcctaaaggatttagctt

SEQ ID NO: 2181039 - DNA, 25 bp, Homo sapien
cctaaaggatttagctttgatcagc

SEQ ID NO: 2181040 - DNA, 25 bp, Homo sapien
tggttatgccctttagtgaagctct

SEQ ID NO: 2181041 - DNA, 25 bp, Homo sapien
gttatgccctttagtgaagctctct

SEQ ID NO: 2181042 - DNA, 25 bp, Homo sapien
actggttatgccctttagtgaagct

SEQ ID NO: 2181043 - DNA, 25 bp, Homo sapien
ggttatgccctttagtgaagctctc

SEQ ID NO: 2181044 - DNA, 25 bp, Homo sapien
tcctgataagcttggcctctcgatg

SEQ ID NO: 2181045 - DNA, 25 bp, Homo sapien
cccggaagatagctgctacctctgg

SEQ ID NO: 2181046 - DNA, 25 bp, Homo sapien
aagctgtcactaggatggccccgga

SEQ ID NO: 2181047 - DNA, 25 bp, Homo sapien
cacaagtccacagatcgtggtggcc

SEQ ID NO: 2181048 - DNA, 25 bp, Homo sapien
gctgtcctctgaggtacgctgccga

SEQ ID NO: 2181049 - DNA, 25 bp, Homo sapien
tacgctgccgaaaagtgaggccaga

SEQ ID NO: 2181050 - DNA, 25 bp, Homo sapien
gctgccttaacttcttcgctgtcct

SEQ ID NO: 2181051 - DNA, 25 bp, Homo sapien
ggtacccttggatactgttgtcgcc

SEQ ID NO: 2181052 - DNA, 25 bp, Homo sapien
tagagggcgaaaagcaaggtcccag

SEQ ID NO: 2181053 - DNA, 25 bp, Homo sapien
gtcccagtagtgctcttcaaccaag

SEQ ID NO: 2181054 - DNA, 25 bp, Homo sapien
cacatgctgtaaattattagagggc

SEQ ID NO: 2181055 - DNA, 25 bp, Homo sapien
aaggtcccagtagtgctcttcaacc

SEQ ID NO: 2181056 - DNA, 25 bp, Homo sapien
aatgaagtgagccttctcggtatca

SEQ ID NO: 2181057 - DNA, 25 bp, Homo sapien
aaagccattgccgtttttcataggt

SEQ ID NO: 2181058 - DNA, 25 bp, Homo sapien
taggttccactgaagtgatagttgc

SEQ ID NO: 2181059 - DNA, 25 bp, Homo sapien
gagccttctcggtatcagatgttgc

SEQ ID NO: 2181060 - DNA, 25 bp, Homo sapien
agtagcttggcggtgctcccagtga

SEQ ID NO: 2181061 - DNA, 25 bp, Homo sapien
tgctcccagtgagtgagtctgatgt

SEQ ID NO: 2181062 - DNA, 25 bp, Homo sapien
cccagtgagtgagtctgatgttcca

SEQ ID NO: 2181063 - DNA, 25 bp, Homo sapien
tgaaagtagcttggcggtgctccca

SEQ ID NO: 2181064 - DNA, 25 bp, Homo sapien
tcttgcatggccgatggaggcactg

SEQ ID NO: 2181065 - DNA, 25 bp, Homo sapien
tgattctggaggttatggcactggt

SEQ ID NO: 2181066 - DNA, 25 bp, Homo sapien
ccagaacttagtggaaacagctctt

SEQ ID NO: 2181067 - DNA, 25 bp, Homo sapien
ggatgcctggtagtgtatcgccaga

SEQ ID NO: 2181068 - DNA, 25 bp, Homo sapien
taagaattggataacagccttggtt

SEQ ID NO: 2181069 - DNA, 25 bp, Homo sapien
taggtgaccattggataagaatgtc

SEQ ID NO: 2181070 - DNA, 25 bp, Homo sapien
gaattcgttgagcattcaggacaca

SEQ ID NO: 2181071 - DNA, 25 bp, Homo sapien
ttcttgggcccatgtggagttttta

SEQ ID NO: 2181072 - DNA, 25 bp, Homo sapien
tgactgagctccacgtaggtctccc

SEQ ID NO: 2181073 - DNA, 25 bp, Homo sapien
cctttgactgagctccacgtaggtc

SEQ ID NO: 2181074 - DNA, 25 bp, Homo sapien
taccctttgactgagctccacgtag

SEQ ID NO: 2181075 - DNA, 25 bp, Homo sapien
cgtgttaccctttgactgagctcca

SEQ ID NO: 2181076 - DNA, 25 bp, Homo sapien
tcccttgagctatggacattggtct

SEQ ID NO: 2181077 - DNA, 25 bp, Homo sapien
tcttcactaaaatcctggaacatgt

SEQ ID NO: 2181078 - DNA, 25 bp, Homo sapien
gcatctgccctacaacctgctgttt

SEQ ID NO: 2181079 - DNA, 25 bp, Homo sapien
ggaacatgtctatgccagctgcttc

SEQ ID NO: 2181080 - DNA, 25 bp, Homo sapien
tcattatcacttgaggagtggcgca

SEQ ID NO: 2181081 - DNA, 25 bp, Homo sapien
tggcgctactattgccctcttgaca

SEQ ID NO: 2181082 - DNA, 25 bp, Homo sapien
tgatcctttctaaccagattggctg

SEQ ID NO: 2181083 - DNA, 25 bp, Homo sapien
tacataagtgtataaggagctggac

SEQ ID NO: 2181084 - DNA, 25 bp, Homo sapien
ttccagcttgctgagccttggcttc

SEQ ID NO: 2181085 - DNA, 25 bp, Homo sapien
cctcaggttcatagccctttgcctt

SEQ ID NO: 2181086 - DNA, 25 bp, Homo sapien
tgttggatgggcagtccatatggcc

SEQ ID NO: 2181087 - DNA, 25 bp, Homo sapien
cagtgtaaatgacaaggagaaggac

SEQ ID NO: 2181088 - DNA, 25 bp, Homo sapien
ccatatggcctatgaacaaccaggg

SEQ ID NO: 2181089 - DNA, 25 bp, Homo sapien
agaaggacaatggaaggtgggaagg

SEQ ID NO: 2181090 - DNA, 25 bp, Homo sapien
gataagctccctacccttatggaag

SEQ ID NO: 2181091 - DNA, 25 bp, Homo sapien
ctccacacagcagagtacttcttgc

SEQ ID NO: 2181092 - DNA, 25 bp, Homo sapien
tgtatgtagcttgtatccccaggct

SEQ ID NO: 2181093 - DNA, 25 bp, Homo sapien
cttgctttatggataagctccctac

SEQ ID NO: 2181094 - DNA, 25 bp, Homo sapien
tcattaacatccaccttgtattcta

SEQ ID NO: 2181095 - DNA, 25 bp, Homo sapien
ccttgtattctacacagatccactc

SEQ ID NO: 2181096 - DNA, 25 bp, Homo sapien
tccaccttgtattctacacagatcc

SEQ ID NO: 2181097 - DNA, 25 bp, Homo sapien
aacatccaccttgtattctacacag

SEQ ID NO: 2181098 - DNA, 25 bp, Homo sapien
tggcccaggagccatattggcattt

SEQ ID NO: 2181099 - DNA, 25 bp, Homo sapien
ggcccaggagccatattggcatttg

SEQ ID NO: 2181100 - DNA, 25 bp, Homo sapien
tgctctgttgacacagtcttcccga

SEQ ID NO: 2181101 - DNA, 25 bp, Homo sapien
ccccttggtgtgagagttgctgatt

SEQ ID NO: 2181102 - DNA, 25 bp, Homo sapien
cttggatcagcattcaggcagcgca

SEQ ID NO: 2181103 - DNA, 25 bp, Homo sapien
tgtcctggtgttgcagatttgctct

SEQ ID NO: 2181104 - DNA, 25 bp, Homo sapien
gcagtcatatacttttattgggaga

SEQ ID NO: 2181105 - DNA, 25 bp, Homo sapien
catcttgtagagattagaaacaggt

SEQ ID NO: 2181106 - DNA, 25 bp, Homo sapien
taggtctttagataacaggcttttc

SEQ ID NO: 2181107 - DNA, 25 bp, Homo sapien
gggagattatggaaagggccttcac

SEQ ID NO: 2181108 - DNA, 25 bp, Homo sapien
atactttatgtaaaggtgcacattc

SEQ ID NO: 2181109 - DNA, 25 bp, Homo sapien
tttatgtaaaggtgcacattcttgg

SEQ ID NO: 2181110 - DNA, 25 bp, Homo sapien
gttatgcaaacttattctaagtgta

SEQ ID NO: 2181111 - DNA, 25 bp, Homo sapien
tatgtaaaggtgcacattcttggga

SEQ ID NO: 2181112 - DNA, 25 bp, Homo sapien
catctctttggattcacttgcctct

SEQ ID NO: 2181113 - DNA, 25 bp, Homo sapien
ttgcctctacccattccattagggc

SEQ ID NO: 2181114 - DNA, 25 bp, Homo sapien
ttccattagggccattccaggtaga

SEQ ID NO: 2181115 - DNA, 25 bp, Homo sapien
ttggattcacttgcctctacccatt

SEQ ID NO: 2181116 - DNA, 25 bp, Homo sapien
cacagaggaccagggtagaggggta

SEQ ID NO: 2181117 - DNA, 25 bp, Homo sapien
ctgaagcacagaggaccagggtaga

SEQ ID NO: 2181118 - DNA, 25 bp, Homo sapien
ctaagtcttgaggtggctgaagcac

SEQ ID NO: 2181119 - DNA, 25 bp, Homo sapien
gaggtggctgaagcacagaggacca

SEQ ID NO: 2181120 - DNA, 25 bp, Homo sapien
tcaggagaccaagcctttgcttttc

SEQ ID NO: 2181121 - DNA, 25 bp, Homo sapien
gcttttcctggtccgtggcttgtac

SEQ ID NO: 2181122 - DNA, 25 bp, Homo sapien
gggcatcaggagaccaagcctttgc

SEQ ID NO: 2181123 - DNA, 25 bp, Homo sapien
gcagggtccactctgttctgctgct

SEQ ID NO: 2181124 - DNA, 25 bp, Homo sapien
gaccttagcatctgtggagatgatg

SEQ ID NO: 2181125 - DNA, 25 bp, Homo sapien
gcatgaccttagcatctgtggagat

SEQ ID NO: 2181126 - DNA, 25 bp, Homo sapien
gatgcctctaatgcaatgaccatac

SEQ ID NO: 2181127 - DNA, 25 bp, Homo sapien
ctgtggagatgatgcctctaatgca

SEQ ID NO: 2181128 - DNA, 25 bp, Homo sapien
tctttctggtacatcccagagcttg

SEQ ID NO: 2181129 - DNA, 25 bp, Homo sapien
ctctttctggtacatcccagagctt

SEQ ID NO: 2181130 - DNA, 25 bp, Homo sapien
gtcattactgtcagggaaatgcact

SEQ ID NO: 2181131 - DNA, 25 bp, Homo sapien
tggccttgaccatatggaggagaaa

SEQ ID NO: 2181132 - DNA, 25 bp, Homo sapien
ttgaccatatggaggagaaaagctt

SEQ ID NO: 2181133 - DNA, 25 bp, Homo sapien
gtgcttggccttgaccatatggagg

SEQ ID NO: 2181134 - DNA, 25 bp, Homo sapien
tctcgattgaagttctaaccgactt

SEQ ID NO: 2181135 - DNA, 25 bp, Homo sapien
gattgaagttctaaccgacttctta

SEQ ID NO: 2181136 - DNA, 25 bp, Homo sapien
tgttctctcgattgaagttctaacc

SEQ ID NO: 2181137 - DNA, 25 bp, Homo sapien
tctgtgtgttctctcgattgaagtt

SEQ ID NO: 2181138 - DNA, 25 bp, Homo sapien
tctgaatcctcagaacctagcagag

SEQ ID NO: 2181139 - DNA, 25 bp, Homo sapien
gacctagcgtcttctagacttggct

SEQ ID NO: 2181140 - DNA, 25 bp, Homo sapien
ggctctggtttgtgatatgcttccc

SEQ ID NO: 2181141 - DNA, 25 bp, Homo sapien
tccatttgcagtgacatctgtagca

SEQ ID NO: 2181142 - DNA, 25 bp, Homo sapien
aactgtctggcagaccgctgtatcc

SEQ ID NO: 2181143 - DNA, 25 bp, Homo sapien
aagccttggtaactgtctggcagac

SEQ ID NO: 2181144 - DNA, 25 bp, Homo sapien
ttggtaactgtctggcagaccgctg

SEQ ID NO: 2181145 - DNA, 25 bp, Homo sapien
gccttggtaactgtctggcagaccg

SEQ ID NO: 2181146 - DNA, 25 bp, Homo sapien
catttgggtcacaaatgctgaccga

SEQ ID NO: 2181147 - DNA, 25 bp, Homo sapien
cagaaaagcctgaatccagcttgcc

SEQ ID NO: 2181148 - DNA, 25 bp, Homo sapien
cgtgctcccagcgtgtacttggttg

SEQ ID NO: 2181149 - DNA, 25 bp, Homo sapien
tgctgaccgacataaagatgactga

SEQ ID NO: 2181150 - DNA, 25 bp, Homo sapien
ggcataatgtagaattggttaagct

SEQ ID NO: 2181151 - DNA, 25 bp, Homo sapien
aaatttaactatcagacatctgttg

SEQ ID NO: 2181152 - DNA, 25 bp, Homo sapien
cctccaactgcttgtatgaggcata

SEQ ID NO: 2181153 - DNA, 25 bp, Homo sapien
gaccaataacaattatagcctccaa

SEQ ID NO: 2181154 - DNA, 25 bp, Homo sapien
ttcagcaccttttttaggccagctt

SEQ ID NO: 2181155 - DNA, 25 bp, Homo sapien
ttgatggcccgggcaatttcacaga

SEQ ID NO: 2181156 - DNA, 25 bp, Homo sapien
tacatctaaaccctcaagttcgatg

SEQ ID NO: 2181157 - DNA, 25 bp, Homo sapien
cctcaagttcgatgctattctctgc

SEQ ID NO: 2181158 - DNA, 25 bp, Homo sapien
gcagtctgcctaaagcagagagaaa

SEQ ID NO: 2181159 - DNA, 25 bp, Homo sapien
gagttaaatcccatggtttcctggc

SEQ ID NO: 2181160 - DNA, 25 bp, Homo sapien
gcctgtgctagggaagtgagagttc

SEQ ID NO: 2181161 - DNA, 25 bp, Homo sapien
cccctcagttggttcatgactttgg

SEQ ID NO: 2181162 - DNA, 25 bp, Homo sapien
gtcttgatgtatgacccccctcagt

SEQ ID NO: 2181163 - DNA, 25 bp, Homo sapien
cctcagttggttcatgactttggcc

SEQ ID NO: 2181164 - DNA, 25 bp, Homo sapien
cttgatgtatgacccccctcagttg

SEQ ID NO: 2181165 - DNA, 25 bp, Homo sapien
cactgacttgaagggaggctgcctg

SEQ ID NO: 2181166 - DNA, 25 bp, Homo sapien
ctggtaactacagtcttttacttgg

SEQ ID NO: 2181167 - DNA, 25 bp, Homo sapien
gctgcctggtaactacagtctttta

SEQ ID NO: 2181168 - DNA, 25 bp, Homo sapien
tggataccactgacttgaagggagg

SEQ ID NO: 2181169 - DNA, 25 bp, Homo sapien
cagcccctcagtatggctgtatggc

SEQ ID NO: 2181170 - DNA, 25 bp, Homo sapien
tacattgactataattcccttgcca

SEQ ID NO: 2181171 - DNA, 25 bp, Homo sapien
tatggctgtccacttacattgacta

SEQ ID NO: 2181172 - DNA, 25 bp, Homo sapien
catcaccatagagacagcttgtgga

SEQ ID NO: 2181173 - DNA, 25 bp, Homo sapien
tgccctccctcggcattctgtgctg

SEQ ID NO: 2181174 - DNA, 25 bp, Homo sapien
tccctcggcattctgtgctggctcc

SEQ ID NO: 2181175 - DNA, 25 bp, Homo sapien
gcattctgtgctggctccaagggct

SEQ ID NO: 2181176 - DNA, 25 bp, Homo sapien
tcggcattctgtgctggctccaagg

SEQ ID NO: 2181177 - DNA, 25 bp, Homo sapien
gctctccccttcagcccctcacaca

SEQ ID NO: 2181178 - DNA, 25 bp, Homo sapien
gggctctccccttcagcccctcaca

SEQ ID NO: 2181179 - DNA, 25 bp, Homo sapien
ggctctccccttcagcccctcacac

SEQ ID NO: 2181180 - DNA, 25 bp, Homo sapien
ctctccccttcagcccctcacacat

SEQ ID NO: 2181181 - DNA, 25 bp, Homo sapien
tatccctgtcttagaacttggttta

SEQ ID NO: 2181182 - DNA, 25 bp, Homo sapien
gatcctttgggagctctctcattat

SEQ ID NO: 2181183 - DNA, 25 bp, Homo sapien
tgtcttagaacttggtttagctggc

SEQ ID NO: 2181184 - DNA, 25 bp, Homo sapien
ctgagtttgacttgggaaagttatt

SEQ ID NO: 2181185 - DNA, 25 bp, Homo sapien
ccagcccggcatggatataattatc

SEQ ID NO: 2181186 - DNA, 25 bp, Homo sapien
aactgccttacacgttgtcctgtct

SEQ ID NO: 2181187 - DNA, 25 bp, Homo sapien
ccggcatggatataattatctctac

SEQ ID NO: 2181188 - DNA, 25 bp, Homo sapien
tctgctcagacatgatgaatgcttg

SEQ ID NO: 2181189 - DNA, 25 bp, Homo sapien
gagattgtcctttatttccattggg

SEQ ID NO: 2181190 - DNA, 25 bp, Homo sapien
cctttatttccattgggtccttcat

SEQ ID NO: 2181191 - DNA, 25 bp, Homo sapien
ttcttggaagagattgtcctttatt

SEQ ID NO: 2181192 - DNA, 25 bp, Homo sapien
cttggaagagattgtcctttatttc

SEQ ID NO: 2181193 - DNA, 25 bp, Homo sapien
atgtttcttgtacacaatgcccttc

SEQ ID NO: 2181194 - DNA, 25 bp, Homo sapien
ttatgtttcttgtacacaatgccct

SEQ ID NO: 2181195 - DNA, 25 bp, Homo sapien
tatgtttcttgtacacaatgccctt

SEQ ID NO: 2181196 - DNA, 25 bp, Homo sapien
actttcagagtactccctcttttca

SEQ ID NO: 2181197 - DNA, 25 bp, Homo sapien
tgtgctctagacaaagccactttca

SEQ ID NO: 2181198 - DNA, 25 bp, Homo sapien
agccactttcagagtactccctctt

SEQ ID NO: 2181199 - DNA, 25 bp, Homo sapien
ctgtgctctagacaaagccactttc

SEQ ID NO: 2181200 - DNA, 25 bp, Homo sapien
gaggatgtgtttctggaacagtcat

SEQ ID NO: 2181201 - DNA, 25 bp, Homo sapien
tttgggccagcccttcttgcttcct

SEQ ID NO: 2181202 - DNA, 25 bp, Homo sapien
aaagggaggatgtgtttctggaaca

SEQ ID NO: 2181203 - DNA, 25 bp, Homo sapien
tccttgttgcctggaggaagaaagg

SEQ ID NO: 2181204 - DNA, 25 bp, Homo sapien
tttgaaataccattcctccaaatag

SEQ ID NO: 2181205 - DNA, 25 bp, Homo sapien
gactgccagcatattgcatatttga

SEQ ID NO: 2181206 - DNA, 25 bp, Homo sapien
gatactgtttccacaagccccaaag

SEQ ID NO: 2181207 - DNA, 25 bp, Homo sapien
agcagccactagagtgagtttttcc

SEQ ID NO: 2181208 - DNA, 25 bp, Homo sapien
tctgttactctgtggtgaattccct

SEQ ID NO: 2181209 - DNA, 25 bp, Homo sapien
tgtggatattgtggttgtgcccatc

SEQ ID NO: 2181210 - DNA, 25 bp, Homo sapien
tcaagcctacgttttaatacacacc

SEQ ID NO: 2181211 - DNA, 25 bp, Homo sapien
tgtctctgctaataaaatgctgcag

SEQ ID NO: 2181212 - DNA, 25 bp, Homo sapien
ggttcctgagttacgttactcagag

SEQ ID NO: 2181213 - DNA, 25 bp, Homo sapien
agcactgatgggacttggtgaagca

SEQ ID NO: 2181214 - DNA, 25 bp, Homo sapien
actggttcctgagttacgttactca

SEQ ID NO: 2181215 - DNA, 25 bp, Homo sapien
tggttcctgagttacgttactcaga

SEQ ID NO: 2181216 - DNA, 25 bp, Homo sapien
ctttgagtttcatccctgatatctg

SEQ ID NO: 2181217 - DNA, 25 bp, Homo sapien
tctttgagtttcatccctgatatct

SEQ ID NO: 2181218 - DNA, 25 bp, Homo sapien
tttgagtttcatccctgatatctgc

SEQ ID NO: 2181219 - DNA, 25 bp, Homo sapien
ttgagtttcatccctgatatctgca

SEQ ID NO: 2181220 - DNA, 25 bp, Homo sapien
ttagcccctgtttcctacagcatca

SEQ ID NO: 2181221 - DNA, 25 bp, Homo sapien
tgcaacagttaattgtttcacttaa

SEQ ID NO: 2181222 - DNA, 25 bp, Homo sapien
ttattactgaagtgtgagatgtctg

SEQ ID NO: 2181223 - DNA, 25 bp, Homo sapien
tcctgacatgaaattttgccccatg

SEQ ID NO: 2181224 - DNA, 25 bp, Homo sapien
gaaattttgccccatgggctgtact

SEQ ID NO: 2181225 - DNA, 25 bp, Homo sapien
cattagtttcttaatgtagatatcc

SEQ ID NO: 2181226 - DNA, 25 bp, Homo sapien
tatagataggtgtatgttttctctg

SEQ ID NO: 2181227 - DNA, 25 bp, Homo sapien
ttcagaaaatggaagttctgaatca

SEQ ID NO: 2181228 - DNA, 25 bp, Homo sapien
tcatgctgctgttagcggcagtatc

SEQ ID NO: 2181229 - DNA, 25 bp, Homo sapien
ttagcggcagtatccaggcaccaat

SEQ ID NO: 2181230 - DNA, 25 bp, Homo sapien
gcaccaatagaccagtatttcccaa

SEQ ID NO: 2181231 - DNA, 25 bp, Homo sapien
tgttttgctggacactagtctaaca

SEQ ID NO: 2181232 - DNA, 25 bp, Homo sapien
ctattgtgcacaatcccttggtgga

SEQ ID NO: 2181233 - DNA, 25 bp, Homo sapien
ggctattgtgcacaatcccttggtg

SEQ ID NO: 2181234 - DNA, 25 bp, Homo sapien
aatcccttggtggatctcatgaacc

SEQ ID NO: 2181235 - DNA, 25 bp, Homo sapien
ctggctattgtgcacaatcccttgg

SEQ ID NO: 2181236 - DNA, 25 bp, Homo sapien
cttttcatgatctctgaggaactca

SEQ ID NO: 2181237 - DNA, 25 bp, Homo sapien
ttttcatgatctctgaggaactcag

SEQ ID NO: 2181238 - DNA, 25 bp, Homo sapien
ccttttcatgatctctgaggaactc

SEQ ID NO: 2181239 - DNA, 25 bp, Homo sapien
tttcatgatctctgaggaactcagt

SEQ ID NO: 2181240 - DNA, 25 bp, Homo sapien
aatgggctatcgttagatgctcttc

SEQ ID NO: 2181241 - DNA, 25 bp, Homo sapien
gttaaaatgggctatcgttagatgc

SEQ ID NO: 2181242 - DNA, 25 bp, Homo sapien
ggctatcgttagatgctcttctcta

SEQ ID NO: 2181243 - DNA, 25 bp, Homo sapien
tgacttcaagttggacccaaaacat

SEQ ID NO: 2181244 - DNA, 25 bp, Homo sapien
gatcgtgagtcagggaccggactgg

SEQ ID NO: 2181245 - DNA, 25 bp, Homo sapien
gcccacgtgcagggatcgtgagtca

SEQ ID NO: 2181246 - DNA, 25 bp, Homo sapien
gtctctaaatccttgtggtccccca

SEQ ID NO: 2181247 - DNA, 25 bp, Homo sapien
gtgagtcagggaccggactgggcat

SEQ ID NO: 2181248 - DNA, 25 bp, Homo sapien
acttctcaaggataagaatattttg

SEQ ID NO: 2181249 - DNA, 25 bp, Homo sapien
aggccggctgagacggccggtccag

SEQ ID NO: 2181250 - DNA, 25 bp, Homo sapien
tccagggaagctccgccagtactgg

SEQ ID NO: 2181251 - DNA, 25 bp, Homo sapien
gccccaggccggctgagacggccgg

SEQ ID NO: 2181252 - DNA, 25 bp, Homo sapien
gaatatttctacgtgccgggagcgt

SEQ ID NO: 2181253 - DNA, 25 bp, Homo sapien
tttcacccacggcagaatatttcta

SEQ ID NO: 2181254 - DNA, 25 bp, Homo sapien
ccacggcagaatatttctacgtgcc

SEQ ID NO: 2181255 - DNA, 25 bp, Homo sapien
ggcagaatatttctacgtgccggga

SEQ ID NO: 2181256 - DNA, 25 bp, Homo sapien
attatgatcctcataaccaaaacca

SEQ ID NO: 2181257 - DNA, 25 bp, Homo sapien
accaaaaccacgctccagcgcaagc

SEQ ID NO: 2181258 - DNA, 25 bp, Homo sapien
caaaaccacgctccagcgcaagcca

SEQ ID NO: 2181259 - DNA, 25 bp, Homo sapien
aaaccacgctccagcgcaagccagg

SEQ ID NO: 2181260 - DNA, 25 bp, Homo sapien
ccaaaaagtggcagctttaatatct

SEQ ID NO: 2181261 - DNA, 25 bp, Homo sapien
cacataaagtatggatctaatgccg

SEQ ID NO: 2181262 - DNA, 25 bp, Homo sapien
cagctttaatatctgatgtttgcat

SEQ ID NO: 2181263 - DNA, 25 bp, Homo sapien
taatgccgaggagatagtacccagt

SEQ ID NO: 2181264 - DNA, 25 bp, Homo sapien
tggcgatcaatggggcaacagatga

SEQ ID NO: 2181265 - DNA, 25 bp, Homo sapien
gatcaatggggcaacagatgacaca

SEQ ID NO: 2181266 - DNA, 25 bp, Homo sapien
aacagatgacacagccagatcacct

SEQ ID NO: 2181267 - DNA, 25 bp, Homo sapien
gggcaacagatgacacagccagatc

SEQ ID NO: 2181268 - DNA, 25 bp, Homo sapien
tacctaactctgttcttcatacagc

SEQ ID NO: 2181269 - DNA, 25 bp, Homo sapien
ttcatacagccagtacgagtgctac

SEQ ID NO: 2181270 - DNA, 25 bp, Homo sapien
cctgtctcccagatagcatcagagt

SEQ ID NO: 2181271 - DNA, 25 bp, Homo sapien
gcatcagagtcatagttaataccgg

SEQ ID NO: 2181272 - DNA, 25 bp, Homo sapien
ggaatctcccacttcttgtgaggac

SEQ ID NO: 2181273 - DNA, 25 bp, Homo sapien
gattcccaggatgaggaatctccca

SEQ ID NO: 2181274 - DNA, 25 bp, Homo sapien
tatggctgtccgcagcttgttttct

SEQ ID NO: 2181275 - DNA, 25 bp, Homo sapien
tctacttcggtggctcccacgctgg

SEQ ID NO: 2181276 - DNA, 25 bp, Homo sapien
gtctccaagtcatcagaagcccttt

SEQ ID NO: 2181277 - DNA, 25 bp, Homo sapien
ctccaagtcatcagaagcccttttt

SEQ ID NO: 2181278 - DNA, 25 bp, Homo sapien
tctggtctccaagtcatcagaagcc

SEQ ID NO: 2181279 - DNA, 25 bp, Homo sapien
tggtctccaagtcatcagaagccct

SEQ ID NO: 2181280 - DNA, 25 bp, Homo sapien
agcacccagcatcaactgttgactg

SEQ ID NO: 2181281 - DNA, 25 bp, Homo sapien
tcagtaggctgagggtatttcaaag

SEQ ID NO: 2181282 - DNA, 25 bp, Homo sapien
tcaggcagtttagactcagtaggct

SEQ ID NO: 2181283 - DNA, 25 bp, Homo sapien
tctatcagcacatcctggagttccc

SEQ ID NO: 2181284 - DNA, 25 bp, Homo sapien
cctgtagctgtttataaacagtctc

SEQ ID NO: 2181285 - DNA, 25 bp, Homo sapien
gaaggtatattccatcctgtagctg

SEQ ID NO: 2181286 - DNA, 25 bp, Homo sapien
tgcaaacattgtcttcgaattgaag

SEQ ID NO: 2181287 - DNA, 25 bp, Homo sapien
gggatatcatctctattccttgcca

SEQ ID NO: 2181288 - DNA, 25 bp, Homo sapien
gaaccgctcaaaatgtgaggcctca

SEQ ID NO: 2181289 - DNA, 25 bp, Homo sapien
cgctcaaaatgtgaggcctcaggac

SEQ ID NO: 2181290 - DNA, 25 bp, Homo sapien
attcttgaaccgctcaaaatgtgag

SEQ ID NO: 2181291 - DNA, 25 bp, Homo sapien
tcttgaaccgctcaaaatgtgaggc

SEQ ID NO: 2181292 - DNA, 25 bp, Homo sapien
tagttccactaacatggctaccacg

SEQ ID NO: 2181293 - DNA, 25 bp, Homo sapien
tcgtgaatgtgacttggctcccaac

SEQ ID NO: 2181294 - DNA, 25 bp, Homo sapien
acattcaggtccaatgagctgggcc

SEQ ID NO: 2181295 - DNA, 25 bp, Homo sapien
taatgtttactctggtgctcagtcg

SEQ ID NO: 2181296 - DNA, 25 bp, Homo sapien
gaagctttcaattgggcagtttgtt

SEQ ID NO: 2181297 - DNA, 25 bp, Homo sapien
taggaagctttcaattgggcagttt

SEQ ID NO: 2181298 - DNA, 25 bp, Homo sapien
ttcaattgggcagtttgttaaactc

SEQ ID NO: 2181299 - DNA, 25 bp, Homo sapien
ttgttaaactcaggaaacgcttcat

SEQ ID NO: 2181300 - DNA, 25 bp, Homo sapien
aacacagtctgagctcacaccagca

SEQ ID NO: 2181301 - DNA, 25 bp, Homo sapien
ccatctttctacctattcttggtcc

SEQ ID NO: 2181302 - DNA, 25 bp, Homo sapien
ctaaaacatgtccttcccaacacag

SEQ ID NO: 2181303 - DNA, 25 bp, Homo sapien
tctacctattcttggtcccaatttc

SEQ ID NO: 2181304 - DNA, 25 bp, Homo sapien
ggtccattctctagatatatttctg

SEQ ID NO: 2181305 - DNA, 25 bp, Homo sapien
ctggcccaggtccattctctagata

SEQ ID NO: 2181306 - DNA, 25 bp, Homo sapien
catgccaagttgctccggggatgga

SEQ ID NO: 2181307 - DNA, 25 bp, Homo sapien
ggcccaggtccattctctagatata

SEQ ID NO: 2181308 - DNA, 25 bp, Homo sapien
cattgttatttaaaataatgttctc

SEQ ID NO: 2181309 - DNA, 25 bp, Homo sapien
ttgttatttaaaataatgttctcca

SEQ ID NO: 2181310 - DNA, 25 bp, Homo sapien
tgttatttaaaataatgttctccat

SEQ ID NO: 2181311 - DNA, 25 bp, Homo sapien
ctttgcatttacatcatttacattg

SEQ ID NO: 2181312 - DNA, 25 bp, Homo sapien
cacagattctactggggaaagactg

SEQ ID NO: 2181313 - DNA, 25 bp, Homo sapien
aaggagtgctcttggtcatgacaca

SEQ ID NO: 2181314 - DNA, 25 bp, Homo sapien
ctactggggaaagactgagatgctc

SEQ ID NO: 2181315 - DNA, 25 bp, Homo sapien
cattttgcctctggtccgcttggaa

SEQ ID NO: 2181316 - DNA, 25 bp, Homo sapien
agtccactcctgtagattattcccg

SEQ ID NO: 2181317 - DNA, 25 bp, Homo sapien
tattcccgttcagactctggtcatc

SEQ ID NO: 2181318 - DNA, 25 bp, Homo sapien
tgtctactgctctccgcttgtcatc

SEQ ID NO: 2181319 - DNA, 25 bp, Homo sapien
atcccagaggcagtcttcccctttg

SEQ ID NO: 2181320 - DNA, 25 bp, Homo sapien
ttgtatggacatagcctcttcctgt

SEQ ID NO: 2181321 - DNA, 25 bp, Homo sapien
gcttttattgtatggacatagcctc

SEQ ID NO: 2181322 - DNA, 25 bp, Homo sapien
ctatgcacttgtatgcgtagatggc

SEQ ID NO: 2181323 - DNA, 25 bp, Homo sapien
cacttgtatgcgtagatggctttta

SEQ ID NO: 2181324 - DNA, 25 bp, Homo sapien
gcggaaggggaactctcagcaaatg

SEQ ID NO: 2181325 - DNA, 25 bp, Homo sapien
actgcggaaggggaactctcagcaa

SEQ ID NO: 2181326 - DNA, 25 bp, Homo sapien
ctgactgcggaaggggaactctcag

SEQ ID NO: 2181327 - DNA, 25 bp, Homo sapien
tgcggaaggggaactctcagcaaat

SEQ ID NO: 2181328 - DNA, 25 bp, Homo sapien
taatccctgcgcattgcatcttcct

SEQ ID NO: 2181329 - DNA, 25 bp, Homo sapien
tgtatgcggcaaacctgaatgatca

SEQ ID NO: 2181330 - DNA, 25 bp, Homo sapien
tggagtcctgcccaagcagatctgc

SEQ ID NO: 2181331 - DNA, 25 bp, Homo sapien
ggagcaagccactgataatccctgc

SEQ ID NO: 2181332 - DNA, 25 bp, Homo sapien
tatttccaaaggcatcgagactact

SEQ ID NO: 2181333 - DNA, 25 bp, Homo sapien
tctatttccaaaggcatcgagacta

SEQ ID NO: 2181334 - DNA, 25 bp, Homo sapien
tgtctatttccaaaggcatcgagac

SEQ ID NO: 2181335 - DNA, 25 bp, Homo sapien
ttccaaaggcatcgagactactcat

SEQ ID NO: 2181336 - DNA, 25 bp, Homo sapien
tttatcccagtcagacaattccatg

SEQ ID NO: 2181337 - DNA, 25 bp, Homo sapien
ggcggttggtaacatttgagagaca

SEQ ID NO: 2181338 - DNA, 25 bp, Homo sapien
gaagtcatgtggtttctcgttagag

SEQ ID NO: 2181339 - DNA, 25 bp, Homo sapien
gagaggtctttcatcatcaaccacg

SEQ ID NO: 2181340 - DNA, 25 bp, Homo sapien
gaaccaatgcgactggacttagcca

SEQ ID NO: 2181341 - DNA, 25 bp, Homo sapien
gactgtcttgggagcagcttaatcc

SEQ ID NO: 2181342 - DNA, 25 bp, Homo sapien
tatattgagcaatcgccaaggccta

SEQ ID NO: 2181343 - DNA, 25 bp, Homo sapien
tgctcctggcgtggaaacttaagtg

SEQ ID NO: 2181344 - DNA, 25 bp, Homo sapien
acttgatcaattcggctattaatat

SEQ ID NO: 2181345 - DNA, 25 bp, Homo sapien
cattctccattcagttttgtttcct

SEQ ID NO: 2181346 - DNA, 25 bp, Homo sapien
gatcaattcggctattaatatttgt

SEQ ID NO: 2181347 - DNA, 25 bp, Homo sapien
tgatcaattcggctattaatatttg

SEQ ID NO: 2181348 - DNA, 25 bp, Homo sapien
tgcattaacccaggcaacttcaatg

SEQ ID NO: 2181349 - DNA, 25 bp, Homo sapien
cactcactgtgtttgcgtggtcctt

SEQ ID NO: 2181350 - DNA, 25 bp, Homo sapien
tacggtacggtaacttccatcagaa

SEQ ID NO: 2181351 - DNA, 25 bp, Homo sapien
ctagtgcataacagtgaaggagctt

SEQ ID NO: 2181352 - DNA, 25 bp, Homo sapien
gacactgtcattttatctaagagtt

SEQ ID NO: 2181353 - DNA, 25 bp, Homo sapien
attgcagaacacaaattccctcaat

SEQ ID NO: 2181354 - DNA, 25 bp, Homo sapien
ttcttataaccagcctttctcctca

SEQ ID NO: 2181355 - DNA, 25 bp, Homo sapien
ctcttccagaaggacactgtcattt

SEQ ID NO: 2181356 - DNA, 25 bp, Homo sapien
tggggatcactgcagtatgcccaca

SEQ ID NO: 2181357 - DNA, 25 bp, Homo sapien
tgacgtatattacagttctgactgg

SEQ ID NO: 2181358 - DNA, 25 bp, Homo sapien
gcctttttgtgtactgacgtatatt

SEQ ID NO: 2181359 - DNA, 25 bp, Homo sapien
tctgttggggatcactgcagtatgc

SEQ ID NO: 2181360 - DNA, 25 bp, Homo sapien
gacaatgcagaaataagagaggcat

SEQ ID NO: 2181361 - DNA, 25 bp, Homo sapien
acaatgcagaaataagagaggcatt

SEQ ID NO: 2181362 - DNA, 25 bp, Homo sapien
ctacccaccaagggctgttcccagt

SEQ ID NO: 2181363 - DNA, 25 bp, Homo sapien
aagggctgttcccagtcctcctcat

SEQ ID NO: 2181364 - DNA, 25 bp, Homo sapien
gggctgttcccagtcctcctcattt

SEQ ID NO: 2181365 - DNA, 25 bp, Homo sapien
caccaagggctgttcccagtcctcc

SEQ ID NO: 2181366 - DNA, 25 bp, Homo sapien
gcacccctgtaaagctatgggttta

SEQ ID NO: 2181367 - DNA, 25 bp, Homo sapien
caaagacctgggcagcatgattgca

SEQ ID NO: 2181368 - DNA, 25 bp, Homo sapien
gctaggtacataggtttagagtaac

SEQ ID NO: 2181369 - DNA, 25 bp, Homo sapien
tatgggtttaccagtagcagctagg

SEQ ID NO: 2181370 - DNA, 25 bp, Homo sapien
atcagagcccaactttctcattgca

SEQ ID NO: 2181371 - DNA, 25 bp, Homo sapien
tgcttgatcagagcccaactttctc

SEQ ID NO: 2181372 - DNA, 25 bp, Homo sapien
ttgatcagagcccaactttctcatt

SEQ ID NO: 2181373 - DNA, 25 bp, Homo sapien
ctgcttgatcagagcccaactttct

SEQ ID NO: 2181374 - DNA, 25 bp, Homo sapien
ttcaaagggacagagcgtctgagaa

SEQ ID NO: 2181375 - DNA, 25 bp, Homo sapien
tcaactattgagcataggacaaggg

SEQ ID NO: 2181376 - DNA, 25 bp, Homo sapien
gattatgaaagagtccgtctgcagc

SEQ ID NO: 2181377 - DNA, 25 bp, Homo sapien
tcccacaagagacaaacgagctctg

SEQ ID NO: 2181378 - DNA, 25 bp, Homo sapien
gttcacagacggtccccacaaagct

SEQ ID NO: 2181379 - DNA, 25 bp, Homo sapien
gagctgttcacagacggtccccaca

SEQ ID NO: 2181380 - DNA, 25 bp, Homo sapien
cacaaagctctgaacgtggggcttc

SEQ ID NO: 2181381 - DNA, 25 bp, Homo sapien
tcttctaactttctgagggccctca

SEQ ID NO: 2181382 - DNA, 25 bp, Homo sapien
atagaagagcccgtggaacaaagcg

SEQ ID NO: 2181383 - DNA, 25 bp, Homo sapien
ctagggcatcaaccaggtgtccagg

SEQ ID NO: 2181384 - DNA, 25 bp, Homo sapien
gcccgtggaacaaagcgactctagg

SEQ ID NO: 2181385 - DNA, 25 bp, Homo sapien
aaagcgactctagggcatcaaccag

SEQ ID NO: 2181386 - DNA, 25 bp, Homo sapien
taaacatggacgcacagtagctgtc

SEQ ID NO: 2181387 - DNA, 25 bp, Homo sapien
gagaaagtggcaagtacgacagagc

SEQ ID NO: 2181388 - DNA, 25 bp, Homo sapien
caagttgcatcccagaggtgaccac

SEQ ID NO: 2181389 - DNA, 25 bp, Homo sapien
acctggcaaagtgggcgtgacacca

SEQ ID NO: 2181390 - DNA, 25 bp, Homo sapien
tatgaattgtctggtcatccactcg

SEQ ID NO: 2181391 - DNA, 25 bp, Homo sapien
ccatatgtggtacttcgcggcagcc

SEQ ID NO: 2181392 - DNA, 25 bp, Homo sapien
cagtatggggaagccatttgctgcc

SEQ ID NO: 2181393 - DNA, 25 bp, Homo sapien
tccagggttgcacgttatttccata

SEQ ID NO: 2181394 - DNA, 25 bp, Homo sapien
ctgttggcaacagcccaggaatgtg

SEQ ID NO: 2181395 - DNA, 25 bp, Homo sapien
gcaacagcccaggaatgtgtgaagt

SEQ ID NO: 2181396 - DNA, 25 bp, Homo sapien
ttggcaacagcccaggaatgtgtga

SEQ ID NO: 2181397 - DNA, 25 bp, Homo sapien
tggcaacagcccaggaatgtgtgaa

SEQ ID NO: 2181398 - DNA, 25 bp, Homo sapien
ccaagccattctttgactgctgaca

SEQ ID NO: 2181399 - DNA, 25 bp, Homo sapien
aagccattctttgactgctgacagg

SEQ ID NO: 2181400 - DNA, 25 bp, Homo sapien
cataacaaggtgttccacagtccat

SEQ ID NO: 2181401 - DNA, 25 bp, Homo sapien
aggccttccttcataacaaggtgtt

SEQ ID NO: 2181402 - DNA, 25 bp, Homo sapien
aaagatgaagcaatgttcatgttat

SEQ ID NO: 2181403 - DNA, 25 bp, Homo sapien
agaaacttgtggaacaaagatgaag

SEQ ID NO: 2181404 - DNA, 25 bp, Homo sapien
gaaacttgtggaacaaagatgaagc

SEQ ID NO: 2181405 - DNA, 25 bp, Homo sapien
cagaaacttgtggaacaaagatgaa

SEQ ID NO: 2181406 - DNA, 25 bp, Homo sapien
cgcttgagcccatgaggtggatgtt

SEQ ID NO: 2181407 - DNA, 25 bp, Homo sapien
agtgagcaaagatcgcaccattgta

SEQ ID NO: 2181408 - DNA, 25 bp, Homo sapien
ctccagcctgggcaacggagtaaga

SEQ ID NO: 2181409 - DNA, 25 bp, Homo sapien
gcagtgagcaaagatcgcaccattg

SEQ ID NO: 2181410 - DNA, 25 bp, Homo sapien
caattgtaggactaccagttgaacc

SEQ ID NO: 2181411 - DNA, 25 bp, Homo sapien
ctacctcaattgtaggactaccagt

SEQ ID NO: 2181412 - DNA, 25 bp, Homo sapien
taggactaccagttgaaccacatgc

SEQ ID NO: 2181413 - DNA, 25 bp, Homo sapien
gactaccagttgaaccacatgcttc

SEQ ID NO: 2181414 - DNA, 25 bp, Homo sapien
cagatcatagtttggcactgacctc

SEQ ID NO: 2181415 - DNA, 25 bp, Homo sapien
tggcactgacctctgattgttggct

SEQ ID NO: 2181416 - DNA, 25 bp, Homo sapien
ttgatcaagatttgccagatcatag

SEQ ID NO: 2181417 - DNA, 25 bp, Homo sapien
tctatcagctttcccggaccctctg

SEQ ID NO: 2181418 - DNA, 25 bp, Homo sapien
caccccttgtccaagatacctgcat

SEQ ID NO: 2181419 - DNA, 25 bp, Homo sapien
ggactctccatttgacctcctaaat

SEQ ID NO: 2181420 - DNA, 25 bp, Homo sapien
tgtgtccatcatcaacaccccttgt

SEQ ID NO: 2181421 - DNA, 25 bp, Homo sapien
cgtgagatccaaccactcatcaagg

SEQ ID NO: 2181422 - DNA, 25 bp, Homo sapien
gataacctgcaagtcaaactaatga

SEQ ID NO: 2181423 - DNA, 25 bp, Homo sapien
ctatgggtgtccatttagataacct

SEQ ID NO: 2181424 - DNA, 25 bp, Homo sapien
gggtacatcaattaatcagacatag

SEQ ID NO: 2181425 - DNA, 25 bp, Homo sapien
aatttgtttgttagaccagtcacca

SEQ ID NO: 2181426 - DNA, 25 bp, Homo sapien
actgacgctgcctgattgcctcaga

SEQ ID NO: 2181427 - DNA, 25 bp, Homo sapien
tgacgctgcctgattgcctcagaag

SEQ ID NO: 2181428 - DNA, 25 bp, Homo sapien
gacgctgcctgattgcctcagaagc

SEQ ID NO: 2181429 - DNA, 25 bp, Homo sapien
agactgacgctgcctgattgcctca

SEQ ID NO: 2181430 - DNA, 25 bp, Homo sapien
ggcagcccccattacttcagtcaag

SEQ ID NO: 2181431 - DNA, 25 bp, Homo sapien
agtcaagcccaaatttcatcctcgt

SEQ ID NO: 2181432 - DNA, 25 bp, Homo sapien
actgccgcaaggcttcacaggcagc

SEQ ID NO: 2181433 - DNA, 25 bp, Homo sapien
gttacctatcttggcataattttca

SEQ ID NO: 2181434 - DNA, 25 bp, Homo sapien
tactaattgtcatgcactgtccgaa

SEQ ID NO: 2181435 - DNA, 25 bp, Homo sapien
tggccagagtcatgcaacttttaag

SEQ ID NO: 2181436 - DNA, 25 bp, Homo sapien
ggctgcttgctaccgcactggaaaa

SEQ ID NO: 2181437 - DNA, 25 bp, Homo sapien
taggtctcctgaccggttggcaggt

SEQ ID NO: 2181438 - DNA, 25 bp, Homo sapien
gatgcagatgcacttcagcgatgtc

SEQ ID NO: 2181439 - DNA, 25 bp, Homo sapien
taatccccagcgagacaaaagcctg

SEQ ID NO: 2181440 - DNA, 25 bp, Homo sapien
tgtcctagtgctggaaacgctccct

SEQ ID NO: 2181441 - DNA, 25 bp, Homo sapien
taattttcagtagcaagtgggtcac

SEQ ID NO: 2181442 - DNA, 25 bp, Homo sapien
gcaagattcggctttgagaggcatc

SEQ ID NO: 2181443 - DNA, 25 bp, Homo sapien
agaggactagaaagccggatccggc

SEQ ID NO: 2181444 - DNA, 25 bp, Homo sapien
gccgccgcctttgtgagaggactag

SEQ ID NO: 2181445 - DNA, 25 bp, Homo sapien
ccgcggctaggaaatggaaacgctt

SEQ ID NO: 2181446 - DNA, 25 bp, Homo sapien
tccattgtggaataccgtgtagaat

SEQ ID NO: 2181447 - DNA, 25 bp, Homo sapien
aatgaaagccctttagtctgtactg

SEQ ID NO: 2181448 - DNA, 25 bp, Homo sapien
gacagttgatgaatgtggcttgcaa

SEQ ID NO: 2181449 - DNA, 25 bp, Homo sapien
ggaagagccgacagttgatgaatgt

SEQ ID NO: 2181450 - DNA, 25 bp, Homo sapien
aagaacttgcatgttggtgaaggaa

SEQ ID NO: 2181451 - DNA, 25 bp, Homo sapien
aaatctagagtaaaaccaagctggc

SEQ ID NO: 2181452 - DNA, 25 bp, Homo sapien
catcaaagaactactgacaacgaag

SEQ ID NO: 2181453 - DNA, 25 bp, Homo sapien
tgcaaagaggttggatcaagtttaa

SEQ ID NO: 2181454 - DNA, 25 bp, Homo sapien
tatgaaaccaataaagtcaacgtgg

SEQ ID NO: 2181455 - DNA, 25 bp, Homo sapien
tgccaaagatcttgataaagtgctg

SEQ ID NO: 2181456 - DNA, 25 bp, Homo sapien
tcaacgtggaagtacacttgccaaa

SEQ ID NO: 2181457 - DNA, 25 bp, Homo sapien
tactgaaaagtagttctgatccacc

SEQ ID NO: 2181458 - DNA, 25 bp, Homo sapien
aacaagcccacaatattctagaagc

SEQ ID NO: 2181459 - DNA, 25 bp, Homo sapien
gactgggccgtgcagtcctgtttcc

SEQ ID NO: 2181460 - DNA, 25 bp, Homo sapien
agcatgtgcccgtcccaggagccga

SEQ ID NO: 2181461 - DNA, 25 bp, Homo sapien
cttcctgatctttgtagtagttaca

SEQ ID NO: 2181462 - DNA, 25 bp, Homo sapien
cattatggcctcttgattggatgga

SEQ ID NO: 2181463 - DNA, 25 bp, Homo sapien
cagagaggaacattatggcctcttg

SEQ ID NO: 2181464 - DNA, 25 bp, Homo sapien
tcttgattggatggataaagggtcc

SEQ ID NO: 2181465 - DNA, 25 bp, Homo sapien
tggatggataaagggtccagccctg

SEQ ID NO: 2181466 - DNA, 25 bp, Homo sapien
ttgcatattaatcttggccacaggg

SEQ ID NO: 2181467 - DNA, 25 bp, Homo sapien
aagtaattgaggaagcttctccttc

SEQ ID NO: 2181468 - DNA, 25 bp, Homo sapien
gacaagggttactgctgcataagta

SEQ ID NO: 2181469 - DNA, 25 bp, Homo sapien
aactgagatgtttgcatattaatct

SEQ ID NO: 2181470 - DNA, 25 bp, Homo sapien
gactcagaagatagctcaggaggta

SEQ ID NO: 2181471 - DNA, 25 bp, Homo sapien
gactgcgccacgtgaatgtatctcc

SEQ ID NO: 2181472 - DNA, 25 bp, Homo sapien
cgcactgtgatctgactgagcttag

SEQ ID NO: 2181473 - DNA, 25 bp, Homo sapien
tgagcttaggagaattgggctcctc

SEQ ID NO: 2181474 - DNA, 25 bp, Homo sapien
tggtctcttttgttcgaagttgaac

SEQ ID NO: 2181475 - DNA, 25 bp, Homo sapien
gaggtggaacactctcatcagttac

SEQ ID NO: 2181476 - DNA, 25 bp, Homo sapien
tgtacatcacactgggaattgttgc

SEQ ID NO: 2181477 - DNA, 25 bp, Homo sapien
caatggcccagaaggttgtacatca

SEQ ID NO: 2181478 - DNA, 25 bp, Homo sapien
catcttaggagaggctcgacttgta

SEQ ID NO: 2181479 - DNA, 25 bp, Homo sapien
ctcgacttgtagagcgaggactcat

SEQ ID NO: 2181480 - DNA, 25 bp, Homo sapien
gaccctcatcttaggagaggctcga

SEQ ID NO: 2181481 - DNA, 25 bp, Homo sapien
gggtgctgaccctcatcttaggaga

SEQ ID NO: 2181482 - DNA, 25 bp, Homo sapien
gtcctaggagaagatcatgatgtga

SEQ ID NO: 2181483 - DNA, 25 bp, Homo sapien
tcctaggagaagatcatgatgtgac

SEQ ID NO: 2181484 - DNA, 25 bp, Homo sapien
ctgtcctaggagaagatcatgatgt

SEQ ID NO: 2181485 - DNA, 25 bp, Homo sapien
tgtcctaggagaagatcatgatgtg

SEQ ID NO: 2181486 - DNA, 25 bp, Homo sapien
catttgttgtcactacacagccagg

SEQ ID NO: 2181487 - DNA, 25 bp, Homo sapien
tacaaaaaccagcatagtcctttaa

SEQ ID NO: 2181488 - DNA, 25 bp, Homo sapien
cagccaggggctacaaaaaccagca

SEQ ID NO: 2181489 - DNA, 25 bp, Homo sapien
aattcggttcgtgtccttcttatca

SEQ ID NO: 2181490 - DNA, 25 bp, Homo sapien
cctagaaacaccatcaccagggtat

SEQ ID NO: 2181491 - DNA, 25 bp, Homo sapien
catcaccagggtatactatggattc

SEQ ID NO: 2181492 - DNA, 25 bp, Homo sapien
tagaaacaccatcaccagggtatac

SEQ ID NO: 2181493 - DNA, 25 bp, Homo sapien
aacaccatcaccagggtatactatg

SEQ ID NO: 2181494 - DNA, 25 bp, Homo sapien
aggccagaaagtggctgccacattc

SEQ ID NO: 2181495 - DNA, 25 bp, Homo sapien
agaaaggccagaaagtggctgccac

SEQ ID NO: 2181496 - DNA, 25 bp, Homo sapien
ggagaaaggccagaaagtggctgcc

SEQ ID NO: 2181497 - DNA, 25 bp, Homo sapien
aaaggccagaaagtggctgccacat

SEQ ID NO: 2181498 - DNA, 25 bp, Homo sapien
tccacagaggccaaacctaaaacta

SEQ ID NO: 2181499 - DNA, 25 bp, Homo sapien
tgtggtttagtgtagctcaagttat

SEQ ID NO: 2181500 - DNA, 25 bp, Homo sapien
gtgtatgtaactgtgcaattgctgc

SEQ ID NO: 2181501 - DNA, 25 bp, Homo sapien
caagaattaactaaacactgtcatg

SEQ ID NO: 2181502 - DNA, 25 bp, Homo sapien
gagactgatgtccacttagttggca

SEQ ID NO: 2181503 - DNA, 25 bp, Homo sapien
gctgtggaagagcaactcactcgga

SEQ ID NO: 2181504 - DNA, 25 bp, Homo sapien
tgtaatcagtacatggagctccaaa

SEQ ID NO: 2181505 - DNA, 25 bp, Homo sapien
cactcggacatgtagccaaaaatgg

SEQ ID NO: 2181506 - DNA, 25 bp, Homo sapien
taagaactgacatgtggataccact

SEQ ID NO: 2181507 - DNA, 25 bp, Homo sapien
gagtccaagatgataccgaagttcc

SEQ ID NO: 2181508 - DNA, 25 bp, Homo sapien
cttgaactagggttgcctcagtggc

SEQ ID NO: 2181509 - DNA, 25 bp, Homo sapien
gataccactgataggctgggaagag

SEQ ID NO: 2181510 - DNA, 25 bp, Homo sapien
catgaagaagcggtcattgtccgat

SEQ ID NO: 2181511 - DNA, 25 bp, Homo sapien
tcattgtccgatgacaatttgctaa

SEQ ID NO: 2181512 - DNA, 25 bp, Homo sapien
cggtcattgtccgatgacaatttgc

SEQ ID NO: 2181513 - DNA, 25 bp, Homo sapien
gaagcggtcattgtccgatgacaat

SEQ ID NO: 2181514 - DNA, 25 bp, Homo sapien
tttgtcgctgatctcctaaaaactg

SEQ ID NO: 2181515 - DNA, 25 bp, Homo sapien
gccttccactaaagatttgtcgctg

SEQ ID NO: 2181516 - DNA, 25 bp, Homo sapien
gaatatgccataaaacactcctaca

SEQ ID NO: 2181517 - DNA, 25 bp, Homo sapien
gagatactcagtagttacatttgcc

SEQ ID NO: 2181518 - DNA, 25 bp, Homo sapien
ctttgtgaattgctcgtgtggtggc

SEQ ID NO: 2181519 - DNA, 25 bp, Homo sapien
cctttcccatcttgttgccacctct

SEQ ID NO: 2181520 - DNA, 25 bp, Homo sapien
ttcccatcttgttgccacctctttt

SEQ ID NO: 2181521 - DNA, 25 bp, Homo sapien
gccacctcttttgttgctcttgaaa

SEQ ID NO: 2181522 - DNA, 25 bp, Homo sapien
tgccacctcttttgttgctcttgaa

SEQ ID NO: 2181523 - DNA, 25 bp, Homo sapien
gatacaataggttaatcataaagct

SEQ ID NO: 2181524 - DNA, 25 bp, Homo sapien
gagacattgatacaataggttaatc

SEQ ID NO: 2181525 - DNA, 25 bp, Homo sapien
ctgagacattgatacaataggttaa

SEQ ID NO: 2181526 - DNA, 25 bp, Homo sapien
ggttaatcataaagctaagcctgat

SEQ ID NO: 2181527 - DNA, 25 bp, Homo sapien
ctgctcatctgtgatgaactcttca

SEQ ID NO: 2181528 - DNA, 25 bp, Homo sapien
tctgctcatctgtgatgaactcttc

SEQ ID NO: 2181529 - DNA, 25 bp, Homo sapien
ggcttctaggtaatatctctcaatt

SEQ ID NO: 2181530 - DNA, 25 bp, Homo sapien
cattggcttctaggtaatatctctc

SEQ ID NO: 2181531 - DNA, 25 bp, Homo sapien
tcttcattggcttctaggtaatatc

SEQ ID NO: 2181532 - DNA, 25 bp, Homo sapien
tggcttctaggtaatatctctcaat

SEQ ID NO: 2181533 - DNA, 25 bp, Homo sapien
ttttagttgtgttgttctcaaaaca

SEQ ID NO: 2181534 - DNA, 25 bp, Homo sapien
ctctttgcagcaagatgctctttaa

SEQ ID NO: 2181535 - DNA, 25 bp, Homo sapien
tatttcgctgcaagcttttgcaatc

SEQ ID NO: 2181536 - DNA, 25 bp, Homo sapien
tgttctttatttcgctgcaagcttt

SEQ ID NO: 2181537 - DNA, 25 bp, Homo sapien
tgtattagacaaaaccggcactttg

SEQ ID NO: 2181538 - DNA, 25 bp, Homo sapien
tatggtcccataacagtgcaactaa

SEQ ID NO: 2181539 - DNA, 25 bp, Homo sapien
tacatacggacaggaagaggtgaac

SEQ ID NO: 2181540 - DNA, 25 bp, Homo sapien
tgtcaccaccaagcagagcaaagct

SEQ ID NO: 2181541 - DNA, 25 bp, Homo sapien
accacaaatagctcgtaaaacatac

SEQ ID NO: 2181542 - DNA, 25 bp, Homo sapien
ttttcataaaccacaaatagctcgt

SEQ ID NO: 2181543 - DNA, 25 bp, Homo sapien
taaaccacaaatagctcgtaaaaca

SEQ ID NO: 2181544 - DNA, 25 bp, Homo sapien
tgtaagggttgtatggttgaaaaca

SEQ ID NO: 2181545 - DNA, 25 bp, Homo sapien
atcttctagctccttggtatcaacc

SEQ ID NO: 2181546 - DNA, 25 bp, Homo sapien
caatatcttctagctccttggtatc

SEQ ID NO: 2181547 - DNA, 25 bp, Homo sapien
ctgcaatatcttctagctccttggt

SEQ ID NO: 2181548 - DNA, 25 bp, Homo sapien
tatcttctagctccttggtatcaac

SEQ ID NO: 2181549 - DNA, 25 bp, Homo sapien
atcagttacatctccctcctttgtc

SEQ ID NO: 2181550 - DNA, 25 bp, Homo sapien
ttcctgggcggccataacttgaacc

SEQ ID NO: 2181551 - DNA, 25 bp, Homo sapien
acttgaacctccaactggtccttgg

SEQ ID NO: 2181552 - DNA, 25 bp, Homo sapien
ggccataacttgaacctccaactgg

SEQ ID NO: 2181553 - DNA, 25 bp, Homo sapien
gggcggccataacttgaacctccaa

SEQ ID NO: 2181554 - DNA, 25 bp, Homo sapien
cacgggctccgtggctgactggcct

SEQ ID NO: 2181555 - DNA, 25 bp, Homo sapien
tgggaagctagaggcgacctctgaa

SEQ ID NO: 2181556 - DNA, 25 bp, Homo sapien
ggctgactggcctgggaagctagag

SEQ ID NO: 2181557 - DNA, 25 bp, Homo sapien
tgcccacgggctccgtggctgactg

SEQ ID NO: 2181558 - DNA, 25 bp, Homo sapien
ggtgagtgcaaagacacactaagga

SEQ ID NO: 2181559 - DNA, 25 bp, Homo sapien
tggtgagtgcaaagacacactaagg

SEQ ID NO: 2181560 - DNA, 25 bp, Homo sapien
tgagtgcaaagacacactaaggaca

SEQ ID NO: 2181561 - DNA, 25 bp, Homo sapien
ctggtgagtgcaaagacacactaag

SEQ ID NO: 2181562 - DNA, 25 bp, Homo sapien
agggactgcccattcgccagcctgg

SEQ ID NO: 2181563 - DNA, 25 bp, Homo sapien
cccaagtatcccgtcctgatgggca

SEQ ID NO: 2181564 - DNA, 25 bp, Homo sapien
ctgatgggcagccagacaagacgga

SEQ ID NO: 2181565 - DNA, 25 bp, Homo sapien
cagacaagacggacccacgttgacc

SEQ ID NO: 2181566 - DNA, 25 bp, Homo sapien
ctgagggagccctgatgttgctccc

SEQ ID NO: 2181567 - DNA, 25 bp, Homo sapien
gcagaggctggcaccgcgaagctcc

SEQ ID NO: 2181568 - DNA, 25 bp, Homo sapien
tctgttctcacgagagcagcagccg

SEQ ID NO: 2181569 - DNA, 25 bp, Homo sapien
tggcaccgcgaagctcctccgaggg

SEQ ID NO: 2181570 - DNA, 25 bp, Homo sapien
caaccagatgttgctggaactaact

SEQ ID NO: 2181571 - DNA, 25 bp, Homo sapien
agggcatagtctctctaacaaccag

SEQ ID NO: 2181572 - DNA, 25 bp, Homo sapien
aaggagggcatagtctctctaacaa

SEQ ID NO: 2181573 - DNA, 25 bp, Homo sapien
gacaaagagggaacagacatgtcac

SEQ ID NO: 2181574 - DNA, 25 bp, Homo sapien
tgctgaatgctgaaggacgcccaca

SEQ ID NO: 2181575 - DNA, 25 bp, Homo sapien
gattagcgctcagctgctgaatgct

SEQ ID NO: 2181576 - DNA, 25 bp, Homo sapien
tggaattgattagcgctcagctgct

SEQ ID NO: 2181577 - DNA, 25 bp, Homo sapien
tcaggagacaggatagtggaattga

SEQ ID NO: 2181578 - DNA, 25 bp, Homo sapien
ttggtcggctccctttcagataatg

SEQ ID NO: 2181579 - DNA, 25 bp, Homo sapien
cattggtcggctccctttcagataa

SEQ ID NO: 2181580 - DNA, 25 bp, Homo sapien
gggaacattggtcggctccctttca

SEQ ID NO: 2181581 - DNA, 25 bp, Homo sapien
aacattggtcggctccctttcagat

SEQ ID NO: 2181582 - DNA, 25 bp, Homo sapien
cattgagacataaaggctttgtcag

SEQ ID NO: 2181583 - DNA, 25 bp, Homo sapien
gacattgagacataaaggctttgtc

SEQ ID NO: 2181584 - DNA, 25 bp, Homo sapien
ttgagacataaaggctttgtcagaa

SEQ ID NO: 2181585 - DNA, 25 bp, Homo sapien
aaagacattgagacataaaggcttt

SEQ ID NO: 2181586 - DNA, 25 bp, Homo sapien
cctgggtggcctaacaataaaagca

SEQ ID NO: 2181587 - DNA, 25 bp, Homo sapien
ctggcttaaggggtagcagtcccaa

SEQ ID NO: 2181588 - DNA, 25 bp, Homo sapien
tacaagcctatgtcacaacaccctg

SEQ ID NO: 2181589 - DNA, 25 bp, Homo sapien
tgcatgatcaaggacgtccctgggt

SEQ ID NO: 2181590 - DNA, 25 bp, Homo sapien
tctgatgaaatgcacccaaacccaa

SEQ ID NO: 2181591 - DNA, 25 bp, Homo sapien
tgtcccattacagcttgaggaactt

SEQ ID NO: 2181592 - DNA, 25 bp, Homo sapien
tagactaatgttaggtgcactgcta

SEQ ID NO: 2181593 - DNA, 25 bp, Homo sapien
tggtgtcagttgcactagatgtacc

SEQ ID NO: 2181594 - DNA, 25 bp, Homo sapien
cctagtttttcacagtcctcattgg

SEQ ID NO: 2181595 - DNA, 25 bp, Homo sapien
tcctcatagcgtttcttcaactttc

SEQ ID NO: 2181596 - DNA, 25 bp, Homo sapien
cacagtcctcattggccgtcagtga

SEQ ID NO: 2181597 - DNA, 25 bp, Homo sapien
ttggccgtcagtgatctccaagtct

SEQ ID NO: 2181598 - DNA, 25 bp, Homo sapien
gaaggatcttctctgggtggccacc

SEQ ID NO: 2181599 - DNA, 25 bp, Homo sapien
gccaccactaccagattccatttta

SEQ ID NO: 2181600 - DNA, 25 bp, Homo sapien
aaggatcttctctgggtggccacca

SEQ ID NO: 2181601 - DNA, 25 bp, Homo sapien
ctgggtggccaccactaccagattc

SEQ ID NO: 2181602 - DNA, 25 bp, Homo sapien
gcttctaggcagtgtttatgaacag

SEQ ID NO: 2181603 - DNA, 25 bp, Homo sapien
ccaataccaacacactgaggaatag

SEQ ID NO: 2181604 - DNA, 25 bp, Homo sapien
acactgaggaatagcttctaggcag

SEQ ID NO: 2181605 - DNA, 25 bp, Homo sapien
tagcttctaggcagtgtttatgaac

SEQ ID NO: 2181606 - DNA, 25 bp, Homo sapien
gagttgggtcatggttcccataacc

SEQ ID NO: 2181607 - DNA, 25 bp, Homo sapien
catcaccatagcttgctgattcctg

SEQ ID NO: 2181608 - DNA, 25 bp, Homo sapien
ggttcccataaccatcaccatagct

SEQ ID NO: 2181609 - DNA, 25 bp, Homo sapien
ctaagatgagttgggtcatggttcc

SEQ ID NO: 2181610 - DNA, 25 bp, Homo sapien
ttctctctgcttctaaccttagaca

SEQ ID NO: 2181611 - DNA, 25 bp, Homo sapien
gagttttgacacccatgaaaccgct

SEQ ID NO: 2181612 - DNA, 25 bp, Homo sapien
tgtacagtaaatggtatccatttaa

SEQ ID NO: 2181613 - DNA, 25 bp, Homo sapien
ttctaaccttagacaaccactgatc

SEQ ID NO: 2181614 - DNA, 25 bp, Homo sapien
cccttctcaacaggtgggattatcg

SEQ ID NO: 2181615 - DNA, 25 bp, Homo sapien
caacaggtgggattatcgggattac

SEQ ID NO: 2181616 - DNA, 25 bp, Homo sapien
caggtgggattatcgggattacaat

SEQ ID NO: 2181617 - DNA, 25 bp, Homo sapien
tccatgatcccatcatttaccaggc

SEQ ID NO: 2181618 - DNA, 25 bp, Homo sapien
ctagactctgcgagctggatcagca

SEQ ID NO: 2181619 - DNA, 25 bp, Homo sapien
tttggggctgtgctactgaattgtc

SEQ ID NO: 2181620 - DNA, 25 bp, Homo sapien
ctgtgctactgaattgtcatattgc

SEQ ID NO: 2181621 - DNA, 25 bp, Homo sapien
cagctgtgcaaacactggccttttc

SEQ ID NO: 2181622 - DNA, 25 bp, Homo sapien
tacgtctggctttggattatgtcaa

SEQ ID NO: 2181623 - DNA, 25 bp, Homo sapien
agaatccaagcatctgatcccggcc

SEQ ID NO: 2181624 - DNA, 25 bp, Homo sapien
tttggaggccaaagtaggtgcatta

SEQ ID NO: 2181625 - DNA, 25 bp, Homo sapien
tatccaggccttgagcacagaatcc

SEQ ID NO: 2181626 - DNA, 25 bp, Homo sapien
taatcaggccggagttgcagtgatg

SEQ ID NO: 2181627 - DNA, 25 bp, Homo sapien
cagtgaaccggacagtcatgtgcca

SEQ ID NO: 2181628 - DNA, 25 bp, Homo sapien
tacagagttgagattgttgacccac

SEQ ID NO: 2181629 - DNA, 25 bp, Homo sapien
tactacaaaccggtgccactgggtc

SEQ ID NO: 2181630 - DNA, 25 bp, Homo sapien
tggctactgctatatagggcctgct

SEQ ID NO: 2181631 - DNA, 25 bp, Homo sapien
cctttgtcaagcaattggaggcaac

SEQ ID NO: 2181632 - DNA, 25 bp, Homo sapien
taccaagtgactcttccagatgaag

SEQ ID NO: 2181633 - DNA, 25 bp, Homo sapien
gcatttctaaggatccatggtacca

SEQ ID NO: 2181634 - DNA, 25 bp, Homo sapien
ctctttgtaattgacctgaaactga

SEQ ID NO: 2181635 - DNA, 25 bp, Homo sapien
gaaacttgattaactcaatttcctc

SEQ ID NO: 2181636 - DNA, 25 bp, Homo sapien
gtaattgacctgaaactgacttgaa

SEQ ID NO: 2181637 - DNA, 25 bp, Homo sapien
aactgacttgaattcccgaaacttg

SEQ ID NO: 2181638 - DNA, 25 bp, Homo sapien
gcttccagttgatgctaatgctacc

SEQ ID NO: 2181639 - DNA, 25 bp, Homo sapien
tgagtccatagtccattctggggtg

SEQ ID NO: 2181640 - DNA, 25 bp, Homo sapien
cttccagttgatgctaatgctacca

SEQ ID NO: 2181641 - DNA, 25 bp, Homo sapien
cattctggggtgagatctgagattc

SEQ ID NO: 2181642 - DNA, 25 bp, Homo sapien
tatcagaggtatctgaaagctccct

SEQ ID NO: 2181643 - DNA, 25 bp, Homo sapien
ctgaagaaacatggttggtagcttc

SEQ ID NO: 2181644 - DNA, 25 bp, Homo sapien
gctgctggtcatctctatcagaggt

SEQ ID NO: 2181645 - DNA, 25 bp, Homo sapien
ggttggtagcttcaaccctcaccca

SEQ ID NO: 2181646 - DNA, 25 bp, Homo sapien
taaactagaaagagcggtagcatcc

SEQ ID NO: 2181647 - DNA, 25 bp, Homo sapien
tcttgggtcgagacaaaagtgactg

SEQ ID NO: 2181648 - DNA, 25 bp, Homo sapien
aagtctaggcaggattcttgggtcg

SEQ ID NO: 2181649 - DNA, 25 bp, Homo sapien
taacagggcataaattcttcagggc

SEQ ID NO: 2181650 - DNA, 25 bp, Homo sapien
tgttattaccgataatcacacccac

SEQ ID NO: 2181651 - DNA, 25 bp, Homo sapien
aagaccaaagggacttcttacatgg

SEQ ID NO: 2181652 - DNA, 25 bp, Homo sapien
caatcacggcagaagacaaaggaag

SEQ ID NO: 2181653 - DNA, 25 bp, Homo sapien
gcagaagacaaaggaagaccaaagg

SEQ ID NO: 2181654 - DNA, 25 bp, Homo sapien
tggcaggcaagagagggagcttgtg

SEQ ID NO: 2181655 - DNA, 25 bp, Homo sapien
tccatgcaggtaaaactggcccaaa

SEQ ID NO: 2181656 - DNA, 25 bp, Homo sapien
tgtacaccagtatgttcaccaacca

SEQ ID NO: 2181657 - DNA, 25 bp, Homo sapien
gaagctaactaggagtctgtcatga

SEQ ID NO: 2181658 - DNA, 25 bp, Homo sapien
cagccttctaatcgtgtgtttggtc

SEQ ID NO: 2181659 - DNA, 25 bp, Homo sapien
ccaggctggagcaccgtaaggcaat

SEQ ID NO: 2181660 - DNA, 25 bp, Homo sapien
caggctggagcaccgtaaggcaatc

SEQ ID NO: 2181661 - DNA, 25 bp, Homo sapien
taggtatgaactgtggcccggcaga

SEQ ID NO: 2181662 - DNA, 25 bp, Homo sapien
gatcttgcgatgtgtttccggaact

SEQ ID NO: 2181663 - DNA, 25 bp, Homo sapien
tctaaaatggtgtcgacagcggcct

SEQ ID NO: 2181664 - DNA, 25 bp, Homo sapien
tgttctgaagcaggagttacacatg

SEQ ID NO: 2181665 - DNA, 25 bp, Homo sapien
ggcggcttagttcaagggccctctg

SEQ ID NO: 2181666 - DNA, 25 bp, Homo sapien
catgcttaactcaatagtactgcgg

SEQ ID NO: 2181667 - DNA, 25 bp, Homo sapien
ggagatgttcatcttctctattggt

SEQ ID NO: 2181668 - DNA, 25 bp, Homo sapien
ctctattggtttcttggcggcttag

SEQ ID NO: 2181669 - DNA, 25 bp, Homo sapien
tctcttcgacactgatgatctgcag

SEQ ID NO: 2181670 - DNA, 25 bp, Homo sapien
aagttttggtgtatccatctcttcg

SEQ ID NO: 2181671 - DNA, 25 bp, Homo sapien
ttatagactctatgctctttttgtt

SEQ ID NO: 2181672 - DNA, 25 bp, Homo sapien
ttgtaatcgagccaagaaatttgca

SEQ ID NO: 2181673 - DNA, 25 bp, Homo sapien
tataggatcaatgccgagcttctga

SEQ ID NO: 2181674 - DNA, 25 bp, Homo sapien
tgcttattacctgaatggagaagaa

SEQ ID NO: 2181675 - DNA, 25 bp, Homo sapien
aatggagaagaaaccggtatcatcc

SEQ ID NO: 2181676 - DNA, 25 bp, Homo sapien
aaccccagaacttcaaggcattgct

SEQ ID NO: 2181677 - DNA, 25 bp, Homo sapien
atgcaagatactcttcactggtgac

SEQ ID NO: 2181678 - DNA, 25 bp, Homo sapien
aatgcaagatactcttcactggtga

SEQ ID NO: 2181679 - DNA, 25 bp, Homo sapien
ttctccttgcaatagattgttcaga

SEQ ID NO: 2181680 - DNA, 25 bp, Homo sapien
attctccttgcaatagattgttcag

SEQ ID NO: 2181681 - DNA, 25 bp, Homo sapien
tctccttgcaatagattgttcagac

SEQ ID NO: 2181682 - DNA, 25 bp, Homo sapien
tatgcccagctatggcagttacctg

SEQ ID NO: 2181683 - DNA, 25 bp, Homo sapien
tttcaaaccttatgaagaccatggg

SEQ ID NO: 2181684 - DNA, 25 bp, Homo sapien
tatgccggaagatgttgtatgccca

SEQ ID NO: 2181685 - DNA, 25 bp, Homo sapien
caaggtggttttgccagtatccagt

SEQ ID NO: 2181686 - DNA, 25 bp, Homo sapien
gcaacagctttgcataacacccttg

SEQ ID NO: 2181687 - DNA, 25 bp, Homo sapien
tggagcccaagatcgcaatgttcac

SEQ ID NO: 2181688 - DNA, 25 bp, Homo sapien
ttattgtgaggaatagaacaccagc

SEQ ID NO: 2181689 - DNA, 25 bp, Homo sapien
aacctgtggagaggagcgtctgctc

SEQ ID NO: 2181690 - DNA, 25 bp, Homo sapien
tggctttgccaatgatttgagccat

SEQ ID NO: 2181691 - DNA, 25 bp, Homo sapien
ttttggctttgccaatgatttgagc

SEQ ID NO: 2181692 - DNA, 25 bp, Homo sapien
tattttggctttgccaatgatttga

SEQ ID NO: 2181693 - DNA, 25 bp, Homo sapien
cagattcttattttggctttgccaa

SEQ ID NO: 2181694 - DNA, 25 bp, Homo sapien
tatactagcagaatatgctgcctct

SEQ ID NO: 2181695 - DNA, 25 bp, Homo sapien
gcttcttccaacaggcacaaatata

SEQ ID NO: 2181696 - DNA, 25 bp, Homo sapien
ttccaataggaactaccagtccgcc

SEQ ID NO: 2181697 - DNA, 25 bp, Homo sapien
ttcaaatagcctattcatctcagca

SEQ ID NO: 2181698 - DNA, 25 bp, Homo sapien
gactgattaatccagacggccgact

SEQ ID NO: 2181699 - DNA, 25 bp, Homo sapien
aaccaaatgagtggctaaaagctcc

SEQ ID NO: 2181700 - DNA, 25 bp, Homo sapien
gaagtcgcttcacagatggcatcca

SEQ ID NO: 2181701 - DNA, 25 bp, Homo sapien
taaaagctcctagcaagttcaggcc

SEQ ID NO: 2181702 - DNA, 25 bp, Homo sapien
ctcgccttggtctggcagagactgg

SEQ ID NO: 2181703 - DNA, 25 bp, Homo sapien
actcgccttggtctggcagagactg

SEQ ID NO: 2181704 - DNA, 25 bp, Homo sapien
aactcgccttggtctggcagagact

SEQ ID NO: 2181705 - DNA, 25 bp, Homo sapien
gcttcgatgtcaggctcgatgtcaa

SEQ ID NO: 2181706 - DNA, 25 bp, Homo sapien
gcagggcttcgatgtcaggctcgat

SEQ ID NO: 2181707 - DNA, 25 bp, Homo sapien
agacagcagggcttcgatgtcaggc

SEQ ID NO: 2181708 - DNA, 25 bp, Homo sapien
tgtcaggctcgatgtcaatggtctg

SEQ ID NO: 2181709 - DNA, 25 bp, Homo sapien
accaccaggtcggacgtacttgagg

SEQ ID NO: 2181710 - DNA, 25 bp, Homo sapien
gcccttctcgaagagcatgaagttg

SEQ ID NO: 2181711 - DNA, 25 bp, Homo sapien
tcataagcgcagtggcgtcgtcgct

SEQ ID NO: 2181712 - DNA, 25 bp, Homo sapien
agggcctcccgcaggaaggcaaaga

SEQ ID NO: 2181713 - DNA, 25 bp, Homo sapien
cgaggcgccgctgcagctcgttcat

SEQ ID NO: 2181714 - DNA, 25 bp, Homo sapien
cccggggtccgaggcgccgctgcag

SEQ ID NO: 2181715 - DNA, 25 bp, Homo sapien
gcacgggaagccgagcaccaccagg

SEQ ID NO: 2181716 - DNA, 25 bp, Homo sapien
tggttgcacgggaagccgagcacca

SEQ ID NO: 2181717 - DNA, 25 bp, Homo sapien
ctgggtgtagtcccggaccgtggag

SEQ ID NO: 2181718 - DNA, 25 bp, Homo sapien
tgggtgtagtcccggaccgtggagc

SEQ ID NO: 2181719 - DNA, 25 bp, Homo sapien
gagggacgccacattctctataagt

SEQ ID NO: 2181720 - DNA, 25 bp, Homo sapien
gggacgccacattctctataagtag

SEQ ID NO: 2181721 - DNA, 25 bp, Homo sapien
tcagagggacgccacattctctata

SEQ ID NO: 2181722 - DNA, 25 bp, Homo sapien
gacgccacattctctataagtagta

SEQ ID NO: 2181723 - DNA, 25 bp, Homo sapien
cttgcaccgcagggagcccaggctc

SEQ ID NO: 2181724 - DNA, 25 bp, Homo sapien
ttgcaccgcagggagcccaggctca

SEQ ID NO: 2181725 - DNA, 25 bp, Homo sapien
tgcaccgcagggagcccaggctcac

SEQ ID NO: 2181726 - DNA, 25 bp, Homo sapien
gcgccgagaaggcatacaccgactg

SEQ ID NO: 2181727 - DNA, 25 bp, Homo sapien
cgggcgcgccgagaaggcatacacc

SEQ ID NO: 2181728 - DNA, 25 bp, Homo sapien
cgagaaggcatacaccgactgggcc

SEQ ID NO: 2181729 - DNA, 25 bp, Homo sapien
agaaggcatacaccgactgggccgc

SEQ ID NO: 2181730 - DNA, 25 bp, Homo sapien
gagaagttaccaccaaacaggcaga

SEQ ID NO: 2181731 - DNA, 25 bp, Homo sapien
gcaaaccaaagcagatcctctcgtg

SEQ ID NO: 2181732 - DNA, 25 bp, Homo sapien
gagaggagcccacttgtccatctga

SEQ ID NO: 2181733 - DNA, 25 bp, Homo sapien
taccaggttctccatccgtctgctg

SEQ ID NO: 2181734 - DNA, 25 bp, Homo sapien
taggacttgccaaaactaagaataa

SEQ ID NO: 2181735 - DNA, 25 bp, Homo sapien
ttaggacttgccaaaactaagaata

SEQ ID NO: 2181736 - DNA, 25 bp, Homo sapien
ttgtcttgacggcaccttcctttta

SEQ ID NO: 2181737 - DNA, 25 bp, Homo sapien
tcctcgtttgtcttgacggcacctt

SEQ ID NO: 2181738 - DNA, 25 bp, Homo sapien
gaaagaagttcttgacattatctgt

SEQ ID NO: 2181739 - DNA, 25 bp, Homo sapien
gtcacagtaatcgaagcatgtccgt

SEQ ID NO: 2181740 - DNA, 25 bp, Homo sapien
tttaatttgaatatcgcctccacgt

SEQ ID NO: 2181741 - DNA, 25 bp, Homo sapien
cgcctccacgttgcaatgtttccaa

SEQ ID NO: 2181742 - DNA, 25 bp, Homo sapien
gaactttctgttgtgctgagggcca

SEQ ID NO: 2181743 - DNA, 25 bp, Homo sapien
aactttctgttgtgctgagggccat

SEQ ID NO: 2181744 - DNA, 25 bp, Homo sapien
agaactttctgttgtgctgagggcc

SEQ ID NO: 2181745 - DNA, 25 bp, Homo sapien
atgtaagctgccaaagggcaaggat

SEQ ID NO: 2181746 - DNA, 25 bp, Homo sapien
tgcagcggattccaacagtccccag

SEQ ID NO: 2181747 - DNA, 25 bp, Homo sapien
ccaacagtccccaggaaagctgaag

SEQ ID NO: 2181748 - DNA, 25 bp, Homo sapien
gattccaacagtccccaggaaagct

SEQ ID NO: 2181749 - DNA, 25 bp, Homo sapien
atctctgcagcggattccaacagtc

SEQ ID NO: 2181750 - DNA, 25 bp, Homo sapien
ctgggcctgtgatacttctctctga

SEQ ID NO: 2181751 - DNA, 25 bp, Homo sapien
tgtaattctagccttaagcccttcc

SEQ ID NO: 2181752 - DNA, 25 bp, Homo sapien
tcatgtaattctagccttaagccct

SEQ ID NO: 2181753 - DNA, 25 bp, Homo sapien
tgaacatcgtattcagccaaacctt

SEQ ID NO: 2181754 - DNA, 25 bp, Homo sapien
gtgttcgtatatttgacaatgccat

SEQ ID NO: 2181755 - DNA, 25 bp, Homo sapien
gatttcatcatgtgttcgtatattt

SEQ ID NO: 2181756 - DNA, 25 bp, Homo sapien
tcatgtgttcgtatatttgacaatg

SEQ ID NO: 2181757 - DNA, 25 bp, Homo sapien
ttcatcatgtgttcgtatatttgac

SEQ ID NO: 2181758 - DNA, 25 bp, Homo sapien
gaaaaagtattggtctcatctataa

SEQ ID NO: 2181759 - DNA, 25 bp, Homo sapien
ggtgatggattccaagaaaaagtat

SEQ ID NO: 2181760 - DNA, 25 bp, Homo sapien
tcacctgaacagaggagtcctgtgg

SEQ ID NO: 2181761 - DNA, 25 bp, Homo sapien
tggcatcacctgaacagaggagtcc

SEQ ID NO: 2181762 - DNA, 25 bp, Homo sapien
ctggtggcaggactcaacggctgtc

SEQ ID NO: 2181763 - DNA, 25 bp, Homo sapien
tgttcacccacaatatacctgtgtg

SEQ ID NO: 2181764 - DNA, 25 bp, Homo sapien
gctgtcctgttgtatccccattagt

SEQ ID NO: 2181765 - DNA, 25 bp, Homo sapien
ggcttttgctgtctgttcacccaca

SEQ ID NO: 2181766 - DNA, 25 bp, Homo sapien
tgctctgcagaaatgtggttgatct

SEQ ID NO: 2181767 - DNA, 25 bp, Homo sapien
gcaaatccttgtgcactcctttttt

SEQ ID NO: 2181768 - DNA, 25 bp, Homo sapien
tgatctcgtcaaagaagaccctcat

SEQ ID NO: 2181769 - DNA, 25 bp, Homo sapien
gcagaaatgtggttgatctcgtcaa

SEQ ID NO: 2181770 - DNA, 25 bp, Homo sapien
ccctcaaattctttcgcctgaagtc

SEQ ID NO: 2181771 - DNA, 25 bp, Homo sapien
tgccccggagctaaatccccttgga

SEQ ID NO: 2181772 - DNA, 25 bp, Homo sapien
tggaatatgtcttagcaggtttgct

SEQ ID NO: 2181773 - DNA, 25 bp, Homo sapien
cgcctgaagtcttctagatgcaaga

SEQ ID NO: 2181774 - DNA, 25 bp, Homo sapien
cccagttaatctgttcccagcaggt

SEQ ID NO: 2181775 - DNA, 25 bp, Homo sapien
ctggcccagttaatctgttcccagc

SEQ ID NO: 2181776 - DNA, 25 bp, Homo sapien
tggcccagttaatctgttcccagca

SEQ ID NO: 2181777 - DNA, 25 bp, Homo sapien
agttaatctgttcccagcaggtccc

SEQ ID NO: 2181778 - DNA, 25 bp, Homo sapien
tggtctctgggttgactgattcctg

SEQ ID NO: 2181779 - DNA, 25 bp, Homo sapien
gctggtctctgggttgactgattcc

SEQ ID NO: 2181780 - DNA, 25 bp, Homo sapien
tggctggtctctgggttgactgatt

SEQ ID NO: 2181781 - DNA, 25 bp, Homo sapien
ggtctctgggttgactgattcctga

SEQ ID NO: 2181782 - DNA, 25 bp, Homo sapien
ttgaaaaggagtaatttccatgaga

SEQ ID NO: 2181783 - DNA, 25 bp, Homo sapien
gattaagaatggatgttgaaaagga

SEQ ID NO: 2181784 - DNA, 25 bp, Homo sapien
ttccatgagaagagccaagcttttc

SEQ ID NO: 2181785 - DNA, 25 bp, Homo sapien
ttcccagattaagaatggatgttga

SEQ ID NO: 2181786 - DNA, 25 bp, Homo sapien
gagctcagctctagaacagatcaat

SEQ ID NO: 2181787 - DNA, 25 bp, Homo sapien
ttttccacccctgttgactcagtgc

SEQ ID NO: 2181788 - DNA, 25 bp, Homo sapien
aactttggcacagcaatagggtggc

SEQ ID NO: 2181789 - DNA, 25 bp, Homo sapien
cacttccgttgtgaccatgggaccc

SEQ ID NO: 2181790 - DNA, 25 bp, Homo sapien
tactctccacacttgctgatgcgac

SEQ ID NO: 2181791 - DNA, 25 bp, Homo sapien
tgcgactgccaagtaaacatgcatg

SEQ ID NO: 2181792 - DNA, 25 bp, Homo sapien
catgtaagcttgtagctgaggatgg

SEQ ID NO: 2181793 - DNA, 25 bp, Homo sapien
taaacatgcatgtaagcttgtagct

SEQ ID NO: 2181794 - DNA, 25 bp, Homo sapien
cttctagccgctactgagtcagggt

SEQ ID NO: 2181795 - DNA, 25 bp, Homo sapien
gggctcttcttctagccgctactga

SEQ ID NO: 2181796 - DNA, 25 bp, Homo sapien
tcactgggtggttcacttccgaggg

SEQ ID NO: 2181797 - DNA, 25 bp, Homo sapien
caagagaacagacttcactcgtctt

SEQ ID NO: 2181798 - DNA, 25 bp, Homo sapien
cattaacggtggtgtcaatctctcc

SEQ ID NO: 2181799 - DNA, 25 bp, Homo sapien
gggatgctgtccaccattaacggtg

SEQ ID NO: 2181800 - DNA, 25 bp, Homo sapien
ggaaaaacatagttcataataacga

SEQ ID NO: 2181801 - DNA, 25 bp, Homo sapien
ccatagtcaatagagcttcgtgtca

SEQ ID NO: 2181802 - DNA, 25 bp, Homo sapien
agaggtgaacttgaagtagcattgt

SEQ ID NO: 2181803 - DNA, 25 bp, Homo sapien
ctagaggtgaacttgaagtagcatt

SEQ ID NO: 2181804 - DNA, 25 bp, Homo sapien
gaggtgaacttgaagtagcattgtc

SEQ ID NO: 2181805 - DNA, 25 bp, Homo sapien
tagaggtgaacttgaagtagcattg

SEQ ID NO: 2181806 - DNA, 25 bp, Homo sapien
aatttgttcaggacctcgctttgct

SEQ ID NO: 2181807 - DNA, 25 bp, Homo sapien
gacctcgctttgctagtgacctaca

SEQ ID NO: 2181808 - DNA, 25 bp, Homo sapien
tcaggacctcgctttgctagtgacc

SEQ ID NO: 2181809 - DNA, 25 bp, Homo sapien
gctttgctagtgacctacattcccc

SEQ ID NO: 2181810 - DNA, 25 bp, Homo sapien
tcacacaaatgaaagcaggattcgt

SEQ ID NO: 2181811 - DNA, 25 bp, Homo sapien
catttccaaatgtgaggcgtaggct

SEQ ID NO: 2181812 - DNA, 25 bp, Homo sapien
gaaaacgatgaacttctgggatgag

SEQ ID NO: 2181813 - DNA, 25 bp, Homo sapien
gcgtaggctattcctctgagtctca

SEQ ID NO: 2181814 - DNA, 25 bp, Homo sapien
ggtttccagcattttgaaggcagct

SEQ ID NO: 2181815 - DNA, 25 bp, Homo sapien
gcagctttgaatacctctggatatt

SEQ ID NO: 2181816 - DNA, 25 bp, Homo sapien
tgaatacctctggatattttatagg

SEQ ID NO: 2181817 - DNA, 25 bp, Homo sapien
ttgaaggcagctttgaatacctctg

SEQ ID NO: 2181818 - DNA, 25 bp, Homo sapien
catgttgtaccccatttcctccacc

SEQ ID NO: 2181819 - DNA, 25 bp, Homo sapien
taaaagcatgttgtaccccatttcc

SEQ ID NO: 2181820 - DNA, 25 bp, Homo sapien
agcatgttgtaccccatttcctcca

SEQ ID NO: 2181821 - DNA, 25 bp, Homo sapien
aaagcatgttgtaccccatttcctc

SEQ ID NO: 2181822 - DNA, 25 bp, Homo sapien
catctctagggctcctaacggtagg

SEQ ID NO: 2181823 - DNA, 25 bp, Homo sapien
ttataaactgacaaccaaagtggca

SEQ ID NO: 2181824 - DNA, 25 bp, Homo sapien
aatgagtgtctccagttgcctaagc

SEQ ID NO: 2181825 - DNA, 25 bp, Homo sapien
taacggtaggtccacaggtatggca

SEQ ID NO: 2181826 - DNA, 25 bp, Homo sapien
cactctcaatagccagcaacacact

SEQ ID NO: 2181827 - DNA, 25 bp, Homo sapien
actctcaatagccagcaacacactg

SEQ ID NO: 2181828 - DNA, 25 bp, Homo sapien
tcactctcaatagccagcaacacac

SEQ ID NO: 2181829 - DNA, 25 bp, Homo sapien
ctctcaatagccagcaacacactga

SEQ ID NO: 2181830 - DNA, 25 bp, Homo sapien
tatgcgtgtcggtgggtgggttctg

SEQ ID NO: 2181831 - DNA, 25 bp, Homo sapien
tctgcacgcagacccgtgggtgcgt

SEQ ID NO: 2181832 - DNA, 25 bp, Homo sapien
tgatggtctgcagacctgctgtagg

SEQ ID NO: 2181833 - DNA, 25 bp, Homo sapien
tggctgcgtccggagggttgcagga

SEQ ID NO: 2181834 - DNA, 25 bp, Homo sapien
tgatgaatgtgaacggctttccact

SEQ ID NO: 2181835 - DNA, 25 bp, Homo sapien
ttctctcagagttccagcagtgccc

SEQ ID NO: 2181836 - DNA, 25 bp, Homo sapien
cggctttccacttgcatcagttttt

SEQ ID NO: 2181837 - DNA, 25 bp, Homo sapien
cttctctcagagttccagcagtgcc

SEQ ID NO: 2181838 - DNA, 25 bp, Homo sapien
ttcacagaacaccatcagacgtggc

SEQ ID NO: 2181839 - DNA, 25 bp, Homo sapien
caagactccttcgtaatcacgtggg

SEQ ID NO: 2181840 - DNA, 25 bp, Homo sapien
tcaggttggtttagacagaatcccc

SEQ ID NO: 2181841 - DNA, 25 bp, Homo sapien
tggtgctgcgtggaacataaatact

SEQ ID NO: 2181842 - DNA, 25 bp, Homo sapien
ttgacgttgtcccagtcccggtgat

SEQ ID NO: 2181843 - DNA, 25 bp, Homo sapien
aaaggcgagcccttattcccagcgg

SEQ ID NO: 2181844 - DNA, 25 bp, Homo sapien
tgcgcctgcgcttttcggtgagtca

SEQ ID NO: 2181845 - DNA, 25 bp, Homo sapien
gatcggaagttctccgtgggcactg

SEQ ID NO: 2181846 - DNA, 25 bp, Homo sapien
tagcggcaggctttgcatgttgctc

SEQ ID NO: 2181847 - DNA, 25 bp, Homo sapien
ggcaggctttgcatgttgctcgacc

SEQ ID NO: 2181848 - DNA, 25 bp, Homo sapien
ggctttgcatgttgctcgaccccac

SEQ ID NO: 2181849 - DNA, 25 bp, Homo sapien
caggctttgcatgttgctcgacccc

SEQ ID NO: 2181850 - DNA, 25 bp, Homo sapien
gaaactgccactggcattctggaca

SEQ ID NO: 2181851 - DNA, 25 bp, Homo sapien
tagcaccaatggtggtcactagata

SEQ ID NO: 2181852 - DNA, 25 bp, Homo sapien
cactggcattctggacactagcacc

SEQ ID NO: 2181853 - DNA, 25 bp, Homo sapien
tctggacactagcaccaatggtggt

SEQ ID NO: 2181854 - DNA, 25 bp, Homo sapien
tgtgccagaatgaaccctgaactaa

SEQ ID NO: 2181855 - DNA, 25 bp, Homo sapien
agcatctctttgttgcttgcccaag

SEQ ID NO: 2181856 - DNA, 25 bp, Homo sapien
tctgattggctagtcttgggtctcg

SEQ ID NO: 2181857 - DNA, 25 bp, Homo sapien
tcagggtactggaagagcaagtgtc

SEQ ID NO: 2181858 - DNA, 25 bp, Homo sapien
tctgctgggtgcaattccttaggaa

SEQ ID NO: 2181859 - DNA, 25 bp, Homo sapien
tgcaaatcgtccctccagctccact

SEQ ID NO: 2181860 - DNA, 25 bp, Homo sapien
tttcctgtgcaaatcgtccctccag

SEQ ID NO: 2181861 - DNA, 25 bp, Homo sapien
tgctgggtgcaattccttaggaagt

SEQ ID NO: 2181862 - DNA, 25 bp, Homo sapien
ggaatctacagcctttcagggaccc

SEQ ID NO: 2181863 - DNA, 25 bp, Homo sapien
catggaatctacagcctttcaggga

SEQ ID NO: 2181864 - DNA, 25 bp, Homo sapien
ggtcatggaatctacagcctttcag

SEQ ID NO: 2181865 - DNA, 25 bp, Homo sapien
atgtgggtcatggaatctacagcct

SEQ ID NO: 2181866 - DNA, 25 bp, Homo sapien
tgtagagctggtacccattagacat

SEQ ID NO: 2181867 - DNA, 25 bp, Homo sapien
tcttcctgcacactaagtatggtat

SEQ ID NO: 2181868 - DNA, 25 bp, Homo sapien
ggcaggtcttgcctccaagttggcc

SEQ ID NO: 2181869 - DNA, 25 bp, Homo sapien
gttggcctattcctatggtatttcc

SEQ ID NO: 2181870 - DNA, 25 bp, Homo sapien
tccagcagaatcagactttagtgag

SEQ ID NO: 2181871 - DNA, 25 bp, Homo sapien
cagcagaatcagactttagtgaggg

SEQ ID NO: 2181872 - DNA, 25 bp, Homo sapien
cagaatcagactttagtgagggctg

SEQ ID NO: 2181873 - DNA, 25 bp, Homo sapien
ttcccctgggtcaaatctccctcca

SEQ ID NO: 2181874 - DNA, 25 bp, Homo sapien
gagatggtgggcagaatcccttgca

SEQ ID NO: 2181875 - DNA, 25 bp, Homo sapien
tgtaccatatacctctcattttgtg

SEQ ID NO: 2181876 - DNA, 25 bp, Homo sapien
gcactattttaaggtgttcttcgat

SEQ ID NO: 2181877 - DNA, 25 bp, Homo sapien
tcttcgatttttggttgagtgtgaa

SEQ ID NO: 2181878 - DNA, 25 bp, Homo sapien
caccatgcaagttctcacacaatat

SEQ ID NO: 2181879 - DNA, 25 bp, Homo sapien
caatatccgtgtcttgtagagtagt

SEQ ID NO: 2181880 - DNA, 25 bp, Homo sapien
tcttgtagagtagtgaagtgtttgt

SEQ ID NO: 2181881 - DNA, 25 bp, Homo sapien
tgcaagttctcacacaatatccgtg

SEQ ID NO: 2181882 - DNA, 25 bp, Homo sapien
gctaacatacatgtgctcaggagag

SEQ ID NO: 2181883 - DNA, 25 bp, Homo sapien
gcaagatgacaaaactcggtgtacg

SEQ ID NO: 2181884 - DNA, 25 bp, Homo sapien
catgggtaatagcatgggcagagca

SEQ ID NO: 2181885 - DNA, 25 bp, Homo sapien
tcctgtgcagcctaccttggaggtc

SEQ ID NO: 2181886 - DNA, 25 bp, Homo sapien
cagaggttacggtgaaacaactgcc

SEQ ID NO: 2181887 - DNA, 25 bp, Homo sapien
gatcaacctatctgaattgggtaag

SEQ ID NO: 2181888 - DNA, 25 bp, Homo sapien
taatgtcaacgtatgtgctatcaca

SEQ ID NO: 2181889 - DNA, 25 bp, Homo sapien
ggtgtatcacctaaaagactgaata

SEQ ID NO: 2181890 - DNA, 25 bp, Homo sapien
aaaatatttcatggttgggcacggt

SEQ ID NO: 2181891 - DNA, 25 bp, Homo sapien
agtaaaaatatttcatggccgggcg

SEQ ID NO: 2181892 - DNA, 25 bp, Homo sapien
agcgagcttattcccaatttttaag

SEQ ID NO: 2181893 - DNA, 25 bp, Homo sapien
ctacagcctgcacaacaggagcaag

SEQ ID NO: 2181894 - DNA, 25 bp, Homo sapien
ttcacaaggaaataccaattgatct

SEQ ID NO: 2181895 - DNA, 25 bp, Homo sapien
ctattgatacgtgacatgagacaga

SEQ ID NO: 2181896 - DNA, 25 bp, Homo sapien
aaacatgattattgataatgaactc

SEQ ID NO: 2181897 - DNA, 25 bp, Homo sapien
atgaactctttataaataacactgt

SEQ ID NO: 2181898 - DNA, 25 bp, Homo sapien
tctgtcaaatgcacttgatcgaata

SEQ ID NO: 2181899 - DNA, 25 bp, Homo sapien
taggagaattgggttcataaaatgg

SEQ ID NO: 2181900 - DNA, 25 bp, Homo sapien
ttgggttcataaaatggattcattg

SEQ ID NO: 2181901 - DNA, 25 bp, Homo sapien
cacttgatcgaataggagaattggg

SEQ ID NO: 2181902 - DNA, 25 bp, Homo sapien
aaaatcaagaaatgcaagtggcgcc

SEQ ID NO: 2181903 - DNA, 25 bp, Homo sapien
taagggagttacttcaataggccag

SEQ ID NO: 2181904 - DNA, 25 bp, Homo sapien
gcagtgtaaccatgacgtcctatta

SEQ ID NO: 2181905 - DNA, 25 bp, Homo sapien
aagtggcgccattcttcttgagtgg

SEQ ID NO: 2181906 - DNA, 25 bp, Homo sapien
gtcttatgtcatgaagcataataaa

SEQ ID NO: 2181907 - DNA, 25 bp, Homo sapien
gtgaaataattaaggcataatcttt

SEQ ID NO: 2181908 - DNA, 25 bp, Homo sapien
caaaccactcgttgaacttgtccac

SEQ ID NO: 2181909 - DNA, 25 bp, Homo sapien
gacacaaaccactcgttgaacttgt

SEQ ID NO: 2181910 - DNA, 25 bp, Homo sapien
cactcgttgaacttgtccacagttt

SEQ ID NO: 2181911 - DNA, 25 bp, Homo sapien
aaccactcgttgaacttgtccacag

SEQ ID NO: 2181912 - DNA, 25 bp, Homo sapien
gttctcatctacgaggtcgagagca

SEQ ID NO: 2181913 - DNA, 25 bp, Homo sapien
agcatgagctatgaactggttcaga

SEQ ID NO: 2181914 - DNA, 25 bp, Homo sapien
tcatctacgaggtcgagagcagcat

SEQ ID NO: 2181915 - DNA, 25 bp, Homo sapien
actggttcagatgacgatggtcgtc

SEQ ID NO: 2181916 - DNA, 25 bp, Homo sapien
caaaaactggattatcatggtggcc

SEQ ID NO: 2181917 - DNA, 25 bp, Homo sapien
actggattatcatggtggccaacaa

SEQ ID NO: 2181918 - DNA, 25 bp, Homo sapien
aattacaaagtagaagctcccagac

SEQ ID NO: 2181919 - DNA, 25 bp, Homo sapien
catttcaaaaactggattatcatgg

SEQ ID NO: 2181920 - DNA, 25 bp, Homo sapien
caaagacaacattctcatgatctga

SEQ ID NO: 2181921 - DNA, 25 bp, Homo sapien
gaagatacgtagcttctggaataaa

SEQ ID NO: 2181922 - DNA, 25 bp, Homo sapien
agcttggcagtttccagtatactag

SEQ ID NO: 2181923 - DNA, 25 bp, Homo sapien
tgactaatgggaagtgtagaattct

SEQ ID NO: 2181924 - DNA, 25 bp, Homo sapien
tgtctggtagagtaagctgggcttc

SEQ ID NO: 2181925 - DNA, 25 bp, Homo sapien
gactggaccagttagtagcagcacg

SEQ ID NO: 2181926 - DNA, 25 bp, Homo sapien
gaccagttagtagcagcacggacac

SEQ ID NO: 2181927 - DNA, 25 bp, Homo sapien
tctggtagagtaagctgggcttcat

SEQ ID NO: 2181928 - DNA, 25 bp, Homo sapien
agtttaacatgttgggcccggtgca

SEQ ID NO: 2181929 - DNA, 25 bp, Homo sapien
tgggagaccgtatgcacactgggat

SEQ ID NO: 2181930 - DNA, 25 bp, Homo sapien
cattttgcgaccatctaaggctgct

SEQ ID NO: 2181931 - DNA, 25 bp, Homo sapien
taaggctgctctcacgcttcaatgg

SEQ ID NO: 2181932 - DNA, 25 bp, Homo sapien
ggaaagccacgaatgggcaagcagc

SEQ ID NO: 2181933 - DNA, 25 bp, Homo sapien
agcagcatggcgctaagtcagcagg

SEQ ID NO: 2181934 - DNA, 25 bp, Homo sapien
ccctatatggaaagccacgaatggg

SEQ ID NO: 2181935 - DNA, 25 bp, Homo sapien
tatggaaagccacgaatgggcaagc

SEQ ID NO: 2181936 - DNA, 25 bp, Homo sapien
tgtatggtctgctcgattttcccat

SEQ ID NO: 2181937 - DNA, 25 bp, Homo sapien
tgtatgtatggtctgctcgattttc

SEQ ID NO: 2181938 - DNA, 25 bp, Homo sapien
ctgtgtatgtatggtctgctcgatt

SEQ ID NO: 2181939 - DNA, 25 bp, Homo sapien
gactgtgtatgtatggtctgctcga

SEQ ID NO: 2181940 - DNA, 25 bp, Homo sapien
ccttaaataggggcctttgaagcat

SEQ ID NO: 2181941 - DNA, 25 bp, Homo sapien
gccttaaataggggcctttgaagca

SEQ ID NO: 2181942 - DNA, 25 bp, Homo sapien
catcagttaacaggcaaaataacca

SEQ ID NO: 2181943 - DNA, 25 bp, Homo sapien
aacaggccaaattgtaaaagaccat

SEQ ID NO: 2181944 - DNA, 25 bp, Homo sapien
ctgcatcagttaacaggcaaaataa

SEQ ID NO: 2181945 - DNA, 25 bp, Homo sapien
cagttaacaggcaaaataaccagcg

SEQ ID NO: 2181946 - DNA, 25 bp, Homo sapien
gagggatggctcatagccgacttga

SEQ ID NO: 2181947 - DNA, 25 bp, Homo sapien
gtatacctagagctacaacagtgcc

SEQ ID NO: 2181948 - DNA, 25 bp, Homo sapien
cgacttgagtgtcaatactcggaga

SEQ ID NO: 2181949 - DNA, 25 bp, Homo sapien
cagtcttgctagaatgttgccctcc

SEQ ID NO: 2181950 - DNA, 25 bp, Homo sapien
tttagctctgtggatctcaacccgg

SEQ ID NO: 2181951 - DNA, 25 bp, Homo sapien
gagcgatcttgcttccaagaggaca

SEQ ID NO: 2181952 - DNA, 25 bp, Homo sapien
tggtactctaaaacgtttagctctg

SEQ ID NO: 2181953 - DNA, 25 bp, Homo sapien
cctcacagcacacaatggttggtac

SEQ ID NO: 2181954 - DNA, 25 bp, Homo sapien
cgacaacggaaacgcaatgtcagtt

SEQ ID NO: 2181955 - DNA, 25 bp, Homo sapien
gaaacgcaatgtcagtttccgcgga

SEQ ID NO: 2181956 - DNA, 25 bp, Homo sapien
ggaggccgacaacggaaacgcaatg

SEQ ID NO: 2181957 - DNA, 25 bp, Homo sapien
tcagtttccgcggaagagacccgcg

SEQ ID NO: 2181958 - DNA, 25 bp, Homo sapien
gggaccaaccacaggtgcatgccat

SEQ ID NO: 2181959 - DNA, 25 bp, Homo sapien
ctcactgcaatctccctcctcctcc

SEQ ID NO: 2181960 - DNA, 25 bp, Homo sapien
tcctcccaggtccaagtgattcatc

SEQ ID NO: 2181961 - DNA, 25 bp, Homo sapien
cacacccagctagtttttttgtatt

SEQ ID NO: 2181962 - DNA, 25 bp, Homo sapien
tcattactcttagtacatccacaac

SEQ ID NO: 2181963 - DNA, 25 bp, Homo sapien
tagtacatccacaactatttccacc

SEQ ID NO: 2181964 - DNA, 25 bp, Homo sapien
ttatttcattactcttagtacatcc

SEQ ID NO: 2181965 - DNA, 25 bp, Homo sapien
tactcttagtacatccacaactatt

SEQ ID NO: 2181966 - DNA, 25 bp, Homo sapien
gtaaaattaggctttagacactgcc

SEQ ID NO: 2181967 - DNA, 25 bp, Homo sapien
ttgaatagaactacaggaagccctt

SEQ ID NO: 2181968 - DNA, 25 bp, Homo sapien
gaatagttaaatctgtcatgcaaca

SEQ ID NO: 2181969 - DNA, 25 bp, Homo sapien
gaagcccttggcactgatagaaaat

SEQ ID NO: 2181970 - DNA, 25 bp, Homo sapien
tagttaaccctatagtaagcagccc

SEQ ID NO: 2181971 - DNA, 25 bp, Homo sapien
gagctgtaaatacgtcggccgaaac

SEQ ID NO: 2181972 - DNA, 25 bp, Homo sapien
tgtaaacttcgtatccagaccactg

SEQ ID NO: 2181973 - DNA, 25 bp, Homo sapien
tccttattaaggagtcacaggtccc

SEQ ID NO: 2181974 - DNA, 25 bp, Homo sapien
tttgctcgcatcctttaagtaagcc

SEQ ID NO: 2181975 - DNA, 25 bp, Homo sapien
gagttgttcttttgaccgagactgg

SEQ ID NO: 2181976 - DNA, 25 bp, Homo sapien
tcttttgaccgagactggatatctt

SEQ ID NO: 2181977 - DNA, 25 bp, Homo sapien
gcctgcattttgctcgcatccttta

SEQ ID NO: 2181978 - DNA, 25 bp, Homo sapien
actagttggcttcgcattaaaaggc

SEQ ID NO: 2181979 - DNA, 25 bp, Homo sapien
caaaaatgaaatacgagagggtgct

SEQ ID NO: 2181980 - DNA, 25 bp, Homo sapien
gactaatgcgaaagttcgggagcac

SEQ ID NO: 2181981 - DNA, 25 bp, Homo sapien
tgtcagatcctgaaagcatgctcta

SEQ ID NO: 2181982 - DNA, 25 bp, Homo sapien
cttgagaactagctatgaggaaaca

SEQ ID NO: 2181983 - DNA, 25 bp, Homo sapien
tctttacacttgatgcggcaaacac

SEQ ID NO: 2181984 - DNA, 25 bp, Homo sapien
cagtgatatttcatgctacagagca

SEQ ID NO: 2181985 - DNA, 25 bp, Homo sapien
taccaattttgtgggctctaacaga

SEQ ID NO: 2181986 - DNA, 25 bp, Homo sapien
taaacttcaaaaccgcatagttata

SEQ ID NO: 2181987 - DNA, 25 bp, Homo sapien
ttagaatttagtgcagcaatcttcc

SEQ ID NO: 2181988 - DNA, 25 bp, Homo sapien
tatgtagtagccatcatgtagatca

SEQ ID NO: 2181989 - DNA, 25 bp, Homo sapien
tgcagcaatcttcccgactcttaaa

SEQ ID NO: 2181990 - DNA, 25 bp, Homo sapien
gaggctgaacaaggcaatactctgc

SEQ ID NO: 2181991 - DNA, 25 bp, Homo sapien
catgacacttctaaacttgggtggg

SEQ ID NO: 2181992 - DNA, 25 bp, Homo sapien
aatacttgaggcacttctttcgcag

SEQ ID NO: 2181993 - DNA, 25 bp, Homo sapien
cagagcggtgaaagttgagttgccc

SEQ ID NO: 2181994 - DNA, 25 bp, Homo sapien
tcattcaggcatagggatagagcta

SEQ ID NO: 2181995 - DNA, 25 bp, Homo sapien
caggcgccagttaaccaaggttgag

SEQ ID NO: 2181996 - DNA, 25 bp, Homo sapien
gaaatgggtaatgcctcacgtgagc

SEQ ID NO: 2181997 - DNA, 25 bp, Homo sapien
tttcccctaggagcagtggtccagc

SEQ ID NO: 2181998 - DNA, 25 bp, Homo sapien
tgaacaggtgataggacatgtagaa

SEQ ID NO: 2181999 - DNA, 25 bp, Homo sapien
aatgaacaggtgataggacatgtag

SEQ ID NO: 2182000 - DNA, 25 bp, Homo sapien
caatgaacaggtgataggacatgta

SEQ ID NO: 2182001 - DNA, 25 bp, Homo sapien
acaatgaacaggtgataggacatgt

SEQ ID NO: 2182002 - DNA, 25 bp, Homo sapien
tggcctcatggtggaatcacccgag

SEQ ID NO: 2182003 - DNA, 25 bp, Homo sapien
gctttaaaaactttctgatgcccag

SEQ ID NO: 2182004 - DNA, 25 bp, Homo sapien
tgaaatggcctacactcattgtggg

SEQ ID NO: 2182005 - DNA, 25 bp, Homo sapien
ctacaaaagaacagggcatcaacat

SEQ ID NO: 2182006 - DNA, 25 bp, Homo sapien
cagggcagagccacatatttttccg

SEQ ID NO: 2182007 - DNA, 25 bp, Homo sapien
agggcagagccacatatttttccgg

SEQ ID NO: 2182008 - DNA, 25 bp, Homo sapien
gctggagtggagtgctgcaatattg

SEQ ID NO: 2182009 - DNA, 25 bp, Homo sapien
ctggagtggagtgctgcaatattgg

SEQ ID NO: 2182010 - DNA, 25 bp, Homo sapien
ttggactgaaaatcaaattggtttg

SEQ ID NO: 2182011 - DNA, 25 bp, Homo sapien
gaaaatatttttggactgaaaatca

SEQ ID NO: 2182012 - DNA, 25 bp, Homo sapien
gacttcacaagttgaccatatgttg

SEQ ID NO: 2182013 - DNA, 25 bp, Homo sapien
tcccgttggtctgcggtgacttgat

SEQ ID NO: 2182014 - DNA, 25 bp, Homo sapien
ttgtcggatatccacacagatctgc

SEQ ID NO: 2182015 - DNA, 25 bp, Homo sapien
ttgtagaacataaacacgggcaccg

SEQ ID NO: 2182016 - DNA, 25 bp, Homo sapien
cactccaagcacataggtgaggaaa

SEQ ID NO: 2182017 - DNA, 25 bp, Homo sapien
tcgccccggcattggtagcaagaag

SEQ ID NO: 2182018 - DNA, 25 bp, Homo sapien
gatctagaattggagtgcccgaagc

SEQ ID NO: 2182019 - DNA, 25 bp, Homo sapien
ggaagtaagagccagccacattccc

SEQ ID NO: 2182020 - DNA, 25 bp, Homo sapien
tccccagagctagaggatctagaat

SEQ ID NO: 2182021 - DNA, 25 bp, Homo sapien
cacctcctgatggtcacaatgccag

SEQ ID NO: 2182022 - DNA, 25 bp, Homo sapien
ggaaactgcagaaacgagacacttt

SEQ ID NO: 2182023 - DNA, 25 bp, Homo sapien
aactgcagaaacgagacactttccc

SEQ ID NO: 2182024 - DNA, 25 bp, Homo sapien
gaaactgcagaaacgagacactttc

SEQ ID NO: 2182025 - DNA, 25 bp, Homo sapien
tctgtcctgtttctgtccccagcat

SEQ ID NO: 2182026 - DNA, 25 bp, Homo sapien
acaccctccaaggcaggtcagcatt

SEQ ID NO: 2182027 - DNA, 25 bp, Homo sapien
ctccaaggcaggtcagcattgtgat

SEQ ID NO: 2182028 - DNA, 25 bp, Homo sapien
agccctgccccgtcacctgcatctt

SEQ ID NO: 2182029 - DNA, 25 bp, Homo sapien
cattccactgatgcatcggccacaa

SEQ ID NO: 2182030 - DNA, 25 bp, Homo sapien
tgatgcatcggccacaagcggttgt

SEQ ID NO: 2182031 - DNA, 25 bp, Homo sapien
tccactgatgcatcggccacaagcg

SEQ ID NO: 2182032 - DNA, 25 bp, Homo sapien
catcggccacaagcggttgttttaa

SEQ ID NO: 2182033 - DNA, 25 bp, Homo sapien
cactgcacttgtggtgtaaaagcct

SEQ ID NO: 2182034 - DNA, 25 bp, Homo sapien
aaaggacgcaattccatagatgaca

SEQ ID NO: 2182035 - DNA, 25 bp, Homo sapien
tagatgacatactgcatcagttgta

SEQ ID NO: 2182036 - DNA, 25 bp, Homo sapien
tctgccaacagaatgatcccataca

SEQ ID NO: 2182037 - DNA, 25 bp, Homo sapien
caggcattgaggagttaagctcctc

SEQ ID NO: 2182038 - DNA, 25 bp, Homo sapien
gcggcaagggttagaatcctcattt

SEQ ID NO: 2182039 - DNA, 25 bp, Homo sapien
cggaggatacacagttagtggcaaa

SEQ ID NO: 2182040 - DNA, 25 bp, Homo sapien
tcctgggcggcaagggttagaatcc

SEQ ID NO: 2182041 - DNA, 25 bp, Homo sapien
ttcagtctggtgaagaagtttctta

SEQ ID NO: 2182042 - DNA, 25 bp, Homo sapien
gtttcttataatcataagacacact

SEQ ID NO: 2182043 - DNA, 25 bp, Homo sapien
ggaggtcatttgtgaacagataaga

SEQ ID NO: 2182044 - DNA, 25 bp, Homo sapien
gttcatttctttggaggtcatttgt

SEQ ID NO: 2182045 - DNA, 25 bp, Homo sapien
gacacttgatgcagcattcaaagca

SEQ ID NO: 2182046 - DNA, 25 bp, Homo sapien
aggcatggtcactggcgttggtgga

SEQ ID NO: 2182047 - DNA, 25 bp, Homo sapien
agaatcgccacggtgcctgcgagag

SEQ ID NO: 2182048 - DNA, 25 bp, Homo sapien
gcagaataaggccaccccggagaag

SEQ ID NO: 2182049 - DNA, 25 bp, Homo sapien
catattcgatggtgtgtgatgtttt

SEQ ID NO: 2182050 - DNA, 25 bp, Homo sapien
acatgaaaatttgagaagcccattt

SEQ ID NO: 2182051 - DNA, 25 bp, Homo sapien
ggcatcttcccggtctcaggtgtgg

SEQ ID NO: 2182052 - DNA, 25 bp, Homo sapien
gaagtgcctgctttcatattcgatg

SEQ ID NO: 2182053 - DNA, 25 bp, Homo sapien
accttttgtcctcaggcttgtggat

SEQ ID NO: 2182054 - DNA, 25 bp, Homo sapien
gctgtgagttcataatggccaagtg

SEQ ID NO: 2182055 - DNA, 25 bp, Homo sapien
ggctattttgtctccagtatcccta

SEQ ID NO: 2182056 - DNA, 25 bp, Homo sapien
gaaccttttgtgcagaacaacagaa

SEQ ID NO: 2182057 - DNA, 25 bp, Homo sapien
tcccaggacttatagctacaggtgt

SEQ ID NO: 2182058 - DNA, 25 bp, Homo sapien
aaatctcagggactttacggcatga

SEQ ID NO: 2182059 - DNA, 25 bp, Homo sapien
ccagaggtggaatggtacacgcaga

SEQ ID NO: 2182060 - DNA, 25 bp, Homo sapien
ggagaagacctcgaacttagtggcc

SEQ ID NO: 2182061 - DNA, 25 bp, Homo sapien
ctttgagcctgggtacatccagtgg

SEQ ID NO: 2182062 - DNA, 25 bp, Homo sapien
tggcacgggatggtactggtggttc

SEQ ID NO: 2182063 - DNA, 25 bp, Homo sapien
atccagtggtacctgccaatttcca

SEQ ID NO: 2182064 - DNA, 25 bp, Homo sapien
cccagggttggcacgggatggtact

SEQ ID NO: 2182065 - DNA, 25 bp, Homo sapien
gctgaaactcccaggaaagatccca

SEQ ID NO: 2182066 - DNA, 25 bp, Homo sapien
caatagctgggttgtgttgtcccgc

SEQ ID NO: 2182067 - DNA, 25 bp, Homo sapien
gaattttggtatctggtagcatgct

SEQ ID NO: 2182068 - DNA, 25 bp, Homo sapien
gtagcatgctgtgatgaaaactatc

SEQ ID NO: 2182069 - DNA, 25 bp, Homo sapien
tgcagattagataagccaccctcca

SEQ ID NO: 2182070 - DNA, 25 bp, Homo sapien
catatacgggttgtcagggatgtac

SEQ ID NO: 2182071 - DNA, 25 bp, Homo sapien
caatcacgcagaaacatttgtggct

SEQ ID NO: 2182072 - DNA, 25 bp, Homo sapien
caacccctcttgctgtagatcagga

SEQ ID NO: 2182073 - DNA, 25 bp, Homo sapien
cagtattttcctcggctgcagtttc

SEQ ID NO: 2182074 - DNA, 25 bp, Homo sapien
tcagtattttcctcggctgcagttt

SEQ ID NO: 2182075 - DNA, 25 bp, Homo sapien
ttgttcagtattttcctcggctgca

SEQ ID NO: 2182076 - DNA, 25 bp, Homo sapien
gttcagtattttcctcggctgcagt

SEQ ID NO: 2182077 - DNA, 25 bp, Homo sapien
cgtcaccgaggatcccagttagaaa

SEQ ID NO: 2182078 - DNA, 25 bp, Homo sapien
cagtagattacagtcccttccaaga

SEQ ID NO: 2182079 - DNA, 25 bp, Homo sapien
tatttacacccgtctgattgagagg

SEQ ID NO: 2182080 - DNA, 25 bp, Homo sapien
caatttcgctctgcctactggtcca

SEQ ID NO: 2182081 - DNA, 25 bp, Homo sapien
ctcaatgcggctccagtgggagttg

SEQ ID NO: 2182082 - DNA, 25 bp, Homo sapien
tgggggagaaggacctgctccccac

SEQ ID NO: 2182083 - DNA, 25 bp, Homo sapien
gtgggggagaaggacctgctcccca

SEQ ID NO: 2182084 - DNA, 25 bp, Homo sapien
cggctccagtgggagttgggggtag

SEQ ID NO: 2182085 - DNA, 25 bp, Homo sapien
tgctctctttcttaagatctcaatc

SEQ ID NO: 2182086 - DNA, 25 bp, Homo sapien
tctctttcttaagatctcaatctcg

SEQ ID NO: 2182087 - DNA, 25 bp, Homo sapien
ctttcttaagatctcaatctcgatc

SEQ ID NO: 2182088 - DNA, 25 bp, Homo sapien
cttaagatctcaatctcgatctctc

SEQ ID NO: 2182089 - DNA, 25 bp, Homo sapien
ttatgataccatgtgaccttcctga

SEQ ID NO: 2182090 - DNA, 25 bp, Homo sapien
ataagagaacttcccccataaggct

SEQ ID NO: 2182091 - DNA, 25 bp, Homo sapien
tccaatgcttaccagccttatgata

SEQ ID NO: 2182092 - DNA, 25 bp, Homo sapien
ttaggagtgtaacactgcatgcagc

SEQ ID NO: 2182093 - DNA, 25 bp, Homo sapien
tcatgtcagagaatcaggcaagcag

SEQ ID NO: 2182094 - DNA, 25 bp, Homo sapien
catgtgagcaaaggagctacgtgct

SEQ ID NO: 2182095 - DNA, 25 bp, Homo sapien
tttcaagtgaagtccaacgggacca

SEQ ID NO: 2182096 - DNA, 25 bp, Homo sapien
gcatagagccttgccctcagaaggg

SEQ ID NO: 2182097 - DNA, 25 bp, Homo sapien
ttctaaggcccctaagacaaggcca

SEQ ID NO: 2182098 - DNA, 25 bp, Homo sapien
tgacattcagagtgtcagagctctc

SEQ ID NO: 2182099 - DNA, 25 bp, Homo sapien
cccctaagacaaggccagtgacatt

SEQ ID NO: 2182100 - DNA, 25 bp, Homo sapien
gccagtgacattcagagtgtcagag

SEQ ID NO: 2182101 - DNA, 25 bp, Homo sapien
tgttttcttttctatagtggaaatc

SEQ ID NO: 2182102 - DNA, 25 bp, Homo sapien
acctggccagaatgttttcttttct

SEQ ID NO: 2182103 - DNA, 25 bp, Homo sapien
cagaatgttttcttttctatagtgg

SEQ ID NO: 2182104 - DNA, 25 bp, Homo sapien
cacctggccagaatgttttcttttc

SEQ ID NO: 2182105 - DNA, 25 bp, Homo sapien
gaaactactactaatggactaagac

SEQ ID NO: 2182106 - DNA, 25 bp, Homo sapien
gctttctatcaaccataccagtgaa

SEQ ID NO: 2182107 - DNA, 25 bp, Homo sapien
cttggcctcgtctcatgcacgtatg

SEQ ID NO: 2182108 - DNA, 25 bp, Homo sapien
tttacacaggaatcacttcttggcc

SEQ ID NO: 2182109 - DNA, 25 bp, Homo sapien
tgtactctactgaagaaagccgtct

SEQ ID NO: 2182110 - DNA, 25 bp, Homo sapien
tatgtgcaaagatcctaaggttgga

SEQ ID NO: 2182111 - DNA, 25 bp, Homo sapien
tccttccggactgatatactgatac

SEQ ID NO: 2182112 - DNA, 25 bp, Homo sapien
tggctctcagctcaggtatagtgga

SEQ ID NO: 2182113 - DNA, 25 bp, Homo sapien
tgtgaactcttacggcaccaacacc

SEQ ID NO: 2182114 - DNA, 25 bp, Homo sapien
aactcttacggcaccaacaccctgt

SEQ ID NO: 2182115 - DNA, 25 bp, Homo sapien
tcttacggcaccaacaccctgtccc

SEQ ID NO: 2182116 - DNA, 25 bp, Homo sapien
tctgtgaactcttacggcaccaaca

SEQ ID NO: 2182117 - DNA, 25 bp, Homo sapien
cagctctcactaaaagcgaaatgca

SEQ ID NO: 2182118 - DNA, 25 bp, Homo sapien
taaagcaattcactgcacaactccc

SEQ ID NO: 2182119 - DNA, 25 bp, Homo sapien
ggcaatagcattcttggacaactaa

SEQ ID NO: 2182120 - DNA, 25 bp, Homo sapien
gcgaaatgcaagatcttagtcatct

SEQ ID NO: 2182121 - DNA, 25 bp, Homo sapien
ttgtcctgggacattttgagaagca

SEQ ID NO: 2182122 - DNA, 25 bp, Homo sapien
tggggaaaggcatactcaaataatc

SEQ ID NO: 2182123 - DNA, 25 bp, Homo sapien
tagtggggaaaggcatactcaaata

SEQ ID NO: 2182124 - DNA, 25 bp, Homo sapien
gtggggaaaggcatactcaaataat

SEQ ID NO: 2182125 - DNA, 25 bp, Homo sapien
agtggggaaaggcatactcaaataa

SEQ ID NO: 2182126 - DNA, 25 bp, Homo sapien
cagactcaacacaattgggctcagt

SEQ ID NO: 2182127 - DNA, 25 bp, Homo sapien
tacctcccaggagcaaattgcatct

SEQ ID NO: 2182128 - DNA, 25 bp, Homo sapien
taatatcttccaagacagactgtgg

SEQ ID NO: 2182129 - DNA, 25 bp, Homo sapien
gatgctgccacatgtacatcccatg

SEQ ID NO: 2182130 - DNA, 25 bp, Homo sapien
aggcttctgtctcctacccggtcag

SEQ ID NO: 2182131 - DNA, 25 bp, Homo sapien
tgccacaacagctaccacctgaagg

SEQ ID NO: 2182132 - DNA, 25 bp, Homo sapien
cagcaccacagacaacaacaggagg

SEQ ID NO: 2182133 - DNA, 25 bp, Homo sapien
tctattgccaacgaagtcacttaag

SEQ ID NO: 2182134 - DNA, 25 bp, Homo sapien
tactcagcgcaagagaagtggttcc

SEQ ID NO: 2182135 - DNA, 25 bp, Homo sapien
gttccttccaacaaggaatcacaga

SEQ ID NO: 2182136 - DNA, 25 bp, Homo sapien
tcaggacagcataagttcgtcatca

SEQ ID NO: 2182137 - DNA, 25 bp, Homo sapien
tgaacaccgtcatccaacaccaatg

SEQ ID NO: 2182138 - DNA, 25 bp, Homo sapien
gatgcaacgtccacagaatggcctt

SEQ ID NO: 2182139 - DNA, 25 bp, Homo sapien
gaagccacgtgttgagtatgataga

SEQ ID NO: 2182140 - DNA, 25 bp, Homo sapien
ttggacttccacatcagaggtatgg

SEQ ID NO: 2182141 - DNA, 25 bp, Homo sapien
ccggctactgggatgtgaaaagtga

SEQ ID NO: 2182142 - DNA, 25 bp, Homo sapien
caagtgaaaagccagtaggcacatc

SEQ ID NO: 2182143 - DNA, 25 bp, Homo sapien
taaaatgggacttctgtgacagcag

SEQ ID NO: 2182144 - DNA, 25 bp, Homo sapien
cacccacgccaagctattggatgga

SEQ ID NO: 2182145 - DNA, 25 bp, Homo sapien
tggatggaaactaatgcagcatgtc

SEQ ID NO: 2182146 - DNA, 25 bp, Homo sapien
gactggccaatatgtagctctatga

SEQ ID NO: 2182147 - DNA, 25 bp, Homo sapien
cacaaagcgggattaggcaaacagt

SEQ ID NO: 2182148 - DNA, 25 bp, Homo sapien
tttagggaagggtcaattgcggcca

SEQ ID NO: 2182149 - DNA, 25 bp, Homo sapien
gagttcaaatatcgttataccagca

SEQ ID NO: 2182150 - DNA, 25 bp, Homo sapien
aaactgggggatgagtctttgcttc

SEQ ID NO: 2182151 - DNA, 25 bp, Homo sapien
gaaactgggggatgagtctttgctt

SEQ ID NO: 2182152 - DNA, 25 bp, Homo sapien
tggtcagaatgagactatagctaca

SEQ ID NO: 2182153 - DNA, 25 bp, Homo sapien
cctttgaagactggtcagaatgaga

SEQ ID NO: 2182154 - DNA, 25 bp, Homo sapien
ggtcagaatgagactatagctacat

SEQ ID NO: 2182155 - DNA, 25 bp, Homo sapien
tttggttgtagccatcatcagcaga

SEQ ID NO: 2182156 - DNA, 25 bp, Homo sapien
cagtccagtttggttgtagccatca

SEQ ID NO: 2182157 - DNA, 25 bp, Homo sapien
aaaatgtctggcagtccagtttggt

SEQ ID NO: 2182158 - DNA, 25 bp, Homo sapien
cagggacagcaggtgacatgtagaa

SEQ ID NO: 2182159 - DNA, 25 bp, Homo sapien
gagaaccaaaaatcatcccaggcct

SEQ ID NO: 2182160 - DNA, 25 bp, Homo sapien
tgtctaagtccaaacaaacgagaag

SEQ ID NO: 2182161 - DNA, 25 bp, Homo sapien
gtaacaccatacgatttaaagctag

SEQ ID NO: 2182162 - DNA, 25 bp, Homo sapien
acaatgtgacaatagcaaatgctgg

SEQ ID NO: 2182163 - DNA, 25 bp, Homo sapien
catagtttaccagagtttgcagtac

SEQ ID NO: 2182164 - DNA, 25 bp, Homo sapien
tacacatggtgaggatggaaacaca

SEQ ID NO: 2182165 - DNA, 25 bp, Homo sapien
gcctggcagcaatcaaattacttct

SEQ ID NO: 2182166 - DNA, 25 bp, Homo sapien
taaaacgatttctgctcttgacaaa

SEQ ID NO: 2182167 - DNA, 25 bp, Homo sapien
gctgagtagcagtcatcctctgagc

SEQ ID NO: 2182168 - DNA, 25 bp, Homo sapien
taccacacttgttcgtaactgtaac

SEQ ID NO: 2182169 - DNA, 25 bp, Homo sapien
ctgagcctcattttgtgtatgagcc

SEQ ID NO: 2182170 - DNA, 25 bp, Homo sapien
tgtatgagcctcatttaaaacggag

SEQ ID NO: 2182171 - DNA, 25 bp, Homo sapien
cattaactcgcaatggttaaaccca

SEQ ID NO: 2182172 - DNA, 25 bp, Homo sapien
atggttaaacccactgacgtcctcg

SEQ ID NO: 2182173 - DNA, 25 bp, Homo sapien
gacgtcctcgttaggaatgctcttc

SEQ ID NO: 2182174 - DNA, 25 bp, Homo sapien
actgacgtcctcgttaggaatgctc

SEQ ID NO: 2182175 - DNA, 25 bp, Homo sapien
ttcagggtgttaggaagtgacaaaa

SEQ ID NO: 2182176 - DNA, 25 bp, Homo sapien
gacaaaaagaatcctacagccgcct

SEQ ID NO: 2182177 - DNA, 25 bp, Homo sapien
tgttgctgacggcagcatttcaggg

SEQ ID NO: 2182178 - DNA, 25 bp, Homo sapien
agtgacaaaaagaatcctacagccg

SEQ ID NO: 2182179 - DNA, 25 bp, Homo sapien
gccttttgccgttgctagtcgttcc

SEQ ID NO: 2182180 - DNA, 25 bp, Homo sapien
gcctcgggccaggttggagatttca

SEQ ID NO: 2182181 - DNA, 25 bp, Homo sapien
gctgagccttttgccgttgctagtc

SEQ ID NO: 2182182 - DNA, 25 bp, Homo sapien
gttgcattggaacccgctcagcaca

SEQ ID NO: 2182183 - DNA, 25 bp, Homo sapien
ctccagcgtcccggcttcgtcgcag

SEQ ID NO: 2182184 - DNA, 25 bp, Homo sapien
tcccggcttcgtcgcagaggtggcc

SEQ ID NO: 2182185 - DNA, 25 bp, Homo sapien
ctgggcgttccggacacctgcgccg

SEQ ID NO: 2182186 - DNA, 25 bp, Homo sapien
agcgtcccggcttcgtcgcagaggt

SEQ ID NO: 2182187 - DNA, 25 bp, Homo sapien
ccgtggcgcgcagccagcgcgctcg

SEQ ID NO: 2182188 - DNA, 25 bp, Homo sapien
tggccgctggctcctagctcccggc

SEQ ID NO: 2182189 - DNA, 25 bp, Homo sapien
gcagagccggtggcacaagtttgca

SEQ ID NO: 2182190 - DNA, 25 bp, Homo sapien
aagtttgcaggtctcgcgggcacgt

SEQ ID NO: 2182191 - DNA, 25 bp, Homo sapien
cacgtgcgctgaccgggcttctgcg

SEQ ID NO: 2182192 - DNA, 25 bp, Homo sapien
acgtcagcgccgggggctttgtgcg

SEQ ID NO: 2182193 - DNA, 25 bp, Homo sapien
tgacgtcagcgccgggggctttgtg

SEQ ID NO: 2182194 - DNA, 25 bp, Homo sapien
cagcgccgggggctttgtgcgcccg

SEQ ID NO: 2182195 - DNA, 25 bp, Homo sapien
cgccgggggctttgtgcgcccggag

SEQ ID NO: 2182196 - DNA, 25 bp, Homo sapien
gcaggcaaagctcgcggcttcctct

SEQ ID NO: 2182197 - DNA, 25 bp, Homo sapien
aaagctcgcggcttcctctgggacc

SEQ ID NO: 2182198 - DNA, 25 bp, Homo sapien
agcgggcgcgcggagtctgcaggca

SEQ ID NO: 2182199 - DNA, 25 bp, Homo sapien
gtctgcaggcaaagctcgcggcttc

SEQ ID NO: 2182200 - DNA, 25 bp, Homo sapien
ggcaaaggcattccaagcttttgca

SEQ ID NO: 2182201 - DNA, 25 bp, Homo sapien
ccagaaagcagctttagggcaaagg

SEQ ID NO: 2182202 - DNA, 25 bp, Homo sapien
gcagctttagggcaaaggcattcca

SEQ ID NO: 2182203 - DNA, 25 bp, Homo sapien
ctttagggcaaaggcattccaagct

SEQ ID NO: 2182204 - DNA, 25 bp, Homo sapien
tggtgagagcagattggcagtctta

SEQ ID NO: 2182205 - DNA, 25 bp, Homo sapien
agcagattggcagtcttagaaaacc

SEQ ID NO: 2182206 - DNA, 25 bp, Homo sapien
tctgggggagagatgtccctttgca

SEQ ID NO: 2182207 - DNA, 25 bp, Homo sapien
taagaagtttgtgtgggtggtgaga

SEQ ID NO: 2182208 - DNA, 25 bp, Homo sapien
cccactcttcctgatgcctgttgtg

SEQ ID NO: 2182209 - DNA, 25 bp, Homo sapien
gagccaggtcctttggggacagttc

SEQ ID NO: 2182210 - DNA, 25 bp, Homo sapien
tgcctgttgtgtggtcgtgtctcac

SEQ ID NO: 2182211 - DNA, 25 bp, Homo sapien
tggtcgtgtctcacctcgctgcctg

SEQ ID NO: 2182212 - DNA, 25 bp, Homo sapien
tagcgtggccttgagtcgatgcttc

SEQ ID NO: 2182213 - DNA, 25 bp, Homo sapien
tgatgtagtgtgcttattggtccca

SEQ ID NO: 2182214 - DNA, 25 bp, Homo sapien
caggcgcagccaaacattgcagaga

SEQ ID NO: 2182215 - DNA, 25 bp, Homo sapien
tttgtacagagccagagggtagcgt

SEQ ID NO: 2182216 - DNA, 25 bp, Homo sapien
agcagcggcaggagaaagaatggat

SEQ ID NO: 2182217 - DNA, 25 bp, Homo sapien
gatggatctagaaggtccttccggt

SEQ ID NO: 2182218 - DNA, 25 bp, Homo sapien
aataactgaatacctgaagaaaagt

SEQ ID NO: 2182219 - DNA, 25 bp, Homo sapien
aactctcaagttcaatccagctcca

SEQ ID NO: 2182220 - DNA, 25 bp, Homo sapien
cagccattcctttactgggaggtca

SEQ ID NO: 2182221 - DNA, 25 bp, Homo sapien
gctcatggctatgtttctggaacca

SEQ ID NO: 2182222 - DNA, 25 bp, Homo sapien
tgttgagcctgtgctaggcaccgaa

SEQ ID NO: 2182223 - DNA, 25 bp, Homo sapien
gcatcatagcatccaatgagacggt

SEQ ID NO: 2182224 - DNA, 25 bp, Homo sapien
tgtagaggactaaggtccaactgtg

SEQ ID NO: 2182225 - DNA, 25 bp, Homo sapien
aatagagacttaatgccgggcatgg

SEQ ID NO: 2182226 - DNA, 25 bp, Homo sapien
agaaatagagacttaatgccgggca

SEQ ID NO: 2182227 - DNA, 25 bp, Homo sapien
ggtagttataaattgtatggactca

SEQ ID NO: 2182228 - DNA, 25 bp, Homo sapien
ccacactcttctcgtctcaatgctc

SEQ ID NO: 2182229 - DNA, 25 bp, Homo sapien
gaagtcttcaatgacccacactctt

SEQ ID NO: 2182230 - DNA, 25 bp, Homo sapien
aatgacccacactcttctcgtctca

SEQ ID NO: 2182231 - DNA, 25 bp, Homo sapien
agtcttcaatgacccacactcttct

SEQ ID NO: 2182232 - DNA, 25 bp, Homo sapien
acaggaacttctgtggagctcccta

SEQ ID NO: 2182233 - DNA, 25 bp, Homo sapien
tgcgctgggtcacaggaacttctgt

SEQ ID NO: 2182234 - DNA, 25 bp, Homo sapien
ttctgtggagctccctaagacactg

SEQ ID NO: 2182235 - DNA, 25 bp, Homo sapien
tctcactgcgctgggtcacaggaac

SEQ ID NO: 2182236 - DNA, 25 bp, Homo sapien
gaagtcacgcctgtttcacggaaag

SEQ ID NO: 2182237 - DNA, 25 bp, Homo sapien
gcacactagatcaagccaagatgac

SEQ ID NO: 2182238 - DNA, 25 bp, Homo sapien
tgcagtgagtgctacggtgcccaac

SEQ ID NO: 2182239 - DNA, 25 bp, Homo sapien
gatcaggacaatgaggcacactaga

SEQ ID NO: 2182240 - DNA, 25 bp, Homo sapien
gcccagcaaagaccatgtttttgac

SEQ ID NO: 2182241 - DNA, 25 bp, Homo sapien
gtctgcactcattgctaaaagaagt

SEQ ID NO: 2182242 - DNA, 25 bp, Homo sapien
ttgtacagcgttgttaggtgggccc

SEQ ID NO: 2182243 - DNA, 25 bp, Homo sapien
tgtttggtggcactgctcagatcca

SEQ ID NO: 2182244 - DNA, 25 bp, Homo sapien
tgccctgctgtggaggcattgcagt

SEQ ID NO: 2182245 - DNA, 25 bp, Homo sapien
tcgtctactggccatgaagctgagg

SEQ ID NO: 2182246 - DNA, 25 bp, Homo sapien
tttacatggatacccagcaggcaag

SEQ ID NO: 2182247 - DNA, 25 bp, Homo sapien
tctcagaggccaccattttcaggtg

SEQ ID NO: 2182248 - DNA, 25 bp, Homo sapien
ggttctgtcacctgcaattatagga

SEQ ID NO: 2182249 - DNA, 25 bp, Homo sapien
ggctcaactccctatcaggatggta

SEQ ID NO: 2182250 - DNA, 25 bp, Homo sapien
gaatttgttagctcactcaatggcg

SEQ ID NO: 2182251 - DNA, 25 bp, Homo sapien
taagtgcccactggaccatgctggt

SEQ ID NO: 2182252 - DNA, 25 bp, Homo sapien
tggtttctagagactgccagcattc

SEQ ID NO: 2182253 - DNA, 25 bp, Homo sapien
tccacattgtggaacgctggacaca

SEQ ID NO: 2182254 - DNA, 25 bp, Homo sapien
ggacccacgtaggtcaacatccatg

SEQ ID NO: 2182255 - DNA, 25 bp, Homo sapien
tgtgatgacattgggcccacttgga

SEQ ID NO: 2182256 - DNA, 25 bp, Homo sapien
ctgcaatgcttgtcttgtatgtcca

SEQ ID NO: 2182257 - DNA, 25 bp, Homo sapien
gaagagcagtctgaagatcagcata

SEQ ID NO: 2182258 - DNA, 25 bp, Homo sapien
tgtttgaagctaatgtgaagctcag

SEQ ID NO: 2182259 - DNA, 25 bp, Homo sapien
agcatatctggtaaatctgcaatgc

SEQ ID NO: 2182260 - DNA, 25 bp, Homo sapien
gaagccttaggtaacaaagccagta

SEQ ID NO: 2182261 - DNA, 25 bp, Homo sapien
tgagtatttaccgtgtagccagcac

SEQ ID NO: 2182262 - DNA, 25 bp, Homo sapien
taatcttctcaggtcaacatgggct

SEQ ID NO: 2182263 - DNA, 25 bp, Homo sapien
tacaggcactactcaatgtggtccg

SEQ ID NO: 2182264 - DNA, 25 bp, Homo sapien
cagcagtgaccaggtttgggaatta

SEQ ID NO: 2182265 - DNA, 25 bp, Homo sapien
cgcgccgggccggaattattgttct

SEQ ID NO: 2182266 - DNA, 25 bp, Homo sapien
taccatctgtagaccaaatctggcc

SEQ ID NO: 2182267 - DNA, 25 bp, Homo sapien
gagaggtgcagttggcaaactacca

SEQ ID NO: 2182268 - DNA, 25 bp, Homo sapien
gataaagagcgtgtacccaaaagga

SEQ ID NO: 2182269 - DNA, 25 bp, Homo sapien
tgaccgtgtggcttgcagtgccaaa

SEQ ID NO: 2182270 - DNA, 25 bp, Homo sapien
gcatccctctccactacaggtagtg

SEQ ID NO: 2182271 - DNA, 25 bp, Homo sapien
ggttgagtagtcacaacactgaccg

SEQ ID NO: 2182272 - DNA, 25 bp, Homo sapien
gatcttggcagcactgtccccgtac

SEQ ID NO: 2182273 - DNA, 25 bp, Homo sapien
gttcacatagctgtccaggcgctct

SEQ ID NO: 2182274 - DNA, 25 bp, Homo sapien
accgaccggcgggtgttgcagtaca

SEQ ID NO: 2182275 - DNA, 25 bp, Homo sapien
cgtggtcagcgttcacatagctgtc

SEQ ID NO: 2182276 - DNA, 25 bp, Homo sapien
gcagaaggagcccagtgagtgctgc

SEQ ID NO: 2182277 - DNA, 25 bp, Homo sapien
caaacttgatgtatgccatgaatgc

SEQ ID NO: 2182278 - DNA, 25 bp, Homo sapien
cctgaagttactggacaaccgccat

SEQ ID NO: 2182279 - DNA, 25 bp, Homo sapien
tcactgatcggttttgtgcacctgt

SEQ ID NO: 2182280 - DNA, 25 bp, Homo sapien
actggtcttctctcttcgtcgcaca

SEQ ID NO: 2182281 - DNA, 25 bp, Homo sapien
tctggaatctgagtagcaatcacaa

SEQ ID NO: 2182282 - DNA, 25 bp, Homo sapien
aaaggagttcttatcctagtcaagc

SEQ ID NO: 2182283 - DNA, 25 bp, Homo sapien
aatattaaacaagactcaggcgatg

SEQ ID NO: 2182284 - DNA, 25 bp, Homo sapien
tagcttctagtggttttgagagcaa

SEQ ID NO: 2182285 - DNA, 25 bp, Homo sapien
tttctggtgaaggtaatgaattgga

SEQ ID NO: 2182286 - DNA, 25 bp, Homo sapien
ggtaatgaattggaaagcgccatgg

SEQ ID NO: 2182287 - DNA, 25 bp, Homo sapien
aatgaattggaaagcgccatgggca

SEQ ID NO: 2182288 - DNA, 25 bp, Homo sapien
tgaaggtaatgaattggaaagcgcc

SEQ ID NO: 2182289 - DNA, 25 bp, Homo sapien
tgaagagacagaggcctgaacttac

SEQ ID NO: 2182290 - DNA, 25 bp, Homo sapien
gcaaggaaaggaagcatgaagagac

SEQ ID NO: 2182291 - DNA, 25 bp, Homo sapien
aggaaaggaagcatgaagagacaga

SEQ ID NO: 2182292 - DNA, 25 bp, Homo sapien
aatgtaaaaggcagggcaaggaaag

SEQ ID NO: 2182293 - DNA, 25 bp, Homo sapien
catctcttcctctttggacaaagct

SEQ ID NO: 2182294 - DNA, 25 bp, Homo sapien
tcgttcttctctatgcctctcggtc

SEQ ID NO: 2182295 - DNA, 25 bp, Homo sapien
ctcttcctctttggacaaagcttgg

SEQ ID NO: 2182296 - DNA, 25 bp, Homo sapien
cgttcttctctatgcctctcggtct

SEQ ID NO: 2182297 - DNA, 25 bp, Homo sapien
tactgctgtaacgtggatgctgccc

SEQ ID NO: 2182298 - DNA, 25 bp, Homo sapien
actgctgtaacgtggatgctgccca

SEQ ID NO: 2182299 - DNA, 25 bp, Homo sapien
gggaagaagcgcagaaggtaagtac

SEQ ID NO: 2182300 - DNA, 25 bp, Homo sapien
ggggaagaagcgcagaaggtaagta

SEQ ID NO: 2182301 - DNA, 25 bp, Homo sapien
aatgttgccagtatcttgcatatac

SEQ ID NO: 2182302 - DNA, 25 bp, Homo sapien
gctttgcatccaagccattgcttga

SEQ ID NO: 2182303 - DNA, 25 bp, Homo sapien
gcttgatgataatgttgccagtatc

SEQ ID NO: 2182304 - DNA, 25 bp, Homo sapien
ccaagccattgcttgatgataatgt

SEQ ID NO: 2182305 - DNA, 25 bp, Homo sapien
aatgaaaggaggtggagggtggaca

SEQ ID NO: 2182306 - DNA, 25 bp, Homo sapien
tgaaaggaggtggagggtggacacc

SEQ ID NO: 2182307 - DNA, 25 bp, Homo sapien
ctacaaaatgaaaggaggtggaggg

SEQ ID NO: 2182308 - DNA, 25 bp, Homo sapien
caaaatgaaaggaggtggagggtgg

SEQ ID NO: 2182309 - DNA, 25 bp, Homo sapien
ctctgattgtgaaagtccaaatggg

SEQ ID NO: 2182310 - DNA, 25 bp, Homo sapien
ctgattgtgaaagtccaaatgggtg

SEQ ID NO: 2182311 - DNA, 25 bp, Homo sapien
tctgattgtgaaagtccaaatgggt

SEQ ID NO: 2182312 - DNA, 25 bp, Homo sapien
gaagaatcacagtgcaaacgtctga

SEQ ID NO: 2182313 - DNA, 25 bp, Homo sapien
tctatatgacgttggttcctgggct

SEQ ID NO: 2182314 - DNA, 25 bp, Homo sapien
gattaagtgggtcaaaagatcctgc

SEQ ID NO: 2182315 - DNA, 25 bp, Homo sapien
ttctatggtttgtgaggcagctccc

SEQ ID NO: 2182316 - DNA, 25 bp, Homo sapien
ggtctttaattcgatctttcattcc

SEQ ID NO: 2182317 - DNA, 25 bp, Homo sapien
tttaattcgatctttcattcctcac

SEQ ID NO: 2182318 - DNA, 25 bp, Homo sapien
tctttaattcgatctttcattcctc

SEQ ID NO: 2182319 - DNA, 25 bp, Homo sapien
aatggtctttaattcgatctttcat

SEQ ID NO: 2182320 - DNA, 25 bp, Homo sapien
ggaatgtctcccactcttttatggc

SEQ ID NO: 2182321 - DNA, 25 bp, Homo sapien
gaatgtctcccactcttttatggca

SEQ ID NO: 2182322 - DNA, 25 bp, Homo sapien
gggaatgtctcccactcttttatgg

SEQ ID NO: 2182323 - DNA, 25 bp, Homo sapien
taaacactgacgaggcctataggca

SEQ ID NO: 2182324 - DNA, 25 bp, Homo sapien
aacaaagttaccctctgactcagga

SEQ ID NO: 2182325 - DNA, 25 bp, Homo sapien
cccaggcgagtacagagaccattca

SEQ ID NO: 2182326 - DNA, 25 bp, Homo sapien
gttaaaactgataggcaagggagcc

SEQ ID NO: 2182327 - DNA, 25 bp, Homo sapien
cacaaggcccataaactgtaggcgc

SEQ ID NO: 2182328 - DNA, 25 bp, Homo sapien
cagcctagcctgtcaaacgagttta

SEQ ID NO: 2182329 - DNA, 25 bp, Homo sapien
gaaccatctgatctgtactaaggga

SEQ ID NO: 2182330 - DNA, 25 bp, Homo sapien
taaaatgcacttcgttggccactgg

SEQ ID NO: 2182331 - DNA, 25 bp, Homo sapien
gggccccactattagagattctgat

SEQ ID NO: 2182332 - DNA, 25 bp, Homo sapien
taattatgagagcaacgtgacgtcc

SEQ ID NO: 2182333 - DNA, 25 bp, Homo sapien
tctctgcgcatcagaagaagccagg

SEQ ID NO: 2182334 - DNA, 25 bp, Homo sapien
agctttaaaaactaccgatgccagg

SEQ ID NO: 2182335 - DNA, 25 bp, Homo sapien
ctggaggccggaagctgcctgctaa

SEQ ID NO: 2182336 - DNA, 25 bp, Homo sapien
tgctaatcggctaccccgagtggag

SEQ ID NO: 2182337 - DNA, 25 bp, Homo sapien
ctgtgtcgcggacgtcacgttcgca

SEQ ID NO: 2182338 - DNA, 25 bp, Homo sapien
cttccggtgcggaacacgtggcgtg

SEQ ID NO: 2182339 - DNA, 25 bp, Homo sapien
tacatgatgagcttgcacggtgaaa

SEQ ID NO: 2182340 - DNA, 25 bp, Homo sapien
tgttagtagaggaacaatgatgccc

SEQ ID NO: 2182341 - DNA, 25 bp, Homo sapien
catgtgccataggacaggagtaact

SEQ ID NO: 2182342 - DNA, 25 bp, Homo sapien
gaaatggatgaatccctgtccgagg

SEQ ID NO: 2182343 - DNA, 25 bp, Homo sapien
tttctggatgcgttgaggtctcagg

SEQ ID NO: 2182344 - DNA, 25 bp, Homo sapien
gatgcgttgaggtctcagggagatg

SEQ ID NO: 2182345 - DNA, 25 bp, Homo sapien
ctggatgcgttgaggtctcagggag

SEQ ID NO: 2182346 - DNA, 25 bp, Homo sapien
ttttctggatgcgttgaggtctcag

SEQ ID NO: 2182347 - DNA, 25 bp, Homo sapien
gtttccatgacacttcatccattcc

SEQ ID NO: 2182348 - DNA, 25 bp, Homo sapien
tgtttccatgacacttcatccattc

SEQ ID NO: 2182349 - DNA, 25 bp, Homo sapien
catccattccattcatagacttcat

SEQ ID NO: 2182350 - DNA, 25 bp, Homo sapien
tctgtttccatgacacttcatccat

SEQ ID NO: 2182351 - DNA, 25 bp, Homo sapien
cagaggattgagttaggagaggcaa

SEQ ID NO: 2182352 - DNA, 25 bp, Homo sapien
tcagaggattgagttaggagaggca

SEQ ID NO: 2182353 - DNA, 25 bp, Homo sapien
catttactttctgatctccaagccc

SEQ ID NO: 2182354 - DNA, 25 bp, Homo sapien
tctgatctccaagccctttcttttc

SEQ ID NO: 2182355 - DNA, 25 bp, Homo sapien
tttcctctaatttattttgcaagcc

SEQ ID NO: 2182356 - DNA, 25 bp, Homo sapien
tactttctgatctccaagccctttc

SEQ ID NO: 2182357 - DNA, 25 bp, Homo sapien
ttgatagctgtcgaacgactctgac

SEQ ID NO: 2182358 - DNA, 25 bp, Homo sapien
gcacttgccggcattactgttttgc

SEQ ID NO: 2182359 - DNA, 25 bp, Homo sapien
tgccggcattactgttttgctgtac

SEQ ID NO: 2182360 - DNA, 25 bp, Homo sapien
ttgctgtacactaataacaattgat

SEQ ID NO: 2182361 - DNA, 25 bp, Homo sapien
taattggtacagtggctgcagaatc

SEQ ID NO: 2182362 - DNA, 25 bp, Homo sapien
aacagctactgaatatagtctgatg

SEQ ID NO: 2182363 - DNA, 25 bp, Homo sapien
catcagtttgaaagcccagtcacat

SEQ ID NO: 2182364 - DNA, 25 bp, Homo sapien
taaactgctccttggttatgcctat

SEQ ID NO: 2182365 - DNA, 25 bp, Homo sapien
ctgcacacggaggaagacacgggct

SEQ ID NO: 2182366 - DNA, 25 bp, Homo sapien
aatcatcgattgctgtgctgcacac

SEQ ID NO: 2182367 - DNA, 25 bp, Homo sapien
gtttgcgctattcattccaagcgaa

SEQ ID NO: 2182368 - DNA, 25 bp, Homo sapien
tcattccaagcgaatcatcgattgc

SEQ ID NO: 2182369 - DNA, 25 bp, Homo sapien
cttgcccttttctcagctcttttac

SEQ ID NO: 2182370 - DNA, 25 bp, Homo sapien
ttgcccttttctcagctcttttact

SEQ ID NO: 2182371 - DNA, 25 bp, Homo sapien
tttacttttatttctctgggccaca

SEQ ID NO: 2182372 - DNA, 25 bp, Homo sapien
acttttatttctctgggccacagct

SEQ ID NO: 2182373 - DNA, 25 bp, Homo sapien
tagaagttacgggtaacttgatgta

SEQ ID NO: 2182374 - DNA, 25 bp, Homo sapien
ctgggacctgtcctctcaaagccac

SEQ ID NO: 2182375 - DNA, 25 bp, Homo sapien
tgtctggtctgctatgctctgggac

SEQ ID NO: 2182376 - DNA, 25 bp, Homo sapien
caaagccaccactgctaaggagata

SEQ ID NO: 2182377 - DNA, 25 bp, Homo sapien
tccttgtctggtctgctatgctctg

SEQ ID NO: 2182378 - DNA, 25 bp, Homo sapien
gccagtggtccactatagcttgtaa

SEQ ID NO: 2182379 - DNA, 25 bp, Homo sapien
ggaccctagggttctgctcagagac

SEQ ID NO: 2182380 - DNA, 25 bp, Homo sapien
cagagactgttgtagaaacgccagt

SEQ ID NO: 2182381 - DNA, 25 bp, Homo sapien
ctatagcttgtaatttcactggcca

SEQ ID NO: 2182382 - DNA, 25 bp, Homo sapien
gtgagttctcaccttaggcataagg

SEQ ID NO: 2182383 - DNA, 25 bp, Homo sapien
ggtggtgatcgggataggcacatga

SEQ ID NO: 2182384 - DNA, 25 bp, Homo sapien
caccttaggcataaggatctgggaa

SEQ ID NO: 2182385 - DNA, 25 bp, Homo sapien
gaaaggtggtgatcgggataggcac

SEQ ID NO: 2182386 - DNA, 25 bp, Homo sapien
ccctgcttgggtaaaccaaagatag

SEQ ID NO: 2182387 - DNA, 25 bp, Homo sapien
cactgcacagttctctgatgtggca

SEQ ID NO: 2182388 - DNA, 25 bp, Homo sapien
tgaccaccaaaatggagggcagcaa

SEQ ID NO: 2182389 - DNA, 25 bp, Homo sapien
tgatgtggcaatctgaacccagcac

SEQ ID NO: 2182390 - DNA, 25 bp, Homo sapien
gatgttcctgatgacatcagcagtg

SEQ ID NO: 2182391 - DNA, 25 bp, Homo sapien
tagacaggtgaattgttctggagct

SEQ ID NO: 2182392 - DNA, 25 bp, Homo sapien
aatgcatggaccacaattcccttgt

SEQ ID NO: 2182393 - DNA, 25 bp, Homo sapien
gctcctagagtatgaagaggtagac

SEQ ID NO: 2182394 - DNA, 25 bp, Homo sapien
tcatgggcacctcttagagtgttcc

SEQ ID NO: 2182395 - DNA, 25 bp, Homo sapien
gggcacctcttagagtgttcctcct

SEQ ID NO: 2182396 - DNA, 25 bp, Homo sapien
ctggaatcagaccatgtagagaatg

SEQ ID NO: 2182397 - DNA, 25 bp, Homo sapien
cctctggaatcagaccatgtagaga

SEQ ID NO: 2182398 - DNA, 25 bp, Homo sapien
ccaatccttgggtgatcaaagtcca

SEQ ID NO: 2182399 - DNA, 25 bp, Homo sapien
atacctcatactccactacaggcag

SEQ ID NO: 2182400 - DNA, 25 bp, Homo sapien
gaggtgcatagagaactgacagaga

SEQ ID NO: 2182401 - DNA, 25 bp, Homo sapien
gggtgatcaaagtccacagttggtg

SEQ ID NO: 2182402 - DNA, 25 bp, Homo sapien
tgggggtggggtgagggcaataata

SEQ ID NO: 2182403 - DNA, 25 bp, Homo sapien
gtggggtgagggcaataataaaatg

SEQ ID NO: 2182404 - DNA, 25 bp, Homo sapien
ggggtgagggcaataataaaatgct

SEQ ID NO: 2182405 - DNA, 25 bp, Homo sapien
ctgggggtggggtgagggcaataat

SEQ ID NO: 2182406 - DNA, 25 bp, Homo sapien
gaggacacagtcgatatcaggaaag

SEQ ID NO: 2182407 - DNA, 25 bp, Homo sapien
catttcccgtaaggaatggccaaga

SEQ ID NO: 2182408 - DNA, 25 bp, Homo sapien
gagggagccccaccagtaagatgct

SEQ ID NO: 2182409 - DNA, 25 bp, Homo sapien
gaaagtacaggctctcaactcccag

SEQ ID NO: 2182410 - DNA, 25 bp, Homo sapien
ctaaagcacagagccctttaatgcc

SEQ ID NO: 2182411 - DNA, 25 bp, Homo sapien
tgatggtgatagtatgggttgagac

SEQ ID NO: 2182412 - DNA, 25 bp, Homo sapien
cctttaatgcctgatggtgatagta

SEQ ID NO: 2182413 - DNA, 25 bp, Homo sapien
agagccctttaatgcctgatggtga

SEQ ID NO: 2182414 - DNA, 25 bp, Homo sapien
gccagaggcagccttcagtgggtgg

SEQ ID NO: 2182415 - DNA, 25 bp, Homo sapien
gagccagaggcagccttcagtgggt

SEQ ID NO: 2182416 - DNA, 25 bp, Homo sapien
actccttcaaacctggaggagccag

SEQ ID NO: 2182417 - DNA, 25 bp, Homo sapien
aggagccagaggcagccttcagtgg

SEQ ID NO: 2182418 - DNA, 25 bp, Homo sapien
ccttggtattgcttcttgggttctc

SEQ ID NO: 2182419 - DNA, 25 bp, Homo sapien
cttggtattgcttcttgggttctct

SEQ ID NO: 2182420 - DNA, 25 bp, Homo sapien
gcttttaggatgagacctggcgata

SEQ ID NO: 2182421 - DNA, 25 bp, Homo sapien
cccaggtggtcacaattggagctgc

SEQ ID NO: 2182422 - DNA, 25 bp, Homo sapien
tgtgcttgacatagagctgctttta

SEQ ID NO: 2182423 - DNA, 25 bp, Homo sapien
atgagacctggcgataacatcccag

SEQ ID NO: 2182424 - DNA, 25 bp, Homo sapien
ctttgcttccacctccagagcccat

SEQ ID NO: 2182425 - DNA, 25 bp, Homo sapien
ctgttctttgcttccacctccagag

SEQ ID NO: 2182426 - DNA, 25 bp, Homo sapien
tgttctttgcttccacctccagagc

SEQ ID NO: 2182427 - DNA, 25 bp, Homo sapien
ttctttgcttccacctccagagccc

SEQ ID NO: 2182428 - DNA, 25 bp, Homo sapien
tttttgttctcttcggaatgcagta

SEQ ID NO: 2182429 - DNA, 25 bp, Homo sapien
tggagacagaaagtgttccattatt

SEQ ID NO: 2182430 - DNA, 25 bp, Homo sapien
tttctcaggcatgaatttggacatt

SEQ ID NO: 2182431 - DNA, 25 bp, Homo sapien
tctcttcggaatgcagtatttgtta

SEQ ID NO: 2182432 - DNA, 25 bp, Homo sapien
aaagtgcaatattagggtcgagtgt

SEQ ID NO: 2182433 - DNA, 25 bp, Homo sapien
tttacttttctaacatactcctcca

SEQ ID NO: 2182434 - DNA, 25 bp, Homo sapien
actcctccatatcttgtttggaaaa

SEQ ID NO: 2182435 - DNA, 25 bp, Homo sapien
cttagtcataataacccgtttctct

SEQ ID NO: 2182436 - DNA, 25 bp, Homo sapien
acatactcctccatatcttgtttgg

SEQ ID NO: 2182437 - DNA, 25 bp, Homo sapien
cattttacaagataaggatgaaagc

SEQ ID NO: 2182438 - DNA, 25 bp, Homo sapien
cagagaagactccagtaagggtaaa

SEQ ID NO: 2182439 - DNA, 25 bp, Homo sapien
agagaaatggtagactaggtccaaa

SEQ ID NO: 2182440 - DNA, 25 bp, Homo sapien
gaatttatcaaaactgtcagagaag

SEQ ID NO: 2182441 - DNA, 25 bp, Homo sapien
tgttcacctctgtccttttttccaa

SEQ ID NO: 2182442 - DNA, 25 bp, Homo sapien
tctttgtacatctatcctttccctt

SEQ ID NO: 2182443 - DNA, 25 bp, Homo sapien
cactctccagttacttgactgttta

SEQ ID NO: 2182444 - DNA, 25 bp, Homo sapien
cccaaatgcaatttcactctccagt

SEQ ID NO: 2182445 - DNA, 25 bp, Homo sapien
aagacttgatcaaaagttggctttt

SEQ ID NO: 2182446 - DNA, 25 bp, Homo sapien
cttgatcaaaagttggcttttgctg

SEQ ID NO: 2182447 - DNA, 25 bp, Homo sapien
ctgtttctctgctgggttcctagga

SEQ ID NO: 2182448 - DNA, 25 bp, Homo sapien
tgtttctctgctgggttcctaggaa

SEQ ID NO: 2182449 - DNA, 25 bp, Homo sapien
tcatttggtccaagggtctaagttc

SEQ ID NO: 2182450 - DNA, 25 bp, Homo sapien
caagggtctaagttctgacttttat

SEQ ID NO: 2182451 - DNA, 25 bp, Homo sapien
tttggtccaagggtctaagttctga

SEQ ID NO: 2182452 - DNA, 25 bp, Homo sapien
tggtccaagggtctaagttctgact

SEQ ID NO: 2182453 - DNA, 25 bp, Homo sapien
taggcaaacagtctgatgcagttct

SEQ ID NO: 2182454 - DNA, 25 bp, Homo sapien
ttttattgttgtcttggcccaagac

SEQ ID NO: 2182455 - DNA, 25 bp, Homo sapien
tgtctcatggtattgctgataggca

SEQ ID NO: 2182456 - DNA, 25 bp, Homo sapien
ggcccaagactcttctattgctgct

SEQ ID NO: 2182457 - DNA, 25 bp, Homo sapien
ggtttgactcactcttctgaccagc

SEQ ID NO: 2182458 - DNA, 25 bp, Homo sapien
cctctgtggcaagctacccagtaga

SEQ ID NO: 2182459 - DNA, 25 bp, Homo sapien
gatattgggctacttttccttccac

SEQ ID NO: 2182460 - DNA, 25 bp, Homo sapien
tcctgaatgacctttcttgtatccc

SEQ ID NO: 2182461 - DNA, 25 bp, Homo sapien
aactgtccacattgcataacatgct

SEQ ID NO: 2182462 - DNA, 25 bp, Homo sapien
tggattaccccttcactctttttca

SEQ ID NO: 2182463 - DNA, 25 bp, Homo sapien
tgctttgttcctttatccttgcagt

SEQ ID NO: 2182464 - DNA, 25 bp, Homo sapien
tatccttgcagtttctgctacctgg

SEQ ID NO: 2182465 - DNA, 25 bp, Homo sapien
tggcagttcagatgcggaccagcga

SEQ ID NO: 2182466 - DNA, 25 bp, Homo sapien
ggagctagctgaaataacccttgat

SEQ ID NO: 2182467 - DNA, 25 bp, Homo sapien
caagagttagcttcaccaagatgtc

SEQ ID NO: 2182468 - DNA, 25 bp, Homo sapien
tgtccagtgataggcaaaggtccga

SEQ ID NO: 2182469 - DNA, 25 bp, Homo sapien
cgccaggaccagtgaattcagtgcc

SEQ ID NO: 2182470 - DNA, 25 bp, Homo sapien
caatagctgagagtgttccatctgc

SEQ ID NO: 2182471 - DNA, 25 bp, Homo sapien
catctgctgcagtgagtccgccagg

SEQ ID NO: 2182472 - DNA, 25 bp, Homo sapien
gggtcaatagctgagagtgttccat

SEQ ID NO: 2182473 - DNA, 25 bp, Homo sapien
gcccattctaccatactggctcctg

SEQ ID NO: 2182474 - DNA, 25 bp, Homo sapien
ccattctaccatactggctcctgct

SEQ ID NO: 2182475 - DNA, 25 bp, Homo sapien
attctaccatactggctcctgctct

SEQ ID NO: 2182476 - DNA, 25 bp, Homo sapien
ctcagcccattctaccatactggct

SEQ ID NO: 2182477 - DNA, 25 bp, Homo sapien
caatagcgagttatgggatagggat

SEQ ID NO: 2182478 - DNA, 25 bp, Homo sapien
caatggatgtttactggcagggaaa

SEQ ID NO: 2182479 - DNA, 25 bp, Homo sapien
gcaggaaagctagcaatttagagtg

SEQ ID NO: 2182480 - DNA, 25 bp, Homo sapien
tgagctcttcgacattttaacaatg

SEQ ID NO: 2182481 - DNA, 25 bp, Homo sapien
tagccatcctggcaatgtcgcattt

SEQ ID NO: 2182482 - DNA, 25 bp, Homo sapien
tttaggatatgcctagccatcctgg

SEQ ID NO: 2182483 - DNA, 25 bp, Homo sapien
taagacatttaggatatgcctagcc

SEQ ID NO: 2182484 - DNA, 25 bp, Homo sapien
tggcaatgtcgcattttaaagccac

SEQ ID NO: 2182485 - DNA, 25 bp, Homo sapien
cattcacagacctttacaccaaaac

SEQ ID NO: 2182486 - DNA, 25 bp, Homo sapien
gaaccccatcattttattccttggc

SEQ ID NO: 2182487 - DNA, 25 bp, Homo sapien
tgaaagaggctaatctaaaaaggct

SEQ ID NO: 2182488 - DNA, 25 bp, Homo sapien
accaaataaccaccaataataggat

SEQ ID NO: 2182489 - DNA, 25 bp, Homo sapien
tgagttcttctagaattgacagtca

SEQ ID NO: 2182490 - DNA, 25 bp, Homo sapien
cttgagttcttctagaattgacagt

SEQ ID NO: 2182491 - DNA, 25 bp, Homo sapien
gagttcttctagaattgacagtcat

SEQ ID NO: 2182492 - DNA, 25 bp, Homo sapien
atcttgagttcttctagaattgaca

SEQ ID NO: 2182493 - DNA, 25 bp, Homo sapien
tcttcagcatgtgtcgctaaccttt

SEQ ID NO: 2182494 - DNA, 25 bp, Homo sapien
cagcatgtgtcgctaaccttttggt

SEQ ID NO: 2182495 - DNA, 25 bp, Homo sapien
gtgtcgctaaccttttggtgctctc

SEQ ID NO: 2182496 - DNA, 25 bp, Homo sapien
ttgccctcttcagcatgtgtcgcta

SEQ ID NO: 2182497 - DNA, 25 bp, Homo sapien
tcctggaaagccctcctgtcagact

SEQ ID NO: 2182498 - DNA, 25 bp, Homo sapien
ctattacatttgtgaaggacctctt

SEQ ID NO: 2182499 - DNA, 25 bp, Homo sapien
ggaaagccctcctgtcagactatta

SEQ ID NO: 2182500 - DNA, 25 bp, Homo sapien
tcatggtattgtcaatcctggaaag

SEQ ID NO: 2182501 - DNA, 25 bp, Homo sapien
gcaatttatctaagtcatttgtcat

SEQ ID NO: 2182502 - DNA, 25 bp, Homo sapien
ttcttccctttattcatatttagca

SEQ ID NO: 2182503 - DNA, 25 bp, Homo sapien
ctttcctttgtatcaatagaattct

SEQ ID NO: 2182504 - DNA, 25 bp, Homo sapien
cctttgtatcaatagaattcttccc

SEQ ID NO: 2182505 - DNA, 25 bp, Homo sapien
agcttggagctgtccgagtgctgaa

SEQ ID NO: 2182506 - DNA, 25 bp, Homo sapien
gaaacatgcgcacttcagagcttgg

SEQ ID NO: 2182507 - DNA, 25 bp, Homo sapien
ctgaaatttataggctgggtaagat

SEQ ID NO: 2182508 - DNA, 25 bp, Homo sapien
ggtaagatcacgtctccgtctcatt

SEQ ID NO: 2182509 - DNA, 25 bp, Homo sapien
tcagataagttcacatccaatgatc

SEQ ID NO: 2182510 - DNA, 25 bp, Homo sapien
actccagtgcatctggctccgaggc

SEQ ID NO: 2182511 - DNA, 25 bp, Homo sapien
ctccagtgcatctggctccgaggcc

SEQ ID NO: 2182512 - DNA, 25 bp, Homo sapien
ccagtgcatctggctccgaggccat

SEQ ID NO: 2182513 - DNA, 25 bp, Homo sapien
tccagtgcatctggctccgaggcca

SEQ ID NO: 2182514 - DNA, 25 bp, Homo sapien
ggtcctccagtaaacgttacttgca

SEQ ID NO: 2182515 - DNA, 25 bp, Homo sapien
tccagtaaacgttacttgcaatatt

SEQ ID NO: 2182516 - DNA, 25 bp, Homo sapien
cctccagtaaacgttacttgcaata

SEQ ID NO: 2182517 - DNA, 25 bp, Homo sapien
ttggatcagtcacagaaacgaccat

SEQ ID NO: 2182518 - DNA, 25 bp, Homo sapien
ttagctgcagatttatcagttgctc

SEQ ID NO: 2182519 - DNA, 25 bp, Homo sapien
taacatgggccaaccatatgtgtgc

SEQ ID NO: 2182520 - DNA, 25 bp, Homo sapien
ccaatccacatttggacttaattaa

SEQ ID NO: 2182521 - DNA, 25 bp, Homo sapien
gcagatttatcagttgctctccaag

SEQ ID NO: 2182522 - DNA, 25 bp, Homo sapien
gtttcctagccacatctaccatatt

SEQ ID NO: 2182523 - DNA, 25 bp, Homo sapien
cttcactgccctgacttaaccagta

SEQ ID NO: 2182524 - DNA, 25 bp, Homo sapien
ccatattcttggttgccagtggact

SEQ ID NO: 2182525 - DNA, 25 bp, Homo sapien
ttaaccagtatacctctccaatgtg

SEQ ID NO: 2182526 - DNA, 25 bp, Homo sapien
gacttgaagaactttccgatggatg

SEQ ID NO: 2182527 - DNA, 25 bp, Homo sapien
caatgcagctggagagttgtaagtc

SEQ ID NO: 2182528 - DNA, 25 bp, Homo sapien
tgtccagacctgtacaatgcagctg

SEQ ID NO: 2182529 - DNA, 25 bp, Homo sapien
tgaccttatcctgtcccatggactt

SEQ ID NO: 2182530 - DNA, 25 bp, Homo sapien
tacagcataggcaacctttcaaagt

SEQ ID NO: 2182531 - DNA, 25 bp, Homo sapien
gagaaaggacccttacaactcattc

SEQ ID NO: 2182532 - DNA, 25 bp, Homo sapien
aatgactccctgcttgttttaacca

SEQ ID NO: 2182533 - DNA, 25 bp, Homo sapien
ccccaacatcctaatggaaagacaa

SEQ ID NO: 2182534 - DNA, 25 bp, Homo sapien
tctggactctatacagcagctctgg

SEQ ID NO: 2182535 - DNA, 25 bp, Homo sapien
gataaaggtgtctaaagatcttctc

SEQ ID NO: 2182536 - DNA, 25 bp, Homo sapien
tctccagttttttaggatgcaggct

SEQ ID NO: 2182537 - DNA, 25 bp, Homo sapien
ggtttctcggtgtgctgacgcaagc

SEQ ID NO: 2182538 - DNA, 25 bp, Homo sapien
gaaacaagctaatgatggtcaagcg

SEQ ID NO: 2182539 - DNA, 25 bp, Homo sapien
tggtgtaacaggaaagctaggcaaa

SEQ ID NO: 2182540 - DNA, 25 bp, Homo sapien
tggtcaagcgctagacaaagagcaa

SEQ ID NO: 2182541 - DNA, 25 bp, Homo sapien
gaaagatctttctaagcagacagcc

SEQ ID NO: 2182542 - DNA, 25 bp, Homo sapien
taccatgagggacaactagtgttca

SEQ ID NO: 2182543 - DNA, 25 bp, Homo sapien
gaaatccagggtctttatccaccaa

SEQ ID NO: 2182544 - DNA, 25 bp, Homo sapien
gattgccccaacaagtaccaggaaa

SEQ ID NO: 2182545 - DNA, 25 bp, Homo sapien
tcagtaaactgcagaccctgtgaca

SEQ ID NO: 2182546 - DNA, 25 bp, Homo sapien
gatccttttatatcccaagtgggag

SEQ ID NO: 2182547 - DNA, 25 bp, Homo sapien
gtgtgagaccccaaatcgtgagata

SEQ ID NO: 2182548 - DNA, 25 bp, Homo sapien
aaagctgaggtccacatttttggca

SEQ ID NO: 2182549 - DNA, 25 bp, Homo sapien
gatcaccttgacattgggaacccat

SEQ ID NO: 2182550 - DNA, 25 bp, Homo sapien
tgacagtcaacaaaaacttacaggg

SEQ ID NO: 2182551 - DNA, 25 bp, Homo sapien
ccttggtggcatggatacagaagac

SEQ ID NO: 2182552 - DNA, 25 bp, Homo sapien
gcatgaagcgaagactaaactggat

SEQ ID NO: 2182553 - DNA, 25 bp, Homo sapien
caagacgaccgtgggctagaatagg

SEQ ID NO: 2182554 - DNA, 25 bp, Homo sapien
tattctacttagccatttatttaat

SEQ ID NO: 2182555 - DNA, 25 bp, Homo sapien
tgtttattctacttagccatttatt

SEQ ID NO: 2182556 - DNA, 25 bp, Homo sapien
tctacttagccatttatttaatctt

SEQ ID NO: 2182557 - DNA, 25 bp, Homo sapien
cctttaacttggagaagtttgatca

SEQ ID NO: 2182558 - DNA, 25 bp, Homo sapien
tgtgctcctgcaaaccttctaattc

SEQ ID NO: 2182559 - DNA, 25 bp, Homo sapien
tgtaactcacctaaaagttgatcca

SEQ ID NO: 2182560 - DNA, 25 bp, Homo sapien
tgaattatacagatagtagcagagc

SEQ ID NO: 2182561 - DNA, 25 bp, Homo sapien
tccaacaaataatcagggacacagt

SEQ ID NO: 2182562 - DNA, 25 bp, Homo sapien
gcaaagatacaaactgtgatcctag

SEQ ID NO: 2182563 - DNA, 25 bp, Homo sapien
aaggaaatccattagtcagactgag

SEQ ID NO: 2182564 - DNA, 25 bp, Homo sapien
taacctatatgtcctacaatgtaga

SEQ ID NO: 2182565 - DNA, 25 bp, Homo sapien
tcatggtatagaccattaggcaagc

SEQ ID NO: 2182566 - DNA, 25 bp, Homo sapien
gaacataacgctggtagaagtagat

SEQ ID NO: 2182567 - DNA, 25 bp, Homo sapien
ttacaaaggactgggaacataacgc

SEQ ID NO: 2182568 - DNA, 25 bp, Homo sapien
gaggggagtcctaatccttgagcac

SEQ ID NO: 2182569 - DNA, 25 bp, Homo sapien
cccaaattgagtgatgcaccaggaa

SEQ ID NO: 2182570 - DNA, 25 bp, Homo sapien
tatatatcaccagggcactctgtat

SEQ ID NO: 2182571 - DNA, 25 bp, Homo sapien
ccagggcactctgtatgtgtccact

SEQ ID NO: 2182572 - DNA, 25 bp, Homo sapien
gagatatatatcaccagggcactct

SEQ ID NO: 2182573 - DNA, 25 bp, Homo sapien
tatcaccagggcactctgtatgtgt

SEQ ID NO: 2182574 - DNA, 25 bp, Homo sapien
cacatgtaagaatgcgttgtttctg

SEQ ID NO: 2182575 - DNA, 25 bp, Homo sapien
tatcacatgtaagaatgcgttgttt

SEQ ID NO: 2182576 - DNA, 25 bp, Homo sapien
tactggtctccacaggcattcctgc

SEQ ID NO: 2182577 - DNA, 25 bp, Homo sapien
gctttatcacatgtaagaatgcgtt

SEQ ID NO: 2182578 - DNA, 25 bp, Homo sapien
tgggtgattccattttagagtgtgc

SEQ ID NO: 2182579 - DNA, 25 bp, Homo sapien
tgattccattttagagtgtgctttc

SEQ ID NO: 2182580 - DNA, 25 bp, Homo sapien
ttccattttagagtgtgctttctca

SEQ ID NO: 2182581 - DNA, 25 bp, Homo sapien
ttctcagaccactccgggtaccaaa

SEQ ID NO: 2182582 - DNA, 25 bp, Homo sapien
gatgagtcgtcatgctccctcacac

SEQ ID NO: 2182583 - DNA, 25 bp, Homo sapien
tggattaagtccttcacctttcagt

SEQ ID NO: 2182584 - DNA, 25 bp, Homo sapien
gatgactgcttattatatgagtgat

SEQ ID NO: 2182585 - DNA, 25 bp, Homo sapien
gatgattagagctccttgtgccatt

SEQ ID NO: 2182586 - DNA, 25 bp, Homo sapien
tcattctctcgctgacttattggtc

SEQ ID NO: 2182587 - DNA, 25 bp, Homo sapien
tcaatcccaccttctgaagaactct

SEQ ID NO: 2182588 - DNA, 25 bp, Homo sapien
gctgacttattggtccatctggctg

SEQ ID NO: 2182589 - DNA, 25 bp, Homo sapien
cccattagggatgacccagctctgc

SEQ ID NO: 2182590 - DNA, 25 bp, Homo sapien
caagtcagaggtgatgcaggtgtac

SEQ ID NO: 2182591 - DNA, 25 bp, Homo sapien
gagaactcgagtgcctttgattcca

SEQ ID NO: 2182592 - DNA, 25 bp, Homo sapien
ctgttgtagggagaagacagtagcc

SEQ ID NO: 2182593 - DNA, 25 bp, Homo sapien
catggctcgtcttcactgttctgag

SEQ ID NO: 2182594 - DNA, 25 bp, Homo sapien
gagcgccaagactagtgccagactg

SEQ ID NO: 2182595 - DNA, 25 bp, Homo sapien
tttaaggagcgccaagactagtgcc

SEQ ID NO: 2182596 - DNA, 25 bp, Homo sapien
tcatagacctttaaggagcgccaag

SEQ ID NO: 2182597 - DNA, 25 bp, Homo sapien
gactagtgccagactgtcctttgga

SEQ ID NO: 2182598 - DNA, 25 bp, Homo sapien
gaacttttcaatacctgaaaatgag

SEQ ID NO: 2182599 - DNA, 25 bp, Homo sapien
aatacctgaaaatgagattgctctt

SEQ ID NO: 2182600 - DNA, 25 bp, Homo sapien
gaagacaacagattggaatgaactt

SEQ ID NO: 2182601 - DNA, 25 bp, Homo sapien
gacaacagattggaatgaacttttc

SEQ ID NO: 2182602 - DNA, 25 bp, Homo sapien
cctgactttgaagagggttacttat

SEQ ID NO: 2182603 - DNA, 25 bp, Homo sapien
tccattgaaagaacacatcggatgg

SEQ ID NO: 2182604 - DNA, 25 bp, Homo sapien
agccctgactttgaagagggttact

SEQ ID NO: 2182605 - DNA, 25 bp, Homo sapien
tggtgaggactttttggaatgacaa

SEQ ID NO: 2182606 - DNA, 25 bp, Homo sapien
aaagtgggcgcatcgcctgagccca

SEQ ID NO: 2182607 - DNA, 25 bp, Homo sapien
taaaaaccactatttatatatgtac

SEQ ID NO: 2182608 - DNA, 25 bp, Homo sapien
tgtggtggtgggcacatgtggttcc

SEQ ID NO: 2182609 - DNA, 25 bp, Homo sapien
gccaaagtgggcgcatcgcctgagc

SEQ ID NO: 2182610 - DNA, 25 bp, Homo sapien
aacaagaaagggtggagttccatct

SEQ ID NO: 2182611 - DNA, 25 bp, Homo sapien
acacattcttcacaatggaacctgg

SEQ ID NO: 2182612 - DNA, 25 bp, Homo sapien
atgtatatttctgtctccccaccat

SEQ ID NO: 2182613 - DNA, 25 bp, Homo sapien
actgttatggaaatgaaataagatg

SEQ ID NO: 2182614 - DNA, 25 bp, Homo sapien
acataactgatgaacttggcttccc

SEQ ID NO: 2182615 - DNA, 25 bp, Homo sapien
ataactgatgaacttggcttccctt

SEQ ID NO: 2182616 - DNA, 25 bp, Homo sapien
ctgatgaacttggcttccctttggg

SEQ ID NO: 2182617 - DNA, 25 bp, Homo sapien
tgaacttggcttccctttgggaaga

SEQ ID NO: 2182618 - DNA, 25 bp, Homo sapien
ctacagaactaggtccctttggtgt

SEQ ID NO: 2182619 - DNA, 25 bp, Homo sapien
ttgctttaacgtcttctacagaact

SEQ ID NO: 2182620 - DNA, 25 bp, Homo sapien
gcatttttgctttaacgtcttctac

SEQ ID NO: 2182621 - DNA, 25 bp, Homo sapien
ttttgctttaacgtcttctacagaa

SEQ ID NO: 2182622 - DNA, 25 bp, Homo sapien
cctttttatcttggtgttgatgatg

SEQ ID NO: 2182623 - DNA, 25 bp, Homo sapien
gtgcatttttggctgtagtatcttg

SEQ ID NO: 2182624 - DNA, 25 bp, Homo sapien
gtagtatcttgtatagatttcttca

SEQ ID NO: 2182625 - DNA, 25 bp, Homo sapien
ttgacttgtgtgcatttttggctgt

SEQ ID NO: 2182626 - DNA, 25 bp, Homo sapien
taccacttccagggaccaactgctt

SEQ ID NO: 2182627 - DNA, 25 bp, Homo sapien
acttgctaccacttccagggaccaa

SEQ ID NO: 2182628 - DNA, 25 bp, Homo sapien
aacttgctaccacttccagggacca

SEQ ID NO: 2182629 - DNA, 25 bp, Homo sapien
tgctaccacttccagggaccaactg

SEQ ID NO: 2182630 - DNA, 25 bp, Homo sapien
tgtaagagcgctggtggtgttattt

SEQ ID NO: 2182631 - DNA, 25 bp, Homo sapien
ctgtaagagcgctggtggtgttatt

SEQ ID NO: 2182632 - DNA, 25 bp, Homo sapien
tggtggtgttatttcaaagccccca

SEQ ID NO: 2182633 - DNA, 25 bp, Homo sapien
aggtggacagagataaacgacccca

SEQ ID NO: 2182634 - DNA, 25 bp, Homo sapien
agagataaacgaccccagctcaaga

SEQ ID NO: 2182635 - DNA, 25 bp, Homo sapien
cttccatcaggtggctacatgcact

SEQ ID NO: 2182636 - DNA, 25 bp, Homo sapien
tggacagagataaacgaccccagct

SEQ ID NO: 2182637 - DNA, 25 bp, Homo sapien
tattttacagttccgcaataaaata

SEQ ID NO: 2182638 - DNA, 25 bp, Homo sapien
atttgctttaatgtacatgcatatg

SEQ ID NO: 2182639 - DNA, 25 bp, Homo sapien
gaaatgtatctcactggacccctta

SEQ ID NO: 2182640 - DNA, 25 bp, Homo sapien
tctcaactgagatggaaacctgcat

SEQ ID NO: 2182641 - DNA, 25 bp, Homo sapien
catgagagaattagcacttcacagc

SEQ ID NO: 2182642 - DNA, 25 bp, Homo sapien
atttctcagtccctaaggagtgcca

SEQ ID NO: 2182643 - DNA, 25 bp, Homo sapien
ttttgtgcatcatcaaaactaaagt

SEQ ID NO: 2182644 - DNA, 25 bp, Homo sapien
tctactacagtaagcctcggtgttt

SEQ ID NO: 2182645 - DNA, 25 bp, Homo sapien
tacaaaggaggcatatagcaagtag

SEQ ID NO: 2182646 - DNA, 25 bp, Homo sapien
caaaatcttatatggtggtgaaaac

SEQ ID NO: 2182647 - DNA, 25 bp, Homo sapien
agtctgatttcaactgaacctcagc

SEQ ID NO: 2182648 - DNA, 25 bp, Homo sapien
ctgatttcaactgaacctcagctac

SEQ ID NO: 2182649 - DNA, 25 bp, Homo sapien
gtctgatttcaactgaacctcagct

SEQ ID NO: 2182650 - DNA, 25 bp, Homo sapien
aagtctgatttcaactgaacctcag

SEQ ID NO: 2182651 - DNA, 25 bp, Homo sapien
aaggcactggaacataactgtttga

SEQ ID NO: 2182652 - DNA, 25 bp, Homo sapien
tctgtctgataaagcagccgcgacg

SEQ ID NO: 2182653 - DNA, 25 bp, Homo sapien
gctttcatgtttagctatggcagaa

SEQ ID NO: 2182654 - DNA, 25 bp, Homo sapien
cgcgacgacactactctttcctttg

SEQ ID NO: 2182655 - DNA, 25 bp, Homo sapien
catagaaacttcccggtctttcaca

SEQ ID NO: 2182656 - DNA, 25 bp, Homo sapien
tagattattaaaatcccttcgaatg

SEQ ID NO: 2182657 - DNA, 25 bp, Homo sapien
gtctttcacaaaagtacacttctgg

SEQ ID NO: 2182658 - DNA, 25 bp, Homo sapien
taaaatcccttcgaatggtgttctc

SEQ ID NO: 2182659 - DNA, 25 bp, Homo sapien
aaaacaagatttatggaatgctgca

SEQ ID NO: 2182660 - DNA, 25 bp, Homo sapien
catagccgggtgatgtgatttgaaa

SEQ ID NO: 2182661 - DNA, 25 bp, Homo sapien
tcattgaattcagggcatagccggg

SEQ ID NO: 2182662 - DNA, 25 bp, Homo sapien
tgcaagaagtgcaaaaagatcttcc

SEQ ID NO: 2182663 - DNA, 25 bp, Homo sapien
catcaagtatggtgctgggaaagga

SEQ ID NO: 2182664 - DNA, 25 bp, Homo sapien
gaaatgtcagtaggtacttcccagt

SEQ ID NO: 2182665 - DNA, 25 bp, Homo sapien
gacactttagaagccgaaatctgga

SEQ ID NO: 2182666 - DNA, 25 bp, Homo sapien
ccataatttgtagcagtacagtgca

SEQ ID NO: 2182667 - DNA, 25 bp, Homo sapien
tctctactagctgttctgaatcttg

SEQ ID NO: 2182668 - DNA, 25 bp, Homo sapien
caaccaagctatcatctattacacg

SEQ ID NO: 2182669 - DNA, 25 bp, Homo sapien
catctaagatatggacagaattttc

SEQ ID NO: 2182670 - DNA, 25 bp, Homo sapien
accacaaagaggaacaagacattcc

SEQ ID NO: 2182671 - DNA, 25 bp, Homo sapien
ttaccacataagagacccaaggagg

SEQ ID NO: 2182672 - DNA, 25 bp, Homo sapien
gaagtcagagctaggcactacagtg

SEQ ID NO: 2182673 - DNA, 25 bp, Homo sapien
gacccaaacccttacatggctaaga

SEQ ID NO: 2182674 - DNA, 25 bp, Homo sapien
tactatagtgttgctgtgctgtgcc

SEQ ID NO: 2182675 - DNA, 25 bp, Homo sapien
gcacttgacgtattatcatcttttc

SEQ ID NO: 2182676 - DNA, 25 bp, Homo sapien
tctgcacttgacgtattatcatctt

SEQ ID NO: 2182677 - DNA, 25 bp, Homo sapien
tcctctgcacttgacgtattatcat

SEQ ID NO: 2182678 - DNA, 25 bp, Homo sapien
cacttgacgtattatcatcttttcc

SEQ ID NO: 2182679 - DNA, 25 bp, Homo sapien
tattttacagggaatgttcattacc

SEQ ID NO: 2182680 - DNA, 25 bp, Homo sapien
catattcgctgctactctaaaaaga

SEQ ID NO: 2182681 - DNA, 25 bp, Homo sapien
aagatactgtggtatactgatccca

SEQ ID NO: 2182682 - DNA, 25 bp, Homo sapien
tcattaccttggtacatttgggaaa

SEQ ID NO: 2182683 - DNA, 25 bp, Homo sapien
gtggaaccaccaggtaacgattctc

SEQ ID NO: 2182684 - DNA, 25 bp, Homo sapien
gtcttcaaataagtcatcttcattg

SEQ ID NO: 2182685 - DNA, 25 bp, Homo sapien
gaaccaccaggtaacgattctcttg

SEQ ID NO: 2182686 - DNA, 25 bp, Homo sapien
ccaggtaacgattctcttgtttgtc

SEQ ID NO: 2182687 - DNA, 25 bp, Homo sapien
agtcaggcagtctgagttcaaggag

SEQ ID NO: 2182688 - DNA, 25 bp, Homo sapien
taaagtcatctatcagtactaagct

SEQ ID NO: 2182689 - DNA, 25 bp, Homo sapien
tccaagatccgttattttaaatgaa

SEQ ID NO: 2182690 - DNA, 25 bp, Homo sapien
agtaggagtacttgttcagttccac

SEQ ID NO: 2182691 - DNA, 25 bp, Homo sapien
tgaaagtaaggctcttcaacccaca

SEQ ID NO: 2182692 - DNA, 25 bp, Homo sapien
gaatcttcccctataaggctaattg

SEQ ID NO: 2182693 - DNA, 25 bp, Homo sapien
gattcttcacttgtgcagagagaca

SEQ ID NO: 2182694 - DNA, 25 bp, Homo sapien
cagagagacagcttttctgtaaacc

SEQ ID NO: 2182695 - DNA, 25 bp, Homo sapien
ggtatacttgacaatgacctcaatt

SEQ ID NO: 2182696 - DNA, 25 bp, Homo sapien
ccatatcagacagcacagcaccaga

SEQ ID NO: 2182697 - DNA, 25 bp, Homo sapien
aacacaccaatagctatgcttcagg

SEQ ID NO: 2182698 - DNA, 25 bp, Homo sapien
tacattaacctctatcaacaacaca

SEQ ID NO: 2182699 - DNA, 25 bp, Homo sapien
tgcaacattacccaaaaatacagag

SEQ ID NO: 2182700 - DNA, 25 bp, Homo sapien
cattttcaaccaggaggatgcaaca

SEQ ID NO: 2182701 - DNA, 25 bp, Homo sapien
gatagggcacacaaaataaggcaat

SEQ ID NO: 2182702 - DNA, 25 bp, Homo sapien
tacttggtaaggcaaagcctgattc

SEQ ID NO: 2182703 - DNA, 25 bp, Homo sapien
tctagtcaaatcactaataatctta

SEQ ID NO: 2182704 - DNA, 25 bp, Homo sapien
caggaaggcttatctatctagtcaa

SEQ ID NO: 2182705 - DNA, 25 bp, Homo sapien
tttccaggaaggcttatctatctag

SEQ ID NO: 2182706 - DNA, 25 bp, Homo sapien
ggcttatctatctagtcaaatcact

SEQ ID NO: 2182707 - DNA, 25 bp, Homo sapien
cataagttgaactgcacaaggatct

SEQ ID NO: 2182708 - DNA, 25 bp, Homo sapien
tctccaaatggaagctggcacacat

SEQ ID NO: 2182709 - DNA, 25 bp, Homo sapien
tctcccctgcccactgaatagagga

SEQ ID NO: 2182710 - DNA, 25 bp, Homo sapien
cagctgattctttcgagtaagggca

SEQ ID NO: 2182711 - DNA, 25 bp, Homo sapien
cacaatgtaagggaggttaattcca

SEQ ID NO: 2182712 - DNA, 25 bp, Homo sapien
gagcctttcttgttcgttagatgac

SEQ ID NO: 2182713 - DNA, 25 bp, Homo sapien
tatggtaaaaaatccagtggacttc

SEQ ID NO: 2182714 - DNA, 25 bp, Homo sapien
ttctgaaatctgacacacagttgca

SEQ ID NO: 2182715 - DNA, 25 bp, Homo sapien
acaatatcaagtctttgtgctgatc

SEQ ID NO: 2182716 - DNA, 25 bp, Homo sapien
tgcaaattgattccagttgatgttt

SEQ ID NO: 2182717 - DNA, 25 bp, Homo sapien
aatatcaagtctttgtgctgatcta

SEQ ID NO: 2182718 - DNA, 25 bp, Homo sapien
tccacaatatcaagtctttgtgctg

SEQ ID NO: 2182719 - DNA, 25 bp, Homo sapien
caaaggtctggcttgtacttatgaa

SEQ ID NO: 2182720 - DNA, 25 bp, Homo sapien
atcagtaaagaagatagggtaggta

SEQ ID NO: 2182721 - DNA, 25 bp, Homo sapien
gttgttaggcaattaacagaaagat

SEQ ID NO: 2182722 - DNA, 25 bp, Homo sapien
agaagatagggtaggtaaatcaaag

SEQ ID NO: 2182723 - DNA, 25 bp, Homo sapien
ctagatttctagaaaggaaaagcat

SEQ ID NO: 2182724 - DNA, 25 bp, Homo sapien
gcatgaaaattacacattctgaggt

SEQ ID NO: 2182725 - DNA, 25 bp, Homo sapien
ggtaaagctctaagaattcatcatc

SEQ ID NO: 2182726 - DNA, 25 bp, Homo sapien
taccaaaggtcccatgtcaggtttc

SEQ ID NO: 2182727 - DNA, 25 bp, Homo sapien
acgcagcggcaacataccggaggcc

SEQ ID NO: 2182728 - DNA, 25 bp, Homo sapien
ggccccacgtcgatacggtatccat

SEQ ID NO: 2182729 - DNA, 25 bp, Homo sapien
cgtcgatacggtatccatctgctcc

SEQ ID NO: 2182730 - DNA, 25 bp, Homo sapien
cggaggccccacgtcgatacggtat

SEQ ID NO: 2182731 - DNA, 25 bp, Homo sapien
acaaagttgttaatgctgatcaaca

SEQ ID NO: 2182732 - DNA, 25 bp, Homo sapien
gaggaatgaggacttttacctctgt

SEQ ID NO: 2182733 - DNA, 25 bp, Homo sapien
tttaataggttaagatgccatactg

SEQ ID NO: 2182734 - DNA, 25 bp, Homo sapien
ttcaatatgtcagataaaaccagtg

SEQ ID NO: 2182735 - DNA, 25 bp, Homo sapien
tgtaaaccgatttaatgccaaacca

SEQ ID NO: 2182736 - DNA, 25 bp, Homo sapien
tagttgtttgagatgctaagcagga

SEQ ID NO: 2182737 - DNA, 25 bp, Homo sapien
ggagtttcatgttgtccactatagc

SEQ ID NO: 2182738 - DNA, 25 bp, Homo sapien
tgttccctgtaaaagtcagcccatg

SEQ ID NO: 2182739 - DNA, 25 bp, Homo sapien
cattaccttgatctgcaagtagcct

SEQ ID NO: 2182740 - DNA, 25 bp, Homo sapien
aaatgcgattgctggtaaacctggc

SEQ ID NO: 2182741 - DNA, 25 bp, Homo sapien
cctattcatgaccaaattaccaagg

SEQ ID NO: 2182742 - DNA, 25 bp, Homo sapien
ccaaggaaccaacatttagatttag

SEQ ID NO: 2182743 - DNA, 25 bp, Homo sapien
ccgtgtcgggtgtagctgctcttca

SEQ ID NO: 2182744 - DNA, 25 bp, Homo sapien
tttttataaggacagtgctgcaggc

SEQ ID NO: 2182745 - DNA, 25 bp, Homo sapien
cgttttccccagacatagcattgga

SEQ ID NO: 2182746 - DNA, 25 bp, Homo sapien
tgcaggcctccaaagatacaattca

SEQ ID NO: 2182747 - DNA, 25 bp, Homo sapien
ccaggataatttcaaacgatgccat

SEQ ID NO: 2182748 - DNA, 25 bp, Homo sapien
tcaaacgatgccattgcgatatgaa

SEQ ID NO: 2182749 - DNA, 25 bp, Homo sapien
gccattgcgatatgaatatttgaag

SEQ ID NO: 2182750 - DNA, 25 bp, Homo sapien
gatgccattgcgatatgaatatttg

SEQ ID NO: 2182751 - DNA, 25 bp, Homo sapien
ccatccttaaagaagaccatatata

SEQ ID NO: 2182752 - DNA, 25 bp, Homo sapien
catccttaaagaagaccatatatag

SEQ ID NO: 2182753 - DNA, 25 bp, Homo sapien
ccttaaagaagaccatatatagatc

SEQ ID NO: 2182754 - DNA, 25 bp, Homo sapien
aaagaagaccatatatagatcatac

SEQ ID NO: 2182755 - DNA, 25 bp, Homo sapien
ttctcatggtagtccaatagagcta

SEQ ID NO: 2182756 - DNA, 25 bp, Homo sapien
tattctcatggtagtccaatagagc

SEQ ID NO: 2182757 - DNA, 25 bp, Homo sapien
ctcatggtagtccaatagagctacc

SEQ ID NO: 2182758 - DNA, 25 bp, Homo sapien
catggtagtccaatagagctaccat

SEQ ID NO: 2182759 - DNA, 25 bp, Homo sapien
ttcaagtctgcctttaattgatttc

SEQ ID NO: 2182760 - DNA, 25 bp, Homo sapien
catgttttcaccaatgaagaattgg

SEQ ID NO: 2182761 - DNA, 25 bp, Homo sapien
caccaatgaagaattggtagttttt

SEQ ID NO: 2182762 - DNA, 25 bp, Homo sapien
aagtctgcctttaattgatttcatg

SEQ ID NO: 2182763 - DNA, 25 bp, Homo sapien
tgtcttatcaactatttttccctct

SEQ ID NO: 2182764 - DNA, 25 bp, Homo sapien
taccctctgtcttatcaactatttt

SEQ ID NO: 2182765 - DNA, 25 bp, Homo sapien
atgttaccctctgtcttatcaacta

SEQ ID NO: 2182766 - DNA, 25 bp, Homo sapien
cctctgtcttatcaactatttttcc

SEQ ID NO: 2182767 - DNA, 25 bp, Homo sapien
tatagatcacactctataacaatct

SEQ ID NO: 2182768 - DNA, 25 bp, Homo sapien
gatcacactctataacaatctttat

SEQ ID NO: 2182769 - DNA, 25 bp, Homo sapien
tagatcacactctataacaatcttt

SEQ ID NO: 2182770 - DNA, 25 bp, Homo sapien
ttatagatcacactctataacaatc

SEQ ID NO: 2182771 - DNA, 25 bp, Homo sapien
gatgcaacctgaccgagtcttgcca

SEQ ID NO: 2182772 - DNA, 25 bp, Homo sapien
agcataagccactcagacaagtcca

SEQ ID NO: 2182773 - DNA, 25 bp, Homo sapien
gacaagtccatttggccctcgtgca

SEQ ID NO: 2182774 - DNA, 25 bp, Homo sapien
catagattcatccttggccagtggg

SEQ ID NO: 2182775 - DNA, 25 bp, Homo sapien
tgagctgtgcacttgcatctgaatt

SEQ ID NO: 2182776 - DNA, 25 bp, Homo sapien
ttgcatctgaattctctgagcactt

SEQ ID NO: 2182777 - DNA, 25 bp, Homo sapien
atctctgagctgtgcacttgcatct

SEQ ID NO: 2182778 - DNA, 25 bp, Homo sapien
ctctgagcacttgtgttcatgacca

SEQ ID NO: 2182779 - DNA, 25 bp, Homo sapien
taaaatctggtccattcactacttc

SEQ ID NO: 2182780 - DNA, 25 bp, Homo sapien
tatggtatgtaaaatctggtccatt

SEQ ID NO: 2182781 - DNA, 25 bp, Homo sapien
ttttccaggattcctcgacctgcat

SEQ ID NO: 2182782 - DNA, 25 bp, Homo sapien
cctgcattaccaaagtaattacttg

SEQ ID NO: 2182783 - DNA, 25 bp, Homo sapien
tggcatcagagtgaccctccaccat

SEQ ID NO: 2182784 - DNA, 25 bp, Homo sapien
cctagctcccattgtgcctcctttg

SEQ ID NO: 2182785 - DNA, 25 bp, Homo sapien
cccatcatcctagctcccattgtgc

SEQ ID NO: 2182786 - DNA, 25 bp, Homo sapien
catcctagctcccattgtgcctcct

SEQ ID NO: 2182787 - DNA, 25 bp, Homo sapien
gagacccaataggaacctgctgtag

SEQ ID NO: 2182788 - DNA, 25 bp, Homo sapien
gtaataagaccctggtgataagggc

SEQ ID NO: 2182789 - DNA, 25 bp, Homo sapien
tgctgtagcaaatgagtgtgaggta

SEQ ID NO: 2182790 - DNA, 25 bp, Homo sapien
caaagacagggtgtgactgaacttc

SEQ ID NO: 2182791 - DNA, 25 bp, Homo sapien
ctgggcatcttggggacggagacac

SEQ ID NO: 2182792 - DNA, 25 bp, Homo sapien
gggcatcttggggacggagacacca

SEQ ID NO: 2182793 - DNA, 25 bp, Homo sapien
gcatcttggggacggagacaccagt

SEQ ID NO: 2182794 - DNA, 25 bp, Homo sapien
atcttggggacggagacaccagtaa

SEQ ID NO: 2182795 - DNA, 25 bp, Homo sapien
gatacagcatcacacggattttgtg

SEQ ID NO: 2182796 - DNA, 25 bp, Homo sapien
tcacacggattttgtgtccaatggc

SEQ ID NO: 2182797 - DNA, 25 bp, Homo sapien
tattatggctttgtttggtttacca

SEQ ID NO: 2182798 - DNA, 25 bp, Homo sapien
gagggatacagcatcacacggattt

SEQ ID NO: 2182799 - DNA, 25 bp, Homo sapien
ttgtacacataagcacatttcttgc

SEQ ID NO: 2182800 - DNA, 25 bp, Homo sapien
tgtacacataagcacatttcttgcc

SEQ ID NO: 2182801 - DNA, 25 bp, Homo sapien
tacacataagcacatttcttgccca

SEQ ID NO: 2182802 - DNA, 25 bp, Homo sapien
ctttgtacacataagcacatttctt

SEQ ID NO: 2182803 - DNA, 25 bp, Homo sapien
gaccatagccttccagacatctttg

SEQ ID NO: 2182804 - DNA, 25 bp, Homo sapien
aagtcctgttcccaacaggtctcca

SEQ ID NO: 2182805 - DNA, 25 bp, Homo sapien
cctgttcccaacaggtctccacagg

SEQ ID NO: 2182806 - DNA, 25 bp, Homo sapien
gacggcaaaatgaccttggaccata

SEQ ID NO: 2182807 - DNA, 25 bp, Homo sapien
ctttcttctcctgcacataattctc

SEQ ID NO: 2182808 - DNA, 25 bp, Homo sapien
ttcttctcctgcacataattctcca

SEQ ID NO: 2182809 - DNA, 25 bp, Homo sapien
tcttctcctgcacataattctccaa

SEQ ID NO: 2182810 - DNA, 25 bp, Homo sapien
tttcttctcctgcacataattctcc

SEQ ID NO: 2182811 - DNA, 25 bp, Homo sapien
tttattcatttctaaggattcatat

SEQ ID NO: 2182812 - DNA, 25 bp, Homo sapien
tattcatttctaaggattcatatag

SEQ ID NO: 2182813 - DNA, 25 bp, Homo sapien
catttctaaggattcatatagtttc

SEQ ID NO: 2182814 - DNA, 25 bp, Homo sapien
ttcatttctaaggattcatatagtt

SEQ ID NO: 2182815 - DNA, 25 bp, Homo sapien
taaggcactgcagaaacatcaaaaa

SEQ ID NO: 2182816 - DNA, 25 bp, Homo sapien
tgagtacagccaaagtaaggcactg

SEQ ID NO: 2182817 - DNA, 25 bp, Homo sapien
aagttttcatggcagaggaatgttc

SEQ ID NO: 2182818 - DNA, 25 bp, Homo sapien
taataagattgaagttttcatggca

SEQ ID NO: 2182819 - DNA, 25 bp, Homo sapien
actgcaagtaacatagactggttgg

SEQ ID NO: 2182820 - DNA, 25 bp, Homo sapien
tcaaagccagcttgtaaaactgcaa

SEQ ID NO: 2182821 - DNA, 25 bp, Homo sapien
caagtaacatagactggttggtcag

SEQ ID NO: 2182822 - DNA, 25 bp, Homo sapien
ttgtaaaactgcaagtaacatagac

SEQ ID NO: 2182823 - DNA, 25 bp, Homo sapien
ctagttgccacgagttttgaagaca

SEQ ID NO: 2182824 - DNA, 25 bp, Homo sapien
tagttgccacgagttttgaagacac

SEQ ID NO: 2182825 - DNA, 25 bp, Homo sapien
taaactgacacgtactttcaacttg

SEQ ID NO: 2182826 - DNA, 25 bp, Homo sapien
actgacacgtactttcaacttgcag

SEQ ID NO: 2182827 - DNA, 25 bp, Homo sapien
cacgtactttcaacttgcagctgaa

SEQ ID NO: 2182828 - DNA, 25 bp, Homo sapien
cattcagtaaactgacacgtacttt

SEQ ID NO: 2182829 - DNA, 25 bp, Homo sapien
cactgatgctcccaacaataaaggg

SEQ ID NO: 2182830 - DNA, 25 bp, Homo sapien
gatgctcccaacaataaagggatct

SEQ ID NO: 2182831 - DNA, 25 bp, Homo sapien
tctcattgaggctccttcatcctca

SEQ ID NO: 2182832 - DNA, 25 bp, Homo sapien
gctcccaacaataaagggatctgtt

SEQ ID NO: 2182833 - DNA, 25 bp, Homo sapien
tatcttgcaagacaatcgtttctgc

SEQ ID NO: 2182834 - DNA, 25 bp, Homo sapien
tctgcttctaatgaaactactttgc

SEQ ID NO: 2182835 - DNA, 25 bp, Homo sapien
gaaactactttgcttatacaaccca

SEQ ID NO: 2182836 - DNA, 25 bp, Homo sapien
tgtgtagcatgtacaccctcctgcc

SEQ ID NO: 2182837 - DNA, 25 bp, Homo sapien
tgtattctttcacctgggataagtg

SEQ ID NO: 2182838 - DNA, 25 bp, Homo sapien
aaatcagctctgcacaagatgggag

SEQ ID NO: 2182839 - DNA, 25 bp, Homo sapien
agccctgagcagtttgtgaagaatt

SEQ ID NO: 2182840 - DNA, 25 bp, Homo sapien
caattacagctacagcagccctgag

SEQ ID NO: 2182841 - DNA, 25 bp, Homo sapien
cattttcagtggtcccaaaggattt

SEQ ID NO: 2182842 - DNA, 25 bp, Homo sapien
ttcagtggtcccaaaggatttggtg

SEQ ID NO: 2182843 - DNA, 25 bp, Homo sapien
ccatcattttcagtggtcccaaagg

SEQ ID NO: 2182844 - DNA, 25 bp, Homo sapien
cagtggtcccaaaggatttggtgac

SEQ ID NO: 2182845 - DNA, 25 bp, Homo sapien
gacatggatcccagactgttcagtt

SEQ ID NO: 2182846 - DNA, 25 bp, Homo sapien
caccagccttggcttatggacgaag

SEQ ID NO: 2182847 - DNA, 25 bp, Homo sapien
ctgcatgcacaagcccgttgaggga

SEQ ID NO: 2182848 - DNA, 25 bp, Homo sapien
ggaagaaagcccatggaaagacatg

SEQ ID NO: 2182849 - DNA, 25 bp, Homo sapien
agcttgtaagcggacggtgacagca

SEQ ID NO: 2182850 - DNA, 25 bp, Homo sapien
ttagccatgaaaatgcctctagcag

SEQ ID NO: 2182851 - DNA, 25 bp, Homo sapien
tcaaaacagaggacttcccctggga

SEQ ID NO: 2182852 - DNA, 25 bp, Homo sapien
tgcctgatgaaaggcaagctcctca

SEQ ID NO: 2182853 - DNA, 25 bp, Homo sapien
acaggagctccaaatgtgggtggat

SEQ ID NO: 2182854 - DNA, 25 bp, Homo sapien
cacaggagctccaaatgtgggtgga

SEQ ID NO: 2182855 - DNA, 25 bp, Homo sapien
ccaggtgttgcagagctttgctgta

SEQ ID NO: 2182856 - DNA, 25 bp, Homo sapien
caggagctccaaatgtgggtggatg

SEQ ID NO: 2182857 - DNA, 25 bp, Homo sapien
gacacttcggctcctccctaaagac

SEQ ID NO: 2182858 - DNA, 25 bp, Homo sapien
ttcggctcctccctaaagaccctca

SEQ ID NO: 2182859 - DNA, 25 bp, Homo sapien
ctggacacttcggctcctccctaaa

SEQ ID NO: 2182860 - DNA, 25 bp, Homo sapien
tcggctcctccctaaagaccctcat

SEQ ID NO: 2182861 - DNA, 25 bp, Homo sapien
caagataccagctgttatcctggag

SEQ ID NO: 2182862 - DNA, 25 bp, Homo sapien
ttctcaagataccagctgttatcct

SEQ ID NO: 2182863 - DNA, 25 bp, Homo sapien
caatttctcaagataccagctgtta

SEQ ID NO: 2182864 - DNA, 25 bp, Homo sapien
taccagctgttatcctggagacctt

SEQ ID NO: 2182865 - DNA, 25 bp, Homo sapien
gcctggggaacacatcttatctgaa

SEQ ID NO: 2182866 - DNA, 25 bp, Homo sapien
ggcctggggaacacatcttatctga

SEQ ID NO: 2182867 - DNA, 25 bp, Homo sapien
tggggaacacatcttatctgaattc

SEQ ID NO: 2182868 - DNA, 25 bp, Homo sapien
cctggggaacacatcttatctgaat

SEQ ID NO: 2182869 - DNA, 25 bp, Homo sapien
cagagttgaaggttatggttcccca

SEQ ID NO: 2182870 - DNA, 25 bp, Homo sapien
tgcatctctgaaactcactgaggga

SEQ ID NO: 2182871 - DNA, 25 bp, Homo sapien
gaggaaaacaagcatgaccacggtg

SEQ ID NO: 2182872 - DNA, 25 bp, Homo sapien
gacagagagcacttggagacctagg

SEQ ID NO: 2182873 - DNA, 25 bp, Homo sapien
gaaaagcctgcctcgatcaagtcat

SEQ ID NO: 2182874 - DNA, 25 bp, Homo sapien
tcccatatagcagagatggaaccag

SEQ ID NO: 2182875 - DNA, 25 bp, Homo sapien
tatgacactctccatgcagggaaaa

SEQ ID NO: 2182876 - DNA, 25 bp, Homo sapien
caaacgtatgcagtgtctttcaacc

SEQ ID NO: 2182877 - DNA, 25 bp, Homo sapien
tccgaattctaaggcggcataactg

SEQ ID NO: 2182878 - DNA, 25 bp, Homo sapien
caaaacacttccgaattctaaggcg

SEQ ID NO: 2182879 - DNA, 25 bp, Homo sapien
attctaaggcggcataactgcatca

SEQ ID NO: 2182880 - DNA, 25 bp, Homo sapien
ctgctggattccaaaacacttccga

SEQ ID NO: 2182881 - DNA, 25 bp, Homo sapien
gtccaggcctggagtcaatcttttc

SEQ ID NO: 2182882 - DNA, 25 bp, Homo sapien
tgggcctcgtagacatagaactttt

SEQ ID NO: 2182883 - DNA, 25 bp, Homo sapien
tctactggactgttccttgtccagg

SEQ ID NO: 2182884 - DNA, 25 bp, Homo sapien
gaactgctccatgattatcccactg

SEQ ID NO: 2182885 - DNA, 25 bp, Homo sapien
tctactagagccccaagggatgtca

SEQ ID NO: 2182886 - DNA, 25 bp, Homo sapien
cttctactagagccccaagggatgt

SEQ ID NO: 2182887 - DNA, 25 bp, Homo sapien
ttctactagagccccaagggatgtc

SEQ ID NO: 2182888 - DNA, 25 bp, Homo sapien
gggcttaggttttggcaaagaagca

SEQ ID NO: 2182889 - DNA, 25 bp, Homo sapien
ggcttaggttttggcaaagaagcac

SEQ ID NO: 2182890 - DNA, 25 bp, Homo sapien
tgaagtggggaatcctgacctttcc

SEQ ID NO: 2182891 - DNA, 25 bp, Homo sapien
tgggtgtccgctccaaaatccatga

SEQ ID NO: 2182892 - DNA, 25 bp, Homo sapien
tctctggaggcaccagctccacagg

SEQ ID NO: 2182893 - DNA, 25 bp, Homo sapien
tccacaggacgtttgccttcagcat

SEQ ID NO: 2182894 - DNA, 25 bp, Homo sapien
caaatagagtggagtgcccaggtgg

SEQ ID NO: 2182895 - DNA, 25 bp, Homo sapien
ctgatcttatggtcaatgttgcccc

SEQ ID NO: 2182896 - DNA, 25 bp, Homo sapien
ggagtgcccaggtggctgatcttat

SEQ ID NO: 2182897 - DNA, 25 bp, Homo sapien
cccaggtggctgatcttatggtcaa

SEQ ID NO: 2182898 - DNA, 25 bp, Homo sapien
agagagttgacacactccacgtggc

SEQ ID NO: 2182899 - DNA, 25 bp, Homo sapien
ctataagagagttgacacactccac

SEQ ID NO: 2182900 - DNA, 25 bp, Homo sapien
tataagagagttgacacactccacg

SEQ ID NO: 2182901 - DNA, 25 bp, Homo sapien
taagagagttgacacactccacgtg

SEQ ID NO: 2182902 - DNA, 25 bp, Homo sapien
tatggaggaacaggacctgaaggtg

SEQ ID NO: 2182903 - DNA, 25 bp, Homo sapien
gtagtttgtctaagtacagaaattg

SEQ ID NO: 2182904 - DNA, 25 bp, Homo sapien
agtacagaaattgaagtgagagctt

SEQ ID NO: 2182905 - DNA, 25 bp, Homo sapien
taaccaaccagcaactatccacctt

SEQ ID NO: 2182906 - DNA, 25 bp, Homo sapien
cagtgtgggccacgggacagggaag

SEQ ID NO: 2182907 - DNA, 25 bp, Homo sapien
agggcacagtgtgggccacgggaca

SEQ ID NO: 2182908 - DNA, 25 bp, Homo sapien
ggcacagtgtgggccacgggacagg

SEQ ID NO: 2182909 - DNA, 25 bp, Homo sapien
cacagtgtgggccacgggacaggga

SEQ ID NO: 2182910 - DNA, 25 bp, Homo sapien
gccacagcgggtataggcaatgctt

SEQ ID NO: 2182911 - DNA, 25 bp, Homo sapien
tggtccaggatgtcatatttttgac

SEQ ID NO: 2182912 - DNA, 25 bp, Homo sapien
ttgacattgctcctctacgtttctc

SEQ ID NO: 2182913 - DNA, 25 bp, Homo sapien
tgagcagggcccaatctgaaaaact

SEQ ID NO: 2182914 - DNA, 25 bp, Homo sapien
cactctcaggttgaacgctggctcc

SEQ ID NO: 2182915 - DNA, 25 bp, Homo sapien
tgccgctgacacaagcattaaacag

SEQ ID NO: 2182916 - DNA, 25 bp, Homo sapien
gccgctgacacaagcattaaacagt

SEQ ID NO: 2182917 - DNA, 25 bp, Homo sapien
gctgccgctgacacaagcattaaac

SEQ ID NO: 2182918 - DNA, 25 bp, Homo sapien
cgctgacacaagcattaaacagtgg

SEQ ID NO: 2182919 - DNA, 25 bp, Homo sapien
gggagtggctataaagcatcgaaaa

SEQ ID NO: 2182920 - DNA, 25 bp, Homo sapien
tatagaattaacacatacccaagat

SEQ ID NO: 2182921 - DNA, 25 bp, Homo sapien
gagaaataactacgaaattccacag

SEQ ID NO: 2182922 - DNA, 25 bp, Homo sapien
tcttaacgggtgcaagaagattact

SEQ ID NO: 2182923 - DNA, 25 bp, Homo sapien
atcttcacacaagagagatgacctc

SEQ ID NO: 2182924 - DNA, 25 bp, Homo sapien
aatcttcacacaagagagatgacct

SEQ ID NO: 2182925 - DNA, 25 bp, Homo sapien
gatgaggttcctcagagacagctga

SEQ ID NO: 2182926 - DNA, 25 bp, Homo sapien
tgaggttcctcagagacagctgatg

SEQ ID NO: 2182927 - DNA, 25 bp, Homo sapien
atgaggttcctcagagacagctgat

SEQ ID NO: 2182928 - DNA, 25 bp, Homo sapien
cccatcaataagagcctaacaggcc

SEQ ID NO: 2182929 - DNA, 25 bp, Homo sapien
tgctaatgcacttagacccagaggc

SEQ ID NO: 2182930 - DNA, 25 bp, Homo sapien
gggaatgggttatatcctgctaatg

SEQ ID NO: 2182931 - DNA, 25 bp, Homo sapien
ccagaggcttatccttgcccatcaa

SEQ ID NO: 2182932 - DNA, 25 bp, Homo sapien
ttcactcaaccaaaattcccatcag

SEQ ID NO: 2182933 - DNA, 25 bp, Homo sapien
cactcaaccaaaattcccatcagga

SEQ ID NO: 2182934 - DNA, 25 bp, Homo sapien
tggagggagacattggattcactca

SEQ ID NO: 2182935 - DNA, 25 bp, Homo sapien
gagacattggattcactcaaccaaa

SEQ ID NO: 2182936 - DNA, 25 bp, Homo sapien
gtcccgggaaaggcccagtgccgca

SEQ ID NO: 2182937 - DNA, 25 bp, Homo sapien
cgggaaaggcccagtgccgcagttt

SEQ ID NO: 2182938 - DNA, 25 bp, Homo sapien
aggcccagtgccgcagtttccttct

SEQ ID NO: 2182939 - DNA, 25 bp, Homo sapien
gaaaggcccagtgccgcagtttcct

SEQ ID NO: 2182940 - DNA, 25 bp, Homo sapien
gcccatcaatgggtttgaaagaagc

SEQ ID NO: 2182941 - DNA, 25 bp, Homo sapien
aaagaagcctgatgccaggaaagtc

SEQ ID NO: 2182942 - DNA, 25 bp, Homo sapien
cccgcgggcttgctcccatccatgc

SEQ ID NO: 2182943 - DNA, 25 bp, Homo sapien
cctgatgccaggaaagtcccttggc

SEQ ID NO: 2182944 - DNA, 25 bp, Homo sapien
ctctcctaagcgagcaagctctgcg

SEQ ID NO: 2182945 - DNA, 25 bp, Homo sapien
tccacttcagttgctcagcaaagtc

SEQ ID NO: 2182946 - DNA, 25 bp, Homo sapien
cttcagttgctcagcaaagtccaaa

SEQ ID NO: 2182947 - DNA, 25 bp, Homo sapien
caagctctgcgctccacttcagttg

SEQ ID NO: 2182948 - DNA, 25 bp, Homo sapien
ttctgtggctggctgagctgcacac

SEQ ID NO: 2182949 - DNA, 25 bp, Homo sapien
cagttctgtggctggctgagctgca

SEQ ID NO: 2182950 - DNA, 25 bp, Homo sapien
tgtggctggctgagctgcacacgtt

SEQ ID NO: 2182951 - DNA, 25 bp, Homo sapien
gaaaaattccagttctgtggctggc

SEQ ID NO: 2182952 - DNA, 25 bp, Homo sapien
cagagagaggcatgcgctcgtgtac

SEQ ID NO: 2182953 - DNA, 25 bp, Homo sapien
ctgtgatcagagagaggcatgcgct

SEQ ID NO: 2182954 - DNA, 25 bp, Homo sapien
agaggcatgcgctcgtgtacacaca

SEQ ID NO: 2182955 - DNA, 25 bp, Homo sapien
gggtaatctgagtgctacctgtgat

SEQ ID NO: 2182956 - DNA, 25 bp, Homo sapien
gttgctgatgtcacgtcctttccca

SEQ ID NO: 2182957 - DNA, 25 bp, Homo sapien
gaggaagccttggagtttatcagga

SEQ ID NO: 2182958 - DNA, 25 bp, Homo sapien
aatcagtgaggaagccttggagttt

SEQ ID NO: 2182959 - DNA, 25 bp, Homo sapien
tccagccctaagtctgcgaagttgc

SEQ ID NO: 2182960 - DNA, 25 bp, Homo sapien
ctctcttccaggtagaagaggattt

SEQ ID NO: 2182961 - DNA, 25 bp, Homo sapien
tctcttccaggtagaagaggatttt

SEQ ID NO: 2182962 - DNA, 25 bp, Homo sapien
ctcttccaggtagaagaggattttt

SEQ ID NO: 2182963 - DNA, 25 bp, Homo sapien
tacctagaagtaatcaaatcagggt

SEQ ID NO: 2182964 - DNA, 25 bp, Homo sapien
gcttttctgaatagagctacaataa

SEQ ID NO: 2182965 - DNA, 25 bp, Homo sapien
ttaaccaacattgccctattgtccc

SEQ ID NO: 2182966 - DNA, 25 bp, Homo sapien
catttaccctacagtgctatgaaac

SEQ ID NO: 2182967 - DNA, 25 bp, Homo sapien
tagcacaggcttagagaagggtttc

SEQ ID NO: 2182968 - DNA, 25 bp, Homo sapien
catcttaattcagcctagccacaat

SEQ ID NO: 2182969 - DNA, 25 bp, Homo sapien
agccatatgtagctagcagctactg

SEQ ID NO: 2182970 - DNA, 25 bp, Homo sapien
ggctagtagctaccgtattgaatag

SEQ ID NO: 2182971 - DNA, 25 bp, Homo sapien
gcccggccagatctgataattcttt

SEQ ID NO: 2182972 - DNA, 25 bp, Homo sapien
ttagaactgaatactgaaccatgac

SEQ ID NO: 2182973 - DNA, 25 bp, Homo sapien
tctccaccgtctagatgatagtagc

SEQ ID NO: 2182974 - DNA, 25 bp, Homo sapien
tctccagttgagagccaaaggtcta

SEQ ID NO: 2182975 - DNA, 25 bp, Homo sapien
ttatcaaccaggaccgcagtaactg

SEQ ID NO: 2182976 - DNA, 25 bp, Homo sapien
tacttgccccttggttaatgagaac

SEQ ID NO: 2182977 - DNA, 25 bp, Homo sapien
gggttgcaacatgcctcagacaatg

SEQ ID NO: 2182978 - DNA, 25 bp, Homo sapien
aaaatattgacccagcattgagccc

SEQ ID NO: 2182979 - DNA, 25 bp, Homo sapien
ggtacagcagacaacaatctgtgtc

SEQ ID NO: 2182980 - DNA, 25 bp, Homo sapien
tacagcagacaacaatctgtgtcat

SEQ ID NO: 2182981 - DNA, 25 bp, Homo sapien
ctaggtacagcagacaacaatctgt

SEQ ID NO: 2182982 - DNA, 25 bp, Homo sapien
taggtacagcagacaacaatctgtg

SEQ ID NO: 2182983 - DNA, 25 bp, Homo sapien
ctattggtataggaggaatcgttcg

SEQ ID NO: 2182984 - DNA, 25 bp, Homo sapien
ggcttgatgacatgctcgaccgaga

SEQ ID NO: 2182985 - DNA, 25 bp, Homo sapien
cagatgtagcttgtggatggcttga

SEQ ID NO: 2182986 - DNA, 25 bp, Homo sapien
gaatcgttcgagtggctctggcaga

SEQ ID NO: 2182987 - DNA, 25 bp, Homo sapien
cctctgcaaaatggtaatgtagaca

SEQ ID NO: 2182988 - DNA, 25 bp, Homo sapien
tgtagacaaattgtccagtgcccag

SEQ ID NO: 2182989 - DNA, 25 bp, Homo sapien
tggtaatgtagacaaattgtccagt

SEQ ID NO: 2182990 - DNA, 25 bp, Homo sapien
tcctctgcaaaatggtaatgtagac

SEQ ID NO: 2182991 - DNA, 25 bp, Homo sapien
tgagcatttctacgcttcaggttag

SEQ ID NO: 2182992 - DNA, 25 bp, Homo sapien
ttttggagccgccagatcaagcgca

SEQ ID NO: 2182993 - DNA, 25 bp, Homo sapien
catagtcggttagcaggtggatgac

SEQ ID NO: 2182994 - DNA, 25 bp, Homo sapien
tcaagcgcacttttgccctgagcat

SEQ ID NO: 2182995 - DNA, 25 bp, Homo sapien
tctggtaggtgcaggccacatatag

SEQ ID NO: 2182996 - DNA, 25 bp, Homo sapien
agtctaccctctggtaggtgcaggc

SEQ ID NO: 2182997 - DNA, 25 bp, Homo sapien
ccacatataggggagttccgagctg

SEQ ID NO: 2182998 - DNA, 25 bp, Homo sapien
gaggcacctcatggtcaatgttaac

SEQ ID NO: 2182999 - DNA, 25 bp, Homo sapien
tccatgcatgtgagattggatatat

SEQ ID NO: 2183000 - DNA, 25 bp, Homo sapien
gattggatatatggcctgcaacagt

SEQ ID NO: 2183001 - DNA, 25 bp, Homo sapien
tgtcgcctctccattacaaatctct

SEQ ID NO: 2183002 - DNA, 25 bp, Homo sapien
tgcaacagtactttggttagtctga

SEQ ID NO: 2183003 - DNA, 25 bp, Homo sapien
caggtctagtctgtacatacagtct

SEQ ID NO: 2183004 - DNA, 25 bp, Homo sapien
atcttctcggttcaggtctagtctg

SEQ ID NO: 2183005 - DNA, 25 bp, Homo sapien
tcaggtctagtctgtacatacagtc

SEQ ID NO: 2183006 - DNA, 25 bp, Homo sapien
ggcatcttctcggttcaggtctagt

SEQ ID NO: 2183007 - DNA, 25 bp, Homo sapien
actgggccttggctccgaactccag

SEQ ID NO: 2183008 - DNA, 25 bp, Homo sapien
ccgctgcagcaagcattgaagaggg

SEQ ID NO: 2183009 - DNA, 25 bp, Homo sapien
gacacatgcagcactgccgctgcag

SEQ ID NO: 2183010 - DNA, 25 bp, Homo sapien
tgcctcatggatgggcgaggccagg

SEQ ID NO: 2183011 - DNA, 25 bp, Homo sapien
tttggcacaggccacgtgacctcca

SEQ ID NO: 2183012 - DNA, 25 bp, Homo sapien
ttggcacaggccacgtgacctccaa

SEQ ID NO: 2183013 - DNA, 25 bp, Homo sapien
ggctttggcacaggccacgtgacct

SEQ ID NO: 2183014 - DNA, 25 bp, Homo sapien
aaggctttggcacaggccacgtgac

SEQ ID NO: 2183015 - DNA, 25 bp, Homo sapien
tggagagaagacacccggttaattg

SEQ ID NO: 2183016 - DNA, 25 bp, Homo sapien
ttgtcacaaggttcacattgacacc

SEQ ID NO: 2183017 - DNA, 25 bp, Homo sapien
aattgtcacaaggttcacattgaca

SEQ ID NO: 2183018 - DNA, 25 bp, Homo sapien
agacacccggttaattgtcacaagg

SEQ ID NO: 2183019 - DNA, 25 bp, Homo sapien
tagtttgggagcataggatatcctt

SEQ ID NO: 2183020 - DNA, 25 bp, Homo sapien
tgggtcttcaaaacttatgacatgg

SEQ ID NO: 2183021 - DNA, 25 bp, Homo sapien
gaccaagaaagagtatgccattagg

SEQ ID NO: 2183022 - DNA, 25 bp, Homo sapien
gagcctaaagacagcatgacagcct

SEQ ID NO: 2183023 - DNA, 25 bp, Homo sapien
ccaaaacccaatgccatgaccctga

SEQ ID NO: 2183024 - DNA, 25 bp, Homo sapien
agcttccaaaacccaatgccatgac

SEQ ID NO: 2183025 - DNA, 25 bp, Homo sapien
ttccaaaacccaatgccatgaccct

SEQ ID NO: 2183026 - DNA, 25 bp, Homo sapien
gcttccaaaacccaatgccatgacc

SEQ ID NO: 2183027 - DNA, 25 bp, Homo sapien
gctgtgatttcccagaattgtccct

SEQ ID NO: 2183028 - DNA, 25 bp, Homo sapien
agctgtgatttcccagaattgtccc

SEQ ID NO: 2183029 - DNA, 25 bp, Homo sapien
tcctgccagatctctggctgcatcc

SEQ ID NO: 2183030 - DNA, 25 bp, Homo sapien
tcatgaagtggggatcgatcagccc

SEQ ID NO: 2183031 - DNA, 25 bp, Homo sapien
gctgcagcttcatgaagtggggatc

SEQ ID NO: 2183032 - DNA, 25 bp, Homo sapien
tgagctgcagcttcatgaagtgggg

SEQ ID NO: 2183033 - DNA, 25 bp, Homo sapien
cagcttcatgaagtggggatcgatc

SEQ ID NO: 2183034 - DNA, 25 bp, Homo sapien
gaaatctctttccatggtccggacc

SEQ ID NO: 2183035 - DNA, 25 bp, Homo sapien
aaatctctttccatggtccggacct

SEQ ID NO: 2183036 - DNA, 25 bp, Homo sapien
aatctctttccatggtccggacctt

SEQ ID NO: 2183037 - DNA, 25 bp, Homo sapien
aaacttcacaattcttctcattttc

SEQ ID NO: 2183038 - DNA, 25 bp, Homo sapien
gaaacttcacaattcttctcatttt

SEQ ID NO: 2183039 - DNA, 25 bp, Homo sapien
aagactgctgttgtctagtgtcttc

SEQ ID NO: 2183040 - DNA, 25 bp, Homo sapien
gatgcttcgtccttggaggtcttat

SEQ ID NO: 2183041 - DNA, 25 bp, Homo sapien
tgcttcgtccttggaggtcttattt

SEQ ID NO: 2183042 - DNA, 25 bp, Homo sapien
ctttagataagactgctgttgtcta

SEQ ID NO: 2183043 - DNA, 25 bp, Homo sapien
ctcttctgctatcctagccgcttct

SEQ ID NO: 2183044 - DNA, 25 bp, Homo sapien
tcttctgctatcctagccgcttctt

SEQ ID NO: 2183045 - DNA, 25 bp, Homo sapien
atagaaatgggttaggagagccaaa

SEQ ID NO: 2183046 - DNA, 25 bp, Homo sapien
tagaaatgggttaggagagccaaaa

SEQ ID NO: 2183047 - DNA, 25 bp, Homo sapien
tatagaaatgggttaggagagccaa

SEQ ID NO: 2183048 - DNA, 25 bp, Homo sapien
ccatagaaaacaggaccatcttcca

SEQ ID NO: 2183049 - DNA, 25 bp, Homo sapien
tttaaagccatagaaaacaggacca

SEQ ID NO: 2183050 - DNA, 25 bp, Homo sapien
atgtttttaaagccatagaaaacag

SEQ ID NO: 2183051 - DNA, 25 bp, Homo sapien
taaagccatagaaaacaggaccatc

SEQ ID NO: 2183052 - DNA, 25 bp, Homo sapien
tgtatagggtcctaggactgtaaaa

SEQ ID NO: 2183053 - DNA, 25 bp, Homo sapien
gcttatgctctgtatagggtcctag

SEQ ID NO: 2183054 - DNA, 25 bp, Homo sapien
tttggcttatgctctgtatagggtc

SEQ ID NO: 2183055 - DNA, 25 bp, Homo sapien
gctctgtatagggtcctaggactgt

SEQ ID NO: 2183056 - DNA, 25 bp, Homo sapien
tcagaatctatgtagtgcacccaca

SEQ ID NO: 2183057 - DNA, 25 bp, Homo sapien
tggcatgcctctaaaacctgttgaa

SEQ ID NO: 2183058 - DNA, 25 bp, Homo sapien
tgtttccatataccgaccagtgcaa

SEQ ID NO: 2183059 - DNA, 25 bp, Homo sapien
tacttatcagacatcagcgaggcca

SEQ ID NO: 2183060 - DNA, 25 bp, Homo sapien
gttttgggatggcacacctcgtaca

SEQ ID NO: 2183061 - DNA, 25 bp, Homo sapien
tagcagctggttttgggatggcaca

SEQ ID NO: 2183062 - DNA, 25 bp, Homo sapien
gatggcacacctcgtacattctgct

SEQ ID NO: 2183063 - DNA, 25 bp, Homo sapien
cacacctcgtacattctgctcagaa

SEQ ID NO: 2183064 - DNA, 25 bp, Homo sapien
tcaacagtgatatcggtccccagta

SEQ ID NO: 2183065 - DNA, 25 bp, Homo sapien
cctggtccttaatggcgggaagcat

SEQ ID NO: 2183066 - DNA, 25 bp, Homo sapien
caaaatgtgctggtaactgatggac

SEQ ID NO: 2183067 - DNA, 25 bp, Homo sapien
tctgaaaaattgcatacctgagtgg

SEQ ID NO: 2183068 - DNA, 25 bp, Homo sapien
ctggtttcagatatctcattattct

SEQ ID NO: 2183069 - DNA, 25 bp, Homo sapien
tggtttcagatatctcattattctc

SEQ ID NO: 2183070 - DNA, 25 bp, Homo sapien
ggtttcagatatctcattattctca

SEQ ID NO: 2183071 - DNA, 25 bp, Homo sapien
gtttcagatatctcattattctcac

SEQ ID NO: 2183072 - DNA, 25 bp, Homo sapien
ctcttttactgtgagaatagttatt

SEQ ID NO: 2183073 - DNA, 25 bp, Homo sapien
cctcttttactgtgagaatagttat

SEQ ID NO: 2183074 - DNA, 25 bp, Homo sapien
tcgtttgtccattggcaacacagct

SEQ ID NO: 2183075 - DNA, 25 bp, Homo sapien
ctgggccgcagtgagaaataagtct

SEQ ID NO: 2183076 - DNA, 25 bp, Homo sapien
caaagatgtagcctgttactgggcc

SEQ ID NO: 2183077 - DNA, 25 bp, Homo sapien
aataagtctgtccagtcgtttgtcc

SEQ ID NO: 2183078 - DNA, 25 bp, Homo sapien
gggtcaccactgtagggtcaatatt

SEQ ID NO: 2183079 - DNA, 25 bp, Homo sapien
gaattccaaagtcccgcaaagtctg

SEQ ID NO: 2183080 - DNA, 25 bp, Homo sapien
tgaagattccttgactaagctgaga

SEQ ID NO: 2183081 - DNA, 25 bp, Homo sapien
taagctgagatgctctcaccggcat

SEQ ID NO: 2183082 - DNA, 25 bp, Homo sapien
atgttctcaatcagcccaaagatgc

SEQ ID NO: 2183083 - DNA, 25 bp, Homo sapien
tatgttctcaatcagcccaaagatg

SEQ ID NO: 2183084 - DNA, 25 bp, Homo sapien
tactatgttatggatgttttctgga

SEQ ID NO: 2183085 - DNA, 25 bp, Homo sapien
tccttcacacaaagattttactgaa

SEQ ID NO: 2183086 - DNA, 25 bp, Homo sapien
gtccctgacttcagttggaaaatag

SEQ ID NO: 2183087 - DNA, 25 bp, Homo sapien
aacattcctccaggtgtagaaagtc

SEQ ID NO: 2183088 - DNA, 25 bp, Homo sapien
catgcagaatgcttcagtaagggag

SEQ ID NO: 2183089 - DNA, 25 bp, Homo sapien
tgcagaatgcttcagtaagggaggt

SEQ ID NO: 2183090 - DNA, 25 bp, Homo sapien
cagaatgcttcagtaagggaggtat

SEQ ID NO: 2183091 - DNA, 25 bp, Homo sapien
cttgtgttctaaagctcccaaaaga

SEQ ID NO: 2183092 - DNA, 25 bp, Homo sapien
gaaaggagtgaaaactcatgctaca

SEQ ID NO: 2183093 - DNA, 25 bp, Homo sapien
aaaggagtgaaaactcatgctacaa

SEQ ID NO: 2183094 - DNA, 25 bp, Homo sapien
agaaaggagtgaaaactcatgctac

SEQ ID NO: 2183095 - DNA, 25 bp, Homo sapien
aaggagtgaaaactcatgctacaaa

SEQ ID NO: 2183096 - DNA, 25 bp, Homo sapien
ggagaagcaacacacctaaggtacg

SEQ ID NO: 2183097 - DNA, 25 bp, Homo sapien
tgcaaacgcttccagttaaagcagc

SEQ ID NO: 2183098 - DNA, 25 bp, Homo sapien
tatatcaattacatgcaggagaagc

SEQ ID NO: 2183099 - DNA, 25 bp, Homo sapien
taaggtacgcatgcagttaaaacca

SEQ ID NO: 2183100 - DNA, 25 bp, Homo sapien
tcatgcagctggtatctttcccgaa

SEQ ID NO: 2183101 - DNA, 25 bp, Homo sapien
ggatatttctgacagagttcaggta

SEQ ID NO: 2183102 - DNA, 25 bp, Homo sapien
tctggatatttctgacagagttcag

SEQ ID NO: 2183103 - DNA, 25 bp, Homo sapien
gctggtatctttcccgaacttcttc

SEQ ID NO: 2183104 - DNA, 25 bp, Homo sapien
aaaaattcaccagaacgactgagaa

SEQ ID NO: 2183105 - DNA, 25 bp, Homo sapien
ctctcttaaaccttttccaggagtg

SEQ ID NO: 2183106 - DNA, 25 bp, Homo sapien
gactgagaatccacttattttgaaa

SEQ ID NO: 2183107 - DNA, 25 bp, Homo sapien
ttagctatgcactccataaaggaga

SEQ ID NO: 2183108 - DNA, 25 bp, Homo sapien
tcactacagtccatagaacaaaagg

SEQ ID NO: 2183109 - DNA, 25 bp, Homo sapien
ggcagcagggcatcaactgttagat

SEQ ID NO: 2183110 - DNA, 25 bp, Homo sapien
aaagtgagtggctatccaaagtccc

SEQ ID NO: 2183111 - DNA, 25 bp, Homo sapien
taagttcaaaccagctatagcccac

SEQ ID NO: 2183112 - DNA, 25 bp, Homo sapien
tgagcgtgcctacacatgcagagtg

SEQ ID NO: 2183113 - DNA, 25 bp, Homo sapien
tagagactttcgactgccatgtgaa

SEQ ID NO: 2183114 - DNA, 25 bp, Homo sapien
ggtattgtaccacgaacaggcttta

SEQ ID NO: 2183115 - DNA, 25 bp, Homo sapien
tgagtacaggaaaggccataccatc

SEQ ID NO: 2183116 - DNA, 25 bp, Homo sapien
aaatgaagttcaggccaagtttcct

SEQ ID NO: 2183117 - DNA, 25 bp, Homo sapien
gactgctgggtcaatcaagattctc

SEQ ID NO: 2183118 - DNA, 25 bp, Homo sapien
gaatgccagtcggttcacatgttcc

SEQ ID NO: 2183119 - DNA, 25 bp, Homo sapien
cattccaaacgtaaactgaccaagg

SEQ ID NO: 2183120 - DNA, 25 bp, Homo sapien
gtctacaatgcaattatagctatca

SEQ ID NO: 2183121 - DNA, 25 bp, Homo sapien
catcctgaaaaatcgctcttcttgg

SEQ ID NO: 2183122 - DNA, 25 bp, Homo sapien
gatctgaaatttaacagcatcaggt

SEQ ID NO: 2183123 - DNA, 25 bp, Homo sapien
gaaaagccaaacaatcattatatac

SEQ ID NO: 2183124 - DNA, 25 bp, Homo sapien
gaatggtccgtgaagactgtctgaa

SEQ ID NO: 2183125 - DNA, 25 bp, Homo sapien
gcttgtttgtaagcaccgagctgac

SEQ ID NO: 2183126 - DNA, 25 bp, Homo sapien
tttgtatcacaaagagacacggtta

SEQ ID NO: 2183127 - DNA, 25 bp, Homo sapien
tgacatcagcaaatccaaaaaggga

SEQ ID NO: 2183128 - DNA, 25 bp, Homo sapien
gctgtagactggttgtacatgactt

SEQ ID NO: 2183129 - DNA, 25 bp, Homo sapien
ctgtagactggttgtacatgacttt

SEQ ID NO: 2183130 - DNA, 25 bp, Homo sapien
tggctgtagactggttgtacatgac

SEQ ID NO: 2183131 - DNA, 25 bp, Homo sapien
ggctgtagactggttgtacatgact

SEQ ID NO: 2183132 - DNA, 25 bp, Homo sapien
gataccatgcatatattatgggtac

SEQ ID NO: 2183133 - DNA, 25 bp, Homo sapien
aaagtcagataccatgcatatatta

SEQ ID NO: 2183134 - DNA, 25 bp, Homo sapien
accatgcatatattatgggtacggg

SEQ ID NO: 2183135 - DNA, 25 bp, Homo sapien
gggtagaaaaagtcagataccatgc

SEQ ID NO: 2183136 - DNA, 25 bp, Homo sapien
tgaggcacggtggccattcccagct

SEQ ID NO: 2183137 - DNA, 25 bp, Homo sapien
ctgaggcacggtggccattcccagc

SEQ ID NO: 2183138 - DNA, 25 bp, Homo sapien
gacggtttagacatcagttcttaga

SEQ ID NO: 2183139 - DNA, 25 bp, Homo sapien
ttcttagagcaacccagttaagaga

SEQ ID NO: 2183140 - DNA, 25 bp, Homo sapien
gctgagacggtttagacatcagttc

SEQ ID NO: 2183141 - DNA, 25 bp, Homo sapien
gagcaacccagttaagagatgtgtc

SEQ ID NO: 2183142 - DNA, 25 bp, Homo sapien
accacccgccacgatcccacgcgcg

SEQ ID NO: 2183143 - DNA, 25 bp, Homo sapien
tctggagaccctccgacccaacttc

SEQ ID NO: 2183144 - DNA, 25 bp, Homo sapien
gcgcgcagaacagccccatccgaaa

SEQ ID NO: 2183145 - DNA, 25 bp, Homo sapien
ccccatccgaaagcggcccagagcg

SEQ ID NO: 2183146 - DNA, 25 bp, Homo sapien
ccgccagtgtccggacctcccgcgg

SEQ ID NO: 2183147 - DNA, 25 bp, Homo sapien
cagtgtccggacctcccgcggctgc

SEQ ID NO: 2183148 - DNA, 25 bp, Homo sapien
gccagtgtccggacctcccgcggct

SEQ ID NO: 2183149 - DNA, 25 bp, Homo sapien
ggccgccagtgtccggacctcccgc

SEQ ID NO: 2183150 - DNA, 25 bp, Homo sapien
gaagacatccatcaatgaaccaggg

SEQ ID NO: 2183151 - DNA, 25 bp, Homo sapien
tccattccttggtgcgcagaggcat

SEQ ID NO: 2183152 - DNA, 25 bp, Homo sapien
gactccttagctggtgtgaatggaa

SEQ ID NO: 2183153 - DNA, 25 bp, Homo sapien
taaactggaagactataagctggac

SEQ ID NO: 2183154 - DNA, 25 bp, Homo sapien
cacatggtctggtatgaaaggggca

SEQ ID NO: 2183155 - DNA, 25 bp, Homo sapien
ttttctcctttggaaagcggcaatg

SEQ ID NO: 2183156 - DNA, 25 bp, Homo sapien
caaggattctttcggctgtggggcc

SEQ ID NO: 2183157 - DNA, 25 bp, Homo sapien
gaaagcggcaatgctttgcacatgc

SEQ ID NO: 2183158 - DNA, 25 bp, Homo sapien
tggcatctacgttaaatgtcatgag

SEQ ID NO: 2183159 - DNA, 25 bp, Homo sapien
taaaggcaagacaactcaaggcatt

SEQ ID NO: 2183160 - DNA, 25 bp, Homo sapien
ccttagctgctaaacctctgttcta

SEQ ID NO: 2183161 - DNA, 25 bp, Homo sapien
tattatccaaaagggactcaggcac

SEQ ID NO: 2183162 - DNA, 25 bp, Homo sapien
gtgtctgggtgaaatagcttgtgct

SEQ ID NO: 2183163 - DNA, 25 bp, Homo sapien
tctttgcactcaaagcaactgcagt

SEQ ID NO: 2183164 - DNA, 25 bp, Homo sapien
tggattagatctttgggacatggtg

SEQ ID NO: 2183165 - DNA, 25 bp, Homo sapien
ggacatggtgttttacagacacact

SEQ ID NO: 2183166 - DNA, 25 bp, Homo sapien
gacacactcgcaacgatcttcgtca

SEQ ID NO: 2183167 - DNA, 25 bp, Homo sapien
cagatagttgtagtgtggcaattgg

SEQ ID NO: 2183168 - DNA, 25 bp, Homo sapien
tcttttatgtcatccgtaagtaact

SEQ ID NO: 2183169 - DNA, 25 bp, Homo sapien
cagaaacgtgttggtcagatagttg

SEQ ID NO: 2183170 - DNA, 25 bp, Homo sapien
ggatcaccaaagttgattgtatctt

SEQ ID NO: 2183171 - DNA, 25 bp, Homo sapien
cttctgttccagcaagtggattttc

SEQ ID NO: 2183172 - DNA, 25 bp, Homo sapien
tggattttcctcctgcaaaacacat

SEQ ID NO: 2183173 - DNA, 25 bp, Homo sapien
tctgttccagcaagtggattttcct

SEQ ID NO: 2183174 - DNA, 25 bp, Homo sapien
gattttcctcctgcaaaacacattt

SEQ ID NO: 2183175 - DNA, 25 bp, Homo sapien
tgttgctatcccatagcatgtcaat

SEQ ID NO: 2183176 - DNA, 25 bp, Homo sapien
tgctatcccatagcatgtcaatagg

SEQ ID NO: 2183177 - DNA, 25 bp, Homo sapien
atcccatagcatgtcaataggacag

SEQ ID NO: 2183178 - DNA, 25 bp, Homo sapien
atttgttgctatcccatagcatgtc

SEQ ID NO: 2183179 - DNA, 25 bp, Homo sapien
taatctcaagagaatttcaaagcca

SEQ ID NO: 2183180 - DNA, 25 bp, Homo sapien
aagattagaaagttgcaaaactcac

SEQ ID NO: 2183181 - DNA, 25 bp, Homo sapien
tcaaagccaaattaattttaagtca

SEQ ID NO: 2183182 - DNA, 25 bp, Homo sapien
gtcgtttgtcttataaataatcaca

SEQ ID NO: 2183183 - DNA, 25 bp, Homo sapien
ttaatgcttgttctggaacatgtgc

SEQ ID NO: 2183184 - DNA, 25 bp, Homo sapien
tgctaaatttgaggttacagcggtt

SEQ ID NO: 2183185 - DNA, 25 bp, Homo sapien
tagttttgtcactccccaatgaccc

SEQ ID NO: 2183186 - DNA, 25 bp, Homo sapien
tctcatttcaggatgtaaatataca

SEQ ID NO: 2183187 - DNA, 25 bp, Homo sapien
ctgcagtagactatgcatattaaga

SEQ ID NO: 2183188 - DNA, 25 bp, Homo sapien
gcagtagactatgcatattaagaac

SEQ ID NO: 2183189 - DNA, 25 bp, Homo sapien
tgcagtagactatgcatattaagaa

SEQ ID NO: 2183190 - DNA, 25 bp, Homo sapien
tctgataattgagtatggatggcgg

SEQ ID NO: 2183191 - DNA, 25 bp, Homo sapien
ggatcttctgataattgagtatgga

SEQ ID NO: 2183192 - DNA, 25 bp, Homo sapien
tcttctgataattgagtatggatgg

SEQ ID NO: 2183193 - DNA, 25 bp, Homo sapien
tggatcttctgataattgagtatgg

SEQ ID NO: 2183194 - DNA, 25 bp, Homo sapien
aattcaggtactgatgtcaaaggca

SEQ ID NO: 2183195 - DNA, 25 bp, Homo sapien
caggcactaattcaggtactgatgt

SEQ ID NO: 2183196 - DNA, 25 bp, Homo sapien
tttaacaggcactaattcaggtact

SEQ ID NO: 2183197 - DNA, 25 bp, Homo sapien
aacctgtatgattggcaactttaac

SEQ ID NO: 2183198 - DNA, 25 bp, Homo sapien
ccacgcacgtttctctagggctgca

SEQ ID NO: 2183199 - DNA, 25 bp, Homo sapien
gttcatacagataaggctctcttca

SEQ ID NO: 2183200 - DNA, 25 bp, Homo sapien
aacagccaccacatcggaacacgtt

SEQ ID NO: 2183201 - DNA, 25 bp, Homo sapien
ctgtttggaaatgtacgaggtgctg

SEQ ID NO: 2183202 - DNA, 25 bp, Homo sapien
gttgccgcaaacctagtggaccgat

SEQ ID NO: 2183203 - DNA, 25 bp, Homo sapien
gctgttcagatcgttccaatgtgga

SEQ ID NO: 2183204 - DNA, 25 bp, Homo sapien
tcaatgtcatagaaagttgccgcaa

SEQ ID NO: 2183205 - DNA, 25 bp, Homo sapien
gatgctgagcgagagtccatactgg

SEQ ID NO: 2183206 - DNA, 25 bp, Homo sapien
cagcaatttccctttgcagtgggtt

SEQ ID NO: 2183207 - DNA, 25 bp, Homo sapien
caatttccctttgcagtgggtttgg

SEQ ID NO: 2183208 - DNA, 25 bp, Homo sapien
gggaggtggattcggttgcaataca

SEQ ID NO: 2183209 - DNA, 25 bp, Homo sapien
tggattcggttgcaatacaaatagt

SEQ ID NO: 2183210 - DNA, 25 bp, Homo sapien
gtttcactggaagagcattttgcat

SEQ ID NO: 2183211 - DNA, 25 bp, Homo sapien
ttccctctacctcttagcagcttct

SEQ ID NO: 2183212 - DNA, 25 bp, Homo sapien
tctgtttcactggaagagcattttg

SEQ ID NO: 2183213 - DNA, 25 bp, Homo sapien
gttccctctacctcttagcagcttc

SEQ ID NO: 2183214 - DNA, 25 bp, Homo sapien
tgtatggcctgttagctaagaacaa

SEQ ID NO: 2183215 - DNA, 25 bp, Homo sapien
tctagtagacggtgacaaagcaata

SEQ ID NO: 2183216 - DNA, 25 bp, Homo sapien
gagcacagtcacaccttacatgatc

SEQ ID NO: 2183217 - DNA, 25 bp, Homo sapien
aaacatgtcaggtatggatgtgtac

SEQ ID NO: 2183218 - DNA, 25 bp, Homo sapien
ccatgttcattactggagccctgca

SEQ ID NO: 2183219 - DNA, 25 bp, Homo sapien
catgttcattactggagccctgcac

SEQ ID NO: 2183220 - DNA, 25 bp, Homo sapien
tcaccactacccactctctgtacat

SEQ ID NO: 2183221 - DNA, 25 bp, Homo sapien
catgaaaacattcaccactacccac

SEQ ID NO: 2183222 - DNA, 25 bp, Homo sapien
tctctccaatgtatgccgcaggttc

SEQ ID NO: 2183223 - DNA, 25 bp, Homo sapien
tactaagcagttgacatcaggcagc

SEQ ID NO: 2183224 - DNA, 25 bp, Homo sapien
tttttgcacaaccttcatggaagct

SEQ ID NO: 2183225 - DNA, 25 bp, Homo sapien
ggtgtggccaccaatgcttacagct

SEQ ID NO: 2183226 - DNA, 25 bp, Homo sapien
gattaggtttatttgcatgtgccag

SEQ ID NO: 2183227 - DNA, 25 bp, Homo sapien
tggaattctttagaagcaccggcta

SEQ ID NO: 2183228 - DNA, 25 bp, Homo sapien
aaccatgttatcacgttagtgtgga

SEQ ID NO: 2183229 - DNA, 25 bp, Homo sapien
ttctaggacacatcaagacctgctc

SEQ ID NO: 2183230 - DNA, 25 bp, Homo sapien
tcaaacccattttttgcgtttctga

SEQ ID NO: 2183231 - DNA, 25 bp, Homo sapien
atattttcctctaccactagaaatg

SEQ ID NO: 2183232 - DNA, 25 bp, Homo sapien
tattttcctctaccactagaaatga

SEQ ID NO: 2183233 - DNA, 25 bp, Homo sapien
tttcctctaccactagaaatgatat

SEQ ID NO: 2183234 - DNA, 25 bp, Homo sapien
tcctctaccactagaaatgatatat

SEQ ID NO: 2183235 - DNA, 25 bp, Homo sapien
tcagataaatgcaatggcatctcac

SEQ ID NO: 2183236 - DNA, 25 bp, Homo sapien
tgattattgattataaagacgaaac

SEQ ID NO: 2183237 - DNA, 25 bp, Homo sapien
gagtcttagatttggttctattaca

SEQ ID NO: 2183238 - DNA, 25 bp, Homo sapien
ccattcagtataggtttctcaccag

SEQ ID NO: 2183239 - DNA, 25 bp, Homo sapien
acatcacatatatatttccctctga

SEQ ID NO: 2183240 - DNA, 25 bp, Homo sapien
attcttcccaacaatagtatacatg

SEQ ID NO: 2183241 - DNA, 25 bp, Homo sapien
cttcccaacaatagtatacatgtat

SEQ ID NO: 2183242 - DNA, 25 bp, Homo sapien
aaaaaaagagatgaataaacatcac

SEQ ID NO: 2183243 - DNA, 25 bp, Homo sapien
ccccagcaattaagacaaagtggct

SEQ ID NO: 2183244 - DNA, 25 bp, Homo sapien
gttggataactggttctcttaatgg

SEQ ID NO: 2183245 - DNA, 25 bp, Homo sapien
tctcttaatggctccccagcaatta

SEQ ID NO: 2183246 - DNA, 25 bp, Homo sapien
agcaattaagacaaagtggcttctc

SEQ ID NO: 2183247 - DNA, 25 bp, Homo sapien
gttctataacaacaggcagggtcag

SEQ ID NO: 2183248 - DNA, 25 bp, Homo sapien
agaagtcagtccgactgcctcggca

SEQ ID NO: 2183249 - DNA, 25 bp, Homo sapien
cagaaaagtgggctaagatctaata

SEQ ID NO: 2183250 - DNA, 25 bp, Homo sapien
ggctaagatctaataactcctcaaa

SEQ ID NO: 2183251 - DNA, 25 bp, Homo sapien
gctgtgtgatgaggttctatttttt

SEQ ID NO: 2183252 - DNA, 25 bp, Homo sapien
tccacctggacactgtcaccttctc

SEQ ID NO: 2183253 - DNA, 25 bp, Homo sapien
attttttgttgtgcatcatcgggcc

SEQ ID NO: 2183254 - DNA, 25 bp, Homo sapien
gtcaccttctccaagcactgctgtg

SEQ ID NO: 2183255 - DNA, 25 bp, Homo sapien
caatagtcagtttagaaggctcttc

SEQ ID NO: 2183256 - DNA, 25 bp, Homo sapien
gcaaaagattgttgtcaaaggtctc

SEQ ID NO: 2183257 - DNA, 25 bp, Homo sapien
tgcccggctgtggagcattttctaa

SEQ ID NO: 2183258 - DNA, 25 bp, Homo sapien
tcttcagggtgtcattagaggacaa

SEQ ID NO: 2183259 - DNA, 25 bp, Homo sapien
cacagtccagtttattctagacaga

SEQ ID NO: 2183260 - DNA, 25 bp, Homo sapien
cagatgcaactttgctccaaggcta

SEQ ID NO: 2183261 - DNA, 25 bp, Homo sapien
caactttgctccaaggctacagacc

SEQ ID NO: 2183262 - DNA, 25 bp, Homo sapien
gatgttttgcactgtggcccatggt

SEQ ID NO: 2183263 - DNA, 25 bp, Homo sapien
acatctccagatatcgtgtaaatga

SEQ ID NO: 2183264 - DNA, 25 bp, Homo sapien
catctccagatatcgtgtaaatgaa

SEQ ID NO: 2183265 - DNA, 25 bp, Homo sapien
atctccagatatcgtgtaaatgaag

SEQ ID NO: 2183266 - DNA, 25 bp, Homo sapien
catgttagtgtccataatgccaaaa

SEQ ID NO: 2183267 - DNA, 25 bp, Homo sapien
ggaacaaagacatatacgtattaca

SEQ ID NO: 2183268 - DNA, 25 bp, Homo sapien
ggaaaggaccagcaacattaacatg

SEQ ID NO: 2183269 - DNA, 25 bp, Homo sapien
catatacgtattacaaacacaaaga

SEQ ID NO: 2183270 - DNA, 25 bp, Homo sapien
caactcatgttgctgattggaaagc

SEQ ID NO: 2183271 - DNA, 25 bp, Homo sapien
tatgtttaacaacagccacagaaga

SEQ ID NO: 2183272 - DNA, 25 bp, Homo sapien
gatatagtgtccatctttgccagta

SEQ ID NO: 2183273 - DNA, 25 bp, Homo sapien
cacagagtgttagagggcatggaat

SEQ ID NO: 2183274 - DNA, 25 bp, Homo sapien
cagacgctcaatgctaaatgtgcaa

SEQ ID NO: 2183275 - DNA, 25 bp, Homo sapien
tgcttcatagctgggttcataacgc

SEQ ID NO: 2183276 - DNA, 25 bp, Homo sapien
ccagtatgtctgatgacaggcagcc

SEQ ID NO: 2183277 - DNA, 25 bp, Homo sapien
tttaaagtgggtttacagacgctca

SEQ ID NO: 2183278 - DNA, 25 bp, Homo sapien
gctcctgggtccaatttgaagtcca

SEQ ID NO: 2183279 - DNA, 25 bp, Homo sapien
aatataaggttggtgtgcgagtgta

SEQ ID NO: 2183280 - DNA, 25 bp, Homo sapien
ataaggttggtgtgcgagtgtaaac

SEQ ID NO: 2183281 - DNA, 25 bp, Homo sapien
tagggataggttgggaatgtttggc

SEQ ID NO: 2183282 - DNA, 25 bp, Homo sapien
ctcctagggaagtgttaaagccgag

SEQ ID NO: 2183283 - DNA, 25 bp, Homo sapien
taaagccgaggtgggctgctaaaac

SEQ ID NO: 2183284 - DNA, 25 bp, Homo sapien
ggcctggacctggatccattatata

SEQ ID NO: 2183285 - DNA, 25 bp, Homo sapien
gctgctaaaacagcccctcttaaag

SEQ ID NO: 2183286 - DNA, 25 bp, Homo sapien
ttttcatattgggaactggatcatt

SEQ ID NO: 2183287 - DNA, 25 bp, Homo sapien
tgagggtgtcaatataacatatgtc

SEQ ID NO: 2183288 - DNA, 25 bp, Homo sapien
caggattccaattctagtattcttt

SEQ ID NO: 2183289 - DNA, 25 bp, Homo sapien
taacatatgtcttgaataataaact

SEQ ID NO: 2183290 - DNA, 25 bp, Homo sapien
caagttgagaacatcaaggaggtag

SEQ ID NO: 2183291 - DNA, 25 bp, Homo sapien
cacatggaagtcagtggtgactggt

SEQ ID NO: 2183292 - DNA, 25 bp, Homo sapien
tgggtggatgtcaagttgagaacat

SEQ ID NO: 2183293 - DNA, 25 bp, Homo sapien
ctggtttcaatggaccagtgtgggt

SEQ ID NO: 2183294 - DNA, 25 bp, Homo sapien
tgttgacatcgccagatgccttggc

SEQ ID NO: 2183295 - DNA, 25 bp, Homo sapien
tcctagccgactgtcaagttctgac

SEQ ID NO: 2183296 - DNA, 25 bp, Homo sapien
cattgttgcaactgttgacatcgcc

SEQ ID NO: 2183297 - DNA, 25 bp, Homo sapien
agatgccttggcctgtcctagccga

SEQ ID NO: 2183298 - DNA, 25 bp, Homo sapien
tgtctttcccttcaactgcatccat

SEQ ID NO: 2183299 - DNA, 25 bp, Homo sapien
atatgtctttcccttcaactgcatc

SEQ ID NO: 2183300 - DNA, 25 bp, Homo sapien
tactcatgctatcagttgatatgtc

SEQ ID NO: 2183301 - DNA, 25 bp, Homo sapien
cacagtatactcatgctatcagttg

SEQ ID NO: 2183302 - DNA, 25 bp, Homo sapien
tcttagggattaggtcagcagggac

SEQ ID NO: 2183303 - DNA, 25 bp, Homo sapien
gaacatctggcaccctttgtgcaca

SEQ ID NO: 2183304 - DNA, 25 bp, Homo sapien
tctggtttaaaagtgcacctatcca

SEQ ID NO: 2183305 - DNA, 25 bp, Homo sapien
tgtcgccacgactgaaatgtacttc

SEQ ID NO: 2183306 - DNA, 25 bp, Homo sapien
caagaatggtatttctggggtgagt

SEQ ID NO: 2183307 - DNA, 25 bp, Homo sapien
agaatggtatttctggggtgagtgg

SEQ ID NO: 2183308 - DNA, 25 bp, Homo sapien
aagaatggtatttctggggtgagtg

SEQ ID NO: 2183309 - DNA, 25 bp, Homo sapien
gaatggtatttctggggtgagtggg

SEQ ID NO: 2183310 - DNA, 25 bp, Homo sapien
ctgatttgagcagatcctgaccact

SEQ ID NO: 2183311 - DNA, 25 bp, Homo sapien
tgcaaatgaagtgccaactatggct

SEQ ID NO: 2183312 - DNA, 25 bp, Homo sapien
tcctaactgcaaatgaagtgccaac

SEQ ID NO: 2183313 - DNA, 25 bp, Homo sapien
tttgcacattcctaactgcaaatga

SEQ ID NO: 2183314 - DNA, 25 bp, Homo sapien
tctctgtgtggttatgttgccaata

SEQ ID NO: 2183315 - DNA, 25 bp, Homo sapien
caacaaagactatggagtaaagttt

SEQ ID NO: 2183316 - DNA, 25 bp, Homo sapien
ggacatcatgtttaaaagcccttca

SEQ ID NO: 2183317 - DNA, 25 bp, Homo sapien
tttataccaattttagattcttcac

SEQ ID NO: 2183318 - DNA, 25 bp, Homo sapien
catggtctgctgcttgaaagtgctt

SEQ ID NO: 2183319 - DNA, 25 bp, Homo sapien
tatgaaatcgggcaaagtcttctgc

SEQ ID NO: 2183320 - DNA, 25 bp, Homo sapien
gctaatcaactaaatcactggtctg

SEQ ID NO: 2183321 - DNA, 25 bp, Homo sapien
tccttggctgtgattacaagaccac

SEQ ID NO: 2183322 - DNA, 25 bp, Homo sapien
aaaggcatgtccctaaaacctcaga

SEQ ID NO: 2183323 - DNA, 25 bp, Homo sapien
aaggcatgtccctaaaacctcagag

SEQ ID NO: 2183324 - DNA, 25 bp, Homo sapien
ctaaaggcatgtccctaaaacctca

SEQ ID NO: 2183325 - DNA, 25 bp, Homo sapien
ggcatgtccctaaaacctcagagtc

SEQ ID NO: 2183326 - DNA, 25 bp, Homo sapien
caaagtaagcaataggtctgccagg

SEQ ID NO: 2183327 - DNA, 25 bp, Homo sapien
ggttaaatagacacaatagcctggc

SEQ ID NO: 2183328 - DNA, 25 bp, Homo sapien
gccaggttccatgtgtagtacccga

SEQ ID NO: 2183329 - DNA, 25 bp, Homo sapien
tagtgagagctaacaatccagaagg

SEQ ID NO: 2183330 - DNA, 25 bp, Homo sapien
acagttgtaggccatgggctggctc

SEQ ID NO: 2183331 - DNA, 25 bp, Homo sapien
agttcctggtactgaggctccacca

SEQ ID NO: 2183332 - DNA, 25 bp, Homo sapien
tgagcaaggcatctcagcgtgcaga

SEQ ID NO: 2183333 - DNA, 25 bp, Homo sapien
cacaccatccttactgggtttaggg

SEQ ID NO: 2183334 - DNA, 25 bp, Homo sapien
tgtaaccaagctcctaataagtcta

SEQ ID NO: 2183335 - DNA, 25 bp, Homo sapien
caccatcactaagtgagacatctta

SEQ ID NO: 2183336 - DNA, 25 bp, Homo sapien
aacaagagggaaatgtaaccaagct

SEQ ID NO: 2183337 - DNA, 25 bp, Homo sapien
taagtctataggtggaacaattaca

SEQ ID NO: 2183338 - DNA, 25 bp, Homo sapien
gcccctgggcatcgaggggaataat

SEQ ID NO: 2183339 - DNA, 25 bp, Homo sapien
catcgaggggaataataaacatcag

SEQ ID NO: 2183340 - DNA, 25 bp, Homo sapien
ataaacatcagtgacaattgctggg

SEQ ID NO: 2183341 - DNA, 25 bp, Homo sapien
agtgctgctatcagagcccctgggc

SEQ ID NO: 2183342 - DNA, 25 bp, Homo sapien
aatggaagaatcctctctttgactt

SEQ ID NO: 2183343 - DNA, 25 bp, Homo sapien
gggccaaagggctatgaggcaggcc

SEQ ID NO: 2183344 - DNA, 25 bp, Homo sapien
ccaaagggctatgaggcaggccatc

SEQ ID NO: 2183345 - DNA, 25 bp, Homo sapien
gccaaagggctatgaggcaggccat

SEQ ID NO: 2183346 - DNA, 25 bp, Homo sapien
ggccaaagggctatgaggcaggcca

SEQ ID NO: 2183347 - DNA, 25 bp, Homo sapien
tcattttaccagtgtgtccacagaa

SEQ ID NO: 2183348 - DNA, 25 bp, Homo sapien
tttaccagtgtgtccacagaagtct

SEQ ID NO: 2183349 - DNA, 25 bp, Homo sapien
tcctgggttcattttaccagtgtgt

SEQ ID NO: 2183350 - DNA, 25 bp, Homo sapien
gggttcattttaccagtgtgtccac

SEQ ID NO: 2183351 - DNA, 25 bp, Homo sapien
ctgcccccttccaggaggtaggata

SEQ ID NO: 2183352 - DNA, 25 bp, Homo sapien
tgcccccttccaggaggtaggatac

SEQ ID NO: 2183353 - DNA, 25 bp, Homo sapien
tcagacaagctatgcctgggtcgcc

SEQ ID NO: 2183354 - DNA, 25 bp, Homo sapien
taactggcaccacctacatctggca

SEQ ID NO: 2183355 - DNA, 25 bp, Homo sapien
tatgtctcgccaacagatccactga

SEQ ID NO: 2183356 - DNA, 25 bp, Homo sapien
cacataaacgggtagtcggaactat

SEQ ID NO: 2183357 - DNA, 25 bp, Homo sapien
aatataatgcgatgaggaccaaatg

SEQ ID NO: 2183358 - DNA, 25 bp, Homo sapien
tggagctggtgatatccgaaaagac

SEQ ID NO: 2183359 - DNA, 25 bp, Homo sapien
gagaaagtgcatcctcttgggattg

SEQ ID NO: 2183360 - DNA, 25 bp, Homo sapien
ggcataatgtgcatgagactggtaa

SEQ ID NO: 2183361 - DNA, 25 bp, Homo sapien
gcgccttcaacgtgttagcagagaa

SEQ ID NO: 2183362 - DNA, 25 bp, Homo sapien
aaggaatggcttccattattgctgc

SEQ ID NO: 2183363 - DNA, 25 bp, Homo sapien
cacaagaagtagctcgagcaggagc

SEQ ID NO: 2183364 - DNA, 25 bp, Homo sapien
cagaatccagtatgagtgtagggta

SEQ ID NO: 2183365 - DNA, 25 bp, Homo sapien
tcaaacagtaaaaacggatccagat

SEQ ID NO: 2183366 - DNA, 25 bp, Homo sapien
atcaaacagtaaaaacggatccaga

SEQ ID NO: 2183367 - DNA, 25 bp, Homo sapien
gtttcaaaacctcgatgtggatgat

SEQ ID NO: 2183368 - DNA, 25 bp, Homo sapien
caaaacctcgatgtggatgatcagg

SEQ ID NO: 2183369 - DNA, 25 bp, Homo sapien
ctcccggctgagcactgagagagta

SEQ ID NO: 2183370 - DNA, 25 bp, Homo sapien
aaccccttccgactgctcccggctg

SEQ ID NO: 2183371 - DNA, 25 bp, Homo sapien
gccaatgcttctccggaccctcgct

SEQ ID NO: 2183372 - DNA, 25 bp, Homo sapien
gctgagcactgagagagtaactttc

SEQ ID NO: 2183373 - DNA, 25 bp, Homo sapien
ctgatgctgagctgtagaggatgga

SEQ ID NO: 2183374 - DNA, 25 bp, Homo sapien
tctgatgctgagctgtagaggatgg

SEQ ID NO: 2183375 - DNA, 25 bp, Homo sapien
ccctgcaggagccccaggtactcac

SEQ ID NO: 2183376 - DNA, 25 bp, Homo sapien
ctagtggacccctgcaggagcccca

SEQ ID NO: 2183377 - DNA, 25 bp, Homo sapien
gacccctgcaggagccccaggtact

SEQ ID NO: 2183378 - DNA, 25 bp, Homo sapien
tggacccctgcaggagccccaggta

SEQ ID NO: 2183379 - DNA, 25 bp, Homo sapien
gctcactcgggtaatttaggcggca

SEQ ID NO: 2183380 - DNA, 25 bp, Homo sapien
ttaagagagtgtgggtccagtagcc

SEQ ID NO: 2183381 - DNA, 25 bp, Homo sapien
ttaggcggcacttgctgtgctccag

SEQ ID NO: 2183382 - DNA, 25 bp, Homo sapien
tcgtgccgggaagagatgctcactc

SEQ ID NO: 2183383 - DNA, 25 bp, Homo sapien
taaagggggagaacgacataactgc

SEQ ID NO: 2183384 - DNA, 25 bp, Homo sapien
gataacaagagtcattgagggaaat

SEQ ID NO: 2183385 - DNA, 25 bp, Homo sapien
ggaaataaaacgattgattgttgcc

SEQ ID NO: 2183386 - DNA, 25 bp, Homo sapien
gacataactgcacgttcatttcaat

SEQ ID NO: 2183387 - DNA, 25 bp, Homo sapien
catgctctgggagttcacggaggcc

SEQ ID NO: 2183388 - DNA, 25 bp, Homo sapien
gaatttccattcactccacagttag

SEQ ID NO: 2183389 - DNA, 25 bp, Homo sapien
cacttcagagggtgaacatacagtt

SEQ ID NO: 2183390 - DNA, 25 bp, Homo sapien
ggagatgttgatcaagcaccttgga

SEQ ID NO: 2183391 - DNA, 25 bp, Homo sapien
ttgcagctacaccagttcccaggca

SEQ ID NO: 2183392 - DNA, 25 bp, Homo sapien
gatcgattccaaacatcactgtagg

SEQ ID NO: 2183393 - DNA, 25 bp, Homo sapien
tgtaggcaaatcaccatagtacttg

SEQ ID NO: 2183394 - DNA, 25 bp, Homo sapien
aatgaaagtgagctaatgcatgcca

SEQ ID NO: 2183395 - DNA, 25 bp, Homo sapien
caacacttgctccaatgatatatcc

SEQ ID NO: 2183396 - DNA, 25 bp, Homo sapien
tctgaacagagtcatagttttgaca

SEQ ID NO: 2183397 - DNA, 25 bp, Homo sapien
ttagattatccctgaacagcctgtg

SEQ ID NO: 2183398 - DNA, 25 bp, Homo sapien
agcaatgtcaatgaagatgctctct

SEQ ID NO: 2183399 - DNA, 25 bp, Homo sapien
ggtctgaacatcatcagtgttttgg

SEQ ID NO: 2183400 - DNA, 25 bp, Homo sapien
catcatcagtgttttggaatcctgg

SEQ ID NO: 2183401 - DNA, 25 bp, Homo sapien
tctcctttgctaatatcgatggagg

SEQ ID NO: 2183402 - DNA, 25 bp, Homo sapien
tatcgatggaggcataaggattttc

SEQ ID NO: 2183403 - DNA, 25 bp, Homo sapien
tattggcatactcaggaaattacct

SEQ ID NO: 2183404 - DNA, 25 bp, Homo sapien
gattcatcttaagggtatattggca

SEQ ID NO: 2183405 - DNA, 25 bp, Homo sapien
ttggtacagccgctattgagggcaa

SEQ ID NO: 2183406 - DNA, 25 bp, Homo sapien
gcaattgcacgtatgctttcaccca

SEQ ID NO: 2183407 - DNA, 25 bp, Homo sapien
tgttgtcattcagacggaaagcatc

SEQ ID NO: 2183408 - DNA, 25 bp, Homo sapien
cagtgaagatcaggatgacaatgcc

SEQ ID NO: 2183409 - DNA, 25 bp, Homo sapien
gcatcattgatacggctccgggaca

SEQ ID NO: 2183410 - DNA, 25 bp, Homo sapien
tccgatctctgatcccagtgaagat

SEQ ID NO: 2183411 - DNA, 25 bp, Homo sapien
cagacacatttttaggtgcagtgac

SEQ ID NO: 2183412 - DNA, 25 bp, Homo sapien
ggtttcaaattagccactcgcacat

SEQ ID NO: 2183413 - DNA, 25 bp, Homo sapien
tcagttctaggaatgatatcagaca

SEQ ID NO: 2183414 - DNA, 25 bp, Homo sapien
ggagattcttggtttcaaattagcc

SEQ ID NO: 2183415 - DNA, 25 bp, Homo sapien
catcttcacttgtggcacagaggac

SEQ ID NO: 2183416 - DNA, 25 bp, Homo sapien
acatcttcacttgtggcacagagga

SEQ ID NO: 2183417 - DNA, 25 bp, Homo sapien
caagttttggcactatttgttctgc

SEQ ID NO: 2183418 - DNA, 25 bp, Homo sapien
aaaattgtgatatcaagttttggca

SEQ ID NO: 2183419 - DNA, 25 bp, Homo sapien
acaggatagagagacatgggggagg

SEQ ID NO: 2183420 - DNA, 25 bp, Homo sapien
caaacaatgagaggatgtaattgtc

SEQ ID NO: 2183421 - DNA, 25 bp, Homo sapien
aaaagaatcatctgattttttactt

SEQ ID NO: 2183422 - DNA, 25 bp, Homo sapien
aaagaatcatctgattttttacttt

SEQ ID NO: 2183423 - DNA, 25 bp, Homo sapien
agaatcatctgattttttactttta

SEQ ID NO: 2183424 - DNA, 25 bp, Homo sapien
acatttcattgtcgttccattcata

SEQ ID NO: 2183425 - DNA, 25 bp, Homo sapien
ggtacatttcattgtcgttccattc

SEQ ID NO: 2183426 - DNA, 25 bp, Homo sapien
cagatgatcggaacaggtacatttc

SEQ ID NO: 2183427 - DNA, 25 bp, Homo sapien
atagcatatgcaacagatgatcgga

SEQ ID NO: 2183428 - DNA, 25 bp, Homo sapien
gattttaggcttatcctcactttga

SEQ ID NO: 2183429 - DNA, 25 bp, Homo sapien
aagagctgattttaggcttatcctc

SEQ ID NO: 2183430 - DNA, 25 bp, Homo sapien
gcttatcctcactttgatgctttgg

SEQ ID NO: 2183431 - DNA, 25 bp, Homo sapien
tttaggcttatcctcactttgatgc

SEQ ID NO: 2183432 - DNA, 25 bp, Homo sapien
gtcggtactccatcccacaaaagaa

SEQ ID NO: 2183433 - DNA, 25 bp, Homo sapien
ccaggtaaataagggctcaaagtag

SEQ ID NO: 2183434 - DNA, 25 bp, Homo sapien
caaagtagttgagcagtggccttac

SEQ ID NO: 2183435 - DNA, 25 bp, Homo sapien
tgttctggtctttcagccaggtaaa

SEQ ID NO: 2183436 - DNA, 25 bp, Homo sapien
tccaatgctagggtccagggttctg

SEQ ID NO: 2183437 - DNA, 25 bp, Homo sapien
aatgctagggtccagggttctgatt

SEQ ID NO: 2183438 - DNA, 25 bp, Homo sapien
tcatgttctttgctcctacaacatt

SEQ ID NO: 2183439 - DNA, 25 bp, Homo sapien
catgttctttgctcctacaacattt

SEQ ID NO: 2183440 - DNA, 25 bp, Homo sapien
gaaatcaaatacaaacctaggcatg

SEQ ID NO: 2183441 - DNA, 25 bp, Homo sapien
tatggtctaggttcctgtctgacca

SEQ ID NO: 2183442 - DNA, 25 bp, Homo sapien
tactgaatactaggagaggttcaac

SEQ ID NO: 2183443 - DNA, 25 bp, Homo sapien
ggtggcccacccaattgttgtatgg

SEQ ID NO: 2183444 - DNA, 25 bp, Homo sapien
ttgtgcagagggccttcatgtttag

SEQ ID NO: 2183445 - DNA, 25 bp, Homo sapien
tttgtgcagagggccttcatgttta

SEQ ID NO: 2183446 - DNA, 25 bp, Homo sapien
atttgtgcagagggccttcatgttt

SEQ ID NO: 2183447 - DNA, 25 bp, Homo sapien
gcttgacaaagtgcttcttgaaact

SEQ ID NO: 2183448 - DNA, 25 bp, Homo sapien
tttgtcgttattagcacagctgtcc

SEQ ID NO: 2183449 - DNA, 25 bp, Homo sapien
ttgtcgttattagcacagctgtcca

SEQ ID NO: 2183450 - DNA, 25 bp, Homo sapien
ttttgtcgttattagcacagctgtc

SEQ ID NO: 2183451 - DNA, 25 bp, Homo sapien
tttttgtcgttattagcacagctgt

SEQ ID NO: 2183452 - DNA, 25 bp, Homo sapien
gaatgagtaatcattagaaacatgg

SEQ ID NO: 2183453 - DNA, 25 bp, Homo sapien
tggaacagagatgcggggtcacagt

SEQ ID NO: 2183454 - DNA, 25 bp, Homo sapien
cgaatgaatgagtaatcattagaaa

SEQ ID NO: 2183455 - DNA, 25 bp, Homo sapien
cagtatgtttcatcatggggcacag

SEQ ID NO: 2183456 - DNA, 25 bp, Homo sapien
gagtcccaacaatcgtgagtgcttg

SEQ ID NO: 2183457 - DNA, 25 bp, Homo sapien
ggcagagtcccaacaatcgtgagtg

SEQ ID NO: 2183458 - DNA, 25 bp, Homo sapien
aagtaaatggcagagtcccaacaat

SEQ ID NO: 2183459 - DNA, 25 bp, Homo sapien
ttcatccactggtctttgggaattt

SEQ ID NO: 2183460 - DNA, 25 bp, Homo sapien
gaaaatcgggtgacagaagaccaat

SEQ ID NO: 2183461 - DNA, 25 bp, Homo sapien
gtcttcttgaaaatcgggtgacaga

SEQ ID NO: 2183462 - DNA, 25 bp, Homo sapien
attttaaatgcttaggtgtggctgc

SEQ ID NO: 2183463 - DNA, 25 bp, Homo sapien
cgggtgacagaagaccaatggattt

SEQ ID NO: 2183464 - DNA, 25 bp, Homo sapien
cagaaaaggttgtgcagcatatgcc

SEQ ID NO: 2183465 - DNA, 25 bp, Homo sapien
gccatatcatactggatatgcccca

SEQ ID NO: 2183466 - DNA, 25 bp, Homo sapien
cccatctcatgatgagctgtcagga

SEQ ID NO: 2183467 - DNA, 25 bp, Homo sapien
tcaggaagtcgtccattgtcacctt

SEQ ID NO: 2183468 - DNA, 25 bp, Homo sapien
gatacaaagaacttctcggcctcct

SEQ ID NO: 2183469 - DNA, 25 bp, Homo sapien
catttcctgggtccgttagcatgga

SEQ ID NO: 2183470 - DNA, 25 bp, Homo sapien
ttaggaagaccaacagatacaaaga

SEQ ID NO: 2183471 - DNA, 25 bp, Homo sapien
ccttgaatattctctgtgcatccca

SEQ ID NO: 2183472 - DNA, 25 bp, Homo sapien
caccattgcatcagtaacatctatg

SEQ ID NO: 2183473 - DNA, 25 bp, Homo sapien
tccaccattgcatcagtaacatcta

SEQ ID NO: 2183474 - DNA, 25 bp, Homo sapien
ccattgcatcagtaacatctatgtt

SEQ ID NO: 2183475 - DNA, 25 bp, Homo sapien
ggtccaccattgcatcagtaacatc

SEQ ID NO: 2183476 - DNA, 25 bp, Homo sapien
caaagagtacagatttgtccaaaat

SEQ ID NO: 2183477 - DNA, 25 bp, Homo sapien
ctgtcaaagagtacagatttgtcca

SEQ ID NO: 2183478 - DNA, 25 bp, Homo sapien
tacagatttgtccaaaatctacccc

SEQ ID NO: 2183479 - DNA, 25 bp, Homo sapien
gatttgtccaaaatctaccccacat

SEQ ID NO: 2183480 - DNA, 25 bp, Homo sapien
ttcatcaactttgccctcacatagg

SEQ ID NO: 2183481 - DNA, 25 bp, Homo sapien
acataggcatgaagatgttcatata

SEQ ID NO: 2183482 - DNA, 25 bp, Homo sapien
gagcagggaggcatccaattggact

SEQ ID NO: 2183483 - DNA, 25 bp, Homo sapien
ccaattggactgatataggaaggat

SEQ ID NO: 2183484 - DNA, 25 bp, Homo sapien
agtcatagccatctaccccatttac

SEQ ID NO: 2183485 - DNA, 25 bp, Homo sapien
ttcatagtctcctctccaataatcc

SEQ ID NO: 2183486 - DNA, 25 bp, Homo sapien
aactggccgcggctgtagtcatagc

SEQ ID NO: 2183487 - DNA, 25 bp, Homo sapien
tccaataatccccatagtcctcata

SEQ ID NO: 2183488 - DNA, 25 bp, Homo sapien
tcattgtagtctaaactgtttgcca

SEQ ID NO: 2183489 - DNA, 25 bp, Homo sapien
aatggcctcagctgcttgccgacct

SEQ ID NO: 2183490 - DNA, 25 bp, Homo sapien
aagcccagagcctctcattgtagtc

SEQ ID NO: 2183491 - DNA, 25 bp, Homo sapien
tttttcaagaccacatactcttcat

SEQ ID NO: 2183492 - DNA, 25 bp, Homo sapien
tagatggtgctcattgtatttagaa

SEQ ID NO: 2183493 - DNA, 25 bp, Homo sapien
taagcattcttgtggattatctggg

SEQ ID NO: 2183494 - DNA, 25 bp, Homo sapien
gtagatggtgctcattgtatttaga

SEQ ID NO: 2183495 - DNA, 25 bp, Homo sapien
ctggttcaagtaataagcattcttg

SEQ ID NO: 2183496 - DNA, 25 bp, Homo sapien
tgaagcttgactgtgagattctgaa

SEQ ID NO: 2183497 - DNA, 25 bp, Homo sapien
ctgagagcactgaagacccattttg

SEQ ID NO: 2183498 - DNA, 25 bp, Homo sapien
cactgaagacccattttgctgaaga

SEQ ID NO: 2183499 - DNA, 25 bp, Homo sapien
gcactgaagacccattttgctgaag

SEQ ID NO: 2183500 - DNA, 25 bp, Homo sapien
gcaagtgtggactgttcctttaaaa

SEQ ID NO: 2183501 - DNA, 25 bp, Homo sapien
taaaaaggcagaccatttgtcccca

SEQ ID NO: 2183502 - DNA, 25 bp, Homo sapien
ggcagaccatttgtccccagcatta

SEQ ID NO: 2183503 - DNA, 25 bp, Homo sapien
gatacatttgggcaagtgtggactg

SEQ ID NO: 2183504 - DNA, 25 bp, Homo sapien
caagaagcaagtgaactttgataga

SEQ ID NO: 2183505 - DNA, 25 bp, Homo sapien
tggtggactgagcagcagttacagc

SEQ ID NO: 2183506 - DNA, 25 bp, Homo sapien
tggcctgttcctcaatggtggactg

SEQ ID NO: 2183507 - DNA, 25 bp, Homo sapien
tagaacaggtcttcggcttcgtggt

SEQ ID NO: 2183508 - DNA, 25 bp, Homo sapien
gaaggagccaggaagagcttgacat

SEQ ID NO: 2183509 - DNA, 25 bp, Homo sapien
ctgagaaggagccaggaagagcttg

SEQ ID NO: 2183510 - DNA, 25 bp, Homo sapien
agaaggagccaggaagagcttgaca

SEQ ID NO: 2183511 - DNA, 25 bp, Homo sapien
gagaaggagccaggaagagcttgac

SEQ ID NO: 2183512 - DNA, 25 bp, Homo sapien
tctctcttatcagcctttgaacttg

SEQ ID NO: 2183513 - DNA, 25 bp, Homo sapien
agatcacatccactgaatgactttc

SEQ ID NO: 2183514 - DNA, 25 bp, Homo sapien
cactgaatgactttccctagactaa

SEQ ID NO: 2183515 - DNA, 25 bp, Homo sapien
tagactaaaacctcctcatgagatt

SEQ ID NO: 2183516 - DNA, 25 bp, Homo sapien
acagtaaacaatctgctgagccaat

SEQ ID NO: 2183517 - DNA, 25 bp, Homo sapien
ctgacgatgattgtgaaactctgac

SEQ ID NO: 2183518 - DNA, 25 bp, Homo sapien
gatgattgtgaaactctgacacaga

SEQ ID NO: 2183519 - DNA, 25 bp, Homo sapien
agaaaaacaagtcttccaggttcag

SEQ ID NO: 2183520 - DNA, 25 bp, Homo sapien
acaagtcttccaggttcaggtgaca

SEQ ID NO: 2183521 - DNA, 25 bp, Homo sapien
acaagactatgttccacagtgtgaa

SEQ ID NO: 2183522 - DNA, 25 bp, Homo sapien
aattccagaccacaatcagtcacac

SEQ ID NO: 2183523 - DNA, 25 bp, Homo sapien
aataaaaacaagactatgttccaca

SEQ ID NO: 2183524 - DNA, 25 bp, Homo sapien
ataaattccagaccacaatcagtca

SEQ ID NO: 2183525 - DNA, 25 bp, Homo sapien
tgataacaggataaaattccaccct

SEQ ID NO: 2183526 - DNA, 25 bp, Homo sapien
tccaccctgtatatgagtaattcca

SEQ ID NO: 2183527 - DNA, 25 bp, Homo sapien
gatgctcagcagtcacacagaaaca

SEQ ID NO: 2183528 - DNA, 25 bp, Homo sapien
tataagtgatcgtcaaaaaggatcc

SEQ ID NO: 2183529 - DNA, 25 bp, Homo sapien
tcagagaggggtgagcctctcatcc

SEQ ID NO: 2183530 - DNA, 25 bp, Homo sapien
agagaggggtgagcctctcatcctc

SEQ ID NO: 2183531 - DNA, 25 bp, Homo sapien
cagagaggggtgagcctctcatcct

SEQ ID NO: 2183532 - DNA, 25 bp, Homo sapien
agaggggtgagcctctcatcctctg

SEQ ID NO: 2183533 - DNA, 25 bp, Homo sapien
tcacacttatcttcagcgtcatcca

SEQ ID NO: 2183534 - DNA, 25 bp, Homo sapien
tgtgatcatgttttcacacttatct

SEQ ID NO: 2183535 - DNA, 25 bp, Homo sapien
tccacttcagatggttctttgttct

SEQ ID NO: 2183536 - DNA, 25 bp, Homo sapien
gcatcattaatatgccctcccttca

SEQ ID NO: 2183537 - DNA, 25 bp, Homo sapien
aacactttggttcctcttcctatag

SEQ ID NO: 2183538 - DNA, 25 bp, Homo sapien
cagaggattagaacactttggttcc

SEQ ID NO: 2183539 - DNA, 25 bp, Homo sapien
aggtgtattgttcactttccacgtc

SEQ ID NO: 2183540 - DNA, 25 bp, Homo sapien
tcctatagataggtgtattgttcac

SEQ ID NO: 2183541 - DNA, 25 bp, Homo sapien
atataataatccagatgggcacaga

SEQ ID NO: 2183542 - DNA, 25 bp, Homo sapien
tatcacaccaaatataataatccag

SEQ ID NO: 2183543 - DNA, 25 bp, Homo sapien
agtgcaattgcaactatgatgatgc

SEQ ID NO: 2183544 - DNA, 25 bp, Homo sapien
gataaaatcagtagtgcaattgcaa

SEQ ID NO: 2183545 - DNA, 25 bp, Homo sapien
tgcaagtgtggaagggatttttaaa

SEQ ID NO: 2183546 - DNA, 25 bp, Homo sapien
gaaggcattgttgatccggttcttg

SEQ ID NO: 2183547 - DNA, 25 bp, Homo sapien
agaaggcattgttgatccggttctt

SEQ ID NO: 2183548 - DNA, 25 bp, Homo sapien
gtggtgcaagtgtggaagggatttt

SEQ ID NO: 2183549 - DNA, 25 bp, Homo sapien
ttgaagggtctgtaaccacaaacca

SEQ ID NO: 2183550 - DNA, 25 bp, Homo sapien
tatggctgattgcacctcaacagca

SEQ ID NO: 2183551 - DNA, 25 bp, Homo sapien
tacttccacgggaagcgctgggtct

SEQ ID NO: 2183552 - DNA, 25 bp, Homo sapien
ggactacgcccgcatccgcatccgg

SEQ ID NO: 2183553 - DNA, 25 bp, Homo sapien
ccacgggaagcgctgggtctgcatc

SEQ ID NO: 2183554 - DNA, 25 bp, Homo sapien
ccgcatccggagagagatggtgccc

SEQ ID NO: 2183555 - DNA, 25 bp, Homo sapien
ctccaagagtcaggcccctgccacc

SEQ ID NO: 2183556 - DNA, 25 bp, Homo sapien
cttgcccttgcccattcgctcctgc

SEQ ID NO: 2183557 - DNA, 25 bp, Homo sapien
ttcaccctactgaccgcggttctac

SEQ ID NO: 2183558 - DNA, 25 bp, Homo sapien
agccgaccactcagcgagccccagg

SEQ ID NO: 2183559 - DNA, 25 bp, Homo sapien
ttaaataccaaagtggaagccagta

SEQ ID NO: 2183560 - DNA, 25 bp, Homo sapien
aagccagtaacccccacggtggcag

SEQ ID NO: 2183561 - DNA, 25 bp, Homo sapien
cagtaacccccacggtggcagaatt

SEQ ID NO: 2183562 - DNA, 25 bp, Homo sapien
cagaatttgcacatagttccatgcc

SEQ ID NO: 2183563 - DNA, 25 bp, Homo sapien
actgaggaagtaaattggtccaggg

SEQ ID NO: 2183564 - DNA, 25 bp, Homo sapien
aactgaggaagtaaattggtccagg

SEQ ID NO: 2183565 - DNA, 25 bp, Homo sapien
aaactgaggaagtaaattggtccag

SEQ ID NO: 2183566 - DNA, 25 bp, Homo sapien
acttcaagatgactacacttagatt

SEQ ID NO: 2183567 - DNA, 25 bp, Homo sapien
tacttcaagatgactacacttagat

SEQ ID NO: 2183568 - DNA, 25 bp, Homo sapien
ctacttcaagatgactacacttaga

SEQ ID NO: 2183569 - DNA, 25 bp, Homo sapien
ttaagactttggtgatgatcttgga

SEQ ID NO: 2183570 - DNA, 25 bp, Homo sapien
gttcccattaccaggaccatctctt

SEQ ID NO: 2183571 - DNA, 25 bp, Homo sapien
cctttaagactttggtgatgatctt

SEQ ID NO: 2183572 - DNA, 25 bp, Homo sapien
ctcctttaagactttggtgatgatc

SEQ ID NO: 2183573 - DNA, 25 bp, Homo sapien
ggtggggcacaccagtgaccaatgc

SEQ ID NO: 2183574 - DNA, 25 bp, Homo sapien
ggcacaccagtgaccaatgcagtgg

SEQ ID NO: 2183575 - DNA, 25 bp, Homo sapien
tggggcacaccagtgaccaatgcag

SEQ ID NO: 2183576 - DNA, 25 bp, Homo sapien
gggcacaccagtgaccaatgcagtg

SEQ ID NO: 2183577 - DNA, 25 bp, Homo sapien
taccatcgctttgaagaggtattct

SEQ ID NO: 2183578 - DNA, 25 bp, Homo sapien
atggagaaagctaccatcgctttga

SEQ ID NO: 2183579 - DNA, 25 bp, Homo sapien
tattcttcattggtatcccaggcat

SEQ ID NO: 2183580 - DNA, 25 bp, Homo sapien
gaggtattcttcattggtatcccag

SEQ ID NO: 2183581 - DNA, 25 bp, Homo sapien
atactaagtctcactttaaaagcat

SEQ ID NO: 2183582 - DNA, 25 bp, Homo sapien
tactaagtctcactttaaaagcatt

SEQ ID NO: 2183583 - DNA, 25 bp, Homo sapien
tctgatactaagtctcactttaaaa

SEQ ID NO: 2183584 - DNA, 25 bp, Homo sapien
ctcccagagctgttctgatactaag

SEQ ID NO: 2183585 - DNA, 25 bp, Homo sapien
ttcagcatgaatggcagtcaccaga

SEQ ID NO: 2183586 - DNA, 25 bp, Homo sapien
ctggttgacagagttcagcatgaat

SEQ ID NO: 2183587 - DNA, 25 bp, Homo sapien
aatggcagtcaccagaaaaaagagc

SEQ ID NO: 2183588 - DNA, 25 bp, Homo sapien
tgacagagttcagcatgaatggcag

SEQ ID NO: 2183589 - DNA, 25 bp, Homo sapien
tctgtgacccggattagaatatcag

SEQ ID NO: 2183590 - DNA, 25 bp, Homo sapien
aaatctgccttagccattctgtgac

SEQ ID NO: 2183591 - DNA, 25 bp, Homo sapien
aatatcagagaaacaagcgagccac

SEQ ID NO: 2183592 - DNA, 25 bp, Homo sapien
aaatccacgctgcacttaaatctgc

SEQ ID NO: 2183593 - DNA, 25 bp, Homo sapien
caaggacacggagtcaggaaaagct

SEQ ID NO: 2183594 - DNA, 25 bp, Homo sapien
gctaaatccaactgagaaagctttt

SEQ ID NO: 2183595 - DNA, 25 bp, Homo sapien
ccttggttgcaaggacacggagtca

SEQ ID NO: 2183596 - DNA, 25 bp, Homo sapien
tccttcaccttggttgcaaggacac

SEQ ID NO: 2183597 - DNA, 25 bp, Homo sapien
attatcatttatttcaggttttata

SEQ ID NO: 2183598 - DNA, 25 bp, Homo sapien
ttatcatttatttcaggttttatac

SEQ ID NO: 2183599 - DNA, 25 bp, Homo sapien
tcatttcactctataaatgccgcgg

SEQ ID NO: 2183600 - DNA, 25 bp, Homo sapien
ggcttcccgggatcaagtatcgcac

SEQ ID NO: 2183601 - DNA, 25 bp, Homo sapien
gtggcttcccgggatcaagtatcgc

SEQ ID NO: 2183602 - DNA, 25 bp, Homo sapien
taaatgccgcggacatctggttcca

SEQ ID NO: 2183603 - DNA, 25 bp, Homo sapien
cgcaggatgcgagtggccaatgagg

SEQ ID NO: 2183604 - DNA, 25 bp, Homo sapien
ccaatgaggaccacaaggttgtagc

SEQ ID NO: 2183605 - DNA, 25 bp, Homo sapien
tgaggaccacaaggttgtagcgtgt

SEQ ID NO: 2183606 - DNA, 25 bp, Homo sapien
cagaagtgaaggtaggtaagtgcgc

SEQ ID NO: 2183607 - DNA, 25 bp, Homo sapien
aagttagcgtgcaggcgcgtggcag

SEQ ID NO: 2183608 - DNA, 25 bp, Homo sapien
tgtgggcgtgccttgttgctctgag

SEQ ID NO: 2183609 - DNA, 25 bp, Homo sapien
cagaggcgtcggcaagttagcgtgc

SEQ ID NO: 2183610 - DNA, 25 bp, Homo sapien
agatgtgtagccagagcgcagagca

SEQ ID NO: 2183611 - DNA, 25 bp, Homo sapien
ggaactgtgccacttgccgcaaaca

SEQ ID NO: 2183612 - DNA, 25 bp, Homo sapien
ttgctgcgtagggacgtggctaaac

SEQ ID NO: 2183613 - DNA, 25 bp, Homo sapien
tggctcaggtaagtcgttcgggtaa

SEQ ID NO: 2183614 - DNA, 25 bp, Homo sapien
gaatgacgaaatgacgtttgctgcg

SEQ ID NO: 2183615 - DNA, 25 bp, Homo sapien
aaaggcgaaacagcaagggcaccat

SEQ ID NO: 2183616 - DNA, 25 bp, Homo sapien
ctgggctggaattaaccgaaaggcg

SEQ ID NO: 2183617 - DNA, 25 bp, Homo sapien
accgaaaggcgaaacagcaagggca

SEQ ID NO: 2183618 - DNA, 25 bp, Homo sapien
gaattaaccgaaaggcgaaacagca

SEQ ID NO: 2183619 - DNA, 25 bp, Homo sapien
tcagctacctgggactgacgattag

SEQ ID NO: 2183620 - DNA, 25 bp, Homo sapien
tgacgattagccctggaactgaccg

SEQ ID NO: 2183621 - DNA, 25 bp, Homo sapien
tcagccaagtcatacagagggtccc

SEQ ID NO: 2183622 - DNA, 25 bp, Homo sapien
gatcctgcgattatcctcagccaag

SEQ ID NO: 2183623 - DNA, 25 bp, Homo sapien
gagagcacccttctgtcaacaggta

SEQ ID NO: 2183624 - DNA, 25 bp, Homo sapien
caacagttggtggacagaccgtacc

SEQ ID NO: 2183625 - DNA, 25 bp, Homo sapien
cagtgtctactggaaggcccaagcc

SEQ ID NO: 2183626 - DNA, 25 bp, Homo sapien
ttcacactgatcaaagagagcaccc

SEQ ID NO: 2183627 - DNA, 25 bp, Homo sapien
agccgaccactcagcgagccccagg

SEQ ID NO: 2183628 - DNA, 25 bp, Homo sapien
ctccaagagtcaggcccctgccacc

SEQ ID NO: 2183629 - DNA, 25 bp, Homo sapien
ttcaccctactgaccgcggttctac

SEQ ID NO: 2183630 - DNA, 25 bp, Homo sapien
cttgcccttgcccattcgctcctgc

SEQ ID NO: 2183631 - DNA, 25 bp, Homo sapien
tctgcattctttgtcaggagggtct

SEQ ID NO: 2183632 - DNA, 25 bp, Homo sapien
gatttgaacttcatggcctccaagc

SEQ ID NO: 2183633 - DNA, 25 bp, Homo sapien
tgatcagttgcagggtcactaggga

SEQ ID NO: 2183634 - DNA, 25 bp, Homo sapien
ggagggtctctaatccctgccctga

SEQ ID NO: 2183635 - DNA, 25 bp, Homo sapien
ccagccatttcctccgggctccact

SEQ ID NO: 2183636 - DNA, 25 bp, Homo sapien
caccacactagagagaggtagtctc

SEQ ID NO: 2183637 - DNA, 25 bp, Homo sapien
taacccatttgccaagctactggtg

SEQ ID NO: 2183638 - DNA, 25 bp, Homo sapien
gagtgcagcttcctttatgtcagtg

SEQ ID NO: 2183639 - DNA, 25 bp, Homo sapien
tcatcgccttgacagccagtattgc

SEQ ID NO: 2183640 - DNA, 25 bp, Homo sapien
cactaatgcggccagcggcgagcag

SEQ ID NO: 2183641 - DNA, 25 bp, Homo sapien
gagcagggctcagaggcgtggccca

SEQ ID NO: 2183642 - DNA, 25 bp, Homo sapien
gccccaggtctagtttcaatccact

SEQ ID NO: 2183643 - DNA, 25 bp, Homo sapien
tctagtttcaatccactaatgcggc

SEQ ID NO: 2183644 - DNA, 25 bp, Homo sapien
tttaaggttctttgcacaggacgcg

SEQ ID NO: 2183645 - DNA, 25 bp, Homo sapien
gttaccaaacggctgtcatccttta

SEQ ID NO: 2183646 - DNA, 25 bp, Homo sapien
cttcctccactatgggagttaccaa

SEQ ID NO: 2183647 - DNA, 25 bp, Homo sapien
aggacgcgataacagctgttccaga

SEQ ID NO: 2183648 - DNA, 25 bp, Homo sapien
gttggttttcgtgattcttgtggca

SEQ ID NO: 2183649 - DNA, 25 bp, Homo sapien
tgccccgaggcttgtggcaattggt

SEQ ID NO: 2183650 - DNA, 25 bp, Homo sapien
tggcaattggttaatattgatgtca

SEQ ID NO: 2183651 - DNA, 25 bp, Homo sapien
caatgttaaatgcttctgccccgag

SEQ ID NO: 2183652 - DNA, 25 bp, Homo sapien
gcagcaagggcaccgttctctgtgc

SEQ ID NO: 2183653 - DNA, 25 bp, Homo sapien
agcaagggcaccgttctctgtgcct

SEQ ID NO: 2183654 - DNA, 25 bp, Homo sapien
cagcaagggcaccgttctctgtgcc

SEQ ID NO: 2183655 - DNA, 25 bp, Homo sapien
gattgcctttgaccgttctcagtct

SEQ ID NO: 2183656 - DNA, 25 bp, Homo sapien
tggatcttccaagctctgcgccttc

SEQ ID NO: 2183657 - DNA, 25 bp, Homo sapien
ttgaccgttctcagtctcagcatcc

SEQ ID NO: 2183658 - DNA, 25 bp, Homo sapien
tgcgccttccttgattgcctttgac

SEQ ID NO: 2183659 - DNA, 25 bp, Homo sapien
ttttgtgagtctcccttgatatacc

SEQ ID NO: 2183660 - DNA, 25 bp, Homo sapien
tgagtctcccttgatatacctgtaa

SEQ ID NO: 2183661 - DNA, 25 bp, Homo sapien
tcctttttgtgagtctcccttgata

SEQ ID NO: 2183662 - DNA, 25 bp, Homo sapien
gctcctttttgtgagtctcccttga

SEQ ID NO: 2183663 - DNA, 25 bp, Homo sapien
cctgtacccatggaataatatccaa

SEQ ID NO: 2183664 - DNA, 25 bp, Homo sapien
atccatcccgtactccattgtcaga

SEQ ID NO: 2183665 - DNA, 25 bp, Homo sapien
cgtactccattgtcagagtcatcag

SEQ ID NO: 2183666 - DNA, 25 bp, Homo sapien
tctcctgtacccatggaataatatc

SEQ ID NO: 2183667 - DNA, 25 bp, Homo sapien
catctgtttgtacagctctcctggc

SEQ ID NO: 2183668 - DNA, 25 bp, Homo sapien
atctgtttgtacagctctcctggct

SEQ ID NO: 2183669 - DNA, 25 bp, Homo sapien
cgattgtgagcaagaaaggaggcct

SEQ ID NO: 2183670 - DNA, 25 bp, Homo sapien
cccctgatactggaattgtttattg

SEQ ID NO: 2183671 - DNA, 25 bp, Homo sapien
catcgcggaaggttcccctgtccat

SEQ ID NO: 2183672 - DNA, 25 bp, Homo sapien
tatgtctcattctaactcgattgtg

SEQ ID NO: 2183673 - DNA, 25 bp, Homo sapien
tctctagaagtacagtagacaggct

SEQ ID NO: 2183674 - DNA, 25 bp, Homo sapien
catccactctgggagagcgtggacc

SEQ ID NO: 2183675 - DNA, 25 bp, Homo sapien
tgcactcggtccaacagtcttgata

SEQ ID NO: 2183676 - DNA, 25 bp, Homo sapien
tttagtttccattagccctgacagg

SEQ ID NO: 2183677 - DNA, 25 bp, Homo sapien
tgaaagggaaagcaacactagtatc

SEQ ID NO: 2183678 - DNA, 25 bp, Homo sapien
taagtcaagagttggcctttaacaa

SEQ ID NO: 2183679 - DNA, 25 bp, Homo sapien
tgttggataaatgtgctgagagaaa

SEQ ID NO: 2183680 - DNA, 25 bp, Homo sapien
tatttggtcttgtccttatacgtgc

SEQ ID NO: 2183681 - DNA, 25 bp, Homo sapien
tatttcctttcattgggcacagagg

SEQ ID NO: 2183682 - DNA, 25 bp, Homo sapien
attccttcctggtgcgcgctctggt

SEQ ID NO: 2183683 - DNA, 25 bp, Homo sapien
tccccggacttgcacgggcggctgt

SEQ ID NO: 2183684 - DNA, 25 bp, Homo sapien
tgaggcgatgatagatggctgttct

SEQ ID NO: 2183685 - DNA, 25 bp, Homo sapien
tggcatatccaagactaagcacctg

SEQ ID NO: 2183686 - DNA, 25 bp, Homo sapien
aatactgtagactatggaacactcc

SEQ ID NO: 2183687 - DNA, 25 bp, Homo sapien
cctctgtggagagtcaggcgagtca

SEQ ID NO: 2183688 - DNA, 25 bp, Homo sapien
gcctagtggtacttcatgaatactg

SEQ ID NO: 2183689 - DNA, 25 bp, Homo sapien
catacctctgcaagtagtcaggcca

SEQ ID NO: 2183690 - DNA, 25 bp, Homo sapien
gaataaggacattctcccgcagaac

SEQ ID NO: 2183691 - DNA, 25 bp, Homo sapien
tatctaagactggatgagccttcag

SEQ ID NO: 2183692 - DNA, 25 bp, Homo sapien
gcatatgtccgattgtacacgtggg

SEQ ID NO: 2183693 - DNA, 25 bp, Homo sapien
caaactgattacttcaccataataa

SEQ ID NO: 2183694 - DNA, 25 bp, Homo sapien
cacgtaactagtgaacaaactgatt

SEQ ID NO: 2183695 - DNA, 25 bp, Homo sapien
tacttcaccataataactctcatga

SEQ ID NO: 2183696 - DNA, 25 bp, Homo sapien
gaagaacaagaggtatggtaggaat

SEQ ID NO: 2183697 - DNA, 25 bp, Homo sapien
gtttagacataacaccagagttccc

SEQ ID NO: 2183698 - DNA, 25 bp, Homo sapien
gctcttcttcgggtccgtgcagtgg

SEQ ID NO: 2183699 - DNA, 25 bp, Homo sapien
gagaactgcttatgacatgtcagca

SEQ ID NO: 2183700 - DNA, 25 bp, Homo sapien
gtaccctgaaagcagccatcgataa

SEQ ID NO: 2183701 - DNA, 25 bp, Homo sapien
gaaaataaatgtgtagataggctct

SEQ ID NO: 2183702 - DNA, 25 bp, Homo sapien
taaatgtgtagataggctctcagta

SEQ ID NO: 2183703 - DNA, 25 bp, Homo sapien
taaaagcagcatttattgattgaaa

SEQ ID NO: 2183704 - DNA, 25 bp, Homo sapien
agcagcatttattgattgaaaataa

SEQ ID NO: 2183705 - DNA, 25 bp, Homo sapien
aatgaagtacatgaagactccttag

SEQ ID NO: 2183706 - DNA, 25 bp, Homo sapien
cttccaccatgtatcttgtgtgtgc

SEQ ID NO: 2183707 - DNA, 25 bp, Homo sapien
catgaagactccttagatcttccac

SEQ ID NO: 2183708 - DNA, 25 bp, Homo sapien
ttccaccatgtatcttgtgtgtgct

SEQ ID NO: 2183709 - DNA, 25 bp, Homo sapien
aacaaccaccatattcaaatggagg

SEQ ID NO: 2183710 - DNA, 25 bp, Homo sapien
catattcaaatggaggggaattttc

SEQ ID NO: 2183711 - DNA, 25 bp, Homo sapien
acaaccaccatattcaaatggaggg

SEQ ID NO: 2183712 - DNA, 25 bp, Homo sapien
ccaccatattcaaatggaggggaat

SEQ ID NO: 2183713 - DNA, 25 bp, Homo sapien
gacatgaagggagtgaccatctaca

SEQ ID NO: 2183714 - DNA, 25 bp, Homo sapien
ccatctacagtgtgtgaaatgccac

SEQ ID NO: 2183715 - DNA, 25 bp, Homo sapien
cacaagaagtcatcaacaagggagg

SEQ ID NO: 2183716 - DNA, 25 bp, Homo sapien
gacttctgttaactaggcagtgcca

SEQ ID NO: 2183717 - DNA, 25 bp, Homo sapien
tcagtccaatttcttcaagaacact

SEQ ID NO: 2183718 - DNA, 25 bp, Homo sapien
gtccaatttcttcaagaacactacg

SEQ ID NO: 2183719 - DNA, 25 bp, Homo sapien
agaacactacgtggggtttcagctt

SEQ ID NO: 2183720 - DNA, 25 bp, Homo sapien
aatttcttcaagaacactacgtggg

SEQ ID NO: 2183721 - DNA, 25 bp, Homo sapien
gaaagcaatttcgtgtcacagtagc

SEQ ID NO: 2183722 - DNA, 25 bp, Homo sapien
caatgtgctagatgccgttgctgtc

SEQ ID NO: 2183723 - DNA, 25 bp, Homo sapien
cgttgctgtcatgcaaaaagcagtc

SEQ ID NO: 2183724 - DNA, 25 bp, Homo sapien
caaaattggagaccacaaaaggacg

SEQ ID NO: 2183725 - DNA, 25 bp, Homo sapien
gaccaaggaggccaactttcaggta

SEQ ID NO: 2183726 - DNA, 25 bp, Homo sapien
aatcacaaaataaaggaccaaggag

SEQ ID NO: 2183727 - DNA, 25 bp, Homo sapien
ttgtaattaaaaggcaacactatat

SEQ ID NO: 2183728 - DNA, 25 bp, Homo sapien
caggtattactagcaacgaattttg

SEQ ID NO: 2183729 - DNA, 25 bp, Homo sapien
gattaagtgaattaaggctctgcct

SEQ ID NO: 2183730 - DNA, 25 bp, Homo sapien
caaggcgggaaaaagcagacgattt

SEQ ID NO: 2183731 - DNA, 25 bp, Homo sapien
tcctgcagcataaatgacctcgttt

SEQ ID NO: 2183732 - DNA, 25 bp, Homo sapien
tccataaggtaggacatcctgcagc

SEQ ID NO: 2183733 - DNA, 25 bp, Homo sapien
tattcttgtgagacttgcacaggta

SEQ ID NO: 2183734 - DNA, 25 bp, Homo sapien
catttcctgtagagaatcatactgc

SEQ ID NO: 2183735 - DNA, 25 bp, Homo sapien
taaaactgcgtaagatggtgaattc

SEQ ID NO: 2183736 - DNA, 25 bp, Homo sapien
gaaattgtagctcaaaactacccag

SEQ ID NO: 2183737 - DNA, 25 bp, Homo sapien
ttagacatgcaaggaaagctatttc

SEQ ID NO: 2183738 - DNA, 25 bp, Homo sapien
tacagcttagcacaaggcatccaac

SEQ ID NO: 2183739 - DNA, 25 bp, Homo sapien
taaagcaagcagctgtatacagaca

SEQ ID NO: 2183740 - DNA, 25 bp, Homo sapien
gtatacagacagcaaaagaagcaac

SEQ ID NO: 2183741 - DNA, 25 bp, Homo sapien
catccaggtgcttcaaatgtcgtgc

SEQ ID NO: 2183742 - DNA, 25 bp, Homo sapien
gagtagtcatttagtacacagggac

SEQ ID NO: 2183743 - DNA, 25 bp, Homo sapien
aatttcccacctgattgatagcaca

SEQ ID NO: 2183744 - DNA, 25 bp, Homo sapien
gacaataaatcaccatgctgaggat

SEQ ID NO: 2183745 - DNA, 25 bp, Homo sapien
gacatcctccagaaattttacaaaa

SEQ ID NO: 2183746 - DNA, 25 bp, Homo sapien
caatcagatttctagaacatttagc

SEQ ID NO: 2183747 - DNA, 25 bp, Homo sapien
tgtaagtcatctggtcaatactgag

SEQ ID NO: 2183748 - DNA, 25 bp, Homo sapien
taacttctaaacaatgcccaagact

SEQ ID NO: 2183749 - DNA, 25 bp, Homo sapien
tgactgagactgaggatattacttt

SEQ ID NO: 2183750 - DNA, 25 bp, Homo sapien
aatcctcaagacagattttaacgaa

SEQ ID NO: 2183751 - DNA, 25 bp, Homo sapien
agtgtctacagaaggacttctaggg

SEQ ID NO: 2183752 - DNA, 25 bp, Homo sapien
gattttaacgaactctccagatttg

SEQ ID NO: 2183753 - DNA, 25 bp, Homo sapien
gaaactttgaaatgttgaactacaa

SEQ ID NO: 2183754 - DNA, 25 bp, Homo sapien
tctttaaagtatcctcattttaata

SEQ ID NO: 2183755 - DNA, 25 bp, Homo sapien
ttgaaactttgaaatgttgaactac

SEQ ID NO: 2183756 - DNA, 25 bp, Homo sapien
tcaagttgaaactttgaaatgttga

SEQ ID NO: 2183757 - DNA, 25 bp, Homo sapien
taatgaagtaattgggactatccct

SEQ ID NO: 2183758 - DNA, 25 bp, Homo sapien
tattgtcaatgaacctctgaagcta

SEQ ID NO: 2183759 - DNA, 25 bp, Homo sapien
cagaagctctcattttcatagggaa

SEQ ID NO: 2183760 - DNA, 25 bp, Homo sapien
tgatgcatgtcagtactccagcacg

SEQ ID NO: 2183761 - DNA, 25 bp, Homo sapien
caaacagggcggagtatgcaaccat

SEQ ID NO: 2183762 - DNA, 25 bp, Homo sapien
tctcaatgtgaccacccaggcattt

SEQ ID NO: 2183763 - DNA, 25 bp, Homo sapien
ggagacttactatgaactacaccag

SEQ ID NO: 2183764 - DNA, 25 bp, Homo sapien
tgtaaaaaccaaccatcgagagctt

SEQ ID NO: 2183765 - DNA, 25 bp, Homo sapien
gaatactcttcatagggagaaaccc

SEQ ID NO: 2183766 - DNA, 25 bp, Homo sapien
catctattaaatgtgagaatactct

SEQ ID NO: 2183767 - DNA, 25 bp, Homo sapien
catagggagaaacccctcttcactg

SEQ ID NO: 2183768 - DNA, 25 bp, Homo sapien
tctattaaatgtgagaatactcttc

SEQ ID NO: 2183769 - DNA, 25 bp, Homo sapien
tataaatgccttaaggaccacttaa

SEQ ID NO: 2183770 - DNA, 25 bp, Homo sapien
tgttataaatgccttaaggaccact

SEQ ID NO: 2183771 - DNA, 25 bp, Homo sapien
tacaaagaaagtagattcaattata

SEQ ID NO: 2183772 - DNA, 25 bp, Homo sapien
gttctgttataaatgccttaaggac

SEQ ID NO: 2183773 - DNA, 25 bp, Homo sapien
tgactcacaagtaaaaccaacaggg

SEQ ID NO: 2183774 - DNA, 25 bp, Homo sapien
ccttcttagaaaacatgcacttcca

SEQ ID NO: 2183775 - DNA, 25 bp, Homo sapien
cagggaagctataacgaacactgat

SEQ ID NO: 2183776 - DNA, 25 bp, Homo sapien
taagacaagccctgttaccgtgaaa

SEQ ID NO: 2183777 - DNA, 25 bp, Homo sapien
gaatatttgggtaagcttcaatggc

SEQ ID NO: 2183778 - DNA, 25 bp, Homo sapien
gaagtgctttactttacgtgctgaa

SEQ ID NO: 2183779 - DNA, 25 bp, Homo sapien
tgctccagatggttagtgtctaaaa

SEQ ID NO: 2183780 - DNA, 25 bp, Homo sapien
ttttaccatctggagcaacacgatg

SEQ ID NO: 2183781 - DNA, 25 bp, Homo sapien
caggttccaaccctagggctcatga

SEQ ID NO: 2183782 - DNA, 25 bp, Homo sapien
tcacctactggatgccggtagcact

SEQ ID NO: 2183783 - DNA, 25 bp, Homo sapien
ggcttcttaacctgggcacaactga

SEQ ID NO: 2183784 - DNA, 25 bp, Homo sapien
tcaaattactaggtcaggatcagca

SEQ ID NO: 2183785 - DNA, 25 bp, Homo sapien
tttcggcaaagtttcgttctgtggc

SEQ ID NO: 2183786 - DNA, 25 bp, Homo sapien
caaaggagttacacgagtttgtctt

SEQ ID NO: 2183787 - DNA, 25 bp, Homo sapien
caagttggactagcatgcccaaata

SEQ ID NO: 2183788 - DNA, 25 bp, Homo sapien
ctaaagtacgctggcaataaaagac

SEQ ID NO: 2183789 - DNA, 25 bp, Homo sapien
ttccatttgtatgcagtcccacaga

SEQ ID NO: 2183790 - DNA, 25 bp, Homo sapien
tcaattttagcagcgctaatcctcc

SEQ ID NO: 2183791 - DNA, 25 bp, Homo sapien
gtactaagatatatcatgcagcccc

SEQ ID NO: 2183792 - DNA, 25 bp, Homo sapien
gctaatcctccgtagagtaccactt

SEQ ID NO: 2183793 - DNA, 25 bp, Homo sapien
ccatcatgcatcaaccgctaagggt

SEQ ID NO: 2183794 - DNA, 25 bp, Homo sapien
tagaaatcatctcacgtgcaacagt

SEQ ID NO: 2183795 - DNA, 25 bp, Homo sapien
agtggatcatctcaaagtaaaagca

SEQ ID NO: 2183796 - DNA, 25 bp, Homo sapien
gatcttcacggatcaagcaaggact

SEQ ID NO: 2183797 - DNA, 25 bp, Homo sapien
gggactaaagccttagactgctctt

SEQ ID NO: 2183798 - DNA, 25 bp, Homo sapien
tcaaagggactaaagccttagactg

SEQ ID NO: 2183799 - DNA, 25 bp, Homo sapien
ggatcaaagggactaaagccttaga

SEQ ID NO: 2183800 - DNA, 25 bp, Homo sapien
gactaaagccttagactgctcttta

SEQ ID NO: 2183801 - DNA, 25 bp, Homo sapien
tcataagatatcctcagacaaacct

SEQ ID NO: 2183802 - DNA, 25 bp, Homo sapien
gacaaacctccccattcttcattct

SEQ ID NO: 2183803 - DNA, 25 bp, Homo sapien
taagatatcctcagacaaacctccc

SEQ ID NO: 2183804 - DNA, 25 bp, Homo sapien
tcagacaaacctccccattcttcat

SEQ ID NO: 2183805 - DNA, 25 bp, Homo sapien
cacagggtgtcttgaggattagcac

SEQ ID NO: 2183806 - DNA, 25 bp, Homo sapien
ccagggctgccaatctaatacttca

SEQ ID NO: 2183807 - DNA, 25 bp, Homo sapien
gaaaaatggttcactcagactgcta

SEQ ID NO: 2183808 - DNA, 25 bp, Homo sapien
cattgctgtcatattctaaggccca

SEQ ID NO: 2183809 - DNA, 25 bp, Homo sapien
cagaaatagaaggtacatcagcatc

SEQ ID NO: 2183810 - DNA, 25 bp, Homo sapien
gcacaattaacccaagatgactatg

SEQ ID NO: 2183811 - DNA, 25 bp, Homo sapien
tatggaggtaagacaagaatgcagt

SEQ ID NO: 2183812 - DNA, 25 bp, Homo sapien
aagaaaagggagttacacatctggg

SEQ ID NO: 2183813 - DNA, 25 bp, Homo sapien
caaatagtctgtcctctaaaggttt

SEQ ID NO: 2183814 - DNA, 25 bp, Homo sapien
tagactccagtgttttagggtccaa

SEQ ID NO: 2183815 - DNA, 25 bp, Homo sapien
ccattgggaagaggcctgaccgata

SEQ ID NO: 2183816 - DNA, 25 bp, Homo sapien
tgaccgatagaccatctccaaactg

SEQ ID NO: 2183817 - DNA, 25 bp, Homo sapien
tctcaaaattaaagatgatatctag

SEQ ID NO: 2183818 - DNA, 25 bp, Homo sapien
gcctgctcaattgctttaaggacat

SEQ ID NO: 2183819 - DNA, 25 bp, Homo sapien
gttcattgtcctgatcctcaatagc

SEQ ID NO: 2183820 - DNA, 25 bp, Homo sapien
tcaagtaattccacataacgatgaa

SEQ ID NO: 2183821 - DNA, 25 bp, Homo sapien
tccacataacgatgaattatttcca

SEQ ID NO: 2183822 - DNA, 25 bp, Homo sapien
gatcctcaatagcacagcaaaaata

SEQ ID NO: 2183823 - DNA, 25 bp, Homo sapien
ggcatatggccctagacaagtcact

SEQ ID NO: 2183824 - DNA, 25 bp, Homo sapien
tagcgcctgggttcaggatctcaca

SEQ ID NO: 2183825 - DNA, 25 bp, Homo sapien
tagtctcctactgatcctgcaggtg

SEQ ID NO: 2183826 - DNA, 25 bp, Homo sapien
taagatctgagttgcagccccatgt

SEQ ID NO: 2183827 - DNA, 25 bp, Homo sapien
gaaacttatgtcttgtaatctccat

SEQ ID NO: 2183828 - DNA, 25 bp, Homo sapien
tccctgacaaaatatccaacccata

SEQ ID NO: 2183829 - DNA, 25 bp, Homo sapien
gcagaaatgctcttatcttaaattc

SEQ ID NO: 2183830 - DNA, 25 bp, Homo sapien
ttccatgtatactccccacacaaga

SEQ ID NO: 2183831 - DNA, 25 bp, Homo sapien
gatctcgccactcaaggaagctgca

SEQ ID NO: 2183832 - DNA, 25 bp, Homo sapien
taccatttttgcagtcgaagctttc

SEQ ID NO: 2183833 - DNA, 25 bp, Homo sapien
gctaaaacggtctgaacaagttctc

SEQ ID NO: 2183834 - DNA, 25 bp, Homo sapien
aatcttcagatctcgccactcaagg

SEQ ID NO: 2183835 - DNA, 25 bp, Homo sapien
ccgcgggcgcggcggagcttggccg

SEQ ID NO: 2183836 - DNA, 25 bp, Homo sapien
gcgggcgcggcggagcttggccggc

SEQ ID NO: 2183837 - DNA, 25 bp, Homo sapien
gcggcgaaggggaagcccctgtcgc

SEQ ID NO: 2183838 - DNA, 25 bp, Homo sapien
ggccgcgggcgcggcggagcttggc

SEQ ID NO: 2183839 - DNA, 25 bp, Homo sapien
ggggagggcaagctgacagaccccg

SEQ ID NO: 2183840 - DNA, 25 bp, Homo sapien
ggagggcaagctgacagaccccgcc

SEQ ID NO: 2183841 - DNA, 25 bp, Homo sapien
ggaagagaagccgtggtgctgtggg

SEQ ID NO: 2183842 - DNA, 25 bp, Homo sapien
gggcaggcttaggcggagaggggag

SEQ ID NO: 2183843 - DNA, 25 bp, Homo sapien
gaggggcgggctaggcgacgcgcgg

SEQ ID NO: 2183844 - DNA, 25 bp, Homo sapien
ccagcggcaccggaggcagcgcggg

SEQ ID NO: 2183845 - DNA, 25 bp, Homo sapien
cgggctaggcgacgcgcgggaagcg

SEQ ID NO: 2183846 - DNA, 25 bp, Homo sapien
gggaagcggctcagcggtcgccagc

SEQ ID NO: 2183847 - DNA, 25 bp, Homo sapien
tgatttgaagtcatgaatctggatc

SEQ ID NO: 2183848 - DNA, 25 bp, Homo sapien
catgaatctggatcgcagtgagcgg

SEQ ID NO: 2183849 - DNA, 25 bp, Homo sapien
tctggatcgcagtgagcggtacact

SEQ ID NO: 2183850 - DNA, 25 bp, Homo sapien
gaagtcatgaatctggatcgcagtg

SEQ ID NO: 2183851 - DNA, 25 bp, Homo sapien
gcagctttcttaagtactgtggcca

SEQ ID NO: 2183852 - DNA, 25 bp, Homo sapien
ggcagctttcttaagtactgtggcc

SEQ ID NO: 2183853 - DNA, 25 bp, Homo sapien
tggcagctttcttaagtactgtggc

SEQ ID NO: 2183854 - DNA, 25 bp, Homo sapien
cagctttcttaagtactgtggccat

SEQ ID NO: 2183855 - DNA, 25 bp, Homo sapien
gcctgccaggagagttggcttccca

SEQ ID NO: 2183856 - DNA, 25 bp, Homo sapien
ggaacatcttgctgtcggaagcctg

SEQ ID NO: 2183857 - DNA, 25 bp, Homo sapien
ccagcatccattcggcctgaagagc

SEQ ID NO: 2183858 - DNA, 25 bp, Homo sapien
gaagggcctcttggttagaggaaca

SEQ ID NO: 2183859 - DNA, 25 bp, Homo sapien
tcatttttctccaacgaagatgctg

SEQ ID NO: 2183860 - DNA, 25 bp, Homo sapien
aagatgctgaaattggtgtgaatgc

SEQ ID NO: 2183861 - DNA, 25 bp, Homo sapien
aagctgcaagtatttcctacatgac

SEQ ID NO: 2183862 - DNA, 25 bp, Homo sapien
ccaattatttgctccaatgccacat

SEQ ID NO: 2183863 - DNA, 25 bp, Homo sapien
gcctaagcaggacctcaaaaatttg

SEQ ID NO: 2183864 - DNA, 25 bp, Homo sapien
ctaagcaggacctcaaaaatttggt

SEQ ID NO: 2183865 - DNA, 25 bp, Homo sapien
cctaagcaggacctcaaaaatttgg

SEQ ID NO: 2183866 - DNA, 25 bp, Homo sapien
aaaggaggaaggcttaatctcaaag

SEQ ID NO: 2183867 - DNA, 25 bp, Homo sapien
gctgatattcatgggaagaaggaag

SEQ ID NO: 2183868 - DNA, 25 bp, Homo sapien
aggaaggcttaatctcaaagcccag

SEQ ID NO: 2183869 - DNA, 25 bp, Homo sapien
aggcttaatctcaaagcccagacca

SEQ ID NO: 2183870 - DNA, 25 bp, Homo sapien
ctgccagatatcttaggaagcccca

SEQ ID NO: 2183871 - DNA, 25 bp, Homo sapien
tgccagatatcttaggaagccccat

SEQ ID NO: 2183872 - DNA, 25 bp, Homo sapien
atagaggattcctgtgaggttagga

SEQ ID NO: 2183873 - DNA, 25 bp, Homo sapien
aattatagaggattcctgtgaggtt

SEQ ID NO: 2183874 - DNA, 25 bp, Homo sapien
gaggtggaaggctagacctccctga

SEQ ID NO: 2183875 - DNA, 25 bp, Homo sapien
gcagctccttcagcaattatagagg

SEQ ID NO: 2183876 - DNA, 25 bp, Homo sapien
agttcaaggctcctccaccattttt

SEQ ID NO: 2183877 - DNA, 25 bp, Homo sapien
caccatttttcaaaaaatcatccat

SEQ ID NO: 2183878 - DNA, 25 bp, Homo sapien
cagagttcaaggctcctccaccatt

SEQ ID NO: 2183879 - DNA, 25 bp, Homo sapien
ccaccatttttcaaaaaatcatcca

SEQ ID NO: 2183880 - DNA, 25 bp, Homo sapien
catactattgccgtcagcttgcacc

SEQ ID NO: 2183881 - DNA, 25 bp, Homo sapien
tattgccgtcagcttgcaccttgca

SEQ ID NO: 2183882 - DNA, 25 bp, Homo sapien
tgcaccttgcagctaattctgttgc

SEQ ID NO: 2183883 - DNA, 25 bp, Homo sapien
cgtcagcttgcaccttgcagctaat

SEQ ID NO: 2183884 - DNA, 25 bp, Homo sapien
catggtgtaacctaggagaactgca

SEQ ID NO: 2183885 - DNA, 25 bp, Homo sapien
gatgatcttgtgtgggtcccttgtc

SEQ ID NO: 2183886 - DNA, 25 bp, Homo sapien
tagagtcctcaattggaatctgccc

SEQ ID NO: 2183887 - DNA, 25 bp, Homo sapien
cacagttgtttgcaccgaatgtccc

SEQ ID NO: 2183888 - DNA, 25 bp, Homo sapien
ctggaacagcaggatcttcttgtgc

SEQ ID NO: 2183889 - DNA, 25 bp, Homo sapien
tgctggaacagcaggatcttcttgt

SEQ ID NO: 2183890 - DNA, 25 bp, Homo sapien
ggaacagcaggatcttcttgtgcct

SEQ ID NO: 2183891 - DNA, 25 bp, Homo sapien
aacagcaggatcttcttgtgccttc

SEQ ID NO: 2183892 - DNA, 25 bp, Homo sapien
caggaactcgatcactttctggtag

SEQ ID NO: 2183893 - DNA, 25 bp, Homo sapien
ctgtgtaaccccaggaactcgatca

SEQ ID NO: 2183894 - DNA, 25 bp, Homo sapien
tctagctaccggaggctccaccagg

SEQ ID NO: 2183895 - DNA, 25 bp, Homo sapien
tgtaaccccaggaactcgatcactt

SEQ ID NO: 2183896 - DNA, 25 bp, Homo sapien
gcctgaggaattgtccagacacaga

SEQ ID NO: 2183897 - DNA, 25 bp, Homo sapien
cctgaggaattgtccagacacagaa

SEQ ID NO: 2183898 - DNA, 25 bp, Homo sapien
gaattgtccagacacagaattccct

SEQ ID NO: 2183899 - DNA, 25 bp, Homo sapien
gaggaattgtccagacacagaattc

SEQ ID NO: 2183900 - DNA, 25 bp, Homo sapien
gagggtatagtaatttgagattgtc

SEQ ID NO: 2183901 - DNA, 25 bp, Homo sapien
tgatcttttcaaatccccccaaggc

SEQ ID NO: 2183902 - DNA, 25 bp, Homo sapien
ttagttcagattaatccattgatga

SEQ ID NO: 2183903 - DNA, 25 bp, Homo sapien
aaaactagctacagaaccatgtggg

SEQ ID NO: 2183904 - DNA, 25 bp, Homo sapien
ctcttcctaagttaaccagaaccat

SEQ ID NO: 2183905 - DNA, 25 bp, Homo sapien
ctttgtgaaagacttcaccttgtca

SEQ ID NO: 2183906 - DNA, 25 bp, Homo sapien
gcagacgctagtactttagaaatat

SEQ ID NO: 2183907 - DNA, 25 bp, Homo sapien
aatataacttgactctgttttcagg

SEQ ID NO: 2183908 - DNA, 25 bp, Homo sapien
catttctttaagcagacgctagtac

SEQ ID NO: 2183909 - DNA, 25 bp, Homo sapien
gcgtggctgtgcgtgatatctcaca

SEQ ID NO: 2183910 - DNA, 25 bp, Homo sapien
gatgttactgaggacctagaagaaa

SEQ ID NO: 2183911 - DNA, 25 bp, Homo sapien
gctcaatacatactttgaaagcaaa

SEQ ID NO: 2183912 - DNA, 25 bp, Homo sapien
gtatataaagatccacgcgtggctg

SEQ ID NO: 2183913 - DNA, 25 bp, Homo sapien
tttaatcatccagggtgccattcca

SEQ ID NO: 2183914 - DNA, 25 bp, Homo sapien
tacggttttaatcatccagggtgcc

SEQ ID NO: 2183915 - DNA, 25 bp, Homo sapien
ttgtttgctgctacggttttaatca

SEQ ID NO: 2183916 - DNA, 25 bp, Homo sapien
catccagggtgccattccaccatag

SEQ ID NO: 2183917 - DNA, 25 bp, Homo sapien
catgaaccctgatgttccgcgagct

SEQ ID NO: 2183918 - DNA, 25 bp, Homo sapien
tccttggaatactttgcatgaaccc

SEQ ID NO: 2183919 - DNA, 25 bp, Homo sapien
agcttgctatgttttggagttagag

SEQ ID NO: 2183920 - DNA, 25 bp, Homo sapien
cattctgttgcttcaaggggctcct

SEQ ID NO: 2183921 - DNA, 25 bp, Homo sapien
aagttgagtggcagagtataagtgt

SEQ ID NO: 2183922 - DNA, 25 bp, Homo sapien
tctatgtcgatgtccattccactgc

SEQ ID NO: 2183923 - DNA, 25 bp, Homo sapien
gctgatctctctatgtcgatgtcca

SEQ ID NO: 2183924 - DNA, 25 bp, Homo sapien
taagtgtggagctgatctctctatg

SEQ ID NO: 2183925 - DNA, 25 bp, Homo sapien
aggctatgagcgtggcaccagcaac

SEQ ID NO: 2183926 - DNA, 25 bp, Homo sapien
aaaaagtgtcgattgattggcaacc

SEQ ID NO: 2183927 - DNA, 25 bp, Homo sapien
gaagtcgctcactatggccagggca

SEQ ID NO: 2183928 - DNA, 25 bp, Homo sapien
aaaggagaacacttgctcactggct

SEQ ID NO: 2183929 - DNA, 25 bp, Homo sapien
catcctgagtaacactaattgccct

SEQ ID NO: 2183930 - DNA, 25 bp, Homo sapien
taacagccaggctgattcgatagtc

SEQ ID NO: 2183931 - DNA, 25 bp, Homo sapien
tgcctctggccgcttctaacagcca

SEQ ID NO: 2183932 - DNA, 25 bp, Homo sapien
taacccattcatccacagccttata

SEQ ID NO: 2183933 - DNA, 25 bp, Homo sapien
tcttatccttcagcggatgtttctg

SEQ ID NO: 2183934 - DNA, 25 bp, Homo sapien
ctgagcctcatctcttgaatgaata

SEQ ID NO: 2183935 - DNA, 25 bp, Homo sapien
cttcagcggatgtttctgagcctca

SEQ ID NO: 2183936 - DNA, 25 bp, Homo sapien
gagcctcatctcttgaatgaataag

SEQ ID NO: 2183937 - DNA, 25 bp, Homo sapien
tcatcggggcaaatacagatcgcag

SEQ ID NO: 2183938 - DNA, 25 bp, Homo sapien
tccattcatcggggcaaatacagat

SEQ ID NO: 2183939 - DNA, 25 bp, Homo sapien
cattcatcggggcaaatacagatcg

SEQ ID NO: 2183940 - DNA, 25 bp, Homo sapien
ataaattccattcatcggggcaaat

SEQ ID NO: 2183941 - DNA, 25 bp, Homo sapien
tgatttttggtaaactttgtgagtc

SEQ ID NO: 2183942 - DNA, 25 bp, Homo sapien
tgaggaatagctttgatttttggta

SEQ ID NO: 2183943 - DNA, 25 bp, Homo sapien
gaggaatagctttgatttttggtaa

SEQ ID NO: 2183944 - DNA, 25 bp, Homo sapien
ctgaggaatagctttgatttttggt

SEQ ID NO: 2183945 - DNA, 25 bp, Homo sapien
taaatgccagtaagatgtttaggga

SEQ ID NO: 2183946 - DNA, 25 bp, Homo sapien
gtaaatgccagtaagatgtttaggg

SEQ ID NO: 2183947 - DNA, 25 bp, Homo sapien
ctgatatgaattttggttgaggtgg

SEQ ID NO: 2183948 - DNA, 25 bp, Homo sapien
tatgaattttggttgaggtggcaat

SEQ ID NO: 2183949 - DNA, 25 bp, Homo sapien
tgaattttggttgaggtggcaatga

SEQ ID NO: 2183950 - DNA, 25 bp, Homo sapien
gatatgaattttggttgaggtggca

SEQ ID NO: 2183951 - DNA, 25 bp, Homo sapien
tagaatagtccagggggtaatgctg

SEQ ID NO: 2183952 - DNA, 25 bp, Homo sapien
ttctcccgtgctgactgaagccgtg

SEQ ID NO: 2183953 - DNA, 25 bp, Homo sapien
ttttctcccgtgctgactgaagccg

SEQ ID NO: 2183954 - DNA, 25 bp, Homo sapien
tgattagaatagtccagggggtaat

SEQ ID NO: 2183955 - DNA, 25 bp, Homo sapien
tcattttgagaagtttaagcacccg

SEQ ID NO: 2183956 - DNA, 25 bp, Homo sapien
gattttgtaacaagtgcaagaacct

SEQ ID NO: 2183957 - DNA, 25 bp, Homo sapien
caggattgcggctgcaatggcactt

SEQ ID NO: 2183958 - DNA, 25 bp, Homo sapien
ggattgcggctgcaatggcacttcc

SEQ ID NO: 2183959 - DNA, 25 bp, Homo sapien
attgcggctgcaatggcacttcccc

SEQ ID NO: 2183960 - DNA, 25 bp, Homo sapien
gacaggattgcggctgcaatggcac

SEQ ID NO: 2183961 - DNA, 25 bp, Homo sapien
agccttcttggcttcgggtttcttg

SEQ ID NO: 2183962 - DNA, 25 bp, Homo sapien
gcttctcaactttttcacctgccat

SEQ ID NO: 2183963 - DNA, 25 bp, Homo sapien
cgggtttcttgtctttagtatctgg

SEQ ID NO: 2183964 - DNA, 25 bp, Homo sapien
ggcttctcaactttttcacctgcca

SEQ ID NO: 2183965 - DNA, 25 bp, Homo sapien
ttctaggtcgttaaggacatctggg

SEQ ID NO: 2183966 - DNA, 25 bp, Homo sapien
acttgataagggtcattgatgggac

SEQ ID NO: 2183967 - DNA, 25 bp, Homo sapien
acatctggggtctcattgttctcaa

SEQ ID NO: 2183968 - DNA, 25 bp, Homo sapien
ttctggagagccaacttctaggtcg

SEQ ID NO: 2183969 - DNA, 25 bp, Homo sapien
gactcaatttgtagcccattagaca

SEQ ID NO: 2183970 - DNA, 25 bp, Homo sapien
ggtgactcaatttgtagcccattag

SEQ ID NO: 2183971 - DNA, 25 bp, Homo sapien
aagtggtgactcaatttgtagccca

SEQ ID NO: 2183972 - DNA, 25 bp, Homo sapien
caatttgtagcccattagacaacat

SEQ ID NO: 2183973 - DNA, 25 bp, Homo sapien
aactaaagaggatgaaggttttgca

SEQ ID NO: 2183974 - DNA, 25 bp, Homo sapien
gctaggaattgaactaaagaggatg

SEQ ID NO: 2183975 - DNA, 25 bp, Homo sapien
gaggatgaaggttttgcattcacct

SEQ ID NO: 2183976 - DNA, 25 bp, Homo sapien
tccaggaatacttgggctaggaatt

SEQ ID NO: 2183977 - DNA, 25 bp, Homo sapien
tctatagtaatcacgatgatgacaa

SEQ ID NO: 2183978 - DNA, 25 bp, Homo sapien
atgacaacgatgataccaaagtcca

SEQ ID NO: 2183979 - DNA, 25 bp, Homo sapien
ctatagtaatcacgatgatgacaac

SEQ ID NO: 2183980 - DNA, 25 bp, Homo sapien
ctctatagtaatcacgatgatgaca

SEQ ID NO: 2183981 - DNA, 25 bp, Homo sapien
tagagtgcctgagcaatgctggagg

SEQ ID NO: 2183982 - DNA, 25 bp, Homo sapien
ctagagtgcctgagcaatgctggag

SEQ ID NO: 2183983 - DNA, 25 bp, Homo sapien
agctgctggtgacctgagcaaatac

SEQ ID NO: 2183984 - DNA, 25 bp, Homo sapien
ttaggaaaagctgctggtgacctga

SEQ ID NO: 2183985 - DNA, 25 bp, Homo sapien
aaaagctgctggtgacctgagcaaa

SEQ ID NO: 2183986 - DNA, 25 bp, Homo sapien
ggaaaagctgctggtgacctgagca

SEQ ID NO: 2183987 - DNA, 25 bp, Homo sapien
tgaggaaggttttgctccgcacagt

SEQ ID NO: 2183988 - DNA, 25 bp, Homo sapien
cctgaggaaggttttgctccgcaca

SEQ ID NO: 2183989 - DNA, 25 bp, Homo sapien
ggaaggttttgctccgcacagtttc

SEQ ID NO: 2183990 - DNA, 25 bp, Homo sapien
gaggaaggttttgctccgcacagtt

SEQ ID NO: 2183991 - DNA, 25 bp, Homo sapien
caaaagctctcctagttatatgccc

SEQ ID NO: 2183992 - DNA, 25 bp, Homo sapien
tacacatgtcaagggacaaagctga

SEQ ID NO: 2183993 - DNA, 25 bp, Homo sapien
gctgaccctattggctctggcttca

SEQ ID NO: 2183994 - DNA, 25 bp, Homo sapien
tgctgttcctagatcttacaccttc

SEQ ID NO: 2183995 - DNA, 25 bp, Homo sapien
ccagttcgttggagactattttagc

SEQ ID NO: 2183996 - DNA, 25 bp, Homo sapien
ttaaactgtgtttgccatcctgctg

SEQ ID NO: 2183997 - DNA, 25 bp, Homo sapien
catagtgtgagtggccagtaggtcc

SEQ ID NO: 2183998 - DNA, 25 bp, Homo sapien
tgggtccagtgaaaacatcatagtg

SEQ ID NO: 2183999 - DNA, 25 bp, Homo sapien
cttgcaaagagacaatgcccgtttt

SEQ ID NO: 2184000 - DNA, 25 bp, Homo sapien
tccatgagttgctaatatcttgatt

SEQ ID NO: 2184001 - DNA, 25 bp, Homo sapien
ctgtctcccttaactccatgagttg

SEQ ID NO: 2184002 - DNA, 25 bp, Homo sapien
gtctcccttaactccatgagttgct

SEQ ID NO: 2184003 - DNA, 25 bp, Homo sapien
taactccatgagttgctaatatctt

SEQ ID NO: 2184004 - DNA, 25 bp, Homo sapien
ctatctcttgaaggccagtttaact

SEQ ID NO: 2184005 - DNA, 25 bp, Homo sapien
cagtttaactatgggtaaggaattg

SEQ ID NO: 2184006 - DNA, 25 bp, Homo sapien
ggtaaggaattgttgaatttccaga

SEQ ID NO: 2184007 - DNA, 25 bp, Homo sapien
tcttgaaggccagtttaactatggg

SEQ ID NO: 2184008 - DNA, 25 bp, Homo sapien
gagcaggattcttgaactaagagag

SEQ ID NO: 2184009 - DNA, 25 bp, Homo sapien
tctctctcgaggagcaggattcttg

SEQ ID NO: 2184010 - DNA, 25 bp, Homo sapien
ggattcttgaactaagagagaacac

SEQ ID NO: 2184011 - DNA, 25 bp, Homo sapien
tgtcttttctctctcgaggagcagg

SEQ ID NO: 2184012 - DNA, 25 bp, Homo sapien
tgacctgagcaacaatcacacatga

SEQ ID NO: 2184013 - DNA, 25 bp, Homo sapien
gagcaacaatcacacatgaggacag

SEQ ID NO: 2184014 - DNA, 25 bp, Homo sapien
ttcctgcccacaatgtgggcacagt

SEQ ID NO: 2184015 - DNA, 25 bp, Homo sapien
tctgccctgccaatcttcctgccca

SEQ ID NO: 2184016 - DNA, 25 bp, Homo sapien
attttcaccaaatgtgttgacgttt

SEQ ID NO: 2184017 - DNA, 25 bp, Homo sapien
atgtgttgacgttttggtgacctac

SEQ ID NO: 2184018 - DNA, 25 bp, Homo sapien
aaatgtgttgacgttttggtgacct

SEQ ID NO: 2184019 - DNA, 25 bp, Homo sapien
aatgtgttgacgttttggtgaccta

SEQ ID NO: 2184020 - DNA, 25 bp, Homo sapien
atccaacaatggcaatgtcagtgcc

SEQ ID NO: 2184021 - DNA, 25 bp, Homo sapien
caacaatggcaatgtcagtgcccat

SEQ ID NO: 2184022 - DNA, 25 bp, Homo sapien
ccaacaatggcaatgtcagtgccca

SEQ ID NO: 2184023 - DNA, 25 bp, Homo sapien
caatccaacaatggcaatgtcagtg

SEQ ID NO: 2184024 - DNA, 25 bp, Homo sapien
cacatatagctgtgtcctgttctcc

SEQ ID NO: 2184025 - DNA, 25 bp, Homo sapien
tctcatcttgtcaactaagcctttc

SEQ ID NO: 2184026 - DNA, 25 bp, Homo sapien
gaagaagtacaatgttccttttctc

SEQ ID NO: 2184027 - DNA, 25 bp, Homo sapien
tttcatgagagcacatatagctgtg

SEQ ID NO: 2184028 - DNA, 25 bp, Homo sapien
gagaacacccttgaccgtgtctcct

SEQ ID NO: 2184029 - DNA, 25 bp, Homo sapien
cttgtcctttcatagtgatgcccat

SEQ ID NO: 2184030 - DNA, 25 bp, Homo sapien
agtaggagcctcagagaacaccctt

SEQ ID NO: 2184031 - DNA, 25 bp, Homo sapien
ggagatactagtgggctcttgtcct

SEQ ID NO: 2184032 - DNA, 25 bp, Homo sapien
ctggctgctccggaattagaagcag

SEQ ID NO: 2184033 - DNA, 25 bp, Homo sapien
gctccggaattagaagcagtatttt

SEQ ID NO: 2184034 - DNA, 25 bp, Homo sapien
ttactatagagaaactttggcaagg

SEQ ID NO: 2184035 - DNA, 25 bp, Homo sapien
tttggcaaggaccattgactggctg

SEQ ID NO: 2184036 - DNA, 25 bp, Homo sapien
ccactggagtcctgataattcatga

SEQ ID NO: 2184037 - DNA, 25 bp, Homo sapien
aagctgcccatggagtgccattgaa

SEQ ID NO: 2184038 - DNA, 25 bp, Homo sapien
gtctgtgtactgagagccctggcca

SEQ ID NO: 2184039 - DNA, 25 bp, Homo sapien
catgagctccactgggtatcccaca

SEQ ID NO: 2184040 - DNA, 25 bp, Homo sapien
ccacggcggttggagagcagcttgt

SEQ ID NO: 2184041 - DNA, 25 bp, Homo sapien
gtgtggtgtggtgaaactggcaaaa

SEQ ID NO: 2184042 - DNA, 25 bp, Homo sapien
ccttcactgaatcacatggagccgt

SEQ ID NO: 2184043 - DNA, 25 bp, Homo sapien
gaaactgctccgagtgtggtgtggt

SEQ ID NO: 2184044 - DNA, 25 bp, Homo sapien
aacagaatgcacacaaatggagtca

SEQ ID NO: 2184045 - DNA, 25 bp, Homo sapien
gaacagaatgcacacaaatggagtc

SEQ ID NO: 2184046 - DNA, 25 bp, Homo sapien
tggaacagaatgcacacaaatggag

SEQ ID NO: 2184047 - DNA, 25 bp, Homo sapien
ctggaacagaatgcacacaaatgga

SEQ ID NO: 2184048 - DNA, 25 bp, Homo sapien
tactgcacacaaaccataagctctg

SEQ ID NO: 2184049 - DNA, 25 bp, Homo sapien
ctgcacacaaaccataagctctgca

SEQ ID NO: 2184050 - DNA, 25 bp, Homo sapien
actgcacacaaaccataagctctgc

SEQ ID NO: 2184051 - DNA, 25 bp, Homo sapien
ctggtaactcaatgagctttaattg

SEQ ID NO: 2184052 - DNA, 25 bp, Homo sapien
ttccatgtaagacccattctcctca

SEQ ID NO: 2184053 - DNA, 25 bp, Homo sapien
cttcttccatgtaagacccattctc

SEQ ID NO: 2184054 - DNA, 25 bp, Homo sapien
ttctcctcaccctcaagcaggggta

SEQ ID NO: 2184055 - DNA, 25 bp, Homo sapien
caacagcactgggttcctctgttgt

SEQ ID NO: 2184056 - DNA, 25 bp, Homo sapien
cttgatcatgtggtagatgcaggtg

SEQ ID NO: 2184057 - DNA, 25 bp, Homo sapien
agaagaaaacagagcagtttcaaac

SEQ ID NO: 2184058 - DNA, 25 bp, Homo sapien
aaacagagcagtttcaaacagcagc

SEQ ID NO: 2184059 - DNA, 25 bp, Homo sapien
atcatgtggtagatgcaggtggagg

SEQ ID NO: 2184060 - DNA, 25 bp, Homo sapien
cacgcgctttttggccaccatgtag

SEQ ID NO: 2184061 - DNA, 25 bp, Homo sapien
ggtcgggttgatctccacgcgcttt

SEQ ID NO: 2184062 - DNA, 25 bp, Homo sapien
ttcttgattcactccatattggctg

SEQ ID NO: 2184063 - DNA, 25 bp, Homo sapien
ctgagctttcttgattcactccata

SEQ ID NO: 2184064 - DNA, 25 bp, Homo sapien
gaagacacaagcctattggaggctg

SEQ ID NO: 2184065 - DNA, 25 bp, Homo sapien
gtgaagacacaagcctattggaggc

SEQ ID NO: 2184066 - DNA, 25 bp, Homo sapien
acacaagcctattggaggctgtcac

SEQ ID NO: 2184067 - DNA, 25 bp, Homo sapien
gacacaagcctattggaggctgtca

SEQ ID NO: 2184068 - DNA, 25 bp, Homo sapien
ctttcataagcttgcagaggttctc

SEQ ID NO: 2184069 - DNA, 25 bp, Homo sapien
gttctcaaactttgccttgctctcc

SEQ ID NO: 2184070 - DNA, 25 bp, Homo sapien
gatttctttcataagcttgcagagg

SEQ ID NO: 2184071 - DNA, 25 bp, Homo sapien
cttatctaagatttctttcataagc

SEQ ID NO: 2184072 - DNA, 25 bp, Homo sapien
tcctcaggtagctcgacctgaggta

SEQ ID NO: 2184073 - DNA, 25 bp, Homo sapien
cagtgagcttggtctaatataacac

SEQ ID NO: 2184074 - DNA, 25 bp, Homo sapien
gacctgaggtaatagagaccaggct

SEQ ID NO: 2184075 - DNA, 25 bp, Homo sapien
catcagtgagcttggtctaatataa

SEQ ID NO: 2184076 - DNA, 25 bp, Homo sapien
agaggtgtctacctgctctttgctc

SEQ ID NO: 2184077 - DNA, 25 bp, Homo sapien
aagccccgctttgagaggtgtctac

SEQ ID NO: 2184078 - DNA, 25 bp, Homo sapien
gctttgagaggtgtctacctgctct

SEQ ID NO: 2184079 - DNA, 25 bp, Homo sapien
cccgctttgagaggtgtctacctgc

SEQ ID NO: 2184080 - DNA, 25 bp, Homo sapien
tgcctccttcatgtgagagagatac

SEQ ID NO: 2184081 - DNA, 25 bp, Homo sapien
gagatactctgacagagatgtcatc

SEQ ID NO: 2184082 - DNA, 25 bp, Homo sapien
gtaatagatggacttctgtgcctcc

SEQ ID NO: 2184083 - DNA, 25 bp, Homo sapien
ctgtgcctccttcatgtgagagaga

SEQ ID NO: 2184084 - DNA, 25 bp, Homo sapien
gccacttcttaacaacgttttcatg

SEQ ID NO: 2184085 - DNA, 25 bp, Homo sapien
gtcctcatggatcccaaggtttaga

SEQ ID NO: 2184086 - DNA, 25 bp, Homo sapien
agcagctcagacagacgtccctggt

SEQ ID NO: 2184087 - DNA, 25 bp, Homo sapien
cgtccctggttggtggagtcctcat

SEQ ID NO: 2184088 - DNA, 25 bp, Homo sapien
gaaaacgagtgtgaggtgccctgaa

SEQ ID NO: 2184089 - DNA, 25 bp, Homo sapien
ctgatccagccacagtaataggttc

SEQ ID NO: 2184090 - DNA, 25 bp, Homo sapien
gatccagccacagtaataggttcgg

SEQ ID NO: 2184091 - DNA, 25 bp, Homo sapien
cactggtgttaaacggcagggctga

SEQ ID NO: 2184092 - DNA, 25 bp, Homo sapien
ctggaaggtgagtgggaggtatggt

SEQ ID NO: 2184093 - DNA, 25 bp, Homo sapien
tgtcatcccaccccctaactcccca

SEQ ID NO: 2184094 - DNA, 25 bp, Homo sapien
tatttcccatctaagaacttcactg

SEQ ID NO: 2184095 - DNA, 25 bp, Homo sapien
tctactagcacggacggcagaaggt

SEQ ID NO: 2184096 - DNA, 25 bp, Homo sapien
gacggcagaaggtagtatttcccat

SEQ ID NO: 2184097 - DNA, 25 bp, Homo sapien
cccatctaagaacttcactgtgcct

SEQ ID NO: 2184098 - DNA, 25 bp, Homo sapien
ccatcacagtgaagagtctcaacca

SEQ ID NO: 2184099 - DNA, 25 bp, Homo sapien
ggtcactggctcaaccatcacagtg

SEQ ID NO: 2184100 - DNA, 25 bp, Homo sapien
ccaagagggtagctagcaacctgcc

SEQ ID NO: 2184101 - DNA, 25 bp, Homo sapien
tcaaccagccaacttgggtgggcat

SEQ ID NO: 2184102 - DNA, 25 bp, Homo sapien
tgcaaacaagtcagtcaggtctctg

SEQ ID NO: 2184103 - DNA, 25 bp, Homo sapien
caggtctctgccaattgagctggtt

SEQ ID NO: 2184104 - DNA, 25 bp, Homo sapien
tccactgcttccagtaagggccacc

SEQ ID NO: 2184105 - DNA, 25 bp, Homo sapien
tctcacataacctgcaaacaagtca

SEQ ID NO: 2184106 - DNA, 25 bp, Homo sapien
aaagcttcggcttcagtagacatga

SEQ ID NO: 2184107 - DNA, 25 bp, Homo sapien
tgaggtcttggtccaaaaatgccat

SEQ ID NO: 2184108 - DNA, 25 bp, Homo sapien
agacatgaggtcttggtccaaaaat

SEQ ID NO: 2184109 - DNA, 25 bp, Homo sapien
agttcccccaaagcttcggcttcag

SEQ ID NO: 2184110 - DNA, 25 bp, Homo sapien
attgtgggatctttgtggtacttcc

SEQ ID NO: 2184111 - DNA, 25 bp, Homo sapien
tgggatctttgtggtacttcccact

SEQ ID NO: 2184112 - DNA, 25 bp, Homo sapien
tgtgggatctttgtggtacttccca

SEQ ID NO: 2184113 - DNA, 25 bp, Homo sapien
ttgtgggatctttgtggtacttccc

SEQ ID NO: 2184114 - DNA, 25 bp, Homo sapien
tcttgcacacgaatctttatttctc

SEQ ID NO: 2184115 - DNA, 25 bp, Homo sapien
tctcttgcacacgaatctttatttc

SEQ ID NO: 2184116 - DNA, 25 bp, Homo sapien
tgcagtcagaagtggtcacatccat

SEQ ID NO: 2184117 - DNA, 25 bp, Homo sapien
cctctcttgcacacgaatctttatt

SEQ ID NO: 2184118 - DNA, 25 bp, Homo sapien
aggcaactggtggtccctctctccc

SEQ ID NO: 2184119 - DNA, 25 bp, Homo sapien
tgcagacactacattggcatggcac

SEQ ID NO: 2184120 - DNA, 25 bp, Homo sapien
tttgtgcagacactacattggcatg

SEQ ID NO: 2184121 - DNA, 25 bp, Homo sapien
gctgaactttgtgcagacactacat

SEQ ID NO: 2184122 - DNA, 25 bp, Homo sapien
caatcttctctagataaaactggat

SEQ ID NO: 2184123 - DNA, 25 bp, Homo sapien
aatcttctctagataaaactggatt

SEQ ID NO: 2184124 - DNA, 25 bp, Homo sapien
catgcatcctctgtcccaggtaagg

SEQ ID NO: 2184125 - DNA, 25 bp, Homo sapien
tctccatgcatcctctgtcccaggt

SEQ ID NO: 2184126 - DNA, 25 bp, Homo sapien
tccatgcatcctctgtcccaggtaa

SEQ ID NO: 2184127 - DNA, 25 bp, Homo sapien
ccatgcatcctctgtcccaggtaag

SEQ ID NO: 2184128 - DNA, 25 bp, Homo sapien
aggtaataaataggggctgcatccc

SEQ ID NO: 2184129 - DNA, 25 bp, Homo sapien
tccaggtaataaataggggctgcat

SEQ ID NO: 2184130 - DNA, 25 bp, Homo sapien
taataaataggggctgcatccccaa

SEQ ID NO: 2184131 - DNA, 25 bp, Homo sapien
aataaataggggctgcatccccaaa

SEQ ID NO: 2184132 - DNA, 25 bp, Homo sapien
gttgtgcccattggatttttattac

SEQ ID NO: 2184133 - DNA, 25 bp, Homo sapien
ttgtgcccattggatttttattacc

SEQ ID NO: 2184134 - DNA, 25 bp, Homo sapien
gcagctagcgtaaagaaggaaagag

SEQ ID NO: 2184135 - DNA, 25 bp, Homo sapien
aagagaaaggggatcttggagctct

SEQ ID NO: 2184136 - DNA, 25 bp, Homo sapien
aaagagaaaggggatcttggagctc

SEQ ID NO: 2184137 - DNA, 25 bp, Homo sapien
ctacagagcagctagcgtaaagaag

SEQ ID NO: 2184138 - DNA, 25 bp, Homo sapien
taatttctctttaccgttagagcgc

SEQ ID NO: 2184139 - DNA, 25 bp, Homo sapien
tattccggtctttctcccatcagat

SEQ ID NO: 2184140 - DNA, 25 bp, Homo sapien
tacctgacttggtccgatctgagtg

SEQ ID NO: 2184141 - DNA, 25 bp, Homo sapien
ttagagcgctcggtgatcatgttgg

SEQ ID NO: 2184142 - DNA, 25 bp, Homo sapien
ggttgctctctggcgggcaggggca

SEQ ID NO: 2184143 - DNA, 25 bp, Homo sapien
ggggtcacaaggtgctcagtggggg

SEQ ID NO: 2184144 - DNA, 25 bp, Homo sapien
atgtatacgtgcaggcttgggctca

SEQ ID NO: 2184145 - DNA, 25 bp, Homo sapien
atacgtgcaggcttgggctcagaga

SEQ ID NO: 2184146 - DNA, 25 bp, Homo sapien
taagctgtgcttttgtaaaccctgc

SEQ ID NO: 2184147 - DNA, 25 bp, Homo sapien
gcaacctgcttacatacataaggca

SEQ ID NO: 2184148 - DNA, 25 bp, Homo sapien
agctgtgcttttgtaaaccctgcaa

SEQ ID NO: 2184149 - DNA, 25 bp, Homo sapien
actaagctgtgcttttgtaaaccct

SEQ ID NO: 2184150 - DNA, 25 bp, Homo sapien
ctgattttctatggcacctttgggt

SEQ ID NO: 2184151 - DNA, 25 bp, Homo sapien
gttgcagaaccttagctgtaggaga

SEQ ID NO: 2184152 - DNA, 25 bp, Homo sapien
ggtgacggccaatgtctggcactga

SEQ ID NO: 2184153 - DNA, 25 bp, Homo sapien
ctatggcacctttgggttgcagaac

SEQ ID NO: 2184154 - DNA, 25 bp, Homo sapien
tgggtctcagagctctcggcccgtt

SEQ ID NO: 2184155 - DNA, 25 bp, Homo sapien
ctgtcagtcaggaaaagcacatccc

SEQ ID NO: 2184156 - DNA, 25 bp, Homo sapien
tctcagagctctcggcccgttgtct

SEQ ID NO: 2184157 - DNA, 25 bp, Homo sapien
tgtcagtcaggaaaagcacatcccc

SEQ ID NO: 2184158 - DNA, 25 bp, Homo sapien
tgtccttggctctctagtttctgat

SEQ ID NO: 2184159 - DNA, 25 bp, Homo sapien
ttggctctctagtttctgataggac

SEQ ID NO: 2184160 - DNA, 25 bp, Homo sapien
tctctagtttctgataggaccccat

SEQ ID NO: 2184161 - DNA, 25 bp, Homo sapien
gctctctagtttctgataggacccc

SEQ ID NO: 2184162 - DNA, 25 bp, Homo sapien
tcatagtattagtcacaataaccaa

SEQ ID NO: 2184163 - DNA, 25 bp, Homo sapien
catagtattagtcacaataaccaaa

SEQ ID NO: 2184164 - DNA, 25 bp, Homo sapien
ttcatagtattagtcacaataacca

SEQ ID NO: 2184165 - DNA, 25 bp, Homo sapien
ttcatacaatggaattttattcagc

SEQ ID NO: 2184166 - DNA, 25 bp, Homo sapien
tacaatggaattttattcagccata

SEQ ID NO: 2184167 - DNA, 25 bp, Homo sapien
atattcatacaatggaattttattc

SEQ ID NO: 2184168 - DNA, 25 bp, Homo sapien
catacaatggaattttattcagcca

SEQ ID NO: 2184169 - DNA, 25 bp, Homo sapien
ccagacaaagcacgcgaagggtaga

SEQ ID NO: 2184170 - DNA, 25 bp, Homo sapien
tgatcatctcgagtaatgggccacc

SEQ ID NO: 2184171 - DNA, 25 bp, Homo sapien
taaatggaagcctgactgaccaggg

SEQ ID NO: 2184172 - DNA, 25 bp, Homo sapien
gggtaaaccttgcaaacgccatgct

SEQ ID NO: 2184173 - DNA, 25 bp, Homo sapien
caaaggcacagtgacctggactctt

SEQ ID NO: 2184174 - DNA, 25 bp, Homo sapien
acagcaaaggcacagtgacctggac

SEQ ID NO: 2184175 - DNA, 25 bp, Homo sapien
gcaaaggcacagtgacctggactct

SEQ ID NO: 2184176 - DNA, 25 bp, Homo sapien
aaggcacagtgacctggactcttgc

SEQ ID NO: 2184177 - DNA, 25 bp, Homo sapien
tgatccgctggacaaaacatgaaca

SEQ ID NO: 2184178 - DNA, 25 bp, Homo sapien
cctgatccgctggacaaaacatgaa

SEQ ID NO: 2184179 - DNA, 25 bp, Homo sapien
catcctgatccgctggacaaaacat

SEQ ID NO: 2184180 - DNA, 25 bp, Homo sapien
cctaacatcctgatccgctggacaa

SEQ ID NO: 2184181 - DNA, 25 bp, Homo sapien
tctggttctggttgacagaagtatg

SEQ ID NO: 2184182 - DNA, 25 bp, Homo sapien
gaagtatgtattatcagattccctg

SEQ ID NO: 2184183 - DNA, 25 bp, Homo sapien
gctttacatcccatgtttgctggag

SEQ ID NO: 2184184 - DNA, 25 bp, Homo sapien
tgttgggaaaaatttaatcagctac

SEQ ID NO: 2184185 - DNA, 25 bp, Homo sapien
acaggcagtccccattattcccagt

SEQ ID NO: 2184186 - DNA, 25 bp, Homo sapien
ggcagtccccattattcccagtcat

SEQ ID NO: 2184187 - DNA, 25 bp, Homo sapien
cctcacaggcagtccccattattcc

SEQ ID NO: 2184188 - DNA, 25 bp, Homo sapien
ctcacaggcagtccccattattccc

SEQ ID NO: 2184189 - DNA, 25 bp, Homo sapien
aactcagctatccttggctctgaaa

SEQ ID NO: 2184190 - DNA, 25 bp, Homo sapien
tccaactcagctatccttggctctg

SEQ ID NO: 2184191 - DNA, 25 bp, Homo sapien
atcactggcatcactgtatctatca

SEQ ID NO: 2184192 - DNA, 25 bp, Homo sapien
tgaaaagctgtcatcactggcatca

SEQ ID NO: 2184193 - DNA, 25 bp, Homo sapien
cagtccatctgaggttgagcatcac

SEQ ID NO: 2184194 - DNA, 25 bp, Homo sapien
gcactttctagtcaccacaggaaga

SEQ ID NO: 2184195 - DNA, 25 bp, Homo sapien
gaggtcagtccaatcacatgcaatg

SEQ ID NO: 2184196 - DNA, 25 bp, Homo sapien
aatgaaagcctgagttgatggaccc

SEQ ID NO: 2184197 - DNA, 25 bp, Homo sapien
ggactagagaacagtgaacacagct

SEQ ID NO: 2184198 - DNA, 25 bp, Homo sapien
gggccttggccatgaacctatgatg

SEQ ID NO: 2184199 - DNA, 25 bp, Homo sapien
tgctgctgtgcccaactgtatgctt

SEQ ID NO: 2184200 - DNA, 25 bp, Homo sapien
gaacacagctgtgtatccctgatta

SEQ ID NO: 2184201 - DNA, 25 bp, Homo sapien
aagacgtgcatattggctcaagacc

SEQ ID NO: 2184202 - DNA, 25 bp, Homo sapien
ggtcatgaggactaagacgtgcata

SEQ ID NO: 2184203 - DNA, 25 bp, Homo sapien
atctacgatcagcaaattgcacagg

SEQ ID NO: 2184204 - DNA, 25 bp, Homo sapien
catattggctcaagacccagaaaac

SEQ ID NO: 2184205 - DNA, 25 bp, Homo sapien
gagttctactgatctatggagatga

SEQ ID NO: 2184206 - DNA, 25 bp, Homo sapien
tcagcacactgatctactccactag

SEQ ID NO: 2184207 - DNA, 25 bp, Homo sapien
ccagtcttggccaaacttttgctga

SEQ ID NO: 2184208 - DNA, 25 bp, Homo sapien
aaggaaatgtttcatgcctgaccca

SEQ ID NO: 2184209 - DNA, 25 bp, Homo sapien
gaaatcccttctactggtacatagg

SEQ ID NO: 2184210 - DNA, 25 bp, Homo sapien
ttgaacaaaaacagcgtaggtggtg

SEQ ID NO: 2184211 - DNA, 25 bp, Homo sapien
gaaaccctatgctgatagactagaa

SEQ ID NO: 2184212 - DNA, 25 bp, Homo sapien
ccaatcaagtagaaagatacctcct

SEQ ID NO: 2184213 - DNA, 25 bp, Homo sapien
tcaggattgtttcctatgccaagta

SEQ ID NO: 2184214 - DNA, 25 bp, Homo sapien
catttcctatctgatggctgtctgc

SEQ ID NO: 2184215 - DNA, 25 bp, Homo sapien
tttcctacccacattagcaagtgga

SEQ ID NO: 2184216 - DNA, 25 bp, Homo sapien
tgggcgggcctgtttctaatctaac

SEQ ID NO: 2184217 - DNA, 25 bp, Homo sapien
cagagactggcggtaggacaataaa

SEQ ID NO: 2184218 - DNA, 25 bp, Homo sapien
attatcaaaatatacgttactgctg

SEQ ID NO: 2184219 - DNA, 25 bp, Homo sapien
gctgaacttgctgattttaggacgt

SEQ ID NO: 2184220 - DNA, 25 bp, Homo sapien
acaaaccatgacactcaagaacaca

SEQ ID NO: 2184221 - DNA, 25 bp, Homo sapien
taagtcataagctagatgtgtctgg

SEQ ID NO: 2184222 - DNA, 25 bp, Homo sapien
cacacacgtttctcacagggaagaa

SEQ ID NO: 2184223 - DNA, 25 bp, Homo sapien
tctgtgctgcatatgcgccgtgagc

SEQ ID NO: 2184224 - DNA, 25 bp, Homo sapien
cgccgtgagcgctactctatgccgg

SEQ ID NO: 2184225 - DNA, 25 bp, Homo sapien
atgcctcatatagcccacctttacg

SEQ ID NO: 2184226 - DNA, 25 bp, Homo sapien
taagaaaacagatattccaaggtgc

SEQ ID NO: 2184227 - DNA, 25 bp, Homo sapien
aaaacagatattccaaggtgctagg

SEQ ID NO: 2184228 - DNA, 25 bp, Homo sapien
gctagggaaagggtatagcaatgcc

SEQ ID NO: 2184229 - DNA, 25 bp, Homo sapien
atggcatagttaggattcccagcat

SEQ ID NO: 2184230 - DNA, 25 bp, Homo sapien
taaagattttaatggcatagttagg

SEQ ID NO: 2184231 - DNA, 25 bp, Homo sapien
tcttctccattaacagaaagaggtg

SEQ ID NO: 2184232 - DNA, 25 bp, Homo sapien
tcccagcatgcatgagttccttaca

SEQ ID NO: 2184233 - DNA, 25 bp, Homo sapien
taattccattcgtgtctggcaccac

SEQ ID NO: 2184234 - DNA, 25 bp, Homo sapien
aacagtagaataccacccaggcagg

SEQ ID NO: 2184235 - DNA, 25 bp, Homo sapien
gcaccgtgatctggttaaaagcacc

SEQ ID NO: 2184236 - DNA, 25 bp, Homo sapien
cccaggcagggtggtaaaagcacac

SEQ ID NO: 2184237 - DNA, 25 bp, Homo sapien
gattcaccttgttcacctaacgagt

SEQ ID NO: 2184238 - DNA, 25 bp, Homo sapien
ctaagcaggtcaggaatgtgtatca

SEQ ID NO: 2184239 - DNA, 25 bp, Homo sapien
taataattcacctccgattcgccac

SEQ ID NO: 2184240 - DNA, 25 bp, Homo sapien
taacgagtccgtgaacaaccattct

SEQ ID NO: 2184241 - DNA, 25 bp, Homo sapien
tggaatcaaccattacttccaggag

SEQ ID NO: 2184242 - DNA, 25 bp, Homo sapien
cttggaaaactcatacccctttcat

SEQ ID NO: 2184243 - DNA, 25 bp, Homo sapien
aatacagcaatatgttccaggctca

SEQ ID NO: 2184244 - DNA, 25 bp, Homo sapien
tccaggagccctagttcatttcaaa

SEQ ID NO: 2184245 - DNA, 25 bp, Homo sapien
tacaatgtgatctatggtgaacacc

SEQ ID NO: 2184246 - DNA, 25 bp, Homo sapien
ttcactgctggaaggaaggcgaact

SEQ ID NO: 2184247 - DNA, 25 bp, Homo sapien
ggcgaactcgacgtgacttatcaca

SEQ ID NO: 2184248 - DNA, 25 bp, Homo sapien
catggctttcggaatgtgtgctcca

SEQ ID NO: 2184249 - DNA, 25 bp, Homo sapien
cagtccacacgagccagacaggatt

SEQ ID NO: 2184250 - DNA, 25 bp, Homo sapien
accacccgccatgcgggaattggca

SEQ ID NO: 2184251 - DNA, 25 bp, Homo sapien
acaggtgggcagtccacacgagcca

SEQ ID NO: 2184252 - DNA, 25 bp, Homo sapien
aattggcaggccatacaacacacag

SEQ ID NO: 2184253 - DNA, 25 bp, Homo sapien
caatcagtggcataagctgtgcagt

SEQ ID NO: 2184254 - DNA, 25 bp, Homo sapien
catgagccagataaagtggagctgc

SEQ ID NO: 2184255 - DNA, 25 bp, Homo sapien
taaaacggctgcaaagggtcacagc

SEQ ID NO: 2184256 - DNA, 25 bp, Homo sapien
tgcagtctcagaacacaggaagctc

SEQ ID NO: 2184257 - DNA, 25 bp, Homo sapien
ctgcgagggttgtttgccagaatga

SEQ ID NO: 2184258 - DNA, 25 bp, Homo sapien
agcaacactgcgagggttgtttgcc

SEQ ID NO: 2184259 - DNA, 25 bp, Homo sapien
cactgcgagggttgtttgccagaat

SEQ ID NO: 2184260 - DNA, 25 bp, Homo sapien
aacactgcgagggttgtttgccaga

SEQ ID NO: 2184261 - DNA, 25 bp, Homo sapien
ggaagacagtttgcaaccctgttgc

SEQ ID NO: 2184262 - DNA, 25 bp, Homo sapien
aaccctgttgcaagtaggcattcag

SEQ ID NO: 2184263 - DNA, 25 bp, Homo sapien
tttgcaaccctgttgcaagtaggca

SEQ ID NO: 2184264 - DNA, 25 bp, Homo sapien
ggttcccagttgctgcaagtaacag

SEQ ID NO: 2184265 - DNA, 25 bp, Homo sapien
ctcaggatggaactggacaccaaca

SEQ ID NO: 2184266 - DNA, 25 bp, Homo sapien
gaaatgagaacaatcacgatgcgat

SEQ ID NO: 2184267 - DNA, 25 bp, Homo sapien
gagaacaatcacgatgcgattaaag

SEQ ID NO: 2184268 - DNA, 25 bp, Homo sapien
caatcacgatgcgattaaagcagac

SEQ ID NO: 2184269 - DNA, 25 bp, Homo sapien
cgatgcgattaaagcagacaaacag

SEQ ID NO: 2184270 - DNA, 25 bp, Homo sapien
caacttcggtgttcttcctcaattc

SEQ ID NO: 2184271 - DNA, 25 bp, Homo sapien
tccagcctggttactaacaacaact

SEQ ID NO: 2184272 - DNA, 25 bp, Homo sapien
acaacaacttcggtgttcttcctca

SEQ ID NO: 2184273 - DNA, 25 bp, Homo sapien
ctggttactaacaacaacttcggtg

SEQ ID NO: 2184274 - DNA, 25 bp, Homo sapien
taagtcattctgctcaaattgtttg

SEQ ID NO: 2184275 - DNA, 25 bp, Homo sapien
caaattgtttgatcaggttagggtt

SEQ ID NO: 2184276 - DNA, 25 bp, Homo sapien
cctacaaaacttaagtcattctgct

SEQ ID NO: 2184277 - DNA, 25 bp, Homo sapien
catcaacatcctgacctacaaaact

SEQ ID NO: 2184278 - DNA, 25 bp, Homo sapien
tacgctattgcgtacgtaccagttc

SEQ ID NO: 2184279 - DNA, 25 bp, Homo sapien
gaatggctacgctattgcgtacgta

SEQ ID NO: 2184280 - DNA, 25 bp, Homo sapien
atgaatgaatggctacgctattgcg

SEQ ID NO: 2184281 - DNA, 25 bp, Homo sapien
tgcgtacgtaccagttcttgcacct

SEQ ID NO: 2184282 - DNA, 25 bp, Homo sapien
ctcgaaccgatgtctgtgtctttct

SEQ ID NO: 2184283 - DNA, 25 bp, Homo sapien
gtctttcttctataaaaggaacatc

SEQ ID NO: 2184284 - DNA, 25 bp, Homo sapien
tataaaaggaacatcaccataaagt

SEQ ID NO: 2184285 - DNA, 25 bp, Homo sapien
cgaaccgatgtctgtgtctttcttc

SEQ ID NO: 2184286 - DNA, 25 bp, Homo sapien
acagcaccctgggcatgaccagtgt

SEQ ID NO: 2184287 - DNA, 25 bp, Homo sapien
tgaggcactgcagctaagcacagca

SEQ ID NO: 2184288 - DNA, 25 bp, Homo sapien
tcaacgagctgcctagtgacttcat

SEQ ID NO: 2184289 - DNA, 25 bp, Homo sapien
atgggcacggcgatcaacgagctgc

SEQ ID NO: 2184290 - DNA, 25 bp, Homo sapien
ccagaagctgtttttccatatcaat

SEQ ID NO: 2184291 - DNA, 25 bp, Homo sapien
gagccagaagctgtttttccatatc

SEQ ID NO: 2184292 - DNA, 25 bp, Homo sapien
cagaagctgtttttccatatcaatg

SEQ ID NO: 2184293 - DNA, 25 bp, Homo sapien
caggagccagaagctgtttttccat

SEQ ID NO: 2184294 - DNA, 25 bp, Homo sapien
tacgcttctgaggtgcataactgcc

SEQ ID NO: 2184295 - DNA, 25 bp, Homo sapien
cataactgccctcctactcggaagt

SEQ ID NO: 2184296 - DNA, 25 bp, Homo sapien
catttgtgagtcactaagaccaggc

SEQ ID NO: 2184297 - DNA, 25 bp, Homo sapien
gcaaatatcaaatggcgagccatct

SEQ ID NO: 2184298 - DNA, 25 bp, Homo sapien
tcagtccaagtcccagtccaagttc

SEQ ID NO: 2184299 - DNA, 25 bp, Homo sapien
atctccaggagcatcggtaactcac

SEQ ID NO: 2184300 - DNA, 25 bp, Homo sapien
agttcatctccaggagcatcggtaa

SEQ ID NO: 2184301 - DNA, 25 bp, Homo sapien
ttcatctccaggagcatcggtaact

SEQ ID NO: 2184302 - DNA, 25 bp, Homo sapien
cagggagtcacgcagatcaaatgcg

SEQ ID NO: 2184303 - DNA, 25 bp, Homo sapien
acagcccaatgaacagggagtcacg

SEQ ID NO: 2184304 - DNA, 25 bp, Homo sapien
agtcacgcagatcaaatgcggaggg

SEQ ID NO: 2184305 - DNA, 25 bp, Homo sapien
caatgaacagggagtcacgcagatc

SEQ ID NO: 2184306 - DNA, 25 bp, Homo sapien
tcccaaattgccagggttgtgctcg

SEQ ID NO: 2184307 - DNA, 25 bp, Homo sapien
cagtctcattgttcctcccaaattg

SEQ ID NO: 2184308 - DNA, 25 bp, Homo sapien
ttgaaaacagttcttcttattccca

SEQ ID NO: 2184309 - DNA, 25 bp, Homo sapien
ccagggttgtgctcgggcatatcaa

SEQ ID NO: 2184310 - DNA, 25 bp, Homo sapien
cagttttgccatcttgtaaaaatgt

SEQ ID NO: 2184311 - DNA, 25 bp, Homo sapien
acaagtccagttttgccatcttgta

SEQ ID NO: 2184312 - DNA, 25 bp, Homo sapien
aacaaaacaagtccagttttgccat

SEQ ID NO: 2184313 - DNA, 25 bp, Homo sapien
gttttgccatcttgtaaaaatgtca

SEQ ID NO: 2184314 - DNA, 25 bp, Homo sapien
cattggttacgtgcttcaagaggac

SEQ ID NO: 2184315 - DNA, 25 bp, Homo sapien
gaagtaccggttgatgtaagcacag

SEQ ID NO: 2184316 - DNA, 25 bp, Homo sapien
tcatctacccataaaaggctgggca

SEQ ID NO: 2184317 - DNA, 25 bp, Homo sapien
tgaccaaagtgaactgggcacgaga

SEQ ID NO: 2184318 - DNA, 25 bp, Homo sapien
cagcagcagggacacgactgggtgt

SEQ ID NO: 2184319 - DNA, 25 bp, Homo sapien
ccagcagcagggacacgactgggtg

SEQ ID NO: 2184320 - DNA, 25 bp, Homo sapien
cagggacacgactgggtgtgcatgg

SEQ ID NO: 2184321 - DNA, 25 bp, Homo sapien
cagcagggacacgactgggtgtgca

SEQ ID NO: 2184322 - DNA, 25 bp, Homo sapien
aatcctttcctaaacattaagcttg

SEQ ID NO: 2184323 - DNA, 25 bp, Homo sapien
tcacagccgatttaatcctttccta

SEQ ID NO: 2184324 - DNA, 25 bp, Homo sapien
cacagccgatttaatcctttcctaa

SEQ ID NO: 2184325 - DNA, 25 bp, Homo sapien
ttggcctaaactctgtggaatcagc

SEQ ID NO: 2184326 - DNA, 25 bp, Homo sapien
ttgcaaactctatcactgctagttg

SEQ ID NO: 2184327 - DNA, 25 bp, Homo sapien
gcaaactctatcactgctagttgca

SEQ ID NO: 2184328 - DNA, 25 bp, Homo sapien
tgcaaactctatcactgctagttgc

SEQ ID NO: 2184329 - DNA, 25 bp, Homo sapien
caaactctatcactgctagttgcat

SEQ ID NO: 2184330 - DNA, 25 bp, Homo sapien
tcaggctgctaacccacaggcagcc

SEQ ID NO: 2184331 - DNA, 25 bp, Homo sapien
cccacaggcagccccatagccttca

SEQ ID NO: 2184332 - DNA, 25 bp, Homo sapien
ctaacccacaggcagccccatagcc

SEQ ID NO: 2184333 - DNA, 25 bp, Homo sapien
aacccacaggcagccccatagcctt

SEQ ID NO: 2184334 - DNA, 25 bp, Homo sapien
aaagcctccaggcacaagaatacca

SEQ ID NO: 2184335 - DNA, 25 bp, Homo sapien
tccaaagcctccaggcacaagaata

SEQ ID NO: 2184336 - DNA, 25 bp, Homo sapien
gtccttgcccaagaaatcgcctgga

SEQ ID NO: 2184337 - DNA, 25 bp, Homo sapien
gaaatcgcctggagttttcccaatg

SEQ ID NO: 2184338 - DNA, 25 bp, Homo sapien
tctccagatcaatggagtctatgta

SEQ ID NO: 2184339 - DNA, 25 bp, Homo sapien
cttctgccaagcttcatgaaatttc

SEQ ID NO: 2184340 - DNA, 25 bp, Homo sapien
aatttcacagggtcctcggtttcag

SEQ ID NO: 2184341 - DNA, 25 bp, Homo sapien
cagggtcctcggtttcagtgatctt

SEQ ID NO: 2184342 - DNA, 25 bp, Homo sapien
gggctttgaacacagaggcgtagca

SEQ ID NO: 2184343 - DNA, 25 bp, Homo sapien
aggcgtagcagtctctgagcttggt

SEQ ID NO: 2184344 - DNA, 25 bp, Homo sapien
gtatttgccaaccagggctatggag

SEQ ID NO: 2184345 - DNA, 25 bp, Homo sapien
tatttgccaaccagggctatggagc

SEQ ID NO: 2184346 - DNA, 25 bp, Homo sapien
ctctaaaagcacaggaactcggtat

SEQ ID NO: 2184347 - DNA, 25 bp, Homo sapien
tcaccgatgggcaggtgcaatctct

SEQ ID NO: 2184348 - DNA, 25 bp, Homo sapien
gaagaaacatcatggatacatatga

SEQ ID NO: 2184349 - DNA, 25 bp, Homo sapien
aagcaaattacttgcagaatcaccg

SEQ ID NO: 2184350 - DNA, 25 bp, Homo sapien
gggttccccagtgcttgcataaatg

SEQ ID NO: 2184351 - DNA, 25 bp, Homo sapien
gtaatatgatcattgaagaggtaca

SEQ ID NO: 2184352 - DNA, 25 bp, Homo sapien
gaatcatggttggatcagggttccc

SEQ ID NO: 2184353 - DNA, 25 bp, Homo sapien
aaatgccgtgaaaagtaatatgatc

SEQ ID NO: 2184354 - DNA, 25 bp, Homo sapien
cggccatctcaatgggcgttgaact

SEQ ID NO: 2184355 - DNA, 25 bp, Homo sapien
ctgttcagggttcacgtgacaaaac

SEQ ID NO: 2184356 - DNA, 25 bp, Homo sapien
tccttcacggccatctcaatgggcg

SEQ ID NO: 2184357 - DNA, 25 bp, Homo sapien
tgggcgttgaacttcggcagacaat

SEQ ID NO: 2184358 - DNA, 25 bp, Homo sapien
cctcagtgcgcggacgctgttttgg

SEQ ID NO: 2184359 - DNA, 25 bp, Homo sapien
aaacccctcagtgcgcggacgctgt

SEQ ID NO: 2184360 - DNA, 25 bp, Homo sapien
aggcctaaacccctcagtgcgcgga

SEQ ID NO: 2184361 - DNA, 25 bp, Homo sapien
tgcgcggacgctgttttgggtgggt

SEQ ID NO: 2184362 - DNA, 25 bp, Homo sapien
ccacatacttatctggaaagcccac

SEQ ID NO: 2184363 - DNA, 25 bp, Homo sapien
ttatcaaagttgctgtccacatact

SEQ ID NO: 2184364 - DNA, 25 bp, Homo sapien
ttcaaatgcaggacacatagaatat

SEQ ID NO: 2184365 - DNA, 25 bp, Homo sapien
tcaaatgcaggacacatagaatatc

SEQ ID NO: 2184366 - DNA, 25 bp, Homo sapien
gtctaaacgcctccacaaacggcat

SEQ ID NO: 2184367 - DNA, 25 bp, Homo sapien
ctcttttcgccttaaactggaattg

SEQ ID NO: 2184368 - DNA, 25 bp, Homo sapien
tgtgggacaaggctaacgtggatat

SEQ ID NO: 2184369 - DNA, 25 bp, Homo sapien
aaacggcattccttcgatgtctcca

SEQ ID NO: 2184370 - DNA, 25 bp, Homo sapien
agaggatggttgaccactagtatcc

SEQ ID NO: 2184371 - DNA, 25 bp, Homo sapien
acatcagggttataacggagaaggg

SEQ ID NO: 2184372 - DNA, 25 bp, Homo sapien
aacatcagggttataacggagaagg

SEQ ID NO: 2184373 - DNA, 25 bp, Homo sapien
cactagtatccaataagcaaatata

SEQ ID NO: 2184374 - DNA, 25 bp, Homo sapien
gcatatttggggctcttccttatta

SEQ ID NO: 2184375 - DNA, 25 bp, Homo sapien
cttggcttgattcataacccactcc

SEQ ID NO: 2184376 - DNA, 25 bp, Homo sapien
gacagcatcagtaatgtgagggaca

SEQ ID NO: 2184377 - DNA, 25 bp, Homo sapien
gattcataacccactcctggacagc

SEQ ID NO: 2184378 - DNA, 25 bp, Homo sapien
ggacagcatcagtaatgtgagggac

SEQ ID NO: 2184379 - DNA, 25 bp, Homo sapien
tcaccacgcctctctttattgatca

SEQ ID NO: 2184380 - DNA, 25 bp, Homo sapien
ttccccaggtaatcaccacgcctct

SEQ ID NO: 2184381 - DNA, 25 bp, Homo sapien
taatcaccacgcctctctttattga

SEQ ID NO: 2184382 - DNA, 25 bp, Homo sapien
caggtaatcaccacgcctctcttta

SEQ ID NO: 2184383 - DNA, 25 bp, Homo sapien
ccatcatttaagacgaagacttcac

SEQ ID NO: 2184384 - DNA, 25 bp, Homo sapien
tatcttccccgtggtgatattgttg

SEQ ID NO: 2184385 - DNA, 25 bp, Homo sapien
atgctgatatatcttccccgtggtg

SEQ ID NO: 2184386 - DNA, 25 bp, Homo sapien
atttccaaggtctaaatcaacttct

SEQ ID NO: 2184387 - DNA, 25 bp, Homo sapien
tttttatggcagtaactcggagtcc

SEQ ID NO: 2184388 - DNA, 25 bp, Homo sapien
gatccctttaccaatgcctgagatg

SEQ ID NO: 2184389 - DNA, 25 bp, Homo sapien
taaggtgaaaaagtgccagcatcga

SEQ ID NO: 2184390 - DNA, 25 bp, Homo sapien
ccacccgtgaccaggatgtacttca

SEQ ID NO: 2184391 - DNA, 25 bp, Homo sapien
ctgggtgccaacacccagatataat

SEQ ID NO: 2184392 - DNA, 25 bp, Homo sapien
tgcttcgtctcaccaaaatttcaaa

SEQ ID NO: 2184393 - DNA, 25 bp, Homo sapien
gatgctgattacaaaagtgagccac

SEQ ID NO: 2184394 - DNA, 25 bp, Homo sapien
agccaccatgcttcgtctcaccaaa

SEQ ID NO: 2184395 - DNA, 25 bp, Homo sapien
aagatgctgattacaaaagtgagcc

SEQ ID NO: 2184396 - DNA, 25 bp, Homo sapien
cagttgatcacattcaatgccatcg

SEQ ID NO: 2184397 - DNA, 25 bp, Homo sapien
tctacacaacacagttgatcacatt

SEQ ID NO: 2184398 - DNA, 25 bp, Homo sapien
gatcacattcaatgccatcgcacat

SEQ ID NO: 2184399 - DNA, 25 bp, Homo sapien
aacacagttgatcacattcaatgcc

SEQ ID NO: 2184400 - DNA, 25 bp, Homo sapien
tttgtcaccactaagatttccatct

SEQ ID NO: 2184401 - DNA, 25 bp, Homo sapien
aaattttatttgtcaccactaagat

SEQ ID NO: 2184402 - DNA, 25 bp, Homo sapien
accactaagatttccatcttatggc

SEQ ID NO: 2184403 - DNA, 25 bp, Homo sapien
aagaaaatgcttatgttacctgaaa

SEQ ID NO: 2184404 - DNA, 25 bp, Homo sapien
gcagcagcgtagttcggcactatgc

SEQ ID NO: 2184405 - DNA, 25 bp, Homo sapien
taccagggaactttgcagggtgaag

SEQ ID NO: 2184406 - DNA, 25 bp, Homo sapien
tatgcgccctaaccatctagtacgg

SEQ ID NO: 2184407 - DNA, 25 bp, Homo sapien
aatcccgtcgatttgcacactgaaa

SEQ ID NO: 2184408 - DNA, 25 bp, Homo sapien
gcgcggtggtggtagcaccggggag

SEQ ID NO: 2184409 - DNA, 25 bp, Homo sapien
tgcgcggtggtggtagcaccgggga

SEQ ID NO: 2184410 - DNA, 25 bp, Homo sapien
cgcggtggtggtagcaccggggagg

SEQ ID NO: 2184411 - DNA, 25 bp, Homo sapien
ctgcgcggtggtggtagcaccgggg

SEQ ID NO: 2184412 - DNA, 25 bp, Homo sapien
tcgctgccggggctgtccaaagccg

SEQ ID NO: 2184413 - DNA, 25 bp, Homo sapien
tggcccagctcactcacgctggtga

SEQ ID NO: 2184414 - DNA, 25 bp, Homo sapien
tttgcacccgggtttgtgcaatggt

SEQ ID NO: 2184415 - DNA, 25 bp, Homo sapien
caaaacaagcgcctaaaaagtgatt

SEQ ID NO: 2184416 - DNA, 25 bp, Homo sapien
tcccgtgcagatctcacccttgtaa

SEQ ID NO: 2184417 - DNA, 25 bp, Homo sapien
tttgcaaaggcacttcgagtgcgcg

SEQ ID NO: 2184418 - DNA, 25 bp, Homo sapien
aaacgcttgtggatcccctactacg

SEQ ID NO: 2184419 - DNA, 25 bp, Homo sapien
acttcactggtcacaaacgcttgtg

SEQ ID NO: 2184420 - DNA, 25 bp, Homo sapien
tggagtcaaaggcaaccagtgctcg

SEQ ID NO: 2184421 - DNA, 25 bp, Homo sapien
gcagggctacgctgggaaagctctt

SEQ ID NO: 2184422 - DNA, 25 bp, Homo sapien
tcacctacaaagctggcgaatgagg

SEQ ID NO: 2184423 - DNA, 25 bp, Homo sapien
gttgtcacaactgacgtcaccaggg

SEQ ID NO: 2184424 - DNA, 25 bp, Homo sapien
tgactgatcgtattctactctttca

SEQ ID NO: 2184425 - DNA, 25 bp, Homo sapien
accgcacctagcactgactgatcgt

SEQ ID NO: 2184426 - DNA, 25 bp, Homo sapien
gcactgactgatcgtattctactct

SEQ ID NO: 2184427 - DNA, 25 bp, Homo sapien
cacctagcactgactgatcgtattc

SEQ ID NO: 2184428 - DNA, 25 bp, Homo sapien
gaacttaagaggaagcactttcaga

SEQ ID NO: 2184429 - DNA, 25 bp, Homo sapien
cataggcagtatggctatctttgcc

SEQ ID NO: 2184430 - DNA, 25 bp, Homo sapien
tcagaactattcacttgccaggtat

SEQ ID NO: 2184431 - DNA, 25 bp, Homo sapien
taagaaatactgtgcaggccatgcg

SEQ ID NO: 2184432 - DNA, 25 bp, Homo sapien
tgaatgaacgaacgaacaaggtggt

SEQ ID NO: 2184433 - DNA, 25 bp, Homo sapien
gcagtaaacccgtgtattccatgaa

SEQ ID NO: 2184434 - DNA, 25 bp, Homo sapien
caggatgtgtcggtgcttggctctt

SEQ ID NO: 2184435 - DNA, 25 bp, Homo sapien
ccactgggcccatcatcaaaaggtt

SEQ ID NO: 2184436 - DNA, 25 bp, Homo sapien
caggactctgaatgtgcatcaataa

SEQ ID NO: 2184437 - DNA, 25 bp, Homo sapien
tactctttctagtaatagatacccc

SEQ ID NO: 2184438 - DNA, 25 bp, Homo sapien
tagttactctttctagtaatagata

SEQ ID NO: 2184439 - DNA, 25 bp, Homo sapien
tctagtaatagatacccccctccat

SEQ ID NO: 2184440 - DNA, 25 bp, Homo sapien
tcatctacaaagtacagatgtttcc

SEQ ID NO: 2184441 - DNA, 25 bp, Homo sapien
ctgacttatgatggcgttatgttcc

SEQ ID NO: 2184442 - DNA, 25 bp, Homo sapien
caaagtacagatgtttcctgactta

SEQ ID NO: 2184443 - DNA, 25 bp, Homo sapien
caaaacttcattagtagtattagaa

SEQ ID NO: 2184444 - DNA, 25 bp, Homo sapien
ggaactgtctgtagcaaaacaggat

SEQ ID NO: 2184445 - DNA, 25 bp, Homo sapien
tggaactgtctgtagcaaaacagga

SEQ ID NO: 2184446 - DNA, 25 bp, Homo sapien
ttacctaatgttatgaattcgagac

SEQ ID NO: 2184447 - DNA, 25 bp, Homo sapien
aggtggatggattacctaatgttat

SEQ ID NO: 2184448 - DNA, 25 bp, Homo sapien
ctaatgttatgaattcgagaccagc

SEQ ID NO: 2184449 - DNA, 25 bp, Homo sapien
cctaatgttatgaattcgagaccag

SEQ ID NO: 2184450 - DNA, 25 bp, Homo sapien
cccagagttaatccctgctaaaaat

SEQ ID NO: 2184451 - DNA, 25 bp, Homo sapien
tgtcttacctccctaaatcccagag

SEQ ID NO: 2184452 - DNA, 25 bp, Homo sapien
taactgcgtcagagatctgtttgac

SEQ ID NO: 2184453 - DNA, 25 bp, Homo sapien
taaagtgagggaaacagtgtaatag

SEQ ID NO: 2184454 - DNA, 25 bp, Homo sapien
gacagacagccatgaattggttaga

SEQ ID NO: 2184455 - DNA, 25 bp, Homo sapien
aatgcccgggcaacagtgatgatgc

SEQ ID NO: 2184456 - DNA, 25 bp, Homo sapien
gaaggttagctacccaacccagtga

SEQ ID NO: 2184457 - DNA, 25 bp, Homo sapien
ggttgttctcagactcacaccgatc

SEQ ID NO: 2184458 - DNA, 25 bp, Homo sapien
tagatctcacatagtggtggagacc

SEQ ID NO: 2184459 - DNA, 25 bp, Homo sapien
gaccgtgcgccctgggttaatgtcc

SEQ ID NO: 2184460 - DNA, 25 bp, Homo sapien
taacaaaaacctgcccttcatgaaa

SEQ ID NO: 2184461 - DNA, 25 bp, Homo sapien
tgtcccagttgcatcatagaacgtg

SEQ ID NO: 2184462 - DNA, 25 bp, Homo sapien
aatgccccgacctggatcagagctg

SEQ ID NO: 2184463 - DNA, 25 bp, Homo sapien
gggtaattacccaaggcacagggca

SEQ ID NO: 2184464 - DNA, 25 bp, Homo sapien
catgggtcagcagtcaacctaggtc

SEQ ID NO: 2184465 - DNA, 25 bp, Homo sapien
tctggtagcataggtttaacacttc

SEQ ID NO: 2184466 - DNA, 25 bp, Homo sapien
gttgtggtggagtgtcagttcttaa

SEQ ID NO: 2184467 - DNA, 25 bp, Homo sapien
gtgtcagttcttaatgtcttgtggg

SEQ ID NO: 2184468 - DNA, 25 bp, Homo sapien
ctgatgtgttcttggaggttgtggt

SEQ ID NO: 2184469 - DNA, 25 bp, Homo sapien
tgaagatcgctgtcctcccaagaat

SEQ ID NO: 2184470 - DNA, 25 bp, Homo sapien
tatattggcggtggactccaaggtg

SEQ ID NO: 2184471 - DNA, 25 bp, Homo sapien
tgtaatgctactaggctggcccaga

SEQ ID NO: 2184472 - DNA, 25 bp, Homo sapien
tgttgtggctttgtagcgcaccccg

SEQ ID NO: 2184473 - DNA, 25 bp, Homo sapien
tgcaactgcctttattacacctggt

SEQ ID NO: 2184474 - DNA, 25 bp, Homo sapien
atttttacagcccacgtctttcatg

SEQ ID NO: 2184475 - DNA, 25 bp, Homo sapien
taactgtaggagtccaaaggtacca

SEQ ID NO: 2184476 - DNA, 25 bp, Homo sapien
tctttcattatccatgtgaccttaa

SEQ ID NO: 2184477 - DNA, 25 bp, Homo sapien
tatgtatgataaacttaacagcttc

SEQ ID NO: 2184478 - DNA, 25 bp, Homo sapien
agttgaatcaaaggcaataccctgc

SEQ ID NO: 2184479 - DNA, 25 bp, Homo sapien
gcctttttggcgcttgataaatcaa

SEQ ID NO: 2184480 - DNA, 25 bp, Homo sapien
tcagaggataaagaagccataagcc

SEQ ID NO: 2184481 - DNA, 25 bp, Homo sapien
tacgcaacagctcacttgaaagtgc

SEQ ID NO: 2184482 - DNA, 25 bp, Homo sapien
tccttgtccctccagttcggatgtc

SEQ ID NO: 2184483 - DNA, 25 bp, Homo sapien
tgtccctccagttcggatgtcgtga

SEQ ID NO: 2184484 - DNA, 25 bp, Homo sapien
ccagttcggatgtcgtgacatctga

SEQ ID NO: 2184485 - DNA, 25 bp, Homo sapien
tcggatgtcgtgacatctgactctt

SEQ ID NO: 2184486 - DNA, 25 bp, Homo sapien
gccagtgtgtaattccgtatgtata

SEQ ID NO: 2184487 - DNA, 25 bp, Homo sapien
cctatggttttcacatggtcatgta

SEQ ID NO: 2184488 - DNA, 25 bp, Homo sapien
tcaataaggaaatggtaggctagcc

SEQ ID NO: 2184489 - DNA, 25 bp, Homo sapien
cgtatgtatacttagccacccatcg

SEQ ID NO: 2184490 - DNA, 25 bp, Homo sapien
attggggttccagctaaaatctgaa

SEQ ID NO: 2184491 - DNA, 25 bp, Homo sapien
gaaatcttagcagtgtgtcctccat

SEQ ID NO: 2184492 - DNA, 25 bp, Homo sapien
tttgccatatctgcatgatgttatc

SEQ ID NO: 2184493 - DNA, 25 bp, Homo sapien
tgcatgatgttatcctcagacactg

SEQ ID NO: 2184494 - DNA, 25 bp, Homo sapien
caagagacaacctcgtcggaatgca

SEQ ID NO: 2184495 - DNA, 25 bp, Homo sapien
tctggagcattcttacaaggtgggc

SEQ ID NO: 2184496 - DNA, 25 bp, Homo sapien
agagcagttgttccccgcaagagac

SEQ ID NO: 2184497 - DNA, 25 bp, Homo sapien
tacactgtttggaactgggacatca

SEQ ID NO: 2184498 - DNA, 25 bp, Homo sapien
ctgctgattgttcttccccaatttt

SEQ ID NO: 2184499 - DNA, 25 bp, Homo sapien
tgctgattgttcttccccaatttta

SEQ ID NO: 2184500 - DNA, 25 bp, Homo sapien
caggagttctggaggcccatcttct

SEQ ID NO: 2184501 - DNA, 25 bp, Homo sapien
gagttctggaggcccatcttctgca

SEQ ID NO: 2184502 - DNA, 25 bp, Homo sapien
tatatttggtgtaaggacgggatgt

SEQ ID NO: 2184503 - DNA, 25 bp, Homo sapien
caggcacgatcactgtgcactacag

SEQ ID NO: 2184504 - DNA, 25 bp, Homo sapien
tgcaatccctatacttcactcaaag

SEQ ID NO: 2184505 - DNA, 25 bp, Homo sapien
tgttgcatcccaggagtaaaatata

SEQ ID NO: 2184506 - DNA, 25 bp, Homo sapien
ttaaatcccacacattcaggcggcg

SEQ ID NO: 2184507 - DNA, 25 bp, Homo sapien
gccagaatagtttcattatgtggag

SEQ ID NO: 2184508 - DNA, 25 bp, Homo sapien
gtaccacttgaagccagaatagttt

SEQ ID NO: 2184509 - DNA, 25 bp, Homo sapien
attcaggcggcggtcagtaccactt

SEQ ID NO: 2184510 - DNA, 25 bp, Homo sapien
ggctgttgttctaatctgatatttt

SEQ ID NO: 2184511 - DNA, 25 bp, Homo sapien
aatgtatttaaagaatcatccgctg

SEQ ID NO: 2184512 - DNA, 25 bp, Homo sapien
ttgcactctattatcttatccttgg

SEQ ID NO: 2184513 - DNA, 25 bp, Homo sapien
atccgctgctaggtttgtggctgtt

SEQ ID NO: 2184514 - DNA, 25 bp, Homo sapien
tgagcatctccatgtaacaccacgt

SEQ ID NO: 2184515 - DNA, 25 bp, Homo sapien
tttttcaatagtggacccacgagtc

SEQ ID NO: 2184516 - DNA, 25 bp, Homo sapien
tcctgacatacagacaccagaaaac

SEQ ID NO: 2184517 - DNA, 25 bp, Homo sapien
ggtatagcttaactgatgaatccct

SEQ ID NO: 2184518 - DNA, 25 bp, Homo sapien
tatgagattcgaaggtatggagttt

SEQ ID NO: 2184519 - DNA, 25 bp, Homo sapien
ttaattttaagttacgcagatccca

SEQ ID NO: 2184520 - DNA, 25 bp, Homo sapien
tttaagttacgcagatcccataaag

SEQ ID NO: 2184521 - DNA, 25 bp, Homo sapien
ctttatgagattcgaaggtatggag

SEQ ID NO: 2184522 - DNA, 25 bp, Homo sapien
tctgattaaggcacaagagaactgg

SEQ ID NO: 2184523 - DNA, 25 bp, Homo sapien
ctgattaaggcacaagagaactggg

SEQ ID NO: 2184524 - DNA, 25 bp, Homo sapien
tggctagaataaattcgctgtaggg

SEQ ID NO: 2184525 - DNA, 25 bp, Homo sapien
tgacttcggcagtgtgcgcatccac

SEQ ID NO: 2184526 - DNA, 25 bp, Homo sapien
caccaagtgactcggcttggaggtg

SEQ ID NO: 2184527 - DNA, 25 bp, Homo sapien
tgaatgagaggcagttgacttcggc

SEQ ID NO: 2184528 - DNA, 25 bp, Homo sapien
tcatgaagaaaccaaccacacagct

SEQ ID NO: 2184529 - DNA, 25 bp, Homo sapien
cagggatgacacactcacattcggc

SEQ ID NO: 2184530 - DNA, 25 bp, Homo sapien
acagctggtgattcagacctcgacc

SEQ ID NO: 2184531 - DNA, 25 bp, Homo sapien
cacaaaggtaaaggcacacggcacc

SEQ ID NO: 2184532 - DNA, 25 bp, Homo sapien
taagattataagtgaatgaagccct

SEQ ID NO: 2184533 - DNA, 25 bp, Homo sapien
gatatttaccaccacaccaagtatg

SEQ ID NO: 2184534 - DNA, 25 bp, Homo sapien
ttttgtgtagagtctcacactcctg

SEQ ID NO: 2184535 - DNA, 25 bp, Homo sapien
tacagcctgcagcaatcactgatgg

SEQ ID NO: 2184536 - DNA, 25 bp, Homo sapien
tcatcagcaacagatccaaacaatg

SEQ ID NO: 2184537 - DNA, 25 bp, Homo sapien
tcttttggtcctgcgtttatatccc

SEQ ID NO: 2184538 - DNA, 25 bp, Homo sapien
gcgtttatatcccacagacaaacag

SEQ ID NO: 2184539 - DNA, 25 bp, Homo sapien
aatgactcgtgcagcaggtgccagg

SEQ ID NO: 2184540 - DNA, 25 bp, Homo sapien
acaagggctataagagactgatttt

SEQ ID NO: 2184541 - DNA, 25 bp, Homo sapien
gaacaagggctataagagactgatt

SEQ ID NO: 2184542 - DNA, 25 bp, Homo sapien
aaagaacaagggctataagagactg

SEQ ID NO: 2184543 - DNA, 25 bp, Homo sapien
ttttccctcgagacagtgtctcagt

SEQ ID NO: 2184544 - DNA, 25 bp, Homo sapien
actgtgcccggtcaagagattgaat

SEQ ID NO: 2184545 - DNA, 25 bp, Homo sapien
gcccggtcaagagattgaatttaaa

SEQ ID NO: 2184546 - DNA, 25 bp, Homo sapien
gtgcccggtcaagagattgaattta

SEQ ID NO: 2184547 - DNA, 25 bp, Homo sapien
ctgtgcccggtcaagagattgaatt

SEQ ID NO: 2184548 - DNA, 25 bp, Homo sapien
gcacttaggagatgtccactcaaat

SEQ ID NO: 2184549 - DNA, 25 bp, Homo sapien
ttccaggagagaccatagccttcct

SEQ ID NO: 2184550 - DNA, 25 bp, Homo sapien
gaattccaggagagaccatagcctt

SEQ ID NO: 2184551 - DNA, 25 bp, Homo sapien
tctggtgacctcttaatctgagatc

SEQ ID NO: 2184552 - DNA, 25 bp, Homo sapien
gtatagtcaaaaaccaacacatcag

SEQ ID NO: 2184553 - DNA, 25 bp, Homo sapien
cggtttacttctccttcgtgattga

SEQ ID NO: 2184554 - DNA, 25 bp, Homo sapien
cacatcagaagatggtgtttttgta

SEQ ID NO: 2184555 - DNA, 25 bp, Homo sapien
ctgcggcatgtaacgagcacggttt

SEQ ID NO: 2184556 - DNA, 25 bp, Homo sapien
tgttacagaaccaaagccaccaaat

SEQ ID NO: 2184557 - DNA, 25 bp, Homo sapien
ctgttacagaaccaaagccaccaaa

SEQ ID NO: 2184558 - DNA, 25 bp, Homo sapien
agcagtctgggtgcttagccctgga

SEQ ID NO: 2184559 - DNA, 25 bp, Homo sapien
taatagcgttaagccatttgggact

SEQ ID NO: 2184560 - DNA, 25 bp, Homo sapien
tagccctggagtctctgaggaacac

SEQ ID NO: 2184561 - DNA, 25 bp, Homo sapien
ggaccctattactgacccttggcta

SEQ ID NO: 2184562 - DNA, 25 bp, Homo sapien
tcatcagacgtatgagtccccagca

SEQ ID NO: 2184563 - DNA, 25 bp, Homo sapien
gaatatgtactcgagcaaccaccag

SEQ ID NO: 2184564 - DNA, 25 bp, Homo sapien
caatgggaagcatcaaactgtgcat

SEQ ID NO: 2184565 - DNA, 25 bp, Homo sapien
tccccagcactagccaatgaagggc

SEQ ID NO: 2184566 - DNA, 25 bp, Homo sapien
aacagagtaaggcagccgtgactaa

SEQ ID NO: 2184567 - DNA, 25 bp, Homo sapien
tctaggcaagtaatttagtaataag

SEQ ID NO: 2184568 - DNA, 25 bp, Homo sapien
gactaagcaatagcaacgtgtttga

SEQ ID NO: 2184569 - DNA, 25 bp, Homo sapien
gcttacggtaaaaaagtgtgtgcac

SEQ ID NO: 2184570 - DNA, 25 bp, Homo sapien
gagaaaggcagtctaatgcagggac

SEQ ID NO: 2184571 - DNA, 25 bp, Homo sapien
taaaagtacatggtcaagttcctac

SEQ ID NO: 2184572 - DNA, 25 bp, Homo sapien
tgagctcaagctaaccttccaaagc

SEQ ID NO: 2184573 - DNA, 25 bp, Homo sapien
gtccgcaacacccaaatttaagatg

SEQ ID NO: 2184574 - DNA, 25 bp, Homo sapien
tgaacggtaagactgggccactgaa

SEQ ID NO: 2184575 - DNA, 25 bp, Homo sapien
caggtcatatagaaacggtgtattc

SEQ ID NO: 2184576 - DNA, 25 bp, Homo sapien
gagcatgggtcataaccaggtcata

SEQ ID NO: 2184577 - DNA, 25 bp, Homo sapien
tcttcattgatgacacgctcctcca

SEQ ID NO: 2184578 - DNA, 25 bp, Homo sapien
ggagaaagcccacacgattaagtgg

SEQ ID NO: 2184579 - DNA, 25 bp, Homo sapien
ttggagaaagcccacacgattaagt

SEQ ID NO: 2184580 - DNA, 25 bp, Homo sapien
tggagaaagcccacacgattaagtg

SEQ ID NO: 2184581 - DNA, 25 bp, Homo sapien
ctgttctaagatgacgacctgtacg

SEQ ID NO: 2184582 - DNA, 25 bp, Homo sapien
aatgcacgtgtagcagaagcccaca

SEQ ID NO: 2184583 - DNA, 25 bp, Homo sapien
cgcctcggcagccataggcctgagg

SEQ ID NO: 2184584 - DNA, 25 bp, Homo sapien
tgcgcgacccagtcgggaagacaaa

SEQ ID NO: 2184585 - DNA, 25 bp, Homo sapien
cttgcgtcgggtcgttcgcccctcg

SEQ ID NO: 2184586 - DNA, 25 bp, Homo sapien
aagagcagcccgaccgctggcgctc

SEQ ID NO: 2184587 - DNA, 25 bp, Homo sapien
tcggactcctctcgttagccaagag

SEQ ID NO: 2184588 - DNA, 25 bp, Homo sapien
cgccgcctcggactcctctcgttag

SEQ ID NO: 2184589 - DNA, 25 bp, Homo sapien
gaaagcccgggccccgtcttgctgc

SEQ ID NO: 2184590 - DNA, 25 bp, Homo sapien
cactccccactgtcgaaagcccggg

SEQ ID NO: 2184591 - DNA, 25 bp, Homo sapien
ggccccgtcttgctgcctgggtgct

SEQ ID NO: 2184592 - DNA, 25 bp, Homo sapien
ccgggccccgtcttgctgcctgggt

SEQ ID NO: 2184593 - DNA, 25 bp, Homo sapien
tggaacgagacttttcaacccgcgc

SEQ ID NO: 2184594 - DNA, 25 bp, Homo sapien
cccgctcgcgggtaccgaggtctga

SEQ ID NO: 2184595 - DNA, 25 bp, Homo sapien
cgggtaccgaggtctgaggcgctct

SEQ ID NO: 2184596 - DNA, 25 bp, Homo sapien
ctcctccccgctcgcgggtaccgag

SEQ ID NO: 2184597 - DNA, 25 bp, Homo sapien
gagcgcaggcgcatccgccctggga

SEQ ID NO: 2184598 - DNA, 25 bp, Homo sapien
gcgcaggcgcatccgccctgggaaa

SEQ ID NO: 2184599 - DNA, 25 bp, Homo sapien
aggcgcatccgccctgggaaaagtg

SEQ ID NO: 2184600 - DNA, 25 bp, Homo sapien
tgggagccaacggctccggcgccga

SEQ ID NO: 2184601 - DNA, 25 bp, Homo sapien
acttcatagcccctgaggagtgtgt

SEQ ID NO: 2184602 - DNA, 25 bp, Homo sapien
tcatagcccctgaggagtgtgtcgg

SEQ ID NO: 2184603 - DNA, 25 bp, Homo sapien
tcaggaacttcatagcccctgagga

SEQ ID NO: 2184604 - DNA, 25 bp, Homo sapien
tctgctcaggaacttcatagcccct

SEQ ID NO: 2184605 - DNA, 25 bp, Homo sapien
tcagatgctatcttgcagatgccgc

SEQ ID NO: 2184606 - DNA, 25 bp, Homo sapien
aaagcacccccggaacatttgctgc

SEQ ID NO: 2184607 - DNA, 25 bp, Homo sapien
agatgccgctgtcatgcccactttt

SEQ ID NO: 2184608 - DNA, 25 bp, Homo sapien
tgctgccttgatacctttccaagtg

SEQ ID NO: 2184609 - DNA, 25 bp, Homo sapien
ggagatgatttgtatccctttaata

SEQ ID NO: 2184610 - DNA, 25 bp, Homo sapien
tctgacaagtagacatgatttccaa

SEQ ID NO: 2184611 - DNA, 25 bp, Homo sapien
aaagagaacctcgtgtgcaaagcaa

SEQ ID NO: 2184612 - DNA, 25 bp, Homo sapien
tacagtgtactcatttctgacaagt

SEQ ID NO: 2184613 - DNA, 25 bp, Homo sapien
tcaattagcaataatcacgcctcgg

SEQ ID NO: 2184614 - DNA, 25 bp, Homo sapien
caataatcacgcctcggataaacct

SEQ ID NO: 2184615 - DNA, 25 bp, Homo sapien
ttggctacgatactgccactgtgca

SEQ ID NO: 2184616 - DNA, 25 bp, Homo sapien
tggctacgatactgccactgtgcaa

SEQ ID NO: 2184617 - DNA, 25 bp, Homo sapien
tattatttttccctttctctgccat

SEQ ID NO: 2184618 - DNA, 25 bp, Homo sapien
ttattatttttccctttctctgcca

SEQ ID NO: 2184619 - DNA, 25 bp, Homo sapien
ggaggcagctgctgtttggccacgt

SEQ ID NO: 2184620 - DNA, 25 bp, Homo sapien
aggcagctgctgtttggccacgtgc

SEQ ID NO: 2184621 - DNA, 25 bp, Homo sapien
gcagctgctgtttggccacgtgcat

SEQ ID NO: 2184622 - DNA, 25 bp, Homo sapien
ctcaggaggcagctgctgtttggcc

SEQ ID NO: 2184623 - DNA, 25 bp, Homo sapien
gggactgcttcgcgggaagccccac

SEQ ID NO: 2184624 - DNA, 25 bp, Homo sapien
ccgcagaactcaggcggggactgct

SEQ ID NO: 2184625 - DNA, 25 bp, Homo sapien
gttttgtgcatcctgtggcgagggt

SEQ ID NO: 2184626 - DNA, 25 bp, Homo sapien
gtgcttggggacccgcagaactcag

SEQ ID NO: 2184627 - DNA, 25 bp, Homo sapien
ccaaacgccagcaatggagagagtg

SEQ ID NO: 2184628 - DNA, 25 bp, Homo sapien
gagaagtccaaaccaaaggtgagat

SEQ ID NO: 2184629 - DNA, 25 bp, Homo sapien
accaaaggtgagatgcccaccaagg

SEQ ID NO: 2184630 - DNA, 25 bp, Homo sapien
gacttccttccaaacgccagcaatg

SEQ ID NO: 2184631 - DNA, 25 bp, Homo sapien
ggtggaacatgctgtcgatggaatc

SEQ ID NO: 2184632 - DNA, 25 bp, Homo sapien
gcgaatgccaccaatgagcaaggtc

SEQ ID NO: 2184633 - DNA, 25 bp, Homo sapien
tgccaccaatgagcaaggtccccag

SEQ ID NO: 2184634 - DNA, 25 bp, Homo sapien
tcagcgaatgccaccaatgagcaag

SEQ ID NO: 2184635 - DNA, 25 bp, Homo sapien
gaatgccaccaatgagcaaggtccc

SEQ ID NO: 2184636 - DNA, 25 bp, Homo sapien
gtgtcctcaagaggtctccctctat

SEQ ID NO: 2184637 - DNA, 25 bp, Homo sapien
ggcaagaacacaggtggtgtcctca

SEQ ID NO: 2184638 - DNA, 25 bp, Homo sapien
ctcaagaggtctccctctatgctgt

SEQ ID NO: 2184639 - DNA, 25 bp, Homo sapien
tgtttgacctccacagcacactctt

SEQ ID NO: 2184640 - DNA, 25 bp, Homo sapien
actgattgtgatcacgtcgttgtaa

SEQ ID NO: 2184641 - DNA, 25 bp, Homo sapien
agaacaaagacatccataactgatt

SEQ ID NO: 2184642 - DNA, 25 bp, Homo sapien
aagaacaaagacatccataactgat

SEQ ID NO: 2184643 - DNA, 25 bp, Homo sapien
aaagaacaaagacatccataactga

SEQ ID NO: 2184644 - DNA, 25 bp, Homo sapien
gcagttagtgtgcatctgccatgca

SEQ ID NO: 2184645 - DNA, 25 bp, Homo sapien
agtgccagttttcaagcagttagtg

SEQ ID NO: 2184646 - DNA, 25 bp, Homo sapien
tgtgcatctgccatgcataggagct

SEQ ID NO: 2184647 - DNA, 25 bp, Homo sapien
ccatgcataggagctgttcctggag

SEQ ID NO: 2184648 - DNA, 25 bp, Homo sapien
aggctccgctcccttgcagggtagg

SEQ ID NO: 2184649 - DNA, 25 bp, Homo sapien
ctctccagttgggtctagatgcccc

SEQ ID NO: 2184650 - DNA, 25 bp, Homo sapien
cttcccaaccagggcggatggccaa

SEQ ID NO: 2184651 - DNA, 25 bp, Homo sapien
aaccagggcggatggccaaaggctc

SEQ ID NO: 2184652 - DNA, 25 bp, Homo sapien
cgccgagacgctgcaccaggtgggt

SEQ ID NO: 2184653 - DNA, 25 bp, Homo sapien
aggcctcggccagttctgagagaga

SEQ ID NO: 2184654 - DNA, 25 bp, Homo sapien
gggatggcggcgacgcccttgtccc

SEQ ID NO: 2184655 - DNA, 25 bp, Homo sapien
agctcctcgcccagtgctgggtgcg

SEQ ID NO: 2184656 - DNA, 25 bp, Homo sapien
tcggtcaaatgacagcaatgctgct

SEQ ID NO: 2184657 - DNA, 25 bp, Homo sapien
tcactgctttcggtcaaatgacagc

SEQ ID NO: 2184658 - DNA, 25 bp, Homo sapien
tgctttcggtcaaatgacagcaatg

SEQ ID NO: 2184659 - DNA, 25 bp, Homo sapien
tgacagcaatgctgctggcaagtcc

SEQ ID NO: 2184660 - DNA, 25 bp, Homo sapien
tcagctgtgcttcactgcaaaggag

SEQ ID NO: 2184661 - DNA, 25 bp, Homo sapien
gctcagagtgaatggatgctcagct

SEQ ID NO: 2184662 - DNA, 25 bp, Homo sapien
cagagacttgggctaggacatagac

SEQ ID NO: 2184663 - DNA, 25 bp, Homo sapien
tgctcctgaccgttttatctggccc

SEQ ID NO: 2184664 - DNA, 25 bp, Homo sapien
ctgagatgtgtagtgcttgccccat

SEQ ID NO: 2184665 - DNA, 25 bp, Homo sapien
tctgagatgtgtagtgcttgcccca

SEQ ID NO: 2184666 - DNA, 25 bp, Homo sapien
agctgctttctgtgcaccttgcttt

SEQ ID NO: 2184667 - DNA, 25 bp, Homo sapien
ctgctttctgtgcaccttgcttttt

SEQ ID NO: 2184668 - DNA, 25 bp, Homo sapien
ctactatatcagctgctttctgtgc

SEQ ID NO: 2184669 - DNA, 25 bp, Homo sapien
tcagctgctttctgtgcaccttgct

SEQ ID NO: 2184670 - DNA, 25 bp, Homo sapien
acgtgatcatggcttactgctacct

SEQ ID NO: 2184671 - DNA, 25 bp, Homo sapien
ttttttttttgagtgcagtgacgtg

SEQ ID NO: 2184672 - DNA, 25 bp, Homo sapien
tgacgtgatcatggcttactgctac

SEQ ID NO: 2184673 - DNA, 25 bp, Homo sapien
agtgacgtgatcatggcttactgct

SEQ ID NO: 2184674 - DNA, 25 bp, Homo sapien
ttcagatccaattaaggaaggagcc

SEQ ID NO: 2184675 - DNA, 25 bp, Homo sapien
cagaagtcagacaattgatggcctg

SEQ ID NO: 2184676 - DNA, 25 bp, Homo sapien
gaccagatgggctttagacactcac

SEQ ID NO: 2184677 - DNA, 25 bp, Homo sapien
tccaagccctactgatgagataggt

SEQ ID NO: 2184678 - DNA, 25 bp, Homo sapien
gcaaacagaatggtgatggtcaagg

SEQ ID NO: 2184679 - DNA, 25 bp, Homo sapien
tggtcaaggaaactgactctgggct

SEQ ID NO: 2184680 - DNA, 25 bp, Homo sapien
accgcagcagctatgtggaagcagc

SEQ ID NO: 2184681 - DNA, 25 bp, Homo sapien
tacagatcacttatagcaaacagaa

SEQ ID NO: 2184682 - DNA, 25 bp, Homo sapien
caacccgtgggcatttgacattgac

SEQ ID NO: 2184683 - DNA, 25 bp, Homo sapien
aacccgtgggcatttgacattgact

SEQ ID NO: 2184684 - DNA, 25 bp, Homo sapien
acaacccgtgggcatttgacattga

SEQ ID NO: 2184685 - DNA, 25 bp, Homo sapien
ctgtgacggcagaaactcatgaggt

SEQ ID NO: 2184686 - DNA, 25 bp, Homo sapien
cagaaactcatgaggtcagggcaat

SEQ ID NO: 2184687 - DNA, 25 bp, Homo sapien
gacggcagaaactcatgaggtcagg

SEQ ID NO: 2184688 - DNA, 25 bp, Homo sapien
cggcagaaactcatgaggtcagggc

SEQ ID NO: 2184689 - DNA, 25 bp, Homo sapien
cgctattggcgcattgggtcggcca

SEQ ID NO: 2184690 - DNA, 25 bp, Homo sapien
atcggtgctgcgctattggcgcatt

SEQ ID NO: 2184691 - DNA, 25 bp, Homo sapien
gttttttctccatagcgtgtgtgta

SEQ ID NO: 2184692 - DNA, 25 bp, Homo sapien
tctccatagcgtgtgtgtaaagggt

SEQ ID NO: 2184693 - DNA, 25 bp, Homo sapien
tcttttcagctaccaagtcaggatt

SEQ ID NO: 2184694 - DNA, 25 bp, Homo sapien
ttttcagctaccaagtcaggattgt

SEQ ID NO: 2184695 - DNA, 25 bp, Homo sapien
cttttcagctaccaagtcaggattg

SEQ ID NO: 2184696 - DNA, 25 bp, Homo sapien
tctttgcaagggttgatcgccacag

SEQ ID NO: 2184697 - DNA, 25 bp, Homo sapien
tatgtaaactgttcggtggtaggga

SEQ ID NO: 2184698 - DNA, 25 bp, Homo sapien
cagatctggtccatgagattcccaa

SEQ ID NO: 2184699 - DNA, 25 bp, Homo sapien
tagggaagttgtcctatcgctgtgc

SEQ ID NO: 2184700 - DNA, 25 bp, Homo sapien
aggggcctctctctaattggaggtg

SEQ ID NO: 2184701 - DNA, 25 bp, Homo sapien
tccaggggtgcgtctgttttcatcc

SEQ ID NO: 2184702 - DNA, 25 bp, Homo sapien
ggtgcgtctgttttcatccccagag

SEQ ID NO: 2184703 - DNA, 25 bp, Homo sapien
gctgtccaggggtgcgtctgttttc

SEQ ID NO: 2184704 - DNA, 25 bp, Homo sapien
tatggctttaggtatgtgatataga

SEQ ID NO: 2184705 - DNA, 25 bp, Homo sapien
gagtacagttcagacttgactcaga

SEQ ID NO: 2184706 - DNA, 25 bp, Homo sapien
tgatatagagagtacagttcagact

SEQ ID NO: 2184707 - DNA, 25 bp, Homo sapien
tgactctgcagatggtgttataata

SEQ ID NO: 2184708 - DNA, 25 bp, Homo sapien
cagtggtgtgctgggccattggttc

SEQ ID NO: 2184709 - DNA, 25 bp, Homo sapien
aaatggctttctgttgtgttcttgc

SEQ ID NO: 2184710 - DNA, 25 bp, Homo sapien
tctgtgactgggtttagcaaatggc

SEQ ID NO: 2184711 - DNA, 25 bp, Homo sapien
tctctgagcctggttggggaatgat

SEQ ID NO: 2184712 - DNA, 25 bp, Homo sapien
gataaagcctgagttcgtttttctg

SEQ ID NO: 2184713 - DNA, 25 bp, Homo sapien
ctggatccttggatgataaagcctg

SEQ ID NO: 2184714 - DNA, 25 bp, Homo sapien
aagcctgagttcgtttttctgacct

SEQ ID NO: 2184715 - DNA, 25 bp, Homo sapien
ccttggatgataaagcctgagttcg

SEQ ID NO: 2184716 - DNA, 25 bp, Homo sapien
tagttttgcaagagcacctgtggcc

SEQ ID NO: 2184717 - DNA, 25 bp, Homo sapien
gagggaagtctggaatagcatctac

SEQ ID NO: 2184718 - DNA, 25 bp, Homo sapien
gagtttggaccatcagtggttccca

SEQ ID NO: 2184719 - DNA, 25 bp, Homo sapien
ctgggctggctacataaaaatcact

SEQ ID NO: 2184720 - DNA, 25 bp, Homo sapien
gaactaacccagttatgttgcagag

SEQ ID NO: 2184721 - DNA, 25 bp, Homo sapien
caggttccatatgggcgaactaacc

SEQ ID NO: 2184722 - DNA, 25 bp, Homo sapien
gggaatacctatatgcctggagcag

SEQ ID NO: 2184723 - DNA, 25 bp, Homo sapien
gatggaagacctttaactggctgag

SEQ ID NO: 2184724 - DNA, 25 bp, Homo sapien
tgtaaagctaacctgcctcagtgga

SEQ ID NO: 2184725 - DNA, 25 bp, Homo sapien
ccaagagggagatagaccaggcagt

SEQ ID NO: 2184726 - DNA, 25 bp, Homo sapien
aaatttgggaactgatgggctacgc

SEQ ID NO: 2184727 - DNA, 25 bp, Homo sapien
tgggctacgcaaaggcaagtgactt

SEQ ID NO: 2184728 - DNA, 25 bp, Homo sapien
atggacttccaaaatcagaaagcca

SEQ ID NO: 2184729 - DNA, 25 bp, Homo sapien
cttccaaaatcagaaagccatggta

SEQ ID NO: 2184730 - DNA, 25 bp, Homo sapien
tccaaaatcagaaagccatggtaaa

SEQ ID NO: 2184731 - DNA, 25 bp, Homo sapien
gacttccaaaatcagaaagccatgg

SEQ ID NO: 2184732 - DNA, 25 bp, Homo sapien
acacagttatcaaaaatgcacacac

SEQ ID NO: 2184733 - DNA, 25 bp, Homo sapien
tacacagttatcaaaaatgcacaca

SEQ ID NO: 2184734 - DNA, 25 bp, Homo sapien
atacacagttatcaaaaatgcacac

SEQ ID NO: 2184735 - DNA, 25 bp, Homo sapien
aaatacacagttatcaaaaatgcac

SEQ ID NO: 2184736 - DNA, 25 bp, Homo sapien
gcgccttcaactttctgtgcctgct

SEQ ID NO: 2184737 - DNA, 25 bp, Homo sapien
ccttggcatccccagcgccttcaac

SEQ ID NO: 2184738 - DNA, 25 bp, Homo sapien
ccccagcgccttcaactttctgtgc

SEQ ID NO: 2184739 - DNA, 25 bp, Homo sapien
tgtgcctgctctgttttggcctctg

SEQ ID NO: 2184740 - DNA, 25 bp, Homo sapien
ttgcaggggcctctttaggcttggg

SEQ ID NO: 2184741 - DNA, 25 bp, Homo sapien
tctttgcaggggcctctttaggctt

SEQ ID NO: 2184742 - DNA, 25 bp, Homo sapien
cccttctttgcaggggcctctttag

SEQ ID NO: 2184743 - DNA, 25 bp, Homo sapien
cttctttgcaggggcctctttaggc

SEQ ID NO: 2184744 - DNA, 25 bp, Homo sapien
caggtttggcagacaaccttgcaga

SEQ ID NO: 2184745 - DNA, 25 bp, Homo sapien
ggtttggcagacaaccttgcagatc

SEQ ID NO: 2184746 - DNA, 25 bp, Homo sapien
ttggcagacaaccttgcagatcttc

SEQ ID NO: 2184747 - DNA, 25 bp, Homo sapien
agcaggtttggcagacaaccttgca

SEQ ID NO: 2184748 - DNA, 25 bp, Homo sapien
atctcctttagcgtccccttcagcc

SEQ ID NO: 2184749 - DNA, 25 bp, Homo sapien
tccccttcagcctttctcttgggca

SEQ ID NO: 2184750 - DNA, 25 bp, Homo sapien
ccccttcagcctttctcttgggcat

SEQ ID NO: 2184751 - DNA, 25 bp, Homo sapien
tttatctcctttagcgtccccttca

SEQ ID NO: 2184752 - DNA, 25 bp, Homo sapien
tatttggattgtgacttgtagactc

SEQ ID NO: 2184753 - DNA, 25 bp, Homo sapien
tgtagactcaagctaaccttactgc

SEQ ID NO: 2184754 - DNA, 25 bp, Homo sapien
tattgaccttaaacataggtgtcct

SEQ ID NO: 2184755 - DNA, 25 bp, Homo sapien
tttgctaagcattgggaacattatg

SEQ ID NO: 2184756 - DNA, 25 bp, Homo sapien
caaagctctcttttgatgctctgat

SEQ ID NO: 2184757 - DNA, 25 bp, Homo sapien
cctgtgtgataataacaatagcggg

SEQ ID NO: 2184758 - DNA, 25 bp, Homo sapien
cgctgacctgtgtgataataacaat

SEQ ID NO: 2184759 - DNA, 25 bp, Homo sapien
gatgctctgattctctcgccgctga

SEQ ID NO: 2184760 - DNA, 25 bp, Homo sapien
cttctttaactctcatagcagccat

SEQ ID NO: 2184761 - DNA, 25 bp, Homo sapien
gctgggtgctttctcatttatgtta

SEQ ID NO: 2184762 - DNA, 25 bp, Homo sapien
atgtgtatgtcccagtcacacagag

SEQ ID NO: 2184763 - DNA, 25 bp, Homo sapien
ccagtcacacagagtccctgctgtg

SEQ ID NO: 2184764 - DNA, 25 bp, Homo sapien
tgatggacggtagggatttttcaca

SEQ ID NO: 2184765 - DNA, 25 bp, Homo sapien
tgtgactccgaaatccctgactgct

SEQ ID NO: 2184766 - DNA, 25 bp, Homo sapien
gctgctaattctgaaatcccaagtc

SEQ ID NO: 2184767 - DNA, 25 bp, Homo sapien
ttcacagtgatggacggtagggatt

SEQ ID NO: 2184768 - DNA, 25 bp, Homo sapien
tcaaaataagccttagttccgcata

SEQ ID NO: 2184769 - DNA, 25 bp, Homo sapien
tatccagtctcggttgatgttccac

SEQ ID NO: 2184770 - DNA, 25 bp, Homo sapien
tccgcatatccagtctcggttgatg

SEQ ID NO: 2184771 - DNA, 25 bp, Homo sapien
taagccttagttccgcatatccagt

SEQ ID NO: 2184772 - DNA, 25 bp, Homo sapien
tagggctgccctagactagaagccc

SEQ ID NO: 2184773 - DNA, 25 bp, Homo sapien
gctgccctagactagaagccctgga

SEQ ID NO: 2184774 - DNA, 25 bp, Homo sapien
cctagactagaagccctggagactt

SEQ ID NO: 2184775 - DNA, 25 bp, Homo sapien
tgtagggctgccctagactagaagc

SEQ ID NO: 2184776 - DNA, 25 bp, Homo sapien
cttgttctgggtgctgacctgattc

SEQ ID NO: 2184777 - DNA, 25 bp, Homo sapien
ttcttgttctgggtgctgacctgat

SEQ ID NO: 2184778 - DNA, 25 bp, Homo sapien
tgctgacctgattcagtggtaggag

SEQ ID NO: 2184779 - DNA, 25 bp, Homo sapien
tgggtgctgacctgattcagtggta

SEQ ID NO: 2184780 - DNA, 25 bp, Homo sapien
tcaggccccaaaggcaacatactgt

SEQ ID NO: 2184781 - DNA, 25 bp, Homo sapien
acatatatggcagggaatactcagc

SEQ ID NO: 2184782 - DNA, 25 bp, Homo sapien
tgctcaagctgataggactgtatgc

SEQ ID NO: 2184783 - DNA, 25 bp, Homo sapien
tgaagaacgcatcagtggttgcagg

SEQ ID NO: 2184784 - DNA, 25 bp, Homo sapien
tctggtgttggagctctgtatcttg

SEQ ID NO: 2184785 - DNA, 25 bp, Homo sapien
ggagctctgtatcttgtatgtgcat

SEQ ID NO: 2184786 - DNA, 25 bp, Homo sapien
agatctggtgttggagctctgtatc

SEQ ID NO: 2184787 - DNA, 25 bp, Homo sapien
ctcatcttcagatctggtgttggag

SEQ ID NO: 2184788 - DNA, 25 bp, Homo sapien
gaagactcctgtgacaatttctcgg

SEQ ID NO: 2184789 - DNA, 25 bp, Homo sapien
cctgtgacaatttctcggtgccatt

SEQ ID NO: 2184790 - DNA, 25 bp, Homo sapien
gactcctgtgacaatttctcggtgc

SEQ ID NO: 2184791 - DNA, 25 bp, Homo sapien
ttggtgaagactcctgtgacaattt

SEQ ID NO: 2184792 - DNA, 25 bp, Homo sapien
agaaatgcttcaaaccacagaggag

SEQ ID NO: 2184793 - DNA, 25 bp, Homo sapien
cagggtcctccagagtgttaacatt

SEQ ID NO: 2184794 - DNA, 25 bp, Homo sapien
tatagatggaatggggtacatgatt

SEQ ID NO: 2184795 - DNA, 25 bp, Homo sapien
gagagaaatcaaggacttcacattc

SEQ ID NO: 2184796 - DNA, 25 bp, Homo sapien
tcatactagctgaggattcatcaac

SEQ ID NO: 2184797 - DNA, 25 bp, Homo sapien
gaaggacggacctttatccactggc

SEQ ID NO: 2184798 - DNA, 25 bp, Homo sapien
tgtatcactggacaaatcatactag

SEQ ID NO: 2184799 - DNA, 25 bp, Homo sapien
tcaactctccggttaaagagtggga

SEQ ID NO: 2184800 - DNA, 25 bp, Homo sapien
tcactggggtggagattgttgtcat

SEQ ID NO: 2184801 - DNA, 25 bp, Homo sapien
cttcactggggtggagattgttgtc

SEQ ID NO: 2184802 - DNA, 25 bp, Homo sapien
ttttcctcttgttgaataccttctc

SEQ ID NO: 2184803 - DNA, 25 bp, Homo sapien
cttgttgaataccttctcttccctt

SEQ ID NO: 2184804 - DNA, 25 bp, Homo sapien
tgtatgtctgatggcaatgcatctg

SEQ ID NO: 2184805 - DNA, 25 bp, Homo sapien
gaaagaagaacattagagtttcctg

SEQ ID NO: 2184806 - DNA, 25 bp, Homo sapien
gaggagggatggttgaaagaagaac

SEQ ID NO: 2184807 - DNA, 25 bp, Homo sapien
tagattctattaaattcagtgaaaa

SEQ ID NO: 2184808 - DNA, 25 bp, Homo sapien
gggaaatgagtagttcaattctgaa

SEQ ID NO: 2184809 - DNA, 25 bp, Homo sapien
gatcagggtggcatgtcagagcatc

SEQ ID NO: 2184810 - DNA, 25 bp, Homo sapien
ttcaattctgaagggtggatcaggg

SEQ ID NO: 2184811 - DNA, 25 bp, Homo sapien
atgtcagagcatccgctacactgag

SEQ ID NO: 2184812 - DNA, 25 bp, Homo sapien
agttgaagactcctcctgttaatct

SEQ ID NO: 2184813 - DNA, 25 bp, Homo sapien
ttgaagactcctcctgttaatctca

SEQ ID NO: 2184814 - DNA, 25 bp, Homo sapien
gaagtgaagttgaagactcctcctg

SEQ ID NO: 2184815 - DNA, 25 bp, Homo sapien
ttgaagtgaagttgaagactcctcc

SEQ ID NO: 2184816 - DNA, 25 bp, Homo sapien
tcagtgaggggatccattgccgcca

SEQ ID NO: 2184817 - DNA, 25 bp, Homo sapien
agtgaggggatccattgccgccacc

SEQ ID NO: 2184818 - DNA, 25 bp, Homo sapien
ccccagtgagtccaacatgacatgc

SEQ ID NO: 2184819 - DNA, 25 bp, Homo sapien
tcccccagtgagtccaacatgacat

SEQ ID NO: 2184820 - DNA, 25 bp, Homo sapien
ctgtgtgtttctatacgtgtgtctc

SEQ ID NO: 2184821 - DNA, 25 bp, Homo sapien
gtttctatacgtgtgtctcttgtct

SEQ ID NO: 2184822 - DNA, 25 bp, Homo sapien
cccatatccataacaaatcttccca

SEQ ID NO: 2184823 - DNA, 25 bp, Homo sapien
ttcccccatatccataacaaatctt

SEQ ID NO: 2184824 - DNA, 25 bp, Homo sapien
tataggggctatgggacaaagcctc

SEQ ID NO: 2184825 - DNA, 25 bp, Homo sapien
tatctactgtcgcttcaggtaaact

SEQ ID NO: 2184826 - DNA, 25 bp, Homo sapien
ccaggaattatctactgtcgcttca

SEQ ID NO: 2184827 - DNA, 25 bp, Homo sapien
taaactcagagatgggcctataggg

SEQ ID NO: 2184828 - DNA, 25 bp, Homo sapien
acacctctggtctcatattgggctg

SEQ ID NO: 2184829 - DNA, 25 bp, Homo sapien
tattgggctgttcccctttcagact

SEQ ID NO: 2184830 - DNA, 25 bp, Homo sapien
catggggggcggatctttcagcttt

SEQ ID NO: 2184831 - DNA, 25 bp, Homo sapien
cagctttgttaggagagatgtacac

SEQ ID NO: 2184832 - DNA, 25 bp, Homo sapien
gatacataaccaaccattcctcaga

SEQ ID NO: 2184833 - DNA, 25 bp, Homo sapien
attcctcagaacaaggccttctaaa

SEQ ID NO: 2184834 - DNA, 25 bp, Homo sapien
ggattttaaatgcaaggatacataa

SEQ ID NO: 2184835 - DNA, 25 bp, Homo sapien
agaacaaggccttctaaaacatttg

SEQ ID NO: 2184836 - DNA, 25 bp, Homo sapien
aagaacaaggtgcataaggtgtctc

SEQ ID NO: 2184837 - DNA, 25 bp, Homo sapien
ggtgcataaggtgtctctctgcttc

SEQ ID NO: 2184838 - DNA, 25 bp, Homo sapien
caaggtgcataaggtgtctctctgc

SEQ ID NO: 2184839 - DNA, 25 bp, Homo sapien
tcttggagctggacggtttccaagg

SEQ ID NO: 2184840 - DNA, 25 bp, Homo sapien
caacgtgttgtgcatgagcttcagt

SEQ ID NO: 2184841 - DNA, 25 bp, Homo sapien
gcctctagcatgaagcacagcgagc

SEQ ID NO: 2184842 - DNA, 25 bp, Homo sapien
tttctggagcaagaagtacggcctc

SEQ ID NO: 2184843 - DNA, 25 bp, Homo sapien
gacccttagagacacagcatcaaag

SEQ ID NO: 2184844 - DNA, 25 bp, Homo sapien
ctcccaagtctaacagttctctcat

SEQ ID NO: 2184845 - DNA, 25 bp, Homo sapien
ggatatgtccttgccgaaaattttg

SEQ ID NO: 2184846 - DNA, 25 bp, Homo sapien
gaaccctgatatgcccttaacctag

SEQ ID NO: 2184847 - DNA, 25 bp, Homo sapien
catttatgtgtactttgcagacatc

SEQ ID NO: 2184848 - DNA, 25 bp, Homo sapien
taaaaccaaagcgtgggccagtcca

SEQ ID NO: 2184849 - DNA, 25 bp, Homo sapien
tcagagcgcctttccgaaacctcct

SEQ ID NO: 2184850 - DNA, 25 bp, Homo sapien
atcccgggcgcaatcgctccccgga

SEQ ID NO: 2184851 - DNA, 25 bp, Homo sapien
agggagagagatcccgggcgcaatc

SEQ ID NO: 2184852 - DNA, 25 bp, Homo sapien
gtactttcaaactgaggcgcgcgca

SEQ ID NO: 2184853 - DNA, 25 bp, Homo sapien
tatgcgcggtcagcaacgccgctct

SEQ ID NO: 2184854 - DNA, 25 bp, Homo sapien
tgcagggcaagctcggcggcgtgca

SEQ ID NO: 2184855 - DNA, 25 bp, Homo sapien
gtgcagcgcgtcctcagcacgcttg

SEQ ID NO: 2184856 - DNA, 25 bp, Homo sapien
aggagctcgagagcgacatccagct

SEQ ID NO: 2184857 - DNA, 25 bp, Homo sapien
gctcgcctttcacgtccttcacggg

SEQ ID NO: 2184858 - DNA, 25 bp, Homo sapien
gggttgcaactcctgtggtttccag

SEQ ID NO: 2184859 - DNA, 25 bp, Homo sapien
tctgaagtcgcaggcagcgtgggct

SEQ ID NO: 2184860 - DNA, 25 bp, Homo sapien
ggcgtagggaggagggttgcaactc

SEQ ID NO: 2184861 - DNA, 25 bp, Homo sapien
taataatcgatgtttctgggcttag

SEQ ID NO: 2184862 - DNA, 25 bp, Homo sapien
ggcacaaacattccacaagttggag

SEQ ID NO: 2184863 - DNA, 25 bp, Homo sapien
gaagcacagtggtcccttttatggg

SEQ ID NO: 2184864 - DNA, 25 bp, Homo sapien
atttgcatgggctcgctctgggtac

SEQ ID NO: 2184865 - DNA, 25 bp, Homo sapien
aataaaagaccacggattttgtgtg

SEQ ID NO: 2184866 - DNA, 25 bp, Homo sapien
aaagaccacggattttgtgtgtcaa

SEQ ID NO: 2184867 - DNA, 25 bp, Homo sapien
tccattttgtcggtgatggcttcca

SEQ ID NO: 2184868 - DNA, 25 bp, Homo sapien
tgtcaatgttgtacctttggttaat

SEQ ID NO: 2184869 - DNA, 25 bp, Homo sapien
gcaaccttctgaggaatggcagagt

SEQ ID NO: 2184870 - DNA, 25 bp, Homo sapien
agttcattctgatccacgtccggtg

SEQ ID NO: 2184871 - DNA, 25 bp, Homo sapien
tgagcgtagctcaaccgtgatggag

SEQ ID NO: 2184872 - DNA, 25 bp, Homo sapien
tcatagggtcaggaaaccagggaga

SEQ ID NO: 2184873 - DNA, 25 bp, Homo sapien
tgcctctaagtgagaagcataattg

SEQ ID NO: 2184874 - DNA, 25 bp, Homo sapien
tctatcttcagcatgaatgagcagg

SEQ ID NO: 2184875 - DNA, 25 bp, Homo sapien
tggatcttggactcccagtaattct

SEQ ID NO: 2184876 - DNA, 25 bp, Homo sapien
tggactcccagtaattctactttta

SEQ ID NO: 2184877 - DNA, 25 bp, Homo sapien
gacattgcagcttgacctacagcac

SEQ ID NO: 2184878 - DNA, 25 bp, Homo sapien
ccatgcctgacattgcagcttgacc

SEQ ID NO: 2184879 - DNA, 25 bp, Homo sapien
gcctgacattgcagcttgacctaca

SEQ ID NO: 2184880 - DNA, 25 bp, Homo sapien
tgacattgcagcttgacctacagca

SEQ ID NO: 2184881 - DNA, 25 bp, Homo sapien
ctgtatctgtggggaacaaaatcca

SEQ ID NO: 2184882 - DNA, 25 bp, Homo sapien
tatctgtggggaacaaaatccagct

SEQ ID NO: 2184883 - DNA, 25 bp, Homo sapien
tggggaacaaaatccagctgttcag

SEQ ID NO: 2184884 - DNA, 25 bp, Homo sapien
gctgttcagcttggttagctgctgt

SEQ ID NO: 2184885 - DNA, 25 bp, Homo sapien
gtaagttttactgaactctttcaca

SEQ ID NO: 2184886 - DNA, 25 bp, Homo sapien
gcacttggtttaggatcagataaca

SEQ ID NO: 2184887 - DNA, 25 bp, Homo sapien
gagatggatgccaactggcacctga

SEQ ID NO: 2184888 - DNA, 25 bp, Homo sapien
acatttgaccaaactggaaagtaga

SEQ ID NO: 2184889 - DNA, 25 bp, Homo sapien
acccatttctctggtaggcaggctc

SEQ ID NO: 2184890 - DNA, 25 bp, Homo sapien
ccagtcacccatttctctggtaggc

SEQ ID NO: 2184891 - DNA, 25 bp, Homo sapien
caagggtcacaaagtgctgtacctt

SEQ ID NO: 2184892 - DNA, 25 bp, Homo sapien
gggtcacaaagtgctgtaccttccc

SEQ ID NO: 2184893 - DNA, 25 bp, Homo sapien
ctattctctgtttggtcttaggacg

SEQ ID NO: 2184894 - DNA, 25 bp, Homo sapien
cccatagcttgactgtccatgaatg

SEQ ID NO: 2184895 - DNA, 25 bp, Homo sapien
tctccccatagcttgactgtccatg

SEQ ID NO: 2184896 - DNA, 25 bp, Homo sapien
tctgtttggtcttaggacggccacc

SEQ ID NO: 2184897 - DNA, 25 bp, Homo sapien
tctctctgacttggtgttccagaaa

SEQ ID NO: 2184898 - DNA, 25 bp, Homo sapien
ggctctctctgacttggtgttccag

SEQ ID NO: 2184899 - DNA, 25 bp, Homo sapien
cttggtgtcttgcacttccattagc

SEQ ID NO: 2184900 - DNA, 25 bp, Homo sapien
tccagaaacttggtgtcttgcactt

SEQ ID NO: 2184901 - DNA, 25 bp, Homo sapien
tagggattatgaattttctctttcc

SEQ ID NO: 2184902 - DNA, 25 bp, Homo sapien
ggattatgaattttctctttcccat

SEQ ID NO: 2184903 - DNA, 25 bp, Homo sapien
agggtagggattatgaattttctct

SEQ ID NO: 2184904 - DNA, 25 bp, Homo sapien
tagggtagggattatgaattttctc

SEQ ID NO: 2184905 - DNA, 25 bp, Homo sapien
ccccaaaatcaaattgtgtctgcta

SEQ ID NO: 2184906 - DNA, 25 bp, Homo sapien
gccccaaaatcaaattgtgtctgct

SEQ ID NO: 2184907 - DNA, 25 bp, Homo sapien
gctgtagtgttcgtgcattagggtc

SEQ ID NO: 2184908 - DNA, 25 bp, Homo sapien
tagagctgtagtgttcgtgcattag

SEQ ID NO: 2184909 - DNA, 25 bp, Homo sapien
gttcgtgcattagggtcagaagacc

SEQ ID NO: 2184910 - DNA, 25 bp, Homo sapien
tagtgttcgtgcattagggtcagaa

SEQ ID NO: 2184911 - DNA, 25 bp, Homo sapien
ttcctaattggaaccatagctcctt

SEQ ID NO: 2184912 - DNA, 25 bp, Homo sapien
gctccttggattgccttcagattga

SEQ ID NO: 2184913 - DNA, 25 bp, Homo sapien
ggaatggtatttgggccagctttgc

SEQ ID NO: 2184914 - DNA, 25 bp, Homo sapien
gattgaaaacttgagggtctgccac

SEQ ID NO: 2184915 - DNA, 25 bp, Homo sapien
atttggtgttcattgaagagaaggg

SEQ ID NO: 2184916 - DNA, 25 bp, Homo sapien
gagtttgtttctgtgcctagaatac

SEQ ID NO: 2184917 - DNA, 25 bp, Homo sapien
tgtgcctagaataccgctaatggtc

SEQ ID NO: 2184918 - DNA, 25 bp, Homo sapien
ggcctgagggactgagtttgtttct

SEQ ID NO: 2184919 - DNA, 25 bp, Homo sapien
cagcaatggctctgatttgtaaatg

SEQ ID NO: 2184920 - DNA, 25 bp, Homo sapien
cactccctttgtgtgctttgccaaa

SEQ ID NO: 2184921 - DNA, 25 bp, Homo sapien
tgcaggagagttacatctgagtcac

SEQ ID NO: 2184922 - DNA, 25 bp, Homo sapien
tccaaaagggcgacaagtaggctat

SEQ ID NO: 2184923 - DNA, 25 bp, Homo sapien
tatccttcagctgactagcttcggc

SEQ ID NO: 2184924 - DNA, 25 bp, Homo sapien
tagcttcggctcattcacaaggtag

SEQ ID NO: 2184925 - DNA, 25 bp, Homo sapien
agcaaaccttttgggctcacgtgca

SEQ ID NO: 2184926 - DNA, 25 bp, Homo sapien
cacaaggtagacagacacagggttc

SEQ ID NO: 2184927 - DNA, 25 bp, Homo sapien
gtcacatggtcagctcagattcaat

SEQ ID NO: 2184928 - DNA, 25 bp, Homo sapien
ctaagagcaacaacagagtcccagt

SEQ ID NO: 2184929 - DNA, 25 bp, Homo sapien
gcttgcattatgtttgctaatggcc

SEQ ID NO: 2184930 - DNA, 25 bp, Homo sapien
tatgtttgctaatggcccattgtcc

SEQ ID NO: 2184931 - DNA, 25 bp, Homo sapien
tgtttgatgtgtttgatcccgtgat

SEQ ID NO: 2184932 - DNA, 25 bp, Homo sapien
gatcccgtgatgtgagaagctggac

SEQ ID NO: 2184933 - DNA, 25 bp, Homo sapien
tgagaagctggacactctctttgca

SEQ ID NO: 2184934 - DNA, 25 bp, Homo sapien
tagaggtgatagaagcttgtttgat

SEQ ID NO: 2184935 - DNA, 25 bp, Homo sapien
tataaagtagcagagaagtggtcgt

SEQ ID NO: 2184936 - DNA, 25 bp, Homo sapien
aatgtgatcagggaatgcaccaagg

SEQ ID NO: 2184937 - DNA, 25 bp, Homo sapien
tgatgaaccctgctgtataaagtag

SEQ ID NO: 2184938 - DNA, 25 bp, Homo sapien
taggaagtctcctgatgccatgccc

SEQ ID NO: 2184939 - DNA, 25 bp, Homo sapien
gaattgcatccggtgctgtcatgga

SEQ ID NO: 2184940 - DNA, 25 bp, Homo sapien
tcctgtaggagtcaaagcatgaaag

SEQ ID NO: 2184941 - DNA, 25 bp, Homo sapien
cctcgaggaatcttctagtgctgaa

SEQ ID NO: 2184942 - DNA, 25 bp, Homo sapien
ctgtcatggattggagagccttgtc

SEQ ID NO: 2184943 - DNA, 25 bp, Homo sapien
tttgccagttggcccaggttggata

SEQ ID NO: 2184944 - DNA, 25 bp, Homo sapien
cagttggcccaggttggataataga

SEQ ID NO: 2184945 - DNA, 25 bp, Homo sapien
ataatagactgttagatggcctaca

SEQ ID NO: 2184946 - DNA, 25 bp, Homo sapien
taatagactgttagatggcctacat

SEQ ID NO: 2184947 - DNA, 25 bp, Homo sapien
ccaagccccagaaaagcagtcggct

SEQ ID NO: 2184948 - DNA, 25 bp, Homo sapien
tcggctgttacagaccaggattgct

SEQ ID NO: 2184949 - DNA, 25 bp, Homo sapien
ccggatggactgcttttcaattttc

SEQ ID NO: 2184950 - DNA, 25 bp, Homo sapien
gggttccggatggactgcttttcaa

SEQ ID NO: 2184951 - DNA, 25 bp, Homo sapien
aacatggcagcgttttggattctga

SEQ ID NO: 2184952 - DNA, 25 bp, Homo sapien
tagagctttctatagggctgagagg

SEQ ID NO: 2184953 - DNA, 25 bp, Homo sapien
tgcctttccgatcgtaggtttgtgc

SEQ ID NO: 2184954 - DNA, 25 bp, Homo sapien
gaacatcagtggcaatttgaaggct

SEQ ID NO: 2184955 - DNA, 25 bp, Homo sapien
ttgagcagacacatggctggctaaa

SEQ ID NO: 2184956 - DNA, 25 bp, Homo sapien
gagcagacacatggctggctaaaga

SEQ ID NO: 2184957 - DNA, 25 bp, Homo sapien
tgagcagacacatggctggctaaag

SEQ ID NO: 2184958 - DNA, 25 bp, Homo sapien
taactgtggagagtgcttggaaaaa

SEQ ID NO: 2184959 - DNA, 25 bp, Homo sapien
cttctgactccaaacttgttctggg

SEQ ID NO: 2184960 - DNA, 25 bp, Homo sapien
tctgactccaaacttgttctgggaa

SEQ ID NO: 2184961 - DNA, 25 bp, Homo sapien
ccccttctgtttaatcataactgtg

SEQ ID NO: 2184962 - DNA, 25 bp, Homo sapien
caaggttgggtcagttcagctcgag

SEQ ID NO: 2184963 - DNA, 25 bp, Homo sapien
tgatagcccaggtgaatgctcctca

SEQ ID NO: 2184964 - DNA, 25 bp, Homo sapien
gggcttgtcccaacagaacttagta

SEQ ID NO: 2184965 - DNA, 25 bp, Homo sapien
gaacagttggacagattgaggcact

SEQ ID NO: 2184966 - DNA, 25 bp, Homo sapien
cctccctgcatcacttgctgacaca

SEQ ID NO: 2184967 - DNA, 25 bp, Homo sapien
gcagctaggttccagttggaaagta

SEQ ID NO: 2184968 - DNA, 25 bp, Homo sapien
tagatgtagctacttaatccactgg

SEQ ID NO: 2184969 - DNA, 25 bp, Homo sapien
tgtgacatatcttctccctggccac

SEQ ID NO: 2184970 - DNA, 25 bp, Homo sapien
cataaatctgtgacatatcttctcc

SEQ ID NO: 2184971 - DNA, 25 bp, Homo sapien
cagtttggctaacactgcaatgcct

SEQ ID NO: 2184972 - DNA, 25 bp, Homo sapien
tcctgctcaggagtgtgtaagcttc

SEQ ID NO: 2184973 - DNA, 25 bp, Homo sapien
gccgacaaagaaagctgacgcgttg

SEQ ID NO: 2184974 - DNA, 25 bp, Homo sapien
taagcttcagttggctccagtttgg

SEQ ID NO: 2184975 - DNA, 25 bp, Homo sapien
ttcctaagagacaatgcccgactgg

SEQ ID NO: 2184976 - DNA, 25 bp, Homo sapien
cacgcgacgcctgaattgaatttgg

SEQ ID NO: 2184977 - DNA, 25 bp, Homo sapien
attgaatttgggcagttgctgagca

SEQ ID NO: 2184978 - DNA, 25 bp, Homo sapien
gagggtttattcagatttgagggct

SEQ ID NO: 2184979 - DNA, 25 bp, Homo sapien
tacatttctgccacttgcctgacct

SEQ ID NO: 2184980 - DNA, 25 bp, Homo sapien
agggccttttgaagcagcctgtgga

SEQ ID NO: 2184981 - DNA, 25 bp, Homo sapien
ccagggttctgtgtacttgcatgcc

SEQ ID NO: 2184982 - DNA, 25 bp, Homo sapien
tgcatgcctgctctccggttgcaga

SEQ ID NO: 2184983 - DNA, 25 bp, Homo sapien
ggcctttcctcatgattgcgagatg

SEQ ID NO: 2184984 - DNA, 25 bp, Homo sapien
tagggattggctcagcagctgaaca

SEQ ID NO: 2184985 - DNA, 25 bp, Homo sapien
cacagagcacaaggtctagagatag

SEQ ID NO: 2184986 - DNA, 25 bp, Homo sapien
gctatagctccaagcatcatgtctg

SEQ ID NO: 2184987 - DNA, 25 bp, Homo sapien
ccaagagccatccacttaatgatga

SEQ ID NO: 2184988 - DNA, 25 bp, Homo sapien
cacttaatgatgagagtcagggtgt

SEQ ID NO: 2184989 - DNA, 25 bp, Homo sapien
tgcctctgggagaatatttagtgac

SEQ ID NO: 2184990 - DNA, 25 bp, Homo sapien
gggtgtaaatatcccagctcctttg

SEQ ID NO: 2184991 - DNA, 25 bp, Homo sapien
caggtgatcacattctttagacatt

SEQ ID NO: 2184992 - DNA, 25 bp, Homo sapien
tctttagacattcaagtttaagttg

SEQ ID NO: 2184993 - DNA, 25 bp, Homo sapien
tcaggtgatcacattctttagacat

SEQ ID NO: 2184994 - DNA, 25 bp, Homo sapien
gtgatcacattctttagacattcaa

SEQ ID NO: 2184995 - DNA, 25 bp, Homo sapien
gctgaatagatgttgttgctctgta

SEQ ID NO: 2184996 - DNA, 25 bp, Homo sapien
gctctgtaatagtgagaaacagtat

SEQ ID NO: 2184997 - DNA, 25 bp, Homo sapien
taagttccctcgaatttcccattga

SEQ ID NO: 2184998 - DNA, 25 bp, Homo sapien
gaatttcccattgactctattttcc

SEQ ID NO: 2184999 - DNA, 25 bp, Homo sapien
ctttgccagatcatccacttgggag

SEQ ID NO: 2185000 - DNA, 25 bp, Homo sapien
cttgggaggattcagaggtgctatc

SEQ ID NO: 2185001 - DNA, 25 bp, Homo sapien
cagaggtgctatctccattccagcg

SEQ ID NO: 2185002 - DNA, 25 bp, Homo sapien
gccagatcatccacttgggaggatt

SEQ ID NO: 2185003 - DNA, 25 bp, Homo sapien
gtgcccacgctgccttttctaggtt

SEQ ID NO: 2185004 - DNA, 25 bp, Homo sapien
aaatgttgaaatgtgctctgggtag

SEQ ID NO: 2185005 - DNA, 25 bp, Homo sapien
agggatttcatgtctagggccacag

SEQ ID NO: 2185006 - DNA, 25 bp, Homo sapien
gtagtgactccccaacaagaaagca

SEQ ID NO: 2185007 - DNA, 25 bp, Homo sapien
caattaattgacttgaagctggtgg

SEQ ID NO: 2185008 - DNA, 25 bp, Homo sapien
taatgtggaggccaacggcccttct

SEQ ID NO: 2185009 - DNA, 25 bp, Homo sapien
cagcagaggagctttctaatgactt

SEQ ID NO: 2185010 - DNA, 25 bp, Homo sapien
aggtgggcgaagcaccaataatgtg

SEQ ID NO: 2185011 - DNA, 25 bp, Homo sapien
gtagacagacccgaaacagcaattg

SEQ ID NO: 2185012 - DNA, 25 bp, Homo sapien
gaagtacaattacctcgcagatcaa

SEQ ID NO: 2185013 - DNA, 25 bp, Homo sapien
gctgttttctgctaatggtaagacc

SEQ ID NO: 2185014 - DNA, 25 bp, Homo sapien
caattttagaagtagacagacccga

SEQ ID NO: 2185015 - DNA, 25 bp, Homo sapien
ctggcaacatctattcctcgtattg

SEQ ID NO: 2185016 - DNA, 25 bp, Homo sapien
attctggcaacatctattcctcgta

SEQ ID NO: 2185017 - DNA, 25 bp, Homo sapien
ggcaacatctattcctcgtattgtt

SEQ ID NO: 2185018 - DNA, 25 bp, Homo sapien
ttctggcaacatctattcctcgtat

SEQ ID NO: 2185019 - DNA, 25 bp, Homo sapien
attggagaaatggggcgaagaaata

SEQ ID NO: 2185020 - DNA, 25 bp, Homo sapien
tttaaaacccagcattggagaaatg

SEQ ID NO: 2185021 - DNA, 25 bp, Homo sapien
ttaaaacccagcattggagaaatgg

SEQ ID NO: 2185022 - DNA, 25 bp, Homo sapien
taaaacccagcattggagaaatggg

SEQ ID NO: 2185023 - DNA, 25 bp, Homo sapien
cagtccagcgaagatgcgttctttg

SEQ ID NO: 2185024 - DNA, 25 bp, Homo sapien
tccagcgaagatgcgttctttggcc

SEQ ID NO: 2185025 - DNA, 25 bp, Homo sapien
cagcgaagatgcgttctttggccat

SEQ ID NO: 2185026 - DNA, 25 bp, Homo sapien
ttcagtccagcgaagatgcgttctt

SEQ ID NO: 2185027 - DNA, 25 bp, Homo sapien
cagtcccagatgtggctcgttgtca

SEQ ID NO: 2185028 - DNA, 25 bp, Homo sapien
aagcctctggaccaatgcccggagc

SEQ ID NO: 2185029 - DNA, 25 bp, Homo sapien
caacaggccttcttgggcggactct

SEQ ID NO: 2185030 - DNA, 25 bp, Homo sapien
gggcggactcttttgtggcagttcc

SEQ ID NO: 2185031 - DNA, 25 bp, Homo sapien
ctaggtggaggtccaacttccttgc

SEQ ID NO: 2185032 - DNA, 25 bp, Homo sapien
tgtggaaatctgtccttgttttaac

SEQ ID NO: 2185033 - DNA, 25 bp, Homo sapien
tcctgtccctgcatacaatgagcag

SEQ ID NO: 2185034 - DNA, 25 bp, Homo sapien
caactctggaggagtttgtcactgt

SEQ ID NO: 2185035 - DNA, 25 bp, Homo sapien
tgaagtgcttcttgtctgtttgcac

SEQ ID NO: 2185036 - DNA, 25 bp, Homo sapien
aagatggaccctatactctctgaag

SEQ ID NO: 2185037 - DNA, 25 bp, Homo sapien
cctggcagtttgtttgtgagtagac

SEQ ID NO: 2185038 - DNA, 25 bp, Homo sapien
caaactcttggtactggcatgtccc

SEQ ID NO: 2185039 - DNA, 25 bp, Homo sapien
tcttgtgagtcagtgttttgctgaa

SEQ ID NO: 2185040 - DNA, 25 bp, Homo sapien
ggtcttgtgagtcagtgttttgctg

SEQ ID NO: 2185041 - DNA, 25 bp, Homo sapien
cttgtgagtcagtgttttgctgaac

SEQ ID NO: 2185042 - DNA, 25 bp, Homo sapien
tggtcttgtgagtcagtgttttgct

SEQ ID NO: 2185043 - DNA, 25 bp, Homo sapien
tggtagacatgagagtcatgagagg

SEQ ID NO: 2185044 - DNA, 25 bp, Homo sapien
gagagtcatgagagggtaggtttgc

SEQ ID NO: 2185045 - DNA, 25 bp, Homo sapien
gtcatgagagggtaggtttgctctc

SEQ ID NO: 2185046 - DNA, 25 bp, Homo sapien
tagacatgagagtcatgagagggta

SEQ ID NO: 2185047 - DNA, 25 bp, Homo sapien
ctcacacatgctggtctgactcttc

SEQ ID NO: 2185048 - DNA, 25 bp, Homo sapien
gacatgttgtcttcccgccaagttt

SEQ ID NO: 2185049 - DNA, 25 bp, Homo sapien
gggccgacgtgacatgttgtcttcc

SEQ ID NO: 2185050 - DNA, 25 bp, Homo sapien
tcaaacataagtttgcagggagttg

SEQ ID NO: 2185051 - DNA, 25 bp, Homo sapien
acagttggatgaatgcttcagcagc

SEQ ID NO: 2185052 - DNA, 25 bp, Homo sapien
tctccccaaatgagcttattatctg

SEQ ID NO: 2185053 - DNA, 25 bp, Homo sapien
tccccaaatgagcttattatctgct

SEQ ID NO: 2185054 - DNA, 25 bp, Homo sapien
ctgggaagcatgctgtccacagttg

SEQ ID NO: 2185055 - DNA, 25 bp, Homo sapien
tctggggcagatgcaactgtggaca

SEQ ID NO: 2185056 - DNA, 25 bp, Homo sapien
gcaactgtggacagtttcttgtagt

SEQ ID NO: 2185057 - DNA, 25 bp, Homo sapien
taagccacatggttatgtgattttc

SEQ ID NO: 2185058 - DNA, 25 bp, Homo sapien
ttcttgtagtaaaaactgatcattt

SEQ ID NO: 2185059 - DNA, 25 bp, Homo sapien
agctgtcctgtcacttcagggtggg

SEQ ID NO: 2185060 - DNA, 25 bp, Homo sapien
cagctgtcctgtcacttcagggtgg

SEQ ID NO: 2185061 - DNA, 25 bp, Homo sapien
tggctaaaatcatgttctggaacct

SEQ ID NO: 2185062 - DNA, 25 bp, Homo sapien
ctaaaatcatgttctggaacctcag

SEQ ID NO: 2185063 - DNA, 25 bp, Homo sapien
gaataagttgatagcctccgggctg

SEQ ID NO: 2185064 - DNA, 25 bp, Homo sapien
gggtacacccagtaagcaagccatg

SEQ ID NO: 2185065 - DNA, 25 bp, Homo sapien
gggcgggaataagttgatagcctcc

SEQ ID NO: 2185066 - DNA, 25 bp, Homo sapien
caagccatgaccagaaatgagttgc

SEQ ID NO: 2185067 - DNA, 25 bp, Homo sapien
ttgccctctgtagccacaccctggg

SEQ ID NO: 2185068 - DNA, 25 bp, Homo sapien
tgggccttcactgtcagtgtagcct

SEQ ID NO: 2185069 - DNA, 25 bp, Homo sapien
acaccctgggccttcactgtcagtg

SEQ ID NO: 2185070 - DNA, 25 bp, Homo sapien
tcactgtcagtgtagcctgcagggt

SEQ ID NO: 2185071 - DNA, 25 bp, Homo sapien
ggagcagaagtatccaatacaggga

SEQ ID NO: 2185072 - DNA, 25 bp, Homo sapien
ctggttcttgctgcgcatgattaag

SEQ ID NO: 2185073 - DNA, 25 bp, Homo sapien
tgctgcgcatgattaaggagcagaa

SEQ ID NO: 2185074 - DNA, 25 bp, Homo sapien
catgattaaggagcagaagtatcca

SEQ ID NO: 2185075 - DNA, 25 bp, Homo sapien
ggcccttccttaaggagcagagcgg

SEQ ID NO: 2185076 - DNA, 25 bp, Homo sapien
cattcagagacgtctttgcataaaa

SEQ ID NO: 2185077 - DNA, 25 bp, Homo sapien
tgcttgctgacttaagcagatcagc

SEQ ID NO: 2185078 - DNA, 25 bp, Homo sapien
ccttaaggagcagagcgggaatcca

SEQ ID NO: 2185079 - DNA, 25 bp, Homo sapien
tggctggccaacgttttcgcctttg

SEQ ID NO: 2185080 - DNA, 25 bp, Homo sapien
cgacatttgaacgtcttaaagaagg

SEQ ID NO: 2185081 - DNA, 25 bp, Homo sapien
gggctctagctcaggacttctggga

SEQ ID NO: 2185082 - DNA, 25 bp, Homo sapien
tgctctccttctgaggcatcaaact

SEQ ID NO: 2185083 - DNA, 25 bp, Homo sapien
tgggcttgcaccaggccctatgttg

SEQ ID NO: 2185084 - DNA, 25 bp, Homo sapien
ctgcatgggcttgcaccaggcccta

SEQ ID NO: 2185085 - DNA, 25 bp, Homo sapien
tgccccctccagtcttcttggaatt

SEQ ID NO: 2185086 - DNA, 25 bp, Homo sapien
ggaattcttcagtatcttaccttca

SEQ ID NO: 2185087 - DNA, 25 bp, Homo sapien
ctgctgtctgagaacactctctctg

SEQ ID NO: 2185088 - DNA, 25 bp, Homo sapien
ctgtcttccgggggacttccaccag

SEQ ID NO: 2185089 - DNA, 25 bp, Homo sapien
ttccaccagattctctgtcgttgcc

SEQ ID NO: 2185090 - DNA, 25 bp, Homo sapien
ccagattctctgtcgttgccagcag

SEQ ID NO: 2185091 - DNA, 25 bp, Homo sapien
attctctgtcgttgccagcagctgg

SEQ ID NO: 2185092 - DNA, 25 bp, Homo sapien
gagaacagctaacccagactgactt

SEQ ID NO: 2185093 - DNA, 25 bp, Homo sapien
ctagtggagaacagctaacccagac

SEQ ID NO: 2185094 - DNA, 25 bp, Homo sapien
gacttgggttctaggtgatacttca

SEQ ID NO: 2185095 - DNA, 25 bp, Homo sapien
ccagactgacttgggttctaggtga

SEQ ID NO: 2185096 - DNA, 25 bp, Homo sapien
gcgaggtttcagcatccggagatga

SEQ ID NO: 2185097 - DNA, 25 bp, Homo sapien
tatatgcgggcacatgctctacgcc

SEQ ID NO: 2185098 - DNA, 25 bp, Homo sapien
tctgctgttggccatagactaggga

SEQ ID NO: 2185099 - DNA, 25 bp, Homo sapien
aatacatggctgcaaaggcattgtc

SEQ ID NO: 2185100 - DNA, 25 bp, Homo sapien
tcccgcgcgccaccgagtttggggc

SEQ ID NO: 2185101 - DNA, 25 bp, Homo sapien
cgcgcgccaccgagtttggggctgg

SEQ ID NO: 2185102 - DNA, 25 bp, Homo sapien
caggggacggattatttttagcagg

SEQ ID NO: 2185103 - DNA, 25 bp, Homo sapien
gcagcaggggacggattatttttag

SEQ ID NO: 2185104 - DNA, 25 bp, Homo sapien
gagctgggcatggactcctgcgatc

SEQ ID NO: 2185105 - DNA, 25 bp, Homo sapien
ctctgcctgtggaccgagttaggct

SEQ ID NO: 2185106 - DNA, 25 bp, Homo sapien
gatgcccctgctttgatggagcgcg

SEQ ID NO: 2185107 - DNA, 25 bp, Homo sapien
tcaattaggtgtctcagcctgcagc

SEQ ID NO: 2185108 - DNA, 25 bp, Homo sapien
gggaggctagcctcggcgtggcgcc

SEQ ID NO: 2185109 - DNA, 25 bp, Homo sapien
cgcacgggcggtaggatttctgcac

SEQ ID NO: 2185110 - DNA, 25 bp, Homo sapien
agcctgagcctgagcgggcgccagg

SEQ ID NO: 2185111 - DNA, 25 bp, Homo sapien
tctgcaccaggggaacgatgcacgg

SEQ ID NO: 2185112 - DNA, 25 bp, Homo sapien
gaatgaggattcgacggctctgtga

SEQ ID NO: 2185113 - DNA, 25 bp, Homo sapien
cacttggtgttggatgacattttgc

SEQ ID NO: 2185114 - DNA, 25 bp, Homo sapien
gctgtaaggcaaatggactgttagg

SEQ ID NO: 2185115 - DNA, 25 bp, Homo sapien
ggctctgtgagtggaagggcgccct

SEQ ID NO: 2185116 - DNA, 25 bp, Homo sapien
ctctctggcgcacctgtcccctggg

SEQ ID NO: 2185117 - DNA, 25 bp, Homo sapien
ctctggcgcacctgtcccctggggt

SEQ ID NO: 2185118 - DNA, 25 bp, Homo sapien
tctctggcgcacctgtcccctgggg

SEQ ID NO: 2185119 - DNA, 25 bp, Homo sapien
tgcggggaagactcagcaggccccg

SEQ ID NO: 2185120 - DNA, 25 bp, Homo sapien
cccctgcggggaagactcagcaggc

SEQ ID NO: 2185121 - DNA, 25 bp, Homo sapien
gggaagactcagcaggccccgccat

SEQ ID NO: 2185122 - DNA, 25 bp, Homo sapien
ccccctgcggggaagactcagcagg

SEQ ID NO: 2185123 - DNA, 25 bp, Homo sapien
agcctcatccattcccgggtgaggc

SEQ ID NO: 2185124 - DNA, 25 bp, Homo sapien
aagcctcatccattcccgggtgagg

SEQ ID NO: 2185125 - DNA, 25 bp, Homo sapien
agaagcctcatccattcccgggtga

SEQ ID NO: 2185126 - DNA, 25 bp, Homo sapien
gaagcctcatccattcccgggtgag

SEQ ID NO: 2185127 - DNA, 25 bp, Homo sapien
ggcgtgagtacctatagatttttca

SEQ ID NO: 2185128 - DNA, 25 bp, Homo sapien
agatgcctgtcatcaggtttccata

SEQ ID NO: 2185129 - DNA, 25 bp, Homo sapien
ccatattaggattatatagacttca

SEQ ID NO: 2185130 - DNA, 25 bp, Homo sapien
tatatagacttcatacaatgagttg

SEQ ID NO: 2185131 - DNA, 25 bp, Homo sapien
cccttggacataataagaggtgaca

SEQ ID NO: 2185132 - DNA, 25 bp, Homo sapien
gcttgacggcactgacggtgttcct

SEQ ID NO: 2185133 - DNA, 25 bp, Homo sapien
tatggctaccaggttataaactgct

SEQ ID NO: 2185134 - DNA, 25 bp, Homo sapien
taatttgtctaatatggctaccagg

SEQ ID NO: 2185135 - DNA, 25 bp, Homo sapien
agcccagcaaggaaagactctggga

SEQ ID NO: 2185136 - DNA, 25 bp, Homo sapien
ggaagcccagcaaggaaagactctg

SEQ ID NO: 2185137 - DNA, 25 bp, Homo sapien
gctctccttgtactttaccctgttc

SEQ ID NO: 2185138 - DNA, 25 bp, Homo sapien
gaagcccagcaaggaaagactctgg

SEQ ID NO: 2185139 - DNA, 25 bp, Homo sapien
tgaaaagcactagatcctttttatg

SEQ ID NO: 2185140 - DNA, 25 bp, Homo sapien
ttgaaaagcactagatcctttttat

SEQ ID NO: 2185141 - DNA, 25 bp, Homo sapien
tttgaaaagcactagatccttttta

SEQ ID NO: 2185142 - DNA, 25 bp, Homo sapien
gaaaagcactagatcctttttatgt

SEQ ID NO: 2185143 - DNA, 25 bp, Homo sapien
gtgagttactgggaaggactggaag

SEQ ID NO: 2185144 - DNA, 25 bp, Homo sapien
ctagggattgggcaacagaagggcc

SEQ ID NO: 2185145 - DNA, 25 bp, Homo sapien
tagggattgggcaacagaagggcca

SEQ ID NO: 2185146 - DNA, 25 bp, Homo sapien
gcttgtgagttactgggaaggactg

SEQ ID NO: 2185147 - DNA, 25 bp, Homo sapien
cagtcgctcatctgagttattccct

SEQ ID NO: 2185148 - DNA, 25 bp, Homo sapien
tgaaagatattgcatcatccccatc

SEQ ID NO: 2185149 - DNA, 25 bp, Homo sapien
taaaacatcctgtgaaagatattgc

SEQ ID NO: 2185150 - DNA, 25 bp, Homo sapien
gatggttctgtctgtgatgatgccc

SEQ ID NO: 2185151 - DNA, 25 bp, Homo sapien
agtagagtccatgaggacccttgaa

SEQ ID NO: 2185152 - DNA, 25 bp, Homo sapien
caagtccttgcttagattctgatat

SEQ ID NO: 2185153 - DNA, 25 bp, Homo sapien
tctgctttcaccctgcagtagagtc

SEQ ID NO: 2185154 - DNA, 25 bp, Homo sapien
catgaggacccttgaagcccaagtc

SEQ ID NO: 2185155 - DNA, 25 bp, Homo sapien
ctggacagataggcaaggaggtcac

SEQ ID NO: 2185156 - DNA, 25 bp, Homo sapien
tggacagataggcaaggaggtcacc

SEQ ID NO: 2185157 - DNA, 25 bp, Homo sapien
gacagataggcaaggaggtcaccct

SEQ ID NO: 2185158 - DNA, 25 bp, Homo sapien
cagataggcaaggaggtcacccttc

SEQ ID NO: 2185159 - DNA, 25 bp, Homo sapien
gtagtgggatgccagcagtctcaac

SEQ ID NO: 2185160 - DNA, 25 bp, Homo sapien
cctcatcagaatgatcgaggggtgg

SEQ ID NO: 2185161 - DNA, 25 bp, Homo sapien
cgaggggtgggatatctgatggtct

SEQ ID NO: 2185162 - DNA, 25 bp, Homo sapien
taaatgtagtgggatgccagcagtc

SEQ ID NO: 2185163 - DNA, 25 bp, Homo sapien
attctgtgatcccaaaccttcagct

SEQ ID NO: 2185164 - DNA, 25 bp, Homo sapien
caaattattctgtgatcccaaacct

SEQ ID NO: 2185165 - DNA, 25 bp, Homo sapien
cttgctatgcgaatctctgacatac

SEQ ID NO: 2185166 - DNA, 25 bp, Homo sapien
tgctatgcgaatctctgacatacaa

SEQ ID NO: 2185167 - DNA, 25 bp, Homo sapien
gccgtcttgaagcagggtacacacg

SEQ ID NO: 2185168 - DNA, 25 bp, Homo sapien
ttagggctgtcttaaacatcactgc

SEQ ID NO: 2185169 - DNA, 25 bp, Homo sapien
tcatgctggccgaaacgacaatggt

SEQ ID NO: 2185170 - DNA, 25 bp, Homo sapien
cagtggtggcacgtagagaactaga

SEQ ID NO: 2185171 - DNA, 25 bp, Homo sapien
taggtctgtccagtcgtactttttc

SEQ ID NO: 2185172 - DNA, 25 bp, Homo sapien
ctgtccagtcgtactttttcctcac

SEQ ID NO: 2185173 - DNA, 25 bp, Homo sapien
gtctgtccagtcgtactttttcctc

SEQ ID NO: 2185174 - DNA, 25 bp, Homo sapien
aaataggtctgtccagtcgtacttt

SEQ ID NO: 2185175 - DNA, 25 bp, Homo sapien
tgcccgcgcgtgtaagcttttgaga

SEQ ID NO: 2185176 - DNA, 25 bp, Homo sapien
cgggaatacacgatttggcttaggg

SEQ ID NO: 2185177 - DNA, 25 bp, Homo sapien
ggacgacaggatccttttacagtca

SEQ ID NO: 2185178 - DNA, 25 bp, Homo sapien
ggaagagcgagtcttgacttcgcag

SEQ ID NO: 2185179 - DNA, 25 bp, Homo sapien
gcagcttcgctgttttattgtaaat

SEQ ID NO: 2185180 - DNA, 25 bp, Homo sapien
ggtaaccgcgtttgatttagagaca

SEQ ID NO: 2185181 - DNA, 25 bp, Homo sapien
tgagacatagagtctgaggctttga

SEQ ID NO: 2185182 - DNA, 25 bp, Homo sapien
gacagactgtgcagcttcgctgttt

SEQ ID NO: 2185183 - DNA, 25 bp, Homo sapien
cttaaaacaaacagagcgttttgct

SEQ ID NO: 2185184 - DNA, 25 bp, Homo sapien
acaaacagagcgttttgctgtgtgt

SEQ ID NO: 2185185 - DNA, 25 bp, Homo sapien
aacaaacagagcgttttgctgtgtg

SEQ ID NO: 2185186 - DNA, 25 bp, Homo sapien
aaaacaaacagagcgttttgctgtg

SEQ ID NO: 2185187 - DNA, 25 bp, Homo sapien
tgcgcctccggagcgaatatttacg

SEQ ID NO: 2185188 - DNA, 25 bp, Homo sapien
aattttgcacaatctagccttgggc

SEQ ID NO: 2185189 - DNA, 25 bp, Homo sapien
aatggcaggtgaaagccttgcgcct

SEQ ID NO: 2185190 - DNA, 25 bp, Homo sapien
tgtgagctgtgccttatctgatgaa

SEQ ID NO: 2185191 - DNA, 25 bp, Homo sapien
ggtgttatcaagaattggccaggcg

SEQ ID NO: 2185192 - DNA, 25 bp, Homo sapien
aatttctgtggtaaatgcaagtgag

SEQ ID NO: 2185193 - DNA, 25 bp, Homo sapien
gcctgttacgctaactactcgggag

SEQ ID NO: 2185194 - DNA, 25 bp, Homo sapien
ttgtagaatctagtcatggttgggc

SEQ ID NO: 2185195 - DNA, 25 bp, Homo sapien
tatcccatagaactacttgcacagg

SEQ ID NO: 2185196 - DNA, 25 bp, Homo sapien
gcacaggtgcaagactgttctgcag

SEQ ID NO: 2185197 - DNA, 25 bp, Homo sapien
tcgttacagtaactacagtagacct

SEQ ID NO: 2185198 - DNA, 25 bp, Homo sapien
gagattcggccttgctgtatacagc

SEQ ID NO: 2185199 - DNA, 25 bp, Homo sapien
tacttctatgcaacattagtctgcg

SEQ ID NO: 2185200 - DNA, 25 bp, Homo sapien
tgcaacattagtctgcgtttatcta

SEQ ID NO: 2185201 - DNA, 25 bp, Homo sapien
tctatgcaacattagtctgcgttta

SEQ ID NO: 2185202 - DNA, 25 bp, Homo sapien
tgatacttctatgcaacattagtct

SEQ ID NO: 2185203 - DNA, 25 bp, Homo sapien
tctctctatgaagatacgtctgtcc

SEQ ID NO: 2185204 - DNA, 25 bp, Homo sapien
tattctcacccgaagtattcacaca

SEQ ID NO: 2185205 - DNA, 25 bp, Homo sapien
cacagaggtaggatgagccatatat

SEQ ID NO: 2185206 - DNA, 25 bp, Homo sapien
caagaaatattgtaccgcaagggtg

SEQ ID NO: 2185207 - DNA, 25 bp, Homo sapien
gaattggtgctatcaccattagcta

SEQ ID NO: 2185208 - DNA, 25 bp, Homo sapien
tgtactttagacatgaatgcaacta

SEQ ID NO: 2185209 - DNA, 25 bp, Homo sapien
gtttacgagctatgagaattggtgc

SEQ ID NO: 2185210 - DNA, 25 bp, Homo sapien
catcaatgttattccttacatgtca

SEQ ID NO: 2185211 - DNA, 25 bp, Homo sapien
gaagttcagtcgatgagctgtatct

SEQ ID NO: 2185212 - DNA, 25 bp, Homo sapien
ctcagagcctttgttatttatgata

SEQ ID NO: 2185213 - DNA, 25 bp, Homo sapien
gggctgtaagaagttcagtcgatga

SEQ ID NO: 2185214 - DNA, 25 bp, Homo sapien
tgagctgtatctgtactcagagcct

SEQ ID NO: 2185215 - DNA, 25 bp, Homo sapien
ggctccagccgaggaacccagaaac

SEQ ID NO: 2185216 - DNA, 25 bp, Homo sapien
gacaatggggccctgaccgaggctc

SEQ ID NO: 2185217 - DNA, 25 bp, Homo sapien
agttgcggctccagccgaggaaccc

SEQ ID NO: 2185218 - DNA, 25 bp, Homo sapien
cctgtgattcactggagacaatggg

SEQ ID NO: 2185219 - DNA, 25 bp, Homo sapien
tggacttgtttaccttcttcggcat

SEQ ID NO: 2185220 - DNA, 25 bp, Homo sapien
ctggacttgtttaccttcttcggca

SEQ ID NO: 2185221 - DNA, 25 bp, Homo sapien
tcattaccacagctcaaaaatgtgg

SEQ ID NO: 2185222 - DNA, 25 bp, Homo sapien
atttggggattcattaccacagctc

SEQ ID NO: 2185223 - DNA, 25 bp, Homo sapien
cacctattccctccggtacaaggct

SEQ ID NO: 2185224 - DNA, 25 bp, Homo sapien
ccacctcagccacctattccctccg

SEQ ID NO: 2185225 - DNA, 25 bp, Homo sapien
cagccacctattccctccggtacaa

SEQ ID NO: 2185226 - DNA, 25 bp, Homo sapien
ctcagccacctattccctccggtac

SEQ ID NO: 2185227 - DNA, 25 bp, Homo sapien
gaaccctctgaatgtcagaaagcgc

SEQ ID NO: 2185228 - DNA, 25 bp, Homo sapien
tacgctaccaagaaccctctgaatg

SEQ ID NO: 2185229 - DNA, 25 bp, Homo sapien
cagaaagcgcagtacaggctatggt

SEQ ID NO: 2185230 - DNA, 25 bp, Homo sapien
gaatgtcagaaagcgcagtacaggc

SEQ ID NO: 2185231 - DNA, 25 bp, Homo sapien
aagaatttggtcctgcagaggggtc

SEQ ID NO: 2185232 - DNA, 25 bp, Homo sapien
gaggaagaagaatttggtcctgcag

SEQ ID NO: 2185233 - DNA, 25 bp, Homo sapien
tctggcttgtgacaagggagatccc

SEQ ID NO: 2185234 - DNA, 25 bp, Homo sapien
gtgacaagggagatccctactgcca

SEQ ID NO: 2185235 - DNA, 25 bp, Homo sapien
tttcccagtggataagagagacacc

SEQ ID NO: 2185236 - DNA, 25 bp, Homo sapien
ttggtcacacaatcttccagtggct

SEQ ID NO: 2185237 - DNA, 25 bp, Homo sapien
tcccagtggataagagagacacctt

SEQ ID NO: 2185238 - DNA, 25 bp, Homo sapien
cttggtcacacaatcttccagtggc

SEQ ID NO: 2185239 - DNA, 25 bp, Homo sapien
ttctccagctagctggtccccaagg

SEQ ID NO: 2185240 - DNA, 25 bp, Homo sapien
ggcgcatgccagcactcaatgcacc

SEQ ID NO: 2185241 - DNA, 25 bp, Homo sapien
tgccagcactcaatgcaccggtgca

SEQ ID NO: 2185242 - DNA, 25 bp, Homo sapien
aacttctccagctagctggtcccca

SEQ ID NO: 2185243 - DNA, 25 bp, Homo sapien
tgcactgcccccctatttcttacta

SEQ ID NO: 2185244 - DNA, 25 bp, Homo sapien
gctgcacctccactacgacgagtct

SEQ ID NO: 2185245 - DNA, 25 bp, Homo sapien
tccactacgacgagtctgcactgcc

SEQ ID NO: 2185246 - DNA, 25 bp, Homo sapien
tgctgcatgtgcacaacagctggtg

SEQ ID NO: 2185247 - DNA, 25 bp, Homo sapien
tcatccatacccatctattacttgg

SEQ ID NO: 2185248 - DNA, 25 bp, Homo sapien
tctggttcttcgctacaaattctgt

SEQ ID NO: 2185249 - DNA, 25 bp, Homo sapien
ttctctgttccattctctgatacga

SEQ ID NO: 2185250 - DNA, 25 bp, Homo sapien
tccattctctgatacgatttttcac

SEQ ID NO: 2185251 - DNA, 25 bp, Homo sapien
gacattgataccacattgatctgcc

SEQ ID NO: 2185252 - DNA, 25 bp, Homo sapien
gataccacattgatctgcctctgcc

SEQ ID NO: 2185253 - DNA, 25 bp, Homo sapien
tgcctctgcccatctgttactgtca

SEQ ID NO: 2185254 - DNA, 25 bp, Homo sapien
ttgctccctgacattgataccacat

SEQ ID NO: 2185255 - DNA, 25 bp, Homo sapien
caatgtggcctctcagagaagtctt

SEQ ID NO: 2185256 - DNA, 25 bp, Homo sapien
tccccttgctgaccagaaggtcaag

SEQ ID NO: 2185257 - DNA, 25 bp, Homo sapien
tgtccccgcctcacgattgtgcatg

SEQ ID NO: 2185258 - DNA, 25 bp, Homo sapien
cacacgccttcggaaagaattttgt

SEQ ID NO: 2185259 - DNA, 25 bp, Homo sapien
aacccacaccaagtcagaaattcca

SEQ ID NO: 2185260 - DNA, 25 bp, Homo sapien
agggcccatgggcgccgcctgttct

SEQ ID NO: 2185261 - DNA, 25 bp, Homo sapien
cagtgcacgcagacggtctaccagt

SEQ ID NO: 2185262 - DNA, 25 bp, Homo sapien
cgctggcttggccctgtccacggag

SEQ ID NO: 2185263 - DNA, 25 bp, Homo sapien
cgcgcacagtgcgcgtgcacccact

SEQ ID NO: 2185264 - DNA, 25 bp, Homo sapien
gcgcacagtgcgcgtgcacccactg

SEQ ID NO: 2185265 - DNA, 25 bp, Homo sapien
cctctgcaatctggactcgaggctg

SEQ ID NO: 2185266 - DNA, 25 bp, Homo sapien
gatacggaatccagaagggtcacca

SEQ ID NO: 2185267 - DNA, 25 bp, Homo sapien
tgaccagagcattcgaagggtgcct

SEQ ID NO: 2185268 - DNA, 25 bp, Homo sapien
tctcagtggaacctttgaccagagc

SEQ ID NO: 2185269 - DNA, 25 bp, Homo sapien
gggcagagtgggcaccagggcccac

SEQ ID NO: 2185270 - DNA, 25 bp, Homo sapien
agtgggcaccagggcccaccttcct

SEQ ID NO: 2185271 - DNA, 25 bp, Homo sapien
cagagtgggcaccagggcccacctt

SEQ ID NO: 2185272 - DNA, 25 bp, Homo sapien
tgggctgggcaggagggcagagtgg

SEQ ID NO: 2185273 - DNA, 25 bp, Homo sapien
tgtatgctaggtaggtgcccgtgcc

SEQ ID NO: 2185274 - DNA, 25 bp, Homo sapien
agcagagggcgctgtatcccagcgc

SEQ ID NO: 2185275 - DNA, 25 bp, Homo sapien
cccagcgcagatgaagtgggtaaga

SEQ ID NO: 2185276 - DNA, 25 bp, Homo sapien
gtatgctaggtaggtgcccgtgcca

SEQ ID NO: 2185277 - DNA, 25 bp, Homo sapien
ttccatgggccctgtgattggacgg

SEQ ID NO: 2185278 - DNA, 25 bp, Homo sapien
tggtgtcactacagagctgccccca

SEQ ID NO: 2185279 - DNA, 25 bp, Homo sapien
atgggccctgtgattggacggtggc

SEQ ID NO: 2185280 - DNA, 25 bp, Homo sapien
gggccctgtgattggacggtggcct

SEQ ID NO: 2185281 - DNA, 25 bp, Homo sapien
tcaaatcatgccttgttgtcatgga

SEQ ID NO: 2185282 - DNA, 25 bp, Homo sapien
ccaggggacaatttcatgggtcagt

SEQ ID NO: 2185283 - DNA, 25 bp, Homo sapien
ggaccaggggacaatttcatgggtc

SEQ ID NO: 2185284 - DNA, 25 bp, Homo sapien
cagtgatggtgatcaaatcatgcct

SEQ ID NO: 2185285 - DNA, 25 bp, Homo sapien
tgctgacatcctgtaaccagagacc

SEQ ID NO: 2185286 - DNA, 25 bp, Homo sapien
ccattgctatgatggccaccttggg

SEQ ID NO: 2185287 - DNA, 25 bp, Homo sapien
accttggggactgacacctgctgac

SEQ ID NO: 2185288 - DNA, 25 bp, Homo sapien
agagaccaagtctttgttttgtggg

SEQ ID NO: 2185289 - DNA, 25 bp, Homo sapien
gaggctgcaaaaaggtctagtgctt

SEQ ID NO: 2185290 - DNA, 25 bp, Homo sapien
tctagtgcttaaattgggaactact

SEQ ID NO: 2185291 - DNA, 25 bp, Homo sapien
tgagaagagacaggatccttgagtc

SEQ ID NO: 2185292 - DNA, 25 bp, Homo sapien
ggagttcttgattctacaaagtaga

SEQ ID NO: 2185293 - DNA, 25 bp, Homo sapien
gacaagtctgagcaaatttgaacat

SEQ ID NO: 2185294 - DNA, 25 bp, Homo sapien
gatcttcacaacttgctccaatttc

SEQ ID NO: 2185295 - DNA, 25 bp, Homo sapien
tataatttctgaactgaagccagct

SEQ ID NO: 2185296 - DNA, 25 bp, Homo sapien
aagccagctgaagccatcttgacaa

SEQ ID NO: 2185297 - DNA, 25 bp, Homo sapien
tacagggcctctagagccaattcac

SEQ ID NO: 2185298 - DNA, 25 bp, Homo sapien
gaaaatgatactagcatacagggcc

SEQ ID NO: 2185299 - DNA, 25 bp, Homo sapien
aatctgcttgaaaaataggttgctc

SEQ ID NO: 2185300 - DNA, 25 bp, Homo sapien
ggtattacatcatcaaagcactttg

SEQ ID NO: 2185301 - DNA, 25 bp, Homo sapien
ttttggtggacacccctgagaggcc

SEQ ID NO: 2185302 - DNA, 25 bp, Homo sapien
taggcacagcatcttcgacagagac

SEQ ID NO: 2185303 - DNA, 25 bp, Homo sapien
cattcggattgagctctggtgcgga

SEQ ID NO: 2185304 - DNA, 25 bp, Homo sapien
gacgattacaggatacggcaccaag

SEQ ID NO: 2185305 - DNA, 25 bp, Homo sapien
tgagactcggcaggggggttcagaa

SEQ ID NO: 2185306 - DNA, 25 bp, Homo sapien
gaatggatggggctggcacggtcac

SEQ ID NO: 2185307 - DNA, 25 bp, Homo sapien
ggctggcacggtcaccagggccttc

SEQ ID NO: 2185308 - DNA, 25 bp, Homo sapien
cttcagagccatgccactctgagac

SEQ ID NO: 2185309 - DNA, 25 bp, Homo sapien
aggtcagtggagttgatgttccagg

SEQ ID NO: 2185310 - DNA, 25 bp, Homo sapien
catgccattctccagtctgttatta

SEQ ID NO: 2185311 - DNA, 25 bp, Homo sapien
gtctgttattagccaaggcaggagg

SEQ ID NO: 2185312 - DNA, 25 bp, Homo sapien
tccaggcctcggtggtgatcagctg

SEQ ID NO: 2185313 - DNA, 25 bp, Homo sapien
aatagccaagtgaggttaaaccagg

SEQ ID NO: 2185314 - DNA, 25 bp, Homo sapien
tcctgtgtgcgtggagaaccccaat

SEQ ID NO: 2185315 - DNA, 25 bp, Homo sapien
gttaaccagggagcataacccatct

SEQ ID NO: 2185316 - DNA, 25 bp, Homo sapien
cagtccaagttgctatgtcagacag

SEQ ID NO: 2185317 - DNA, 25 bp, Homo sapien
gatcagtgtctgtgtggcgtgccac

SEQ ID NO: 2185318 - DNA, 25 bp, Homo sapien
gacggtaacaaaattctgcctcgga

SEQ ID NO: 2185319 - DNA, 25 bp, Homo sapien
tgccggctgcttacacgttagacga

SEQ ID NO: 2185320 - DNA, 25 bp, Homo sapien
gaggatttccagttgcctatgccaa

SEQ ID NO: 2185321 - DNA, 25 bp, Homo sapien
gattgtccaccactggtcaatggca

SEQ ID NO: 2185322 - DNA, 25 bp, Homo sapien
cagtaactacctgccctgttgtcag

SEQ ID NO: 2185323 - DNA, 25 bp, Homo sapien
tatggtgcaagtgaaacgattgtcc

SEQ ID NO: 2185324 - DNA, 25 bp, Homo sapien
tcaatggcaccaccactttggagaa

SEQ ID NO: 2185325 - DNA, 25 bp, Homo sapien
catttatgaattccactcttgtgaa

SEQ ID NO: 2185326 - DNA, 25 bp, Homo sapien
gaatttctttgtctgggtaagccag

SEQ ID NO: 2185327 - DNA, 25 bp, Homo sapien
aggactgctggttttaataagaaca

SEQ ID NO: 2185328 - DNA, 25 bp, Homo sapien
ttgtctgggtaagccaggactgctg

SEQ ID NO: 2185329 - DNA, 25 bp, Homo sapien
aagcctgccacccttcttaatgtga

SEQ ID NO: 2185330 - DNA, 25 bp, Homo sapien
aggcaagcctgccacccttcttaat

SEQ ID NO: 2185331 - DNA, 25 bp, Homo sapien
caagacaggccttatgcaagttgac

SEQ ID NO: 2185332 - DNA, 25 bp, Homo sapien
ggccttatgcaagttgactgcttca

SEQ ID NO: 2185333 - DNA, 25 bp, Homo sapien
tacgatgtatgttccatagcttgat

SEQ ID NO: 2185334 - DNA, 25 bp, Homo sapien
tattcaatcactcggcactccacag

SEQ ID NO: 2185335 - DNA, 25 bp, Homo sapien
gccgctccagacacattacgatgta

SEQ ID NO: 2185336 - DNA, 25 bp, Homo sapien
taaaactgacagcttggcgagtatt

SEQ ID NO: 2185337 - DNA, 25 bp, Homo sapien
gagaagttgtaaaacctgtagacgc

SEQ ID NO: 2185338 - DNA, 25 bp, Homo sapien
tcccatgatgccttactgaatgcca

SEQ ID NO: 2185339 - DNA, 25 bp, Homo sapien
aaaacctgtagacgccctcccatga

SEQ ID NO: 2185340 - DNA, 25 bp, Homo sapien
tcgaagctctaggacaggagaaatg

SEQ ID NO: 2185341 - DNA, 25 bp, Homo sapien
gctgggggagcaatgcaacaaatca

SEQ ID NO: 2185342 - DNA, 25 bp, Homo sapien
caccggggagccttttgaggcctgt

SEQ ID NO: 2185343 - DNA, 25 bp, Homo sapien
gcagctgggggagcaatgcaacaaa

SEQ ID NO: 2185344 - DNA, 25 bp, Homo sapien
cagtgaggagaacagggtcacaccg

SEQ ID NO: 2185345 - DNA, 25 bp, Homo sapien
caatggcgctgacattgggagtcag

SEQ ID NO: 2185346 - DNA, 25 bp, Homo sapien
gtcagggataaagggcccaggctct

SEQ ID NO: 2185347 - DNA, 25 bp, Homo sapien
ggtcaagcccacgagaaccggcaat

SEQ ID NO: 2185348 - DNA, 25 bp, Homo sapien
cattgaggctgcacgcttgtgcgtt

SEQ ID NO: 2185349 - DNA, 25 bp, Homo sapien
cattctaagatgtttccccttgcag

SEQ ID NO: 2185350 - DNA, 25 bp, Homo sapien
gcagttttggctgtaagcttcagcc

SEQ ID NO: 2185351 - DNA, 25 bp, Homo sapien
ctgtccgatacaggcagtggtctgc

SEQ ID NO: 2185352 - DNA, 25 bp, Homo sapien
agtggtctgcaaacctggtctgtgg

SEQ ID NO: 2185353 - DNA, 25 bp, Homo sapien
gaaactggcctccaacgcccagatt

SEQ ID NO: 2185354 - DNA, 25 bp, Homo sapien
gtggcctctgcaccacgaaactggc

SEQ ID NO: 2185355 - DNA, 25 bp, Homo sapien
gaatcctggcctgcaacggactggc

SEQ ID NO: 2185356 - DNA, 25 bp, Homo sapien
ttatgatcctatttcctctcccagt

SEQ ID NO: 2185357 - DNA, 25 bp, Homo sapien
gcctgtaggcattaccaggtgctag

SEQ ID NO: 2185358 - DNA, 25 bp, Homo sapien
ctgcctgtaggcattaccaggtgct

SEQ ID NO: 2185359 - DNA, 25 bp, Homo sapien
cagaaagaatatggctgagggcttg

SEQ ID NO: 2185360 - DNA, 25 bp, Homo sapien
gtaggcattaccaggtgctagctgc

SEQ ID NO: 2185361 - DNA, 25 bp, Homo sapien
gaatcacatactttggccccattgt

SEQ ID NO: 2185362 - DNA, 25 bp, Homo sapien
aagaattccacacggccaagatagg

SEQ ID NO: 2185363 - DNA, 25 bp, Homo sapien
gactttctgcctggttgtgcatacg

SEQ ID NO: 2185364 - DNA, 25 bp, Homo sapien
gggagggattcttcagccaattgct

SEQ ID NO: 2185365 - DNA, 25 bp, Homo sapien
taatgaattatttttcgccagaatg

SEQ ID NO: 2185366 - DNA, 25 bp, Homo sapien
agaacagttgctacagtgcagctgg

SEQ ID NO: 2185367 - DNA, 25 bp, Homo sapien
ggaactggtaataccctggctgtta

SEQ ID NO: 2185368 - DNA, 25 bp, Homo sapien
gcacggcccgattctgctgctgaaa

SEQ ID NO: 2185369 - DNA, 25 bp, Homo sapien
accaactccttctgaggagcccaag

SEQ ID NO: 2185370 - DNA, 25 bp, Homo sapien
gccaagggtcccctgtgagggcagc

SEQ ID NO: 2185371 - DNA, 25 bp, Homo sapien
aaccaactccttctgaggagcccaa

SEQ ID NO: 2185372 - DNA, 25 bp, Homo sapien
caagggtcccctgtgagggcagccc

SEQ ID NO: 2185373 - DNA, 25 bp, Homo sapien
ctggccgccaaaatcagcttctcac

SEQ ID NO: 2185374 - DNA, 25 bp, Homo sapien
catcaacattgtgagccatgaagga

SEQ ID NO: 2185375 - DNA, 25 bp, Homo sapien
tcaacattgtgagccatgaaggaaa

SEQ ID NO: 2185376 - DNA, 25 bp, Homo sapien
caacattgtgagccatgaaggaaag

SEQ ID NO: 2185377 - DNA, 25 bp, Homo sapien
ccatcagaggacagtgaagtggcag

SEQ ID NO: 2185378 - DNA, 25 bp, Homo sapien
tgtagttcagatggtcctgtttcag

SEQ ID NO: 2185379 - DNA, 25 bp, Homo sapien
gaaatgtgtcttacagttcttcccc

SEQ ID NO: 2185380 - DNA, 25 bp, Homo sapien
aatgtgtcttacagttcttccccag

SEQ ID NO: 2185381 - DNA, 25 bp, Homo sapien
acaagattttgaaatgtgtcttaca

SEQ ID NO: 2185382 - DNA, 25 bp, Homo sapien
tttgaaatgtgtcttacagttcttc

SEQ ID NO: 2185383 - DNA, 25 bp, Homo sapien
caaaccgtgttctcaccccagcgat

SEQ ID NO: 2185384 - DNA, 25 bp, Homo sapien
ccaccaaaccgtgttctcaccccag

SEQ ID NO: 2185385 - DNA, 25 bp, Homo sapien
ctgcccaccaaaccgtgttctcacc

SEQ ID NO: 2185386 - DNA, 25 bp, Homo sapien
gtgttctcaccccagcgatcggcat

SEQ ID NO: 2185387 - DNA, 25 bp, Homo sapien
agcagccacatacccgatatggtgt

SEQ ID NO: 2185388 - DNA, 25 bp, Homo sapien
ccgatatggtgtcggcgcctccttg

SEQ ID NO: 2185389 - DNA, 25 bp, Homo sapien
tacccgatatggtgtcggcgcctcc

SEQ ID NO: 2185390 - DNA, 25 bp, Homo sapien
cacatacccgatatggtgtcggcgc

SEQ ID NO: 2185391 - DNA, 25 bp, Homo sapien
caaaaatgcagcgagaacgttgctc

SEQ ID NO: 2185392 - DNA, 25 bp, Homo sapien
aacgttgctcggtgcctaacatggc

SEQ ID NO: 2185393 - DNA, 25 bp, Homo sapien
gccaccgcggagagaagcaataact

SEQ ID NO: 2185394 - DNA, 25 bp, Homo sapien
tccgcagcaaaaggcgccactgaaa

SEQ ID NO: 2185395 - DNA, 25 bp, Homo sapien
tggccgcgcgtcacaaagaggagcc

SEQ ID NO: 2185396 - DNA, 25 bp, Homo sapien
aggagcccggcgcaatctggcaaaa

SEQ ID NO: 2185397 - DNA, 25 bp, Homo sapien
acccaactttccaccaggctcgcca

SEQ ID NO: 2185398 - DNA, 25 bp, Homo sapien
gggccgccagatacgtcaacagaat

SEQ ID NO: 2185399 - DNA, 25 bp, Homo sapien
gggcagaacggcagatccggagact

SEQ ID NO: 2185400 - DNA, 25 bp, Homo sapien
agactgcccggtgcggtgcctgggc

SEQ ID NO: 2185401 - DNA, 25 bp, Homo sapien
acggcagatccggagactgcccggt

SEQ ID NO: 2185402 - DNA, 25 bp, Homo sapien
tgggcgcggagtccgccgtgcaccg

SEQ ID NO: 2185403 - DNA, 25 bp, Homo sapien
cgcccgatgccagtgcgggcggcgg

SEQ ID NO: 2185404 - DNA, 25 bp, Homo sapien
tgcgcccgatgccagtgcgggcggc

SEQ ID NO: 2185405 - DNA, 25 bp, Homo sapien
gcgcccgatgccagtgcgggcggcg

SEQ ID NO: 2185406 - DNA, 25 bp, Homo sapien
ctgcgcccgatgccagtgcgggcgg

SEQ ID NO: 2185407 - DNA, 25 bp, Homo sapien
tgctggaactctccggtctggcctc

SEQ ID NO: 2185408 - DNA, 25 bp, Homo sapien
gaagccgcggggtggtcgagtgtgc

SEQ ID NO: 2185409 - DNA, 25 bp, Homo sapien
cgcggggtggtcgagtgtgctggaa

SEQ ID NO: 2185410 - DNA, 25 bp, Homo sapien
gtgtgctggaactctccggtctggc

SEQ ID NO: 2185411 - DNA, 25 bp, Homo sapien
tgaagggggtgcgccgcggtgggag

SEQ ID NO: 2185412 - DNA, 25 bp, Homo sapien
ccgtcgccgctgtcaccgagtcgct

SEQ ID NO: 2185413 - DNA, 25 bp, Homo sapien
gaagggggtgcgccgcggtgggagc

SEQ ID NO: 2185414 - DNA, 25 bp, Homo sapien
ctgaagggggtgcgccgcggtggga

SEQ ID NO: 2185415 - DNA, 25 bp, Homo sapien
tcaaagtggcttcgagtaagctctc

SEQ ID NO: 2185416 - DNA, 25 bp, Homo sapien
ggcttcgagtaagctctcctctccc

SEQ ID NO: 2185417 - DNA, 25 bp, Homo sapien
aaagtggcttcgagtaagctctcct

SEQ ID NO: 2185418 - DNA, 25 bp, Homo sapien
tggcttcgagtaagctctcctctcc

SEQ ID NO: 2185419 - DNA, 25 bp, Homo sapien
cagtggtagccgtccttgcccttgc

SEQ ID NO: 2185420 - DNA, 25 bp, Homo sapien
agtggtagccgtccttgcccttgcc

SEQ ID NO: 2185421 - DNA, 25 bp, Homo sapien
ctacaagtatcatgaccgtcaaaca

SEQ ID NO: 2185422 - DNA, 25 bp, Homo sapien
acaagtatcatgaccgtcaaacaca

SEQ ID NO: 2185423 - DNA, 25 bp, Homo sapien
tacaagtatcatgaccgtcaaacac

SEQ ID NO: 2185424 - DNA, 25 bp, Homo sapien
caagtatcatgaccgtcaaacacac

SEQ ID NO: 2185425 - DNA, 25 bp, Homo sapien
ccaaatccatggagagccctgtaca

SEQ ID NO: 2185426 - DNA, 25 bp, Homo sapien
tgtacaagccacgtgagaagccagg

SEQ ID NO: 2185427 - DNA, 25 bp, Homo sapien
tcatgtgactgtcacttgaggccac

SEQ ID NO: 2185428 - DNA, 25 bp, Homo sapien
atggagagccctgtacaagccacgt

SEQ ID NO: 2185429 - DNA, 25 bp, Homo sapien
ttcctctcttagaagttcattcaca

SEQ ID NO: 2185430 - DNA, 25 bp, Homo sapien
tcattcacaaatgagccagattcat

SEQ ID NO: 2185431 - DNA, 25 bp, Homo sapien
attcacaaatgagccagattcatcc

SEQ ID NO: 2185432 - DNA, 25 bp, Homo sapien
cctctcttagaagttcattcacaaa

SEQ ID NO: 2185433 - DNA, 25 bp, Homo sapien
gagtacactaggcatcgctcagcca

SEQ ID NO: 2185434 - DNA, 25 bp, Homo sapien
tctaagctcctcgtgttcttgaggg

SEQ ID NO: 2185435 - DNA, 25 bp, Homo sapien
aggattatccttgcccaatttctga

SEQ ID NO: 2185436 - DNA, 25 bp, Homo sapien
tctctgatgctcttcacccctagga

SEQ ID NO: 2185437 - DNA, 25 bp, Homo sapien
gatattttcagtggggtaaaaggca

SEQ ID NO: 2185438 - DNA, 25 bp, Homo sapien
atattttcagtggggtaaaaggcag

SEQ ID NO: 2185439 - DNA, 25 bp, Homo sapien
gcttccacagggtctggccctctat

SEQ ID NO: 2185440 - DNA, 25 bp, Homo sapien
tgaaggatagtgagttgctcctggt

SEQ ID NO: 2185441 - DNA, 25 bp, Homo sapien
ggtgacaggcatgcattccatggtg

SEQ ID NO: 2185442 - DNA, 25 bp, Homo sapien
aagctgtagcccaactgagccaggt

SEQ ID NO: 2185443 - DNA, 25 bp, Homo sapien
ctatgcttctgtaagtgactctggg

SEQ ID NO: 2185444 - DNA, 25 bp, Homo sapien
tgtctgggtctgtctatgcttctgt

SEQ ID NO: 2185445 - DNA, 25 bp, Homo sapien
gaggatagccatctgttgttgaggt

SEQ ID NO: 2185446 - DNA, 25 bp, Homo sapien
gcagggcatcttcttgtgagggact

SEQ ID NO: 2185447 - DNA, 25 bp, Homo sapien
tctgaaaaagtggtgaaaaggatct

SEQ ID NO: 2185448 - DNA, 25 bp, Homo sapien
ttctgaaaaagtggtgaaaaggatc

SEQ ID NO: 2185449 - DNA, 25 bp, Homo sapien
catttttcatgttggatgattctga

SEQ ID NO: 2185450 - DNA, 25 bp, Homo sapien
gatgtaacggaagcctgcatttttc

SEQ ID NO: 2185451 - DNA, 25 bp, Homo sapien
gggttcctttgttggtgacatgcag

SEQ ID NO: 2185452 - DNA, 25 bp, Homo sapien
catgcagttgagaggaggaaataac

SEQ ID NO: 2185453 - DNA, 25 bp, Homo sapien
cacttccagcatgtagggttccttt

SEQ ID NO: 2185454 - DNA, 25 bp, Homo sapien
gcgagatctccgaaaagccccactt

SEQ ID NO: 2185455 - DNA, 25 bp, Homo sapien
aacagacttgttctgggtccctgta

SEQ ID NO: 2185456 - DNA, 25 bp, Homo sapien
tgaacagacttgttctgggtccctg

SEQ ID NO: 2185457 - DNA, 25 bp, Homo sapien
ctgtgaacagacttgttctgggtcc

SEQ ID NO: 2185458 - DNA, 25 bp, Homo sapien
tgtgaacagacttgttctgggtccc

SEQ ID NO: 2185459 - DNA, 25 bp, Homo sapien
aagatctgcatgtgctatgtgctgc

SEQ ID NO: 2185460 - DNA, 25 bp, Homo sapien
tctgcatgtgctatgtgctgcaaca

SEQ ID NO: 2185461 - DNA, 25 bp, Homo sapien
gatgttcaagatctgcatgtgctat

SEQ ID NO: 2185462 - DNA, 25 bp, Homo sapien
ttcaagatgttcaagatctgcatgt

SEQ ID NO: 2185463 - DNA, 25 bp, Homo sapien
ttcatctctgcccaatctagttggc

SEQ ID NO: 2185464 - DNA, 25 bp, Homo sapien
gttcatctctgcccaatctagttgg

SEQ ID NO: 2185465 - DNA, 25 bp, Homo sapien
tcatggtcaagtcatccaggatcct

SEQ ID NO: 2185466 - DNA, 25 bp, Homo sapien
tccaggatcctgattttccccagga

SEQ ID NO: 2185467 - DNA, 25 bp, Homo sapien
aggatcctgattttccccaggatct

SEQ ID NO: 2185468 - DNA, 25 bp, Homo sapien
ttcatggtcaagtcatccaggatcc

SEQ ID NO: 2185469 - DNA, 25 bp, Homo sapien
gcctggtgcacggaaagataactct

SEQ ID NO: 2185470 - DNA, 25 bp, Homo sapien
cctggtgcacggaaagataactctt

SEQ ID NO: 2185471 - DNA, 25 bp, Homo sapien
ctggtgcacggaaagataactcttc

SEQ ID NO: 2185472 - DNA, 25 bp, Homo sapien
gatgtagagctgtggctgaaaagca

SEQ ID NO: 2185473 - DNA, 25 bp, Homo sapien
atgatgtagagctgtggctgaaaag

SEQ ID NO: 2185474 - DNA, 25 bp, Homo sapien
ccatgatgtagagctgtggctgaaa

SEQ ID NO: 2185475 - DNA, 25 bp, Homo sapien
ctccatgatgtagagctgtggctga

SEQ ID NO: 2185476 - DNA, 25 bp, Homo sapien
aggagcctaagccttggtccagcct

SEQ ID NO: 2185477 - DNA, 25 bp, Homo sapien
ccaaagctatcactgagatggaaca

SEQ ID NO: 2185478 - DNA, 25 bp, Homo sapien
tcagttgtcggaaatcttcctcctc

SEQ ID NO: 2185479 - DNA, 25 bp, Homo sapien
cctttagctcctcagattctgcagg

SEQ ID NO: 2185480 - DNA, 25 bp, Homo sapien
atggccccagcaagcctttgctcac

SEQ ID NO: 2185481 - DNA, 25 bp, Homo sapien
tttgacgggcctcacccgattcctg

SEQ ID NO: 2185482 - DNA, 25 bp, Homo sapien
ctgtttctcccacccgggcagcctt

SEQ ID NO: 2185483 - DNA, 25 bp, Homo sapien
gggcctcacccgattcctgaaggtc

SEQ ID NO: 2185484 - DNA, 25 bp, Homo sapien
cccgggcagcctttgacgggcctca

SEQ ID NO: 2185485 - DNA, 25 bp, Homo sapien
ctgtaagaattgtgtgtcttgttac

SEQ ID NO: 2185486 - DNA, 25 bp, Homo sapien
gagggatctgtaagaattgtgtgtc

SEQ ID NO: 2185487 - DNA, 25 bp, Homo sapien
caaacagctcttgagggatctgtaa

SEQ ID NO: 2185488 - DNA, 25 bp, Homo sapien
gctcttgagggatctgtaagaattg

SEQ ID NO: 2185489 - DNA, 25 bp, Homo sapien
caggctcctttagttccttactaag

SEQ ID NO: 2185490 - DNA, 25 bp, Homo sapien
tctcaggctcctttagttccttact

SEQ ID NO: 2185491 - DNA, 25 bp, Homo sapien
tgtggtcccgttctgtcactcctgc

SEQ ID NO: 2185492 - DNA, 25 bp, Homo sapien
cctggaactgtgtggtcccgttctg

SEQ ID NO: 2185493 - DNA, 25 bp, Homo sapien
attctgcctgagatctcttcatccc

SEQ ID NO: 2185494 - DNA, 25 bp, Homo sapien
tctcctgttcttcagcaattctgcc

SEQ ID NO: 2185495 - DNA, 25 bp, Homo sapien
gcaattctgcctgagatctcttcat

SEQ ID NO: 2185496 - DNA, 25 bp, Homo sapien
cagcaattctgcctgagatctcttc

SEQ ID NO: 2185497 - DNA, 25 bp, Homo sapien
ctctggtacgggcttggattggttt

SEQ ID NO: 2185498 - DNA, 25 bp, Homo sapien
tcctcctctggtacgggcttggatt

SEQ ID NO: 2185499 - DNA, 25 bp, Homo sapien
tattttgtggattgcagttgtggaa

SEQ ID NO: 2185500 - DNA, 25 bp, Homo sapien
ccaaccacttgcaagtccagaaatg

SEQ ID NO: 2185501 - DNA, 25 bp, Homo sapien
acaaccagcaggtctgcaaatagca

SEQ ID NO: 2185502 - DNA, 25 bp, Homo sapien
tgcagctctagcttaagccaattaa

SEQ ID NO: 2185503 - DNA, 25 bp, Homo sapien
aacaaccagcaggtctgcaaatagc

SEQ ID NO: 2185504 - DNA, 25 bp, Homo sapien
gcctgaacgtcctcatggcatgaag

SEQ ID NO: 2185505 - DNA, 25 bp, Homo sapien
ttggccaaagctgcagttatctgca

SEQ ID NO: 2185506 - DNA, 25 bp, Homo sapien
aaggtggcccattcccatagctggc

SEQ ID NO: 2185507 - DNA, 25 bp, Homo sapien
ggtgagagacctcagatcctttcca

SEQ ID NO: 2185508 - DNA, 25 bp, Homo sapien
aagtcactcacttgctgtccaggaa

SEQ ID NO: 2185509 - DNA, 25 bp, Homo sapien
caggtagaagaaacctgggtccctg

SEQ ID NO: 2185510 - DNA, 25 bp, Homo sapien
ttctgaaggacagtagagctaccag

SEQ ID NO: 2185511 - DNA, 25 bp, Homo sapien
gaattaccgcctgtgagcaagtcac

SEQ ID NO: 2185512 - DNA, 25 bp, Homo sapien
gaacttgacccatgcagtctcttag

SEQ ID NO: 2185513 - DNA, 25 bp, Homo sapien
gtagatccacattaagttcccttcg

SEQ ID NO: 2185514 - DNA, 25 bp, Homo sapien
cccttcgagactgaaatggtgtaag

SEQ ID NO: 2185515 - DNA, 25 bp, Homo sapien
aatggtgtaagcagcttcagagaca

SEQ ID NO: 2185516 - DNA, 25 bp, Homo sapien
ttccttggcaaaggctggaggatcc

SEQ ID NO: 2185517 - DNA, 25 bp, Homo sapien
cttggcaaaggctggaggatcctga

SEQ ID NO: 2185518 - DNA, 25 bp, Homo sapien
ccttggcaaaggctggaggatcctg

SEQ ID NO: 2185519 - DNA, 25 bp, Homo sapien
ttttccttggcaaaggctggaggat

SEQ ID NO: 2185520 - DNA, 25 bp, Homo sapien
ttgttacatgattccccccttgctt

SEQ ID NO: 2185521 - DNA, 25 bp, Homo sapien
gctttaagcacagtatgttctattt

SEQ ID NO: 2185522 - DNA, 25 bp, Homo sapien
ccccttgctttaagcacagtatgtt

SEQ ID NO: 2185523 - DNA, 25 bp, Homo sapien
tgttacatgattccccccttgcttt

SEQ ID NO: 2185524 - DNA, 25 bp, Homo sapien
tgagaatgaccctcagacatgaaat

SEQ ID NO: 2185525 - DNA, 25 bp, Homo sapien
aatactccagggcattcagtgagct

SEQ ID NO: 2185526 - DNA, 25 bp, Homo sapien
tggctgaatactccagggcattcag

SEQ ID NO: 2185527 - DNA, 25 bp, Homo sapien
agtgagctgagaatgaccctcagac

SEQ ID NO: 2185528 - DNA, 25 bp, Homo sapien
gagactccagcttggtgagtgcaca

SEQ ID NO: 2185529 - DNA, 25 bp, Homo sapien
cagcgttggaaagcgatgacttgcc

SEQ ID NO: 2185530 - DNA, 25 bp, Homo sapien
agcagcctcgctgatgagactccag

SEQ ID NO: 2185531 - DNA, 25 bp, Homo sapien
gcagaaacaattggacagcgttgga

SEQ ID NO: 2185532 - DNA, 25 bp, Homo sapien
gatggctttaccgtttctactggac

SEQ ID NO: 2185533 - DNA, 25 bp, Homo sapien
tggctaacagctctaggacttttct

SEQ ID NO: 2185534 - DNA, 25 bp, Homo sapien
tactggacttttgactaaagtcaca

SEQ ID NO: 2185535 - DNA, 25 bp, Homo sapien
tagatacaaacttgaatatcctggc

SEQ ID NO: 2185536 - DNA, 25 bp, Homo sapien
tttcaaaggattgagataaatcgga

SEQ ID NO: 2185537 - DNA, 25 bp, Homo sapien
tcaaaggattgagataaatcggaag

SEQ ID NO: 2185538 - DNA, 25 bp, Homo sapien
aaggattgagataaatcggaagggg

SEQ ID NO: 2185539 - DNA, 25 bp, Homo sapien
caaaggattgagataaatcggaagg

SEQ ID NO: 2185540 - DNA, 25 bp, Homo sapien
tctggggcccattagtgctgcttca

SEQ ID NO: 2185541 - DNA, 25 bp, Homo sapien
tctatttccagatccctgaagtggg

SEQ ID NO: 2185542 - DNA, 25 bp, Homo sapien
tgcaaatgcaagttcaggaggtctg

SEQ ID NO: 2185543 - DNA, 25 bp, Homo sapien
gacccaatacactccagaaggtttc

SEQ ID NO: 2185544 - DNA, 25 bp, Homo sapien
tagcaccttttaagcaccagcaggg

SEQ ID NO: 2185545 - DNA, 25 bp, Homo sapien
tatattgtcttcgtaagagcagccg

SEQ ID NO: 2185546 - DNA, 25 bp, Homo sapien
tactatattgtcttcgtaagagcag

SEQ ID NO: 2185547 - DNA, 25 bp, Homo sapien
cttcgtaagagcagccgatggatca

SEQ ID NO: 2185548 - DNA, 25 bp, Homo sapien
tgaagtgtggttttttggcgtacag

SEQ ID NO: 2185549 - DNA, 25 bp, Homo sapien
aaatgtctcgcagttgacggggaca

SEQ ID NO: 2185550 - DNA, 25 bp, Homo sapien
gggtcttcatgggaaagcaaatgtc

SEQ ID NO: 2185551 - DNA, 25 bp, Homo sapien
aagtcagtggcttgattgagaagca

SEQ ID NO: 2185552 - DNA, 25 bp, Homo sapien
gagaaaggagattctaacagaatct

SEQ ID NO: 2185553 - DNA, 25 bp, Homo sapien
gaaaggagattctaacagaatctca

SEQ ID NO: 2185554 - DNA, 25 bp, Homo sapien
gagagaaaggagattctaacagaat

SEQ ID NO: 2185555 - DNA, 25 bp, Homo sapien
gggagagaaaggagattctaacaga

SEQ ID NO: 2185556 - DNA, 25 bp, Homo sapien
cacaatcactgccagttctgaggaa

SEQ ID NO: 2185557 - DNA, 25 bp, Homo sapien
tgccagttctgaggaatcaatggcc

SEQ ID NO: 2185558 - DNA, 25 bp, Homo sapien
tcactgccagttctgaggaatcaat

SEQ ID NO: 2185559 - DNA, 25 bp, Homo sapien
ccagttctgaggaatcaatggccat

SEQ ID NO: 2185560 - DNA, 25 bp, Homo sapien
tttggtaaatataagaagtaaggca

SEQ ID NO: 2185561 - DNA, 25 bp, Homo sapien
gaagtcagaaacatgcaggttactt

SEQ ID NO: 2185562 - DNA, 25 bp, Homo sapien
tataagaagtaaggcatggagaagt

SEQ ID NO: 2185563 - DNA, 25 bp, Homo sapien
taaatataagaagtaaggcatggag

SEQ ID NO: 2185564 - DNA, 25 bp, Homo sapien
tgggtgaagtggacggcccatcccc

SEQ ID NO: 2185565 - DNA, 25 bp, Homo sapien
ctctgtcactgttctgtctaagtgg

SEQ ID NO: 2185566 - DNA, 25 bp, Homo sapien
tgtcactgttctgtctaagtggctt

SEQ ID NO: 2185567 - DNA, 25 bp, Homo sapien
aatgtgggtgaagtggacggcccat

SEQ ID NO: 2185568 - DNA, 25 bp, Homo sapien
catctctctgagttgatggtgcacg

SEQ ID NO: 2185569 - DNA, 25 bp, Homo sapien
tctctctgagttgatggtgcacgtt

SEQ ID NO: 2185570 - DNA, 25 bp, Homo sapien
ctctctgagttgatggtgcacgttg

SEQ ID NO: 2185571 - DNA, 25 bp, Homo sapien
ctctgagttgatggtgcacgttgag

SEQ ID NO: 2185572 - DNA, 25 bp, Homo sapien
tcatgtgactgtcacttgaggccac

SEQ ID NO: 2185573 - DNA, 25 bp, Homo sapien
gtcatgtgactgtcacttgaggcca

SEQ ID NO: 2185574 - DNA, 25 bp, Homo sapien
tgtacaagccacgtgagaagccagg

SEQ ID NO: 2185575 - DNA, 25 bp, Homo sapien
ctgtacaagccacgtgagaagccag

SEQ ID NO: 2185576 - DNA, 25 bp, Homo sapien
ttcctctcttagaagttcattcaca

SEQ ID NO: 2185577 - DNA, 25 bp, Homo sapien
tcattcacaaatgagccagattcat

SEQ ID NO: 2185578 - DNA, 25 bp, Homo sapien
cctctcttagaagttcattcacaaa

SEQ ID NO: 2185579 - DNA, 25 bp, Homo sapien
attcacaaatgagccagattcatcc

SEQ ID NO: 2185580 - DNA, 25 bp, Homo sapien
gggtactccaatagctagaggtgtc

SEQ ID NO: 2185581 - DNA, 25 bp, Homo sapien
caggaggaacggtgggtactccaat

SEQ ID NO: 2185582 - DNA, 25 bp, Homo sapien
gaacggtgggtactccaatagctag

SEQ ID NO: 2185583 - DNA, 25 bp, Homo sapien
catgcaggaggaacggtgggtactc

SEQ ID NO: 2185584 - DNA, 25 bp, Homo sapien
ttaatcagctgctttaccctaacag

SEQ ID NO: 2185585 - DNA, 25 bp, Homo sapien
gaaatgtgattctaattgtagcaaa

SEQ ID NO: 2185586 - DNA, 25 bp, Homo sapien
aacagctagctgagtagcttggagg

SEQ ID NO: 2185587 - DNA, 25 bp, Homo sapien
tagtcatcaacacgagtgtgacttt

SEQ ID NO: 2185588 - DNA, 25 bp, Homo sapien
caccacactgaacgtctgaattctt

SEQ ID NO: 2185589 - DNA, 25 bp, Homo sapien
gtttggattatgaagggttggatct

SEQ ID NO: 2185590 - DNA, 25 bp, Homo sapien
cacactgaacgtctgaattcttggt

SEQ ID NO: 2185591 - DNA, 25 bp, Homo sapien
ttgcctcttccccgtgtggtttgga

SEQ ID NO: 2185592 - DNA, 25 bp, Homo sapien
ttggggggaaaggagcatgaaatct

SEQ ID NO: 2185593 - DNA, 25 bp, Homo sapien
tgcttggtcccctttcactcctagg

SEQ ID NO: 2185594 - DNA, 25 bp, Homo sapien
aatattcaccaagatctcccctgct

SEQ ID NO: 2185595 - DNA, 25 bp, Homo sapien
tgagcgagccatggaaagcatgctg

SEQ ID NO: 2185596 - DNA, 25 bp, Homo sapien
tctaattggaagtgcatgggtctcc

SEQ ID NO: 2185597 - DNA, 25 bp, Homo sapien
tttgtggagaatgcacaatgaagag

SEQ ID NO: 2185598 - DNA, 25 bp, Homo sapien
tgtggagaatgcacaatgaagagag

SEQ ID NO: 2185599 - DNA, 25 bp, Homo sapien
cttttgtggagaatgcacaatgaag

SEQ ID NO: 2185600 - DNA, 25 bp, Homo sapien
ggagaatgcacaatgaagagagcag

SEQ ID NO: 2185601 - DNA, 25 bp, Homo sapien
tcttcttattcatccctgtttgctc

SEQ ID NO: 2185602 - DNA, 25 bp, Homo sapien
ctagacctctggcagttaacaacct

SEQ ID NO: 2185603 - DNA, 25 bp, Homo sapien
gcagttaacaacctcttcttattca

SEQ ID NO: 2185604 - DNA, 25 bp, Homo sapien
tctggcagttaacaacctcttctta

SEQ ID NO: 2185605 - DNA, 25 bp, Homo sapien
gcttttctgacgggcttgaaaaatg

SEQ ID NO: 2185606 - DNA, 25 bp, Homo sapien
cgcttttctgacgggcttgaaaaat

SEQ ID NO: 2185607 - DNA, 25 bp, Homo sapien
ttctgacgggcttgaaaaatggcgc

SEQ ID NO: 2185608 - DNA, 25 bp, Homo sapien
ttttctgacgggcttgaaaaatggc

SEQ ID NO: 2185609 - DNA, 25 bp, Homo sapien
gggatgtcatatgttcttgctttgt

SEQ ID NO: 2185610 - DNA, 25 bp, Homo sapien
agggatgtcatatgttcttgctttg

SEQ ID NO: 2185611 - DNA, 25 bp, Homo sapien
tcagtggtagcctcctctgagtctt

SEQ ID NO: 2185612 - DNA, 25 bp, Homo sapien
ccctggatggtgtgtttcagtggta

SEQ ID NO: 2185613 - DNA, 25 bp, Homo sapien
ggtgtgtttcagtggtagcctcctc

SEQ ID NO: 2185614 - DNA, 25 bp, Homo sapien
tgtttcagtggtagcctcctctgag

SEQ ID NO: 2185615 - DNA, 25 bp, Homo sapien
ttcaaacaatatgggaagcacctgc

SEQ ID NO: 2185616 - DNA, 25 bp, Homo sapien
aagttctgtgatgtttgggcaacaa

SEQ ID NO: 2185617 - DNA, 25 bp, Homo sapien
caaacaattgtctagcccttcaaac

SEQ ID NO: 2185618 - DNA, 25 bp, Homo sapien
gggcaggatttcttcgggtcaataa

SEQ ID NO: 2185619 - DNA, 25 bp, Homo sapien
gaaagttacatctgctgttcaggca

SEQ ID NO: 2185620 - DNA, 25 bp, Homo sapien
aaagttacatctgctgttcaggcag

SEQ ID NO: 2185621 - DNA, 25 bp, Homo sapien
tatcatcagtgttggggtcgttagg

SEQ ID NO: 2185622 - DNA, 25 bp, Homo sapien
ttaaatactatcatcagtgttgggg

SEQ ID NO: 2185623 - DNA, 25 bp, Homo sapien
ggtttggcgattactacaggtgtca

SEQ ID NO: 2185624 - DNA, 25 bp, Homo sapien
taagtcaaagccatgggtcacaagc

SEQ ID NO: 2185625 - DNA, 25 bp, Homo sapien
cttgcctagggtcgaactgtacttt

SEQ ID NO: 2185626 - DNA, 25 bp, Homo sapien
caagcccatgaggagtttactacca

SEQ ID NO: 2185627 - DNA, 25 bp, Homo sapien
gataccgctgttgatggaggtcaca

SEQ ID NO: 2185628 - DNA, 25 bp, Homo sapien
ggaggtcacacacgacttccagtct

SEQ ID NO: 2185629 - DNA, 25 bp, Homo sapien
tcatgtctaaggctacggataccgc

SEQ ID NO: 2185630 - DNA, 25 bp, Homo sapien
actgctggaagcgactgagacctgg

SEQ ID NO: 2185631 - DNA, 25 bp, Homo sapien
ggcacacaggccatgcttcagattg

SEQ ID NO: 2185632 - DNA, 25 bp, Homo sapien
cagtactgaacatggcatccgtata

SEQ ID NO: 2185633 - DNA, 25 bp, Homo sapien
gaataaggtatctagccgacaggct

SEQ ID NO: 2185634 - DNA, 25 bp, Homo sapien
ccatagacgttactttggaccagga

SEQ ID NO: 2185635 - DNA, 25 bp, Homo sapien
ggattatcagtggaaggttctcgca

SEQ ID NO: 2185636 - DNA, 25 bp, Homo sapien
tgccgatgcaacacggttggtacgt

SEQ ID NO: 2185637 - DNA, 25 bp, Homo sapien
atttctatctgcagatgccgatgca

SEQ ID NO: 2185638 - DNA, 25 bp, Homo sapien
tattcattggctgaaacatccaaga

SEQ ID NO: 2185639 - DNA, 25 bp, Homo sapien
taaacaaagtcccacagcaagaaaa

SEQ ID NO: 2185640 - DNA, 25 bp, Homo sapien
cacaaaatcatatccgtaaacaaag

SEQ ID NO: 2185641 - DNA, 25 bp, Homo sapien
gcaagaaaatatgtctgtgctctac

SEQ ID NO: 2185642 - DNA, 25 bp, Homo sapien
agaaaatatgtctgtgctctaccac

SEQ ID NO: 2185643 - DNA, 25 bp, Homo sapien
catatttagatgaaaaataacttac

SEQ ID NO: 2185644 - DNA, 25 bp, Homo sapien
gataccagaaatacagtcctgccag

SEQ ID NO: 2185645 - DNA, 25 bp, Homo sapien
ttccatgttcatgcaaatcacaggt

SEQ ID NO: 2185646 - DNA, 25 bp, Homo sapien
tggagtactcttgccttcagaacat

SEQ ID NO: 2185647 - DNA, 25 bp, Homo sapien
tcacaggtgggaaaagttgttgcca

SEQ ID NO: 2185648 - DNA, 25 bp, Homo sapien
caaaatacgaaccaagtagcaggct

SEQ ID NO: 2185649 - DNA, 25 bp, Homo sapien
cagccattttgttcgggtcgaggga

SEQ ID NO: 2185650 - DNA, 25 bp, Homo sapien
cagcaaatggattttaagtactctg

SEQ ID NO: 2185651 - DNA, 25 bp, Homo sapien
ggccatattttgtacggccagcaaa

SEQ ID NO: 2185652 - DNA, 25 bp, Homo sapien
gttgagcgattcattgtgttgacgc

SEQ ID NO: 2185653 - DNA, 25 bp, Homo sapien
tccgtgttggtgtctacttttacca

SEQ ID NO: 2185654 - DNA, 25 bp, Homo sapien
actgtccaataaagttgagcgattc

SEQ ID NO: 2185655 - DNA, 25 bp, Homo sapien
gaggaagaatcctggccactgtcac

SEQ ID NO: 2185656 - DNA, 25 bp, Homo sapien
tttcagttgagtaactcattgtccc

SEQ ID NO: 2185657 - DNA, 25 bp, Homo sapien
gaagcatcatcttggtcacagttat

SEQ ID NO: 2185658 - DNA, 25 bp, Homo sapien
gcagatgctgaagcatcatcttggt

SEQ ID NO: 2185659 - DNA, 25 bp, Homo sapien
ccataactcatttgtgggccagatt

SEQ ID NO: 2185660 - DNA, 25 bp, Homo sapien
aagctgggtaatacactgtctgaga

SEQ ID NO: 2185661 - DNA, 25 bp, Homo sapien
tcgtatttcccgataaagctgggta

SEQ ID NO: 2185662 - DNA, 25 bp, Homo sapien
caaaattagaagtgatgggaagata

SEQ ID NO: 2185663 - DNA, 25 bp, Homo sapien
tctgagagttattttccacgttggt

SEQ ID NO: 2185664 - DNA, 25 bp, Homo sapien
aaaatagggagggatgaagacagat

SEQ ID NO: 2185665 - DNA, 25 bp, Homo sapien
tgtaatttcccattaaagttggata

SEQ ID NO: 2185666 - DNA, 25 bp, Homo sapien
agggatgaagacagataaagaggca

SEQ ID NO: 2185667 - DNA, 25 bp, Homo sapien
ggataattcgctgtctcagtgctgt

SEQ ID NO: 2185668 - DNA, 25 bp, Homo sapien
agattgaagaatgctatctgtaata

SEQ ID NO: 2185669 - DNA, 25 bp, Homo sapien
tagattgaagaatgctatctgtaat

SEQ ID NO: 2185670 - DNA, 25 bp, Homo sapien
ccaaattgggatggaagcagaaaga

SEQ ID NO: 2185671 - DNA, 25 bp, Homo sapien
ggaagcagaaagatgacaaggctct

SEQ ID NO: 2185672 - DNA, 25 bp, Homo sapien
aagcagaaagatgacaaggctctac

SEQ ID NO: 2185673 - DNA, 25 bp, Homo sapien
attgggatggaagcagaaagatgac

SEQ ID NO: 2185674 - DNA, 25 bp, Homo sapien
cagaactgccataggtactgctgta

SEQ ID NO: 2185675 - DNA, 25 bp, Homo sapien
tgacagcattggtactttcagcacc

SEQ ID NO: 2185676 - DNA, 25 bp, Homo sapien
cacaccagggttatttgccagactg

SEQ ID NO: 2185677 - DNA, 25 bp, Homo sapien
gagcagagtaattcaccacaccagg

SEQ ID NO: 2185678 - DNA, 25 bp, Homo sapien
tccgctggtggtgatatgctagact

SEQ ID NO: 2185679 - DNA, 25 bp, Homo sapien
tgggtttcctgcctttccgctggtg

SEQ ID NO: 2185680 - DNA, 25 bp, Homo sapien
gggatatgataaactctcactgagg

SEQ ID NO: 2185681 - DNA, 25 bp, Homo sapien
caccttgtgcgacatactgctgtaa

SEQ ID NO: 2185682 - DNA, 25 bp, Homo sapien
actgggtggtttatctgtgaaacta

SEQ ID NO: 2185683 - DNA, 25 bp, Homo sapien
cttaaatgtactgggtggtttatct

SEQ ID NO: 2185684 - DNA, 25 bp, Homo sapien
aatgtactgggtggtttatctgtga

SEQ ID NO: 2185685 - DNA, 25 bp, Homo sapien
tgtactgggtggtttatctgtgaaa

SEQ ID NO: 2185686 - DNA, 25 bp, Homo sapien
aattgcttgagtccaagaggttgag

SEQ ID NO: 2185687 - DNA, 25 bp, Homo sapien
ccagcctgggtgacagagccagacc

SEQ ID NO: 2185688 - DNA, 25 bp, Homo sapien
gctgcagtgagctgtgatcatgcca

SEQ ID NO: 2185689 - DNA, 25 bp, Homo sapien
ctgggaaggctgaggtggaagaatt

SEQ ID NO: 2185690 - DNA, 25 bp, Homo sapien
gacggtgatggccatcattgccgcc

SEQ ID NO: 2185691 - DNA, 25 bp, Homo sapien
gtcatcagtgggattatctgctgtg

SEQ ID NO: 2185692 - DNA, 25 bp, Homo sapien
catatgacatttggagtggacggtg

SEQ ID NO: 2185693 - DNA, 25 bp, Homo sapien
tatctgctgtgacataagtggaatc

SEQ ID NO: 2185694 - DNA, 25 bp, Homo sapien
ctcaatactgcaatcattgttatca

SEQ ID NO: 2185695 - DNA, 25 bp, Homo sapien
gttatcatcactgtcgtcgacagtt

SEQ ID NO: 2185696 - DNA, 25 bp, Homo sapien
caatactgcaatcattgttatcatc

SEQ ID NO: 2185697 - DNA, 25 bp, Homo sapien
cactgtcgtcgacagttataataac

SEQ ID NO: 2185698 - DNA, 25 bp, Homo sapien
cctgttcctgggtcctctctgacat

SEQ ID NO: 2185699 - DNA, 25 bp, Homo sapien
tgaggcccgagacctgaggcctacg

SEQ ID NO: 2185700 - DNA, 25 bp, Homo sapien
taactgcgtacactcgttgtccgag

SEQ ID NO: 2185701 - DNA, 25 bp, Homo sapien
gaggtaactgcttggtaactgtgtg

SEQ ID NO: 2185702 - DNA, 25 bp, Homo sapien
tctgaggcccgagacctgaggcccg

SEQ ID NO: 2185703 - DNA, 25 bp, Homo sapien
tccaaagggactccgatttcgcagg

SEQ ID NO: 2185704 - DNA, 25 bp, Homo sapien
ggactccgatttcgcaggatctccc

SEQ ID NO: 2185705 - DNA, 25 bp, Homo sapien
aagggactccgatttcgcaggatct

SEQ ID NO: 2185706 - DNA, 25 bp, Homo sapien
ccactccaaagggactccgatttcg

SEQ ID NO: 2185707 - DNA, 25 bp, Homo sapien
tggccaaggtgtgcaacgccatgct

SEQ ID NO: 2185708 - DNA, 25 bp, Homo sapien
tggtcgtcacccgtggcctggagcc

SEQ ID NO: 2185709 - DNA, 25 bp, Homo sapien
gccatgctttcatgaggccctgaga

SEQ ID NO: 2185710 - DNA, 25 bp, Homo sapien
caggcacagtggtcgtcacccgtgg

SEQ ID NO: 2185711 - DNA, 25 bp, Homo sapien
caacccctttcttaaaggctctgag

SEQ ID NO: 2185712 - DNA, 25 bp, Homo sapien
gtgccttgggcaggtctttccctct

SEQ ID NO: 2185713 - DNA, 25 bp, Homo sapien
ggcccagctctgagtgccttgggca

SEQ ID NO: 2185714 - DNA, 25 bp, Homo sapien
tgaggttcttggacggaggaggggc

SEQ ID NO: 2185715 - DNA, 25 bp, Homo sapien
gaccaccggctttctgcagtccaaa

SEQ ID NO: 2185716 - DNA, 25 bp, Homo sapien
gctgagctgtgtcttgactcctgga

SEQ ID NO: 2185717 - DNA, 25 bp, Homo sapien
cgtgggtcctgcaagcgcagttagc

SEQ ID NO: 2185718 - DNA, 25 bp, Homo sapien
ccgtgaatttcagcgtgcatggcca

SEQ ID NO: 2185719 - DNA, 25 bp, Homo sapien
acacaccaggccttgaccttgacct

SEQ ID NO: 2185720 - DNA, 25 bp, Homo sapien
cacaccaggccttgaccttgacctt

SEQ ID NO: 2185721 - DNA, 25 bp, Homo sapien
ctgattctcatagcttataaacatt

SEQ ID NO: 2185722 - DNA, 25 bp, Homo sapien
tcctcttcaaagttctaacttataa

SEQ ID NO: 2185723 - DNA, 25 bp, Homo sapien
tgattctcatagcttataaacatta

SEQ ID NO: 2185724 - DNA, 25 bp, Homo sapien
taaaataaagccccaaacatggctg

SEQ ID NO: 2185725 - DNA, 25 bp, Homo sapien
catatcccctgaagagtaagctgag

SEQ ID NO: 2185726 - DNA, 25 bp, Homo sapien
tactggtgatagcaaacgatggaca

SEQ ID NO: 2185727 - DNA, 25 bp, Homo sapien
catcgtcacctctgtggcagtgcaa

SEQ ID NO: 2185728 - DNA, 25 bp, Homo sapien
aaaagatgatatctacaggtgcacc

SEQ ID NO: 2185729 - DNA, 25 bp, Homo sapien
cagtacacctgagaattatgtccaa

SEQ ID NO: 2185730 - DNA, 25 bp, Homo sapien
cctgagaattatgtccaatctaaac

SEQ ID NO: 2185731 - DNA, 25 bp, Homo sapien
aatgttaacagtacacctgagaatt

SEQ ID NO: 2185732 - DNA, 25 bp, Homo sapien
taacagtacacctgagaattatgtc

SEQ ID NO: 2185733 - DNA, 25 bp, Homo sapien
agcttcagccccatatacttcatca

SEQ ID NO: 2185734 - DNA, 25 bp, Homo sapien
taacacagctttaatgctggcccca

SEQ ID NO: 2185735 - DNA, 25 bp, Homo sapien
tgagtaggaacagagccttcccatc

SEQ ID NO: 2185736 - DNA, 25 bp, Homo sapien
tcatcacatcactcttgagtaggaa

SEQ ID NO: 2185737 - DNA, 25 bp, Homo sapien
gacactgggatcaggtacagctata

SEQ ID NO: 2185738 - DNA, 25 bp, Homo sapien
gggcctgatatctgaggatctgtat

SEQ ID NO: 2185739 - DNA, 25 bp, Homo sapien
gaagccttgtttcaggacactggga

SEQ ID NO: 2185740 - DNA, 25 bp, Homo sapien
tcaggtacagctatataacttggag

SEQ ID NO: 2185741 - DNA, 25 bp, Homo sapien
gaaaaaagacaaatcatacttgacc

SEQ ID NO: 2185742 - DNA, 25 bp, Homo sapien
aaaagacaaatcatacttgacctga

SEQ ID NO: 2185743 - DNA, 25 bp, Homo sapien
gggaaaaaagacaaatcatacttga

SEQ ID NO: 2185744 - DNA, 25 bp, Homo sapien
gacaaatcatacttgacctgatcat

SEQ ID NO: 2185745 - DNA, 25 bp, Homo sapien
tcactcctcaacctcgcctgcatgc

SEQ ID NO: 2185746 - DNA, 25 bp, Homo sapien
ggcacacttcgagaaaaatcctggg

SEQ ID NO: 2185747 - DNA, 25 bp, Homo sapien
gactgaagtatgaatatacatagga

SEQ ID NO: 2185748 - DNA, 25 bp, Homo sapien
gggatatgtccccaactagtggtga

SEQ ID NO: 2185749 - DNA, 25 bp, Homo sapien
taacttcatggggactgctcttggg

SEQ ID NO: 2185750 - DNA, 25 bp, Homo sapien
tcagacgcatactcctttgttttgg

SEQ ID NO: 2185751 - DNA, 25 bp, Homo sapien
cagacgcatactcctttgttttggg

SEQ ID NO: 2185752 - DNA, 25 bp, Homo sapien
acgcatactcctttgttttggggag

SEQ ID NO: 2185753 - DNA, 25 bp, Homo sapien
cttcagacgcatactcctttgtttt

SEQ ID NO: 2185754 - DNA, 25 bp, Homo sapien
tgcctttctgttacatcttcttttg

SEQ ID NO: 2185755 - DNA, 25 bp, Homo sapien
gagaggaacaacatatggtacagtt

SEQ ID NO: 2185756 - DNA, 25 bp, Homo sapien
tgaggagatcgtttggtgctttgcc

SEQ ID NO: 2185757 - DNA, 25 bp, Homo sapien
caacatatggtacagtttgctgagg

SEQ ID NO: 2185758 - DNA, 25 bp, Homo sapien
cattttggatgacctcctacctctc

SEQ ID NO: 2185759 - DNA, 25 bp, Homo sapien
caaaaggttatcacactgcagactg

SEQ ID NO: 2185760 - DNA, 25 bp, Homo sapien
tggaagaactaaaaggctggctact

SEQ ID NO: 2185761 - DNA, 25 bp, Homo sapien
gagctgtgagtatgacccctggaag

SEQ ID NO: 2185762 - DNA, 25 bp, Homo sapien
gagcaaatgatgcactgttcactgg

SEQ ID NO: 2185763 - DNA, 25 bp, Homo sapien
ccagatgagggccaaagtttccatg

SEQ ID NO: 2185764 - DNA, 25 bp, Homo sapien
aggcctgcacaatccggcgaagcac

SEQ ID NO: 2185765 - DNA, 25 bp, Homo sapien
gaagcaccacattcaccgggcccgg

SEQ ID NO: 2185766 - DNA, 25 bp, Homo sapien
cagttttagtttcaagggcacaatc

SEQ ID NO: 2185767 - DNA, 25 bp, Homo sapien
gagaaaaaatgcgtatgcatacata

SEQ ID NO: 2185768 - DNA, 25 bp, Homo sapien
gaaaaaatgcgtatgcatacataac

SEQ ID NO: 2185769 - DNA, 25 bp, Homo sapien
aaaaatgcgtatgcatacataacaa

SEQ ID NO: 2185770 - DNA, 25 bp, Homo sapien
cttgagaaaaaatgcgtatgcatac

SEQ ID NO: 2185771 - DNA, 25 bp, Homo sapien
tctggtcagcgattttagagaagct

SEQ ID NO: 2185772 - DNA, 25 bp, Homo sapien
tacatggcccagaagcgacatcttt

SEQ ID NO: 2185773 - DNA, 25 bp, Homo sapien
tataacatgccacggtctctggtca

SEQ ID NO: 2185774 - DNA, 25 bp, Homo sapien
tgtagaacatatcacgggcaaaggt

SEQ ID NO: 2185775 - DNA, 25 bp, Homo sapien
tatcgatagttatgtgaggctttca

SEQ ID NO: 2185776 - DNA, 25 bp, Homo sapien
ctgagtttcaaactaactagtctga

SEQ ID NO: 2185777 - DNA, 25 bp, Homo sapien
ccctgccccagtttattgaggtata

SEQ ID NO: 2185778 - DNA, 25 bp, Homo sapien
tctaagttttagagttgactccagc

SEQ ID NO: 2185779 - DNA, 25 bp, Homo sapien
actgcattgaatgctggcttgcttc

SEQ ID NO: 2185780 - DNA, 25 bp, Homo sapien
ccaggtggtttaattcgacttgatc

SEQ ID NO: 2185781 - DNA, 25 bp, Homo sapien
tgttggtaatattagagtagttttc

SEQ ID NO: 2185782 - DNA, 25 bp, Homo sapien
gcttgcttcggaaggagaagactct

SEQ ID NO: 2185783 - DNA, 25 bp, Homo sapien
cttttatcaccctttgatctttgat

SEQ ID NO: 2185784 - DNA, 25 bp, Homo sapien
tcatgtccagaatgtcagtccccat

SEQ ID NO: 2185785 - DNA, 25 bp, Homo sapien
tttatcaccctttgatctttgatca

SEQ ID NO: 2185786 - DNA, 25 bp, Homo sapien
tctttgatcatgtccagaatgtcag

SEQ ID NO: 2185787 - DNA, 25 bp, Homo sapien
tccagtgccgacatgcaggagtgaa

SEQ ID NO: 2185788 - DNA, 25 bp, Homo sapien
actctgtcgtccagtgccgacatgc

SEQ ID NO: 2185789 - DNA, 25 bp, Homo sapien
aactcccaggagcaatcatataaca

SEQ ID NO: 2185790 - DNA, 25 bp, Homo sapien
tttcactttagaaagcaggcttttc

SEQ ID NO: 2185791 - DNA, 25 bp, Homo sapien
ctgtcccacagaacccagattgcca

SEQ ID NO: 2185792 - DNA, 25 bp, Homo sapien
tattcagtcaacaactttcaccttt

SEQ ID NO: 2185793 - DNA, 25 bp, Homo sapien
tctgcttggaactttgctccctgtc

SEQ ID NO: 2185794 - DNA, 25 bp, Homo sapien
tggcaacctaagcatatgatttttg

SEQ ID NO: 2185795 - DNA, 25 bp, Homo sapien
acaaagcccatgttgcctgagcaag

SEQ ID NO: 2185796 - DNA, 25 bp, Homo sapien
cctgagcaagcctgaatttctagca

SEQ ID NO: 2185797 - DNA, 25 bp, Homo sapien
ggatagccttgctccttaccaggaa

SEQ ID NO: 2185798 - DNA, 25 bp, Homo sapien
tagacaaagttatccccacctgatc

SEQ ID NO: 2185799 - DNA, 25 bp, Homo sapien
cagacactctgtacgggtctcgtga

SEQ ID NO: 2185800 - DNA, 25 bp, Homo sapien
cacagcagcacatatgttcctttcc

SEQ ID NO: 2185801 - DNA, 25 bp, Homo sapien
gtaaatctgatgagctgtgacagca

SEQ ID NO: 2185802 - DNA, 25 bp, Homo sapien
ccttctgcaagttgccaaggacaca

SEQ ID NO: 2185803 - DNA, 25 bp, Homo sapien
taagcctcagcagttactccatcat

SEQ ID NO: 2185804 - DNA, 25 bp, Homo sapien
gttaggcatatctaagcccttgaaa

SEQ ID NO: 2185805 - DNA, 25 bp, Homo sapien
agagtcaccaaggaacatcaacatg

SEQ ID NO: 2185806 - DNA, 25 bp, Homo sapien
aggttaggcatatctaagcccttga

SEQ ID NO: 2185807 - DNA, 25 bp, Homo sapien
gatacgggttctttttgtcaatagc

SEQ ID NO: 2185808 - DNA, 25 bp, Homo sapien
atatctcgagaatcatacttgcacc

SEQ ID NO: 2185809 - DNA, 25 bp, Homo sapien
tacttgcaccagtaatcaaaagctc

SEQ ID NO: 2185810 - DNA, 25 bp, Homo sapien
ctttaacatctccaatggtcgcagg

SEQ ID NO: 2185811 - DNA, 25 bp, Homo sapien
ctttcgagtgattttttggcccatc

SEQ ID NO: 2185812 - DNA, 25 bp, Homo sapien
aagaaagaggctgctaatgaaattg

SEQ ID NO: 2185813 - DNA, 25 bp, Homo sapien
gaccagtgggttattgtaattgaga

SEQ ID NO: 2185814 - DNA, 25 bp, Homo sapien
tccaatatcaaagggactaacacag

SEQ ID NO: 2185815 - DNA, 25 bp, Homo sapien
atacaaaaaaagtatctgggcatga

SEQ ID NO: 2185816 - DNA, 25 bp, Homo sapien
ttgatctcagacttctagcctccgc

SEQ ID NO: 2185817 - DNA, 25 bp, Homo sapien
caaaaaaagtatctgggcatgatgg

SEQ ID NO: 2185818 - DNA, 25 bp, Homo sapien
aaaaaaagtatctgggcatgatggt

SEQ ID NO: 2185819 - DNA, 25 bp, Homo sapien
catcggccaggaggatgtattcatc

SEQ ID NO: 2185820 - DNA, 25 bp, Homo sapien
catttcagacccatttagtgtcttt

SEQ ID NO: 2185821 - DNA, 25 bp, Homo sapien
cagacccatttagtgtctttaagag

SEQ ID NO: 2185822 - DNA, 25 bp, Homo sapien
aataatgtggcagatgccatttcag

SEQ ID NO: 2185823 - DNA, 25 bp, Homo sapien
aaataaattaggtatcatgaaaaag

SEQ ID NO: 2185824 - DNA, 25 bp, Homo sapien
taaattaggtatcatgaaaaagcct

SEQ ID NO: 2185825 - DNA, 25 bp, Homo sapien
aaattaggtatcatgaaaaagcctc

SEQ ID NO: 2185826 - DNA, 25 bp, Homo sapien
ataaattaggtatcatgaaaaagcc

SEQ ID NO: 2185827 - DNA, 25 bp, Homo sapien
actgaagtggcattgcgagggtcac

SEQ ID NO: 2185828 - DNA, 25 bp, Homo sapien
tgtcactaccatccagtcgtaaccg

SEQ ID NO: 2185829 - DNA, 25 bp, Homo sapien
cttttcacatgtcccaacaggttgt

SEQ ID NO: 2185830 - DNA, 25 bp, Homo sapien
cccagtaattccaataaccgtagca

SEQ ID NO: 2185831 - DNA, 25 bp, Homo sapien
aactttgaaatcattcacaggtgga

SEQ ID NO: 2185832 - DNA, 25 bp, Homo sapien
gaaggagcacttatagacccagtct

SEQ ID NO: 2185833 - DNA, 25 bp, Homo sapien
gagcacttatagacccagtctcttt

SEQ ID NO: 2185834 - DNA, 25 bp, Homo sapien
cacttatagacccagtctctttcaa

SEQ ID NO: 2185835 - DNA, 25 bp, Homo sapien
gacccagtctctttcaaatactcct

SEQ ID NO: 2185836 - DNA, 25 bp, Homo sapien
gtcatagggtgaactgctctgcact

SEQ ID NO: 2185837 - DNA, 25 bp, Homo sapien
ttcaagtaggaacagaaggtcatag

SEQ ID NO: 2185838 - DNA, 25 bp, Homo sapien
gcagggcagatacaacagaaacaca

SEQ ID NO: 2185839 - DNA, 25 bp, Homo sapien
aaacacaaggggcaagaaatctctg

SEQ ID NO: 2185840 - DNA, 25 bp, Homo sapien
tgattctccttcttgacatccatgg

SEQ ID NO: 2185841 - DNA, 25 bp, Homo sapien
ttctcttgattctccttcttgacat

SEQ ID NO: 2185842 - DNA, 25 bp, Homo sapien
gaagatgtacttgactgaggagttt

SEQ ID NO: 2185843 - DNA, 25 bp, Homo sapien
tcttgattctccttcttgacatcca

SEQ ID NO: 2185844 - DNA, 25 bp, Homo sapien
agttcataccaaaggctggacacag

SEQ ID NO: 2185845 - DNA, 25 bp, Homo sapien
caatacctgttgttaaccatctggt

SEQ ID NO: 2185846 - DNA, 25 bp, Homo sapien
taccaccaaattccatatatcgata

SEQ ID NO: 2185847 - DNA, 25 bp, Homo sapien
gaaatgtacaatgaataataaatgc

SEQ ID NO: 2185848 - DNA, 25 bp, Homo sapien
gaatacaactgtagaatttcaacct

SEQ ID NO: 2185849 - DNA, 25 bp, Homo sapien
ccaggttccaggttcagttcaattt

SEQ ID NO: 2185850 - DNA, 25 bp, Homo sapien
tcaactttaggccattggtcagatg

SEQ ID NO: 2185851 - DNA, 25 bp, Homo sapien
agagatttcccaaggcctgtttcaa

SEQ ID NO: 2185852 - DNA, 25 bp, Homo sapien
gcggaaacagacaccaacagcaaag

SEQ ID NO: 2185853 - DNA, 25 bp, Homo sapien
tgatgcggaaacagacaccaacagc

SEQ ID NO: 2185854 - DNA, 25 bp, Homo sapien
gaaacagacaccaacagcaaaggga

SEQ ID NO: 2185855 - DNA, 25 bp, Homo sapien
gatgcggaaacagacaccaacagca

SEQ ID NO: 2185856 - DNA, 25 bp, Homo sapien
atttgcgcccgcacgccgccacagg

SEQ ID NO: 2185857 - DNA, 25 bp, Homo sapien
aggatttgcgcccgcacgccgccac

SEQ ID NO: 2185858 - DNA, 25 bp, Homo sapien
gcaccaggatttgcgcccgcacgcc

SEQ ID NO: 2185859 - DNA, 25 bp, Homo sapien
ggcaccaggatttgcgcccgcacgc

SEQ ID NO: 2185860 - DNA, 25 bp, Homo sapien
gatcgcgcgagccggcaccgagctt

SEQ ID NO: 2185861 - DNA, 25 bp, Homo sapien
aattctgtcccaccgatcgcgcgag

SEQ ID NO: 2185862 - DNA, 25 bp, Homo sapien
ctccagtctcgtcggtgaaaacaac

SEQ ID NO: 2185863 - DNA, 25 bp, Homo sapien
tcggtgaaaacaacgaaattctgtc

SEQ ID NO: 2185864 - DNA, 25 bp, Homo sapien
cgccatgtttgagaagccgcgcgcg

SEQ ID NO: 2185865 - DNA, 25 bp, Homo sapien
ccgccgccatgtttgagaagccgcg

SEQ ID NO: 2185866 - DNA, 25 bp, Homo sapien
ccatgtttgagaagccgcgcgcgga

SEQ ID NO: 2185867 - DNA, 25 bp, Homo sapien
cgcggagccgcgcatgccccgcaac

SEQ ID NO: 2185868 - DNA, 25 bp, Homo sapien
gggtcccttctgcacgctccctttc

SEQ ID NO: 2185869 - DNA, 25 bp, Homo sapien
ccgggcaaggcccatagcgcaagtg

SEQ ID NO: 2185870 - DNA, 25 bp, Homo sapien
agcatccccgagagtgcgttttggg

SEQ ID NO: 2185871 - DNA, 25 bp, Homo sapien
tagcgcaagtggaggtcgcacaaag

SEQ ID NO: 2185872 - DNA, 25 bp, Homo sapien
acggtggcagtggcagtacaatgac

SEQ ID NO: 2185873 - DNA, 25 bp, Homo sapien
cagtgacggtggcagtggcagtaca

SEQ ID NO: 2185874 - DNA, 25 bp, Homo sapien
tgacggtggcagtggcagtacaatg

SEQ ID NO: 2185875 - DNA, 25 bp, Homo sapien
agtgacggtggcagtggcagtacaa

SEQ ID NO: 2185876 - DNA, 25 bp, Homo sapien
gctgggaccattattgaaacagttt

SEQ ID NO: 2185877 - DNA, 25 bp, Homo sapien
atatttcaagccaaccaactgtggg

SEQ ID NO: 2185878 - DNA, 25 bp, Homo sapien
tttgctagttccctggaagctaccc

SEQ ID NO: 2185879 - DNA, 25 bp, Homo sapien
cacacctctgtaaataacccagtaa

SEQ ID NO: 2185880 - DNA, 25 bp, Homo sapien
agctgctgctaccactccaagggct

SEQ ID NO: 2185881 - DNA, 25 bp, Homo sapien
ctagctgctgctaccactccaaggg

SEQ ID NO: 2185882 - DNA, 25 bp, Homo sapien
cctctagctgctgctaccactccaa

SEQ ID NO: 2185883 - DNA, 25 bp, Homo sapien
tctagctgctgctaccactccaagg

SEQ ID NO: 2185884 - DNA, 25 bp, Homo sapien
ctctcctagtggaaacgtgatgtct

SEQ ID NO: 2185885 - DNA, 25 bp, Homo sapien
agtggaaacgtgatgtctgcaagag

SEQ ID NO: 2185886 - DNA, 25 bp, Homo sapien
ccagagatgggatgagcactgacag

SEQ ID NO: 2185887 - DNA, 25 bp, Homo sapien
agcagccagagatgggatgagcact

SEQ ID NO: 2185888 - DNA, 25 bp, Homo sapien
gctgatgcgtgtggaacacctgagg

SEQ ID NO: 2185889 - DNA, 25 bp, Homo sapien
ctttgcattccatgtataccaccta

SEQ ID NO: 2185890 - DNA, 25 bp, Homo sapien
tataccacctatgtgggcattttta

SEQ ID NO: 2185891 - DNA, 25 bp, Homo sapien
taatacagacttgtaaaccagtgtg

SEQ ID NO: 2185892 - DNA, 25 bp, Homo sapien
ccccggaactgcagctactagatgg

SEQ ID NO: 2185893 - DNA, 25 bp, Homo sapien
tccccggaactgcagctactagatg

SEQ ID NO: 2185894 - DNA, 25 bp, Homo sapien
cttccccggaactgcagctactaga

SEQ ID NO: 2185895 - DNA, 25 bp, Homo sapien
ttccccggaactgcagctactagat

SEQ ID NO: 2185896 - DNA, 25 bp, Homo sapien
aaacaccactgtcttcaggccagcc

SEQ ID NO: 2185897 - DNA, 25 bp, Homo sapien
taaggctaatcaagggaaacagtgg

SEQ ID NO: 2185898 - DNA, 25 bp, Homo sapien
tgtaaacaccactgtcttcaggcca

SEQ ID NO: 2185899 - DNA, 25 bp, Homo sapien
aatcaagggaaacagtgggagtgaa

SEQ ID NO: 2185900 - DNA, 25 bp, Homo sapien
ggtcactagtcccaaaatatcagca

SEQ ID NO: 2185901 - DNA, 25 bp, Homo sapien
ttagacatcatcctcgccagggctg

SEQ ID NO: 2185902 - DNA, 25 bp, Homo sapien
aatatcagcacgagatgaaattgtt

SEQ ID NO: 2185903 - DNA, 25 bp, Homo sapien
cagattcgtctgagagtagtgacac

SEQ ID NO: 2185904 - DNA, 25 bp, Homo sapien
tgcacggattcattctgcaggaaga

SEQ ID NO: 2185905 - DNA, 25 bp, Homo sapien
gcacggattcattctgcaggaagag

SEQ ID NO: 2185906 - DNA, 25 bp, Homo sapien
cacggattcattctgcaggaagagc

SEQ ID NO: 2185907 - DNA, 25 bp, Homo sapien
ctgcacggattcattctgcaggaag

SEQ ID NO: 2185908 - DNA, 25 bp, Homo sapien
ggcatgactcagtgaaatggactcc

SEQ ID NO: 2185909 - DNA, 25 bp, Homo sapien
tagatccacaaagaaggcatgactc

SEQ ID NO: 2185910 - DNA, 25 bp, Homo sapien
ccacaaagaaggcatgactcagtga

SEQ ID NO: 2185911 - DNA, 25 bp, Homo sapien
gaaggcatgactcagtgaaatggac

SEQ ID NO: 2185912 - DNA, 25 bp, Homo sapien
tttgtactggttgggcgatgacttc

SEQ ID NO: 2185913 - DNA, 25 bp, Homo sapien
ccatggtgggtattaagatctttac

SEQ ID NO: 2185914 - DNA, 25 bp, Homo sapien
cctccttggaaacccgatccatggt

SEQ ID NO: 2185915 - DNA, 25 bp, Homo sapien
ttacatttgtactggttgggcgatg

SEQ ID NO: 2185916 - DNA, 25 bp, Homo sapien
aagcggaggtgtgggtcgttgctgc

SEQ ID NO: 2185917 - DNA, 25 bp, Homo sapien
gctgcaacagctctttgcacgcgcc

SEQ ID NO: 2185918 - DNA, 25 bp, Homo sapien
acagctctttgcacgcgcccagctg

SEQ ID NO: 2185919 - DNA, 25 bp, Homo sapien
cgaagcggaggtgtgggtcgttgct

SEQ ID NO: 2185920 - DNA, 25 bp, Homo sapien
tcgattagttgtctctgccgctggg

SEQ ID NO: 2185921 - DNA, 25 bp, Homo sapien
agcggcgacggcgtcctcaggagct

SEQ ID NO: 2185922 - DNA, 25 bp, Homo sapien
cagttagcaaaataggctgcgcgtt

SEQ ID NO: 2185923 - DNA, 25 bp, Homo sapien
tgctttcccattggtccgaacgggc

SEQ ID NO: 2185924 - DNA, 25 bp, Homo sapien
ctgcccgcgagggtgggctagcgac

SEQ ID NO: 2185925 - DNA, 25 bp, Homo sapien
tgcccgagttcggagggagcccgag

SEQ ID NO: 2185926 - DNA, 25 bp, Homo sapien
ccccggacaagtttcaggcgatgct

SEQ ID NO: 2185927 - DNA, 25 bp, Homo sapien
ggcttgcggcgaggtaagccccttc

SEQ ID NO: 2185928 - DNA, 25 bp, Homo sapien
cttttggaccctcatagaaatcgga

SEQ ID NO: 2185929 - DNA, 25 bp, Homo sapien
gaccctcatagaaatcggattctgg

SEQ ID NO: 2185930 - DNA, 25 bp, Homo sapien
ttggaaccgtctcccagaacgaaca

SEQ ID NO: 2185931 - DNA, 25 bp, Homo sapien
tcggattctgggatttggaaccgtc

SEQ ID NO: 2185932 - DNA, 25 bp, Homo sapien
cagactggattgtgatgggatttgc

SEQ ID NO: 2185933 - DNA, 25 bp, Homo sapien
taacatgcaaggtactgtaactgcc

SEQ ID NO: 2185934 - DNA, 25 bp, Homo sapien
ctaatgcgcgtgtcgtagagcaggc

SEQ ID NO: 2185935 - DNA, 25 bp, Homo sapien
gggatttgcaaacagcttaacatgc

SEQ ID NO: 2185936 - DNA, 25 bp, Homo sapien
tcactattgtcttaagggtagaagt

SEQ ID NO: 2185937 - DNA, 25 bp, Homo sapien
tttcactattgtcttaagggtagaa

SEQ ID NO: 2185938 - DNA, 25 bp, Homo sapien
cactattgtcttaagggtagaagta

SEQ ID NO: 2185939 - DNA, 25 bp, Homo sapien
tcaatgtggaatcctacccctctcc

SEQ ID NO: 2185940 - DNA, 25 bp, Homo sapien
ccagctgtactctccaacaggcgag

SEQ ID NO: 2185941 - DNA, 25 bp, Homo sapien
ggtgtccagctgtactctccaacag

SEQ ID NO: 2185942 - DNA, 25 bp, Homo sapien
tttggtgtccagctgtactctccaa

SEQ ID NO: 2185943 - DNA, 25 bp, Homo sapien
tgtactctccaacaggcgagcacat

SEQ ID NO: 2185944 - DNA, 25 bp, Homo sapien
gtaagcttatccaacccgcggtctg

SEQ ID NO: 2185945 - DNA, 25 bp, Homo sapien
gaaaggatttcagtcgcagctgcaa

SEQ ID NO: 2185946 - DNA, 25 bp, Homo sapien
tggaaataaagtgctgccgggcttc

SEQ ID NO: 2185947 - DNA, 25 bp, Homo sapien
gccgggcttccatatcacagcatat

SEQ ID NO: 2185948 - DNA, 25 bp, Homo sapien
tttgcagagggcattggcttgcttg

SEQ ID NO: 2185949 - DNA, 25 bp, Homo sapien
tccgcatttgcagagggcattggct

SEQ ID NO: 2185950 - DNA, 25 bp, Homo sapien
ggagctctccgcatttgcagagggc

SEQ ID NO: 2185951 - DNA, 25 bp, Homo sapien
cccagggagctctccgcatttgcag

SEQ ID NO: 2185952 - DNA, 25 bp, Homo sapien
cgtattgaagtatggttcttactca

SEQ ID NO: 2185953 - DNA, 25 bp, Homo sapien
cagatctcgtattgaagtatggttc

SEQ ID NO: 2185954 - DNA, 25 bp, Homo sapien
ttagtgctcagatctcgtattgaag

SEQ ID NO: 2185955 - DNA, 25 bp, Homo sapien
gtagtgctttggagattagtgctca

SEQ ID NO: 2185956 - DNA, 25 bp, Homo sapien
catctctgttgcctctacctttatt

SEQ ID NO: 2185957 - DNA, 25 bp, Homo sapien
tctctgttgcctctacctttattaa

SEQ ID NO: 2185958 - DNA, 25 bp, Homo sapien
agaagtttatcacttgtggtatgac

SEQ ID NO: 2185959 - DNA, 25 bp, Homo sapien
tgtggtatgactgttctccttaaaa

SEQ ID NO: 2185960 - DNA, 25 bp, Homo sapien
ttaaatataggaacacattttctca

SEQ ID NO: 2185961 - DNA, 25 bp, Homo sapien
taaatataggaacacattttctcat

SEQ ID NO: 2185962 - DNA, 25 bp, Homo sapien
cttaaatataggaacacattttctc

SEQ ID NO: 2185963 - DNA, 25 bp, Homo sapien
ttctctctatcagattctggattcc

SEQ ID NO: 2185964 - DNA, 25 bp, Homo sapien
tgaatgtgtagggtttattctctct

SEQ ID NO: 2185965 - DNA, 25 bp, Homo sapien
agctgattaggagacctggagatga

SEQ ID NO: 2185966 - DNA, 25 bp, Homo sapien
cagctgattaggagacctggagatg

SEQ ID NO: 2185967 - DNA, 25 bp, Homo sapien
tcagggagtcatttaatacttcatg

SEQ ID NO: 2185968 - DNA, 25 bp, Homo sapien
cttcatgattagaacaaatatgtga

SEQ ID NO: 2185969 - DNA, 25 bp, Homo sapien
tcttactgcacagctttctgagaag

SEQ ID NO: 2185970 - DNA, 25 bp, Homo sapien
ttcttccttcagacggttttggatc

SEQ ID NO: 2185971 - DNA, 25 bp, Homo sapien
ttgttgccagtgtatagaaatatta

SEQ ID NO: 2185972 - DNA, 25 bp, Homo sapien
ccgcacctcgctgctattttaaatg

SEQ ID NO: 2185973 - DNA, 25 bp, Homo sapien
tttgttgccagtgtatagaaatatt

SEQ ID NO: 2185974 - DNA, 25 bp, Homo sapien
ccaccgcacctcgctgctattttaa

SEQ ID NO: 2185975 - DNA, 25 bp, Homo sapien
cttcagtattgggttggctgttttg

SEQ ID NO: 2185976 - DNA, 25 bp, Homo sapien
ttgggcctttcaatacaccctttga

SEQ ID NO: 2185977 - DNA, 25 bp, Homo sapien
tatcttaaaggggagtagtagtatc

SEQ ID NO: 2185978 - DNA, 25 bp, Homo sapien
gactttagtttgtcaatattcacag

SEQ ID NO: 2185979 - DNA, 25 bp, Homo sapien
ggcaccaattagagacagatcaact

SEQ ID NO: 2185980 - DNA, 25 bp, Homo sapien
gagaacctctaccttactacggtga

SEQ ID NO: 2185981 - DNA, 25 bp, Homo sapien
ttgtcttggagacctgagaacctct

SEQ ID NO: 2185982 - DNA, 25 bp, Homo sapien
gtccacgcgtataaggaaccttgtc

SEQ ID NO: 2185983 - DNA, 25 bp, Homo sapien
ggttaattcagagaaatacttcata

SEQ ID NO: 2185984 - DNA, 25 bp, Homo sapien
ccaaaatgtagcataggtgtgttat

SEQ ID NO: 2185985 - DNA, 25 bp, Homo sapien
cctcattagtagagagggtagtgag

SEQ ID NO: 2185986 - DNA, 25 bp, Homo sapien
tagttagtctttgacctctggaaac

SEQ ID NO: 2185987 - DNA, 25 bp, Homo sapien
gaagtgagtattatacttctactaa

SEQ ID NO: 2185988 - DNA, 25 bp, Homo sapien
tctactaaagggagttgaattgtgg

SEQ ID NO: 2185989 - DNA, 25 bp, Homo sapien
atacatttgtgatatgaagtgagta

SEQ ID NO: 2185990 - DNA, 25 bp, Homo sapien
tatacttctactaaagggagttgaa

SEQ ID NO: 2185991 - DNA, 25 bp, Homo sapien
tgtaacagtatgaaccttgctcaac

SEQ ID NO: 2185992 - DNA, 25 bp, Homo sapien
ttgaggccccagcagtagcctctag

SEQ ID NO: 2185993 - DNA, 25 bp, Homo sapien
agtagcctctagacatgatccttgg

SEQ ID NO: 2185994 - DNA, 25 bp, Homo sapien
tggtagcagacgagatgcagcatct

SEQ ID NO: 2185995 - DNA, 25 bp, Homo sapien
actgtcccggagactcttggctgat

SEQ ID NO: 2185996 - DNA, 25 bp, Homo sapien
tgtctgcagatcttgcaaaccatct

SEQ ID NO: 2185997 - DNA, 25 bp, Homo sapien
tatgctcctgaatattgtccactgt

SEQ ID NO: 2185998 - DNA, 25 bp, Homo sapien
aaaccatctctatgctcctgaatat

SEQ ID NO: 2185999 - DNA, 25 bp, Homo sapien
aaaaagatgcttatcgtcccggaga

SEQ ID NO: 2186000 - DNA, 25 bp, Homo sapien
tctttggtcaccgatcgagtcaggc

SEQ ID NO: 2186001 - DNA, 25 bp, Homo sapien
aaattgtaatagtcggcacgctgga

SEQ ID NO: 2186002 - DNA, 25 bp, Homo sapien
tgtaagtaagttctccagcacggct

SEQ ID NO: 2186003 - DNA, 25 bp, Homo sapien
caggccgtcccaatcttgagcactg

SEQ ID NO: 2186004 - DNA, 25 bp, Homo sapien
tgatgtgactgccaggccgtcccaa

SEQ ID NO: 2186005 - DNA, 25 bp, Homo sapien
cttgagcactgtggtccttcgtgtt

SEQ ID NO: 2186006 - DNA, 25 bp, Homo sapien
cgtgtttgaactgcgaacagctcca

SEQ ID NO: 2186007 - DNA, 25 bp, Homo sapien
tcatcatttagggtaacaccaaccg

SEQ ID NO: 2186008 - DNA, 25 bp, Homo sapien
cagtttcatcatttagggtaacacc

SEQ ID NO: 2186009 - DNA, 25 bp, Homo sapien
atcatttagggtaacaccaaccgag

SEQ ID NO: 2186010 - DNA, 25 bp, Homo sapien
tttcatcatttagggtaacaccaac

SEQ ID NO: 2186011 - DNA, 25 bp, Homo sapien
ttccaatgtgaaatcccagctggct

SEQ ID NO: 2186012 - DNA, 25 bp, Homo sapien
gaggactcacatgccccaatttcaa

SEQ ID NO: 2186013 - DNA, 25 bp, Homo sapien
tctttgcaatgatggacaagttagt

SEQ ID NO: 2186014 - DNA, 25 bp, Homo sapien
gaagtattgagcagtttccaatgtg

SEQ ID NO: 2186015 - DNA, 25 bp, Homo sapien
catttgtcacgtatagcctctcagg

SEQ ID NO: 2186016 - DNA, 25 bp, Homo sapien
gaaacttaactaggaggagctgctc

SEQ ID NO: 2186017 - DNA, 25 bp, Homo sapien
caaataagggtctctgttcaggcat

SEQ ID NO: 2186018 - DNA, 25 bp, Homo sapien
tgtagaacgtccagaaggccaatct

SEQ ID NO: 2186019 - DNA, 25 bp, Homo sapien
agctccatccggatggcaatgcgga

SEQ ID NO: 2186020 - DNA, 25 bp, Homo sapien
cccagcgggatgaggcggatgaagc

SEQ ID NO: 2186021 - DNA, 25 bp, Homo sapien
gcaggttctgaaccgtggaggtgcg

SEQ ID NO: 2186022 - DNA, 25 bp, Homo sapien
aggtgcggtccgagttgccatagaa

SEQ ID NO: 2186023 - DNA, 25 bp, Homo sapien
taaatccagttcaggcgctcatcgg

SEQ ID NO: 2186024 - DNA, 25 bp, Homo sapien
tgtaaccactggctactgtcctgga

SEQ ID NO: 2186025 - DNA, 25 bp, Homo sapien
gtcacagcgcccctgggtgaggatc

SEQ ID NO: 2186026 - DNA, 25 bp, Homo sapien
catcggtcctgtactgcacgctgta

SEQ ID NO: 2186027 - DNA, 25 bp, Homo sapien
tgggctgcagtctgagccttgtctc

SEQ ID NO: 2186028 - DNA, 25 bp, Homo sapien
gcatgtctgcaaaaagcccgcaggt

SEQ ID NO: 2186029 - DNA, 25 bp, Homo sapien
tgtctgcaaaaagcccgcaggtgct

SEQ ID NO: 2186030 - DNA, 25 bp, Homo sapien
gagtcaccgagagactccccctgtg

SEQ ID NO: 2186031 - DNA, 25 bp, Homo sapien
tttgcagtccacgaagaataccagc

SEQ ID NO: 2186032 - DNA, 25 bp, Homo sapien
caaagccttgactgttgagccgggc

SEQ ID NO: 2186033 - DNA, 25 bp, Homo sapien
gcccacatactgctccgggttagag

SEQ ID NO: 2186034 - DNA, 25 bp, Homo sapien
ccctgactcgaaacccagaggcttg

SEQ ID NO: 2186035 - DNA, 25 bp, Homo sapien
tcactactcacgcaagaaaggaatg

SEQ ID NO: 2186036 - DNA, 25 bp, Homo sapien
tctctgtggttcacaatgggtacag

SEQ ID NO: 2186037 - DNA, 25 bp, Homo sapien
aaaggaattgccatagagactcaac

SEQ ID NO: 2186038 - DNA, 25 bp, Homo sapien
caatgggtacagctgtgtcttcaac

SEQ ID NO: 2186039 - DNA, 25 bp, Homo sapien
ccgaggactgagtgcctgcggactc

SEQ ID NO: 2186040 - DNA, 25 bp, Homo sapien
gctggggatcccgaggactgagtgc

SEQ ID NO: 2186041 - DNA, 25 bp, Homo sapien
gggatcccgaggactgagtgcctgc

SEQ ID NO: 2186042 - DNA, 25 bp, Homo sapien
atcccgaggactgagtgcctgcgga

SEQ ID NO: 2186043 - DNA, 25 bp, Homo sapien
caagcccgagcgatcagggggaggg

SEQ ID NO: 2186044 - DNA, 25 bp, Homo sapien
caggtggcagggatttttcatgggc

SEQ ID NO: 2186045 - DNA, 25 bp, Homo sapien
ctgggaagacaagcccgagcgatca

SEQ ID NO: 2186046 - DNA, 25 bp, Homo sapien
gatttttcatgggcaaaattctaac

SEQ ID NO: 2186047 - DNA, 25 bp, Homo sapien
tttgagcatttgatgactgaacctc

SEQ ID NO: 2186048 - DNA, 25 bp, Homo sapien
cactttgagcatttgatgactgaac

SEQ ID NO: 2186049 - DNA, 25 bp, Homo sapien
tgagcatttgatgactgaacctcct

SEQ ID NO: 2186050 - DNA, 25 bp, Homo sapien
tccactttgagcatttgatgactga

SEQ ID NO: 2186051 - DNA, 25 bp, Homo sapien
ccccgctcagggctactagctctga

SEQ ID NO: 2186052 - DNA, 25 bp, Homo sapien
gccgccccgctcagggctactagct

SEQ ID NO: 2186053 - DNA, 25 bp, Homo sapien
cgctcagggctactagctctgagag

SEQ ID NO: 2186054 - DNA, 25 bp, Homo sapien
gccgccgccccgctcagggctacta

SEQ ID NO: 2186055 - DNA, 25 bp, Homo sapien
tcttcccaaatagctcatctaacac

SEQ ID NO: 2186056 - DNA, 25 bp, Homo sapien
tggccagggccaatggccttgacag

SEQ ID NO: 2186057 - DNA, 25 bp, Homo sapien
ggtacctggccagggccaatggcct

SEQ ID NO: 2186058 - DNA, 25 bp, Homo sapien
tccagagcggtctgtagccctgcag

SEQ ID NO: 2186059 - DNA, 25 bp, Homo sapien
gtccagacgtggatgctgtacttac

SEQ ID NO: 2186060 - DNA, 25 bp, Homo sapien
taaagacccgtgtgtccagacgtgg

SEQ ID NO: 2186061 - DNA, 25 bp, Homo sapien
cagcagagaatgtgtggctcactct

SEQ ID NO: 2186062 - DNA, 25 bp, Homo sapien
gtgtggctcactctgcgatctaaag

SEQ ID NO: 2186063 - DNA, 25 bp, Homo sapien
tgtctgggagccgatgcctgcctcc

SEQ ID NO: 2186064 - DNA, 25 bp, Homo sapien
gaaggtgacgctctcactgtcacct

SEQ ID NO: 2186065 - DNA, 25 bp, Homo sapien
ggtgacgctctcactgtcaccttgg

SEQ ID NO: 2186066 - DNA, 25 bp, Homo sapien
tctgggagccgatgcctgcctcccg

SEQ ID NO: 2186067 - DNA, 25 bp, Homo sapien
actgccctctgaatattttccagga

SEQ ID NO: 2186068 - DNA, 25 bp, Homo sapien
tgccctctgaatattttccaggaga

SEQ ID NO: 2186069 - DNA, 25 bp, Homo sapien
tctgaatattttccaggagaatact

SEQ ID NO: 2186070 - DNA, 25 bp, Homo sapien
tccactgccctctgaatattttcca

SEQ ID NO: 2186071 - DNA, 25 bp, Homo sapien
caaaccgagcccttcatcgtccaat

SEQ ID NO: 2186072 - DNA, 25 bp, Homo sapien
tcatcgtccaatctccagtcctgct

SEQ ID NO: 2186073 - DNA, 25 bp, Homo sapien
aaagaagcctcacactccgtgcgtc

SEQ ID NO: 2186074 - DNA, 25 bp, Homo sapien
cagtcctgctccctatccagtactc

SEQ ID NO: 2186075 - DNA, 25 bp, Homo sapien
cgatttcattgaaagttagatccca

SEQ ID NO: 2186076 - DNA, 25 bp, Homo sapien
aaagttagatcccatcgtactatcc

SEQ ID NO: 2186077 - DNA, 25 bp, Homo sapien
tcattcatcgatttcattgaaagtt

SEQ ID NO: 2186078 - DNA, 25 bp, Homo sapien
gttagatcccatcgtactatcccag

SEQ ID NO: 2186079 - DNA, 25 bp, Homo sapien
gtcctccttggcaatcgcacttgca

SEQ ID NO: 2186080 - DNA, 25 bp, Homo sapien
agaccacagagcattgggtcctcct

SEQ ID NO: 2186081 - DNA, 25 bp, Homo sapien
cttggcaatcgcacttgcatgcttt

SEQ ID NO: 2186082 - DNA, 25 bp, Homo sapien
tgcagaccacagagcattgggtcct

SEQ ID NO: 2186083 - DNA, 25 bp, Homo sapien
tcggtagacgataatcccaatgtgg

SEQ ID NO: 2186084 - DNA, 25 bp, Homo sapien
ctcggtagacgataatcccaatgtg

SEQ ID NO: 2186085 - DNA, 25 bp, Homo sapien
ctgctaaagagagacttgtctcttt

SEQ ID NO: 2186086 - DNA, 25 bp, Homo sapien
gtgaggtgcaaacctgatgccgcca

SEQ ID NO: 2186087 - DNA, 25 bp, Homo sapien
acgctttggcgggtccctgttgcca

SEQ ID NO: 2186088 - DNA, 25 bp, Homo sapien
cactctcctgcgcaaaacgctttgg

SEQ ID NO: 2186089 - DNA, 25 bp, Homo sapien
tttcactgtaatgaggagacactgc

SEQ ID NO: 2186090 - DNA, 25 bp, Homo sapien
tatttcactgtaatgaggagacact

SEQ ID NO: 2186091 - DNA, 25 bp, Homo sapien
cttatttcactgtaatgaggagaca

SEQ ID NO: 2186092 - DNA, 25 bp, Homo sapien
tcactgtaatgaggagacactgcca

SEQ ID NO: 2186093 - DNA, 25 bp, Homo sapien
taataacaaaaagccttctatcttg

SEQ ID NO: 2186094 - DNA, 25 bp, Homo sapien
aaaagccttctatcttgcgtgacat

SEQ ID NO: 2186095 - DNA, 25 bp, Homo sapien
aacaaaaagccttctatcttgcgtg

SEQ ID NO: 2186096 - DNA, 25 bp, Homo sapien
caaaaagccttctatcttgcgtgac

SEQ ID NO: 2186097 - DNA, 25 bp, Homo sapien
gtcctcggccaaagctctaccttac

SEQ ID NO: 2186098 - DNA, 25 bp, Homo sapien
cgtcctcggccaaagctctacctta

SEQ ID NO: 2186099 - DNA, 25 bp, Homo sapien
ctcgtcctcggccaaagctctacct

SEQ ID NO: 2186100 - DNA, 25 bp, Homo sapien
ccctcgtcctcggccaaagctctac

SEQ ID NO: 2186101 - DNA, 25 bp, Homo sapien
ttaatcagagtcataatcatgaccg

SEQ ID NO: 2186102 - DNA, 25 bp, Homo sapien
tcagagtcataatcatgaccgacct

SEQ ID NO: 2186103 - DNA, 25 bp, Homo sapien
tcatgaccgacctttaataattcac

SEQ ID NO: 2186104 - DNA, 25 bp, Homo sapien
tcataatcatgaccgacctttaata

SEQ ID NO: 2186105 - DNA, 25 bp, Homo sapien
cgagcgcccgattttccgaggcgta

SEQ ID NO: 2186106 - DNA, 25 bp, Homo sapien
cttgctggcttgcaggcaaagggca

SEQ ID NO: 2186107 - DNA, 25 bp, Homo sapien
aaagcgctgctgtattgcctgccac

SEQ ID NO: 2186108 - DNA, 25 bp, Homo sapien
gggtggccggcccttgctggcttgc

SEQ ID NO: 2186109 - DNA, 25 bp, Homo sapien
cgtgtaaagcagacgtgataaccac

SEQ ID NO: 2186110 - DNA, 25 bp, Homo sapien
tgcgtgtaaagcagacgtgataacc

SEQ ID NO: 2186111 - DNA, 25 bp, Homo sapien
cgaacccaggaccttctgcgtgtaa

SEQ ID NO: 2186112 - DNA, 25 bp, Homo sapien
tgtaaagcagacgtgataaccacta

SEQ ID NO: 2186113 - DNA, 25 bp, Homo sapien
gcgtttgggcggcttgtcttccctg

SEQ ID NO: 2186114 - DNA, 25 bp, Homo sapien
cccgaggcgaggagtttgcggcggc

SEQ ID NO: 2186115 - DNA, 25 bp, Homo sapien
gcggcttcgagtctcgggctccggc

SEQ ID NO: 2186116 - DNA, 25 bp, Homo sapien
ttccctgcccgccacagtcgcggcc

SEQ ID NO: 2186117 - DNA, 25 bp, Homo sapien
ttcgtcaccaccctaggattgctca

SEQ ID NO: 2186118 - DNA, 25 bp, Homo sapien
caggtggatcttcgtcaccacccta

SEQ ID NO: 2186119 - DNA, 25 bp, Homo sapien
ttcttgtttttcatcgtcagtgtca

SEQ ID NO: 2186120 - DNA, 25 bp, Homo sapien
tcatcgtcagtgtcatttgccttct

SEQ ID NO: 2186121 - DNA, 25 bp, Homo sapien
gccaggaatgatgtccaaatctcac

SEQ ID NO: 2186122 - DNA, 25 bp, Homo sapien
taaaggacaccagatggctcacagg

SEQ ID NO: 2186123 - DNA, 25 bp, Homo sapien
tcacaccagtgttggagcccagaat

SEQ ID NO: 2186124 - DNA, 25 bp, Homo sapien
tgccactaaccttggcagtagatgg

SEQ ID NO: 2186125 - DNA, 25 bp, Homo sapien
gacaactcgaagcaagggggaggag

SEQ ID NO: 2186126 - DNA, 25 bp, Homo sapien
cgtggcttccgggttataggtagat

SEQ ID NO: 2186127 - DNA, 25 bp, Homo sapien
ggacaactcgaagcaagggggagga

SEQ ID NO: 2186128 - DNA, 25 bp, Homo sapien
gcgtggcttccgggttataggtaga

SEQ ID NO: 2186129 - DNA, 25 bp, Homo sapien
gcaagaaatagtcctctcatccagg

SEQ ID NO: 2186130 - DNA, 25 bp, Homo sapien
tgaagatctaggagtctgttcccct

SEQ ID NO: 2186131 - DNA, 25 bp, Homo sapien
caggtcaggctgaaagagtcaacaa

SEQ ID NO: 2186132 - DNA, 25 bp, Homo sapien
ctgtgtggacctgatcaaacctcga

SEQ ID NO: 2186133 - DNA, 25 bp, Homo sapien
ccaattcccagtgctttaacatgag

SEQ ID NO: 2186134 - DNA, 25 bp, Homo sapien
cagagaacctcatgatggtcttgca

SEQ ID NO: 2186135 - DNA, 25 bp, Homo sapien
ttcttggaatggcagattgtagctc

SEQ ID NO: 2186136 - DNA, 25 bp, Homo sapien
gtctagatcagttttgcccaattcc

SEQ ID NO: 2186137 - DNA, 25 bp, Homo sapien
gattattgcaggagcctcctcattg

SEQ ID NO: 2186138 - DNA, 25 bp, Homo sapien
tcctggattattgcaggagcctcct

SEQ ID NO: 2186139 - DNA, 25 bp, Homo sapien
ctggattattgcaggagcctcctca

SEQ ID NO: 2186140 - DNA, 25 bp, Homo sapien
tattgcaggagcctcctcattggtc

SEQ ID NO: 2186141 - DNA, 25 bp, Homo sapien
gccaccgtagggtatattgaaaatc

SEQ ID NO: 2186142 - DNA, 25 bp, Homo sapien
tttcaagtccattgtccctctaaga

SEQ ID NO: 2186143 - DNA, 25 bp, Homo sapien
caagcagtctttactgccaccgtag

SEQ ID NO: 2186144 - DNA, 25 bp, Homo sapien
aatccctgtgaactcggaccgtcct

SEQ ID NO: 2186145 - DNA, 25 bp, Homo sapien
ctgagcgagcctcataaggtgtctg

SEQ ID NO: 2186146 - DNA, 25 bp, Homo sapien
agaagtctcactgggacagccgcac

SEQ ID NO: 2186147 - DNA, 25 bp, Homo sapien
cagaagtctcactgggacagccgca

SEQ ID NO: 2186148 - DNA, 25 bp, Homo sapien
ctggcagatggcagatatagaaaat

SEQ ID NO: 2186149 - DNA, 25 bp, Homo sapien
tctggcagatggcagatatagaaaa

SEQ ID NO: 2186150 - DNA, 25 bp, Homo sapien
tttcaggtgaccctagagcctccat

SEQ ID NO: 2186151 - DNA, 25 bp, Homo sapien
tgtgagtatgagaacccctgaggcc

SEQ ID NO: 2186152 - DNA, 25 bp, Homo sapien
gagggtgattcatcatgatagcgac

SEQ ID NO: 2186153 - DNA, 25 bp, Homo sapien
tgaggccagagggtgattcatcatg

SEQ ID NO: 2186154 - DNA, 25 bp, Homo sapien
catatggtttatcccggagaatgct

SEQ ID NO: 2186155 - DNA, 25 bp, Homo sapien
tgcacttcagaagactatatatttc

SEQ ID NO: 2186156 - DNA, 25 bp, Homo sapien
ggtaatatcattgacttgagatctt

SEQ ID NO: 2186157 - DNA, 25 bp, Homo sapien
tgtggtcagcgaacacatgctttgc

SEQ ID NO: 2186158 - DNA, 25 bp, Homo sapien
tatctaagcactacttcatatgttt

SEQ ID NO: 2186159 - DNA, 25 bp, Homo sapien
acatccagcctttttccaatctttt

SEQ ID NO: 2186160 - DNA, 25 bp, Homo sapien
agtaccaattcgctattttgtggaa

SEQ ID NO: 2186161 - DNA, 25 bp, Homo sapien
ccaattcgctattttgtggaaaaat

SEQ ID NO: 2186162 - DNA, 25 bp, Homo sapien
aaaccactgcgatcacaatctatat

SEQ ID NO: 2186163 - DNA, 25 bp, Homo sapien
tgtatcacccaaaaaaccactgcga

SEQ ID NO: 2186164 - DNA, 25 bp, Homo sapien
actcggcaggatagtatttagcctc

SEQ ID NO: 2186165 - DNA, 25 bp, Homo sapien
cggcaggatagtatttagcctcagc

SEQ ID NO: 2186166 - DNA, 25 bp, Homo sapien
caactcggcaggatagtatttagcc

SEQ ID NO: 2186167 - DNA, 25 bp, Homo sapien
ttgatctgtgcagatctggcagttg

SEQ ID NO: 2186168 - DNA, 25 bp, Homo sapien
ttgacccacggtcagctcagctctc

SEQ ID NO: 2186169 - DNA, 25 bp, Homo sapien
aagtccacttgacccacggtcagct

SEQ ID NO: 2186170 - DNA, 25 bp, Homo sapien
tagaggtaggatacacagtgagagc

SEQ ID NO: 2186171 - DNA, 25 bp, Homo sapien
cctgcctgaaagtgatgccctattc

SEQ ID NO: 2186172 - DNA, 25 bp, Homo sapien
agaaacattgctgtgtggttagaaa

SEQ ID NO: 2186173 - DNA, 25 bp, Homo sapien
aaacattgctgtgtggttagaaaaa

SEQ ID NO: 2186174 - DNA, 25 bp, Homo sapien
gaaacattgctgtgtggttagaaaa

SEQ ID NO: 2186175 - DNA, 25 bp, Homo sapien
ctttcagaacgcaacagggtccaga

SEQ ID NO: 2186176 - DNA, 25 bp, Homo sapien
cattccacagtatgaggtgaaccca

SEQ ID NO: 2186177 - DNA, 25 bp, Homo sapien
caagtgaataccagtcagaagccaa

SEQ ID NO: 2186178 - DNA, 25 bp, Homo sapien
tgcggtggcccttgaaacgaaggat

SEQ ID NO: 2186179 - DNA, 25 bp, Homo sapien
gacctagaggggctggactgccata

SEQ ID NO: 2186180 - DNA, 25 bp, Homo sapien
tcattgacctagaggggctggactg

SEQ ID NO: 2186181 - DNA, 25 bp, Homo sapien
ccatagcgggatcgcagcccctgat

SEQ ID NO: 2186182 - DNA, 25 bp, Homo sapien
ctggactgccatagcgggatcgcag

SEQ ID NO: 2186183 - DNA, 25 bp, Homo sapien
ccctgcaaatctcctaaagggagaa

SEQ ID NO: 2186184 - DNA, 25 bp, Homo sapien
tggttgcagtaggaacacctgggaa

SEQ ID NO: 2186185 - DNA, 25 bp, Homo sapien
cctgggaacacacgaaagcgtgctg

SEQ ID NO: 2186186 - DNA, 25 bp, Homo sapien
ccaagcacgtggttgcagtaggaac

SEQ ID NO: 2186187 - DNA, 25 bp, Homo sapien
gtgtgagctggggcttgcatttcct

SEQ ID NO: 2186188 - DNA, 25 bp, Homo sapien
cgctaatgtgtgtgagctggggctt

SEQ ID NO: 2186189 - DNA, 25 bp, Homo sapien
gctaatgtgtgtgagctggggcttg

SEQ ID NO: 2186190 - DNA, 25 bp, Homo sapien
tgagctggggcttgcatttcctcgc

SEQ ID NO: 2186191 - DNA, 25 bp, Homo sapien
tgaaacgcctcccagtgcgagagtg

SEQ ID NO: 2186192 - DNA, 25 bp, Homo sapien
cagcgcggcgcctggtgaaacgcct

SEQ ID NO: 2186193 - DNA, 25 bp, Homo sapien
aatggttttctgcaggtgctatgtg

SEQ ID NO: 2186194 - DNA, 25 bp, Homo sapien
tcacatcgtgcacagtggacagctc

SEQ ID NO: 2186195 - DNA, 25 bp, Homo sapien
tatcctcgttatcagacaaaaactg

SEQ ID NO: 2186196 - DNA, 25 bp, Homo sapien
taatttcaaacgtggtgatgtggcc

SEQ ID NO: 2186197 - DNA, 25 bp, Homo sapien
ccgataacaccggacagaaaatgtc

SEQ ID NO: 2186198 - DNA, 25 bp, Homo sapien
acttctcatcgctttgtgctttcag

SEQ ID NO: 2186199 - DNA, 25 bp, Homo sapien
gcattcagcgctgaaggccaaggat

SEQ ID NO: 2186200 - DNA, 25 bp, Homo sapien
ggccaaggatgccttgtgctctgag

SEQ ID NO: 2186201 - DNA, 25 bp, Homo sapien
tgatcacataagcttgtgagcattc

SEQ ID NO: 2186202 - DNA, 25 bp, Homo sapien
caaggatgccttgtgctctgagaat

SEQ ID NO: 2186203 - DNA, 25 bp, Homo sapien
ttgcaggcatgcttttgggtaccga

SEQ ID NO: 2186204 - DNA, 25 bp, Homo sapien
catgcttttgggtaccgacacatgt

SEQ ID NO: 2186205 - DNA, 25 bp, Homo sapien
cgacacatgttcctccaggaggagt

SEQ ID NO: 2186206 - DNA, 25 bp, Homo sapien
accgacacatgttcctccaggagga

SEQ ID NO: 2186207 - DNA, 25 bp, Homo sapien
cacagctgccgccactttctgatgg

SEQ ID NO: 2186208 - DNA, 25 bp, Homo sapien
tctgaacagacactgcgaggagcca

SEQ ID NO: 2186209 - DNA, 25 bp, Homo sapien
gaagaagttgttctctaacttctga

SEQ ID NO: 2186210 - DNA, 25 bp, Homo sapien
tgagtggagctagtggcagaggttg

SEQ ID NO: 2186211 - DNA, 25 bp, Homo sapien
aggagggagaacaggcagggtccca

SEQ ID NO: 2186212 - DNA, 25 bp, Homo sapien
ggagggagaacaggcagggtcccac

SEQ ID NO: 2186213 - DNA, 25 bp, Homo sapien
ctgaggagggagaacaggcagggtc

SEQ ID NO: 2186214 - DNA, 25 bp, Homo sapien
tgaggagggagaacaggcagggtcc

SEQ ID NO: 2186215 - DNA, 25 bp, Homo sapien
tggaagtaccgcaatggctgtgtct

SEQ ID NO: 2186216 - DNA, 25 bp, Homo sapien
ggcgttgctgcttgtgattctttgc

SEQ ID NO: 2186217 - DNA, 25 bp, Homo sapien
ttggaagtaccgcaatggctgtgtc

SEQ ID NO: 2186218 - DNA, 25 bp, Homo sapien
tccagggcgttgctgcttgtgattc

SEQ ID NO: 2186219 - DNA, 25 bp, Homo sapien
gctaggtgttgtggcagatgaggca

SEQ ID NO: 2186220 - DNA, 25 bp, Homo sapien
aggcagtgcctccacgtgtgctcat

SEQ ID NO: 2186221 - DNA, 25 bp, Homo sapien
gaggcagtgcctccacgtgtgctca

SEQ ID NO: 2186222 - DNA, 25 bp, Homo sapien
gagacatcggagagagccgctaggt

SEQ ID NO: 2186223 - DNA, 25 bp, Homo sapien
gtgaagaatcccaatatgtattcgc

SEQ ID NO: 2186224 - DNA, 25 bp, Homo sapien
gaaattttaatactccaagtgtgcg

SEQ ID NO: 2186225 - DNA, 25 bp, Homo sapien
aattttaatactccaagtgtgcgtg

SEQ ID NO: 2186226 - DNA, 25 bp, Homo sapien
gtattcgcaaattgttgagcagacc

SEQ ID NO: 2186227 - DNA, 25 bp, Homo sapien
cagatacacaggcactccgtcctgg

SEQ ID NO: 2186228 - DNA, 25 bp, Homo sapien
catgaaccatgtaaacccaatctgt

SEQ ID NO: 2186229 - DNA, 25 bp, Homo sapien
tgtcaccatcgatctaggtagctgg

SEQ ID NO: 2186230 - DNA, 25 bp, Homo sapien
tgttcatgtgtatggtggcttctcc

SEQ ID NO: 2186231 - DNA, 25 bp, Homo sapien
tagtttccaagacgcctgaggttta

SEQ ID NO: 2186232 - DNA, 25 bp, Homo sapien
tagatctaggtaaacatggaggccg

SEQ ID NO: 2186233 - DNA, 25 bp, Homo sapien
gtaaaatccaggtgctaacagcagc

SEQ ID NO: 2186234 - DNA, 25 bp, Homo sapien
ctaacccctgtatgctaagctgaga

SEQ ID NO: 2186235 - DNA, 25 bp, Homo sapien
tgcagggcgcactggcaattctgca

SEQ ID NO: 2186236 - DNA, 25 bp, Homo sapien
taattaattgtcctacctccatccc

SEQ ID NO: 2186237 - DNA, 25 bp, Homo sapien
cagtggtgatccagcccctatggct

SEQ ID NO: 2186238 - DNA, 25 bp, Homo sapien
tatgaaaatcgaatgggactgggct

SEQ ID NO: 2186239 - DNA, 25 bp, Homo sapien
aggggcaaatgtgcctcttgcgtca

SEQ ID NO: 2186240 - DNA, 25 bp, Homo sapien
gcaaatgtgcctcttgcgtcagctc

SEQ ID NO: 2186241 - DNA, 25 bp, Homo sapien
tgcctcttgcgtcagctctccaggg

SEQ ID NO: 2186242 - DNA, 25 bp, Homo sapien
gtgcctcttgcgtcagctctccagg

SEQ ID NO: 2186243 - DNA, 25 bp, Homo sapien
ccacgtcgggtagaacagaaggcat

SEQ ID NO: 2186244 - DNA, 25 bp, Homo sapien
tcacaggcagagctatcagtagcca

SEQ ID NO: 2186245 - DNA, 25 bp, Homo sapien
caaggccgtggctttcctaagtggc

SEQ ID NO: 2186246 - DNA, 25 bp, Homo sapien
gcattctgggaacgcggtgctctca

SEQ ID NO: 2186247 - DNA, 25 bp, Homo sapien
aagcatgaagcccttgaccagagga

SEQ ID NO: 2186248 - DNA, 25 bp, Homo sapien
tgccccgactgatctcctaatggag

SEQ ID NO: 2186249 - DNA, 25 bp, Homo sapien
tacatagtggtcaactcatgcccag

SEQ ID NO: 2186250 - DNA, 25 bp, Homo sapien
cagggtggcaggaatgctgaattca

SEQ ID NO: 2186251 - DNA, 25 bp, Homo sapien
tgatgcctgtggaaatgcggtccta

SEQ ID NO: 2186252 - DNA, 25 bp, Homo sapien
tgcaaaggctatgaaaatgcgaccc

SEQ ID NO: 2186253 - DNA, 25 bp, Homo sapien
aaatggaaacggcatggaagtccca

SEQ ID NO: 2186254 - DNA, 25 bp, Homo sapien
tgcaagaaacgcgtaagcccactgt

SEQ ID NO: 2186255 - DNA, 25 bp, Homo sapien
gaaactccattgctagggcattggc

SEQ ID NO: 2186256 - DNA, 25 bp, Homo sapien
taccaagagggtacaggttcctagc

SEQ ID NO: 2186257 - DNA, 25 bp, Homo sapien
ggtctagccctaaacaactgcttgc

SEQ ID NO: 2186258 - DNA, 25 bp, Homo sapien
gacaatgcccggagagaaactccat

SEQ ID NO: 2186259 - DNA, 25 bp, Homo sapien
tactgccgccaggaggatctttgca

SEQ ID NO: 2186260 - DNA, 25 bp, Homo sapien
tcagagtccgtgagaccagatgcta

SEQ ID NO: 2186261 - DNA, 25 bp, Homo sapien
catacatcagtttcagggtgagtgc

SEQ ID NO: 2186262 - DNA, 25 bp, Homo sapien
acagaaggttcccagtaaggctagg

SEQ ID NO: 2186263 - DNA, 25 bp, Homo sapien
taggtaggtcatcgtcccataagcc

SEQ ID NO: 2186264 - DNA, 25 bp, Homo sapien
agtggcagattcctgtggcttggtc

SEQ ID NO: 2186265 - DNA, 25 bp, Homo sapien
cactcggagcgctgtcataaaagaa

SEQ ID NO: 2186266 - DNA, 25 bp, Homo sapien
gaagccactgctcttgttaggtagg

SEQ ID NO: 2186267 - DNA, 25 bp, Homo sapien
tccccgtcacgcttctgcgtggtgg

SEQ ID NO: 2186268 - DNA, 25 bp, Homo sapien
cagaggggacaataagcggagcccc

SEQ ID NO: 2186269 - DNA, 25 bp, Homo sapien
tggtggcagcgggtcaacatgggca

SEQ ID NO: 2186270 - DNA, 25 bp, Homo sapien
tgagggttgctctagtagagccttg

SEQ ID NO: 2186271 - DNA, 25 bp, Homo sapien
gacattttcttggttcgagtatatt

SEQ ID NO: 2186272 - DNA, 25 bp, Homo sapien
tatattctttcctattggacacaga

SEQ ID NO: 2186273 - DNA, 25 bp, Homo sapien
tcttggttcgagtatattctttcct

SEQ ID NO: 2186274 - DNA, 25 bp, Homo sapien
aacagagataaatgccagccaaccc

SEQ ID NO: 2186275 - DNA, 25 bp, Homo sapien
gattcgacatggacagcaaacttga

SEQ ID NO: 2186276 - DNA, 25 bp, Homo sapien
gagcagcgtcagcaccatgatggct

SEQ ID NO: 2186277 - DNA, 25 bp, Homo sapien
tcatctccgtgtccgagagcagcgt

SEQ ID NO: 2186278 - DNA, 25 bp, Homo sapien
tggtcctgcaagaacagctgactgg

SEQ ID NO: 2186279 - DNA, 25 bp, Homo sapien
caatcaatcaccgagtaaccaaggg

SEQ ID NO: 2186280 - DNA, 25 bp, Homo sapien
tcagagtccatgcaatgaagccctt

SEQ ID NO: 2186281 - DNA, 25 bp, Homo sapien
aagaatgacaaatcacctagggacg

SEQ ID NO: 2186282 - DNA, 25 bp, Homo sapien
tccttccagcatgaagcatggtgct

SEQ ID NO: 2186283 - DNA, 25 bp, Homo sapien
taaccatcgatggagagaccgtggc

SEQ ID NO: 2186284 - DNA, 25 bp, Homo sapien
gggaggacataaccatcgatggaga

SEQ ID NO: 2186285 - DNA, 25 bp, Homo sapien
tcgtcgaggatgggaggacataacc

SEQ ID NO: 2186286 - DNA, 25 bp, Homo sapien
tctcgggtcgtcgaggatgggagga

SEQ ID NO: 2186287 - DNA, 25 bp, Homo sapien
ggaggctccgcattgtacttggcaa

SEQ ID NO: 2186288 - DNA, 25 bp, Homo sapien
tattgcgccagtgagtccgagcgga

SEQ ID NO: 2186289 - DNA, 25 bp, Homo sapien
tcgatggaacaattctagggaaccc

SEQ ID NO: 2186290 - DNA, 25 bp, Homo sapien
agcttttaagcgaggcacactgtcc

SEQ ID NO: 2186291 - DNA, 25 bp, Homo sapien
ggagattgtgccttcagggcacaca

SEQ ID NO: 2186292 - DNA, 25 bp, Homo sapien
aggcagatgggaagcgcaacagccg

SEQ ID NO: 2186293 - DNA, 25 bp, Homo sapien
cttgggactgaacacggcaggtacc

SEQ ID NO: 2186294 - DNA, 25 bp, Homo sapien
tccacctctgtacaccttgggactg

SEQ ID NO: 2186295 - DNA, 25 bp, Homo sapien
gggctcagtcacatcgctgaacagc

SEQ ID NO: 2186296 - DNA, 25 bp, Homo sapien
gtggggctcagtcacatcgctgaac

SEQ ID NO: 2186297 - DNA, 25 bp, Homo sapien
cagtcacatcgctgaacagcaggga

SEQ ID NO: 2186298 - DNA, 25 bp, Homo sapien
gctcagtcacatcgctgaacagcag

SEQ ID NO: 2186299 - DNA, 25 bp, Homo sapien
cagccttctcctgcgcagccactgg

SEQ ID NO: 2186300 - DNA, 25 bp, Homo sapien
tcaccccagccgatgtgatgtcctc

SEQ ID NO: 2186301 - DNA, 25 bp, Homo sapien
acaccctctggtagaatcccacggg

SEQ ID NO: 2186302 - DNA, 25 bp, Homo sapien
cagccgatgtgatgtcctcccgagt

SEQ ID NO: 2186303 - DNA, 25 bp, Homo sapien
aggatgacgtgccagtgggcgagga

SEQ ID NO: 2186304 - DNA, 25 bp, Homo sapien
gatgacgtgccagtgggcgaggatg

SEQ ID NO: 2186305 - DNA, 25 bp, Homo sapien
ctgaggatgacgtgccagtgggcga

SEQ ID NO: 2186306 - DNA, 25 bp, Homo sapien
tgacgtgccagtgggcgaggatggg

SEQ ID NO: 2186307 - DNA, 25 bp, Homo sapien
aaagtgcgccatctcgaagggcggc

SEQ ID NO: 2186308 - DNA, 25 bp, Homo sapien
gtcagactgccggagtgctaatccc

SEQ ID NO: 2186309 - DNA, 25 bp, Homo sapien
tgtgagatgactcgcatactttggg

SEQ ID NO: 2186310 - DNA, 25 bp, Homo sapien
tagaacccataaggaggaggccgaa

SEQ ID NO: 2186311 - DNA, 25 bp, Homo sapien
tagtgtgcgctaagtgcccatgagg

SEQ ID NO: 2186312 - DNA, 25 bp, Homo sapien
cctataaagagctgcccggaagcct

SEQ ID NO: 2186313 - DNA, 25 bp, Homo sapien
tctggccctgccatgaacactgatt

SEQ ID NO: 2186314 - DNA, 25 bp, Homo sapien
ccctgaggcatacctagtgtgcgct

SEQ ID NO: 2186315 - DNA, 25 bp, Homo sapien
ctttgagggtgacaacgggccctcg

SEQ ID NO: 2186316 - DNA, 25 bp, Homo sapien
gtgacaacgggccctcggagcaggc

SEQ ID NO: 2186317 - DNA, 25 bp, Homo sapien
ccctcggagcaggcatccatggctc

SEQ ID NO: 2186318 - DNA, 25 bp, Homo sapien
tcggagcaggcatccatggctcagg

SEQ ID NO: 2186319 - DNA, 25 bp, Homo sapien
cccgcgtttagtggcgaggacctcg

SEQ ID NO: 2186320 - DNA, 25 bp, Homo sapien
gacctcgcagatcagggtccatcca

SEQ ID NO: 2186321 - DNA, 25 bp, Homo sapien
caatacatgacacgggggaagacaa

SEQ ID NO: 2186322 - DNA, 25 bp, Homo sapien
ggaagacaaacagtgaagcccgcgt

SEQ ID NO: 2186323 - DNA, 25 bp, Homo sapien
cctccaggtcgagaagggataacct

SEQ ID NO: 2186324 - DNA, 25 bp, Homo sapien
ggcttctagcttcgagacctccagg

SEQ ID NO: 2186325 - DNA, 25 bp, Homo sapien
cctgggactatctggcacttttgtt

SEQ ID NO: 2186326 - DNA, 25 bp, Homo sapien
tcaacattggctggactgattcagg

SEQ ID NO: 2186327 - DNA, 25 bp, Homo sapien
catgaggaaggacgcgaggaggagc

SEQ ID NO: 2186328 - DNA, 25 bp, Homo sapien
tgagcatcccgctgaaaacacttca

SEQ ID NO: 2186329 - DNA, 25 bp, Homo sapien
acttcagccctgctcgaatcctcag

SEQ ID NO: 2186330 - DNA, 25 bp, Homo sapien
tcagccctgctcgaatcctcagaag

SEQ ID NO: 2186331 - DNA, 25 bp, Homo sapien
tggacgcggcctggcccacagaaaa

SEQ ID NO: 2186332 - DNA, 25 bp, Homo sapien
cgcagacttggaggaatgcgcactg

SEQ ID NO: 2186333 - DNA, 25 bp, Homo sapien
aggaatgcgcactgctggacgcggc

SEQ ID NO: 2186334 - DNA, 25 bp, Homo sapien
acttggaggaatgcgcactgctgga

SEQ ID NO: 2186335 - DNA, 25 bp, Homo sapien
gatgatcgggctgatacctttggcc

SEQ ID NO: 2186336 - DNA, 25 bp, Homo sapien
tagctaggtgactctaagcccagca

SEQ ID NO: 2186337 - DNA, 25 bp, Homo sapien
caagggtacagtgtgctatctacaa

SEQ ID NO: 2186338 - DNA, 25 bp, Homo sapien
ggagaacatatgtcaccagggtgat

SEQ ID NO: 2186339 - DNA, 25 bp, Homo sapien
ccccaggcgatctgaggacaggaat

SEQ ID NO: 2186340 - DNA, 25 bp, Homo sapien
ttttgaatagaaactcccactgagg

SEQ ID NO: 2186341 - DNA, 25 bp, Homo sapien
tactgatataaccaatgaccgcatt

SEQ ID NO: 2186342 - DNA, 25 bp, Homo sapien
gcagcattctttctactgatataac

SEQ ID NO: 2186343 - DNA, 25 bp, Homo sapien
cacacgctgcggagtcacagcctca

SEQ ID NO: 2186344 - DNA, 25 bp, Homo sapien
cacattcacacgctgcggagtcaca

SEQ ID NO: 2186345 - DNA, 25 bp, Homo sapien
ttcacacgctgcggagtcacagcct

SEQ ID NO: 2186346 - DNA, 25 bp, Homo sapien
cattcacacgctgcggagtcacagc

SEQ ID NO: 2186347 - DNA, 25 bp, Homo sapien
caggaagtaaaggacgaacaaggca

SEQ ID NO: 2186348 - DNA, 25 bp, Homo sapien
catcagcactaaaccgcctagtcat

SEQ ID NO: 2186349 - DNA, 25 bp, Homo sapien
ctgttcatcagcactaaaccgccta

SEQ ID NO: 2186350 - DNA, 25 bp, Homo sapien
tcatcagcactaaaccgcctagtca

SEQ ID NO: 2186351 - DNA, 25 bp, Homo sapien
gttcatcagcactaaaccgcctagt

SEQ ID NO: 2186352 - DNA, 25 bp, Homo sapien
gaccggctctggaatatctatctgg

SEQ ID NO: 2186353 - DNA, 25 bp, Homo sapien
cactctacagacagtgggctgcagc

SEQ ID NO: 2186354 - DNA, 25 bp, Homo sapien
ctaagaaaagagacccctgtggctg

SEQ ID NO: 2186355 - DNA, 25 bp, Homo sapien
cctaagagtggttctcgggaacaga

SEQ ID NO: 2186356 - DNA, 25 bp, Homo sapien
ctcagtctgttaatgccactcctct

SEQ ID NO: 2186357 - DNA, 25 bp, Homo sapien
cagtctgttaatgccactcctctca

SEQ ID NO: 2186358 - DNA, 25 bp, Homo sapien
cagttttggtgactccggtatggcc

SEQ ID NO: 2186359 - DNA, 25 bp, Homo sapien
ggcccacctcgtggatggagatggt

SEQ ID NO: 2186360 - DNA, 25 bp, Homo sapien
gaagccccgacacagtgagatatgt

SEQ ID NO: 2186361 - DNA, 25 bp, Homo sapien
taaaggagtaaacggaagtgtgcag

SEQ ID NO: 2186362 - DNA, 25 bp, Homo sapien
cacacacacgtggttctcaggaact

SEQ ID NO: 2186363 - DNA, 25 bp, Homo sapien
gcagagtacttaagcaccattataa

SEQ ID NO: 2186364 - DNA, 25 bp, Homo sapien
tgggcagcatggtgagacctcgtat

SEQ ID NO: 2186365 - DNA, 25 bp, Homo sapien
ctgggcagcatggtgagacctcgta

SEQ ID NO: 2186366 - DNA, 25 bp, Homo sapien
cccagtcccgtgtgactctcggaat

SEQ ID NO: 2186367 - DNA, 25 bp, Homo sapien
tgactctcggaatgcccctggaaaa

SEQ ID NO: 2186368 - DNA, 25 bp, Homo sapien
cccctggaaaatgacaaaactgctg

SEQ ID NO: 2186369 - DNA, 25 bp, Homo sapien
cctggaaaatgacaaaactgctgtg

SEQ ID NO: 2186370 - DNA, 25 bp, Homo sapien
caggagaattcagtgccacagcggg

SEQ ID NO: 2186371 - DNA, 25 bp, Homo sapien
atgcaggtgtgaatgcaggagaatt

SEQ ID NO: 2186372 - DNA, 25 bp, Homo sapien
gcagcagatgcaggtgtgaatgcag

SEQ ID NO: 2186373 - DNA, 25 bp, Homo sapien
caggtgtgaatgcaggagaattcag

SEQ ID NO: 2186374 - DNA, 25 bp, Homo sapien
aatgtctgctgcatgtaaaggaggc

SEQ ID NO: 2186375 - DNA, 25 bp, Homo sapien
gggcaagaaaagctcgcccagcaca

SEQ ID NO: 2186376 - DNA, 25 bp, Homo sapien
ggaggcagctccctgaagacgttaa

SEQ ID NO: 2186377 - DNA, 25 bp, Homo sapien
acactgcgagcaagtctcaaagccc

SEQ ID NO: 2186378 - DNA, 25 bp, Homo sapien
ggttcatcaaactttcagaagcctc

SEQ ID NO: 2186379 - DNA, 25 bp, Homo sapien
ttcccacttagaatatggtgcagga

SEQ ID NO: 2186380 - DNA, 25 bp, Homo sapien
tttttcatatcgaaagggctgaggt

SEQ ID NO: 2186381 - DNA, 25 bp, Homo sapien
tagaatatggtgcaggagatttttc

SEQ ID NO: 2186382 - DNA, 25 bp, Homo sapien
aatatcttgtaagtgtcccaaacac

SEQ ID NO: 2186383 - DNA, 25 bp, Homo sapien
aaatatcttgtaagtgtcccaaaca

SEQ ID NO: 2186384 - DNA, 25 bp, Homo sapien
gctccgtggccatcacctgaatgat

SEQ ID NO: 2186385 - DNA, 25 bp, Homo sapien
cctgaatgatcagtccaatccggag

SEQ ID NO: 2186386 - DNA, 25 bp, Homo sapien
tgggctgcgccctgacatacatggc

SEQ ID NO: 2186387 - DNA, 25 bp, Homo sapien
gagcagttcaggctccgtgccagct

SEQ ID NO: 2186388 - DNA, 25 bp, Homo sapien
gtgagtggctgaagggtcccctcca

SEQ ID NO: 2186389 - DNA, 25 bp, Homo sapien
tcagagacagggtgagtggctgaag

SEQ ID NO: 2186390 - DNA, 25 bp, Homo sapien
gaggaaggctgtggcccgacccctc

SEQ ID NO: 2186391 - DNA, 25 bp, Homo sapien
gtcccctccactctgaggaaggctg

SEQ ID NO: 2186392 - DNA, 25 bp, Homo sapien
cgtgaggacggcaatgctgatgtcc

SEQ ID NO: 2186393 - DNA, 25 bp, Homo sapien
gacggcaatgctgatgtcctgccca

SEQ ID NO: 2186394 - DNA, 25 bp, Homo sapien
ccactggcctcgtagatgagttttg

SEQ ID NO: 2186395 - DNA, 25 bp, Homo sapien
agatgagttttgtgagctcctctgg

SEQ ID NO: 2186396 - DNA, 25 bp, Homo sapien
aggcccacggtgagctgcttctggt

SEQ ID NO: 2186397 - DNA, 25 bp, Homo sapien
gggcggcaggcccacggtgagctgc

SEQ ID NO: 2186398 - DNA, 25 bp, Homo sapien
cttctggtgcgaaagcaggtctgtg

SEQ ID NO: 2186399 - DNA, 25 bp, Homo sapien
tgagctgcttctggtgcgaaagcag

SEQ ID NO: 2186400 - DNA, 25 bp, Homo sapien
ctgaactcgagtgtcttagaaagca

SEQ ID NO: 2186401 - DNA, 25 bp, Homo sapien
catcatgacactgaactcgagtgtc

SEQ ID NO: 2186402 - DNA, 25 bp, Homo sapien
ctcgagtgtcttagaaagcagctct

SEQ ID NO: 2186403 - DNA, 25 bp, Homo sapien
gacactgaactcgagtgtcttagaa

SEQ ID NO: 2186404 - DNA, 25 bp, Homo sapien
taaatattaatgatcactgtactgt

SEQ ID NO: 2186405 - DNA, 25 bp, Homo sapien
ttttgaacggtgaccccgtgctgtc

SEQ ID NO: 2186406 - DNA, 25 bp, Homo sapien
tgagatgtagcgaatcagaccccac

SEQ ID NO: 2186407 - DNA, 25 bp, Homo sapien
ccactcctggttcaagccggctttc

SEQ ID NO: 2186408 - DNA, 25 bp, Homo sapien
ggctttcccatagagctcaccaaga

SEQ ID NO: 2186409 - DNA, 25 bp, Homo sapien
cacgtcaccatggtcatctctgggc

SEQ ID NO: 2186410 - DNA, 25 bp, Homo sapien
cagaatgtctgcttggtcctgtagg

SEQ ID NO: 2186411 - DNA, 25 bp, Homo sapien
gaacaatcttttagctgctcaacca

SEQ ID NO: 2186412 - DNA, 25 bp, Homo sapien
tggtcctgtaggttcgaacaatctt

SEQ ID NO: 2186413 - DNA, 25 bp, Homo sapien
tgggcacttagaactttagtcggca

SEQ ID NO: 2186414 - DNA, 25 bp, Homo sapien
tctaggagtggctgaggagaatcaa

SEQ ID NO: 2186415 - DNA, 25 bp, Homo sapien
ctttagtcggcaaagtcatgggaac

SEQ ID NO: 2186416 - DNA, 25 bp, Homo sapien
tcaacaagattcagtgatttacggt

SEQ ID NO: 2186417 - DNA, 25 bp, Homo sapien
tgtcccgcgtggagtggatagcact

SEQ ID NO: 2186418 - DNA, 25 bp, Homo sapien
cagataggacctcaacgatgtgctt

SEQ ID NO: 2186419 - DNA, 25 bp, Homo sapien
ggatagcactgaagacatggcggtc

SEQ ID NO: 2186420 - DNA, 25 bp, Homo sapien
catggcggtcttctgtgttcttaca

SEQ ID NO: 2186421 - DNA, 25 bp, Homo sapien
ccctgtaggcctatagtcttagcca

SEQ ID NO: 2186422 - DNA, 25 bp, Homo sapien
gcttccctgtaggcctatagtctta

SEQ ID NO: 2186423 - DNA, 25 bp, Homo sapien
gtaggcctatagtcttagccacttg

SEQ ID NO: 2186424 - DNA, 25 bp, Homo sapien
ttccctgtaggcctatagtcttagc

SEQ ID NO: 2186425 - DNA, 25 bp, Homo sapien
aggactgaaagtcccttcgctggca

SEQ ID NO: 2186426 - DNA, 25 bp, Homo sapien
gattacaggtgtcttccagatatcc

SEQ ID NO: 2186427 - DNA, 25 bp, Homo sapien
cgctggcattgtcaaacaacttctc

SEQ ID NO: 2186428 - DNA, 25 bp, Homo sapien
tcagatatgtgtagaacgatgtggt

SEQ ID NO: 2186429 - DNA, 25 bp, Homo sapien
caacaacaaccctcagaaatagagg

SEQ ID NO: 2186430 - DNA, 25 bp, Homo sapien
aactgtgactcaacttatcaagaac

SEQ ID NO: 2186431 - DNA, 25 bp, Homo sapien
cccaagtggatccagtgggtatgta

SEQ ID NO: 2186432 - DNA, 25 bp, Homo sapien
caccatggtttatgcttgcaatccc

SEQ ID NO: 2186433 - DNA, 25 bp, Homo sapien
ttatagtgtgagccaccgtgcctgg

SEQ ID NO: 2186434 - DNA, 25 bp, Homo sapien
gcagcctctacctcctaagttcaag

SEQ ID NO: 2186435 - DNA, 25 bp, Homo sapien
gattatagtgtgagccaccgtgcct

SEQ ID NO: 2186436 - DNA, 25 bp, Homo sapien
gggattatagtgtgagccaccgtgc

SEQ ID NO: 2186437 - DNA, 25 bp, Homo sapien
gatggttcacctccctatgtccgag

SEQ ID NO: 2186438 - DNA, 25 bp, Homo sapien
cacacgggcgactggattagagaag

SEQ ID NO: 2186439 - DNA, 25 bp, Homo sapien
gcctcctggtgcctgtaaagcttaa

SEQ ID NO: 2186440 - DNA, 25 bp, Homo sapien
agatgagccaagtttcacacgggcg

SEQ ID NO: 2186441 - DNA, 25 bp, Homo sapien
gttttctaattgtggagagcacagc

SEQ ID NO: 2186442 - DNA, 25 bp, Homo sapien
agagcacagcagaatgaatgtctga

SEQ ID NO: 2186443 - DNA, 25 bp, Homo sapien
tatccatcctctagttttctaattg

SEQ ID NO: 2186444 - DNA, 25 bp, Homo sapien
gcagaatgaatgtctgagccatcat

SEQ ID NO: 2186445 - DNA, 25 bp, Homo sapien
ccaaactgctaagaagccccttcag

SEQ ID NO: 2186446 - DNA, 25 bp, Homo sapien
cagtgcttagttctggccatgggag

SEQ ID NO: 2186447 - DNA, 25 bp, Homo sapien
gaagattcccgagataagaaaccaa

SEQ ID NO: 2186448 - DNA, 25 bp, Homo sapien
atttctggcatagaagattcccgag

SEQ ID NO: 2186449 - DNA, 25 bp, Homo sapien
tgagcatggtgcgactgatggggaa

SEQ ID NO: 2186450 - DNA, 25 bp, Homo sapien
tctcattgtcgagggccaggtagaa

SEQ ID NO: 2186451 - DNA, 25 bp, Homo sapien
acgatcatctcattgtcgagggcca

SEQ ID NO: 2186452 - DNA, 25 bp, Homo sapien
taggccagctcgatccttagcatct

SEQ ID NO: 2186453 - DNA, 25 bp, Homo sapien
agcagcttgacccaagaccccatga

SEQ ID NO: 2186454 - DNA, 25 bp, Homo sapien
cactgccaaagcgatcccactgttg

SEQ ID NO: 2186455 - DNA, 25 bp, Homo sapien
tcagtatcccagtaagcgagggtgt

SEQ ID NO: 2186456 - DNA, 25 bp, Homo sapien
tgcccaggtaagcagggattgtgcc

SEQ ID NO: 2186457 - DNA, 25 bp, Homo sapien
cagaattctgtcatattcacaggag

SEQ ID NO: 2186458 - DNA, 25 bp, Homo sapien
tctctatttgaacctatgcatgcag

SEQ ID NO: 2186459 - DNA, 25 bp, Homo sapien
gagcacctactacgggcagacttgt

SEQ ID NO: 2186460 - DNA, 25 bp, Homo sapien
actaggctcttggtatcatttcata

SEQ ID NO: 2186461 - DNA, 25 bp, Homo sapien
ccaaggacaccaatatgtcgatacg

SEQ ID NO: 2186462 - DNA, 25 bp, Homo sapien
atgtcgatacggtcgcccactcaaa

SEQ ID NO: 2186463 - DNA, 25 bp, Homo sapien
tatagtttagaggttccaaggacac

SEQ ID NO: 2186464 - DNA, 25 bp, Homo sapien
ggtcgcccactcaaattcatattct

SEQ ID NO: 2186465 - DNA, 25 bp, Homo sapien
ccggcccggctggacttgaattgga

SEQ ID NO: 2186466 - DNA, 25 bp, Homo sapien
tgaatgtccgcgatactctggacgt

SEQ ID NO: 2186467 - DNA, 25 bp, Homo sapien
tatatgtgactaagaatccggcccg

SEQ ID NO: 2186468 - DNA, 25 bp, Homo sapien
cgtgtttcctcaataagtccttaat

SEQ ID NO: 2186469 - DNA, 25 bp, Homo sapien
tcaggagtggaaacagctccacttg

SEQ ID NO: 2186470 - DNA, 25 bp, Homo sapien
ggggatgccagaagcctgtgcccct

SEQ ID NO: 2186471 - DNA, 25 bp, Homo sapien
cttgggggatgccagaagcctgtgc

SEQ ID NO: 2186472 - DNA, 25 bp, Homo sapien
aacagctccacttgggggatgccag

SEQ ID NO: 2186473 - DNA, 25 bp, Homo sapien
catcaccggggacaacccgggatcg

SEQ ID NO: 2186474 - DNA, 25 bp, Homo sapien
ggagctgattgtgcctgggacctgg

SEQ ID NO: 2186475 - DNA, 25 bp, Homo sapien
ctggcggtagtggagcagcctggcc

SEQ ID NO: 2186476 - DNA, 25 bp, Homo sapien
aaagcaaagtaggtctgtgagtggg

SEQ ID NO: 2186477 - DNA, 25 bp, Homo sapien
ctgctgtactagtaccgctggcctt

SEQ ID NO: 2186478 - DNA, 25 bp, Homo sapien
caaagggaaggagtacagggatggg

SEQ ID NO: 2186479 - DNA, 25 bp, Homo sapien
tgtactagtaccgctggcctttctg

SEQ ID NO: 2186480 - DNA, 25 bp, Homo sapien
gctgtactagtaccgctggcctttc

SEQ ID NO: 2186481 - DNA, 25 bp, Homo sapien
gaaaaggggagcacggccacaggga

SEQ ID NO: 2186482 - DNA, 25 bp, Homo sapien
agcacggccacagggagagaggttg

SEQ ID NO: 2186483 - DNA, 25 bp, Homo sapien
gggagagaggttggtgccatgtcca

SEQ ID NO: 2186484 - DNA, 25 bp, Homo sapien
gtgccatgtccagctgcggccgagc

SEQ ID NO: 2186485 - DNA, 25 bp, Homo sapien
cttgtactacaacatcaggtttgac

SEQ ID NO: 2186486 - DNA, 25 bp, Homo sapien
catcaggtttgactgaagtggaaaa

SEQ ID NO: 2186487 - DNA, 25 bp, Homo sapien
gatcgatttcaccagcggcaaggaa

SEQ ID NO: 2186488 - DNA, 25 bp, Homo sapien
tcttctatttaagggatcgatttca

SEQ ID NO: 2186489 - DNA, 25 bp, Homo sapien
ggtctactgtgtgaggattcttgta

SEQ ID NO: 2186490 - DNA, 25 bp, Homo sapien
cataggaactcggtctactgtgtga

SEQ ID NO: 2186491 - DNA, 25 bp, Homo sapien
atgaggcaccttccccataggaact

SEQ ID NO: 2186492 - DNA, 25 bp, Homo sapien
gaggatgtacaaggattggccccac

SEQ ID NO: 2186493 - DNA, 25 bp, Homo sapien
ttatgaaatggtactcatcctccag

SEQ ID NO: 2186494 - DNA, 25 bp, Homo sapien
ccatggggaatgcactgaggattta

SEQ ID NO: 2186495 - DNA, 25 bp, Homo sapien
tgaaatggtactcatcctccaggcc

SEQ ID NO: 2186496 - DNA, 25 bp, Homo sapien
tccaggccaattctgtgcaggtgcc

SEQ ID NO: 2186497 - DNA, 25 bp, Homo sapien
gctttgcgcacagctctggccatga

SEQ ID NO: 2186498 - DNA, 25 bp, Homo sapien
aaggccacgagcaccggatgcctgg

SEQ ID NO: 2186499 - DNA, 25 bp, Homo sapien
acacgcaaggccacgagcaccggat

SEQ ID NO: 2186500 - DNA, 25 bp, Homo sapien
ctgctttgcgcacagctctggccat

SEQ ID NO: 2186501 - DNA, 25 bp, Homo sapien
tgcatcgctggagccatccctaggg

SEQ ID NO: 2186502 - DNA, 25 bp, Homo sapien
agctgtggcggtgcatcgctggagc

SEQ ID NO: 2186503 - DNA, 25 bp, Homo sapien
catccctaggggtttataaactgtg

SEQ ID NO: 2186504 - DNA, 25 bp, Homo sapien
cggtgcatcgctggagccatcccta

SEQ ID NO: 2186505 - DNA, 25 bp, Homo sapien
agccctgaggcaccaaaagcatcca

SEQ ID NO: 2186506 - DNA, 25 bp, Homo sapien
gacacggtcctctgaaggccttttc

SEQ ID NO: 2186507 - DNA, 25 bp, Homo sapien
taaccatgagatattgacagacaaa

SEQ ID NO: 2186508 - DNA, 25 bp, Homo sapien
attttggggaagacacggtcctctg

SEQ ID NO: 2186509 - DNA, 25 bp, Homo sapien
cctccagggcctctcggtattcttg

SEQ ID NO: 2186510 - DNA, 25 bp, Homo sapien
aggcaccaggcggatcccattcttg

SEQ ID NO: 2186511 - DNA, 25 bp, Homo sapien
cgggacagcgtagagttcaggcacc

SEQ ID NO: 2186512 - DNA, 25 bp, Homo sapien
tccagggcctctcggtattcttgga

SEQ ID NO: 2186513 - DNA, 25 bp, Homo sapien
aaacacaggccactcacattcaatg

SEQ ID NO: 2186514 - DNA, 25 bp, Homo sapien
gcatcaccactgaagactccatcta

SEQ ID NO: 2186515 - DNA, 25 bp, Homo sapien
gttcagcagggtcataatgcagtcg

SEQ ID NO: 2186516 - DNA, 25 bp, Homo sapien
tgttttcgaagagcttgagttcagc

SEQ ID NO: 2186517 - DNA, 25 bp, Homo sapien
ttttataaccatctcgaaggaagcg

SEQ ID NO: 2186518 - DNA, 25 bp, Homo sapien
ggaagcgacagcatccataacgccc

SEQ ID NO: 2186519 - DNA, 25 bp, Homo sapien
catctcgaaggaagcgacagcatcc

SEQ ID NO: 2186520 - DNA, 25 bp, Homo sapien
ctctcttggagttttataaccatct

SEQ ID NO: 2186521 - DNA, 25 bp, Homo sapien
aggctcctggaagttaggctttggc

SEQ ID NO: 2186522 - DNA, 25 bp, Homo sapien
gcttcctgtgcttaggactgtcgct

SEQ ID NO: 2186523 - DNA, 25 bp, Homo sapien
catcttccactgcaaaggccgggaa

SEQ ID NO: 2186524 - DNA, 25 bp, Homo sapien
tgtcgacgctcttggcagcatggag

SEQ ID NO: 2186525 - DNA, 25 bp, Homo sapien
aatttctttagatgtcgacgctctt

SEQ ID NO: 2186526 - DNA, 25 bp, Homo sapien
ttccactgcaaaggccgggaaggaa

SEQ ID NO: 2186527 - DNA, 25 bp, Homo sapien
tctggcagaacatgaatcactgact

SEQ ID NO: 2186528 - DNA, 25 bp, Homo sapien
cactgacttgcgtcctccatgggct

SEQ ID NO: 2186529 - DNA, 25 bp, Homo sapien
cagtgctcgacctcatctggcagaa

SEQ ID NO: 2186530 - DNA, 25 bp, Homo sapien
catgggctccaaaaaggtccagttc

SEQ ID NO: 2186531 - DNA, 25 bp, Homo sapien
acatccttgatgctgacttttgaca

SEQ ID NO: 2186532 - DNA, 25 bp, Homo sapien
tccttgatgctgacttttgacaaat

SEQ ID NO: 2186533 - DNA, 25 bp, Homo sapien
caaatatgctaatcagattaaatac

SEQ ID NO: 2186534 - DNA, 25 bp, Homo sapien
ttctttacctagaatttcaggtggc

SEQ ID NO: 2186535 - DNA, 25 bp, Homo sapien
tagtcttatctccacgctcccacat

SEQ ID NO: 2186536 - DNA, 25 bp, Homo sapien
cttggccattcctacggagcttgca

SEQ ID NO: 2186537 - DNA, 25 bp, Homo sapien
tccgggatgccctgattagtcttat

SEQ ID NO: 2186538 - DNA, 25 bp, Homo sapien
gcttgcattcaattccgggatgccc

SEQ ID NO: 2186539 - DNA, 25 bp, Homo sapien
gaggtatataagaagtgctatggga

SEQ ID NO: 2186540 - DNA, 25 bp, Homo sapien
tcttctcggaggctttgtagactca

SEQ ID NO: 2186541 - DNA, 25 bp, Homo sapien
cactgaaacataagtggatcttctc

SEQ ID NO: 2186542 - DNA, 25 bp, Homo sapien
gctttgtagactcatactgtgctct

SEQ ID NO: 2186543 - DNA, 25 bp, Homo sapien
aaccccggcactgggtgattcatcc

SEQ ID NO: 2186544 - DNA, 25 bp, Homo sapien
ttgctgcttccccttgtttcagggt

SEQ ID NO: 2186545 - DNA, 25 bp, Homo sapien
tttgattgctgcttccccttgtttc

SEQ ID NO: 2186546 - DNA, 25 bp, Homo sapien
ccaaccccggcactgggtgattcat

SEQ ID NO: 2186547 - DNA, 25 bp, Homo sapien
tcgagagtgaaaatgatacgtaagc

SEQ ID NO: 2186548 - DNA, 25 bp, Homo sapien
gaaggccacctcatcgagagtgaaa

SEQ ID NO: 2186549 - DNA, 25 bp, Homo sapien
cctcatcgagagtgaaaatgatacg

SEQ ID NO: 2186550 - DNA, 25 bp, Homo sapien
ctgtatgaaggccacctcatcgaga

SEQ ID NO: 2186551 - DNA, 25 bp, Homo sapien
tcttaagtaaggcataacagtgagt

SEQ ID NO: 2186552 - DNA, 25 bp, Homo sapien
gagtgtctaatctccgaaaagaggg

SEQ ID NO: 2186553 - DNA, 25 bp, Homo sapien
gagatttgggacctctggtacaggt

SEQ ID NO: 2186554 - DNA, 25 bp, Homo sapien
gagagctgccagtcacaaattacaa

SEQ ID NO: 2186555 - DNA, 25 bp, Homo sapien
gactggtaggtgataagaactccca

SEQ ID NO: 2186556 - DNA, 25 bp, Homo sapien
cttcaatgggaacaaggcacaccgc

SEQ ID NO: 2186557 - DNA, 25 bp, Homo sapien
cacatgccattgtgagagagagacc

SEQ ID NO: 2186558 - DNA, 25 bp, Homo sapien
cagacatagccgttaagtgccctaa

SEQ ID NO: 2186559 - DNA, 25 bp, Homo sapien
taagaggcgattaggccctgaggac

SEQ ID NO: 2186560 - DNA, 25 bp, Homo sapien
tggagcccttactggacaactgagc

SEQ ID NO: 2186561 - DNA, 25 bp, Homo sapien
aaaacacacttcgtggagcctctgg

SEQ ID NO: 2186562 - DNA, 25 bp, Homo sapien
cctacatgggatgaaggctcttaca

SEQ ID NO: 2186563 - DNA, 25 bp, Homo sapien
ccttttccggattgtcactccttat

SEQ ID NO: 2186564 - DNA, 25 bp, Homo sapien
tcactccttatacaatgggctccag

SEQ ID NO: 2186565 - DNA, 25 bp, Homo sapien
tccttatacaatgggctccagcaac

SEQ ID NO: 2186566 - DNA, 25 bp, Homo sapien
ggattgtcactccttatacaatggg

SEQ ID NO: 2186567 - DNA, 25 bp, Homo sapien
gtggccccactggtcgtcgcccacc

SEQ ID NO: 2186568 - DNA, 25 bp, Homo sapien
tgccacaggtggcggtgttgtactt

SEQ ID NO: 2186569 - DNA, 25 bp, Homo sapien
ttgtacttggcgtgcaggctgtcct

SEQ ID NO: 2186570 - DNA, 25 bp, Homo sapien
tgtgtttgaacttctccactttggc

SEQ ID NO: 2186571 - DNA, 25 bp, Homo sapien
tggagaagacctcgcatcagcttca

SEQ ID NO: 2186572 - DNA, 25 bp, Homo sapien
cactggagaagacctcgcatcagct

SEQ ID NO: 2186573 - DNA, 25 bp, Homo sapien
atgcactggagaagacctcgcatca

SEQ ID NO: 2186574 - DNA, 25 bp, Homo sapien
agaagacctcgcatcagcttcacca

SEQ ID NO: 2186575 - DNA, 25 bp, Homo sapien
gctccagctcgtaggccttggcctt

SEQ ID NO: 2186576 - DNA, 25 bp, Homo sapien
ctgtagatgttatcccgcacccagg

SEQ ID NO: 2186577 - DNA, 25 bp, Homo sapien
catccttctgctcatggctggctga

SEQ ID NO: 2186578 - DNA, 25 bp, Homo sapien
tcatcgcggtctgcattcttacggt

SEQ ID NO: 2186579 - DNA, 25 bp, Homo sapien
ttctaatgtaggaaaagtgcccttg

SEQ ID NO: 2186580 - DNA, 25 bp, Homo sapien
tgtaggaaaagtgcccttgttggct

SEQ ID NO: 2186581 - DNA, 25 bp, Homo sapien
taatgtaggaaaagtgcccttgttg

SEQ ID NO: 2186582 - DNA, 25 bp, Homo sapien
tgggtttctaatgtaggaaaagtgc

SEQ ID NO: 2186583 - DNA, 25 bp, Homo sapien
gttgatgaaaaataaagggcaggcc

SEQ ID NO: 2186584 - DNA, 25 bp, Homo sapien
ttgatgaaaaataaagggcaggccc

SEQ ID NO: 2186585 - DNA, 25 bp, Homo sapien
tgatgaaaaataaagggcaggcccc

SEQ ID NO: 2186586 - DNA, 25 bp, Homo sapien
ctgttgatgaaaaataaagggcagg

SEQ ID NO: 2186587 - DNA, 25 bp, Homo sapien
ttggattaagaatcgctaagtgcat

SEQ ID NO: 2186588 - DNA, 25 bp, Homo sapien
tttcctttggattaagaatcgctaa

SEQ ID NO: 2186589 - DNA, 25 bp, Homo sapien
tcctttggattaagaatcgctaagt

SEQ ID NO: 2186590 - DNA, 25 bp, Homo sapien
ctttggattaagaatcgctaagtgc

SEQ ID NO: 2186591 - DNA, 25 bp, Homo sapien
gcacggaggcggctcattctcatcc

SEQ ID NO: 2186592 - DNA, 25 bp, Homo sapien
caaaaaaagcagagtcaatgcaaaa

SEQ ID NO: 2186593 - DNA, 25 bp, Homo sapien
aggcagtttggacccgggcacggag

SEQ ID NO: 2186594 - DNA, 25 bp, Homo sapien
tgaaaagtagccgtagcaacagtta

SEQ ID NO: 2186595 - DNA, 25 bp, Homo sapien
cgtccaagcggaccccggaattgct

SEQ ID NO: 2186596 - DNA, 25 bp, Homo sapien
accagccgcgcgtacccgtccaagc

SEQ ID NO: 2186597 - DNA, 25 bp, Homo sapien
ctggtaacacaggatggtttgctgc

SEQ ID NO: 2186598 - DNA, 25 bp, Homo sapien
ggtaacacaggatggtttgctgcac

SEQ ID NO: 2186599 - DNA, 25 bp, Homo sapien
ccgaggctcccaggccgcagcgccc

SEQ ID NO: 2186600 - DNA, 25 bp, Homo sapien
ctccccgaggctcccaggccgcagc

SEQ ID NO: 2186601 - DNA, 25 bp, Homo sapien
ccccgaggctcccaggccgcagcgc

SEQ ID NO: 2186602 - DNA, 25 bp, Homo sapien
gaggctcccaggccgcagcgcccga

SEQ ID NO: 2186603 - DNA, 25 bp, Homo sapien
cgggtctggttcccggacactcaca

SEQ ID NO: 2186604 - DNA, 25 bp, Homo sapien
cggacactcacagccttagtcggtt

SEQ ID NO: 2186605 - DNA, 25 bp, Homo sapien
tgccgcgtgggcgcgggacgtcggg

SEQ ID NO: 2186606 - DNA, 25 bp, Homo sapien
tggttcccggacactcacagcctta

SEQ ID NO: 2186607 - DNA, 25 bp, Homo sapien
ctggagcgacgaaggtcccgcctcg

SEQ ID NO: 2186608 - DNA, 25 bp, Homo sapien
gccggaggaggtcgagacttttcta

SEQ ID NO: 2186609 - DNA, 25 bp, Homo sapien
ggagcggaaccctccaagtcgcggc

SEQ ID NO: 2186610 - DNA, 25 bp, Homo sapien
cgggagagccgctgcgaaatcagca

SEQ ID NO: 2186611 - DNA, 25 bp, Homo sapien
taggtaggaagcaagatagaccctg

SEQ ID NO: 2186612 - DNA, 25 bp, Homo sapien
tacaggtcgtgcacccaagagggtg

SEQ ID NO: 2186613 - DNA, 25 bp, Homo sapien
taaggatgtacttgaggcactgctc

SEQ ID NO: 2186614 - DNA, 25 bp, Homo sapien
gagaagcggcagtgtatgtacctca

SEQ ID NO: 2186615 - DNA, 25 bp, Homo sapien
gtgtaagcttccccgctttgaagtc

SEQ ID NO: 2186616 - DNA, 25 bp, Homo sapien
tgtaagcttccccgctttgaagtcc

SEQ ID NO: 2186617 - DNA, 25 bp, Homo sapien
agtgtaagcttccccgctttgaagt

SEQ ID NO: 2186618 - DNA, 25 bp, Homo sapien
agcttccccgctttgaagtccttct

SEQ ID NO: 2186619 - DNA, 25 bp, Homo sapien
ttccagtgaaatcgtgaaggcacac

SEQ ID NO: 2186620 - DNA, 25 bp, Homo sapien
gagaccccattcctctctgtagaag

SEQ ID NO: 2186621 - DNA, 25 bp, Homo sapien
gcacacatctccattctgaacacta

SEQ ID NO: 2186622 - DNA, 25 bp, Homo sapien
gcaggaatcttccttctcgttaaac

SEQ ID NO: 2186623 - DNA, 25 bp, Homo sapien
gagcaatcattattcactagcagtg

SEQ ID NO: 2186624 - DNA, 25 bp, Homo sapien
ggagttagtggagttactgcttgac

SEQ ID NO: 2186625 - DNA, 25 bp, Homo sapien
cccgcttgcgtgtactgagcaatca

SEQ ID NO: 2186626 - DNA, 25 bp, Homo sapien
atttgaagagctggacactccttgg

SEQ ID NO: 2186627 - DNA, 25 bp, Homo sapien
gaaaaacagggcagtatgttgaagc

SEQ ID NO: 2186628 - DNA, 25 bp, Homo sapien
cagtatgttgaagctcaaacgcaag

SEQ ID NO: 2186629 - DNA, 25 bp, Homo sapien
caaacgcaagagacagatcacagtg

SEQ ID NO: 2186630 - DNA, 25 bp, Homo sapien
gaagctcaaacgcaagagacagatc

SEQ ID NO: 2186631 - DNA, 25 bp, Homo sapien
gccagccgtaactttccacaacaaa

SEQ ID NO: 2186632 - DNA, 25 bp, Homo sapien
taactttccacaacaaagataccgc

SEQ ID NO: 2186633 - DNA, 25 bp, Homo sapien
acaacaaagataccgcctccattgc

SEQ ID NO: 2186634 - DNA, 25 bp, Homo sapien
agaattttcagccagccgtaacttt

SEQ ID NO: 2186635 - DNA, 25 bp, Homo sapien
gtttagacatcatgcaattgcacac

SEQ ID NO: 2186636 - DNA, 25 bp, Homo sapien
catgtactcaccttgtgtctctgta

SEQ ID NO: 2186637 - DNA, 25 bp, Homo sapien
ccaacatctctgaggcatgcctgta

SEQ ID NO: 2186638 - DNA, 25 bp, Homo sapien
aaggttgtggcagccctgcgtccag

SEQ ID NO: 2186639 - DNA, 25 bp, Homo sapien
gaatactggtttttcgctgggctcc

SEQ ID NO: 2186640 - DNA, 25 bp, Homo sapien
gaaatatcccaccaccgtaatgtag

SEQ ID NO: 2186641 - DNA, 25 bp, Homo sapien
tgaaggtcacgttaactggtcccca

SEQ ID NO: 2186642 - DNA, 25 bp, Homo sapien
tgtaaggccagcgatactcctgagg

SEQ ID NO: 2186643 - DNA, 25 bp, Homo sapien
tttcccataggatccaagcccatag

SEQ ID NO: 2186644 - DNA, 25 bp, Homo sapien
aagtcatccggtgaaccattgggga

SEQ ID NO: 2186645 - DNA, 25 bp, Homo sapien
ggatccaagcccatagttatctggg

SEQ ID NO: 2186646 - DNA, 25 bp, Homo sapien
tatagtcaggatgatggtcacaacc

SEQ ID NO: 2186647 - DNA, 25 bp, Homo sapien
cagaggccttgcatcttatacagag

SEQ ID NO: 2186648 - DNA, 25 bp, Homo sapien
tatacagagcaatccacgagtccag

SEQ ID NO: 2186649 - DNA, 25 bp, Homo sapien
tattaaatactttgacaagggccag

SEQ ID NO: 2186650 - DNA, 25 bp, Homo sapien
gcccatccatgtgaatgagaccaag

SEQ ID NO: 2186651 - DNA, 25 bp, Homo sapien
gagccatcatttgagcaggcagcac

SEQ ID NO: 2186652 - DNA, 25 bp, Homo sapien
atgtaggttacaagagtcactgaca

SEQ ID NO: 2186653 - DNA, 25 bp, Homo sapien
tatgtaatgaacgtcagagccatca

SEQ ID NO: 2186654 - DNA, 25 bp, Homo sapien
aaaaattgatgaaagcccacaacca

SEQ ID NO: 2186655 - DNA, 25 bp, Homo sapien
ccctcagactcagaatttaaggcca

SEQ ID NO: 2186656 - DNA, 25 bp, Homo sapien
cagactcagaatttaaggccacgtg

SEQ ID NO: 2186657 - DNA, 25 bp, Homo sapien
ctcagaatttaaggccacgtggcac

SEQ ID NO: 2186658 - DNA, 25 bp, Homo sapien
agaatttaaggccacgtggcacagg

SEQ ID NO: 2186659 - DNA, 25 bp, Homo sapien
gttagatggctacaggtacagatgg

SEQ ID NO: 2186660 - DNA, 25 bp, Homo sapien
tcaatctcctgtctttgacagagca

SEQ ID NO: 2186661 - DNA, 25 bp, Homo sapien
cagcagaacgccgaagcttgttaga

SEQ ID NO: 2186662 - DNA, 25 bp, Homo sapien
gccattgtctgaccagcctcctctg

SEQ ID NO: 2186663 - DNA, 25 bp, Homo sapien
ccaaaatacacatctcactgttaac

SEQ ID NO: 2186664 - DNA, 25 bp, Homo sapien
aaatacacatctcactgttaactca

SEQ ID NO: 2186665 - DNA, 25 bp, Homo sapien
atacacatctcactgttaactcatc

SEQ ID NO: 2186666 - DNA, 25 bp, Homo sapien
agtcccaaaatacacatctcactgt

SEQ ID NO: 2186667 - DNA, 25 bp, Homo sapien
tgtcaagttcctgacggtcaggttt

SEQ ID NO: 2186668 - DNA, 25 bp, Homo sapien
gatgtgctttaatgtgactgtcacg

SEQ ID NO: 2186669 - DNA, 25 bp, Homo sapien
gttgatgtgctttaatgtgactgtc

SEQ ID NO: 2186670 - DNA, 25 bp, Homo sapien
ggtcaggtttgcaacactcgatgat

SEQ ID NO: 2186671 - DNA, 25 bp, Homo sapien
atcagagagaggttctccagggaag

SEQ ID NO: 2186672 - DNA, 25 bp, Homo sapien
gagagaggttctccagggaaggatc

SEQ ID NO: 2186673 - DNA, 25 bp, Homo sapien
ctgatcagagagaggttctccaggg

SEQ ID NO: 2186674 - DNA, 25 bp, Homo sapien
agagagaggttctccagggaaggat

SEQ ID NO: 2186675 - DNA, 25 bp, Homo sapien
tggaagctagctccatgtcatgagc

SEQ ID NO: 2186676 - DNA, 25 bp, Homo sapien
tgtgccaatactgttctcaggagct

SEQ ID NO: 2186677 - DNA, 25 bp, Homo sapien
aaaattgaactgaaccctggaagct

SEQ ID NO: 2186678 - DNA, 25 bp, Homo sapien
ggtaaattattcatcagcgatgaag

SEQ ID NO: 2186679 - DNA, 25 bp, Homo sapien
gaaactactggcattcactctgatc

SEQ ID NO: 2186680 - DNA, 25 bp, Homo sapien
tatagtcgtgtttgaaaagttcagc

SEQ ID NO: 2186681 - DNA, 25 bp, Homo sapien
gtcttgggccacaaaggtagttgtg

SEQ ID NO: 2186682 - DNA, 25 bp, Homo sapien
ctgaagatttgcagggtcttgggcc

SEQ ID NO: 2186683 - DNA, 25 bp, Homo sapien
gatcatttctcctgcgaggttaggc

SEQ ID NO: 2186684 - DNA, 25 bp, Homo sapien
tgcgaggttaggctccaggctgccc

SEQ ID NO: 2186685 - DNA, 25 bp, Homo sapien
gccagcatgtcaggcggggaatgaa

SEQ ID NO: 2186686 - DNA, 25 bp, Homo sapien
ctttgagccagaggggccagcatgt

SEQ ID NO: 2186687 - DNA, 25 bp, Homo sapien
ggttctcaagatcagaaatactgct

SEQ ID NO: 2186688 - DNA, 25 bp, Homo sapien
cttggttctcaagatcagaaatact

SEQ ID NO: 2186689 - DNA, 25 bp, Homo sapien
tcagaaatactgctggtgttgacga

SEQ ID NO: 2186690 - DNA, 25 bp, Homo sapien
tcaagatcagaaatactgctggtgt

SEQ ID NO: 2186691 - DNA, 25 bp, Homo sapien
tctggaggctcagcaaaagaggtag

SEQ ID NO: 2186692 - DNA, 25 bp, Homo sapien
tgtgggtcacaggtgaataatctgg

SEQ ID NO: 2186693 - DNA, 25 bp, Homo sapien
ggaagagatcgtttcagactgtggg

SEQ ID NO: 2186694 - DNA, 25 bp, Homo sapien
aggtgcgctggtagtgttgacattc

SEQ ID NO: 2186695 - DNA, 25 bp, Homo sapien
tcagcaagacagacaatgggatcct

SEQ ID NO: 2186696 - DNA, 25 bp, Homo sapien
cagcaagacagacaatgggatcctg

SEQ ID NO: 2186697 - DNA, 25 bp, Homo sapien
agcaagacagacaatgggatcctgc

SEQ ID NO: 2186698 - DNA, 25 bp, Homo sapien
gcaagacagacaatgggatcctgca

SEQ ID NO: 2186699 - DNA, 25 bp, Homo sapien
tctctggcacaagatccatcagtct

SEQ ID NO: 2186700 - DNA, 25 bp, Homo sapien
tggcacaagatccatcagtcttgag

SEQ ID NO: 2186701 - DNA, 25 bp, Homo sapien
ctactctctggcacaagatccatca

SEQ ID NO: 2186702 - DNA, 25 bp, Homo sapien
cacaagatccatcagtcttgagaga

SEQ ID NO: 2186703 - DNA, 25 bp, Homo sapien
tgattttaaggcatcaattctcaac

SEQ ID NO: 2186704 - DNA, 25 bp, Homo sapien
ttgcacattagaatcgccagcaggg

SEQ ID NO: 2186705 - DNA, 25 bp, Homo sapien
ttaaggcatcaattctcaactttgg

SEQ ID NO: 2186706 - DNA, 25 bp, Homo sapien
catcaattctcaactttggttgcac

SEQ ID NO: 2186707 - DNA, 25 bp, Homo sapien
gggtatcctgacagaacagcagcag

SEQ ID NO: 2186708 - DNA, 25 bp, Homo sapien
gaagggcagggtatcctgacagaac

SEQ ID NO: 2186709 - DNA, 25 bp, Homo sapien
gcagggtatcctgacagaacagcag

SEQ ID NO: 2186710 - DNA, 25 bp, Homo sapien
aagggcagggtatcctgacagaaca

SEQ ID NO: 2186711 - DNA, 25 bp, Homo sapien
ccattggtcgaatctttactctttc

SEQ ID NO: 2186712 - DNA, 25 bp, Homo sapien
tccaaagcagctattacagcacatg

SEQ ID NO: 2186713 - DNA, 25 bp, Homo sapien
tctttactctttccaaagcagctat

SEQ ID NO: 2186714 - DNA, 25 bp, Homo sapien
agcagctattacagcacatgcattc

SEQ ID NO: 2186715 - DNA, 25 bp, Homo sapien
tattgtgaatgtacaatttaatgtg

SEQ ID NO: 2186716 - DNA, 25 bp, Homo sapien
attcagttttattgtgaatgtacaa

SEQ ID NO: 2186717 - DNA, 25 bp, Homo sapien
gtattattcagttttattgtgaatg

SEQ ID NO: 2186718 - DNA, 25 bp, Homo sapien
ttattcagttttattgtgaatgtac

SEQ ID NO: 2186719 - DNA, 25 bp, Homo sapien
cctctgctgtagcacacattataaa

SEQ ID NO: 2186720 - DNA, 25 bp, Homo sapien
ctctgctgtagcacacattataaag

SEQ ID NO: 2186721 - DNA, 25 bp, Homo sapien
tctgctgtagcacacattataaagt

SEQ ID NO: 2186722 - DNA, 25 bp, Homo sapien
cagggttttgttgagctctgagcgt

SEQ ID NO: 2186723 - DNA, 25 bp, Homo sapien
ccttgtgcttctgatttcttcctca

SEQ ID NO: 2186724 - DNA, 25 bp, Homo sapien
cctggggaccttgtgcttctgattt

SEQ ID NO: 2186725 - DNA, 25 bp, Homo sapien
ggggaccttgtgcttctgatttctt

SEQ ID NO: 2186726 - DNA, 25 bp, Homo sapien
cttgtgcttctgatttcttcctcat

SEQ ID NO: 2186727 - DNA, 25 bp, Homo sapien
gttaaggtgccattcgttatatgtt

SEQ ID NO: 2186728 - DNA, 25 bp, Homo sapien
aaggtgccattcgttatatgttgat

SEQ ID NO: 2186729 - DNA, 25 bp, Homo sapien
cagttaaggtgccattcgttatatg

SEQ ID NO: 2186730 - DNA, 25 bp, Homo sapien
tccagttaaggtgccattcgttata

SEQ ID NO: 2186731 - DNA, 25 bp, Homo sapien
gaaacatgatctcacctctaaaaaa

SEQ ID NO: 2186732 - DNA, 25 bp, Homo sapien
aaacatgatctcacctctaaaaaat

SEQ ID NO: 2186733 - DNA, 25 bp, Homo sapien
taatgtgtaatgtacacaagaacta

SEQ ID NO: 2186734 - DNA, 25 bp, Homo sapien
ggtaatgtgtaatgtacacaagaac

SEQ ID NO: 2186735 - DNA, 25 bp, Homo sapien
ctggtaatgtgtaatgtacacaaga

SEQ ID NO: 2186736 - DNA, 25 bp, Homo sapien
atgtgtaatgtacacaagaactaac

SEQ ID NO: 2186737 - DNA, 25 bp, Homo sapien
tgcaaatagatgacaaattgcagat

SEQ ID NO: 2186738 - DNA, 25 bp, Homo sapien
ctgagtcattgcaaatagatgacaa

SEQ ID NO: 2186739 - DNA, 25 bp, Homo sapien
gagtcattgcaaatagatgacaaat

SEQ ID NO: 2186740 - DNA, 25 bp, Homo sapien
tcattgcaaatagatgacaaattgc

SEQ ID NO: 2186741 - DNA, 25 bp, Homo sapien
tggtcatttgtcagctacggaactt

SEQ ID NO: 2186742 - DNA, 25 bp, Homo sapien
gatagtttgccaaccgctacttgaa

SEQ ID NO: 2186743 - DNA, 25 bp, Homo sapien
caaccactcgtgttttacgcagcag

SEQ ID NO: 2186744 - DNA, 25 bp, Homo sapien
tattgttccaaagcagtgttaccca

SEQ ID NO: 2186745 - DNA, 25 bp, Homo sapien
cattgaaggtttttactatagtgat

SEQ ID NO: 2186746 - DNA, 25 bp, Homo sapien
gcattgaaggtttttactatagtga

SEQ ID NO: 2186747 - DNA, 25 bp, Homo sapien
attgaaggtttttactatagtgatt

SEQ ID NO: 2186748 - DNA, 25 bp, Homo sapien
gaatgaataggaaccgcatccacgg

SEQ ID NO: 2186749 - DNA, 25 bp, Homo sapien
cacggatcatgtagcattggcacag

SEQ ID NO: 2186750 - DNA, 25 bp, Homo sapien
tcatccactgcggacaggaatgtcg

SEQ ID NO: 2186751 - DNA, 25 bp, Homo sapien
tagaattaagccactatcgggacct

SEQ ID NO: 2186752 - DNA, 25 bp, Homo sapien
ctgtttcgtttgaagggagtaagct

SEQ ID NO: 2186753 - DNA, 25 bp, Homo sapien
tgaagggagtaagcttaaagtaaca

SEQ ID NO: 2186754 - DNA, 25 bp, Homo sapien
tatagccctgtggatgcataataca

SEQ ID NO: 2186755 - DNA, 25 bp, Homo sapien
tattataatgaacgtccctaaggga

SEQ ID NO: 2186756 - DNA, 25 bp, Homo sapien
caacccctggagacaattccggagc

SEQ ID NO: 2186757 - DNA, 25 bp, Homo sapien
taactactggcatggtttacaaaca

SEQ ID NO: 2186758 - DNA, 25 bp, Homo sapien
tggaggagggggcaaaactgacaac

SEQ ID NO: 2186759 - DNA, 25 bp, Homo sapien
attggaggagggggcaaaactgaca

SEQ ID NO: 2186760 - DNA, 25 bp, Homo sapien
gaggagggggcaaaactgacaacag

SEQ ID NO: 2186761 - DNA, 25 bp, Homo sapien
cattggaggagggggcaaaactgac

SEQ ID NO: 2186762 - DNA, 25 bp, Homo sapien
agaagccaggctgtgactagaccca

SEQ ID NO: 2186763 - DNA, 25 bp, Homo sapien
gccaggctgtgactagacccagtgt

SEQ ID NO: 2186764 - DNA, 25 bp, Homo sapien
gctgtgactagacccagtgtgtccc

SEQ ID NO: 2186765 - DNA, 25 bp, Homo sapien
ccagggcacccagaagccaggctgt

SEQ ID NO: 2186766 - DNA, 25 bp, Homo sapien
ggtggtggtgacaaactggaattat

SEQ ID NO: 2186767 - DNA, 25 bp, Homo sapien
ggtggtgacaaactggaattatcag

SEQ ID NO: 2186768 - DNA, 25 bp, Homo sapien
ggtgacaaactggaattatcagtat

SEQ ID NO: 2186769 - DNA, 25 bp, Homo sapien
gacaaactggaattatcagtatctt

SEQ ID NO: 2186770 - DNA, 25 bp, Homo sapien
agagtaaagctgaagagggcatcat

SEQ ID NO: 2186771 - DNA, 25 bp, Homo sapien
tgcccggacctcacagtctcagaga

SEQ ID NO: 2186772 - DNA, 25 bp, Homo sapien
gaagcactgattcagccatggctga

SEQ ID NO: 2186773 - DNA, 25 bp, Homo sapien
ctgacatgtcggagttggaatggac

SEQ ID NO: 2186774 - DNA, 25 bp, Homo sapien
tgttgtagctcacataggttggcaa

SEQ ID NO: 2186775 - DNA, 25 bp, Homo sapien
tgtactttatgatgaagcgcccagc

SEQ ID NO: 2186776 - DNA, 25 bp, Homo sapien
tctcgtgggctacaatgcatgcttc

SEQ ID NO: 2186777 - DNA, 25 bp, Homo sapien
ggatatccatactgccaaggtcaaa

SEQ ID NO: 2186778 - DNA, 25 bp, Homo sapien
cagtgctgagccctgagttctcaat

SEQ ID NO: 2186779 - DNA, 25 bp, Homo sapien
gctgagccctgagttctcaatggcc

SEQ ID NO: 2186780 - DNA, 25 bp, Homo sapien
gggtatccaactggtgtccactgct

SEQ ID NO: 2186781 - DNA, 25 bp, Homo sapien
ctgggtatccaactggtgtccactg

SEQ ID NO: 2186782 - DNA, 25 bp, Homo sapien
ttccagggatgttaccagaacgaca

SEQ ID NO: 2186783 - DNA, 25 bp, Homo sapien
ggaatatcttgaacgtcagtaaaac

SEQ ID NO: 2186784 - DNA, 25 bp, Homo sapien
tcttgaacgtcagtaaaacttcttc

SEQ ID NO: 2186785 - DNA, 25 bp, Homo sapien
gaacgacatgaagacaaatgatgac

SEQ ID NO: 2186786 - DNA, 25 bp, Homo sapien
aaacaaagtggagaacctctgtgca

SEQ ID NO: 2186787 - DNA, 25 bp, Homo sapien
gatgaataccaaggcctcaacttca

SEQ ID NO: 2186788 - DNA, 25 bp, Homo sapien
ggcccatccttcagtccacagatcc

SEQ ID NO: 2186789 - DNA, 25 bp, Homo sapien
cattaaagaaaggcccatccttcag

SEQ ID NO: 2186790 - DNA, 25 bp, Homo sapien
ccatccttcagtccacagatccctc

SEQ ID NO: 2186791 - DNA, 25 bp, Homo sapien
agaaactggaagtcagtgccattcc

SEQ ID NO: 2186792 - DNA, 25 bp, Homo sapien
tctcattggaaaggcagggttaaaa

SEQ ID NO: 2186793 - DNA, 25 bp, Homo sapien
tcccaggttctcattggaaaggcag

SEQ ID NO: 2186794 - DNA, 25 bp, Homo sapien
caggttctcattggaaaggcagggt

SEQ ID NO: 2186795 - DNA, 25 bp, Homo sapien
ggttctcattggaaaggcagggtta

SEQ ID NO: 2186796 - DNA, 25 bp, Homo sapien
gacatggctaagaggagcagtgacc

SEQ ID NO: 2186797 - DNA, 25 bp, Homo sapien
gaaacggatgtaggtaggcccttga

SEQ ID NO: 2186798 - DNA, 25 bp, Homo sapien
gagaaggactcctcatcccaagagg

SEQ ID NO: 2186799 - DNA, 25 bp, Homo sapien
tgaccatcgatgcaaagcttcggaa

SEQ ID NO: 2186800 - DNA, 25 bp, Homo sapien
ccatagttagagtacaatctttttc

SEQ ID NO: 2186801 - DNA, 25 bp, Homo sapien
gccacttatctgactttttctccct

SEQ ID NO: 2186802 - DNA, 25 bp, Homo sapien
tgaaatgccacttatctgacttttt

SEQ ID NO: 2186803 - DNA, 25 bp, Homo sapien
tatccatagttagagtacaatcttt

SEQ ID NO: 2186804 - DNA, 25 bp, Homo sapien
gtttcggagcctcgaaactcgagtc

SEQ ID NO: 2186805 - DNA, 25 bp, Homo sapien
tgccgaaatgcgctcactccgagac

SEQ ID NO: 2186806 - DNA, 25 bp, Homo sapien
aatgcgctcactccgagaccacgag

SEQ ID NO: 2186807 - DNA, 25 bp, Homo sapien
aaactcgagtccctgccgaaatgcg

SEQ ID NO: 2186808 - DNA, 25 bp, Homo sapien
gcccagcgcggcgtggcgcgtcggg

SEQ ID NO: 2186809 - DNA, 25 bp, Homo sapien
tgcccagcgcggcgtggcgcgtcgg

SEQ ID NO: 2186810 - DNA, 25 bp, Homo sapien
ctgcccagcgcggcgtggcgcgtcg

SEQ ID NO: 2186811 - DNA, 25 bp, Homo sapien
ccagcgcggcgtggcgcgtcgggcg

SEQ ID NO: 2186812 - DNA, 25 bp, Homo sapien
ttcagtgtcgcacgctgtaatgggt

SEQ ID NO: 2186813 - DNA, 25 bp, Homo sapien
ccgagggcgcacttctaccaagata

SEQ ID NO: 2186814 - DNA, 25 bp, Homo sapien
cggtacccatatgcccgtttcagtg

SEQ ID NO: 2186815 - DNA, 25 bp, Homo sapien
taccaagatattcctgaatccggag

SEQ ID NO: 2186816 - DNA, 25 bp, Homo sapien
gattcagttcgatggttttcctggt

SEQ ID NO: 2186817 - DNA, 25 bp, Homo sapien
cgagaaatgtcccagtaaaggattc

SEQ ID NO: 2186818 - DNA, 25 bp, Homo sapien
cagtaaaggattcagttcgatggtt

SEQ ID NO: 2186819 - DNA, 25 bp, Homo sapien
agagagcagtaaacgagaaatgtcc

SEQ ID NO: 2186820 - DNA, 25 bp, Homo sapien
agaaaccgggatctcgggcgctctg

SEQ ID NO: 2186821 - DNA, 25 bp, Homo sapien
ggatctcgggcgctctgcctgctgg

SEQ ID NO: 2186822 - DNA, 25 bp, Homo sapien
cccagaaaccgggatctcgggcgct

SEQ ID NO: 2186823 - DNA, 25 bp, Homo sapien
aaaccgggatctcgggcgctctgcc

SEQ ID NO: 2186824 - DNA, 25 bp, Homo sapien
cctatgctgttaggatagcggtcac

SEQ ID NO: 2186825 - DNA, 25 bp, Homo sapien
gaagtcaggcccaaaaacacagaca

SEQ ID NO: 2186826 - DNA, 25 bp, Homo sapien
tatagtcacaaagcggaatcccaga

SEQ ID NO: 2186827 - DNA, 25 bp, Homo sapien
taccagtatatttgcaatagcccag

SEQ ID NO: 2186828 - DNA, 25 bp, Homo sapien
ctccatggtataggctttggtggat

SEQ ID NO: 2186829 - DNA, 25 bp, Homo sapien
gagtgaagtcactgtgtgatacagc

SEQ ID NO: 2186830 - DNA, 25 bp, Homo sapien
aaaccaatcactgccaacttgagtg

SEQ ID NO: 2186831 - DNA, 25 bp, Homo sapien
ctttggtggatctaggtgagaaacc

SEQ ID NO: 2186832 - DNA, 25 bp, Homo sapien
gggtagcctcggaccatgactggat

SEQ ID NO: 2186833 - DNA, 25 bp, Homo sapien
catgactggattctccaaaggcccc

SEQ ID NO: 2186834 - DNA, 25 bp, Homo sapien
ctggagtccgttcagggtagcctcg

SEQ ID NO: 2186835 - DNA, 25 bp, Homo sapien
cagcccctggagtccgttcagggta

SEQ ID NO: 2186836 - DNA, 25 bp, Homo sapien
gatggcttgctcattgccaacttca

SEQ ID NO: 2186837 - DNA, 25 bp, Homo sapien
gaatggcttccaacgtgaagtcctg

SEQ ID NO: 2186838 - DNA, 25 bp, Homo sapien
ctcttctcagttgaaccccagcagg

SEQ ID NO: 2186839 - DNA, 25 bp, Homo sapien
agagaaaatatgtcatgctggtttt

SEQ ID NO: 2186840 - DNA, 25 bp, Homo sapien
atcagcatggcagggccttccacat

SEQ ID NO: 2186841 - DNA, 25 bp, Homo sapien
ccgatcagcatggcagggccttcca

SEQ ID NO: 2186842 - DNA, 25 bp, Homo sapien
cgatcagcatggcagggccttccac

SEQ ID NO: 2186843 - DNA, 25 bp, Homo sapien
gatcagcatggcagggccttccaca

SEQ ID NO: 2186844 - DNA, 25 bp, Homo sapien
cctaaatgtgtcaccagaggctggt

SEQ ID NO: 2186845 - DNA, 25 bp, Homo sapien
ggatggagataatgagtggtcagac

SEQ ID NO: 2186846 - DNA, 25 bp, Homo sapien
aatcttcctaaatgtgtcaccagag

SEQ ID NO: 2186847 - DNA, 25 bp, Homo sapien
tgagtggtcagaccgaatcttccta

SEQ ID NO: 2186848 - DNA, 25 bp, Homo sapien
ctattgcgggtacattgaatttcct

SEQ ID NO: 2186849 - DNA, 25 bp, Homo sapien
ttgcgggtacattgaatttcctgga

SEQ ID NO: 2186850 - DNA, 25 bp, Homo sapien
tattgcgggtacattgaatttcctg

SEQ ID NO: 2186851 - DNA, 25 bp, Homo sapien
attgcgggtacattgaatttcctgg

SEQ ID NO: 2186852 - DNA, 25 bp, Homo sapien
ctcattaagcagcagtttagaatct

SEQ ID NO: 2186853 - DNA, 25 bp, Homo sapien
tagaatcttctcttggtctgctgtc

SEQ ID NO: 2186854 - DNA, 25 bp, Homo sapien
ctcttggtctgctgtcctgaggatc

SEQ ID NO: 2186855 - DNA, 25 bp, Homo sapien
cccacagctcattaagcagcagttt

SEQ ID NO: 2186856 - DNA, 25 bp, Homo sapien
ttgtggactaccctcttggcttgag

SEQ ID NO: 2186857 - DNA, 25 bp, Homo sapien
cctcttggcttgagtttcaccctgg

SEQ ID NO: 2186858 - DNA, 25 bp, Homo sapien
ttaactataggatcggccagtccca

SEQ ID NO: 2186859 - DNA, 25 bp, Homo sapien
tataggatcggccagtcccatcatc

SEQ ID NO: 2186860 - DNA, 25 bp, Homo sapien
acccatcttggagtgaacccttcct

SEQ ID NO: 2186861 - DNA, 25 bp, Homo sapien
ggagtgaacccttcctgtaaggtgc

SEQ ID NO: 2186862 - DNA, 25 bp, Homo sapien
taagctgtgggtgtgaacattttca

SEQ ID NO: 2186863 - DNA, 25 bp, Homo sapien
ttaagctgtgggtgtgaacattttc

SEQ ID NO: 2186864 - DNA, 25 bp, Homo sapien
gctgtgggtgtgaacattttcacac

SEQ ID NO: 2186865 - DNA, 25 bp, Homo sapien
aagctgtgggtgtgaacattttcac

SEQ ID NO: 2186866 - DNA, 25 bp, Homo sapien
gacccagatgttcggcatcagtctt

SEQ ID NO: 2186867 - DNA, 25 bp, Homo sapien
caaacggttttgcatggtgctgccc

SEQ ID NO: 2186868 - DNA, 25 bp, Homo sapien
cttcgccttggctggcgggagctca

SEQ ID NO: 2186869 - DNA, 25 bp, Homo sapien
tcttccatgatgacgtcttcgcctt

SEQ ID NO: 2186870 - DNA, 25 bp, Homo sapien
tgtacccccaagaccaagtgcatct

SEQ ID NO: 2186871 - DNA, 25 bp, Homo sapien
tgtgtgactggtaaccttagccata

SEQ ID NO: 2186872 - DNA, 25 bp, Homo sapien
tacagttttgtatcaccttggcaaa

SEQ ID NO: 2186873 - DNA, 25 bp, Homo sapien
caagaccaagtgcatcttagacctt

SEQ ID NO: 2186874 - DNA, 25 bp, Homo sapien
tgcccatcatcagaggatggcagat

SEQ ID NO: 2186875 - DNA, 25 bp, Homo sapien
tcatcagaggatggcagatgtaatt

SEQ ID NO: 2186876 - DNA, 25 bp, Homo sapien
ggcagatgtaattgtttctacccat

SEQ ID NO: 2186877 - DNA, 25 bp, Homo sapien
agaggatggcagatgtaattgtttc

SEQ ID NO: 2186878 - DNA, 25 bp, Homo sapien
ccctcttttctgctctgttgccacc

SEQ ID NO: 2186879 - DNA, 25 bp, Homo sapien
gcttcactgggagagcatgcttcct

SEQ ID NO: 2186880 - DNA, 25 bp, Homo sapien
tttaagcttggccataagacttgct

SEQ ID NO: 2186881 - DNA, 25 bp, Homo sapien
tgccagggcttcactgggagagcat

SEQ ID NO: 2186882 - DNA, 25 bp, Homo sapien
cactgggagagcatgcttccttctc

SEQ ID NO: 2186883 - DNA, 25 bp, Homo sapien
agctggaacgtgctgctaacaccca

SEQ ID NO: 2186884 - DNA, 25 bp, Homo sapien
ttcaaatggttttgccccacaagtg

SEQ ID NO: 2186885 - DNA, 25 bp, Homo sapien
cttgtctaccttgcaaaccagctgg

SEQ ID NO: 2186886 - DNA, 25 bp, Homo sapien
tgccttcagtgggtatgtgccctgc

SEQ ID NO: 2186887 - DNA, 25 bp, Homo sapien
gtttcaggattcatgagtagttcag

SEQ ID NO: 2186888 - DNA, 25 bp, Homo sapien
agtagttcaggaaagaactgttgag

SEQ ID NO: 2186889 - DNA, 25 bp, Homo sapien
gaaagaactgttgagttatctcagc

SEQ ID NO: 2186890 - DNA, 25 bp, Homo sapien
gagttatctcagctgtgctgaacat

SEQ ID NO: 2186891 - DNA, 25 bp, Homo sapien
catccataagcatgggagggcgaga

SEQ ID NO: 2186892 - DNA, 25 bp, Homo sapien
gggcgagacaagaccgcttgaaaat

SEQ ID NO: 2186893 - DNA, 25 bp, Homo sapien
cctgtgaagtctgcactctggattt

SEQ ID NO: 2186894 - DNA, 25 bp, Homo sapien
caatagccccagcaccaaaagggtg

SEQ ID NO: 2186895 - DNA, 25 bp, Homo sapien
gcttctcgaattcacctgctcaggg

SEQ ID NO: 2186896 - DNA, 25 bp, Homo sapien
tgtaaggctccagcgttgcatgact

SEQ ID NO: 2186897 - DNA, 25 bp, Homo sapien
cacctggaagtgaagtggagtttcc

SEQ ID NO: 2186898 - DNA, 25 bp, Homo sapien
caagattgcactgcgctgaatcagg

SEQ ID NO: 2186899 - DNA, 25 bp, Homo sapien
aggctctcagttcaaatcgcagcag

SEQ ID NO: 2186900 - DNA, 25 bp, Homo sapien
tagccacgcctttgtatttggtttg

SEQ ID NO: 2186901 - DNA, 25 bp, Homo sapien
ggaaaatgatgaggtagccacgcct

SEQ ID NO: 2186902 - DNA, 25 bp, Homo sapien
ccattaattggatctggaaagtgcc

SEQ ID NO: 2186903 - DNA, 25 bp, Homo sapien
gggagaaagatgtgctcaagctggg

SEQ ID NO: 2186904 - DNA, 25 bp, Homo sapien
gaaagatgtgctcaagctgggccat

SEQ ID NO: 2186905 - DNA, 25 bp, Homo sapien
gagaaagatgtgctcaagctgggcc

SEQ ID NO: 2186906 - DNA, 25 bp, Homo sapien
agaaagatgtgctcaagctgggcca

SEQ ID NO: 2186907 - DNA, 25 bp, Homo sapien
aactccagccaaacatagagaaatg

SEQ ID NO: 2186908 - DNA, 25 bp, Homo sapien
actccagccaaacatagagaaatgc

SEQ ID NO: 2186909 - DNA, 25 bp, Homo sapien
aaactccagccaaacatagagaaat

SEQ ID NO: 2186910 - DNA, 25 bp, Homo sapien
ggaagaagcacaaccagcgtctgaa

SEQ ID NO: 2186911 - DNA, 25 bp, Homo sapien
tacacgcgaacagtctaggcgagtg

SEQ ID NO: 2186912 - DNA, 25 bp, Homo sapien
aaaaccctggaatactgtggcttga

SEQ ID NO: 2186913 - DNA, 25 bp, Homo sapien
tgtggcttgaagaaattacacgcga

SEQ ID NO: 2186914 - DNA, 25 bp, Homo sapien
ttttactagaatatcttgcctcctc

SEQ ID NO: 2186915 - DNA, 25 bp, Homo sapien
cacttcaccactgaattggtcatta

SEQ ID NO: 2186916 - DNA, 25 bp, Homo sapien
tcaggtcctacatcttgaaaccttg

SEQ ID NO: 2186917 - DNA, 25 bp, Homo sapien
taatatcatactgcttgatgttgct

SEQ ID NO: 2186918 - DNA, 25 bp, Homo sapien
tcatagtagattttgataatgtgtt

SEQ ID NO: 2186919 - DNA, 25 bp, Homo sapien
caaccacagtgcaagttcatagtag

SEQ ID NO: 2186920 - DNA, 25 bp, Homo sapien
ctgcaggggaggaactatttttgtg

SEQ ID NO: 2186921 - DNA, 25 bp, Homo sapien
gtttattatacatcaaccacagtgc

SEQ ID NO: 2186922 - DNA, 25 bp, Homo sapien
ttgcgtacttgcctttaatgtgggt

SEQ ID NO: 2186923 - DNA, 25 bp, Homo sapien
gcctgttgcgtgagaatcgaggctt

SEQ ID NO: 2186924 - DNA, 25 bp, Homo sapien
tcgaggcttgcgtacttgcctttaa

SEQ ID NO: 2186925 - DNA, 25 bp, Homo sapien
tgcgtgagaatcgaggcttgcgtac

SEQ ID NO: 2186926 - DNA, 25 bp, Homo sapien
tttcaaaagtttgtcctgcctggct

SEQ ID NO: 2186927 - DNA, 25 bp, Homo sapien
cacgaaggtgctgaaagactttttc

SEQ ID NO: 2186928 - DNA, 25 bp, Homo sapien
gcattgcctgccaaatcacactaaa

SEQ ID NO: 2186929 - DNA, 25 bp, Homo sapien
tggcttcctgctttttcggccgact

SEQ ID NO: 2186930 - DNA, 25 bp, Homo sapien
cctggaagtcttcagaaggacaaat

SEQ ID NO: 2186931 - DNA, 25 bp, Homo sapien
tggaagtcttcagaaggacaaatct

SEQ ID NO: 2186932 - DNA, 25 bp, Homo sapien
aattaccagcaaagccgattccctc

SEQ ID NO: 2186933 - DNA, 25 bp, Homo sapien
cctcgtgggaatccacttcagcttt

SEQ ID NO: 2186934 - DNA, 25 bp, Homo sapien
gagcccagtgggaaaccttagtcat

SEQ ID NO: 2186935 - DNA, 25 bp, Homo sapien
cagagagagaacttgatcccagaca

SEQ ID NO: 2186936 - DNA, 25 bp, Homo sapien
cagatggctgctacatgtgggctga

SEQ ID NO: 2186937 - DNA, 25 bp, Homo sapien
aaggatgagaagcgattctgaggac

SEQ ID NO: 2186938 - DNA, 25 bp, Homo sapien
tgctattctgaagaccgcctgacca

SEQ ID NO: 2186939 - DNA, 25 bp, Homo sapien
tcgtctaatgagtggccacgtccaa

SEQ ID NO: 2186940 - DNA, 25 bp, Homo sapien
caggctcatcaggatttctataggc

SEQ ID NO: 2186941 - DNA, 25 bp, Homo sapien
tttgctgtccaagtacttccaggct

SEQ ID NO: 2186942 - DNA, 25 bp, Homo sapien
ttgagtaggccaccaaatggcccac

SEQ ID NO: 2186943 - DNA, 25 bp, Homo sapien
caagtgggtgatcagctggcagaac

SEQ ID NO: 2186944 - DNA, 25 bp, Homo sapien
ccagagctgacccagcgtgttgagt

SEQ ID NO: 2186945 - DNA, 25 bp, Homo sapien
tcagccccactagaccagacaagtg

SEQ ID NO: 2186946 - DNA, 25 bp, Homo sapien
ctagagattttagctgtgcagcatt

SEQ ID NO: 2186947 - DNA, 25 bp, Homo sapien
ccttgatgtctcagatgtgtggcca

SEQ ID NO: 2186948 - DNA, 25 bp, Homo sapien
caaagagtgaggttcttccaagcga

SEQ ID NO: 2186949 - DNA, 25 bp, Homo sapien
cacgggtgtgtgacttaggtaagcc

SEQ ID NO: 2186950 - DNA, 25 bp, Homo sapien
gtaagcctgccaaagtcgcacactg

SEQ ID NO: 2186951 - DNA, 25 bp, Homo sapien
cattcgtcctcacactggaccaaga

SEQ ID NO: 2186952 - DNA, 25 bp, Homo sapien
attcgtcctcacactggaccaagaa

SEQ ID NO: 2186953 - DNA, 25 bp, Homo sapien
ttcgtcctcacactggaccaagaac

SEQ ID NO: 2186954 - DNA, 25 bp, Homo sapien
tcgtcctcacactggaccaagaaca

SEQ ID NO: 2186955 - DNA, 25 bp, Homo sapien
tcattcggactgatggactgtggtt

SEQ ID NO: 2186956 - DNA, 25 bp, Homo sapien
ggactgtggtttcttgtacgtacac

SEQ ID NO: 2186957 - DNA, 25 bp, Homo sapien
cacagatgcagctgacgcaagggtt

SEQ ID NO: 2186958 - DNA, 25 bp, Homo sapien
gctgacgcaagggttttgtgataca

SEQ ID NO: 2186959 - DNA, 25 bp, Homo sapien
gagaggagcaccatgttcaagatac

SEQ ID NO: 2186960 - DNA, 25 bp, Homo sapien
atgaacatgtcatctagtaccattc

SEQ ID NO: 2186961 - DNA, 25 bp, Homo sapien
aacatgtcatctagtaccattctag

SEQ ID NO: 2186962 - DNA, 25 bp, Homo sapien
atgttcaagatacctacccttggag

SEQ ID NO: 2186963 - DNA, 25 bp, Homo sapien
ttgagggcagtcagacggagaggcc

SEQ ID NO: 2186964 - DNA, 25 bp, Homo sapien
gaagattcggatttccgatttagaa

SEQ ID NO: 2186965 - DNA, 25 bp, Homo sapien
tagaaacagctttcgggctgtggaa

SEQ ID NO: 2186966 - DNA, 25 bp, Homo sapien
cagtgtgaccgtgaacttgagggca

SEQ ID NO: 2186967 - DNA, 25 bp, Homo sapien
gaatcctgtggggaccctaaaggca

SEQ ID NO: 2186968 - DNA, 25 bp, Homo sapien
ctgggccatcaacccagttaattgg

SEQ ID NO: 2186969 - DNA, 25 bp, Homo sapien
agacactcccttctgggatgaatcc

SEQ ID NO: 2186970 - DNA, 25 bp, Homo sapien
ggccatcaacccagttaattggaaa

SEQ ID NO: 2186971 - DNA, 25 bp, Homo sapien
gaaactgcagaacagatctgtttgt

SEQ ID NO: 2186972 - DNA, 25 bp, Homo sapien
gtggaatttttctgaaactgcagaa

SEQ ID NO: 2186973 - DNA, 25 bp, Homo sapien
ctggtggaatttttctgaaactgca

SEQ ID NO: 2186974 - DNA, 25 bp, Homo sapien
tgaaactgcagaacagatctgtttg

SEQ ID NO: 2186975 - DNA, 25 bp, Homo sapien
tgtctctgcctgtaagttaactgaa

SEQ ID NO: 2186976 - DNA, 25 bp, Homo sapien
gtctctgcctgtaagttaactgaaa

SEQ ID NO: 2186977 - DNA, 25 bp, Homo sapien
ttctgagatacattagtggactgtc

SEQ ID NO: 2186978 - DNA, 25 bp, Homo sapien
tacattagtggactgtctctgcctg

SEQ ID NO: 2186979 - DNA, 25 bp, Homo sapien
aggctggagtggctggagtgaagtg

SEQ ID NO: 2186980 - DNA, 25 bp, Homo sapien
ctaggattataggtgcccaaccacc

SEQ ID NO: 2186981 - DNA, 25 bp, Homo sapien
gagtgaagtggtatgattttggctc

SEQ ID NO: 2186982 - DNA, 25 bp, Homo sapien
acacctggctaatttctgtattttt

SEQ ID NO: 2186983 - DNA, 25 bp, Homo sapien
tcttgaatgcagaaatgttagtgct

SEQ ID NO: 2186984 - DNA, 25 bp, Homo sapien
aatgttagtgcttactggttaaaat

SEQ ID NO: 2186985 - DNA, 25 bp, Homo sapien
agtgcttactggttaaaatagaaca

SEQ ID NO: 2186986 - DNA, 25 bp, Homo sapien
tgttagtgcttactggttaaaatag

SEQ ID NO: 2186987 - DNA, 25 bp, Homo sapien
ccttaatgttaggtgcccctgggcg

SEQ ID NO: 2186988 - DNA, 25 bp, Homo sapien
ttatatggcgatggtgctgctaacc

SEQ ID NO: 2186989 - DNA, 25 bp, Homo sapien
tggaaaagatgaggtctgcctgact

SEQ ID NO: 2186990 - DNA, 25 bp, Homo sapien
cgctgggattgctctagcctgtaag

SEQ ID NO: 2186991 - DNA, 25 bp, Homo sapien
tgcatgcagtttgtacattagtgca

SEQ ID NO: 2186992 - DNA, 25 bp, Homo sapien
tggtgctgcagcctgttcgcgctga

SEQ ID NO: 2186993 - DNA, 25 bp, Homo sapien
tcacagcattctaccaaccatagca

SEQ ID NO: 2186994 - DNA, 25 bp, Homo sapien
gattgagcaggtagtaattgcatgc

SEQ ID NO: 2186995 - DNA, 25 bp, Homo sapien
tgaagtaccataccagttctgaggc

SEQ ID NO: 2186996 - DNA, 25 bp, Homo sapien
aaacatgtagcgtggtgggacactc

SEQ ID NO: 2186997 - DNA, 25 bp, Homo sapien
gtttgtttcaccattccagcaagtg

SEQ ID NO: 2186998 - DNA, 25 bp, Homo sapien
tccgggaggtcaaaaccaaggctca

SEQ ID NO: 2186999 - DNA, 25 bp, Homo sapien
tctgtactgggagaccgcactccag

SEQ ID NO: 2187000 - DNA, 25 bp, Homo sapien
actgggagaccgcactccagagtct

SEQ ID NO: 2187001 - DNA, 25 bp, Homo sapien
tgtactgggagaccgcactccagag

SEQ ID NO: 2187002 - DNA, 25 bp, Homo sapien
ggagaccgcactccagagtctgcag

SEQ ID NO: 2187003 - DNA, 25 bp, Homo sapien
cagtgcttcaagccaacagagctta

SEQ ID NO: 2187004 - DNA, 25 bp, Homo sapien
gtgcttcaagccaacagagcttaaa

SEQ ID NO: 2187005 - DNA, 25 bp, Homo sapien
gagcttaaaactgcagtccctaatt

SEQ ID NO: 2187006 - DNA, 25 bp, Homo sapien
gcttaaaactgcagtccctaattta

SEQ ID NO: 2187007 - DNA, 25 bp, Homo sapien
gaaagtgtataaccctcttcaacaa

SEQ ID NO: 2187008 - DNA, 25 bp, Homo sapien
ctcattaagaatatccgaaagtgta

SEQ ID NO: 2187009 - DNA, 25 bp, Homo sapien
gatcttccttagtgatctcattaag

SEQ ID NO: 2187010 - DNA, 25 bp, Homo sapien
cgtagtcgaaggtatcttagatctt

SEQ ID NO: 2187011 - DNA, 25 bp, Homo sapien
tttgcatcagctccttgcagccgca

SEQ ID NO: 2187012 - DNA, 25 bp, Homo sapien
tgcagccgcaaccagtctataagct

SEQ ID NO: 2187013 - DNA, 25 bp, Homo sapien
tgtctttgcatcagctccttgcagc

SEQ ID NO: 2187014 - DNA, 25 bp, Homo sapien
ctttatctgttctctgcccgtaggg

SEQ ID NO: 2187015 - DNA, 25 bp, Homo sapien
ctgttctagagtttgccgcagaaga

SEQ ID NO: 2187016 - DNA, 25 bp, Homo sapien
tctgttctagagtttgccgcagaag

SEQ ID NO: 2187017 - DNA, 25 bp, Homo sapien
gagttttctgttctagagtttgccg

SEQ ID NO: 2187018 - DNA, 25 bp, Homo sapien
ttttctgttctagagtttgccgcag

SEQ ID NO: 2187019 - DNA, 25 bp, Homo sapien
cggtggctgggggatagccctcttc

SEQ ID NO: 2187020 - DNA, 25 bp, Homo sapien
acaggtaggctcaaagtgggctcgg

SEQ ID NO: 2187021 - DNA, 25 bp, Homo sapien
atgtccttatctaccccttcagtct

SEQ ID NO: 2187022 - DNA, 25 bp, Homo sapien
tggtctcctgtctgagctcacccag

SEQ ID NO: 2187023 - DNA, 25 bp, Homo sapien
ctacacagtgcattcgggagggtgg

SEQ ID NO: 2187024 - DNA, 25 bp, Homo sapien
cacagtgcattcgggagggtgggct

SEQ ID NO: 2187025 - DNA, 25 bp, Homo sapien
cagtgcattcgggagggtgggctgg

SEQ ID NO: 2187026 - DNA, 25 bp, Homo sapien
tacacagtgcattcgggagggtggg

SEQ ID NO: 2187027 - DNA, 25 bp, Homo sapien
aatggtgaccgcggcctgcaccgct

SEQ ID NO: 2187028 - DNA, 25 bp, Homo sapien
gcctgcaccgctcggcggatgatgt

SEQ ID NO: 2187029 - DNA, 25 bp, Homo sapien
cggcctgcaccgctcggcggatgat

SEQ ID NO: 2187030 - DNA, 25 bp, Homo sapien
tgagaatggtgaccgcggcctgcac

SEQ ID NO: 2187031 - DNA, 25 bp, Homo sapien
atttcctggacttcattgtttagga

SEQ ID NO: 2187032 - DNA, 25 bp, Homo sapien
cttcattgtttaggaggagctgctg

SEQ ID NO: 2187033 - DNA, 25 bp, Homo sapien
ccagatgccatttcctggacttcat

SEQ ID NO: 2187034 - DNA, 25 bp, Homo sapien
tcctggacttcattgtttaggagga

SEQ ID NO: 2187035 - DNA, 25 bp, Homo sapien
caggtgtatacagttaagaagagat

SEQ ID NO: 2187036 - DNA, 25 bp, Homo sapien
tcaggtgtatacagttaagaagaga

SEQ ID NO: 2187037 - DNA, 25 bp, Homo sapien
tgtatacagttaagaagagatgggg

SEQ ID NO: 2187038 - DNA, 25 bp, Homo sapien
ggtgtatacagttaagaagagatgg

SEQ ID NO: 2187039 - DNA, 25 bp, Homo sapien
ggtgtgttccctagggccagatgga

SEQ ID NO: 2187040 - DNA, 25 bp, Homo sapien
ctggtgtgttccctagggccagatg

SEQ ID NO: 2187041 - DNA, 25 bp, Homo sapien
tgttccctagggccagatggagcac

SEQ ID NO: 2187042 - DNA, 25 bp, Homo sapien
tgtgttccctagggccagatggagc

SEQ ID NO: 2187043 - DNA, 25 bp, Homo sapien
tgatattgtggtcgccatcacccgg

SEQ ID NO: 2187044 - DNA, 25 bp, Homo sapien
ccaggtccaccttgagctttgatat

SEQ ID NO: 2187045 - DNA, 25 bp, Homo sapien
tcctgaaatccgaacagcaccaggt

SEQ ID NO: 2187046 - DNA, 25 bp, Homo sapien
tctgactgatggacgagctgtcaaa

SEQ ID NO: 2187047 - DNA, 25 bp, Homo sapien
gcaaattcatgtttcggcagagctt

SEQ ID NO: 2187048 - DNA, 25 bp, Homo sapien
gtgcctggaatcactgcggtatctg

SEQ ID NO: 2187049 - DNA, 25 bp, Homo sapien
actatgcagatgttccagggcggca

SEQ ID NO: 2187050 - DNA, 25 bp, Homo sapien
ggctttctgctacaatctggctggt

SEQ ID NO: 2187051 - DNA, 25 bp, Homo sapien
cactgtccttgcgtagcaggaagag

SEQ ID NO: 2187052 - DNA, 25 bp, Homo sapien
tcctgcaggttggaagccacctggt

SEQ ID NO: 2187053 - DNA, 25 bp, Homo sapien
ctcctcccagaggattttgtacagg

SEQ ID NO: 2187054 - DNA, 25 bp, Homo sapien
tacaggatggcacggcgctcactgt

SEQ ID NO: 2187055 - DNA, 25 bp, Homo sapien
tgtcatgttaggacgccctggagaa

SEQ ID NO: 2187056 - DNA, 25 bp, Homo sapien
ctgtggacaaacacgtgtgacaatc

SEQ ID NO: 2187057 - DNA, 25 bp, Homo sapien
tgtgacaatctctgtgcgtgccggg

SEQ ID NO: 2187058 - DNA, 25 bp, Homo sapien
gctgagaggtaactgcgatgcagtc

SEQ ID NO: 2187059 - DNA, 25 bp, Homo sapien
cagacatgcagtgttctgtcaaccc

SEQ ID NO: 2187060 - DNA, 25 bp, Homo sapien
ttgccggaggaaggacagacatgca

SEQ ID NO: 2187061 - DNA, 25 bp, Homo sapien
agtgttctgtcaacccccacagcag

SEQ ID NO: 2187062 - DNA, 25 bp, Homo sapien
gtgctcaagaagatgaaattgccgg

SEQ ID NO: 2187063 - DNA, 25 bp, Homo sapien
ggtcctctcaaagagtgcgtcaggc

SEQ ID NO: 2187064 - DNA, 25 bp, Homo sapien
ccgggtcctctcaaagagtgcgtca

SEQ ID NO: 2187065 - DNA, 25 bp, Homo sapien
ggcgcccgggtcctctcaaagagtg

SEQ ID NO: 2187066 - DNA, 25 bp, Homo sapien
ctctcaaagagtgcgtcaggctggg

SEQ ID NO: 2187067 - DNA, 25 bp, Homo sapien
ggcagggccaggacgacaccgcggg

SEQ ID NO: 2187068 - DNA, 25 bp, Homo sapien
ctgctggtggccatgggctctccct

SEQ ID NO: 2187069 - DNA, 25 bp, Homo sapien
gcagggccaggacgacaccgcgggg

SEQ ID NO: 2187070 - DNA, 25 bp, Homo sapien
gccatgggctctccctgtgtgggca

SEQ ID NO: 2187071 - DNA, 25 bp, Homo sapien
gaaggtgtcactggacttcggtggc

SEQ ID NO: 2187072 - DNA, 25 bp, Homo sapien
taaaatgaaggctcgggcttcagct

SEQ ID NO: 2187073 - DNA, 25 bp, Homo sapien
gaaggcaattcggttcttcttgccc

SEQ ID NO: 2187074 - DNA, 25 bp, Homo sapien
cacctgccttaagaaaccctctctc

SEQ ID NO: 2187075 - DNA, 25 bp, Homo sapien
gggtcaggctcgaaacaggataaaa

SEQ ID NO: 2187076 - DNA, 25 bp, Homo sapien
gcaatgcagggtgcctcacaggtgg

SEQ ID NO: 2187077 - DNA, 25 bp, Homo sapien
tgagcggtagggaggttaagctggc

SEQ ID NO: 2187078 - DNA, 25 bp, Homo sapien
gggtgcctcacaggtggctcctctc

SEQ ID NO: 2187079 - DNA, 25 bp, Homo sapien
tagggaggttaagctggcactgttc

SEQ ID NO: 2187080 - DNA, 25 bp, Homo sapien
ggctctgaacccaagcagctgatag

SEQ ID NO: 2187081 - DNA, 25 bp, Homo sapien
cggtcaaagtgctgaggacggtcat

SEQ ID NO: 2187082 - DNA, 25 bp, Homo sapien
tgcaggtatcagaagactcttgtcg

SEQ ID NO: 2187083 - DNA, 25 bp, Homo sapien
tcttgtcgacttgaggtcttggcct

SEQ ID NO: 2187084 - DNA, 25 bp, Homo sapien
gcagaaacctgcactcacacctcca

SEQ ID NO: 2187085 - DNA, 25 bp, Homo sapien
agaaacctgcactcacacctccaag

SEQ ID NO: 2187086 - DNA, 25 bp, Homo sapien
ctgcactcacacctccaagttcctt

SEQ ID NO: 2187087 - DNA, 25 bp, Homo sapien
aaacctgcactcacacctccaagtt

SEQ ID NO: 2187088 - DNA, 25 bp, Homo sapien
tgccccatggaaggtcagtgctggt

SEQ ID NO: 2187089 - DNA, 25 bp, Homo sapien
cggcctcatcatccataagcaatgg

SEQ ID NO: 2187090 - DNA, 25 bp, Homo sapien
ggaatcgcgttctatcagggccgtg

SEQ ID NO: 2187091 - DNA, 25 bp, Homo sapien
aaggcaccgtgtttggcagagaagc

SEQ ID NO: 2187092 - DNA, 25 bp, Homo sapien
tgaggtcacaaggaaggacatccct

SEQ ID NO: 2187093 - DNA, 25 bp, Homo sapien
ccccacccgcaatgctcaatctgca

SEQ ID NO: 2187094 - DNA, 25 bp, Homo sapien
tcctggcatcagcttcccgtgaggt

SEQ ID NO: 2187095 - DNA, 25 bp, Homo sapien
ttcccgtgaggtcacaaggaaggac

SEQ ID NO: 2187096 - DNA, 25 bp, Homo sapien
cctgcggctcaccaagctcatggaa

SEQ ID NO: 2187097 - DNA, 25 bp, Homo sapien
aagctcatggaacggaggcttgctg

SEQ ID NO: 2187098 - DNA, 25 bp, Homo sapien
ttggtcaattatctcaggtgccatg

SEQ ID NO: 2187099 - DNA, 25 bp, Homo sapien
accatatccgcgaggcccttggtca

SEQ ID NO: 2187100 - DNA, 25 bp, Homo sapien
ccttgtccatctgactcaaacgact

SEQ ID NO: 2187101 - DNA, 25 bp, Homo sapien
tttgcagccagacgagaacagactt

SEQ ID NO: 2187102 - DNA, 25 bp, Homo sapien
aattcagactgtgtgcgctccttca

SEQ ID NO: 2187103 - DNA, 25 bp, Homo sapien
gattacaccctttgagtccaatggg

SEQ ID NO: 2187104 - DNA, 25 bp, Homo sapien
tatgagtaggtacaacgagcatttc

SEQ ID NO: 2187105 - DNA, 25 bp, Homo sapien
gaggttccaaaatcggagattttca

SEQ ID NO: 2187106 - DNA, 25 bp, Homo sapien
agattttcaccactccgctgtaggt

SEQ ID NO: 2187107 - DNA, 25 bp, Homo sapien
tcaccactccgctgtaggtgttcac

SEQ ID NO: 2187108 - DNA, 25 bp, Homo sapien
tcacacccgcaagacgtttcgaggt

SEQ ID NO: 2187109 - DNA, 25 bp, Homo sapien
tgtgcacgatctggttttcatgaag

SEQ ID NO: 2187110 - DNA, 25 bp, Homo sapien
gattgtcggttccttcatcggcccc

SEQ ID NO: 2187111 - DNA, 25 bp, Homo sapien
tgaagatacttaaggccctccagga

SEQ ID NO: 2187112 - DNA, 25 bp, Homo sapien
ccatttggatcgcagaagagcagaa

SEQ ID NO: 2187113 - DNA, 25 bp, Homo sapien
aatgtagccgttctctgaaacagag

SEQ ID NO: 2187114 - DNA, 25 bp, Homo sapien
gcccaggtactgaacgatattgcgg

SEQ ID NO: 2187115 - DNA, 25 bp, Homo sapien
cttaaggtacttgtgcagggctatc

SEQ ID NO: 2187116 - DNA, 25 bp, Homo sapien
gcagggctatctcctcgtgcagagg

SEQ ID NO: 2187117 - DNA, 25 bp, Homo sapien
taaggagagtaattcattcctcttc

SEQ ID NO: 2187118 - DNA, 25 bp, Homo sapien
tggcacttggcactttcactcagag

SEQ ID NO: 2187119 - DNA, 25 bp, Homo sapien
tctgcatttgccaccgaaccagcag

SEQ ID NO: 2187120 - DNA, 25 bp, Homo sapien
tgcgttctaaaaacactctgtgtac

SEQ ID NO: 2187121 - DNA, 25 bp, Homo sapien
tcggtccccagtgccagcccagagt

SEQ ID NO: 2187122 - DNA, 25 bp, Homo sapien
ttcggtccccagtgccagcccagag

SEQ ID NO: 2187123 - DNA, 25 bp, Homo sapien
tttcggtccccagtgccagcccaga

SEQ ID NO: 2187124 - DNA, 25 bp, Homo sapien
ctttcggtccccagtgccagcccag

SEQ ID NO: 2187125 - DNA, 25 bp, Homo sapien
gggatctggggtgtggagacggcac

SEQ ID NO: 2187126 - DNA, 25 bp, Homo sapien
catgagcggtgggtatgggatctgg

SEQ ID NO: 2187127 - DNA, 25 bp, Homo sapien
atgagcggtgggtatgggatctggg

SEQ ID NO: 2187128 - DNA, 25 bp, Homo sapien
tatgggatctggggtgtggagacgg

SEQ ID NO: 2187129 - DNA, 25 bp, Homo sapien
cgaaatgcggaaggcccgcctggac

SEQ ID NO: 2187130 - DNA, 25 bp, Homo sapien
ccgaaatgcggaaggcccgcctgga

SEQ ID NO: 2187131 - DNA, 25 bp, Homo sapien
ttgattgctcagatctcggccagca

SEQ ID NO: 2187132 - DNA, 25 bp, Homo sapien
tctcggccagcatacacaatcccat

SEQ ID NO: 2187133 - DNA, 25 bp, Homo sapien
atctctctccgggatttctttgatg

SEQ ID NO: 2187134 - DNA, 25 bp, Homo sapien
ctttgatggctattcgcacttgatt

SEQ ID NO: 2187135 - DNA, 25 bp, Homo sapien
aagacaactctctcaccatttgcat

SEQ ID NO: 2187136 - DNA, 25 bp, Homo sapien
catttgcatcatggtcatactcata

SEQ ID NO: 2187137 - DNA, 25 bp, Homo sapien
tccccaagacaactctctcaccatt

SEQ ID NO: 2187138 - DNA, 25 bp, Homo sapien
tcaccatttgcatcatggtcatact

SEQ ID NO: 2187139 - DNA, 25 bp, Homo sapien
aaaggacaaaaaagcatacaacttg

SEQ ID NO: 2187140 - DNA, 25 bp, Homo sapien
ctccaccgtactgcctgctgtattg

SEQ ID NO: 2187141 - DNA, 25 bp, Homo sapien
ctccagctccaccgtactgcctgct

SEQ ID NO: 2187142 - DNA, 25 bp, Homo sapien
tccaaggtgtctccatcggtctctc

SEQ ID NO: 2187143 - DNA, 25 bp, Homo sapien
caccgtactgcctgctgtattggtt

SEQ ID NO: 2187144 - DNA, 25 bp, Homo sapien
gaagtactgatacgtgttacacatg

SEQ ID NO: 2187145 - DNA, 25 bp, Homo sapien
aaatggctgaattacctgctatgtg

SEQ ID NO: 2187146 - DNA, 25 bp, Homo sapien
gccctttaaaaatgattcgccataa

SEQ ID NO: 2187147 - DNA, 25 bp, Homo sapien
tgaaatggccagaataggcagagcc

SEQ ID NO: 2187148 - DNA, 25 bp, Homo sapien
aacacctttcatcaaactttgatag

SEQ ID NO: 2187149 - DNA, 25 bp, Homo sapien
taaagaaaacaacacctttcatcaa

SEQ ID NO: 2187150 - DNA, 25 bp, Homo sapien
catcagaattatcatggacataaag

SEQ ID NO: 2187151 - DNA, 25 bp, Homo sapien
actgcactgctcttcggtggaaaag

SEQ ID NO: 2187152 - DNA, 25 bp, Homo sapien
tggaagaggctgtaaaattccattc

SEQ ID NO: 2187153 - DNA, 25 bp, Homo sapien
tccctttatggaagaggctgtaaaa

SEQ ID NO: 2187154 - DNA, 25 bp, Homo sapien
tgtaaaattccattcgtgcatctgt

SEQ ID NO: 2187155 - DNA, 25 bp, Homo sapien
cttattccctttatggaagaggctg

SEQ ID NO: 2187156 - DNA, 25 bp, Homo sapien
attgcttgtgatttttcctccttac

SEQ ID NO: 2187157 - DNA, 25 bp, Homo sapien
taaattgcttgtgatttttcctcct

SEQ ID NO: 2187158 - DNA, 25 bp, Homo sapien
ttaaattgcttgtgatttttcctcc

SEQ ID NO: 2187159 - DNA, 25 bp, Homo sapien
tgattaaattgcttgtgatttttcc

SEQ ID NO: 2187160 - DNA, 25 bp, Homo sapien
gaaactgttctctcctcggcttcat

SEQ ID NO: 2187161 - DNA, 25 bp, Homo sapien
acataagaaggctggtacactttgg

SEQ ID NO: 2187162 - DNA, 25 bp, Homo sapien
ggtacactttggttggctctatgac

SEQ ID NO: 2187163 - DNA, 25 bp, Homo sapien
tgggtgagacatgccataaagaaac

SEQ ID NO: 2187164 - DNA, 25 bp, Homo sapien
caagttctgaactaatgatcgcagg

SEQ ID NO: 2187165 - DNA, 25 bp, Homo sapien
gaagttcagccgctcttgcctgggc

SEQ ID NO: 2187166 - DNA, 25 bp, Homo sapien
tcttgaagcgccgaattagtaacaa

SEQ ID NO: 2187167 - DNA, 25 bp, Homo sapien
tgcctgggcgagtgttcaataatgg

SEQ ID NO: 2187168 - DNA, 25 bp, Homo sapien
gaggtttcagtttgaacaacctctc

SEQ ID NO: 2187169 - DNA, 25 bp, Homo sapien
tgggccagcatgctgacgctgaaga

SEQ ID NO: 2187170 - DNA, 25 bp, Homo sapien
tcccaacaaactgttcagccggaca

SEQ ID NO: 2187171 - DNA, 25 bp, Homo sapien
ctggacggctttcccgacatcatgg

SEQ ID NO: 2187172 - DNA, 25 bp, Homo sapien
tagagggatgactggagttcaaacc

SEQ ID NO: 2187173 - DNA, 25 bp, Homo sapien
gactggagttcaaaccctttgcgat

SEQ ID NO: 2187174 - DNA, 25 bp, Homo sapien
taattcccgaatagagggatgactg

SEQ ID NO: 2187175 - DNA, 25 bp, Homo sapien
aactgcaagattaattcccgaatag

SEQ ID NO: 2187176 - DNA, 25 bp, Homo sapien
tcccacacaggcagaacatgtcggg

SEQ ID NO: 2187177 - DNA, 25 bp, Homo sapien
tgtcgcggctggtgtcatctttgca

SEQ ID NO: 2187178 - DNA, 25 bp, Homo sapien
agagccttctcacggtcacctgtgc

SEQ ID NO: 2187179 - DNA, 25 bp, Homo sapien
tggagcatgatctgcagagccttct

SEQ ID NO: 2187180 - DNA, 25 bp, Homo sapien
cttcctctagatctctatacatcct

SEQ ID NO: 2187181 - DNA, 25 bp, Homo sapien
ttcctctagatctctatacatccta

SEQ ID NO: 2187182 - DNA, 25 bp, Homo sapien
tcttcctctagatctctatacatcc

SEQ ID NO: 2187183 - DNA, 25 bp, Homo sapien
accagactacagaataacgtaatca

SEQ ID NO: 2187184 - DNA, 25 bp, Homo sapien
gatgactcagatgtccattaacgga

SEQ ID NO: 2187185 - DNA, 25 bp, Homo sapien
aggtacccatcctgacccaacgatt

SEQ ID NO: 2187186 - DNA, 25 bp, Homo sapien
gatgtttgttatggcactgcttgta

SEQ ID NO: 2187187 - DNA, 25 bp, Homo sapien
aaagctgaccggctcgagccagctt

SEQ ID NO: 2187188 - DNA, 25 bp, Homo sapien
aatgggcttctgaacgcagtggagt

SEQ ID NO: 2187189 - DNA, 25 bp, Homo sapien
tttcccactaacagggagcccttga

SEQ ID NO: 2187190 - DNA, 25 bp, Homo sapien
tggagtggaaggtatcagggaaagc

SEQ ID NO: 2187191 - DNA, 25 bp, Homo sapien
tcagtgcaaacgcatagtggaattt

SEQ ID NO: 2187192 - DNA, 25 bp, Homo sapien
aaatcacacgtaggcagcatctcca

SEQ ID NO: 2187193 - DNA, 25 bp, Homo sapien
gaatttaatgttatgctgatcggcc

SEQ ID NO: 2187194 - DNA, 25 bp, Homo sapien
accagcttcaccatcgcatcatagt

SEQ ID NO: 2187195 - DNA, 25 bp, Homo sapien
gctttccggatgtcatttaacaagg

SEQ ID NO: 2187196 - DNA, 25 bp, Homo sapien
gatatcacggtaggacaggagtaag

SEQ ID NO: 2187197 - DNA, 25 bp, Homo sapien
tgatccgagctagctccttcgccag

SEQ ID NO: 2187198 - DNA, 25 bp, Homo sapien
cagaacctcagtattatccatgcgg

SEQ ID NO: 2187199 - DNA, 25 bp, Homo sapien
acccaggactgtcttgcgcccaaaa

SEQ ID NO: 2187200 - DNA, 25 bp, Homo sapien
tggttctcattgacctgacttaggc

SEQ ID NO: 2187201 - DNA, 25 bp, Homo sapien
taggctaacacatagggacctcggc

SEQ ID NO: 2187202 - DNA, 25 bp, Homo sapien
ctgtcttgcgcccaaaatggttctc

SEQ ID NO: 2187203 - DNA, 25 bp, Homo sapien
tcacgtggatgtccttaaggaggct

SEQ ID NO: 2187204 - DNA, 25 bp, Homo sapien
tggatgtccttaaggaggctaatga

SEQ ID NO: 2187205 - DNA, 25 bp, Homo sapien
cgtggatgtccttaaggaggctaat

SEQ ID NO: 2187206 - DNA, 25 bp, Homo sapien
gatgtccttaaggaggctaatgaac

SEQ ID NO: 2187207 - DNA, 25 bp, Homo sapien
tgggcatcactctcgcagcaaaaat

SEQ ID NO: 2187208 - DNA, 25 bp, Homo sapien
gcaaaaataatcagcgcacggtgtc

SEQ ID NO: 2187209 - DNA, 25 bp, Homo sapien
gtccaccaaaggcatgcacagcggg

SEQ ID NO: 2187210 - DNA, 25 bp, Homo sapien
catgtactcggaggctcgtctctgg

SEQ ID NO: 2187211 - DNA, 25 bp, Homo sapien
ggttgatgttatggtcaaagacttc

SEQ ID NO: 2187212 - DNA, 25 bp, Homo sapien
gaaattggttgatgttatggtcaaa

SEQ ID NO: 2187213 - DNA, 25 bp, Homo sapien
attggttgatgttatggtcaaagac

SEQ ID NO: 2187214 - DNA, 25 bp, Homo sapien
ctgaaattggttgatgttatggtca

SEQ ID NO: 2187215 - DNA, 25 bp, Homo sapien
aaatgtcggacttccttcagtgggc

SEQ ID NO: 2187216 - DNA, 25 bp, Homo sapien
tctccacgaataaacagtgcaaggc

SEQ ID NO: 2187217 - DNA, 25 bp, Homo sapien
gagcctccactcaattgtccattgg

SEQ ID NO: 2187218 - DNA, 25 bp, Homo sapien
tcagtgggctgcacatataaagctc

SEQ ID NO: 2187219 - DNA, 25 bp, Homo sapien
ccttggtttgggctaagagttcaca

SEQ ID NO: 2187220 - DNA, 25 bp, Homo sapien
taataagggccttgcttccaaaatg

SEQ ID NO: 2187221 - DNA, 25 bp, Homo sapien
gttcacagatataccaaaagcacga

SEQ ID NO: 2187222 - DNA, 25 bp, Homo sapien
aggatgtgaagatactggacctctc

SEQ ID NO: 2187223 - DNA, 25 bp, Homo sapien
caaagcaactgctcctagaaatgga

SEQ ID NO: 2187224 - DNA, 25 bp, Homo sapien
cacatgagaagtcttgaaaaggcaa

SEQ ID NO: 2187225 - DNA, 25 bp, Homo sapien
taaaactagactgtggtacacaacc

SEQ ID NO: 2187226 - DNA, 25 bp, Homo sapien
tagaaatggagacaaatggccaggc

SEQ ID NO: 2187227 - DNA, 25 bp, Homo sapien
tgtcggcgatagcaagaaagggccc

SEQ ID NO: 2187228 - DNA, 25 bp, Homo sapien
cttcccagaaaagaatgtcggcgat

SEQ ID NO: 2187229 - DNA, 25 bp, Homo sapien
tcaccactggttagtctctggaact

SEQ ID NO: 2187230 - DNA, 25 bp, Homo sapien
aagggcccagaaggcaccgtgctat

SEQ ID NO: 2187231 - DNA, 25 bp, Homo sapien
cgaagtagccaggaagtcatctgtg

SEQ ID NO: 2187232 - DNA, 25 bp, Homo sapien
tcacgaagtagccaggaagtcatct

SEQ ID NO: 2187233 - DNA, 25 bp, Homo sapien
tagccaggaagtcatctgtgtgaac

SEQ ID NO: 2187234 - DNA, 25 bp, Homo sapien
aagtagccaggaagtcatctgtgtg

SEQ ID NO: 2187235 - DNA, 25 bp, Homo sapien
tggagacatcgctcatgtctaccac

SEQ ID NO: 2187236 - DNA, 25 bp, Homo sapien
catggtacaagatcacattattggc

SEQ ID NO: 2187237 - DNA, 25 bp, Homo sapien
tattggccatgtcaaagctttctcg

SEQ ID NO: 2187238 - DNA, 25 bp, Homo sapien
cagtgtcggcatcggtgtcatggta

SEQ ID NO: 2187239 - DNA, 25 bp, Homo sapien
catagtgagtggtactcgttgcctg

SEQ ID NO: 2187240 - DNA, 25 bp, Homo sapien
tgtcatagtgagtggtactcgttgc

SEQ ID NO: 2187241 - DNA, 25 bp, Homo sapien
caagtgtcatagtgagtggtactcg

SEQ ID NO: 2187242 - DNA, 25 bp, Homo sapien
tactcgttgcctgggggatcgagtt

SEQ ID NO: 2187243 - DNA, 25 bp, Homo sapien
gaaagttccaggctcaattctgagt

SEQ ID NO: 2187244 - DNA, 25 bp, Homo sapien
tctgagtcagtagcactaacagcag

SEQ ID NO: 2187245 - DNA, 25 bp, Homo sapien
aagctcagggaagggcccctatgga

SEQ ID NO: 2187246 - DNA, 25 bp, Homo sapien
gccaaatccaacagaagacagctga

SEQ ID NO: 2187247 - DNA, 25 bp, Homo sapien
tacgtccaaggcctgcctgccattt

SEQ ID NO: 2187248 - DNA, 25 bp, Homo sapien
ccaagatttagacccacacaggacc

SEQ ID NO: 2187249 - DNA, 25 bp, Homo sapien
cacttgctcttgcttacgtccaagg

SEQ ID NO: 2187250 - DNA, 25 bp, Homo sapien
tatatgtgctagtgacacagcccca

SEQ ID NO: 2187251 - DNA, 25 bp, Homo sapien
tcgagcacggccgtctccccgaagt

SEQ ID NO: 2187252 - DNA, 25 bp, Homo sapien
cggaggtgaggtgagcgccctcggc

SEQ ID NO: 2187253 - DNA, 25 bp, Homo sapien
aagggcacggaggtgaggtgagcgc

SEQ ID NO: 2187254 - DNA, 25 bp, Homo sapien
ctgcgtcgtagaaggcgtcgagcac

SEQ ID NO: 2187255 - DNA, 25 bp, Homo sapien
ggctgcgatccgctaggaggcacaa

SEQ ID NO: 2187256 - DNA, 25 bp, Homo sapien
agtggccagcggctgcgatccgcta

SEQ ID NO: 2187257 - DNA, 25 bp, Homo sapien
taggaggcacaagttacagcagccg

SEQ ID NO: 2187258 - DNA, 25 bp, Homo sapien
caagttacagcagccgcgcaggcgg

SEQ ID NO: 2187259 - DNA, 25 bp, Homo sapien
cattgggatgaacggatgcttcatc

SEQ ID NO: 2187260 - DNA, 25 bp, Homo sapien
cctgtgccggaggcgagctcgtcct

SEQ ID NO: 2187261 - DNA, 25 bp, Homo sapien
ttcatccctggttgccaagcgcacg

SEQ ID NO: 2187262 - DNA, 25 bp, Homo sapien
agctcgtcctggctttcgccgtgac

SEQ ID NO: 2187263 - DNA, 25 bp, Homo sapien
gggaggcaccagcaacaaattttgt

SEQ ID NO: 2187264 - DNA, 25 bp, Homo sapien
agggaggcaccagcaacaaattttg

SEQ ID NO: 2187265 - DNA, 25 bp, Homo sapien
agatagactccaagtacgctgcctg

SEQ ID NO: 2187266 - DNA, 25 bp, Homo sapien
gatagactccaagtacgctgcctgc

SEQ ID NO: 2187267 - DNA, 25 bp, Homo sapien
gaagatagactccaagtacgctgcc

SEQ ID NO: 2187268 - DNA, 25 bp, Homo sapien
tggaagatagactccaagtacgctg

SEQ ID NO: 2187269 - DNA, 25 bp, Homo sapien
ccacatgcgtccctatcaaagcaga

SEQ ID NO: 2187270 - DNA, 25 bp, Homo sapien
ccctatcaaagcagattagttctac

SEQ ID NO: 2187271 - DNA, 25 bp, Homo sapien
catgcgtccctatcaaagcagatta

SEQ ID NO: 2187272 - DNA, 25 bp, Homo sapien
agcaccacatgcgtccctatcaaag

SEQ ID NO: 2187273 - DNA, 25 bp, Homo sapien
ttcctctttcaattcatgtccttct

SEQ ID NO: 2187274 - DNA, 25 bp, Homo sapien
ctgattgagaacaaagaacattttc

SEQ ID NO: 2187275 - DNA, 25 bp, Homo sapien
gaacaaagaacattttctgagagct

SEQ ID NO: 2187276 - DNA, 25 bp, Homo sapien
acaaagaacattttctgagagctgc

SEQ ID NO: 2187277 - DNA, 25 bp, Homo sapien
tgagaacaaagaacattttctgaga

SEQ ID NO: 2187278 - DNA, 25 bp, Homo sapien
aagatatttctataagagaaatcaa

SEQ ID NO: 2187279 - DNA, 25 bp, Homo sapien
aaaatcattcctcttggaccatgac

SEQ ID NO: 2187280 - DNA, 25 bp, Homo sapien
ctcttggaccatgacaactttgaac

SEQ ID NO: 2187281 - DNA, 25 bp, Homo sapien
gagaaatcaaattgtataaagtgga

SEQ ID NO: 2187282 - DNA, 25 bp, Homo sapien
gatgcctggtcgagtccatgctgaa

SEQ ID NO: 2187283 - DNA, 25 bp, Homo sapien
gaacagtctcgcaatacagtaggcc

SEQ ID NO: 2187284 - DNA, 25 bp, Homo sapien
ccagtgttccatgagggtgttccaa

SEQ ID NO: 2187285 - DNA, 25 bp, Homo sapien
gaatcctcttgctgggtagcccgag

SEQ ID NO: 2187286 - DNA, 25 bp, Homo sapien
cagtggcctctagtggacttggata

SEQ ID NO: 2187287 - DNA, 25 bp, Homo sapien
catattctgttcacgcaaaaggtgc

SEQ ID NO: 2187288 - DNA, 25 bp, Homo sapien
tagaaaagtcacagctggtaccaca

SEQ ID NO: 2187289 - DNA, 25 bp, Homo sapien
aaaggacactcgcttctgactacgt

SEQ ID NO: 2187290 - DNA, 25 bp, Homo sapien
gggaagattctcctcttggatggaa

SEQ ID NO: 2187291 - DNA, 25 bp, Homo sapien
taccactatggactaaactgcctga

SEQ ID NO: 2187292 - DNA, 25 bp, Homo sapien
tcggactcaggatgaataatgtgac

SEQ ID NO: 2187293 - DNA, 25 bp, Homo sapien
tgtaagtcacaacgagtgccagccc

SEQ ID NO: 2187294 - DNA, 25 bp, Homo sapien
gctttctttatgtcgttcacttcca

SEQ ID NO: 2187295 - DNA, 25 bp, Homo sapien
gagctttctttatgtcgttcacttc

SEQ ID NO: 2187296 - DNA, 25 bp, Homo sapien
agctttctttatgtcgttcacttcc

SEQ ID NO: 2187297 - DNA, 25 bp, Homo sapien
ctttctttatgtcgttcacttccat

SEQ ID NO: 2187298 - DNA, 25 bp, Homo sapien
tctctgccatttggtaacagcagtg

SEQ ID NO: 2187299 - DNA, 25 bp, Homo sapien
ggtcaatcagaactcccacgcattc

SEQ ID NO: 2187300 - DNA, 25 bp, Homo sapien
gtaacagcagtgttgaatcagaggc

SEQ ID NO: 2187301 - DNA, 25 bp, Homo sapien
ttcggtcaatcagaactcccacgca

SEQ ID NO: 2187302 - DNA, 25 bp, Homo sapien
actcagacaataactgtttaatctc

SEQ ID NO: 2187303 - DNA, 25 bp, Homo sapien
ccgaagccggattttcttctcttca

SEQ ID NO: 2187304 - DNA, 25 bp, Homo sapien
tgcaaccgaagccggattttcttct

SEQ ID NO: 2187305 - DNA, 25 bp, Homo sapien
tctcttcatccaactcagacaataa

SEQ ID NO: 2187306 - DNA, 25 bp, Homo sapien
tcatcgctgtaagtctctggctgca

SEQ ID NO: 2187307 - DNA, 25 bp, Homo sapien
caatcctaaatcatcgttcaaaatc

SEQ ID NO: 2187308 - DNA, 25 bp, Homo sapien
cagactggcagagggcttcatcgct

SEQ ID NO: 2187309 - DNA, 25 bp, Homo sapien
ctggagtagtgtgctcttggcaatc

SEQ ID NO: 2187310 - DNA, 25 bp, Homo sapien
tctgctggtccttcatggtctcgat

SEQ ID NO: 2187311 - DNA, 25 bp, Homo sapien
gttttccttccgtgccgaacagaga

SEQ ID NO: 2187312 - DNA, 25 bp, Homo sapien
gcttgggcggcagggatgctttgtt

SEQ ID NO: 2187313 - DNA, 25 bp, Homo sapien
tcagctcgcggacctgtgtccttag

SEQ ID NO: 2187314 - DNA, 25 bp, Homo sapien
gacagtcccgtcttggaggaggacc

SEQ ID NO: 2187315 - DNA, 25 bp, Homo sapien
ggcaggcatcgcaagcaggtgctga

SEQ ID NO: 2187316 - DNA, 25 bp, Homo sapien
agggaggtgagcatacagagcccca

SEQ ID NO: 2187317 - DNA, 25 bp, Homo sapien
ggaggaccaagaagtagccagagga

SEQ ID NO: 2187318 - DNA, 25 bp, Homo sapien
ctagagaccgcagagcaaaatgcat

SEQ ID NO: 2187319 - DNA, 25 bp, Homo sapien
agataatgatttccgtttttgacac

SEQ ID NO: 2187320 - DNA, 25 bp, Homo sapien
attggattttaggagcccttagtga

SEQ ID NO: 2187321 - DNA, 25 bp, Homo sapien
tgaagaatcagataatgatttccgt

SEQ ID NO: 2187322 - DNA, 25 bp, Homo sapien
gaaacagcagactgaagaatcagat

SEQ ID NO: 2187323 - DNA, 25 bp, Homo sapien
ggtggagtccacttggtggagccag

SEQ ID NO: 2187324 - DNA, 25 bp, Homo sapien
cagaaggaacgaagtggttgcatgc

SEQ ID NO: 2187325 - DNA, 25 bp, Homo sapien
catgcgtgggtgaagggtgctgaga

SEQ ID NO: 2187326 - DNA, 25 bp, Homo sapien
agtccagaaggaacgaagtggttgc

SEQ ID NO: 2187327 - DNA, 25 bp, Homo sapien
gagtcgaagatatcagggcttgaaa

SEQ ID NO: 2187328 - DNA, 25 bp, Homo sapien
gaagttttctttgacgcgtccactc

SEQ ID NO: 2187329 - DNA, 25 bp, Homo sapien
tctgtgcgcaagtgaaatgtgttcc

SEQ ID NO: 2187330 - DNA, 25 bp, Homo sapien
tgggatatggtaacagtcttggaag

SEQ ID NO: 2187331 - DNA, 25 bp, Homo sapien
tgcttgcagaagagtccttagctag

SEQ ID NO: 2187332 - DNA, 25 bp, Homo sapien
ccttagctagagtttctaatctgtc

SEQ ID NO: 2187333 - DNA, 25 bp, Homo sapien
cagggtgtcctcaaatcggctgctt

SEQ ID NO: 2187334 - DNA, 25 bp, Homo sapien
tttggttggcagtgtatctcatggc

SEQ ID NO: 2187335 - DNA, 25 bp, Homo sapien
agcttttggtctgcttgtggtcgga

SEQ ID NO: 2187336 - DNA, 25 bp, Homo sapien
aggccgcctccctgtagcttttggt

SEQ ID NO: 2187337 - DNA, 25 bp, Homo sapien
gagtttctcagtagatgataccacg

SEQ ID NO: 2187338 - DNA, 25 bp, Homo sapien
gataccacggagtcaaaaccttcta

SEQ ID NO: 2187339 - DNA, 25 bp, Homo sapien
caaacagtatgaacctcagggagac

SEQ ID NO: 2187340 - DNA, 25 bp, Homo sapien
tacaggctcctaaccttggccaagg

SEQ ID NO: 2187341 - DNA, 25 bp, Homo sapien
taatgtgacaaagggatgcctgagc

SEQ ID NO: 2187342 - DNA, 25 bp, Homo sapien
gcttggttctaaatcagggcatcct

SEQ ID NO: 2187343 - DNA, 25 bp, Homo sapien
taaaaacatgagtcattacacatcc

SEQ ID NO: 2187344 - DNA, 25 bp, Homo sapien
aaatagacaaaacatttagtgggca

SEQ ID NO: 2187345 - DNA, 25 bp, Homo sapien
gataatcttgctcagtttccccagc

SEQ ID NO: 2187346 - DNA, 25 bp, Homo sapien
catagggctatggacggtgagaaaa

SEQ ID NO: 2187347 - DNA, 25 bp, Homo sapien
gacagtgtactatagttctgtaaga

SEQ ID NO: 2187348 - DNA, 25 bp, Homo sapien
tattacttcttacgactgcatgtga

SEQ ID NO: 2187349 - DNA, 25 bp, Homo sapien
caatatcttagtcatgacagtgtac

SEQ ID NO: 2187350 - DNA, 25 bp, Homo sapien
taaagggtacacagatttctattac

SEQ ID NO: 2187351 - DNA, 25 bp, Homo sapien
caagtcaatctttggactgtcaccc

SEQ ID NO: 2187352 - DNA, 25 bp, Homo sapien
gagagatctttgtccaggatgccag

SEQ ID NO: 2187353 - DNA, 25 bp, Homo sapien
caatgtcattgctgcggtccgagag

SEQ ID NO: 2187354 - DNA, 25 bp, Homo sapien
gccagatagcgaactgccggccaag

SEQ ID NO: 2187355 - DNA, 25 bp, Homo sapien
tgccctgcggccaaataaacactgg

SEQ ID NO: 2187356 - DNA, 25 bp, Homo sapien
aacactggctaatgataactgggag

SEQ ID NO: 2187357 - DNA, 25 bp, Homo sapien
ttcttgctgcacacgttaaggagtg

SEQ ID NO: 2187358 - DNA, 25 bp, Homo sapien
caacgagctgtctagccacatgaga

SEQ ID NO: 2187359 - DNA, 25 bp, Homo sapien
tatggtaactgtcaatctgggagct

SEQ ID NO: 2187360 - DNA, 25 bp, Homo sapien
aagcttccaatcaaatgtgagcccg

SEQ ID NO: 2187361 - DNA, 25 bp, Homo sapien
ggaaagatggtttgaggtgataccc

SEQ ID NO: 2187362 - DNA, 25 bp, Homo sapien
tgtgagcccgtctccagaaacttta

SEQ ID NO: 2187363 - DNA, 25 bp, Homo sapien
gatccttccaagtagggaagctgca

SEQ ID NO: 2187364 - DNA, 25 bp, Homo sapien
cagactgtgggtgtgcaagcatttt

SEQ ID NO: 2187365 - DNA, 25 bp, Homo sapien
tagactcttagaacaatgctaatga

SEQ ID NO: 2187366 - DNA, 25 bp, Homo sapien
caatgtctatttggaaatgcctttc

SEQ ID NO: 2187367 - DNA, 25 bp, Homo sapien
taatttctagccaagacttctctcc

SEQ ID NO: 2187368 - DNA, 25 bp, Homo sapien
cttcatcctgatttgtattaaagga

SEQ ID NO: 2187369 - DNA, 25 bp, Homo sapien
tgatgggctaagcatccaagtattc

SEQ ID NO: 2187370 - DNA, 25 bp, Homo sapien
catcagtcacttaactcccagtgtt

SEQ ID NO: 2187371 - DNA, 25 bp, Homo sapien
cttccctatgcacttagttgatgtt

SEQ ID NO: 2187372 - DNA, 25 bp, Homo sapien
tgcctcaagctaaaatgcttcagaa

SEQ ID NO: 2187373 - DNA, 25 bp, Homo sapien
tgcacttagttgatgtttggcatat

SEQ ID NO: 2187374 - DNA, 25 bp, Homo sapien
agaggaacccatttttattcaattg

SEQ ID NO: 2187375 - DNA, 25 bp, Homo sapien
catttttattcaattgctaatacac

SEQ ID NO: 2187376 - DNA, 25 bp, Homo sapien
tttattcaattgctaatacacatta

SEQ ID NO: 2187377 - DNA, 25 bp, Homo sapien
gaacccatttttattcaattgctaa

SEQ ID NO: 2187378 - DNA, 25 bp, Homo sapien
gaggtgagaggatagagtagccaag

SEQ ID NO: 2187379 - DNA, 25 bp, Homo sapien
tgggaattatttaggtgcattccat

SEQ ID NO: 2187380 - DNA, 25 bp, Homo sapien
cttactgcagcgtgcccaattcaat

SEQ ID NO: 2187381 - DNA, 25 bp, Homo sapien
tgcccaattcaataggcaataatca

SEQ ID NO: 2187382 - DNA, 25 bp, Homo sapien
gattccagccctgaggtctgtctga

SEQ ID NO: 2187383 - DNA, 25 bp, Homo sapien
cagccagctggcgaatgaatttgca

SEQ ID NO: 2187384 - DNA, 25 bp, Homo sapien
tgaagcccatgcaactttcaccagg

SEQ ID NO: 2187385 - DNA, 25 bp, Homo sapien
tgtctgactccaacgcaagagctgt

SEQ ID NO: 2187386 - DNA, 25 bp, Homo sapien
gagatatacatacttgaggccggca

SEQ ID NO: 2187387 - DNA, 25 bp, Homo sapien
cttgcttctaataaggcccaggaaa

SEQ ID NO: 2187388 - DNA, 25 bp, Homo sapien
tcttagagttagagacgttcctggc

SEQ ID NO: 2187389 - DNA, 25 bp, Homo sapien
gggtcgtagccacacatgagatata

SEQ ID NO: 2187390 - DNA, 25 bp, Homo sapien
gtggcagtcagttcccctcctgtgt

SEQ ID NO: 2187391 - DNA, 25 bp, Homo sapien
gtctgtggcagtcagttcccctcct

SEQ ID NO: 2187392 - DNA, 25 bp, Homo sapien
caaggtctgtggcagtcagttcccc

SEQ ID NO: 2187393 - DNA, 25 bp, Homo sapien
ttcctcccaaggtctgtggcagtca

SEQ ID NO: 2187394 - DNA, 25 bp, Homo sapien
cccggaggtgagagcacagcagtac

SEQ ID NO: 2187395 - DNA, 25 bp, Homo sapien
ccccggaggtgagagcacagcagta

SEQ ID NO: 2187396 - DNA, 25 bp, Homo sapien
ccgccccggaggtgagagcacagca

SEQ ID NO: 2187397 - DNA, 25 bp, Homo sapien
gccccggaggtgagagcacagcagt

SEQ ID NO: 2187398 - DNA, 25 bp, Homo sapien
gaacggagggcttctgtaaatccag

SEQ ID NO: 2187399 - DNA, 25 bp, Homo sapien
cttttttggcggtatggcaggaacg

SEQ ID NO: 2187400 - DNA, 25 bp, Homo sapien
aattggtcttaggtggccgaggctt

SEQ ID NO: 2187401 - DNA, 25 bp, Homo sapien
ctggtgtgtgtcagcggacccaccg

SEQ ID NO: 2187402 - DNA, 25 bp, Homo sapien
ggagtttgtgctgacccaacaggga

SEQ ID NO: 2187403 - DNA, 25 bp, Homo sapien
tgcatctgaccagggattctacgtc

SEQ ID NO: 2187404 - DNA, 25 bp, Homo sapien
tggcttccctattgcatctgaccag

SEQ ID NO: 2187405 - DNA, 25 bp, Homo sapien
ccaagtatccgggtagggctgattc

SEQ ID NO: 2187406 - DNA, 25 bp, Homo sapien
tggaagcatttctggtctttcagga

SEQ ID NO: 2187407 - DNA, 25 bp, Homo sapien
tggcctcaggcatgtaagagcactt

SEQ ID NO: 2187408 - DNA, 25 bp, Homo sapien
tcaggcatgtaagagcacttgagaa

SEQ ID NO: 2187409 - DNA, 25 bp, Homo sapien
ccagtggcctcaggcatgtaagagc

SEQ ID NO: 2187410 - DNA, 25 bp, Homo sapien
attggtgccagtggcctcaggcatg

SEQ ID NO: 2187411 - DNA, 25 bp, Homo sapien
atggaggcggtggcttcttgggtct

SEQ ID NO: 2187412 - DNA, 25 bp, Homo sapien
gacaggagcggatggaggcggtggc

SEQ ID NO: 2187413 - DNA, 25 bp, Homo sapien
tgccccttgtttgatgacaggagcg

SEQ ID NO: 2187414 - DNA, 25 bp, Homo sapien
ctgccccttgtttgatgacaggagc

SEQ ID NO: 2187415 - DNA, 25 bp, Homo sapien
taaagaaagctgctctaagggccac

SEQ ID NO: 2187416 - DNA, 25 bp, Homo sapien
cacctaggattgactgtgggagaga

SEQ ID NO: 2187417 - DNA, 25 bp, Homo sapien
cactctgtaggtgatggaggtagca

SEQ ID NO: 2187418 - DNA, 25 bp, Homo sapien
cagccagggcactgttctcagacag

SEQ ID NO: 2187419 - DNA, 25 bp, Homo sapien
cccactaagttctctggcggtgtct

SEQ ID NO: 2187420 - DNA, 25 bp, Homo sapien
acacatcccactaagttctctggcg

SEQ ID NO: 2187421 - DNA, 25 bp, Homo sapien
taaagggcttcgttagaggaatatg

SEQ ID NO: 2187422 - DNA, 25 bp, Homo sapien
cctgatggctgggtaacctttaaag

SEQ ID NO: 2187423 - DNA, 25 bp, Homo sapien
tgccagacccttggtaagaacaaca

SEQ ID NO: 2187424 - DNA, 25 bp, Homo sapien
ggcttctaaggaatcagacccatag

SEQ ID NO: 2187425 - DNA, 25 bp, Homo sapien
gataaacgtggcttctggtggaacc

SEQ ID NO: 2187426 - DNA, 25 bp, Homo sapien
tgccctcccggaaagcaccggataa

SEQ ID NO: 2187427 - DNA, 25 bp, Homo sapien
gacagccctatctccagtcgcattg

SEQ ID NO: 2187428 - DNA, 25 bp, Homo sapien
gcattgtcaccaactcaccaatact

SEQ ID NO: 2187429 - DNA, 25 bp, Homo sapien
tatctccagtcgcattgtcaccaac

SEQ ID NO: 2187430 - DNA, 25 bp, Homo sapien
caaatgacagccctatctccagtcg

SEQ ID NO: 2187431 - DNA, 25 bp, Homo sapien
ttcccaccagcctacgtcgatgcag

SEQ ID NO: 2187432 - DNA, 25 bp, Homo sapien
tcaaagtccggtggaagtaacttca

SEQ ID NO: 2187433 - DNA, 25 bp, Homo sapien
ggaacacgcctcgtctgccgttcag

SEQ ID NO: 2187434 - DNA, 25 bp, Homo sapien
tcacgaagttatcggggaacacgcc

SEQ ID NO: 2187435 - DNA, 25 bp, Homo sapien
ctttagatgttgatggcgcacagtt

SEQ ID NO: 2187436 - DNA, 25 bp, Homo sapien
ctcctttagatgttgatggcgcaca

SEQ ID NO: 2187437 - DNA, 25 bp, Homo sapien
ttagatgttgatggcgcacagttgc

SEQ ID NO: 2187438 - DNA, 25 bp, Homo sapien
tcctttagatgttgatggcgcacag

SEQ ID NO: 2187439 - DNA, 25 bp, Homo sapien
gttcatcttgatgtcatcaaatagg

SEQ ID NO: 2187440 - DNA, 25 bp, Homo sapien
taagcgttcatcttgatgtcatcaa

SEQ ID NO: 2187441 - DNA, 25 bp, Homo sapien
ctaagcgttcatcttgatgtcatca

SEQ ID NO: 2187442 - DNA, 25 bp, Homo sapien
agcgttcatcttgatgtcatcaaat

SEQ ID NO: 2187443 - DNA, 25 bp, Homo sapien
ccacagcgtgggacaccttccaatg

SEQ ID NO: 2187444 - DNA, 25 bp, Homo sapien
ggccacagcgtgggacaccttccaa

SEQ ID NO: 2187445 - DNA, 25 bp, Homo sapien
acagcgtgggacaccttccaatggc

SEQ ID NO: 2187446 - DNA, 25 bp, Homo sapien
gccatctcacccttgcagctgagcc

SEQ ID NO: 2187447 - DNA, 25 bp, Homo sapien
gcctcatatggaaatattactttgc

SEQ ID NO: 2187448 - DNA, 25 bp, Homo sapien
ttgatgagagtgactatatctcctt

SEQ ID NO: 2187449 - DNA, 25 bp, Homo sapien
gatgagagtgactatatctccttct

SEQ ID NO: 2187450 - DNA, 25 bp, Homo sapien
tccttctttgattgtcaattcatca

SEQ ID NO: 2187451 - DNA, 25 bp, Homo sapien
ggactgtaatatacaagtaagccca

SEQ ID NO: 2187452 - DNA, 25 bp, Homo sapien
caaagatgttcctgacttccactta

SEQ ID NO: 2187453 - DNA, 25 bp, Homo sapien
gaagtgacagtctaattcttggaga

SEQ ID NO: 2187454 - DNA, 25 bp, Homo sapien
tatttattggaccaccaccatgaaa

SEQ ID NO: 2187455 - DNA, 25 bp, Homo sapien
tcttccctgcagatgtgaatcttca

SEQ ID NO: 2187456 - DNA, 25 bp, Homo sapien
ttttgtggggcacctgttcattcta

SEQ ID NO: 2187457 - DNA, 25 bp, Homo sapien
tgttcattctattatcttcccagac

SEQ ID NO: 2187458 - DNA, 25 bp, Homo sapien
tcaatcatccctgataagaattttg

SEQ ID NO: 2187459 - DNA, 25 bp, Homo sapien
tcagccaccttaactgtgcaaagtg

SEQ ID NO: 2187460 - DNA, 25 bp, Homo sapien
aaaaagacttgagcctcctgcctgc

SEQ ID NO: 2187461 - DNA, 25 bp, Homo sapien
tggttaggcctctccgacctgaggg

SEQ ID NO: 2187462 - DNA, 25 bp, Homo sapien
gacctgagggctcgtgaatccctaa

SEQ ID NO: 2187463 - DNA, 25 bp, Homo sapien
tggagttgctgtagttgcaggtaac

SEQ ID NO: 2187464 - DNA, 25 bp, Homo sapien
ctgtttttgatgagtctggagttgc

SEQ ID NO: 2187465 - DNA, 25 bp, Homo sapien
gttgctgtagttgcaggtaacttct

SEQ ID NO: 2187466 - DNA, 25 bp, Homo sapien
tgagtctggagttgctgtagttgca

SEQ ID NO: 2187467 - DNA, 25 bp, Homo sapien
caaacatccctagttgagaacctct

SEQ ID NO: 2187468 - DNA, 25 bp, Homo sapien
tccaaacatccctagttgagaacct

SEQ ID NO: 2187469 - DNA, 25 bp, Homo sapien
ctttccaaacatccctagttgagaa

SEQ ID NO: 2187470 - DNA, 25 bp, Homo sapien
catccctagttgagaacctctagcc

SEQ ID NO: 2187471 - DNA, 25 bp, Homo sapien
gaacgagccagagtaaatttccatt

SEQ ID NO: 2187472 - DNA, 25 bp, Homo sapien
gtaggatcatcttattcacagagga

SEQ ID NO: 2187473 - DNA, 25 bp, Homo sapien
agagaggagcctgcatgctattttg

SEQ ID NO: 2187474 - DNA, 25 bp, Homo sapien
cagaggatgaacgagccagagtaaa

SEQ ID NO: 2187475 - DNA, 25 bp, Homo sapien
caataaagtctatacttggctgtca

SEQ ID NO: 2187476 - DNA, 25 bp, Homo sapien
tctggtctggtgaagcaaaaggtca

SEQ ID NO: 2187477 - DNA, 25 bp, Homo sapien
taacagcaagtcttgggaggaacag

SEQ ID NO: 2187478 - DNA, 25 bp, Homo sapien
gaggaacaggagtcttaaggttgta

SEQ ID NO: 2187479 - DNA, 25 bp, Homo sapien
tgtgacaggtattgctcaggcagat

SEQ ID NO: 2187480 - DNA, 25 bp, Homo sapien
ggcagattacttccatgtgtgggca

SEQ ID NO: 2187481 - DNA, 25 bp, Homo sapien
tctactgcatgttgatattgtgaca

SEQ ID NO: 2187482 - DNA, 25 bp, Homo sapien
tcaggcagattacttccatgtgtgg

SEQ ID NO: 2187483 - DNA, 25 bp, Homo sapien
agtgcaacaagtagctcagacatca

SEQ ID NO: 2187484 - DNA, 25 bp, Homo sapien
caacaagtagctcagacatcacagg

SEQ ID NO: 2187485 - DNA, 25 bp, Homo sapien
cagtgcaacaagtagctcagacatc

SEQ ID NO: 2187486 - DNA, 25 bp, Homo sapien
tgcaacaagtagctcagacatcaca

SEQ ID NO: 2187487 - DNA, 25 bp, Homo sapien
aaactccaaatgtcggtgaccctca

SEQ ID NO: 2187488 - DNA, 25 bp, Homo sapien
caaatgtcggtgaccctcaagagtg

SEQ ID NO: 2187489 - DNA, 25 bp, Homo sapien
tgcatggacatacccttctctctaa

SEQ ID NO: 2187490 - DNA, 25 bp, Homo sapien
aaacgccccacagctggcttgctct

SEQ ID NO: 2187491 - DNA, 25 bp, Homo sapien
ggacccagcctaaccctgagtcata

SEQ ID NO: 2187492 - DNA, 25 bp, Homo sapien
ctcttctcccatgatgcagccagcc

SEQ ID NO: 2187493 - DNA, 25 bp, Homo sapien
cttctcccatgatgcagccagcctc

SEQ ID NO: 2187494 - DNA, 25 bp, Homo sapien
acccagcctaaccctgagtcatact

SEQ ID NO: 2187495 - DNA, 25 bp, Homo sapien
atccaaggtgtgacttagggtagga

SEQ ID NO: 2187496 - DNA, 25 bp, Homo sapien
ctccaatgtagggacaatccaaagc

SEQ ID NO: 2187497 - DNA, 25 bp, Homo sapien
tgagaaacctgtatatgacagctga

SEQ ID NO: 2187498 - DNA, 25 bp, Homo sapien
ttctctccaatgtagggacaatcca

SEQ ID NO: 2187499 - DNA, 25 bp, Homo sapien
cgatgaaccacaccagatctgctcc

SEQ ID NO: 2187500 - DNA, 25 bp, Homo sapien
gatgaaccacaccagatctgctcca

SEQ ID NO: 2187501 - DNA, 25 bp, Homo sapien
tccgatgaaccacaccagatctgct

SEQ ID NO: 2187502 - DNA, 25 bp, Homo sapien
tgaaccacaccagatctgctccacc

SEQ ID NO: 2187503 - DNA, 25 bp, Homo sapien
tctaatcattaactctgggtagggt

SEQ ID NO: 2187504 - DNA, 25 bp, Homo sapien
tcttctggactataggaagcaagtc

SEQ ID NO: 2187505 - DNA, 25 bp, Homo sapien
tttcagaaggccaactgtcgcagcc

SEQ ID NO: 2187506 - DNA, 25 bp, Homo sapien
cattcggagacatatccacttggtg

SEQ ID NO: 2187507 - DNA, 25 bp, Homo sapien
gattctgcttctaatgcatgatgac

SEQ ID NO: 2187508 - DNA, 25 bp, Homo sapien
attctgcttctaatgcatgatgaca

SEQ ID NO: 2187509 - DNA, 25 bp, Homo sapien
aaccgcgtactcagcagcaacatgc

SEQ ID NO: 2187510 - DNA, 25 bp, Homo sapien
atcggcagccacaagcgcgagggct

SEQ ID NO: 2187511 - DNA, 25 bp, Homo sapien
gttgctgtggtaaccgcgtactcag

SEQ ID NO: 2187512 - DNA, 25 bp, Homo sapien
tataccacagtagacgtcatcggca

SEQ ID NO: 2187513 - DNA, 25 bp, Homo sapien
agaggcagaaggaaacagccagctt

SEQ ID NO: 2187514 - DNA, 25 bp, Homo sapien
cccagaaccagaggcagaaggaaac

SEQ ID NO: 2187515 - DNA, 25 bp, Homo sapien
tagcccagaaccagaggcagaagga

SEQ ID NO: 2187516 - DNA, 25 bp, Homo sapien
cagaggcagaaggaaacagccagct

SEQ ID NO: 2187517 - DNA, 25 bp, Homo sapien
tagagaagtactggtccatttccaa

SEQ ID NO: 2187518 - DNA, 25 bp, Homo sapien
agagaagtactggtccatttccaaa

SEQ ID NO: 2187519 - DNA, 25 bp, Homo sapien
cttttctaccggcagaaagtcattt

SEQ ID NO: 2187520 - DNA, 25 bp, Homo sapien
gaccttggtcttagtttgattggct

SEQ ID NO: 2187521 - DNA, 25 bp, Homo sapien
acttggtgctgcttgagtcaccccc

SEQ ID NO: 2187522 - DNA, 25 bp, Homo sapien
tgtcccgttggcaccttcagacttg

SEQ ID NO: 2187523 - DNA, 25 bp, Homo sapien
tgtaatagcgtctgtggccctccgt

SEQ ID NO: 2187524 - DNA, 25 bp, Homo sapien
agaattgtcccttcaaaggtagtct

SEQ ID NO: 2187525 - DNA, 25 bp, Homo sapien
cccggtgcagctcggtacagaattg

SEQ ID NO: 2187526 - DNA, 25 bp, Homo sapien
tggccctccgtctttcccggtgcag

SEQ ID NO: 2187527 - DNA, 25 bp, Homo sapien
cactgaggtagaccatggctctgat

SEQ ID NO: 2187528 - DNA, 25 bp, Homo sapien
gagtcactgaggtagaccatggctc

SEQ ID NO: 2187529 - DNA, 25 bp, Homo sapien
gcaaagtctctctgtgcattggcag

SEQ ID NO: 2187530 - DNA, 25 bp, Homo sapien
cattggcagcaaggcaatttgagat

SEQ ID NO: 2187531 - DNA, 25 bp, Homo sapien
cacctggacactttgctgaactcgg

SEQ ID NO: 2187532 - DNA, 25 bp, Homo sapien
cagtgtgagcttactgaaagcaggg

SEQ ID NO: 2187533 - DNA, 25 bp, Homo sapien
gcctggcctgctactggaaattctg

SEQ ID NO: 2187534 - DNA, 25 bp, Homo sapien
gatgcttactttgcagagcacctgg

SEQ ID NO: 2187535 - DNA, 25 bp, Homo sapien
ttgctccgtgagctggaaagggcag

SEQ ID NO: 2187536 - DNA, 25 bp, Homo sapien
ttttgctccgtgagctggaaagggc

SEQ ID NO: 2187537 - DNA, 25 bp, Homo sapien
cttttgctccgtgagctggaaaggg

SEQ ID NO: 2187538 - DNA, 25 bp, Homo sapien
tttgctccgtgagctggaaagggca

SEQ ID NO: 2187539 - DNA, 25 bp, Homo sapien
tgacaatcccatttggttcattttt

SEQ ID NO: 2187540 - DNA, 25 bp, Homo sapien
ctgacaatcccatttggttcatttt

SEQ ID NO: 2187541 - DNA, 25 bp, Homo sapien
gacagtattaccagggcatgaaggc

SEQ ID NO: 2187542 - DNA, 25 bp, Homo sapien
gcaacactctagaagtatatggagg

SEQ ID NO: 2187543 - DNA, 25 bp, Homo sapien
tatatggaggcacagcaacatgggc

SEQ ID NO: 2187544 - DNA, 25 bp, Homo sapien
gccacccatgagacagtattaccag

SEQ ID NO: 2187545 - DNA, 25 bp, Homo sapien
tacagaatgtgtggctacgggtcac

SEQ ID NO: 2187546 - DNA, 25 bp, Homo sapien
tcctgcttggtagggtagacttcct

SEQ ID NO: 2187547 - DNA, 25 bp, Homo sapien
taagcgtttactatagcctctcggc

SEQ ID NO: 2187548 - DNA, 25 bp, Homo sapien
tcggcataggatacagaacagaagg

SEQ ID NO: 2187549 - DNA, 25 bp, Homo sapien
catccgactcccctgacagctcctt

SEQ ID NO: 2187550 - DNA, 25 bp, Homo sapien
ttccagtcttcccgttgagaacacc

SEQ ID NO: 2187551 - DNA, 25 bp, Homo sapien
tccagtcttcccgttgagaacacct

SEQ ID NO: 2187552 - DNA, 25 bp, Homo sapien
cgactcccctgacagctccttgatg

SEQ ID NO: 2187553 - DNA, 25 bp, Homo sapien
tgccagtatcactgtcacagcacag

SEQ ID NO: 2187554 - DNA, 25 bp, Homo sapien
cattaaccacgcagtaagtggaggg

SEQ ID NO: 2187555 - DNA, 25 bp, Homo sapien
ggcagacaataaaaccactgctcat

SEQ ID NO: 2187556 - DNA, 25 bp, Homo sapien
ggcctatcattaaccacgcagtaag

SEQ ID NO: 2187557 - DNA, 25 bp, Homo sapien
aatggcagaggcctatcattaacca

SEQ ID NO: 2187558 - DNA, 25 bp, Homo sapien
cagctcccttaaagtcatcctcaac

SEQ ID NO: 2187559 - DNA, 25 bp, Homo sapien
atgacagctcccttaaagtcatcct

SEQ ID NO: 2187560 - DNA, 25 bp, Homo sapien
gacagctcccttaaagtcatcctca

SEQ ID NO: 2187561 - DNA, 25 bp, Homo sapien
tcatcctcaacttctagcttccttt

SEQ ID NO: 2187562 - DNA, 25 bp, Homo sapien
tcttctagggtctcttgatcctcct

SEQ ID NO: 2187563 - DNA, 25 bp, Homo sapien
ggccatcagccctgcgtcttctagg

SEQ ID NO: 2187564 - DNA, 25 bp, Homo sapien
ctcatcccgcacaataaaccgtgtg

SEQ ID NO: 2187565 - DNA, 25 bp, Homo sapien
catcccgcacaataaaccgtgtggg

SEQ ID NO: 2187566 - DNA, 25 bp, Homo sapien
taccacctctatgatgtcgccaact

SEQ ID NO: 2187567 - DNA, 25 bp, Homo sapien
tgaatgccacctggcaccggcgcct

SEQ ID NO: 2187568 - DNA, 25 bp, Homo sapien
agctcaagttcatcgtcattctggg

SEQ ID NO: 2187569 - DNA, 25 bp, Homo sapien
gatgtcgccaactttcagctcaagt

SEQ ID NO: 2187570 - DNA, 25 bp, Homo sapien
cagaagtttgtcgttcatggctgac

SEQ ID NO: 2187571 - DNA, 25 bp, Homo sapien
aagtttgtcgttcatggctgaccgc

SEQ ID NO: 2187572 - DNA, 25 bp, Homo sapien
gtcgttcatggctgaccgcctcaca

SEQ ID NO: 2187573 - DNA, 25 bp, Homo sapien
attgctcagaagtttgtcgttcatg

SEQ ID NO: 2187574 - DNA, 25 bp, Homo sapien
aaatcatattgcaaggtagaaacca

SEQ ID NO: 2187575 - DNA, 25 bp, Homo sapien
tctgaaatcatattgcaaggtagaa

SEQ ID NO: 2187576 - DNA, 25 bp, Homo sapien
tggggaacgtggcagtattctgaaa

SEQ ID NO: 2187577 - DNA, 25 bp, Homo sapien
gtattctgaaatcatattgcaaggt

SEQ ID NO: 2187578 - DNA, 25 bp, Homo sapien
gtagtttctagctctggaaatgtgt

SEQ ID NO: 2187579 - DNA, 25 bp, Homo sapien
cagtaagtagtttctagctctggaa

SEQ ID NO: 2187580 - DNA, 25 bp, Homo sapien
tgcagtaagtagtttctagctctgg

SEQ ID NO: 2187581 - DNA, 25 bp, Homo sapien
taagtagtttctagctctggaaatg

SEQ ID NO: 2187582 - DNA, 25 bp, Homo sapien
aacatctctgcaccgcagaacacag

SEQ ID NO: 2187583 - DNA, 25 bp, Homo sapien
gactgttgcagtggaaatgtataat

SEQ ID NO: 2187584 - DNA, 25 bp, Homo sapien
tttgcctgctacttcaaaggcagag

SEQ ID NO: 2187585 - DNA, 25 bp, Homo sapien
ttaaccagcattgtgtggtccctgg

SEQ ID NO: 2187586 - DNA, 25 bp, Homo sapien
ggaaccacgcttggcatgtaactgg

SEQ ID NO: 2187587 - DNA, 25 bp, Homo sapien
tattagagcctttgagccatggagg

SEQ ID NO: 2187588 - DNA, 25 bp, Homo sapien
tccaccaacgcaagatgataccagg

SEQ ID NO: 2187589 - DNA, 25 bp, Homo sapien
tcctgaggccaactctaggaggttc

SEQ ID NO: 2187590 - DNA, 25 bp, Homo sapien
aacttcgcaagtcctgaaccacaaa

SEQ ID NO: 2187591 - DNA, 25 bp, Homo sapien
acaaatggccacgtggcacggtgct

SEQ ID NO: 2187592 - DNA, 25 bp, Homo sapien
cacgtggcacggtgctcatgaagct

SEQ ID NO: 2187593 - DNA, 25 bp, Homo sapien
cactttgggcaacttcgcaagtcct

SEQ ID NO: 2187594 - DNA, 25 bp, Homo sapien
gcttggctgagctcaatgcccatga

SEQ ID NO: 2187595 - DNA, 25 bp, Homo sapien
ggcgagagccccactctgtcatctg

SEQ ID NO: 2187596 - DNA, 25 bp, Homo sapien
cagcacagctaatttgcaggctgac

SEQ ID NO: 2187597 - DNA, 25 bp, Homo sapien
agggaggccagcacagctaatttgc

SEQ ID NO: 2187598 - DNA, 25 bp, Homo sapien
tacacagactggaccccaatatttc

SEQ ID NO: 2187599 - DNA, 25 bp, Homo sapien
catgtgggaacttgatttgttcaac

SEQ ID NO: 2187600 - DNA, 25 bp, Homo sapien
tagaatgggctgatggtacacagac

SEQ ID NO: 2187601 - DNA, 25 bp, Homo sapien
cagaggcttctgactggtcatgtgg

SEQ ID NO: 2187602 - DNA, 25 bp, Homo sapien
tcctttgtaaggaatgacaatacca

SEQ ID NO: 2187603 - DNA, 25 bp, Homo sapien
tttgtaaggaatgacaataccaaag

SEQ ID NO: 2187604 - DNA, 25 bp, Homo sapien
cctttgtaaggaatgacaataccaa

SEQ ID NO: 2187605 - DNA, 25 bp, Homo sapien
ttgtaaggaatgacaataccaaaga

SEQ ID NO: 2187606 - DNA, 25 bp, Homo sapien
catcagagctagacctgttacaaat

SEQ ID NO: 2187607 - DNA, 25 bp, Homo sapien
taacatcttttaaaccgtcagatct

SEQ ID NO: 2187608 - DNA, 25 bp, Homo sapien
ccgtcagatctttcagcattaatct

SEQ ID NO: 2187609 - DNA, 25 bp, Homo sapien
agcatcagagctagacctgttacaa

SEQ ID NO: 2187610 - DNA, 25 bp, Homo sapien
gggcagtaaaatgcaaatgcataaa

SEQ ID NO: 2187611 - DNA, 25 bp, Homo sapien
gcagtaaaatgcaaatgcataaaaa

SEQ ID NO: 2187612 - DNA, 25 bp, Homo sapien
agtaaaatgcaaatgcataaaaaac

SEQ ID NO: 2187613 - DNA, 25 bp, Homo sapien
ctggaaggggcagtaaaatgcaaat

SEQ ID NO: 2187614 - DNA, 25 bp, Homo sapien
tctcacctcagccttccagagtgct

SEQ ID NO: 2187615 - DNA, 25 bp, Homo sapien
gattctcccacctcagcctcttgag

SEQ ID NO: 2187616 - DNA, 25 bp, Homo sapien
cagccccgaccttctgggcttaagt

SEQ ID NO: 2187617 - DNA, 25 bp, Homo sapien
tgcagccccgaccttctgggcttaa

SEQ ID NO: 2187618 - DNA, 25 bp, Homo sapien
gcacttcgtgcaggggcttttctgg

SEQ ID NO: 2187619 - DNA, 25 bp, Homo sapien
tcttaaaatcgtttcagaagacagc

SEQ ID NO: 2187620 - DNA, 25 bp, Homo sapien
ctggagctttgttggtgagagggtc

SEQ ID NO: 2187621 - DNA, 25 bp, Homo sapien
ctctcttattggttcttaaaatcgt

SEQ ID NO: 2187622 - DNA, 25 bp, Homo sapien
cctactccccaatgcttcagagcag

SEQ ID NO: 2187623 - DNA, 25 bp, Homo sapien
ggtctgatcaagagcaggtgctgaa

SEQ ID NO: 2187624 - DNA, 25 bp, Homo sapien
cagctggctaggaaggactgggtct

SEQ ID NO: 2187625 - DNA, 25 bp, Homo sapien
gatgagtgaattgcttaagttgctt

SEQ ID NO: 2187626 - DNA, 25 bp, Homo sapien
caagctcaatgcagccccacccaaa

SEQ ID NO: 2187627 - DNA, 25 bp, Homo sapien
aagctcaatgcagccccacccaaag

SEQ ID NO: 2187628 - DNA, 25 bp, Homo sapien
agctcaatgcagccccacccaaagc

SEQ ID NO: 2187629 - DNA, 25 bp, Homo sapien
cccaagctcaatgcagccccaccca

SEQ ID NO: 2187630 - DNA, 25 bp, Homo sapien
gggcagcctgtcttctttggtaccc

SEQ ID NO: 2187631 - DNA, 25 bp, Homo sapien
cagcctgtcttctttggtaccccat

SEQ ID NO: 2187632 - DNA, 25 bp, Homo sapien
ccaggaaagggcagcctgtcttctt

SEQ ID NO: 2187633 - DNA, 25 bp, Homo sapien
ccttctcccaggaaagggcagcctg

SEQ ID NO: 2187634 - DNA, 25 bp, Homo sapien
tcttcacaaaaggctggtctgtctc

SEQ ID NO: 2187635 - DNA, 25 bp, Homo sapien
tgttcccttcgtgcagagactgtgc

SEQ ID NO: 2187636 - DNA, 25 bp, Homo sapien
aacagctgccccgtgagtatgttcc

SEQ ID NO: 2187637 - DNA, 25 bp, Homo sapien
gccttcccagtatttggctctcttc

SEQ ID NO: 2187638 - DNA, 25 bp, Homo sapien
tgacagcctagctctttaagccact

SEQ ID NO: 2187639 - DNA, 25 bp, Homo sapien
gctgacagcctagctctttaagcca

SEQ ID NO: 2187640 - DNA, 25 bp, Homo sapien
ctgacagcctagctctttaagccac

SEQ ID NO: 2187641 - DNA, 25 bp, Homo sapien
gcctgccacctgaatctgtactgaa

SEQ ID NO: 2187642 - DNA, 25 bp, Homo sapien
caaccgcctgccacctgaatctgta

SEQ ID NO: 2187643 - DNA, 25 bp, Homo sapien
gccacctgaatctgtactgaaagac

SEQ ID NO: 2187644 - DNA, 25 bp, Homo sapien
ctgaatctgtactgaaagaccacac

SEQ ID NO: 2187645 - DNA, 25 bp, Homo sapien
cagctgccatcagttgtctttaagc

SEQ ID NO: 2187646 - DNA, 25 bp, Homo sapien
gaagatttcctccatctcccttaac

SEQ ID NO: 2187647 - DNA, 25 bp, Homo sapien
tgagcaagacaaacttgaatgaaga

SEQ ID NO: 2187648 - DNA, 25 bp, Homo sapien
gacacattaaaagatcactgagcaa

SEQ ID NO: 2187649 - DNA, 25 bp, Homo sapien
tggtgccttgggctagcttctttac

SEQ ID NO: 2187650 - DNA, 25 bp, Homo sapien
ttaggtggtgccttgggctagcttc

SEQ ID NO: 2187651 - DNA, 25 bp, Homo sapien
ggtggtgccttgggctagcttcttt

SEQ ID NO: 2187652 - DNA, 25 bp, Homo sapien
taggtggtgccttgggctagcttct

SEQ ID NO: 2187653 - DNA, 25 bp, Homo sapien
ttccaagataatggggtttttcaca

SEQ ID NO: 2187654 - DNA, 25 bp, Homo sapien
tatcccagcacatttggtggtaagt

SEQ ID NO: 2187655 - DNA, 25 bp, Homo sapien
cagagggaaaaccactttccaagat

SEQ ID NO: 2187656 - DNA, 25 bp, Homo sapien
ggtaagtcatctggctttgtattcc

SEQ ID NO: 2187657 - DNA, 25 bp, Homo sapien
gaacttggtggccacaaaagatggc

SEQ ID NO: 2187658 - DNA, 25 bp, Homo sapien
tgagaacttggtggccacaaaagat

SEQ ID NO: 2187659 - DNA, 25 bp, Homo sapien
catgagaacttggtggccacaaaag

SEQ ID NO: 2187660 - DNA, 25 bp, Homo sapien
gagaacttggtggccacaaaagatg

SEQ ID NO: 2187661 - DNA, 25 bp, Homo sapien
ctcagacaagtctgcggcacttggg

SEQ ID NO: 2187662 - DNA, 25 bp, Homo sapien
aatctcagacaagtctgcggcactt

SEQ ID NO: 2187663 - DNA, 25 bp, Homo sapien
gacaagtctgcggcacttggggctt

SEQ ID NO: 2187664 - DNA, 25 bp, Homo sapien
acaagtctgcggcacttggggcttt

SEQ ID NO: 2187665 - DNA, 25 bp, Homo sapien
cgtgctctccgagaactgcaagtct

SEQ ID NO: 2187666 - DNA, 25 bp, Homo sapien
tatgaaatggtaatttctggctgtg

SEQ ID NO: 2187667 - DNA, 25 bp, Homo sapien
ctgtgaagtatgaaatggtaatttc

SEQ ID NO: 2187668 - DNA, 25 bp, Homo sapien
aactctgggcaggaataagttccgt

SEQ ID NO: 2187669 - DNA, 25 bp, Homo sapien
tatttctgtcgcaaatcaagtgaaa

SEQ ID NO: 2187670 - DNA, 25 bp, Homo sapien
ttatttctgtcgcaaatcaagtgaa

SEQ ID NO: 2187671 - DNA, 25 bp, Homo sapien
caatctctggcacttgagagtgtgg

SEQ ID NO: 2187672 - DNA, 25 bp, Homo sapien
agtgtggaacctgtatgactgagga

SEQ ID NO: 2187673 - DNA, 25 bp, Homo sapien
cagagcccactcctggtcacaggtg

SEQ ID NO: 2187674 - DNA, 25 bp, Homo sapien
gcagagcccactcctggtcacaggt

SEQ ID NO: 2187675 - DNA, 25 bp, Homo sapien
aacgtgcaggaaatcccttatccag

SEQ ID NO: 2187676 - DNA, 25 bp, Homo sapien
tccagcgacttcagactcagtacag

SEQ ID NO: 2187677 - DNA, 25 bp, Homo sapien
actggcagcttccacaacgtgcagg

SEQ ID NO: 2187678 - DNA, 25 bp, Homo sapien
ccttatccagatcacacttagcgct

SEQ ID NO: 2187679 - DNA, 25 bp, Homo sapien
tccctagaggttggccatgacagca

SEQ ID NO: 2187680 - DNA, 25 bp, Homo sapien
ttgtaaagcttgctgtaatcagcac

SEQ ID NO: 2187681 - DNA, 25 bp, Homo sapien
ccaccactttatccctagaggttgg

SEQ ID NO: 2187682 - DNA, 25 bp, Homo sapien
gacagcaacacaattgtaaagcttg

SEQ ID NO: 2187683 - DNA, 25 bp, Homo sapien
tatctcagaccttgaccatggcttc

SEQ ID NO: 2187684 - DNA, 25 bp, Homo sapien
gttcacagcacagccacaactggaa

SEQ ID NO: 2187685 - DNA, 25 bp, Homo sapien
caggaaaagtacaaccccaagagct

SEQ ID NO: 2187686 - DNA, 25 bp, Homo sapien
catggcttcgtttgacagccaggaa

SEQ ID NO: 2187687 - DNA, 25 bp, Homo sapien
taactctagttaccgtgctgcacag

SEQ ID NO: 2187688 - DNA, 25 bp, Homo sapien
tatacaccgtgaaatgacgatcaca

SEQ ID NO: 2187689 - DNA, 25 bp, Homo sapien
taagaacacgcaagagttactctca

SEQ ID NO: 2187690 - DNA, 25 bp, Homo sapien
taattgcaagtttgtgccctttggc

SEQ ID NO: 2187691 - DNA, 25 bp, Homo sapien
cacctgactctgaaaatgtaacttg

SEQ ID NO: 2187692 - DNA, 25 bp, Homo sapien
tacaatcctataaaagtcagaagat

SEQ ID NO: 2187693 - DNA, 25 bp, Homo sapien
catattatggtctgtcatggtctgt

SEQ ID NO: 2187694 - DNA, 25 bp, Homo sapien
cctattattgtaccccatattatgg

SEQ ID NO: 2187695 - DNA, 25 bp, Homo sapien
tatgatgatcaatttcctaggggga

SEQ ID NO: 2187696 - DNA, 25 bp, Homo sapien
aaaggcttggtggaactgtctgttc

SEQ ID NO: 2187697 - DNA, 25 bp, Homo sapien
aggaatcattgggaaaaggcttggt

SEQ ID NO: 2187698 - DNA, 25 bp, Homo sapien
tttcctagggggagaggaatcattg

SEQ ID NO: 2187699 - DNA, 25 bp, Homo sapien
gcagagcagccccgagagctgcctg

SEQ ID NO: 2187700 - DNA, 25 bp, Homo sapien
ggattattcatgagctttccaagaa

SEQ ID NO: 2187701 - DNA, 25 bp, Homo sapien
tgagctttccaagaaaggggtgggc

SEQ ID NO: 2187702 - DNA, 25 bp, Homo sapien
agcagccccgagagctgcctggagc

SEQ ID NO: 2187703 - DNA, 25 bp, Homo sapien
tggtaacacggagactacagcaggg

SEQ ID NO: 2187704 - DNA, 25 bp, Homo sapien
gaggacaacccattcttctgagaac

SEQ ID NO: 2187705 - DNA, 25 bp, Homo sapien
ggacttctgcatgcaggtcttccca

SEQ ID NO: 2187706 - DNA, 25 bp, Homo sapien
ttaagtattatctggtaacacggag

SEQ ID NO: 2187707 - DNA, 25 bp, Homo sapien
ccatgaggaatagcctccaggtgat

SEQ ID NO: 2187708 - DNA, 25 bp, Homo sapien
gttaatatttcccatgaggaatagc

SEQ ID NO: 2187709 - DNA, 25 bp, Homo sapien
tatttcccatgaggaatagcctcca

SEQ ID NO: 2187710 - DNA, 25 bp, Homo sapien
tgaggaatagcctccaggtgatctt

SEQ ID NO: 2187711 - DNA, 25 bp, Homo sapien
tcttacaaagttgtcagggaacaaa

SEQ ID NO: 2187712 - DNA, 25 bp, Homo sapien
cctgccgttgatctgtccctcccac

SEQ ID NO: 2187713 - DNA, 25 bp, Homo sapien
ctctcctgccgttgatctgtccctc

SEQ ID NO: 2187714 - DNA, 25 bp, Homo sapien
tcctgccgttgatctgtccctccca

SEQ ID NO: 2187715 - DNA, 25 bp, Homo sapien
tctcctgccgttgatctgtccctcc

SEQ ID NO: 2187716 - DNA, 25 bp, Homo sapien
gatgatttcacccacgctgatcgtc

SEQ ID NO: 2187717 - DNA, 25 bp, Homo sapien
cacgctgatcgtcagctcatcatcg

SEQ ID NO: 2187718 - DNA, 25 bp, Homo sapien
gtcagctcatcatcgtgctgggcct

SEQ ID NO: 2187719 - DNA, 25 bp, Homo sapien
tgatttcacccacgctgatcgtcag

SEQ ID NO: 2187720 - DNA, 25 bp, Homo sapien
gggatctccgcgtacaataaagctg

SEQ ID NO: 2187721 - DNA, 25 bp, Homo sapien
tctgaatttcccaggtcaaggccac

SEQ ID NO: 2187722 - DNA, 25 bp, Homo sapien
ctcccattagtgtcagggctgaagg

SEQ ID NO: 2187723 - DNA, 25 bp, Homo sapien
aagctgacctacataccagccacgt

SEQ ID NO: 2187724 - DNA, 25 bp, Homo sapien
ctgttgtttgcgttgtttaggtgta

SEQ ID NO: 2187725 - DNA, 25 bp, Homo sapien
tattgtgattatggtttttagcaga

SEQ ID NO: 2187726 - DNA, 25 bp, Homo sapien
gagatgtgttttacataaggaaggc

SEQ ID NO: 2187727 - DNA, 25 bp, Homo sapien
cagatctatgagtgtggacaaggcc

SEQ ID NO: 2187728 - DNA, 25 bp, Homo sapien
tatgagcctccagatctgtagaagt

SEQ ID NO: 2187729 - DNA, 25 bp, Homo sapien
gctatgagcctccagatctgtagaa

SEQ ID NO: 2187730 - DNA, 25 bp, Homo sapien
attaacaatgggcagatccccttcc

SEQ ID NO: 2187731 - DNA, 25 bp, Homo sapien
acagcagcaagaggttccacattaa

SEQ ID NO: 2187732 - DNA, 25 bp, Homo sapien
gacggtctgcggggacagggtcacc

SEQ ID NO: 2187733 - DNA, 25 bp, Homo sapien
tgacggtctgcggggacagggtcac

SEQ ID NO: 2187734 - DNA, 25 bp, Homo sapien
acggtctgcggggacagggtcacca

SEQ ID NO: 2187735 - DNA, 25 bp, Homo sapien
cggtctgcggggacagggtcaccat

SEQ ID NO: 2187736 - DNA, 25 bp, Homo sapien
taagtccagctggatagtcctggtc

SEQ ID NO: 2187737 - DNA, 25 bp, Homo sapien
tttttcaagccacctgtcattccat

SEQ ID NO: 2187738 - DNA, 25 bp, Homo sapien
taactatagcgttcactaaatcact

SEQ ID NO: 2187739 - DNA, 25 bp, Homo sapien
tctttacatcacaaagtgccctcca

SEQ ID NO: 2187740 - DNA, 25 bp, Homo sapien
tcaagaggtccatatgcatcagatg

SEQ ID NO: 2187741 - DNA, 25 bp, Homo sapien
cagagctttccaacctaaggactgg

SEQ ID NO: 2187742 - DNA, 25 bp, Homo sapien
ctctaatcaattggcaagatgggct

SEQ ID NO: 2187743 - DNA, 25 bp, Homo sapien
gatacaagctcaaaagactgcatta

SEQ ID NO: 2187744 - DNA, 25 bp, Homo sapien
tgcaggtggcaggaacacactagtt

SEQ ID NO: 2187745 - DNA, 25 bp, Homo sapien
gcaaggagcttgattaagagacatt

SEQ ID NO: 2187746 - DNA, 25 bp, Homo sapien
caatgtgagtacaagtaaaaacggc

SEQ ID NO: 2187747 - DNA, 25 bp, Homo sapien
cagcaaacatggtaaatcaagtagg

SEQ ID NO: 2187748 - DNA, 25 bp, Homo sapien
caaggctgcaaggtaagatatattt

SEQ ID NO: 2187749 - DNA, 25 bp, Homo sapien
aagacaggtgtgtttacaaggctgc

SEQ ID NO: 2187750 - DNA, 25 bp, Homo sapien
caggtgtgtttacaaggctgcaagg

SEQ ID NO: 2187751 - DNA, 25 bp, Homo sapien
ctaaagacaggtgtgtttacaaggc

SEQ ID NO: 2187752 - DNA, 25 bp, Homo sapien
ctggttaccagtaccaccgctgcgt

SEQ ID NO: 2187753 - DNA, 25 bp, Homo sapien
caccgctgcgtcttttggacctgac

SEQ ID NO: 2187754 - DNA, 25 bp, Homo sapien
gacggataagcgactgttaatgaag

SEQ ID NO: 2187755 - DNA, 25 bp, Homo sapien
tcttttggacctgacggataagcga

SEQ ID NO: 2187756 - DNA, 25 bp, Homo sapien
ttaagccagatgacggaggagtttc

SEQ ID NO: 2187757 - DNA, 25 bp, Homo sapien
tgtttttgacaggagggcattttct

SEQ ID NO: 2187758 - DNA, 25 bp, Homo sapien
gctgcaatctcttagccattagcaa

SEQ ID NO: 2187759 - DNA, 25 bp, Homo sapien
gcaacagttcaaatattaagccaga

SEQ ID NO: 2187760 - DNA, 25 bp, Homo sapien
aggaagtgtggcaagcctgaaagct

SEQ ID NO: 2187761 - DNA, 25 bp, Homo sapien
agtgtggcaagcctgaaagctgacc

SEQ ID NO: 2187762 - DNA, 25 bp, Homo sapien
aggaggaagtgtggcaagcctgaaa

SEQ ID NO: 2187763 - DNA, 25 bp, Homo sapien
gaagtgtggcaagcctgaaagctga

SEQ ID NO: 2187764 - DNA, 25 bp, Homo sapien
tgccaattcccttggactgaactct

SEQ ID NO: 2187765 - DNA, 25 bp, Homo sapien
gtgccaattcccttggactgaactc

SEQ ID NO: 2187766 - DNA, 25 bp, Homo sapien
ccaagtaatcataagtgccttgcca

SEQ ID NO: 2187767 - DNA, 25 bp, Homo sapien
tgccaataaagtggcagcttctctg

SEQ ID NO: 2187768 - DNA, 25 bp, Homo sapien
caaacatttaatagcccaagtaatc

SEQ ID NO: 2187769 - DNA, 25 bp, Homo sapien
agcaaggtggttccaatgctccggg

SEQ ID NO: 2187770 - DNA, 25 bp, Homo sapien
aggcgcgagggtccggacgcggcgg

SEQ ID NO: 2187771 - DNA, 25 bp, Homo sapien
tgaaagttggcggaggcgggcgtgg

SEQ ID NO: 2187772 - DNA, 25 bp, Homo sapien
ggatccaggcgcgagggtccggacg

SEQ ID NO: 2187773 - DNA, 25 bp, Homo sapien
gggccgccgaggcagcgtgaaagtt

SEQ ID NO: 2187774 - DNA, 25 bp, Homo sapien
gctgccccggggcgactcctgctgc

SEQ ID NO: 2187775 - DNA, 25 bp, Homo sapien
gccccggggcgactcctgctgctgc

SEQ ID NO: 2187776 - DNA, 25 bp, Homo sapien
gcccggctgcgccgggtttcctgct

SEQ ID NO: 2187777 - DNA, 25 bp, Homo sapien
gctccccgcgagtggaaattgcgaa

SEQ ID NO: 2187778 - DNA, 25 bp, Homo sapien
tccccgcgagtggaaattgcgaaaa

SEQ ID NO: 2187779 - DNA, 25 bp, Homo sapien
cctgctccccgcgagtggaaattgc

SEQ ID NO: 2187780 - DNA, 25 bp, Homo sapien
cgttttgggtccattcaccaccaca

SEQ ID NO: 2187781 - DNA, 25 bp, Homo sapien
cttgagtgggcgctaaaatgttaac

SEQ ID NO: 2187782 - DNA, 25 bp, Homo sapien
tccgtgggcattcgtgggcaattca

SEQ ID NO: 2187783 - DNA, 25 bp, Homo sapien
caattcagaagctccgttttgggtc

SEQ ID NO: 2187784 - DNA, 25 bp, Homo sapien
catctggtggtaggaagcgatagtg

SEQ ID NO: 2187785 - DNA, 25 bp, Homo sapien
ctttcgccatagatactctgcctgc

SEQ ID NO: 2187786 - DNA, 25 bp, Homo sapien
ttcgccatagatactctgcctgcca

SEQ ID NO: 2187787 - DNA, 25 bp, Homo sapien
cacattcctctaccggcccgttatt

SEQ ID NO: 2187788 - DNA, 25 bp, Homo sapien
cagcacaagggaagttaatatcaag

SEQ ID NO: 2187789 - DNA, 25 bp, Homo sapien
agcacaagggaagttaatatcaaga

SEQ ID NO: 2187790 - DNA, 25 bp, Homo sapien
gaaggtgagacgtgcatgtccacaa

SEQ ID NO: 2187791 - DNA, 25 bp, Homo sapien
tgtgggaacgcctcgctttgtaaac

SEQ ID NO: 2187792 - DNA, 25 bp, Homo sapien
tccaaagtgcgcaaaaagagccctg

SEQ ID NO: 2187793 - DNA, 25 bp, Homo sapien
ggtctcgaacccctagctgaagtga

SEQ ID NO: 2187794 - DNA, 25 bp, Homo sapien
cacagatttctaagcaggctgtttt

SEQ ID NO: 2187795 - DNA, 25 bp, Homo sapien
cagcaacaggccagaggtggtaaag

SEQ ID NO: 2187796 - DNA, 25 bp, Homo sapien
ccagcaacaggccagaggtggtaaa

SEQ ID NO: 2187797 - DNA, 25 bp, Homo sapien
tggagcacagatttctaagcaggct

SEQ ID NO: 2187798 - DNA, 25 bp, Homo sapien
aaatgtcaaactacctaaatgtcca

SEQ ID NO: 2187799 - DNA, 25 bp, Homo sapien
gttatgataacagctacacagtgga

SEQ ID NO: 2187800 - DNA, 25 bp, Homo sapien
ccaaatataagagtgtggttgaata

SEQ ID NO: 2187801 - DNA, 25 bp, Homo sapien
tatgcacaaggttattgattacagc

SEQ ID NO: 2187802 - DNA, 25 bp, Homo sapien
tcaagcagttcataagccaggtgct

SEQ ID NO: 2187803 - DNA, 25 bp, Homo sapien
tcaggccggttgtcttggcgcacac

SEQ ID NO: 2187804 - DNA, 25 bp, Homo sapien
cgcacacggaggtgaggctacacat

SEQ ID NO: 2187805 - DNA, 25 bp, Homo sapien
cctgaattcatggagctagagtagc

SEQ ID NO: 2187806 - DNA, 25 bp, Homo sapien
gaatcgctgggccacatggtaatcc

SEQ ID NO: 2187807 - DNA, 25 bp, Homo sapien
ctaactcagcgaggctaggttggga

SEQ ID NO: 2187808 - DNA, 25 bp, Homo sapien
gaacacacccatgagaggaatcgct

SEQ ID NO: 2187809 - DNA, 25 bp, Homo sapien
tgccatacaagtgtctgagtccctg

SEQ ID NO: 2187810 - DNA, 25 bp, Homo sapien
gtcactcataatcccaccatttaaa

SEQ ID NO: 2187811 - DNA, 25 bp, Homo sapien
caattcactcatatgtacagacagg

SEQ ID NO: 2187812 - DNA, 25 bp, Homo sapien
gcccggccagcaaacaagttttaga

SEQ ID NO: 2187813 - DNA, 25 bp, Homo sapien
tcattatatttgatagatacagaag

SEQ ID NO: 2187814 - DNA, 25 bp, Homo sapien
tggtcactagcgtttttccccatat

SEQ ID NO: 2187815 - DNA, 25 bp, Homo sapien
gacgtgacatgacacctggccatga

SEQ ID NO: 2187816 - DNA, 25 bp, Homo sapien
aactcaagtatgtgccagaatcccc

SEQ ID NO: 2187817 - DNA, 25 bp, Homo sapien
ccatgaatgatgagacggttagttc

SEQ ID NO: 2187818 - DNA, 25 bp, Homo sapien
tcccattaaatgtccagaaccagaa

SEQ ID NO: 2187819 - DNA, 25 bp, Homo sapien
ggctgctctgagacctgggaaatgc

SEQ ID NO: 2187820 - DNA, 25 bp, Homo sapien
gacacagtcaaaggtgtctctgact

SEQ ID NO: 2187821 - DNA, 25 bp, Homo sapien
tgacttctgcaggatttggctttcc

SEQ ID NO: 2187822 - DNA, 25 bp, Homo sapien
gaagcaaagacttcgttgtcccaag

SEQ ID NO: 2187823 - DNA, 25 bp, Homo sapien
agatggaagcaaagacttcgttgtc

SEQ ID NO: 2187824 - DNA, 25 bp, Homo sapien
cctttgtccatactggggcccactg

SEQ ID NO: 2187825 - DNA, 25 bp, Homo sapien
gcccactgttaccaatatttttgtc

SEQ ID NO: 2187826 - DNA, 25 bp, Homo sapien
ggatgggcgagggatgaagtcatac

SEQ ID NO: 2187827 - DNA, 25 bp, Homo sapien
gggatgggcgagggatgaagtcata

SEQ ID NO: 2187828 - DNA, 25 bp, Homo sapien
ttgtgcctggtggttactgaatttg

SEQ ID NO: 2187829 - DNA, 25 bp, Homo sapien
atttgtgcctggtggttactgaatt

SEQ ID NO: 2187830 - DNA, 25 bp, Homo sapien
gcttggttgttcctggtgaatttgt

SEQ ID NO: 2187831 - DNA, 25 bp, Homo sapien
ggttgttcctggtgaatttgtgcct

SEQ ID NO: 2187832 - DNA, 25 bp, Homo sapien
gacaataagagtttctcatccagct

SEQ ID NO: 2187833 - DNA, 25 bp, Homo sapien
ccaataggaaagaaacatgacgagg

SEQ ID NO: 2187834 - DNA, 25 bp, Homo sapien
tctgcctggaagtatccccgtcttt

SEQ ID NO: 2187835 - DNA, 25 bp, Homo sapien
gagatcccgcgtacaatttacccag

SEQ ID NO: 2187836 - DNA, 25 bp, Homo sapien
cttcagcagtgcatgagcttcctca

SEQ ID NO: 2187837 - DNA, 25 bp, Homo sapien
tcttcagcagtgcatgagcttcctc

SEQ ID NO: 2187838 - DNA, 25 bp, Homo sapien
tcagcagtgcatgagcttcctcaca

SEQ ID NO: 2187839 - DNA, 25 bp, Homo sapien
ttcagcagtgcatgagcttcctcac

SEQ ID NO: 2187840 - DNA, 25 bp, Homo sapien
taacacgctttgcatattgagacag

SEQ ID NO: 2187841 - DNA, 25 bp, Homo sapien
ttgagacagtgccaaaagaatatcc

SEQ ID NO: 2187842 - DNA, 25 bp, Homo sapien
tactatggtggacaagacagacacg

SEQ ID NO: 2187843 - DNA, 25 bp, Homo sapien
cacgtcaaataggaagctgggtgct

SEQ ID NO: 2187844 - DNA, 25 bp, Homo sapien
tgaactcacttaaggaaaaggctgc

SEQ ID NO: 2187845 - DNA, 25 bp, Homo sapien
gaggtgctatccaaggctataagtc

SEQ ID NO: 2187846 - DNA, 25 bp, Homo sapien
taaagttgccatactacctgtgtgc

SEQ ID NO: 2187847 - DNA, 25 bp, Homo sapien
tgtttggaaaacctgacctatagag

SEQ ID NO: 2187848 - DNA, 25 bp, Homo sapien
ccataaggccactgtttaaagttct

SEQ ID NO: 2187849 - DNA, 25 bp, Homo sapien
aaatatgatatgcacaagcttgccc

SEQ ID NO: 2187850 - DNA, 25 bp, Homo sapien
agtgcactcacaactacctgatgga

SEQ ID NO: 2187851 - DNA, 25 bp, Homo sapien
gttctctctatgaaaccatgctcag

SEQ ID NO: 2187852 - DNA, 25 bp, Homo sapien
ttagattcctgtggcaacatctgta

SEQ ID NO: 2187853 - DNA, 25 bp, Homo sapien
gattcctgtggcaacatctgtatat

SEQ ID NO: 2187854 - DNA, 25 bp, Homo sapien
agattcctgtggcaacatctgtata

SEQ ID NO: 2187855 - DNA, 25 bp, Homo sapien
ttcctgtggcaacatctgtatattc

SEQ ID NO: 2187856 - DNA, 25 bp, Homo sapien
tttcactaggatcttacactattaa

SEQ ID NO: 2187857 - DNA, 25 bp, Homo sapien
ctttcactaggatcttacactatta

SEQ ID NO: 2187858 - DNA, 25 bp, Homo sapien
tcactaggatcttacactattaaaa

SEQ ID NO: 2187859 - DNA, 25 bp, Homo sapien
ttcactaggatcttacactattaaa

SEQ ID NO: 2187860 - DNA, 25 bp, Homo sapien
aatacatgcacgtatatatttgtca

SEQ ID NO: 2187861 - DNA, 25 bp, Homo sapien
ttttgagttacattcacccttgaca

SEQ ID NO: 2187862 - DNA, 25 bp, Homo sapien
agattcagttgaagtatcttgttaa

SEQ ID NO: 2187863 - DNA, 25 bp, Homo sapien
tcctttaaatagaggtagacttcat

SEQ ID NO: 2187864 - DNA, 25 bp, Homo sapien
ctttacagtatggagcaaaaaggtt

SEQ ID NO: 2187865 - DNA, 25 bp, Homo sapien
atccacagagtggaataatatgcag

SEQ ID NO: 2187866 - DNA, 25 bp, Homo sapien
tcaaaactttacagtatggagcaaa

SEQ ID NO: 2187867 - DNA, 25 bp, Homo sapien
gaatgagtgatggaaatgagaagac

SEQ ID NO: 2187868 - DNA, 25 bp, Homo sapien
tagtcagggttgaagacatcaacag

SEQ ID NO: 2187869 - DNA, 25 bp, Homo sapien
gacaagaaggaggactgaaaaaaga

SEQ ID NO: 2187870 - DNA, 25 bp, Homo sapien
tcttgggaggaggtaagggcaatca

SEQ ID NO: 2187871 - DNA, 25 bp, Homo sapien
cttttaggacatccatgtgagggca

SEQ ID NO: 2187872 - DNA, 25 bp, Homo sapien
gcactgacagtagccagattggaaa

SEQ ID NO: 2187873 - DNA, 25 bp, Homo sapien
cttgcttgcaggcactgacagtagc

SEQ ID NO: 2187874 - DNA, 25 bp, Homo sapien
ttgatgctgtacttgtagagctggg

SEQ ID NO: 2187875 - DNA, 25 bp, Homo sapien
gatgctgtacttgtagagctgggct

SEQ ID NO: 2187876 - DNA, 25 bp, Homo sapien
aaacaggtagtagacactgcaagaa

SEQ ID NO: 2187877 - DNA, 25 bp, Homo sapien
tgttgagacactgctaatgcagcca

SEQ ID NO: 2187878 - DNA, 25 bp, Homo sapien
tatgaagcagcatccagaagggtgg

SEQ ID NO: 2187879 - DNA, 25 bp, Homo sapien
gacactgcaagaatagtagacacta

SEQ ID NO: 2187880 - DNA, 25 bp, Homo sapien
gatgcaaaaagcctaggcctaaaga

SEQ ID NO: 2187881 - DNA, 25 bp, Homo sapien
tagatgatgcaaaaagcctaggcct

SEQ ID NO: 2187882 - DNA, 25 bp, Homo sapien
gcaaaaagcctaggcctaaagattg

SEQ ID NO: 2187883 - DNA, 25 bp, Homo sapien
aagcctaggcctaaagattggagac

SEQ ID NO: 2187884 - DNA, 25 bp, Homo sapien
atttctatttgctgtgaagcggggc

SEQ ID NO: 2187885 - DNA, 25 bp, Homo sapien
gtagcttcttctaggatatacttct

SEQ ID NO: 2187886 - DNA, 25 bp, Homo sapien
tcttctaggatatacttcttatgtc

SEQ ID NO: 2187887 - DNA, 25 bp, Homo sapien
tatacttcttatgtcctatgatgaa

SEQ ID NO: 2187888 - DNA, 25 bp, Homo sapien
atagggtggtcagcaggaattgggc

SEQ ID NO: 2187889 - DNA, 25 bp, Homo sapien
tagaaactataagctgaagcagaca

SEQ ID NO: 2187890 - DNA, 25 bp, Homo sapien
aaaaaaatggagcaagatccaagat

SEQ ID NO: 2187891 - DNA, 25 bp, Homo sapien
tggagcaagatccaagatatataga

SEQ ID NO: 2187892 - DNA, 25 bp, Homo sapien
tataagctgaagcagacagtcaggt

SEQ ID NO: 2187893 - DNA, 25 bp, Homo sapien
tattaacattaagagttatcggcca

SEQ ID NO: 2187894 - DNA, 25 bp, Homo sapien
taatggaatcaacctcagtatcaac

SEQ ID NO: 2187895 - DNA, 25 bp, Homo sapien
caactaaaagagtatgcaattccaa

SEQ ID NO: 2187896 - DNA, 25 bp, Homo sapien
cctcagtatcaacggctgaatggat

SEQ ID NO: 2187897 - DNA, 25 bp, Homo sapien
ttagtgtcgctgaactgtatgtact

SEQ ID NO: 2187898 - DNA, 25 bp, Homo sapien
gcaaagtattcaaggcataatgcct

SEQ ID NO: 2187899 - DNA, 25 bp, Homo sapien
gataatctaggagtttaaaagtcac

SEQ ID NO: 2187900 - DNA, 25 bp, Homo sapien
tgcatagcactgtgaatgaaattag

SEQ ID NO: 2187901 - DNA, 25 bp, Homo sapien
tagcctgaatgtacaagctcttctg

SEQ ID NO: 2187902 - DNA, 25 bp, Homo sapien
cttgggccagtgaaccgtaaacgct

SEQ ID NO: 2187903 - DNA, 25 bp, Homo sapien
acttatgagtgataaatccccttgg

SEQ ID NO: 2187904 - DNA, 25 bp, Homo sapien
gtaccaggcctgatttataattggg

SEQ ID NO: 2187905 - DNA, 25 bp, Homo sapien
tggcatctgccacctctaaagttgc

SEQ ID NO: 2187906 - DNA, 25 bp, Homo sapien
ctggcatctgccacctctaaagttg

SEQ ID NO: 2187907 - DNA, 25 bp, Homo sapien
ggcatctgccacctctaaagttgct

SEQ ID NO: 2187908 - DNA, 25 bp, Homo sapien
agaaagtaggtttctctcaagctgg

SEQ ID NO: 2187909 - DNA, 25 bp, Homo sapien
gatgaaaaactgtctggtacttgga

SEQ ID NO: 2187910 - DNA, 25 bp, Homo sapien
ggattctaggccttatagatgttaa

SEQ ID NO: 2187911 - DNA, 25 bp, Homo sapien
gacgttgcagcgagtcactgttctc

SEQ ID NO: 2187912 - DNA, 25 bp, Homo sapien
gaacgcctctaagggttgtgtgtcc

SEQ ID NO: 2187913 - DNA, 25 bp, Homo sapien
cttggagaaagctctacagctctgc

SEQ ID NO: 2187914 - DNA, 25 bp, Homo sapien
tcctgtgatgatccagaacgcctct

SEQ ID NO: 2187915 - DNA, 25 bp, Homo sapien
ttgtgtgtccatggcagggtttttc

SEQ ID NO: 2187916 - DNA, 25 bp, Homo sapien
cggtggtttccctcaacctcaaatg

SEQ ID NO: 2187917 - DNA, 25 bp, Homo sapien
tcttgtgtttcggtggtttccctca

SEQ ID NO: 2187918 - DNA, 25 bp, Homo sapien
caaatggtttgtgagtaattatgtc

SEQ ID NO: 2187919 - DNA, 25 bp, Homo sapien
tatgtcttttctctgcgtagtataa

SEQ ID NO: 2187920 - DNA, 25 bp, Homo sapien
tgtgtgggtttttggaatccatcag

SEQ ID NO: 2187921 - DNA, 25 bp, Homo sapien
atgtgtgggtttttggaatccatca

SEQ ID NO: 2187922 - DNA, 25 bp, Homo sapien
gggtttttggaatccatcagtatga

SEQ ID NO: 2187923 - DNA, 25 bp, Homo sapien
tgtgggtttttggaatccatcagta

SEQ ID NO: 2187924 - DNA, 25 bp, Homo sapien
tgaaaaactggaattctgatcatcc

SEQ ID NO: 2187925 - DNA, 25 bp, Homo sapien
ttgaaaaactggaattctgatcatc

SEQ ID NO: 2187926 - DNA, 25 bp, Homo sapien
tttgaaaaactggaattctgatcat

SEQ ID NO: 2187927 - DNA, 25 bp, Homo sapien
ctttgaaaaactggaattctgatca

SEQ ID NO: 2187928 - DNA, 25 bp, Homo sapien
attattgccacaatttcagctcctg

SEQ ID NO: 2187929 - DNA, 25 bp, Homo sapien
ttgccacaatttcagctcctgttat

SEQ ID NO: 2187930 - DNA, 25 bp, Homo sapien
tgattattgccacaatttcagctcc

SEQ ID NO: 2187931 - DNA, 25 bp, Homo sapien
tattgccacaatttcagctcctgtt

SEQ ID NO: 2187932 - DNA, 25 bp, Homo sapien
gatgttgccctatcataagttaagg

SEQ ID NO: 2187933 - DNA, 25 bp, Homo sapien
cacctgtagagaacagatgggtcct

SEQ ID NO: 2187934 - DNA, 25 bp, Homo sapien
tacaactttttgaaggaaagccaca

SEQ ID NO: 2187935 - DNA, 25 bp, Homo sapien
gcttgtgaaagatcctaaggcatca

SEQ ID NO: 2187936 - DNA, 25 bp, Homo sapien
gagaatacgatatagccatacaatg

SEQ ID NO: 2187937 - DNA, 25 bp, Homo sapien
gaagtcagttacgagaggccacata

SEQ ID NO: 2187938 - DNA, 25 bp, Homo sapien
tattcagccatacataagaattctc

SEQ ID NO: 2187939 - DNA, 25 bp, Homo sapien
tgagcgttaaaagcattatgctata

SEQ ID NO: 2187940 - DNA, 25 bp, Homo sapien
tttcggaattagatagtaatgatgg

SEQ ID NO: 2187941 - DNA, 25 bp, Homo sapien
caggatgaatgttaagtaatgtctc

SEQ ID NO: 2187942 - DNA, 25 bp, Homo sapien
tttgcaggatgaatgttaagtaatg

SEQ ID NO: 2187943 - DNA, 25 bp, Homo sapien
ggttgcataagtttgttaatatact

SEQ ID NO: 2187944 - DNA, 25 bp, Homo sapien
ccagagttgccgtgagttccatcca

SEQ ID NO: 2187945 - DNA, 25 bp, Homo sapien
tagctaggaatccaagagccagcca

SEQ ID NO: 2187946 - DNA, 25 bp, Homo sapien
tgaagaggctccagagactaagcaa

SEQ ID NO: 2187947 - DNA, 25 bp, Homo sapien
caaatttgtccaagatcggtcagct

SEQ ID NO: 2187948 - DNA, 25 bp, Homo sapien
cctcatcagaattacgaagacctca

SEQ ID NO: 2187949 - DNA, 25 bp, Homo sapien
ggtcctgcctcctgctaatattcta

SEQ ID NO: 2187950 - DNA, 25 bp, Homo sapien
gtatagacatccacaaagagtcgca

SEQ ID NO: 2187951 - DNA, 25 bp, Homo sapien
tcaaaccgcatatgagaatcactga

SEQ ID NO: 2187952 - DNA, 25 bp, Homo sapien
gtcatgtcgtaggtcatttggatct

SEQ ID NO: 2187953 - DNA, 25 bp, Homo sapien
catgtcgtaggtcatttggatctat

SEQ ID NO: 2187954 - DNA, 25 bp, Homo sapien
ctctctgcagcactagctatgtgaa

SEQ ID NO: 2187955 - DNA, 25 bp, Homo sapien
gaaaaatgtgctcatcttcattctg

SEQ ID NO: 2187956 - DNA, 25 bp, Homo sapien
tcacattacttttagttgcacaaag

SEQ ID NO: 2187957 - DNA, 25 bp, Homo sapien
attacttttagttgcacaaagacca

SEQ ID NO: 2187958 - DNA, 25 bp, Homo sapien
cattacttttagttgcacaaagacc

SEQ ID NO: 2187959 - DNA, 25 bp, Homo sapien
cacattacttttagttgcacaaaga

SEQ ID NO: 2187960 - DNA, 25 bp, Homo sapien
ctagataagttaccttgtactcatc

SEQ ID NO: 2187961 - DNA, 25 bp, Homo sapien
caagaacgttaattacaagtcctag

SEQ ID NO: 2187962 - DNA, 25 bp, Homo sapien
gaacgttaattacaagtcctagata

SEQ ID NO: 2187963 - DNA, 25 bp, Homo sapien
gtcctagataagttaccttgtactc

SEQ ID NO: 2187964 - DNA, 25 bp, Homo sapien
cacagcttgtttactctgaagctcg

SEQ ID NO: 2187965 - DNA, 25 bp, Homo sapien
catagatcacagcttgtttactctg

SEQ ID NO: 2187966 - DNA, 25 bp, Homo sapien
cagcttgtttactctgaagctcggc

SEQ ID NO: 2187967 - DNA, 25 bp, Homo sapien
gatcacagcttgtttactctgaagc

SEQ ID NO: 2187968 - DNA, 25 bp, Homo sapien
acatctgccttgtgtatatcttgca

SEQ ID NO: 2187969 - DNA, 25 bp, Homo sapien
tatcttgcattgttgagaaacgctc

SEQ ID NO: 2187970 - DNA, 25 bp, Homo sapien
gagaaacgctcatgtaaagtaatgc

SEQ ID NO: 2187971 - DNA, 25 bp, Homo sapien
catgtaaagtaatgccaggtgatgg

SEQ ID NO: 2187972 - DNA, 25 bp, Homo sapien
agtattctgagttgagtcaagatgt

SEQ ID NO: 2187973 - DNA, 25 bp, Homo sapien
gtattctgagttgagtcaagatgtt

SEQ ID NO: 2187974 - DNA, 25 bp, Homo sapien
cagtattctgagttgagtcaagatg

SEQ ID NO: 2187975 - DNA, 25 bp, Homo sapien
ctgccaacagcaaccaaatcatgtg

SEQ ID NO: 2187976 - DNA, 25 bp, Homo sapien
tgccaacagcaaccaaatcatgtga

SEQ ID NO: 2187977 - DNA, 25 bp, Homo sapien
caacagcaaccaaatcatgtgacat

SEQ ID NO: 2187978 - DNA, 25 bp, Homo sapien
gccaacagcaaccaaatcatgtgac

SEQ ID NO: 2187979 - DNA, 25 bp, Homo sapien
caagagcttaggacgtttgtgacga

SEQ ID NO: 2187980 - DNA, 25 bp, Homo sapien
tgtcattactagatcgcaaatcaac

SEQ ID NO: 2187981 - DNA, 25 bp, Homo sapien
tgataggcgagggtttcacatcagg

SEQ ID NO: 2187982 - DNA, 25 bp, Homo sapien
cctctcagcatgtcgataagtttgg

SEQ ID NO: 2187983 - DNA, 25 bp, Homo sapien
tatgtgtagaatgtcgggcagcatg

SEQ ID NO: 2187984 - DNA, 25 bp, Homo sapien
cacttgaggctttataccaaattac

SEQ ID NO: 2187985 - DNA, 25 bp, Homo sapien
taaaagtattctagccatcaacatg

SEQ ID NO: 2187986 - DNA, 25 bp, Homo sapien
taagccaattctataggcacaaggc

SEQ ID NO: 2187987 - DNA, 25 bp, Homo sapien
tatttgggcatatactgagctctcc

SEQ ID NO: 2187988 - DNA, 25 bp, Homo sapien
tcagagcctcttctagttgactggg

SEQ ID NO: 2187989 - DNA, 25 bp, Homo sapien
gaatctgctattgacctctgaggtg

SEQ ID NO: 2187990 - DNA, 25 bp, Homo sapien
tatttccacgagagggaatccttgg

SEQ ID NO: 2187991 - DNA, 25 bp, Homo sapien
ggagggccagcttaggtgcacagca

SEQ ID NO: 2187992 - DNA, 25 bp, Homo sapien
gaggagggccagcttaggtgcacag

SEQ ID NO: 2187993 - DNA, 25 bp, Homo sapien
ccagcttaggtgcacagcaggatcc

SEQ ID NO: 2187994 - DNA, 25 bp, Homo sapien
ggccagcttaggtgcacagcaggat

SEQ ID NO: 2187995 - DNA, 25 bp, Homo sapien
gaacagagcttgtaacttcggtgaa

SEQ ID NO: 2187996 - DNA, 25 bp, Homo sapien
tatggaaagatgtgctgttcgaaca

SEQ ID NO: 2187997 - DNA, 25 bp, Homo sapien
gcagctacaatgctctccagggaca

SEQ ID NO: 2187998 - DNA, 25 bp, Homo sapien
agggacagcacatcctttatggaac

SEQ ID NO: 2187999 - DNA, 25 bp, Homo sapien
tgtttccactaaggcggaaggcttc

SEQ ID NO: 2188000 - DNA, 25 bp, Homo sapien
tctccatacctcagcattgccaaca

SEQ ID NO: 2188001 - DNA, 25 bp, Homo sapien
gaggcttgtgtttccactaaggcgg

SEQ ID NO: 2188002 - DNA, 25 bp, Homo sapien
tccactaaggcggaaggcttctgta

SEQ ID NO: 2188003 - DNA, 25 bp, Homo sapien
ctagacgtaaagagaggtgtgccac

SEQ ID NO: 2188004 - DNA, 25 bp, Homo sapien
gacgtaaagagaggtgtgccactat

SEQ ID NO: 2188005 - DNA, 25 bp, Homo sapien
agacgtaaagagaggtgtgccacta

SEQ ID NO: 2188006 - DNA, 25 bp, Homo sapien
tagacgtaaagagaggtgtgccact

SEQ ID NO: 2188007 - DNA, 25 bp, Homo sapien
catctgagctgcccaatttctccat

SEQ ID NO: 2188008 - DNA, 25 bp, Homo sapien
cattttgcacctggggacctttcca

SEQ ID NO: 2188009 - DNA, 25 bp, Homo sapien
cattcaatatcggtttgatatgcta

SEQ ID NO: 2188010 - DNA, 25 bp, Homo sapien
cgaagaagtttgctggaacagttgc

SEQ ID NO: 2188011 - DNA, 25 bp, Homo sapien
ttatatgtttcatagcacagtgtcc

SEQ ID NO: 2188012 - DNA, 25 bp, Homo sapien
ttcttccgaagaagtttgctggaac

SEQ ID NO: 2188013 - DNA, 25 bp, Homo sapien
gggatctagatcgtgaccgtgccat

SEQ ID NO: 2188014 - DNA, 25 bp, Homo sapien
cctgggggatctagatcgtgaccgt

SEQ ID NO: 2188015 - DNA, 25 bp, Homo sapien
ttccacctgggggatctagatcgtg

SEQ ID NO: 2188016 - DNA, 25 bp, Homo sapien
ggggatctagatcgtgaccgtgcca

SEQ ID NO: 2188017 - DNA, 25 bp, Homo sapien
cgtgagccactatccactttttaca

SEQ ID NO: 2188018 - DNA, 25 bp, Homo sapien
tgacacgtgagccactatccacttt

SEQ ID NO: 2188019 - DNA, 25 bp, Homo sapien
cctttgacacgtgagccactatcca

SEQ ID NO: 2188020 - DNA, 25 bp, Homo sapien
cacgtgagccactatccacttttta

SEQ ID NO: 2188021 - DNA, 25 bp, Homo sapien
ctggttgccatcgattagttgtaaa

SEQ ID NO: 2188022 - DNA, 25 bp, Homo sapien
ggttgccatcgattagttgtaaata

SEQ ID NO: 2188023 - DNA, 25 bp, Homo sapien
tctgtaactggttgccatcgattag

SEQ ID NO: 2188024 - DNA, 25 bp, Homo sapien
gtaactggttgccatcgattagttg

SEQ ID NO: 2188025 - DNA, 25 bp, Homo sapien
aataaggagggactatttgcctggc

SEQ ID NO: 2188026 - DNA, 25 bp, Homo sapien
tagaatgatagtcatagcagagatg

SEQ ID NO: 2188027 - DNA, 25 bp, Homo sapien
cattagggatctaaagtagaatgat

SEQ ID NO: 2188028 - DNA, 25 bp, Homo sapien
gcagagatgagtctaagtccaatta

SEQ ID NO: 2188029 - DNA, 25 bp, Homo sapien
ggtgtataaccacattcacaatggt

SEQ ID NO: 2188030 - DNA, 25 bp, Homo sapien
ctggaggtgtataaccacattcaca

SEQ ID NO: 2188031 - DNA, 25 bp, Homo sapien
ggaggtgtataaccacattcacaat

SEQ ID NO: 2188032 - DNA, 25 bp, Homo sapien
acattcacaatggttacttggaatg

SEQ ID NO: 2188033 - DNA, 25 bp, Homo sapien
gtcgccgtgcctgtcgagggacctc

SEQ ID NO: 2188034 - DNA, 25 bp, Homo sapien
gccgcctcgaggacaagggcaccgt

SEQ ID NO: 2188035 - DNA, 25 bp, Homo sapien
ggtcgccgcgcccaagggaaggcgc

SEQ ID NO: 2188036 - DNA, 25 bp, Homo sapien
aacctgcccgacgacggcggaggat

SEQ ID NO: 2188037 - DNA, 25 bp, Homo sapien
ggcgcagaggagctgtcccaacaga

SEQ ID NO: 2188038 - DNA, 25 bp, Homo sapien
tgtcccaacagaacccgagtcggac

SEQ ID NO: 2188039 - DNA, 25 bp, Homo sapien
ggagctgtcccaacagaacccgagt

SEQ ID NO: 2188040 - DNA, 25 bp, Homo sapien
gcagaggagctgtcccaacagaacc

SEQ ID NO: 2188041 - DNA, 25 bp, Homo sapien
cgccgcatcctccccgctgccccat

SEQ ID NO: 2188042 - DNA, 25 bp, Homo sapien
cctcgcccctcactctgccgccgcc

SEQ ID NO: 2188043 - DNA, 25 bp, Homo sapien
ggcctcgcccctcactctgccgccg

SEQ ID NO: 2188044 - DNA, 25 bp, Homo sapien
tgtgaaatagctctttcaggctctg

SEQ ID NO: 2188045 - DNA, 25 bp, Homo sapien
tctggtagtaacaccttttgccctc

SEQ ID NO: 2188046 - DNA, 25 bp, Homo sapien
tgactgtctggcattagttttcctc

SEQ ID NO: 2188047 - DNA, 25 bp, Homo sapien
tctgtgccatctggtagtaacacct

SEQ ID NO: 2188048 - DNA, 25 bp, Homo sapien
aagggacttggccagtatttgccga

SEQ ID NO: 2188049 - DNA, 25 bp, Homo sapien
taaaacgctagcaagtcatcagact

SEQ ID NO: 2188050 - DNA, 25 bp, Homo sapien
tgtgtgcctgtcataaagggacttg

SEQ ID NO: 2188051 - DNA, 25 bp, Homo sapien
tatttgccgagatggacagcaccgc

SEQ ID NO: 2188052 - DNA, 25 bp, Homo sapien
tttgtatctcctggttgcaaacctc

SEQ ID NO: 2188053 - DNA, 25 bp, Homo sapien
aagcacatgaacaagattactactg

SEQ ID NO: 2188054 - DNA, 25 bp, Homo sapien
ctttattgagtagagacacatacac

SEQ ID NO: 2188055 - DNA, 25 bp, Homo sapien
cattcttaaatgtagctggctgtaa

SEQ ID NO: 2188056 - DNA, 25 bp, Homo sapien
caaggtttctaccaagagtggccag

SEQ ID NO: 2188057 - DNA, 25 bp, Homo sapien
tatcagcagctttacgggttctcca

SEQ ID NO: 2188058 - DNA, 25 bp, Homo sapien
tataaagcgaattgccgagccagtc

SEQ ID NO: 2188059 - DNA, 25 bp, Homo sapien
cactcaggttattcagagggtcact

SEQ ID NO: 2188060 - DNA, 25 bp, Homo sapien
gaggacctatgaatactctaataaa

SEQ ID NO: 2188061 - DNA, 25 bp, Homo sapien
taataaatattaagccacgtaactg

SEQ ID NO: 2188062 - DNA, 25 bp, Homo sapien
tatagtgaggtaagtgaactgaagg

SEQ ID NO: 2188063 - DNA, 25 bp, Homo sapien
gccacgtaactgtcagggaaataga

SEQ ID NO: 2188064 - DNA, 25 bp, Homo sapien
ttttattaaagggatgctgtatttg

SEQ ID NO: 2188065 - DNA, 25 bp, Homo sapien
cttttattaaagggatgctgtattt

SEQ ID NO: 2188066 - DNA, 25 bp, Homo sapien
gtgttgagaggagtttcttggccag

SEQ ID NO: 2188067 - DNA, 25 bp, Homo sapien
cagaaggtgttgagaggagtttctt

SEQ ID NO: 2188068 - DNA, 25 bp, Homo sapien
aacagaaggtgttgagaggagtttc

SEQ ID NO: 2188069 - DNA, 25 bp, Homo sapien
aggtgttgagaggagtttcttggcc

SEQ ID NO: 2188070 - DNA, 25 bp, Homo sapien
aaaattccgggatagagataagctc

SEQ ID NO: 2188071 - DNA, 25 bp, Homo sapien
aagtgctcgggcattaccagttcca

SEQ ID NO: 2188072 - DNA, 25 bp, Homo sapien
tttttgttacagtcgtccaggctga

SEQ ID NO: 2188073 - DNA, 25 bp, Homo sapien
ttttggtccagagacaccccaggaa

SEQ ID NO: 2188074 - DNA, 25 bp, Homo sapien
gtgatccacaccattaacttcctgg

SEQ ID NO: 2188075 - DNA, 25 bp, Homo sapien
cagctggcttaagcccattagagaa

SEQ ID NO: 2188076 - DNA, 25 bp, Homo sapien
acttcttcagttgaatcatccaggc

SEQ ID NO: 2188077 - DNA, 25 bp, Homo sapien
tgatttcccatcaagggcatccaga

SEQ ID NO: 2188078 - DNA, 25 bp, Homo sapien
cacacagcaggctggacccccactt

SEQ ID NO: 2188079 - DNA, 25 bp, Homo sapien
acagcaggctggacccccactttgg

SEQ ID NO: 2188080 - DNA, 25 bp, Homo sapien
cagcaggctggacccccactttggg

SEQ ID NO: 2188081 - DNA, 25 bp, Homo sapien
tcttcttttccacacacacagcagg

SEQ ID NO: 2188082 - DNA, 25 bp, Homo sapien
ttaaaatggtcatttgaattcctac

SEQ ID NO: 2188083 - DNA, 25 bp, Homo sapien
ttctacttagtacataaactattaa

SEQ ID NO: 2188084 - DNA, 25 bp, Homo sapien
tcactgagtgtattctgctgttctt

SEQ ID NO: 2188085 - DNA, 25 bp, Homo sapien
gctgttcttttctacttagtacata

SEQ ID NO: 2188086 - DNA, 25 bp, Homo sapien
cttcacttgtggagacacatcactt

SEQ ID NO: 2188087 - DNA, 25 bp, Homo sapien
tcacttgtggagacacatcactttt

SEQ ID NO: 2188088 - DNA, 25 bp, Homo sapien
cacttgtggagacacatcacttttc

SEQ ID NO: 2188089 - DNA, 25 bp, Homo sapien
cttgtggagacacatcacttttcct

SEQ ID NO: 2188090 - DNA, 25 bp, Homo sapien
aatctgttctctctcgagacgcatc

SEQ ID NO: 2188091 - DNA, 25 bp, Homo sapien
ctcccgggcctttgtttctgctgct

SEQ ID NO: 2188092 - DNA, 25 bp, Homo sapien
cgcatctgttcagctacctcccggg

SEQ ID NO: 2188093 - DNA, 25 bp, Homo sapien
tgttctctctcgagacgcatctgtt

SEQ ID NO: 2188094 - DNA, 25 bp, Homo sapien
gcttttctttcaacaacagctcctc

SEQ ID NO: 2188095 - DNA, 25 bp, Homo sapien
cttgcttttctttcaacaacagctc

SEQ ID NO: 2188096 - DNA, 25 bp, Homo sapien
ttctcttgtttttcttgttcttgct

SEQ ID NO: 2188097 - DNA, 25 bp, Homo sapien
tctcttgtttttcttgttcttgctt

SEQ ID NO: 2188098 - DNA, 25 bp, Homo sapien
tcttctaggcgaagcctttcctcct

SEQ ID NO: 2188099 - DNA, 25 bp, Homo sapien
tctaggcgaagcctttcctcctctg

SEQ ID NO: 2188100 - DNA, 25 bp, Homo sapien
ttcgggcttcctcttctaggcgaag

SEQ ID NO: 2188101 - DNA, 25 bp, Homo sapien
cctgctttcgggcttcctcttctag

SEQ ID NO: 2188102 - DNA, 25 bp, Homo sapien
acagatgtgaggatgatcttattcc

SEQ ID NO: 2188103 - DNA, 25 bp, Homo sapien
gtgttccagccccaggttgtctggt

SEQ ID NO: 2188104 - DNA, 25 bp, Homo sapien
tggctttaactattaactgtaaaca

SEQ ID NO: 2188105 - DNA, 25 bp, Homo sapien
tcttattccaagaggtggccgctgt

SEQ ID NO: 2188106 - DNA, 25 bp, Homo sapien
cacgtggcactatgcaaagcttcac

SEQ ID NO: 2188107 - DNA, 25 bp, Homo sapien
ctcccacgtggcactatgcaaagct

SEQ ID NO: 2188108 - DNA, 25 bp, Homo sapien
gtggcactatgcaaagcttcacatt

SEQ ID NO: 2188109 - DNA, 25 bp, Homo sapien
ccacgtggcactatgcaaagcttca

SEQ ID NO: 2188110 - DNA, 25 bp, Homo sapien
tctaggttcccatacttctgttcaa

SEQ ID NO: 2188111 - DNA, 25 bp, Homo sapien
ttcagacattctaggttcccatact

SEQ ID NO: 2188112 - DNA, 25 bp, Homo sapien
agttcagacattctaggttcccata

SEQ ID NO: 2188113 - DNA, 25 bp, Homo sapien
gacattctaggttcccatacttctg

SEQ ID NO: 2188114 - DNA, 25 bp, Homo sapien
aaaagaaaggcaagctgctctttcc

SEQ ID NO: 2188115 - DNA, 25 bp, Homo sapien
gctctttccaacacaacagttacat

SEQ ID NO: 2188116 - DNA, 25 bp, Homo sapien
acacaacagttacatgagatcacac

SEQ ID NO: 2188117 - DNA, 25 bp, Homo sapien
tccaacacaacagttacatgagatc

SEQ ID NO: 2188118 - DNA, 25 bp, Homo sapien
tctcttttcagccaagatcttcgca

SEQ ID NO: 2188119 - DNA, 25 bp, Homo sapien
ttcagccaagatcttcgcagcctct

SEQ ID NO: 2188120 - DNA, 25 bp, Homo sapien
tcttttcagccaagatcttcgcagc

SEQ ID NO: 2188121 - DNA, 25 bp, Homo sapien
ttttcagccaagatcttcgcagcct

SEQ ID NO: 2188122 - DNA, 25 bp, Homo sapien
taagcggtacttcacaggagaccct

SEQ ID NO: 2188123 - DNA, 25 bp, Homo sapien
agcctgctgagccaaggtaccttcc

SEQ ID NO: 2188124 - DNA, 25 bp, Homo sapien
gcttgtccactacatgcttctctag

SEQ ID NO: 2188125 - DNA, 25 bp, Homo sapien
tctctttctccgctttcctcttggg

SEQ ID NO: 2188126 - DNA, 25 bp, Homo sapien
ctgtggataagctttagtagctgtc

SEQ ID NO: 2188127 - DNA, 25 bp, Homo sapien
cctggccatttggagctcagacctc

SEQ ID NO: 2188128 - DNA, 25 bp, Homo sapien
ggccatttggagctcagacctccat

SEQ ID NO: 2188129 - DNA, 25 bp, Homo sapien
tcacactctctgcagttgtgtccat

SEQ ID NO: 2188130 - DNA, 25 bp, Homo sapien
ccattcacactctctgcagttgtgt

SEQ ID NO: 2188131 - DNA, 25 bp, Homo sapien
tctgcttcgggggtccctgaagtgt

SEQ ID NO: 2188132 - DNA, 25 bp, Homo sapien
cagtatagaaagagttgggctctgc

SEQ ID NO: 2188133 - DNA, 25 bp, Homo sapien
cccgtggaatgaggtacgatttctc

SEQ ID NO: 2188134 - DNA, 25 bp, Homo sapien
tctctccctggaactggcctgcgag

SEQ ID NO: 2188135 - DNA, 25 bp, Homo sapien
ccatgaatgggtaggcagacaagaa

SEQ ID NO: 2188136 - DNA, 25 bp, Homo sapien
atgggtaggcagacaagaagccttc

SEQ ID NO: 2188137 - DNA, 25 bp, Homo sapien
gaatgggtaggcagacaagaagcct

SEQ ID NO: 2188138 - DNA, 25 bp, Homo sapien
ctgcccatgaatgggtaggcagaca

SEQ ID NO: 2188139 - DNA, 25 bp, Homo sapien
ctgcagacatgactccgaccacaag

SEQ ID NO: 2188140 - DNA, 25 bp, Homo sapien
atgactccgaccacaagggtctcca

SEQ ID NO: 2188141 - DNA, 25 bp, Homo sapien
gcagacatgactccgaccacaaggg

SEQ ID NO: 2188142 - DNA, 25 bp, Homo sapien
gacatgactccgaccacaagggtct

SEQ ID NO: 2188143 - DNA, 25 bp, Homo sapien
tatgtcagactgcacggctctctgg

SEQ ID NO: 2188144 - DNA, 25 bp, Homo sapien
gactttgtaccctgtcagctgccct

SEQ ID NO: 2188145 - DNA, 25 bp, Homo sapien
aactaaaccacaaggctggtatgtc

SEQ ID NO: 2188146 - DNA, 25 bp, Homo sapien
ctaagcacaggtatccggaagaaac

SEQ ID NO: 2188147 - DNA, 25 bp, Homo sapien
gaagatggtctcttaggaatgcctc

SEQ ID NO: 2188148 - DNA, 25 bp, Homo sapien
tggtctcttaggaatgcctccagaa

SEQ ID NO: 2188149 - DNA, 25 bp, Homo sapien
ggagaagatggtctcttaggaatgc

SEQ ID NO: 2188150 - DNA, 25 bp, Homo sapien
agatggtctcttaggaatgcctcca

SEQ ID NO: 2188151 - DNA, 25 bp, Homo sapien
ggacccgaagttcacaacaggaaga

SEQ ID NO: 2188152 - DNA, 25 bp, Homo sapien
gagaagttgctgttcgttgcccccg

SEQ ID NO: 2188153 - DNA, 25 bp, Homo sapien
gttgctgttcgttgcccccgcttca

SEQ ID NO: 2188154 - DNA, 25 bp, Homo sapien
aagttgctgttcgttgcccccgctt

SEQ ID NO: 2188155 - DNA, 25 bp, Homo sapien
catctcctgcaccagatgtagacgt

SEQ ID NO: 2188156 - DNA, 25 bp, Homo sapien
tcaatgtttcgagtgggtgaagact

SEQ ID NO: 2188157 - DNA, 25 bp, Homo sapien
tgtagacgtagatgtagctttcttc

SEQ ID NO: 2188158 - DNA, 25 bp, Homo sapien
tctcaatgtttcgagtgggtgaaga

SEQ ID NO: 2188159 - DNA, 25 bp, Homo sapien
ctgtgtgggtgtcaacagtcgcgaa

SEQ ID NO: 2188160 - DNA, 25 bp, Homo sapien
gcttccattggactaaggtgcatgt

SEQ ID NO: 2188161 - DNA, 25 bp, Homo sapien
cagtcgcgaaacaagaatggcttcc

SEQ ID NO: 2188162 - DNA, 25 bp, Homo sapien
tgaatcattggcctgcccagagagc

SEQ ID NO: 2188163 - DNA, 25 bp, Homo sapien
taacttgtgctaaacactccactgg

SEQ ID NO: 2188164 - DNA, 25 bp, Homo sapien
cacataatatgcctctgggatagag

SEQ ID NO: 2188165 - DNA, 25 bp, Homo sapien
tctgccaagtcgcaaccagcctttt

SEQ ID NO: 2188166 - DNA, 25 bp, Homo sapien
gaaccttatagggtctctgacacac

SEQ ID NO: 2188167 - DNA, 25 bp, Homo sapien
tggatgaagacaggcgtttattcat

SEQ ID NO: 2188168 - DNA, 25 bp, Homo sapien
ttcatgggaggctccgttggctttg

SEQ ID NO: 2188169 - DNA, 25 bp, Homo sapien
acaggcgtttattcatgggaggctc

SEQ ID NO: 2188170 - DNA, 25 bp, Homo sapien
aactcatagttgatgttgaaagttt

SEQ ID NO: 2188171 - DNA, 25 bp, Homo sapien
gtggcacagcatgctctgctttcat

SEQ ID NO: 2188172 - DNA, 25 bp, Homo sapien
tcctaaatgctgtggcacagcatgc

SEQ ID NO: 2188173 - DNA, 25 bp, Homo sapien
cctaaatgctgtggcacagcatgct

SEQ ID NO: 2188174 - DNA, 25 bp, Homo sapien
gcacagcatgctctgctttcatcat

SEQ ID NO: 2188175 - DNA, 25 bp, Homo sapien
ctccattcagaactccgggtgatta

SEQ ID NO: 2188176 - DNA, 25 bp, Homo sapien
cagacgttagtgagttgaggatgaa

SEQ ID NO: 2188177 - DNA, 25 bp, Homo sapien
cactaagatgtaaggcatgcaccgc

SEQ ID NO: 2188178 - DNA, 25 bp, Homo sapien
gacaagattttcaaggcagacgtta

SEQ ID NO: 2188179 - DNA, 25 bp, Homo sapien
gttttggtaaccagaagtaatcaga

SEQ ID NO: 2188180 - DNA, 25 bp, Homo sapien
ccaattgtaaaagtgcttgacgcag

SEQ ID NO: 2188181 - DNA, 25 bp, Homo sapien
ctaagaaaccaattgtaaaagtgct

SEQ ID NO: 2188182 - DNA, 25 bp, Homo sapien
aattgtaaaagtgcttgacgcagac

SEQ ID NO: 2188183 - DNA, 25 bp, Homo sapien
gaaaccaattgtaaaagtgcttgac

SEQ ID NO: 2188184 - DNA, 25 bp, Homo sapien
tgatcagaacagttatcacaaaatg

SEQ ID NO: 2188185 - DNA, 25 bp, Homo sapien
gaggatgatcagaacagttatcaca

SEQ ID NO: 2188186 - DNA, 25 bp, Homo sapien
aaaatgctatggcacagtgatgctc

SEQ ID NO: 2188187 - DNA, 25 bp, Homo sapien
tcacaaaatgctatggcacagtgat

SEQ ID NO: 2188188 - DNA, 25 bp, Homo sapien
tggtggactcggcagctgcggcagt

SEQ ID NO: 2188189 - DNA, 25 bp, Homo sapien
tccctgcatccggagggagggtgct

SEQ ID NO: 2188190 - DNA, 25 bp, Homo sapien
cgttggtggactcggcagctgcggc

SEQ ID NO: 2188191 - DNA, 25 bp, Homo sapien
ccctgcatccggagggagggtgctg

SEQ ID NO: 2188192 - DNA, 25 bp, Homo sapien
tgctgtgtgcgctccagggaccggc

SEQ ID NO: 2188193 - DNA, 25 bp, Homo sapien
atgtcctccgggtccaatggccagt

SEQ ID NO: 2188194 - DNA, 25 bp, Homo sapien
tggtgctccccacgaatacttcttt

SEQ ID NO: 2188195 - DNA, 25 bp, Homo sapien
tgcgctccagggaccggcgcatcat

SEQ ID NO: 2188196 - DNA, 25 bp, Homo sapien
taacaagattaactacccagcccca

SEQ ID NO: 2188197 - DNA, 25 bp, Homo sapien
cacagttcgtgtaaggcaagtgtta

SEQ ID NO: 2188198 - DNA, 25 bp, Homo sapien
taaacaatgcggctaggctagcact

SEQ ID NO: 2188199 - DNA, 25 bp, Homo sapien
tcagtgcacagtgtgagtcaccaaa

SEQ ID NO: 2188200 - DNA, 25 bp, Homo sapien
catttgcttttcgtactgcagcctg

SEQ ID NO: 2188201 - DNA, 25 bp, Homo sapien
ctcctccatttgcttttcgtactgc

SEQ ID NO: 2188202 - DNA, 25 bp, Homo sapien
gctcttccagttttcgccatcgctc

SEQ ID NO: 2188203 - DNA, 25 bp, Homo sapien
ccagttttcgccatcgctcctccat

SEQ ID NO: 2188204 - DNA, 25 bp, Homo sapien
ctttcttctcgtctttctttggcca

SEQ ID NO: 2188205 - DNA, 25 bp, Homo sapien
tcgtctttctttggccaatctctgc

SEQ ID NO: 2188206 - DNA, 25 bp, Homo sapien
tcttctcgtctttctttggccaatc

SEQ ID NO: 2188207 - DNA, 25 bp, Homo sapien
ttctcgtctttctttggccaatctc

SEQ ID NO: 2188208 - DNA, 25 bp, Homo sapien
catgggcctgctccgtatctaaagt

SEQ ID NO: 2188209 - DNA, 25 bp, Homo sapien
acccaggcagggcctgaacctagct

SEQ ID NO: 2188210 - DNA, 25 bp, Homo sapien
tgccctctaggtgttcatgggcctg

SEQ ID NO: 2188211 - DNA, 25 bp, Homo sapien
tgaacctagctctgtactgcccatg

SEQ ID NO: 2188212 - DNA, 25 bp, Homo sapien
gcggaaaggacccacattctcagtt

SEQ ID NO: 2188213 - DNA, 25 bp, Homo sapien
atctggcggaaaggacccacattct

SEQ ID NO: 2188214 - DNA, 25 bp, Homo sapien
ctcagttaccgcttttctgtgctgc

SEQ ID NO: 2188215 - DNA, 25 bp, Homo sapien
ggacccacattctcagttaccgctt

SEQ ID NO: 2188216 - DNA, 25 bp, Homo sapien
aactgcaatgtccagaaaaaaaggg

SEQ ID NO: 2188217 - DNA, 25 bp, Homo sapien
tgtgcaactgcaatgtccagaaaaa

SEQ ID NO: 2188218 - DNA, 25 bp, Homo sapien
aatgaagagctcatccaataggaaa

SEQ ID NO: 2188219 - DNA, 25 bp, Homo sapien
tgaagagctcatccaataggaaata

SEQ ID NO: 2188220 - DNA, 25 bp, Homo sapien
tgatcccttcaaggggttgccaggc

SEQ ID NO: 2188221 - DNA, 25 bp, Homo sapien
ccatcctgatcccttcaaggggttg

SEQ ID NO: 2188222 - DNA, 25 bp, Homo sapien
gagccatcctgatcccttcaagggg

SEQ ID NO: 2188223 - DNA, 25 bp, Homo sapien
tcctgatcccttcaaggggttgcca

SEQ ID NO: 2188224 - DNA, 25 bp, Homo sapien
ttcccaccttaatggtcactcttgg

SEQ ID NO: 2188225 - DNA, 25 bp, Homo sapien
cactgtttcccaccttaatggtcac

SEQ ID NO: 2188226 - DNA, 25 bp, Homo sapien
tcttggttgcactgtgatgatctgt

SEQ ID NO: 2188227 - DNA, 25 bp, Homo sapien
gtcactcttggttgcactgtgatga

SEQ ID NO: 2188228 - DNA, 25 bp, Homo sapien
ggaaataggaggtatgccttctgcc

SEQ ID NO: 2188229 - DNA, 25 bp, Homo sapien
aataggaggtatgccttctgccagg

SEQ ID NO: 2188230 - DNA, 25 bp, Homo sapien
aagtggggtgtatttggactccaag

SEQ ID NO: 2188231 - DNA, 25 bp, Homo sapien
aactcccaggtaaccacatcttcac

SEQ ID NO: 2188232 - DNA, 25 bp, Homo sapien
gacctttccagccaatctccatggc

SEQ ID NO: 2188233 - DNA, 25 bp, Homo sapien
ccagatgcccataaggccccaggtc

SEQ ID NO: 2188234 - DNA, 25 bp, Homo sapien
ggacaagctgcactcttgagtatga

SEQ ID NO: 2188235 - DNA, 25 bp, Homo sapien
gccccaggtccctaccataggacaa

SEQ ID NO: 2188236 - DNA, 25 bp, Homo sapien
gtggctgtcactatttctttccttt

SEQ ID NO: 2188237 - DNA, 25 bp, Homo sapien
tgtggctgtcactatttctttcctt

SEQ ID NO: 2188238 - DNA, 25 bp, Homo sapien
tcccagatggcagtacagtgaaacc

SEQ ID NO: 2188239 - DNA, 25 bp, Homo sapien
tttcccagatggcagtacagtgaaa

SEQ ID NO: 2188240 - DNA, 25 bp, Homo sapien
cttcctttcccagatggcagtacag

SEQ ID NO: 2188241 - DNA, 25 bp, Homo sapien
cctttcccagatggcagtacagtga

SEQ ID NO: 2188242 - DNA, 25 bp, Homo sapien
gtagcatttcttaaactccttcaaa

SEQ ID NO: 2188243 - DNA, 25 bp, Homo sapien
tgacctcgctcagaaaattccacag

SEQ ID NO: 2188244 - DNA, 25 bp, Homo sapien
tccccaagtgtactccagaatacaa

SEQ ID NO: 2188245 - DNA, 25 bp, Homo sapien
aaaaggcaggacagatcttgttcta

SEQ ID NO: 2188246 - DNA, 25 bp, Homo sapien
agtgttaacctgctaaactcctgca

SEQ ID NO: 2188247 - DNA, 25 bp, Homo sapien
tgccttgtatacagtaggcttacaa

SEQ ID NO: 2188248 - DNA, 25 bp, Homo sapien
tatggcctcttaataacagtgttgg

SEQ ID NO: 2188249 - DNA, 25 bp, Homo sapien
gcactttgacgtactgaactgaaga

SEQ ID NO: 2188250 - DNA, 25 bp, Homo sapien
gcacagccagcttgtttcagatcag

SEQ ID NO: 2188251 - DNA, 25 bp, Homo sapien
gctgtcccaaccctcatggtgtgtg

SEQ ID NO: 2188252 - DNA, 25 bp, Homo sapien
gtgtgtgccatccacactactcaag

SEQ ID NO: 2188253 - DNA, 25 bp, Homo sapien
tactcaaggtccaggtgtgacccac

SEQ ID NO: 2188254 - DNA, 25 bp, Homo sapien
ttcttttctagtacgaagacatctg

SEQ ID NO: 2188255 - DNA, 25 bp, Homo sapien
tctagtacgaagacatctgtgccca

SEQ ID NO: 2188256 - DNA, 25 bp, Homo sapien
gggcattggaaattcatctctactc

SEQ ID NO: 2188257 - DNA, 25 bp, Homo sapien
gacattccaacctcaagtttccaag

SEQ ID NO: 2188258 - DNA, 25 bp, Homo sapien
gaagctgcagtatgttgctacatga

SEQ ID NO: 2188259 - DNA, 25 bp, Homo sapien
ttccttctgtaagtaagaagctgca

SEQ ID NO: 2188260 - DNA, 25 bp, Homo sapien
tgttgctacatgagcagagtccaag

SEQ ID NO: 2188261 - DNA, 25 bp, Homo sapien
ccttctgtaagtaagaagctgcagt

SEQ ID NO: 2188262 - DNA, 25 bp, Homo sapien
cctgcttatctaaaatcctgccaaa

SEQ ID NO: 2188263 - DNA, 25 bp, Homo sapien
tgcttatctaaaatcctgccaaatg

SEQ ID NO: 2188264 - DNA, 25 bp, Homo sapien
cagacctgcttatctaaaatcctgc

SEQ ID NO: 2188265 - DNA, 25 bp, Homo sapien
gacctgcttatctaaaatcctgcca

SEQ ID NO: 2188266 - DNA, 25 bp, Homo sapien
caatgggtgacacgccgattttgcc

SEQ ID NO: 2188267 - DNA, 25 bp, Homo sapien
cctgagcagcgttcccaagacaggg

SEQ ID NO: 2188268 - DNA, 25 bp, Homo sapien
gaatctgcctctgccaatgggtgac

SEQ ID NO: 2188269 - DNA, 25 bp, Homo sapien
gctgagagccttgtttgccccgctg

SEQ ID NO: 2188270 - DNA, 25 bp, Homo sapien
tcgcgcgcgtttcccagaacgcaga

SEQ ID NO: 2188271 - DNA, 25 bp, Homo sapien
tttcccagaacgcagagagagcgcg

SEQ ID NO: 2188272 - DNA, 25 bp, Homo sapien
aagaggcgcgaagctgggccacctt

SEQ ID NO: 2188273 - DNA, 25 bp, Homo sapien
tggaaacgccaagaggcgcgaagct

SEQ ID NO: 2188274 - DNA, 25 bp, Homo sapien
gggagagaggttccccgcgcagtcc

SEQ ID NO: 2188275 - DNA, 25 bp, Homo sapien
gcccggttctgcgatcttccctggg

SEQ ID NO: 2188276 - DNA, 25 bp, Homo sapien
cttgaggccggtagttgggctgaga

SEQ ID NO: 2188277 - DNA, 25 bp, Homo sapien
tgagaggtccgcaccgcgcccggtt

SEQ ID NO: 2188278 - DNA, 25 bp, Homo sapien
gggatgcgccggccgcacaggcgca

SEQ ID NO: 2188279 - DNA, 25 bp, Homo sapien
cgggatgcgccggccgcacaggcgc

SEQ ID NO: 2188280 - DNA, 25 bp, Homo sapien
cgaacccgcgcgcgtccgcatgcgc

SEQ ID NO: 2188281 - DNA, 25 bp, Homo sapien
gcgcgcgtccgcatgcgcacgcgtc

SEQ ID NO: 2188282 - DNA, 25 bp, Homo sapien
aacccgcgcgcgtccgcatgcgcac

SEQ ID NO: 2188283 - DNA, 25 bp, Homo sapien
gagattaatctcatacactggtaca

SEQ ID NO: 2188284 - DNA, 25 bp, Homo sapien
cactggtacatcctaacctttgagt

SEQ ID NO: 2188285 - DNA, 25 bp, Homo sapien
gggaatactacacaaacctcttctg

SEQ ID NO: 2188286 - DNA, 25 bp, Homo sapien
gcataccaatgtacagcagttgtct

SEQ ID NO: 2188287 - DNA, 25 bp, Homo sapien
gctgagacaagcaggagaatgtgcc

SEQ ID NO: 2188288 - DNA, 25 bp, Homo sapien
gacagcagtttatacctatggaaga

SEQ ID NO: 2188289 - DNA, 25 bp, Homo sapien
tattgtacgaatcaaagactgcacg

SEQ ID NO: 2188290 - DNA, 25 bp, Homo sapien
cagtgtgcaaaagttcatgggagtc

SEQ ID NO: 2188291 - DNA, 25 bp, Homo sapien
tcagatgcattccacctagatgtgt

SEQ ID NO: 2188292 - DNA, 25 bp, Homo sapien
cagacaaaccacgtgttagaggagg

SEQ ID NO: 2188293 - DNA, 25 bp, Homo sapien
aaaccagcccttagtctcagatgca

SEQ ID NO: 2188294 - DNA, 25 bp, Homo sapien
taggatttaacagcccaagattggg

SEQ ID NO: 2188295 - DNA, 25 bp, Homo sapien
tgtgaaggtttattaccctgtgtat

SEQ ID NO: 2188296 - DNA, 25 bp, Homo sapien
tcactgaaaagttccccggtgacta

SEQ ID NO: 2188297 - DNA, 25 bp, Homo sapien
gaagccatgtgaaggtttattaccc

SEQ ID NO: 2188298 - DNA, 25 bp, Homo sapien
tattaccctgtgtattttcatcact

SEQ ID NO: 2188299 - DNA, 25 bp, Homo sapien
tagctcagccctagtttcattttat

SEQ ID NO: 2188300 - DNA, 25 bp, Homo sapien
ggctagtgagggctaactagctcag

SEQ ID NO: 2188301 - DNA, 25 bp, Homo sapien
agtaaagctaattcccaatacaagc

SEQ ID NO: 2188302 - DNA, 25 bp, Homo sapien
gtaaagctaattcccaatacaagca

SEQ ID NO: 2188303 - DNA, 25 bp, Homo sapien
gaacaaagtgggcttaacatctcac

SEQ ID NO: 2188304 - DNA, 25 bp, Homo sapien
taagataactgagtgccacctagtg

SEQ ID NO: 2188305 - DNA, 25 bp, Homo sapien
taatcagattccgtgaggacaaggc

SEQ ID NO: 2188306 - DNA, 25 bp, Homo sapien
tttacggtggcaaaatacgactatg

SEQ ID NO: 2188307 - DNA, 25 bp, Homo sapien
aattcctataattctggcctgctat

SEQ ID NO: 2188308 - DNA, 25 bp, Homo sapien
tcttatattccaacagtctactcca

SEQ ID NO: 2188309 - DNA, 25 bp, Homo sapien
cttaggctatgtgagaaacaaatcc

SEQ ID NO: 2188310 - DNA, 25 bp, Homo sapien
ccatatataagggagactttcacct

SEQ ID NO: 2188311 - DNA, 25 bp, Homo sapien
gattgatcccgttcagtgtgatact

SEQ ID NO: 2188312 - DNA, 25 bp, Homo sapien
ttctcctgagtcaatctggttatag

SEQ ID NO: 2188313 - DNA, 25 bp, Homo sapien
gtgatactgacctaattctcctgag

SEQ ID NO: 2188314 - DNA, 25 bp, Homo sapien
tcaatctggttatagttaaaacatc

SEQ ID NO: 2188315 - DNA, 25 bp, Homo sapien
gagtttgccaacagtacacacccaa

SEQ ID NO: 2188316 - DNA, 25 bp, Homo sapien
tcgtaagactcctcttggctcaggg

SEQ ID NO: 2188317 - DNA, 25 bp, Homo sapien
tcttggtcaggaacaactgctctag

SEQ ID NO: 2188318 - DNA, 25 bp, Homo sapien
caattacagtaacagcagaagtgca

SEQ ID NO: 2188319 - DNA, 25 bp, Homo sapien
gctggcgttaatattgccaatgcaa

SEQ ID NO: 2188320 - DNA, 25 bp, Homo sapien
tatgattagagtggctggcgttaat

SEQ ID NO: 2188321 - DNA, 25 bp, Homo sapien
aaacaagttatgattagagtggctg

SEQ ID NO: 2188322 - DNA, 25 bp, Homo sapien
agagtggctggcgttaatattgcca

SEQ ID NO: 2188323 - DNA, 25 bp, Homo sapien
aattgaagagggttataagaattct

SEQ ID NO: 2188324 - DNA, 25 bp, Homo sapien
ttgaagagggttataagaattctca

SEQ ID NO: 2188325 - DNA, 25 bp, Homo sapien
agagggttataagaattctcaaaat

SEQ ID NO: 2188326 - DNA, 25 bp, Homo sapien
gaagagggttataagaattctcaaa

SEQ ID NO: 2188327 - DNA, 25 bp, Homo sapien
tcatcatctccaggaccaaatgtat

SEQ ID NO: 2188328 - DNA, 25 bp, Homo sapien
ctccaatgtcatcaaactgaatttc

SEQ ID NO: 2188329 - DNA, 25 bp, Homo sapien
gaccaaatgtatcagtttcattgat

SEQ ID NO: 2188330 - DNA, 25 bp, Homo sapien
catctccaatgtcatcaaactgaat

SEQ ID NO: 2188331 - DNA, 25 bp, Homo sapien
cactgacagtctctcgaggaaggaa

SEQ ID NO: 2188332 - DNA, 25 bp, Homo sapien
tattatgaagcataggcaggcatac

SEQ ID NO: 2188333 - DNA, 25 bp, Homo sapien
gtttaacccatatgcgcactgacag

SEQ ID NO: 2188334 - DNA, 25 bp, Homo sapien
tgtggaagtccaaagcttacagaac

SEQ ID NO: 2188335 - DNA, 25 bp, Homo sapien
atgctctggaagctcgccgtatgcc

SEQ ID NO: 2188336 - DNA, 25 bp, Homo sapien
acttctagcttcgtctgcattgtat

SEQ ID NO: 2188337 - DNA, 25 bp, Homo sapien
ttaaaattacatcagctttgttatc

SEQ ID NO: 2188338 - DNA, 25 bp, Homo sapien
agctcgccgtatgccttcagacttc

SEQ ID NO: 2188339 - DNA, 25 bp, Homo sapien
tgtatcccctagaataatggctccc

SEQ ID NO: 2188340 - DNA, 25 bp, Homo sapien
tccctgggatacctagcacaatgcc

SEQ ID NO: 2188341 - DNA, 25 bp, Homo sapien
ctatgagccttttgtgggatgggca

SEQ ID NO: 2188342 - DNA, 25 bp, Homo sapien
caagggttaccatcacgaaaggcaa

SEQ ID NO: 2188343 - DNA, 25 bp, Homo sapien
ccaaaataatgtccgaggtatttat

SEQ ID NO: 2188344 - DNA, 25 bp, Homo sapien
aaataatgtccgaggtatttatcca

SEQ ID NO: 2188345 - DNA, 25 bp, Homo sapien
caaaataatgtccgaggtatttatc

SEQ ID NO: 2188346 - DNA, 25 bp, Homo sapien
aattaagagattttaggccaggagc

SEQ ID NO: 2188347 - DNA, 25 bp, Homo sapien
attaagagattttaggccaggagcg

SEQ ID NO: 2188348 - DNA, 25 bp, Homo sapien
aacacattgcttctagccgtccatt

SEQ ID NO: 2188349 - DNA, 25 bp, Homo sapien
caattttcctctgatgtgacataac

SEQ ID NO: 2188350 - DNA, 25 bp, Homo sapien
acattgcttctagccgtccatttcc

SEQ ID NO: 2188351 - DNA, 25 bp, Homo sapien
aaacacattgcttctagccgtccat

SEQ ID NO: 2188352 - DNA, 25 bp, Homo sapien
ttcatagttacaaaggtcagtcgta

SEQ ID NO: 2188353 - DNA, 25 bp, Homo sapien
ggtcagtcgtaaaacctttacatca

SEQ ID NO: 2188354 - DNA, 25 bp, Homo sapien
aacttcatagttacaaaggtcagtc

SEQ ID NO: 2188355 - DNA, 25 bp, Homo sapien
gtcagtcgtaaaacctttacatcat

SEQ ID NO: 2188356 - DNA, 25 bp, Homo sapien
tggttggtcaactcaaaggcagcct

SEQ ID NO: 2188357 - DNA, 25 bp, Homo sapien
cagactacagtgagtttagcaccca

SEQ ID NO: 2188358 - DNA, 25 bp, Homo sapien
tgtggaagtcaattactcagactac

SEQ ID NO: 2188359 - DNA, 25 bp, Homo sapien
gaatatgactaatccccagagagga

SEQ ID NO: 2188360 - DNA, 25 bp, Homo sapien
gattcattctcattcttacccctgc

SEQ ID NO: 2188361 - DNA, 25 bp, Homo sapien
ctctttgaataccagttctcttttt

SEQ ID NO: 2188362 - DNA, 25 bp, Homo sapien
cattcttacccctgcgtctgttttt

SEQ ID NO: 2188363 - DNA, 25 bp, Homo sapien
cctgaccatcctctttgaataccag

SEQ ID NO: 2188364 - DNA, 25 bp, Homo sapien
gagacccggccgagcagagccgtgg

SEQ ID NO: 2188365 - DNA, 25 bp, Homo sapien
gacccggccgagcagagccgtggtc

SEQ ID NO: 2188366 - DNA, 25 bp, Homo sapien
agacccggccgagcagagccgtggt

SEQ ID NO: 2188367 - DNA, 25 bp, Homo sapien
ggcgacctcgcggcgtctctgactt

SEQ ID NO: 2188368 - DNA, 25 bp, Homo sapien
acctcgcggcgtctctgacttcttt

SEQ ID NO: 2188369 - DNA, 25 bp, Homo sapien
ctccgaggggcgacacgagggagcg

SEQ ID NO: 2188370 - DNA, 25 bp, Homo sapien
tctgacttctttccgggtagcggcg

SEQ ID NO: 2188371 - DNA, 25 bp, Homo sapien
tggaggccaggcaacgtgcgcggga

SEQ ID NO: 2188372 - DNA, 25 bp, Homo sapien
caacgtgcgcgggagaggctggcga

SEQ ID NO: 2188373 - DNA, 25 bp, Homo sapien
gcgggagaggctggcgacccagctc

SEQ ID NO: 2188374 - DNA, 25 bp, Homo sapien
gccaggcaacgtgcgcgggagaggc

SEQ ID NO: 2188375 - DNA, 25 bp, Homo sapien
tgcgtccacgctcggcggcagcaaa

SEQ ID NO: 2188376 - DNA, 25 bp, Homo sapien
ctgcgtccacgctcggcggcagcaa

SEQ ID NO: 2188377 - DNA, 25 bp, Homo sapien
cctgcgtccacgctcggcggcagca

SEQ ID NO: 2188378 - DNA, 25 bp, Homo sapien
cgcctgcgtccacgctcggcggcag

SEQ ID NO: 2188379 - DNA, 25 bp, Homo sapien
aaagttagttacatggcattgggcc

SEQ ID NO: 2188380 - DNA, 25 bp, Homo sapien
tgctggcctccatggtgattaagcg

SEQ ID NO: 2188381 - DNA, 25 bp, Homo sapien
gatatggtatcttgggcttctggca

SEQ ID NO: 2188382 - DNA, 25 bp, Homo sapien
aaccctcggtatgccctgttatgaa

SEQ ID NO: 2188383 - DNA, 25 bp, Homo sapien
gagtcccttttctgccgaatacatt

SEQ ID NO: 2188384 - DNA, 25 bp, Homo sapien
ctgagtcccttttctgccgaataca

SEQ ID NO: 2188385 - DNA, 25 bp, Homo sapien
ttttctgccgaatacattctgccct

SEQ ID NO: 2188386 - DNA, 25 bp, Homo sapien
cccttttctgccgaatacattctgc

SEQ ID NO: 2188387 - DNA, 25 bp, Homo sapien
gactggactgataccttttgggaga

SEQ ID NO: 2188388 - DNA, 25 bp, Homo sapien
aacccgctttttggagtacactgca

SEQ ID NO: 2188389 - DNA, 25 bp, Homo sapien
tatttagagcacatcgttggccaag

SEQ ID NO: 2188390 - DNA, 25 bp, Homo sapien
taccttccagtacgtgcttgacaag

SEQ ID NO: 2188391 - DNA, 25 bp, Homo sapien
gctaaattttccttcacccatctcc

SEQ ID NO: 2188392 - DNA, 25 bp, Homo sapien
aatcccagatgatatgccaaattct

SEQ ID NO: 2188393 - DNA, 25 bp, Homo sapien
accatgactcttaaagggctttgac

SEQ ID NO: 2188394 - DNA, 25 bp, Homo sapien
ttgacgtatattggcaaaatcccag

SEQ ID NO: 2188395 - DNA, 25 bp, Homo sapien
ctaaggagttgcaaagtatatggac

SEQ ID NO: 2188396 - DNA, 25 bp, Homo sapien
tggccatttttaggactgtccaaca

SEQ ID NO: 2188397 - DNA, 25 bp, Homo sapien
cagctctctaggttagtctgacaga

SEQ ID NO: 2188398 - DNA, 25 bp, Homo sapien
aacgaaccagtgaaacagacgtggg

SEQ ID NO: 2188399 - DNA, 25 bp, Homo sapien
aaacggattgtttaagctaagtgct

SEQ ID NO: 2188400 - DNA, 25 bp, Homo sapien
catacaaaatgttggatggcacaag

SEQ ID NO: 2188401 - DNA, 25 bp, Homo sapien
tccaagttaaacaaggcatgtatac

SEQ ID NO: 2188402 - DNA, 25 bp, Homo sapien
gggatacagtgctaatataaacgga

SEQ ID NO: 2188403 - DNA, 25 bp, Homo sapien
catggtaccaaatatctcactgagg

SEQ ID NO: 2188404 - DNA, 25 bp, Homo sapien
agatacgtgctacctgtcgccagaa

SEQ ID NO: 2188405 - DNA, 25 bp, Homo sapien
tgtgctatcagcttacaccatggta

SEQ ID NO: 2188406 - DNA, 25 bp, Homo sapien
gcaggaacagcagcattatgggtac

SEQ ID NO: 2188407 - DNA, 25 bp, Homo sapien
ggctgttgaggtgatttttttaata

SEQ ID NO: 2188408 - DNA, 25 bp, Homo sapien
gctgttgaggtgatttttttaatac

SEQ ID NO: 2188409 - DNA, 25 bp, Homo sapien
cagggctgttgaggtgattttttta

SEQ ID NO: 2188410 - DNA, 25 bp, Homo sapien
tcacagggctgttgaggtgattttt

SEQ ID NO: 2188411 - DNA, 25 bp, Homo sapien
tagagcggcctactggttccaaaac

SEQ ID NO: 2188412 - DNA, 25 bp, Homo sapien
tgattacggttcaaagcagaatatg

SEQ ID NO: 2188413 - DNA, 25 bp, Homo sapien
ctctccgctgagcaagagtagagcg

SEQ ID NO: 2188414 - DNA, 25 bp, Homo sapien
tccaaaactggtgactgattacggt

SEQ ID NO: 2188415 - DNA, 25 bp, Homo sapien
gaaggcatgctctttaagttgggaa

SEQ ID NO: 2188416 - DNA, 25 bp, Homo sapien
agtcacccactgtaagagaatccca

SEQ ID NO: 2188417 - DNA, 25 bp, Homo sapien
gacaatggatagtcacacgtacaca

SEQ ID NO: 2188418 - DNA, 25 bp, Homo sapien
caaagataggctcataacaggcagt

SEQ ID NO: 2188419 - DNA, 25 bp, Homo sapien
agttggtcccagtggacgatccaag

SEQ ID NO: 2188420 - DNA, 25 bp, Homo sapien
tactagatgtggtgcatcctgtctg

SEQ ID NO: 2188421 - DNA, 25 bp, Homo sapien
atcctgtctgtttagttggtattgt

SEQ ID NO: 2188422 - DNA, 25 bp, Homo sapien
tccaaggatgtctgagcacaagagc

SEQ ID NO: 2188423 - DNA, 25 bp, Homo sapien
aaaacatgaatgtccaataacagga

SEQ ID NO: 2188424 - DNA, 25 bp, Homo sapien
ttaattggagggctctaaatgcccc

SEQ ID NO: 2188425 - DNA, 25 bp, Homo sapien
ttttgtgctgctggtaatactgaaa

SEQ ID NO: 2188426 - DNA, 25 bp, Homo sapien
tgcaagtgttactcccgcttcagcc

SEQ ID NO: 2188427 - DNA, 25 bp, Homo sapien
agtaaaaagatcacattcactgagt

SEQ ID NO: 2188428 - DNA, 25 bp, Homo sapien
gaggatagctagagtccagaagttg

SEQ ID NO: 2188429 - DNA, 25 bp, Homo sapien
gaaaatggactggtgaaagatgaca

SEQ ID NO: 2188430 - DNA, 25 bp, Homo sapien
caaacgtggacttatttgatggtaa

SEQ ID NO: 2188431 - DNA, 25 bp, Homo sapien
ggccctaggccaacagaatctatat

SEQ ID NO: 2188432 - DNA, 25 bp, Homo sapien
acagagttggagagcaagtcagtgc

SEQ ID NO: 2188433 - DNA, 25 bp, Homo sapien
gatggcagatcttccagtgagaagg

SEQ ID NO: 2188434 - DNA, 25 bp, Homo sapien
gaagggctcttcaaacgatttcatg

SEQ ID NO: 2188435 - DNA, 25 bp, Homo sapien
ggtaaagtggcatgtgaggcacaca

SEQ ID NO: 2188436 - DNA, 25 bp, Homo sapien
tataaataataaggccaaaccaatg

SEQ ID NO: 2188437 - DNA, 25 bp, Homo sapien
taatgggtccattttcgagttcaaa

SEQ ID NO: 2188438 - DNA, 25 bp, Homo sapien
gacaaatcatgaagactaccacggt

SEQ ID NO: 2188439 - DNA, 25 bp, Homo sapien
tctgaaacagaattccagtaaccac

SEQ ID NO: 2188440 - DNA, 25 bp, Homo sapien
tgtctgaaacagaattccagtaacc

SEQ ID NO: 2188441 - DNA, 25 bp, Homo sapien
tgaaacagaattccagtaaccacca

SEQ ID NO: 2188442 - DNA, 25 bp, Homo sapien
ctttgctgtgtctgaaacagaattc

SEQ ID NO: 2188443 - DNA, 25 bp, Homo sapien
ctgagtgagaattttccgctaccta

SEQ ID NO: 2188444 - DNA, 25 bp, Homo sapien
gctacctattcgtgccaatatttcc

SEQ ID NO: 2188445 - DNA, 25 bp, Homo sapien
ggtgtatcatcaggaccatttgcaa

SEQ ID NO: 2188446 - DNA, 25 bp, Homo sapien
ctggtgtatcatcaggaccatttgc

SEQ ID NO: 2188447 - DNA, 25 bp, Homo sapien
aagactccatatatcacaagcagca

SEQ ID NO: 2188448 - DNA, 25 bp, Homo sapien
cggtaagcattgtatagagtaggac

SEQ ID NO: 2188449 - DNA, 25 bp, Homo sapien
cagcatcatagccttgtctttttaa

SEQ ID NO: 2188450 - DNA, 25 bp, Homo sapien
acaagcagcatcatagccttgtctt

SEQ ID NO: 2188451 - DNA, 25 bp, Homo sapien
gaagaccattttccgctctcagctg

SEQ ID NO: 2188452 - DNA, 25 bp, Homo sapien
gattaccagattcatccacataaag

SEQ ID NO: 2188453 - DNA, 25 bp, Homo sapien
tttgcagtgtaacaaggagtcatga

SEQ ID NO: 2188454 - DNA, 25 bp, Homo sapien
ttcgaatagattccggattaccaga

SEQ ID NO: 2188455 - DNA, 25 bp, Homo sapien
catatagagtggtaaaaagacttac

SEQ ID NO: 2188456 - DNA, 25 bp, Homo sapien
ttccaggtcggaagagatcacttac

SEQ ID NO: 2188457 - DNA, 25 bp, Homo sapien
tctaattctagctcaaacataaagg

SEQ ID NO: 2188458 - DNA, 25 bp, Homo sapien
gaaggtcagtaggataattcagcta

SEQ ID NO: 2188459 - DNA, 25 bp, Homo sapien
cccttgtgcgtgaagatattcaacg

SEQ ID NO: 2188460 - DNA, 25 bp, Homo sapien
caacggttttagttatagtgaacag

SEQ ID NO: 2188461 - DNA, 25 bp, Homo sapien
tatccagcaattcacctcctttcat

SEQ ID NO: 2188462 - DNA, 25 bp, Homo sapien
ctttcataagttctgttactacata

SEQ ID NO: 2188463 - DNA, 25 bp, Homo sapien
actcacttcatattcaagacaaatt

SEQ ID NO: 2188464 - DNA, 25 bp, Homo sapien
tatatgtgcccaaaacgaagtttaa

SEQ ID NO: 2188465 - DNA, 25 bp, Homo sapien
gaaactatatgtgcccaaaacgaag

SEQ ID NO: 2188466 - DNA, 25 bp, Homo sapien
aactcacttcatattcaagacaaat

SEQ ID NO: 2188467 - DNA, 25 bp, Homo sapien
gctgtccataacgaagaagaatttc

SEQ ID NO: 2188468 - DNA, 25 bp, Homo sapien
cataacgaagaagaatttcaatttc

SEQ ID NO: 2188469 - DNA, 25 bp, Homo sapien
tggatgctgtccataacgaagaaga

SEQ ID NO: 2188470 - DNA, 25 bp, Homo sapien
gtgataatgtttggatgctgtccat

SEQ ID NO: 2188471 - DNA, 25 bp, Homo sapien
gggaccacaggcacataccactaca

SEQ ID NO: 2188472 - DNA, 25 bp, Homo sapien
tgcaacctcaaacccctgggcccaa

SEQ ID NO: 2188473 - DNA, 25 bp, Homo sapien
gtgatcctcccacctctacctcctg

SEQ ID NO: 2188474 - DNA, 25 bp, Homo sapien
agtagctgggaccacaggcacatac

SEQ ID NO: 2188475 - DNA, 25 bp, Homo sapien
ctgacatgcatgaacaagaactgta

SEQ ID NO: 2188476 - DNA, 25 bp, Homo sapien
taatttttaactggtactgacatgc

SEQ ID NO: 2188477 - DNA, 25 bp, Homo sapien
gctgacaccctgagcataaaatggg

SEQ ID NO: 2188478 - DNA, 25 bp, Homo sapien
tcacttgaggtgtaaactgctactg

SEQ ID NO: 2188479 - DNA, 25 bp, Homo sapien
gcaaactccatgtttgtagctttat

SEQ ID NO: 2188480 - DNA, 25 bp, Homo sapien
taggagccaactccaatatcttctt

SEQ ID NO: 2188481 - DNA, 25 bp, Homo sapien
tatgtatacatctcttgcaaacaga

SEQ ID NO: 2188482 - DNA, 25 bp, Homo sapien
tccatgtttgtagctttatgtatac

SEQ ID NO: 2188483 - DNA, 25 bp, Homo sapien
aggtatctaggattttggttcttgc

SEQ ID NO: 2188484 - DNA, 25 bp, Homo sapien
gtcacataggtatctaggattttgg

SEQ ID NO: 2188485 - DNA, 25 bp, Homo sapien
gcaaccttttcgatgacatatgaaa

SEQ ID NO: 2188486 - DNA, 25 bp, Homo sapien
tgcaaccttttcgatgacatatgaa

SEQ ID NO: 2188487 - DNA, 25 bp, Homo sapien
gcattagcactaggtggaatgccag

SEQ ID NO: 2188488 - DNA, 25 bp, Homo sapien
tgaacaattgaatgtacaccaactg

SEQ ID NO: 2188489 - DNA, 25 bp, Homo sapien
ctaaacccccgaaaaagctgatgtg

SEQ ID NO: 2188490 - DNA, 25 bp, Homo sapien
caactgtctgcatagcttggctttc

SEQ ID NO: 2188491 - DNA, 25 bp, Homo sapien
aactcaggatcaaaatagaatgtat

SEQ ID NO: 2188492 - DNA, 25 bp, Homo sapien
ttaaatggcggatgaatttctcttc

SEQ ID NO: 2188493 - DNA, 25 bp, Homo sapien
gcccgttgcaggtttaaatggcgga

SEQ ID NO: 2188494 - DNA, 25 bp, Homo sapien
gtatcttcaggcctgcccgttgcag

SEQ ID NO: 2188495 - DNA, 25 bp, Homo sapien
ccagtctatcgttgagaaaaatgaa

SEQ ID NO: 2188496 - DNA, 25 bp, Homo sapien
ttaatttcttcaactccatctggtc

SEQ ID NO: 2188497 - DNA, 25 bp, Homo sapien
cagtctatcgttgagaaaaatgaat

SEQ ID NO: 2188498 - DNA, 25 bp, Homo sapien
aatatacatattgctcagcctttgt

SEQ ID NO: 2188499 - DNA, 25 bp, Homo sapien
caaaacaaatatctactccccgcta

SEQ ID NO: 2188500 - DNA, 25 bp, Homo sapien
tatacatattgctcagcctttgttt

SEQ ID NO: 2188501 - DNA, 25 bp, Homo sapien
ccaggcctagccttgtctaaatagt

SEQ ID NO: 2188502 - DNA, 25 bp, Homo sapien
aaaactgtggcattccaagtttggc

SEQ ID NO: 2188503 - DNA, 25 bp, Homo sapien
tgcgcttcaggactcaaaaactgtg

SEQ ID NO: 2188504 - DNA, 25 bp, Homo sapien
tctgtttgcaggatttcgcttgaaa

SEQ ID NO: 2188505 - DNA, 25 bp, Homo sapien
gaaaagcattcgtaaaagactctgc

SEQ ID NO: 2188506 - DNA, 25 bp, Homo sapien
gatacttgtagattcacactcagtt

SEQ ID NO: 2188507 - DNA, 25 bp, Homo sapien
atacttgtagattcacactcagttg

SEQ ID NO: 2188508 - DNA, 25 bp, Homo sapien
taatgactgcaattggctgaatcac

SEQ ID NO: 2188509 - DNA, 25 bp, Homo sapien
cactaggaagtaactagggctctga

SEQ ID NO: 2188510 - DNA, 25 bp, Homo sapien
gaaactggactaacatgactagact

SEQ ID NO: 2188511 - DNA, 25 bp, Homo sapien
aagcatatcatagacggatcctggg

SEQ ID NO: 2188512 - DNA, 25 bp, Homo sapien
actttacaacggaggaatcagctgc

SEQ ID NO: 2188513 - DNA, 25 bp, Homo sapien
taagcctcctgatgtaatagggacc

SEQ ID NO: 2188514 - DNA, 25 bp, Homo sapien
aatagggaccacacggtattagctg

SEQ ID NO: 2188515 - DNA, 25 bp, Homo sapien
tgacaacttgcctggtgaacacctg

SEQ ID NO: 2188516 - DNA, 25 bp, Homo sapien
cctggtaaagcaagtcttcctatct

SEQ ID NO: 2188517 - DNA, 25 bp, Homo sapien
gatctactttccacacttgtttcaa

SEQ ID NO: 2188518 - DNA, 25 bp, Homo sapien
tgtcatccattatagtagccactag

SEQ ID NO: 2188519 - DNA, 25 bp, Homo sapien
tggtcttcgagagtattttagctac

SEQ ID NO: 2188520 - DNA, 25 bp, Homo sapien
tctcctgtcttagcccccatctgcc

SEQ ID NO: 2188521 - DNA, 25 bp, Homo sapien
ctcctgtcttagcccccatctgcca

SEQ ID NO: 2188522 - DNA, 25 bp, Homo sapien
gaaagggagtgtaccagtaagcatt

SEQ ID NO: 2188523 - DNA, 25 bp, Homo sapien
cttggaaagggagtgtaccagtaag

SEQ ID NO: 2188524 - DNA, 25 bp, Homo sapien
ggaaagggagtgtaccagtaagcat

SEQ ID NO: 2188525 - DNA, 25 bp, Homo sapien
tggaaagggagtgtaccagtaagca

SEQ ID NO: 2188526 - DNA, 25 bp, Homo sapien
tcttttcatggtcaatagactcttt

SEQ ID NO: 2188527 - DNA, 25 bp, Homo sapien
gacctcgacgattaactacttctgg

SEQ ID NO: 2188528 - DNA, 25 bp, Homo sapien
agtcagcactctgagtatgacctcg

SEQ ID NO: 2188529 - DNA, 25 bp, Homo sapien
atagactctttacttaggccgaaat

SEQ ID NO: 2188530 - DNA, 25 bp, Homo sapien
ctgccaaaacaaatatcataaatat

SEQ ID NO: 2188531 - DNA, 25 bp, Homo sapien
tgccaaaacaaatatcataaatatc

SEQ ID NO: 2188532 - DNA, 25 bp, Homo sapien
ctgttaacttgatgtgaccttcttc

SEQ ID NO: 2188533 - DNA, 25 bp, Homo sapien
tgttaacttgatgtgaccttcttca

SEQ ID NO: 2188534 - DNA, 25 bp, Homo sapien
gttaacttgatgtgaccttcttcat

SEQ ID NO: 2188535 - DNA, 25 bp, Homo sapien
gcccagctctcttggtcattttaaa

SEQ ID NO: 2188536 - DNA, 25 bp, Homo sapien
cctttctgcagacgtagtttgacta

SEQ ID NO: 2188537 - DNA, 25 bp, Homo sapien
cacatttataacaaagcccaaaggc

SEQ ID NO: 2188538 - DNA, 25 bp, Homo sapien
tagtgcctgcattaatagacagagg

SEQ ID NO: 2188539 - DNA, 25 bp, Homo sapien
catatccgagagaaatattcaaaat

SEQ ID NO: 2188540 - DNA, 25 bp, Homo sapien
gtctgttcatatccgagagaaatat

SEQ ID NO: 2188541 - DNA, 25 bp, Homo sapien
gttcatatccgagagaaatattcaa

SEQ ID NO: 2188542 - DNA, 25 bp, Homo sapien
tgtctgttcatatccgagagaaata

SEQ ID NO: 2188543 - DNA, 25 bp, Homo sapien
tcaacttagtagcatgattccttac

SEQ ID NO: 2188544 - DNA, 25 bp, Homo sapien
tacagtgttagcagagatgtgaagc

SEQ ID NO: 2188545 - DNA, 25 bp, Homo sapien
gatgtgaagcacaggcacgctagtg

SEQ ID NO: 2188546 - DNA, 25 bp, Homo sapien
cacgctagtgcaatactgtgggagt

SEQ ID NO: 2188547 - DNA, 25 bp, Homo sapien
aggctatgtagatggtctaaagcaa

SEQ ID NO: 2188548 - DNA, 25 bp, Homo sapien
tattcccaggctatgtagatggtct

SEQ ID NO: 2188549 - DNA, 25 bp, Homo sapien
caggctatgtagatggtctaaagca

SEQ ID NO: 2188550 - DNA, 25 bp, Homo sapien
ttcccaggctatgtagatggtctaa

SEQ ID NO: 2188551 - DNA, 25 bp, Homo sapien
ctttggataagcgtgtaaacaaatc

SEQ ID NO: 2188552 - DNA, 25 bp, Homo sapien
aaataagatacaacttcccttcagt

SEQ ID NO: 2188553 - DNA, 25 bp, Homo sapien
ctctttggataagcgtgtaaacaaa

SEQ ID NO: 2188554 - DNA, 25 bp, Homo sapien
tggataagcgtgtaaacaaatctcc

SEQ ID NO: 2188555 - DNA, 25 bp, Homo sapien
tatggctaccactcagaaactaact

SEQ ID NO: 2188556 - DNA, 25 bp, Homo sapien
gttgacattagggatctctttggcc

SEQ ID NO: 2188557 - DNA, 25 bp, Homo sapien
gatgatgtgggagacggctcatact

SEQ ID NO: 2188558 - DNA, 25 bp, Homo sapien
ggttggctaacacatataggctaca

SEQ ID NO: 2188559 - DNA, 25 bp, Homo sapien
atgattaacctctaccaagatatca

SEQ ID NO: 2188560 - DNA, 25 bp, Homo sapien
gattaacctctaccaagatatcacg

SEQ ID NO: 2188561 - DNA, 25 bp, Homo sapien
taacctctaccaagatatcacgttc

SEQ ID NO: 2188562 - DNA, 25 bp, Homo sapien
cctctaccaagatatcacgttccat

SEQ ID NO: 2188563 - DNA, 25 bp, Homo sapien
tgtatgtatgctacattgtaatatc

SEQ ID NO: 2188564 - DNA, 25 bp, Homo sapien
aagattgtatgtatgctacattgta

SEQ ID NO: 2188565 - DNA, 25 bp, Homo sapien
cattgtaatatctttcaaagataat

SEQ ID NO: 2188566 - DNA, 25 bp, Homo sapien
ctataaaagattgtatgtatgctac

SEQ ID NO: 2188567 - DNA, 25 bp, Homo sapien
tactaccagcaatgagtactgcagg

SEQ ID NO: 2188568 - DNA, 25 bp, Homo sapien
ggccctagaaaacaagagtccaagc

SEQ ID NO: 2188569 - DNA, 25 bp, Homo sapien
gagatttactactgcgccaaggcga

SEQ ID NO: 2188570 - DNA, 25 bp, Homo sapien
tggagtacccagtgtaagcaaagat

SEQ ID NO: 2188571 - DNA, 25 bp, Homo sapien
ttttacctatgagagccaaatcctg

SEQ ID NO: 2188572 - DNA, 25 bp, Homo sapien
agttatatgattcctagcctagcag

SEQ ID NO: 2188573 - DNA, 25 bp, Homo sapien
taacatgccaaggagtcccatgagc

SEQ ID NO: 2188574 - DNA, 25 bp, Homo sapien
tataacgtggcaactctggttctca

SEQ ID NO: 2188575 - DNA, 25 bp, Homo sapien
catcagagcctgagatttttttaac

SEQ ID NO: 2188576 - DNA, 25 bp, Homo sapien
tggcataaagctgcctagcatcaga

SEQ ID NO: 2188577 - DNA, 25 bp, Homo sapien
cataaagctgcctagcatcagagcc

SEQ ID NO: 2188578 - DNA, 25 bp, Homo sapien
catggcataaagctgcctagcatca

SEQ ID NO: 2188579 - DNA, 25 bp, Homo sapien
tccaaatgatccctgccctaatact

SEQ ID NO: 2188580 - DNA, 25 bp, Homo sapien
gattgcaatttctttgatactgact

SEQ ID NO: 2188581 - DNA, 25 bp, Homo sapien
ttcctttacatgatgtgtgattgca

SEQ ID NO: 2188582 - DNA, 25 bp, Homo sapien
caaatgatccctgccctaatacttt

SEQ ID NO: 2188583 - DNA, 25 bp, Homo sapien
tgtatagagcgaacacgaaaagaca

SEQ ID NO: 2188584 - DNA, 25 bp, Homo sapien
ctgtatagagcgaacacgaaaagac

SEQ ID NO: 2188585 - DNA, 25 bp, Homo sapien
gtatagagcgaacacgaaaagacaa

SEQ ID NO: 2188586 - DNA, 25 bp, Homo sapien
tatagagcgaacacgaaaagacaaa

SEQ ID NO: 2188587 - DNA, 25 bp, Homo sapien
gctacgaaaccatgatggtgataaa

SEQ ID NO: 2188588 - DNA, 25 bp, Homo sapien
ctacgaaaccatgatggtgataaaa

SEQ ID NO: 2188589 - DNA, 25 bp, Homo sapien
ggctacgaaaccatgatggtgataa

SEQ ID NO: 2188590 - DNA, 25 bp, Homo sapien
ccttcctggaggatatggtccctag

SEQ ID NO: 2188591 - DNA, 25 bp, Homo sapien
gaccaggtcaccattcagtaatagg

SEQ ID NO: 2188592 - DNA, 25 bp, Homo sapien
tataggttaactagccaaccaggca

SEQ ID NO: 2188593 - DNA, 25 bp, Homo sapien
tccctagtggttggaatgggaccag

SEQ ID NO: 2188594 - DNA, 25 bp, Homo sapien
tctcccataggttcatccataattt

SEQ ID NO: 2188595 - DNA, 25 bp, Homo sapien
ccataggttcatccataatttgctg

SEQ ID NO: 2188596 - DNA, 25 bp, Homo sapien
cctctcccataggttcatccataat

SEQ ID NO: 2188597 - DNA, 25 bp, Homo sapien
tcccataggttcatccataatttgc

SEQ ID NO: 2188598 - DNA, 25 bp, Homo sapien
cccttgagtttaatagttaaatgca

SEQ ID NO: 2188599 - DNA, 25 bp, Homo sapien
ccttgagtttaatagttaaatgcat

SEQ ID NO: 2188600 - DNA, 25 bp, Homo sapien
gttaagataccaccaaattgttcag

SEQ ID NO: 2188601 - DNA, 25 bp, Homo sapien
tgagcatgaggcattagaaacctct

SEQ ID NO: 2188602 - DNA, 25 bp, Homo sapien
gacaggattaagaatcagctcctca

SEQ ID NO: 2188603 - DNA, 25 bp, Homo sapien
tcctgtccaaaagcttacacaatag

SEQ ID NO: 2188604 - DNA, 25 bp, Homo sapien
atcaacaccaagacatgtcctggca

SEQ ID NO: 2188605 - DNA, 25 bp, Homo sapien
tcaacaccaagacatgtcctggcaa

SEQ ID NO: 2188606 - DNA, 25 bp, Homo sapien
tcatcaacaccaagacatgtcctgg

SEQ ID NO: 2188607 - DNA, 25 bp, Homo sapien
catcaacaccaagacatgtcctggc

SEQ ID NO: 2188608 - DNA, 25 bp, Homo sapien
tcttagtcccaatgaaagtagggca

SEQ ID NO: 2188609 - DNA, 25 bp, Homo sapien
ccagatgggagtgaaggctcagttc

SEQ ID NO: 2188610 - DNA, 25 bp, Homo sapien
gaaagcagagggctgactcaaactt

SEQ ID NO: 2188611 - DNA, 25 bp, Homo sapien
gacggaagttcagctccactcttag

SEQ ID NO: 2188612 - DNA, 25 bp, Homo sapien
caagtctcaaatgccgtgggccata

SEQ ID NO: 2188613 - DNA, 25 bp, Homo sapien
ggcaatactggatcgcgttactgta

SEQ ID NO: 2188614 - DNA, 25 bp, Homo sapien
tgtccactgagacttcaatagatgg

SEQ ID NO: 2188615 - DNA, 25 bp, Homo sapien
gattcttgaggcatggatacacctt

SEQ ID NO: 2188616 - DNA, 25 bp, Homo sapien
gaatatctgagatctgatatctcca

SEQ ID NO: 2188617 - DNA, 25 bp, Homo sapien
taactgataaactagaatatctgag

SEQ ID NO: 2188618 - DNA, 25 bp, Homo sapien
gatatctccaggttaatgatacagg

SEQ ID NO: 2188619 - DNA, 25 bp, Homo sapien
atgctttttggtgtttaactgataa

SEQ ID NO: 2188620 - DNA, 25 bp, Homo sapien
ccttggtcaggagtacacagtccaa

SEQ ID NO: 2188621 - DNA, 25 bp, Homo sapien
ggcagatcacatgtccctgagcatt

SEQ ID NO: 2188622 - DNA, 25 bp, Homo sapien
taggacaattgttctgcaactcaga

SEQ ID NO: 2188623 - DNA, 25 bp, Homo sapien
ggcaagtgtgaccttacccatcatt

SEQ ID NO: 2188624 - DNA, 25 bp, Homo sapien
tagttctagcctatcatgttctgac

SEQ ID NO: 2188625 - DNA, 25 bp, Homo sapien
tgaacaccatgagattcgtgtgagg

SEQ ID NO: 2188626 - DNA, 25 bp, Homo sapien
tgacccacgtttgagtttaaccaca

SEQ ID NO: 2188627 - DNA, 25 bp, Homo sapien
ttttgaacaccatgagattcgtgtg

SEQ ID NO: 2188628 - DNA, 25 bp, Homo sapien
aattgttatacagcagcggaggtga

SEQ ID NO: 2188629 - DNA, 25 bp, Homo sapien
ctaagcaccaatcataagcactatt

SEQ ID NO: 2188630 - DNA, 25 bp, Homo sapien
gcgttaaggagaacaagcaaaattg

SEQ ID NO: 2188631 - DNA, 25 bp, Homo sapien
taagcactattacaactctgcgtgc

SEQ ID NO: 2188632 - DNA, 25 bp, Homo sapien
ctattacacacacgcagcctatcat

SEQ ID NO: 2188633 - DNA, 25 bp, Homo sapien
tcatcctgtaatcccctaaagtccg

SEQ ID NO: 2188634 - DNA, 25 bp, Homo sapien
tcagtaactattacacacacgcagc

SEQ ID NO: 2188635 - DNA, 25 bp, Homo sapien
cacacgcagcctatcatcctgtaat

SEQ ID NO: 2188636 - DNA, 25 bp, Homo sapien
tcagcgctgtcggacgggctctcca

SEQ ID NO: 2188637 - DNA, 25 bp, Homo sapien
ccatcttctgccacgggtccgccag

SEQ ID NO: 2188638 - DNA, 25 bp, Homo sapien
ctcagcgctgtcggacgggctctcc

SEQ ID NO: 2188639 - DNA, 25 bp, Homo sapien
ttctgccacgggtccgccagctgcg

SEQ ID NO: 2188640 - DNA, 25 bp, Homo sapien
gcctggccagagacgcccgcgcgct

SEQ ID NO: 2188641 - DNA, 25 bp, Homo sapien
gcgctgagcgagagcctcgcgcctc

SEQ ID NO: 2188642 - DNA, 25 bp, Homo sapien
gaccgcccgaaagccgcgcgcctgg

SEQ ID NO: 2188643 - DNA, 25 bp, Homo sapien
ctcgcgcctccgctgggcaccgggt

SEQ ID NO: 2188644 - DNA, 25 bp, Homo sapien
tgtctctcaaagcgaggctcggccg

SEQ ID NO: 2188645 - DNA, 25 bp, Homo sapien
ctgtctctcaaagcgaggctcggcc

SEQ ID NO: 2188646 - DNA, 25 bp, Homo sapien
aagcataccagctcaggaccagaac

SEQ ID NO: 2188647 - DNA, 25 bp, Homo sapien
tttgcagttaaagcataccagctca

SEQ ID NO: 2188648 - DNA, 25 bp, Homo sapien
cacataccagttgtgacttgctagg

SEQ ID NO: 2188649 - DNA, 25 bp, Homo sapien
tgacttgctaggtttttgcagttaa

SEQ ID NO: 2188650 - DNA, 25 bp, Homo sapien
ctcatgcaagacagaaatagtgttg

SEQ ID NO: 2188651 - DNA, 25 bp, Homo sapien
cttcgtcggcttgagtattttgtac

SEQ ID NO: 2188652 - DNA, 25 bp, Homo sapien
tttgattcactggatcttcgtcggc

SEQ ID NO: 2188653 - DNA, 25 bp, Homo sapien
tattttgtacgttctctccactgga

SEQ ID NO: 2188654 - DNA, 25 bp, Homo sapien
caataacctcctctatcctgattta

SEQ ID NO: 2188655 - DNA, 25 bp, Homo sapien
catggcaacggcagtaatagtggca

SEQ ID NO: 2188656 - DNA, 25 bp, Homo sapien
gataccttatttgaagagccgtttc

SEQ ID NO: 2188657 - DNA, 25 bp, Homo sapien
ttaatatgatatggccatggcaacg

SEQ ID NO: 2188658 - DNA, 25 bp, Homo sapien
tgtctatgagtgaaaacagagacgc

SEQ ID NO: 2188659 - DNA, 25 bp, Homo sapien
gccaaggcattatgtagctcagcaa

SEQ ID NO: 2188660 - DNA, 25 bp, Homo sapien
tttattaccattgctgccaaggcat

SEQ ID NO: 2188661 - DNA, 25 bp, Homo sapien
tttacagacagcattcaaccgtagt

SEQ ID NO: 2188662 - DNA, 25 bp, Homo sapien
gaaccctggtgaaagctatgaagtc

SEQ ID NO: 2188663 - DNA, 25 bp, Homo sapien
catcaagtattgacctgagagaaca

SEQ ID NO: 2188664 - DNA, 25 bp, Homo sapien
gagctggcaaaaagctcccggactt

SEQ ID NO: 2188665 - DNA, 25 bp, Homo sapien
gacttgagtgctaaatgtcgaacca

SEQ ID NO: 2188666 - DNA, 25 bp, Homo sapien
gagtggcctcgtttagctccaaaat

SEQ ID NO: 2188667 - DNA, 25 bp, Homo sapien
ggttggagtggcctcgtttagctcc

SEQ ID NO: 2188668 - DNA, 25 bp, Homo sapien
gcctgagcccaaattgagctgggtt

SEQ ID NO: 2188669 - DNA, 25 bp, Homo sapien
caaggcctagctcgccaagcaagtt

SEQ ID NO: 2188670 - DNA, 25 bp, Homo sapien
ccttggcctgtaggaaatgtactca

SEQ ID NO: 2188671 - DNA, 25 bp, Homo sapien
gccttgccaaactttggcacacagg

SEQ ID NO: 2188672 - DNA, 25 bp, Homo sapien
ggcacacaggtatgtccactgccac

SEQ ID NO: 2188673 - DNA, 25 bp, Homo sapien
tggcctgtaggaaatgtactcattt

SEQ ID NO: 2188674 - DNA, 25 bp, Homo sapien
tgttagtactatgtgaccacctcct

SEQ ID NO: 2188675 - DNA, 25 bp, Homo sapien
actttagctggtcggtgttgggcct

SEQ ID NO: 2188676 - DNA, 25 bp, Homo sapien
gaggtcatgtaagctgtatctggag

SEQ ID NO: 2188677 - DNA, 25 bp, Homo sapien
ccaggaacaggtcaatccaagtgtc

SEQ ID NO: 2188678 - DNA, 25 bp, Homo sapien
atcgttgacatttggcgtactttca

SEQ ID NO: 2188679 - DNA, 25 bp, Homo sapien
gacatttggcgtactttcaaagaga

SEQ ID NO: 2188680 - DNA, 25 bp, Homo sapien
gtcgaataatcgttgacatttggcg

SEQ ID NO: 2188681 - DNA, 25 bp, Homo sapien
taaattgctgattgtcgaataatcg

SEQ ID NO: 2188682 - DNA, 25 bp, Homo sapien
gccaaatgatgatgcatgaactcat

SEQ ID NO: 2188683 - DNA, 25 bp, Homo sapien
tttgccaaatgatgatgcatgaact

SEQ ID NO: 2188684 - DNA, 25 bp, Homo sapien
ggagtttgccaaatgatgatgcatg

SEQ ID NO: 2188685 - DNA, 25 bp, Homo sapien
gagtttgccaaatgatgatgcatga

SEQ ID NO: 2188686 - DNA, 25 bp, Homo sapien
gagggtgacatccacgtctgcagat

SEQ ID NO: 2188687 - DNA, 25 bp, Homo sapien
tttggagggtgacatccacgtctgc

SEQ ID NO: 2188688 - DNA, 25 bp, Homo sapien
gacatccacgtctgcagatgctgcc

SEQ ID NO: 2188689 - DNA, 25 bp, Homo sapien
ggtgacatccacgtctgcagatgct

SEQ ID NO: 2188690 - DNA, 25 bp, Homo sapien
gtagtggccctgtttcgtattggga

SEQ ID NO: 2188691 - DNA, 25 bp, Homo sapien
caggattagggcatccagaaggtgg

SEQ ID NO: 2188692 - DNA, 25 bp, Homo sapien
ccctgtttcgtattgggatgaggca

SEQ ID NO: 2188693 - DNA, 25 bp, Homo sapien
tcccattctcaaggtagtggccctg

SEQ ID NO: 2188694 - DNA, 25 bp, Homo sapien
ggtctgacagaataaggacctgcac

SEQ ID NO: 2188695 - DNA, 25 bp, Homo sapien
tgtgctcggttgtgccaatattggc

SEQ ID NO: 2188696 - DNA, 25 bp, Homo sapien
aatattggctgaatgttgcacaaca

SEQ ID NO: 2188697 - DNA, 25 bp, Homo sapien
cacaacagcccggtagctgcactta

SEQ ID NO: 2188698 - DNA, 25 bp, Homo sapien
tcatgttttatccatgtgctcggtt

SEQ ID NO: 2188699 - DNA, 25 bp, Homo sapien
cagctgtcgtttaaggaatgtggca

SEQ ID NO: 2188700 - DNA, 25 bp, Homo sapien
gaatgtggcagatttgctagactta

SEQ ID NO: 2188701 - DNA, 25 bp, Homo sapien
aatgcagagttggatgcttgctgcc

SEQ ID NO: 2188702 - DNA, 25 bp, Homo sapien
tgccatttacttgtccagtctcatc

SEQ ID NO: 2188703 - DNA, 25 bp, Homo sapien
ggacaccggaccaactaacagcata

SEQ ID NO: 2188704 - DNA, 25 bp, Homo sapien
cgagaggagtggattacagcaccca

SEQ ID NO: 2188705 - DNA, 25 bp, Homo sapien
tatattcgcgggtgtgctggacttg

SEQ ID NO: 2188706 - DNA, 25 bp, Homo sapien
aaatatctcggtaggcagttacacg

SEQ ID NO: 2188707 - DNA, 25 bp, Homo sapien
cctgatcaatggaaagctggttccg

SEQ ID NO: 2188708 - DNA, 25 bp, Homo sapien
gctggttccgtctacacttgggaga

SEQ ID NO: 2188709 - DNA, 25 bp, Homo sapien
gagaccccttctactcgatatcaag

SEQ ID NO: 2188710 - DNA, 25 bp, Homo sapien
tcaagacatagtgcaagattacagc

SEQ ID NO: 2188711 - DNA, 25 bp, Homo sapien
tgcttccctgcctttcattgaattt

SEQ ID NO: 2188712 - DNA, 25 bp, Homo sapien
tcagcaactgatgtcccagccacat

SEQ ID NO: 2188713 - DNA, 25 bp, Homo sapien
tttctcattagtcagcaactgatgt

SEQ ID NO: 2188714 - DNA, 25 bp, Homo sapien
cattagtcagcaactgatgtcccag

SEQ ID NO: 2188715 - DNA, 25 bp, Homo sapien
tctctttgagcagtttgacagggag

SEQ ID NO: 2188716 - DNA, 25 bp, Homo sapien
ctctttgagcagtttgacagggaga

SEQ ID NO: 2188717 - DNA, 25 bp, Homo sapien
tggaagacatttctgctagggaagt

SEQ ID NO: 2188718 - DNA, 25 bp, Homo sapien
gacatttctgctagggaagtggtga

SEQ ID NO: 2188719 - DNA, 25 bp, Homo sapien
ccttgctgaagggaagggcacagac

SEQ ID NO: 2188720 - DNA, 25 bp, Homo sapien
atttcctctcctttgcaattgccct

SEQ ID NO: 2188721 - DNA, 25 bp, Homo sapien
tctcctttgcaattgcccttgctga

SEQ ID NO: 2188722 - DNA, 25 bp, Homo sapien
tggggtgccaaccgaatttcctctc

SEQ ID NO: 2188723 - DNA, 25 bp, Homo sapien
cttggcctggcaacagaaaccgtgt

SEQ ID NO: 2188724 - DNA, 25 bp, Homo sapien
aatatagccgcgaagaagcttgtcc

SEQ ID NO: 2188725 - DNA, 25 bp, Homo sapien
gttttggttgccctgagttactcca

SEQ ID NO: 2188726 - DNA, 25 bp, Homo sapien
cctgctgaggtttatcactgattgc

SEQ ID NO: 2188727 - DNA, 25 bp, Homo sapien
cgaatagctttcagcctgagttgta

SEQ ID NO: 2188728 - DNA, 25 bp, Homo sapien
tttaaggctgtaaggctctgggtca

SEQ ID NO: 2188729 - DNA, 25 bp, Homo sapien
tgtatatgtcaaggaggttttaagg

SEQ ID NO: 2188730 - DNA, 25 bp, Homo sapien
cttgaggttctcgaatagctttcag

SEQ ID NO: 2188731 - DNA, 25 bp, Homo sapien
gagagtggtggcgtcataggaggag

SEQ ID NO: 2188732 - DNA, 25 bp, Homo sapien
gtgggattgagagtggtggcgtcat

SEQ ID NO: 2188733 - DNA, 25 bp, Homo sapien
agtggtggcgtcataggaggaggtg

SEQ ID NO: 2188734 - DNA, 25 bp, Homo sapien
gattgagagtggtggcgtcatagga

SEQ ID NO: 2188735 - DNA, 25 bp, Homo sapien
gctgaaagctgattcaaggacctca

SEQ ID NO: 2188736 - DNA, 25 bp, Homo sapien
agcacctttgaggagtattgcgagc

SEQ ID NO: 2188737 - DNA, 25 bp, Homo sapien
gctgattcaaggacctcagagtggg

SEQ ID NO: 2188738 - DNA, 25 bp, Homo sapien
ggagtattgcgagccttcaccttgg

SEQ ID NO: 2188739 - DNA, 25 bp, Homo sapien
taatatagcgtagttgtagtctgtt

SEQ ID NO: 2188740 - DNA, 25 bp, Homo sapien
tcagagggacgctttcactaaggaa

SEQ ID NO: 2188741 - DNA, 25 bp, Homo sapien
gtttgccttttgtcaccagctttcc

SEQ ID NO: 2188742 - DNA, 25 bp, Homo sapien
tcttcacttccagcgcaaacattaa

SEQ ID NO: 2188743 - DNA, 25 bp, Homo sapien
tggatacttgaaagaacacctcgca

SEQ ID NO: 2188744 - DNA, 25 bp, Homo sapien
attctgatggtaggacgaggcagcc

SEQ ID NO: 2188745 - DNA, 25 bp, Homo sapien
tgtggatgccacaatattctgatgg

SEQ ID NO: 2188746 - DNA, 25 bp, Homo sapien
gaacacctcgcatgagagtctcttg

SEQ ID NO: 2188747 - DNA, 25 bp, Homo sapien
cagtcgtgagtaaactgtcagcatc

SEQ ID NO: 2188748 - DNA, 25 bp, Homo sapien
ggaactcgtaaatttgacaagctct

SEQ ID NO: 2188749 - DNA, 25 bp, Homo sapien
cagcatctatttgaaaatgcgaagg

SEQ ID NO: 2188750 - DNA, 25 bp, Homo sapien
tcaacttcggcaggtatgacagtcg

SEQ ID NO: 2188751 - DNA, 25 bp, Homo sapien
catccttccaggagaaacacagccc

SEQ ID NO: 2188752 - DNA, 25 bp, Homo sapien
agtctcctccatccttccaggagaa

SEQ ID NO: 2188753 - DNA, 25 bp, Homo sapien
tccatccttccaggagaaacacagc

SEQ ID NO: 2188754 - DNA, 25 bp, Homo sapien
tcagtctcctccatccttccaggag

SEQ ID NO: 2188755 - DNA, 25 bp, Homo sapien
aatattcctgacaacttcttgcttc

SEQ ID NO: 2188756 - DNA, 25 bp, Homo sapien
gaatattcctgacaacttcttgctt

SEQ ID NO: 2188757 - DNA, 25 bp, Homo sapien
tgaatattcctgacaacttcttgct

SEQ ID NO: 2188758 - DNA, 25 bp, Homo sapien
ttgaatattcctgacaacttcttgc

SEQ ID NO: 2188759 - DNA, 25 bp, Homo sapien
ttcaactccttgtttgcattgcctg

SEQ ID NO: 2188760 - DNA, 25 bp, Homo sapien
tttagcaaaatgtgtagcctctctt

SEQ ID NO: 2188761 - DNA, 25 bp, Homo sapien
agcaaaatgtgtagcctctcttttc

SEQ ID NO: 2188762 - DNA, 25 bp, Homo sapien
caactccttgtttgcattgcctgct

SEQ ID NO: 2188763 - DNA, 25 bp, Homo sapien
tgggactacgtagtggcacagagga

SEQ ID NO: 2188764 - DNA, 25 bp, Homo sapien
gtgggactacgtagtggcacagagg

SEQ ID NO: 2188765 - DNA, 25 bp, Homo sapien
agtgggactacgtagtggcacagag

SEQ ID NO: 2188766 - DNA, 25 bp, Homo sapien
gggactacgtagtggcacagaggag

SEQ ID NO: 2188767 - DNA, 25 bp, Homo sapien
cttcctgctagatgtggacagcagt

SEQ ID NO: 2188768 - DNA, 25 bp, Homo sapien
ctttatgcaggcatgtggtatgccc

SEQ ID NO: 2188769 - DNA, 25 bp, Homo sapien
tcctgctagatgtggacagcagtct

SEQ ID NO: 2188770 - DNA, 25 bp, Homo sapien
ccttgtgacaccctttatgcaggca

SEQ ID NO: 2188771 - DNA, 25 bp, Homo sapien
gatgacgccatattgatgactgcca

SEQ ID NO: 2188772 - DNA, 25 bp, Homo sapien
tttcacgccttcagtcaaataggga

SEQ ID NO: 2188773 - DNA, 25 bp, Homo sapien
gcccatttgggctattctcaaattg

SEQ ID NO: 2188774 - DNA, 25 bp, Homo sapien
cattatagacctgaagatgacgcca

SEQ ID NO: 2188775 - DNA, 25 bp, Homo sapien
cagggtgtatcccttggagggtcca

SEQ ID NO: 2188776 - DNA, 25 bp, Homo sapien
gaaaacacccatgcactattggata

SEQ ID NO: 2188777 - DNA, 25 bp, Homo sapien
gaatgacctgattatttccagctcg

SEQ ID NO: 2188778 - DNA, 25 bp, Homo sapien
gctggaccagcatgtagaaggacca

SEQ ID NO: 2188779 - DNA, 25 bp, Homo sapien
gacagcggcataatgtgcctttgtg

SEQ ID NO: 2188780 - DNA, 25 bp, Homo sapien
agcggcataatgtgcctttgtgctg

SEQ ID NO: 2188781 - DNA, 25 bp, Homo sapien
tgaagacagcggcataatgtgcctt

SEQ ID NO: 2188782 - DNA, 25 bp, Homo sapien
aagacagcggcataatgtgcctttg

SEQ ID NO: 2188783 - DNA, 25 bp, Homo sapien
agctggccaaatcatcttggaaaga

SEQ ID NO: 2188784 - DNA, 25 bp, Homo sapien
cagctggccaaatcatcttggaaag

SEQ ID NO: 2188785 - DNA, 25 bp, Homo sapien
tcaagagtagttgcttaccaagaag

SEQ ID NO: 2188786 - DNA, 25 bp, Homo sapien
ccctggagagttagtgaaggtcatt

SEQ ID NO: 2188787 - DNA, 25 bp, Homo sapien
tccacatctcatcttaaagctagca

SEQ ID NO: 2188788 - DNA, 25 bp, Homo sapien
gcagttcaattgttcctaaaacata

SEQ ID NO: 2188789 - DNA, 25 bp, Homo sapien
ctcagtgattggctcaatggtcttc

SEQ ID NO: 2188790 - DNA, 25 bp, Homo sapien
gattggctcaatggtcttcgtggag

SEQ ID NO: 2188791 - DNA, 25 bp, Homo sapien
cgtggagataagattagttgtgaaa

SEQ ID NO: 2188792 - DNA, 25 bp, Homo sapien
tcaatggtcttcgtggagataagat

SEQ ID NO: 2188793 - DNA, 25 bp, Homo sapien
ctttcatagccctcttgcacacatt

SEQ ID NO: 2188794 - DNA, 25 bp, Homo sapien
cattttcttcttgatcgttgatcat

SEQ ID NO: 2188795 - DNA, 25 bp, Homo sapien
tcatagccctcttgcacacattttc

SEQ ID NO: 2188796 - DNA, 25 bp, Homo sapien
acattttcttcttgatcgttgatca

SEQ ID NO: 2188797 - DNA, 25 bp, Homo sapien
cccagagccctttaagaagggctgc

SEQ ID NO: 2188798 - DNA, 25 bp, Homo sapien
ttggtaaacactcctctttaccaca

SEQ ID NO: 2188799 - DNA, 25 bp, Homo sapien
agggctgctctgttttgatcacttt

SEQ ID NO: 2188800 - DNA, 25 bp, Homo sapien
catgatccatggatgtcaaggtcac

SEQ ID NO: 2188801 - DNA, 25 bp, Homo sapien
gggcttcacatcttatcccttgact

SEQ ID NO: 2188802 - DNA, 25 bp, Homo sapien
taccagggcttcacatcttatccct

SEQ ID NO: 2188803 - DNA, 25 bp, Homo sapien
ctaccagggcttcacatcttatccc

SEQ ID NO: 2188804 - DNA, 25 bp, Homo sapien
ccagggcttcacatcttatcccttg

SEQ ID NO: 2188805 - DNA, 25 bp, Homo sapien
ttttccagctctacattcactctgc

SEQ ID NO: 2188806 - DNA, 25 bp, Homo sapien
ggcagcccactgatgagtcatcttc

SEQ ID NO: 2188807 - DNA, 25 bp, Homo sapien
tctgcctttccacattgggaccaag

SEQ ID NO: 2188808 - DNA, 25 bp, Homo sapien
ccatgattcataggcagcccactga

SEQ ID NO: 2188809 - DNA, 25 bp, Homo sapien
tctctgaaggcttgtcgcaggaaag

SEQ ID NO: 2188810 - DNA, 25 bp, Homo sapien
aaagatgtagacctcctgctctatg

SEQ ID NO: 2188811 - DNA, 25 bp, Homo sapien
ggcttgtcgcaggaaagatgtagac

SEQ ID NO: 2188812 - DNA, 25 bp, Homo sapien
ggaaagatgtagacctcctgctcta

SEQ ID NO: 2188813 - DNA, 25 bp, Homo sapien
gaccaattgtccctgtgaatgacac

SEQ ID NO: 2188814 - DNA, 25 bp, Homo sapien
acgaccaattgtccctgtgaatgac

SEQ ID NO: 2188815 - DNA, 25 bp, Homo sapien
aacgaccaattgtccctgtgaatga

SEQ ID NO: 2188816 - DNA, 25 bp, Homo sapien
ccaattgtccctgtgaatgacacat

SEQ ID NO: 2188817 - DNA, 25 bp, Homo sapien
caaaatttaccatcagagggcgcac

SEQ ID NO: 2188818 - DNA, 25 bp, Homo sapien
tgggtcctccataaccgccaactta

SEQ ID NO: 2188819 - DNA, 25 bp, Homo sapien
gagagccagtcgttaccaaaattta

SEQ ID NO: 2188820 - DNA, 25 bp, Homo sapien
gagaactaaagcaactctcagtggg

SEQ ID NO: 2188821 - DNA, 25 bp, Homo sapien
tgaagaaattgaaggaggatttttc

SEQ ID NO: 2188822 - DNA, 25 bp, Homo sapien
gatatgatccttggaaaatgacctc

SEQ ID NO: 2188823 - DNA, 25 bp, Homo sapien
gggacttttagatcatctagtctct

SEQ ID NO: 2188824 - DNA, 25 bp, Homo sapien
cagtgttgcaaaatctcgaatgaag

SEQ ID NO: 2188825 - DNA, 25 bp, Homo sapien
ctgcaggatgctttgtgggaatgtc

SEQ ID NO: 2188826 - DNA, 25 bp, Homo sapien
caggatgctttgtgggaatgtctgt

SEQ ID NO: 2188827 - DNA, 25 bp, Homo sapien
aggatgctttgtgggaatgtctgtg

SEQ ID NO: 2188828 - DNA, 25 bp, Homo sapien
tgcaggatgctttgtgggaatgtct

SEQ ID NO: 2188829 - DNA, 25 bp, Homo sapien
atcagcacgaacaactaggcagatg

SEQ ID NO: 2188830 - DNA, 25 bp, Homo sapien
gaacaggacatttggagcctacagt

SEQ ID NO: 2188831 - DNA, 25 bp, Homo sapien
caaccatcagcacgaacaactaggc

SEQ ID NO: 2188832 - DNA, 25 bp, Homo sapien
gtgaacaggacatttggagcctaca

SEQ ID NO: 2188833 - DNA, 25 bp, Homo sapien
caaagttgtacttatgtactgggtg

SEQ ID NO: 2188834 - DNA, 25 bp, Homo sapien
gggtttctgcaaagttgtacttatg

SEQ ID NO: 2188835 - DNA, 25 bp, Homo sapien
tatgtactgggtgagatttggctgt

SEQ ID NO: 2188836 - DNA, 25 bp, Homo sapien
gtgagatttggctgtgttggtttca

SEQ ID NO: 2188837 - DNA, 25 bp, Homo sapien
gaataagctgttaatccttccatct

SEQ ID NO: 2188838 - DNA, 25 bp, Homo sapien
gaggtcatgcatatccatttctgta

SEQ ID NO: 2188839 - DNA, 25 bp, Homo sapien
tacaggatattttaggaatgctcat

SEQ ID NO: 2188840 - DNA, 25 bp, Homo sapien
tgtgcatctgtacacacagtgttga

SEQ ID NO: 2188841 - DNA, 25 bp, Homo sapien
ataaaatgaggataatgtcgccttt

SEQ ID NO: 2188842 - DNA, 25 bp, Homo sapien
tttataaaatgaggataatgtcgcc

SEQ ID NO: 2188843 - DNA, 25 bp, Homo sapien
ttataaaatgaggataatgtcgcct

SEQ ID NO: 2188844 - DNA, 25 bp, Homo sapien
attttataaaatgaggataatgtcg

SEQ ID NO: 2188845 - DNA, 25 bp, Homo sapien
caagtaagttgtagtggactctgtt

SEQ ID NO: 2188846 - DNA, 25 bp, Homo sapien
gactctgtttatgactgatccacca

SEQ ID NO: 2188847 - DNA, 25 bp, Homo sapien
tacaatgcctaaagcaaatgcttca

SEQ ID NO: 2188848 - DNA, 25 bp, Homo sapien
tctaaggttagctgaactacaatgc

SEQ ID NO: 2188849 - DNA, 25 bp, Homo sapien
ctccaagaataccatcttcctcaga

SEQ ID NO: 2188850 - DNA, 25 bp, Homo sapien
cagcctccaagaataccatcttcct

SEQ ID NO: 2188851 - DNA, 25 bp, Homo sapien
gcctccaagaataccatcttcctca

SEQ ID NO: 2188852 - DNA, 25 bp, Homo sapien
ccaagaataccatcttcctcagatt

SEQ ID NO: 2188853 - DNA, 25 bp, Homo sapien
cctgttgggccagctgttctggaaa

SEQ ID NO: 2188854 - DNA, 25 bp, Homo sapien
cacctgttgggccagctgttctgga

SEQ ID NO: 2188855 - DNA, 25 bp, Homo sapien
cagctgttctggaaaggttggaagt

SEQ ID NO: 2188856 - DNA, 25 bp, Homo sapien
gccagctgttctggaaaggttggaa

SEQ ID NO: 2188857 - DNA, 25 bp, Homo sapien
ttagctgctagctggctctagcaca

SEQ ID NO: 2188858 - DNA, 25 bp, Homo sapien
tagctgctagctggctctagcacac

SEQ ID NO: 2188859 - DNA, 25 bp, Homo sapien
tagctccctttgtattccaggctgc

SEQ ID NO: 2188860 - DNA, 25 bp, Homo sapien
tgaagatacggtgcctgactacttc

SEQ ID NO: 2188861 - DNA, 25 bp, Homo sapien
tgcatcaaactcttgaagatacggt

SEQ ID NO: 2188862 - DNA, 25 bp, Homo sapien
tcaaagctatgctctgggatgtgct

SEQ ID NO: 2188863 - DNA, 25 bp, Homo sapien
ttactagcatgtctaatttgacacg

SEQ ID NO: 2188864 - DNA, 25 bp, Homo sapien
tggcaacatatgctgcagagttcag

SEQ ID NO: 2188865 - DNA, 25 bp, Homo sapien
cgaacattaagtgggagctgtaaca

SEQ ID NO: 2188866 - DNA, 25 bp, Homo sapien
gacacgtaacgtagagggcgaacat

SEQ ID NO: 2188867 - DNA, 25 bp, Homo sapien
acctgtctttgggatagatggagca

SEQ ID NO: 2188868 - DNA, 25 bp, Homo sapien
tgacatgggtttgaggaatttcagg

SEQ ID NO: 2188869 - DNA, 25 bp, Homo sapien
tcggagtcatgtacacgaacctgtc

SEQ ID NO: 2188870 - DNA, 25 bp, Homo sapien
ggtctggaagatggttcaatcttta

SEQ ID NO: 2188871 - DNA, 25 bp, Homo sapien
ccgactcaatgaaagtgtgatggtg

SEQ ID NO: 2188872 - DNA, 25 bp, Homo sapien
tatcttcttgatccccagcagacag

SEQ ID NO: 2188873 - DNA, 25 bp, Homo sapien
tagcacattgaaaaccgactcaatg

SEQ ID NO: 2188874 - DNA, 25 bp, Homo sapien
ttttatcttcttgatccccagcaga

SEQ ID NO: 2188875 - DNA, 25 bp, Homo sapien
tgtacccatgaattctgatgacagg

SEQ ID NO: 2188876 - DNA, 25 bp, Homo sapien
tatcgctttaaaataggaccatgtt

SEQ ID NO: 2188877 - DNA, 25 bp, Homo sapien
tatgggataaaactgtagaaggaga

SEQ ID NO: 2188878 - DNA, 25 bp, Homo sapien
tcccagcaatatggaatttccctaa

SEQ ID NO: 2188879 - DNA, 25 bp, Homo sapien
tctgtattgtacgatggccagggtc

SEQ ID NO: 2188880 - DNA, 25 bp, Homo sapien
tatttataaggattgatgaggtggg

SEQ ID NO: 2188881 - DNA, 25 bp, Homo sapien
taaattcttgatccccactcacgag

SEQ ID NO: 2188882 - DNA, 25 bp, Homo sapien
cacgtgtaactaacacagggctgtt

SEQ ID NO: 2188883 - DNA, 25 bp, Homo sapien
ctgtctaaatgcttggttgagtctt

SEQ ID NO: 2188884 - DNA, 25 bp, Homo sapien
tgcttggttgagtcttaaagctgcc

SEQ ID NO: 2188885 - DNA, 25 bp, Homo sapien
taaatgcttggttgagtcttaaagc

SEQ ID NO: 2188886 - DNA, 25 bp, Homo sapien
ttaatccatccaatcagtcatttct

SEQ ID NO: 2188887 - DNA, 25 bp, Homo sapien
gccagactccagagccgggtaatta

SEQ ID NO: 2188888 - DNA, 25 bp, Homo sapien
cttagcattaaggaagggcaagcca

SEQ ID NO: 2188889 - DNA, 25 bp, Homo sapien
catcctgcattttgaaagcggttca

SEQ ID NO: 2188890 - DNA, 25 bp, Homo sapien
tctcttcgggagataacaaggtccc

SEQ ID NO: 2188891 - DNA, 25 bp, Homo sapien
aattgcgtgaaaggctcagtttgct

SEQ ID NO: 2188892 - DNA, 25 bp, Homo sapien
atctgggctgatcttggatgaaatt

SEQ ID NO: 2188893 - DNA, 25 bp, Homo sapien
ttggatgaaattgcgtgaaaggctc

SEQ ID NO: 2188894 - DNA, 25 bp, Homo sapien
cgtgaaaggctcagtttgctgtggc

SEQ ID NO: 2188895 - DNA, 25 bp, Homo sapien
tggggtcgcatctctttagatgtct

SEQ ID NO: 2188896 - DNA, 25 bp, Homo sapien
aagctttaaatgaacgcttattttg

SEQ ID NO: 2188897 - DNA, 25 bp, Homo sapien
gaacgcttattttggggtcgcatct

SEQ ID NO: 2188898 - DNA, 25 bp, Homo sapien
ttttggggtcgcatctctttagatg

SEQ ID NO: 2188899 - DNA, 25 bp, Homo sapien
taagtcttctttcacctcagtatga

SEQ ID NO: 2188900 - DNA, 25 bp, Homo sapien
ttttcactgagaatacttgatctga

SEQ ID NO: 2188901 - DNA, 25 bp, Homo sapien
tggttcacatactcaagggctttca

SEQ ID NO: 2188902 - DNA, 25 bp, Homo sapien
tttccaataactaaatcaggtactg

SEQ ID NO: 2188903 - DNA, 25 bp, Homo sapien
ctaatggtttatgataaatgttggg

SEQ ID NO: 2188904 - DNA, 25 bp, Homo sapien
cattgccttgggtgtatgcatcagg

SEQ ID NO: 2188905 - DNA, 25 bp, Homo sapien
aatccaattcgaatgatgtgttgct

SEQ ID NO: 2188906 - DNA, 25 bp, Homo sapien
cctgtggtccagagctgggcaagtt

SEQ ID NO: 2188907 - DNA, 25 bp, Homo sapien
aaggccaagccatttgctgcttacg

SEQ ID NO: 2188908 - DNA, 25 bp, Homo sapien
caagccatttgctgcttacggtcaa

SEQ ID NO: 2188909 - DNA, 25 bp, Homo sapien
gccatttgctgcttacggtcaactc

SEQ ID NO: 2188910 - DNA, 25 bp, Homo sapien
catttgctgcttacggtcaactcag

SEQ ID NO: 2188911 - DNA, 25 bp, Homo sapien
gagtctgagtaggaagcatagcatt

SEQ ID NO: 2188912 - DNA, 25 bp, Homo sapien
caaatgaaaggccttcaactgctgc

SEQ ID NO: 2188913 - DNA, 25 bp, Homo sapien
tgtgacgaactctaacaaaggtaag

SEQ ID NO: 2188914 - DNA, 25 bp, Homo sapien
gaccagctctggcacaacaaatgaa

SEQ ID NO: 2188915 - DNA, 25 bp, Homo sapien
aaattcatgcaatatgctttgtaca

SEQ ID NO: 2188916 - DNA, 25 bp, Homo sapien
cagctttgcacagcatatgtgagct

SEQ ID NO: 2188917 - DNA, 25 bp, Homo sapien
tgagctcagaataacgacccctggt

SEQ ID NO: 2188918 - DNA, 25 bp, Homo sapien
ataacgacccctggtaaattcatgc

SEQ ID NO: 2188919 - DNA, 25 bp, Homo sapien
tagctgcagtgacatcgttttgaca

SEQ ID NO: 2188920 - DNA, 25 bp, Homo sapien
ctgcagtgacatcgttttgacagtg

SEQ ID NO: 2188921 - DNA, 25 bp, Homo sapien
ttagctgcagtgacatcgttttgac

SEQ ID NO: 2188922 - DNA, 25 bp, Homo sapien
caggaaatgagtttagctgcagtga

SEQ ID NO: 2188923 - DNA, 25 bp, Homo sapien
tttgtgatgcttaggagactggaga

SEQ ID NO: 2188924 - DNA, 25 bp, Homo sapien
taagttgcagatgcaacaaccagca

SEQ ID NO: 2188925 - DNA, 25 bp, Homo sapien
gacatgattggtgaataagttgcag

SEQ ID NO: 2188926 - DNA, 25 bp, Homo sapien
tctggagttagacttgtgtttgtga

SEQ ID NO: 2188927 - DNA, 25 bp, Homo sapien
tggctcatggctctctttttctata

SEQ ID NO: 2188928 - DNA, 25 bp, Homo sapien
tgaaggtaacaatcacaggtgccag

SEQ ID NO: 2188929 - DNA, 25 bp, Homo sapien
gcctgctgcaagcttctagaggtca

SEQ ID NO: 2188930 - DNA, 25 bp, Homo sapien
gggagggagtccttcttatgtccta

SEQ ID NO: 2188931 - DNA, 25 bp, Homo sapien
ctagttagtagaattcgaatttgtg

SEQ ID NO: 2188932 - DNA, 25 bp, Homo sapien
agaattcgaatttgtgaaatcagtc

SEQ ID NO: 2188933 - DNA, 25 bp, Homo sapien
tagtagaattcgaatttgtgaaatc

SEQ ID NO: 2188934 - DNA, 25 bp, Homo sapien
tagttagtagaattcgaatttgtga

SEQ ID NO: 2188935 - DNA, 25 bp, Homo sapien
tactgttgactaaaggaggagctga

SEQ ID NO: 2188936 - DNA, 25 bp, Homo sapien
gcagctctgggcaagaaccgtgcgt

SEQ ID NO: 2188937 - DNA, 25 bp, Homo sapien
tgttagtctggaatgctgagcagct

SEQ ID NO: 2188938 - DNA, 25 bp, Homo sapien
taatagaaaccattcccgcctttca

SEQ ID NO: 2188939 - DNA, 25 bp, Homo sapien
tcatcttcactagacagcagagaca

SEQ ID NO: 2188940 - DNA, 25 bp, Homo sapien
gcttcccctaagatcaattgctcat

SEQ ID NO: 2188941 - DNA, 25 bp, Homo sapien
tttggcgataatcaatggcttcccc

SEQ ID NO: 2188942 - DNA, 25 bp, Homo sapien
taatcaatggcttcccctaagatca

SEQ ID NO: 2188943 - DNA, 25 bp, Homo sapien
ttggcttttggcgataatcaatggc

SEQ ID NO: 2188944 - DNA, 25 bp, Homo sapien
ggtataaggactgtcttcagctgta

SEQ ID NO: 2188945 - DNA, 25 bp, Homo sapien
aacagattcaccaaggcagtgggaa

SEQ ID NO: 2188946 - DNA, 25 bp, Homo sapien
aagacaaggtataaggactgtcttc

SEQ ID NO: 2188947 - DNA, 25 bp, Homo sapien
cagtgggaagacaaggtataaggac

SEQ ID NO: 2188948 - DNA, 25 bp, Homo sapien
tttgcctgctgacaaacaatactgt

SEQ ID NO: 2188949 - DNA, 25 bp, Homo sapien
catcactctgcttgcccacgcccag

SEQ ID NO: 2188950 - DNA, 25 bp, Homo sapien
tgcatcatcactctgcttgcccacg

SEQ ID NO: 2188951 - DNA, 25 bp, Homo sapien
tgtttctgcatcatcactctgcttg

SEQ ID NO: 2188952 - DNA, 25 bp, Homo sapien
tctttactaggagtctggattctat

SEQ ID NO: 2188953 - DNA, 25 bp, Homo sapien
taagattcatctcgacatgattcct

SEQ ID NO: 2188954 - DNA, 25 bp, Homo sapien
gattccttataatatggatcccaaa

SEQ ID NO: 2188955 - DNA, 25 bp, Homo sapien
ggattctatctatgatcattggaaa

SEQ ID NO: 2188956 - DNA, 25 bp, Homo sapien
acatccttttggacgtttccttgct

SEQ ID NO: 2188957 - DNA, 25 bp, Homo sapien
cttttggacgtttccttgctgagct

SEQ ID NO: 2188958 - DNA, 25 bp, Homo sapien
tatattgtatcaaagtatgtcccat

SEQ ID NO: 2188959 - DNA, 25 bp, Homo sapien
ttatattgtatcaaagtatgtccca

SEQ ID NO: 2188960 - DNA, 25 bp, Homo sapien
atcagtgtcaccatgagagccaatt

SEQ ID NO: 2188961 - DNA, 25 bp, Homo sapien
cagtattgccaggtaccaacagggt

SEQ ID NO: 2188962 - DNA, 25 bp, Homo sapien
gaatcagtgtcaccatgagagccaa

SEQ ID NO: 2188963 - DNA, 25 bp, Homo sapien
tattgccaggtaccaacagggtata

SEQ ID NO: 2188964 - DNA, 25 bp, Homo sapien
aagacgtacaacttgaccctgttgg

SEQ ID NO: 2188965 - DNA, 25 bp, Homo sapien
aaagacgtacaacttgaccctgttg

SEQ ID NO: 2188966 - DNA, 25 bp, Homo sapien
agacgtacaacttgaccctgttggc

SEQ ID NO: 2188967 - DNA, 25 bp, Homo sapien
catcagagactgatttgcctagacc

SEQ ID NO: 2188968 - DNA, 25 bp, Homo sapien
caagattttaggtccacttcctggc

SEQ ID NO: 2188969 - DNA, 25 bp, Homo sapien
tgcctagacccctgatagttgcagc

SEQ ID NO: 2188970 - DNA, 25 bp, Homo sapien
aacataaatagtggttgtagcagca

SEQ ID NO: 2188971 - DNA, 25 bp, Homo sapien
gtgagcagagatttgttctgttgtc

SEQ ID NO: 2188972 - DNA, 25 bp, Homo sapien
cagtgagcagagatttgttctgttg

SEQ ID NO: 2188973 - DNA, 25 bp, Homo sapien
agtgagcagagatttgttctgttgt

SEQ ID NO: 2188974 - DNA, 25 bp, Homo sapien
tgagcagagatttgttctgttgtct

SEQ ID NO: 2188975 - DNA, 25 bp, Homo sapien
aattgtagttgctttatctccatag

SEQ ID NO: 2188976 - DNA, 25 bp, Homo sapien
gctggcacataaggtcactcaaaat

SEQ ID NO: 2188977 - DNA, 25 bp, Homo sapien
gggaactgctggcacataaggtcac

SEQ ID NO: 2188978 - DNA, 25 bp, Homo sapien
tcaaaattgtagttgctttatctcc

SEQ ID NO: 2188979 - DNA, 25 bp, Homo sapien
ttaagggcacaaatgtgaatgtctc

SEQ ID NO: 2188980 - DNA, 25 bp, Homo sapien
tggcatagctgttgtttggaaagaa

SEQ ID NO: 2188981 - DNA, 25 bp, Homo sapien
cttgctcttgagtaatccttgtggc

SEQ ID NO: 2188982 - DNA, 25 bp, Homo sapien
gaagagctgagaattcacattggta

SEQ ID NO: 2188983 - DNA, 25 bp, Homo sapien
aaggcaccaatacaccagcatcatc

SEQ ID NO: 2188984 - DNA, 25 bp, Homo sapien
accaatacaccagcatcatccaaaa

SEQ ID NO: 2188985 - DNA, 25 bp, Homo sapien
ggcaccaatacaccagcatcatcca

SEQ ID NO: 2188986 - DNA, 25 bp, Homo sapien
ctaaggcaccaatacaccagcatca

SEQ ID NO: 2188987 - DNA, 25 bp, Homo sapien
gtttggatttcctaatatcattatc

SEQ ID NO: 2188988 - DNA, 25 bp, Homo sapien
aatatcattatctctggagtctaat

SEQ ID NO: 2188989 - DNA, 25 bp, Homo sapien
taatatcattatctctggagtctaa

SEQ ID NO: 2188990 - DNA, 25 bp, Homo sapien
tcagtttggatttcctaatatcatt

SEQ ID NO: 2188991 - DNA, 25 bp, Homo sapien
gacacctgatcgttaggtctatcca

SEQ ID NO: 2188992 - DNA, 25 bp, Homo sapien
ggtctatccatgtattctatgtcca

SEQ ID NO: 2188993 - DNA, 25 bp, Homo sapien
catgacacctgatcgttaggtctat

SEQ ID NO: 2188994 - DNA, 25 bp, Homo sapien
gatcgttaggtctatccatgtattc

SEQ ID NO: 2188995 - DNA, 25 bp, Homo sapien
ctaagttacccaatcttcctagaag

SEQ ID NO: 2188996 - DNA, 25 bp, Homo sapien
cagttcctggtcagtaggaataact

SEQ ID NO: 2188997 - DNA, 25 bp, Homo sapien
gaataactgattttgttccaacttg

SEQ ID NO: 2188998 - DNA, 25 bp, Homo sapien
tccaacttggtatgagcatcctaag

SEQ ID NO: 2188999 - DNA, 25 bp, Homo sapien
cgctgcgcttctggcaggcggagcc

SEQ ID NO: 2189000 - DNA, 25 bp, Homo sapien
tcatcacccggggaagatccgacag

SEQ ID NO: 2189001 - DNA, 25 bp, Homo sapien
gggaagatccgacagcactagccct

SEQ ID NO: 2189002 - DNA, 25 bp, Homo sapien
gagccccgttctcgtccacggcagt

SEQ ID NO: 2189003 - DNA, 25 bp, Homo sapien
gcggagccacgactcctgcacgttt

SEQ ID NO: 2189004 - DNA, 25 bp, Homo sapien
aagctatgaactgaagctccctagg

SEQ ID NO: 2189005 - DNA, 25 bp, Homo sapien
ttagcgggaactgagcagacccggc

SEQ ID NO: 2189006 - DNA, 25 bp, Homo sapien
gcaagttggctgagggcgtgcggca

SEQ ID NO: 2189007 - DNA, 25 bp, Homo sapien
caagtagtggactggatgaaaggta

SEQ ID NO: 2189008 - DNA, 25 bp, Homo sapien
ctgagttcgttttgtgtctgagctc

SEQ ID NO: 2189009 - DNA, 25 bp, Homo sapien
taatggaaccggtgagcaaatggtc

SEQ ID NO: 2189010 - DNA, 25 bp, Homo sapien
caaatggtctccgagtcaagtagtg

SEQ ID NO: 2189011 - DNA, 25 bp, Homo sapien
gcttccactggcggatcgtcgtacg

SEQ ID NO: 2189012 - DNA, 25 bp, Homo sapien
cactggcggatcgtcgtacgcgtcg

SEQ ID NO: 2189013 - DNA, 25 bp, Homo sapien
ttccactggcggatcgtcgtacgcg

SEQ ID NO: 2189014 - DNA, 25 bp, Homo sapien
tccactggcggatcgtcgtacgcgt

SEQ ID NO: 2189015 - DNA, 25 bp, Homo sapien
gaagtagggttgctttatccatttc

SEQ ID NO: 2189016 - DNA, 25 bp, Homo sapien
taatggatacttcagtgccaacttg

SEQ ID NO: 2189017 - DNA, 25 bp, Homo sapien
gccaacttgtatattgtgtgccaga

SEQ ID NO: 2189018 - DNA, 25 bp, Homo sapien
tatccatttctcatagttgtagtgc

SEQ ID NO: 2189019 - DNA, 25 bp, Homo sapien
tagaaaccaagtttgatgtggtata

SEQ ID NO: 2189020 - DNA, 25 bp, Homo sapien
gcagggctaggtgctctttccccat

SEQ ID NO: 2189021 - DNA, 25 bp, Homo sapien
gatgtggtatagagctagcatgata

SEQ ID NO: 2189022 - DNA, 25 bp, Homo sapien
tagagctagcatgatatggcagggc

SEQ ID NO: 2189023 - DNA, 25 bp, Homo sapien
tctctctgactctgtaaagcacctt

SEQ ID NO: 2189024 - DNA, 25 bp, Homo sapien
gcacctttttctcctaaattgctca

SEQ ID NO: 2189025 - DNA, 25 bp, Homo sapien
gtcttgtctctctgactctgtaaag

SEQ ID NO: 2189026 - DNA, 25 bp, Homo sapien
cacctttttctcctaaattgctcat

SEQ ID NO: 2189027 - DNA, 25 bp, Homo sapien
ctggagtaggcaaggtacgtattct

SEQ ID NO: 2189028 - DNA, 25 bp, Homo sapien
tttcagaccaaaaaacaggacaagc

SEQ ID NO: 2189029 - DNA, 25 bp, Homo sapien
cctgaatcagacattctgggtgacc

SEQ ID NO: 2189030 - DNA, 25 bp, Homo sapien
gattacccaggaatgtatcatctct

SEQ ID NO: 2189031 - DNA, 25 bp, Homo sapien
gaatttactgaattcgactttggta

SEQ ID NO: 2189032 - DNA, 25 bp, Homo sapien
tttactgaattcgactttggtatgc

SEQ ID NO: 2189033 - DNA, 25 bp, Homo sapien
ctgaattcgactttggtatgctgct

SEQ ID NO: 2189034 - DNA, 25 bp, Homo sapien
aattttctatgacaatgactgttct

SEQ ID NO: 2189035 - DNA, 25 bp, Homo sapien
tgttgagcaagactaaggatggcag

SEQ ID NO: 2189036 - DNA, 25 bp, Homo sapien
gatattctggaacctgatgactaca

SEQ ID NO: 2189037 - DNA, 25 bp, Homo sapien
tgcgtctcccttactctcactgttg

SEQ ID NO: 2189038 - DNA, 25 bp, Homo sapien
tcaagaagaagatagactgcagcaa

SEQ ID NO: 2189039 - DNA, 25 bp, Homo sapien
taaaaactgacttaacacacccaga

SEQ ID NO: 2189040 - DNA, 25 bp, Homo sapien
gagatgctgattgtgtacagaagaa

SEQ ID NO: 2189041 - DNA, 25 bp, Homo sapien
acttcccttctaaggagcaagcagg

SEQ ID NO: 2189042 - DNA, 25 bp, Homo sapien
cttcaggtagggaagtacaatatgt

SEQ ID NO: 2189043 - DNA, 25 bp, Homo sapien
tcatgtttacagtggccaggttgtg

SEQ ID NO: 2189044 - DNA, 25 bp, Homo sapien
ccaggttgtggcctgtaaacagcaa

SEQ ID NO: 2189045 - DNA, 25 bp, Homo sapien
cagcaagcagttgacgggaagacta

SEQ ID NO: 2189046 - DNA, 25 bp, Homo sapien
tgcacaactgtacaggagagtggcc

SEQ ID NO: 2189047 - DNA, 25 bp, Homo sapien
aaaagcagcctagggtgacaccggt

SEQ ID NO: 2189048 - DNA, 25 bp, Homo sapien
tgatacaagccaaaagcagcacctg

SEQ ID NO: 2189049 - DNA, 25 bp, Homo sapien
tgtctaaagtcagggcaaaagcagc

SEQ ID NO: 2189050 - DNA, 25 bp, Homo sapien
tgtgacttaaaaccagtgagctgtc

SEQ ID NO: 2189051 - DNA, 25 bp, Homo sapien
aaagtccttctctagccttgcgtga

SEQ ID NO: 2189052 - DNA, 25 bp, Homo sapien
tccattgcggaaggaaaccggactg

SEQ ID NO: 2189053 - DNA, 25 bp, Homo sapien
tgtaagactaaccaagcgcgacttt

SEQ ID NO: 2189054 - DNA, 25 bp, Homo sapien
tagaaaaagcccatccgttgctctg

SEQ ID NO: 2189055 - DNA, 25 bp, Homo sapien
gtataagtcccggaggctgctcgct

SEQ ID NO: 2189056 - DNA, 25 bp, Homo sapien
ccaacggtccaggtcgaggtcgtag

SEQ ID NO: 2189057 - DNA, 25 bp, Homo sapien
actacgttgcgggtaggcacctggc

SEQ ID NO: 2189058 - DNA, 25 bp, Homo sapien
tcgtagcgctcgatctcagagaagg

SEQ ID NO: 2189059 - DNA, 25 bp, Homo sapien
attgtacacatcgaaggccaccacg

SEQ ID NO: 2189060 - DNA, 25 bp, Homo sapien
cggtgattgtacacatcgaaggcca

SEQ ID NO: 2189061 - DNA, 25 bp, Homo sapien
gccagcggtgattgtacacatcgaa

SEQ ID NO: 2189062 - DNA, 25 bp, Homo sapien
gctgcgccagcggtgattgtacaca

SEQ ID NO: 2189063 - DNA, 25 bp, Homo sapien
gcggggccgcgacctcctcaatcac

SEQ ID NO: 2189064 - DNA, 25 bp, Homo sapien
gggccgcgacctcctcaatcaccac

SEQ ID NO: 2189065 - DNA, 25 bp, Homo sapien
ctgcggggccgcgacctcctcaatc

SEQ ID NO: 2189066 - DNA, 25 bp, Homo sapien
ctctgcggggccgcgacctcctcaa

SEQ ID NO: 2189067 - DNA, 25 bp, Homo sapien
ggatgctggtctgctcgccctgcat

SEQ ID NO: 2189068 - DNA, 25 bp, Homo sapien
ggaaccaggccaaagcggacacgct

SEQ ID NO: 2189069 - DNA, 25 bp, Homo sapien
gtacacgcgccgcagtacgtcggcg

SEQ ID NO: 2189070 - DNA, 25 bp, Homo sapien
cagcaactctgtacagtgtgccagg

SEQ ID NO: 2189071 - DNA, 25 bp, Homo sapien
accaagctaacgccaggcccagtag

SEQ ID NO: 2189072 - DNA, 25 bp, Homo sapien
cagccctcagcgatgtagggttgag

SEQ ID NO: 2189073 - DNA, 25 bp, Homo sapien
cagtagccgggcctcgggcacccgc

SEQ ID NO: 2189074 - DNA, 25 bp, Homo sapien
gtcgggggcacccagtacagccctc

SEQ ID NO: 2189075 - DNA, 25 bp, Homo sapien
ccagcagctcctgcaagtggctcac

SEQ ID NO: 2189076 - DNA, 25 bp, Homo sapien
gggcccgcgccccgcgccagcagct

SEQ ID NO: 2189077 - DNA, 25 bp, Homo sapien
ctccaggagtcccgcggggcccgcg

SEQ ID NO: 2189078 - DNA, 25 bp, Homo sapien
ccgcgccccgcgccagcagctcctg

SEQ ID NO: 2189079 - DNA, 25 bp, Homo sapien
catgagctttgcagtaagacaggaa

SEQ ID NO: 2189080 - DNA, 25 bp, Homo sapien
cctgaagtagtcactggagcacgcc

SEQ ID NO: 2189081 - DNA, 25 bp, Homo sapien
agagtgtcctctacagtgtccatgg

SEQ ID NO: 2189082 - DNA, 25 bp, Homo sapien
acgttggcggcgaagcagcagttct

SEQ ID NO: 2189083 - DNA, 25 bp, Homo sapien
ggcatcccggggcacaacactcccg

SEQ ID NO: 2189084 - DNA, 25 bp, Homo sapien
catcccggggcacaacactcccggg

SEQ ID NO: 2189085 - DNA, 25 bp, Homo sapien
gaggcatcccggggcacaacactcc

SEQ ID NO: 2189086 - DNA, 25 bp, Homo sapien
gcatcccggggcacaacactcccgg

SEQ ID NO: 2189087 - DNA, 25 bp, Homo sapien
agggctccttcatccagacctgcag

SEQ ID NO: 2189088 - DNA, 25 bp, Homo sapien
tgcagatcgcccagtgcccctctca

SEQ ID NO: 2189089 - DNA, 25 bp, Homo sapien
tagcaggggcccatttctgcctgct

SEQ ID NO: 2189090 - DNA, 25 bp, Homo sapien
gcccctctcagagcaaatccagtct

SEQ ID NO: 2189091 - DNA, 25 bp, Homo sapien
cccggcccaatgtggagagcccaca

SEQ ID NO: 2189092 - DNA, 25 bp, Homo sapien
ggcttggtttccacgactgccgagg

SEQ ID NO: 2189093 - DNA, 25 bp, Homo sapien
tggtttccacgactgccgaggcttc

SEQ ID NO: 2189094 - DNA, 25 bp, Homo sapien
ccctccccggcccaatgtggagagc

SEQ ID NO: 2189095 - DNA, 25 bp, Homo sapien
tcccgggagtgcagggcgaggactc

SEQ ID NO: 2189096 - DNA, 25 bp, Homo sapien
accatcacctggaagaaccgagttg

SEQ ID NO: 2189097 - DNA, 25 bp, Homo sapien
tgctggatgtccgacggcgcagatg

SEQ ID NO: 2189098 - DNA, 25 bp, Homo sapien
cggcggtggctgcacaccatcacct

SEQ ID NO: 2189099 - DNA, 25 bp, Homo sapien
tgcgggcacccgcgaaggccgggga

SEQ ID NO: 2189100 - DNA, 25 bp, Homo sapien
ctgcgggcacccgcgaaggccgggg

SEQ ID NO: 2189101 - DNA, 25 bp, Homo sapien
gaggagtgtagacctcccggtgtcc

SEQ ID NO: 2189102 - DNA, 25 bp, Homo sapien
tctgctttgaagaggccctaattaa

SEQ ID NO: 2189103 - DNA, 25 bp, Homo sapien
ctaattaatccagcgggagcgagga

SEQ ID NO: 2189104 - DNA, 25 bp, Homo sapien
cgaggattaagctgcgactttgcgc

SEQ ID NO: 2189105 - DNA, 25 bp, Homo sapien
gacccatccctttgcagcatgaaca

SEQ ID NO: 2189106 - DNA, 25 bp, Homo sapien
ccgacccatccctttgcagcatgaa

SEQ ID NO: 2189107 - DNA, 25 bp, Homo sapien
gaaactgtggttgacttggattttc

SEQ ID NO: 2189108 - DNA, 25 bp, Homo sapien
tgtggttgacttggattttctgcca

SEQ ID NO: 2189109 - DNA, 25 bp, Homo sapien
agatgtgtacaacgaaccaagccca

SEQ ID NO: 2189110 - DNA, 25 bp, Homo sapien
gcaccactctgacatcaatatcaga

SEQ ID NO: 2189111 - DNA, 25 bp, Homo sapien
catgacttttgatagttggactttc

SEQ ID NO: 2189112 - DNA, 25 bp, Homo sapien
aaccaagcccatgacttttgatagt

SEQ ID NO: 2189113 - DNA, 25 bp, Homo sapien
accaagtcatacaatgggaagtggc

SEQ ID NO: 2189114 - DNA, 25 bp, Homo sapien
aaaccaagtcatacaatgggaagtg

SEQ ID NO: 2189115 - DNA, 25 bp, Homo sapien
caagtcatacaatgggaagtggctc

SEQ ID NO: 2189116 - DNA, 25 bp, Homo sapien
gtcatacaatgggaagtggctcgga

SEQ ID NO: 2189117 - DNA, 25 bp, Homo sapien
ttttcccgataactccctgctctaa

SEQ ID NO: 2189118 - DNA, 25 bp, Homo sapien
taactccctgctctaattctggctt

SEQ ID NO: 2189119 - DNA, 25 bp, Homo sapien
ccgataactccctgctctaattctg

SEQ ID NO: 2189120 - DNA, 25 bp, Homo sapien
atttttcccgataactccctgctct

SEQ ID NO: 2189121 - DNA, 25 bp, Homo sapien
ggacgttgcccaaatgacagcttgt

SEQ ID NO: 2189122 - DNA, 25 bp, Homo sapien
tcaagatttcccacaggacgttgcc

SEQ ID NO: 2189123 - DNA, 25 bp, Homo sapien
cgttccgattggatgtcaccagtga

SEQ ID NO: 2189124 - DNA, 25 bp, Homo sapien
gcagcgggaagcaacttctcatcct

SEQ ID NO: 2189125 - DNA, 25 bp, Homo sapien
agctatatagactccacctaagagg

SEQ ID NO: 2189126 - DNA, 25 bp, Homo sapien
aatgctgcataagctatatagactc

SEQ ID NO: 2189127 - DNA, 25 bp, Homo sapien
cctaagaggtcaagagccttcttat

SEQ ID NO: 2189128 - DNA, 25 bp, Homo sapien
tagactccacctaagaggtcaagag

SEQ ID NO: 2189129 - DNA, 25 bp, Homo sapien
gctggctgagtgatacatgtgggtc

SEQ ID NO: 2189130 - DNA, 25 bp, Homo sapien
gattctgccatgggccagaataagg

SEQ ID NO: 2189131 - DNA, 25 bp, Homo sapien
catgggccagaataaggctgaagct

SEQ ID NO: 2189132 - DNA, 25 bp, Homo sapien
tggctgagtgatacatgtgggtcat

SEQ ID NO: 2189133 - DNA, 25 bp, Homo sapien
caccattaggtagctttctgttgtt

SEQ ID NO: 2189134 - DNA, 25 bp, Homo sapien
ccattaggtagctttctgttgttac

SEQ ID NO: 2189135 - DNA, 25 bp, Homo sapien
ggcaccattaggtagctttctgttg

SEQ ID NO: 2189136 - DNA, 25 bp, Homo sapien
gcaccattaggtagctttctgttgt

SEQ ID NO: 2189137 - DNA, 25 bp, Homo sapien
aatggaaagatatccgctggttcta

SEQ ID NO: 2189138 - DNA, 25 bp, Homo sapien
taacccacaggaggatgattggaga

SEQ ID NO: 2189139 - DNA, 25 bp, Homo sapien
tatccgctggttctagatgagaatg

SEQ ID NO: 2189140 - DNA, 25 bp, Homo sapien
gattggagagcaatggaaagatatc

SEQ ID NO: 2189141 - DNA, 25 bp, Homo sapien
tattccaaatggtgggtagacagct

SEQ ID NO: 2189142 - DNA, 25 bp, Homo sapien
ttattccaaatggtgggtagacagc

SEQ ID NO: 2189143 - DNA, 25 bp, Homo sapien
gacaagttgacaagtccaatgacta

SEQ ID NO: 2189144 - DNA, 25 bp, Homo sapien
ggaagccagggacaagttgacaagt

SEQ ID NO: 2189145 - DNA, 25 bp, Homo sapien
cattgtccttgttcagggaagccag

SEQ ID NO: 2189146 - DNA, 25 bp, Homo sapien
gactaagctaaaatccaaccagaag

SEQ ID NO: 2189147 - DNA, 25 bp, Homo sapien
gccaagtggtgttccactagaaaca

SEQ ID NO: 2189148 - DNA, 25 bp, Homo sapien
ggactgtttcatgactgttctgaga

SEQ ID NO: 2189149 - DNA, 25 bp, Homo sapien
cttgttggattaatggtgtctgctc

SEQ ID NO: 2189150 - DNA, 25 bp, Homo sapien
tgctctcggaaggttgccaagtggt

SEQ ID NO: 2189151 - DNA, 25 bp, Homo sapien
gcttgcaacttaaacagattttctg

SEQ ID NO: 2189152 - DNA, 25 bp, Homo sapien
agattttctggcattcacttgctga

SEQ ID NO: 2189153 - DNA, 25 bp, Homo sapien
cttaaacagattttctggcattcac

SEQ ID NO: 2189154 - DNA, 25 bp, Homo sapien
ctgggttcgcttgcaacttaaacag

SEQ ID NO: 2189155 - DNA, 25 bp, Homo sapien
ctagtgggcagaggctccaaagtac

SEQ ID NO: 2189156 - DNA, 25 bp, Homo sapien
tatctccaactagggatggaggtct

SEQ ID NO: 2189157 - DNA, 25 bp, Homo sapien
gtgggcagaggctccaaagtacaaa

SEQ ID NO: 2189158 - DNA, 25 bp, Homo sapien
cagagacaaatatctccaactaggg

SEQ ID NO: 2189159 - DNA, 25 bp, Homo sapien
gatgtaggtcttgcctaatggtgca

SEQ ID NO: 2189160 - DNA, 25 bp, Homo sapien
ctgagtgtctgaatcaacaaagctt

SEQ ID NO: 2189161 - DNA, 25 bp, Homo sapien
tgcctaatggtgcatctgttaaaga

SEQ ID NO: 2189162 - DNA, 25 bp, Homo sapien
aaagatcattgcctcagtttggcct

SEQ ID NO: 2189163 - DNA, 25 bp, Homo sapien
aaatacagccaactagaaggaagag

SEQ ID NO: 2189164 - DNA, 25 bp, Homo sapien
tcatcaaaatcgttaggcacattgc

SEQ ID NO: 2189165 - DNA, 25 bp, Homo sapien
tcaggaggttcacaatcatcataca

SEQ ID NO: 2189166 - DNA, 25 bp, Homo sapien
caaacaggccatttctgctagagtc

SEQ ID NO: 2189167 - DNA, 25 bp, Homo sapien
tctctcaattccatgaatgtaaatg

SEQ ID NO: 2189168 - DNA, 25 bp, Homo sapien
cttcatctctcaattccatgaatgt

SEQ ID NO: 2189169 - DNA, 25 bp, Homo sapien
ctctcaattccatgaatgtaaatga

SEQ ID NO: 2189170 - DNA, 25 bp, Homo sapien
aaacttcatctctcaattccatgaa

SEQ ID NO: 2189171 - DNA, 25 bp, Homo sapien
cagtctctctggctaagtaagaggc

SEQ ID NO: 2189172 - DNA, 25 bp, Homo sapien
ttctctgagcagcatggaatgggtg

SEQ ID NO: 2189173 - DNA, 25 bp, Homo sapien
tggatgacatatggccagtctctct

SEQ ID NO: 2189174 - DNA, 25 bp, Homo sapien
gggtgatgatccataggaaattgta

SEQ ID NO: 2189175 - DNA, 25 bp, Homo sapien
atattgacccaagatttccctacca

SEQ ID NO: 2189176 - DNA, 25 bp, Homo sapien
caagatttccctaccaaggcagagt

SEQ ID NO: 2189177 - DNA, 25 bp, Homo sapien
tctaaaggggccaccgacttcattg

SEQ ID NO: 2189178 - DNA, 25 bp, Homo sapien
gggccaccgacttcattggagaaat

SEQ ID NO: 2189179 - DNA, 25 bp, Homo sapien
gctgagcagacatgacaagccttgt

SEQ ID NO: 2189180 - DNA, 25 bp, Homo sapien
ggatagcgaatatacaagaggttgc

SEQ ID NO: 2189181 - DNA, 25 bp, Homo sapien
caagccttgtcgtttttgaacggat

SEQ ID NO: 2189182 - DNA, 25 bp, Homo sapien
ttgaacggattgaaaaaggatagcg

SEQ ID NO: 2189183 - DNA, 25 bp, Homo sapien
gagcagactaagataagggcacacc

SEQ ID NO: 2189184 - DNA, 25 bp, Homo sapien
tgaagtctgactgccacacatgtgg

SEQ ID NO: 2189185 - DNA, 25 bp, Homo sapien
aaggcccactggttgacctcaaaag

SEQ ID NO: 2189186 - DNA, 25 bp, Homo sapien
tgtatgggtacaaaggaactgcaga

SEQ ID NO: 2189187 - DNA, 25 bp, Homo sapien
taattgatgcgtcattaccactttg

SEQ ID NO: 2189188 - DNA, 25 bp, Homo sapien
tctttgatatcactgagttctttta

SEQ ID NO: 2189189 - DNA, 25 bp, Homo sapien
ttgatatcactgagttcttttacca

SEQ ID NO: 2189190 - DNA, 25 bp, Homo sapien
tttgatacttattttgttcctcttc

SEQ ID NO: 2189191 - DNA, 25 bp, Homo sapien
ctatgctctgatctaagggtcggga

SEQ ID NO: 2189192 - DNA, 25 bp, Homo sapien
tgtccatgaagcctgaggtggtatc

SEQ ID NO: 2189193 - DNA, 25 bp, Homo sapien
aagcctgaggtggtatctgctacaa

SEQ ID NO: 2189194 - DNA, 25 bp, Homo sapien
catgaagcctgaggtggtatctgct

SEQ ID NO: 2189195 - DNA, 25 bp, Homo sapien
agcaaacaagctgacagtggtttct

SEQ ID NO: 2189196 - DNA, 25 bp, Homo sapien
gtggtttctgatagtggccctgcag

SEQ ID NO: 2189197 - DNA, 25 bp, Homo sapien
ctgtaagcaaacaagctgacagtgg

SEQ ID NO: 2189198 - DNA, 25 bp, Homo sapien
gtttctgatagtggccctgcaggat

SEQ ID NO: 2189199 - DNA, 25 bp, Homo sapien
ctgtctctatattgcctggtctggt

SEQ ID NO: 2189200 - DNA, 25 bp, Homo sapien
tgtgctgtctctatattgcctggtc

SEQ ID NO: 2189201 - DNA, 25 bp, Homo sapien
tttgacttggtatgtgctgtctcta

SEQ ID NO: 2189202 - DNA, 25 bp, Homo sapien
ttttggctttgacttggtatgtgct

SEQ ID NO: 2189203 - DNA, 25 bp, Homo sapien
ggtgcccaacggggtagtcactggc

SEQ ID NO: 2189204 - DNA, 25 bp, Homo sapien
tggtgcccaacggggtagtcactgg

SEQ ID NO: 2189205 - DNA, 25 bp, Homo sapien
ctggtgcccaacggggtagtcactg

SEQ ID NO: 2189206 - DNA, 25 bp, Homo sapien
cttgcgccttgtggttttcactgtg

SEQ ID NO: 2189207 - DNA, 25 bp, Homo sapien
tcatctcaacttggcaacacaagca

SEQ ID NO: 2189208 - DNA, 25 bp, Homo sapien
gcaacacaagcaggactgagtgtga

SEQ ID NO: 2189209 - DNA, 25 bp, Homo sapien
catctcaacttggcaacacaagcag

SEQ ID NO: 2189210 - DNA, 25 bp, Homo sapien
tactgttcagctttggggacatatt

SEQ ID NO: 2189211 - DNA, 25 bp, Homo sapien
agctttggggacatattttagttca

SEQ ID NO: 2189212 - DNA, 25 bp, Homo sapien
gttcagctttggggacatattttag

SEQ ID NO: 2189213 - DNA, 25 bp, Homo sapien
tcagctttggggacatattttagtt

SEQ ID NO: 2189214 - DNA, 25 bp, Homo sapien
ttttaatattctggatttccgatag

SEQ ID NO: 2189215 - DNA, 25 bp, Homo sapien
tctggatttccgatagattgactgc

SEQ ID NO: 2189216 - DNA, 25 bp, Homo sapien
tattctggatttccgatagattgac

SEQ ID NO: 2189217 - DNA, 25 bp, Homo sapien
atttccgatagattgactgcaggtc

SEQ ID NO: 2189218 - DNA, 25 bp, Homo sapien
agtttcttcgctcctggaattggct

SEQ ID NO: 2189219 - DNA, 25 bp, Homo sapien
gaagtttcttcgctcctggaattgg

SEQ ID NO: 2189220 - DNA, 25 bp, Homo sapien
aagtttcttcgctcctggaattggc

SEQ ID NO: 2189221 - DNA, 25 bp, Homo sapien
tggaagtttcttcgctcctggaatt

SEQ ID NO: 2189222 - DNA, 25 bp, Homo sapien
gctcctggccgaaaggctcccattg

SEQ ID NO: 2189223 - DNA, 25 bp, Homo sapien
ggccgaaaggctcccattggaatat

SEQ ID NO: 2189224 - DNA, 25 bp, Homo sapien
tcctggccgaaaggctcccattgga

SEQ ID NO: 2189225 - DNA, 25 bp, Homo sapien
gaaaggctcccattggaatattgat

SEQ ID NO: 2189226 - DNA, 25 bp, Homo sapien
gctctaacattggaaactggctgtt

SEQ ID NO: 2189227 - DNA, 25 bp, Homo sapien
ctggatggctctaacattggaaact

SEQ ID NO: 2189228 - DNA, 25 bp, Homo sapien
gatggctctaacattggaaactggc

SEQ ID NO: 2189229 - DNA, 25 bp, Homo sapien
tggctctaacattggaaactggctg

SEQ ID NO: 2189230 - DNA, 25 bp, Homo sapien
ggtgtcctctgagctgcgatctcaa

SEQ ID NO: 2189231 - DNA, 25 bp, Homo sapien
tgtttactgcctaagggaagtccca

SEQ ID NO: 2189232 - DNA, 25 bp, Homo sapien
gatgcaagaatacaaagctccttgg

SEQ ID NO: 2189233 - DNA, 25 bp, Homo sapien
catgtggctgaaatagctctgtgcc

SEQ ID NO: 2189234 - DNA, 25 bp, Homo sapien
gatccatgacttggctcccacaaag

SEQ ID NO: 2189235 - DNA, 25 bp, Homo sapien
tttggtatccaaagtcatcccacag

SEQ ID NO: 2189236 - DNA, 25 bp, Homo sapien
tttgtgctgcattccatcgggtcga

SEQ ID NO: 2189237 - DNA, 25 bp, Homo sapien
aatagaaaagacagatttgtgctgc

SEQ ID NO: 2189238 - DNA, 25 bp, Homo sapien
tttttaagttcaagcagctgtgctg

SEQ ID NO: 2189239 - DNA, 25 bp, Homo sapien
tgaacaattcccacctggactttag

SEQ ID NO: 2189240 - DNA, 25 bp, Homo sapien
ggactttaggaggttcactctcaaa

SEQ ID NO: 2189241 - DNA, 25 bp, Homo sapien
cagctgtgctgagagtttcagggca

SEQ ID NO: 2189242 - DNA, 25 bp, Homo sapien
gcgcccgagcgcccgcaaaaataag

SEQ ID NO: 2189243 - DNA, 25 bp, Homo sapien
ctacaagactagatgccgagttcga

SEQ ID NO: 2189244 - DNA, 25 bp, Homo sapien
gatgccgagttcgaactactgcctg

SEQ ID NO: 2189245 - DNA, 25 bp, Homo sapien
gaactactgcctggacggcagcgcc

SEQ ID NO: 2189246 - DNA, 25 bp, Homo sapien
aaatcctcctgtatgtccccactgg

SEQ ID NO: 2189247 - DNA, 25 bp, Homo sapien
gagccggcggtagcttggttcctga

SEQ ID NO: 2189248 - DNA, 25 bp, Homo sapien
cggtgggaaaccgtgccaccgcaag

SEQ ID NO: 2189249 - DNA, 25 bp, Homo sapien
tccccactggaagagtccggtggga

SEQ ID NO: 2189250 - DNA, 25 bp, Homo sapien
tgagggccttgggcctaaggtccaa

SEQ ID NO: 2189251 - DNA, 25 bp, Homo sapien
taaggtccaagcccgcggtgcccat

SEQ ID NO: 2189252 - DNA, 25 bp, Homo sapien
ggcctaaggtccaagcccgcggtgc

SEQ ID NO: 2189253 - DNA, 25 bp, Homo sapien
cttgggcctaaggtccaagcccgcg

SEQ ID NO: 2189254 - DNA, 25 bp, Homo sapien
ctggacggtgcccacgtgcgacagt

SEQ ID NO: 2189255 - DNA, 25 bp, Homo sapien
gccggagcgcaaggccttcttttct

SEQ ID NO: 2189256 - DNA, 25 bp, Homo sapien
tggatcggcccggtggagtaaataa

SEQ ID NO: 2189257 - DNA, 25 bp, Homo sapien
aataaaacattgccggccgcgggag

SEQ ID NO: 2189258 - DNA, 25 bp, Homo sapien
tgttagagaagttgtgtcactcctt

SEQ ID NO: 2189259 - DNA, 25 bp, Homo sapien
gagaagttgtgtcactccttttcca

SEQ ID NO: 2189260 - DNA, 25 bp, Homo sapien
ggatttctgcatagacatctgttag

SEQ ID NO: 2189261 - DNA, 25 bp, Homo sapien
accctgggcttttctaggatttctg

SEQ ID NO: 2189262 - DNA, 25 bp, Homo sapien
tcagctctattaggagatccgtgct

SEQ ID NO: 2189263 - DNA, 25 bp, Homo sapien
aatgtcagctctattaggagatccg

SEQ ID NO: 2189264 - DNA, 25 bp, Homo sapien
gctctattaggagatccgtgctttg

SEQ ID NO: 2189265 - DNA, 25 bp, Homo sapien
aaaatgtcagctctattaggagatc

SEQ ID NO: 2189266 - DNA, 25 bp, Homo sapien
gattcaagcagcattgtttgaatct

SEQ ID NO: 2189267 - DNA, 25 bp, Homo sapien
gaatcttcagttactaaaggaagct

SEQ ID NO: 2189268 - DNA, 25 bp, Homo sapien
gaaaggacacttggaattaatggaa

SEQ ID NO: 2189269 - DNA, 25 bp, Homo sapien
gacacttggaattaatggaatttag

SEQ ID NO: 2189270 - DNA, 25 bp, Homo sapien
ttaagagatagagacaggaccggcc

SEQ ID NO: 2189271 - DNA, 25 bp, Homo sapien
tcagtaggcaactcgcagaaggacc

SEQ ID NO: 2189272 - DNA, 25 bp, Homo sapien
aaacaagtcaggttatcagtaggca

SEQ ID NO: 2189273 - DNA, 25 bp, Homo sapien
gcttgcccaaggttatgaaagggtc

SEQ ID NO: 2189274 - DNA, 25 bp, Homo sapien
taaagagcctgcttacgaaagtgga

SEQ ID NO: 2189275 - DNA, 25 bp, Homo sapien
ggaatagctgcatacatcataatag

SEQ ID NO: 2189276 - DNA, 25 bp, Homo sapien
cagatactgttatatgggatggaca

SEQ ID NO: 2189277 - DNA, 25 bp, Homo sapien
aggagtaggcttttttggcagatac

SEQ ID NO: 2189278 - DNA, 25 bp, Homo sapien
ccaaatcttattgtggtctttcgca

SEQ ID NO: 2189279 - DNA, 25 bp, Homo sapien
gatcgagctggtttcaactactaag

SEQ ID NO: 2189280 - DNA, 25 bp, Homo sapien
tattatgcagaattgaattactgga

SEQ ID NO: 2189281 - DNA, 25 bp, Homo sapien
tagcaattcagagggccaaatctta

SEQ ID NO: 2189282 - DNA, 25 bp, Homo sapien
gagcttggagaatgccatgaaatac

SEQ ID NO: 2189283 - DNA, 25 bp, Homo sapien
ctgttgacccataggatcaggattt

SEQ ID NO: 2189284 - DNA, 25 bp, Homo sapien
caggatttgggaaccactttactag

SEQ ID NO: 2189285 - DNA, 25 bp, Homo sapien
taatgctcagtcagacctgttcaag

SEQ ID NO: 2189286 - DNA, 25 bp, Homo sapien
aaacttgaccttttgataatcgctc

SEQ ID NO: 2189287 - DNA, 25 bp, Homo sapien
gatattgtggctctcagtcatcact

SEQ ID NO: 2189288 - DNA, 25 bp, Homo sapien
taatcgctcttacaggtcattgtct

SEQ ID NO: 2189289 - DNA, 25 bp, Homo sapien
ttattctcagtgttcctactctgca

SEQ ID NO: 2189290 - DNA, 25 bp, Homo sapien
tgtctttagaacagatatcctgatt

SEQ ID NO: 2189291 - DNA, 25 bp, Homo sapien
tataacgattaagcatggaacattg

SEQ ID NO: 2189292 - DNA, 25 bp, Homo sapien
gattacttgttcaaatacatgcatt

SEQ ID NO: 2189293 - DNA, 25 bp, Homo sapien
gggtaatgcagatactatgaatttg

SEQ ID NO: 2189294 - DNA, 25 bp, Homo sapien
ggagaacttccttcactactaggga

SEQ ID NO: 2189295 - DNA, 25 bp, Homo sapien
tagggagtctttgcgcatcttgcca

SEQ ID NO: 2189296 - DNA, 25 bp, Homo sapien
tatagatttctggatcatgagacag

SEQ ID NO: 2189297 - DNA, 25 bp, Homo sapien
catttctatgcaccagtgactgacg

SEQ ID NO: 2189298 - DNA, 25 bp, Homo sapien
ctcgcacaccatcttcccgtggaga

SEQ ID NO: 2189299 - DNA, 25 bp, Homo sapien
cgcacaccatcttcccgtggagaga

SEQ ID NO: 2189300 - DNA, 25 bp, Homo sapien
ccagccagctcgcacaccatcttcc

SEQ ID NO: 2189301 - DNA, 25 bp, Homo sapien
ccagctcgcacaccatcttcccgtg

SEQ ID NO: 2189302 - DNA, 25 bp, Homo sapien
cggctttgggtcttatcacttggca

SEQ ID NO: 2189303 - DNA, 25 bp, Homo sapien
aaatctcggcagttctttggtggct

SEQ ID NO: 2189304 - DNA, 25 bp, Homo sapien
gagtgactgtctgtgtgtacatccg

SEQ ID NO: 2189305 - DNA, 25 bp, Homo sapien
gatgactaaacaccccttggagcca

SEQ ID NO: 2189306 - DNA, 25 bp, Homo sapien
tggtcaattacacgcagggtggcct

SEQ ID NO: 2189307 - DNA, 25 bp, Homo sapien
tagattgttcgttcaccagcatggg

SEQ ID NO: 2189308 - DNA, 25 bp, Homo sapien
cagtttgaaacctggccggaggact

SEQ ID NO: 2189309 - DNA, 25 bp, Homo sapien
taagggatgaggttcaccccagctc

SEQ ID NO: 2189310 - DNA, 25 bp, Homo sapien
gggatataattcagaccttcgcttt

SEQ ID NO: 2189311 - DNA, 25 bp, Homo sapien
ctgccaaacgactttcccaaaggca

SEQ ID NO: 2189312 - DNA, 25 bp, Homo sapien
taatttcctgaaaccaatttcagaa

SEQ ID NO: 2189313 - DNA, 25 bp, Homo sapien
atttcagaatagcaaagcaagctag

SEQ ID NO: 2189314 - DNA, 25 bp, Homo sapien
ggtctgcgttgcctttccttgcagg

SEQ ID NO: 2189315 - DNA, 25 bp, Homo sapien
cgtcgtgtaatctggtggtctgcgt

SEQ ID NO: 2189316 - DNA, 25 bp, Homo sapien
tgtaatctggtggtctgcgttgcct

SEQ ID NO: 2189317 - DNA, 25 bp, Homo sapien
aatctggtggtctgcgttgcctttc

SEQ ID NO: 2189318 - DNA, 25 bp, Homo sapien
taacttacgctaaggttaggtcagc

SEQ ID NO: 2189319 - DNA, 25 bp, Homo sapien
ggatcatagtatctgcttagcttag

SEQ ID NO: 2189320 - DNA, 25 bp, Homo sapien
tttatagctgcagtaccctttagcc

SEQ ID NO: 2189321 - DNA, 25 bp, Homo sapien
ggccaggcgtctacaggctgctaga

SEQ ID NO: 2189322 - DNA, 25 bp, Homo sapien
gcttcagcatctcctaccaactgtc

SEQ ID NO: 2189323 - DNA, 25 bp, Homo sapien
cacagcctgtacagagcttcagcat

SEQ ID NO: 2189324 - DNA, 25 bp, Homo sapien
agcaagaggcaatgagaaccctcta

SEQ ID NO: 2189325 - DNA, 25 bp, Homo sapien
ctctagatcctccatgtgaggaggg

SEQ ID NO: 2189326 - DNA, 25 bp, Homo sapien
tttggtagatcttcaatttggatat

SEQ ID NO: 2189327 - DNA, 25 bp, Homo sapien
agctgaaggatggttagacagcaca

SEQ ID NO: 2189328 - DNA, 25 bp, Homo sapien
gaagactgctaaatgcactgacccc

SEQ ID NO: 2189329 - DNA, 25 bp, Homo sapien
tggttagacagcacagcgaagactg

SEQ ID NO: 2189330 - DNA, 25 bp, Homo sapien
tatagaccacttttgctgtagcctc

SEQ ID NO: 2189331 - DNA, 25 bp, Homo sapien
tctgtgtaaagggtcatagacaacg

SEQ ID NO: 2189332 - DNA, 25 bp, Homo sapien
tatatccacggcaatgtgtagagga

SEQ ID NO: 2189333 - DNA, 25 bp, Homo sapien
tagacaacgtgtgggatatatccac

SEQ ID NO: 2189334 - DNA, 25 bp, Homo sapien
tcatcctgcaaggttaaatgccttc

SEQ ID NO: 2189335 - DNA, 25 bp, Homo sapien
ggtcccaaccaccaggtggctgaaa

SEQ ID NO: 2189336 - DNA, 25 bp, Homo sapien
aaagctgtccaaatcgtggtcccaa

SEQ ID NO: 2189337 - DNA, 25 bp, Homo sapien
aatgccttctcggtcaggtcccaga

SEQ ID NO: 2189338 - DNA, 25 bp, Homo sapien
caataggaacacaaccaactagggt

SEQ ID NO: 2189339 - DNA, 25 bp, Homo sapien
tgcagctgtcacatttgcggtcttt

SEQ ID NO: 2189340 - DNA, 25 bp, Homo sapien
tctaggagccacaatcccattgatg

SEQ ID NO: 2189341 - DNA, 25 bp, Homo sapien
tctttatgtaggatcccggagtttc

SEQ ID NO: 2189342 - DNA, 25 bp, Homo sapien
gctactgctgagtgggactctagga

SEQ ID NO: 2189343 - DNA, 25 bp, Homo sapien
gcgtgctttagggtcatgtggccaa

SEQ ID NO: 2189344 - DNA, 25 bp, Homo sapien
gaatctaccgctctgggatttctgc

SEQ ID NO: 2189345 - DNA, 25 bp, Homo sapien
ttgtcctgcaagctgcccattctcg

SEQ ID NO: 2189346 - DNA, 25 bp, Homo sapien
ggaagtcttcccaatgaatctaccg

SEQ ID NO: 2189347 - DNA, 25 bp, Homo sapien
aactacttaactttgctcttgcagc

SEQ ID NO: 2189348 - DNA, 25 bp, Homo sapien
gcagcatgaaagcaactatgcacaa

SEQ ID NO: 2189349 - DNA, 25 bp, Homo sapien
ctacaaacaaataggtgtgaccttg

SEQ ID NO: 2189350 - DNA, 25 bp, Homo sapien
caaaggccaaaatgtctctgttgca

SEQ ID NO: 2189351 - DNA, 25 bp, Homo sapien
ttttgtagaatttggtagtgaagac

SEQ ID NO: 2189352 - DNA, 25 bp, Homo sapien
gatgttccactttgttggcatatag

SEQ ID NO: 2189353 - DNA, 25 bp, Homo sapien
cttcaatcttgctactaggtattag

SEQ ID NO: 2189354 - DNA, 25 bp, Homo sapien
tggtagtgaagacatcaagtcctgg

SEQ ID NO: 2189355 - DNA, 25 bp, Homo sapien
tgttcctggcgtggtaatattagca

SEQ ID NO: 2189356 - DNA, 25 bp, Homo sapien
cagaggtctggttgttatgctatca

SEQ ID NO: 2189357 - DNA, 25 bp, Homo sapien
cattgtctcgctgtgtgaacttctc

SEQ ID NO: 2189358 - DNA, 25 bp, Homo sapien
tcacctttgtaatgccttgtccagg

SEQ ID NO: 2189359 - DNA, 25 bp, Homo sapien
tccttgagtgatgatcctgttcacc

SEQ ID NO: 2189360 - DNA, 25 bp, Homo sapien
cccacttccttgagtgatgatcctg

SEQ ID NO: 2189361 - DNA, 25 bp, Homo sapien
cttgagtgatgatcctgttcaccat

SEQ ID NO: 2189362 - DNA, 25 bp, Homo sapien
ttctgcccacttccttgagtgatga

SEQ ID NO: 2189363 - DNA, 25 bp, Homo sapien
tccaacatatcagccgattccacca

SEQ ID NO: 2189364 - DNA, 25 bp, Homo sapien
cctctccaacatatcagccgattcc

SEQ ID NO: 2189365 - DNA, 25 bp, Homo sapien
tctccaacatatcagccgattccac

SEQ ID NO: 2189366 - DNA, 25 bp, Homo sapien
ccaacatatcagccgattccaccat

SEQ ID NO: 2189367 - DNA, 25 bp, Homo sapien
gatgatgctctcgttccactgtgcc

SEQ ID NO: 2189368 - DNA, 25 bp, Homo sapien
agagatgatgctctcgttccactgt

SEQ ID NO: 2189369 - DNA, 25 bp, Homo sapien
agatgatgctctcgttccactgtgc

SEQ ID NO: 2189370 - DNA, 25 bp, Homo sapien
caagccctgatccatatgctcatga

SEQ ID NO: 2189371 - DNA, 25 bp, Homo sapien
gtgtgctgccacgacgatgacacat

SEQ ID NO: 2189372 - DNA, 25 bp, Homo sapien
tgccacgacgatgacacattggctc

SEQ ID NO: 2189373 - DNA, 25 bp, Homo sapien
acgacgatgacacattggctcacct

SEQ ID NO: 2189374 - DNA, 25 bp, Homo sapien
tgctgccacgacgatgacacattgg

SEQ ID NO: 2189375 - DNA, 25 bp, Homo sapien
tgaaattaatcaccttcaaagattt

SEQ ID NO: 2189376 - DNA, 25 bp, Homo sapien
ggggtagttcaacaccatttcacag

SEQ ID NO: 2189377 - DNA, 25 bp, Homo sapien
accaatgaaattaatcaccttcaaa

SEQ ID NO: 2189378 - DNA, 25 bp, Homo sapien
aatgaaattaatcaccttcaaagat

SEQ ID NO: 2189379 - DNA, 25 bp, Homo sapien
taatgttaacaattgatttacaacc

SEQ ID NO: 2189380 - DNA, 25 bp, Homo sapien
tacaaccccatgctctcaaatgaaa

SEQ ID NO: 2189381 - DNA, 25 bp, Homo sapien
gggtgtcccattgagaaagccaaag

SEQ ID NO: 2189382 - DNA, 25 bp, Homo sapien
ggtttgtatccatgaacaggcaggg

SEQ ID NO: 2189383 - DNA, 25 bp, Homo sapien
gctgccggtggcctctaatgtgacg

SEQ ID NO: 2189384 - DNA, 25 bp, Homo sapien
ggcacgtacatcctcactatgggtg

SEQ ID NO: 2189385 - DNA, 25 bp, Homo sapien
tatgggtgtggcctcactgttcaaa

SEQ ID NO: 2189386 - DNA, 25 bp, Homo sapien
gaagtccacctttcggtagcagccc

SEQ ID NO: 2189387 - DNA, 25 bp, Homo sapien
gagtcatttctcatgcaagccaatt

SEQ ID NO: 2189388 - DNA, 25 bp, Homo sapien
gcttcttggctttgacgttccctct

SEQ ID NO: 2189389 - DNA, 25 bp, Homo sapien
gaaaacctcgactgaagcttcttgg

SEQ ID NO: 2189390 - DNA, 25 bp, Homo sapien
cgttcgctgggcctttattgacatg

SEQ ID NO: 2189391 - DNA, 25 bp, Homo sapien
tcctttctcctaattgctgtctgta

SEQ ID NO: 2189392 - DNA, 25 bp, Homo sapien
cctttctcctaattgctgtctgtaa

SEQ ID NO: 2189393 - DNA, 25 bp, Homo sapien
ttcctttctcctaattgctgtctgt

SEQ ID NO: 2189394 - DNA, 25 bp, Homo sapien
tgtatgcagtgtatcacccaggcgg

SEQ ID NO: 2189395 - DNA, 25 bp, Homo sapien
gacttggcactgttctttgggcatg

SEQ ID NO: 2189396 - DNA, 25 bp, Homo sapien
tgagtagcccctgcattaagaaagg

SEQ ID NO: 2189397 - DNA, 25 bp, Homo sapien
ttgaagtggaggtgaataactcgcc

SEQ ID NO: 2189398 - DNA, 25 bp, Homo sapien
ctcaaggtcgctacatcaggattct

SEQ ID NO: 2189399 - DNA, 25 bp, Homo sapien
ggtgtcttctggaggatttgccctt

SEQ ID NO: 2189400 - DNA, 25 bp, Homo sapien
gctgttgaatgagtgtcaggtgata

SEQ ID NO: 2189401 - DNA, 25 bp, Homo sapien
gaggaggatctcaaggtcgctacat

SEQ ID NO: 2189402 - DNA, 25 bp, Homo sapien
cacagtcccttttctgcgggggcct

SEQ ID NO: 2189403 - DNA, 25 bp, Homo sapien
tgagccgggattcggactcagagat

SEQ ID NO: 2189404 - DNA, 25 bp, Homo sapien
gccacagtcccttttctgcgggggc

SEQ ID NO: 2189405 - DNA, 25 bp, Homo sapien
gtgctgagccgggattcggactcag

SEQ ID NO: 2189406 - DNA, 25 bp, Homo sapien
gggacagtgactggtagaccagcat

SEQ ID NO: 2189407 - DNA, 25 bp, Homo sapien
cctgccctttccagttacagattct

SEQ ID NO: 2189408 - DNA, 25 bp, Homo sapien
tgcataaccgctcaagaatgcagtc

SEQ ID NO: 2189409 - DNA, 25 bp, Homo sapien
gggctttcatcaaactgtctcctgc

SEQ ID NO: 2189410 - DNA, 25 bp, Homo sapien
caggcagatagtggaaaatgggtga

SEQ ID NO: 2189411 - DNA, 25 bp, Homo sapien
gaccctagcatagctgggtaaaggc

SEQ ID NO: 2189412 - DNA, 25 bp, Homo sapien
tgtcatttttgagaccctagcatag

SEQ ID NO: 2189413 - DNA, 25 bp, Homo sapien
tgtatttaacccagtgttctgagtt

SEQ ID NO: 2189414 - DNA, 25 bp, Homo sapien
gaaaccctggactcgaggcagaaag

SEQ ID NO: 2189415 - DNA, 25 bp, Homo sapien
gaggcagtccaggtctaatatgctg

SEQ ID NO: 2189416 - DNA, 25 bp, Homo sapien
cattggcccgaatctcatcctgtag

SEQ ID NO: 2189417 - DNA, 25 bp, Homo sapien
ggcatgggttgctcctggtatctaa

SEQ ID NO: 2189418 - DNA, 25 bp, Homo sapien
tcattggcagtctaacctggagcca

SEQ ID NO: 2189419 - DNA, 25 bp, Homo sapien
tgcttgtacaccaaagaggtctttc

SEQ ID NO: 2189420 - DNA, 25 bp, Homo sapien
tctcaggagaatgcctggaagttgc

SEQ ID NO: 2189421 - DNA, 25 bp, Homo sapien
gaaaagggctgtatctgctgtctgc

SEQ ID NO: 2189422 - DNA, 25 bp, Homo sapien
tcatcctgtgtaggttacttaactt

SEQ ID NO: 2189423 - DNA, 25 bp, Homo sapien
atcctgtgtaggttacttaacttcg

SEQ ID NO: 2189424 - DNA, 25 bp, Homo sapien
ttcatcctgtgtaggttacttaact

SEQ ID NO: 2189425 - DNA, 25 bp, Homo sapien
catcctgtgtaggttacttaacttc

SEQ ID NO: 2189426 - DNA, 25 bp, Homo sapien
tcccttctgtgaccctagacacagg

SEQ ID NO: 2189427 - DNA, 25 bp, Homo sapien
cgcagctgtgtactcctgtgactct

SEQ ID NO: 2189428 - DNA, 25 bp, Homo sapien
tactctcctaagtgatggtaccatc

SEQ ID NO: 2189429 - DNA, 25 bp, Homo sapien
tctcctctactctcctaagtgatgg

SEQ ID NO: 2189430 - DNA, 25 bp, Homo sapien
gtccccagcattacggaacagagtg

SEQ ID NO: 2189431 - DNA, 25 bp, Homo sapien
agttttcagattcccagtccccagc

SEQ ID NO: 2189432 - DNA, 25 bp, Homo sapien
tgatggtaccgtcacttaggagagt

SEQ ID NO: 2189433 - DNA, 25 bp, Homo sapien
cctaaaaaggtaggcatgagcccat

SEQ ID NO: 2189434 - DNA, 25 bp, Homo sapien
caaagttatagccagttctcagtcc

SEQ ID NO: 2189435 - DNA, 25 bp, Homo sapien
gatgtgtggagtgcttatttggccc

SEQ ID NO: 2189436 - DNA, 25 bp, Homo sapien
ggtatgtagctgtcgatgtctccac

SEQ ID NO: 2189437 - DNA, 25 bp, Homo sapien
catgtgcctagtttcccagtcagcc

SEQ ID NO: 2189438 - DNA, 25 bp, Homo sapien
tctaatgcatatgcagagaccccta

SEQ ID NO: 2189439 - DNA, 25 bp, Homo sapien
ttgctgactttatgccaccactctc

SEQ ID NO: 2189440 - DNA, 25 bp, Homo sapien
cagggtcatgttcccaactgtctaa

SEQ ID NO: 2189441 - DNA, 25 bp, Homo sapien
tctttggctttcatgggcctgctct

SEQ ID NO: 2189442 - DNA, 25 bp, Homo sapien
tagaaccccttctgacgggagtgaa

SEQ ID NO: 2189443 - DNA, 25 bp, Homo sapien
tctgtcttgctggcgttcccagcac

SEQ ID NO: 2189444 - DNA, 25 bp, Homo sapien
gctctgtgggggtaggacccgccaa

SEQ ID NO: 2189445 - DNA, 25 bp, Homo sapien
cttgctggcgttcccagcaccagtg

SEQ ID NO: 2189446 - DNA, 25 bp, Homo sapien
attttctgattccccattaggaaca

SEQ ID NO: 2189447 - DNA, 25 bp, Homo sapien
ccccattaggaacatatgattttca

SEQ ID NO: 2189448 - DNA, 25 bp, Homo sapien
gctgtaactgttataccgaaaattg

SEQ ID NO: 2189449 - DNA, 25 bp, Homo sapien
tacttgctgtaactgttataccgaa

SEQ ID NO: 2189450 - DNA, 25 bp, Homo sapien
ttatcctgattaactttacttgctg

SEQ ID NO: 2189451 - DNA, 25 bp, Homo sapien
cgaaaattgtaggtaggatgtccat

SEQ ID NO: 2189452 - DNA, 25 bp, Homo sapien
atgtgggctgagtagtgagtggaca

SEQ ID NO: 2189453 - DNA, 25 bp, Homo sapien
ctgagtagtgagtggacagctgcag

SEQ ID NO: 2189454 - DNA, 25 bp, Homo sapien
gaagcaaatctagatcttacagtcc

SEQ ID NO: 2189455 - DNA, 25 bp, Homo sapien
attgttctgtaaggggagcaggcct

SEQ ID NO: 2189456 - DNA, 25 bp, Homo sapien
aatgactgcttctaggccagatggc

SEQ ID NO: 2189457 - DNA, 25 bp, Homo sapien
gccagatggcatgtagcttaaacgg

SEQ ID NO: 2189458 - DNA, 25 bp, Homo sapien
taattgtgcacattgatactcctcc

SEQ ID NO: 2189459 - DNA, 25 bp, Homo sapien
gcttaaacggagatgtctcaacctg

SEQ ID NO: 2189460 - DNA, 25 bp, Homo sapien
ctggtggaagaccagcagttaggaa

SEQ ID NO: 2189461 - DNA, 25 bp, Homo sapien
ggaagaccagcagttaggaagaatg

SEQ ID NO: 2189462 - DNA, 25 bp, Homo sapien
gctgtggctggtggaagaccagcag

SEQ ID NO: 2189463 - DNA, 25 bp, Homo sapien
atttcatcaggtggaggtcttggtc

SEQ ID NO: 2189464 - DNA, 25 bp, Homo sapien
tcccggataaactctgcgtgtgctg

SEQ ID NO: 2189465 - DNA, 25 bp, Homo sapien
ccacagtgtccctaatgttccagag

SEQ ID NO: 2189466 - DNA, 25 bp, Homo sapien
gcacctttgattttccagacaccag

SEQ ID NO: 2189467 - DNA, 25 bp, Homo sapien
cagctgtcaaagaaattagcctgtc

SEQ ID NO: 2189468 - DNA, 25 bp, Homo sapien
cacctctctcctgggaggtgatgtg

SEQ ID NO: 2189469 - DNA, 25 bp, Homo sapien
aggtgatgtgggaggcatccttcat

SEQ ID NO: 2189470 - DNA, 25 bp, Homo sapien
taaagcacctctctcctgggaggtg

SEQ ID NO: 2189471 - DNA, 25 bp, Homo sapien
tgggaggtgatgtgggaggcatcct

SEQ ID NO: 2189472 - DNA, 25 bp, Homo sapien
gcttcaccaggttgactgaattact

SEQ ID NO: 2189473 - DNA, 25 bp, Homo sapien
gccactgtctgttcctttagcttca

SEQ ID NO: 2189474 - DNA, 25 bp, Homo sapien
tgaggaaggttaaccagcgcccctc

SEQ ID NO: 2189475 - DNA, 25 bp, Homo sapien
gaattactgcttagcctctcagatg

SEQ ID NO: 2189476 - DNA, 25 bp, Homo sapien
atgggattccatggcactgaaacac

SEQ ID NO: 2189477 - DNA, 25 bp, Homo sapien
gaaatctgaggtgttggtgctgcaa

SEQ ID NO: 2189478 - DNA, 25 bp, Homo sapien
cagtggaaccggattttgtagaata

SEQ ID NO: 2189479 - DNA, 25 bp, Homo sapien
ccagagccttaaaagcatccctcga

SEQ ID NO: 2189480 - DNA, 25 bp, Homo sapien
cctccacatccggttcactaaatgg

SEQ ID NO: 2189481 - DNA, 25 bp, Homo sapien
cggttcactaaatgggaggcttcta

SEQ ID NO: 2189482 - DNA, 25 bp, Homo sapien
cactaaatgggaggcttctatggtt

SEQ ID NO: 2189483 - DNA, 25 bp, Homo sapien
catccggttcactaaatgggaggct

SEQ ID NO: 2189484 - DNA, 25 bp, Homo sapien
cagattgatttaatcgaggattggg

SEQ ID NO: 2189485 - DNA, 25 bp, Homo sapien
tccagattgatttaatcgaggattg

SEQ ID NO: 2189486 - DNA, 25 bp, Homo sapien
ttgatttaatcgaggattgggaact

SEQ ID NO: 2189487 - DNA, 25 bp, Homo sapien
aattccagattgatttaatcgagga

SEQ ID NO: 2189488 - DNA, 25 bp, Homo sapien
tctatctgatttgttaagcacaggc

SEQ ID NO: 2189489 - DNA, 25 bp, Homo sapien
gaaactgaatgagattgcctctggg

SEQ ID NO: 2189490 - DNA, 25 bp, Homo sapien
ctgggttacataaggaagcgaggaa

SEQ ID NO: 2189491 - DNA, 25 bp, Homo sapien
cattatacctagagagccctgtgct

SEQ ID NO: 2189492 - DNA, 25 bp, Homo sapien
cagtaggccaccctggaagtaggag

SEQ ID NO: 2189493 - DNA, 25 bp, Homo sapien
cctcctgagagcgaatacaaggtat

SEQ ID NO: 2189494 - DNA, 25 bp, Homo sapien
gaatcccaattgtccagccagcaag

SEQ ID NO: 2189495 - DNA, 25 bp, Homo sapien
ctggaagtaggagacatccctcctg

SEQ ID NO: 2189496 - DNA, 25 bp, Homo sapien
agcaggatcatttgggatgaaggag

SEQ ID NO: 2189497 - DNA, 25 bp, Homo sapien
catttgggatgaaggaggtccactg

SEQ ID NO: 2189498 - DNA, 25 bp, Homo sapien
gagaggtggtgagcaggatcatttg

SEQ ID NO: 2189499 - DNA, 25 bp, Homo sapien
tgaaggaggtccactggatgaccat

SEQ ID NO: 2189500 - DNA, 25 bp, Homo sapien
tgtgacagcagaatcctgggtgctg

SEQ ID NO: 2189501 - DNA, 25 bp, Homo sapien
ctcaagagtcgggaatccctgaatc

SEQ ID NO: 2189502 - DNA, 25 bp, Homo sapien
gacagcagaatcctgggtgctgaag

SEQ ID NO: 2189503 - DNA, 25 bp, Homo sapien
accctcttcctcaagagtcgggaat

SEQ ID NO: 2189504 - DNA, 25 bp, Homo sapien
cttccttcctattatcaccataggc

SEQ ID NO: 2189505 - DNA, 25 bp, Homo sapien
ttcctattatcaccataggcttcta

SEQ ID NO: 2189506 - DNA, 25 bp, Homo sapien
tatcaccataggcttctattatcac

SEQ ID NO: 2189507 - DNA, 25 bp, Homo sapien
tattatcaccataggcttctattat

SEQ ID NO: 2189508 - DNA, 25 bp, Homo sapien
gggctactgatcactacaggaccgg

SEQ ID NO: 2189509 - DNA, 25 bp, Homo sapien
aaccctttcactgtctaggacccag

SEQ ID NO: 2189510 - DNA, 25 bp, Homo sapien
tacaggaccgggcaacctctttcca

SEQ ID NO: 2189511 - DNA, 25 bp, Homo sapien
tgactcctagatccctgatccatgc

SEQ ID NO: 2189512 - DNA, 25 bp, Homo sapien
ccaaggctctgatttgctgataatt

SEQ ID NO: 2189513 - DNA, 25 bp, Homo sapien
taattcacactctccccttttggct

SEQ ID NO: 2189514 - DNA, 25 bp, Homo sapien
cttttggcttggttccctagcccat

SEQ ID NO: 2189515 - DNA, 25 bp, Homo sapien
ttccctagcccatctctcagtgcct

SEQ ID NO: 2189516 - DNA, 25 bp, Homo sapien
tctctcagtttctgcctccatcagc

SEQ ID NO: 2189517 - DNA, 25 bp, Homo sapien
tcacaacaagactgcagcttctctc

SEQ ID NO: 2189518 - DNA, 25 bp, Homo sapien
cacaacaagactgcagcttctctct

SEQ ID NO: 2189519 - DNA, 25 bp, Homo sapien
tccatcagctgccagaggaggagtc

SEQ ID NO: 2189520 - DNA, 25 bp, Homo sapien
gctggatatagcttcactaacgggt

SEQ ID NO: 2189521 - DNA, 25 bp, Homo sapien
tggatatagcttcactaacgggtaa

SEQ ID NO: 2189522 - DNA, 25 bp, Homo sapien
gatatagcttcactaacgggtaata

SEQ ID NO: 2189523 - DNA, 25 bp, Homo sapien
tatagcttcactaacgggtaatact

SEQ ID NO: 2189524 - DNA, 25 bp, Homo sapien
gtgtccattgaacttgctttactga

SEQ ID NO: 2189525 - DNA, 25 bp, Homo sapien
cactgtgcacgtgacatgaatggaa

SEQ ID NO: 2189526 - DNA, 25 bp, Homo sapien
gaatggaagcaagcacggcatcagt

SEQ ID NO: 2189527 - DNA, 25 bp, Homo sapien
catcagttatcatgccagtcaaaga

SEQ ID NO: 2189528 - DNA, 25 bp, Homo sapien
ggctttctggttagtattcaggcca

SEQ ID NO: 2189529 - DNA, 25 bp, Homo sapien
tcagacggtggcaacaaagcttttc

SEQ ID NO: 2189530 - DNA, 25 bp, Homo sapien
ccagcacctctgttatcagacggtg

SEQ ID NO: 2189531 - DNA, 25 bp, Homo sapien
caacaaagcttttccgcctgaatct

SEQ ID NO: 2189532 - DNA, 25 bp, Homo sapien
acagtaatgagctgtttttgcaggc

SEQ ID NO: 2189533 - DNA, 25 bp, Homo sapien
tgcaggcttccttcgggagcctttt

SEQ ID NO: 2189534 - DNA, 25 bp, Homo sapien
tggcaagaggagctaattcaaaaca

SEQ ID NO: 2189535 - DNA, 25 bp, Homo sapien
tttcttatatcccttggcaagagga

SEQ ID NO: 2189536 - DNA, 25 bp, Homo sapien
tgggtcctcgcaacctaatcgtgtc

SEQ ID NO: 2189537 - DNA, 25 bp, Homo sapien
tcttcctttctcgggacctttctgc

SEQ ID NO: 2189538 - DNA, 25 bp, Homo sapien
tgccctgtctcttgatgccctgggt

SEQ ID NO: 2189539 - DNA, 25 bp, Homo sapien
tgtctcgtggccctaattgctgtgt

SEQ ID NO: 2189540 - DNA, 25 bp, Homo sapien
gatgaagtgtgggactcaccagcac

SEQ ID NO: 2189541 - DNA, 25 bp, Homo sapien
accatggtgtttctcgagtgctgac

SEQ ID NO: 2189542 - DNA, 25 bp, Homo sapien
tctcacttgagcaaagaccatggtg

SEQ ID NO: 2189543 - DNA, 25 bp, Homo sapien
tattatagctccttgctgcacggat

SEQ ID NO: 2189544 - DNA, 25 bp, Homo sapien
ggagccccgttggtatgatgagaaa

SEQ ID NO: 2189545 - DNA, 25 bp, Homo sapien
gctgtagctataggtaccagaggct

SEQ ID NO: 2189546 - DNA, 25 bp, Homo sapien
tggaggcggtgaagcattctacaac

SEQ ID NO: 2189547 - DNA, 25 bp, Homo sapien
cccaattaggtgaggaacgctagag

SEQ ID NO: 2189548 - DNA, 25 bp, Homo sapien
ttcctccatcaagggccttatacca

SEQ ID NO: 2189549 - DNA, 25 bp, Homo sapien
ttccagtgggaagcttcttgagtca

SEQ ID NO: 2189550 - DNA, 25 bp, Homo sapien
agggccttataccaccttcctctgg

SEQ ID NO: 2189551 - DNA, 25 bp, Homo sapien
gcataatctgcataatgatcactct

SEQ ID NO: 2189552 - DNA, 25 bp, Homo sapien
tctttgaagccatttgagaaaacgg

SEQ ID NO: 2189553 - DNA, 25 bp, Homo sapien
tgatgccaaacgatgacatgggtct

SEQ ID NO: 2189554 - DNA, 25 bp, Homo sapien
cagccctgagcagggtgtttggcat

SEQ ID NO: 2189555 - DNA, 25 bp, Homo sapien
tgtttggcatgtcagagacgattac

SEQ ID NO: 2189556 - DNA, 25 bp, Homo sapien
caaaagtatccaaggaacagcttaa

SEQ ID NO: 2189557 - DNA, 25 bp, Homo sapien
gaacagcttaagccctgggaaagat

SEQ ID NO: 2189558 - DNA, 25 bp, Homo sapien
gtctgtggtgtttgctcctataaag

SEQ ID NO: 2189559 - DNA, 25 bp, Homo sapien
taattcacagttttccctgatggct

SEQ ID NO: 2189560 - DNA, 25 bp, Homo sapien
tcctataaagtgatgcaccactggg

SEQ ID NO: 2189561 - DNA, 25 bp, Homo sapien
gagatgtgtacttctggccctgcac

SEQ ID NO: 2189562 - DNA, 25 bp, Homo sapien
tcaaaaagtgatagacgttggcagg

SEQ ID NO: 2189563 - DNA, 25 bp, Homo sapien
agtgatagacgttggcagggatata

SEQ ID NO: 2189564 - DNA, 25 bp, Homo sapien
taaacaacccacagagtcggagaaa

SEQ ID NO: 2189565 - DNA, 25 bp, Homo sapien
ttctcaatctatatctccaacaaag

SEQ ID NO: 2189566 - DNA, 25 bp, Homo sapien
ggcttgactggagtccattatcctt

SEQ ID NO: 2189567 - DNA, 25 bp, Homo sapien
ttattttctgtattcattgcacaac

SEQ ID NO: 2189568 - DNA, 25 bp, Homo sapien
tttatgcagagaataacaacgagct

SEQ ID NO: 2189569 - DNA, 25 bp, Homo sapien
gaataacaacgagcttatgggttgc

SEQ ID NO: 2189570 - DNA, 25 bp, Homo sapien
ttattgagtctgaccctgtgctcat

SEQ ID NO: 2189571 - DNA, 25 bp, Homo sapien
tttattgagtctgaccctgtgctca

SEQ ID NO: 2189572 - DNA, 25 bp, Homo sapien
tcaattcttcatggtatgaccactc

SEQ ID NO: 2189573 - DNA, 25 bp, Homo sapien
catggtatgaccactctggaaactt

SEQ ID NO: 2189574 - DNA, 25 bp, Homo sapien
ccacaacttaagtgattatcaatca

SEQ ID NO: 2189575 - DNA, 25 bp, Homo sapien
tttgaaacagctccacaacttaagt

SEQ ID NO: 2189576 - DNA, 25 bp, Homo sapien
aaggaattaatagctgcctcatgta

SEQ ID NO: 2189577 - DNA, 25 bp, Homo sapien
aggaattaatagctgcctcatgtaa

SEQ ID NO: 2189578 - DNA, 25 bp, Homo sapien
acgctcgtggatgggtaggatcaat

SEQ ID NO: 2189579 - DNA, 25 bp, Homo sapien
ccacgctcgtggatgggtaggatca

SEQ ID NO: 2189580 - DNA, 25 bp, Homo sapien
tcccacgctcgtggatgggtaggat

SEQ ID NO: 2189581 - DNA, 25 bp, Homo sapien
catcccacgctcgtggatgggtagg

SEQ ID NO: 2189582 - DNA, 25 bp, Homo sapien
aatccatcaccaaaagctcgtttga

SEQ ID NO: 2189583 - DNA, 25 bp, Homo sapien
caccaaaagctcgtttgaaagcctt

SEQ ID NO: 2189584 - DNA, 25 bp, Homo sapien
catcaccaaaagctcgtttgaaagc

SEQ ID NO: 2189585 - DNA, 25 bp, Homo sapien
caaaagctcgtttgaaagccttatc

SEQ ID NO: 2189586 - DNA, 25 bp, Homo sapien
gagataagctcttcggagactaaag

SEQ ID NO: 2189587 - DNA, 25 bp, Homo sapien
gcatgatttcagtgtcggttctgtt

SEQ ID NO: 2189588 - DNA, 25 bp, Homo sapien
ggatttcttcaactctgcgacaaga

SEQ ID NO: 2189589 - DNA, 25 bp, Homo sapien
taagggtagttttgaagagataagc

SEQ ID NO: 2189590 - DNA, 25 bp, Homo sapien
gaaactctggtcctgtatgtctgac

SEQ ID NO: 2189591 - DNA, 25 bp, Homo sapien
tgtatagtacgtttgtcctcgatgg

SEQ ID NO: 2189592 - DNA, 25 bp, Homo sapien
gctacctatattgtatgttaacttg

SEQ ID NO: 2189593 - DNA, 25 bp, Homo sapien
catcttggattctgtgctacctata

SEQ ID NO: 2189594 - DNA, 25 bp, Homo sapien
atcagtttgaaagacacctgggcag

SEQ ID NO: 2189595 - DNA, 25 bp, Homo sapien
caatcagtttgaaagacacctgggc

SEQ ID NO: 2189596 - DNA, 25 bp, Homo sapien
cttcccaatcagtttgaaagacacc

SEQ ID NO: 2189597 - DNA, 25 bp, Homo sapien
gtttgaaagacacctgggcagcttg

SEQ ID NO: 2189598 - DNA, 25 bp, Homo sapien
tttggggccacgagcttgcctgcgc

SEQ ID NO: 2189599 - DNA, 25 bp, Homo sapien
tgaggaaccaactgaagtttcagcc

SEQ ID NO: 2189600 - DNA, 25 bp, Homo sapien
tgcgcgctgggaaattgtggctcct

SEQ ID NO: 2189601 - DNA, 25 bp, Homo sapien
cagcaacctgaacaagtgctatggt

SEQ ID NO: 2189602 - DNA, 25 bp, Homo sapien
tcatgtcagggcagaaagccagcca

SEQ ID NO: 2189603 - DNA, 25 bp, Homo sapien
gtcagggcagaaagccagccaggca

SEQ ID NO: 2189604 - DNA, 25 bp, Homo sapien
atgtcagggcagaaagccagccagg

SEQ ID NO: 2189605 - DNA, 25 bp, Homo sapien
cagggcagaaagccagccaggcaac

SEQ ID NO: 2189606 - DNA, 25 bp, Homo sapien
agaggcactaatgcgagcaggacct

SEQ ID NO: 2189607 - DNA, 25 bp, Homo sapien
aagaggcactaatgcgagcaggacc

SEQ ID NO: 2189608 - DNA, 25 bp, Homo sapien
gaagaggcactaatgcgagcaggac

SEQ ID NO: 2189609 - DNA, 25 bp, Homo sapien
aggcactaatgcgagcaggacctcc

SEQ ID NO: 2189610 - DNA, 25 bp, Homo sapien
atctcatgttgagtaaagtagtccc

SEQ ID NO: 2189611 - DNA, 25 bp, Homo sapien
gcatatctcatgttgagtaaagtag

SEQ ID NO: 2189612 - DNA, 25 bp, Homo sapien
ctttgcgcatatctcatgttgagta

SEQ ID NO: 2189613 - DNA, 25 bp, Homo sapien
tgcgcatatctcatgttgagtaaag

SEQ ID NO: 2189614 - DNA, 25 bp, Homo sapien
gcattttgcgaaatggagtgtccat

SEQ ID NO: 2189615 - DNA, 25 bp, Homo sapien
tgggtgccacttttgggcagactcg

SEQ ID NO: 2189616 - DNA, 25 bp, Homo sapien
ggcagactcgatttaacaacccaaa

SEQ ID NO: 2189617 - DNA, 25 bp, Homo sapien
gaggcagcattttgcgaaatggagt

SEQ ID NO: 2189618 - DNA, 25 bp, Homo sapien
ggaaaaacttcaattggcttctggc

SEQ ID NO: 2189619 - DNA, 25 bp, Homo sapien
aaaaacttcaattggcttctggcag

SEQ ID NO: 2189620 - DNA, 25 bp, Homo sapien
gaaaaacttcaattggcttctggca

SEQ ID NO: 2189621 - DNA, 25 bp, Homo sapien
ggtcccacaggatgagttagagagt

SEQ ID NO: 2189622 - DNA, 25 bp, Homo sapien
cttccatcaatgtgtggtagaattc

SEQ ID NO: 2189623 - DNA, 25 bp, Homo sapien
tctttagcctaatgatgtgaatgaa

SEQ ID NO: 2189624 - DNA, 25 bp, Homo sapien
tgtacctgagataagtcccacttgg

SEQ ID NO: 2189625 - DNA, 25 bp, Homo sapien
caccagctgctaagattgctaagag

SEQ ID NO: 2189626 - DNA, 25 bp, Homo sapien
ggctgcaaagagctgagtgccagct

SEQ ID NO: 2189627 - DNA, 25 bp, Homo sapien
aagctggctgccgagattcacactg

SEQ ID NO: 2189628 - DNA, 25 bp, Homo sapien
gctgctgagggccacatacactggc

SEQ ID NO: 2189629 - DNA, 25 bp, Homo sapien
tagtgtagtatagccaagttgtcaa

SEQ ID NO: 2189630 - DNA, 25 bp, Homo sapien
tatagccaagttgtcaagggaacgg

SEQ ID NO: 2189631 - DNA, 25 bp, Homo sapien
cacagtatctgcaacattcgaatag

SEQ ID NO: 2189632 - DNA, 25 bp, Homo sapien
cattcgaatagtgtagtatagccaa

SEQ ID NO: 2189633 - DNA, 25 bp, Homo sapien
accataaccatcaccttgctttgct

SEQ ID NO: 2189634 - DNA, 25 bp, Homo sapien
tttgatctgtaatagattcatgcac

SEQ ID NO: 2189635 - DNA, 25 bp, Homo sapien
accatcaccttgctttgctatataa

SEQ ID NO: 2189636 - DNA, 25 bp, Homo sapien
ggttttgatctgtaatagattcatg

SEQ ID NO: 2189637 - DNA, 25 bp, Homo sapien
ctgttgatcaatggcaagtacatca

SEQ ID NO: 2189638 - DNA, 25 bp, Homo sapien
tcaactgttgatcaatggcaagtac

SEQ ID NO: 2189639 - DNA, 25 bp, Homo sapien
caactgttgatcaatggcaagtaca

SEQ ID NO: 2189640 - DNA, 25 bp, Homo sapien
tctaattgtgaacaattatttgcat

SEQ ID NO: 2189641 - DNA, 25 bp, Homo sapien
tgacaataatgaggcatccgcaggc

SEQ ID NO: 2189642 - DNA, 25 bp, Homo sapien
tagccatagttagggatatttccca

SEQ ID NO: 2189643 - DNA, 25 bp, Homo sapien
gagcccaagggctatttgatgcaca

SEQ ID NO: 2189644 - DNA, 25 bp, Homo sapien
tatctttgggttgccagcagctccg

SEQ ID NO: 2189645 - DNA, 25 bp, Homo sapien
gttcacattacccatttcatacacg

SEQ ID NO: 2189646 - DNA, 25 bp, Homo sapien
cgtcttgacggttcataatatcctc

SEQ ID NO: 2189647 - DNA, 25 bp, Homo sapien
cttcctgttcacattacccatttca

SEQ ID NO: 2189648 - DNA, 25 bp, Homo sapien
cctccctcgtcttgacggttcataa

SEQ ID NO: 2189649 - DNA, 25 bp, Homo sapien
cagaggaaattgtgatgttaaccat

SEQ ID NO: 2189650 - DNA, 25 bp, Homo sapien
aggaaggtggtaagatacagaggaa

SEQ ID NO: 2189651 - DNA, 25 bp, Homo sapien
cttttcaggaaggtggtaagataca

SEQ ID NO: 2189652 - DNA, 25 bp, Homo sapien
ttcaggaaggtggtaagatacagag

SEQ ID NO: 2189653 - DNA, 25 bp, Homo sapien
tgtcttttcacggtctccctggcaa

SEQ ID NO: 2189654 - DNA, 25 bp, Homo sapien
ttttcacggtctccctggcaatctc

SEQ ID NO: 2189655 - DNA, 25 bp, Homo sapien
tcacggtgtcttttcacggtctccc

SEQ ID NO: 2189656 - DNA, 25 bp, Homo sapien
cacggtgtcttttcacggtctccct

SEQ ID NO: 2189657 - DNA, 25 bp, Homo sapien
catttcagaaatccactagcaggta

SEQ ID NO: 2189658 - DNA, 25 bp, Homo sapien
taatgctatgagatactgtggataa

SEQ ID NO: 2189659 - DNA, 25 bp, Homo sapien
tttagcagggatcaaactgttcagc

SEQ ID NO: 2189660 - DNA, 25 bp, Homo sapien
tgtccaatattaggcatagtatgtc

SEQ ID NO: 2189661 - DNA, 25 bp, Homo sapien
ttcttggatgatgaaggttgtacca

SEQ ID NO: 2189662 - DNA, 25 bp, Homo sapien
gatgatgaaggttgtaccaaagcct

SEQ ID NO: 2189663 - DNA, 25 bp, Homo sapien
gcctttttcactacatgagatatac

SEQ ID NO: 2189664 - DNA, 25 bp, Homo sapien
tacatgagatataccaaggaatcct

SEQ ID NO: 2189665 - DNA, 25 bp, Homo sapien
cactggcctttaaccgggctgtgtc

SEQ ID NO: 2189666 - DNA, 25 bp, Homo sapien
actggcctttaaccgggctgtgtct

SEQ ID NO: 2189667 - DNA, 25 bp, Homo sapien
ctggaggttcctgctgtccgccttc

SEQ ID NO: 2189668 - DNA, 25 bp, Homo sapien
tctagctcttctcccccccagctca

SEQ ID NO: 2189669 - DNA, 25 bp, Homo sapien
ctagctcttctcccccccagctcat

SEQ ID NO: 2189670 - DNA, 25 bp, Homo sapien
ggaggttcctgctgtccgccttctg

SEQ ID NO: 2189671 - DNA, 25 bp, Homo sapien
gctccaagtttaattgctgctttct

SEQ ID NO: 2189672 - DNA, 25 bp, Homo sapien
tcagactgttggaatgaccgcaatg

SEQ ID NO: 2189673 - DNA, 25 bp, Homo sapien
ctgttggaatgaccgcaatgccctt

SEQ ID NO: 2189674 - DNA, 25 bp, Homo sapien
gactgttggaatgaccgcaatgccc

SEQ ID NO: 2189675 - DNA, 25 bp, Homo sapien
gcgagcgttgccccattccctgtta

SEQ ID NO: 2189676 - DNA, 25 bp, Homo sapien
ttccctgttaacacaggacatggcc

SEQ ID NO: 2189677 - DNA, 25 bp, Homo sapien
ttaacacaggacatggcccaaagcc

SEQ ID NO: 2189678 - DNA, 25 bp, Homo sapien
caaagccgctgacctctgtagagtg

SEQ ID NO: 2189679 - DNA, 25 bp, Homo sapien
tggagtgatggccagtcttattaaa

SEQ ID NO: 2189680 - DNA, 25 bp, Homo sapien
gccagtcttattaaatgcacctatt

SEQ ID NO: 2189681 - DNA, 25 bp, Homo sapien
tctggagtgatggccagtcttatta

SEQ ID NO: 2189682 - DNA, 25 bp, Homo sapien
cagtcttattaaatgcacctattac

SEQ ID NO: 2189683 - DNA, 25 bp, Homo sapien
gcagagcgagcaccagcatgaaatg

SEQ ID NO: 2189684 - DNA, 25 bp, Homo sapien
aacagcatgatgtttggtctccagg

SEQ ID NO: 2189685 - DNA, 25 bp, Homo sapien
tgtgcttgatgagcaaggaggacaa

SEQ ID NO: 2189686 - DNA, 25 bp, Homo sapien
gatgtttggtctccagggtaattac

SEQ ID NO: 2189687 - DNA, 25 bp, Homo sapien
agggccttgtgcagcttgagcacac

SEQ ID NO: 2189688 - DNA, 25 bp, Homo sapien
cagtccatgagctgttacagtgaag

SEQ ID NO: 2189689 - DNA, 25 bp, Homo sapien
tagctatgagaaaggctctcagtcc

SEQ ID NO: 2189690 - DNA, 25 bp, Homo sapien
tatctgggtgtttgtcttttgtcca

SEQ ID NO: 2189691 - DNA, 25 bp, Homo sapien
tgaattcaatatctaggcctgctag

SEQ ID NO: 2189692 - DNA, 25 bp, Homo sapien
gaaaataattcgtgatggcagcagc

SEQ ID NO: 2189693 - DNA, 25 bp, Homo sapien
cagcagctctggtagggtgttggct

SEQ ID NO: 2189694 - DNA, 25 bp, Homo sapien
cctgctagagcaaggcacaaagcat

SEQ ID NO: 2189695 - DNA, 25 bp, Homo sapien
ttcctttgggtacaaacacaggaga

SEQ ID NO: 2189696 - DNA, 25 bp, Homo sapien
gctgtcaaaaatggtaggacctcca

SEQ ID NO: 2189697 - DNA, 25 bp, Homo sapien
tttataggatggtgatttcgtttcc

SEQ ID NO: 2189698 - DNA, 25 bp, Homo sapien
taaatagtattctatgccacaaatc

SEQ ID NO: 2189699 - DNA, 25 bp, Homo sapien
cgttcgtgggctcaaagaatcggca

SEQ ID NO: 2189700 - DNA, 25 bp, Homo sapien
ctactgctagttgtatagaacggaa

SEQ ID NO: 2189701 - DNA, 25 bp, Homo sapien
gaatatcacagagtaacgttcgtgg

SEQ ID NO: 2189702 - DNA, 25 bp, Homo sapien
tttgcttctgtgtgcctactgctag

SEQ ID NO: 2189703 - DNA, 25 bp, Homo sapien
taactgcctattgcatcccatcggg

SEQ ID NO: 2189704 - DNA, 25 bp, Homo sapien
gatttggccaattgtatcatcctgg

SEQ ID NO: 2189705 - DNA, 25 bp, Homo sapien
cacccttagataatttttgcctgga

SEQ ID NO: 2189706 - DNA, 25 bp, Homo sapien
ggtacatgaagactggctcctctac

SEQ ID NO: 2189707 - DNA, 25 bp, Homo sapien
caattctattaccatggacttggct

SEQ ID NO: 2189708 - DNA, 25 bp, Homo sapien
cctgctatctgggacagtcgacaaa

SEQ ID NO: 2189709 - DNA, 25 bp, Homo sapien
caggcgcacgagatttccggaatat

SEQ ID NO: 2189710 - DNA, 25 bp, Homo sapien
gggagttgcataccaattctattac

SEQ ID NO: 2189711 - DNA, 25 bp, Homo sapien
gtattcaagatgctaaataggctca

SEQ ID NO: 2189712 - DNA, 25 bp, Homo sapien
tcaaggtagtatgacaaaaccacgg

SEQ ID NO: 2189713 - DNA, 25 bp, Homo sapien
taagcctttactccatgacatagag

SEQ ID NO: 2189714 - DNA, 25 bp, Homo sapien
gaaatcccacctccgtaataaagca

SEQ ID NO: 2189715 - DNA, 25 bp, Homo sapien
aatcaggcacagctttggttttaga

SEQ ID NO: 2189716 - DNA, 25 bp, Homo sapien
tcaggcacagctttggttttagaaa

SEQ ID NO: 2189717 - DNA, 25 bp, Homo sapien
caggcacagctttggttttagaaaa

SEQ ID NO: 2189718 - DNA, 25 bp, Homo sapien
ttaatcaggcacagctttggtttta

SEQ ID NO: 2189719 - DNA, 25 bp, Homo sapien
tctgaagccatgttcagtcagttct

SEQ ID NO: 2189720 - DNA, 25 bp, Homo sapien
atggatactgcctctgaagccatgt

SEQ ID NO: 2189721 - DNA, 25 bp, Homo sapien
tactgcctctgaagccatgttcagt

SEQ ID NO: 2189722 - DNA, 25 bp, Homo sapien
gaagccatgttcagtcagttctcca

SEQ ID NO: 2189723 - DNA, 25 bp, Homo sapien
ggctaagtgtgcttaacttcttgag

SEQ ID NO: 2189724 - DNA, 25 bp, Homo sapien
ggcacctctgggctaagtgtgctta

SEQ ID NO: 2189725 - DNA, 25 bp, Homo sapien
ggaagaatttccactcctgccgacc

SEQ ID NO: 2189726 - DNA, 25 bp, Homo sapien
aatggtctctctccgggcactgctg

SEQ ID NO: 2189727 - DNA, 25 bp, Homo sapien
ctatgaattgtggatattcccttgc

SEQ ID NO: 2189728 - DNA, 25 bp, Homo sapien
atctgataccggtactacttctggg

SEQ ID NO: 2189729 - DNA, 25 bp, Homo sapien
tgtagaacattcactgagatagccc

SEQ ID NO: 2189730 - DNA, 25 bp, Homo sapien
gaaagtagctctattggctcctcta

SEQ ID NO: 2189731 - DNA, 25 bp, Homo sapien
gctagccttataagggatacttcaa

SEQ ID NO: 2189732 - DNA, 25 bp, Homo sapien
gccttataagggatacttcaaaatc

SEQ ID NO: 2189733 - DNA, 25 bp, Homo sapien
caccaagctgggctagccttataag

SEQ ID NO: 2189734 - DNA, 25 bp, Homo sapien
gctgggctagccttataagggatac

SEQ ID NO: 2189735 - DNA, 25 bp, Homo sapien
tgtgaaaactcgaaaggctgtggca

SEQ ID NO: 2189736 - DNA, 25 bp, Homo sapien
atttgattgtgaaaactcgaaaggc

SEQ ID NO: 2189737 - DNA, 25 bp, Homo sapien
ttgattgtgaaaactcgaaaggctg

SEQ ID NO: 2189738 - DNA, 25 bp, Homo sapien
gattgtgaaaactcgaaaggctgtg

SEQ ID NO: 2189739 - DNA, 25 bp, Homo sapien
gaaacgctagatgcttctaaaacca

SEQ ID NO: 2189740 - DNA, 25 bp, Homo sapien
gagatacatgattgcccagaaacag

SEQ ID NO: 2189741 - DNA, 25 bp, Homo sapien
gcaaacgtatccttctttagatgat

SEQ ID NO: 2189742 - DNA, 25 bp, Homo sapien
tcaggaactgcacctaaagtttgtg

SEQ ID NO: 2189743 - DNA, 25 bp, Homo sapien
ccatctcgcttaccttccatcctct

SEQ ID NO: 2189744 - DNA, 25 bp, Homo sapien
ttgtctcttctgctcggccatctcg

SEQ ID NO: 2189745 - DNA, 25 bp, Homo sapien
tcggccatctcgcttaccttccatc

SEQ ID NO: 2189746 - DNA, 25 bp, Homo sapien
tctgctcggccatctcgcttacctt

SEQ ID NO: 2189747 - DNA, 25 bp, Homo sapien
acaaacatcagttcacgatattcct

SEQ ID NO: 2189748 - DNA, 25 bp, Homo sapien
tcagttcacgatattccttgacttg

SEQ ID NO: 2189749 - DNA, 25 bp, Homo sapien
gacttgtgtgaagacgagcaaaaca

SEQ ID NO: 2189750 - DNA, 25 bp, Homo sapien
cttgtgtgaagacgagcaaaacaga

SEQ ID NO: 2189751 - DNA, 25 bp, Homo sapien
aactcatttgcactaaacaagaaca

SEQ ID NO: 2189752 - DNA, 25 bp, Homo sapien
tttggtcgttttcaatactccttga

SEQ ID NO: 2189753 - DNA, 25 bp, Homo sapien
catttgcactaaacaagaacaaatc

SEQ ID NO: 2189754 - DNA, 25 bp, Homo sapien
ttgcactaaacaagaacaaatcatt

SEQ ID NO: 2189755 - DNA, 25 bp, Homo sapien
tcaaagtggcttacacaataagagc

SEQ ID NO: 2189756 - DNA, 25 bp, Homo sapien
gtggcttacacaataagagctttta

SEQ ID NO: 2189757 - DNA, 25 bp, Homo sapien
agatgactagcatcatcaaattttt

SEQ ID NO: 2189758 - DNA, 25 bp, Homo sapien
aattctcatttctccgcatgtattg

SEQ ID NO: 2189759 - DNA, 25 bp, Homo sapien
ttgcattggactccctgtttcctgg

SEQ ID NO: 2189760 - DNA, 25 bp, Homo sapien
gactccctgtttcctggtggaggtc

SEQ ID NO: 2189761 - DNA, 25 bp, Homo sapien
ctaaaataactctcccgactccatt

SEQ ID NO: 2189762 - DNA, 25 bp, Homo sapien
ttctctctcactaaaataactctcc

SEQ ID NO: 2189763 - DNA, 25 bp, Homo sapien
attccatcagctttcacatcctgcc

SEQ ID NO: 2189764 - DNA, 25 bp, Homo sapien
cagcagcagggttgaaaaaaggcca

SEQ ID NO: 2189765 - DNA, 25 bp, Homo sapien
tgcccttcccctggtacccagcagc

SEQ ID NO: 2189766 - DNA, 25 bp, Homo sapien
cttgctttgtgtgccttcattccat

SEQ ID NO: 2189767 - DNA, 25 bp, Homo sapien
tttttcaggcctcagcaagaggtta

SEQ ID NO: 2189768 - DNA, 25 bp, Homo sapien
cacctggtaacgttaaagacacttg

SEQ ID NO: 2189769 - DNA, 25 bp, Homo sapien
acttactatggctggccactagccc

SEQ ID NO: 2189770 - DNA, 25 bp, Homo sapien
gactcataagtacaactgcattgga

SEQ ID NO: 2189771 - DNA, 25 bp, Homo sapien
caagaggactggtgataggtaatta

SEQ ID NO: 2189772 - DNA, 25 bp, Homo sapien
gactagcatcaaaatcaggcccttt

SEQ ID NO: 2189773 - DNA, 25 bp, Homo sapien
ctggtgataggtaattactcttgtc

SEQ ID NO: 2189774 - DNA, 25 bp, Homo sapien
cttgtcaggtgctttcgactagcat

SEQ ID NO: 2189775 - DNA, 25 bp, Homo sapien
ggtcattcttacaggtccattcttc

SEQ ID NO: 2189776 - DNA, 25 bp, Homo sapien
tgtaccacctgtttcgtgaaagagg

SEQ ID NO: 2189777 - DNA, 25 bp, Homo sapien
tcgtgaaagagggtcattcttacag

SEQ ID NO: 2189778 - DNA, 25 bp, Homo sapien
ccacctgtttcgtgaaagagggtca

SEQ ID NO: 2189779 - DNA, 25 bp, Homo sapien
tagctcttttattatctccttggcc

SEQ ID NO: 2189780 - DNA, 25 bp, Homo sapien
atttttagctcttttattatctcct

SEQ ID NO: 2189781 - DNA, 25 bp, Homo sapien
atatttttagctcttttattatctc

SEQ ID NO: 2189782 - DNA, 25 bp, Homo sapien
ttttagctcttttattatctccttg

SEQ ID NO: 2189783 - DNA, 25 bp, Homo sapien
tctgcgtgcatgagcaagcgaatca

SEQ ID NO: 2189784 - DNA, 25 bp, Homo sapien
ggtggttccaactctctgcgtgcat

SEQ ID NO: 2189785 - DNA, 25 bp, Homo sapien
cgaatcagttccagcagccaaaggg

SEQ ID NO: 2189786 - DNA, 25 bp, Homo sapien
tggctatgtaaactcccaggtggtt

SEQ ID NO: 2189787 - DNA, 25 bp, Homo sapien
taataaataattgtcagaggtccac

SEQ ID NO: 2189788 - DNA, 25 bp, Homo sapien
catgcacgctgggataaaataacaa

SEQ ID NO: 2189789 - DNA, 25 bp, Homo sapien
tttttcccctagcagtacagccatc

SEQ ID NO: 2189790 - DNA, 25 bp, Homo sapien
gatgatagcctccacaaaacaagca

SEQ ID NO: 2189791 - DNA, 25 bp, Homo sapien
aacatatgctgtcactggagaactc

SEQ ID NO: 2189792 - DNA, 25 bp, Homo sapien
cacagacgtgtttgtcacggccacc

SEQ ID NO: 2189793 - DNA, 25 bp, Homo sapien
ggtaaattggtgatatccacagtcc

SEQ ID NO: 2189794 - DNA, 25 bp, Homo sapien
ggttactgaaacacactctctattg

SEQ ID NO: 2189795 - DNA, 25 bp, Homo sapien
ccttgttttgatgactgactgtctc

SEQ ID NO: 2189796 - DNA, 25 bp, Homo sapien
tgatgactgactgtctcccatgtca

SEQ ID NO: 2189797 - DNA, 25 bp, Homo sapien
tgcctcgtgactcctcttggaattc

SEQ ID NO: 2189798 - DNA, 25 bp, Homo sapien
tcctccttgttttgatgactgactg

SEQ ID NO: 2189799 - DNA, 25 bp, Homo sapien
cataggtgagtcttttcttcctgct

SEQ ID NO: 2189800 - DNA, 25 bp, Homo sapien
atagtgagcaggtattgttgttggc

SEQ ID NO: 2189801 - DNA, 25 bp, Homo sapien
gggatcataggtgagtcttttcttc

SEQ ID NO: 2189802 - DNA, 25 bp, Homo sapien
aatgcttatagtgagcaggtattgt

SEQ ID NO: 2189803 - DNA, 25 bp, Homo sapien
caacataggatttgtgccatgctgc

SEQ ID NO: 2189804 - DNA, 25 bp, Homo sapien
gactctgcgtgaggtgtgataccag

SEQ ID NO: 2189805 - DNA, 25 bp, Homo sapien
gacaaggtctctgacttcatagggc

SEQ ID NO: 2189806 - DNA, 25 bp, Homo sapien
gcttgtcagcaattaataccctaga

SEQ ID NO: 2189807 - DNA, 25 bp, Homo sapien
cacaatctcttgcaagcttcctgga

SEQ ID NO: 2189808 - DNA, 25 bp, Homo sapien
cgtctatctcccacaatctcttgca

SEQ ID NO: 2189809 - DNA, 25 bp, Homo sapien
cctggatcctgttctgattaatcat

SEQ ID NO: 2189810 - DNA, 25 bp, Homo sapien
tcttgcaagcttcctggatcctgtt

SEQ ID NO: 2189811 - DNA, 25 bp, Homo sapien
taaatgggtgttgaattatgtcaca

SEQ ID NO: 2189812 - DNA, 25 bp, Homo sapien
tctgcataaattgatgaaatcatgc

SEQ ID NO: 2189813 - DNA, 25 bp, Homo sapien
tctactttagcctgttaatgcagtg

SEQ ID NO: 2189814 - DNA, 25 bp, Homo sapien
aaagtggtgaaagtgcctgcacttg

SEQ ID NO: 2189815 - DNA, 25 bp, Homo sapien
tgcaataacctgtccccgaaagtct

SEQ ID NO: 2189816 - DNA, 25 bp, Homo sapien
caaagttccccagtggtctagtcat

SEQ ID NO: 2189817 - DNA, 25 bp, Homo sapien
tccatcattctacaaaaagggcatt

SEQ ID NO: 2189818 - DNA, 25 bp, Homo sapien
cattgcctttgagcttcaggtacaa

SEQ ID NO: 2189819 - DNA, 25 bp, Homo sapien
ctaaatgaatctgtaaggagttccc

SEQ ID NO: 2189820 - DNA, 25 bp, Homo sapien
tatctgcctggcatatcctcagcat

SEQ ID NO: 2189821 - DNA, 25 bp, Homo sapien
tgaagacagggcgataaacgcacta

SEQ ID NO: 2189822 - DNA, 25 bp, Homo sapien
gaaaacattccctgtaaagcagcca

SEQ ID NO: 2189823 - DNA, 25 bp, Homo sapien
tgaggctaaatgacattgccccgat

SEQ ID NO: 2189824 - DNA, 25 bp, Homo sapien
gattaccgtcgttttttcatatgtc

SEQ ID NO: 2189825 - DNA, 25 bp, Homo sapien
aaatgggtagtatatttgcttcacc

SEQ ID NO: 2189826 - DNA, 25 bp, Homo sapien
aaaatccgtttgtctatatctactc

SEQ ID NO: 2189827 - DNA, 25 bp, Homo sapien
tggttgtggtgtattattcccttta

SEQ ID NO: 2189828 - DNA, 25 bp, Homo sapien
ttcctgatcctatatcacattgagt

SEQ ID NO: 2189829 - DNA, 25 bp, Homo sapien
tctatgtcaattgatataactgtgc

SEQ ID NO: 2189830 - DNA, 25 bp, Homo sapien
gagacacagcccttttggttgtggt

SEQ ID NO: 2189831 - DNA, 25 bp, Homo sapien
tgtgacagccattatgcacgatgac

SEQ ID NO: 2189832 - DNA, 25 bp, Homo sapien
acagccattatgcacgatgacttca

SEQ ID NO: 2189833 - DNA, 25 bp, Homo sapien
tgacagccattatgcacgatgactt

SEQ ID NO: 2189834 - DNA, 25 bp, Homo sapien
gtgtgtgacagccattatgcacgat

SEQ ID NO: 2189835 - DNA, 25 bp, Homo sapien
tcctgctatgaagtgtgtttcctta

SEQ ID NO: 2189836 - DNA, 25 bp, Homo sapien
tctcgctccagattttgtatggaag

SEQ ID NO: 2189837 - DNA, 25 bp, Homo sapien
ttatgtataagctaataacttgtgc

SEQ ID NO: 2189838 - DNA, 25 bp, Homo sapien
tgtgcttagttctcaatttgcttac

SEQ ID NO: 2189839 - DNA, 25 bp, Homo sapien
gttactgtttcagccagccgccata

SEQ ID NO: 2189840 - DNA, 25 bp, Homo sapien
attggaaaccatggtaaccgatcag

SEQ ID NO: 2189841 - DNA, 25 bp, Homo sapien
agttactgtttcagccagccgccat

SEQ ID NO: 2189842 - DNA, 25 bp, Homo sapien
tggtaaccgatcagttactgtttca

SEQ ID NO: 2189843 - DNA, 25 bp, Homo sapien
caacaataatcttaatgtttatctc

SEQ ID NO: 2189844 - DNA, 25 bp, Homo sapien
tattctcaacaataatcttaatgtt

SEQ ID NO: 2189845 - DNA, 25 bp, Homo sapien
tttcttattctcaacaataatctta

SEQ ID NO: 2189846 - DNA, 25 bp, Homo sapien
aataatcttaatgtttatctccttc

SEQ ID NO: 2189847 - DNA, 25 bp, Homo sapien
cccctccagcaacatgttgtacatc

SEQ ID NO: 2189848 - DNA, 25 bp, Homo sapien
ttttgtatgtggctgcccctccagc

SEQ ID NO: 2189849 - DNA, 25 bp, Homo sapien
tttttgtatgtggctgcccctccag

SEQ ID NO: 2189850 - DNA, 25 bp, Homo sapien
ccagcaacatgttgtacatccccat

SEQ ID NO: 2189851 - DNA, 25 bp, Homo sapien
tcctttattgccagcacaatctgcc

SEQ ID NO: 2189852 - DNA, 25 bp, Homo sapien
gagcagagggaaactcaagggtatt

SEQ ID NO: 2189853 - DNA, 25 bp, Homo sapien
tctcagaagccaattattacaagga

SEQ ID NO: 2189854 - DNA, 25 bp, Homo sapien
gaataggctctctaagtgtggcaga

SEQ ID NO: 2189855 - DNA, 25 bp, Homo sapien
tagccaggcttcaatactcgaggca

SEQ ID NO: 2189856 - DNA, 25 bp, Homo sapien
gaatgctgagaccattaatcccttc

SEQ ID NO: 2189857 - DNA, 25 bp, Homo sapien
cagtagccaggcttcaatactcgag

SEQ ID NO: 2189858 - DNA, 25 bp, Homo sapien
atgctgagaccattaatcccttccc

SEQ ID NO: 2189859 - DNA, 25 bp, Homo sapien
caggaggtggccatttatcgccaaa

SEQ ID NO: 2189860 - DNA, 25 bp, Homo sapien
cagttcaggcttatgggttgccaga

SEQ ID NO: 2189861 - DNA, 25 bp, Homo sapien
gataaacctaacatgcgatgcgtgt

SEQ ID NO: 2189862 - DNA, 25 bp, Homo sapien
ggtagtcttaataccagcccagtgg

SEQ ID NO: 2189863 - DNA, 25 bp, Homo sapien
tattaatgtagtcacagctgtaagg

SEQ ID NO: 2189864 - DNA, 25 bp, Homo sapien
tgtcggttgactggcatgtgccttc

SEQ ID NO: 2189865 - DNA, 25 bp, Homo sapien
gtaactttgacaagtgagttcaatg

SEQ ID NO: 2189866 - DNA, 25 bp, Homo sapien
tagtcacagctgtaaggcttgaggt

SEQ ID NO: 2189867 - DNA, 25 bp, Homo sapien
cggcaaatctataaggtatggcagc

SEQ ID NO: 2189868 - DNA, 25 bp, Homo sapien
tatttctgccacgatatagactctc

SEQ ID NO: 2189869 - DNA, 25 bp, Homo sapien
agaacgccagtttgcagatgccttg

SEQ ID NO: 2189870 - DNA, 25 bp, Homo sapien
aacagtctttgtaatagaacgccag

SEQ ID NO: 2189871 - DNA, 25 bp, Homo sapien
tctggaccacatgttagaggatctt

SEQ ID NO: 2189872 - DNA, 25 bp, Homo sapien
ttccatataacatcagtagcccagg

SEQ ID NO: 2189873 - DNA, 25 bp, Homo sapien
tgctggcaactataacctcatctgg

SEQ ID NO: 2189874 - DNA, 25 bp, Homo sapien
tctgtgtagcctttcaatgctggca

SEQ ID NO: 2189875 - DNA, 25 bp, Homo sapien
cacagacaagtccagattcacagta

SEQ ID NO: 2189876 - DNA, 25 bp, Homo sapien
gtagaagtaggagtgaccattcaac

SEQ ID NO: 2189877 - DNA, 25 bp, Homo sapien
tctaaaactgccctaaagaaacaga

SEQ ID NO: 2189878 - DNA, 25 bp, Homo sapien
gtcctgctggctatggtataagaag

SEQ ID NO: 2189879 - DNA, 25 bp, Homo sapien
tccttggtgcttctccattacagaa

SEQ ID NO: 2189880 - DNA, 25 bp, Homo sapien
gtagaagaaacatctccttggtgct

SEQ ID NO: 2189881 - DNA, 25 bp, Homo sapien
caagctatatctggaagaggtagaa

SEQ ID NO: 2189882 - DNA, 25 bp, Homo sapien
cattacagaaaagggcaggtcatac

SEQ ID NO: 2189883 - DNA, 25 bp, Homo sapien
gctgtcttagcactagttttctgta

SEQ ID NO: 2189884 - DNA, 25 bp, Homo sapien
tcaaccttgtacaaccagtgctaaa

SEQ ID NO: 2189885 - DNA, 25 bp, Homo sapien
ccttctcagaataactgcttcttcc

SEQ ID NO: 2189886 - DNA, 25 bp, Homo sapien
ttctgtaaggtttgggaattggtca

SEQ ID NO: 2189887 - DNA, 25 bp, Homo sapien
gttatcacatattcgctcttcagtg

SEQ ID NO: 2189888 - DNA, 25 bp, Homo sapien
atcacatattcgctcttcagtggct

SEQ ID NO: 2189889 - DNA, 25 bp, Homo sapien
ttatcacatattcgctcttcagtgg

SEQ ID NO: 2189890 - DNA, 25 bp, Homo sapien
tgttatcacatattcgctcttcagt

SEQ ID NO: 2189891 - DNA, 25 bp, Homo sapien
gaccataatcagtcatgccatgatc

SEQ ID NO: 2189892 - DNA, 25 bp, Homo sapien
gaactcgtagtctcagtaactatat

SEQ ID NO: 2189893 - DNA, 25 bp, Homo sapien
ccatgatcatctagtataataaacg

SEQ ID NO: 2189894 - DNA, 25 bp, Homo sapien
gtataataaacgactcaaatcctga

SEQ ID NO: 2189895 - DNA, 25 bp, Homo sapien
taggtgatccctgatgaatctgtgc

SEQ ID NO: 2189896 - DNA, 25 bp, Homo sapien
ggtgccctatcaattgcagctgaag

SEQ ID NO: 2189897 - DNA, 25 bp, Homo sapien
cactaacactgcagcaagtaacgga

SEQ ID NO: 2189898 - DNA, 25 bp, Homo sapien
taggtaattacaaggacacagcaaa

SEQ ID NO: 2189899 - DNA, 25 bp, Homo sapien
ttgggctccaggcttcacgttcaca

SEQ ID NO: 2189900 - DNA, 25 bp, Homo sapien
cacacgtgtaatgcataacttcaac

SEQ ID NO: 2189901 - DNA, 25 bp, Homo sapien
tcagctcatcttgactgggtttcgc

SEQ ID NO: 2189902 - DNA, 25 bp, Homo sapien
tttcgctgtgacaggttgggctcca

SEQ ID NO: 2189903 - DNA, 25 bp, Homo sapien
cttcaagccaaaaagagcggtggtc

SEQ ID NO: 2189904 - DNA, 25 bp, Homo sapien
tatgcaaccacagtacaaatgcctt

SEQ ID NO: 2189905 - DNA, 25 bp, Homo sapien
ggtggtctcccaaatactggccaaa

SEQ ID NO: 2189906 - DNA, 25 bp, Homo sapien
actgtaagtacgcttgtatccctca

SEQ ID NO: 2189907 - DNA, 25 bp, Homo sapien
cttaaggcctacgttcagaattgca

SEQ ID NO: 2189908 - DNA, 25 bp, Homo sapien
tcttgtgagcctacagatcagctag

SEQ ID NO: 2189909 - DNA, 25 bp, Homo sapien
cattgctccaagaaaatcacgtgac

SEQ ID NO: 2189910 - DNA, 25 bp, Homo sapien
tcagctagggtgactctgatccaca

SEQ ID NO: 2189911 - DNA, 25 bp, Homo sapien
catgatggctggacgtgacaaagaa

SEQ ID NO: 2189912 - DNA, 25 bp, Homo sapien
gaatcctcatgtgcatcgatgtggc

SEQ ID NO: 2189913 - DNA, 25 bp, Homo sapien
tagatggtacctagacctgaacaag

SEQ ID NO: 2189914 - DNA, 25 bp, Homo sapien
tagggaaccgtagggcaagaagatc

SEQ ID NO: 2189915 - DNA, 25 bp, Homo sapien
catccaagccaggtgtaatagtggt

SEQ ID NO: 2189916 - DNA, 25 bp, Homo sapien
ccaggtgtaatagtggtaccagagg

SEQ ID NO: 2189917 - DNA, 25 bp, Homo sapien
cttcatccaagccaggtgtaatagt

SEQ ID NO: 2189918 - DNA, 25 bp, Homo sapien
aagccaggtgtaatagtggtaccag

SEQ ID NO: 2189919 - DNA, 25 bp, Homo sapien
taattaagcatagctgtaggtctca

SEQ ID NO: 2189920 - DNA, 25 bp, Homo sapien
catagctgtaggtctcaaagacctc

SEQ ID NO: 2189921 - DNA, 25 bp, Homo sapien
taaggcattataattaagcatagct

SEQ ID NO: 2189922 - DNA, 25 bp, Homo sapien
aacattaggcaaatataaggcatta

SEQ ID NO: 2189923 - DNA, 25 bp, Homo sapien
ttgaactggatggaggaataccctg

SEQ ID NO: 2189924 - DNA, 25 bp, Homo sapien
gagacaatttgaactggatggagga

SEQ ID NO: 2189925 - DNA, 25 bp, Homo sapien
gaagtctgtggtactgagacaattt

SEQ ID NO: 2189926 - DNA, 25 bp, Homo sapien
tggtactgagacaatttgaactgga

SEQ ID NO: 2189927 - DNA, 25 bp, Homo sapien
tcaaagatcaatttgcatacatgga

SEQ ID NO: 2189928 - DNA, 25 bp, Homo sapien
agcctcaaagatcaatttgcataca

SEQ ID NO: 2189929 - DNA, 25 bp, Homo sapien
gagaatcttacagcttgctggttca

SEQ ID NO: 2189930 - DNA, 25 bp, Homo sapien
tacatggatcaaagagaatcttaca

SEQ ID NO: 2189931 - DNA, 25 bp, Homo sapien
catctaatggatcgtagcctctacc

SEQ ID NO: 2189932 - DNA, 25 bp, Homo sapien
gcctctaccttgtggactctccaga

SEQ ID NO: 2189933 - DNA, 25 bp, Homo sapien
tgtggatttcatctaatggatcgta

SEQ ID NO: 2189934 - DNA, 25 bp, Homo sapien
gaatctctacactgtggatttcatc

SEQ ID NO: 2189935 - DNA, 25 bp, Homo sapien
gatttccacgttcgagcgtcttcgc

SEQ ID NO: 2189936 - DNA, 25 bp, Homo sapien
ccacctgagcctggcgagagccggg

SEQ ID NO: 2189937 - DNA, 25 bp, Homo sapien
ttggaaggaggcgtgatttccacgt

SEQ ID NO: 2189938 - DNA, 25 bp, Homo sapien
agccgggacgcacgcagtcttcagc

SEQ ID NO: 2189939 - DNA, 25 bp, Homo sapien
agcaaggagcagaacgagagaagac

SEQ ID NO: 2189940 - DNA, 25 bp, Homo sapien
cgcttgttttggtcgcagtgggctt

SEQ ID NO: 2189941 - DNA, 25 bp, Homo sapien
ggagcagaacgagagaagacattct

SEQ ID NO: 2189942 - DNA, 25 bp, Homo sapien
cacagtgctgtggtcggtgcgcttg

SEQ ID NO: 2189943 - DNA, 25 bp, Homo sapien
cgggcttcttctgacagtgtgtaag

SEQ ID NO: 2189944 - DNA, 25 bp, Homo sapien
agtcagcagcagtcgcccacttagg

SEQ ID NO: 2189945 - DNA, 25 bp, Homo sapien
acttaggtcgggcttcttctgacag

SEQ ID NO: 2189946 - DNA, 25 bp, Homo sapien
acagtgtgtaagaccccactgtgag

SEQ ID NO: 2189947 - DNA, 25 bp, Homo sapien
cttgatagcacatcacagcaagcag

SEQ ID NO: 2189948 - DNA, 25 bp, Homo sapien
gaaggccacagaactaccgaggaat

SEQ ID NO: 2189949 - DNA, 25 bp, Homo sapien
gtgtctccgccacatacccggaagg

SEQ ID NO: 2189950 - DNA, 25 bp, Homo sapien
cagactgatttaatgaccagcaggg

SEQ ID NO: 2189951 - DNA, 25 bp, Homo sapien
tgtcgttgctaccatcacatatggg

SEQ ID NO: 2189952 - DNA, 25 bp, Homo sapien
caaagctttcgttcttccaaagcct

SEQ ID NO: 2189953 - DNA, 25 bp, Homo sapien
cacatatgggattgccaaagctttc

SEQ ID NO: 2189954 - DNA, 25 bp, Homo sapien
agccttcccatacagggtcatctgc

SEQ ID NO: 2189955 - DNA, 25 bp, Homo sapien
gacatccaactcactgccatcgtgg

SEQ ID NO: 2189956 - DNA, 25 bp, Homo sapien
catccaacaatggtgagtaccaaga

SEQ ID NO: 2189957 - DNA, 25 bp, Homo sapien
catcccagcagtacagaacatccaa

SEQ ID NO: 2189958 - DNA, 25 bp, Homo sapien
ccgatgcatggagaatttgtctcca

SEQ ID NO: 2189959 - DNA, 25 bp, Homo sapien
ccagctgtttgcgcatgcttgtcat

SEQ ID NO: 2189960 - DNA, 25 bp, Homo sapien
tgtttgcgcatgcttgtcattggtg

SEQ ID NO: 2189961 - DNA, 25 bp, Homo sapien
tttgcgcatgcttgtcattggtgat

SEQ ID NO: 2189962 - DNA, 25 bp, Homo sapien
gctgtttgcgcatgcttgtcattgg

SEQ ID NO: 2189963 - DNA, 25 bp, Homo sapien
ttaaggtaggtagtggaagcgacac

SEQ ID NO: 2189964 - DNA, 25 bp, Homo sapien
cagtgtgtcagaaaagcatacctca

SEQ ID NO: 2189965 - DNA, 25 bp, Homo sapien
taaatattagctagaccaacaccct

SEQ ID NO: 2189966 - DNA, 25 bp, Homo sapien
tcatctatcagatcggattgccctg

SEQ ID NO: 2189967 - DNA, 25 bp, Homo sapien
ggccaaataattcagatgtaaccac

SEQ ID NO: 2189968 - DNA, 25 bp, Homo sapien
gggcccgcaactaggctattattca

SEQ ID NO: 2189969 - DNA, 25 bp, Homo sapien
gcaaacctgtgctttctatttcacg

SEQ ID NO: 2189970 - DNA, 25 bp, Homo sapien
tgtaaccacaccaagtgcaaacctg

SEQ ID NO: 2189971 - DNA, 25 bp, Homo sapien
tctctctctaaaagtgttctccctc

SEQ ID NO: 2189972 - DNA, 25 bp, Homo sapien
tgggcatttcctttccattactaaa

SEQ ID NO: 2189973 - DNA, 25 bp, Homo sapien
tatagttgtgagatttgtatcccag

SEQ ID NO: 2189974 - DNA, 25 bp, Homo sapien
cacagtaggactttactttcaatcc

SEQ ID NO: 2189975 - DNA, 25 bp, Homo sapien
cattctaaggtatgaacaggattaa

SEQ ID NO: 2189976 - DNA, 25 bp, Homo sapien
agaagagctctaattctagtttatc

SEQ ID NO: 2189977 - DNA, 25 bp, Homo sapien
ctggagaaaaactggggtatagtgt

SEQ ID NO: 2189978 - DNA, 25 bp, Homo sapien
aaaactggggtatagtgtcagcacc

SEQ ID NO: 2189979 - DNA, 25 bp, Homo sapien
ctgagaacaatcacttccatttgtg

SEQ ID NO: 2189980 - DNA, 25 bp, Homo sapien
gaacaatcacttccatttgtggcca

SEQ ID NO: 2189981 - DNA, 25 bp, Homo sapien
gagaacaatcacttccatttgtggc

SEQ ID NO: 2189982 - DNA, 25 bp, Homo sapien
aacaatcacttccatttgtggccat

SEQ ID NO: 2189983 - DNA, 25 bp, Homo sapien
aaagcatattggctttttggcttat

SEQ ID NO: 2189984 - DNA, 25 bp, Homo sapien
tatggcaatactagaatatatgact

SEQ ID NO: 2189985 - DNA, 25 bp, Homo sapien
cttccgagactagttcataaaaagc

SEQ ID NO: 2189986 - DNA, 25 bp, Homo sapien
ctcaagcagctaagtggaagtctcc

SEQ ID NO: 2189987 - DNA, 25 bp, Homo sapien
gctctcaggtttctagcccacagaa

SEQ ID NO: 2189988 - DNA, 25 bp, Homo sapien
tatagcagtagataacgagcacaac

SEQ ID NO: 2189989 - DNA, 25 bp, Homo sapien
aaatgtgcattgttttaggctacta

SEQ ID NO: 2189990 - DNA, 25 bp, Homo sapien
gaagtataacaggaaatctaacagg

SEQ ID NO: 2189991 - DNA, 25 bp, Homo sapien
ggtaaggctttcgaagtggaatgac

SEQ ID NO: 2189992 - DNA, 25 bp, Homo sapien
gcaataaggtaaggctttcgaagtg

SEQ ID NO: 2189993 - DNA, 25 bp, Homo sapien
tttagcaataaggtaaggctttcga

SEQ ID NO: 2189994 - DNA, 25 bp, Homo sapien
tatccaggtttagcaataaggtaag

SEQ ID NO: 2189995 - DNA, 25 bp, Homo sapien
tttgagagctctgcccgccaatact

SEQ ID NO: 2189996 - DNA, 25 bp, Homo sapien
ttcgctatcattccagctgccttta

SEQ ID NO: 2189997 - DNA, 25 bp, Homo sapien
caatacttcaggtaatattcgctat

SEQ ID NO: 2189998 - DNA, 25 bp, Homo sapien
gctgcctttattgaagttgacgtgg

SEQ ID NO: 2189999 - DNA, 25 bp, Homo sapien
tataaatatagcctgtcctttaaaa

SEQ ID NO: 2190000 - DNA, 25 bp, Homo sapien
ataaatatagcctgtcctttaaaat

SEQ ID NO: 2190001 - DNA, 25 bp, Homo sapien
tattatttctatgtcaatgcctata

SEQ ID NO: 2190002 - DNA, 25 bp, Homo sapien
ggtattatttctatgtcaatgccta

SEQ ID NO: 2190003 - DNA, 25 bp, Homo sapien
tgaaatatgggcgtctcagaaggag

SEQ ID NO: 2190004 - DNA, 25 bp, Homo sapien
gatcaagccgaaaaaagaagtcagt

SEQ ID NO: 2190005 - DNA, 25 bp, Homo sapien
tcatcaagtacaagagagctcccat

SEQ ID NO: 2190006 - DNA, 25 bp, Homo sapien
gctcaaagagttccacctaggatga

SEQ ID NO: 2190007 - DNA, 25 bp, Homo sapien
ctaacaagatgcgagggtggtacat

SEQ ID NO: 2190008 - DNA, 25 bp, Homo sapien
tcatgctcgggaactataaagggat

SEQ ID NO: 2190009 - DNA, 25 bp, Homo sapien
cccaatcgtcatgctcgggaactat

SEQ ID NO: 2190010 - DNA, 25 bp, Homo sapien
aatgtgccaacgtctaacaagatgc

SEQ ID NO: 2190011 - DNA, 25 bp, Homo sapien
tgttgatgcatgtttcttccatccc

SEQ ID NO: 2190012 - DNA, 25 bp, Homo sapien
cgttgaggtattccagatcttagag

SEQ ID NO: 2190013 - DNA, 25 bp, Homo sapien
ggtgacagtgcacatcgttgaggta

SEQ ID NO: 2190014 - DNA, 25 bp, Homo sapien
caggttttcgccattcaggatgata

SEQ ID NO: 2190015 - DNA, 25 bp, Homo sapien
cagtcaaggaatccaaacatgaaac

SEQ ID NO: 2190016 - DNA, 25 bp, Homo sapien
gatgcagtcaaggaatccaaacatg

SEQ ID NO: 2190017 - DNA, 25 bp, Homo sapien
tgcagtcaaggaatccaaacatgaa

SEQ ID NO: 2190018 - DNA, 25 bp, Homo sapien
gactggatgcagtcaaggaatccaa

SEQ ID NO: 2190019 - DNA, 25 bp, Homo sapien
aaaaggtatacagccataaccaggg

SEQ ID NO: 2190020 - DNA, 25 bp, Homo sapien
aataagtttggcagtatcatactca

SEQ ID NO: 2190021 - DNA, 25 bp, Homo sapien
ggcagtatcatactcagaaaaggta

SEQ ID NO: 2190022 - DNA, 25 bp, Homo sapien
tcatactcagaaaaggtatacagcc

SEQ ID NO: 2190023 - DNA, 25 bp, Homo sapien
gatcccaccatacttgactgtgcag

SEQ ID NO: 2190024 - DNA, 25 bp, Homo sapien
gatggcactggtcctaaactgggca

SEQ ID NO: 2190025 - DNA, 25 bp, Homo sapien
cacatttccaggctccttggcgttg

SEQ ID NO: 2190026 - DNA, 25 bp, Homo sapien
gggtatcatcaagtaattccggcta

SEQ ID NO: 2190027 - DNA, 25 bp, Homo sapien
taagacaccattcatgcccagtttg

SEQ ID NO: 2190028 - DNA, 25 bp, Homo sapien
gaagtcccagtccatctaatgcagc

SEQ ID NO: 2190029 - DNA, 25 bp, Homo sapien
cgcttacacttaacaaggatgctca

SEQ ID NO: 2190030 - DNA, 25 bp, Homo sapien
ccatacatggagtgactggacacat

SEQ ID NO: 2190031 - DNA, 25 bp, Homo sapien
ctgaaaagggctccgacttgagaga

SEQ ID NO: 2190032 - DNA, 25 bp, Homo sapien
gagagaggagtcatggctgttcaca

SEQ ID NO: 2190033 - DNA, 25 bp, Homo sapien
tccgacttgagagaggagtcatggc

SEQ ID NO: 2190034 - DNA, 25 bp, Homo sapien
tctggggacctgaaaagggctccga

SEQ ID NO: 2190035 - DNA, 25 bp, Homo sapien
aggcatcccgggtatcggtcgccga

SEQ ID NO: 2190036 - DNA, 25 bp, Homo sapien
ttctacgcgggtggacaagtgtacc

SEQ ID NO: 2190037 - DNA, 25 bp, Homo sapien
ccccggactcgcgaagaggagtgcc

SEQ ID NO: 2190038 - DNA, 25 bp, Homo sapien
gccgccaccgaaggctgcttctgct

SEQ ID NO: 2190039 - DNA, 25 bp, Homo sapien
cagctgtgatcgatggagaatttaa

SEQ ID NO: 2190040 - DNA, 25 bp, Homo sapien
gtgatcgatggagaatttaaggagc

SEQ ID NO: 2190041 - DNA, 25 bp, Homo sapien
aaggaacagctgtgatcgatggaga

SEQ ID NO: 2190042 - DNA, 25 bp, Homo sapien
gaacagctgtgatcgatggagaatt

SEQ ID NO: 2190043 - DNA, 25 bp, Homo sapien
tctgtagccatgctctctaaatgtg

SEQ ID NO: 2190044 - DNA, 25 bp, Homo sapien
ggactttagtgagcccttagtgaac

SEQ ID NO: 2190045 - DNA, 25 bp, Homo sapien
aatagccgaaattagtaggcaggac

SEQ ID NO: 2190046 - DNA, 25 bp, Homo sapien
tcaaggcatgggcaactaatgtcag

SEQ ID NO: 2190047 - DNA, 25 bp, Homo sapien
aaactgaaaatacagccgggcgcgg

SEQ ID NO: 2190048 - DNA, 25 bp, Homo sapien
gagacctattcccagaagatgctga

SEQ ID NO: 2190049 - DNA, 25 bp, Homo sapien
tgccctactggagacgatggaccct

SEQ ID NO: 2190050 - DNA, 25 bp, Homo sapien
ttgagaaaggatagtcccctgccct

SEQ ID NO: 2190051 - DNA, 25 bp, Homo sapien
aatttcaagcccatagttagaaata

SEQ ID NO: 2190052 - DNA, 25 bp, Homo sapien
atttcaagcccatagttagaaatat

SEQ ID NO: 2190053 - DNA, 25 bp, Homo sapien
tttcaagcccatagttagaaatata

SEQ ID NO: 2190054 - DNA, 25 bp, Homo sapien
ctctccaagtactgagactataggc

SEQ ID NO: 2190055 - DNA, 25 bp, Homo sapien
tggcctctccaagtactgagactat

SEQ ID NO: 2190056 - DNA, 25 bp, Homo sapien
gcctctccaagtactgagactatag

SEQ ID NO: 2190057 - DNA, 25 bp, Homo sapien
accaaccttggcctctccaagtact

SEQ ID NO: 2190058 - DNA, 25 bp, Homo sapien
tgcaggcaccgataagggaagtagc

SEQ ID NO: 2190059 - DNA, 25 bp, Homo sapien
gcctcatccccacagaacagagaaa

SEQ ID NO: 2190060 - DNA, 25 bp, Homo sapien
gcaccatcactctgagaggagttag

SEQ ID NO: 2190061 - DNA, 25 bp, Homo sapien
gagaggagttagctagctttcctta

SEQ ID NO: 2190062 - DNA, 25 bp, Homo sapien
gagccaccgaatccagccgagagct

SEQ ID NO: 2190063 - DNA, 25 bp, Homo sapien
cgaatccagccgagagctttcttgt

SEQ ID NO: 2190064 - DNA, 25 bp, Homo sapien
gcaacggcgcgatcctcaactcacc

SEQ ID NO: 2190065 - DNA, 25 bp, Homo sapien
gccaccgaatccagccgagagcttt

SEQ ID NO: 2190066 - DNA, 25 bp, Homo sapien
gtcaaactgcatgcttccaagagat

SEQ ID NO: 2190067 - DNA, 25 bp, Homo sapien
cattacggcatggagagacaagtta

SEQ ID NO: 2190068 - DNA, 25 bp, Homo sapien
aaatgctttccaccggccgggtgca

SEQ ID NO: 2190069 - DNA, 25 bp, Homo sapien
tattgaagggccaggtaaatctcag

SEQ ID NO: 2190070 - DNA, 25 bp, Homo sapien
taaatcagatatatcctgcggagcc

SEQ ID NO: 2190071 - DNA, 25 bp, Homo sapien
tacgcgtcggacctccaggaagtta

SEQ ID NO: 2190072 - DNA, 25 bp, Homo sapien
ccaagggctgaggatggtgcctatc

SEQ ID NO: 2190073 - DNA, 25 bp, Homo sapien
tgcggagccactagcagaatgtgct

SEQ ID NO: 2190074 - DNA, 25 bp, Homo sapien
agatgggaggcaacatggtaggttc

SEQ ID NO: 2190075 - DNA, 25 bp, Homo sapien
atgggaggcaacatggtaggttcac

SEQ ID NO: 2190076 - DNA, 25 bp, Homo sapien
gaagatgggaggcaacatggtaggt

SEQ ID NO: 2190077 - DNA, 25 bp, Homo sapien
gggaggcaacatggtaggttcacaa

SEQ ID NO: 2190078 - DNA, 25 bp, Homo sapien
ggtcttcatcagataccacgtcact

SEQ ID NO: 2190079 - DNA, 25 bp, Homo sapien
aatacactcgatcaggtcttcatca

SEQ ID NO: 2190080 - DNA, 25 bp, Homo sapien
cacgaagcaatactaaaatcaatac

SEQ ID NO: 2190081 - DNA, 25 bp, Homo sapien
tgtgggtagagtgctagttttcaac

SEQ ID NO: 2190082 - DNA, 25 bp, Homo sapien
tccacaaggtagtcctttctcaagg

SEQ ID NO: 2190083 - DNA, 25 bp, Homo sapien
ctcaaggtcgctgggccactcatgg

SEQ ID NO: 2190084 - DNA, 25 bp, Homo sapien
tcatggagttgaaatgccgctgccc

SEQ ID NO: 2190085 - DNA, 25 bp, Homo sapien
catggagttgaaatgccgctgccca

SEQ ID NO: 2190086 - DNA, 25 bp, Homo sapien
gaggccacttcactgtgtactctga

SEQ ID NO: 2190087 - DNA, 25 bp, Homo sapien
tgtactctgacttgaatataattat

SEQ ID NO: 2190088 - DNA, 25 bp, Homo sapien
tggtggttgtatgctgcttctcctg

SEQ ID NO: 2190089 - DNA, 25 bp, Homo sapien
ggcacttctttttccgacatgaacg

SEQ ID NO: 2190090 - DNA, 25 bp, Homo sapien
atgagccaacctcaacaggtttctg

SEQ ID NO: 2190091 - DNA, 25 bp, Homo sapien
tactgctaccacaaacggtcgagaa

SEQ ID NO: 2190092 - DNA, 25 bp, Homo sapien
gagcaatgagccaacctcaacaggt

SEQ ID NO: 2190093 - DNA, 25 bp, Homo sapien
caggtttctgaaacatgatgtcatc

SEQ ID NO: 2190094 - DNA, 25 bp, Homo sapien
aaagatccgattgaaaatgttccgc

SEQ ID NO: 2190095 - DNA, 25 bp, Homo sapien
gcaagttcatatgccttcctcataa

SEQ ID NO: 2190096 - DNA, 25 bp, Homo sapien
ggaaaccaccaaagatccgattgaa

SEQ ID NO: 2190097 - DNA, 25 bp, Homo sapien
aaagctacaagcagtagcccacgca

SEQ ID NO: 2190098 - DNA, 25 bp, Homo sapien
gcattagagggtaaaactcgactcc

SEQ ID NO: 2190099 - DNA, 25 bp, Homo sapien
cattagagggtaaaactcgactccg

SEQ ID NO: 2190100 - DNA, 25 bp, Homo sapien
ccatccacactgcattagagggtaa

SEQ ID NO: 2190101 - DNA, 25 bp, Homo sapien
tccatccacactgcattagagggta

SEQ ID NO: 2190102 - DNA, 25 bp, Homo sapien
acatctcatgtatggtggtcctctc

SEQ ID NO: 2190103 - DNA, 25 bp, Homo sapien
catctcatgtatggtggtcctctcc

SEQ ID NO: 2190104 - DNA, 25 bp, Homo sapien
aaacatctcatgtatggtggtcctc

SEQ ID NO: 2190105 - DNA, 25 bp, Homo sapien
agaaacatctcatgtatggtggtcc

SEQ ID NO: 2190106 - DNA, 25 bp, Homo sapien
ttcagtaacgacgtggagctgaagg

SEQ ID NO: 2190107 - DNA, 25 bp, Homo sapien
cagtaacgacgtggagctgaaggca

SEQ ID NO: 2190108 - DNA, 25 bp, Homo sapien
tttcagtaacgacgtggagctgaag

SEQ ID NO: 2190109 - DNA, 25 bp, Homo sapien
tcagtaacgacgtggagctgaaggc

SEQ ID NO: 2190110 - DNA, 25 bp, Homo sapien
gaaaactgcagaggccacataaaac

SEQ ID NO: 2190111 - DNA, 25 bp, Homo sapien
cagcacacggtattctgacctggga

SEQ ID NO: 2190112 - DNA, 25 bp, Homo sapien
gatccagagccctgacctgcagtta

SEQ ID NO: 2190113 - DNA, 25 bp, Homo sapien
gagcaatgatcaggacggtcgcact

SEQ ID NO: 2190114 - DNA, 25 bp, Homo sapien
taaatattgtctgatcaataaaatc

SEQ ID NO: 2190115 - DNA, 25 bp, Homo sapien
aacggagataacaaattacttcact

SEQ ID NO: 2190116 - DNA, 25 bp, Homo sapien
tattggtatgaataagacatttggg

SEQ ID NO: 2190117 - DNA, 25 bp, Homo sapien
gtatgaataagacatttgggccagg

SEQ ID NO: 2190118 - DNA, 25 bp, Homo sapien
gatgagtggatttacaaatgccggc

SEQ ID NO: 2190119 - DNA, 25 bp, Homo sapien
tctgggctttcagggatgagtggat

SEQ ID NO: 2190120 - DNA, 25 bp, Homo sapien
attccccttgtctaaagagctcctc

SEQ ID NO: 2190121 - DNA, 25 bp, Homo sapien
tccccttgtctaaagagctcctctt

SEQ ID NO: 2190122 - DNA, 25 bp, Homo sapien
caagacatcttgtgtcagacagcag

SEQ ID NO: 2190123 - DNA, 25 bp, Homo sapien
gaaatacgtaagatgagcccaagac

SEQ ID NO: 2190124 - DNA, 25 bp, Homo sapien
gcaggaagctatcaaacagacaggt

SEQ ID NO: 2190125 - DNA, 25 bp, Homo sapien
tggaaaggagccagcttagaggaac

SEQ ID NO: 2190126 - DNA, 25 bp, Homo sapien
aacgggctgggcgaaatgactcacg

SEQ ID NO: 2190127 - DNA, 25 bp, Homo sapien
aaacgggctgggcgaaatgactcac

SEQ ID NO: 2190128 - DNA, 25 bp, Homo sapien
aaaacgggctgggcgaaatgactca

SEQ ID NO: 2190129 - DNA, 25 bp, Homo sapien
acgggctgggcgaaatgactcacgc

SEQ ID NO: 2190130 - DNA, 25 bp, Homo sapien
caaatgttgcatccaaaacaggaca

SEQ ID NO: 2190131 - DNA, 25 bp, Homo sapien
ttattttcagaatcacgagccacca

SEQ ID NO: 2190132 - DNA, 25 bp, Homo sapien
cacgagccaccattacaaatgttgc

SEQ ID NO: 2190133 - DNA, 25 bp, Homo sapien
ttacaaatgttgcatccaaaacagg

SEQ ID NO: 2190134 - DNA, 25 bp, Homo sapien
gacccagctaacatggccactgaac

SEQ ID NO: 2190135 - DNA, 25 bp, Homo sapien
tcacttccatggatgtcttcccgac

SEQ ID NO: 2190136 - DNA, 25 bp, Homo sapien
catggccactgaacttaatgtcctg

SEQ ID NO: 2190137 - DNA, 25 bp, Homo sapien
ctggaacatttgcatcttcacttcc

SEQ ID NO: 2190138 - DNA, 25 bp, Homo sapien
caatcttatccaccagggctgtaac

SEQ ID NO: 2190139 - DNA, 25 bp, Homo sapien
tatccaccagggctgtaactatcga

SEQ ID NO: 2190140 - DNA, 25 bp, Homo sapien
gacatcttggcggagtggattttgt

SEQ ID NO: 2190141 - DNA, 25 bp, Homo sapien
gctgtaactatcgataaaggagaca

SEQ ID NO: 2190142 - DNA, 25 bp, Homo sapien
tgtccaggctggagtctatctcagc

SEQ ID NO: 2190143 - DNA, 25 bp, Homo sapien
aggctcaagcgattctcgtgcctca

SEQ ID NO: 2190144 - DNA, 25 bp, Homo sapien
gtccaggctggagtctatctcagct

SEQ ID NO: 2190145 - DNA, 25 bp, Homo sapien
cactgcaacctctgcctcccaggct

SEQ ID NO: 2190146 - DNA, 25 bp, Homo sapien
aagatcctcaagaatcctgccaaat

SEQ ID NO: 2190147 - DNA, 25 bp, Homo sapien
ctcccaagctgtcaagatcctcaag

SEQ ID NO: 2190148 - DNA, 25 bp, Homo sapien
caagatcctcaagaatcctgccaaa

SEQ ID NO: 2190149 - DNA, 25 bp, Homo sapien
ttctctcgtaattcaggctcactgc

SEQ ID NO: 2190150 - DNA, 25 bp, Homo sapien
gatttagccaagaaactatgaagta

SEQ ID NO: 2190151 - DNA, 25 bp, Homo sapien
aggcagtccatcctgtgatttagcc

SEQ ID NO: 2190152 - DNA, 25 bp, Homo sapien
gaacttcaatataactgtccttcat

SEQ ID NO: 2190153 - DNA, 25 bp, Homo sapien
ctgagaagaaaggatgcaggattca

SEQ ID NO: 2190154 - DNA, 25 bp, Homo sapien
tgagaagaaaggatgcaggattcat

SEQ ID NO: 2190155 - DNA, 25 bp, Homo sapien
gtgaaattgatcatttccggtatca

SEQ ID NO: 2190156 - DNA, 25 bp, Homo sapien
tgaaattgatcatttccggtatcat

SEQ ID NO: 2190157 - DNA, 25 bp, Homo sapien
ggtgaaattgatcatttccggtatc

SEQ ID NO: 2190158 - DNA, 25 bp, Homo sapien
ttggtgaaattgatcatttccggta

SEQ ID NO: 2190159 - DNA, 25 bp, Homo sapien
ctccagtttgtggatgctcctacta

SEQ ID NO: 2190160 - DNA, 25 bp, Homo sapien
actatctcccgcaacttatctcgaa

SEQ ID NO: 2190161 - DNA, 25 bp, Homo sapien
gtttgtggatgctcctactatctcc

SEQ ID NO: 2190162 - DNA, 25 bp, Homo sapien
tggatgctcctactatctcccgcaa

SEQ ID NO: 2190163 - DNA, 25 bp, Homo sapien
atgattcacatgtatagatgaacat

SEQ ID NO: 2190164 - DNA, 25 bp, Homo sapien
catgattcacatgtatagatgaaca

SEQ ID NO: 2190165 - DNA, 25 bp, Homo sapien
tgattcacatgtatagatgaacatg

SEQ ID NO: 2190166 - DNA, 25 bp, Homo sapien
aacaaggtttttcaccacataggca

SEQ ID NO: 2190167 - DNA, 25 bp, Homo sapien
cttccaggagtaagctgccctttgc

SEQ ID NO: 2190168 - DNA, 25 bp, Homo sapien
gtcctcttccaggagtaagctgccc

SEQ ID NO: 2190169 - DNA, 25 bp, Homo sapien
gctgccctttgcccaaggcacaaag

SEQ ID NO: 2190170 - DNA, 25 bp, Homo sapien
agctgccctttgcccaaggcacaaa

SEQ ID NO: 2190171 - DNA, 25 bp, Homo sapien
cagaaactggagcaggtgtgagccc

SEQ ID NO: 2190172 - DNA, 25 bp, Homo sapien
tggcagcgagataacttcagaaact

SEQ ID NO: 2190173 - DNA, 25 bp, Homo sapien
agaaactggagcaggtgtgagcccc

SEQ ID NO: 2190174 - DNA, 25 bp, Homo sapien
cagcgagataacttcagaaactgga

SEQ ID NO: 2190175 - DNA, 25 bp, Homo sapien
cctagacgcacagtcctagggtcct

SEQ ID NO: 2190176 - DNA, 25 bp, Homo sapien
ggtaccctgtaatctctgccaatgt

SEQ ID NO: 2190177 - DNA, 25 bp, Homo sapien
aaattggcaccagggtcctagacgc

SEQ ID NO: 2190178 - DNA, 25 bp, Homo sapien
ggctttgcggctcattaaagttaag

SEQ ID NO: 2190179 - DNA, 25 bp, Homo sapien
cccttgctgaggacagcccgggagc

SEQ ID NO: 2190180 - DNA, 25 bp, Homo sapien
gataaaagacgcacgagtaccagac

SEQ ID NO: 2190181 - DNA, 25 bp, Homo sapien
tgccgtgcgcgcgatggagaaccgg

SEQ ID NO: 2190182 - DNA, 25 bp, Homo sapien
cgctagtcggcggagggaaactgag

SEQ ID NO: 2190183 - DNA, 25 bp, Homo sapien
ttaacataggatcagagggcatctg

SEQ ID NO: 2190184 - DNA, 25 bp, Homo sapien
gctgtctgggaagcatgtagcctca

SEQ ID NO: 2190185 - DNA, 25 bp, Homo sapien
ggtgcaaagattgccctcccgaaga

SEQ ID NO: 2190186 - DNA, 25 bp, Homo sapien
gcagatcttgacagctgtccgctaa

SEQ ID NO: 2190187 - DNA, 25 bp, Homo sapien
gaataccaagaagtgcccaactaga

SEQ ID NO: 2190188 - DNA, 25 bp, Homo sapien
attcgcagtcacaaccaggcaaggg

SEQ ID NO: 2190189 - DNA, 25 bp, Homo sapien
gagttgctgcacttgtccattcgca

SEQ ID NO: 2190190 - DNA, 25 bp, Homo sapien
tagctttcccaatggtgtaacccaa

SEQ ID NO: 2190191 - DNA, 25 bp, Homo sapien
gagagcaagtatccctgccaaggtg

SEQ ID NO: 2190192 - DNA, 25 bp, Homo sapien
ggcctggccatacccacacttgtgt

SEQ ID NO: 2190193 - DNA, 25 bp, Homo sapien
aagaatgtgcccctttgcagaacag

SEQ ID NO: 2190194 - DNA, 25 bp, Homo sapien
tggccacaagaagtccaaaggcctg

SEQ ID NO: 2190195 - DNA, 25 bp, Homo sapien
gagcccacagttgcaaattcaggaa

SEQ ID NO: 2190196 - DNA, 25 bp, Homo sapien
cttgtcacgaaaacccgataatggg

SEQ ID NO: 2190197 - DNA, 25 bp, Homo sapien
ccgagacttgtcacgaaaacccgat

SEQ ID NO: 2190198 - DNA, 25 bp, Homo sapien
ggttcatgaccccagtcattgataa

SEQ ID NO: 2190199 - DNA, 25 bp, Homo sapien
gggtagatctgaaagtaggttcatg

SEQ ID NO: 2190200 - DNA, 25 bp, Homo sapien
ctgcaactggagtggaccatttctg

SEQ ID NO: 2190201 - DNA, 25 bp, Homo sapien
accatggaaacagtaggtgatgaca

SEQ ID NO: 2190202 - DNA, 25 bp, Homo sapien
ccatggaaacagtaggtgatgacag

SEQ ID NO: 2190203 - DNA, 25 bp, Homo sapien
ttagtcccgtctaccatggaaacag

SEQ ID NO: 2190204 - DNA, 25 bp, Homo sapien
ttagcatttctcgtagtacagtttt

SEQ ID NO: 2190205 - DNA, 25 bp, Homo sapien
tttccatcagtttgaacaacttcct

SEQ ID NO: 2190206 - DNA, 25 bp, Homo sapien
ttctcgtagtacagttttagtgatg

SEQ ID NO: 2190207 - DNA, 25 bp, Homo sapien
cctttgggcaaattcaagtgtccat

SEQ ID NO: 2190208 - DNA, 25 bp, Homo sapien
gatggtattgcggtgcctcagctct

SEQ ID NO: 2190209 - DNA, 25 bp, Homo sapien
ctgagttttgatcaggcccgccaga

SEQ ID NO: 2190210 - DNA, 25 bp, Homo sapien
ttgaagataccagaaaccgcagagc

SEQ ID NO: 2190211 - DNA, 25 bp, Homo sapien
caaaggtgccggttctatgcaagtc

SEQ ID NO: 2190212 - DNA, 25 bp, Homo sapien
cattgatacagtggtacccggccac

SEQ ID NO: 2190213 - DNA, 25 bp, Homo sapien
cacttagggaaatctctcgccagga

SEQ ID NO: 2190214 - DNA, 25 bp, Homo sapien
gataatgtgtgttttgacctgaccg

SEQ ID NO: 2190215 - DNA, 25 bp, Homo sapien
cagcttggaaccatcctgagaggca

SEQ ID NO: 2190216 - DNA, 25 bp, Homo sapien
cctttggtcataagagcagtgtcat

SEQ ID NO: 2190217 - DNA, 25 bp, Homo sapien
tttggtcataagagcagtgtcatca

SEQ ID NO: 2190218 - DNA, 25 bp, Homo sapien
aaaagaatatacgagctcacattcc

SEQ ID NO: 2190219 - DNA, 25 bp, Homo sapien
aagaatatacgagctcacattcctt

SEQ ID NO: 2190220 - DNA, 25 bp, Homo sapien
tgttactgggggacacaccggctcc

SEQ ID NO: 2190221 - DNA, 25 bp, Homo sapien
ttcatttgcaaatgttactggggga

SEQ ID NO: 2190222 - DNA, 25 bp, Homo sapien
tgcaaatgttactgggggacacacc

SEQ ID NO: 2190223 - DNA, 25 bp, Homo sapien
catttgcaaatgttactgggggaca

SEQ ID NO: 2190224 - DNA, 25 bp, Homo sapien
taagtataagtgctgtggagacccg

SEQ ID NO: 2190225 - DNA, 25 bp, Homo sapien
tctgaactgccgtgtaaacctgacg

SEQ ID NO: 2190226 - DNA, 25 bp, Homo sapien
tacctatgacccgtggattggcaag

SEQ ID NO: 2190227 - DNA, 25 bp, Homo sapien
aaggtaattcaacagtggcgggacg

SEQ ID NO: 2190228 - DNA, 25 bp, Homo sapien
gagactgttcaagatcgacaaggag

SEQ ID NO: 2190229 - DNA, 25 bp, Homo sapien
tgctgctgtagatgacaacctccat

SEQ ID NO: 2190230 - DNA, 25 bp, Homo sapien
tccaaagctttattaccagtggcgt

SEQ ID NO: 2190231 - DNA, 25 bp, Homo sapien
caaggagtacttgctaaaaatggca

SEQ ID NO: 2190232 - DNA, 25 bp, Homo sapien
cagtcaaaggtaatgttgtcctgca

SEQ ID NO: 2190233 - DNA, 25 bp, Homo sapien
ttgtcctgcaagcctttgtatcagt

SEQ ID NO: 2190234 - DNA, 25 bp, Homo sapien
tgagctcctcagtcaaaggtaatgt

SEQ ID NO: 2190235 - DNA, 25 bp, Homo sapien
tgagttctccagcaaatcagtactg

SEQ ID NO: 2190236 - DNA, 25 bp, Homo sapien
cagcaactgatggaactgccaggcc

SEQ ID NO: 2190237 - DNA, 25 bp, Homo sapien
ggagtgaagcaacttcctcactgac

SEQ ID NO: 2190238 - DNA, 25 bp, Homo sapien
gcaactgatggaactgccaggccct

SEQ ID NO: 2190239 - DNA, 25 bp, Homo sapien
tgaagcaacttcctcactgactgtg

SEQ ID NO: 2190240 - DNA, 25 bp, Homo sapien
gaggggcctgtctatccaccgtcct

SEQ ID NO: 2190241 - DNA, 25 bp, Homo sapien
tgtctatccaccgtcctcttggtcc

SEQ ID NO: 2190242 - DNA, 25 bp, Homo sapien
aaaggcttaaggagctgaatgtcgg

SEQ ID NO: 2190243 - DNA, 25 bp, Homo sapien
gaatgtcggggtactgtttgttaga

SEQ ID NO: 2190244 - DNA, 25 bp, Homo sapien
gaaaaaggcttgtgttatgctcagg

SEQ ID NO: 2190245 - DNA, 25 bp, Homo sapien
agaaaaaggcttgtgttatgctcag

SEQ ID NO: 2190246 - DNA, 25 bp, Homo sapien
ttcgcaagctggaggctgtagcctg

SEQ ID NO: 2190247 - DNA, 25 bp, Homo sapien
atttcatggctaacactatttcgca

SEQ ID NO: 2190248 - DNA, 25 bp, Homo sapien
tatttcgcaatagttcgcaagctgg

SEQ ID NO: 2190249 - DNA, 25 bp, Homo sapien
tctccaagaccatcccaaagagttg

SEQ ID NO: 2190250 - DNA, 25 bp, Homo sapien
ctaggtgaagggattccaggttagt

SEQ ID NO: 2190251 - DNA, 25 bp, Homo sapien
gcaacatgagaatgaggagttctaa

SEQ ID NO: 2190252 - DNA, 25 bp, Homo sapien
ggcttgtacattatctctaggtgaa

SEQ ID NO: 2190253 - DNA, 25 bp, Homo sapien
tagtttgcttgtaggatgatttcac

SEQ ID NO: 2190254 - DNA, 25 bp, Homo sapien
gaagaagaaagccaatttaatacat

SEQ ID NO: 2190255 - DNA, 25 bp, Homo sapien
aagaagaaagccaatttaatacatt

SEQ ID NO: 2190256 - DNA, 25 bp, Homo sapien
tttattctatggagtttccaatgtt

SEQ ID NO: 2190257 - DNA, 25 bp, Homo sapien
ttattctatggagtttccaatgttt

SEQ ID NO: 2190258 - DNA, 25 bp, Homo sapien
aaaacataagtaactgtgccagaaa

SEQ ID NO: 2190259 - DNA, 25 bp, Homo sapien
aaacataagtaactgtgccagaaaa

SEQ ID NO: 2190260 - DNA, 25 bp, Homo sapien
tcacttgatcttttaatatacaacc

SEQ ID NO: 2190261 - DNA, 25 bp, Homo sapien
ttttagaggccagtgactattcact

SEQ ID NO: 2190262 - DNA, 25 bp, Homo sapien
gcccggcacaattggagatttctaa

SEQ ID NO: 2190263 - DNA, 25 bp, Homo sapien
tcttaaacatgtaaactactagctt

SEQ ID NO: 2190264 - DNA, 25 bp, Homo sapien
taggtcttaagtgtcatctggcatc

SEQ ID NO: 2190265 - DNA, 25 bp, Homo sapien
gtaggtcttaagtgtcatctggcat

SEQ ID NO: 2190266 - DNA, 25 bp, Homo sapien
agtaggtcttaagtgtcatctggca

SEQ ID NO: 2190267 - DNA, 25 bp, Homo sapien
ggtcttaagtgtcatctggcatctt

SEQ ID NO: 2190268 - DNA, 25 bp, Homo sapien
tcgacagtctgattgctgagaatag

SEQ ID NO: 2190269 - DNA, 25 bp, Homo sapien
gactacaaatagtccgaacggtagc

SEQ ID NO: 2190270 - DNA, 25 bp, Homo sapien
cattctcctggataacaacgttgat

SEQ ID NO: 2190271 - DNA, 25 bp, Homo sapien
aagaaggctgagttctacattgatg

SEQ ID NO: 2190272 - DNA, 25 bp, Homo sapien
tcgcagtagacgcagcaaagaaagc

SEQ ID NO: 2190273 - DNA, 25 bp, Homo sapien
ctcgcagtagacgcagcaaagaaag

SEQ ID NO: 2190274 - DNA, 25 bp, Homo sapien
aagatcccatccccccagataaata

SEQ ID NO: 2190275 - DNA, 25 bp, Homo sapien
ttacaattatatgccttcagtaagt

SEQ ID NO: 2190276 - DNA, 25 bp, Homo sapien
tgccagactcatataatccacctac

SEQ ID NO: 2190277 - DNA, 25 bp, Homo sapien
aactgccagactcatataatccacc

SEQ ID NO: 2190278 - DNA, 25 bp, Homo sapien
tacaaccaacacgaatcacttttat

SEQ ID NO: 2190279 - DNA, 25 bp, Homo sapien
aaaagctacacctcctccaataaag

SEQ ID NO: 2190280 - DNA, 25 bp, Homo sapien
tgaagtcaaggttgtgtatttcagc

SEQ ID NO: 2190281 - DNA, 25 bp, Homo sapien
gctgaactctggtgcagagtatctt

SEQ ID NO: 2190282 - DNA, 25 bp, Homo sapien
ctgattaagatggcagagcatggag

SEQ ID NO: 2190283 - DNA, 25 bp, Homo sapien
gattaagatggcagagcatggagtt

SEQ ID NO: 2190284 - DNA, 25 bp, Homo sapien
tgattaagatggcagagcatggagt

SEQ ID NO: 2190285 - DNA, 25 bp, Homo sapien
ttaagatggcagagcatggagtttt

SEQ ID NO: 2190286 - DNA, 25 bp, Homo sapien
ccaggtgaattcttcacatttcctg

SEQ ID NO: 2190287 - DNA, 25 bp, Homo sapien
ctacttagttccaggtgaattcttc

SEQ ID NO: 2190288 - DNA, 25 bp, Homo sapien
acttagttccaggtgaattcttcac

SEQ ID NO: 2190289 - DNA, 25 bp, Homo sapien
gttccaggtgaattcttcacatttc

SEQ ID NO: 2190290 - DNA, 25 bp, Homo sapien
tctaattagtatgcctgccatgtga

SEQ ID NO: 2190291 - DNA, 25 bp, Homo sapien
tgacaatttctgctagcaaaaccaa

SEQ ID NO: 2190292 - DNA, 25 bp, Homo sapien
ctaattagtatgcctgccatgtgaa

SEQ ID NO: 2190293 - DNA, 25 bp, Homo sapien
tttctaattagtatgcctgccatgt

SEQ ID NO: 2190294 - DNA, 25 bp, Homo sapien
aaggtttcagggctagtaagaggca

SEQ ID NO: 2190295 - DNA, 25 bp, Homo sapien
ggaaaacccatcaagctgtcattta

SEQ ID NO: 2190296 - DNA, 25 bp, Homo sapien
tagtccactggacaacgctgtatcc

SEQ ID NO: 2190297 - DNA, 25 bp, Homo sapien
ctggagtaacttcccaaggtttcag

SEQ ID NO: 2190298 - DNA, 25 bp, Homo sapien
gtttccaagccagaggctcccgcag

SEQ ID NO: 2190299 - DNA, 25 bp, Homo sapien
aatgaccagaaaatgttggcctgct

SEQ ID NO: 2190300 - DNA, 25 bp, Homo sapien
tggcctgcttaactggtatcctaac

SEQ ID NO: 2190301 - DNA, 25 bp, Homo sapien
tcttagcacagtcagagaatgctgt

SEQ ID NO: 2190302 - DNA, 25 bp, Homo sapien
gacaccacagtgagcactccgggga

SEQ ID NO: 2190303 - DNA, 25 bp, Homo sapien
cacagtgagcactccggggagcctg

SEQ ID NO: 2190304 - DNA, 25 bp, Homo sapien
actccctctggctttggtgtgcttc

SEQ ID NO: 2190305 - DNA, 25 bp, Homo sapien
ccctctggctttggtgtgcttcagt

SEQ ID NO: 2190306 - DNA, 25 bp, Homo sapien
tacaaaaccctagagaaaccacata

SEQ ID NO: 2190307 - DNA, 25 bp, Homo sapien
ctagagaaaccacatatttaaacca

SEQ ID NO: 2190308 - DNA, 25 bp, Homo sapien
aaggaagataatgaaaaagatgctc

SEQ ID NO: 2190309 - DNA, 25 bp, Homo sapien
agataatgaaaaagatgctcctcac

SEQ ID NO: 2190310 - DNA, 25 bp, Homo sapien
tgactatatatcctcgtaaacccca

SEQ ID NO: 2190311 - DNA, 25 bp, Homo sapien
tatgactatatatcctcgtaaaccc

SEQ ID NO: 2190312 - DNA, 25 bp, Homo sapien
gactatatatcctcgtaaaccccag

SEQ ID NO: 2190313 - DNA, 25 bp, Homo sapien
tctatgactatatatcctcgtaaac

SEQ ID NO: 2190314 - DNA, 25 bp, Homo sapien
cttgttgtggataatagagggaggc

SEQ ID NO: 2190315 - DNA, 25 bp, Homo sapien
cacgatggcttgttgtggataatag

SEQ ID NO: 2190316 - DNA, 25 bp, Homo sapien
gagggaggcagctaatcccatgaaa

SEQ ID NO: 2190317 - DNA, 25 bp, Homo sapien
caggcggatacactagcttctttat

SEQ ID NO: 2190318 - DNA, 25 bp, Homo sapien
cctccttaggatggtcatcctagtg

SEQ ID NO: 2190319 - DNA, 25 bp, Homo sapien
gtcatcctagtggatgttccaggga

SEQ ID NO: 2190320 - DNA, 25 bp, Homo sapien
atgttccagggacaagctctcggca

SEQ ID NO: 2190321 - DNA, 25 bp, Homo sapien
tcctccttaggatggtcatcctagt

SEQ ID NO: 2190322 - DNA, 25 bp, Homo sapien
tgtaggaacgtacccacagcacaga

SEQ ID NO: 2190323 - DNA, 25 bp, Homo sapien
ctgtaggaacgtacccacagcacag

SEQ ID NO: 2190324 - DNA, 25 bp, Homo sapien
taggaacgtacccacagcacagaaa

SEQ ID NO: 2190325 - DNA, 25 bp, Homo sapien
gtaggaacgtacccacagcacagaa

SEQ ID NO: 2190326 - DNA, 25 bp, Homo sapien
gccagcaaaaccaataacaccaagt

SEQ ID NO: 2190327 - DNA, 25 bp, Homo sapien
aggccagcaaaaccaataacaccaa

SEQ ID NO: 2190328 - DNA, 25 bp, Homo sapien
tagtcagaacatggactgtgaatcc

SEQ ID NO: 2190329 - DNA, 25 bp, Homo sapien
tgagtgtatgtgataagtggcccac

SEQ ID NO: 2190330 - DNA, 25 bp, Homo sapien
gcaaatgagctattccgattcagaa

SEQ ID NO: 2190331 - DNA, 25 bp, Homo sapien
tttataggagtaccaactcagctcc

SEQ ID NO: 2190332 - DNA, 25 bp, Homo sapien
acccccattgaaccaaactttgcat

SEQ ID NO: 2190333 - DNA, 25 bp, Homo sapien
actttgcatcttgggcttagtttgg

SEQ ID NO: 2190334 - DNA, 25 bp, Homo sapien
ccccattgaaccaaactttgcatct

SEQ ID NO: 2190335 - DNA, 25 bp, Homo sapien
gcatcttgggcttagtttgggagta

SEQ ID NO: 2190336 - DNA, 25 bp, Homo sapien
aaacagaaatgcgttcactccattt

SEQ ID NO: 2190337 - DNA, 25 bp, Homo sapien
aatacagactttcctctatggactc

SEQ ID NO: 2190338 - DNA, 25 bp, Homo sapien
acatgcagccaatacagactttcct

SEQ ID NO: 2190339 - DNA, 25 bp, Homo sapien
tctaaacagaaatgcgttcactcca

SEQ ID NO: 2190340 - DNA, 25 bp, Homo sapien
acatacttcgattgaccctcaggaa

SEQ ID NO: 2190341 - DNA, 25 bp, Homo sapien
tcctccacatacttcgattgaccct

SEQ ID NO: 2190342 - DNA, 25 bp, Homo sapien
ctccacatacttcgattgaccctca

SEQ ID NO: 2190343 - DNA, 25 bp, Homo sapien
ccacatacttcgattgaccctcagg

SEQ ID NO: 2190344 - DNA, 25 bp, Homo sapien
ccttttttggtgctgcatagacttt

SEQ ID NO: 2190345 - DNA, 25 bp, Homo sapien
gactttgaaggtgagcaagctcagg

SEQ ID NO: 2190346 - DNA, 25 bp, Homo sapien
ctggccccacggacctctgaattac

SEQ ID NO: 2190347 - DNA, 25 bp, Homo sapien
catcaaccttcacggaatttttggg

SEQ ID NO: 2190348 - DNA, 25 bp, Homo sapien
ggcacctaagaagtgggccacactc

SEQ ID NO: 2190349 - DNA, 25 bp, Homo sapien
agaacggcaggacaacgcggagttt

SEQ ID NO: 2190350 - DNA, 25 bp, Homo sapien
tcaaaagcatgaattctcccggctc

SEQ ID NO: 2190351 - DNA, 25 bp, Homo sapien
tcccggctcttaggcagttctacag

SEQ ID NO: 2190352 - DNA, 25 bp, Homo sapien
tttttaaactgacaagaatcgtgta

SEQ ID NO: 2190353 - DNA, 25 bp, Homo sapien
tacaacataatgactagagttaaca

SEQ ID NO: 2190354 - DNA, 25 bp, Homo sapien
caatggtggctaccagggcaagggc

SEQ ID NO: 2190355 - DNA, 25 bp, Homo sapien
caacaatgtattggattttcgaaaa

SEQ ID NO: 2190356 - DNA, 25 bp, Homo sapien
tttctagttgggtggtgacacagca

SEQ ID NO: 2190357 - DNA, 25 bp, Homo sapien
ctagttgggtggtgacacagcattc

SEQ ID NO: 2190358 - DNA, 25 bp, Homo sapien
tctagttgggtggtgacacagcatt

SEQ ID NO: 2190359 - DNA, 25 bp, Homo sapien
gtttttctagttgggtggtgacaca

SEQ ID NO: 2190360 - DNA, 25 bp, Homo sapien
aactgtggccacaagggtggtagca

SEQ ID NO: 2190361 - DNA, 25 bp, Homo sapien
ctggctcctgcagcggccttttcag

SEQ ID NO: 2190362 - DNA, 25 bp, Homo sapien
ttccacagcaagaactgtggccaca

SEQ ID NO: 2190363 - DNA, 25 bp, Homo sapien
caagggtggtagcaccaaagaaagc

SEQ ID NO: 2190364 - DNA, 25 bp, Homo sapien
aactggtatagatctgtgtgatgga

SEQ ID NO: 2190365 - DNA, 25 bp, Homo sapien
tatagatctgtgtgatggaaaccca

SEQ ID NO: 2190366 - DNA, 25 bp, Homo sapien
catggtaaggaactggtatagatct

SEQ ID NO: 2190367 - DNA, 25 bp, Homo sapien
taaggaactggtatagatctgtgtg

SEQ ID NO: 2190368 - DNA, 25 bp, Homo sapien
aaacttttgtttcgcacagcccgca

SEQ ID NO: 2190369 - DNA, 25 bp, Homo sapien
gatgaggccctaacaagaagtgtaa

SEQ ID NO: 2190370 - DNA, 25 bp, Homo sapien
ccactgaagcttgcgaaggactgat

SEQ ID NO: 2190371 - DNA, 25 bp, Homo sapien
tctggtcaggcaagcaaggttatat

SEQ ID NO: 2190372 - DNA, 25 bp, Homo sapien
agtagaccagtgaatgaaccgcggg

SEQ ID NO: 2190373 - DNA, 25 bp, Homo sapien
gatcccaagagggtactagccgagg

SEQ ID NO: 2190374 - DNA, 25 bp, Homo sapien
cgctcatccccagtagaccagtgaa

SEQ ID NO: 2190375 - DNA, 25 bp, Homo sapien
aattcacgaaagcacaacccaaagg

SEQ ID NO: 2190376 - DNA, 25 bp, Homo sapien
caatcacccggttctagaagccgcg

SEQ ID NO: 2190377 - DNA, 25 bp, Homo sapien
tgcggcgaaggtttagttcaatcac

SEQ ID NO: 2190378 - DNA, 25 bp, Homo sapien
tgacggccgtactgcaaactcggtg

SEQ ID NO: 2190379 - DNA, 25 bp, Homo sapien
tcggccacgcccactatagagaggt

SEQ ID NO: 2190380 - DNA, 25 bp, Homo sapien
tttaatcctccaacgtatagaaatc

SEQ ID NO: 2190381 - DNA, 25 bp, Homo sapien
cctccaacgtatagaaatctaccat

SEQ ID NO: 2190382 - DNA, 25 bp, Homo sapien
atcctccaacgtatagaaatctacc

SEQ ID NO: 2190383 - DNA, 25 bp, Homo sapien
taatcctccaacgtatagaaatcta

SEQ ID NO: 2190384 - DNA, 25 bp, Homo sapien
catctgctctcatagctctgtcagt

SEQ ID NO: 2190385 - DNA, 25 bp, Homo sapien
ccacagaatattcatgaatatgatt

SEQ ID NO: 2190386 - DNA, 25 bp, Homo sapien
tgtcagtgaggaattcatcattccc

SEQ ID NO: 2190387 - DNA, 25 bp, Homo sapien
tttacccatgcaatttcccctggca

SEQ ID NO: 2190388 - DNA, 25 bp, Homo sapien
ttcaggaactccaattagcttgcat

SEQ ID NO: 2190389 - DNA, 25 bp, Homo sapien
tattcaggaactccaattagcttgc

SEQ ID NO: 2190390 - DNA, 25 bp, Homo sapien
caggaactccaattagcttgcatag

SEQ ID NO: 2190391 - DNA, 25 bp, Homo sapien
ctattcaggaactccaattagcttg

SEQ ID NO: 2190392 - DNA, 25 bp, Homo sapien
taaaagtgcttgcatgctgcagggc

SEQ ID NO: 2190393 - DNA, 25 bp, Homo sapien
tacagctaacatcaggtccgacgtg

SEQ ID NO: 2190394 - DNA, 25 bp, Homo sapien
tatagactactcatgcgcaaatggc

SEQ ID NO: 2190395 - DNA, 25 bp, Homo sapien
ttactatgactcgagcaggcttccc

SEQ ID NO: 2190396 - DNA, 25 bp, Homo sapien
gaagcatggaattcaccatccgggc

SEQ ID NO: 2190397 - DNA, 25 bp, Homo sapien
tcaacttcgtaacggagctgtcggg

SEQ ID NO: 2190398 - DNA, 25 bp, Homo sapien
catccctgagattcgaaagaggccc

SEQ ID NO: 2190399 - DNA, 25 bp, Homo sapien
tacttctgtagaagggcatccctga

SEQ ID NO: 2190400 - DNA, 25 bp, Homo sapien
ggcaatcttgggcacatagctcaat

SEQ ID NO: 2190401 - DNA, 25 bp, Homo sapien
ccatgtctggtgattaaggatccaa

SEQ ID NO: 2190402 - DNA, 25 bp, Homo sapien
tgactttggcactcatgagctgtgg

SEQ ID NO: 2190403 - DNA, 25 bp, Homo sapien
tggtctgagagctacacaggttttc

SEQ ID NO: 2190404 - DNA, 25 bp, Homo sapien
ttttcaaatggcgtagacaaccctc

SEQ ID NO: 2190405 - DNA, 25 bp, Homo sapien
taacatgaaaagtgaccgaccaagt

SEQ ID NO: 2190406 - DNA, 25 bp, Homo sapien
actaaagctgaggaactatttaaca

SEQ ID NO: 2190407 - DNA, 25 bp, Homo sapien
caaccctcctttgcagatactgtat

SEQ ID NO: 2190408 - DNA, 25 bp, Homo sapien
actaaatgatgagtactgtctattg

SEQ ID NO: 2190409 - DNA, 25 bp, Homo sapien
ttaactaaatgatgagtactgtcta

SEQ ID NO: 2190410 - DNA, 25 bp, Homo sapien
tgatgagtactgtctattgctttca

SEQ ID NO: 2190411 - DNA, 25 bp, Homo sapien
taaatgatgagtactgtctattgct

SEQ ID NO: 2190412 - DNA, 25 bp, Homo sapien
caggacatggctgaaaccggtagct

SEQ ID NO: 2190413 - DNA, 25 bp, Homo sapien
aagtcaggcctagacatgagtggca

SEQ ID NO: 2190414 - DNA, 25 bp, Homo sapien
gactccctcgatgtttacgccgaaa

SEQ ID NO: 2190415 - DNA, 25 bp, Homo sapien
gttgaacatacatggcagcctgaag

SEQ ID NO: 2190416 - DNA, 25 bp, Homo sapien
aggctcctcggacgtctacgagcag

SEQ ID NO: 2190417 - DNA, 25 bp, Homo sapien
cagcgggccgatgggtgggcggtcg

SEQ ID NO: 2190418 - DNA, 25 bp, Homo sapien
cagtctgcatcaggaagaaccgggc

SEQ ID NO: 2190419 - DNA, 25 bp, Homo sapien
ggcacgagagtgctcgcctgcagcc

SEQ ID NO: 2190420 - DNA, 25 bp, Homo sapien
tcgagaaaccagacagtcgggctcc

SEQ ID NO: 2190421 - DNA, 25 bp, Homo sapien
tcgaggacggcgtctctgggcttct

SEQ ID NO: 2190422 - DNA, 25 bp, Homo sapien
aagaagacagcgctgagtcgagaaa

SEQ ID NO: 2190423 - DNA, 25 bp, Homo sapien
agacagaagcaccagccgaggaagc

SEQ ID NO: 2190424 - DNA, 25 bp, Homo sapien
ccccctggtcgagcgccaatgccgc

SEQ ID NO: 2190425 - DNA, 25 bp, Homo sapien
cctggtcgagcgccaatgccgccat

SEQ ID NO: 2190426 - DNA, 25 bp, Homo sapien
cttccccctggtcgagcgccaatgc

SEQ ID NO: 2190427 - DNA, 25 bp, Homo sapien
ttccccctggtcgagcgccaatgcc

SEQ ID NO: 2190428 - DNA, 25 bp, Homo sapien
caagagttgaaacgtttctgcgctc

SEQ ID NO: 2190429 - DNA, 25 bp, Homo sapien
ctgtctaaagagaggcttctgttct

SEQ ID NO: 2190430 - DNA, 25 bp, Homo sapien
attcaagcaagagttgaaacgtttc

SEQ ID NO: 2190431 - DNA, 25 bp, Homo sapien
ctgcgctctttgtaccaggtataaa

SEQ ID NO: 2190432 - DNA, 25 bp, Homo sapien
tgtttattcagaaatggataagtaa

SEQ ID NO: 2190433 - DNA, 25 bp, Homo sapien
tcagaaatggataagtaatacataa

SEQ ID NO: 2190434 - DNA, 25 bp, Homo sapien
cctcaatgtaccagatggtcaccta

SEQ ID NO: 2190435 - DNA, 25 bp, Homo sapien
ggtcccctcaatgtaccagatggtc

SEQ ID NO: 2190436 - DNA, 25 bp, Homo sapien
tgtactgtggaacgagaaactaact

SEQ ID NO: 2190437 - DNA, 25 bp, Homo sapien
tctggagttcatactgtcaggttca

SEQ ID NO: 2190438 - DNA, 25 bp, Homo sapien
tcaagcttggatatgctaatgctaa

SEQ ID NO: 2190439 - DNA, 25 bp, Homo sapien
tataagcttgatgacccaagttgcc

SEQ ID NO: 2190440 - DNA, 25 bp, Homo sapien
ggcgtgagcccccatgcccagctag

SEQ ID NO: 2190441 - DNA, 25 bp, Homo sapien
gcgtgagcccccatgcccagctagt

SEQ ID NO: 2190442 - DNA, 25 bp, Homo sapien
cacagttagtgcgaaagactcctag

SEQ ID NO: 2190443 - DNA, 25 bp, Homo sapien
tctttcccaggttattgagtttgcc

SEQ ID NO: 2190444 - DNA, 25 bp, Homo sapien
gagccaggaagcatacacacatttt

SEQ ID NO: 2190445 - DNA, 25 bp, Homo sapien
gcttctaggtcttttgagagcatag

SEQ ID NO: 2190446 - DNA, 25 bp, Homo sapien
tgttagaaagcaatgagtgagtcct

SEQ ID NO: 2190447 - DNA, 25 bp, Homo sapien
tcctggcctgaaacacgggaaacca

SEQ ID NO: 2190448 - DNA, 25 bp, Homo sapien
tttgagtacctccaggctgaaagac

SEQ ID NO: 2190449 - DNA, 25 bp, Homo sapien
gcgttgtttaatgcctgaaatccaa

SEQ ID NO: 2190450 - DNA, 25 bp, Homo sapien
gaagctctggctatgggttgcctaa

SEQ ID NO: 2190451 - DNA, 25 bp, Homo sapien
tgcaactcttgctgacgttgctggg

SEQ ID NO: 2190452 - DNA, 25 bp, Homo sapien
cttggagtagaattcaggcattgat

SEQ ID NO: 2190453 - DNA, 25 bp, Homo sapien
aactccccagtgttgagaaacaaat

SEQ ID NO: 2190454 - DNA, 25 bp, Homo sapien
ggagtacgaacccagactggccaat

SEQ ID NO: 2190455 - DNA, 25 bp, Homo sapien
aggccaggagtacgaacccagactg

SEQ ID NO: 2190456 - DNA, 25 bp, Homo sapien
ggccaggagtacgaacccagactgg

SEQ ID NO: 2190457 - DNA, 25 bp, Homo sapien
ccaggagtacgaacccagactggcc

SEQ ID NO: 2190458 - DNA, 25 bp, Homo sapien
ttcgagaattacaaaactttccaca

SEQ ID NO: 2190459 - DNA, 25 bp, Homo sapien
gttaatttttgtagggcatgcttag

SEQ ID NO: 2190460 - DNA, 25 bp, Homo sapien
atttttgtagggcatgcttagttca

SEQ ID NO: 2190461 - DNA, 25 bp, Homo sapien
tgcttagttcaataaaactagggcc

SEQ ID NO: 2190462 - DNA, 25 bp, Homo sapien
tttgtagggcatgcttagttcaata

SEQ ID NO: 2190463 - DNA, 25 bp, Homo sapien
caactttattcaagaaggtctacat

SEQ ID NO: 2190464 - DNA, 25 bp, Homo sapien
tgaattcccatcagtctccgatgtg

SEQ ID NO: 2190465 - DNA, 25 bp, Homo sapien
cttctatcgtttctggctcaaggac

SEQ ID NO: 2190466 - DNA, 25 bp, Homo sapien
aaaatgattgaaaggccttctatcg

SEQ ID NO: 2190467 - DNA, 25 bp, Homo sapien
caagatgtctggtgcttaattacca

SEQ ID NO: 2190468 - DNA, 25 bp, Homo sapien
ccaagggcaagcacatctttgttac

SEQ ID NO: 2190469 - DNA, 25 bp, Homo sapien
tccttattcgagttccccaagggca

SEQ ID NO: 2190470 - DNA, 25 bp, Homo sapien
ttatcaaggcaagataggctgcagt

SEQ ID NO: 2190471 - DNA, 25 bp, Homo sapien
tatgaaacgatgacaccagtcttac

SEQ ID NO: 2190472 - DNA, 25 bp, Homo sapien
aggaatgtggaaaattcatgattta

SEQ ID NO: 2190473 - DNA, 25 bp, Homo sapien
gatttatgaaacgatgacaccagtc

SEQ ID NO: 2190474 - DNA, 25 bp, Homo sapien
catgatttatgaaacgatgacacca

SEQ ID NO: 2190475 - DNA, 25 bp, Homo sapien
tcccgggcggtgacgtgacgtgctg

SEQ ID NO: 2190476 - DNA, 25 bp, Homo sapien
cccgggcggtgacgtgacgtgctga

SEQ ID NO: 2190477 - DNA, 25 bp, Homo sapien
ccgggcggtgacgtgacgtgctgac

SEQ ID NO: 2190478 - DNA, 25 bp, Homo sapien
tctcccgggcggtgacgtgacgtgc

SEQ ID NO: 2190479 - DNA, 25 bp, Homo sapien
gggagctgggccgctttttgtcagc

SEQ ID NO: 2190480 - DNA, 25 bp, Homo sapien
ggagctgggccgctttttgtcagct

SEQ ID NO: 2190481 - DNA, 25 bp, Homo sapien
ctgggccgctttttgtcagctccga

SEQ ID NO: 2190482 - DNA, 25 bp, Homo sapien
agctgggccgctttttgtcagctcc

SEQ ID NO: 2190483 - DNA, 25 bp, Homo sapien
gcacagcggcctggtctcggcctgg

SEQ ID NO: 2190484 - DNA, 25 bp, Homo sapien
cgcggggcctagtgcgcgcacagcg

SEQ ID NO: 2190485 - DNA, 25 bp, Homo sapien
gcgcacagcggcctggtctcggcct

SEQ ID NO: 2190486 - DNA, 25 bp, Homo sapien
ggtgagtcccgggtgccgccgcggc

SEQ ID NO: 2190487 - DNA, 25 bp, Homo sapien
tcgcccggttgtgccggaggcggtc

SEQ ID NO: 2190488 - DNA, 25 bp, Homo sapien
cggaggcgcgctccgtaagcgggcg

SEQ ID NO: 2190489 - DNA, 25 bp, Homo sapien
gccgcagttaggcccggggaggagc

SEQ ID NO: 2190490 - DNA, 25 bp, Homo sapien
cggttgtgccggaggcggtcgaggg

SEQ ID NO: 2190491 - DNA, 25 bp, Homo sapien
aaggctgcaggcgtgaggtgaaggc

SEQ ID NO: 2190492 - DNA, 25 bp, Homo sapien
cgaaggctgcaggcgtgaggtgaag

SEQ ID NO: 2190493 - DNA, 25 bp, Homo sapien
gaaggctgcaggcgtgaggtgaagg

SEQ ID NO: 2190494 - DNA, 25 bp, Homo sapien
gcgaaggctgcaggcgtgaggtgaa

SEQ ID NO: 2190495 - DNA, 25 bp, Homo sapien
ctatgtaaatatcggtgaggggggg

SEQ ID NO: 2190496 - DNA, 25 bp, Homo sapien
caggggacgatagagggggttgccg

SEQ ID NO: 2190497 - DNA, 25 bp, Homo sapien
ctgcaggggacgatagagggggttg

SEQ ID NO: 2190498 - DNA, 25 bp, Homo sapien
gcaggggacgatagagggggttgcc

SEQ ID NO: 2190499 - DNA, 25 bp, Homo sapien
ctgctgcaggggacgatagaggggg

SEQ ID NO: 2190500 - DNA, 25 bp, Homo sapien
ggccattgcccttgccgccatgatg

SEQ ID NO: 2190501 - DNA, 25 bp, Homo sapien
tcccgcagccccgtgactggctgca

SEQ ID NO: 2190502 - DNA, 25 bp, Homo sapien
cttgccgccatgatgagcgctcggg

SEQ ID NO: 2190503 - DNA, 25 bp, Homo sapien
gactggctgcagtttccgctgcgtt

SEQ ID NO: 2190504 - DNA, 25 bp, Homo sapien
caacaatctttgccgccccgagtat

SEQ ID NO: 2190505 - DNA, 25 bp, Homo sapien
ctaaggtgctttcgatgcagttgtt

SEQ ID NO: 2190506 - DNA, 25 bp, Homo sapien
gctttcgatgcagttgtttttccaa

SEQ ID NO: 2190507 - DNA, 25 bp, Homo sapien
tttccaacaatctttgccgccccga

SEQ ID NO: 2190508 - DNA, 25 bp, Homo sapien
aagattgatgggaaagtttttgcca

SEQ ID NO: 2190509 - DNA, 25 bp, Homo sapien
ttgatgggaaagtttttgccattct

SEQ ID NO: 2190510 - DNA, 25 bp, Homo sapien
agaaaaataaagattgatgggaaag

SEQ ID NO: 2190511 - DNA, 25 bp, Homo sapien
gattgatgggaaagtttttgccatt

SEQ ID NO: 2190512 - DNA, 25 bp, Homo sapien
agactgtaacaggtcgtgagcagcg

SEQ ID NO: 2190513 - DNA, 25 bp, Homo sapien
ttaggtggcatagatacccattttc

SEQ ID NO: 2190514 - DNA, 25 bp, Homo sapien
ggtggcatagatacccattttcagt

SEQ ID NO: 2190515 - DNA, 25 bp, Homo sapien
cgtgagcagcggtgctccatgaaag

SEQ ID NO: 2190516 - DNA, 25 bp, Homo sapien
ccaaattgggaaacttgcacagcat

SEQ ID NO: 2190517 - DNA, 25 bp, Homo sapien
tattacccaaattgggaaacttgca

SEQ ID NO: 2190518 - DNA, 25 bp, Homo sapien
tattcttaaatccagtattacccaa

SEQ ID NO: 2190519 - DNA, 25 bp, Homo sapien
cttaaatccagtattacccaaattg

SEQ ID NO: 2190520 - DNA, 25 bp, Homo sapien
cactgtgctcggtcaaattttaaaa

SEQ ID NO: 2190521 - DNA, 25 bp, Homo sapien
taccttggactacagatgggcgcca

SEQ ID NO: 2190522 - DNA, 25 bp, Homo sapien
ttcttttagcggcagggtctcaccc

SEQ ID NO: 2190523 - DNA, 25 bp, Homo sapien
ttcttgaatctctaaatccagtggg

SEQ ID NO: 2190524 - DNA, 25 bp, Homo sapien
tgttcacttaatcttgccacaggca

SEQ ID NO: 2190525 - DNA, 25 bp, Homo sapien
tcctgtgaggtatgcatggcagata

SEQ ID NO: 2190526 - DNA, 25 bp, Homo sapien
caaacctaggtaatggactaagtgg

SEQ ID NO: 2190527 - DNA, 25 bp, Homo sapien
ccagggcctccgttttcatatgtca

SEQ ID NO: 2190528 - DNA, 25 bp, Homo sapien
tggttaagtcatttaatctcactgg

SEQ ID NO: 2190529 - DNA, 25 bp, Homo sapien
gataaggatatttgattctatttcc

SEQ ID NO: 2190530 - DNA, 25 bp, Homo sapien
tttctgagcaccatacactgtgcaa

SEQ ID NO: 2190531 - DNA, 25 bp, Homo sapien
tcactgggcttcaactgattcagtc

SEQ ID NO: 2190532 - DNA, 25 bp, Homo sapien
tactccggaatcatacacagttctt

SEQ ID NO: 2190533 - DNA, 25 bp, Homo sapien
tgccctgcgattcttgaaagctctg

SEQ ID NO: 2190534 - DNA, 25 bp, Homo sapien
tgtagtcactgttatgtactgacat

SEQ ID NO: 2190535 - DNA, 25 bp, Homo sapien
tgatccgtgattcattgccctgcga

SEQ ID NO: 2190536 - DNA, 25 bp, Homo sapien
ggcagcatcttaatctcctgggact

SEQ ID NO: 2190537 - DNA, 25 bp, Homo sapien
catggctaatcaatatcttaaaggg

SEQ ID NO: 2190538 - DNA, 25 bp, Homo sapien
tcctactgaattgggaaactggcgt

SEQ ID NO: 2190539 - DNA, 25 bp, Homo sapien
ggttttcaaagtatggccggacagc

SEQ ID NO: 2190540 - DNA, 25 bp, Homo sapien
tagcctctgacatccactagtttac

SEQ ID NO: 2190541 - DNA, 25 bp, Homo sapien
taggtttgctatgctggtcacttca

SEQ ID NO: 2190542 - DNA, 25 bp, Homo sapien
ctagtttacctttagtctctatagg

SEQ ID NO: 2190543 - DNA, 25 bp, Homo sapien
aaagaaatttcatacccataagcag

SEQ ID NO: 2190544 - DNA, 25 bp, Homo sapien
cgagcttgactcaatcatgattcct

SEQ ID NO: 2190545 - DNA, 25 bp, Homo sapien
caacaaaggaaacctaggagctgta

SEQ ID NO: 2190546 - DNA, 25 bp, Homo sapien
gaggtcctgccaggtcgagcttgac

SEQ ID NO: 2190547 - DNA, 25 bp, Homo sapien
tattttatggtagcacccagagaca

SEQ ID NO: 2190548 - DNA, 25 bp, Homo sapien
gatgcctgctgtgattgttgttcca

SEQ ID NO: 2190549 - DNA, 25 bp, Homo sapien
ttccaatctgaagaaacagaggtgc

SEQ ID NO: 2190550 - DNA, 25 bp, Homo sapien
ccaacctgtgctgataaattgggcc

SEQ ID NO: 2190551 - DNA, 25 bp, Homo sapien
cctgtgaatttcagtagttgtccat

SEQ ID NO: 2190552 - DNA, 25 bp, Homo sapien
ctgataccagacttcacaatgtctc

SEQ ID NO: 2190553 - DNA, 25 bp, Homo sapien
tctggggttaatgtcagaattatca

SEQ ID NO: 2190554 - DNA, 25 bp, Homo sapien
cactctgataccagacttcacaatg

SEQ ID NO: 2190555 - DNA, 25 bp, Homo sapien
cttgggctatctggggttaatgtca

SEQ ID NO: 2190556 - DNA, 25 bp, Homo sapien
tcagtcagtagagagtgacctcctt

SEQ ID NO: 2190557 - DNA, 25 bp, Homo sapien
tccttcagtcagtagagagtgacct

SEQ ID NO: 2190558 - DNA, 25 bp, Homo sapien
ttcagtcagtagagagtgacctcct

SEQ ID NO: 2190559 - DNA, 25 bp, Homo sapien
cttcagtcagtagagagtgacctcc

SEQ ID NO: 2190560 - DNA, 25 bp, Homo sapien
gagaacatgagctgccattgctgat

SEQ ID NO: 2190561 - DNA, 25 bp, Homo sapien
ggagactgtgagaaactgagatcac

SEQ ID NO: 2190562 - DNA, 25 bp, Homo sapien
tgagaacatgagctgccattgctga

SEQ ID NO: 2190563 - DNA, 25 bp, Homo sapien
tgaacgtgccagtacaaaataacac

SEQ ID NO: 2190564 - DNA, 25 bp, Homo sapien
gacccaatagtccataattcccagg

SEQ ID NO: 2190565 - DNA, 25 bp, Homo sapien
acctcatttgttttccggactcctg

SEQ ID NO: 2190566 - DNA, 25 bp, Homo sapien
taacacagaaacgataagggagcgc

SEQ ID NO: 2190567 - DNA, 25 bp, Homo sapien
ctggaattccctggatgtaaactga

SEQ ID NO: 2190568 - DNA, 25 bp, Homo sapien
gggtgccagttctacatctgctgtc

SEQ ID NO: 2190569 - DNA, 25 bp, Homo sapien
accagctcataagcctggaattccc

SEQ ID NO: 2190570 - DNA, 25 bp, Homo sapien
tcttttctctcatagggtgccagtt

SEQ ID NO: 2190571 - DNA, 25 bp, Homo sapien
gctgtgaagccacgctgtggttttt

SEQ ID NO: 2190572 - DNA, 25 bp, Homo sapien
tgaagccacgctgtggtttttcatt

SEQ ID NO: 2190573 - DNA, 25 bp, Homo sapien
ggctgtgaagccacgctgtggtttt

SEQ ID NO: 2190574 - DNA, 25 bp, Homo sapien
tgtgaagccacgctgtggtttttca

SEQ ID NO: 2190575 - DNA, 25 bp, Homo sapien
caggaatctctaatgcatgcttccc

SEQ ID NO: 2190576 - DNA, 25 bp, Homo sapien
ggaatctctaatgcatgcttcccaa

SEQ ID NO: 2190577 - DNA, 25 bp, Homo sapien
aatcatgatcaagtttccatggggc

SEQ ID NO: 2190578 - DNA, 25 bp, Homo sapien
gatcaagtttccatggggcacagga

SEQ ID NO: 2190579 - DNA, 25 bp, Homo sapien
gaagagaactttgatcggtccataa

SEQ ID NO: 2190580 - DNA, 25 bp, Homo sapien
tgatcggtccataacttccccgtgg

SEQ ID NO: 2190581 - DNA, 25 bp, Homo sapien
ggaagaagagaactttgatcggtcc

SEQ ID NO: 2190582 - DNA, 25 bp, Homo sapien
gaactttgatcggtccataacttcc

SEQ ID NO: 2190583 - DNA, 25 bp, Homo sapien
tgccttgaaacccgtatagtccctc

SEQ ID NO: 2190584 - DNA, 25 bp, Homo sapien
cactgccttgaaacccgtatagtcc

SEQ ID NO: 2190585 - DNA, 25 bp, Homo sapien
tcactgccttgaaacccgtatagtc

SEQ ID NO: 2190586 - DNA, 25 bp, Homo sapien
ctgccttgaaacccgtatagtccct

SEQ ID NO: 2190587 - DNA, 25 bp, Homo sapien
ttaattactgagatataaatctcca

SEQ ID NO: 2190588 - DNA, 25 bp, Homo sapien
taattactgagatataaatctccat

SEQ ID NO: 2190589 - DNA, 25 bp, Homo sapien
cttaattactgagatataaatctcc

SEQ ID NO: 2190590 - DNA, 25 bp, Homo sapien
gaaatgcaggtgctctcaaaagaca

SEQ ID NO: 2190591 - DNA, 25 bp, Homo sapien
actggatgagggaaaaggcgtaact

SEQ ID NO: 2190592 - DNA, 25 bp, Homo sapien
tgcttggagggatctgaaactaagt

SEQ ID NO: 2190593 - DNA, 25 bp, Homo sapien
gaaactaagttccagcatttgcatc

SEQ ID NO: 2190594 - DNA, 25 bp, Homo sapien
tgatccagagggaagatgtttcggt

SEQ ID NO: 2190595 - DNA, 25 bp, Homo sapien
ttaaggaatggttgatccagaggga

SEQ ID NO: 2190596 - DNA, 25 bp, Homo sapien
cggtgtagtccagtgttaagtagat

SEQ ID NO: 2190597 - DNA, 25 bp, Homo sapien
agggaagatgtttcggtgtagtcca

SEQ ID NO: 2190598 - DNA, 25 bp, Homo sapien
tacaactggtcattgcactcgttcg

SEQ ID NO: 2190599 - DNA, 25 bp, Homo sapien
tgggaagggaaggtcacatcactga

SEQ ID NO: 2190600 - DNA, 25 bp, Homo sapien
tcactgcttagctccgaaggccatg

SEQ ID NO: 2190601 - DNA, 25 bp, Homo sapien
catgtcctacttgaaagaagcagca

SEQ ID NO: 2190602 - DNA, 25 bp, Homo sapien
tgttctgtgattaccccttagttgt

SEQ ID NO: 2190603 - DNA, 25 bp, Homo sapien
tggttgttctgtgattaccccttag

SEQ ID NO: 2190604 - DNA, 25 bp, Homo sapien
caatggttggttgttctgtgattac

SEQ ID NO: 2190605 - DNA, 25 bp, Homo sapien
tactttacaatggttggttgttctg

SEQ ID NO: 2190606 - DNA, 25 bp, Homo sapien
gctgaacaactgatgatgatgcatc

SEQ ID NO: 2190607 - DNA, 25 bp, Homo sapien
tcttgcaaacaacctacaaaaaatg

SEQ ID NO: 2190608 - DNA, 25 bp, Homo sapien
gatgatgatgcatcaacaaagagaa

SEQ ID NO: 2190609 - DNA, 25 bp, Homo sapien
gaaacaaggctacagatatttgaaa

SEQ ID NO: 2190610 - DNA, 25 bp, Homo sapien
tcagggagctggaggggttggcttg

SEQ ID NO: 2190611 - DNA, 25 bp, Homo sapien
gctggaggggttggcttgcctccct

SEQ ID NO: 2190612 - DNA, 25 bp, Homo sapien
agggagctggaggggttggcttgcc

SEQ ID NO: 2190613 - DNA, 25 bp, Homo sapien
ggagctggaggggttggcttgcctc

SEQ ID NO: 2190614 - DNA, 25 bp, Homo sapien
ctggatgtggctgcactatctgaac

SEQ ID NO: 2190615 - DNA, 25 bp, Homo sapien
tctgaacagcgcctgttgccaaaaa

SEQ ID NO: 2190616 - DNA, 25 bp, Homo sapien
tgtggctgcactatctgaacagcgc

SEQ ID NO: 2190617 - DNA, 25 bp, Homo sapien
tgcactatctgaacagcgcctgttg

SEQ ID NO: 2190618 - DNA, 25 bp, Homo sapien
ctgctccagtgaggttcacattaag

SEQ ID NO: 2190619 - DNA, 25 bp, Homo sapien
gctccagtgaggttcacattaagaa

SEQ ID NO: 2190620 - DNA, 25 bp, Homo sapien
gggctgcagaccactacctgctcca

SEQ ID NO: 2190621 - DNA, 25 bp, Homo sapien
cagtgaggttcacattaagaagttg

SEQ ID NO: 2190622 - DNA, 25 bp, Homo sapien
atggctggggctatttttacgaatc

SEQ ID NO: 2190623 - DNA, 25 bp, Homo sapien
ccggcagctggacggcgcctgctag

SEQ ID NO: 2190624 - DNA, 25 bp, Homo sapien
tatttttacgaatctggtggggcgc

SEQ ID NO: 2190625 - DNA, 25 bp, Homo sapien
gagcctgtccggacctgaatggctg

SEQ ID NO: 2190626 - DNA, 25 bp, Homo sapien
cttctgagaatggcttggtgccgcc

SEQ ID NO: 2190627 - DNA, 25 bp, Homo sapien
ttctgagaatggcttggtgccgccc

SEQ ID NO: 2190628 - DNA, 25 bp, Homo sapien
gcagcagcagctaaagcaggagcag

SEQ ID NO: 2190629 - DNA, 25 bp, Homo sapien
caggagcaggagcaggagcaggagc

SEQ ID NO: 2190630 - DNA, 25 bp, Homo sapien
agcagcagctacagcaggagcagca

SEQ ID NO: 2190631 - DNA, 25 bp, Homo sapien
cacagcagcagcagctaaagcagga

SEQ ID NO: 2190632 - DNA, 25 bp, Homo sapien
tgcctgcctgttgtgggggaaaact

SEQ ID NO: 2190633 - DNA, 25 bp, Homo sapien
gctgcctgcctgttgtgggggaaaa

SEQ ID NO: 2190634 - DNA, 25 bp, Homo sapien
cctgcctgttgtgggggaaaactgt

SEQ ID NO: 2190635 - DNA, 25 bp, Homo sapien
tgcctgttgtgggggaaaactgtta

SEQ ID NO: 2190636 - DNA, 25 bp, Homo sapien
gctgtgacggactgataccctttag

SEQ ID NO: 2190637 - DNA, 25 bp, Homo sapien
gatactgaagactggacccacacag

SEQ ID NO: 2190638 - DNA, 25 bp, Homo sapien
ggccgtattttaccacagagaagcg

SEQ ID NO: 2190639 - DNA, 25 bp, Homo sapien
tgaaggcacggccaaatcacagggt

SEQ ID NO: 2190640 - DNA, 25 bp, Homo sapien
tacagagggccacgaatacctctgg

SEQ ID NO: 2190641 - DNA, 25 bp, Homo sapien
catcgggtcggtattcatcttttgc

SEQ ID NO: 2190642 - DNA, 25 bp, Homo sapien
gaggtggacagtcagactgctcctg

SEQ ID NO: 2190643 - DNA, 25 bp, Homo sapien
ttttggccagaagtcgacactctca

SEQ ID NO: 2190644 - DNA, 25 bp, Homo sapien
agttgactctcaagaggaaatttgt

SEQ ID NO: 2190645 - DNA, 25 bp, Homo sapien
cagttgactctcaagaggaaatttg

SEQ ID NO: 2190646 - DNA, 25 bp, Homo sapien
tcatcgtcttcacctcaggggctaa

SEQ ID NO: 2190647 - DNA, 25 bp, Homo sapien
ctcttgtcatcgtcttcacctcagg

SEQ ID NO: 2190648 - DNA, 25 bp, Homo sapien
agaatatgcctgctttggtaaccag

SEQ ID NO: 2190649 - DNA, 25 bp, Homo sapien
ggttggacgtagaagaatatgcctg

SEQ ID NO: 2190650 - DNA, 25 bp, Homo sapien
aatatgcctgctttggtaaccagga

SEQ ID NO: 2190651 - DNA, 25 bp, Homo sapien
tggtaaccaggaggttgcatattac

SEQ ID NO: 2190652 - DNA, 25 bp, Homo sapien
tctggagcatcacagaatacccctg

SEQ ID NO: 2190653 - DNA, 25 bp, Homo sapien
tccaagtagtccagcaatgcccttt

SEQ ID NO: 2190654 - DNA, 25 bp, Homo sapien
taaccgaagctttatccaggacatc

SEQ ID NO: 2190655 - DNA, 25 bp, Homo sapien
cataaggcagccgaatggtctctgc

SEQ ID NO: 2190656 - DNA, 25 bp, Homo sapien
tttcccgccctaggtgagtatctcc

SEQ ID NO: 2190657 - DNA, 25 bp, Homo sapien
ggactctctcctaacaagcttttct

SEQ ID NO: 2190658 - DNA, 25 bp, Homo sapien
gatccagagcctgttctaaatctcg

SEQ ID NO: 2190659 - DNA, 25 bp, Homo sapien
cagtaaacatggcaaggactctctc

SEQ ID NO: 2190660 - DNA, 25 bp, Homo sapien
ctgaggggtcgtcgtcgtggccggg

SEQ ID NO: 2190661 - DNA, 25 bp, Homo sapien
gggtcgtcgtcgtggccgggcttca

SEQ ID NO: 2190662 - DNA, 25 bp, Homo sapien
cgtggccgggcttcacgtctctgcg

SEQ ID NO: 2190663 - DNA, 25 bp, Homo sapien
tcgtcgtcgtggccgggcttcacgt

SEQ ID NO: 2190664 - DNA, 25 bp, Homo sapien
ttctgaaaacatcggtacctgaggg

SEQ ID NO: 2190665 - DNA, 25 bp, Homo sapien
cccagggaagcgctacccaatctgt

SEQ ID NO: 2190666 - DNA, 25 bp, Homo sapien
gaagcgctacccaatctgtttgagg

SEQ ID NO: 2190667 - DNA, 25 bp, Homo sapien
ggtttctgaaaacatcggtacctga

SEQ ID NO: 2190668 - DNA, 25 bp, Homo sapien
gaagcgctacccaatctgtttgagg

SEQ ID NO: 2190669 - DNA, 25 bp, Homo sapien
agggaagcgctacccaatctgtttg

SEQ ID NO: 2190670 - DNA, 25 bp, Homo sapien
tgcccagaaacctgcccccagggaa

SEQ ID NO: 2190671 - DNA, 25 bp, Homo sapien
cccagggaagcgctacccaatctgt

SEQ ID NO: 2190672 - DNA, 25 bp, Homo sapien
tcgtggtcggacttcgcgtctctgc

SEQ ID NO: 2190673 - DNA, 25 bp, Homo sapien
tcgtcgtggtcggacttcgcgtctc

SEQ ID NO: 2190674 - DNA, 25 bp, Homo sapien
cgtggtcggacttcgcgtctctgcg

SEQ ID NO: 2190675 - DNA, 25 bp, Homo sapien
tcgtcgtcgtggtcggacttcgcgt

SEQ ID NO: 2190676 - DNA, 25 bp, Homo sapien
ttctaggcgcgtctgggcacctgcc

SEQ ID NO: 2190677 - DNA, 25 bp, Homo sapien
gtcagcttctaggcgcgtctgggca

SEQ ID NO: 2190678 - DNA, 25 bp, Homo sapien
ccggggtcagcttctaggcgcgtct

SEQ ID NO: 2190679 - DNA, 25 bp, Homo sapien
gcttctaggcgcgtctgggcacctg

SEQ ID NO: 2190680 - DNA, 25 bp, Homo sapien
gcgcgaggctcactcgctgcacttc

SEQ ID NO: 2190681 - DNA, 25 bp, Homo sapien
aggctcactcgctgcacttccgggt

SEQ ID NO: 2190682 - DNA, 25 bp, Homo sapien
gaggctcactcgctgcacttccggg

SEQ ID NO: 2190683 - DNA, 25 bp, Homo sapien
gcgaggctcactcgctgcacttccg

SEQ ID NO: 2190684 - DNA, 25 bp, Homo sapien
agcgtacatgcaaaagcacgagcca

SEQ ID NO: 2190685 - DNA, 25 bp, Homo sapien
ccttgaaagcgtacatgcaaaagca

SEQ ID NO: 2190686 - DNA, 25 bp, Homo sapien
ttcaccttgaaagcgtacatgcaaa

SEQ ID NO: 2190687 - DNA, 25 bp, Homo sapien
gaaagcgtacatgcaaaagcacgag

SEQ ID NO: 2190688 - DNA, 25 bp, Homo sapien
ccagctgaagtgcagctcagcaacc

SEQ ID NO: 2190689 - DNA, 25 bp, Homo sapien
tccaggtaagaagcgtgaagcagct

SEQ ID NO: 2190690 - DNA, 25 bp, Homo sapien
tctgccccaagtttgttggtttcca

SEQ ID NO: 2190691 - DNA, 25 bp, Homo sapien
tgaagtcttaggtggcccagctgaa

SEQ ID NO: 2190692 - DNA, 25 bp, Homo sapien
tcagcttattagctatggtagatga

SEQ ID NO: 2190693 - DNA, 25 bp, Homo sapien
tctgatccactatcagcttattagc

SEQ ID NO: 2190694 - DNA, 25 bp, Homo sapien
tagatgaggtggcttcctgtggatc

SEQ ID NO: 2190695 - DNA, 25 bp, Homo sapien
ttatttgtagattgggatgggagca

SEQ ID NO: 2190696 - DNA, 25 bp, Homo sapien
cttgtggatgagtaatggaaaattc

SEQ ID NO: 2190697 - DNA, 25 bp, Homo sapien
gtggatgagtaatggaaaattctgc

SEQ ID NO: 2190698 - DNA, 25 bp, Homo sapien
cagcaagagaagcttgtggatgagt

SEQ ID NO: 2190699 - DNA, 25 bp, Homo sapien
ctgcttcagcaagagaagcttgtgg

SEQ ID NO: 2190700 - DNA, 25 bp, Homo sapien
actaagccttacctggagtaattct

SEQ ID NO: 2190701 - DNA, 25 bp, Homo sapien
agccttacctggagtaattctatct

SEQ ID NO: 2190702 - DNA, 25 bp, Homo sapien
gtgaccatctagaaagacctgtata

SEQ ID NO: 2190703 - DNA, 25 bp, Homo sapien
catctagaaagacctgtatatctct

SEQ ID NO: 2190704 - DNA, 25 bp, Homo sapien
tgtctcttgatgtggctgatgccct

SEQ ID NO: 2190705 - DNA, 25 bp, Homo sapien
gctgatgccctgtgggctgtagtct

SEQ ID NO: 2190706 - DNA, 25 bp, Homo sapien
catcctgggatgtctcttgatgtgg

SEQ ID NO: 2190707 - DNA, 25 bp, Homo sapien
tactgctctacacccatcacttctg

SEQ ID NO: 2190708 - DNA, 25 bp, Homo sapien
tccatttgtctttggatcaacttca

SEQ ID NO: 2190709 - DNA, 25 bp, Homo sapien
ggtgatagtatgtccatttgtcttt

SEQ ID NO: 2190710 - DNA, 25 bp, Homo sapien
gtccatttgtctttggatcaacttc

SEQ ID NO: 2190711 - DNA, 25 bp, Homo sapien
cttggtgatagtatgtccatttgtc

SEQ ID NO: 2190712 - DNA, 25 bp, Homo sapien
gatatcccttctgcggcagcacaca

SEQ ID NO: 2190713 - DNA, 25 bp, Homo sapien
tcagaatcactcttactacctgtgg

SEQ ID NO: 2190714 - DNA, 25 bp, Homo sapien
tcacagcctgctgatatcccttctg

SEQ ID NO: 2190715 - DNA, 25 bp, Homo sapien
tcttactacctgtggtcacagcctg

SEQ ID NO: 2190716 - DNA, 25 bp, Homo sapien
cagccagcccacagacagggaagtg

SEQ ID NO: 2190717 - DNA, 25 bp, Homo sapien
cggagggcacccagccagcccacag

SEQ ID NO: 2190718 - DNA, 25 bp, Homo sapien
cacccagccagcccacagacaggga

SEQ ID NO: 2190719 - DNA, 25 bp, Homo sapien
ccagccagcccacagacagggaagt

SEQ ID NO: 2190720 - DNA, 25 bp, Homo sapien
tgtctgtgatggtggtgaacgagga

SEQ ID NO: 2190721 - DNA, 25 bp, Homo sapien
acaacctgctggtcattgtctgtga

SEQ ID NO: 2190722 - DNA, 25 bp, Homo sapien
caacctgctggtcattgtctgtgat

SEQ ID NO: 2190723 - DNA, 25 bp, Homo sapien
tgtgatggtggtgaacgaggaggaa

SEQ ID NO: 2190724 - DNA, 25 bp, Homo sapien
caagatacggtcacatgaagtgcgt

SEQ ID NO: 2190725 - DNA, 25 bp, Homo sapien
gggtgagacaagatacggtcacatg

SEQ ID NO: 2190726 - DNA, 25 bp, Homo sapien
gtgcgtggtaaacaagatacgccat

SEQ ID NO: 2190727 - DNA, 25 bp, Homo sapien
cacatgaagtgcgtggtaaacaaga

SEQ ID NO: 2190728 - DNA, 25 bp, Homo sapien
gcagtgtcaaaagtccacgcgggca

SEQ ID NO: 2190729 - DNA, 25 bp, Homo sapien
gctggtcattggctaaattccaccc

SEQ ID NO: 2190730 - DNA, 25 bp, Homo sapien
gaagcagctgctatcgtccactgaa

SEQ ID NO: 2190731 - DNA, 25 bp, Homo sapien
ggcaccatgagcaaagcagtgtcaa

SEQ ID NO: 2190732 - DNA, 25 bp, Homo sapien
tcccagtagtgcttaatgttatcag

SEQ ID NO: 2190733 - DNA, 25 bp, Homo sapien
tagtgcttaatgttatcagcagtgc

SEQ ID NO: 2190734 - DNA, 25 bp, Homo sapien
cttaatgttatcagcagtgcgctgg

SEQ ID NO: 2190735 - DNA, 25 bp, Homo sapien
ccagtagtgcttaatgttatcagca

SEQ ID NO: 2190736 - DNA, 25 bp, Homo sapien
tgtcgattagaatacagttgtctgt

SEQ ID NO: 2190737 - DNA, 25 bp, Homo sapien
tggcgaatggttttggccagtcttc

SEQ ID NO: 2190738 - DNA, 25 bp, Homo sapien
tgttgagtaagagccctccgttggt

SEQ ID NO: 2190739 - DNA, 25 bp, Homo sapien
taagagagggaacaatgtcgattag

SEQ ID NO: 2190740 - DNA, 25 bp, Homo sapien
tacatggtgctccaaagctttccgt

SEQ ID NO: 2190741 - DNA, 25 bp, Homo sapien
ggtgagtccctggtacctggcaaca

SEQ ID NO: 2190742 - DNA, 25 bp, Homo sapien
gccctatagtgtgtccgtggaaatc

SEQ ID NO: 2190743 - DNA, 25 bp, Homo sapien
taaagagcgcagttagctgttagcc

SEQ ID NO: 2190744 - DNA, 25 bp, Homo sapien
ggagcggatgatacacttccccacg

SEQ ID NO: 2190745 - DNA, 25 bp, Homo sapien
ttccccacgtgattgcaaagcagtg

SEQ ID NO: 2190746 - DNA, 25 bp, Homo sapien
aagcagtggtggcttctgtcttata

SEQ ID NO: 2190747 - DNA, 25 bp, Homo sapien
ggaggtctgctccacagagcttgga

SEQ ID NO: 2190748 - DNA, 25 bp, Homo sapien
tctgtaatttagtctggtactcttt

SEQ ID NO: 2190749 - DNA, 25 bp, Homo sapien
ctgtaatttagtctggtactctttg

SEQ ID NO: 2190750 - DNA, 25 bp, Homo sapien
tgtaatttagtctggtactctttgc

SEQ ID NO: 2190751 - DNA, 25 bp, Homo sapien
ttgcccacacaactccttcccaagg

SEQ ID NO: 2190752 - DNA, 25 bp, Homo sapien
cccaaggatggtggcttgccggcag

SEQ ID NO: 2190753 - DNA, 25 bp, Homo sapien
taacacatgtctgatgtctgcagta

SEQ ID NO: 2190754 - DNA, 25 bp, Homo sapien
ggcttgccggcagcaaacccagtta

SEQ ID NO: 2190755 - DNA, 25 bp, Homo sapien
ctccagagaatagcctgtcttcagt

SEQ ID NO: 2190756 - DNA, 25 bp, Homo sapien
agagaatagcctgtcttcagtcttt

SEQ ID NO: 2190757 - DNA, 25 bp, Homo sapien
gagaatagcctgtcttcagtcttta

SEQ ID NO: 2190758 - DNA, 25 bp, Homo sapien
ttttctccagagaatagcctgtctt

SEQ ID NO: 2190759 - DNA, 25 bp, Homo sapien
tcgggcacatttagtgcagcgaata

SEQ ID NO: 2190760 - DNA, 25 bp, Homo sapien
cgcatcgggcacatttagtgcagcg

SEQ ID NO: 2190761 - DNA, 25 bp, Homo sapien
ttgggcacgcatcgggcacatttag

SEQ ID NO: 2190762 - DNA, 25 bp, Homo sapien
gcacgcatcgggcacatttagtgca

SEQ ID NO: 2190763 - DNA, 25 bp, Homo sapien
tccaatgagtatgcagcggttcttc

SEQ ID NO: 2190764 - DNA, 25 bp, Homo sapien
agtatgcagcggttcttcactggga

SEQ ID NO: 2190765 - DNA, 25 bp, Homo sapien
caatgagtatgcagcggttcttcac

SEQ ID NO: 2190766 - DNA, 25 bp, Homo sapien
tcatccaatgagtatgcagcggttc

SEQ ID NO: 2190767 - DNA, 25 bp, Homo sapien
ttcatcttttgggttgaaggagaac

SEQ ID NO: 2190768 - DNA, 25 bp, Homo sapien
tcttttgggttgaaggagaactgaa

SEQ ID NO: 2190769 - DNA, 25 bp, Homo sapien
tcatcttttgggttgaaggagaact

SEQ ID NO: 2190770 - DNA, 25 bp, Homo sapien
catcttttgggttgaaggagaactg

SEQ ID NO: 2190771 - DNA, 25 bp, Homo sapien
ttgagaagggtcttgagcagcgcgg

SEQ ID NO: 2190772 - DNA, 25 bp, Homo sapien
tcccggaaaaggcgcctgcggttga

SEQ ID NO: 2190773 - DNA, 25 bp, Homo sapien
tacctttcggcagcggagaacccag

SEQ ID NO: 2190774 - DNA, 25 bp, Homo sapien
caggatgcagcgaacggcaagtcct

SEQ ID NO: 2190775 - DNA, 25 bp, Homo sapien
ctatccgtgcggcttggctgcgcca

SEQ ID NO: 2190776 - DNA, 25 bp, Homo sapien
ggctgttccggtggctgctgaagca

SEQ ID NO: 2190777 - DNA, 25 bp, Homo sapien
gatcgagcgctactcgcgcttttcg

SEQ ID NO: 2190778 - DNA, 25 bp, Homo sapien
gcagccggtgcccaagcagatcgag

SEQ ID NO: 2190779 - DNA, 25 bp, Homo sapien
cccgggcgaggatgcggctgttccg

SEQ ID NO: 2190780 - DNA, 25 bp, Homo sapien
ccggagacacagaaacggcgtctca

SEQ ID NO: 2190781 - DNA, 25 bp, Homo sapien
cggagacacagaaacggcgtctcat

SEQ ID NO: 2190782 - DNA, 25 bp, Homo sapien
aggcgagactccccaaacctgcggt

SEQ ID NO: 2190783 - DNA, 25 bp, Homo sapien
caggaccctcatcgcaggcgagact

SEQ ID NO: 2190784 - DNA, 25 bp, Homo sapien
tgcaggaccctcatcgcaggcgaga

SEQ ID NO: 2190785 - DNA, 25 bp, Homo sapien
caaacctgcggtcgttagcttcaaa

SEQ ID NO: 2190786 - DNA, 25 bp, Homo sapien
tcttagaaggtagcggccagtttcc

SEQ ID NO: 2190787 - DNA, 25 bp, Homo sapien
gctctgtgaacctcagagcctttag

SEQ ID NO: 2190788 - DNA, 25 bp, Homo sapien
ctttagctcttagaaggtagcggcc

SEQ ID NO: 2190789 - DNA, 25 bp, Homo sapien
ggccagtttccgcattcttactatt

SEQ ID NO: 2190790 - DNA, 25 bp, Homo sapien
gactagattctaaactcccttctgg

SEQ ID NO: 2190791 - DNA, 25 bp, Homo sapien
aactcccttctggaattaggttgat

SEQ ID NO: 2190792 - DNA, 25 bp, Homo sapien
atatggatgcatggcggctttggct

SEQ ID NO: 2190793 - DNA, 25 bp, Homo sapien
caatttaccgttaggactagattct

SEQ ID NO: 2190794 - DNA, 25 bp, Homo sapien
ttacatgaagggtaccacgggtgtc

SEQ ID NO: 2190795 - DNA, 25 bp, Homo sapien
tcctcagcttaagggtattctccta

SEQ ID NO: 2190796 - DNA, 25 bp, Homo sapien
cacgggtgtcagaccccattaggaa

SEQ ID NO: 2190797 - DNA, 25 bp, Homo sapien
gacatcatgcctctttacccctaga

SEQ ID NO: 2190798 - DNA, 25 bp, Homo sapien
tagctgatgctgatacgtggagaat

SEQ ID NO: 2190799 - DNA, 25 bp, Homo sapien
taagggtgacgttattggcatttgt

SEQ ID NO: 2190800 - DNA, 25 bp, Homo sapien
gagaagtgcctcagttaagccccaa

SEQ ID NO: 2190801 - DNA, 25 bp, Homo sapien
ttgcattgatagcagatcctttgcc

SEQ ID NO: 2190802 - DNA, 25 bp, Homo sapien
aagctctgtccttcgagttcaagtg

SEQ ID NO: 2190803 - DNA, 25 bp, Homo sapien
agctctgtccttcgagttcaagtga

SEQ ID NO: 2190804 - DNA, 25 bp, Homo sapien
gctctgtccttcgagttcaagtgat

SEQ ID NO: 2190805 - DNA, 25 bp, Homo sapien
caagctctgtccttcgagttcaagt

SEQ ID NO: 2190806 - DNA, 25 bp, Homo sapien
ccattccagatacagcagatcgtac

SEQ ID NO: 2190807 - DNA, 25 bp, Homo sapien
tccaggattctgtgcgcctttccca

SEQ ID NO: 2190808 - DNA, 25 bp, Homo sapien
gttgctccttgtgaccaaataccat

SEQ ID NO: 2190809 - DNA, 25 bp, Homo sapien
tgtgccctcgtactctccatcttgt

SEQ ID NO: 2190810 - DNA, 25 bp, Homo sapien
gcatcctatatacagctccacagga

SEQ ID NO: 2190811 - DNA, 25 bp, Homo sapien
gaatccggattgaaaccagcatcct

SEQ ID NO: 2190812 - DNA, 25 bp, Homo sapien
ccttaggaatagaagtgaccgaaga

SEQ ID NO: 2190813 - DNA, 25 bp, Homo sapien
tagaagtgaccgaagaatccggatt

SEQ ID NO: 2190814 - DNA, 25 bp, Homo sapien
tgtgagtgccttccatagacactgt

SEQ ID NO: 2190815 - DNA, 25 bp, Homo sapien
tcgtcatcctagcaggaacatggtg

SEQ ID NO: 2190816 - DNA, 25 bp, Homo sapien
gagtgacacgaagcctccttggaac

SEQ ID NO: 2190817 - DNA, 25 bp, Homo sapien
ccacatttgtgagatcggctccaga

SEQ ID NO: 2190818 - DNA, 25 bp, Homo sapien
gtgtctggctctgcactcaactttg

SEQ ID NO: 2190819 - DNA, 25 bp, Homo sapien
ggaccctgtcgaggtccccacactg

SEQ ID NO: 2190820 - DNA, 25 bp, Homo sapien
cttcacgtcgattgatctgaatttg

SEQ ID NO: 2190821 - DNA, 25 bp, Homo sapien
gagcccatttcagttcattgtcttg

SEQ ID NO: 2190822 - DNA, 25 bp, Homo sapien
gcaccttagggcatcattaccgaaa

SEQ ID NO: 2190823 - DNA, 25 bp, Homo sapien
cccttaagtgttggtggcgctgcag

SEQ ID NO: 2190824 - DNA, 25 bp, Homo sapien
taccgaaagtgtctaagcaaatgtc

SEQ ID NO: 2190825 - DNA, 25 bp, Homo sapien
caacgtgcctcccattggaagtggt

SEQ ID NO: 2190826 - DNA, 25 bp, Homo sapien
tagagtattgtaatctcaggaacat

SEQ ID NO: 2190827 - DNA, 25 bp, Homo sapien
tctcagggaatagcctttgataaga

SEQ ID NO: 2190828 - DNA, 25 bp, Homo sapien
taagaatcccatggagatctctgga

SEQ ID NO: 2190829 - DNA, 25 bp, Homo sapien
ggaacataagattatccaagaagcc

SEQ ID NO: 2190830 - DNA, 25 bp, Homo sapien
ttcctttgtctaggagataagcata

SEQ ID NO: 2190831 - DNA, 25 bp, Homo sapien
ggagataagcatagatcccttttat

SEQ ID NO: 2190832 - DNA, 25 bp, Homo sapien
tgtctaggagataagcatagatccc

SEQ ID NO: 2190833 - DNA, 25 bp, Homo sapien
catgataaatgacatccaaatttcc

SEQ ID NO: 2190834 - DNA, 25 bp, Homo sapien
gtagttcgcgttattcagcaccaga

SEQ ID NO: 2190835 - DNA, 25 bp, Homo sapien
tctctgctagagacgggctcatctg

SEQ ID NO: 2190836 - DNA, 25 bp, Homo sapien
ccaagactagtgctgaacggatgcc

SEQ ID NO: 2190837 - DNA, 25 bp, Homo sapien
taaatgcttgggcataaggtcgtgc

SEQ ID NO: 2190838 - DNA, 25 bp, Homo sapien
ttgccagaagcaagtcgttcagtgt

SEQ ID NO: 2190839 - DNA, 25 bp, Homo sapien
cagcaatcccacccttgtttcttag

SEQ ID NO: 2190840 - DNA, 25 bp, Homo sapien
tcgttcagtgtgacttatggcacag

SEQ ID NO: 2190841 - DNA, 25 bp, Homo sapien
ccttggtaaggtcctgacacacagg

SEQ ID NO: 2190842 - DNA, 25 bp, Homo sapien
tgggctctgcctacaagttgctggt

SEQ ID NO: 2190843 - DNA, 25 bp, Homo sapien
tcatattgcacatgggatacacccg

SEQ ID NO: 2190844 - DNA, 25 bp, Homo sapien
tctgggtggcccttgactgcaaaaa

SEQ ID NO: 2190845 - DNA, 25 bp, Homo sapien
taactggtcagaaatgggaaaagcc

SEQ ID NO: 2190846 - DNA, 25 bp, Homo sapien
gaggcaacgtgcaggacccttatgg

SEQ ID NO: 2190847 - DNA, 25 bp, Homo sapien
ccttatggacgcagaagtagcaggt

SEQ ID NO: 2190848 - DNA, 25 bp, Homo sapien
cagaagtcaccccatcagtgcaagt

SEQ ID NO: 2190849 - DNA, 25 bp, Homo sapien
caagtctctctagggaactctgcat

SEQ ID NO: 2190850 - DNA, 25 bp, Homo sapien
gtctctgcacctcgcccaactcttc

SEQ ID NO: 2190851 - DNA, 25 bp, Homo sapien
tctctgcacctcgcccaactcttca

SEQ ID NO: 2190852 - DNA, 25 bp, Homo sapien
ctctgcacctcgcccaactcttcag

SEQ ID NO: 2190853 - DNA, 25 bp, Homo sapien
gtgactattacccttcaaacaccac

SEQ ID NO: 2190854 - DNA, 25 bp, Homo sapien
cccatcctgcatggtgcggctcttg

SEQ ID NO: 2190855 - DNA, 25 bp, Homo sapien
gagctgcagctcctgtgactattac

SEQ ID NO: 2190856 - DNA, 25 bp, Homo sapien
gcatggtgcggctcttgcctcccag

SEQ ID NO: 2190857 - DNA, 25 bp, Homo sapien
gaccggctccgggttgggctgctca

SEQ ID NO: 2190858 - DNA, 25 bp, Homo sapien
accggctccgggttgggctgctcac

SEQ ID NO: 2190859 - DNA, 25 bp, Homo sapien
ggaccggctccgggttgggctgctc

SEQ ID NO: 2190860 - DNA, 25 bp, Homo sapien
ggctctgcttcggggataaggcctg

SEQ ID NO: 2190861 - DNA, 25 bp, Homo sapien
tctgcttcggggataaggcctgcag

SEQ ID NO: 2190862 - DNA, 25 bp, Homo sapien
tgcttcggggataaggcctgcagca

SEQ ID NO: 2190863 - DNA, 25 bp, Homo sapien
cttcggggataaggcctgcagcatc

SEQ ID NO: 2190864 - DNA, 25 bp, Homo sapien
agaaggcatctgttaactttgcaat

SEQ ID NO: 2190865 - DNA, 25 bp, Homo sapien
ctggtgcattttgaagggtggttcc

SEQ ID NO: 2190866 - DNA, 25 bp, Homo sapien
tctggtgcattttgaagggtggttc

SEQ ID NO: 2190867 - DNA, 25 bp, Homo sapien
tggtgcattttgaagggtggttccc

SEQ ID NO: 2190868 - DNA, 25 bp, Homo sapien
caggagacagtttgtaatgagcttc

SEQ ID NO: 2190869 - DNA, 25 bp, Homo sapien
ctggggccagatgggctgcataaat

SEQ ID NO: 2190870 - DNA, 25 bp, Homo sapien
cggagcaaggtgtgactatggcaaa

SEQ ID NO: 2190871 - DNA, 25 bp, Homo sapien
gcaaggtgtgactatggcaaacaag

SEQ ID NO: 2190872 - DNA, 25 bp, Homo sapien
tggcaaacaagagctcatgccttcc

SEQ ID NO: 2190873 - DNA, 25 bp, Homo sapien
ccagctactatttcaccttcactgg

SEQ ID NO: 2190874 - DNA, 25 bp, Homo sapien
agactcccaagaacaattccagcta

SEQ ID NO: 2190875 - DNA, 25 bp, Homo sapien
cttgctgtcatcagactcccaagaa

SEQ ID NO: 2190876 - DNA, 25 bp, Homo sapien
tcccaagaacaattccagctactat

SEQ ID NO: 2190877 - DNA, 25 bp, Homo sapien
acatttctttggattctcctcccca

SEQ ID NO: 2190878 - DNA, 25 bp, Homo sapien
gagactgagatgagcgacagcatca

SEQ ID NO: 2190879 - DNA, 25 bp, Homo sapien
cataaatgccagtagttgatccaag

SEQ ID NO: 2190880 - DNA, 25 bp, Homo sapien
tgtaacacaagctccgtgctgccac

SEQ ID NO: 2190881 - DNA, 25 bp, Homo sapien
gctccataaaaaggaggataaactg

SEQ ID NO: 2190882 - DNA, 25 bp, Homo sapien
ccttgagtggctccataaaaaggag

SEQ ID NO: 2190883 - DNA, 25 bp, Homo sapien
aactgaaaacactcatcattgtggg

SEQ ID NO: 2190884 - DNA, 25 bp, Homo sapien
cattgtggggtaaagtgaaatcatt

SEQ ID NO: 2190885 - DNA, 25 bp, Homo sapien
gttgccaatgaattcccttgacttc

SEQ ID NO: 2190886 - DNA, 25 bp, Homo sapien
cacttttgaattagatcatggctct

SEQ ID NO: 2190887 - DNA, 25 bp, Homo sapien
caaacagttctaggaagttgccaat

SEQ ID NO: 2190888 - DNA, 25 bp, Homo sapien
tgtccacttggttctggaaacggta

SEQ ID NO: 2190889 - DNA, 25 bp, Homo sapien
catcatagtcacgaacaattctggt

SEQ ID NO: 2190890 - DNA, 25 bp, Homo sapien
tctgttctctgcgttggaacgaaca

SEQ ID NO: 2190891 - DNA, 25 bp, Homo sapien
taatgatgtccgatgttgagatgcc

SEQ ID NO: 2190892 - DNA, 25 bp, Homo sapien
tacgtcgggcataaacatcatagtc

SEQ ID NO: 2190893 - DNA, 25 bp, Homo sapien
atgtcatcatgagccacaaagtcaa

SEQ ID NO: 2190894 - DNA, 25 bp, Homo sapien
ttcctttatgtgcttgtaaacatca

SEQ ID NO: 2190895 - DNA, 25 bp, Homo sapien
ctgcttcctttatgtgcttgtaaac

SEQ ID NO: 2190896 - DNA, 25 bp, Homo sapien
tacggaatgtcatcatgagccacaa

SEQ ID NO: 2190897 - DNA, 25 bp, Homo sapien
gagaagagtgatgtcaccactggga

SEQ ID NO: 2190898 - DNA, 25 bp, Homo sapien
tcaccactgggatggatgtgcatgt

SEQ ID NO: 2190899 - DNA, 25 bp, Homo sapien
agaagagtgatgtcaccactgggat

SEQ ID NO: 2190900 - DNA, 25 bp, Homo sapien
agagagaagagtgatgtcaccactg

SEQ ID NO: 2190901 - DNA, 25 bp, Homo sapien
tgcagatttgaaggggggaatggtg

SEQ ID NO: 2190902 - DNA, 25 bp, Homo sapien
ggagacctgaatccttggctgaaat

SEQ ID NO: 2190903 - DNA, 25 bp, Homo sapien
ctgcagatttgaaggggggaatggt

SEQ ID NO: 2190904 - DNA, 25 bp, Homo sapien
gagacctgaatccttggctgaaatg

SEQ ID NO: 2190905 - DNA, 25 bp, Homo sapien
aaaggtgccacatcaagcagttcca

SEQ ID NO: 2190906 - DNA, 25 bp, Homo sapien
cagtcctcgggcttgggcggacgaa

SEQ ID NO: 2190907 - DNA, 25 bp, Homo sapien
ttgggcggacgaaaggtgccacatc

SEQ ID NO: 2190908 - DNA, 25 bp, Homo sapien
ccacatcaagcagttccacatgaca

SEQ ID NO: 2190909 - DNA, 25 bp, Homo sapien
ttagaaattgagagagactttgggc

SEQ ID NO: 2190910 - DNA, 25 bp, Homo sapien
cttagagaatgtgggagaatgagaa

SEQ ID NO: 2190911 - DNA, 25 bp, Homo sapien
tggctgcagaaccagactccctaat

SEQ ID NO: 2190912 - DNA, 25 bp, Homo sapien
ggctttccgtagtcttggctgcaga

SEQ ID NO: 2190913 - DNA, 25 bp, Homo sapien
ccagggagcatctctgataacttcg

SEQ ID NO: 2190914 - DNA, 25 bp, Homo sapien
gataacttcgtctacgtagcgacag

SEQ ID NO: 2190915 - DNA, 25 bp, Homo sapien
tatctctcggcttcattcatcacgg

SEQ ID NO: 2190916 - DNA, 25 bp, Homo sapien
aaactctggcgtgagtgtccaggga

SEQ ID NO: 2190917 - DNA, 25 bp, Homo sapien
ccacaacccatgtaatagccattaa

SEQ ID NO: 2190918 - DNA, 25 bp, Homo sapien
tggtcatccaagtagttcaatatgc

SEQ ID NO: 2190919 - DNA, 25 bp, Homo sapien
tcatccaagtagttcaatatgccct

SEQ ID NO: 2190920 - DNA, 25 bp, Homo sapien
ccattaagggaatatctgaaattct

SEQ ID NO: 2190921 - DNA, 25 bp, Homo sapien
cagtgtttttgcttgcataagggct

SEQ ID NO: 2190922 - DNA, 25 bp, Homo sapien
cttgcataagggctcttgcatgacc

SEQ ID NO: 2190923 - DNA, 25 bp, Homo sapien
tattccatcggcgtatactctgaca

SEQ ID NO: 2190924 - DNA, 25 bp, Homo sapien
catgacctgagtggaagaggtcaaa

SEQ ID NO: 2190925 - DNA, 25 bp, Homo sapien
taagcgggcctgagcaatggtcagt

SEQ ID NO: 2190926 - DNA, 25 bp, Homo sapien
ttttcatggggtgcttgacactggc

SEQ ID NO: 2190927 - DNA, 25 bp, Homo sapien
gggtgcttgacactggcagttggtt

SEQ ID NO: 2190928 - DNA, 25 bp, Homo sapien
ctggtgttcctaagcgggcctgagc

SEQ ID NO: 2190929 - DNA, 25 bp, Homo sapien
agaaggtgctctgcaccaacttggc

SEQ ID NO: 2190930 - DNA, 25 bp, Homo sapien
gaaggtgctctgcaccaacttggct

SEQ ID NO: 2190931 - DNA, 25 bp, Homo sapien
cttcagctctaataggccggcccat

SEQ ID NO: 2190932 - DNA, 25 bp, Homo sapien
cacagcttcagctctaataggccgg

SEQ ID NO: 2190933 - DNA, 25 bp, Homo sapien
tttccttccactgcattaaagccgc

SEQ ID NO: 2190934 - DNA, 25 bp, Homo sapien
cactgcattaaagccgctgcttgct

SEQ ID NO: 2190935 - DNA, 25 bp, Homo sapien
ttacatgaaaatcctctaagcatcg

SEQ ID NO: 2190936 - DNA, 25 bp, Homo sapien
gctgcgggcgcataaggaactcttt

SEQ ID NO: 2190937 - DNA, 25 bp, Homo sapien
catcgttttcctcgctggctgcggg

SEQ ID NO: 2190938 - DNA, 25 bp, Homo sapien
ggaactcttttatgccatagccacg

SEQ ID NO: 2190939 - DNA, 25 bp, Homo sapien
gggattttgggatacctgtttctga

SEQ ID NO: 2190940 - DNA, 25 bp, Homo sapien
ctgagggaggctcattggaaaggga

SEQ ID NO: 2190941 - DNA, 25 bp, Homo sapien
tgtgggcatgtgtgctctatttcct

SEQ ID NO: 2190942 - DNA, 25 bp, Homo sapien
gctgtgggcatgtgtgctctatttc

SEQ ID NO: 2190943 - DNA, 25 bp, Homo sapien
ctccctctagctctacaccctcaga

SEQ ID NO: 2190944 - DNA, 25 bp, Homo sapien
ccctctagctctacaccctcagaga

SEQ ID NO: 2190945 - DNA, 25 bp, Homo sapien
gaatgctccctctagctctacaccc

SEQ ID NO: 2190946 - DNA, 25 bp, Homo sapien
tgctccctctagctctacaccctca

SEQ ID NO: 2190947 - DNA, 25 bp, Homo sapien
gaagacaaagccacttttgagccca

SEQ ID NO: 2190948 - DNA, 25 bp, Homo sapien
gacccctggacttcatgcaacgtga

SEQ ID NO: 2190949 - DNA, 25 bp, Homo sapien
tgctaattgccagtggagggcccct

SEQ ID NO: 2190950 - DNA, 25 bp, Homo sapien
tccgggcattcactatgggcacctg

SEQ ID NO: 2190951 - DNA, 25 bp, Homo sapien
cctatttgccctcctggaagcacaa

SEQ ID NO: 2190952 - DNA, 25 bp, Homo sapien
tttgccctcctggaagcacaaaaca

SEQ ID NO: 2190953 - DNA, 25 bp, Homo sapien
cttccagcagcaggtttaactctac

SEQ ID NO: 2190954 - DNA, 25 bp, Homo sapien
cctcctggaagcacaaaacacttcc

SEQ ID NO: 2190955 - DNA, 25 bp, Homo sapien
tgtgttacatttaggagcccttttc

SEQ ID NO: 2190956 - DNA, 25 bp, Homo sapien
tacgtgtactgggtgacgtgcaaat

SEQ ID NO: 2190957 - DNA, 25 bp, Homo sapien
aagagccaagccctgtgttacattt

SEQ ID NO: 2190958 - DNA, 25 bp, Homo sapien
aggagcccttttcctacgtgtactg

SEQ ID NO: 2190959 - DNA, 25 bp, Homo sapien
tactacagcaagtactgcagggtcc

SEQ ID NO: 2190960 - DNA, 25 bp, Homo sapien
aatgagcttgattgacaagtgagtc

SEQ ID NO: 2190961 - DNA, 25 bp, Homo sapien
gtaccataaccagatttcctccttg

SEQ ID NO: 2190962 - DNA, 25 bp, Homo sapien
aggcagtttcccagtactacagcaa

SEQ ID NO: 2190963 - DNA, 25 bp, Homo sapien
attgagttcctttggataatccagg

SEQ ID NO: 2190964 - DNA, 25 bp, Homo sapien
tggctaacagtcattcaattgcaga

SEQ ID NO: 2190965 - DNA, 25 bp, Homo sapien
gggcctggtatctcatctccagata

SEQ ID NO: 2190966 - DNA, 25 bp, Homo sapien
ggtcacatattctctaagtctcctg

SEQ ID NO: 2190967 - DNA, 25 bp, Homo sapien
ttggatagccttcacgttgaaagct

SEQ ID NO: 2190968 - DNA, 25 bp, Homo sapien
ccccactcaatgcatgatgccttgg

SEQ ID NO: 2190969 - DNA, 25 bp, Homo sapien
gatgccttggtacctcaacattttt

SEQ ID NO: 2190970 - DNA, 25 bp, Homo sapien
catttaggactgtgggacctcaaag

SEQ ID NO: 2190971 - DNA, 25 bp, Homo sapien
gggttgaaacccactcattctcctg

SEQ ID NO: 2190972 - DNA, 25 bp, Homo sapien
gagagccttgtaaacagtgatcaca

SEQ ID NO: 2190973 - DNA, 25 bp, Homo sapien
caatcaatttagacgctagggtcaa

SEQ ID NO: 2190974 - DNA, 25 bp, Homo sapien
ggtcaagttggagttggtccatcca

SEQ ID NO: 2190975 - DNA, 25 bp, Homo sapien
ttgttcttgtcatctaagtctatcc

SEQ ID NO: 2190976 - DNA, 25 bp, Homo sapien
agtctatccagggagctgacatact

SEQ ID NO: 2190977 - DNA, 25 bp, Homo sapien
tctaagtctatccagggagctgaca

SEQ ID NO: 2190978 - DNA, 25 bp, Homo sapien
taagtctatccagggagctgacata

SEQ ID NO: 2190979 - DNA, 25 bp, Homo sapien
ggggagcgcgattgtcctcttccat

SEQ ID NO: 2190980 - DNA, 25 bp, Homo sapien
attggggagcgcgattgtcctcttc

SEQ ID NO: 2190981 - DNA, 25 bp, Homo sapien
gccacaattggggagcgcgattgtc

SEQ ID NO: 2190982 - DNA, 25 bp, Homo sapien
cttgcgccacaattggggagcgcga

SEQ ID NO: 2190983 - DNA, 25 bp, Homo sapien
tctctgtgcccagcgctcaaagata

SEQ ID NO: 2190984 - DNA, 25 bp, Homo sapien
gatgcactcctgatggcctaccatg

SEQ ID NO: 2190985 - DNA, 25 bp, Homo sapien
ttgaccaaaggtcaagcaggctctc

SEQ ID NO: 2190986 - DNA, 25 bp, Homo sapien
tagaggcctctaccctttggagttc

SEQ ID NO: 2190987 - DNA, 25 bp, Homo sapien
cattgacaattgctgtgctctgaac

SEQ ID NO: 2190988 - DNA, 25 bp, Homo sapien
gggctgttgttcattgacaattgct

SEQ ID NO: 2190989 - DNA, 25 bp, Homo sapien
tagcgctatgatggcctgttgtgcg

SEQ ID NO: 2190990 - DNA, 25 bp, Homo sapien
gctgtgctctgaactagcgctatga

SEQ ID NO: 2190991 - DNA, 25 bp, Homo sapien
cagtcgtgaaaaaggctattgttta

SEQ ID NO: 2190992 - DNA, 25 bp, Homo sapien
ttaatctaccccgtccctcgctgaa

SEQ ID NO: 2190993 - DNA, 25 bp, Homo sapien
tttaatctaccccgtccctcgctga

SEQ ID NO: 2190994 - DNA, 25 bp, Homo sapien
taatctaccccgtccctcgctgaag

SEQ ID NO: 2190995 - DNA, 25 bp, Homo sapien
ttcagatccaaacagttagctcttc

SEQ ID NO: 2190996 - DNA, 25 bp, Homo sapien
tttcttcagatccaaacagttagct

SEQ ID NO: 2190997 - DNA, 25 bp, Homo sapien
tcagatccaaacagttagctcttct

SEQ ID NO: 2190998 - DNA, 25 bp, Homo sapien
tcttcagatccaaacagttagctct

SEQ ID NO: 2190999 - DNA, 25 bp, Homo sapien
tgccgtgtgtttgctgattaactgg

SEQ ID NO: 2191000 - DNA, 25 bp, Homo sapien
cattttgtaactgcttctcatcatt

SEQ ID NO: 2191001 - DNA, 25 bp, Homo sapien
gatgacgttatccaaggctgctctg

SEQ ID NO: 2191002 - DNA, 25 bp, Homo sapien
aactcctctttgactgatgacgtta

SEQ ID NO: 2191003 - DNA, 25 bp, Homo sapien
tggatttcctaaaattaactatcaa

SEQ ID NO: 2191004 - DNA, 25 bp, Homo sapien
atttcctaaaattaactatcaacag

SEQ ID NO: 2191005 - DNA, 25 bp, Homo sapien
gatttcctaaaattaactatcaaca

SEQ ID NO: 2191006 - DNA, 25 bp, Homo sapien
ttggatttcctaaaattaactatca

SEQ ID NO: 2191007 - DNA, 25 bp, Homo sapien
ttttgccatttgccagcaacccttg

SEQ ID NO: 2191008 - DNA, 25 bp, Homo sapien
gatgcaagatatctgtgcttgacct

SEQ ID NO: 2191009 - DNA, 25 bp, Homo sapien
tgcttgacctgagagcctaacccat

SEQ ID NO: 2191010 - DNA, 25 bp, Homo sapien
gagcctaacccattgtatcttccca

SEQ ID NO: 2191011 - DNA, 25 bp, Homo sapien
caagatatctgtgcttgacctgaga

SEQ ID NO: 2191012 - DNA, 25 bp, Homo sapien
cttgaaggggataaatgaactcctc

SEQ ID NO: 2191013 - DNA, 25 bp, Homo sapien
gaactcctcattagattcagattga

SEQ ID NO: 2191014 - DNA, 25 bp, Homo sapien
gtgcactgatgtgacctgtggaaga

SEQ ID NO: 2191015 - DNA, 25 bp, Homo sapien
tcatggcaggatttgatgaagttgg

SEQ ID NO: 2191016 - DNA, 25 bp, Homo sapien
cttgtctggtttcttgcctaagttc

SEQ ID NO: 2191017 - DNA, 25 bp, Homo sapien
ttgtctggtttcttgcctaagttca

SEQ ID NO: 2191018 - DNA, 25 bp, Homo sapien
gcttgtctggtttcttgcctaagtt

SEQ ID NO: 2191019 - DNA, 25 bp, Homo sapien
tgatgtaaaacctagaggtcttcct

SEQ ID NO: 2191020 - DNA, 25 bp, Homo sapien
caagccagatctggttggatctcac

SEQ ID NO: 2191021 - DNA, 25 bp, Homo sapien
tagaggtcttccttcccaagccaga

SEQ ID NO: 2191022 - DNA, 25 bp, Homo sapien
tgagcctgaatcagggttgatgtaa

SEQ ID NO: 2191023 - DNA, 25 bp, Homo sapien
gtattaagtaacttcagctgttcca

SEQ ID NO: 2191024 - DNA, 25 bp, Homo sapien
tagttgttgagtccatagtccaagc

SEQ ID NO: 2191025 - DNA, 25 bp, Homo sapien
tagtccaagcaggttttatcgtttg

SEQ ID NO: 2191026 - DNA, 25 bp, Homo sapien
tcttgtaactgctatagaacaccac

SEQ ID NO: 2191027 - DNA, 25 bp, Homo sapien
atttaaatgccatgatccaggatgg

SEQ ID NO: 2191028 - DNA, 25 bp, Homo sapien
cttttatttaaatgccatgatccag

SEQ ID NO: 2191029 - DNA, 25 bp, Homo sapien
ttttatttaaatgccatgatccagg

SEQ ID NO: 2191030 - DNA, 25 bp, Homo sapien
ttatttaaatgccatgatccaggat

SEQ ID NO: 2191031 - DNA, 25 bp, Homo sapien
catccatggactgcacgtagtcctc

SEQ ID NO: 2191032 - DNA, 25 bp, Homo sapien
tcctccagcatatctgttccgactt

SEQ ID NO: 2191033 - DNA, 25 bp, Homo sapien
catggactgcacgtagtcctcaaaa

SEQ ID NO: 2191034 - DNA, 25 bp, Homo sapien
gactgcacgtagtcctcaaaagcag

SEQ ID NO: 2191035 - DNA, 25 bp, Homo sapien
tgaagtttcttaattccgtatccca

SEQ ID NO: 2191036 - DNA, 25 bp, Homo sapien
tcttaattccgtatcccactggaac

SEQ ID NO: 2191037 - DNA, 25 bp, Homo sapien
atcccactggaactagtttagatga

SEQ ID NO: 2191038 - DNA, 25 bp, Homo sapien
ccactggaactagtttagatgagcc

SEQ ID NO: 2191039 - DNA, 25 bp, Homo sapien
gcttctgacgcgctcctctaatttc

SEQ ID NO: 2191040 - DNA, 25 bp, Homo sapien
cttgaatgcttctgacgcgctcctc

SEQ ID NO: 2191041 - DNA, 25 bp, Homo sapien
gaatgcttctgacgcgctcctctaa

SEQ ID NO: 2191042 - DNA, 25 bp, Homo sapien
ttgattcatattgtgcaagacgttc

SEQ ID NO: 2191043 - DNA, 25 bp, Homo sapien
cctcatcatcagatccaaagaggtc

SEQ ID NO: 2191044 - DNA, 25 bp, Homo sapien
tcatcagatccaaagaggtcaatgt

SEQ ID NO: 2191045 - DNA, 25 bp, Homo sapien
ttccacatcggcaggaccatacttg

SEQ ID NO: 2191046 - DNA, 25 bp, Homo sapien
catcggcaggaccatacttgcccaa

SEQ ID NO: 2191047 - DNA, 25 bp, Homo sapien
gctggacacggcttcaaatactgcc

SEQ ID NO: 2191048 - DNA, 25 bp, Homo sapien
ggcatgacacaagtcggcaggcagt

SEQ ID NO: 2191049 - DNA, 25 bp, Homo sapien
agggcatgacacaagtcggcaggca

SEQ ID NO: 2191050 - DNA, 25 bp, Homo sapien
aggcagtgggctggacacggcttca

SEQ ID NO: 2191051 - DNA, 25 bp, Homo sapien
gtgtcggctgtatccgagagctggg

SEQ ID NO: 2191052 - DNA, 25 bp, Homo sapien
cggctgtatccgagagctggggagc

SEQ ID NO: 2191053 - DNA, 25 bp, Homo sapien
tgtatccgagagctggggagcagca

SEQ ID NO: 2191054 - DNA, 25 bp, Homo sapien
ggtgtcggctgtatccgagagctgg

SEQ ID NO: 2191055 - DNA, 25 bp, Homo sapien
agtaagaatttggtagctccctgag

SEQ ID NO: 2191056 - DNA, 25 bp, Homo sapien
cagtttgaattgagggctggacttg

SEQ ID NO: 2191057 - DNA, 25 bp, Homo sapien
gtgaaacataaagtccagcttctgg

SEQ ID NO: 2191058 - DNA, 25 bp, Homo sapien
gtagataacatctgagccctcccca

SEQ ID NO: 2191059 - DNA, 25 bp, Homo sapien
ggcagtgtcccagtgagccagtttg

SEQ ID NO: 2191060 - DNA, 25 bp, Homo sapien
cagattctttctgatcaaagccggg

SEQ ID NO: 2191061 - DNA, 25 bp, Homo sapien
gaaaacattcagaagaggctgatag

SEQ ID NO: 2191062 - DNA, 25 bp, Homo sapien
tcagatagttgaagaaccacctcat

SEQ ID NO: 2191063 - DNA, 25 bp, Homo sapien
tctaattcattcctcaattgggcgg

SEQ ID NO: 2191064 - DNA, 25 bp, Homo sapien
taactgccctggttaatttgaaaga

SEQ ID NO: 2191065 - DNA, 25 bp, Homo sapien
tgtgttaatcgttttggccctccac

SEQ ID NO: 2191066 - DNA, 25 bp, Homo sapien
ggccctccactagacactcttggga

SEQ ID NO: 2191067 - DNA, 25 bp, Homo sapien
gtaatccatcactaggcagtggctc

SEQ ID NO: 2191068 - DNA, 25 bp, Homo sapien
gggtcacatcataacctgtaagtaa

SEQ ID NO: 2191069 - DNA, 25 bp, Homo sapien
gcagtggctccacagcattcggata

SEQ ID NO: 2191070 - DNA, 25 bp, Homo sapien
gggacatagagaagatgcactgttt

SEQ ID NO: 2191071 - DNA, 25 bp, Homo sapien
ccaaaggctgatagggtgaacggct

SEQ ID NO: 2191072 - DNA, 25 bp, Homo sapien
gctgatagggtgaacggcttgccca

SEQ ID NO: 2191073 - DNA, 25 bp, Homo sapien
ggtgaacggcttgcccaaggcacat

SEQ ID NO: 2191074 - DNA, 25 bp, Homo sapien
tagggtgaacggcttgcccaaggca

SEQ ID NO: 2191075 - DNA, 25 bp, Homo sapien
tgccacagggcttctttatctacct

SEQ ID NO: 2191076 - DNA, 25 bp, Homo sapien
gccacagggcttctttatctacctc

SEQ ID NO: 2191077 - DNA, 25 bp, Homo sapien
gagatctttgagttggctcctgccc

SEQ ID NO: 2191078 - DNA, 25 bp, Homo sapien
agcatgttgcttgcccttagcattc

SEQ ID NO: 2191079 - DNA, 25 bp, Homo sapien
taatatagacccagcatgttgcttg

SEQ ID NO: 2191080 - DNA, 25 bp, Homo sapien
caggtgtcccaggtaaaaagagcca

SEQ ID NO: 2191081 - DNA, 25 bp, Homo sapien
ccccaagcgatgctgttgaaactgt

SEQ ID NO: 2191082 - DNA, 25 bp, Homo sapien
tattgtctgctatgaaacagctgct

SEQ ID NO: 2191083 - DNA, 25 bp, Homo sapien
tttactttattgtctgctatgaaac

SEQ ID NO: 2191084 - DNA, 25 bp, Homo sapien
tttattgtctgctatgaaacagctg

SEQ ID NO: 2191085 - DNA, 25 bp, Homo sapien
gccaagaggaaagaagtggcttttc

SEQ ID NO: 2191086 - DNA, 25 bp, Homo sapien
gccatgaagagcatgagaacaatat

SEQ ID NO: 2191087 - DNA, 25 bp, Homo sapien
caatattctgcaattaaggattcca

SEQ ID NO: 2191088 - DNA, 25 bp, Homo sapien
ggattccattaagttgaagaaaaga

SEQ ID NO: 2191089 - DNA, 25 bp, Homo sapien
aatgactgtagctccctgtctgccc

SEQ ID NO: 2191090 - DNA, 25 bp, Homo sapien
tttgtgttcatttgtcattcgttct

SEQ ID NO: 2191091 - DNA, 25 bp, Homo sapien
tttgtcattcgttctttgacttcag

SEQ ID NO: 2191092 - DNA, 25 bp, Homo sapien
gtgttcatttgtcattcgttctttg

SEQ ID NO: 2191093 - DNA, 25 bp, Homo sapien
ccccaattcttgttatcaattttct

SEQ ID NO: 2191094 - DNA, 25 bp, Homo sapien
atgcgagtcgcccttggtaactggc

SEQ ID NO: 2191095 - DNA, 25 bp, Homo sapien
gccatggtgttttgcaaattattgc

SEQ ID NO: 2191096 - DNA, 25 bp, Homo sapien
gtaactggcgaaaaaactgataatc

SEQ ID NO: 2191097 - DNA, 25 bp, Homo sapien
tgcaattatgttcaccatgcgagtc

SEQ ID NO: 2191098 - DNA, 25 bp, Homo sapien
aggtcaaattgctgaatagaaagtc

SEQ ID NO: 2191099 - DNA, 25 bp, Homo sapien
ctgttttgaacaaaaggtcaaattg

SEQ ID NO: 2191100 - DNA, 25 bp, Homo sapien
ttgctgaatagaaagtcttgattaa

SEQ ID NO: 2191101 - DNA, 25 bp, Homo sapien
tgttttgaacaaaaggtcaaattgc

SEQ ID NO: 2191102 - DNA, 25 bp, Homo sapien
aagtacaaagcattgaaaggatgtt

SEQ ID NO: 2191103 - DNA, 25 bp, Homo sapien
catctgattactgaagtacaaagca

SEQ ID NO: 2191104 - DNA, 25 bp, Homo sapien
aaggatgttgtcttgagcctttcat

SEQ ID NO: 2191105 - DNA, 25 bp, Homo sapien
tgaagtacaaagcattgaaaggatg

SEQ ID NO: 2191106 - DNA, 25 bp, Homo sapien
tagtgaccacctgaaaaatcaattc

SEQ ID NO: 2191107 - DNA, 25 bp, Homo sapien
caagtttgtgggtttacattctaca

SEQ ID NO: 2191108 - DNA, 25 bp, Homo sapien
tacatcacctagcaacctcctgact

SEQ ID NO: 2191109 - DNA, 25 bp, Homo sapien
ctgactcagccagatctcttgtcta

SEQ ID NO: 2191110 - DNA, 25 bp, Homo sapien
gcactatctataaggagacccattt

SEQ ID NO: 2191111 - DNA, 25 bp, Homo sapien
catactgtgcactatctataaggag

SEQ ID NO: 2191112 - DNA, 25 bp, Homo sapien
cagctgtgggcccatactgtgcact

SEQ ID NO: 2191113 - DNA, 25 bp, Homo sapien
gggcccatactgtgcactatctata

SEQ ID NO: 2191114 - DNA, 25 bp, Homo sapien
tgttccccaggggaccgaccatcca

SEQ ID NO: 2191115 - DNA, 25 bp, Homo sapien
tggactcagaaggattgcagctgtg

SEQ ID NO: 2191116 - DNA, 25 bp, Homo sapien
aagtttgcttgtggaagtggactca

SEQ ID NO: 2191117 - DNA, 25 bp, Homo sapien
gaagtggactcagaaggattgcagc

SEQ ID NO: 2191118 - DNA, 25 bp, Homo sapien
aaaagacttgaagtttgcttgtgga

SEQ ID NO: 2191119 - DNA, 25 bp, Homo sapien
ttactgcatcattcgtgggggtggg

SEQ ID NO: 2191120 - DNA, 25 bp, Homo sapien
ccagcgcttattatgggtcaacagc

SEQ ID NO: 2191121 - DNA, 25 bp, Homo sapien
caacagctgcgttaaccaacggaag

SEQ ID NO: 2191122 - DNA, 25 bp, Homo sapien
tcaggtcactaaactccgtggctga

SEQ ID NO: 2191123 - DNA, 25 bp, Homo sapien
gacaagcagctatattgacccagcg

SEQ ID NO: 2191124 - DNA, 25 bp, Homo sapien
aagcagtaatcaggattcgctaaaa

SEQ ID NO: 2191125 - DNA, 25 bp, Homo sapien
aactaaacaaataacttaatcgctg

SEQ ID NO: 2191126 - DNA, 25 bp, Homo sapien
aaataacttaatcgctgtcgtcctc

SEQ ID NO: 2191127 - DNA, 25 bp, Homo sapien
aaataactggtgtataatagtataa

SEQ ID NO: 2191128 - DNA, 25 bp, Homo sapien
cctactgtgtcaggctgttcatgca

SEQ ID NO: 2191129 - DNA, 25 bp, Homo sapien
cattgctgtctcagaagcaggccgt

SEQ ID NO: 2191130 - DNA, 25 bp, Homo sapien
cagcctgtttcacattgtcctctat

SEQ ID NO: 2191131 - DNA, 25 bp, Homo sapien
tggcataggaatccccagctttggc

SEQ ID NO: 2191132 - DNA, 25 bp, Homo sapien
atcacattgacaacttttctattac

SEQ ID NO: 2191133 - DNA, 25 bp, Homo sapien
ctgaaaatcacattgacaacttttc

SEQ ID NO: 2191134 - DNA, 25 bp, Homo sapien
aaatcacattgacaacttttctatt

SEQ ID NO: 2191135 - DNA, 25 bp, Homo sapien
gaaaatcacattgacaacttttcta

SEQ ID NO: 2191136 - DNA, 25 bp, Homo sapien
caccagtagatgttaacatcaaaag

SEQ ID NO: 2191137 - DNA, 25 bp, Homo sapien
cagaacaccagtagatgttaacatc

SEQ ID NO: 2191138 - DNA, 25 bp, Homo sapien
ccagaacaccagtagatgttaacat

SEQ ID NO: 2191139 - DNA, 25 bp, Homo sapien
gaacaccagtagatgttaacatcaa

SEQ ID NO: 2191140 - DNA, 25 bp, Homo sapien
aaatgacagtcgttatacacagtta

SEQ ID NO: 2191141 - DNA, 25 bp, Homo sapien
taagtgtcttctgtcaacaagtgcc

SEQ ID NO: 2191142 - DNA, 25 bp, Homo sapien
caagtgccccgtaactggtgtgtga

SEQ ID NO: 2191143 - DNA, 25 bp, Homo sapien
tactgtcagtacctagcaacatttc

SEQ ID NO: 2191144 - DNA, 25 bp, Homo sapien
tatacatcttaattacgtaattact

SEQ ID NO: 2191145 - DNA, 25 bp, Homo sapien
tacatcttaattacgtaattactat

SEQ ID NO: 2191146 - DNA, 25 bp, Homo sapien
catcttaattacgtaattactatca

SEQ ID NO: 2191147 - DNA, 25 bp, Homo sapien
tcttaattacgtaattactatcata

SEQ ID NO: 2191148 - DNA, 25 bp, Homo sapien
tctggaacaggatggtagtagtaga

SEQ ID NO: 2191149 - DNA, 25 bp, Homo sapien
actcagctgactggatcctgggtag

SEQ ID NO: 2191150 - DNA, 25 bp, Homo sapien
gcagccttccgcaactttataattt

SEQ ID NO: 2191151 - DNA, 25 bp, Homo sapien
tttataattttgcacgtcctccaag

SEQ ID NO: 2191152 - DNA, 25 bp, Homo sapien
ggtgaagaaccgctaagagactttc

SEQ ID NO: 2191153 - DNA, 25 bp, Homo sapien
tatatcttgaaatgtctggaggcca

SEQ ID NO: 2191154 - DNA, 25 bp, Homo sapien
catgcaggcacacgtattaatggca

SEQ ID NO: 2191155 - DNA, 25 bp, Homo sapien
cagaaagctctcgtgaaggtgggaa

SEQ ID NO: 2191156 - DNA, 25 bp, Homo sapien
ttcatcttcccgccccacttcacca

SEQ ID NO: 2191157 - DNA, 25 bp, Homo sapien
cttttcatcttcccgccccacttca

SEQ ID NO: 2191158 - DNA, 25 bp, Homo sapien
ttttttaatgcatgattgtgactgt

SEQ ID NO: 2191159 - DNA, 25 bp, Homo sapien
acactgattacattgcaagcctcat

SEQ ID NO: 2191160 - DNA, 25 bp, Homo sapien
ttaatgcatgattgtgactgtacct

SEQ ID NO: 2191161 - DNA, 25 bp, Homo sapien
ctgattacattgcaagcctcattta

SEQ ID NO: 2191162 - DNA, 25 bp, Homo sapien
tgatttgacccatggttcatctgaa

SEQ ID NO: 2191163 - DNA, 25 bp, Homo sapien
tgtgttttgtggtttgatttgaccc

SEQ ID NO: 2191164 - DNA, 25 bp, Homo sapien
tatattaagggttctactgtccact

SEQ ID NO: 2191165 - DNA, 25 bp, Homo sapien
tcatctgaatccaggcaattacact

SEQ ID NO: 2191166 - DNA, 25 bp, Homo sapien
aaaaatggaaatgcctgaagagtgc

SEQ ID NO: 2191167 - DNA, 25 bp, Homo sapien
ggaaatgcctgaagagtgctttcac

SEQ ID NO: 2191168 - DNA, 25 bp, Homo sapien
aatggaaatgcctgaagagtgcttt

SEQ ID NO: 2191169 - DNA, 25 bp, Homo sapien
acaaaaatggaaatgcctgaagagt

SEQ ID NO: 2191170 - DNA, 25 bp, Homo sapien
ctgagcagacccacatgggcctgct

SEQ ID NO: 2191171 - DNA, 25 bp, Homo sapien
ctgcattaatcaagggacagctgct

SEQ ID NO: 2191172 - DNA, 25 bp, Homo sapien
gctgctgccattcccaaggcgctgc

SEQ ID NO: 2191173 - DNA, 25 bp, Homo sapien
tgccctgcagttggctgagcagacc

SEQ ID NO: 2191174 - DNA, 25 bp, Homo sapien
gacgaccagttaacaacatgaaata

SEQ ID NO: 2191175 - DNA, 25 bp, Homo sapien
aatgtttgatgtaacctcgagtttc

SEQ ID NO: 2191176 - DNA, 25 bp, Homo sapien
gatgtaacctcgagtttctctctga

SEQ ID NO: 2191177 - DNA, 25 bp, Homo sapien
cgggtagacgaccagttaacaacat

SEQ ID NO: 2191178 - DNA, 25 bp, Homo sapien
taattccaatactaagggagaaggc

SEQ ID NO: 2191179 - DNA, 25 bp, Homo sapien
tgtgtgttgccatatctagtgtaaa

SEQ ID NO: 2191180 - DNA, 25 bp, Homo sapien
tcttgacagttgcttgataacagct

SEQ ID NO: 2191181 - DNA, 25 bp, Homo sapien
tgcatgatatttagcagcaagagca

SEQ ID NO: 2191182 - DNA, 25 bp, Homo sapien
agctcccaatgccgtcatctggcat

SEQ ID NO: 2191183 - DNA, 25 bp, Homo sapien
tattttgccatcaaaccaaatttgc

SEQ ID NO: 2191184 - DNA, 25 bp, Homo sapien
tgctgtagcatagcaaagctcccaa

SEQ ID NO: 2191185 - DNA, 25 bp, Homo sapien
ttttgccatcaaaccaaatttgctg

SEQ ID NO: 2191186 - DNA, 25 bp, Homo sapien
cagtgatgagcagcgaattgctttt

SEQ ID NO: 2191187 - DNA, 25 bp, Homo sapien
aagtgggcattatgccagttcagca

SEQ ID NO: 2191188 - DNA, 25 bp, Homo sapien
gagcagcgaattgcttttaaagtgg

SEQ ID NO: 2191189 - DNA, 25 bp, Homo sapien
tggaaaaccaatcttccaccattct

SEQ ID NO: 2191190 - DNA, 25 bp, Homo sapien
tttacttattgtcttcacctccctg

SEQ ID NO: 2191191 - DNA, 25 bp, Homo sapien
tactacctgtttacttattgtcttc

SEQ ID NO: 2191192 - DNA, 25 bp, Homo sapien
agcagaaatgttgaaaagtttcttt

SEQ ID NO: 2191193 - DNA, 25 bp, Homo sapien
ctacctgtttacttattgtcttcac

SEQ ID NO: 2191194 - DNA, 25 bp, Homo sapien
gttcaatttacaggctggcttctct

SEQ ID NO: 2191195 - DNA, 25 bp, Homo sapien
tatctgtgtcctgataatgttcaat

SEQ ID NO: 2191196 - DNA, 25 bp, Homo sapien
gctctgagagcgcacagaactgttt

SEQ ID NO: 2191197 - DNA, 25 bp, Homo sapien
tcctgctctgagagcgcacagaact

SEQ ID NO: 2191198 - DNA, 25 bp, Homo sapien
accttgttagataccgctgaagctg

SEQ ID NO: 2191199 - DNA, 25 bp, Homo sapien
gccgggaattggaagcgtctgtcat

SEQ ID NO: 2191200 - DNA, 25 bp, Homo sapien
gttagataccgctgaagctgatcca

SEQ ID NO: 2191201 - DNA, 25 bp, Homo sapien
tgatccagtggctggccgggaattg

SEQ ID NO: 2191202 - DNA, 25 bp, Homo sapien
caaagctcacgttgcattgagggag

SEQ ID NO: 2191203 - DNA, 25 bp, Homo sapien
gctctctgtaggtcggatggctcta

SEQ ID NO: 2191204 - DNA, 25 bp, Homo sapien
ttatatggatcgatattcaggaaaa

SEQ ID NO: 2191205 - DNA, 25 bp, Homo sapien
tggctctacgtgtagagagcgtaga

SEQ ID NO: 2191206 - DNA, 25 bp, Homo sapien
cccgatctcgacaaaggttggcttt

SEQ ID NO: 2191207 - DNA, 25 bp, Homo sapien
gatggctgcggatcttctctggctc

SEQ ID NO: 2191208 - DNA, 25 bp, Homo sapien
ctggtggcggagacagcagttacca

SEQ ID NO: 2191209 - DNA, 25 bp, Homo sapien
atttcctccccgatctcgacaaagg

SEQ ID NO: 2191210 - DNA, 25 bp, Homo sapien
taacagttgttattgggcacctgac

SEQ ID NO: 2191211 - DNA, 25 bp, Homo sapien
tggaatcttttaacagttgttattg

SEQ ID NO: 2191212 - DNA, 25 bp, Homo sapien
atcttttaacagttgttattgggca

SEQ ID NO: 2191213 - DNA, 25 bp, Homo sapien
tttaacagttgttattgggcacctg

SEQ ID NO: 2191214 - DNA, 25 bp, Homo sapien
cccaaaagatcagacctgagcatca

SEQ ID NO: 2191215 - DNA, 25 bp, Homo sapien
tcacccaaaagatcagacctgagca

SEQ ID NO: 2191216 - DNA, 25 bp, Homo sapien
agatcagacctgagcatcacagccc

SEQ ID NO: 2191217 - DNA, 25 bp, Homo sapien
aacacagcgtcatcccccacgtgat

SEQ ID NO: 2191218 - DNA, 25 bp, Homo sapien
accagaggccatagctccctttgag

SEQ ID NO: 2191219 - DNA, 25 bp, Homo sapien
caccagaggccatagctccctttga

SEQ ID NO: 2191220 - DNA, 25 bp, Homo sapien
ccagaggccatagctccctttgaga

SEQ ID NO: 2191221 - DNA, 25 bp, Homo sapien
cacgtccagacttcgcaagcagttg

SEQ ID NO: 2191222 - DNA, 25 bp, Homo sapien
caagcagttgcatgcatgtgctcgc

SEQ ID NO: 2191223 - DNA, 25 bp, Homo sapien
aaagtggcgtctgcgagtagagctc

SEQ ID NO: 2191224 - DNA, 25 bp, Homo sapien
caccttgtctgctgcacatgagggt

SEQ ID NO: 2191225 - DNA, 25 bp, Homo sapien
gcagttcacatcagtagagggtggc

SEQ ID NO: 2191226 - DNA, 25 bp, Homo sapien
tgtcccccagtgcactgagtcagct

SEQ ID NO: 2191227 - DNA, 25 bp, Homo sapien
agttcacatcagtagagggtggccc

SEQ ID NO: 2191228 - DNA, 25 bp, Homo sapien
ctgcagttcacatcagtagagggtg

SEQ ID NO: 2191229 - DNA, 25 bp, Homo sapien
aaactcttcgctggttgtgccgtga

SEQ ID NO: 2191230 - DNA, 25 bp, Homo sapien
gtggctactccgaagtgaatctgag

SEQ ID NO: 2191231 - DNA, 25 bp, Homo sapien
agcaattcttgtcccgaagtggcta

SEQ ID NO: 2191232 - DNA, 25 bp, Homo sapien
ccaaagttctgcaggactacagaaa

SEQ ID NO: 2191233 - DNA, 25 bp, Homo sapien
taacaatccattaacatgtgtaggg

SEQ ID NO: 2191234 - DNA, 25 bp, Homo sapien
ggatgcttaattggccctggcgctt

SEQ ID NO: 2191235 - DNA, 25 bp, Homo sapien
ccaaagtccaacagacacacactga

SEQ ID NO: 2191236 - DNA, 25 bp, Homo sapien
cactgagcaggtgttttacactcac

SEQ ID NO: 2191237 - DNA, 25 bp, Homo sapien
cagcggctctgcattaatttaacca

SEQ ID NO: 2191238 - DNA, 25 bp, Homo sapien
aaggcagcattatcaggttgttgga

SEQ ID NO: 2191239 - DNA, 25 bp, Homo sapien
taaaattccttcatcccgaaggcag

SEQ ID NO: 2191240 - DNA, 25 bp, Homo sapien
ctttgatgagggaattagcgctcca

SEQ ID NO: 2191241 - DNA, 25 bp, Homo sapien
cagggaggtaaacttcttttgagag

SEQ ID NO: 2191242 - DNA, 25 bp, Homo sapien
tgcttggcagtggtgtagaacctaa

SEQ ID NO: 2191243 - DNA, 25 bp, Homo sapien
tagaacctaataagggcccagagta

SEQ ID NO: 2191244 - DNA, 25 bp, Homo sapien
caggcttttacgaagatttccggag

SEQ ID NO: 2191245 - DNA, 25 bp, Homo sapien
tgaactgggccctcgcaaactccct

SEQ ID NO: 2191246 - DNA, 25 bp, Homo sapien
ttctgccttgggtgtgataggacac

SEQ ID NO: 2191247 - DNA, 25 bp, Homo sapien
gggccattctgccttgggtgtgata

SEQ ID NO: 2191248 - DNA, 25 bp, Homo sapien
tgggtgtgataggacacagccatgc

SEQ ID NO: 2191249 - DNA, 25 bp, Homo sapien
tcagggggtctttagcgtgtgatat

SEQ ID NO: 2191250 - DNA, 25 bp, Homo sapien
ggggtctttagcgtgtgatatttat

SEQ ID NO: 2191251 - DNA, 25 bp, Homo sapien
cagggggtctttagcgtgtgatatt

SEQ ID NO: 2191252 - DNA, 25 bp, Homo sapien
gtctttagcgtgtgatatttatggg

SEQ ID NO: 2191253 - DNA, 25 bp, Homo sapien
gagatcaacttcgagcgccaaaatg

SEQ ID NO: 2191254 - DNA, 25 bp, Homo sapien
cacagtaagaatctacgggaggaca

SEQ ID NO: 2191255 - DNA, 25 bp, Homo sapien
tacaggctcgcatttgcttcccggg

SEQ ID NO: 2191256 - DNA, 25 bp, Homo sapien
tttacttcaatatcaggcgtctggg

SEQ ID NO: 2191257 - DNA, 25 bp, Homo sapien
gctgtctcaggagcgcggccgcggt

SEQ ID NO: 2191258 - DNA, 25 bp, Homo sapien
ttggccttgagcctcagcgcggcta

SEQ ID NO: 2191259 - DNA, 25 bp, Homo sapien
ggctatgctagaggcgcgtctgtct

SEQ ID NO: 2191260 - DNA, 25 bp, Homo sapien
tccacggcgggtgtgggctgtctca

SEQ ID NO: 2191261 - DNA, 25 bp, Homo sapien
cacgggacccggatgggccgcggcg

SEQ ID NO: 2191262 - DNA, 25 bp, Homo sapien
gctggaccccgcagagagggctttc

SEQ ID NO: 2191263 - DNA, 25 bp, Homo sapien
cagggagagcaaacagcgcggtcat

SEQ ID NO: 2191264 - DNA, 25 bp, Homo sapien
atggcctcgggagctgtgcgcggcg

SEQ ID NO: 2191265 - DNA, 25 bp, Homo sapien
gcgtggattcggtggtttcgcttaa

SEQ ID NO: 2191266 - DNA, 25 bp, Homo sapien
agccccacggcccagtggcgtggat

SEQ ID NO: 2191267 - DNA, 25 bp, Homo sapien
accgagtccagatattccccgaggg

SEQ ID NO: 2191268 - DNA, 25 bp, Homo sapien
ccacaggccggcgtggagacctcaa

SEQ ID NO: 2191269 - DNA, 25 bp, Homo sapien
ctggccagcgcctgcgggtgagagt

SEQ ID NO: 2191270 - DNA, 25 bp, Homo sapien
agagtgaagggcgaccgcctgttga

SEQ ID NO: 2191271 - DNA, 25 bp, Homo sapien
tcagctacccgcgtctggccagcgc

SEQ ID NO: 2191272 - DNA, 25 bp, Homo sapien
atttcggctccacgggcgggtgtca

SEQ ID NO: 2191273 - DNA, 25 bp, Homo sapien
gcggcgcaaggcgatgcccaagcct

SEQ ID NO: 2191274 - DNA, 25 bp, Homo sapien
catgcacacagcaccgggacattag

SEQ ID NO: 2191275 - DNA, 25 bp, Homo sapien
gaattactccacgtgacgcttccac

SEQ ID NO: 2191276 - DNA, 25 bp, Homo sapien
tccaagcggcgaccgaattactcca

SEQ ID NO: 2191277 - DNA, 25 bp, Homo sapien
ttggagcgcccgcgagctttcccga

SEQ ID NO: 2191278 - DNA, 25 bp, Homo sapien
cgcggggccaattccggatttccag

SEQ ID NO: 2191279 - DNA, 25 bp, Homo sapien
tccagggttagaaatgagcccacct

SEQ ID NO: 2191280 - DNA, 25 bp, Homo sapien
cctccctgaggggtctggctccagg

SEQ ID NO: 2191281 - DNA, 25 bp, Homo sapien
cagcctctccgaatctcgcaactcg

SEQ ID NO: 2191282 - DNA, 25 bp, Homo sapien
gaatctcgcaactcggtcctccagc

SEQ ID NO: 2191283 - DNA, 25 bp, Homo sapien
tccgaatctcgcaactcggtcctcc

SEQ ID NO: 2191284 - DNA, 25 bp, Homo sapien
actgctcactcctcgcaccacccca

SEQ ID NO: 2191285 - DNA, 25 bp, Homo sapien
ttggcagcgggtcacttgagtgaca

SEQ ID NO: 2191286 - DNA, 25 bp, Homo sapien
tatttcgttgtcttgtactgccgtg

SEQ ID NO: 2191287 - DNA, 25 bp, Homo sapien
tgtagatcggggcttgcacatatgg

SEQ ID NO: 2191288 - DNA, 25 bp, Homo sapien
ttgtcttgtactgccgtgtagatcg

SEQ ID NO: 2191289 - DNA, 25 bp, Homo sapien
tgccgctccgaggaaagtgctcagg

SEQ ID NO: 2191290 - DNA, 25 bp, Homo sapien
gtgtcggaacactgccgctccgagg

SEQ ID NO: 2191291 - DNA, 25 bp, Homo sapien
atgaaagctgggtgtcggaacactg

SEQ ID NO: 2191292 - DNA, 25 bp, Homo sapien
ccgaatgccgggctgatgaaagctg

SEQ ID NO: 2191293 - DNA, 25 bp, Homo sapien
gcggaggtaggctcgggaaggcggc

SEQ ID NO: 2191294 - DNA, 25 bp, Homo sapien
cgagcgccgggtggtgcggagggaa

SEQ ID NO: 2191295 - DNA, 25 bp, Homo sapien
caggggggtgggtctgcgcgcctgc

SEQ ID NO: 2191296 - DNA, 25 bp, Homo sapien
ggcagcggcagtccaagcggagtcg

SEQ ID NO: 2191297 - DNA, 25 bp, Homo sapien
ttggcccgacggttctggaaccaga

SEQ ID NO: 2191298 - DNA, 25 bp, Homo sapien
tggcccgacggttctggaaccagac

SEQ ID NO: 2191299 - DNA, 25 bp, Homo sapien
aacacctttaatagcattgcactca

SEQ ID NO: 2191300 - DNA, 25 bp, Homo sapien
tctttggttatgaggcctgggttcg

SEQ ID NO: 2191301 - DNA, 25 bp, Homo sapien
ggttcggaaatgcactctggtatgg

SEQ ID NO: 2191302 - DNA, 25 bp, Homo sapien
gggctgctcagtgttgatcgtctct

SEQ ID NO: 2191303 - DNA, 25 bp, Homo sapien
gggcctcggtcaagtccagcctcat

SEQ ID NO: 2191304 - DNA, 25 bp, Homo sapien
ctggactcgggcctcggtcaagtcc

SEQ ID NO: 2191305 - DNA, 25 bp, Homo sapien
gcctcggtcaagtccagcctcatgg

SEQ ID NO: 2191306 - DNA, 25 bp, Homo sapien
ggactcgggcctcggtcaagtccag

SEQ ID NO: 2191307 - DNA, 25 bp, Homo sapien
tatgaccgcgccgagaataattggc

SEQ ID NO: 2191308 - DNA, 25 bp, Homo sapien
cctccggctcgctaatatgaaagag

SEQ ID NO: 2191309 - DNA, 25 bp, Homo sapien
aataattggccctccggctcgctaa

SEQ ID NO: 2191310 - DNA, 25 bp, Homo sapien
cctgtttaccgaaaatatgaccgcg

SEQ ID NO: 2191311 - DNA, 25 bp, Homo sapien
accagaggtaaaccgtctccataag

SEQ ID NO: 2191312 - DNA, 25 bp, Homo sapien
tcagcaccagaggtaaaccgtctcc

SEQ ID NO: 2191313 - DNA, 25 bp, Homo sapien
tccataagtgccctccgttgccgtt

SEQ ID NO: 2191314 - DNA, 25 bp, Homo sapien
agcaaatctaaagcggcactccagg

SEQ ID NO: 2191315 - DNA, 25 bp, Homo sapien
gctaggcagtcaccgatccctttct

SEQ ID NO: 2191316 - DNA, 25 bp, Homo sapien
ttcgaaggaactgcccgcgcttgac

SEQ ID NO: 2191317 - DNA, 25 bp, Homo sapien
cttgacaagccccgcgctaggcagt

SEQ ID NO: 2191318 - DNA, 25 bp, Homo sapien
gggacgtttgccctaagactggctc

SEQ ID NO: 2191319 - DNA, 25 bp, Homo sapien
cgacagaactcggatctttttaaag

SEQ ID NO: 2191320 - DNA, 25 bp, Homo sapien
tttaaaggccttctccgctggcacg

SEQ ID NO: 2191321 - DNA, 25 bp, Homo sapien
tcctgaaacgacagaactcggatct

SEQ ID NO: 2191322 - DNA, 25 bp, Homo sapien
gcttcactgcgaactgcgtaactga

SEQ ID NO: 2191323 - DNA, 25 bp, Homo sapien
tggggcaccaggcgggggtggcgag

SEQ ID NO: 2191324 - DNA, 25 bp, Homo sapien
caccaggcgggggtggcgagcgcac

SEQ ID NO: 2191325 - DNA, 25 bp, Homo sapien
cctggggcaccaggcgggggtggcg

SEQ ID NO: 2191326 - DNA, 25 bp, Homo sapien
gggcaccaggcgggggtggcgagcg

SEQ ID NO: 2191327 - DNA, 25 bp, Homo sapien
tgtctgcggacagcgcttcctgagc

SEQ ID NO: 2191328 - DNA, 25 bp, Homo sapien
ccaaggtggcgctttcgggcgctct

SEQ ID NO: 2191329 - DNA, 25 bp, Homo sapien
tctgtgccctctgctgtgcgcgcgt

SEQ ID NO: 2191330 - DNA, 25 bp, Homo sapien
gcacagcgaccaaaaatagcccctg

SEQ ID NO: 2191331 - DNA, 25 bp, Homo sapien
aacgtggtgcggtagcgcctctgtt

SEQ ID NO: 2191332 - DNA, 25 bp, Homo sapien
ctctgtttgcgtttcagcagcccct

SEQ ID NO: 2191333 - DNA, 25 bp, Homo sapien
cgcagagaggcacacgctgtcctcg

SEQ ID NO: 2191334 - DNA, 25 bp, Homo sapien
gaagacgtccgggtagtgcgtcttc

SEQ ID NO: 2191335 - DNA, 25 bp, Homo sapien
tctgtggccactgcagcggcagctg

SEQ ID NO: 2191336 - DNA, 25 bp, Homo sapien
ctctgtggccactgcagcggcagct

SEQ ID NO: 2191337 - DNA, 25 bp, Homo sapien
cagtggcggccacaggacagcgccg

SEQ ID NO: 2191338 - DNA, 25 bp, Homo sapien
gtggcggccacaggacagcgccggg

SEQ ID NO: 2191339 - DNA, 25 bp, Homo sapien
cgccagtggcggccacaggacagcg

SEQ ID NO: 2191340 - DNA, 25 bp, Homo sapien
ggcgccagtggcggccacaggacag

SEQ ID NO: 2191341 - DNA, 25 bp, Homo sapien
tgagcagcgcgcgggcgtcgtcctc

SEQ ID NO: 2191342 - DNA, 25 bp, Homo sapien
cttgagcagcgcgcgggcgtcgtcc

SEQ ID NO: 2191343 - DNA, 25 bp, Homo sapien
ctcgtcgtcctcggtgccggtgcca

SEQ ID NO: 2191344 - DNA, 25 bp, Homo sapien
tcgtcgtcctcggtgccggtgccac

SEQ ID NO: 2191345 - DNA, 25 bp, Homo sapien
cccgttctcgcggtacgacttgctg

SEQ ID NO: 2191346 - DNA, 25 bp, Homo sapien
tctcgcggtacgacttgctgcggct

SEQ ID NO: 2191347 - DNA, 25 bp, Homo sapien
cacgccgaggcgctcctccgggtgc

SEQ ID NO: 2191348 - DNA, 25 bp, Homo sapien
gtacgacttgctgcggctgatgctc

SEQ ID NO: 2191349 - DNA, 25 bp, Homo sapien
gccgcaccctgaaggaggcggcccc

SEQ ID NO: 2191350 - DNA, 25 bp, Homo sapien
ccgctgccgcaccctgaaggaggcg

SEQ ID NO: 2191351 - DNA, 25 bp, Homo sapien
gctgccgcaccctgaaggaggcggc

SEQ ID NO: 2191352 - DNA, 25 bp, Homo sapien
tgccgcaccctgaaggaggcggccc

SEQ ID NO: 2191353 - DNA, 25 bp, Homo sapien
gaacggggcgctgctgctcttaggg

SEQ ID NO: 2191354 - DNA, 25 bp, Homo sapien
agctcggcctcgaacggggcgctgc

SEQ ID NO: 2191355 - DNA, 25 bp, Homo sapien
cagctcggcctcgaacggggcgctg

SEQ ID NO: 2191356 - DNA, 25 bp, Homo sapien
cggggcgctgctgctcttaggggag

SEQ ID NO: 2191357 - DNA, 25 bp, Homo sapien
ccttcccttatctattcctcttgcc

SEQ ID NO: 2191358 - DNA, 25 bp, Homo sapien
tctttttgcaggctttctctcccct

SEQ ID NO: 2191359 - DNA, 25 bp, Homo sapien
ttcctatcttccttcccttatctat

SEQ ID NO: 2191360 - DNA, 25 bp, Homo sapien
tttctctttttgcaggctttctctc

SEQ ID NO: 2191361 - DNA, 25 bp, Homo sapien
ccacgtcggggcagaggaaaatccg

SEQ ID NO: 2191362 - DNA, 25 bp, Homo sapien
tcccttcccacgtcggggcagagga

SEQ ID NO: 2191363 - DNA, 25 bp, Homo sapien
tcccacgtcggggcagaggaaaatc

SEQ ID NO: 2191364 - DNA, 25 bp, Homo sapien
cacgtcggggcagaggaaaatccga

SEQ ID NO: 2191365 - DNA, 25 bp, Homo sapien
cactatcctgaaaactttgcgcatg

SEQ ID NO: 2191366 - DNA, 25 bp, Homo sapien
ctatcctgaaaactttgcgcatgac

SEQ ID NO: 2191367 - DNA, 25 bp, Homo sapien
actatcctgaaaactttgcgcatga

SEQ ID NO: 2191368 - DNA, 25 bp, Homo sapien
tggcaagaggggtgcagccctgaag

SEQ ID NO: 2191369 - DNA, 25 bp, Homo sapien
aagaggggtgcagccctgaaggcga

SEQ ID NO: 2191370 - DNA, 25 bp, Homo sapien
aggggtgcagccctgaaggcgaccg

SEQ ID NO: 2191371 - DNA, 25 bp, Homo sapien
ccaccatgagggcaagggttggcaa

SEQ ID NO: 2191372 - DNA, 25 bp, Homo sapien
gggcttcttgcacaaaaaggcaaag

SEQ ID NO: 2191373 - DNA, 25 bp, Homo sapien
caggccgctccttccttttgaggaa

SEQ ID NO: 2191374 - DNA, 25 bp, Homo sapien
caaaaatgttctgggaaaggtctgg

SEQ ID NO: 2191375 - DNA, 25 bp, Homo sapien
gaagcgcctggcataggtgccactg

SEQ ID NO: 2191376 - DNA, 25 bp, Homo sapien
tcaagttggtgctacaagggtccac

SEQ ID NO: 2191377 - DNA, 25 bp, Homo sapien
tagtaagtgcctgacgggagcatcc

SEQ ID NO: 2191378 - DNA, 25 bp, Homo sapien
tccaaattgcgctatggccggaccg

SEQ ID NO: 2191379 - DNA, 25 bp, Homo sapien
gatcaacaccgaaaagctaaaggct

SEQ ID NO: 2191380 - DNA, 25 bp, Homo sapien
gcaaccgcattttgcacgggctcct

SEQ ID NO: 2191381 - DNA, 25 bp, Homo sapien
gagcaggcaagctctgcgcggctcc

SEQ ID NO: 2191382 - DNA, 25 bp, Homo sapien
tttacttttgcactcgggcctctcg

SEQ ID NO: 2191383 - DNA, 25 bp, Homo sapien
tgcacggccttttccgggtcggcgc

SEQ ID NO: 2191384 - DNA, 25 bp, Homo sapien
ctgattggctctcgccagaggccgg

SEQ ID NO: 2191385 - DNA, 25 bp, Homo sapien
cacgtgctgagaggcgccctctgat

SEQ ID NO: 2191386 - DNA, 25 bp, Homo sapien
caagcggtaacaagtgtagtgagca

SEQ ID NO: 2191387 - DNA, 25 bp, Homo sapien
tctccgcgctcaggacaagcggtaa

SEQ ID NO: 2191388 - DNA, 25 bp, Homo sapien
ctgtgggcgcggcgcaaagcccgga

SEQ ID NO: 2191389 - DNA, 25 bp, Homo sapien
ctggaggcgaggcctcgaggctcac

SEQ ID NO: 2191390 - DNA, 25 bp, Homo sapien
tcgctccctggaggcgaggcctcga

SEQ ID NO: 2191391 - DNA, 25 bp, Homo sapien
ctcgctccctggaggcgaggcctcg

SEQ ID NO: 2191392 - DNA, 25 bp, Homo sapien
tccctggaggcgaggcctcgaggct

SEQ ID NO: 2191393 - DNA, 25 bp, Homo sapien
gttcagactcactcggcacttttca

SEQ ID NO: 2191394 - DNA, 25 bp, Homo sapien
tccctggcgctcaattgccgtcctc

SEQ ID NO: 2191395 - DNA, 25 bp, Homo sapien
ccgatattgggctcccaggacaccg

SEQ ID NO: 2191396 - DNA, 25 bp, Homo sapien
gcacttttcaaagccgatattgggc

SEQ ID NO: 2191397 - DNA, 25 bp, Homo sapien
tccaatcgcagctagggagcagaac

SEQ ID NO: 2191398 - DNA, 25 bp, Homo sapien
gaattctcatgacctggctcccttg

SEQ ID NO: 2191399 - DNA, 25 bp, Homo sapien
gaaggaacccaaattcggctgcagc

SEQ ID NO: 2191400 - DNA, 25 bp, Homo sapien
gagtgaaccttagagagagcgcctt

SEQ ID NO: 2191401 - DNA, 25 bp, Homo sapien
tagcagacagatcgggctgcctccg

SEQ ID NO: 2191402 - DNA, 25 bp, Homo sapien
cataactcttggatgctggtgggtg

SEQ ID NO: 2191403 - DNA, 25 bp, Homo sapien
ggctgcctccgcaggaaacttcaag

SEQ ID NO: 2191404 - DNA, 25 bp, Homo sapien
taaaaatacaaggatgcataactgg

SEQ ID NO: 2191405 - DNA, 25 bp, Homo sapien
cgagccatcgctgacatttgatttt

SEQ ID NO: 2191406 - DNA, 25 bp, Homo sapien
taagccctctctgcgattcaaagtc

SEQ ID NO: 2191407 - DNA, 25 bp, Homo sapien
agcggaggagaacccgagccatcgc

SEQ ID NO: 2191408 - DNA, 25 bp, Homo sapien
tcctttaagccctctctgcgattca

SEQ ID NO: 2191409 - DNA, 25 bp, Homo sapien
gggatctctccttgcctttcccgca

SEQ ID NO: 2191410 - DNA, 25 bp, Homo sapien
ctgggatctctccttgcctttcccg

SEQ ID NO: 2191411 - DNA, 25 bp, Homo sapien
tgggatctctccttgcctttcccgc

SEQ ID NO: 2191412 - DNA, 25 bp, Homo sapien
ggatctctccttgcctttcccgcat

SEQ ID NO: 2191413 - DNA, 25 bp, Homo sapien
tcggaggtcaatcaatagaacttgg

SEQ ID NO: 2191414 - DNA, 25 bp, Homo sapien
cattggaaagatgtttcggaggtca

SEQ ID NO: 2191415 - DNA, 25 bp, Homo sapien
gcatggccaccattgaagaatttta

SEQ ID NO: 2191416 - DNA, 25 bp, Homo sapien
taggaagctactgcctagtctagca

SEQ ID NO: 2191417 - DNA, 25 bp, Homo sapien
cttaaccttaatgaagtaatttgag

SEQ ID NO: 2191418 - DNA, 25 bp, Homo sapien
tttagcattcttaaccttaatgaag

SEQ ID NO: 2191419 - DNA, 25 bp, Homo sapien
aaagggcatttaagaattcaccaga

SEQ ID NO: 2191420 - DNA, 25 bp, Homo sapien
caccagaaggatttattgctttagc

SEQ ID NO: 2191421 - DNA, 25 bp, Homo sapien
ttatcttctaaagcttgaggtaggt

SEQ ID NO: 2191422 - DNA, 25 bp, Homo sapien
tcttctaaagcttgaggtaggtttc

SEQ ID NO: 2191423 - DNA, 25 bp, Homo sapien
cttctaaagcttgaggtaggtttca

SEQ ID NO: 2191424 - DNA, 25 bp, Homo sapien
ctaaagcttgaggtaggtttcatac

SEQ ID NO: 2191425 - DNA, 25 bp, Homo sapien
gacggtggcagctgatgtactatta

SEQ ID NO: 2191426 - DNA, 25 bp, Homo sapien
gatggacatttctcagtaatcaggt

SEQ ID NO: 2191427 - DNA, 25 bp, Homo sapien
taatcaggtaagtaggcaagctggc

SEQ ID NO: 2191428 - DNA, 25 bp, Homo sapien
gcagcatagcacgtgaaaagcagca

SEQ ID NO: 2191429 - DNA, 25 bp, Homo sapien
accttattcactcggtagatttctc

SEQ ID NO: 2191430 - DNA, 25 bp, Homo sapien
taccttattcactcggtagatttct

SEQ ID NO: 2191431 - DNA, 25 bp, Homo sapien
cttttatcatctttcctactgcagg

SEQ ID NO: 2191432 - DNA, 25 bp, Homo sapien
ttttatcatctttcctactgcaggt

SEQ ID NO: 2191433 - DNA, 25 bp, Homo sapien
ttatcatctttcctactgcaggtgt

SEQ ID NO: 2191434 - DNA, 25 bp, Homo sapien
tttatcatctttcctactgcaggtg

SEQ ID NO: 2191435 - DNA, 25 bp, Homo sapien
ctaagaagatcctctgctcttacag

SEQ ID NO: 2191436 - DNA, 25 bp, Homo sapien
ctttctgccttctaagaagatcctc

SEQ ID NO: 2191437 - DNA, 25 bp, Homo sapien
gtaccacaataaagaggctgctgtg

SEQ ID NO: 2191438 - DNA, 25 bp, Homo sapien
ttgtaccacaataaagaggctgctg

SEQ ID NO: 2191439 - DNA, 25 bp, Homo sapien
agctgcttgaccgtcagggccactg

SEQ ID NO: 2191440 - DNA, 25 bp, Homo sapien
gctgcttgaccgtcagggccactga

SEQ ID NO: 2191441 - DNA, 25 bp, Homo sapien
ctgcttgaccgtcagggccactgac

SEQ ID NO: 2191442 - DNA, 25 bp, Homo sapien
cagctgcttgaccgtcagggccact

SEQ ID NO: 2191443 - DNA, 25 bp, Homo sapien
agccaagattggctgagttactcaa

SEQ ID NO: 2191444 - DNA, 25 bp, Homo sapien
tgaggttccagccaagattggctga

SEQ ID NO: 2191445 - DNA, 25 bp, Homo sapien
tggctgagttactcaaaatgaaggg

SEQ ID NO: 2191446 - DNA, 25 bp, Homo sapien
ccaagattggctgagttactcaaaa

SEQ ID NO: 2191447 - DNA, 25 bp, Homo sapien
cacctgatagacacagtgcattaca

SEQ ID NO: 2191448 - DNA, 25 bp, Homo sapien
gtgcaaacacctgatagacacagtg

SEQ ID NO: 2191449 - DNA, 25 bp, Homo sapien
tgggctggttcataggcaacttggt

SEQ ID NO: 2191450 - DNA, 25 bp, Homo sapien
gtacagtcccaatactgatcagcct

SEQ ID NO: 2191451 - DNA, 25 bp, Homo sapien
ggttgccactgcgttgcctctggtg

SEQ ID NO: 2191452 - DNA, 25 bp, Homo sapien
tgcctctggtgctttttgtgagaac

SEQ ID NO: 2191453 - DNA, 25 bp, Homo sapien
ctgcttgacggtgcctctggttgcc

SEQ ID NO: 2191454 - DNA, 25 bp, Homo sapien
ggtgcctctggttgccactgcgttg

SEQ ID NO: 2191455 - DNA, 25 bp, Homo sapien
gggtcatttgtcagggcacagctgt

SEQ ID NO: 2191456 - DNA, 25 bp, Homo sapien
ggtcatttgtcagggcacagctgtg

SEQ ID NO: 2191457 - DNA, 25 bp, Homo sapien
gggggtcatttgtcagggcacagct

SEQ ID NO: 2191458 - DNA, 25 bp, Homo sapien
ggggtcatttgtcagggcacagctg

SEQ ID NO: 2191459 - DNA, 25 bp, Homo sapien
agcgcctactgtgcagtgctaatag

SEQ ID NO: 2191460 - DNA, 25 bp, Homo sapien
tcaagagttgaacagactaagtctg

SEQ ID NO: 2191461 - DNA, 25 bp, Homo sapien
atcccccgttcttggccggcatgga

SEQ ID NO: 2191462 - DNA, 25 bp, Homo sapien
agtgctaatagttctgggaaatccc

SEQ ID NO: 2191463 - DNA, 25 bp, Homo sapien
tacttgggaatacaggtcactcttt

SEQ ID NO: 2191464 - DNA, 25 bp, Homo sapien
tgctaggtgcaagtctcttaaacaa

SEQ ID NO: 2191465 - DNA, 25 bp, Homo sapien
caaatgaaggctacttgggaataca

SEQ ID NO: 2191466 - DNA, 25 bp, Homo sapien
tagaaaagtggcagtttgagtggct

SEQ ID NO: 2191467 - DNA, 25 bp, Homo sapien
ttgcagacatccaggttcgtttttt

SEQ ID NO: 2191468 - DNA, 25 bp, Homo sapien
aagtttgcagacatccaggttcgtt

SEQ ID NO: 2191469 - DNA, 25 bp, Homo sapien
ttcagattctgattccttggctaag

SEQ ID NO: 2191470 - DNA, 25 bp, Homo sapien
attctgattccttggctaagtttgc

SEQ ID NO: 2191471 - DNA, 25 bp, Homo sapien
tgaccctggattttcaatgcttgcc

SEQ ID NO: 2191472 - DNA, 25 bp, Homo sapien
ggaaagctattgagatcctcgtact

SEQ ID NO: 2191473 - DNA, 25 bp, Homo sapien
gtactgcgggacttcttgaccctgg

SEQ ID NO: 2191474 - DNA, 25 bp, Homo sapien
ttttcaatgcttgcctaatcatggc

SEQ ID NO: 2191475 - DNA, 25 bp, Homo sapien
ttctctacagacaaagacagcacaa

SEQ ID NO: 2191476 - DNA, 25 bp, Homo sapien
ccttacctcgttgctattcatgcta

SEQ ID NO: 2191477 - DNA, 25 bp, Homo sapien
tgcacatcaggcatcagccttacct

SEQ ID NO: 2191478 - DNA, 25 bp, Homo sapien
taatttaattcaagggccacttcat

SEQ ID NO: 2191479 - DNA, 25 bp, Homo sapien
tcctgtcaccacaggtatgcaattt

SEQ ID NO: 2191480 - DNA, 25 bp, Homo sapien
aatgaaatacatcttgtctccctcc

SEQ ID NO: 2191481 - DNA, 25 bp, Homo sapien
tgcaatttattttgccttccggttc

SEQ ID NO: 2191482 - DNA, 25 bp, Homo sapien
tctgctgctgcaggccggcatggct

SEQ ID NO: 2191483 - DNA, 25 bp, Homo sapien
caagaaaaaggtagagagtgtgagc

SEQ ID NO: 2191484 - DNA, 25 bp, Homo sapien
cacacgcatggtgatggtgcaaagt

SEQ ID NO: 2191485 - DNA, 25 bp, Homo sapien
gagtgtgagcatcagtaactgcaag

SEQ ID NO: 2191486 - DNA, 25 bp, Homo sapien
tctcaaaggcgttgatcacaagaaa

SEQ ID NO: 2191487 - DNA, 25 bp, Homo sapien
gcaagcagtttagatggactacatt

SEQ ID NO: 2191488 - DNA, 25 bp, Homo sapien
tagcaagcagtttagatggactaca

SEQ ID NO: 2191489 - DNA, 25 bp, Homo sapien
cctagcaagcagtttagatggacta

SEQ ID NO: 2191490 - DNA, 25 bp, Homo sapien
aagcagtttagatggactacattcc

SEQ ID NO: 2191491 - DNA, 25 bp, Homo sapien
agccttccaaagatcccctatggtc

SEQ ID NO: 2191492 - DNA, 25 bp, Homo sapien
acagccttccaaagatcccctatgg

SEQ ID NO: 2191493 - DNA, 25 bp, Homo sapien
cagccttccaaagatcccctatggt

SEQ ID NO: 2191494 - DNA, 25 bp, Homo sapien
caggggtagtcatcaacaccagcgg

SEQ ID NO: 2191495 - DNA, 25 bp, Homo sapien
aacaccagcgggttctgccctgggc

SEQ ID NO: 2191496 - DNA, 25 bp, Homo sapien
gaggagccaggggtagtcatcaaca

SEQ ID NO: 2191497 - DNA, 25 bp, Homo sapien
tagtcatcaacaccagcgggttctg

SEQ ID NO: 2191498 - DNA, 25 bp, Homo sapien
tcagctccagcagtctcaactggga

SEQ ID NO: 2191499 - DNA, 25 bp, Homo sapien
cagctccagcagtctcaactgggaa

SEQ ID NO: 2191500 - DNA, 25 bp, Homo sapien
ctaaggtagagtaagcagtcagtga

SEQ ID NO: 2191501 - DNA, 25 bp, Homo sapien
taaggtagagtaagcagtcagtgac

SEQ ID NO: 2191502 - DNA, 25 bp, Homo sapien
caggcaggctggtttggggggtcac

SEQ ID NO: 2191503 - DNA, 25 bp, Homo sapien
tggaggacgggatcttgtattcttc

SEQ ID NO: 2191504 - DNA, 25 bp, Homo sapien
cctggaggacgggatcttgtattct

SEQ ID NO: 2191505 - DNA, 25 bp, Homo sapien
ggaggacgggatcttgtattcttcg

SEQ ID NO: 2191506 - DNA, 25 bp, Homo sapien
tgcctggaggacgggatcttgtatt

SEQ ID NO: 2191507 - DNA, 25 bp, Homo sapien
gaactttcttcccctcctcagttga

SEQ ID NO: 2191508 - DNA, 25 bp, Homo sapien
actttcttcccctcctcagttgagg

SEQ ID NO: 2191509 - DNA, 25 bp, Homo sapien
ttcttcccctcctcagttgaggtac

SEQ ID NO: 2191510 - DNA, 25 bp, Homo sapien
tttcttcccctcctcagttgaggta

SEQ ID NO: 2191511 - DNA, 25 bp, Homo sapien
ccagcacatgggttatcgtatatac

SEQ ID NO: 2191512 - DNA, 25 bp, Homo sapien
gccgcttgtgctttatctgcttgaa

SEQ ID NO: 2191513 - DNA, 25 bp, Homo sapien
caggcatacgctcaaacagcgggtg

SEQ ID NO: 2191514 - DNA, 25 bp, Homo sapien
tcccacaatggagtcttcactcagg

SEQ ID NO: 2191515 - DNA, 25 bp, Homo sapien
agagacaggcaatgttctggaagcc

SEQ ID NO: 2191516 - DNA, 25 bp, Homo sapien
cttgtagaagttaggaaggtgcttc

SEQ ID NO: 2191517 - DNA, 25 bp, Homo sapien
ttgctacagagacaggcaatgttct

SEQ ID NO: 2191518 - DNA, 25 bp, Homo sapien
gaaggtgcttcatggcattgctaca

SEQ ID NO: 2191519 - DNA, 25 bp, Homo sapien
tcttgtacatagtctgagaccttca

SEQ ID NO: 2191520 - DNA, 25 bp, Homo sapien
gaactctgggtatagctcagaccag

SEQ ID NO: 2191521 - DNA, 25 bp, Homo sapien
ctctgattttgagtgagtggagcga

SEQ ID NO: 2191522 - DNA, 25 bp, Homo sapien
aatccggtcttgtacatagtctgag

SEQ ID NO: 2191523 - DNA, 25 bp, Homo sapien
cactgagaggctgagttaataagga

SEQ ID NO: 2191524 - DNA, 25 bp, Homo sapien
gaacttcagattgatccatgtctta

SEQ ID NO: 2191525 - DNA, 25 bp, Homo sapien
gcaaaatgggctgtctccttaaaaa

SEQ ID NO: 2191526 - DNA, 25 bp, Homo sapien
aatgtggcggtctaactgtgcttaa

SEQ ID NO: 2191527 - DNA, 25 bp, Homo sapien
gaataaagcaataaccccaccataa

SEQ ID NO: 2191528 - DNA, 25 bp, Homo sapien
ggagacaggaattggaagataataa

SEQ ID NO: 2191529 - DNA, 25 bp, Homo sapien
ttaatgacacggcagacattttcct

SEQ ID NO: 2191530 - DNA, 25 bp, Homo sapien
ttattattaatgacacggcagacat

SEQ ID NO: 2191531 - DNA, 25 bp, Homo sapien
ctgtgcaattctgggccagtattct

SEQ ID NO: 2191532 - DNA, 25 bp, Homo sapien
gggccagtattctgtgcagctcttg

SEQ ID NO: 2191533 - DNA, 25 bp, Homo sapien
tctgggccagtattctgtgcagctc

SEQ ID NO: 2191534 - DNA, 25 bp, Homo sapien
caattctgggccagtattctgtgca

SEQ ID NO: 2191535 - DNA, 25 bp, Homo sapien
ctggtaaagttggtatctgtggccc

SEQ ID NO: 2191536 - DNA, 25 bp, Homo sapien
tctgtggccctgcaaaaaactttat

SEQ ID NO: 2191537 - DNA, 25 bp, Homo sapien
aagttggtatctgtggccctgcaaa

SEQ ID NO: 2191538 - DNA, 25 bp, Homo sapien
aaagtgattttattgatcgtcttca

SEQ ID NO: 2191539 - DNA, 25 bp, Homo sapien
tgtgccaaggtggttgatagaagac

SEQ ID NO: 2191540 - DNA, 25 bp, Homo sapien
ccaaggtggttgatagaagacggtt

SEQ ID NO: 2191541 - DNA, 25 bp, Homo sapien
tgccaaggtggttgatagaagacgg

SEQ ID NO: 2191542 - DNA, 25 bp, Homo sapien
caaggtggttgatagaagacggtta

SEQ ID NO: 2191543 - DNA, 25 bp, Homo sapien
ttctgctgcccactccttcaatcat

SEQ ID NO: 2191544 - DNA, 25 bp, Homo sapien
ttttctgctgcccactccttcaatc

SEQ ID NO: 2191545 - DNA, 25 bp, Homo sapien
ctggcattcaccttgaagcccatct

SEQ ID NO: 2191546 - DNA, 25 bp, Homo sapien
ggcattcaccttgaagcccatcttc

SEQ ID NO: 2191547 - DNA, 25 bp, Homo sapien
tgagaaggagatagcattcacattg

SEQ ID NO: 2191548 - DNA, 25 bp, Homo sapien
taagtttttggagacttcgctgaag

SEQ ID NO: 2191549 - DNA, 25 bp, Homo sapien
tctctgattgcaaactatgtggagt

SEQ ID NO: 2191550 - DNA, 25 bp, Homo sapien
gctttcccaataatgatctggagag

SEQ ID NO: 2191551 - DNA, 25 bp, Homo sapien
tgtgcctgtttgtaaattggacaat

SEQ ID NO: 2191552 - DNA, 25 bp, Homo sapien
ttcttgattgggagaactggctcgt

SEQ ID NO: 2191553 - DNA, 25 bp, Homo sapien
tgattgggagaactggctcgtttca

SEQ ID NO: 2191554 - DNA, 25 bp, Homo sapien
gcctgtttgtaaattggacaattgc

SEQ ID NO: 2191555 - DNA, 25 bp, Homo sapien
gaataactttcatcaatcatttcca

SEQ ID NO: 2191556 - DNA, 25 bp, Homo sapien
tgaataactttcatcaatcatttcc

SEQ ID NO: 2191557 - DNA, 25 bp, Homo sapien
aataactttcatcaatcatttccat

SEQ ID NO: 2191558 - DNA, 25 bp, Homo sapien
cttgaataactttcatcaatcattt

SEQ ID NO: 2191559 - DNA, 25 bp, Homo sapien
ccttccagtagggagtgacttagga

SEQ ID NO: 2191560 - DNA, 25 bp, Homo sapien
gagtgacttaggaatccaagcaggt

SEQ ID NO: 2191561 - DNA, 25 bp, Homo sapien
cctccttccagtagggagtgactta

SEQ ID NO: 2191562 - DNA, 25 bp, Homo sapien
gacttaggaatccaagcaggtgcca

SEQ ID NO: 2191563 - DNA, 25 bp, Homo sapien
gccacaaacattgaaccacaccgaa

SEQ ID NO: 2191564 - DNA, 25 bp, Homo sapien
ttctgctcaatacctaatccaccta

SEQ ID NO: 2191565 - DNA, 25 bp, Homo sapien
gatcatgccctgcttttcgaagaac

SEQ ID NO: 2191566 - DNA, 25 bp, Homo sapien
tacaaaatctgacagcaacctcgcc

SEQ ID NO: 2191567 - DNA, 25 bp, Homo sapien
cattttatgacttggaactgtttgg

SEQ ID NO: 2191568 - DNA, 25 bp, Homo sapien
tatgacttggaactgtttggacctg

SEQ ID NO: 2191569 - DNA, 25 bp, Homo sapien
gacttggaactgtttggacctgcag

SEQ ID NO: 2191570 - DNA, 25 bp, Homo sapien
aactgtttggacctgcagttcccac

SEQ ID NO: 2191571 - DNA, 25 bp, Homo sapien
taattatccacaagctgtggaatgc

SEQ ID NO: 2191572 - DNA, 25 bp, Homo sapien
caagctgtggaatgccagaagctcc

SEQ ID NO: 2191573 - DNA, 25 bp, Homo sapien
tttcatacactttctgtgttcagtt

SEQ ID NO: 2191574 - DNA, 25 bp, Homo sapien
tatccacaagctgtggaatgccaga

SEQ ID NO: 2191575 - DNA, 25 bp, Homo sapien
gtcctgtgccagtgttgcactcatc

SEQ ID NO: 2191576 - DNA, 25 bp, Homo sapien
cagtgttgcactcatcctttccgca

SEQ ID NO: 2191577 - DNA, 25 bp, Homo sapien
tgtgccagtgttgcactcatccttt

SEQ ID NO: 2191578 - DNA, 25 bp, Homo sapien
gccagtgttgcactcatcctttccg

SEQ ID NO: 2191579 - DNA, 25 bp, Homo sapien
gatacatgcatgaggtaaaagcggg

SEQ ID NO: 2191580 - DNA, 25 bp, Homo sapien
tttgatacatgcatgaggtaaaagc

SEQ ID NO: 2191581 - DNA, 25 bp, Homo sapien
gtccacttatttgatacatgcatga

SEQ ID NO: 2191582 - DNA, 25 bp, Homo sapien
tttcttaatagcttgcttggttttc

SEQ ID NO: 2191583 - DNA, 25 bp, Homo sapien
tcagacagttgccactgggggtcac

SEQ ID NO: 2191584 - DNA, 25 bp, Homo sapien
attttcagacagttgccactggggg

SEQ ID NO: 2191585 - DNA, 25 bp, Homo sapien
ttttcagacagttgccactgggggt

SEQ ID NO: 2191586 - DNA, 25 bp, Homo sapien
agctttgcctgcagttccagagcca

SEQ ID NO: 2191587 - DNA, 25 bp, Homo sapien
gcctgcagttccagagccacggcag

SEQ ID NO: 2191588 - DNA, 25 bp, Homo sapien
gttccagagccacggcagcaactcg

SEQ ID NO: 2191589 - DNA, 25 bp, Homo sapien
ctttgcctgcagttccagagccacg

SEQ ID NO: 2191590 - DNA, 25 bp, Homo sapien
cattaagcagcaatcgatacagagc

SEQ ID NO: 2191591 - DNA, 25 bp, Homo sapien
caattgtcaaaatccatgataggca

SEQ ID NO: 2191592 - DNA, 25 bp, Homo sapien
catatcccacttatactgacagcag

SEQ ID NO: 2191593 - DNA, 25 bp, Homo sapien
tcaaagtataaaggccagagcaaac

SEQ ID NO: 2191594 - DNA, 25 bp, Homo sapien
cttgtagttatttgcagtggttccc

SEQ ID NO: 2191595 - DNA, 25 bp, Homo sapien
tgtagttatttgcagtggttcccat

SEQ ID NO: 2191596 - DNA, 25 bp, Homo sapien
ctcaatttcattcttgtagttattt

SEQ ID NO: 2191597 - DNA, 25 bp, Homo sapien
ttgtagttatttgcagtggttccca

SEQ ID NO: 2191598 - DNA, 25 bp, Homo sapien
tttctattcttatctgcaggaaggg

SEQ ID NO: 2191599 - DNA, 25 bp, Homo sapien
gagtggcaaaggagcattgcatctt

SEQ ID NO: 2191600 - DNA, 25 bp, Homo sapien
gccaaactgactgttatccctgcca

SEQ ID NO: 2191601 - DNA, 25 bp, Homo sapien
ttttatttctgagcggactagttcc

SEQ ID NO: 2191602 - DNA, 25 bp, Homo sapien
tgttagatctctacgggctgccctg

SEQ ID NO: 2191603 - DNA, 25 bp, Homo sapien
tccaatatatggtgtaggtaactgc

SEQ ID NO: 2191604 - DNA, 25 bp, Homo sapien
ctgagttgttcccaaagagtgctac

SEQ ID NO: 2191605 - DNA, 25 bp, Homo sapien
gggacctgcacatctgctactaatc

SEQ ID NO: 2191606 - DNA, 25 bp, Homo sapien
tcaattttaccaccgaaagtgccat

SEQ ID NO: 2191607 - DNA, 25 bp, Homo sapien
tctctctggaccctattcttgatga

SEQ ID NO: 2191608 - DNA, 25 bp, Homo sapien
ggaccctattcttgatgaatccatt

SEQ ID NO: 2191609 - DNA, 25 bp, Homo sapien
tctggaccctattcttgatgaatcc

SEQ ID NO: 2191610 - DNA, 25 bp, Homo sapien
gcctccttgcacaacagtgcctgga

SEQ ID NO: 2191611 - DNA, 25 bp, Homo sapien
gagttcagatccacacaggtcagta

SEQ ID NO: 2191612 - DNA, 25 bp, Homo sapien
tctgccaataggctcagcgctgctt

SEQ ID NO: 2191613 - DNA, 25 bp, Homo sapien
agcagggaagataccttaggtctcc

SEQ ID NO: 2191614 - DNA, 25 bp, Homo sapien
tagtttctccacttgctatagccat

SEQ ID NO: 2191615 - DNA, 25 bp, Homo sapien
tctgtacactttgctagtttctcca

SEQ ID NO: 2191616 - DNA, 25 bp, Homo sapien
gctagtttctccacttgctatagcc

SEQ ID NO: 2191617 - DNA, 25 bp, Homo sapien
ctggtatctctgtacactttgctag

SEQ ID NO: 2191618 - DNA, 25 bp, Homo sapien
tatataacgtcccttgtaaaaatga

SEQ ID NO: 2191619 - DNA, 25 bp, Homo sapien
caggcacggtcgctacctgcgttgg

SEQ ID NO: 2191620 - DNA, 25 bp, Homo sapien
acggtcgctacctgcgttgggcttc

SEQ ID NO: 2191621 - DNA, 25 bp, Homo sapien
gcacggtcgctacctgcgttgggct

SEQ ID NO: 2191622 - DNA, 25 bp, Homo sapien
aggcacggtcgctacctgcgttggg

SEQ ID NO: 2191623 - DNA, 25 bp, Homo sapien
gtcgctggctccgtcgtcgctggct

SEQ ID NO: 2191624 - DNA, 25 bp, Homo sapien
ggtcggtggtcgctggctccgtcgt

SEQ ID NO: 2191625 - DNA, 25 bp, Homo sapien
cgttctcggaggcaaatcgcaacca

SEQ ID NO: 2191626 - DNA, 25 bp, Homo sapien
gcaaatcgcaaccattttgcccgca

SEQ ID NO: 2191627 - DNA, 25 bp, Homo sapien
catcctgaaaataggaactgctcag

SEQ ID NO: 2191628 - DNA, 25 bp, Homo sapien
ttatgagttcagcacatcctgaaaa

SEQ ID NO: 2191629 - DNA, 25 bp, Homo sapien
tcagcacatcctgaaaataggaact

SEQ ID NO: 2191630 - DNA, 25 bp, Homo sapien
aaaataggaactgctcagaacctcc

SEQ ID NO: 2191631 - DNA, 25 bp, Homo sapien
tgcttctctcttacaactgccatcg

SEQ ID NO: 2191632 - DNA, 25 bp, Homo sapien
atggtgtcagccttgaatacagaaa

SEQ ID NO: 2191633 - DNA, 25 bp, Homo sapien
tctacacccaccagatgtttttgcc

SEQ ID NO: 2191634 - DNA, 25 bp, Homo sapien
tgccatcgccctgcacaaaatgacg

SEQ ID NO: 2191635 - DNA, 25 bp, Homo sapien
gtttacactggtttagacaagctgc

SEQ ID NO: 2191636 - DNA, 25 bp, Homo sapien
agccacaactggtttagtccggttg

SEQ ID NO: 2191637 - DNA, 25 bp, Homo sapien
tagtccggttgtgactggccacagc

SEQ ID NO: 2191638 - DNA, 25 bp, Homo sapien
gacaagctgcaaccagatttgaatg

SEQ ID NO: 2191639 - DNA, 25 bp, Homo sapien
gactgacttaggctttgactggttt

SEQ ID NO: 2191640 - DNA, 25 bp, Homo sapien
tcttggttggatgcaacttgtttag

SEQ ID NO: 2191641 - DNA, 25 bp, Homo sapien
tttggctggccacaactggattaga

SEQ ID NO: 2191642 - DNA, 25 bp, Homo sapien
cttgtttagaccagttttggctggc

SEQ ID NO: 2191643 - DNA, 25 bp, Homo sapien
gattgctgctggcaccaggtctcaa

SEQ ID NO: 2191644 - DNA, 25 bp, Homo sapien
ttgctgctggcaccaggtctcaaag

SEQ ID NO: 2191645 - DNA, 25 bp, Homo sapien
gctgctggcaccaggtctcaaagat

SEQ ID NO: 2191646 - DNA, 25 bp, Homo sapien
cagggattgctgctggcaccaggtc

SEQ ID NO: 2191647 - DNA, 25 bp, Homo sapien
tttgcttggatccacaactaagtgt

SEQ ID NO: 2191648 - DNA, 25 bp, Homo sapien
gaggctgttcgacatcaagctcttt

SEQ ID NO: 2191649 - DNA, 25 bp, Homo sapien
ctttgctttagtccatgaggctgtt

SEQ ID NO: 2191650 - DNA, 25 bp, Homo sapien
cacaactaagtgtctcagttttcta

SEQ ID NO: 2191651 - DNA, 25 bp, Homo sapien
taagcattagttcatatttgccaat

SEQ ID NO: 2191652 - DNA, 25 bp, Homo sapien
gggtagatgacgcttaagcattagt

SEQ ID NO: 2191653 - DNA, 25 bp, Homo sapien
ccaattaagcgtaagttgtgtttct

SEQ ID NO: 2191654 - DNA, 25 bp, Homo sapien
tgaagcactgccattatggagcacc

SEQ ID NO: 2191655 - DNA, 25 bp, Homo sapien
tcactgggattctctcagagcaccg

SEQ ID NO: 2191656 - DNA, 25 bp, Homo sapien
gacttttaaaccagccagcactgtg

SEQ ID NO: 2191657 - DNA, 25 bp, Homo sapien
actgtggtcattgaacttctctttt

SEQ ID NO: 2191658 - DNA, 25 bp, Homo sapien
ccgagggagccatagaggtagtata

SEQ ID NO: 2191659 - DNA, 25 bp, Homo sapien
tctttaggaacatggcttgttggca

SEQ ID NO: 2191660 - DNA, 25 bp, Homo sapien
caggggcaacatttggccaatggca

SEQ ID NO: 2191661 - DNA, 25 bp, Homo sapien
aatggcagtataataaccagctggc

SEQ ID NO: 2191662 - DNA, 25 bp, Homo sapien
aaccagctggcagtctttctgatag

SEQ ID NO: 2191663 - DNA, 25 bp, Homo sapien
ttcctagcctcttcgccactgcagg

SEQ ID NO: 2191664 - DNA, 25 bp, Homo sapien
gtgcttcctagcctcttcgccactg

SEQ ID NO: 2191665 - DNA, 25 bp, Homo sapien
tagcctcttcgccactgcaggaggc

SEQ ID NO: 2191666 - DNA, 25 bp, Homo sapien
ctagcctcttcgccactgcaggagg

SEQ ID NO: 2191667 - DNA, 25 bp, Homo sapien
ttattccagaagatggcgctgctgc

SEQ ID NO: 2191668 - DNA, 25 bp, Homo sapien
attccagaagatggcgctgctgctg

SEQ ID NO: 2191669 - DNA, 25 bp, Homo sapien
tattccagaagatggcgctgctgct

SEQ ID NO: 2191670 - DNA, 25 bp, Homo sapien
agaagatggcgctgctgctgctgct

SEQ ID NO: 2191671 - DNA, 25 bp, Homo sapien
tgactgaatctcatacagttgtggt

SEQ ID NO: 2191672 - DNA, 25 bp, Homo sapien
gacatgcttgtgtccgttactgact

SEQ ID NO: 2191673 - DNA, 25 bp, Homo sapien
ttcagatttggctgtttagacatgc

SEQ ID NO: 2191674 - DNA, 25 bp, Homo sapien
cagttgtggtatgggatgattttcc

SEQ ID NO: 2191675 - DNA, 25 bp, Homo sapien
gcgctgtctcttatctcctgtcttc

SEQ ID NO: 2191676 - DNA, 25 bp, Homo sapien
ttccttccagccataagcgctgtct

SEQ ID NO: 2191677 - DNA, 25 bp, Homo sapien
gccataagcgctgtctcttatctcc

SEQ ID NO: 2191678 - DNA, 25 bp, Homo sapien
ttccagccataagcgctgtctctta

SEQ ID NO: 2191679 - DNA, 25 bp, Homo sapien
gaggaccatattcaaagtccttcaa

SEQ ID NO: 2191680 - DNA, 25 bp, Homo sapien
ttaagaggaccatattcaaagtcct

SEQ ID NO: 2191681 - DNA, 25 bp, Homo sapien
gaaaattaagaggaccatattcaaa

SEQ ID NO: 2191682 - DNA, 25 bp, Homo sapien
ggaccatattcaaagtccttcaaag

SEQ ID NO: 2191683 - DNA, 25 bp, Homo sapien
gaggagcctcattccatggctacta

SEQ ID NO: 2191684 - DNA, 25 bp, Homo sapien
gaaaccagcgaatctcagtctcacc

SEQ ID NO: 2191685 - DNA, 25 bp, Homo sapien
tcaagagggcatttggtaccctacc

SEQ ID NO: 2191686 - DNA, 25 bp, Homo sapien
gggagtgctgccaggctactactga

SEQ ID NO: 2191687 - DNA, 25 bp, Homo sapien
acccaccatgtttgatttactgcag

SEQ ID NO: 2191688 - DNA, 25 bp, Homo sapien
gattaatgccctgatttgcatgcag

SEQ ID NO: 2191689 - DNA, 25 bp, Homo sapien
catgtgtactcatcagtcaaacgga

SEQ ID NO: 2191690 - DNA, 25 bp, Homo sapien
tgtgggttcctataacataagccat

SEQ ID NO: 2191691 - DNA, 25 bp, Homo sapien
ggtcgcaaaagttggttcctgaaca

SEQ ID NO: 2191692 - DNA, 25 bp, Homo sapien
taagcagttttagtgggcccattgg

SEQ ID NO: 2191693 - DNA, 25 bp, Homo sapien
tgggcccattggaatagatctaaca

SEQ ID NO: 2191694 - DNA, 25 bp, Homo sapien
gctgcggccacagcagaatcgttag

SEQ ID NO: 2191695 - DNA, 25 bp, Homo sapien
tcttcctcacttcacactggcagag

SEQ ID NO: 2191696 - DNA, 25 bp, Homo sapien
tcctcacttcacactggcagagccc

SEQ ID NO: 2191697 - DNA, 25 bp, Homo sapien
ctcacttcacactggcagagcccag

SEQ ID NO: 2191698 - DNA, 25 bp, Homo sapien
ttcctcacttcacactggcagagcc

SEQ ID NO: 2191699 - DNA, 25 bp, Homo sapien
gatgcctaagttgttccgtcttcct

SEQ ID NO: 2191700 - DNA, 25 bp, Homo sapien
ttttgaatccacttacaagggccat

SEQ ID NO: 2191701 - DNA, 25 bp, Homo sapien
tccttttgaatccacttacaagggc

SEQ ID NO: 2191702 - DNA, 25 bp, Homo sapien
atctttttcatggagtgtggatgcc

SEQ ID NO: 2191703 - DNA, 25 bp, Homo sapien
gaagataacagtcgctcaattcttg

SEQ ID NO: 2191704 - DNA, 25 bp, Homo sapien
aacagtcgctcaattcttgatcttc

SEQ ID NO: 2191705 - DNA, 25 bp, Homo sapien
gataacagtcgctcaattcttgatc

SEQ ID NO: 2191706 - DNA, 25 bp, Homo sapien
tgttgaagataacagtcgctcaatt

SEQ ID NO: 2191707 - DNA, 25 bp, Homo sapien
tcaattggcttgcattcccagtttc

SEQ ID NO: 2191708 - DNA, 25 bp, Homo sapien
ttggcttgcattcccagtttcctct

SEQ ID NO: 2191709 - DNA, 25 bp, Homo sapien
aattggcttgcattcccagtttcct

SEQ ID NO: 2191710 - DNA, 25 bp, Homo sapien
ggcttgcattcccagtttcctctgg

SEQ ID NO: 2191711 - DNA, 25 bp, Homo sapien
aaaatcaaattgtcactcctgcctg

SEQ ID NO: 2191712 - DNA, 25 bp, Homo sapien
aaaaatcaaattgtcactcctgcct

SEQ ID NO: 2191713 - DNA, 25 bp, Homo sapien
ggtcattatacctgtaggtgccaga

SEQ ID NO: 2191714 - DNA, 25 bp, Homo sapien
ccacaggcaggtcattatacctgta

SEQ ID NO: 2191715 - DNA, 25 bp, Homo sapien
gccagatactctaggatttggcatc

SEQ ID NO: 2191716 - DNA, 25 bp, Homo sapien
gtgccagatactctaggatttggca

SEQ ID NO: 2191717 - DNA, 25 bp, Homo sapien
tgtagaacctcatccaacatttttg

SEQ ID NO: 2191718 - DNA, 25 bp, Homo sapien
ttaaaaggagttgtagaacctcatc

SEQ ID NO: 2191719 - DNA, 25 bp, Homo sapien
tagaacctcatccaacatttttggg

SEQ ID NO: 2191720 - DNA, 25 bp, Homo sapien
ggagttgtagaacctcatccaacat

SEQ ID NO: 2191721 - DNA, 25 bp, Homo sapien
tatctcaatgaactttgagtcaggg

SEQ ID NO: 2191722 - DNA, 25 bp, Homo sapien
gaacacagaagtgaactataagcag

SEQ ID NO: 2191723 - DNA, 25 bp, Homo sapien
aaagagcatggttgacccaagttgg

SEQ ID NO: 2191724 - DNA, 25 bp, Homo sapien
tatggtagatgatttgtcgaaaaca

SEQ ID NO: 2191725 - DNA, 25 bp, Homo sapien
tccctctggtctctggctgcttctg

SEQ ID NO: 2191726 - DNA, 25 bp, Homo sapien
gcctctgtctctgggataaccccag

SEQ ID NO: 2191727 - DNA, 25 bp, Homo sapien
tccatccccactggatttctggttc

SEQ ID NO: 2191728 - DNA, 25 bp, Homo sapien
ttttccatccccactggatttctgg

SEQ ID NO: 2191729 - DNA, 25 bp, Homo sapien
caaagtaatttacactaaccatgga

SEQ ID NO: 2191730 - DNA, 25 bp, Homo sapien
gatttgagaccttctgtcccaaacc

SEQ ID NO: 2191731 - DNA, 25 bp, Homo sapien
aggaactctgctaccacctttctgc

SEQ ID NO: 2191732 - DNA, 25 bp, Homo sapien
taatatctttcataggaactctgct

SEQ ID NO: 2191733 - DNA, 25 bp, Homo sapien
agaaggaaatccgaggcaagtgact

SEQ ID NO: 2191734 - DNA, 25 bp, Homo sapien
gaaagaaggaaatccgaggcaagtg

SEQ ID NO: 2191735 - DNA, 25 bp, Homo sapien
aaggaaatccgaggcaagtgactta

SEQ ID NO: 2191736 - DNA, 25 bp, Homo sapien
ggaaatccgaggcaagtgacttaat

SEQ ID NO: 2191737 - DNA, 25 bp, Homo sapien
tccaaattgagctctggctagggtg

SEQ ID NO: 2191738 - DNA, 25 bp, Homo sapien
caaattgagctctggctagggtgta

SEQ ID NO: 2191739 - DNA, 25 bp, Homo sapien
tggctagggtgtagttttctctcat

SEQ ID NO: 2191740 - DNA, 25 bp, Homo sapien
gaagaaactcttccaaattgagctc

SEQ ID NO: 2191741 - DNA, 25 bp, Homo sapien
catgacccaaacatatatccaggta

SEQ ID NO: 2191742 - DNA, 25 bp, Homo sapien
taaaacttcctccagaggagcaaaa

SEQ ID NO: 2191743 - DNA, 25 bp, Homo sapien
cacacgggatgttgacatgacccaa

SEQ ID NO: 2191744 - DNA, 25 bp, Homo sapien
aatgctctctgagtctcttcactga

SEQ ID NO: 2191745 - DNA, 25 bp, Homo sapien
aaataatcctgctagaagagccaat

SEQ ID NO: 2191746 - DNA, 25 bp, Homo sapien
gagccaatagcccaagttctgatgg

SEQ ID NO: 2191747 - DNA, 25 bp, Homo sapien
tagaagagccaatagcccaagttct

SEQ ID NO: 2191748 - DNA, 25 bp, Homo sapien
gaagagccaatagcccaagttctga

SEQ ID NO: 2191749 - DNA, 25 bp, Homo sapien
ctgtttgccttaagatggtagtgcc

SEQ ID NO: 2191750 - DNA, 25 bp, Homo sapien
aaaacactgtcgtctagtgctgctg

SEQ ID NO: 2191751 - DNA, 25 bp, Homo sapien
gatggtccacctaccctttcagctt

SEQ ID NO: 2191752 - DNA, 25 bp, Homo sapien
agtgctgctgactatggacctatga

SEQ ID NO: 2191753 - DNA, 25 bp, Homo sapien
agtcttctgccatttggtctctgaa

SEQ ID NO: 2191754 - DNA, 25 bp, Homo sapien
tacctggagtaccagcaagttccca

SEQ ID NO: 2191755 - DNA, 25 bp, Homo sapien
caggagctcacggttaaatcagcaa

SEQ ID NO: 2191756 - DNA, 25 bp, Homo sapien
tgtctaaggccaatgatatgtcact

SEQ ID NO: 2191757 - DNA, 25 bp, Homo sapien
gacaaagcatttcatcggtaggtac

SEQ ID NO: 2191758 - DNA, 25 bp, Homo sapien
tgccaacggccaagatgagaaaagt

SEQ ID NO: 2191759 - DNA, 25 bp, Homo sapien
tcatcctcttctcgcgcttgtctgg

SEQ ID NO: 2191760 - DNA, 25 bp, Homo sapien
tctgggtgattgtcgtaggtcttct

SEQ ID NO: 2191761 - DNA, 25 bp, Homo sapien
gtcttctgatgcctccattcctcag

SEQ ID NO: 2191762 - DNA, 25 bp, Homo sapien
tgataatgcgctgccgaagtcgggt

SEQ ID NO: 2191763 - DNA, 25 bp, Homo sapien
gcacgttggcgcaattcctgcagaa

SEQ ID NO: 2191764 - DNA, 25 bp, Homo sapien
tgtgtccgcagagagtacaagccct

SEQ ID NO: 2191765 - DNA, 25 bp, Homo sapien
caaaatatgatgtggctgccgaggg

SEQ ID NO: 2191766 - DNA, 25 bp, Homo sapien
cagggctatctggttgaggttcccc

SEQ ID NO: 2191767 - DNA, 25 bp, Homo sapien
gtgccccagggagataaagctttga

SEQ ID NO: 2191768 - DNA, 25 bp, Homo sapien
gaattatccacccagaacagtaggg

SEQ ID NO: 2191769 - DNA, 25 bp, Homo sapien
ttaaggcttctactggtgccccagg

SEQ ID NO: 2191770 - DNA, 25 bp, Homo sapien
taagttgctttaccaggttctcagg

SEQ ID NO: 2191771 - DNA, 25 bp, Homo sapien
tttaccaggttctcaggggacagac

SEQ ID NO: 2191772 - DNA, 25 bp, Homo sapien
tctaagttgctttaccaggttctca

SEQ ID NO: 2191773 - DNA, 25 bp, Homo sapien
accaggttctcaggggacagactca

SEQ ID NO: 2191774 - DNA, 25 bp, Homo sapien
gtgatttcacagaaacctgcattgg

SEQ ID NO: 2191775 - DNA, 25 bp, Homo sapien
gcattggcagccttggttaaagcca

SEQ ID NO: 2191776 - DNA, 25 bp, Homo sapien
caaggtggtctctccttgctgacgg

SEQ ID NO: 2191777 - DNA, 25 bp, Homo sapien
acaattgcccaataggttcctagag

SEQ ID NO: 2191778 - DNA, 25 bp, Homo sapien
caccagggttgtccagaaagtgcca

SEQ ID NO: 2191779 - DNA, 25 bp, Homo sapien
gatgttacagcatcaagtgcaacag

SEQ ID NO: 2191780 - DNA, 25 bp, Homo sapien
cttcccagagcaaagagactgattt

SEQ ID NO: 2191781 - DNA, 25 bp, Homo sapien
cagtaactgcgtaaggagactctgg

SEQ ID NO: 2191782 - DNA, 25 bp, Homo sapien
ctttaagctaccagaggcttggctg

SEQ ID NO: 2191783 - DNA, 25 bp, Homo sapien
ttggctggcccagaattgcaacagg

SEQ ID NO: 2191784 - DNA, 25 bp, Homo sapien
ctactgcctttctatctggctttaa

SEQ ID NO: 2191785 - DNA, 25 bp, Homo sapien
ccagaattgcaacaggattcttagc

SEQ ID NO: 2191786 - DNA, 25 bp, Homo sapien
tccacctcagtactattccttttac

SEQ ID NO: 2191787 - DNA, 25 bp, Homo sapien
ttcctccacctcagtactattcctt

SEQ ID NO: 2191788 - DNA, 25 bp, Homo sapien
tcctccacctcagtactattccttt

SEQ ID NO: 2191789 - DNA, 25 bp, Homo sapien
ctccacctcagtactattcctttta

SEQ ID NO: 2191790 - DNA, 25 bp, Homo sapien
ctctggtattaccacgagaattgaa

SEQ ID NO: 2191791 - DNA, 25 bp, Homo sapien
gctgtcagttcggtaaagtcaccct

SEQ ID NO: 2191792 - DNA, 25 bp, Homo sapien
tgagtggcgaaccaagggaagccct

SEQ ID NO: 2191793 - DNA, 25 bp, Homo sapien
gaaacccgcattttattgacagtca

SEQ ID NO: 2191794 - DNA, 25 bp, Homo sapien
catgtgcactttgaagccaattcca

SEQ ID NO: 2191795 - DNA, 25 bp, Homo sapien
tgatgaagagattgactggacatgt

SEQ ID NO: 2191796 - DNA, 25 bp, Homo sapien
gactggacatgtgcactttgaagcc

SEQ ID NO: 2191797 - DNA, 25 bp, Homo sapien
tgcatggccagatctaaccggggag

SEQ ID NO: 2191798 - DNA, 25 bp, Homo sapien
tttggctgtacaccagcatgacaaa

SEQ ID NO: 2191799 - DNA, 25 bp, Homo sapien
tggctgtacaccagcatgacaaagg

SEQ ID NO: 2191800 - DNA, 25 bp, Homo sapien
gacaaaggcttttctagctgcagta

SEQ ID NO: 2191801 - DNA, 25 bp, Homo sapien
caaaggcttttctagctgcagtatg

SEQ ID NO: 2191802 - DNA, 25 bp, Homo sapien
cttcattgtcatgaacgtgtcaata

SEQ ID NO: 2191803 - DNA, 25 bp, Homo sapien
gaacgtgtcaatataaaaatctcca

SEQ ID NO: 2191804 - DNA, 25 bp, Homo sapien
tataaaagaggattaggacatctga

SEQ ID NO: 2191805 - DNA, 25 bp, Homo sapien
taaaagaggattaggacatctgaat

SEQ ID NO: 2191806 - DNA, 25 bp, Homo sapien
catcctcaagattcccaacatattg

SEQ ID NO: 2191807 - DNA, 25 bp, Homo sapien
tcctcaagattcccaacatattgac

SEQ ID NO: 2191808 - DNA, 25 bp, Homo sapien
atcctcaagattcccaacatattga

SEQ ID NO: 2191809 - DNA, 25 bp, Homo sapien
gacatcctcaagattcccaacatat

SEQ ID NO: 2191810 - DNA, 25 bp, Homo sapien
tgctttcagttgatagacttttgtc

SEQ ID NO: 2191811 - DNA, 25 bp, Homo sapien
gctttcagttgatagacttttgtct

SEQ ID NO: 2191812 - DNA, 25 bp, Homo sapien
ctgctttcagttgatagacttttgt

SEQ ID NO: 2191813 - DNA, 25 bp, Homo sapien
tttcagttgatagacttttgtctga

SEQ ID NO: 2191814 - DNA, 25 bp, Homo sapien
ctattaagcttttggagaattctcc

SEQ ID NO: 2191815 - DNA, 25 bp, Homo sapien
gttcgccaagtacaggcgataccta

SEQ ID NO: 2191816 - DNA, 25 bp, Homo sapien
gcgatacctattaagcttttggaga

SEQ ID NO: 2191817 - DNA, 25 bp, Homo sapien
caagtacaggcgatacctattaagc

SEQ ID NO: 2191818 - DNA, 25 bp, Homo sapien
tcaaatcctgaaagtaaacatgtgg

SEQ ID NO: 2191819 - DNA, 25 bp, Homo sapien
aaaggtccaggacattgatccttgg

SEQ ID NO: 2191820 - DNA, 25 bp, Homo sapien
gatccttgggtagacactcaaatgt

SEQ ID NO: 2191821 - DNA, 25 bp, Homo sapien
ctaggtgacacaaaggtccaggaca

SEQ ID NO: 2191822 - DNA, 25 bp, Homo sapien
cagaagacaggaatgatattgtctt

SEQ ID NO: 2191823 - DNA, 25 bp, Homo sapien
gcatttttggaaggataggacgcaa

SEQ ID NO: 2191824 - DNA, 25 bp, Homo sapien
ggataggacgcaatctattatctct

SEQ ID NO: 2191825 - DNA, 25 bp, Homo sapien
tctcttgggctacatgtggaatttg

SEQ ID NO: 2191826 - DNA, 25 bp, Homo sapien
tcctctttgaccgttggctgtgggt

SEQ ID NO: 2191827 - DNA, 25 bp, Homo sapien
gccacttaggtctcccctgaggcag

SEQ ID NO: 2191828 - DNA, 25 bp, Homo sapien
cttagtttcttgccacttaggtctc

SEQ ID NO: 2191829 - DNA, 25 bp, Homo sapien
ggtatctggctccaatagagcaaga

SEQ ID NO: 2191830 - DNA, 25 bp, Homo sapien
ccattcctcagggttcaccgtactt

SEQ ID NO: 2191831 - DNA, 25 bp, Homo sapien
cattcctcagggttcaccgtacttt

SEQ ID NO: 2191832 - DNA, 25 bp, Homo sapien
tggttgatgattcccacacggtttg

SEQ ID NO: 2191833 - DNA, 25 bp, Homo sapien
gttgatgattcccacacggtttgac

SEQ ID NO: 2191834 - DNA, 25 bp, Homo sapien
atgattcccacacggtttgacagtt

SEQ ID NO: 2191835 - DNA, 25 bp, Homo sapien
tgatgattcccacacggtttgacag

SEQ ID NO: 2191836 - DNA, 25 bp, Homo sapien
ccaatgtatgtgctttcctgactca

SEQ ID NO: 2191837 - DNA, 25 bp, Homo sapien
tataactttcgactgccctgtggca

SEQ ID NO: 2191838 - DNA, 25 bp, Homo sapien
gaaagatggctgactatcaatccca

SEQ ID NO: 2191839 - DNA, 25 bp, Homo sapien
gaaaagcacgctttctgatgttgca

SEQ ID NO: 2191840 - DNA, 25 bp, Homo sapien
tcgtaacagaataaggcatggtcag

SEQ ID NO: 2191841 - DNA, 25 bp, Homo sapien
agaatgcccctagaggacccacttc

SEQ ID NO: 2191842 - DNA, 25 bp, Homo sapien
aaaagtgcctgaagacaacatagtg

SEQ ID NO: 2191843 - DNA, 25 bp, Homo sapien
taaaaaaccgttcagcagaatgccc

SEQ ID NO: 2191844 - DNA, 25 bp, Homo sapien
tgcggccttagggacagcattgacc

SEQ ID NO: 2191845 - DNA, 25 bp, Homo sapien
gcagtgcggccttagggacagcatt

SEQ ID NO: 2191846 - DNA, 25 bp, Homo sapien
ccttagcagtgcggccttagggaca

SEQ ID NO: 2191847 - DNA, 25 bp, Homo sapien
gccttagggacagcattgaccttct

SEQ ID NO: 2191848 - DNA, 25 bp, Homo sapien
ctggattagttttctcttcttccac

SEQ ID NO: 2191849 - DNA, 25 bp, Homo sapien
tctcttcttccactctttctctcac

SEQ ID NO: 2191850 - DNA, 25 bp, Homo sapien
ttttctcttcttccactctttctct

SEQ ID NO: 2191851 - DNA, 25 bp, Homo sapien
gttttctcttcttccactctttctc

SEQ ID NO: 2191852 - DNA, 25 bp, Homo sapien
ctgaatgaagatgtctagctttctt

SEQ ID NO: 2191853 - DNA, 25 bp, Homo sapien
gtcaggaattccaaagcagcttgac

SEQ ID NO: 2191854 - DNA, 25 bp, Homo sapien
tcaggaattccaaagcagcttgact

SEQ ID NO: 2191855 - DNA, 25 bp, Homo sapien
caggaattccaaagcagcttgactc

SEQ ID NO: 2191856 - DNA, 25 bp, Homo sapien
tctgttctgttttgcatattgcccc

SEQ ID NO: 2191857 - DNA, 25 bp, Homo sapien
ctgatcatccagctttctctgttct

SEQ ID NO: 2191858 - DNA, 25 bp, Homo sapien
tgttctgttttgcatattgccccat

SEQ ID NO: 2191859 - DNA, 25 bp, Homo sapien
gatcatccagctttctctgttctgt

SEQ ID NO: 2191860 - DNA, 25 bp, Homo sapien
tatggctatctcatactccacagct

SEQ ID NO: 2191861 - DNA, 25 bp, Homo sapien
tattagtcagctcaactggacaaat

SEQ ID NO: 2191862 - DNA, 25 bp, Homo sapien
gaggttttccagtgagtatatttct

SEQ ID NO: 2191863 - DNA, 25 bp, Homo sapien
tcaaaaccagtaacccatgtctggc

SEQ ID NO: 2191864 - DNA, 25 bp, Homo sapien
agaggcagagccattaggcagttaa

SEQ ID NO: 2191865 - DNA, 25 bp, Homo sapien
tttctcttcaagttaagggtcggca

SEQ ID NO: 2191866 - DNA, 25 bp, Homo sapien
gcagagccattaggcagttaaaaaa

SEQ ID NO: 2191867 - DNA, 25 bp, Homo sapien
ttcaagttaagggtcggcagaggca

SEQ ID NO: 2191868 - DNA, 25 bp, Homo sapien
cttttaggatccaatttatccagta

SEQ ID NO: 2191869 - DNA, 25 bp, Homo sapien
caaatcttttacaactctcagatag

SEQ ID NO: 2191870 - DNA, 25 bp, Homo sapien
tcagatagaacagatggcacagcca

SEQ ID NO: 2191871 - DNA, 25 bp, Homo sapien
caatttatccagtacacttttgaaa

SEQ ID NO: 2191872 - DNA, 25 bp, Homo sapien
tcctcttctaaaacaggtacaggca

SEQ ID NO: 2191873 - DNA, 25 bp, Homo sapien
attctcctcttctaaaacaggtaca

SEQ ID NO: 2191874 - DNA, 25 bp, Homo sapien
cctcttctaaaacaggtacaggcat

SEQ ID NO: 2191875 - DNA, 25 bp, Homo sapien
tccattctcctcttctaaaacaggt

SEQ ID NO: 2191876 - DNA, 25 bp, Homo sapien
ttcaataatatgttcgctgtaaaat

SEQ ID NO: 2191877 - DNA, 25 bp, Homo sapien
tgttcgctgtaaaatgttatagaca

SEQ ID NO: 2191878 - DNA, 25 bp, Homo sapien
ttacttttcttcaagtcagtaatat

SEQ ID NO: 2191879 - DNA, 25 bp, Homo sapien
caataatatgttcgctgtaaaatgt

SEQ ID NO: 2191880 - DNA, 25 bp, Homo sapien
catgccggccaaaggcaatgttgca

SEQ ID NO: 2191881 - DNA, 25 bp, Homo sapien
tctgttgaaactaataggcagcaac

SEQ ID NO: 2191882 - DNA, 25 bp, Homo sapien
cagaaggtactgcttttgttcatgc

SEQ ID NO: 2191883 - DNA, 25 bp, Homo sapien
caatgttgcagtgatcagtgtctgc

SEQ ID NO: 2191884 - DNA, 25 bp, Homo sapien
gactaacgtctgagatgagaatgtc

SEQ ID NO: 2191885 - DNA, 25 bp, Homo sapien
taatgcctgatattgagagtgacta

SEQ ID NO: 2191886 - DNA, 25 bp, Homo sapien
cctgatattgagagtgactaacgtc

SEQ ID NO: 2191887 - DNA, 25 bp, Homo sapien
gagagtgactaacgtctgagatgag

SEQ ID NO: 2191888 - DNA, 25 bp, Homo sapien
atgatgacttccaatttcgtgtctc

SEQ ID NO: 2191889 - DNA, 25 bp, Homo sapien
gatgatgacttccaatttcgtgtct

SEQ ID NO: 2191890 - DNA, 25 bp, Homo sapien
tgatgatgacttccaatttcgtgtc

SEQ ID NO: 2191891 - DNA, 25 bp, Homo sapien
aacatactcagccttaatgcgtcca

SEQ ID NO: 2191892 - DNA, 25 bp, Homo sapien
gggacatttatcacagaacggtgct

SEQ ID NO: 2191893 - DNA, 25 bp, Homo sapien
tattgaggcaatttggctcacagcc

SEQ ID NO: 2191894 - DNA, 25 bp, Homo sapien
cagccagatggtgtgaaatagcttt

SEQ ID NO: 2191895 - DNA, 25 bp, Homo sapien
catgatcagccattatgatagtttc

SEQ ID NO: 2191896 - DNA, 25 bp, Homo sapien
cgtccatgatcagccattatgatag

SEQ ID NO: 2191897 - DNA, 25 bp, Homo sapien
gatcagccattatgatagtttcatc

SEQ ID NO: 2191898 - DNA, 25 bp, Homo sapien
tcagccattatgatagtttcatctt

SEQ ID NO: 2191899 - DNA, 25 bp, Homo sapien
cataggccaaaatctagatttcttg

SEQ ID NO: 2191900 - DNA, 25 bp, Homo sapien
gatttcttgcatcaagttagccaag

SEQ ID NO: 2191901 - DNA, 25 bp, Homo sapien
ttatttcccccacacataggccaaa

SEQ ID NO: 2191902 - DNA, 25 bp, Homo sapien
caaaatctagatttcttgcatcaag

SEQ ID NO: 2191903 - DNA, 25 bp, Homo sapien
gtgcatacgctgggaccagccctct

SEQ ID NO: 2191904 - DNA, 25 bp, Homo sapien
tgctacgggcatcctccgccgccgg

SEQ ID NO: 2191905 - DNA, 25 bp, Homo sapien
tgcgtgggcttcctgctacgggcat

SEQ ID NO: 2191906 - DNA, 25 bp, Homo sapien
ttcaccatggggcaggtcgacgcct

SEQ ID NO: 2191907 - DNA, 25 bp, Homo sapien
tgcccagtcacctcagctgaaggct

SEQ ID NO: 2191908 - DNA, 25 bp, Homo sapien
tgaaggctttggactcatcctacat

SEQ ID NO: 2191909 - DNA, 25 bp, Homo sapien
tatgtgactccatggtaatgcaaga

SEQ ID NO: 2191910 - DNA, 25 bp, Homo sapien
tcttcagaccaccaagcaagccatt

SEQ ID NO: 2191911 - DNA, 25 bp, Homo sapien
gttgcatcacttacaaagactattg

SEQ ID NO: 2191912 - DNA, 25 bp, Homo sapien
taagcagacagagcaaaagtggtga

SEQ ID NO: 2191913 - DNA, 25 bp, Homo sapien
gaacttcatgcaagaggtattagtc

SEQ ID NO: 2191914 - DNA, 25 bp, Homo sapien
gacagctcgtttgtacctgctcaag

SEQ ID NO: 2191915 - DNA, 25 bp, Homo sapien
ttatacctacaagttcaagcctcag

SEQ ID NO: 2191916 - DNA, 25 bp, Homo sapien
tgtccctctggatccatagaatgcc

SEQ ID NO: 2191917 - DNA, 25 bp, Homo sapien
tgtgccagcaagcatatgtccctct

SEQ ID NO: 2191918 - DNA, 25 bp, Homo sapien
tataaagtaagcaatggtcctcaat

SEQ ID NO: 2191919 - DNA, 25 bp, Homo sapien
tataagagtaggaccacaacatttc

SEQ ID NO: 2191920 - DNA, 25 bp, Homo sapien
tcaaaaatataagagtaggaccaca

SEQ ID NO: 2191921 - DNA, 25 bp, Homo sapien
agtccagtgctttgaccaatcaaaa

SEQ ID NO: 2191922 - DNA, 25 bp, Homo sapien
cacaacatttcatgatgagaatgtg

SEQ ID NO: 2191923 - DNA, 25 bp, Homo sapien
cctgtccagctgtattacctctcat

SEQ ID NO: 2191924 - DNA, 25 bp, Homo sapien
cagctgtattacctctcatccctgt

SEQ ID NO: 2191925 - DNA, 25 bp, Homo sapien
tactggtcagcaaagacctgtccag

SEQ ID NO: 2191926 - DNA, 25 bp, Homo sapien
aggaggcagtgccagttcatgactg

SEQ ID NO: 2191927 - DNA, 25 bp, Homo sapien
gtcattctcttcaggcagaaaggcc

SEQ ID NO: 2191928 - DNA, 25 bp, Homo sapien
cttcccagtcattctcttcaggcag

SEQ ID NO: 2191929 - DNA, 25 bp, Homo sapien
ccagtcattctcttcaggcagaaag

SEQ ID NO: 2191930 - DNA, 25 bp, Homo sapien
ttcccagtcattctcttcaggcaga

SEQ ID NO: 2191931 - DNA, 25 bp, Homo sapien
caggtgcagggtcagtattatcctt

SEQ ID NO: 2191932 - DNA, 25 bp, Homo sapien
tgtgtgttacgtgcaccatctgcag

SEQ ID NO: 2191933 - DNA, 25 bp, Homo sapien
ccttcctgttttgaaggcaatcgtg

SEQ ID NO: 2191934 - DNA, 25 bp, Homo sapien
tccttccaagcatggagtttagcac

SEQ ID NO: 2191935 - DNA, 25 bp, Homo sapien
ctaactccactggtatcctgtatct

SEQ ID NO: 2191936 - DNA, 25 bp, Homo sapien
actccactggtatcctgtatctgac

SEQ ID NO: 2191937 - DNA, 25 bp, Homo sapien
tcctaactccactggtatcctgtat

SEQ ID NO: 2191938 - DNA, 25 bp, Homo sapien
tccactggtatcctgtatctgacac

SEQ ID NO: 2191939 - DNA, 25 bp, Homo sapien
cctgtgagcctagttagaggtgtca

SEQ ID NO: 2191940 - DNA, 25 bp, Homo sapien
tccctgtgagcctagttagaggtgt

SEQ ID NO: 2191941 - DNA, 25 bp, Homo sapien
tgagcctagttagaggtgtcaatcg

SEQ ID NO: 2191942 - DNA, 25 bp, Homo sapien
ctagttagaggtgtcaatcgatggg

SEQ ID NO: 2191943 - DNA, 25 bp, Homo sapien
tatgtttagatgtcctgttgaaaaa

SEQ ID NO: 2191944 - DNA, 25 bp, Homo sapien
gcctaagccaagattacaaagattt

SEQ ID NO: 2191945 - DNA, 25 bp, Homo sapien
gataagaggaacttctcactgtggg

SEQ ID NO: 2191946 - DNA, 25 bp, Homo sapien
tcttccagaagatgagtaaatcgaa

SEQ ID NO: 2191947 - DNA, 25 bp, Homo sapien
catatccggccttctgtgtcgcttc

SEQ ID NO: 2191948 - DNA, 25 bp, Homo sapien
tcaatcttgaccatatccggccttc

SEQ ID NO: 2191949 - DNA, 25 bp, Homo sapien
aggcatcgaagatctcaatcttgac

SEQ ID NO: 2191950 - DNA, 25 bp, Homo sapien
gtgtcgcttcaactcataacatgtc

SEQ ID NO: 2191951 - DNA, 25 bp, Homo sapien
gaaatgcataaactgtgcccagtac

SEQ ID NO: 2191952 - DNA, 25 bp, Homo sapien
gcctcttatactggctggaagatag

SEQ ID NO: 2191953 - DNA, 25 bp, Homo sapien
caaggatggtgtaagtagttctgaa

SEQ ID NO: 2191954 - DNA, 25 bp, Homo sapien
caaatgagccttgagttggaacact

SEQ ID NO: 2191955 - DNA, 25 bp, Homo sapien
tgtaattcttcactattgtttgctc

SEQ ID NO: 2191956 - DNA, 25 bp, Homo sapien
aattcttcactattgtttgctcttt

SEQ ID NO: 2191957 - DNA, 25 bp, Homo sapien
taattcttcactattgtttgctctt

SEQ ID NO: 2191958 - DNA, 25 bp, Homo sapien
gtctgaattccagaacccatcacag

SEQ ID NO: 2191959 - DNA, 25 bp, Homo sapien
ctaaattgctggtctgaattccaga

SEQ ID NO: 2191960 - DNA, 25 bp, Homo sapien
tcatggtttctatccacttgcctac

SEQ ID NO: 2191961 - DNA, 25 bp, Homo sapien
gaacttcttgtcatggtttctatcc

SEQ ID NO: 2191962 - DNA, 25 bp, Homo sapien
aaacaactggccgatcacagaattc

SEQ ID NO: 2191963 - DNA, 25 bp, Homo sapien
gacaagcgctaaatctttaatccta

SEQ ID NO: 2191964 - DNA, 25 bp, Homo sapien
cagaattcgcattgacaagcgctaa

SEQ ID NO: 2191965 - DNA, 25 bp, Homo sapien
tggccgatcacagaattcgcattga

SEQ ID NO: 2191966 - DNA, 25 bp, Homo sapien
tgaccgctctccaacagacatgctg

SEQ ID NO: 2191967 - DNA, 25 bp, Homo sapien
tgctgacccatagtacacaggagga

SEQ ID NO: 2191968 - DNA, 25 bp, Homo sapien
ggagaaagggtgcttctggtgaacc

SEQ ID NO: 2191969 - DNA, 25 bp, Homo sapien
catgtcctgatcacttgatgctgcc

SEQ ID NO: 2191970 - DNA, 25 bp, Homo sapien
cggattaggtttgcaaaattacact

SEQ ID NO: 2191971 - DNA, 25 bp, Homo sapien
aatgctgccggattaggtttgcaaa

SEQ ID NO: 2191972 - DNA, 25 bp, Homo sapien
gctgccggattaggtttgcaaaatt

SEQ ID NO: 2191973 - DNA, 25 bp, Homo sapien
gccggattaggtttgcaaaattaca

SEQ ID NO: 2191974 - DNA, 25 bp, Homo sapien
tgtggtgtaggcaattcaaaactgt

SEQ ID NO: 2191975 - DNA, 25 bp, Homo sapien
tataaatgctctctccgtgtgcacc

SEQ ID NO: 2191976 - DNA, 25 bp, Homo sapien
gttccaacgcaaagtcctacaatca

SEQ ID NO: 2191977 - DNA, 25 bp, Homo sapien
tgtgcaccgactgagttctgtccca

SEQ ID NO: 2191978 - DNA, 25 bp, Homo sapien
tataacaattctttcatactcccat

SEQ ID NO: 2191979 - DNA, 25 bp, Homo sapien
gcttgggtctgatatttcctataac

SEQ ID NO: 2191980 - DNA, 25 bp, Homo sapien
ttcctgcttgggtctgatatttcct

SEQ ID NO: 2191981 - DNA, 25 bp, Homo sapien
gggtctgatatttcctataacaatt

SEQ ID NO: 2191982 - DNA, 25 bp, Homo sapien
tacagccaattagtgcaggtatttc

SEQ ID NO: 2191983 - DNA, 25 bp, Homo sapien
tgatagagaatacggagacaaatac

SEQ ID NO: 2191984 - DNA, 25 bp, Homo sapien
gaactaaacagactacaagtccaag

SEQ ID NO: 2191985 - DNA, 25 bp, Homo sapien
caagtccaagatagagactacagcc

SEQ ID NO: 2191986 - DNA, 25 bp, Homo sapien
ccataagagcattccacagagttcc

SEQ ID NO: 2191987 - DNA, 25 bp, Homo sapien
ttcctaaagtcaccttgagtgacag

SEQ ID NO: 2191988 - DNA, 25 bp, Homo sapien
aatcctagctcctaccataagagca

SEQ ID NO: 2191989 - DNA, 25 bp, Homo sapien
gttcctaaagtcaccttgagtgaca

SEQ ID NO: 2191990 - DNA, 25 bp, Homo sapien
gctcttacaaggtgcttcagggaac

SEQ ID NO: 2191991 - DNA, 25 bp, Homo sapien
gctcaggcagcgttgctcttacaag

SEQ ID NO: 2191992 - DNA, 25 bp, Homo sapien
gttgctcttacaaggtgcttcaggg

SEQ ID NO: 2191993 - DNA, 25 bp, Homo sapien
gaactgtgctcaggcagcgttgctc

SEQ ID NO: 2191994 - DNA, 25 bp, Homo sapien
tgtcctcgggggttgagtgactcac

SEQ ID NO: 2191995 - DNA, 25 bp, Homo sapien
ttgcctctatttgcaaaaatgtcct

SEQ ID NO: 2191996 - DNA, 25 bp, Homo sapien
ggaggataactagggggcttgctga

SEQ ID NO: 2191997 - DNA, 25 bp, Homo sapien
tgagaaaggtcttgacattttgcct

SEQ ID NO: 2191998 - DNA, 25 bp, Homo sapien
atgctttgttaacatgcagcaactg

SEQ ID NO: 2191999 - DNA, 25 bp, Homo sapien
gaaagctgtcttgtgcctagtccct

SEQ ID NO: 2192000 - DNA, 25 bp, Homo sapien
ctgtcttgtgcctagtcccttggct

SEQ ID NO: 2192001 - DNA, 25 bp, Homo sapien
aataagctgaaagctgtcttgtgcc

SEQ ID NO: 2192002 - DNA, 25 bp, Homo sapien
gataaaaataagctgaaagctgtct

SEQ ID NO: 2192003 - DNA, 25 bp, Homo sapien
cagccttaaacaggctgctagttcc

SEQ ID NO: 2192004 - DNA, 25 bp, Homo sapien
aagtatctaaatttgtgacaatttg

SEQ ID NO: 2192005 - DNA, 25 bp, Homo sapien
ccttaaacaggctgctagttcctaa

SEQ ID NO: 2192006 - DNA, 25 bp, Homo sapien
ttgtgacaatttgtgaatgaatcac

SEQ ID NO: 2192007 - DNA, 25 bp, Homo sapien
ttatggcatgatgagctcatagcca

SEQ ID NO: 2192008 - DNA, 25 bp, Homo sapien
tctaatttcagggtagccgtagtta

SEQ ID NO: 2192009 - DNA, 25 bp, Homo sapien
aacttggcaactggatcagcgtttc

SEQ ID NO: 2192010 - DNA, 25 bp, Homo sapien
tgcatattgtggaagtgaaacactt

SEQ ID NO: 2192011 - DNA, 25 bp, Homo sapien
taaccaaatctaagggcagctgagt

SEQ ID NO: 2192012 - DNA, 25 bp, Homo sapien
gccaggcttagtaggagtaacacaa

SEQ ID NO: 2192013 - DNA, 25 bp, Homo sapien
gaatgtctggcaccaagtgctactt

SEQ ID NO: 2192014 - DNA, 25 bp, Homo sapien
gcatccagattattccaccagagtg

SEQ ID NO: 2192015 - DNA, 25 bp, Homo sapien
ctctttatagagtttccttgagtta

SEQ ID NO: 2192016 - DNA, 25 bp, Homo sapien
agagtttccttgagttacagatttg

SEQ ID NO: 2192017 - DNA, 25 bp, Homo sapien
tttatagagtttccttgagttacag

SEQ ID NO: 2192018 - DNA, 25 bp, Homo sapien
tatagagtttccttgagttacagat

SEQ ID NO: 2192019 - DNA, 25 bp, Homo sapien
tgaactgactagtttccctttgttc

SEQ ID NO: 2192020 - DNA, 25 bp, Homo sapien
ctctatttatctcctcaggcccaat

SEQ ID NO: 2192021 - DNA, 25 bp, Homo sapien
ccagggtgctgagagactcacatga

SEQ ID NO: 2192022 - DNA, 25 bp, Homo sapien
tatttatctcctcaggcccaattct

SEQ ID NO: 2192023 - DNA, 25 bp, Homo sapien
gagtcccagtccattccgaggcctg

SEQ ID NO: 2192024 - DNA, 25 bp, Homo sapien
gaattctgctcccatttggtctccc

SEQ ID NO: 2192025 - DNA, 25 bp, Homo sapien
agtaatgacttgagtccatagggaa

SEQ ID NO: 2192026 - DNA, 25 bp, Homo sapien
aagaaattgcctctaggagcttctg

SEQ ID NO: 2192027 - DNA, 25 bp, Homo sapien
aggcatcattttgggatgcaccaag

SEQ ID NO: 2192028 - DNA, 25 bp, Homo sapien
tctaaaggcatcattttgggatgca

SEQ ID NO: 2192029 - DNA, 25 bp, Homo sapien
tcctggtttggggctttgtctgtga

SEQ ID NO: 2192030 - DNA, 25 bp, Homo sapien
ttgtctgtgaagtgcgtgggaggtg

SEQ ID NO: 2192031 - DNA, 25 bp, Homo sapien
cgatggagatcatgaaattcatggc

SEQ ID NO: 2192032 - DNA, 25 bp, Homo sapien
gaaaggccactgctatggcttcctt

SEQ ID NO: 2192033 - DNA, 25 bp, Homo sapien
tctttttggcgatggagatcatgaa

SEQ ID NO: 2192034 - DNA, 25 bp, Homo sapien
tcatggcatggggaaaggccactgc

SEQ ID NO: 2192035 - DNA, 25 bp, Homo sapien
tcctttagacttggtgccatcaggt

SEQ ID NO: 2192036 - DNA, 25 bp, Homo sapien
tattcaatggctgtaaatccacagc

SEQ ID NO: 2192037 - DNA, 25 bp, Homo sapien
gccatcaggtaatgcacaatccatg

SEQ ID NO: 2192038 - DNA, 25 bp, Homo sapien
gcacaatccatgaggatgtattcaa

SEQ ID NO: 2192039 - DNA, 25 bp, Homo sapien
ctgaatataaggaaagctcttttcc

SEQ ID NO: 2192040 - DNA, 25 bp, Homo sapien
tgaatataaggaaagctcttttcca

SEQ ID NO: 2192041 - DNA, 25 bp, Homo sapien
attttcagataacagctggaaaact

SEQ ID NO: 2192042 - DNA, 25 bp, Homo sapien
tttcagataacagctggaaaactgt

SEQ ID NO: 2192043 - DNA, 25 bp, Homo sapien
gataacagctggaaaactgtttcct

SEQ ID NO: 2192044 - DNA, 25 bp, Homo sapien
cagataacagctggaaaactgtttc

SEQ ID NO: 2192045 - DNA, 25 bp, Homo sapien
ctagtcccaactgaaatagctcatt

SEQ ID NO: 2192046 - DNA, 25 bp, Homo sapien
gcagccatcagtggcacagtctgtg

SEQ ID NO: 2192047 - DNA, 25 bp, Homo sapien
ttccacaagtggtgtcagtgactca

SEQ ID NO: 2192048 - DNA, 25 bp, Homo sapien
tatgctgcagagtaagtccaccgag

SEQ ID NO: 2192049 - DNA, 25 bp, Homo sapien
cattcccgaatccatatatgctgca

SEQ ID NO: 2192050 - DNA, 25 bp, Homo sapien
taaggtaggcatctatcattcccga

SEQ ID NO: 2192051 - DNA, 25 bp, Homo sapien
ttccttctctccgaagaacttttca

SEQ ID NO: 2192052 - DNA, 25 bp, Homo sapien
ctctccgaagaacttttcacatttc

SEQ ID NO: 2192053 - DNA, 25 bp, Homo sapien
ctttccttatgtaggtctcagtttc

SEQ ID NO: 2192054 - DNA, 25 bp, Homo sapien
aatattaacgatatgaaaataaaga

SEQ ID NO: 2192055 - DNA, 25 bp, Homo sapien
tcacaaggccaccccaggtgcaaaa

SEQ ID NO: 2192056 - DNA, 25 bp, Homo sapien
acaaggccaccccaggtgcaaaaga

SEQ ID NO: 2192057 - DNA, 25 bp, Homo sapien
caaggccaccccaggtgcaaaagac

SEQ ID NO: 2192058 - DNA, 25 bp, Homo sapien
cacaaggccaccccaggtgcaaaag

SEQ ID NO: 2192059 - DNA, 25 bp, Homo sapien
tcttgtatattctgaacattgatga

SEQ ID NO: 2192060 - DNA, 25 bp, Homo sapien
ttcttgtatattctgaacattgatg

SEQ ID NO: 2192061 - DNA, 25 bp, Homo sapien
gtatgccaaggaccattactaccat

SEQ ID NO: 2192062 - DNA, 25 bp, Homo sapien
tttttctaccactatagtcgtctcg

SEQ ID NO: 2192063 - DNA, 25 bp, Homo sapien
taccactatagtcgtctcgtatgcc

SEQ ID NO: 2192064 - DNA, 25 bp, Homo sapien
tatagtcgtctcgtatgccaaggac

SEQ ID NO: 2192065 - DNA, 25 bp, Homo sapien
aaagtcaacatactgagttgctgag

SEQ ID NO: 2192066 - DNA, 25 bp, Homo sapien
ataaagtcaacatactgagttgctg

SEQ ID NO: 2192067 - DNA, 25 bp, Homo sapien
tctctctcaggaaataaagtcaaca

SEQ ID NO: 2192068 - DNA, 25 bp, Homo sapien
agtcaacatactgagttgctgagca

SEQ ID NO: 2192069 - DNA, 25 bp, Homo sapien
ctcactctcgttcccaaatgggcag

SEQ ID NO: 2192070 - DNA, 25 bp, Homo sapien
ttcatcatccctacactgccttaaa

SEQ ID NO: 2192071 - DNA, 25 bp, Homo sapien
catccctacactgccttaaatttct

SEQ ID NO: 2192072 - DNA, 25 bp, Homo sapien
ttcctcactctcgttcccaaatggg

SEQ ID NO: 2192073 - DNA, 25 bp, Homo sapien
aaaccaatgaccaaatataaaggca

SEQ ID NO: 2192074 - DNA, 25 bp, Homo sapien
taacaaaatggctatgagaacaagg

SEQ ID NO: 2192075 - DNA, 25 bp, Homo sapien
gccaaattatcaagttctataaaac

SEQ ID NO: 2192076 - DNA, 25 bp, Homo sapien
caaggttcatgtccgatattagtat

SEQ ID NO: 2192077 - DNA, 25 bp, Homo sapien
aagtttggagttcagctcttcttgg

SEQ ID NO: 2192078 - DNA, 25 bp, Homo sapien
agaagtttggagttcagctcttctt

SEQ ID NO: 2192079 - DNA, 25 bp, Homo sapien
tgactctgagacctctgaaaagtca

SEQ ID NO: 2192080 - DNA, 25 bp, Homo sapien
gactctgagacctctgaaaagtcac

SEQ ID NO: 2192081 - DNA, 25 bp, Homo sapien
tgaggagtggatagctgcaattaaa

SEQ ID NO: 2192082 - DNA, 25 bp, Homo sapien
cttggcatatgaggagtggatagct

SEQ ID NO: 2192083 - DNA, 25 bp, Homo sapien
gcatatgaggagtggatagctgcaa

SEQ ID NO: 2192084 - DNA, 25 bp, Homo sapien
ccttggcatatgaggagtggatagc

SEQ ID NO: 2192085 - DNA, 25 bp, Homo sapien
ttgttttagttggataggacatatt

SEQ ID NO: 2192086 - DNA, 25 bp, Homo sapien
ccaacttttctcagttgcagtctga

SEQ ID NO: 2192087 - DNA, 25 bp, Homo sapien
tctcagttgcagtctgagctctgtc

SEQ ID NO: 2192088 - DNA, 25 bp, Homo sapien
tagccctgaggcctctggaaagtga

SEQ ID NO: 2192089 - DNA, 25 bp, Homo sapien
tgtgcctctgcaagattatccagta

SEQ ID NO: 2192090 - DNA, 25 bp, Homo sapien
gcctgcagaatcaatttgggtcttg

SEQ ID NO: 2192091 - DNA, 25 bp, Homo sapien
ctttcgccacctcaactcttttatt

SEQ ID NO: 2192092 - DNA, 25 bp, Homo sapien
ttatttcactcggttgagtgatgcc

SEQ ID NO: 2192093 - DNA, 25 bp, Homo sapien
gggacatgtctgaccgaagcatcct

SEQ ID NO: 2192094 - DNA, 25 bp, Homo sapien
acaccataactgaaggcactgcatg

SEQ ID NO: 2192095 - DNA, 25 bp, Homo sapien
catggtatatctccctgagaggtga

SEQ ID NO: 2192096 - DNA, 25 bp, Homo sapien
ctatgcaggttttcagggacatgtc

SEQ ID NO: 2192097 - DNA, 25 bp, Homo sapien
acaaccagaaagaagtagtggctgc

SEQ ID NO: 2192098 - DNA, 25 bp, Homo sapien
gtggctgcatactgctgtaggctcc

SEQ ID NO: 2192099 - DNA, 25 bp, Homo sapien
tagtggctgcatactgctgtaggct

SEQ ID NO: 2192100 - DNA, 25 bp, Homo sapien
gaagtagtggctgcatactgctgta

SEQ ID NO: 2192101 - DNA, 25 bp, Homo sapien
taacaagccttccacggatcccaat

SEQ ID NO: 2192102 - DNA, 25 bp, Homo sapien
gcaactctgcggatggagtaggacc

SEQ ID NO: 2192103 - DNA, 25 bp, Homo sapien
tggacgcacctcgtcagcaactctg

SEQ ID NO: 2192104 - DNA, 25 bp, Homo sapien
tctatttggatttaacaagccttcc

SEQ ID NO: 2192105 - DNA, 25 bp, Homo sapien
tgatctaggctcattttatccaagg

SEQ ID NO: 2192106 - DNA, 25 bp, Homo sapien
gaggtatcacctagacaaaaggcat

SEQ ID NO: 2192107 - DNA, 25 bp, Homo sapien
cagcaaaggttatatgtcacctgac

SEQ ID NO: 2192108 - DNA, 25 bp, Homo sapien
taatggaaatctcaggaaaacacct

SEQ ID NO: 2192109 - DNA, 25 bp, Homo sapien
agagtccaggcattctcaaacccag

SEQ ID NO: 2192110 - DNA, 25 bp, Homo sapien
aggagagaattgacgggcagagtcc

SEQ ID NO: 2192111 - DNA, 25 bp, Homo sapien
aaggagagaattgacgggcagagtc

SEQ ID NO: 2192112 - DNA, 25 bp, Homo sapien
gaaggagagaattgacgggcagagt

SEQ ID NO: 2192113 - DNA, 25 bp, Homo sapien
ctggaataaaatttggagtgagaat

SEQ ID NO: 2192114 - DNA, 25 bp, Homo sapien
tggaataaaatttggagtgagaatg

SEQ ID NO: 2192115 - DNA, 25 bp, Homo sapien
gaataaaatttggagtgagaatgtc

SEQ ID NO: 2192116 - DNA, 25 bp, Homo sapien
ggaataaaatttggagtgagaatgt

SEQ ID NO: 2192117 - DNA, 25 bp, Homo sapien
tatatgccaggatggcaactgtctc

SEQ ID NO: 2192118 - DNA, 25 bp, Homo sapien
aatttgggtccaatccctctccaga

SEQ ID NO: 2192119 - DNA, 25 bp, Homo sapien
ggataggtctaacccacagaatgct

SEQ ID NO: 2192120 - DNA, 25 bp, Homo sapien
tgccgatgcctgcagaaccaatttg

SEQ ID NO: 2192121 - DNA, 25 bp, Homo sapien
actgttcatataactccgcagggag

SEQ ID NO: 2192122 - DNA, 25 bp, Homo sapien
tgcagaggtatccttgaccccatgt

SEQ ID NO: 2192123 - DNA, 25 bp, Homo sapien
tttatgcaggccaagtgtaactggg

SEQ ID NO: 2192124 - DNA, 25 bp, Homo sapien
attagggccgtagcaaagaatcagc

SEQ ID NO: 2192125 - DNA, 25 bp, Homo sapien
actactcaagtttggaggctccggg

SEQ ID NO: 2192126 - DNA, 25 bp, Homo sapien
ggctccggggaagtcagtatctctt

SEQ ID NO: 2192127 - DNA, 25 bp, Homo sapien
gggaagtcagtatctctttattcta

SEQ ID NO: 2192128 - DNA, 25 bp, Homo sapien
tctatcattcaatggaaacttgttt

SEQ ID NO: 2192129 - DNA, 25 bp, Homo sapien
tgacagcttcagtcctttctgcatt

SEQ ID NO: 2192130 - DNA, 25 bp, Homo sapien
gacagcttcagtcctttctgcattg

SEQ ID NO: 2192131 - DNA, 25 bp, Homo sapien
ttgacagcttcagtcctttctgcat

SEQ ID NO: 2192132 - DNA, 25 bp, Homo sapien
tccttgtcctcgtggactttgagaa

SEQ ID NO: 2192133 - DNA, 25 bp, Homo sapien
caatagcatccatggagatctacca

SEQ ID NO: 2192134 - DNA, 25 bp, Homo sapien
cattcggtggaaagatgtccttgtc

SEQ ID NO: 2192135 - DNA, 25 bp, Homo sapien
tggactttgagaagtaccttctcaa

SEQ ID NO: 2192136 - DNA, 25 bp, Homo sapien
aatgccccaagggttcatttggcat

SEQ ID NO: 2192137 - DNA, 25 bp, Homo sapien
ccagggaacaatatacggattcagg

SEQ ID NO: 2192138 - DNA, 25 bp, Homo sapien
gggaacaatatacggattcagggcc

SEQ ID NO: 2192139 - DNA, 25 bp, Homo sapien
aacaatatacggattcagggccttc

SEQ ID NO: 2192140 - DNA, 25 bp, Homo sapien
gcacacttacgtgtcctgacccgga

SEQ ID NO: 2192141 - DNA, 25 bp, Homo sapien
gattcttctgcaaggaaggtggtga

SEQ ID NO: 2192142 - DNA, 25 bp, Homo sapien
gatactgccagctacggataccgtt

SEQ ID NO: 2192143 - DNA, 25 bp, Homo sapien
tgacccggaattcagttagttctgc

SEQ ID NO: 2192144 - DNA, 25 bp, Homo sapien
gagacttgtgaagcatagtagtgag

SEQ ID NO: 2192145 - DNA, 25 bp, Homo sapien
gtaactaactctgaacaattaatta

SEQ ID NO: 2192146 - DNA, 25 bp, Homo sapien
gggataatgtattccctttggacca

SEQ ID NO: 2192147 - DNA, 25 bp, Homo sapien
attgggataatgtattccctttgga

SEQ ID NO: 2192148 - DNA, 25 bp, Homo sapien
tataggtctggaaattttcatacta

SEQ ID NO: 2192149 - DNA, 25 bp, Homo sapien
gatattcatggtgcaagtatttcaa

SEQ ID NO: 2192150 - DNA, 25 bp, Homo sapien
tggatattcatggtgcaagtatttc

SEQ ID NO: 2192151 - DNA, 25 bp, Homo sapien
tctataggtctggaaattttcatac

SEQ ID NO: 2192152 - DNA, 25 bp, Homo sapien
caacacgatgccttgggaggcaaga

SEQ ID NO: 2192153 - DNA, 25 bp, Homo sapien
cctttcagtgaccaacacgatgcct

SEQ ID NO: 2192154 - DNA, 25 bp, Homo sapien
tcagtgaccaacacgatgccttggg

SEQ ID NO: 2192155 - DNA, 25 bp, Homo sapien
gtgccaggaaccaaagaacctttca

SEQ ID NO: 2192156 - DNA, 25 bp, Homo sapien
ctggacaataattgtcacaagtgcc

SEQ ID NO: 2192157 - DNA, 25 bp, Homo sapien
ccaaatctggacaataattgtcaca

SEQ ID NO: 2192158 - DNA, 25 bp, Homo sapien
aaatctggacaataattgtcacaag

SEQ ID NO: 2192159 - DNA, 25 bp, Homo sapien
atctggacaataattgtcacaagtg

SEQ ID NO: 2192160 - DNA, 25 bp, Homo sapien
ggatccacggccaacaatttccagg

SEQ ID NO: 2192161 - DNA, 25 bp, Homo sapien
tcaaagtgatttccagcaccctggg

SEQ ID NO: 2192162 - DNA, 25 bp, Homo sapien
ttccaggaaggccagtcgcaaggat

SEQ ID NO: 2192163 - DNA, 25 bp, Homo sapien
taggatcctcctgtgggtaacgtgc

SEQ ID NO: 2192164 - DNA, 25 bp, Homo sapien
ccaccggtggtaccaaatctggaca

SEQ ID NO: 2192165 - DNA, 25 bp, Homo sapien
agcaaatgtgcattgaagagaagcc

SEQ ID NO: 2192166 - DNA, 25 bp, Homo sapien
tctgtaatgtactggatagccctcc

SEQ ID NO: 2192167 - DNA, 25 bp, Homo sapien
atgtactggatagccctccaaaagc

SEQ ID NO: 2192168 - DNA, 25 bp, Homo sapien
ggagtgcagcactcctaaggaactg

SEQ ID NO: 2192169 - DNA, 25 bp, Homo sapien
agtgcagcactcctaaggaactgaa

SEQ ID NO: 2192170 - DNA, 25 bp, Homo sapien
tgaaggctgagtgaacggggagtga

SEQ ID NO: 2192171 - DNA, 25 bp, Homo sapien
ctggagtgcagcactcctaaggaac

SEQ ID NO: 2192172 - DNA, 25 bp, Homo sapien
ttttggccattgaccagcaggtggt

SEQ ID NO: 2192173 - DNA, 25 bp, Homo sapien
acatgaatgtagaccagttttggcc

SEQ ID NO: 2192174 - DNA, 25 bp, Homo sapien
aagggttgcaaagagtaccgttatg

SEQ ID NO: 2192175 - DNA, 25 bp, Homo sapien
caaagagtaccgttatgggttgaat

SEQ ID NO: 2192176 - DNA, 25 bp, Homo sapien
agtattccagtaactagtatttgca

SEQ ID NO: 2192177 - DNA, 25 bp, Homo sapien
tggtaatatcatttgccctaacaga

SEQ ID NO: 2192178 - DNA, 25 bp, Homo sapien
tcaatgataaatgtactgaagttac

SEQ ID NO: 2192179 - DNA, 25 bp, Homo sapien
tgatacaaatgatgcactccttggt

SEQ ID NO: 2192180 - DNA, 25 bp, Homo sapien
gaacagaatccataatcagaaaaaa

SEQ ID NO: 2192181 - DNA, 25 bp, Homo sapien
aaaatggagcagaatcttctcaacg

SEQ ID NO: 2192182 - DNA, 25 bp, Homo sapien
tgacttaaaattcggcttccttctg

SEQ ID NO: 2192183 - DNA, 25 bp, Homo sapien
cctagaacgatgacttaaaattcgg

SEQ ID NO: 2192184 - DNA, 25 bp, Homo sapien
tttgaaaccaagcagatcatgacgg

SEQ ID NO: 2192185 - DNA, 25 bp, Homo sapien
tatgcacagaacgaggacagaagtc

SEQ ID NO: 2192186 - DNA, 25 bp, Homo sapien
taaagggctaggctgcacatgtgca

SEQ ID NO: 2192187 - DNA, 25 bp, Homo sapien
caggccctatgggtggcgaaaattc

SEQ ID NO: 2192188 - DNA, 25 bp, Homo sapien
catacaattgcatatgatgtgctca

SEQ ID NO: 2192189 - DNA, 25 bp, Homo sapien
gggttttgccttactgcttaccaca

SEQ ID NO: 2192190 - DNA, 25 bp, Homo sapien
tcttcagttaaatcacagttgccaa

SEQ ID NO: 2192191 - DNA, 25 bp, Homo sapien
tgtattcacatcatcgctgaccctg

SEQ ID NO: 2192192 - DNA, 25 bp, Homo sapien
ctgtctcacagatttaagagattct

SEQ ID NO: 2192193 - DNA, 25 bp, Homo sapien
cagcacctccagtctcattatacaa

SEQ ID NO: 2192194 - DNA, 25 bp, Homo sapien
attcttcaatcattcacgcacacac

SEQ ID NO: 2192195 - DNA, 25 bp, Homo sapien
ctccagtctcattatacaacattct

SEQ ID NO: 2192196 - DNA, 25 bp, Homo sapien
ccaagggacacaaattgggtttatg

SEQ ID NO: 2192197 - DNA, 25 bp, Homo sapien
tgcggctgaaaagctaagcagctga

SEQ ID NO: 2192198 - DNA, 25 bp, Homo sapien
gacacaaattgggtttatggcccac

SEQ ID NO: 2192199 - DNA, 25 bp, Homo sapien
cagctgatcaggatttccagcagaa

SEQ ID NO: 2192200 - DNA, 25 bp, Homo sapien
caaagatgtaaagcaactttgcagc

SEQ ID NO: 2192201 - DNA, 25 bp, Homo sapien
ttatcagctgctggcaaagatgtaa

SEQ ID NO: 2192202 - DNA, 25 bp, Homo sapien
aagcaactttgcagctcacacacta

SEQ ID NO: 2192203 - DNA, 25 bp, Homo sapien
cttatcagctgctggcaaagatgta

SEQ ID NO: 2192204 - DNA, 25 bp, Homo sapien
tgtggagtgcccgaaataacgaagc

SEQ ID NO: 2192205 - DNA, 25 bp, Homo sapien
ctctctaggaaagacgaactaaaga

SEQ ID NO: 2192206 - DNA, 25 bp, Homo sapien
gaaagacgaactaaagatggctgcc

SEQ ID NO: 2192207 - DNA, 25 bp, Homo sapien
gctgccttcgcaacagaatctgtgg

SEQ ID NO: 2192208 - DNA, 25 bp, Homo sapien
agcactggactacccctaattgcag

SEQ ID NO: 2192209 - DNA, 25 bp, Homo sapien
ctgcgacaatttagcactggactac

SEQ ID NO: 2192210 - DNA, 25 bp, Homo sapien
gacaatttagcactggactacccct

SEQ ID NO: 2192211 - DNA, 25 bp, Homo sapien
tggactacccctaattgcagttgct

SEQ ID NO: 2192212 - DNA, 25 bp, Homo sapien
caacaaccaggatcttcatgaaatt

SEQ ID NO: 2192213 - DNA, 25 bp, Homo sapien
cacagtgaattgcaatacaacaacc

SEQ ID NO: 2192214 - DNA, 25 bp, Homo sapien
catcaaaaggccagtccggaacctg

SEQ ID NO: 2192215 - DNA, 25 bp, Homo sapien
tatctggctggatggtgctgtacca

SEQ ID NO: 2192216 - DNA, 25 bp, Homo sapien
tataaatggatccctttgccgccat

SEQ ID NO: 2192217 - DNA, 25 bp, Homo sapien
atataaatggatccctttgccgcca

SEQ ID NO: 2192218 - DNA, 25 bp, Homo sapien
gtgtcaattttttaaatggcacatt

SEQ ID NO: 2192219 - DNA, 25 bp, Homo sapien
gtcaattttttaaatggcacattaa

SEQ ID NO: 2192220 - DNA, 25 bp, Homo sapien
cagtgtcaattttttaaatggcaca

SEQ ID NO: 2192221 - DNA, 25 bp, Homo sapien
ctacagtgtcaattttttaaatggc

SEQ ID NO: 2192222 - DNA, 25 bp, Homo sapien
accgaagaatcttttagttttgcat

SEQ ID NO: 2192223 - DNA, 25 bp, Homo sapien
ctttgtagctttaaccgaagaatct

SEQ ID NO: 2192224 - DNA, 25 bp, Homo sapien
aagaatcttttagttttgcataagc

SEQ ID NO: 2192225 - DNA, 25 bp, Homo sapien
gaatcttttagttttgcataagctg

SEQ ID NO: 2192226 - DNA, 25 bp, Homo sapien
ggaaagaataccatggctagtacca

SEQ ID NO: 2192227 - DNA, 25 bp, Homo sapien
gccacattttgagggtgccccatat

SEQ ID NO: 2192228 - DNA, 25 bp, Homo sapien
tggaatcagtctttttagcttatgg

SEQ ID NO: 2192229 - DNA, 25 bp, Homo sapien
taacattatcgacctggttcttccc

SEQ ID NO: 2192230 - DNA, 25 bp, Homo sapien
ggagctaagatgaggtttcttcttg

SEQ ID NO: 2192231 - DNA, 25 bp, Homo sapien
aggagctaagatgaggtttcttctt

SEQ ID NO: 2192232 - DNA, 25 bp, Homo sapien
taggagctaagatgaggtttcttct

SEQ ID NO: 2192233 - DNA, 25 bp, Homo sapien
ttaggagctaagatgaggtttcttc

SEQ ID NO: 2192234 - DNA, 25 bp, Homo sapien
gatccactaaacgaaccacactgct

SEQ ID NO: 2192235 - DNA, 25 bp, Homo sapien
tcatctggatgatccactaaacgaa

SEQ ID NO: 2192236 - DNA, 25 bp, Homo sapien
gaaccacactgctaccacttgggct

SEQ ID NO: 2192237 - DNA, 25 bp, Homo sapien
taaacgaaccacactgctaccactt

SEQ ID NO: 2192238 - DNA, 25 bp, Homo sapien
gttccaatagcagcacaagcagaat

SEQ ID NO: 2192239 - DNA, 25 bp, Homo sapien
tccaatagcagcacaagcagaataa

SEQ ID NO: 2192240 - DNA, 25 bp, Homo sapien
atagcagcacaagcagaataagatg

SEQ ID NO: 2192241 - DNA, 25 bp, Homo sapien
ctgttccaatagcagcacaagcaga

SEQ ID NO: 2192242 - DNA, 25 bp, Homo sapien
gagagtctaccttgccttcatgttc

SEQ ID NO: 2192243 - DNA, 25 bp, Homo sapien
ttcttttgggagagtctaccttgcc

SEQ ID NO: 2192244 - DNA, 25 bp, Homo sapien
tttgggagagtctaccttgccttca

SEQ ID NO: 2192245 - DNA, 25 bp, Homo sapien
cagaagatgttcttttgggagagtc

SEQ ID NO: 2192246 - DNA, 25 bp, Homo sapien
tatcaaggcctttcttagcaagtct

SEQ ID NO: 2192247 - DNA, 25 bp, Homo sapien
tccagtggtggcataactacttctc

SEQ ID NO: 2192248 - DNA, 25 bp, Homo sapien
ggcaaatcatccttctcataaagcg

SEQ ID NO: 2192249 - DNA, 25 bp, Homo sapien
gctctaatatcaaagcaagcagttg

SEQ ID NO: 2192250 - DNA, 25 bp, Homo sapien
tatctttgcacacgtgagcttctga

SEQ ID NO: 2192251 - DNA, 25 bp, Homo sapien
tataaattctcggatcctggatgga

SEQ ID NO: 2192252 - DNA, 25 bp, Homo sapien
tctcaggtgttgtcagcatgttgcg

SEQ ID NO: 2192253 - DNA, 25 bp, Homo sapien
gaagaactcccaactgtatcaacgt

SEQ ID NO: 2192254 - DNA, 25 bp, Homo sapien
cactgtggtttggatagacggatcc

SEQ ID NO: 2192255 - DNA, 25 bp, Homo sapien
tgaacttcgcatcgttggtcaagaa

SEQ ID NO: 2192256 - DNA, 25 bp, Homo sapien
gccagtctttccctatccgtaacag

SEQ ID NO: 2192257 - DNA, 25 bp, Homo sapien
tatctcaaacagacatgcctcgttg

SEQ ID NO: 2192258 - DNA, 25 bp, Homo sapien
ctttccaaatatcctggcagccggc

SEQ ID NO: 2192259 - DNA, 25 bp, Homo sapien
tttccaaatatcctggcagccggct

SEQ ID NO: 2192260 - DNA, 25 bp, Homo sapien
gaccggtgcctagattgttccattc

SEQ ID NO: 2192261 - DNA, 25 bp, Homo sapien
tcataggtggatgagacctgaccgg

SEQ ID NO: 2192262 - DNA, 25 bp, Homo sapien
tatctgtgaccgcaggatgaccgac

SEQ ID NO: 2192263 - DNA, 25 bp, Homo sapien
tgaatctgaccgaacaagcagcgac

SEQ ID NO: 2192264 - DNA, 25 bp, Homo sapien
gtcaggtctgttctccacggcactg

SEQ ID NO: 2192265 - DNA, 25 bp, Homo sapien
cacggcactgcttccggtacagcat

SEQ ID NO: 2192266 - DNA, 25 bp, Homo sapien
tctggcctcgccccgtcaggtctgt

SEQ ID NO: 2192267 - DNA, 25 bp, Homo sapien
cactgcttccggtacagcatggaag

SEQ ID NO: 2192268 - DNA, 25 bp, Homo sapien
tcaagcacactgaatcttctctcca

SEQ ID NO: 2192269 - DNA, 25 bp, Homo sapien
caagcacactgaatcttctctccat

SEQ ID NO: 2192270 - DNA, 25 bp, Homo sapien
ctcaagcacactgaatcttctctcc

SEQ ID NO: 2192271 - DNA, 25 bp, Homo sapien
ctcctttagatccacatctgtgtat

SEQ ID NO: 2192272 - DNA, 25 bp, Homo sapien
ttagatccacatctgtgtatagcca

SEQ ID NO: 2192273 - DNA, 25 bp, Homo sapien
gaagcttggatatggcaactctgtt

SEQ ID NO: 2192274 - DNA, 25 bp, Homo sapien
aaaatagaagcttggatatggcaac

SEQ ID NO: 2192275 - DNA, 25 bp, Homo sapien
agtactactatcttgaccctttcgc

SEQ ID NO: 2192276 - DNA, 25 bp, Homo sapien
cttcagtactactatcttgaccctt

SEQ ID NO: 2192277 - DNA, 25 bp, Homo sapien
tactactatcttgaccctttcgctt

SEQ ID NO: 2192278 - DNA, 25 bp, Homo sapien
tcagtactactatcttgaccctttc

SEQ ID NO: 2192279 - DNA, 25 bp, Homo sapien
gaggtaagtactctactttgagttg

SEQ ID NO: 2192280 - DNA, 25 bp, Homo sapien
agtactctactttgagttgggaaat

SEQ ID NO: 2192281 - DNA, 25 bp, Homo sapien
tagaggtaagtactctactttgagt

SEQ ID NO: 2192282 - DNA, 25 bp, Homo sapien
gtaagtactctactttgagttggga

SEQ ID NO: 2192283 - DNA, 25 bp, Homo sapien
tttgtttcagtttctggcagaactt

SEQ ID NO: 2192284 - DNA, 25 bp, Homo sapien
tttcctgtataatgatttttagcat

SEQ ID NO: 2192285 - DNA, 25 bp, Homo sapien
tcagtttctggcagaactttttcct

SEQ ID NO: 2192286 - DNA, 25 bp, Homo sapien
ttctggcagaactttttcctgtata

SEQ ID NO: 2192287 - DNA, 25 bp, Homo sapien
tgctcaagactgctaatgataagtt

SEQ ID NO: 2192288 - DNA, 25 bp, Homo sapien
gtgctcaagactgctaatgataagt

SEQ ID NO: 2192289 - DNA, 25 bp, Homo sapien
atgtgctcaagactgctaatgataa

SEQ ID NO: 2192290 - DNA, 25 bp, Homo sapien
tgtgctcaagactgctaatgataag

SEQ ID NO: 2192291 - DNA, 25 bp, Homo sapien
aatccatattgcaaatggttcttgt

SEQ ID NO: 2192292 - DNA, 25 bp, Homo sapien
catattgcaaatggttcttgtttag

SEQ ID NO: 2192293 - DNA, 25 bp, Homo sapien
ttgcaaatggttcttgtttagaaaa

SEQ ID NO: 2192294 - DNA, 25 bp, Homo sapien
tattgcaaatggttcttgtttagaa

SEQ ID NO: 2192295 - DNA, 25 bp, Homo sapien
gaacatcattttgtgcccaatacaa

SEQ ID NO: 2192296 - DNA, 25 bp, Homo sapien
tcatcgatacacaggtttgtattgc

SEQ ID NO: 2192297 - DNA, 25 bp, Homo sapien
tcgatacacaggtttgtattgcctt

SEQ ID NO: 2192298 - DNA, 25 bp, Homo sapien
gatacacaggtttgtattgccttgt

SEQ ID NO: 2192299 - DNA, 25 bp, Homo sapien
ccctaatgtatgcttctgggtggta

SEQ ID NO: 2192300 - DNA, 25 bp, Homo sapien
cattccttacctctaaaagttatga

SEQ ID NO: 2192301 - DNA, 25 bp, Homo sapien
ccttctgcacctccagaaacttggt

SEQ ID NO: 2192302 - DNA, 25 bp, Homo sapien
taaatatctgatagctctcgtttct

SEQ ID NO: 2192303 - DNA, 25 bp, Homo sapien
gcttcatagcttcataccatcttat

SEQ ID NO: 2192304 - DNA, 25 bp, Homo sapien
tcatagcttcataccatcttatata

SEQ ID NO: 2192305 - DNA, 25 bp, Homo sapien
taatcagcttcatagcttcatacca

SEQ ID NO: 2192306 - DNA, 25 bp, Homo sapien
atatttaatcagcttcatagcttca

SEQ ID NO: 2192307 - DNA, 25 bp, Homo sapien
cagcacagcctggttgtcgtccatc

SEQ ID NO: 2192308 - DNA, 25 bp, Homo sapien
aatgtacagcacagcctggttgtcg

SEQ ID NO: 2192309 - DNA, 25 bp, Homo sapien
gtacagcacagcctggttgtcgtcc

SEQ ID NO: 2192310 - DNA, 25 bp, Homo sapien
acagcctggttgtcgtccatcctgc

SEQ ID NO: 2192311 - DNA, 25 bp, Homo sapien
gagagagaaggcgagggcgatgcag

SEQ ID NO: 2192312 - DNA, 25 bp, Homo sapien
tgagtgaggtgcgtggggcaggatg

SEQ ID NO: 2192313 - DNA, 25 bp, Homo sapien
ggcaggatgagctgtggggccccct

SEQ ID NO: 2192314 - DNA, 25 bp, Homo sapien
gagagaaggcgagggcgatgcagat

SEQ ID NO: 2192315 - DNA, 25 bp, Homo sapien
tcctgtgtattctggtagggtttag

SEQ ID NO: 2192316 - DNA, 25 bp, Homo sapien
cctggggtaccaagtcctgtgtatt

SEQ ID NO: 2192317 - DNA, 25 bp, Homo sapien
cttgcaacaaatccccatccttctc

SEQ ID NO: 2192318 - DNA, 25 bp, Homo sapien
ggggtaccaagtcctgtgtattctg

SEQ ID NO: 2192319 - DNA, 25 bp, Homo sapien
ccatgatatctctgggggtaattgt

SEQ ID NO: 2192320 - DNA, 25 bp, Homo sapien
catgatatctctgggggtaattgtc

SEQ ID NO: 2192321 - DNA, 25 bp, Homo sapien
gaggctctttgtccatgatatctct

SEQ ID NO: 2192322 - DNA, 25 bp, Homo sapien
gctctttgtccatgatatctctggg

SEQ ID NO: 2192323 - DNA, 25 bp, Homo sapien
tgttcagattagacatagacgcttc

SEQ ID NO: 2192324 - DNA, 25 bp, Homo sapien
cttctccaggtatgcacatccccat

SEQ ID NO: 2192325 - DNA, 25 bp, Homo sapien
ttcagattagacatagacgcttctc

SEQ ID NO: 2192326 - DNA, 25 bp, Homo sapien
tcagattagacatagacgcttctcc

SEQ ID NO: 2192327 - DNA, 25 bp, Homo sapien
tttccacatgtcactatgtgggttt

SEQ ID NO: 2192328 - DNA, 25 bp, Homo sapien
ttccacatgtcactatgtgggtttt

SEQ ID NO: 2192329 - DNA, 25 bp, Homo sapien
aatttccacatgtcactatgtgggt

SEQ ID NO: 2192330 - DNA, 25 bp, Homo sapien
tgaatttccacatgtcactatgtgg

SEQ ID NO: 2192331 - DNA, 25 bp, Homo sapien
tagttccagtcagtaaggcttcttc

SEQ ID NO: 2192332 - DNA, 25 bp, Homo sapien
gagtgctccttcttaatgtgatggc

SEQ ID NO: 2192333 - DNA, 25 bp, Homo sapien
caagcaaggaaagtccctttccacg

SEQ ID NO: 2192334 - DNA, 25 bp, Homo sapien
catgcaaatcacaagattgctgggc

SEQ ID NO: 2192335 - DNA, 25 bp, Homo sapien
gttggagctggcctgaaagagcacc

SEQ ID NO: 2192336 - DNA, 25 bp, Homo sapien
tattgactggactatctggagaggg

SEQ ID NO: 2192337 - DNA, 25 bp, Homo sapien
gaaagagcaccggaattagtaagca

SEQ ID NO: 2192338 - DNA, 25 bp, Homo sapien
taaagtcctgcttattgactggact

SEQ ID NO: 2192339 - DNA, 25 bp, Homo sapien
agtaactgaacaactcatgcagcat

SEQ ID NO: 2192340 - DNA, 25 bp, Homo sapien
tgatgagccctttactgcttgtgtc

SEQ ID NO: 2192341 - DNA, 25 bp, Homo sapien
gcattgctaaggataaggcctttcc

SEQ ID NO: 2192342 - DNA, 25 bp, Homo sapien
tgatgttgatgatgagccctttact

SEQ ID NO: 2192343 - DNA, 25 bp, Homo sapien
gctgcacgtgaaggcggcgcgcgcc

SEQ ID NO: 2192344 - DNA, 25 bp, Homo sapien
cgctgcacgtgaaggcggcgcgcgc

SEQ ID NO: 2192345 - DNA, 25 bp, Homo sapien
cgcgctgcacgtgaaggcggcgcgc

SEQ ID NO: 2192346 - DNA, 25 bp, Homo sapien
gcgctgcacgtgaaggcggcgcgcg

SEQ ID NO: 2192347 - DNA, 25 bp, Homo sapien
caatccgataacatattcccttgcg

SEQ ID NO: 2192348 - DNA, 25 bp, Homo sapien
gggcttcgggctggtggagcacgtg

SEQ ID NO: 2192349 - DNA, 25 bp, Homo sapien
gccattagctgtccgcgcgtcttct

SEQ ID NO: 2192350 - DNA, 25 bp, Homo sapien
cgcgctctctgcgacgtgggcaccg

SEQ ID NO: 2192351 - DNA, 25 bp, Homo sapien
cttcatttcatttagggtgttcaga

SEQ ID NO: 2192352 - DNA, 25 bp, Homo sapien
atttcatttagggtgttcagatcca

SEQ ID NO: 2192353 - DNA, 25 bp, Homo sapien
taagagaataccacttcatttcatt

SEQ ID NO: 2192354 - DNA, 25 bp, Homo sapien
tagggtgttcagatccaaatcgatt

SEQ ID NO: 2192355 - DNA, 25 bp, Homo sapien
ttacggcggtgatgtatgcaaatga

SEQ ID NO: 2192356 - DNA, 25 bp, Homo sapien
cacagcgttgataaagttggctaca

SEQ ID NO: 2192357 - DNA, 25 bp, Homo sapien
agtgaccaagccagaggagttaggc

SEQ ID NO: 2192358 - DNA, 25 bp, Homo sapien
tgctgggaacactcatagatctctg

SEQ ID NO: 2192359 - DNA, 25 bp, Homo sapien
ggctaacaagatattgtggtgggtt

SEQ ID NO: 2192360 - DNA, 25 bp, Homo sapien
caagatattgtggtgggttgctgtc

SEQ ID NO: 2192361 - DNA, 25 bp, Homo sapien
ctgaggctaacaagatattgtggtg

SEQ ID NO: 2192362 - DNA, 25 bp, Homo sapien
aacaagatattgtggtgggttgctg

SEQ ID NO: 2192363 - DNA, 25 bp, Homo sapien
agtgctcgctggtggcagtaaaaag

SEQ ID NO: 2192364 - DNA, 25 bp, Homo sapien
gtctttgcagctggatattttgtac

SEQ ID NO: 2192365 - DNA, 25 bp, Homo sapien
gagcagtgctcgctggtggcagtaa

SEQ ID NO: 2192366 - DNA, 25 bp, Homo sapien
gggatgtaactattttagctatgtc

SEQ ID NO: 2192367 - DNA, 25 bp, Homo sapien
caaatcactacatcttcttcgtcct

SEQ ID NO: 2192368 - DNA, 25 bp, Homo sapien
actgacagtaacagatagttcttga

SEQ ID NO: 2192369 - DNA, 25 bp, Homo sapien
gataattatgatccatgtgtagctc

SEQ ID NO: 2192370 - DNA, 25 bp, Homo sapien
tacacccagtgaaactgaatatgat

SEQ ID NO: 2192371 - DNA, 25 bp, Homo sapien
ctaatacacccagtgaaactgaata

SEQ ID NO: 2192372 - DNA, 25 bp, Homo sapien
tcatcaatctcaaaccacttgccaa

SEQ ID NO: 2192373 - DNA, 25 bp, Homo sapien
aatgccaaatcaactgctggagcag

SEQ ID NO: 2192374 - DNA, 25 bp, Homo sapien
cacttgccaatgtcgtgaaagcgca

SEQ ID NO: 2192375 - DNA, 25 bp, Homo sapien
tggagcagttttgtgtcatcaatct

SEQ ID NO: 2192376 - DNA, 25 bp, Homo sapien
tccaattggttctattttatcgaca

SEQ ID NO: 2192377 - DNA, 25 bp, Homo sapien
gcacacagtattccttataggaact

SEQ ID NO: 2192378 - DNA, 25 bp, Homo sapien
ttttatcgacaaggcactgagatcc

SEQ ID NO: 2192379 - DNA, 25 bp, Homo sapien
gatccaaagatgtcacacagtacca

SEQ ID NO: 2192380 - DNA, 25 bp, Homo sapien
ttagttcttaccagcttcagtgtgc

SEQ ID NO: 2192381 - DNA, 25 bp, Homo sapien
ttcagaaaatgtggataatcccaag

SEQ ID NO: 2192382 - DNA, 25 bp, Homo sapien
tgtgtggccaagtgttaggaattaa

SEQ ID NO: 2192383 - DNA, 25 bp, Homo sapien
cagtattcaaagaactatggtttgc

SEQ ID NO: 2192384 - DNA, 25 bp, Homo sapien
catgcggttgtcaaacgagtccgta

SEQ ID NO: 2192385 - DNA, 25 bp, Homo sapien
ggtatgcactgcactcgatcttggc

SEQ ID NO: 2192386 - DNA, 25 bp, Homo sapien
tccagccgggttgatgagctctctg

SEQ ID NO: 2192387 - DNA, 25 bp, Homo sapien
tgtaacaggtgacgcacgaagaacc

SEQ ID NO: 2192388 - DNA, 25 bp, Homo sapien
gtgccccttatatctcttaacatat

SEQ ID NO: 2192389 - DNA, 25 bp, Homo sapien
gctgatctaggccactggtcgccaa

SEQ ID NO: 2192390 - DNA, 25 bp, Homo sapien
cagatcctgacatgctgatctaggc

SEQ ID NO: 2192391 - DNA, 25 bp, Homo sapien
gtcattatttctgtgccccttatat

SEQ ID NO: 2192392 - DNA, 25 bp, Homo sapien
gtggctgtacacaacgcaggtgatg

SEQ ID NO: 2192393 - DNA, 25 bp, Homo sapien
ctgtgccatcgtggctgtacacaac

SEQ ID NO: 2192394 - DNA, 25 bp, Homo sapien
caggtgatgtttgttgggaaatcac

SEQ ID NO: 2192395 - DNA, 25 bp, Homo sapien
tgtttgttgggaaatcacaataaac

SEQ ID NO: 2192396 - DNA, 25 bp, Homo sapien
aagtgaggaacttataaggagagtc

SEQ ID NO: 2192397 - DNA, 25 bp, Homo sapien
atcttcacctgaagtgaggaactta

SEQ ID NO: 2192398 - DNA, 25 bp, Homo sapien
tcacctgaagtgaggaacttataag

SEQ ID NO: 2192399 - DNA, 25 bp, Homo sapien
caacttttgaagctggccggtcttg

SEQ ID NO: 2192400 - DNA, 25 bp, Homo sapien
tagtattctcgcaatatgatgcatt

SEQ ID NO: 2192401 - DNA, 25 bp, Homo sapien
cttagtattctcgcaatatgatgca

SEQ ID NO: 2192402 - DNA, 25 bp, Homo sapien
gtattctcgcaatatgatgcattaa

SEQ ID NO: 2192403 - DNA, 25 bp, Homo sapien
agtattctcgcaatatgatgcatta

SEQ ID NO: 2192404 - DNA, 25 bp, Homo sapien
cgaagagcagtaaggacttgccagc

SEQ ID NO: 2192405 - DNA, 25 bp, Homo sapien
ggaaagaacttagcctggatgacat

SEQ ID NO: 2192406 - DNA, 25 bp, Homo sapien
gaaccggcatggcttccaagaagat

SEQ ID NO: 2192407 - DNA, 25 bp, Homo sapien
tgtatggtactgacagaaccggcat

SEQ ID NO: 2192408 - DNA, 25 bp, Homo sapien
cactcctccaacgcctgatcctcgt

SEQ ID NO: 2192409 - DNA, 25 bp, Homo sapien
ctgaggaaatccactcctccaacgc

SEQ ID NO: 2192410 - DNA, 25 bp, Homo sapien
gaaatccactcctccaacgcctgat

SEQ ID NO: 2192411 - DNA, 25 bp, Homo sapien
atccactcctccaacgcctgatcct

SEQ ID NO: 2192412 - DNA, 25 bp, Homo sapien
ttggtgccaccgcatcgtggacaca

SEQ ID NO: 2192413 - DNA, 25 bp, Homo sapien
atggttggtgccaccgcatcgtgga

SEQ ID NO: 2192414 - DNA, 25 bp, Homo sapien
ggttggtgccaccgcatcgtggaca

SEQ ID NO: 2192415 - DNA, 25 bp, Homo sapien
tggtgccaccgcatcgtggacacat

SEQ ID NO: 2192416 - DNA, 25 bp, Homo sapien
atgctttcaagttcgacgtcttcac

SEQ ID NO: 2192417 - DNA, 25 bp, Homo sapien
ccatgctttcaagttcgacgtcttc

SEQ ID NO: 2192418 - DNA, 25 bp, Homo sapien
catgctttcaagttcgacgtcttca

SEQ ID NO: 2192419 - DNA, 25 bp, Homo sapien
gaggccgccgtcaccgctgctactc

SEQ ID NO: 2192420 - DNA, 25 bp, Homo sapien
tgtgctggcatcgttcaggaaacca

SEQ ID NO: 2192421 - DNA, 25 bp, Homo sapien
aaccaccatccctggtatcaccacc

SEQ ID NO: 2192422 - DNA, 25 bp, Homo sapien
tctccggtcgatggctctgtggctg

SEQ ID NO: 2192423 - DNA, 25 bp, Homo sapien
cgaacgatgtttgctgtagctgatc

SEQ ID NO: 2192424 - DNA, 25 bp, Homo sapien
aacgatgtttgctgtagctgatctg

SEQ ID NO: 2192425 - DNA, 25 bp, Homo sapien
ctcgaacgatgtttgctgtagctga

SEQ ID NO: 2192426 - DNA, 25 bp, Homo sapien
ctgtagctgatctggaactggaaaa

SEQ ID NO: 2192427 - DNA, 25 bp, Homo sapien
tggtttttacagtgatgacttgctt

SEQ ID NO: 2192428 - DNA, 25 bp, Homo sapien
tccatgctaatagggaacaagatca

SEQ ID NO: 2192429 - DNA, 25 bp, Homo sapien
gatgacttgctttgatgtccatgct

SEQ ID NO: 2192430 - DNA, 25 bp, Homo sapien
tgctttgatgtccatgctaataggg

SEQ ID NO: 2192431 - DNA, 25 bp, Homo sapien
ttcttggcaccactgcagtaaccaa

SEQ ID NO: 2192432 - DNA, 25 bp, Homo sapien
gacaatcaggtcatcagcacatata

SEQ ID NO: 2192433 - DNA, 25 bp, Homo sapien
agtgaggccaccaccatgacaatca

SEQ ID NO: 2192434 - DNA, 25 bp, Homo sapien
taaccaaatggctggacagagtcag

SEQ ID NO: 2192435 - DNA, 25 bp, Homo sapien
ggcaccagatctctggtgagtttgg

SEQ ID NO: 2192436 - DNA, 25 bp, Homo sapien
aaagtccaaccttgcaggcaccaga

SEQ ID NO: 2192437 - DNA, 25 bp, Homo sapien
ctgaggacggtagaaataggagata

SEQ ID NO: 2192438 - DNA, 25 bp, Homo sapien
atctctggtgagtttggctttccaa

SEQ ID NO: 2192439 - DNA, 25 bp, Homo sapien
aaataatgggtctgcaaaataaact

SEQ ID NO: 2192440 - DNA, 25 bp, Homo sapien
tcacaattcgaacagacaaagaacg

SEQ ID NO: 2192441 - DNA, 25 bp, Homo sapien
cagacaaagaacgtaaataatgggt

SEQ ID NO: 2192442 - DNA, 25 bp, Homo sapien
tcatcggacacttgtcacaattcga

SEQ ID NO: 2192443 - DNA, 25 bp, Homo sapien
cactgaatgtgagaaacacaactcc

SEQ ID NO: 2192444 - DNA, 25 bp, Homo sapien
gaataatcatctactccccattgtc

SEQ ID NO: 2192445 - DNA, 25 bp, Homo sapien
cattgtcctatttctgccccttgtc

SEQ ID NO: 2192446 - DNA, 25 bp, Homo sapien
tggtgagtatttctgagaataatca

SEQ ID NO: 2192447 - DNA, 25 bp, Homo sapien
gagtagaaccctagctagaaacaca

SEQ ID NO: 2192448 - DNA, 25 bp, Homo sapien
atatctgtatcaattgcccctgatt

SEQ ID NO: 2192449 - DNA, 25 bp, Homo sapien
ccaggtctagagtggaaatatctgt

SEQ ID NO: 2192450 - DNA, 25 bp, Homo sapien
taattttaggagatgtgtggcatcc

SEQ ID NO: 2192451 - DNA, 25 bp, Homo sapien
caccagtcaccctctttatctctcc

SEQ ID NO: 2192452 - DNA, 25 bp, Homo sapien
accagtcaccctctttatctctccc

SEQ ID NO: 2192453 - DNA, 25 bp, Homo sapien
gcaaatattgcagaatggtaaatgt

SEQ ID NO: 2192454 - DNA, 25 bp, Homo sapien
cagtcggcccctattgggaggtgtc

SEQ ID NO: 2192455 - DNA, 25 bp, Homo sapien
ggcacctggctgtatgaggtgtcag

SEQ ID NO: 2192456 - DNA, 25 bp, Homo sapien
gaagtttctcctgccttttattcag

SEQ ID NO: 2192457 - DNA, 25 bp, Homo sapien
tcacaccctcaattcctgtgcatga

SEQ ID NO: 2192458 - DNA, 25 bp, Homo sapien
tcaattcctgtgcatgagaagtcat

SEQ ID NO: 2192459 - DNA, 25 bp, Homo sapien
aatagaactggtggaagaatctggg

SEQ ID NO: 2192460 - DNA, 25 bp, Homo sapien
caaatagaactggtggaagaatctg

SEQ ID NO: 2192461 - DNA, 25 bp, Homo sapien
gcagcagggggaccaacccagatcc

SEQ ID NO: 2192462 - DNA, 25 bp, Homo sapien
caggccaacaggcagcagggggacc

SEQ ID NO: 2192463 - DNA, 25 bp, Homo sapien
gggcggtcccgaatccacaggccaa

SEQ ID NO: 2192464 - DNA, 25 bp, Homo sapien
ggataagggcggtcccgaatccaca

SEQ ID NO: 2192465 - DNA, 25 bp, Homo sapien
actcagggagttcccctgtggtgtc

SEQ ID NO: 2192466 - DNA, 25 bp, Homo sapien
cagtgtgtgttcagatcacaaagcc

SEQ ID NO: 2192467 - DNA, 25 bp, Homo sapien
tgactcagggagttcccctgtggtg

SEQ ID NO: 2192468 - DNA, 25 bp, Homo sapien
ggcccagtcccaagcagtgtgtgtt

SEQ ID NO: 2192469 - DNA, 25 bp, Homo sapien
tatttgatatcatctttgtgaaagc

SEQ ID NO: 2192470 - DNA, 25 bp, Homo sapien
ctatttgatatcatctttgtgaaag

SEQ ID NO: 2192471 - DNA, 25 bp, Homo sapien
atctgagaactgtatcctgtgtctt

SEQ ID NO: 2192472 - DNA, 25 bp, Homo sapien
tagcctcacagtaaaagtctctcat

SEQ ID NO: 2192473 - DNA, 25 bp, Homo sapien
actgtgctgttatatatagcctcac

SEQ ID NO: 2192474 - DNA, 25 bp, Homo sapien
ctcaatgtgtgagtacgatactctt

SEQ ID NO: 2192475 - DNA, 25 bp, Homo sapien
tctttcggataggaaactgtgctgt

SEQ ID NO: 2192476 - DNA, 25 bp, Homo sapien
tcaggtgactactccaatcacaaaa

SEQ ID NO: 2192477 - DNA, 25 bp, Homo sapien
ggtgactactccaatcacaaaactt

SEQ ID NO: 2192478 - DNA, 25 bp, Homo sapien
aaactttcagatgccagaggctttt

SEQ ID NO: 2192479 - DNA, 25 bp, Homo sapien
caaaactttcagatgccagaggctt

SEQ ID NO: 2192480 - DNA, 25 bp, Homo sapien
aaaatgcggttctttctgttcacac

SEQ ID NO: 2192481 - DNA, 25 bp, Homo sapien
tgttgacttaccacggacacagcct

SEQ ID NO: 2192482 - DNA, 25 bp, Homo sapien
caagtatggcttggacatcttgaca

SEQ ID NO: 2192483 - DNA, 25 bp, Homo sapien
tctgggctgacattatcttccttgg

SEQ ID NO: 2192484 - DNA, 25 bp, Homo sapien
gctttcaattgggtgaggcctataa

SEQ ID NO: 2192485 - DNA, 25 bp, Homo sapien
tcaattgggtgaggcctataatcat

SEQ ID NO: 2192486 - DNA, 25 bp, Homo sapien
ggtgaggcctataatcatcatttcc

SEQ ID NO: 2192487 - DNA, 25 bp, Homo sapien
aattgctttcaattgggtgaggcct

SEQ ID NO: 2192488 - DNA, 25 bp, Homo sapien
taactgtaaaagctgctggagcagg

SEQ ID NO: 2192489 - DNA, 25 bp, Homo sapien
aaagctgctggagcagggtccagtg

SEQ ID NO: 2192490 - DNA, 25 bp, Homo sapien
gctgctggagcagggtccagtgcct

SEQ ID NO: 2192491 - DNA, 25 bp, Homo sapien
ttaactgtaaaagctgctggagcag

SEQ ID NO: 2192492 - DNA, 25 bp, Homo sapien
ttaggactctctccactgagtcttg

SEQ ID NO: 2192493 - DNA, 25 bp, Homo sapien
taggactctctccactgagtcttga

SEQ ID NO: 2192494 - DNA, 25 bp, Homo sapien
gactctctccactgagtcttgatgg

SEQ ID NO: 2192495 - DNA, 25 bp, Homo sapien
ggactctctccactgagtcttgatg

SEQ ID NO: 2192496 - DNA, 25 bp, Homo sapien
caacatccctgctagaattttcatt

SEQ ID NO: 2192497 - DNA, 25 bp, Homo sapien
gactctttatcaggaaggtacttct

SEQ ID NO: 2192498 - DNA, 25 bp, Homo sapien
cattgatttcctctggttgtggcaa

SEQ ID NO: 2192499 - DNA, 25 bp, Homo sapien
cagaaaggcctcatttgattggcac

SEQ ID NO: 2192500 - DNA, 25 bp, Homo sapien
taagagagttactaccaacaacttc

SEQ ID NO: 2192501 - DNA, 25 bp, Homo sapien
gctcagaaagtttcttaaagtacat

SEQ ID NO: 2192502 - DNA, 25 bp, Homo sapien
attttgctgaggttttcttgcctgc

SEQ ID NO: 2192503 - DNA, 25 bp, Homo sapien
gttttcttgcctgctcagaaagttt

SEQ ID NO: 2192504 - DNA, 25 bp, Homo sapien
ctgaggttttcttgcctgctcagaa

SEQ ID NO: 2192505 - DNA, 25 bp, Homo sapien
tcaaagtactgtacctgattcttgg

SEQ ID NO: 2192506 - DNA, 25 bp, Homo sapien
tgtacctgattcttggaagttaatg

SEQ ID NO: 2192507 - DNA, 25 bp, Homo sapien
gcatgatgtataaatcaaagtactg

SEQ ID NO: 2192508 - DNA, 25 bp, Homo sapien
taggattcattaataagaactttta

SEQ ID NO: 2192509 - DNA, 25 bp, Homo sapien
gcttctgtgactgccggatggaaat

SEQ ID NO: 2192510 - DNA, 25 bp, Homo sapien
taaggccctaaagacagccatatgc

SEQ ID NO: 2192511 - DNA, 25 bp, Homo sapien
caaaatgtttgcttggcaaagcgtt

SEQ ID NO: 2192512 - DNA, 25 bp, Homo sapien
gactgccggatggaaatatttctga

SEQ ID NO: 2192513 - DNA, 25 bp, Homo sapien
cttctaatggtgttgctgttttcaa

SEQ ID NO: 2192514 - DNA, 25 bp, Homo sapien
tttcaaggcattctgggagaaacac

SEQ ID NO: 2192515 - DNA, 25 bp, Homo sapien
taatggtgttgctgttttcaaggca

SEQ ID NO: 2192516 - DNA, 25 bp, Homo sapien
gttgctgttttcaaggcattctggg

SEQ ID NO: 2192517 - DNA, 25 bp, Homo sapien
cttgcatgacatggacccgataact

SEQ ID NO: 2192518 - DNA, 25 bp, Homo sapien
catggacccgataacttctttcatt

SEQ ID NO: 2192519 - DNA, 25 bp, Homo sapien
ggactctgcaacttgcatgacatgg

SEQ ID NO: 2192520 - DNA, 25 bp, Homo sapien
tggactctgcaacttgcatgacatg

SEQ ID NO: 2192521 - DNA, 25 bp, Homo sapien
gttgtcctttgtgctaacaagccca

SEQ ID NO: 2192522 - DNA, 25 bp, Homo sapien
cacagttgtcctttgtgctaacaag

SEQ ID NO: 2192523 - DNA, 25 bp, Homo sapien
tttgtgctaacaagcccattctgca

SEQ ID NO: 2192524 - DNA, 25 bp, Homo sapien
cctttgtgctaacaagcccattctg

SEQ ID NO: 2192525 - DNA, 25 bp, Homo sapien
cttcagttttggtttgctccgctgc

SEQ ID NO: 2192526 - DNA, 25 bp, Homo sapien
tggtttgctccgctgctccagtact

SEQ ID NO: 2192527 - DNA, 25 bp, Homo sapien
gtttgctccgctgctccagtacttc

SEQ ID NO: 2192528 - DNA, 25 bp, Homo sapien
tcagttttggtttgctccgctgctc

SEQ ID NO: 2192529 - DNA, 25 bp, Homo sapien
ctgatgggttttaataggctgggct

SEQ ID NO: 2192530 - DNA, 25 bp, Homo sapien
ggtcccctattcctgaagatgccat

SEQ ID NO: 2192531 - DNA, 25 bp, Homo sapien
gcctcttcttggtcccctattcctg

SEQ ID NO: 2192532 - DNA, 25 bp, Homo sapien
tgatgggttttaataggctgggctt

SEQ ID NO: 2192533 - DNA, 25 bp, Homo sapien
tcagaaagccgtgtttagagggctg

SEQ ID NO: 2192534 - DNA, 25 bp, Homo sapien
tgaaagtttgctttgaagtcgggta

SEQ ID NO: 2192535 - DNA, 25 bp, Homo sapien
ccttgactcagtattgagacaaata

SEQ ID NO: 2192536 - DNA, 25 bp, Homo sapien
tgctggtatagaaagcttccttgac

SEQ ID NO: 2192537 - DNA, 25 bp, Homo sapien
taattcccacagaatatcgctgggc

SEQ ID NO: 2192538 - DNA, 25 bp, Homo sapien
gggcacggtcccagtccttgtgtaa

SEQ ID NO: 2192539 - DNA, 25 bp, Homo sapien
ggatctgatgccacacggagacatg

SEQ ID NO: 2192540 - DNA, 25 bp, Homo sapien
tcactcttttctagggactcgggcc

SEQ ID NO: 2192541 - DNA, 25 bp, Homo sapien
aatggcaacacatttctatggagcc

SEQ ID NO: 2192542 - DNA, 25 bp, Homo sapien
gagttagtgatattatcagtcacta

SEQ ID NO: 2192543 - DNA, 25 bp, Homo sapien
tattacaactaaagtgtgattcgtg

SEQ ID NO: 2192544 - DNA, 25 bp, Homo sapien
cagtcactacaaaacagagtgtttc

SEQ ID NO: 2192545 - DNA, 25 bp, Homo sapien
tgcaatcctccttactcaggtgatc

SEQ ID NO: 2192546 - DNA, 25 bp, Homo sapien
ggcagttctatggcaggtctgcaat

SEQ ID NO: 2192547 - DNA, 25 bp, Homo sapien
agttctatggcaggtctgcaatcct

SEQ ID NO: 2192548 - DNA, 25 bp, Homo sapien
cagttctatggcaggtctgcaatcc

SEQ ID NO: 2192549 - DNA, 25 bp, Homo sapien
tcaatctgtaatgacgagctctgtc

SEQ ID NO: 2192550 - DNA, 25 bp, Homo sapien
ttcaatctgtaatgacgagctctgt

SEQ ID NO: 2192551 - DNA, 25 bp, Homo sapien
atctgtaatgacgagctctgtcaat

SEQ ID NO: 2192552 - DNA, 25 bp, Homo sapien
caatctgtaatgacgagctctgtca

SEQ ID NO: 2192553 - DNA, 25 bp, Homo sapien
ctttatgtcagaagccacttcagtg

SEQ ID NO: 2192554 - DNA, 25 bp, Homo sapien
tgtgttcttcaagtgatcataggct

SEQ ID NO: 2192555 - DNA, 25 bp, Homo sapien
cagtggccactttcaatagtagacc

SEQ ID NO: 2192556 - DNA, 25 bp, Homo sapien
gagcccacagtagattcaactgtgt

SEQ ID NO: 2192557 - DNA, 25 bp, Homo sapien
aatttcgtggccttgtcttccctgt

SEQ ID NO: 2192558 - DNA, 25 bp, Homo sapien
cattcgaccccaaagaatgtgcaga

SEQ ID NO: 2192559 - DNA, 25 bp, Homo sapien
ccctaaggcaagcatgatgcccatg

SEQ ID NO: 2192560 - DNA, 25 bp, Homo sapien
ggcaagcatgatgcccatgagctgt

SEQ ID NO: 2192561 - DNA, 25 bp, Homo sapien
caggaatgatcagagttaggtaata

SEQ ID NO: 2192562 - DNA, 25 bp, Homo sapien
catctttataaagtagaagctgaca

SEQ ID NO: 2192563 - DNA, 25 bp, Homo sapien
cagtaaactctgtacaggaatgatc

SEQ ID NO: 2192564 - DNA, 25 bp, Homo sapien
gctgacagcatcagtgctaacagta

SEQ ID NO: 2192565 - DNA, 25 bp, Homo sapien
ctttgatgtggaacattcaagcaaa

SEQ ID NO: 2192566 - DNA, 25 bp, Homo sapien
gagagtatctgctctaatgtactcc

SEQ ID NO: 2192567 - DNA, 25 bp, Homo sapien
caagcaaatgttcttgacaagggaa

SEQ ID NO: 2192568 - DNA, 25 bp, Homo sapien
tgtaccactccgatgcacatgtgcc

SEQ ID NO: 2192569 - DNA, 25 bp, Homo sapien
cttcaagaaagtggccagtaatcat

SEQ ID NO: 2192570 - DNA, 25 bp, Homo sapien
tgaggaggactggttagtacccaaa

SEQ ID NO: 2192571 - DNA, 25 bp, Homo sapien
caaaagggaaggatcagaaatatat

SEQ ID NO: 2192572 - DNA, 25 bp, Homo sapien
aataacaaaggtgaggaggactggt

SEQ ID NO: 2192573 - DNA, 25 bp, Homo sapien
taaataacaaaggtgaggaggactg

SEQ ID NO: 2192574 - DNA, 25 bp, Homo sapien
tcttcaaacacccaggcttgaactt

SEQ ID NO: 2192575 - DNA, 25 bp, Homo sapien
ccttcttcaaacacccaggcttgaa

SEQ ID NO: 2192576 - DNA, 25 bp, Homo sapien
ttcttcaaacacccaggcttgaact

SEQ ID NO: 2192577 - DNA, 25 bp, Homo sapien
cttcttcaaacacccaggcttgaac

SEQ ID NO: 2192578 - DNA, 25 bp, Homo sapien
tcagggaacaaggagtgactggcct

SEQ ID NO: 2192579 - DNA, 25 bp, Homo sapien
gcaaattgaagccaagacctcaggg

SEQ ID NO: 2192580 - DNA, 25 bp, Homo sapien
aaataaattgggtgatggccctctc

SEQ ID NO: 2192581 - DNA, 25 bp, Homo sapien
ctctcctaatgcatggcctaacggg

SEQ ID NO: 2192582 - DNA, 25 bp, Homo sapien
gtcctcagatgaactgtcagtaata

SEQ ID NO: 2192583 - DNA, 25 bp, Homo sapien
ttggcttgtactgaacaaagttaga

SEQ ID NO: 2192584 - DNA, 25 bp, Homo sapien
ctggtcctcagatgaactgtcagta

SEQ ID NO: 2192585 - DNA, 25 bp, Homo sapien
tggcttgtactgaacaaagttagac

SEQ ID NO: 2192586 - DNA, 25 bp, Homo sapien
tgtataaatataccctcccaccagc

SEQ ID NO: 2192587 - DNA, 25 bp, Homo sapien
gtgagccattcctctatatacagtt

SEQ ID NO: 2192588 - DNA, 25 bp, Homo sapien
ctgaaatattgttctgcggttttat

SEQ ID NO: 2192589 - DNA, 25 bp, Homo sapien
ccttccaaatgaaaggcactgtata

SEQ ID NO: 2192590 - DNA, 25 bp, Homo sapien
ctataataatagtttgctttagcgc

SEQ ID NO: 2192591 - DNA, 25 bp, Homo sapien
taataatagtttgctttagcgcagc

SEQ ID NO: 2192592 - DNA, 25 bp, Homo sapien
aatagtttgctttagcgcagctttt

SEQ ID NO: 2192593 - DNA, 25 bp, Homo sapien
tgaatattgctggcaaaaggcctga

SEQ ID NO: 2192594 - DNA, 25 bp, Homo sapien
ttcacagatggaagaggctttgaag

SEQ ID NO: 2192595 - DNA, 25 bp, Homo sapien
gctttgaagagacgtattttagcct

SEQ ID NO: 2192596 - DNA, 25 bp, Homo sapien
ctaagtaacttagcatgataatcga

SEQ ID NO: 2192597 - DNA, 25 bp, Homo sapien
aaaaggggggctgatttcatagagc

SEQ ID NO: 2192598 - DNA, 25 bp, Homo sapien
gtttaggctgaattatagcatgtgg

SEQ ID NO: 2192599 - DNA, 25 bp, Homo sapien
cagtttaggctgaattatagcatgt

SEQ ID NO: 2192600 - DNA, 25 bp, Homo sapien
aatcttcagtttaggctgaattata

SEQ ID NO: 2192601 - DNA, 25 bp, Homo sapien
cttcagtttaggctgaattatagca

SEQ ID NO: 2192602 - DNA, 25 bp, Homo sapien
tatagagagaggctccatcaccctg

SEQ ID NO: 2192603 - DNA, 25 bp, Homo sapien
tgagatgattgtatagagagaggct

SEQ ID NO: 2192604 - DNA, 25 bp, Homo sapien
tcagtcaacgatagtgagatgagat

SEQ ID NO: 2192605 - DNA, 25 bp, Homo sapien
gaggctccatcaccctgttaacttt

SEQ ID NO: 2192606 - DNA, 25 bp, Homo sapien
ccctaggattgaaatatatgacccc

SEQ ID NO: 2192607 - DNA, 25 bp, Homo sapien
tggagagtcaaaatgagtctgcgat

SEQ ID NO: 2192608 - DNA, 25 bp, Homo sapien
ggactgatgattccagccaaggtca

SEQ ID NO: 2192609 - DNA, 25 bp, Homo sapien
tatgaccccaactgaatggaaagtt

SEQ ID NO: 2192610 - DNA, 25 bp, Homo sapien
cttaaccatgacaatctctttctgg

SEQ ID NO: 2192611 - DNA, 25 bp, Homo sapien
accatgacaatctctttctgggcca

SEQ ID NO: 2192612 - DNA, 25 bp, Homo sapien
cctttatcttaaccatgacaatctc

SEQ ID NO: 2192613 - DNA, 25 bp, Homo sapien
ttgtccctttatcttaaccatgaca

SEQ ID NO: 2192614 - DNA, 25 bp, Homo sapien
ggtttggcgttcatattgtgtagga

SEQ ID NO: 2192615 - DNA, 25 bp, Homo sapien
gatgtattgtgccagtggattggga

SEQ ID NO: 2192616 - DNA, 25 bp, Homo sapien
catattgtgtaggaaattgaatgtg

SEQ ID NO: 2192617 - DNA, 25 bp, Homo sapien
tgcaggacatgcacaaacattgatg

SEQ ID NO: 2192618 - DNA, 25 bp, Homo sapien
tggagacacaatacaaaggagagtt

SEQ ID NO: 2192619 - DNA, 25 bp, Homo sapien
agttgagaacataggtcactggtgg

SEQ ID NO: 2192620 - DNA, 25 bp, Homo sapien
ttagctttgtatctttccacctgca

SEQ ID NO: 2192621 - DNA, 25 bp, Homo sapien
aaggagagttgagaacataggtcac

SEQ ID NO: 2192622 - DNA, 25 bp, Homo sapien
tgggtggatggaatttgactatttc

SEQ ID NO: 2192623 - DNA, 25 bp, Homo sapien
cttgtgggtggatggaatttgacta

SEQ ID NO: 2192624 - DNA, 25 bp, Homo sapien
ttgtgggtggatggaatttgactat

SEQ ID NO: 2192625 - DNA, 25 bp, Homo sapien
tgtgggtggatggaatttgactatt

SEQ ID NO: 2192626 - DNA, 25 bp, Homo sapien
gctctgccagtcagttttatgttct

SEQ ID NO: 2192627 - DNA, 25 bp, Homo sapien
tggaagctgtttgtagctctgccag

SEQ ID NO: 2192628 - DNA, 25 bp, Homo sapien
ccagcacattcttggttgttgtaca

SEQ ID NO: 2192629 - DNA, 25 bp, Homo sapien
tgtgggtgccaactcaatgtgcaga

SEQ ID NO: 2192630 - DNA, 25 bp, Homo sapien
tataagtggtgaacctgggcatgct

SEQ ID NO: 2192631 - DNA, 25 bp, Homo sapien
gaatgcattccggtgccaataaggg

SEQ ID NO: 2192632 - DNA, 25 bp, Homo sapien
gcatcttgttgctggtgatcctgta

SEQ ID NO: 2192633 - DNA, 25 bp, Homo sapien
ccaataagggctaaggcatggaagt

SEQ ID NO: 2192634 - DNA, 25 bp, Homo sapien
ccctcaaaggccatggaagcttgaa

SEQ ID NO: 2192635 - DNA, 25 bp, Homo sapien
cgagtcgcttagatctgtggctgca

SEQ ID NO: 2192636 - DNA, 25 bp, Homo sapien
tctgtgaggtaccagacgtcttcta

SEQ ID NO: 2192637 - DNA, 25 bp, Homo sapien
gataaaagccatcaacaggcccttg

SEQ ID NO: 2192638 - DNA, 25 bp, Homo sapien
tcttgccagattttacacccctcaa

SEQ ID NO: 2192639 - DNA, 25 bp, Homo sapien
cccccatctctggtcttgccagatt

SEQ ID NO: 2192640 - DNA, 25 bp, Homo sapien
ttgccagattttacacccctcaagc

SEQ ID NO: 2192641 - DNA, 25 bp, Homo sapien
cccatctctggtcttgccagatttt

SEQ ID NO: 2192642 - DNA, 25 bp, Homo sapien
tatccttcgctttcagtacatgagg

SEQ ID NO: 2192643 - DNA, 25 bp, Homo sapien
taccttgcaagtagggtacaatctc

SEQ ID NO: 2192644 - DNA, 25 bp, Homo sapien
catggttggagtttgcggctaaagc

SEQ ID NO: 2192645 - DNA, 25 bp, Homo sapien
tgtggcaggctaacccattaccttg

SEQ ID NO: 2192646 - DNA, 25 bp, Homo sapien
tctactgtatgataaaaatgctaca

SEQ ID NO: 2192647 - DNA, 25 bp, Homo sapien
ctactgtatgataaaaatgctacaa

SEQ ID NO: 2192648 - DNA, 25 bp, Homo sapien
taggcctcagttgcctcctgcaaag

SEQ ID NO: 2192649 - DNA, 25 bp, Homo sapien
ctaggcctcagttgcctcctgcaaa

SEQ ID NO: 2192650 - DNA, 25 bp, Homo sapien
ggcctcagttgcctcctgcaaagca

SEQ ID NO: 2192651 - DNA, 25 bp, Homo sapien
gcctcagttgcctcctgcaaagcac

SEQ ID NO: 2192652 - DNA, 25 bp, Homo sapien
aatttcttgcaccaaacgctggacg

SEQ ID NO: 2192653 - DNA, 25 bp, Homo sapien
ccaccagtcgatttgcgggaagtca

SEQ ID NO: 2192654 - DNA, 25 bp, Homo sapien
tgcaccaaacgctggacgggaagtt

SEQ ID NO: 2192655 - DNA, 25 bp, Homo sapien
gatgactaatttcacgaagtgccac

SEQ ID NO: 2192656 - DNA, 25 bp, Homo sapien
tctccttcggctggagctcggcgag

SEQ ID NO: 2192657 - DNA, 25 bp, Homo sapien
atagagacctccttgcttaaccacc

SEQ ID NO: 2192658 - DNA, 25 bp, Homo sapien
gatatagagacctccttgcttaacc

SEQ ID NO: 2192659 - DNA, 25 bp, Homo sapien
ctccttgcttaaccacccttctcct

SEQ ID NO: 2192660 - DNA, 25 bp, Homo sapien
tcgtgcatggaattgttattatcaa

SEQ ID NO: 2192661 - DNA, 25 bp, Homo sapien
tgattttatgagtgctgccatttcc

SEQ ID NO: 2192662 - DNA, 25 bp, Homo sapien
ttctgattttatgagtgctgccatt

SEQ ID NO: 2192663 - DNA, 25 bp, Homo sapien
tcccttatatcatgctgcttatttg

SEQ ID NO: 2192664 - DNA, 25 bp, Homo sapien
aaaagcttgtgcctctttactggta

SEQ ID NO: 2192665 - DNA, 25 bp, Homo sapien
tggggtgagaactgatgtcatcttt

SEQ ID NO: 2192666 - DNA, 25 bp, Homo sapien
tctttggcagctatatggctgatac

SEQ ID NO: 2192667 - DNA, 25 bp, Homo sapien
gcttgtgcctctttactggtacccc

SEQ ID NO: 2192668 - DNA, 25 bp, Homo sapien
aataaacctggggagctttggtcat

SEQ ID NO: 2192669 - DNA, 25 bp, Homo sapien
ttagctgttgtcaggcatgtaatta

SEQ ID NO: 2192670 - DNA, 25 bp, Homo sapien
caggcatgtaattataatgcataaa

SEQ ID NO: 2192671 - DNA, 25 bp, Homo sapien
cgatcctcgaggaatttgcaattat

SEQ ID NO: 2192672 - DNA, 25 bp, Homo sapien
taatgcataaactcgatcctcgagg

SEQ ID NO: 2192673 - DNA, 25 bp, Homo sapien
agcaggaaggattgggtctagattt

SEQ ID NO: 2192674 - DNA, 25 bp, Homo sapien
caggaaggattgggtctagattttc

SEQ ID NO: 2192675 - DNA, 25 bp, Homo sapien
gcaggaaggattgggtctagatttt

SEQ ID NO: 2192676 - DNA, 25 bp, Homo sapien
cccttttcatgtgttgcaactgagg

SEQ ID NO: 2192677 - DNA, 25 bp, Homo sapien
caaactcatacatgatattttggtt

SEQ ID NO: 2192678 - DNA, 25 bp, Homo sapien
gagtcaaacgcatcctgttttcaaa

SEQ ID NO: 2192679 - DNA, 25 bp, Homo sapien
tgaggagagttatgagtcaaacgca

SEQ ID NO: 2192680 - DNA, 25 bp, Homo sapien
ctgctgatggccatctctgagataa

SEQ ID NO: 2192681 - DNA, 25 bp, Homo sapien
tctgagataaccaacttgctcacac

SEQ ID NO: 2192682 - DNA, 25 bp, Homo sapien
ggccatctctgagataaccaacttg

SEQ ID NO: 2192683 - DNA, 25 bp, Homo sapien
gctgctgatggccatctctgagata

SEQ ID NO: 2192684 - DNA, 25 bp, Homo sapien
ggcaagaatcaaagcgacgctacag

SEQ ID NO: 2192685 - DNA, 25 bp, Homo sapien
tcaaagcgacgctacaggcagggat

SEQ ID NO: 2192686 - DNA, 25 bp, Homo sapien
ctgaagataatcataaggagctgga

SEQ ID NO: 2192687 - DNA, 25 bp, Homo sapien
gaggtaaccagggtcctgaagataa

SEQ ID NO: 2192688 - DNA, 25 bp, Homo sapien
taagacatctgtccaagtagaaatc

SEQ ID NO: 2192689 - DNA, 25 bp, Homo sapien
caataaacccaggataatagttttg

SEQ ID NO: 2192690 - DNA, 25 bp, Homo sapien
aaaatactaagacatctgtccaagt

SEQ ID NO: 2192691 - DNA, 25 bp, Homo sapien
tactaagacatctgtccaagtagaa

SEQ ID NO: 2192692 - DNA, 25 bp, Homo sapien
taactgagtagtttatcgtcatcca

SEQ ID NO: 2192693 - DNA, 25 bp, Homo sapien
gtgattccgtatactccaaaatgtt

SEQ ID NO: 2192694 - DNA, 25 bp, Homo sapien
gattccgtatactccaaaatgtttc

SEQ ID NO: 2192695 - DNA, 25 bp, Homo sapien
catccatgggataagtatgaaaata

SEQ ID NO: 2192696 - DNA, 25 bp, Homo sapien
tggattccgactgacaaattgtaca

SEQ ID NO: 2192697 - DNA, 25 bp, Homo sapien
cactgtagggttctttcaaatgtct

SEQ ID NO: 2192698 - DNA, 25 bp, Homo sapien
aaatgatgtatcttttgcagtgtgg

SEQ ID NO: 2192699 - DNA, 25 bp, Homo sapien
taaaaatctgcgtttgggtccactg

SEQ ID NO: 2192700 - DNA, 25 bp, Homo sapien
cctgagtgattacgttgttgacata

SEQ ID NO: 2192701 - DNA, 25 bp, Homo sapien
ccacctgagtgattacgttgttgac

SEQ ID NO: 2192702 - DNA, 25 bp, Homo sapien
ttctttcttatgatcaccacctgag

SEQ ID NO: 2192703 - DNA, 25 bp, Homo sapien
tatgatcaccacctgagtgattacg

SEQ ID NO: 2192704 - DNA, 25 bp, Homo sapien
gtgtttaagatcattggacttgtag

SEQ ID NO: 2192705 - DNA, 25 bp, Homo sapien
ttgtgagtctggatatgattgagca

SEQ ID NO: 2192706 - DNA, 25 bp, Homo sapien
gacttgtagtccacctggtaaatgg

SEQ ID NO: 2192707 - DNA, 25 bp, Homo sapien
taaatggtgacaggattgtgagtct

SEQ ID NO: 2192708 - DNA, 25 bp, Homo sapien
ttttatatactgctggattctattt

SEQ ID NO: 2192709 - DNA, 25 bp, Homo sapien
gatattggtcagtagtttttacttc

SEQ ID NO: 2192710 - DNA, 25 bp, Homo sapien
tttagatattaaataagccttgcac

SEQ ID NO: 2192711 - DNA, 25 bp, Homo sapien
gcactcttgggaaatattcctgttg

SEQ ID NO: 2192712 - DNA, 25 bp, Homo sapien
tttcagccagctaccagagagataa

SEQ ID NO: 2192713 - DNA, 25 bp, Homo sapien
caccacctaaggcagctgcaaggct

SEQ ID NO: 2192714 - DNA, 25 bp, Homo sapien
tgtgacgagctccaaaccagtttgt

SEQ ID NO: 2192715 - DNA, 25 bp, Homo sapien
tgccatattagggatagaactttcc

SEQ ID NO: 2192716 - DNA, 25 bp, Homo sapien
tcactgagactagaacccctggaag

SEQ ID NO: 2192717 - DNA, 25 bp, Homo sapien
taagcttccgtgtctaagttgtact

SEQ ID NO: 2192718 - DNA, 25 bp, Homo sapien
tcccaatggagtcagaatcactgag

SEQ ID NO: 2192719 - DNA, 25 bp, Homo sapien
tcagaatcactgagactagaacccc

SEQ ID NO: 2192720 - DNA, 25 bp, Homo sapien
cccattcgacaggtggccaatcatc

SEQ ID NO: 2192721 - DNA, 25 bp, Homo sapien
ccaatcatcagacatgagcgaggcc

SEQ ID NO: 2192722 - DNA, 25 bp, Homo sapien
tcgacaggtggccaatcatcagaca

SEQ ID NO: 2192723 - DNA, 25 bp, Homo sapien
cattcgacaggtggccaatcatcag

SEQ ID NO: 2192724 - DNA, 25 bp, Homo sapien
tgctggcaggaaatgttgggaattt

SEQ ID NO: 2192725 - DNA, 25 bp, Homo sapien
cctcaacgtcttatcatttgatgag

SEQ ID NO: 2192726 - DNA, 25 bp, Homo sapien
tggaaatttggcctcaacgtcttat

SEQ ID NO: 2192727 - DNA, 25 bp, Homo sapien
tttggcctcaacgtcttatcatttg

SEQ ID NO: 2192728 - DNA, 25 bp, Homo sapien
cggttgccccaatgatgacagtttc

SEQ ID NO: 2192729 - DNA, 25 bp, Homo sapien
cctcggttgccccaatgatgacagt

SEQ ID NO: 2192730 - DNA, 25 bp, Homo sapien
gctgctctgaatcttcctcggttgc

SEQ ID NO: 2192731 - DNA, 25 bp, Homo sapien
tgctctgaatcttcctcggttgccc

SEQ ID NO: 2192732 - DNA, 25 bp, Homo sapien
tcagtttcttgtacaagtagtttga

SEQ ID NO: 2192733 - DNA, 25 bp, Homo sapien
tgtacaagtagtttgaaatcaggcg

SEQ ID NO: 2192734 - DNA, 25 bp, Homo sapien
ctcagtttcttgtacaagtagtttg

SEQ ID NO: 2192735 - DNA, 25 bp, Homo sapien
agtttgaaatcaggcggtcaagttt

SEQ ID NO: 2192736 - DNA, 25 bp, Homo sapien
tagtttgttcaaatccgtaatgaat

SEQ ID NO: 2192737 - DNA, 25 bp, Homo sapien
acgataactgaagagggctttatat

SEQ ID NO: 2192738 - DNA, 25 bp, Homo sapien
tttatatgctgagatgaaatttagt

SEQ ID NO: 2192739 - DNA, 25 bp, Homo sapien
gctttatatgctgagatgaaattta

SEQ ID NO: 2192740 - DNA, 25 bp, Homo sapien
aagtatccctaaattgtttcctcag

SEQ ID NO: 2192741 - DNA, 25 bp, Homo sapien
gtagtgaaaataagcgagcccatat

SEQ ID NO: 2192742 - DNA, 25 bp, Homo sapien
cagtcttttgacttatttcacatgg

SEQ ID NO: 2192743 - DNA, 25 bp, Homo sapien
ttagtcatctaatttgcggctggcc

SEQ ID NO: 2192744 - DNA, 25 bp, Homo sapien
tgcatgtttgggtgttattacttcc

SEQ ID NO: 2192745 - DNA, 25 bp, Homo sapien
cctggaacaccgaggatccttaaat

SEQ ID NO: 2192746 - DNA, 25 bp, Homo sapien
taattctggcgttgattttaactgc

SEQ ID NO: 2192747 - DNA, 25 bp, Homo sapien
cctcctttgaagactatggtcctgg

SEQ ID NO: 2192748 - DNA, 25 bp, Homo sapien
gcctataagattggcattgatttca

SEQ ID NO: 2192749 - DNA, 25 bp, Homo sapien
ttcagcgtagctttcaaatgggccc

SEQ ID NO: 2192750 - DNA, 25 bp, Homo sapien
aatgggcccaggttgcaatatctgt

SEQ ID NO: 2192751 - DNA, 25 bp, Homo sapien
ctttgcctataagattggcattgat

SEQ ID NO: 2192752 - DNA, 25 bp, Homo sapien
ttcgaaagatgagaatgccttgagg

SEQ ID NO: 2192753 - DNA, 25 bp, Homo sapien
ttgtgagcagaaggtattactctcg

SEQ ID NO: 2192754 - DNA, 25 bp, Homo sapien
gagcagaaggtattactctcgttcc

SEQ ID NO: 2192755 - DNA, 25 bp, Homo sapien
attagctgacagatcaagaattcga

SEQ ID NO: 2192756 - DNA, 25 bp, Homo sapien
tggctttgcaaaatgatcgtcctct

SEQ ID NO: 2192757 - DNA, 25 bp, Homo sapien
caaaatgatcgtcctctgccaactc

SEQ ID NO: 2192758 - DNA, 25 bp, Homo sapien
aaatgatcgtcctctgccaactctc

SEQ ID NO: 2192759 - DNA, 25 bp, Homo sapien
tttgcaaaatgatcgtcctctgcca

SEQ ID NO: 2192760 - DNA, 25 bp, Homo sapien
aatcttgtgcctgagagagagcgtc

SEQ ID NO: 2192761 - DNA, 25 bp, Homo sapien
tgaagcagttagaaatcttgtgcct

SEQ ID NO: 2192762 - DNA, 25 bp, Homo sapien
ttgtgcctgagagagagcgtccctc

SEQ ID NO: 2192763 - DNA, 25 bp, Homo sapien
tattgatgaagcagttagaaatctt

SEQ ID NO: 2192764 - DNA, 25 bp, Homo sapien
tacagtaagtggcttcccacattct

SEQ ID NO: 2192765 - DNA, 25 bp, Homo sapien
ctcttttcagttacagtaagtggct

SEQ ID NO: 2192766 - DNA, 25 bp, Homo sapien
ttttggtccctgtagtgtgtctctt

SEQ ID NO: 2192767 - DNA, 25 bp, Homo sapien
ggtccctgtagtgtgtctcttttca

SEQ ID NO: 2192768 - DNA, 25 bp, Homo sapien
agctgttccttggagtcaaagggag

SEQ ID NO: 2192769 - DNA, 25 bp, Homo sapien
tcaaggttctccttcgtaatctcta

SEQ ID NO: 2192770 - DNA, 25 bp, Homo sapien
aaggttctccttcgtaatctctagc

SEQ ID NO: 2192771 - DNA, 25 bp, Homo sapien
caaggttctccttcgtaatctctag

SEQ ID NO: 2192772 - DNA, 25 bp, Homo sapien
aggttctccttcgtaatctctagca

SEQ ID NO: 2192773 - DNA, 25 bp, Homo sapien
ttaatctgatagcaaaatcagcagt

SEQ ID NO: 2192774 - DNA, 25 bp, Homo sapien
taatctgatagcaaaatcagcagtc

SEQ ID NO: 2192775 - DNA, 25 bp, Homo sapien
gaaaagagagagtcagaagaattac

SEQ ID NO: 2192776 - DNA, 25 bp, Homo sapien
gaaaaataatgatgtttctgaaaag

SEQ ID NO: 2192777 - DNA, 25 bp, Homo sapien
ataatgatgtttctgaaaagagaga

SEQ ID NO: 2192778 - DNA, 25 bp, Homo sapien
aaaataatgatgtttctgaaaagag

SEQ ID NO: 2192779 - DNA, 25 bp, Homo sapien
tgtaacaagtttgttgttgtgatgg

SEQ ID NO: 2192780 - DNA, 25 bp, Homo sapien
gtatttcagtctcttgtgtaacaag

SEQ ID NO: 2192781 - DNA, 25 bp, Homo sapien
gtgtaacaagtttgttgttgtgatg

SEQ ID NO: 2192782 - DNA, 25 bp, Homo sapien
tatttcagtctcttgtgtaacaagt

SEQ ID NO: 2192783 - DNA, 25 bp, Homo sapien
ttctgccactaaacccgagtatcat

SEQ ID NO: 2192784 - DNA, 25 bp, Homo sapien
taagtgccgaatctgaccacaggat

SEQ ID NO: 2192785 - DNA, 25 bp, Homo sapien
tcctggatcataaggtaagtgccga

SEQ ID NO: 2192786 - DNA, 25 bp, Homo sapien
ccaaagttcttaaacgtatcagcaa

SEQ ID NO: 2192787 - DNA, 25 bp, Homo sapien
atgagaccagccatgttcagagtgg

SEQ ID NO: 2192788 - DNA, 25 bp, Homo sapien
tgagatcagatgagaccagccatgt

SEQ ID NO: 2192789 - DNA, 25 bp, Homo sapien
atcagatgagaccagccatgttcag

SEQ ID NO: 2192790 - DNA, 25 bp, Homo sapien
cagatgagaccagccatgttcagag

SEQ ID NO: 2192791 - DNA, 25 bp, Homo sapien
tcatcctccattcatttgtagtgga

SEQ ID NO: 2192792 - DNA, 25 bp, Homo sapien
ggaggtggtatattcttggtgatca

SEQ ID NO: 2192793 - DNA, 25 bp, Homo sapien
gaagacagccgtaattcatcctcca

SEQ ID NO: 2192794 - DNA, 25 bp, Homo sapien
ctgtatgaggaagacagccgtaatt

SEQ ID NO: 2192795 - DNA, 25 bp, Homo sapien
gctgtccctcacatatagctttgtc

SEQ ID NO: 2192796 - DNA, 25 bp, Homo sapien
cctcacatatagctttgtcaggacc

SEQ ID NO: 2192797 - DNA, 25 bp, Homo sapien
ttgctgtccctcacatatagctttg

SEQ ID NO: 2192798 - DNA, 25 bp, Homo sapien
tgtccctcacatatagctttgtcag

SEQ ID NO: 2192799 - DNA, 25 bp, Homo sapien
taatctccatcctccgccaatgttt

SEQ ID NO: 2192800 - DNA, 25 bp, Homo sapien
ttttaccggatactgcatggcatcc

SEQ ID NO: 2192801 - DNA, 25 bp, Homo sapien
catcctccgccaatgtttttaccgg

SEQ ID NO: 2192802 - DNA, 25 bp, Homo sapien
gcatccttcctattatggagtgtta

SEQ ID NO: 2192803 - DNA, 25 bp, Homo sapien
cagtatcataccactcacaatacag

SEQ ID NO: 2192804 - DNA, 25 bp, Homo sapien
gcagtataacctccatacacccaca

SEQ ID NO: 2192805 - DNA, 25 bp, Homo sapien
ggatggaaggttctggaattgaatc

SEQ ID NO: 2192806 - DNA, 25 bp, Homo sapien
cgaagttaagatataccaaaggatg

SEQ ID NO: 2192807 - DNA, 25 bp, Homo sapien
agatataccaaaggatgtatccaag

SEQ ID NO: 2192808 - DNA, 25 bp, Homo sapien
cagctcatagtttgtgtccccatca

SEQ ID NO: 2192809 - DNA, 25 bp, Homo sapien
gttccatatgtctcctacagctgtt

SEQ ID NO: 2192810 - DNA, 25 bp, Homo sapien
tgctgtactctcttatggcttggaa

SEQ ID NO: 2192811 - DNA, 25 bp, Homo sapien
taagtggaacgtgactctcttcagc

SEQ ID NO: 2192812 - DNA, 25 bp, Homo sapien
gacacaggatggacatcaattgtct

SEQ ID NO: 2192813 - DNA, 25 bp, Homo sapien
tcagtgaaataacatcattggagtc

SEQ ID NO: 2192814 - DNA, 25 bp, Homo sapien
ggacaccattcccattgttgtgaaa

SEQ ID NO: 2192815 - DNA, 25 bp, Homo sapien
ttacatgctgtctaacaggcagagg

SEQ ID NO: 2192816 - DNA, 25 bp, Homo sapien
cagaggtaatcaggtaaataagtca

SEQ ID NO: 2192817 - DNA, 25 bp, Homo sapien
gttttgctggtgattttttcaggta

SEQ ID NO: 2192818 - DNA, 25 bp, Homo sapien
tgttttgctggtgattttttcaggt

SEQ ID NO: 2192819 - DNA, 25 bp, Homo sapien
ttgctggtgattttttcaggtaatt

SEQ ID NO: 2192820 - DNA, 25 bp, Homo sapien
tttgttttgctggtgattttttcag

SEQ ID NO: 2192821 - DNA, 25 bp, Homo sapien
cttttcaaacttatataatctgatt

SEQ ID NO: 2192822 - DNA, 25 bp, Homo sapien
tgatgacttttcaaacttatataat

SEQ ID NO: 2192823 - DNA, 25 bp, Homo sapien
gacttttcaaacttatataatctga

SEQ ID NO: 2192824 - DNA, 25 bp, Homo sapien
tgacttttcaaacttatataatctg

SEQ ID NO: 2192825 - DNA, 25 bp, Homo sapien
gagcttgccttatcatcatactgat

SEQ ID NO: 2192826 - DNA, 25 bp, Homo sapien
atactgatacagtagctgggttttg

SEQ ID NO: 2192827 - DNA, 25 bp, Homo sapien
atcatcatactgatacagtagctgg

SEQ ID NO: 2192828 - DNA, 25 bp, Homo sapien
catcatactgatacagtagctgggt

SEQ ID NO: 2192829 - DNA, 25 bp, Homo sapien
ttctcctttgcaatgttggagagat

SEQ ID NO: 2192830 - DNA, 25 bp, Homo sapien
tgcaatgttggagagatcttgcttc

SEQ ID NO: 2192831 - DNA, 25 bp, Homo sapien
ttaaaatgtgcaaaggataaataca

SEQ ID NO: 2192832 - DNA, 25 bp, Homo sapien
cctttgcaatgttggagagatcttg

SEQ ID NO: 2192833 - DNA, 25 bp, Homo sapien
tgggacagctcagtcatcaccatct

SEQ ID NO: 2192834 - DNA, 25 bp, Homo sapien
aacaagtgcttgtcaattgtaaatg

SEQ ID NO: 2192835 - DNA, 25 bp, Homo sapien
ttttgcagcatctttgcaatgtttc

SEQ ID NO: 2192836 - DNA, 25 bp, Homo sapien
ccacagaacaagtgcttgtcaattg

SEQ ID NO: 2192837 - DNA, 25 bp, Homo sapien
ttcaggctgaagttccagcagttcc

SEQ ID NO: 2192838 - DNA, 25 bp, Homo sapien
cctgctagagtgtggaagacacata

SEQ ID NO: 2192839 - DNA, 25 bp, Homo sapien
taagatgggccataatccctgaaaa

SEQ ID NO: 2192840 - DNA, 25 bp, Homo sapien
cacataatgtaaatacgttaggagc

SEQ ID NO: 2192841 - DNA, 25 bp, Homo sapien
gttcctcttgagctttgcaacagta

SEQ ID NO: 2192842 - DNA, 25 bp, Homo sapien
caggagctttcttatccgttgttcc

SEQ ID NO: 2192843 - DNA, 25 bp, Homo sapien
gagctttgcaacagtactaggcaga

SEQ ID NO: 2192844 - DNA, 25 bp, Homo sapien
ggcagacaggatagataagtaatga

SEQ ID NO: 2192845 - DNA, 25 bp, Homo sapien
tcaagtagtgttcatctcccttctc

SEQ ID NO: 2192846 - DNA, 25 bp, Homo sapien
gggatctgtcaagtagtgttcatct

SEQ ID NO: 2192847 - DNA, 25 bp, Homo sapien
ttacaactcaattgaaggctggccc

SEQ ID NO: 2192848 - DNA, 25 bp, Homo sapien
gaaggctggccccagaggaactggg

SEQ ID NO: 2192849 - DNA, 25 bp, Homo sapien
tatacttgacgcagaaacattgtag

SEQ ID NO: 2192850 - DNA, 25 bp, Homo sapien
gagtagcttttaaattcgctgccac

SEQ ID NO: 2192851 - DNA, 25 bp, Homo sapien
tcgctgccaccatgatgacttgaag

SEQ ID NO: 2192852 - DNA, 25 bp, Homo sapien
tgacttgaaggatcagaaagcctct

SEQ ID NO: 2192853 - DNA, 25 bp, Homo sapien
cagtcatctctcagacgagcatcct

SEQ ID NO: 2192854 - DNA, 25 bp, Homo sapien
ttacaatcatctgacagtcatctct

SEQ ID NO: 2192855 - DNA, 25 bp, Homo sapien
tgacagtcatctctcagacgagcat

SEQ ID NO: 2192856 - DNA, 25 bp, Homo sapien
gacagtcatctctcagacgagcatc

SEQ ID NO: 2192857 - DNA, 25 bp, Homo sapien
tctggttagcgttgactggctatac

SEQ ID NO: 2192858 - DNA, 25 bp, Homo sapien
gggactgaccgaccatgctgtgaga

SEQ ID NO: 2192859 - DNA, 25 bp, Homo sapien
gatctttagcgagaaaattgagctc

SEQ ID NO: 2192860 - DNA, 25 bp, Homo sapien
gaccgaccatgctgtgagatcttta

SEQ ID NO: 2192861 - DNA, 25 bp, Homo sapien
tatagtaaagttcccatgacttggg

SEQ ID NO: 2192862 - DNA, 25 bp, Homo sapien
ctatagtaaagttcccatgacttgg

SEQ ID NO: 2192863 - DNA, 25 bp, Homo sapien
ccacgactatagtaaagttcccatg

SEQ ID NO: 2192864 - DNA, 25 bp, Homo sapien
cgactatagtaaagttcccatgact

SEQ ID NO: 2192865 - DNA, 25 bp, Homo sapien
atagtaaaccagatcttcagatccc

SEQ ID NO: 2192866 - DNA, 25 bp, Homo sapien
tgggaaacccagaggcaatagaatc

SEQ ID NO: 2192867 - DNA, 25 bp, Homo sapien
cccagaggcaatagaatccatatac

SEQ ID NO: 2192868 - DNA, 25 bp, Homo sapien
tttgatggtgggttgatagtaaacc

SEQ ID NO: 2192869 - DNA, 25 bp, Homo sapien
tgacctcgaggtcatccaaacttcc

SEQ ID NO: 2192870 - DNA, 25 bp, Homo sapien
cattttaggcaaaagtggccgattt

SEQ ID NO: 2192871 - DNA, 25 bp, Homo sapien
aattgtgctatagggagcatcccag

SEQ ID NO: 2192872 - DNA, 25 bp, Homo sapien
tcccagaaccacgaaaatgacagtg

SEQ ID NO: 2192873 - DNA, 25 bp, Homo sapien
cttttaacgtgtgtataagatgtgt

SEQ ID NO: 2192874 - DNA, 25 bp, Homo sapien
atacaatcacatgtactattctgca

SEQ ID NO: 2192875 - DNA, 25 bp, Homo sapien
taacgtgtgtataagatgtgttttc

SEQ ID NO: 2192876 - DNA, 25 bp, Homo sapien
ttttctcatgacttcttatacaatc

SEQ ID NO: 2192877 - DNA, 25 bp, Homo sapien
catttacagatgtcctagctagggc

SEQ ID NO: 2192878 - DNA, 25 bp, Homo sapien
tcacatggcggagaaggaggactct

SEQ ID NO: 2192879 - DNA, 25 bp, Homo sapien
gggctgctccacaacaataccatag

SEQ ID NO: 2192880 - DNA, 25 bp, Homo sapien
cctggcttgtagatagactccttct

SEQ ID NO: 2192881 - DNA, 25 bp, Homo sapien
gaggttctgtcgcatttatagtgac

SEQ ID NO: 2192882 - DNA, 25 bp, Homo sapien
tcagagttacacagcagttgctggc

SEQ ID NO: 2192883 - DNA, 25 bp, Homo sapien
tagcagccactgttaaacttcgagg

SEQ ID NO: 2192884 - DNA, 25 bp, Homo sapien
ctgaacttcatagccttagcagcca

SEQ ID NO: 2192885 - DNA, 25 bp, Homo sapien
gatgaacgaagagaaccagttggct

SEQ ID NO: 2192886 - DNA, 25 bp, Homo sapien
tcatgccctgtggtgggagcaaaag

SEQ ID NO: 2192887 - DNA, 25 bp, Homo sapien
caatttgactttgctggatgaacga

SEQ ID NO: 2192888 - DNA, 25 bp, Homo sapien
taatgtccttggtaggtggatcctg

SEQ ID NO: 2192889 - DNA, 25 bp, Homo sapien
ttaaaactgtgtagcattcttttct

SEQ ID NO: 2192890 - DNA, 25 bp, Homo sapien
aaactgtgtagcattcttttctggt

SEQ ID NO: 2192891 - DNA, 25 bp, Homo sapien
aactgtgtagcattcttttctggtt

SEQ ID NO: 2192892 - DNA, 25 bp, Homo sapien
aaaactgtgtagcattcttttctgg

SEQ ID NO: 2192893 - DNA, 25 bp, Homo sapien
gtttgtactgattaacatcatccca

SEQ ID NO: 2192894 - DNA, 25 bp, Homo sapien
ggtttgtactgattaacatcatccc

SEQ ID NO: 2192895 - DNA, 25 bp, Homo sapien
tggcacgcaataaggttgtccttgc

SEQ ID NO: 2192896 - DNA, 25 bp, Homo sapien
gcacgcaataaggttgtccttgcca

SEQ ID NO: 2192897 - DNA, 25 bp, Homo sapien
ttggcacgcaataaggttgtccttg

SEQ ID NO: 2192898 - DNA, 25 bp, Homo sapien
cacgcaataaggttgtccttgccaa

SEQ ID NO: 2192899 - DNA, 25 bp, Homo sapien
cattttggtgtcgagcatttttgta

SEQ ID NO: 2192900 - DNA, 25 bp, Homo sapien
gcagcaatatcctccaatgtgcagg

SEQ ID NO: 2192901 - DNA, 25 bp, Homo sapien
gaaaccctgtatctagaccaataga

SEQ ID NO: 2192902 - DNA, 25 bp, Homo sapien
tggtggacaaaaccactcttttctc

SEQ ID NO: 2192903 - DNA, 25 bp, Homo sapien
tcgcgccatccaatctagagtagaa

SEQ ID NO: 2192904 - DNA, 25 bp, Homo sapien
aaagcaactttatcaccagcccctg

SEQ ID NO: 2192905 - DNA, 25 bp, Homo sapien
aaaacgatggaacaacagagcctgg

SEQ ID NO: 2192906 - DNA, 25 bp, Homo sapien
gctgaatctgttctcagtcagaaag

SEQ ID NO: 2192907 - DNA, 25 bp, Homo sapien
tttcagtaggaagttggcttccaat

SEQ ID NO: 2192908 - DNA, 25 bp, Homo sapien
cttttcagtaggaagttggcttcca

SEQ ID NO: 2192909 - DNA, 25 bp, Homo sapien
aatactagagttcacttgtcttctt

SEQ ID NO: 2192910 - DNA, 25 bp, Homo sapien
gatgatcaactttgaaatactagag

SEQ ID NO: 2192911 - DNA, 25 bp, Homo sapien
gaaacaagtcagttttgcatacccg

SEQ ID NO: 2192912 - DNA, 25 bp, Homo sapien
tgcagagtgggaaacaagtcagttt

SEQ ID NO: 2192913 - DNA, 25 bp, Homo sapien
ggagctccaacagttcttttcccca

SEQ ID NO: 2192914 - DNA, 25 bp, Homo sapien
ttttgcatacccgttggagctccaa

SEQ ID NO: 2192915 - DNA, 25 bp, Homo sapien
gaatctccctatgtgtaacctcccg

SEQ ID NO: 2192916 - DNA, 25 bp, Homo sapien
cacttgatcagtgtctgaagtgaga

SEQ ID NO: 2192917 - DNA, 25 bp, Homo sapien
tagtttcttccatgggctaccaagt

SEQ ID NO: 2192918 - DNA, 25 bp, Homo sapien
tatgctgataaccttggaatcatgg

SEQ ID NO: 2192919 - DNA, 25 bp, Homo sapien
taatattagtgtacggtaaagcttc

SEQ ID NO: 2192920 - DNA, 25 bp, Homo sapien
tagtgtacggtaaagcttctccaca

SEQ ID NO: 2192921 - DNA, 25 bp, Homo sapien
tgtacggtaaagcttctccacacat

SEQ ID NO: 2192922 - DNA, 25 bp, Homo sapien
catatagttaatattagtgtacggt

SEQ ID NO: 2192923 - DNA, 25 bp, Homo sapien
taatgtagtatttcatgttcattct

SEQ ID NO: 2192924 - DNA, 25 bp, Homo sapien
tctatagtatagctatcaatgttag

SEQ ID NO: 2192925 - DNA, 25 bp, Homo sapien
caatgttagtggcataatgtagtat

SEQ ID NO: 2192926 - DNA, 25 bp, Homo sapien
gggtcactttagactcatcgtagca

SEQ ID NO: 2192927 - DNA, 25 bp, Homo sapien
ggcattccgcaagcctaaattcatt

SEQ ID NO: 2192928 - DNA, 25 bp, Homo sapien
gaaaatattggcattccgcaagcct

SEQ ID NO: 2192929 - DNA, 25 bp, Homo sapien
ttgctagaaaatattggcattccgc

SEQ ID NO: 2192930 - DNA, 25 bp, Homo sapien
cgcaagcctaaattcattagagagg

SEQ ID NO: 2192931 - DNA, 25 bp, Homo sapien
gatactgaagtccaatgaatctgaa

SEQ ID NO: 2192932 - DNA, 25 bp, Homo sapien
gacggtgtcttgttagctttgtcat

SEQ ID NO: 2192933 - DNA, 25 bp, Homo sapien
cattcttaatcttatgctgacggtg

SEQ ID NO: 2192934 - DNA, 25 bp, Homo sapien
aagaatgttattactctggtgatac

SEQ ID NO: 2192935 - DNA, 25 bp, Homo sapien
gaatcatgaagaaagtcacaagcac

SEQ ID NO: 2192936 - DNA, 25 bp, Homo sapien
ggaatcatgaagaaagtcacaagca

SEQ ID NO: 2192937 - DNA, 25 bp, Homo sapien
tggaatcatgaagaaagtcacaagc

SEQ ID NO: 2192938 - DNA, 25 bp, Homo sapien
tggcattgtagtatggcagctgaac

SEQ ID NO: 2192939 - DNA, 25 bp, Homo sapien
agctgcctggcattgtagtatggca

SEQ ID NO: 2192940 - DNA, 25 bp, Homo sapien
tgtagtatggcagctgaacagtaat

SEQ ID NO: 2192941 - DNA, 25 bp, Homo sapien
tgcctggcattgtagtatggcagct

SEQ ID NO: 2192942 - DNA, 25 bp, Homo sapien
ctttgtagattgcttgcttggctta

SEQ ID NO: 2192943 - DNA, 25 bp, Homo sapien
tagattgcttgcttggcttattgat

SEQ ID NO: 2192944 - DNA, 25 bp, Homo sapien
taaaacagctttgtagattgcttgc

SEQ ID NO: 2192945 - DNA, 25 bp, Homo sapien
cagctttgtagattgcttgcttggc

SEQ ID NO: 2192946 - DNA, 25 bp, Homo sapien
tctttctgggtactaagcctgtaca

SEQ ID NO: 2192947 - DNA, 25 bp, Homo sapien
tgatctttctgggtactaagcctgt

SEQ ID NO: 2192948 - DNA, 25 bp, Homo sapien
tactaagcctgtacaaggtttctaa

SEQ ID NO: 2192949 - DNA, 25 bp, Homo sapien
tctgggtactaagcctgtacaaggt

SEQ ID NO: 2192950 - DNA, 25 bp, Homo sapien
ggatctgccgtgagtcttggtgcat

SEQ ID NO: 2192951 - DNA, 25 bp, Homo sapien
gccgtgagtcttggtgcatcaaaca

SEQ ID NO: 2192952 - DNA, 25 bp, Homo sapien
aatgtgttctgggatctgccgtgag

SEQ ID NO: 2192953 - DNA, 25 bp, Homo sapien
ttagtgggtggttaaatgtgttctg

SEQ ID NO: 2192954 - DNA, 25 bp, Homo sapien
gcttaaaatcgaagagagtatatca

SEQ ID NO: 2192955 - DNA, 25 bp, Homo sapien
gtgggctgataattgaagttgacga

SEQ ID NO: 2192956 - DNA, 25 bp, Homo sapien
tgtagaagcttaaaatcgaagagag

SEQ ID NO: 2192957 - DNA, 25 bp, Homo sapien
tgaagttgacgagagcacagagcag

SEQ ID NO: 2192958 - DNA, 25 bp, Homo sapien
ctttcccattttctatatttctgta

SEQ ID NO: 2192959 - DNA, 25 bp, Homo sapien
gtgtcctgttcttctaattcctcca

SEQ ID NO: 2192960 - DNA, 25 bp, Homo sapien
atttctgtattttcttgtgtcctgt

SEQ ID NO: 2192961 - DNA, 25 bp, Homo sapien
ttgtgtcctgttcttctaattcctc

SEQ ID NO: 2192962 - DNA, 25 bp, Homo sapien
ctttagtgagaacttgaagttccct

SEQ ID NO: 2192963 - DNA, 25 bp, Homo sapien
ctgcatgtcatcattttgtataggg

SEQ ID NO: 2192964 - DNA, 25 bp, Homo sapien
ggtgaaggaatacgttgctcagttc

SEQ ID NO: 2192965 - DNA, 25 bp, Homo sapien
tgaagttccctaaggagaaatccta

SEQ ID NO: 2192966 - DNA, 25 bp, Homo sapien
cactgatcttcgagcatgaagttct

SEQ ID NO: 2192967 - DNA, 25 bp, Homo sapien
cagttgcatgtctcttgaatctgct

SEQ ID NO: 2192968 - DNA, 25 bp, Homo sapien
aaatggaagtacttaggacattcat

SEQ ID NO: 2192969 - DNA, 25 bp, Homo sapien
gttcatctttgcctcctattttctc

SEQ ID NO: 2192970 - DNA, 25 bp, Homo sapien
tttttaaactatgggggcagtcaca

SEQ ID NO: 2192971 - DNA, 25 bp, Homo sapien
gtgctcagcattgcaggttttaacc

SEQ ID NO: 2192972 - DNA, 25 bp, Homo sapien
gctcagcattgcaggttttaacctt

SEQ ID NO: 2192973 - DNA, 25 bp, Homo sapien
actatgggggcagtcacagtgctca

SEQ ID NO: 2192974 - DNA, 25 bp, Homo sapien
tcaaagtggataactcaaaagaatc

SEQ ID NO: 2192975 - DNA, 25 bp, Homo sapien
tgtctttgaagacttcacccacttt

SEQ ID NO: 2192976 - DNA, 25 bp, Homo sapien
tcttcatgtctttgaagacttcacc

SEQ ID NO: 2192977 - DNA, 25 bp, Homo sapien
caaagtggataactcaaaagaatct

SEQ ID NO: 2192978 - DNA, 25 bp, Homo sapien
gctatagagcatggaatcatgggaa

SEQ ID NO: 2192979 - DNA, 25 bp, Homo sapien
gtctggctggctatagagcatggaa

SEQ ID NO: 2192980 - DNA, 25 bp, Homo sapien
tttcttcaagtgacatgggcagttt

SEQ ID NO: 2192981 - DNA, 25 bp, Homo sapien
ttcaagtgacatgggcagtttatcc

SEQ ID NO: 2192982 - DNA, 25 bp, Homo sapien
aaaacatagctcttcggtctgctcc

SEQ ID NO: 2192983 - DNA, 25 bp, Homo sapien
tagctcttcggtctgctcccagatc

SEQ ID NO: 2192984 - DNA, 25 bp, Homo sapien
cctccactggggcaactagttttgc

SEQ ID NO: 2192985 - DNA, 25 bp, Homo sapien
gcccatggtccatctctggcatcct

SEQ ID NO: 2192986 - DNA, 25 bp, Homo sapien
ttctctggttcagttagattcttct

SEQ ID NO: 2192987 - DNA, 25 bp, Homo sapien
tcttcttaaattggaatgtctccag

SEQ ID NO: 2192988 - DNA, 25 bp, Homo sapien
tataatcttctacctccaccagact

SEQ ID NO: 2192989 - DNA, 25 bp, Homo sapien
atttttccctctgcatgccaccccg

SEQ ID NO: 2192990 - DNA, 25 bp, Homo sapien
ttttcagtcactttcctataatctt

SEQ ID NO: 2192991 - DNA, 25 bp, Homo sapien
ccgacctggtggcttaatattccat

SEQ ID NO: 2192992 - DNA, 25 bp, Homo sapien
ctgatgatgccaaaacgtagacctg

SEQ ID NO: 2192993 - DNA, 25 bp, Homo sapien
gatgatgccaaaacgtagacctgtg

SEQ ID NO: 2192994 - DNA, 25 bp, Homo sapien
tgatgatgccaaaacgtagacctgt

SEQ ID NO: 2192995 - DNA, 25 bp, Homo sapien
gacttcagtgatcctgatttcaccc

SEQ ID NO: 2192996 - DNA, 25 bp, Homo sapien
tgacttcagtgatcctgatttcacc

SEQ ID NO: 2192997 - DNA, 25 bp, Homo sapien
atgacttcagtgatcctgatttcac

SEQ ID NO: 2192998 - DNA, 25 bp, Homo sapien
tgaattctggttcattagcacaagg

SEQ ID NO: 2192999 - DNA, 25 bp, Homo sapien
cctgaattctggttcattagcacaa

SEQ ID NO: 2193000 - DNA, 25 bp, Homo sapien
ctgaattctggttcattagcacaag

SEQ ID NO: 2193001 - DNA, 25 bp, Homo sapien
gaattctggttcattagcacaaggt

SEQ ID NO: 2193002 - DNA, 25 bp, Homo sapien
caggaaaagaggtgagagctggtat

SEQ ID NO: 2193003 - DNA, 25 bp, Homo sapien
ctcaggaaaagaggtgagagctggt

SEQ ID NO: 2193004 - DNA, 25 bp, Homo sapien
tcaggaaaagaggtgagagctggta

SEQ ID NO: 2193005 - DNA, 25 bp, Homo sapien
ttgtcctatacattccacttgactt

SEQ ID NO: 2193006 - DNA, 25 bp, Homo sapien
ccttctgcaaggattttgtcagtga

SEQ ID NO: 2193007 - DNA, 25 bp, Homo sapien
ctgcaaggattttgtcagtgatgtt

SEQ ID NO: 2193008 - DNA, 25 bp, Homo sapien
tggtaactcattacttgtcctatac

SEQ ID NO: 2193009 - DNA, 25 bp, Homo sapien
tcccttgctttcagcaccatcaaaa

SEQ ID NO: 2193010 - DNA, 25 bp, Homo sapien
cccttgctttcagcaccatcaaaat

SEQ ID NO: 2193011 - DNA, 25 bp, Homo sapien
atagtttcagcaagatcaggggaag

SEQ ID NO: 2193012 - DNA, 25 bp, Homo sapien
aagatcaggggaagctacccctctc

SEQ ID NO: 2193013 - DNA, 25 bp, Homo sapien
cccaccatgaagttggttactcctt

SEQ ID NO: 2193014 - DNA, 25 bp, Homo sapien
ccaccatgaagttggttactccttt

SEQ ID NO: 2193015 - DNA, 25 bp, Homo sapien
tgaagttggttactcctttcttcat

SEQ ID NO: 2193016 - DNA, 25 bp, Homo sapien
acccaccatgaagttggttactcct

SEQ ID NO: 2193017 - DNA, 25 bp, Homo sapien
catatgagaattacattacaaaata

SEQ ID NO: 2193018 - DNA, 25 bp, Homo sapien
acattacaaaatatggcaagacggg

SEQ ID NO: 2193019 - DNA, 25 bp, Homo sapien
cttgtttaaggttgatactggccag

SEQ ID NO: 2193020 - DNA, 25 bp, Homo sapien
tactggccagagactttcctgtctt

SEQ ID NO: 2193021 - DNA, 25 bp, Homo sapien
attgatagtcataaactggagagaa

SEQ ID NO: 2193022 - DNA, 25 bp, Homo sapien
tttcattgatagtcataaactggag

SEQ ID NO: 2193023 - DNA, 25 bp, Homo sapien
cattgatagtcataaactggagaga

SEQ ID NO: 2193024 - DNA, 25 bp, Homo sapien
tcattgatagtcataaactggagag

SEQ ID NO: 2193025 - DNA, 25 bp, Homo sapien
tatgtctggaggagataagatatgg

SEQ ID NO: 2193026 - DNA, 25 bp, Homo sapien
cagaggcacaagacgccaaggctta

SEQ ID NO: 2193027 - DNA, 25 bp, Homo sapien
gtcttccagcattgcttccatttta

SEQ ID NO: 2193028 - DNA, 25 bp, Homo sapien
tccattttatgtctggaggagataa

SEQ ID NO: 2193029 - DNA, 25 bp, Homo sapien
ggactctggcgactcatactacata

SEQ ID NO: 2193030 - DNA, 25 bp, Homo sapien
tacagctgtttgatgacagacacac

SEQ ID NO: 2193031 - DNA, 25 bp, Homo sapien
gaactaagctatgggtacacaaacg

SEQ ID NO: 2193032 - DNA, 25 bp, Homo sapien
gactatagagactgcattctcccag

SEQ ID NO: 2193033 - DNA, 25 bp, Homo sapien
caatcacaccgataacttctatgag

SEQ ID NO: 2193034 - DNA, 25 bp, Homo sapien
ccaatcacaccgataacttctatga

SEQ ID NO: 2193035 - DNA, 25 bp, Homo sapien
gccaatcacaccgataacttctatg

SEQ ID NO: 2193036 - DNA, 25 bp, Homo sapien
ctgccaatcacaccgataacttcta

SEQ ID NO: 2193037 - DNA, 25 bp, Homo sapien
tctgatcggtagtagcgtcatccca

SEQ ID NO: 2193038 - DNA, 25 bp, Homo sapien
agagtctgatcggtagtagcgtcat

SEQ ID NO: 2193039 - DNA, 25 bp, Homo sapien
tcggtagtagcgtcatcccacattg

SEQ ID NO: 2193040 - DNA, 25 bp, Homo sapien
tagcgtcatcccacattgagagctg

SEQ ID NO: 2193041 - DNA, 25 bp, Homo sapien
gacagaaagaactgcctgtgccaaa

SEQ ID NO: 2193042 - DNA, 25 bp, Homo sapien
tgtgattcccggatgaaaagcctca

SEQ ID NO: 2193043 - DNA, 25 bp, Homo sapien
taggcatagccatgtgtttcaaaat

SEQ ID NO: 2193044 - DNA, 25 bp, Homo sapien
ggcctttccaaagagcaagaacatg

SEQ ID NO: 2193045 - DNA, 25 bp, Homo sapien
cggatgatttaggtggctgtattca

SEQ ID NO: 2193046 - DNA, 25 bp, Homo sapien
aaacgtgacggatgatttaggtggc

SEQ ID NO: 2193047 - DNA, 25 bp, Homo sapien
tggttataaaaacgtgacggatgat

SEQ ID NO: 2193048 - DNA, 25 bp, Homo sapien
gaaagctgcagttggttataaaaac

SEQ ID NO: 2193049 - DNA, 25 bp, Homo sapien
gtactataggcaaaaacgtgtgatt

SEQ ID NO: 2193050 - DNA, 25 bp, Homo sapien
ctgtaagcaataaatgctgagctcg

SEQ ID NO: 2193051 - DNA, 25 bp, Homo sapien
taggcaaaaacgtgtgatttactag

SEQ ID NO: 2193052 - DNA, 25 bp, Homo sapien
gctgagctcggcagaaagtactata

SEQ ID NO: 2193053 - DNA, 25 bp, Homo sapien
ttcaatgatagcctttttgtctgtt

SEQ ID NO: 2193054 - DNA, 25 bp, Homo sapien
ggtgtgatatacgttgtatattgtc

SEQ ID NO: 2193055 - DNA, 25 bp, Homo sapien
aaaaataagtgctctagaataggca

SEQ ID NO: 2193056 - DNA, 25 bp, Homo sapien
gttgtgtacgtgaatgatactggaa

SEQ ID NO: 2193057 - DNA, 25 bp, Homo sapien
tgatgcgagtcagttcttctattcc

SEQ ID NO: 2193058 - DNA, 25 bp, Homo sapien
gtgatgcgagtcagttcttctattc

SEQ ID NO: 2193059 - DNA, 25 bp, Homo sapien
ctactgcctgtcagtgatgcgagtc

SEQ ID NO: 2193060 - DNA, 25 bp, Homo sapien
cagtgatgcgagtcagttcttctat

SEQ ID NO: 2193061 - DNA, 25 bp, Homo sapien
tgtggtcctcctcacatctgagctc

SEQ ID NO: 2193062 - DNA, 25 bp, Homo sapien
tgacctggagtgtttcttgaagcac

SEQ ID NO: 2193063 - DNA, 25 bp, Homo sapien
tcacagatggtgatactctttgagg

SEQ ID NO: 2193064 - DNA, 25 bp, Homo sapien
gaagcacttccaatattcggttcta

SEQ ID NO: 2193065 - DNA, 25 bp, Homo sapien
cagggagcaggacactgaattgatc

SEQ ID NO: 2193066 - DNA, 25 bp, Homo sapien
aggaggtcgccttattttggagtca

SEQ ID NO: 2193067 - DNA, 25 bp, Homo sapien
gtgagggttgattgatcataaatat

SEQ ID NO: 2193068 - DNA, 25 bp, Homo sapien
tatagctgacaccaccaagctgtca

SEQ ID NO: 2193069 - DNA, 25 bp, Homo sapien
tttcctgatgaaggcctatgcttct

SEQ ID NO: 2193070 - DNA, 25 bp, Homo sapien
cctgatgaaggcctatgcttctgga

SEQ ID NO: 2193071 - DNA, 25 bp, Homo sapien
tgaaggcctatgcttctggactttc

SEQ ID NO: 2193072 - DNA, 25 bp, Homo sapien
tgatgaaggcctatgcttctggact

SEQ ID NO: 2193073 - DNA, 25 bp, Homo sapien
tgcgtgcctattgtccgggctactc

SEQ ID NO: 2193074 - DNA, 25 bp, Homo sapien
tcattaagccacatactgagtgcgg

SEQ ID NO: 2193075 - DNA, 25 bp, Homo sapien
taacagacttactatggaattgcaa

SEQ ID NO: 2193076 - DNA, 25 bp, Homo sapien
ggaattgcaaaacatgaatgccatt

SEQ ID NO: 2193077 - DNA, 25 bp, Homo sapien
ccaagtagcatcattgttagaaaag

SEQ ID NO: 2193078 - DNA, 25 bp, Homo sapien
ggaccattgtctgctgatgattaac

SEQ ID NO: 2193079 - DNA, 25 bp, Homo sapien
caaaaccaatgtcgagggccaagaa

SEQ ID NO: 2193080 - DNA, 25 bp, Homo sapien
tgtaacattgtttggcctcttagcc

SEQ ID NO: 2193081 - DNA, 25 bp, Homo sapien
ctgttctttattcccgtgctctccc

SEQ ID NO: 2193082 - DNA, 25 bp, Homo sapien
ttattcccgtgctctccccttggat

SEQ ID NO: 2193083 - DNA, 25 bp, Homo sapien
tgttctttattcccgtgctctcccc

SEQ ID NO: 2193084 - DNA, 25 bp, Homo sapien
ctttattcccgtgctctccccttgg

SEQ ID NO: 2193085 - DNA, 25 bp, Homo sapien
gtttggtattgcctgtttttcatca

SEQ ID NO: 2193086 - DNA, 25 bp, Homo sapien
ctgtttttcatcaattgccgctcga

SEQ ID NO: 2193087 - DNA, 25 bp, Homo sapien
gccgctcgagctctgaacgacacat

SEQ ID NO: 2193088 - DNA, 25 bp, Homo sapien
catcaattgccgctcgagctctgaa

SEQ ID NO: 2193089 - DNA, 25 bp, Homo sapien
cgacagattgaaagctcacaggtgc

SEQ ID NO: 2193090 - DNA, 25 bp, Homo sapien
caaagagcattcataatggctagtc

SEQ ID NO: 2193091 - DNA, 25 bp, Homo sapien
tggctagtctaccatgacagatact

SEQ ID NO: 2193092 - DNA, 25 bp, Homo sapien
gacttcagctagattatattcgaca

SEQ ID NO: 2193093 - DNA, 25 bp, Homo sapien
aaacacaacagatgcacaaccgtat

SEQ ID NO: 2193094 - DNA, 25 bp, Homo sapien
cacaaccgtattaagtgtgcttcca

SEQ ID NO: 2193095 - DNA, 25 bp, Homo sapien
gatcaggctaattgaaaacatgcat

SEQ ID NO: 2193096 - DNA, 25 bp, Homo sapien
gatgattatacaatagtctcttgat

SEQ ID NO: 2193097 - DNA, 25 bp, Homo sapien
gcatggccatcagcgttggcagcag

SEQ ID NO: 2193098 - DNA, 25 bp, Homo sapien
acagagcaagggctataaggcatgg

SEQ ID NO: 2193099 - DNA, 25 bp, Homo sapien
agtaggaacaatcacacagtagcag

SEQ ID NO: 2193100 - DNA, 25 bp, Homo sapien
ggcatcaccgcaggtaagagatata

SEQ ID NO: 2193101 - DNA, 25 bp, Homo sapien
gtattctctaaatggtccacacagg

SEQ ID NO: 2193102 - DNA, 25 bp, Homo sapien
ttctctaaatggtccacacaggaat

SEQ ID NO: 2193103 - DNA, 25 bp, Homo sapien
ctctaaatggtccacacaggaatca

SEQ ID NO: 2193104 - DNA, 25 bp, Homo sapien
tattctctaaatggtccacacagga

SEQ ID NO: 2193105 - DNA, 25 bp, Homo sapien
tgtactctgccctacaaccttgaga

SEQ ID NO: 2193106 - DNA, 25 bp, Homo sapien
tataactggcattgacagggacaca

SEQ ID NO: 2193107 - DNA, 25 bp, Homo sapien
tgaatatcagatctggaccctcggg

SEQ ID NO: 2193108 - DNA, 25 bp, Homo sapien
cataataggacacctgagagaacca

SEQ ID NO: 2193109 - DNA, 25 bp, Homo sapien
tatgtctctatttcctgtgggtttc

SEQ ID NO: 2193110 - DNA, 25 bp, Homo sapien
ctatgtctctatttcctgtgggttt

SEQ ID NO: 2193111 - DNA, 25 bp, Homo sapien
tatttcctgtgggtttcatcttcat

SEQ ID NO: 2193112 - DNA, 25 bp, Homo sapien
ctctatttcctgtgggtttcatctt

SEQ ID NO: 2193113 - DNA, 25 bp, Homo sapien
taataaagcttcatcgtcagattgc

SEQ ID NO: 2193114 - DNA, 25 bp, Homo sapien
ctaataacaagtgaacagcagcaga

SEQ ID NO: 2193115 - DNA, 25 bp, Homo sapien
tcatcgtcagattgctatctatgaa

SEQ ID NO: 2193116 - DNA, 25 bp, Homo sapien
tagcaactatgtagtagtacccatc

SEQ ID NO: 2193117 - DNA, 25 bp, Homo sapien
tacctgaggggctgaggtaggttcc

SEQ ID NO: 2193118 - DNA, 25 bp, Homo sapien
ctgaggtaggttccggtgtccagac

SEQ ID NO: 2193119 - DNA, 25 bp, Homo sapien
gggctgaggtaggttccggtgtcca

SEQ ID NO: 2193120 - DNA, 25 bp, Homo sapien
gtaggttccggtgtccagacttgct

SEQ ID NO: 2193121 - DNA, 25 bp, Homo sapien
tttctggtacctaaatgtaagccaa

SEQ ID NO: 2193122 - DNA, 25 bp, Homo sapien
aactgcttccatatttatcggtcat

SEQ ID NO: 2193123 - DNA, 25 bp, Homo sapien
tgtttgcctgagacagccggatctc

SEQ ID NO: 2193124 - DNA, 25 bp, Homo sapien
gttggactgagatgttagaaacctc

SEQ ID NO: 2193125 - DNA, 25 bp, Homo sapien
tattcacataagactttccatgaca

SEQ ID NO: 2193126 - DNA, 25 bp, Homo sapien
tcagggctaattcacagggcatgtt

SEQ ID NO: 2193127 - DNA, 25 bp, Homo sapien
gatgcctatagacgtttgagtctga

SEQ ID NO: 2193128 - DNA, 25 bp, Homo sapien
gagtctgagatctcttcttactcat

SEQ ID NO: 2193129 - DNA, 25 bp, Homo sapien
cctatagacgtttgagtctgagatc

SEQ ID NO: 2193130 - DNA, 25 bp, Homo sapien
ctgctgatgcctatagacgtttgag

SEQ ID NO: 2193131 - DNA, 25 bp, Homo sapien
gtttacttatgcatgactgctcttg

SEQ ID NO: 2193132 - DNA, 25 bp, Homo sapien
tttgggcaggccagaagtttctggt

SEQ ID NO: 2193133 - DNA, 25 bp, Homo sapien
tacttatgcatgactgctcttggga

SEQ ID NO: 2193134 - DNA, 25 bp, Homo sapien
tcttgggagccacccttgatcaaat

SEQ ID NO: 2193135 - DNA, 25 bp, Homo sapien
gtgtaatgatgttatgaaagccgct

SEQ ID NO: 2193136 - DNA, 25 bp, Homo sapien
tgtcgaccttgtatagattcttctc

SEQ ID NO: 2193137 - DNA, 25 bp, Homo sapien
tatagcaaatattcccacacctgca

SEQ ID NO: 2193138 - DNA, 25 bp, Homo sapien
tcagagttgtgaagaatgtcgacct

SEQ ID NO: 2193139 - DNA, 25 bp, Homo sapien
tctgatggctaacatcccttctgct

SEQ ID NO: 2193140 - DNA, 25 bp, Homo sapien
cagagagtaccacaatccttgggca

SEQ ID NO: 2193141 - DNA, 25 bp, Homo sapien
tggtgtcagcctggaataatgctga

SEQ ID NO: 2193142 - DNA, 25 bp, Homo sapien
tgacatgccctgaagggacctctga

SEQ ID NO: 2193143 - DNA, 25 bp, Homo sapien
gcctaatgtcataggctggccctat

SEQ ID NO: 2193144 - DNA, 25 bp, Homo sapien
tgcagattcgaaaaacctgtctcca

SEQ ID NO: 2193145 - DNA, 25 bp, Homo sapien
tgcaagatgtactcgaaagaactgg

SEQ ID NO: 2193146 - DNA, 25 bp, Homo sapien
actctttagcggcagacaacagctg

SEQ ID NO: 2193147 - DNA, 25 bp, Homo sapien
gctgtactgtaaagagccttctcag

SEQ ID NO: 2193148 - DNA, 25 bp, Homo sapien
gctggctgtactgtaaagagccttc

SEQ ID NO: 2193149 - DNA, 25 bp, Homo sapien
ctactgtgagccctgggtaggctgc

SEQ ID NO: 2193150 - DNA, 25 bp, Homo sapien
tggctggctgtactgtaaagagcct

SEQ ID NO: 2193151 - DNA, 25 bp, Homo sapien
aaggcaattgaaccaatgaggagat

SEQ ID NO: 2193152 - DNA, 25 bp, Homo sapien
gaggagataatcttggaagagctga

SEQ ID NO: 2193153 - DNA, 25 bp, Homo sapien
ttacaaaaggcaattgaaccaatga

SEQ ID NO: 2193154 - DNA, 25 bp, Homo sapien
atgaggagataatcttggaagagct

SEQ ID NO: 2193155 - DNA, 25 bp, Homo sapien
cccaggaaggtcatcaccagagatc

SEQ ID NO: 2193156 - DNA, 25 bp, Homo sapien
tctgacgcatgaaaggtagctggac

SEQ ID NO: 2193157 - DNA, 25 bp, Homo sapien
ggtagctggactgccagcagatgcc

SEQ ID NO: 2193158 - DNA, 25 bp, Homo sapien
tcaccagagatctgacgcatgaaag

SEQ ID NO: 2193159 - DNA, 25 bp, Homo sapien
gggctggcactactgccacagccaa

SEQ ID NO: 2193160 - DNA, 25 bp, Homo sapien
gaaggacagagctcaagccagagtt

SEQ ID NO: 2193161 - DNA, 25 bp, Homo sapien
cattccagggctatgttcagcagct

SEQ ID NO: 2193162 - DNA, 25 bp, Homo sapien
ccaggtatggagaggctttgagaca

SEQ ID NO: 2193163 - DNA, 25 bp, Homo sapien
tctcttcggcagagggtgaattcct

SEQ ID NO: 2193164 - DNA, 25 bp, Homo sapien
tcatagagttccacccgtgttgtca

SEQ ID NO: 2193165 - DNA, 25 bp, Homo sapien
tctggagtcaaggtcaggaccctga

SEQ ID NO: 2193166 - DNA, 25 bp, Homo sapien
cctgaatgtgcatgaaagggaccac

SEQ ID NO: 2193167 - DNA, 25 bp, Homo sapien
gagctgacagctatcttcatgccta

SEQ ID NO: 2193168 - DNA, 25 bp, Homo sapien
tatgtcttgactaccctgagggtcc

SEQ ID NO: 2193169 - DNA, 25 bp, Homo sapien
atacgcccttgccagagtgccagag

SEQ ID NO: 2193170 - DNA, 25 bp, Homo sapien
tgaggcaggtatttcttcccctgtg

SEQ ID NO: 2193171 - DNA, 25 bp, Homo sapien
aagcttgggagggagacgttcataa

SEQ ID NO: 2193172 - DNA, 25 bp, Homo sapien
gagggagacgttcataatcacactg

SEQ ID NO: 2193173 - DNA, 25 bp, Homo sapien
tcacactgtcagtaatagattccat

SEQ ID NO: 2193174 - DNA, 25 bp, Homo sapien
gatatccacctccaaggtgagaatg

SEQ ID NO: 2193175 - DNA, 25 bp, Homo sapien
tcctataggcccattcctcaatctg

SEQ ID NO: 2193176 - DNA, 25 bp, Homo sapien
tgctgaactgttggtcaagctcttg

SEQ ID NO: 2193177 - DNA, 25 bp, Homo sapien
caactaggtcttgtactcttttgat

SEQ ID NO: 2193178 - DNA, 25 bp, Homo sapien
ttctggtccaaatggcctctcctat

SEQ ID NO: 2193179 - DNA, 25 bp, Homo sapien
ggcattgtgctctttgttctgggaa

SEQ ID NO: 2193180 - DNA, 25 bp, Homo sapien
gggcattgtgctctttgttctggga

SEQ ID NO: 2193181 - DNA, 25 bp, Homo sapien
cagagctatgctacctgttggcaaa

SEQ ID NO: 2193182 - DNA, 25 bp, Homo sapien
ttaactatggaacagagaaatttgt

SEQ ID NO: 2193183 - DNA, 25 bp, Homo sapien
ttgtgactgtctggaataaaattat

SEQ ID NO: 2193184 - DNA, 25 bp, Homo sapien
ccatgaaattgctacacttgtgaaa

SEQ ID NO: 2193185 - DNA, 25 bp, Homo sapien
cactcttttgcccacagctctttat

SEQ ID NO: 2193186 - DNA, 25 bp, Homo sapien
ctgcacttgtgtggcccacatgact

SEQ ID NO: 2193187 - DNA, 25 bp, Homo sapien
ctcatggtgaactgcactactgcac

SEQ ID NO: 2193188 - DNA, 25 bp, Homo sapien
tattttacactcttttgcccacagc

SEQ ID NO: 2193189 - DNA, 25 bp, Homo sapien
ttaagttcgatgaatctgtcatggg

SEQ ID NO: 2193190 - DNA, 25 bp, Homo sapien
agcatcatatcatccatgctgactg

SEQ ID NO: 2193191 - DNA, 25 bp, Homo sapien
cgatgatgggcctgaagaacagttc

SEQ ID NO: 2193192 - DNA, 25 bp, Homo sapien
tgaatgtacttcacgcactgcaggc

SEQ ID NO: 2193193 - DNA, 25 bp, Homo sapien
ccagtctacgttttcagaagcaacg

SEQ ID NO: 2193194 - DNA, 25 bp, Homo sapien
caccacagagtcctttgctagcttt

SEQ ID NO: 2193195 - DNA, 25 bp, Homo sapien
actatgtttctatgcacacgtttgc

SEQ ID NO: 2193196 - DNA, 25 bp, Homo sapien
gaagcaacgtgtccaagaatgaaac

SEQ ID NO: 2193197 - DNA, 25 bp, Homo sapien
gaaaacatcacgaattgtaccatga

SEQ ID NO: 2193198 - DNA, 25 bp, Homo sapien
agtaattagcagttgaccacttggt

SEQ ID NO: 2193199 - DNA, 25 bp, Homo sapien
gcagtatagtgtgataccgaagtaa

SEQ ID NO: 2193200 - DNA, 25 bp, Homo sapien
aaacacatgaccttttgcagtatag

SEQ ID NO: 2193201 - DNA, 25 bp, Homo sapien
taataatggtaataagcgagaggca

SEQ ID NO: 2193202 - DNA, 25 bp, Homo sapien
taatggtaataagcgagaggcactc

SEQ ID NO: 2193203 - DNA, 25 bp, Homo sapien
ttttaaaagcaccatgccaatcatc

SEQ ID NO: 2193204 - DNA, 25 bp, Homo sapien
tcacagagcagcagaaccagtgttc

SEQ ID NO: 2193205 - DNA, 25 bp, Homo sapien
tgtccagggagacgttcctccagtg

SEQ ID NO: 2193206 - DNA, 25 bp, Homo sapien
gattctaatagtgagaaacacccaa

SEQ ID NO: 2193207 - DNA, 25 bp, Homo sapien
gaaaattttgttcccacttcaatca

SEQ ID NO: 2193208 - DNA, 25 bp, Homo sapien
aaaggacgctggttgaagatgattc

SEQ ID NO: 2193209 - DNA, 25 bp, Homo sapien
actgaaaactcgttactgcccgcgc

SEQ ID NO: 2193210 - DNA, 25 bp, Homo sapien
ccctagataggcactgcccgatgct

SEQ ID NO: 2193211 - DNA, 25 bp, Homo sapien
ccgacactctcctgatcactgaaaa

SEQ ID NO: 2193212 - DNA, 25 bp, Homo sapien
cttttgtgagctgggaaaagccggc

SEQ ID NO: 2193213 - DNA, 25 bp, Homo sapien
gcaagtacttgacgaagcgcagcgt

SEQ ID NO: 2193214 - DNA, 25 bp, Homo sapien
taaagagcacggtccccttgaggta

SEQ ID NO: 2193215 - DNA, 25 bp, Homo sapien
cctctgcgcgaagtaggagcggtcc

SEQ ID NO: 2193216 - DNA, 25 bp, Homo sapien
agtctcgaactgcaagcggtcctgg

SEQ ID NO: 2193217 - DNA, 25 bp, Homo sapien
cccatgacctcggtggttcgaaggg

SEQ ID NO: 2193218 - DNA, 25 bp, Homo sapien
cctcggtctgggcaagggcgcggag

SEQ ID NO: 2193219 - DNA, 25 bp, Homo sapien
tatttatacctagcgcgcacgcagg

SEQ ID NO: 2193220 - DNA, 25 bp, Homo sapien
tgctgcgctccggtgtgttcgccca

SEQ ID NO: 2193221 - DNA, 25 bp, Homo sapien
caagttgcgatcttctatttgccac

SEQ ID NO: 2193222 - DNA, 25 bp, Homo sapien
gaccttctaggttctctggattgac

SEQ ID NO: 2193223 - DNA, 25 bp, Homo sapien
gagattgcgtgcttgtccttcacaa

SEQ ID NO: 2193224 - DNA, 25 bp, Homo sapien
tttgccactccgaaggaccttctag

SEQ ID NO: 2193225 - DNA, 25 bp, Homo sapien
aactgacttcatctttccactttcc

SEQ ID NO: 2193226 - DNA, 25 bp, Homo sapien
cttgaaaacatcacgagaaaactga

SEQ ID NO: 2193227 - DNA, 25 bp, Homo sapien
tgaaaacatcacgagaaaactgact

SEQ ID NO: 2193228 - DNA, 25 bp, Homo sapien
aaacatcacgagaaaactgacttca

SEQ ID NO: 2193229 - DNA, 25 bp, Homo sapien
tctgcctgcctgaatgcaaccttca

SEQ ID NO: 2193230 - DNA, 25 bp, Homo sapien
ggaatccattatctgctccaactca

SEQ ID NO: 2193231 - DNA, 25 bp, Homo sapien
ggacacctgttctgcggaatccatt

SEQ ID NO: 2193232 - DNA, 25 bp, Homo sapien
taaaattgaccttttcgcagcaagc

SEQ ID NO: 2193233 - DNA, 25 bp, Homo sapien
gaatcccacttgatatggagactgg

SEQ ID NO: 2193234 - DNA, 25 bp, Homo sapien
gatgtagtaacaaccccaggatttc

SEQ ID NO: 2193235 - DNA, 25 bp, Homo sapien
tatggagactggttgaagtgatgta

SEQ ID NO: 2193236 - DNA, 25 bp, Homo sapien
tgaaaagcatgttaccattatggtc

SEQ ID NO: 2193237 - DNA, 25 bp, Homo sapien
atagccaagtgtgatgtcaatgaca

SEQ ID NO: 2193238 - DNA, 25 bp, Homo sapien
tagccaagtgtgatgtcaatgacat

SEQ ID NO: 2193239 - DNA, 25 bp, Homo sapien
aacctgctctttcttgtgctctaaa

SEQ ID NO: 2193240 - DNA, 25 bp, Homo sapien
tgttccatgaacatcttcatatgcc

SEQ ID NO: 2193241 - DNA, 25 bp, Homo sapien
cttgtgctctaaatgttccatgaac

SEQ ID NO: 2193242 - DNA, 25 bp, Homo sapien
ttccatgaacatcttcatatgccat

SEQ ID NO: 2193243 - DNA, 25 bp, Homo sapien
catcatccatgtatttaccaccaaa

SEQ ID NO: 2193244 - DNA, 25 bp, Homo sapien
tccatcatccatgtatttaccacca

SEQ ID NO: 2193245 - DNA, 25 bp, Homo sapien
agatccatcatccatgtatttacca

SEQ ID NO: 2193246 - DNA, 25 bp, Homo sapien
tcatccatgtatttaccaccaaaaa

SEQ ID NO: 2193247 - DNA, 25 bp, Homo sapien
aacttgtgttgtgggtatagcggtc

SEQ ID NO: 2193248 - DNA, 25 bp, Homo sapien
tatagcggtcacagtgaaggtgaaa

SEQ ID NO: 2193249 - DNA, 25 bp, Homo sapien
tggcgagcaggacaaccagatgtag

SEQ ID NO: 2193250 - DNA, 25 bp, Homo sapien
taatttatgtaatggtaatcaagct

SEQ ID NO: 2193251 - DNA, 25 bp, Homo sapien
tgaggtatgtttctcgttttgtgag

SEQ ID NO: 2193252 - DNA, 25 bp, Homo sapien
atgaggtatgtttctcgttttgtga

SEQ ID NO: 2193253 - DNA, 25 bp, Homo sapien
ctcgttcctcaattcagcatcccca

SEQ ID NO: 2193254 - DNA, 25 bp, Homo sapien
ggaacctcacaagttgcccaaaaga

SEQ ID NO: 2193255 - DNA, 25 bp, Homo sapien
ccaccagcgggaacctcacaagttg

SEQ ID NO: 2193256 - DNA, 25 bp, Homo sapien
cagcgggaacctcacaagttgccca

SEQ ID NO: 2193257 - DNA, 25 bp, Homo sapien
caggtcctcattccatgacaccaaa

SEQ ID NO: 2193258 - DNA, 25 bp, Homo sapien
ccaaatttgtgtttcctctaccatc

SEQ ID NO: 2193259 - DNA, 25 bp, Homo sapien
tctaccatcagctggcatttcatgt

SEQ ID NO: 2193260 - DNA, 25 bp, Homo sapien
ggcatttcatgtttttgggttacca

SEQ ID NO: 2193261 - DNA, 25 bp, Homo sapien
tgcccatcagttgggttatactgac

SEQ ID NO: 2193262 - DNA, 25 bp, Homo sapien
gcgacccatttgtgagtcagcagca

SEQ ID NO: 2193263 - DNA, 25 bp, Homo sapien
tctccccatgcgcaaccaatttgcc

SEQ ID NO: 2193264 - DNA, 25 bp, Homo sapien
gttgggttatactgacaaggatgta

SEQ ID NO: 2193265 - DNA, 25 bp, Homo sapien
gtcctaacttgtctctgtctatcca

SEQ ID NO: 2193266 - DNA, 25 bp, Homo sapien
taacttgtctctgtctatccacttt

SEQ ID NO: 2193267 - DNA, 25 bp, Homo sapien
gagtgtcctaacttgtctctgtcta

SEQ ID NO: 2193268 - DNA, 25 bp, Homo sapien
ttgccagagtgtcctaacttgtctc

SEQ ID NO: 2193269 - DNA, 25 bp, Homo sapien
gacgctatgattgagagcctctcag

SEQ ID NO: 2193270 - DNA, 25 bp, Homo sapien
aagagtaggactggacgctatgatt

SEQ ID NO: 2193271 - DNA, 25 bp, Homo sapien
ccttctgggagggaccctgcaagag

SEQ ID NO: 2193272 - DNA, 25 bp, Homo sapien
ttctgggagggaccctgcaagagta

SEQ ID NO: 2193273 - DNA, 25 bp, Homo sapien
caagaccttgctccgtcactcaggt

SEQ ID NO: 2193274 - DNA, 25 bp, Homo sapien
caggttggagtgtattatagcgatc

SEQ ID NO: 2193275 - DNA, 25 bp, Homo sapien
acagcgcccagcactgactctgtta

SEQ ID NO: 2193276 - DNA, 25 bp, Homo sapien
tagctacaagcacaggcatttgcca

SEQ ID NO: 2193277 - DNA, 25 bp, Homo sapien
agaaggccttgacacatctgtgacc

SEQ ID NO: 2193278 - DNA, 25 bp, Homo sapien
tttccgggccactgaagaagacctg

SEQ ID NO: 2193279 - DNA, 25 bp, Homo sapien
tgaggcactgattcgaattgaccgt

SEQ ID NO: 2193280 - DNA, 25 bp, Homo sapien
tggccctaaggtcagcacactgagg

SEQ ID NO: 2193281 - DNA, 25 bp, Homo sapien
tagtgctttgaatctggtttgggga

SEQ ID NO: 2193282 - DNA, 25 bp, Homo sapien
gcttagtgctttgaatctggtttgg

SEQ ID NO: 2193283 - DNA, 25 bp, Homo sapien
cttagtgctttgaatctggtttggg

SEQ ID NO: 2193284 - DNA, 25 bp, Homo sapien
ctgcttagtgctttgaatctggttt

SEQ ID NO: 2193285 - DNA, 25 bp, Homo sapien
atttatgaagtttggcggtcattaa

SEQ ID NO: 2193286 - DNA, 25 bp, Homo sapien
aatttatgaagtttggcggtcatta

SEQ ID NO: 2193287 - DNA, 25 bp, Homo sapien
tttatgaagtttggcggtcattaaa

SEQ ID NO: 2193288 - DNA, 25 bp, Homo sapien
tgatcagtgtggtgagtatgatgcc

SEQ ID NO: 2193289 - DNA, 25 bp, Homo sapien
tagctcagtgagttttctcggtcca

SEQ ID NO: 2193290 - DNA, 25 bp, Homo sapien
ttgcctgtaagtcactagctcagtg

SEQ ID NO: 2193291 - DNA, 25 bp, Homo sapien
ggtccattaggtaacttcacaaagc

SEQ ID NO: 2193292 - DNA, 25 bp, Homo sapien
tctttatcttcctgatgtctgtcca

SEQ ID NO: 2193293 - DNA, 25 bp, Homo sapien
ttctttatcttcctgatgtctgtcc

SEQ ID NO: 2193294 - DNA, 25 bp, Homo sapien
ctttatcttcctgatgtctgtccat

SEQ ID NO: 2193295 - DNA, 25 bp, Homo sapien
caagccaattgacgcatttcctgca

SEQ ID NO: 2193296 - DNA, 25 bp, Homo sapien
cacattgggcctttcgagcttctgc

SEQ ID NO: 2193297 - DNA, 25 bp, Homo sapien
gagcttctgctaccaaccaagccaa

SEQ ID NO: 2193298 - DNA, 25 bp, Homo sapien
tctctgacccacattgggcctttcg

SEQ ID NO: 2193299 - DNA, 25 bp, Homo sapien
tcatagcaggaatgacacgcctctg

SEQ ID NO: 2193300 - DNA, 25 bp, Homo sapien
gcaggaatgacacgcctctggagct

SEQ ID NO: 2193301 - DNA, 25 bp, Homo sapien
ggaatgacacgcctctggagctcac

SEQ ID NO: 2193302 - DNA, 25 bp, Homo sapien
tagcaggaatgacacgcctctggag

SEQ ID NO: 2193303 - DNA, 25 bp, Homo sapien
caataacaacacaattctggagcct

SEQ ID NO: 2193304 - DNA, 25 bp, Homo sapien
taacaacacaattctggagcctgga

SEQ ID NO: 2193305 - DNA, 25 bp, Homo sapien
cctgatcacgtaaggggcagcagct

SEQ ID NO: 2193306 - DNA, 25 bp, Homo sapien
cttcctgatcatggtggtttcctga

SEQ ID NO: 2193307 - DNA, 25 bp, Homo sapien
tgctgcctcttatgtgatcaagagg

SEQ ID NO: 2193308 - DNA, 25 bp, Homo sapien
cttatgtgatcaagaggctcctggt

SEQ ID NO: 2193309 - DNA, 25 bp, Homo sapien
gaacctggctatcagggcagctgct

SEQ ID NO: 2193310 - DNA, 25 bp, Homo sapien
ctggttccagaactgtgttgttatt

SEQ ID NO: 2193311 - DNA, 25 bp, Homo sapien
catcaggaaaccaccacgatcaaga

SEQ ID NO: 2193312 - DNA, 25 bp, Homo sapien
ccacgatcaagaaactgctgctgtg

SEQ ID NO: 2193313 - DNA, 25 bp, Homo sapien
tgctgtgagctccagaggtgtgcca

SEQ ID NO: 2193314 - DNA, 25 bp, Homo sapien
accaccacgatcaagaaactgctgc

SEQ ID NO: 2193315 - DNA, 25 bp, Homo sapien
ttctaatctgaaagctggtagcctc

SEQ ID NO: 2193316 - DNA, 25 bp, Homo sapien
tggtagcctcaagaccaaggaatag

SEQ ID NO: 2193317 - DNA, 25 bp, Homo sapien
tctcaggttgagttcgaaggcaaga

SEQ ID NO: 2193318 - DNA, 25 bp, Homo sapien
caaggaatagccaatgtctcaggtt

SEQ ID NO: 2193319 - DNA, 25 bp, Homo sapien
tctagattacagaaggaacccagta

SEQ ID NO: 2193320 - DNA, 25 bp, Homo sapien
caaatgtctacgtcctaatccgcgg

SEQ ID NO: 2193321 - DNA, 25 bp, Homo sapien
aaaacattagttagccgtggtggca

SEQ ID NO: 2193322 - DNA, 25 bp, Homo sapien
cacaggttggtcctctctgaatcca

SEQ ID NO: 2193323 - DNA, 25 bp, Homo sapien
tcgtgggagttcaaaagcaggcagc

SEQ ID NO: 2193324 - DNA, 25 bp, Homo sapien
tagtttgacaatccctgagccagag

SEQ ID NO: 2193325 - DNA, 25 bp, Homo sapien
tgttccaaggacatggaagacccct

SEQ ID NO: 2193326 - DNA, 25 bp, Homo sapien
gaatttgatatcatgggaccctaca

SEQ ID NO: 2193327 - DNA, 25 bp, Homo sapien
tacctttaaatgatctgatacagaa

SEQ ID NO: 2193328 - DNA, 25 bp, Homo sapien
tgaccctatctttctacccaaatat

SEQ ID NO: 2193329 - DNA, 25 bp, Homo sapien
gccttctacagtccatctccttcaa

SEQ ID NO: 2193330 - DNA, 25 bp, Homo sapien
caatatacctttaaatgatctgata

SEQ ID NO: 2193331 - DNA, 25 bp, Homo sapien
cgagacagtaatggaagcatcctct

SEQ ID NO: 2193332 - DNA, 25 bp, Homo sapien
tgattcacacatgacttccagctga

SEQ ID NO: 2193333 - DNA, 25 bp, Homo sapien
taaatggataaagtgttgcttcatg

SEQ ID NO: 2193334 - DNA, 25 bp, Homo sapien
caagtgtaatattatgagatttctc

SEQ ID NO: 2193335 - DNA, 25 bp, Homo sapien
cctccatgggtaaaggaatctcaga

SEQ ID NO: 2193336 - DNA, 25 bp, Homo sapien
gaaacacggtgtccataatgtactg

SEQ ID NO: 2193337 - DNA, 25 bp, Homo sapien
cactgaattaatggccatcacctgg

SEQ ID NO: 2193338 - DNA, 25 bp, Homo sapien
catgatgagttcagacgccagaatc

SEQ ID NO: 2193339 - DNA, 25 bp, Homo sapien
gattgacagtgagtactttcccacc

SEQ ID NO: 2193340 - DNA, 25 bp, Homo sapien
tctaaaacttagacgcacatccaag

SEQ ID NO: 2193341 - DNA, 25 bp, Homo sapien
tagactacaaaccagggaccagatg

SEQ ID NO: 2193342 - DNA, 25 bp, Homo sapien
cagtatggctacatgatgacaacca

SEQ ID NO: 2193343 - DNA, 25 bp, Homo sapien
cttgcaggcagtaggaatttatatt

SEQ ID NO: 2193344 - DNA, 25 bp, Homo sapien
cacttgcaggcagtaggaatttata

SEQ ID NO: 2193345 - DNA, 25 bp, Homo sapien
gcaggcagtaggaatttatattggg

SEQ ID NO: 2193346 - DNA, 25 bp, Homo sapien
cttccacttgcaggcagtaggaatt

SEQ ID NO: 2193347 - DNA, 25 bp, Homo sapien
cacttatgatatggatgtttgacac

SEQ ID NO: 2193348 - DNA, 25 bp, Homo sapien
tgtttgacacagacttcaaatactc

SEQ ID NO: 2193349 - DNA, 25 bp, Homo sapien
aaattccacttatgatatggatgtt

SEQ ID NO: 2193350 - DNA, 25 bp, Homo sapien
gatatggatgtttgacacagacttc

SEQ ID NO: 2193351 - DNA, 25 bp, Homo sapien
tcaagctcagaaacaatcttcttct

SEQ ID NO: 2193352 - DNA, 25 bp, Homo sapien
gaaacaatcttcttctcacactgac

SEQ ID NO: 2193353 - DNA, 25 bp, Homo sapien
ccagaagcttctcaagctcagaaac

SEQ ID NO: 2193354 - DNA, 25 bp, Homo sapien
cctccagaagcttctcaagctcaga

SEQ ID NO: 2193355 - DNA, 25 bp, Homo sapien
cttcactaaccaatctgctcatctg

SEQ ID NO: 2193356 - DNA, 25 bp, Homo sapien
gcaactgaccaaacagagagatgaa

SEQ ID NO: 2193357 - DNA, 25 bp, Homo sapien
tctgatccggcagaaacacagcaac

SEQ ID NO: 2193358 - DNA, 25 bp, Homo sapien
agatgaacaagccagccaatgctct

SEQ ID NO: 2193359 - DNA, 25 bp, Homo sapien
tcactgatgagaccagtagactgag

SEQ ID NO: 2193360 - DNA, 25 bp, Homo sapien
cagtagactgagctgctcagtgcaa

SEQ ID NO: 2193361 - DNA, 25 bp, Homo sapien
ttctttttataattggtcccatgga

SEQ ID NO: 2193362 - DNA, 25 bp, Homo sapien
attggtcccatggaaaaagagttgt

SEQ ID NO: 2193363 - DNA, 25 bp, Homo sapien
accagcatttgttatagcctttcta

SEQ ID NO: 2193364 - DNA, 25 bp, Homo sapien
ttttatgctacacacaagaaatcag

SEQ ID NO: 2193365 - DNA, 25 bp, Homo sapien
cagcagtccgattgctggatcttat

SEQ ID NO: 2193366 - DNA, 25 bp, Homo sapien
cagcatttgttatagcctttctaga

SEQ ID NO: 2193367 - DNA, 25 bp, Homo sapien
ttatggtgggttaccaagaactcgc

SEQ ID NO: 2193368 - DNA, 25 bp, Homo sapien
ccaagaactcgcctggaagtacaat

SEQ ID NO: 2193369 - DNA, 25 bp, Homo sapien
gttaccaagaactcgcctggaagta

SEQ ID NO: 2193370 - DNA, 25 bp, Homo sapien
tgggttaccaagaactcgcctggaa

SEQ ID NO: 2193371 - DNA, 25 bp, Homo sapien
gtggtctatgtcacactgagcatat

SEQ ID NO: 2193372 - DNA, 25 bp, Homo sapien
tcacactgagcatatgacagacacc

SEQ ID NO: 2193373 - DNA, 25 bp, Homo sapien
gacagacacccatcaaagaacacac

SEQ ID NO: 2193374 - DNA, 25 bp, Homo sapien
tgagcatatgacagacacccatcaa

SEQ ID NO: 2193375 - DNA, 25 bp, Homo sapien
caccggaaaaatcatggatctgaca

SEQ ID NO: 2193376 - DNA, 25 bp, Homo sapien
caataattagtcgtcttggggtgta

SEQ ID NO: 2193377 - DNA, 25 bp, Homo sapien
catggatctgacaataaaaccattt

SEQ ID NO: 2193378 - DNA, 25 bp, Homo sapien
gaagaccagggcaccggaaaaatca

SEQ ID NO: 2193379 - DNA, 25 bp, Homo sapien
ttttctcagtcttacttcctgagtc

SEQ ID NO: 2193380 - DNA, 25 bp, Homo sapien
cttttctcagtcttacttcctgagt

SEQ ID NO: 2193381 - DNA, 25 bp, Homo sapien
ctgtcctttccacaggaaccctcat

SEQ ID NO: 2193382 - DNA, 25 bp, Homo sapien
ctgagtcccttccttgacgacaggc

SEQ ID NO: 2193383 - DNA, 25 bp, Homo sapien
actctctcaagcaggactaagagcc

SEQ ID NO: 2193384 - DNA, 25 bp, Homo sapien
agacactctctcaagcaggactaag

SEQ ID NO: 2193385 - DNA, 25 bp, Homo sapien
gtaactcttcgaaagacactctctc

SEQ ID NO: 2193386 - DNA, 25 bp, Homo sapien
tgggcgagtaactcttcgaaagaca

SEQ ID NO: 2193387 - DNA, 25 bp, Homo sapien
aaaagactagactatccattattga

SEQ ID NO: 2193388 - DNA, 25 bp, Homo sapien
aaaaagactagactatccattattg

SEQ ID NO: 2193389 - DNA, 25 bp, Homo sapien
aatgtaattacaaggtcctcctcaa

SEQ ID NO: 2193390 - DNA, 25 bp, Homo sapien
attacaaggtcctcctcaaaagtgc

SEQ ID NO: 2193391 - DNA, 25 bp, Homo sapien
tagtcttggaccagtgctcgctgtc

SEQ ID NO: 2193392 - DNA, 25 bp, Homo sapien
tctgatctataaccctgtagctgtg

SEQ ID NO: 2193393 - DNA, 25 bp, Homo sapien
ttactcaagcctgaccaaagcgcat

SEQ ID NO: 2193394 - DNA, 25 bp, Homo sapien
gcaggccctgaggaccttcaataac

SEQ ID NO: 2193395 - DNA, 25 bp, Homo sapien
tatccctacatctaagtggaagggc

SEQ ID NO: 2193396 - DNA, 25 bp, Homo sapien
tcctgaactttagatgagttgtgca

SEQ ID NO: 2193397 - DNA, 25 bp, Homo sapien
gtggaagggcttcaaacttctctta

SEQ ID NO: 2193398 - DNA, 25 bp, Homo sapien
tctcttagggttgtagtcctgaact

SEQ ID NO: 2193399 - DNA, 25 bp, Homo sapien
catcacaagggcagcaatagccttc

SEQ ID NO: 2193400 - DNA, 25 bp, Homo sapien
tgtgctggtaatccatcctctcctg

SEQ ID NO: 2193401 - DNA, 25 bp, Homo sapien
tatctggatctcctgccaactttcc

SEQ ID NO: 2193402 - DNA, 25 bp, Homo sapien
acatcagtcagaaccaagtccccat

SEQ ID NO: 2193403 - DNA, 25 bp, Homo sapien
ccacggcataggcttgatgaaggta

SEQ ID NO: 2193404 - DNA, 25 bp, Homo sapien
tgatgaaggtaaagactgagaaggg

SEQ ID NO: 2193405 - DNA, 25 bp, Homo sapien
ttgcaataaaggtgtgtttgtttat

SEQ ID NO: 2193406 - DNA, 25 bp, Homo sapien
atcattggtggccacggcataggct

SEQ ID NO: 2193407 - DNA, 25 bp, Homo sapien
tcaatatttatcttacccagtgcac

SEQ ID NO: 2193408 - DNA, 25 bp, Homo sapien
tgaaacactgagtattgagatgtgc

SEQ ID NO: 2193409 - DNA, 25 bp, Homo sapien
tccattctaattcatcctatttcaa

SEQ ID NO: 2193410 - DNA, 25 bp, Homo sapien
gagccaataacacctgctaggattg

SEQ ID NO: 2193411 - DNA, 25 bp, Homo sapien
cactgtgtaaaagtagactgccctt

SEQ ID NO: 2193412 - DNA, 25 bp, Homo sapien
ccctgggcatgggagatcttgccac

SEQ ID NO: 2193413 - DNA, 25 bp, Homo sapien
tgtaaaagtagactgcccttgttcc

SEQ ID NO: 2193414 - DNA, 25 bp, Homo sapien
gggcatgggagatcttgccacctcc

SEQ ID NO: 2193415 - DNA, 25 bp, Homo sapien
ttttagcaaggtcaaggccaagttc

SEQ ID NO: 2193416 - DNA, 25 bp, Homo sapien
tactacctcgctattgactttgtga

SEQ ID NO: 2193417 - DNA, 25 bp, Homo sapien
cactctgcttcgagggatgcatgct

SEQ ID NO: 2193418 - DNA, 25 bp, Homo sapien
caagttcttctagcgtctaaaagga

SEQ ID NO: 2193419 - DNA, 25 bp, Homo sapien
gagcatcagaggtccctccctctga

SEQ ID NO: 2193420 - DNA, 25 bp, Homo sapien
ttctgcatgcttcatcaaggatgct

SEQ ID NO: 2193421 - DNA, 25 bp, Homo sapien
ttacatgcctgaacacacatagtag

SEQ ID NO: 2193422 - DNA, 25 bp, Homo sapien
tatatcaagatatatagcctctagg

SEQ ID NO: 2193423 - DNA, 25 bp, Homo sapien
ggatcctatttcttagttctcctaa

SEQ ID NO: 2193424 - DNA, 25 bp, Homo sapien
tccttaatatcattaaatattgcct

SEQ ID NO: 2193425 - DNA, 25 bp, Homo sapien
taaaattaaggttgtcaagtctaca

SEQ ID NO: 2193426 - DNA, 25 bp, Homo sapien
aaatattgccttgagttaatgtgtc

SEQ ID NO: 2193427 - DNA, 25 bp, Homo sapien
atcacgtagcccaatctccattttg

SEQ ID NO: 2193428 - DNA, 25 bp, Homo sapien
taactaaccaagagtagagccctca

SEQ ID NO: 2193429 - DNA, 25 bp, Homo sapien
gtattgagaggtttcaacagcctgc

SEQ ID NO: 2193430 - DNA, 25 bp, Homo sapien
tagcaaagtactaatgaacttgagc

SEQ ID NO: 2193431 - DNA, 25 bp, Homo sapien
caaatgaatcattgtcaaaccaagt

SEQ ID NO: 2193432 - DNA, 25 bp, Homo sapien
tcctatatagtctgaattcgttttc

SEQ ID NO: 2193433 - DNA, 25 bp, Homo sapien
tctgctctgttctgtatttgtgtag

SEQ ID NO: 2193434 - DNA, 25 bp, Homo sapien
cagagagacgctagatcatatgaca

SEQ ID NO: 2193435 - DNA, 25 bp, Homo sapien
gctaacctagcggtctcagcaacaa

SEQ ID NO: 2193436 - DNA, 25 bp, Homo sapien
ggaataatgctagactggtaaaact

SEQ ID NO: 2193437 - DNA, 25 bp, Homo sapien
gctgatttgggaacaataagataca

SEQ ID NO: 2193438 - DNA, 25 bp, Homo sapien
gcatactaatatgttaacggtgtag

SEQ ID NO: 2193439 - DNA, 25 bp, Homo sapien
cctcagattaatgcggagggtacat

SEQ ID NO: 2193440 - DNA, 25 bp, Homo sapien
tactgccacactgtcaggtatagct

SEQ ID NO: 2193441 - DNA, 25 bp, Homo sapien
tgaaaacgaccttagtgcacgggag

SEQ ID NO: 2193442 - DNA, 25 bp, Homo sapien
ttcggctgccaagcatattgggctt

SEQ ID NO: 2193443 - DNA, 25 bp, Homo sapien
aagaaataaaaatgtctccttctag

SEQ ID NO: 2193444 - DNA, 25 bp, Homo sapien
agaaataaaaatgtctccttctagt

SEQ ID NO: 2193445 - DNA, 25 bp, Homo sapien
tggtactaagaacatctcagcaaac

SEQ ID NO: 2193446 - DNA, 25 bp, Homo sapien
tgtttcactccaacttccaagcaag

SEQ ID NO: 2193447 - DNA, 25 bp, Homo sapien
gcaagcatgtcttccagtcactggc

SEQ ID NO: 2193448 - DNA, 25 bp, Homo sapien
taaagccctactgcagtttaatgtg

SEQ ID NO: 2193449 - DNA, 25 bp, Homo sapien
caggtgaccctagtatcttctgtag

SEQ ID NO: 2193450 - DNA, 25 bp, Homo sapien
cttgggcttttttatagtgagtagc

SEQ ID NO: 2193451 - DNA, 25 bp, Homo sapien
tctcttctgcttggatgaccacagg

SEQ ID NO: 2193452 - DNA, 25 bp, Homo sapien
catggtaatgttaatcggagcaagg

SEQ ID NO: 2193453 - DNA, 25 bp, Homo sapien
tattttatacactgagggtagccca

SEQ ID NO: 2193454 - DNA, 25 bp, Homo sapien
gacatattttggatcctattgaggg

SEQ ID NO: 2193455 - DNA, 25 bp, Homo sapien
taacagggctggtcttaagtgaacc

SEQ ID NO: 2193456 - DNA, 25 bp, Homo sapien
cagctgtatacatttttgggcaacg

SEQ ID NO: 2193457 - DNA, 25 bp, Homo sapien
tacacagtgaccaaacctgaatttg

SEQ ID NO: 2193458 - DNA, 25 bp, Homo sapien
gtatgccactgactacccattcctg

SEQ ID NO: 2193459 - DNA, 25 bp, Homo sapien
cagatgaaagggataatgacccaaa

SEQ ID NO: 2193460 - DNA, 25 bp, Homo sapien
cctgccagctttcgaacagatgaaa

SEQ ID NO: 2193461 - DNA, 25 bp, Homo sapien
tctgggaattctcaagatcctttac

SEQ ID NO: 2193462 - DNA, 25 bp, Homo sapien
tatttctgggaattctcaagatcct

SEQ ID NO: 2193463 - DNA, 25 bp, Homo sapien
aagtatttctgggaattctcaagat

SEQ ID NO: 2193464 - DNA, 25 bp, Homo sapien
ctagaccaagtatttctgggaattc

SEQ ID NO: 2193465 - DNA, 25 bp, Homo sapien
aagggctaccatggccagataagct

SEQ ID NO: 2193466 - DNA, 25 bp, Homo sapien
catggccagataagctgggatccca

SEQ ID NO: 2193467 - DNA, 25 bp, Homo sapien
gctgaagttcgcagctgtgccttca

SEQ ID NO: 2193468 - DNA, 25 bp, Homo sapien
tgtgccttcatgtccatctgcgatg

SEQ ID NO: 2193469 - DNA, 25 bp, Homo sapien
cagaatattcaagtcccagctccat

SEQ ID NO: 2193470 - DNA, 25 bp, Homo sapien
ttacctggcatgtttgagctaagcc

SEQ ID NO: 2193471 - DNA, 25 bp, Homo sapien
tgtaaggctcctcacccatatgagt

SEQ ID NO: 2193472 - DNA, 25 bp, Homo sapien
cgtggccgatacagagtttgactcc

SEQ ID NO: 2193473 - DNA, 25 bp, Homo sapien
tcagctggttacaatgggtacatac

SEQ ID NO: 2193474 - DNA, 25 bp, Homo sapien
tggaatacttctgatccaactcttt

SEQ ID NO: 2193475 - DNA, 25 bp, Homo sapien
gttacacatcagcttggccttggaa

SEQ ID NO: 2193476 - DNA, 25 bp, Homo sapien
cagcttggccttggaatacttctga

SEQ ID NO: 2193477 - DNA, 25 bp, Homo sapien
ggaatacttctgatccaactctttc

SEQ ID NO: 2193478 - DNA, 25 bp, Homo sapien
tcccatttgcccacggctcagagtt

SEQ ID NO: 2193479 - DNA, 25 bp, Homo sapien
gacttggtttgcaggttgactttca

SEQ ID NO: 2193480 - DNA, 25 bp, Homo sapien
tggaattgtgtgctggccgacactg

SEQ ID NO: 2193481 - DNA, 25 bp, Homo sapien
gagagcctattctccagtccttaaa

SEQ ID NO: 2193482 - DNA, 25 bp, Homo sapien
tgccacatgtgaccatttgattcat

SEQ ID NO: 2193483 - DNA, 25 bp, Homo sapien
ctgccacatgtgaccatttgattca

SEQ ID NO: 2193484 - DNA, 25 bp, Homo sapien
gaaatctccatcataaaacattacc

SEQ ID NO: 2193485 - DNA, 25 bp, Homo sapien
cataaaacattacctggtcaacatt

SEQ ID NO: 2193486 - DNA, 25 bp, Homo sapien
tctttgaaatctccatcataaaaca

SEQ ID NO: 2193487 - DNA, 25 bp, Homo sapien
ccatcataaaacattacctggtcaa

SEQ ID NO: 2193488 - DNA, 25 bp, Homo sapien
aatctttgactttccgaatatgtac

SEQ ID NO: 2193489 - DNA, 25 bp, Homo sapien
taaaagagacatggtatttacaaga

SEQ ID NO: 2193490 - DNA, 25 bp, Homo sapien
ggtacgatgcatgcagagcctttta

SEQ ID NO: 2193491 - DNA, 25 bp, Homo sapien
tgtactgtttggaggtacgatgcat

SEQ ID NO: 2193492 - DNA, 25 bp, Homo sapien
taatctctgaatgcccaagccatgc

SEQ ID NO: 2193493 - DNA, 25 bp, Homo sapien
gacacacacggtaacatggactcat

SEQ ID NO: 2193494 - DNA, 25 bp, Homo sapien
tagtcaggcctatatgttaccagat

SEQ ID NO: 2193495 - DNA, 25 bp, Homo sapien
tacagtagtggtgcaacacagacag

SEQ ID NO: 2193496 - DNA, 25 bp, Homo sapien
tccgatttatatcctaccacttcca

SEQ ID NO: 2193497 - DNA, 25 bp, Homo sapien
gaaacaagaagtgcaccagctgatc

SEQ ID NO: 2193498 - DNA, 25 bp, Homo sapien
gcagccaggcgtcatccgatttata

SEQ ID NO: 2193499 - DNA, 25 bp, Homo sapien
ccaattgtctgtacataccaactga

SEQ ID NO: 2193500 - DNA, 25 bp, Homo sapien
gatctgaactgcctgtagagactca

SEQ ID NO: 2193501 - DNA, 25 bp, Homo sapien
gtttccagcgatgcaccctagtgag

SEQ ID NO: 2193502 - DNA, 25 bp, Homo sapien
tacagaacagtaggacggctagact

SEQ ID NO: 2193503 - DNA, 25 bp, Homo sapien
gaaacctgatgggagcgtctatgga

SEQ ID NO: 2193504 - DNA, 25 bp, Homo sapien
gttttccagagagcggtgaccaggt

SEQ ID NO: 2193505 - DNA, 25 bp, Homo sapien
tcactgtgctactggcaaagcgcag

SEQ ID NO: 2193506 - DNA, 25 bp, Homo sapien
ggattccaccacagaagagctcttg

SEQ ID NO: 2193507 - DNA, 25 bp, Homo sapien
tccccgctgtgcaatcgaaaatgaa

SEQ ID NO: 2193508 - DNA, 25 bp, Homo sapien
caggtgtaccgtggcatctcgcact

SEQ ID NO: 2193509 - DNA, 25 bp, Homo sapien
ggtgtaccgtggcatctcgcactgc

SEQ ID NO: 2193510 - DNA, 25 bp, Homo sapien
aggtgtaccgtggcatctcgcactg

SEQ ID NO: 2193511 - DNA, 25 bp, Homo sapien
tcaggtgtaccgtggcatctcgcac

SEQ ID NO: 2193512 - DNA, 25 bp, Homo sapien
ggtgcagctatcacaattccatgga

SEQ ID NO: 2193513 - DNA, 25 bp, Homo sapien
tccgaggactttgtgtggagccagt

SEQ ID NO: 2193514 - DNA, 25 bp, Homo sapien
tagtcttcatctcgaggttgtgtcc

SEQ ID NO: 2193515 - DNA, 25 bp, Homo sapien
ccatggagccccttcgtagtcttca

SEQ ID NO: 2193516 - DNA, 25 bp, Homo sapien
aaactctggacacacaagtacaaac

SEQ ID NO: 2193517 - DNA, 25 bp, Homo sapien
ttcgggcttttctctcaattgtgca

SEQ ID NO: 2193518 - DNA, 25 bp, Homo sapien
ctgctgcctgggtgtcatggatgtc

SEQ ID NO: 2193519 - DNA, 25 bp, Homo sapien
tggaggtcacgctaattcttcgggc

SEQ ID NO: 2193520 - DNA, 25 bp, Homo sapien
tcatggatgtctgcctgtactttgg

SEQ ID NO: 2193521 - DNA, 25 bp, Homo sapien
tatatactgacaaccacgtgctccc

SEQ ID NO: 2193522 - DNA, 25 bp, Homo sapien
caattacctatgtgtgcagaagccc

SEQ ID NO: 2193523 - DNA, 25 bp, Homo sapien
gaagctgtctaagcccactgaagag

SEQ ID NO: 2193524 - DNA, 25 bp, Homo sapien
cagtgctcagatcgtgggacaccaa

SEQ ID NO: 2193525 - DNA, 25 bp, Homo sapien
aaatctggcactcggcagtcatcca

SEQ ID NO: 2193526 - DNA, 25 bp, Homo sapien
tcggcaagaaactgcatatgatgct

SEQ ID NO: 2193527 - DNA, 25 bp, Homo sapien
tacacctcagtgactttcggcaaga

SEQ ID NO: 2193528 - DNA, 25 bp, Homo sapien
tttccaatgcactcccttagacagg

SEQ ID NO: 2193529 - DNA, 25 bp, Homo sapien
ttgacatttatttctatcgtatttg

SEQ ID NO: 2193530 - DNA, 25 bp, Homo sapien
catttatttctatcgtatttgtgac

SEQ ID NO: 2193531 - DNA, 25 bp, Homo sapien
gacatttatttctatcgtatttgtg

SEQ ID NO: 2193532 - DNA, 25 bp, Homo sapien
ttatttctatcgtatttgtgacatt

SEQ ID NO: 2193533 - DNA, 25 bp, Homo sapien
ttttttagatggcttgggtggtaca

SEQ ID NO: 2193534 - DNA, 25 bp, Homo sapien
ttcatggcttttggatcaaagtttc

SEQ ID NO: 2193535 - DNA, 25 bp, Homo sapien
tttagatggcttgggtggtacaact

SEQ ID NO: 2193536 - DNA, 25 bp, Homo sapien
caactgggccaggttctatgttgtc

SEQ ID NO: 2193537 - DNA, 25 bp, Homo sapien
taagcagacaattcaaccgatggga

SEQ ID NO: 2193538 - DNA, 25 bp, Homo sapien
ttcatcgctgtgagaaaagacccaa

SEQ ID NO: 2193539 - DNA, 25 bp, Homo sapien
ttaagggtacctgactagattgctc

SEQ ID NO: 2193540 - DNA, 25 bp, Homo sapien
gaaatgcctaagtatcccaaagagc

SEQ ID NO: 2193541 - DNA, 25 bp, Homo sapien
cagcctactagtcaaaagtatgcag

SEQ ID NO: 2193542 - DNA, 25 bp, Homo sapien
catcagtcagtatattttccacaga

SEQ ID NO: 2193543 - DNA, 25 bp, Homo sapien
ccatctctaatctggtgagttgggt

SEQ ID NO: 2193544 - DNA, 25 bp, Homo sapien
atctggtgagttgggtaaatgaaag

SEQ ID NO: 2193545 - DNA, 25 bp, Homo sapien
gaacttgatgaaactgccgaagtaa

SEQ ID NO: 2193546 - DNA, 25 bp, Homo sapien
tccccaaatctgatccatgaccatg

SEQ ID NO: 2193547 - DNA, 25 bp, Homo sapien
cccaggattgtaatcttacggataa

SEQ ID NO: 2193548 - DNA, 25 bp, Homo sapien
taagcagcttaaaataccacactat

SEQ ID NO: 2193549 - DNA, 25 bp, Homo sapien
caacatttatctggagttgtctgtt

SEQ ID NO: 2193550 - DNA, 25 bp, Homo sapien
gaaggaggtcaacttctttcagtgt

SEQ ID NO: 2193551 - DNA, 25 bp, Homo sapien
ctctagattgaaggaggtcaacttc

SEQ ID NO: 2193552 - DNA, 25 bp, Homo sapien
tcagtgtacagtcaacatttatctg

SEQ ID NO: 2193553 - DNA, 25 bp, Homo sapien
gtttatcagtaagattcctatgtcc

SEQ ID NO: 2193554 - DNA, 25 bp, Homo sapien
ttccaaagatagtagaaccactcga

SEQ ID NO: 2193555 - DNA, 25 bp, Homo sapien
tcatcaacaggctcatttccaaaga

SEQ ID NO: 2193556 - DNA, 25 bp, Homo sapien
cgatcttactaagggtttatcagta

SEQ ID NO: 2193557 - DNA, 25 bp, Homo sapien
cttcaatatcttccgcaatcagagg

SEQ ID NO: 2193558 - DNA, 25 bp, Homo sapien
tatgctctacaggtacctaaaggtt

SEQ ID NO: 2193559 - DNA, 25 bp, Homo sapien
tatttagcagggattatcacacagc

SEQ ID NO: 2193560 - DNA, 25 bp, Homo sapien
tactacgggtggattcccatatggg

SEQ ID NO: 2193561 - DNA, 25 bp, Homo sapien
agctgactcttctgagccgtctctg

SEQ ID NO: 2193562 - DNA, 25 bp, Homo sapien
taacttcagacttcaaccgctctag

SEQ ID NO: 2193563 - DNA, 25 bp, Homo sapien
tctctgcatcaggtcatgctccata

SEQ ID NO: 2193564 - DNA, 25 bp, Homo sapien
cgtagggatcgcagtggtgcagctg

SEQ ID NO: 2193565 - DNA, 25 bp, Homo sapien
ccttgctcgttgatgtaacagcaag

SEQ ID NO: 2193566 - DNA, 25 bp, Homo sapien
cttgctcgttgatgtaacagcaagg

SEQ ID NO: 2193567 - DNA, 25 bp, Homo sapien
cactgaaatgggctgaataggttct

SEQ ID NO: 2193568 - DNA, 25 bp, Homo sapien
taggcatagtcatctgatccagaac

SEQ ID NO: 2193569 - DNA, 25 bp, Homo sapien
gctgcagagcgctcttcttggtcca

SEQ ID NO: 2193570 - DNA, 25 bp, Homo sapien
tcagtcgttgctcggcctacggtaa

SEQ ID NO: 2193571 - DNA, 25 bp, Homo sapien
tccctcttgaaggagaacttgaagg

SEQ ID NO: 2193572 - DNA, 25 bp, Homo sapien
ttgggtttggtatcactcgaggaga

SEQ ID NO: 2193573 - DNA, 25 bp, Homo sapien
cacaggattaacactaaatggaggt

SEQ ID NO: 2193574 - DNA, 25 bp, Homo sapien
gactcctattaattgctgtcccagg

SEQ ID NO: 2193575 - DNA, 25 bp, Homo sapien
ccaggagacccatagagattgcttg

SEQ ID NO: 2193576 - DNA, 25 bp, Homo sapien
tagctactaggagaatggataccca

SEQ ID NO: 2193577 - DNA, 25 bp, Homo sapien
tgaaggcccttgcatagcagacgga

SEQ ID NO: 2193578 - DNA, 25 bp, Homo sapien
gagctatgtaccagtgttcgaccac

SEQ ID NO: 2193579 - DNA, 25 bp, Homo sapien
agacaccacgccctctggaatttca

SEQ ID NO: 2193580 - DNA, 25 bp, Homo sapien
ccacgccctctggaatttcagggaa

SEQ ID NO: 2193581 - DNA, 25 bp, Homo sapien
cagggaaacgttgtcgaagatcatg

SEQ ID NO: 2193582 - DNA, 25 bp, Homo sapien
ttcagggaaacgttgtcgaagatca

SEQ ID NO: 2193583 - DNA, 25 bp, Homo sapien
tcaagctgtgggctgctttgcgcca

SEQ ID NO: 2193584 - DNA, 25 bp, Homo sapien
ctgaatatcaagctgtgggctgctt

SEQ ID NO: 2193585 - DNA, 25 bp, Homo sapien
caagctgtgggctgctttgcgccat

SEQ ID NO: 2193586 - DNA, 25 bp, Homo sapien
atatcaagctgtgggctgctttgcg

SEQ ID NO: 2193587 - DNA, 25 bp, Homo sapien
ccaagtttctcttaggaaatggatg

SEQ ID NO: 2193588 - DNA, 25 bp, Homo sapien
cagagcaaatggtggccaagtttct

SEQ ID NO: 2193589 - DNA, 25 bp, Homo sapien
gaaatggatgttaaccggctttcca

SEQ ID NO: 2193590 - DNA, 25 bp, Homo sapien
aagtaatgatcttctagcaccacag

SEQ ID NO: 2193591 - DNA, 25 bp, Homo sapien
tgatcctgatcctatactaaaaggg

SEQ ID NO: 2193592 - DNA, 25 bp, Homo sapien
gatgaacatcaccaatgagggccag

SEQ ID NO: 2193593 - DNA, 25 bp, Homo sapien
caggcctccagatgtgacaccatga

SEQ ID NO: 2193594 - DNA, 25 bp, Homo sapien
tctggatgaagagtaggaaatacac

SEQ ID NO: 2193595 - DNA, 25 bp, Homo sapien
tcagtactcctcaagaacaaaagtc

SEQ ID NO: 2193596 - DNA, 25 bp, Homo sapien
cataacaaccaactgtgatggggtt

SEQ ID NO: 2193597 - DNA, 25 bp, Homo sapien
taacaaccaactgtgatggggtttc

SEQ ID NO: 2193598 - DNA, 25 bp, Homo sapien
ctgatcagtactcctcaagaacaaa

SEQ ID NO: 2193599 - DNA, 25 bp, Homo sapien
ctcaagatggtttatcaaccctggc

SEQ ID NO: 2193600 - DNA, 25 bp, Homo sapien
ttttattcacatctccagctctgaa

SEQ ID NO: 2193601 - DNA, 25 bp, Homo sapien
caacttcttttcagtagtctagaaa

SEQ ID NO: 2193602 - DNA, 25 bp, Homo sapien
atcaaccctggcacagaaattttat

SEQ ID NO: 2193603 - DNA, 25 bp, Homo sapien
cacaatccacggtcaaaaacttgaa

SEQ ID NO: 2193604 - DNA, 25 bp, Homo sapien
taattcatccagtttgacacaacac

SEQ ID NO: 2193605 - DNA, 25 bp, Homo sapien
aattcaactaagataattcatccag

SEQ ID NO: 2193606 - DNA, 25 bp, Homo sapien
ttttcaactggtgaaaattcaacta

SEQ ID NO: 2193607 - DNA, 25 bp, Homo sapien
cttaaacagaactagggctgagtct

SEQ ID NO: 2193608 - DNA, 25 bp, Homo sapien
cattgtcaaggtctagcaattgacc

SEQ ID NO: 2193609 - DNA, 25 bp, Homo sapien
gctgagtgttcaggaaacaatttac

SEQ ID NO: 2193610 - DNA, 25 bp, Homo sapien
tgagtcattccagacgtagctgaaa

SEQ ID NO: 2193611 - DNA, 25 bp, Homo sapien
aggcccgcctcgtatttcctagatc

SEQ ID NO: 2193612 - DNA, 25 bp, Homo sapien
gcagggccgggatccggtgtgagcc

SEQ ID NO: 2193613 - DNA, 25 bp, Homo sapien
tcctagatccggtctgagcgagagc

SEQ ID NO: 2193614 - DNA, 25 bp, Homo sapien
tctgagcgagagcttggcaagcaag

SEQ ID NO: 2193615 - DNA, 25 bp, Homo sapien
cacattctgaggacaccgagatgaa

SEQ ID NO: 2193616 - DNA, 25 bp, Homo sapien
gcaaatgaagccatagctcatgcct

SEQ ID NO: 2193617 - DNA, 25 bp, Homo sapien
tctagaagctatgggtctggaggaa

SEQ ID NO: 2193618 - DNA, 25 bp, Homo sapien
taagacaaagtccatggcttcaagg

SEQ ID NO: 2193619 - DNA, 25 bp, Homo sapien
gaatgatgtgctgatgtgcaatcct

SEQ ID NO: 2193620 - DNA, 25 bp, Homo sapien
tgtgcaatcctctatatcaggctca

SEQ ID NO: 2193621 - DNA, 25 bp, Homo sapien
ctgaatgatgtgctgatgtgcaatc

SEQ ID NO: 2193622 - DNA, 25 bp, Homo sapien
tatatcaggctcagatgtgtctcct

SEQ ID NO: 2193623 - DNA, 25 bp, Homo sapien
tactcttgacagagctatgttccct

SEQ ID NO: 2193624 - DNA, 25 bp, Homo sapien
caggccacgggcaaagaacatactc

SEQ ID NO: 2193625 - DNA, 25 bp, Homo sapien
cagatggctttttcaattgcgtagg

SEQ ID NO: 2193626 - DNA, 25 bp, Homo sapien
attgcgtaggactctgaaattgcag

SEQ ID NO: 2193627 - DNA, 25 bp, Homo sapien
ctctataggatgttgttaaaagtac

SEQ ID NO: 2193628 - DNA, 25 bp, Homo sapien
tcttatcatttaccccaatgccatt

SEQ ID NO: 2193629 - DNA, 25 bp, Homo sapien
taccccaatgccattgcttgctatg

SEQ ID NO: 2193630 - DNA, 25 bp, Homo sapien
cactctataggatgttgttaaaagt

SEQ ID NO: 2193631 - DNA, 25 bp, Homo sapien
ggtcaataacagtatccaatggatt

SEQ ID NO: 2193632 - DNA, 25 bp, Homo sapien
cagcatcttggctacgatggtcaat

SEQ ID NO: 2193633 - DNA, 25 bp, Homo sapien
gtcaattctgtcaacagcatcttgg

SEQ ID NO: 2193634 - DNA, 25 bp, Homo sapien
gctacgatggtcaataacagtatcc

SEQ ID NO: 2193635 - DNA, 25 bp, Homo sapien
acagccagaattgcaggctctgggc

SEQ ID NO: 2193636 - DNA, 25 bp, Homo sapien
cagccacagccagaattgcaggctc

SEQ ID NO: 2193637 - DNA, 25 bp, Homo sapien
cacagccagaattgcaggctctggg

SEQ ID NO: 2193638 - DNA, 25 bp, Homo sapien
gccacagccagaattgcaggctctg

SEQ ID NO: 2193639 - DNA, 25 bp, Homo sapien
tgctgctggcttgttacagtgaaat

SEQ ID NO: 2193640 - DNA, 25 bp, Homo sapien
tggctgcaggggactgcttttgctg

SEQ ID NO: 2193641 - DNA, 25 bp, Homo sapien
tgctggcttgttacagtgaaattcc

SEQ ID NO: 2193642 - DNA, 25 bp, Homo sapien
gaggcagccatgatggatccctgtg

SEQ ID NO: 2193643 - DNA, 25 bp, Homo sapien
gtttagttatcaagtgctgccttaa

SEQ ID NO: 2193644 - DNA, 25 bp, Homo sapien
tagttatcaagtgctgccttaagtc

SEQ ID NO: 2193645 - DNA, 25 bp, Homo sapien
ctgaagtttagttatcaagtgctgc

SEQ ID NO: 2193646 - DNA, 25 bp, Homo sapien
tgaagtttagttatcaagtgctgcc

SEQ ID NO: 2193647 - DNA, 25 bp, Homo sapien
tatcctccttgttgagacataattt

SEQ ID NO: 2193648 - DNA, 25 bp, Homo sapien
cttagtttcccaattatcctccttg

SEQ ID NO: 2193649 - DNA, 25 bp, Homo sapien
agtttcccaattatcctccttgttg

SEQ ID NO: 2193650 - DNA, 25 bp, Homo sapien
attcctgattcagagttctggattg

SEQ ID NO: 2193651 - DNA, 25 bp, Homo sapien
cctgattcagagttctggattgttg

SEQ ID NO: 2193652 - DNA, 25 bp, Homo sapien
ttcagagttctggattgttggagaa

SEQ ID NO: 2193653 - DNA, 25 bp, Homo sapien
gattcagagttctggattgttggag

SEQ ID NO: 2193654 - DNA, 25 bp, Homo sapien
tgtaggtagtgacatcactatcatg

SEQ ID NO: 2193655 - DNA, 25 bp, Homo sapien
gtaggtagtgacatcactatcatgc

SEQ ID NO: 2193656 - DNA, 25 bp, Homo sapien
attgccctcttgaccaacgcatttc

SEQ ID NO: 2193657 - DNA, 25 bp, Homo sapien
cattgttggtatactaaggatagcc

SEQ ID NO: 2193658 - DNA, 25 bp, Homo sapien
gccacatcgagtttttcaacaatag

SEQ ID NO: 2193659 - DNA, 25 bp, Homo sapien
tcatttcgtggtggcatcttctatt

SEQ ID NO: 2193660 - DNA, 25 bp, Homo sapien
gacctgagtcatgacgttgttcctc

SEQ ID NO: 2193661 - DNA, 25 bp, Homo sapien
tcctcttcactgctgacctgagtca

SEQ ID NO: 2193662 - DNA, 25 bp, Homo sapien
gcttgttctggccaacggctcctct

SEQ ID NO: 2193663 - DNA, 25 bp, Homo sapien
tgttctggccaacggctcctcttca

SEQ ID NO: 2193664 - DNA, 25 bp, Homo sapien
tgctcgcccgaatgtgtggctttct

SEQ ID NO: 2193665 - DNA, 25 bp, Homo sapien
cttgctcgcccgaatgtgtggcttt

SEQ ID NO: 2193666 - DNA, 25 bp, Homo sapien
gctcgcccgaatgtgtggctttctc

SEQ ID NO: 2193667 - DNA, 25 bp, Homo sapien
cgcccgaatgtgtggctttctctgg

SEQ ID NO: 2193668 - DNA, 25 bp, Homo sapien
tcctttccgaacaggaatgggttca

SEQ ID NO: 2193669 - DNA, 25 bp, Homo sapien
gcttcctcctttccgaacaggaatg

SEQ ID NO: 2193670 - DNA, 25 bp, Homo sapien
tgcttcctcctttccgaacaggaat

SEQ ID NO: 2193671 - DNA, 25 bp, Homo sapien
cttcctcctttccgaacaggaatgg

SEQ ID NO: 2193672 - DNA, 25 bp, Homo sapien
catgttggccaggtaaaatttcaac

SEQ ID NO: 2193673 - DNA, 25 bp, Homo sapien
tacccaaagtatcctcaaagagttc

SEQ ID NO: 2193674 - DNA, 25 bp, Homo sapien
gatccccaagggatttgtaatgcct

SEQ ID NO: 2193675 - DNA, 25 bp, Homo sapien
tctataggctatagggtacccaaag

SEQ ID NO: 2193676 - DNA, 25 bp, Homo sapien
gctttggaatctccatccttaaggg

SEQ ID NO: 2193677 - DNA, 25 bp, Homo sapien
gacacgtcctggctccatagtgaga

SEQ ID NO: 2193678 - DNA, 25 bp, Homo sapien
gcaggacaagccataagccaagcag

SEQ ID NO: 2193679 - DNA, 25 bp, Homo sapien
agaaccaagtcaattctcagctgtg

SEQ ID NO: 2193680 - DNA, 25 bp, Homo sapien
tgcatattgttaccatggctggtgg

SEQ ID NO: 2193681 - DNA, 25 bp, Homo sapien
gccctgagatcaatatagagtcctt

SEQ ID NO: 2193682 - DNA, 25 bp, Homo sapien
cctaagtcttctggtgcaatattcc

SEQ ID NO: 2193683 - DNA, 25 bp, Homo sapien
tagagtccttaatgcagtgcatatt

SEQ ID NO: 2193684 - DNA, 25 bp, Homo sapien
tcaaggaacagtttgatatccatcc

SEQ ID NO: 2193685 - DNA, 25 bp, Homo sapien
tttgatatccatccctgggaagcag

SEQ ID NO: 2193686 - DNA, 25 bp, Homo sapien
ctctgggctccagtcatcaaggaac

SEQ ID NO: 2193687 - DNA, 25 bp, Homo sapien
gctccagtcatcaaggaacagtttg

SEQ ID NO: 2193688 - DNA, 25 bp, Homo sapien
ttcaagaaggctatgggcagattct

SEQ ID NO: 2193689 - DNA, 25 bp, Homo sapien
cttcaagaaggctatgggcagattc

SEQ ID NO: 2193690 - DNA, 25 bp, Homo sapien
ttgaaggagtatatagcatgacttt

SEQ ID NO: 2193691 - DNA, 25 bp, Homo sapien
gaaggagtatatagcatgacttttt

SEQ ID NO: 2193692 - DNA, 25 bp, Homo sapien
tcagtcccagtcatgtaagtgctgc

SEQ ID NO: 2193693 - DNA, 25 bp, Homo sapien
agtcccagtcatgtaagtgctgcca

SEQ ID NO: 2193694 - DNA, 25 bp, Homo sapien
tcccagtcatgtaagtgctgccata

SEQ ID NO: 2193695 - DNA, 25 bp, Homo sapien
cagtcatgtaagtgctgccatattc

SEQ ID NO: 2193696 - DNA, 25 bp, Homo sapien
gtcttgtttggtaccagtgttctac

SEQ ID NO: 2193697 - DNA, 25 bp, Homo sapien
tggtaccagtgttctacttttgttg

SEQ ID NO: 2193698 - DNA, 25 bp, Homo sapien
tacttttgttggtggcgtgttctct

SEQ ID NO: 2193699 - DNA, 25 bp, Homo sapien
cagtgttctacttttgttggtggcg

SEQ ID NO: 2193700 - DNA, 25 bp, Homo sapien
ccaaacatcgtccttcagaattctt

SEQ ID NO: 2193701 - DNA, 25 bp, Homo sapien
tccaaacatcgtccttcagaattct

SEQ ID NO: 2193702 - DNA, 25 bp, Homo sapien
ctggtcttcaagaactatagtttct

SEQ ID NO: 2193703 - DNA, 25 bp, Homo sapien
tcttcaagaactatagtttctaatg

SEQ ID NO: 2193704 - DNA, 25 bp, Homo sapien
ggtcttcaagaactatagtttctaa

SEQ ID NO: 2193705 - DNA, 25 bp, Homo sapien
gaactatagtttctaatgttaacat

SEQ ID NO: 2193706 - DNA, 25 bp, Homo sapien
cgtctgacaaaaacagtgaacggtt

SEQ ID NO: 2193707 - DNA, 25 bp, Homo sapien
caaacgtctgacaaaaacagtgaac

SEQ ID NO: 2193708 - DNA, 25 bp, Homo sapien
ttccaaacgtctgacaaaaacagtg

SEQ ID NO: 2193709 - DNA, 25 bp, Homo sapien
ttcttccaaacgtctgacaaaaaca

SEQ ID NO: 2193710 - DNA, 25 bp, Homo sapien
ctctgaaaggaagggtacaagccct

SEQ ID NO: 2193711 - DNA, 25 bp, Homo sapien
gctgagcctgatgttctttctctga

SEQ ID NO: 2193712 - DNA, 25 bp, Homo sapien
agacacttgcgctggcaacaccagg

SEQ ID NO: 2193713 - DNA, 25 bp, Homo sapien
ctctgagacacttgcgctggcaaca

SEQ ID NO: 2193714 - DNA, 25 bp, Homo sapien
gatttttcttccagtaggtctctgt

SEQ ID NO: 2193715 - DNA, 25 bp, Homo sapien
tttcttccagtaggtctctgttggg

SEQ ID NO: 2193716 - DNA, 25 bp, Homo sapien
tttttcttccagtaggtctctgttg

SEQ ID NO: 2193717 - DNA, 25 bp, Homo sapien
cttccagtaggtctctgttgggaac

SEQ ID NO: 2193718 - DNA, 25 bp, Homo sapien
gacaagagaaccatgacaggaacca

SEQ ID NO: 2193719 - DNA, 25 bp, Homo sapien
aaaagttctagacaagagaaccatg

SEQ ID NO: 2193720 - DNA, 25 bp, Homo sapien
tgacaggaaccacaccaacaatgcc

SEQ ID NO: 2193721 - DNA, 25 bp, Homo sapien
ccatgacaggaaccacaccaacaat

SEQ ID NO: 2193722 - DNA, 25 bp, Homo sapien
ggcaccctcccaggccagtttatgt

SEQ ID NO: 2193723 - DNA, 25 bp, Homo sapien
actttggtacccacagcaacagcca

SEQ ID NO: 2193724 - DNA, 25 bp, Homo sapien
tcattgcctgagactttggtaccca

SEQ ID NO: 2193725 - DNA, 25 bp, Homo sapien
cattttccctcagtcccgatactat

SEQ ID NO: 2193726 - DNA, 25 bp, Homo sapien
agtcccgatactatcattgcctgag

SEQ ID NO: 2193727 - DNA, 25 bp, Homo sapien
tgaagagaacgttctgaaagggcaa

SEQ ID NO: 2193728 - DNA, 25 bp, Homo sapien
gaagagaacgttctgaaagggcaac

SEQ ID NO: 2193729 - DNA, 25 bp, Homo sapien
aagagaacgttctgaaagggcaaca

SEQ ID NO: 2193730 - DNA, 25 bp, Homo sapien
gcttccggggaacaaatcttgcgca

SEQ ID NO: 2193731 - DNA, 25 bp, Homo sapien
tcaagtctctttgacgcggccgccc

SEQ ID NO: 2193732 - DNA, 25 bp, Homo sapien
ccagctggtacagatccagcaggct

SEQ ID NO: 2193733 - DNA, 25 bp, Homo sapien
tcttgacttgctcgtgcaggtagtg

SEQ ID NO: 2193734 - DNA, 25 bp, Homo sapien
ctgatatcgtgaaggcagatgtggc

SEQ ID NO: 2193735 - DNA, 25 bp, Homo sapien
cagcttctgggcatgctccattttg

SEQ ID NO: 2193736 - DNA, 25 bp, Homo sapien
tcctgatatcgtgaaggcagatgtg

SEQ ID NO: 2193737 - DNA, 25 bp, Homo sapien
tgatatcgtgaaggcagatgtggcc

SEQ ID NO: 2193738 - DNA, 25 bp, Homo sapien
ggtgtcgtacttctggcgcacctgc

SEQ ID NO: 2193739 - DNA, 25 bp, Homo sapien
gtgtagagctccagcgtgatgtggc

SEQ ID NO: 2193740 - DNA, 25 bp, Homo sapien
cggcgtcgcagttggtgtcgtactt

SEQ ID NO: 2193741 - DNA, 25 bp, Homo sapien
gcgcacctgcgacggctgggcggtg

SEQ ID NO: 2193742 - DNA, 25 bp, Homo sapien
gagcacacgggcgaagtcggtgcgg

SEQ ID NO: 2193743 - DNA, 25 bp, Homo sapien
cacgggcgaagtcggtgcggtagcg

SEQ ID NO: 2193744 - DNA, 25 bp, Homo sapien
gcaagtgcaggcgagcacacgggcg

SEQ ID NO: 2193745 - DNA, 25 bp, Homo sapien
caggcgagcacacgggcgaagtcgg

SEQ ID NO: 2193746 - DNA, 25 bp, Homo sapien
acaagaatggcggatagtgaaaggc

SEQ ID NO: 2193747 - DNA, 25 bp, Homo sapien
gaggtgacaagaatggcggatagtg

SEQ ID NO: 2193748 - DNA, 25 bp, Homo sapien
cgatgaaaccggaagtgggcagtgg

SEQ ID NO: 2193749 - DNA, 25 bp, Homo sapien
gtgaaaggcgggtgtgcgatgaaac

SEQ ID NO: 2193750 - DNA, 25 bp, Homo sapien
gggtgttcggatccacagatactaa

SEQ ID NO: 2193751 - DNA, 25 bp, Homo sapien
gatcctctcatcagcacttttgtgc

SEQ ID NO: 2193752 - DNA, 25 bp, Homo sapien
tgtgctccctgaatcatacccctgg

SEQ ID NO: 2193753 - DNA, 25 bp, Homo sapien
actaagagtgtggagtatccaggac

SEQ ID NO: 2193754 - DNA, 25 bp, Homo sapien
tgtaatgcagcttgtgtggtcccat

SEQ ID NO: 2193755 - DNA, 25 bp, Homo sapien
aatgcagcttgtgtggtcccatctc

SEQ ID NO: 2193756 - DNA, 25 bp, Homo sapien
taatgcagcttgtgtggtcccatct

SEQ ID NO: 2193757 - DNA, 25 bp, Homo sapien
tatgtaatgcagcttgtgtggtccc

SEQ ID NO: 2193758 - DNA, 25 bp, Homo sapien
tcttctccgaagttaagccatcact

SEQ ID NO: 2193759 - DNA, 25 bp, Homo sapien
ttcagaaagagtcaactgggagaga

SEQ ID NO: 2193760 - DNA, 25 bp, Homo sapien
tctagcctctatcgatgttgccact

SEQ ID NO: 2193761 - DNA, 25 bp, Homo sapien
ctcattgtagcgaagagcaggaact

SEQ ID NO: 2193762 - DNA, 25 bp, Homo sapien
ccttccccgacagctgtttcctcat

SEQ ID NO: 2193763 - DNA, 25 bp, Homo sapien
catgccttccccgacagctgtttcc

SEQ ID NO: 2193764 - DNA, 25 bp, Homo sapien
tgccttccccgacagctgtttcctc

SEQ ID NO: 2193765 - DNA, 25 bp, Homo sapien
cccacatgccttccccgacagctgt

SEQ ID NO: 2193766 - DNA, 25 bp, Homo sapien
acattgctacccactttctcagctt

SEQ ID NO: 2193767 - DNA, 25 bp, Homo sapien
gacattgctacccactttctcagct

SEQ ID NO: 2193768 - DNA, 25 bp, Homo sapien
cattgctacccactttctcagcttc

SEQ ID NO: 2193769 - DNA, 25 bp, Homo sapien
ggtaaagaaaaggtccagcgtcaca

SEQ ID NO: 2193770 - DNA, 25 bp, Homo sapien
tgtggaactactcgcagagaaatgc

SEQ ID NO: 2193771 - DNA, 25 bp, Homo sapien
tgcaaaattataggtcacacggtgg

SEQ ID NO: 2193772 - DNA, 25 bp, Homo sapien
tggcctactccttcacagggatggg

SEQ ID NO: 2193773 - DNA, 25 bp, Homo sapien
cttctgattgatttccactgaagca

SEQ ID NO: 2193774 - DNA, 25 bp, Homo sapien
tctgattgatttccactgaagcatc

SEQ ID NO: 2193775 - DNA, 25 bp, Homo sapien
catcattaaatctaaatcgtggcat

SEQ ID NO: 2193776 - DNA, 25 bp, Homo sapien
gaagcatcattaaatctaaatcgtg

SEQ ID NO: 2193777 - DNA, 25 bp, Homo sapien
tagtgtggtgtagtttcctcctggc

SEQ ID NO: 2193778 - DNA, 25 bp, Homo sapien
ggatatcacgccaaaaggatgcaaa

SEQ ID NO: 2193779 - DNA, 25 bp, Homo sapien
ttctagaccaagcaggtaagcctgg

SEQ ID NO: 2193780 - DNA, 25 bp, Homo sapien
ggatgcaaaacaatgcgctgcctca

SEQ ID NO: 2193781 - DNA, 25 bp, Homo sapien
gcgggaatcaggagttgtaaaacat

SEQ ID NO: 2193782 - DNA, 25 bp, Homo sapien
aaaaccatgcgggaatcaggagttg

SEQ ID NO: 2193783 - DNA, 25 bp, Homo sapien
atattataaaaaccatgcgggaatc

SEQ ID NO: 2193784 - DNA, 25 bp, Homo sapien
gtaaactcttactgtctaatcctct

SEQ ID NO: 2193785 - DNA, 25 bp, Homo sapien
atgactgatactaaggactccatcg

SEQ ID NO: 2193786 - DNA, 25 bp, Homo sapien
taaggactccatcgctctgcccaaa

SEQ ID NO: 2193787 - DNA, 25 bp, Homo sapien
gactgatactaaggactccatcgct

SEQ ID NO: 2193788 - DNA, 25 bp, Homo sapien
gatactaaggactccatcgctctgc

SEQ ID NO: 2193789 - DNA, 25 bp, Homo sapien
ccggaatactacagggaaatttgct

SEQ ID NO: 2193790 - DNA, 25 bp, Homo sapien
ggaattgttttccacagcgattgga

SEQ ID NO: 2193791 - DNA, 25 bp, Homo sapien
tacacctcaggtagtcaagtctgca

SEQ ID NO: 2193792 - DNA, 25 bp, Homo sapien
ttattgaacacaaaggcactatgcc

SEQ ID NO: 2193793 - DNA, 25 bp, Homo sapien
ctctcattggctttccaggggtatt

SEQ ID NO: 2193794 - DNA, 25 bp, Homo sapien
tctcattggctttccaggggtattt

SEQ ID NO: 2193795 - DNA, 25 bp, Homo sapien
ctcattggctttccaggggtatttc

SEQ ID NO: 2193796 - DNA, 25 bp, Homo sapien
taccactgagtaagccggaacttaa

SEQ ID NO: 2193797 - DNA, 25 bp, Homo sapien
gagaacttaaatcagcccttaaggc

SEQ ID NO: 2193798 - DNA, 25 bp, Homo sapien
ggccacaagggtaccactgagtaag

SEQ ID NO: 2193799 - DNA, 25 bp, Homo sapien
taatggaattggtatcggacaaggc

SEQ ID NO: 2193800 - DNA, 25 bp, Homo sapien
tcctctaaccctgtgcttgtgtcct

SEQ ID NO: 2193801 - DNA, 25 bp, Homo sapien
ccatcacctcctctaaccctgtgct

SEQ ID NO: 2193802 - DNA, 25 bp, Homo sapien
gggaaggagttgttgagttgctcca

SEQ ID NO: 2193803 - DNA, 25 bp, Homo sapien
cctcctctaaccctgtgcttgtgtc

SEQ ID NO: 2193804 - DNA, 25 bp, Homo sapien
tttaaccagtttccgacttgatgtg

SEQ ID NO: 2193805 - DNA, 25 bp, Homo sapien
ggctgtgtatgaacaaatacgccca

SEQ ID NO: 2193806 - DNA, 25 bp, Homo sapien
tttcctaaacgtgtgggctgttcca

SEQ ID NO: 2193807 - DNA, 25 bp, Homo sapien
tataggaccgatgctttcaatttca

SEQ ID NO: 2193808 - DNA, 25 bp, Homo sapien
ctgataccaagatgagtcaaacact

SEQ ID NO: 2193809 - DNA, 25 bp, Homo sapien
cacttacggccaaatattcatgtcc

SEQ ID NO: 2193810 - DNA, 25 bp, Homo sapien
tattcatgtccctgtaatacgactc

SEQ ID NO: 2193811 - DNA, 25 bp, Homo sapien
gtaatacgactctacctttcttcag

SEQ ID NO: 2193812 - DNA, 25 bp, Homo sapien
gtccgaagtttgactgccaaccact

SEQ ID NO: 2193813 - DNA, 25 bp, Homo sapien
ctgccaaccactcggagcagcatag

SEQ ID NO: 2193814 - DNA, 25 bp, Homo sapien
ccaaccactcggagcagcataggct

SEQ ID NO: 2193815 - DNA, 25 bp, Homo sapien
gagtccgaagtttgactgccaacca

SEQ ID NO: 2193816 - DNA, 25 bp, Homo sapien
ggtagaaggagaggacaccgttgtg

SEQ ID NO: 2193817 - DNA, 25 bp, Homo sapien
caccgttgtgccattcactttggcc

SEQ ID NO: 2193818 - DNA, 25 bp, Homo sapien
aggacaccgttgtgccattcacttt

SEQ ID NO: 2193819 - DNA, 25 bp, Homo sapien
cgttgtgccattcactttggcctct

SEQ ID NO: 2193820 - DNA, 25 bp, Homo sapien
tcaaaatatgatacacactcaggac

SEQ ID NO: 2193821 - DNA, 25 bp, Homo sapien
acacactcaggactcataaattttg

SEQ ID NO: 2193822 - DNA, 25 bp, Homo sapien
actttagaagccctcccaaagattg

SEQ ID NO: 2193823 - DNA, 25 bp, Homo sapien
gactcataaattttgacccttccta

SEQ ID NO: 2193824 - DNA, 25 bp, Homo sapien
tagcctgtgtaactgtgactccagc

SEQ ID NO: 2193825 - DNA, 25 bp, Homo sapien
tgacgcagtagcttggcctcagcaa

SEQ ID NO: 2193826 - DNA, 25 bp, Homo sapien
tagacggtcatattctgcttgcaga

SEQ ID NO: 2193827 - DNA, 25 bp, Homo sapien
caggcggcctttgtgttgacgcagt

SEQ ID NO: 2193828 - DNA, 25 bp, Homo sapien
ccccttgataagtttatcatttgcc

SEQ ID NO: 2193829 - DNA, 25 bp, Homo sapien
cagtcagattctgcacacgggtctt

SEQ ID NO: 2193830 - DNA, 25 bp, Homo sapien
gtgtgcaccgatgtatgtaactgtc

SEQ ID NO: 2193831 - DNA, 25 bp, Homo sapien
gaagcagtatccaatgttcacaagg

SEQ ID NO: 2193832 - DNA, 25 bp, Homo sapien
ttcaaaaggctagatctccacatgg

SEQ ID NO: 2193833 - DNA, 25 bp, Homo sapien
ctttcacatttctggttcacagaga

SEQ ID NO: 2193834 - DNA, 25 bp, Homo sapien
acatttctggttcacagagatgttc

SEQ ID NO: 2193835 - DNA, 25 bp, Homo sapien
tcacatttctggttcacagagatgt

SEQ ID NO: 2193836 - DNA, 25 bp, Homo sapien
tttctttcacatttctggttcacag

SEQ ID NO: 2193837 - DNA, 25 bp, Homo sapien
tcaagccttaattcatcaggccagg

SEQ ID NO: 2193838 - DNA, 25 bp, Homo sapien
gaaagatgccttcaagcaagagcta

SEQ ID NO: 2193839 - DNA, 25 bp, Homo sapien
aaagaggtatcttggcctgcaacca

SEQ ID NO: 2193840 - DNA, 25 bp, Homo sapien
cagaagcctaccaggacacattgat

SEQ ID NO: 2193841 - DNA, 25 bp, Homo sapien
taatcaaattggcaaggcttgttcc

SEQ ID NO: 2193842 - DNA, 25 bp, Homo sapien
ttatgagtgcctctctagcaatcgt

SEQ ID NO: 2193843 - DNA, 25 bp, Homo sapien
taactgtataccaaagcatgagcac

SEQ ID NO: 2193844 - DNA, 25 bp, Homo sapien
tgaaaacatgaaagcagctggccct

SEQ ID NO: 2193845 - DNA, 25 bp, Homo sapien
tcaagttaaggcacattctggggaa

SEQ ID NO: 2193846 - DNA, 25 bp, Homo sapien
gcacattctggggaatatgccgcaa

SEQ ID NO: 2193847 - DNA, 25 bp, Homo sapien
aagttaaggcacattctggggaata

SEQ ID NO: 2193848 - DNA, 25 bp, Homo sapien
acattctggggaatatgccgcaatt

SEQ ID NO: 2193849 - DNA, 25 bp, Homo sapien
tggcagtaatgctggattaacaaat

SEQ ID NO: 2193850 - DNA, 25 bp, Homo sapien
cctcaagatctgctaggattctctc

SEQ ID NO: 2193851 - DNA, 25 bp, Homo sapien
ggagtcctggttcaaactttggcag

SEQ ID NO: 2193852 - DNA, 25 bp, Homo sapien
caagatctgggcaggactacgaggc

SEQ ID NO: 2193853 - DNA, 25 bp, Homo sapien
tctcattaggagagatgctatcatt

SEQ ID NO: 2193854 - DNA, 25 bp, Homo sapien
catttagataagatccattgctgtt

SEQ ID NO: 2193855 - DNA, 25 bp, Homo sapien
cattaggagagatgctatcatttag

SEQ ID NO: 2193856 - DNA, 25 bp, Homo sapien
gataagatccattgctgttttccat

SEQ ID NO: 2193857 - DNA, 25 bp, Homo sapien
ctgctagcataatgttcaatgcgtg

SEQ ID NO: 2193858 - DNA, 25 bp, Homo sapien
agtatcatcgtgtgaaagctgaggg

SEQ ID NO: 2193859 - DNA, 25 bp, Homo sapien
gcgtgaatgagtatcatcgtgtgaa

SEQ ID NO: 2193860 - DNA, 25 bp, Homo sapien
cataatgttcaatgcgtgaatgagt

SEQ ID NO: 2193861 - DNA, 25 bp, Homo sapien
tatcagtggcgcctatcacagcatg

SEQ ID NO: 2193862 - DNA, 25 bp, Homo sapien
cgtttgactggctcacttatggaca

SEQ ID NO: 2193863 - DNA, 25 bp, Homo sapien
ttatggacagacaacgtaaaggcct

SEQ ID NO: 2193864 - DNA, 25 bp, Homo sapien
caaacggtctgtatctctggaaact

SEQ ID NO: 2193865 - DNA, 25 bp, Homo sapien
gaatctactggccagaagttgatca

SEQ ID NO: 2193866 - DNA, 25 bp, Homo sapien
tctactggccagaagttgatcagag

SEQ ID NO: 2193867 - DNA, 25 bp, Homo sapien
tggccagaagttgatcagagtaacg

SEQ ID NO: 2193868 - DNA, 25 bp, Homo sapien
gcagaatctactggccagaagttga

SEQ ID NO: 2193869 - DNA, 25 bp, Homo sapien
tgggaaagtggcaactggacatcag

SEQ ID NO: 2193870 - DNA, 25 bp, Homo sapien
tgactagatatgaccacacaatgag

SEQ ID NO: 2193871 - DNA, 25 bp, Homo sapien
cacagttgtgtgactgccatcagag

SEQ ID NO: 2193872 - DNA, 25 bp, Homo sapien
caggttgaaaagaggtgaagacgtc

SEQ ID NO: 2193873 - DNA, 25 bp, Homo sapien
ccatgttgtccccctctaagacagt

SEQ ID NO: 2193874 - DNA, 25 bp, Homo sapien
caggtagcccattcggggatgcttc

SEQ ID NO: 2193875 - DNA, 25 bp, Homo sapien
ttttagtaccttggcaaagtctcga

SEQ ID NO: 2193876 - DNA, 25 bp, Homo sapien
ggatgcttcgcaaaataccttttgg

SEQ ID NO: 2193877 - DNA, 25 bp, Homo sapien
ctcgaacatcttctcctgatgtagt

SEQ ID NO: 2193878 - DNA, 25 bp, Homo sapien
attaaagtgctttagactcctgtac

SEQ ID NO: 2193879 - DNA, 25 bp, Homo sapien
ttggcagatgtcataattaaagtgc

SEQ ID NO: 2193880 - DNA, 25 bp, Homo sapien
gccttttgcaactcgaccagaaaaa

SEQ ID NO: 2193881 - DNA, 25 bp, Homo sapien
ccaccatgggatagtgcattttatg

SEQ ID NO: 2193882 - DNA, 25 bp, Homo sapien
agcccactagctaaggaagcagaga

SEQ ID NO: 2193883 - DNA, 25 bp, Homo sapien
cttgtatacaaagcccactagctaa

SEQ ID NO: 2193884 - DNA, 25 bp, Homo sapien
gaaaaggtagcttagaaatctaatg

SEQ ID NO: 2193885 - DNA, 25 bp, Homo sapien
gaaatctaatgcagtcactgtggct

SEQ ID NO: 2193886 - DNA, 25 bp, Homo sapien
gcacaggcatagaccatagagctag

SEQ ID NO: 2193887 - DNA, 25 bp, Homo sapien
tctttgtaaacagcatgactatgga

SEQ ID NO: 2193888 - DNA, 25 bp, Homo sapien
gttcacacgtaactggaaaagagtg

SEQ ID NO: 2193889 - DNA, 25 bp, Homo sapien
taaaaagcacgcaacagtacaaggt

SEQ ID NO: 2193890 - DNA, 25 bp, Homo sapien
gacggtacgaactaacagcaactgg

SEQ ID NO: 2193891 - DNA, 25 bp, Homo sapien
tctgtaatacctccgtgaagacacg

SEQ ID NO: 2193892 - DNA, 25 bp, Homo sapien
taacctagcgatcaggagggtgaca

SEQ ID NO: 2193893 - DNA, 25 bp, Homo sapien
tgagatccaccaaaataacctagcg

SEQ ID NO: 2193894 - DNA, 25 bp, Homo sapien
ggccgcttcgatctctggcttatta

SEQ ID NO: 2193895 - DNA, 25 bp, Homo sapien
tgtgcaggacgggcagccacaccat

SEQ ID NO: 2193896 - DNA, 25 bp, Homo sapien
agtctcatccagtctaggaagaggg

SEQ ID NO: 2193897 - DNA, 25 bp, Homo sapien
ctgaatccaatgattggacactctt

SEQ ID NO: 2193898 - DNA, 25 bp, Homo sapien
tcagttcgattaataagttaaacag

SEQ ID NO: 2193899 - DNA, 25 bp, Homo sapien
gcaaaggaggtgtatatcagttcga

SEQ ID NO: 2193900 - DNA, 25 bp, Homo sapien
caaagagctacccactcctaaggct

SEQ ID NO: 2193901 - DNA, 25 bp, Homo sapien
caatggttgcaaagctaggctggct

SEQ ID NO: 2193902 - DNA, 25 bp, Homo sapien
caggagggtttagactgacaggtca

SEQ ID NO: 2193903 - DNA, 25 bp, Homo sapien
caagtcatgggtatttgagctgcaa

SEQ ID NO: 2193904 - DNA, 25 bp, Homo sapien
tggcttataacactgatcacctcaa

SEQ ID NO: 2193905 - DNA, 25 bp, Homo sapien
gcttgagcctagaataaaagtgctt

SEQ ID NO: 2193906 - DNA, 25 bp, Homo sapien
ggccctagggaacatatgcacaatt

SEQ ID NO: 2193907 - DNA, 25 bp, Homo sapien
gctctaaatattaatcaggactctg

SEQ ID NO: 2193908 - DNA, 25 bp, Homo sapien
gcaaatccctaagtatactcaacag

SEQ ID NO: 2193909 - DNA, 25 bp, Homo sapien
tgctaccgagttctaatttaacagg

SEQ ID NO: 2193910 - DNA, 25 bp, Homo sapien
cctgttgaacttgccacttgcttga

SEQ ID NO: 2193911 - DNA, 25 bp, Homo sapien
aaggatgcaacttcacccaactgtc

SEQ ID NO: 2193912 - DNA, 25 bp, Homo sapien
tcttggaatttggatagaatcatgc

SEQ ID NO: 2193913 - DNA, 25 bp, Homo sapien
gcagctccggacacttggctcaatg

SEQ ID NO: 2193914 - DNA, 25 bp, Homo sapien
aaagacaggacacggatcctccctg

SEQ ID NO: 2193915 - DNA, 25 bp, Homo sapien
aggacacggatcctccctgttcgtc

SEQ ID NO: 2193916 - DNA, 25 bp, Homo sapien
gacaggacacggatcctccctgttc

SEQ ID NO: 2193917 - DNA, 25 bp, Homo sapien
ttaaaagacaggacacggatcctcc

SEQ ID NO: 2193918 - DNA, 25 bp, Homo sapien
tgctccaggcggtcataaatagtgg

SEQ ID NO: 2193919 - DNA, 25 bp, Homo sapien
cgcagagagggacgttgaccaaatt

SEQ ID NO: 2193920 - DNA, 25 bp, Homo sapien
tgcaggatatccatgggctggtcat

SEQ ID NO: 2193921 - DNA, 25 bp, Homo sapien
cagcagccagttcagacacatatcc

SEQ ID NO: 2193922 - DNA, 25 bp, Homo sapien
cattgggtgaagatatgggcaaaga

SEQ ID NO: 2193923 - DNA, 25 bp, Homo sapien
tggcattgggtgaagatatgggcaa

SEQ ID NO: 2193924 - DNA, 25 bp, Homo sapien
gaataatatgctcccttggcttaga

SEQ ID NO: 2193925 - DNA, 25 bp, Homo sapien
taactgcgactacaacaccatggag

SEQ ID NO: 2193926 - DNA, 25 bp, Homo sapien
tgtgagtgggagagtcagccaacct

SEQ ID NO: 2193927 - DNA, 25 bp, Homo sapien
caacacactggatgacgagatgggc

SEQ ID NO: 2193928 - DNA, 25 bp, Homo sapien
tcccagctatgacgtattaacaggt

SEQ ID NO: 2193929 - DNA, 25 bp, Homo sapien
catattgaaccatgctgtgtgccag

SEQ ID NO: 2193930 - DNA, 25 bp, Homo sapien
taacttcgggctataaggaaatgga

SEQ ID NO: 2193931 - DNA, 25 bp, Homo sapien
gataaccagtgcctaattactcctt

SEQ ID NO: 2193932 - DNA, 25 bp, Homo sapien
caggctcatgatccctaaacgttgt

SEQ ID NO: 2193933 - DNA, 25 bp, Homo sapien
ttcacctgatattccaagccaagca

SEQ ID NO: 2193934 - DNA, 25 bp, Homo sapien
gcatgtggcatcataacctcttgga

SEQ ID NO: 2193935 - DNA, 25 bp, Homo sapien
acagctccgtgtctaaccttaccag

SEQ ID NO: 2193936 - DNA, 25 bp, Homo sapien
tttttattctaagcaaagacatagt

SEQ ID NO: 2193937 - DNA, 25 bp, Homo sapien
gcaaagacatagtatcaagatcttc

SEQ ID NO: 2193938 - DNA, 25 bp, Homo sapien
agcaaagacatagtatcaagatctt

SEQ ID NO: 2193939 - DNA, 25 bp, Homo sapien
tggcagtcctataagctgagaatct

SEQ ID NO: 2193940 - DNA, 25 bp, Homo sapien
ctgcagtcttcggagtttcatggca

SEQ ID NO: 2193941 - DNA, 25 bp, Homo sapien
agctgagaatctgacattattcagg

SEQ ID NO: 2193942 - DNA, 25 bp, Homo sapien
ggccttctgcagtcttcggagtttc

SEQ ID NO: 2193943 - DNA, 25 bp, Homo sapien
ttatggccatcgcagagaccaaaca

SEQ ID NO: 2193944 - DNA, 25 bp, Homo sapien
ctttatggccatcgcagagaccaaa

SEQ ID NO: 2193945 - DNA, 25 bp, Homo sapien
tatggccatcgcagagaccaaacat

SEQ ID NO: 2193946 - DNA, 25 bp, Homo sapien
agctttatggccatcgcagagacca

SEQ ID NO: 2193947 - DNA, 25 bp, Homo sapien
gatcctgctgaagacactaatatgt

SEQ ID NO: 2193948 - DNA, 25 bp, Homo sapien
gatgcctgaagcgttcctgtttacc

SEQ ID NO: 2193949 - DNA, 25 bp, Homo sapien
gcaacatttctgtcttaggctggta

SEQ ID NO: 2193950 - DNA, 25 bp, Homo sapien
tgggaaaagcaaactgaccttcttg

SEQ ID NO: 2193951 - DNA, 25 bp, Homo sapien
tgaggataaacctaaagcagccctt

SEQ ID NO: 2193952 - DNA, 25 bp, Homo sapien
tggattgcctcctacttcatagcag

SEQ ID NO: 2193953 - DNA, 25 bp, Homo sapien
cctgtagagccaaagagaaaaacgg

SEQ ID NO: 2193954 - DNA, 25 bp, Homo sapien
ttcatagcagacagggctcattccc

SEQ ID NO: 2193955 - DNA, 25 bp, Homo sapien
ctctggagtcacgttcccttttcct

SEQ ID NO: 2193956 - DNA, 25 bp, Homo sapien
ttgttaagaaaaacctctggagtca

SEQ ID NO: 2193957 - DNA, 25 bp, Homo sapien
ctggcaattctaccttgttaagaaa

SEQ ID NO: 2193958 - DNA, 25 bp, Homo sapien
cttctggcaattctaccttgttaag

SEQ ID NO: 2193959 - DNA, 25 bp, Homo sapien
cccagcaagttgtttgagtctcgtg

SEQ ID NO: 2193960 - DNA, 25 bp, Homo sapien
ccagcaagttgtttgagtctcgtgg

SEQ ID NO: 2193961 - DNA, 25 bp, Homo sapien
caactctgtcaaagagataccggac

SEQ ID NO: 2193962 - DNA, 25 bp, Homo sapien
catttcttgaagtgtggttgctggc

SEQ ID NO: 2193963 - DNA, 25 bp, Homo sapien
tatcttacaagcagaaaggcccctt

SEQ ID NO: 2193964 - DNA, 25 bp, Homo sapien
tctttgcacccacaaatcgatcgca

SEQ ID NO: 2193965 - DNA, 25 bp, Homo sapien
ctgccacaaaaagaacaaaacacct

SEQ ID NO: 2193966 - DNA, 25 bp, Homo sapien
ccaggatatttgtaaggaccgtagc

SEQ ID NO: 2193967 - DNA, 25 bp, Homo sapien
caatgtcccatctccaggatatttg

SEQ ID NO: 2193968 - DNA, 25 bp, Homo sapien
gtaaggaccgtagcatcttctatag

SEQ ID NO: 2193969 - DNA, 25 bp, Homo sapien
actgtgtaacaacaatgtcccatct

SEQ ID NO: 2193970 - DNA, 25 bp, Homo sapien
gaatatgcagacgatatagaaaaac

SEQ ID NO: 2193971 - DNA, 25 bp, Homo sapien
tatgcagacgatatagaaaaacacg

SEQ ID NO: 2193972 - DNA, 25 bp, Homo sapien
cagacgatatagaaaaacacggtgt

SEQ ID NO: 2193973 - DNA, 25 bp, Homo sapien
ctggaatatgcagacgatatagaaa

SEQ ID NO: 2193974 - DNA, 25 bp, Homo sapien
aattctgaaacctgttcacatgtta

SEQ ID NO: 2193975 - DNA, 25 bp, Homo sapien
ggcactgttttggtaattgtctctt

SEQ ID NO: 2193976 - DNA, 25 bp, Homo sapien
tgttcacatgttaatgggtacatct

SEQ ID NO: 2193977 - DNA, 25 bp, Homo sapien
catcggaaatacactccccatatac

SEQ ID NO: 2193978 - DNA, 25 bp, Homo sapien
tataaaaagggagcgttctcttgcg

SEQ ID NO: 2193979 - DNA, 25 bp, Homo sapien
tgttccagctgttagttgtcctccg

SEQ ID NO: 2193980 - DNA, 25 bp, Homo sapien
taaagccagggcaaagatgattgcc

SEQ ID NO: 2193981 - DNA, 25 bp, Homo sapien
taatctggagcccattgatccacac

SEQ ID NO: 2193982 - DNA, 25 bp, Homo sapien
gagacctttcatataaccgtgttgc

SEQ ID NO: 2193983 - DNA, 25 bp, Homo sapien
tccacggtgttcaagggtcagagac

SEQ ID NO: 2193984 - DNA, 25 bp, Homo sapien
cagcaaatgtatcctccaaagaggg

SEQ ID NO: 2193985 - DNA, 25 bp, Homo sapien
tcagggtcgtgtccaatcggagatc

SEQ ID NO: 2193986 - DNA, 25 bp, Homo sapien
gatgacagggataaagcagaagacc

SEQ ID NO: 2193987 - DNA, 25 bp, Homo sapien
taagagcgacgatttaggaacagcc

SEQ ID NO: 2193988 - DNA, 25 bp, Homo sapien
gagaaatgcgagagaacaccctaga

SEQ ID NO: 2193989 - DNA, 25 bp, Homo sapien
tgagcacggtagaaaatgcagcgag

SEQ ID NO: 2193990 - DNA, 25 bp, Homo sapien
aatccccgcgtgaggaacgcgttat

SEQ ID NO: 2193991 - DNA, 25 bp, Homo sapien
tccccgcgtgaggaacgcgttatcc

SEQ ID NO: 2193992 - DNA, 25 bp, Homo sapien
ccaatccccgcgtgaggaacgcgtt

SEQ ID NO: 2193993 - DNA, 25 bp, Homo sapien
ccgcgtgaggaacgcgttatcccct

SEQ ID NO: 2193994 - DNA, 25 bp, Homo sapien
aaatcagctttttctctccgagccc

SEQ ID NO: 2193995 - DNA, 25 bp, Homo sapien
aatcagctttttctctccgagcccg

SEQ ID NO: 2193996 - DNA, 25 bp, Homo sapien
cgcgggagaggttcctagacgccca

SEQ ID NO: 2193997 - DNA, 25 bp, Homo sapien
tgctcgcgccacaagtgcacggatt

SEQ ID NO: 2193998 - DNA, 25 bp, Homo sapien
tgtccaagttttgaccgcctcagct

SEQ ID NO: 2193999 - DNA, 25 bp, Homo sapien
aagtgcacggattgcggccatcaga

SEQ ID NO: 2194000 - DNA, 25 bp, Homo sapien
gccgccgcccaagctcacagctgaa

SEQ ID NO: 2194001 - DNA, 25 bp, Homo sapien
gctccgcggtcgagtgtgggtacga

SEQ ID NO: 2194002 - DNA, 25 bp, Homo sapien
gccgggctccccgaaagtggagcgc

SEQ ID NO: 2194003 - DNA, 25 bp, Homo sapien
tacgagtggaggagtgagcttccca

SEQ ID NO: 2194004 - DNA, 25 bp, Homo sapien
tcacagagccacctatatcaagccg

SEQ ID NO: 2194005 - DNA, 25 bp, Homo sapien
aggccgacggttgcttcatgggaaa

SEQ ID NO: 2194006 - DNA, 25 bp, Homo sapien
tatcaagccgaacatctaaaaagat

SEQ ID NO: 2194007 - DNA, 25 bp, Homo sapien
gaatttggagtacctattagcctgc

SEQ ID NO: 2194008 - DNA, 25 bp, Homo sapien
aggcaaagtggtctaagaatgcagc

SEQ ID NO: 2194009 - DNA, 25 bp, Homo sapien
caggaacatgatgccgaggtacacc

SEQ ID NO: 2194010 - DNA, 25 bp, Homo sapien
agtgcccctcgacataagccaggaa

SEQ ID NO: 2194011 - DNA, 25 bp, Homo sapien
cacctgagttgaggcaatcttatgg

SEQ ID NO: 2194012 - DNA, 25 bp, Homo sapien
gaacaccaatattcccagccgcttg

SEQ ID NO: 2194013 - DNA, 25 bp, Homo sapien
ctgcttctcagatcggcatctttat

SEQ ID NO: 2194014 - DNA, 25 bp, Homo sapien
gaaagcacagctttgaacaccaata

SEQ ID NO: 2194015 - DNA, 25 bp, Homo sapien
gcatctttatcactcatgccagaag

SEQ ID NO: 2194016 - DNA, 25 bp, Homo sapien
ggcttaaatttaggcacatccagga

SEQ ID NO: 2194017 - DNA, 25 bp, Homo sapien
tctgtgggaagcatctacttagggc

SEQ ID NO: 2194018 - DNA, 25 bp, Homo sapien
taaagctggtcaatcgttgagcccc

SEQ ID NO: 2194019 - DNA, 25 bp, Homo sapien
gaagcaatgtgggtatgttcccgac

SEQ ID NO: 2194020 - DNA, 25 bp, Homo sapien
aaccttgtctgatgccctgtatggt

SEQ ID NO: 2194021 - DNA, 25 bp, Homo sapien
tgctaatgatggaagactgttgcta

SEQ ID NO: 2194022 - DNA, 25 bp, Homo sapien
tgtgaatcactactgagcctacact

SEQ ID NO: 2194023 - DNA, 25 bp, Homo sapien
gattagcgagggcacaatgttccac

SEQ ID NO: 2194024 - DNA, 25 bp, Homo sapien
tgtggacttcacatgaactcgctgt

SEQ ID NO: 2194025 - DNA, 25 bp, Homo sapien
ttgccaatctagtctactttcaaac

SEQ ID NO: 2194026 - DNA, 25 bp, Homo sapien
cacagcagccaattatgtcttgcca

SEQ ID NO: 2194027 - DNA, 25 bp, Homo sapien
acacagcagccaattatgtcttgcc

SEQ ID NO: 2194028 - DNA, 25 bp, Homo sapien
attatgtcttgccaatctagtctac

SEQ ID NO: 2194029 - DNA, 25 bp, Homo sapien
ctgacatgcaatggctttggggacc

SEQ ID NO: 2194030 - DNA, 25 bp, Homo sapien
tctgacatgcaatggctttggggac

SEQ ID NO: 2194031 - DNA, 25 bp, Homo sapien
gacatgcaatggctttggggaccaa

SEQ ID NO: 2194032 - DNA, 25 bp, Homo sapien
catctgacatgcaatggctttgggg

SEQ ID NO: 2194033 - DNA, 25 bp, Homo sapien
tattacagaaaagtagcagaaaacc

SEQ ID NO: 2194034 - DNA, 25 bp, Homo sapien
tagaactaatatatgcagaagaggt

SEQ ID NO: 2194035 - DNA, 25 bp, Homo sapien
tataaggtcaaacacttttgctggt

SEQ ID NO: 2194036 - DNA, 25 bp, Homo sapien
gcagaaaaccaaccttcggctagaa

SEQ ID NO: 2194037 - DNA, 25 bp, Homo sapien
cagcagctggttaaaggctattata

SEQ ID NO: 2194038 - DNA, 25 bp, Homo sapien
ttacccatatgggagcatgcaacat

SEQ ID NO: 2194039 - DNA, 25 bp, Homo sapien
cccatatgggagcatgcaacataaa

SEQ ID NO: 2194040 - DNA, 25 bp, Homo sapien
gctggttaaaggctattatattgaa

SEQ ID NO: 2194041 - DNA, 25 bp, Homo sapien
actttgtttggcgagatggctctct

SEQ ID NO: 2194042 - DNA, 25 bp, Homo sapien
ttggcgagatggctctctcccaggg

SEQ ID NO: 2194043 - DNA, 25 bp, Homo sapien
atatagtagggcactttgtttggcg

SEQ ID NO: 2194044 - DNA, 25 bp, Homo sapien
gatatagtagggcactttgtttggc

SEQ ID NO: 2194045 - DNA, 25 bp, Homo sapien
ccccagttcctagatcagagtttga

SEQ ID NO: 2194046 - DNA, 25 bp, Homo sapien
taacaatgctacaggcaccatgtca

SEQ ID NO: 2194047 - DNA, 25 bp, Homo sapien
caaccatagttgataagacccttcc

SEQ ID NO: 2194048 - DNA, 25 bp, Homo sapien
caatatctgactggtgtacttcctc

SEQ ID NO: 2194049 - DNA, 25 bp, Homo sapien
agtgataaaagctgaaaatgactta

SEQ ID NO: 2194050 - DNA, 25 bp, Homo sapien
ttaagtgataaaagctgaaaatgac

SEQ ID NO: 2194051 - DNA, 25 bp, Homo sapien
gtgataaaagctgaaaatgacttac

SEQ ID NO: 2194052 - DNA, 25 bp, Homo sapien
taagtgataaaagctgaaaatgact

SEQ ID NO: 2194053 - DNA, 25 bp, Homo sapien
aagtgctgagatgctggaccaaagt

SEQ ID NO: 2194054 - DNA, 25 bp, Homo sapien
gctgagatgctggaccaaagtccct

SEQ ID NO: 2194055 - DNA, 25 bp, Homo sapien
gaaagtgctgagatgctggaccaaa

SEQ ID NO: 2194056 - DNA, 25 bp, Homo sapien
agatgctggaccaaagtccctgtgg

SEQ ID NO: 2194057 - DNA, 25 bp, Homo sapien
gcctgactcggtcctcgacggccac

SEQ ID NO: 2194058 - DNA, 25 bp, Homo sapien
gcagctgcctgactcggtcctcgac

SEQ ID NO: 2194059 - DNA, 25 bp, Homo sapien
agctgcctgactcggtcctcgacgg

SEQ ID NO: 2194060 - DNA, 25 bp, Homo sapien
ctgcctgactcggtcctcgacggcc

SEQ ID NO: 2194061 - DNA, 25 bp, Homo sapien
atataactcttgtgcgtggcttctt

SEQ ID NO: 2194062 - DNA, 25 bp, Homo sapien
tgcctgtcctgcactattccatcca

SEQ ID NO: 2194063 - DNA, 25 bp, Homo sapien
gcactattccatccaatataactct

SEQ ID NO: 2194064 - DNA, 25 bp, Homo sapien
gtcctgcactattccatccaatata

SEQ ID NO: 2194065 - DNA, 25 bp, Homo sapien
tcacgcttcttagtaaaggacaggg

SEQ ID NO: 2194066 - DNA, 25 bp, Homo sapien
tactgtacttccaaatcctacaaca

SEQ ID NO: 2194067 - DNA, 25 bp, Homo sapien
cgcatatcataagccacaagttatt

SEQ ID NO: 2194068 - DNA, 25 bp, Homo sapien
tcaataaaccggaagatctcatcta

SEQ ID NO: 2194069 - DNA, 25 bp, Homo sapien
gactcacagtctctacggtctctct

SEQ ID NO: 2194070 - DNA, 25 bp, Homo sapien
ctgtgtagatgtgtgagaaccagaa

SEQ ID NO: 2194071 - DNA, 25 bp, Homo sapien
tagatgtgtgagaaccagaattaaa

SEQ ID NO: 2194072 - DNA, 25 bp, Homo sapien
ctgccatggactcacagtctctacg

SEQ ID NO: 2194073 - DNA, 25 bp, Homo sapien
gtaatagcaaatcagtaaatcatgg

SEQ ID NO: 2194074 - DNA, 25 bp, Homo sapien
ctggtttgttgcagcatagtttgat

SEQ ID NO: 2194075 - DNA, 25 bp, Homo sapien
tagcaaatcagtaaatcatggacgg

SEQ ID NO: 2194076 - DNA, 25 bp, Homo sapien
gcagcatagtttgatgtaatagcaa

SEQ ID NO: 2194077 - DNA, 25 bp, Homo sapien
gtgtagaacggtattccattctggg

SEQ ID NO: 2194078 - DNA, 25 bp, Homo sapien
atcagtacagttggtgtagaacggt

SEQ ID NO: 2194079 - DNA, 25 bp, Homo sapien
aacggtattccattctggggctcat

SEQ ID NO: 2194080 - DNA, 25 bp, Homo sapien
tggtgtagaacggtattccattctg

SEQ ID NO: 2194081 - DNA, 25 bp, Homo sapien
tgcactgatggttctccatactcct

SEQ ID NO: 2194082 - DNA, 25 bp, Homo sapien
aagactgacactgccgctgctctgc

SEQ ID NO: 2194083 - DNA, 25 bp, Homo sapien
tccaatgacacaaagcctatcctgc

SEQ ID NO: 2194084 - DNA, 25 bp, Homo sapien
gctccactttgaggtttgtagcaaa

SEQ ID NO: 2194085 - DNA, 25 bp, Homo sapien
tctaactcgtgctgtatagccagca

SEQ ID NO: 2194086 - DNA, 25 bp, Homo sapien
tagtggacggttctgtgcaagttct

SEQ ID NO: 2194087 - DNA, 25 bp, Homo sapien
gtgcaagttctaactcgtgctgtat

SEQ ID NO: 2194088 - DNA, 25 bp, Homo sapien
tgattccagtgtcagcagtagtgga

SEQ ID NO: 2194089 - DNA, 25 bp, Homo sapien
gatctacttatggttgacatctcac

SEQ ID NO: 2194090 - DNA, 25 bp, Homo sapien
cctcggtcagatctacttatggttg

SEQ ID NO: 2194091 - DNA, 25 bp, Homo sapien
tggttgacatctcaccacaactaac

SEQ ID NO: 2194092 - DNA, 25 bp, Homo sapien
atttcctcggtcagatctacttatg

SEQ ID NO: 2194093 - DNA, 25 bp, Homo sapien
caacaggttatgaagccaaacacag

SEQ ID NO: 2194094 - DNA, 25 bp, Homo sapien
ccttgggaatattgctcttttttgc

SEQ ID NO: 2194095 - DNA, 25 bp, Homo sapien
ccaaacacagtgattaggactagtg

SEQ ID NO: 2194096 - DNA, 25 bp, Homo sapien
tcttttttgcgtaatgtttgggcca

SEQ ID NO: 2194097 - DNA, 25 bp, Homo sapien
tgacaacaatatagccagcacaagt

SEQ ID NO: 2194098 - DNA, 25 bp, Homo sapien
gaagttaaagcctctataccgacac

SEQ ID NO: 2194099 - DNA, 25 bp, Homo sapien
tatatgactgaagcgcgaactgtgt

SEQ ID NO: 2194100 - DNA, 25 bp, Homo sapien
taattctgcatctgggtactctagg

SEQ ID NO: 2194101 - DNA, 25 bp, Homo sapien
ttgcacactgggcatatccactgac

SEQ ID NO: 2194102 - DNA, 25 bp, Homo sapien
actgggcatatccactgacaacaca

SEQ ID NO: 2194103 - DNA, 25 bp, Homo sapien
cagatgggatatgtgtacttttgcc

SEQ ID NO: 2194104 - DNA, 25 bp, Homo sapien
aattccagatgggatatgtgtactt

SEQ ID NO: 2194105 - DNA, 25 bp, Homo sapien
gaattgctttctccgacaaggaagc

SEQ ID NO: 2194106 - DNA, 25 bp, Homo sapien
tcatttatggtgactgaattgcttt

SEQ ID NO: 2194107 - DNA, 25 bp, Homo sapien
tttatggtgactgaattgctttctc

SEQ ID NO: 2194108 - DNA, 25 bp, Homo sapien
gctttctccgacaaggaagcctcac

SEQ ID NO: 2194109 - DNA, 25 bp, Homo sapien
tacggatggtgctctcaaaaattgg

SEQ ID NO: 2194110 - DNA, 25 bp, Homo sapien
tgttcgtggactttacggatggtgc

SEQ ID NO: 2194111 - DNA, 25 bp, Homo sapien
gactttacggatggtgctctcaaaa

SEQ ID NO: 2194112 - DNA, 25 bp, Homo sapien
gatggtgctctcaaaaattggccag

SEQ ID NO: 2194113 - DNA, 25 bp, Homo sapien
gaataggtatttgtcagtgcagaga

SEQ ID NO: 2194114 - DNA, 25 bp, Homo sapien
cagagagtgcgaacagaacattatt

SEQ ID NO: 2194115 - DNA, 25 bp, Homo sapien
gactctcggcactattcctggaaga

SEQ ID NO: 2194116 - DNA, 25 bp, Homo sapien
gccatttatgcaattgatgcatgga

SEQ ID NO: 2194117 - DNA, 25 bp, Homo sapien
tatttaccccagtcgtcttccagat

SEQ ID NO: 2194118 - DNA, 25 bp, Homo sapien
tgctctgcacggatagtattcagcc

SEQ ID NO: 2194119 - DNA, 25 bp, Homo sapien
tgctgtaggttcattatgcaaatgt

SEQ ID NO: 2194120 - DNA, 25 bp, Homo sapien
tcaacaaattctctatttaccccag

SEQ ID NO: 2194121 - DNA, 25 bp, Homo sapien
gctgttatacaggttccaacttgtc

SEQ ID NO: 2194122 - DNA, 25 bp, Homo sapien
cagtattgatttgctgttatacagg

SEQ ID NO: 2194123 - DNA, 25 bp, Homo sapien
caggttccaacttgtctaaatttca

SEQ ID NO: 2194124 - DNA, 25 bp, Homo sapien
gatttgctgttatacaggttccaac

SEQ ID NO: 2194125 - DNA, 25 bp, Homo sapien
cttgaacctgctgatgcccatgagg

SEQ ID NO: 2194126 - DNA, 25 bp, Homo sapien
gcgtgagccacgacacccggtcatt

SEQ ID NO: 2194127 - DNA, 25 bp, Homo sapien
tcatttttttcttggagttttggca

SEQ ID NO: 2194128 - DNA, 25 bp, Homo sapien
cgtgagccacgacacccggtcattt

SEQ ID NO: 2194129 - DNA, 25 bp, Homo sapien
tgagccacgacacccggtcattttt

SEQ ID NO: 2194130 - DNA, 25 bp, Homo sapien
gcaattcttgagatcgtggtctgaa

SEQ ID NO: 2194131 - DNA, 25 bp, Homo sapien
ggagttctgacagattccccaggca

SEQ ID NO: 2194132 - DNA, 25 bp, Homo sapien
ctgggttacgtgaggcttaaaagca

SEQ ID NO: 2194133 - DNA, 25 bp, Homo sapien
cagtaagtgctaggtaagttctcac

SEQ ID NO: 2194134 - DNA, 25 bp, Homo sapien
cagcttctcatgtggcctgaaaggg

SEQ ID NO: 2194135 - DNA, 25 bp, Homo sapien
tgaaggaggagtcgggaatcttact

SEQ ID NO: 2194136 - DNA, 25 bp, Homo sapien
tcgggaatcttactggcggccatgt

SEQ ID NO: 2194137 - DNA, 25 bp, Homo sapien
ggagttggctttaacacgcagcttc

SEQ ID NO: 2194138 - DNA, 25 bp, Homo sapien
tagtatctgctaattgagaaaaggc

SEQ ID NO: 2194139 - DNA, 25 bp, Homo sapien
tttgtattcaagctacagacaatgc

SEQ ID NO: 2194140 - DNA, 25 bp, Homo sapien
tactgcagtattttgggagaggtgc

SEQ ID NO: 2194141 - DNA, 25 bp, Homo sapien
cagtgggcacatcagactagatatt

SEQ ID NO: 2194142 - DNA, 25 bp, Homo sapien
gtttggctttaagagctgattcact

SEQ ID NO: 2194143 - DNA, 25 bp, Homo sapien
tagtttggctttaagagctgattca

SEQ ID NO: 2194144 - DNA, 25 bp, Homo sapien
ttagtttggctttaagagctgattc

SEQ ID NO: 2194145 - DNA, 25 bp, Homo sapien
agtttggctttaagagctgattcac

SEQ ID NO: 2194146 - DNA, 25 bp, Homo sapien
gaggcgcaatttctcctcgaagtgc

SEQ ID NO: 2194147 - DNA, 25 bp, Homo sapien
tcacgttctctttcagaggcgcaat

SEQ ID NO: 2194148 - DNA, 25 bp, Homo sapien
gttatacggtgagagctgaatgccc

SEQ ID NO: 2194149 - DNA, 25 bp, Homo sapien
cccaaagtggtaagctggcgagcaa

SEQ ID NO: 2194150 - DNA, 25 bp, Homo sapien
aattggcagcaggtacagcccagct

SEQ ID NO: 2194151 - DNA, 25 bp, Homo sapien
cagcaggtacagcccagctatgttt

SEQ ID NO: 2194152 - DNA, 25 bp, Homo sapien
gaattggcagcaggtacagcccagc

SEQ ID NO: 2194153 - DNA, 25 bp, Homo sapien
tggcagcaggtacagcccagctatg

SEQ ID NO: 2194154 - DNA, 25 bp, Homo sapien
aaatctcaagtagatcagtataact

SEQ ID NO: 2194155 - DNA, 25 bp, Homo sapien
tctcaagtagatcagtataacttgt

SEQ ID NO: 2194156 - DNA, 25 bp, Homo sapien
gtagatcagtataacttgtggtcat

SEQ ID NO: 2194157 - DNA, 25 bp, Homo sapien
aagtagatcagtataacttgtggtc

SEQ ID NO: 2194158 - DNA, 25 bp, Homo sapien
gaaagcctccacacggcaattcatt

SEQ ID NO: 2194159 - DNA, 25 bp, Homo sapien
gagtgacactcgctataatatggcc

SEQ ID NO: 2194160 - DNA, 25 bp, Homo sapien
ttcagaggaaatatgcttggcttcc

SEQ ID NO: 2194161 - DNA, 25 bp, Homo sapien
gatttttaggatcgccctgttcatg

SEQ ID NO: 2194162 - DNA, 25 bp, Homo sapien
caagtatggctaaaaatgaatccct

SEQ ID NO: 2194163 - DNA, 25 bp, Homo sapien
gaataccgcaaatagggttgggtga

SEQ ID NO: 2194164 - DNA, 25 bp, Homo sapien
taaagaagagctaccgaagggagat

SEQ ID NO: 2194165 - DNA, 25 bp, Homo sapien
acccttagttttccagtacacagca

SEQ ID NO: 2194166 - DNA, 25 bp, Homo sapien
gggccctgaagcaaagaagtagacg

SEQ ID NO: 2194167 - DNA, 25 bp, Homo sapien
tcagcttggcgcagcttgaggtcca

SEQ ID NO: 2194168 - DNA, 25 bp, Homo sapien
ggatcccttgatcacctcagcttgg

SEQ ID NO: 2194169 - DNA, 25 bp, Homo sapien
cctgctttcgtagaagccgagtgac

SEQ ID NO: 2194170 - DNA, 25 bp, Homo sapien
ccagtcagcggagtgcaggttcaat

SEQ ID NO: 2194171 - DNA, 25 bp, Homo sapien
ctaaattggcaatatgacaaggttt

SEQ ID NO: 2194172 - DNA, 25 bp, Homo sapien
taaattggcaatatgacaaggtttt

SEQ ID NO: 2194173 - DNA, 25 bp, Homo sapien
aaattggcaatatgacaaggtttta

SEQ ID NO: 2194174 - DNA, 25 bp, Homo sapien
gagtttctctagtccttccaaaggc

SEQ ID NO: 2194175 - DNA, 25 bp, Homo sapien
gctctgtcagaaatattcgtacagt

SEQ ID NO: 2194176 - DNA, 25 bp, Homo sapien
gtagagtttctctagtccttccaaa

SEQ ID NO: 2194177 - DNA, 25 bp, Homo sapien
ttcgtacagtctcaagagtactcat

SEQ ID NO: 2194178 - DNA, 25 bp, Homo sapien
tagttttcaattccctcttgaaggc

SEQ ID NO: 2194179 - DNA, 25 bp, Homo sapien
tctttagttttcaattccctcttga

SEQ ID NO: 2194180 - DNA, 25 bp, Homo sapien
tcaacctagtgatttcttaaaggag

SEQ ID NO: 2194181 - DNA, 25 bp, Homo sapien
tccatggtttgaactgctgcttggg

SEQ ID NO: 2194182 - DNA, 25 bp, Homo sapien
cactcagaagttccatggtttgaac

SEQ ID NO: 2194183 - DNA, 25 bp, Homo sapien
atgtccaaacactcagaagttccat

SEQ ID NO: 2194184 - DNA, 25 bp, Homo sapien
tgcagacgcttccactggtcagaac

SEQ ID NO: 2194185 - DNA, 25 bp, Homo sapien
cttctgaactgctggaaagtcgcct

SEQ ID NO: 2194186 - DNA, 25 bp, Homo sapien
tgcctgccggcttaattcatcatct

SEQ ID NO: 2194187 - DNA, 25 bp, Homo sapien
cctccaataggtgcctgccggctta

SEQ ID NO: 2194188 - DNA, 25 bp, Homo sapien
caaacgtctttgtaacaggactgca

SEQ ID NO: 2194189 - DNA, 25 bp, Homo sapien
ccagggatctcaggattttttggct

SEQ ID NO: 2194190 - DNA, 25 bp, Homo sapien
gagactttttccgaagttcactcca

SEQ ID NO: 2194191 - DNA, 25 bp, Homo sapien
caggactgcatcatcggaaccttcc

SEQ ID NO: 2194192 - DNA, 25 bp, Homo sapien
ctttacatggtatgtcttcctgtgt

SEQ ID NO: 2194193 - DNA, 25 bp, Homo sapien
catggtatgtcttcctgtgtaacat

SEQ ID NO: 2194194 - DNA, 25 bp, Homo sapien
tttacatggtatgtcttcctgtgta

SEQ ID NO: 2194195 - DNA, 25 bp, Homo sapien
tacatggtatgtcttcctgtgtaac

SEQ ID NO: 2194196 - DNA, 25 bp, Homo sapien
accgggcactacagcactgatcctg

SEQ ID NO: 2194197 - DNA, 25 bp, Homo sapien
gcttgaaccgggcactacagcactg

SEQ ID NO: 2194198 - DNA, 25 bp, Homo sapien
gcactacagcactgatcctgttgca

SEQ ID NO: 2194199 - DNA, 25 bp, Homo sapien
tttcagcttgaaccgggcactacag

SEQ ID NO: 2194200 - DNA, 25 bp, Homo sapien
tctgtgacacgacgttctctttctg

SEQ ID NO: 2194201 - DNA, 25 bp, Homo sapien
gcaaaagggtctcagtagcagcaga

SEQ ID NO: 2194202 - DNA, 25 bp, Homo sapien
aaagggtctcagtagcagcagaggc

SEQ ID NO: 2194203 - DNA, 25 bp, Homo sapien
ctcattctctccaagtaacaaaagg

SEQ ID NO: 2194204 - DNA, 25 bp, Homo sapien
aaggccagtggttcacaccactgtt

SEQ ID NO: 2194205 - DNA, 25 bp, Homo sapien
ccactgtttgtgcacccaggtgccc

SEQ ID NO: 2194206 - DNA, 25 bp, Homo sapien
gccagtggttcacaccactgtttgt

SEQ ID NO: 2194207 - DNA, 25 bp, Homo sapien
accactgtttgtgcacccaggtgcc

SEQ ID NO: 2194208 - DNA, 25 bp, Homo sapien
ccaggatcagaaccagagccttcag

SEQ ID NO: 2194209 - DNA, 25 bp, Homo sapien
gaaccagagccttcagctggcagcc

SEQ ID NO: 2194210 - DNA, 25 bp, Homo sapien
aggatcagaaccagagccttcagct

SEQ ID NO: 2194211 - DNA, 25 bp, Homo sapien
cagaaccagagccttcagctggcag

SEQ ID NO: 2194212 - DNA, 25 bp, Homo sapien
aagatgactttcatctacagtgatc

SEQ ID NO: 2194213 - DNA, 25 bp, Homo sapien
agatgactttcatctacagtgatct

SEQ ID NO: 2194214 - DNA, 25 bp, Homo sapien
atgactttcatctacagtgatctct

SEQ ID NO: 2194215 - DNA, 25 bp, Homo sapien
gatgactttcatctacagtgatctc

SEQ ID NO: 2194216 - DNA, 25 bp, Homo sapien
tggggagtcagtcatcatacttcct

SEQ ID NO: 2194217 - DNA, 25 bp, Homo sapien
ctcccaaaatcccagttcacctcag

SEQ ID NO: 2194218 - DNA, 25 bp, Homo sapien
gggcaaaaatcctatctccaggaag

SEQ ID NO: 2194219 - DNA, 25 bp, Homo sapien
ttctccagattgagggcaaaaatcc

SEQ ID NO: 2194220 - DNA, 25 bp, Homo sapien
tcttttaaaagagatgccgggagga

SEQ ID NO: 2194221 - DNA, 25 bp, Homo sapien
tagtatagtagaatcgtgccgcagt

SEQ ID NO: 2194222 - DNA, 25 bp, Homo sapien
taccactttagtgcagactggcctg

SEQ ID NO: 2194223 - DNA, 25 bp, Homo sapien
tgccgcagtcatgagaagcaaccct

SEQ ID NO: 2194224 - DNA, 25 bp, Homo sapien
gctagaagtcactcacaaaagctaa

SEQ ID NO: 2194225 - DNA, 25 bp, Homo sapien
cgcccggccgatgagttattatata

SEQ ID NO: 2194226 - DNA, 25 bp, Homo sapien
tgcaatcacattaatcgcaaccata

SEQ ID NO: 2194227 - DNA, 25 bp, Homo sapien
agagttggcatagctatttagcaaa

SEQ ID NO: 2194228 - DNA, 25 bp, Homo sapien
ccgccttttgatggcatgtccttaa

SEQ ID NO: 2194229 - DNA, 25 bp, Homo sapien
tcttttggtgagtgccagatcacta

SEQ ID NO: 2194230 - DNA, 25 bp, Homo sapien
taacaacatcaatcagggaaagctc

SEQ ID NO: 2194231 - DNA, 25 bp, Homo sapien
taatgactacccctcttttggtgag

SEQ ID NO: 2194232 - DNA, 25 bp, Homo sapien
gacatagtctcagcctaaatggtag

SEQ ID NO: 2194233 - DNA, 25 bp, Homo sapien
gggaagctgcgccttgctaatttaa

SEQ ID NO: 2194234 - DNA, 25 bp, Homo sapien
tactaagctgcgtgaaaacttctag

SEQ ID NO: 2194235 - DNA, 25 bp, Homo sapien
tcaagctgggactttatgggaagct

SEQ ID NO: 2194236 - DNA, 25 bp, Homo sapien
ggcttaacccatggtgcattaacaa

SEQ ID NO: 2194237 - DNA, 25 bp, Homo sapien
cacatgtcgtagtgtggcttaaccc

SEQ ID NO: 2194238 - DNA, 25 bp, Homo sapien
ctagtttgaaaacttccaggtctat

SEQ ID NO: 2194239 - DNA, 25 bp, Homo sapien
taattttcacctgcctgtctgcgaa

SEQ ID NO: 2194240 - DNA, 25 bp, Homo sapien
taaaactctaggcatgggaccattc

SEQ ID NO: 2194241 - DNA, 25 bp, Homo sapien
gatgcatgttcaagtcggccctaaa

SEQ ID NO: 2194242 - DNA, 25 bp, Homo sapien
caagtcctctagtagctttgatgca

SEQ ID NO: 2194243 - DNA, 25 bp, Homo sapien
gctaaaggaatctcaggacaatgat

SEQ ID NO: 2194244 - DNA, 25 bp, Homo sapien
taacgcagtgagtaatggtacaatt

SEQ ID NO: 2194245 - DNA, 25 bp, Homo sapien
aaaattgattgcatctaggtttacc

SEQ ID NO: 2194246 - DNA, 25 bp, Homo sapien
caaattgatcaaaaggttatacgct

SEQ ID NO: 2194247 - DNA, 25 bp, Homo sapien
gaatgttgcattttaacgcagtgag

SEQ ID NO: 2194248 - DNA, 25 bp, Homo sapien
tacacaatgagaaatgtagtatctg

SEQ ID NO: 2194249 - DNA, 25 bp, Homo sapien
cttacacaatgagaaatgtagtatc

SEQ ID NO: 2194250 - DNA, 25 bp, Homo sapien
ttacacaatgagaaatgtagtatct

SEQ ID NO: 2194251 - DNA, 25 bp, Homo sapien
acacaatgagaaatgtagtatctga

SEQ ID NO: 2194252 - DNA, 25 bp, Homo sapien
ttctgtccttaagagaaagccactg

SEQ ID NO: 2194253 - DNA, 25 bp, Homo sapien
ccctgagtatcatttcgaggcaaat

SEQ ID NO: 2194254 - DNA, 25 bp, Homo sapien
caacaacggcttcaggtctaggaga

SEQ ID NO: 2194255 - DNA, 25 bp, Homo sapien
ccaatcctgagtatgtagtgccttg

SEQ ID NO: 2194256 - DNA, 25 bp, Homo sapien
gaaaaaagcatcaaggcactgtagt

SEQ ID NO: 2194257 - DNA, 25 bp, Homo sapien
tgtgacccataatgcaaggtgcttc

SEQ ID NO: 2194258 - DNA, 25 bp, Homo sapien
gcttgtggctggtcaaaaagaacag

SEQ ID NO: 2194259 - DNA, 25 bp, Homo sapien
tgggctggcagtaccttataaaaag

SEQ ID NO: 2194260 - DNA, 25 bp, Homo sapien
accagaatgagttatcaataattgc

SEQ ID NO: 2194261 - DNA, 25 bp, Homo sapien
caggtaccagaatgagttatcaata

SEQ ID NO: 2194262 - DNA, 25 bp, Homo sapien
ggtaccagaatgagttatcaataat

SEQ ID NO: 2194263 - DNA, 25 bp, Homo sapien
taccagaatgagttatcaataattg

SEQ ID NO: 2194264 - DNA, 25 bp, Homo sapien
gaattaatcagtcctactgctactt

SEQ ID NO: 2194265 - DNA, 25 bp, Homo sapien
actctttactcctcctctataggaa

SEQ ID NO: 2194266 - DNA, 25 bp, Homo sapien
caggaagacctatcatctgactttc

SEQ ID NO: 2194267 - DNA, 25 bp, Homo sapien
cactcatgatgtggtgcgggcagca

SEQ ID NO: 2194268 - DNA, 25 bp, Homo sapien
ttctcatctcgtctttcaaattctt

SEQ ID NO: 2194269 - DNA, 25 bp, Homo sapien
ttttctcatctcgtctttcaaattc

SEQ ID NO: 2194270 - DNA, 25 bp, Homo sapien
ctcatctcgtctttcaaattcttgt

SEQ ID NO: 2194271 - DNA, 25 bp, Homo sapien
tcttgtttttctggtggtgttccat

SEQ ID NO: 2194272 - DNA, 25 bp, Homo sapien
ctccttttaccaaactgtgtttcag

SEQ ID NO: 2194273 - DNA, 25 bp, Homo sapien
ggtgtgatttcctgtgttactcagg

SEQ ID NO: 2194274 - DNA, 25 bp, Homo sapien
gtcattggtgtgatttcctgtgtta

SEQ ID NO: 2194275 - DNA, 25 bp, Homo sapien
tttaccaaactgtgtttcaggcaat

SEQ ID NO: 2194276 - DNA, 25 bp, Homo sapien
ttaaatggaaatctgcaagttggat

SEQ ID NO: 2194277 - DNA, 25 bp, Homo sapien
aatagtaagagtgtgaatgagagtg

SEQ ID NO: 2194278 - DNA, 25 bp, Homo sapien
aaaaatagtaagagtgtgaatgaga

SEQ ID NO: 2194279 - DNA, 25 bp, Homo sapien
ggaaatctgcaagttggattggagc

SEQ ID NO: 2194280 - DNA, 25 bp, Homo sapien
catgctacgttcaattgaactggta

SEQ ID NO: 2194281 - DNA, 25 bp, Homo sapien
caatagattcatgggtagaacatgc

SEQ ID NO: 2194282 - DNA, 25 bp, Homo sapien
tcactgaacaatagattcatgggta

SEQ ID NO: 2194283 - DNA, 25 bp, Homo sapien
gggtagaacatgctacgttcaattg

SEQ ID NO: 2194284 - DNA, 25 bp, Homo sapien
tctaaccatacatcgaagagtgagc

SEQ ID NO: 2194285 - DNA, 25 bp, Homo sapien
taactcaacacgcattttggaggag

SEQ ID NO: 2194286 - DNA, 25 bp, Homo sapien
gcaagaacgataaattcaggagcca

SEQ ID NO: 2194287 - DNA, 25 bp, Homo sapien
cacaagccatgggagatatctataa

SEQ ID NO: 2194288 - DNA, 25 bp, Homo sapien
ataaaacagacaattcatacagatg

SEQ ID NO: 2194289 - DNA, 25 bp, Homo sapien
agttagcaacgctaaataaaacaga

SEQ ID NO: 2194290 - DNA, 25 bp, Homo sapien
gttagcaacgctaaataaaacagac

SEQ ID NO: 2194291 - DNA, 25 bp, Homo sapien
cagacaattcatacagatgctttcc

SEQ ID NO: 2194292 - DNA, 25 bp, Homo sapien
ccttggagtcttctaggagcctttc

SEQ ID NO: 2194293 - DNA, 25 bp, Homo sapien
cagtaatctatgagtttcttccaaa

SEQ ID NO: 2194294 - DNA, 25 bp, Homo sapien
cttacgggtagcatcctgtaggaca

SEQ ID NO: 2194295 - DNA, 25 bp, Homo sapien
ttggcagttgtttcagcttctgtaa

SEQ ID NO: 2194296 - DNA, 25 bp, Homo sapien
tatatattatgagcaggccccaatg

SEQ ID NO: 2194297 - DNA, 25 bp, Homo sapien
ttttaaacaaatatcccgctagcat

SEQ ID NO: 2194298 - DNA, 25 bp, Homo sapien
cagtgcccaacatctgatgaattgt

SEQ ID NO: 2194299 - DNA, 25 bp, Homo sapien
ccgctagcattctatcatatttttg

SEQ ID NO: 2194300 - DNA, 25 bp, Homo sapien
attgtacaggtgctattttttcagc

SEQ ID NO: 2194301 - DNA, 25 bp, Homo sapien
catattgtacaggtgctattttttc

SEQ ID NO: 2194302 - DNA, 25 bp, Homo sapien
tttcagcttgcacaaggtaattgta

SEQ ID NO: 2194303 - DNA, 25 bp, Homo sapien
cagcttgcacaaggtaattgtacat

SEQ ID NO: 2194304 - DNA, 25 bp, Homo sapien
ttctctgttatcatgtggacttttc

SEQ ID NO: 2194305 - DNA, 25 bp, Homo sapien
catttgtctgccactggcggaggtc

SEQ ID NO: 2194306 - DNA, 25 bp, Homo sapien
ggccaagtcatttgccacatctaca

SEQ ID NO: 2194307 - DNA, 25 bp, Homo sapien
tctgcagaataatcccggagaagtt

SEQ ID NO: 2194308 - DNA, 25 bp, Homo sapien
gggttttacccaagtgtcattcaca

SEQ ID NO: 2194309 - DNA, 25 bp, Homo sapien
aagtgtcattcacactaggaaccat

SEQ ID NO: 2194310 - DNA, 25 bp, Homo sapien
tgggttttacccaagtgtcattcac

SEQ ID NO: 2194311 - DNA, 25 bp, Homo sapien
gctgagagcagactagtaaatgtgt

SEQ ID NO: 2194312 - DNA, 25 bp, Homo sapien
attttctgtcttacatggcttcatg

SEQ ID NO: 2194313 - DNA, 25 bp, Homo sapien
tcaacaatgactacaagctgagagc

SEQ ID NO: 2194314 - DNA, 25 bp, Homo sapien
ggccaacccattagagttccattat

SEQ ID NO: 2194315 - DNA, 25 bp, Homo sapien
catgtactcttagctcagccaagca

SEQ ID NO: 2194316 - DNA, 25 bp, Homo sapien
aaacagctaatgctgtcacgtttga

SEQ ID NO: 2194317 - DNA, 25 bp, Homo sapien
ttctctattgaattcatgtactctt

SEQ ID NO: 2194318 - DNA, 25 bp, Homo sapien
cacaaaacagctaatgctgtcacgt

SEQ ID NO: 2194319 - DNA, 25 bp, Homo sapien
atcagatactggtttagcaaaaggc

SEQ ID NO: 2194320 - DNA, 25 bp, Homo sapien
agaatcagatactggtttagcaaaa

SEQ ID NO: 2194321 - DNA, 25 bp, Homo sapien
agatactggtttagcaaaaggcctt

SEQ ID NO: 2194322 - DNA, 25 bp, Homo sapien
tcagatactggtttagcaaaaggcc

SEQ ID NO: 2194323 - DNA, 25 bp, Homo sapien
tggctctggcctgtcctaagacctg

SEQ ID NO: 2194324 - DNA, 25 bp, Homo sapien
gattgcatctactgtatagggaccc

SEQ ID NO: 2194325 - DNA, 25 bp, Homo sapien
caactgttgcctccggttctgaagg

SEQ ID NO: 2194326 - DNA, 25 bp, Homo sapien
ccttagcttccagccattgtgttga

SEQ ID NO: 2194327 - DNA, 25 bp, Homo sapien
caataatccatctatccctctgtgc

SEQ ID NO: 2194328 - DNA, 25 bp, Homo sapien
aataatccatctatccctctgtgca

SEQ ID NO: 2194329 - DNA, 25 bp, Homo sapien
ataatccatctatccctctgtgcat

SEQ ID NO: 2194330 - DNA, 25 bp, Homo sapien
tcaataatccatctatccctctgtg

SEQ ID NO: 2194331 - DNA, 25 bp, Homo sapien
aaaaatgttatggcatttagacaac

SEQ ID NO: 2194332 - DNA, 25 bp, Homo sapien
aaaatgttatggcatttagacaaca

SEQ ID NO: 2194333 - DNA, 25 bp, Homo sapien
aaatgttatggcatttagacaacat

SEQ ID NO: 2194334 - DNA, 25 bp, Homo sapien
caaaaatgttatggcatttagacaa

SEQ ID NO: 2194335 - DNA, 25 bp, Homo sapien
cagcccagtgcctagatgaacaaat

SEQ ID NO: 2194336 - DNA, 25 bp, Homo sapien
gaacaaatgacgtatcaatagccat

SEQ ID NO: 2194337 - DNA, 25 bp, Homo sapien
gcctagatgaacaaatgacgtatca

SEQ ID NO: 2194338 - DNA, 25 bp, Homo sapien
cagtgcctagatgaacaaatgacgt

SEQ ID NO: 2194339 - DNA, 25 bp, Homo sapien
aaaacactctgtcaattgctcccac

SEQ ID NO: 2194340 - DNA, 25 bp, Homo sapien
taaaattagtataggaactcttaca

SEQ ID NO: 2194341 - DNA, 25 bp, Homo sapien
caatgcttgggtttatgggaaacaa

SEQ ID NO: 2194342 - DNA, 25 bp, Homo sapien
ctcttacaatagtacagcagctcct

SEQ ID NO: 2194343 - DNA, 25 bp, Homo sapien
cctggagagagacaataccttggtg

SEQ ID NO: 2194344 - DNA, 25 bp, Homo sapien
cataactatacatccagagaagaaa

SEQ ID NO: 2194345 - DNA, 25 bp, Homo sapien
tggagagagacaataccttggtgaa

SEQ ID NO: 2194346 - DNA, 25 bp, Homo sapien
atcataactatacatccagagaaga

SEQ ID NO: 2194347 - DNA, 25 bp, Homo sapien
tcctgaaacagaattcccatagtaa

SEQ ID NO: 2194348 - DNA, 25 bp, Homo sapien
taatccatgtgaacagtgctttgta

SEQ ID NO: 2194349 - DNA, 25 bp, Homo sapien
gacacacatacgttgccagaacttg

SEQ ID NO: 2194350 - DNA, 25 bp, Homo sapien
cctatactatttgcagccaagggaa

SEQ ID NO: 2194351 - DNA, 25 bp, Homo sapien
taaggacactaagcccgaatctccc

SEQ ID NO: 2194352 - DNA, 25 bp, Homo sapien
taatagccacaatggaactatgaat

SEQ ID NO: 2194353 - DNA, 25 bp, Homo sapien
gacactaagcccgaatctcccttta

SEQ ID NO: 2194354 - DNA, 25 bp, Homo sapien
gaactatgaattaaggacactaagc

SEQ ID NO: 2194355 - DNA, 25 bp, Homo sapien
ttgtagcctacactagctgccagct

SEQ ID NO: 2194356 - DNA, 25 bp, Homo sapien
gcttgtagcctacactagctgccag

SEQ ID NO: 2194357 - DNA, 25 bp, Homo sapien
gcagcttgtagcctacactagctgc

SEQ ID NO: 2194358 - DNA, 25 bp, Homo sapien
tgtagcctacactagctgccagctc

SEQ ID NO: 2194359 - DNA, 25 bp, Homo sapien
tcatgcatcttgctttgtgtgtccc

SEQ ID NO: 2194360 - DNA, 25 bp, Homo sapien
tgtgtgtcccatgcttgttaaaaaa

SEQ ID NO: 2194361 - DNA, 25 bp, Homo sapien
gactgaaaatctcagcacaattgtt

SEQ ID NO: 2194362 - DNA, 25 bp, Homo sapien
gcacaattgttatcatttacaatta

SEQ ID NO: 2194363 - DNA, 25 bp, Homo sapien
aactggggacgcctctgttccaaat

SEQ ID NO: 2194364 - DNA, 25 bp, Homo sapien
tcgatccgtaatgattgttctagcc

SEQ ID NO: 2194365 - DNA, 25 bp, Homo sapien
tcaaattttgggcagcggtaatgag

SEQ ID NO: 2194366 - DNA, 25 bp, Homo sapien
ggcagcggtaatgagttcttccaac

SEQ ID NO: 2194367 - DNA, 25 bp, Homo sapien
cagggttcttcagcgttgtgtattc

SEQ ID NO: 2194368 - DNA, 25 bp, Homo sapien
gtatcagggttcttcagcgttgtgt

SEQ ID NO: 2194369 - DNA, 25 bp, Homo sapien
caaatatcccttagtatcagggttc

SEQ ID NO: 2194370 - DNA, 25 bp, Homo sapien
ctgtaagaacaaatatcccttagta

SEQ ID NO: 2194371 - DNA, 25 bp, Homo sapien
caaagtaaagtacaattgtgagacc

SEQ ID NO: 2194372 - DNA, 25 bp, Homo sapien
agtacaattgtgagaccagccaaaa

SEQ ID NO: 2194373 - DNA, 25 bp, Homo sapien
aaagtacaattgtgagaccagccaa

SEQ ID NO: 2194374 - DNA, 25 bp, Homo sapien
gtaaagtacaattgtgagaccagcc

SEQ ID NO: 2194375 - DNA, 25 bp, Homo sapien
aaggtgtattgttgggtctctttca

SEQ ID NO: 2194376 - DNA, 25 bp, Homo sapien
tcttggctcttcgacaagttctcag

SEQ ID NO: 2194377 - DNA, 25 bp, Homo sapien
ttttatcttggctcttcgacaagtt

SEQ ID NO: 2194378 - DNA, 25 bp, Homo sapien
tatcttggctcttcgacaagttctc

SEQ ID NO: 2194379 - DNA, 25 bp, Homo sapien
ttggctcttcgacaagttctcagtt

SEQ ID NO: 2194380 - DNA, 25 bp, Homo sapien
tctctattatttcttccctgggtat

SEQ ID NO: 2194381 - DNA, 25 bp, Homo sapien
ttctctattatttcttccctgggta

SEQ ID NO: 2194382 - DNA, 25 bp, Homo sapien
attctctattatttcttccctgggt

SEQ ID NO: 2194383 - DNA, 25 bp, Homo sapien
tcatctcgttgatatcctcaaggtc

SEQ ID NO: 2194384 - DNA, 25 bp, Homo sapien
cttgatgatcatctcgttgatatcc

SEQ ID NO: 2194385 - DNA, 25 bp, Homo sapien
gatcatctcgttgatatcctcaagg

SEQ ID NO: 2194386 - DNA, 25 bp, Homo sapien
gatgatcatctcgttgatatcctca

SEQ ID NO: 2194387 - DNA, 25 bp, Homo sapien
tataacttgatcaagcagagaaagc

SEQ ID NO: 2194388 - DNA, 25 bp, Homo sapien
ccagtcggtaagttctgtccaagcc

SEQ ID NO: 2194389 - DNA, 25 bp, Homo sapien
caccctctgtgattttataacttga

SEQ ID NO: 2194390 - DNA, 25 bp, Homo sapien
gcccggttgaaatctgccagagcag

SEQ ID NO: 2194391 - DNA, 25 bp, Homo sapien
taaccacaggttgtgtcaccagagt

SEQ ID NO: 2194392 - DNA, 25 bp, Homo sapien
caggttgtgtcaccagagtaacagt

SEQ ID NO: 2194393 - DNA, 25 bp, Homo sapien
cttagtaaccacaggttgtgtcacc

SEQ ID NO: 2194394 - DNA, 25 bp, Homo sapien
cacaggttgtgtcaccagagtaaca

SEQ ID NO: 2194395 - DNA, 25 bp, Homo sapien
ctccacacccatgtctattgtgcat

SEQ ID NO: 2194396 - DNA, 25 bp, Homo sapien
gtcctttcatacgctttctatactt

SEQ ID NO: 2194397 - DNA, 25 bp, Homo sapien
tgtgtcctttcatacgctttctata

SEQ ID NO: 2194398 - DNA, 25 bp, Homo sapien
gtgtcctttcatacgctttctatac

SEQ ID NO: 2194399 - DNA, 25 bp, Homo sapien
tgtcctttcatacgctttctatact

SEQ ID NO: 2194400 - DNA, 25 bp, Homo sapien
tactgtaatgcttcatcaagatcct

SEQ ID NO: 2194401 - DNA, 25 bp, Homo sapien
tctggagtcgatgcacccacactac

SEQ ID NO: 2194402 - DNA, 25 bp, Homo sapien
ggtaagcagaatatgccagtgcctc

SEQ ID NO: 2194403 - DNA, 25 bp, Homo sapien
tgcctctctgtagtggatactgtaa

SEQ ID NO: 2194404 - DNA, 25 bp, Homo sapien
tcttgtgtaacttcaggatttctat

SEQ ID NO: 2194405 - DNA, 25 bp, Homo sapien
gagtcttgctcgtaattatcttgtg

SEQ ID NO: 2194406 - DNA, 25 bp, Homo sapien
ctgatccccagctcaagggttcctt

SEQ ID NO: 2194407 - DNA, 25 bp, Homo sapien
tttactgctactactcattctccac

SEQ ID NO: 2194408 - DNA, 25 bp, Homo sapien
tatttttaaaacgtgctaggctcca

SEQ ID NO: 2194409 - DNA, 25 bp, Homo sapien
tagtctctctacaatgcttcagtgg

SEQ ID NO: 2194410 - DNA, 25 bp, Homo sapien
tcagttacctattcttcagccagag

SEQ ID NO: 2194411 - DNA, 25 bp, Homo sapien
tgaaccactggaatagcctccaaag

SEQ ID NO: 2194412 - DNA, 25 bp, Homo sapien
ctaagaagaaatccggtatgtgaag

SEQ ID NO: 2194413 - DNA, 25 bp, Homo sapien
taagaagaaatccggtatgtgaagc

SEQ ID NO: 2194414 - DNA, 25 bp, Homo sapien
tggaaatccccagaatcatagagat

SEQ ID NO: 2194415 - DNA, 25 bp, Homo sapien
tccagagattcctcaagctgtatgc

SEQ ID NO: 2194416 - DNA, 25 bp, Homo sapien
tagagatttgcgtctgtaaactggc

SEQ ID NO: 2194417 - DNA, 25 bp, Homo sapien
caacacatgctgtgagtgacctcca

SEQ ID NO: 2194418 - DNA, 25 bp, Homo sapien
caatagtatagccatgtcgtaagtg

SEQ ID NO: 2194419 - DNA, 25 bp, Homo sapien
tataaaaccggcaatagtatagcca

SEQ ID NO: 2194420 - DNA, 25 bp, Homo sapien
tagccatgtcgtaagtgtttttagc

SEQ ID NO: 2194421 - DNA, 25 bp, Homo sapien
catgtcgtaagtgtttttagcagag

SEQ ID NO: 2194422 - DNA, 25 bp, Homo sapien
gcagcttgtggataagaaaggattc

SEQ ID NO: 2194423 - DNA, 25 bp, Homo sapien
gcccagcagcttgtggataagaaag

SEQ ID NO: 2194424 - DNA, 25 bp, Homo sapien
agcttgtggataagaaaggattcac

SEQ ID NO: 2194425 - DNA, 25 bp, Homo sapien
cagcagcttgtggataagaaaggat

SEQ ID NO: 2194426 - DNA, 25 bp, Homo sapien
tttacaaccagatttgctggctctt

SEQ ID NO: 2194427 - DNA, 25 bp, Homo sapien
atttacaaccagatttgctggctct

SEQ ID NO: 2194428 - DNA, 25 bp, Homo sapien
catttacaaccagatttgctggctc

SEQ ID NO: 2194429 - DNA, 25 bp, Homo sapien
aggctccaatagtggtcagtccagg

SEQ ID NO: 2194430 - DNA, 25 bp, Homo sapien
acggtttaccgccttccactcagag

SEQ ID NO: 2194431 - DNA, 25 bp, Homo sapien
tcagctcttgaagtaaacggtttac

SEQ ID NO: 2194432 - DNA, 25 bp, Homo sapien
ccttccactcagagctcagatcttc

SEQ ID NO: 2194433 - DNA, 25 bp, Homo sapien
cttgattgatgtcgggtttggttaa

SEQ ID NO: 2194434 - DNA, 25 bp, Homo sapien
aataacttgattgatgtcgggtttg

SEQ ID NO: 2194435 - DNA, 25 bp, Homo sapien
taacttgattgatgtcgggtttggt

SEQ ID NO: 2194436 - DNA, 25 bp, Homo sapien
acaaataacttgattgatgtcgggt

SEQ ID NO: 2194437 - DNA, 25 bp, Homo sapien
aaatgctgccctttagacaaaatct

SEQ ID NO: 2194438 - DNA, 25 bp, Homo sapien
caaaatctcttccacatccggttgt

SEQ ID NO: 2194439 - DNA, 25 bp, Homo sapien
tagcttgaactgctatttcagtttc

SEQ ID NO: 2194440 - DNA, 25 bp, Homo sapien
ttccacatccggttgtttagcttga

SEQ ID NO: 2194441 - DNA, 25 bp, Homo sapien
tttaaatatacccttggagactcca

SEQ ID NO: 2194442 - DNA, 25 bp, Homo sapien
tatagtgcagattaacttcacagtt

SEQ ID NO: 2194443 - DNA, 25 bp, Homo sapien
tagtgcagattaacttcacagttag

SEQ ID NO: 2194444 - DNA, 25 bp, Homo sapien
ctccacatgtattgcagatcaattt

SEQ ID NO: 2194445 - DNA, 25 bp, Homo sapien
tttaatagtttcagggtgccacaaa

SEQ ID NO: 2194446 - DNA, 25 bp, Homo sapien
tatggtgatgggtaatcagtaatct

SEQ ID NO: 2194447 - DNA, 25 bp, Homo sapien
taataaccgtactatggcctctaaa

SEQ ID NO: 2194448 - DNA, 25 bp, Homo sapien
acaaacagtgcccatataggatggc

SEQ ID NO: 2194449 - DNA, 25 bp, Homo sapien
aacatagctaattatagtggccggc

SEQ ID NO: 2194450 - DNA, 25 bp, Homo sapien
gattgccaaacctctgatatccagg

SEQ ID NO: 2194451 - DNA, 25 bp, Homo sapien
catagccttgtaatagctctgaggg

SEQ ID NO: 2194452 - DNA, 25 bp, Homo sapien
gaaagtcgtcatgggatttccacca

SEQ ID NO: 2194453 - DNA, 25 bp, Homo sapien
tcctgatacaacaagaaaggtccca

SEQ ID NO: 2194454 - DNA, 25 bp, Homo sapien
cacgcttcaaggtgttatcaagcca

SEQ ID NO: 2194455 - DNA, 25 bp, Homo sapien
cagaattatactcttgcccagaggc

SEQ ID NO: 2194456 - DNA, 25 bp, Homo sapien
ccttatctaacagagtcccagggaa

SEQ ID NO: 2194457 - DNA, 25 bp, Homo sapien
tcctaataggagataaccacagcag

SEQ ID NO: 2194458 - DNA, 25 bp, Homo sapien
tgatttaactgctcttcaaggtctt

SEQ ID NO: 2194459 - DNA, 25 bp, Homo sapien
tttccaactgattcctaataggaga

SEQ ID NO: 2194460 - DNA, 25 bp, Homo sapien
agatgatttaactgctcttcaaggt

SEQ ID NO: 2194461 - DNA, 25 bp, Homo sapien
taggtaacaagccctttaatggctc

SEQ ID NO: 2194462 - DNA, 25 bp, Homo sapien
ttcaatgtcaaacacaatcaccttg

SEQ ID NO: 2194463 - DNA, 25 bp, Homo sapien
cttttcaatgtcaaacacaatcacc

SEQ ID NO: 2194464 - DNA, 25 bp, Homo sapien
ttttcaatgtcaaacacaatcacct

SEQ ID NO: 2194465 - DNA, 25 bp, Homo sapien
caatgtcaaacacaatcaccttgct

SEQ ID NO: 2194466 - DNA, 25 bp, Homo sapien
aactaatcctccatgacacttcaca

SEQ ID NO: 2194467 - DNA, 25 bp, Homo sapien
actaatcctccatgacacttcacag

SEQ ID NO: 2194468 - DNA, 25 bp, Homo sapien
ctaatcctccatgacacttcacaga

SEQ ID NO: 2194469 - DNA, 25 bp, Homo sapien
tcttgccccgaaccataaggtggat

SEQ ID NO: 2194470 - DNA, 25 bp, Homo sapien
atgctgattttggcatccagcttac

SEQ ID NO: 2194471 - DNA, 25 bp, Homo sapien
tcaggcccttatcagcccttttgtt

SEQ ID NO: 2194472 - DNA, 25 bp, Homo sapien
ccttttgttacccatacagtggtct

SEQ ID NO: 2194473 - DNA, 25 bp, Homo sapien
tcagataatctagctcatccttctc

SEQ ID NO: 2194474 - DNA, 25 bp, Homo sapien
agataatctagctcatccttctcag

SEQ ID NO: 2194475 - DNA, 25 bp, Homo sapien
cagataatctagctcatccttctca

SEQ ID NO: 2194476 - DNA, 25 bp, Homo sapien
tttcagataatctagctcatccttc

SEQ ID NO: 2194477 - DNA, 25 bp, Homo sapien
ctgttgcattcataatagtagcaca

SEQ ID NO: 2194478 - DNA, 25 bp, Homo sapien
attcataatagtagcacatagttca

SEQ ID NO: 2194479 - DNA, 25 bp, Homo sapien
tcataatagtagcacatagttcagc

SEQ ID NO: 2194480 - DNA, 25 bp, Homo sapien
ttcataatagtagcacatagttcag

SEQ ID NO: 2194481 - DNA, 25 bp, Homo sapien
ctggagatttgtctgcttgagctta

SEQ ID NO: 2194482 - DNA, 25 bp, Homo sapien
taattgtttgagaattccctggcgc

SEQ ID NO: 2194483 - DNA, 25 bp, Homo sapien
tcttctgggcttatgggagcactta

SEQ ID NO: 2194484 - DNA, 25 bp, Homo sapien
gagcacttacaagcacgggtcctcc

SEQ ID NO: 2194485 - DNA, 25 bp, Homo sapien
ttcctccaaccataaaacaaattca

SEQ ID NO: 2194486 - DNA, 25 bp, Homo sapien
tcctccaaccataaaacaaattcat

SEQ ID NO: 2194487 - DNA, 25 bp, Homo sapien
aagtgggatactagcaatgttatct

SEQ ID NO: 2194488 - DNA, 25 bp, Homo sapien
gatactagcaatgttatctgcttcc

SEQ ID NO: 2194489 - DNA, 25 bp, Homo sapien
tccctaaagtttgtgtcttgtcgga

SEQ ID NO: 2194490 - DNA, 25 bp, Homo sapien
gagttgtacaagtagacatttgttc

SEQ ID NO: 2194491 - DNA, 25 bp, Homo sapien
gtttgtgtcttgtcggaatgaagtg

SEQ ID NO: 2194492 - DNA, 25 bp, Homo sapien
ctggttggtgcttgagttgtacaag

SEQ ID NO: 2194493 - DNA, 25 bp, Homo sapien
catacaaaggtctgcatgaggtact

SEQ ID NO: 2194494 - DNA, 25 bp, Homo sapien
ggacaaagcttgcttaccccaggca

SEQ ID NO: 2194495 - DNA, 25 bp, Homo sapien
tagagtaaggactccggaggcagac

SEQ ID NO: 2194496 - DNA, 25 bp, Homo sapien
gactgcgggactgcatcctggttca

SEQ ID NO: 2194497 - DNA, 25 bp, Homo sapien
ggcatctgtttttgaggattgctga

SEQ ID NO: 2194498 - DNA, 25 bp, Homo sapien
gccaccgcagattcaggcttcccaa

SEQ ID NO: 2194499 - DNA, 25 bp, Homo sapien
ttctgacaacagtttgccgctgccc

SEQ ID NO: 2194500 - DNA, 25 bp, Homo sapien
gctgcccaatgccatcctggagttc

SEQ ID NO: 2194501 - DNA, 25 bp, Homo sapien
tacaatgactttccaattcttcatc

SEQ ID NO: 2194502 - DNA, 25 bp, Homo sapien
taggcttcttacaatgactttccaa

SEQ ID NO: 2194503 - DNA, 25 bp, Homo sapien
ctttttaggcttcttacaatgactt

SEQ ID NO: 2194504 - DNA, 25 bp, Homo sapien
caatgactttccaattcttcatcca

SEQ ID NO: 2194505 - DNA, 25 bp, Homo sapien
tatactgtggtagtgaacgtggcag

SEQ ID NO: 2194506 - DNA, 25 bp, Homo sapien
gaagtgggttcttagtggatgaaaa

SEQ ID NO: 2194507 - DNA, 25 bp, Homo sapien
cagtggttgaagtgggttcttagtg

SEQ ID NO: 2194508 - DNA, 25 bp, Homo sapien
ttccagagggtgttccatattatac

SEQ ID NO: 2194509 - DNA, 25 bp, Homo sapien
ggctcccagtgtcagcgctatgaat

SEQ ID NO: 2194510 - DNA, 25 bp, Homo sapien
cagtgtcagcgctatgaatgggtct

SEQ ID NO: 2194511 - DNA, 25 bp, Homo sapien
cttatctcccagagcatatctagcc

SEQ ID NO: 2194512 - DNA, 25 bp, Homo sapien
tatctagcctttccaacatggctcc

SEQ ID NO: 2194513 - DNA, 25 bp, Homo sapien
gcacccttcattacaatcagtgcgt

SEQ ID NO: 2194514 - DNA, 25 bp, Homo sapien
ttcatggcctttgaagcacccttca

SEQ ID NO: 2194515 - DNA, 25 bp, Homo sapien
tgctgggggtctctgtaaataagtt

SEQ ID NO: 2194516 - DNA, 25 bp, Homo sapien
gtaaataagttgctttccaagttca

SEQ ID NO: 2194517 - DNA, 25 bp, Homo sapien
aaaacacggtcagagttagcacctt

SEQ ID NO: 2194518 - DNA, 25 bp, Homo sapien
acacggtcagagttagcaccttcat

SEQ ID NO: 2194519 - DNA, 25 bp, Homo sapien
ataaaaacacggtcagagttagcac

SEQ ID NO: 2194520 - DNA, 25 bp, Homo sapien
taaaaacacggtcagagttagcacc

SEQ ID NO: 2194521 - DNA, 25 bp, Homo sapien
tcactcgacgataaatccacgtctc

SEQ ID NO: 2194522 - DNA, 25 bp, Homo sapien
aatccacgtctcagaatttgctcta

SEQ ID NO: 2194523 - DNA, 25 bp, Homo sapien
gataaatccacgtctcagaatttgc

SEQ ID NO: 2194524 - DNA, 25 bp, Homo sapien
tcgacgataaatccacgtctcagaa

SEQ ID NO: 2194525 - DNA, 25 bp, Homo sapien
gagaaccaacaatgccttcatattt

SEQ ID NO: 2194526 - DNA, 25 bp, Homo sapien
ccaacaatgccttcatattttttct

SEQ ID NO: 2194527 - DNA, 25 bp, Homo sapien
caacaatgccttcatattttttctt

SEQ ID NO: 2194528 - DNA, 25 bp, Homo sapien
aaaagagaaccaacaatgccttcat

SEQ ID NO: 2194529 - DNA, 25 bp, Homo sapien
cacgagattgaaagatgcattgtga

SEQ ID NO: 2194530 - DNA, 25 bp, Homo sapien
tgtgagagaagttccggtttgctac

SEQ ID NO: 2194531 - DNA, 25 bp, Homo sapien
gatgcattgtgagagaagttccggt

SEQ ID NO: 2194532 - DNA, 25 bp, Homo sapien
aaagcacgagattgaaagatgcatt

SEQ ID NO: 2194533 - DNA, 25 bp, Homo sapien
tgagatatacaataaagcatcatta

SEQ ID NO: 2194534 - DNA, 25 bp, Homo sapien
ttgagatatacaataaagcatcatt

SEQ ID NO: 2194535 - DNA, 25 bp, Homo sapien
tttgagatatacaataaagcatcat

SEQ ID NO: 2194536 - DNA, 25 bp, Homo sapien
ttgttttgcaacacctgcattagat

SEQ ID NO: 2194537 - DNA, 25 bp, Homo sapien
tttgcaacacctgcattagatgctg

SEQ ID NO: 2194538 - DNA, 25 bp, Homo sapien
tgttttgcaacacctgcattagatg

SEQ ID NO: 2194539 - DNA, 25 bp, Homo sapien
gttttgcaacacctgcattagatgc

SEQ ID NO: 2194540 - DNA, 25 bp, Homo sapien
gagggcattggaaggcaaacaaaac

SEQ ID NO: 2194541 - DNA, 25 bp, Homo sapien
taattttcctatcccttgaggcctg

SEQ ID NO: 2194542 - DNA, 25 bp, Homo sapien
gtgcctaggttctgcaataacaatg

SEQ ID NO: 2194543 - DNA, 25 bp, Homo sapien
ccaagcctacagagtgcgtgcctag

SEQ ID NO: 2194544 - DNA, 25 bp, Homo sapien
gctgagctagatggcccctttaatg

SEQ ID NO: 2194545 - DNA, 25 bp, Homo sapien
tcagctgagctagatggccccttta

SEQ ID NO: 2194546 - DNA, 25 bp, Homo sapien
gctagatggcccctttaatggtgtt

SEQ ID NO: 2194547 - DNA, 25 bp, Homo sapien
agcttcagctgagctagatggcccc

SEQ ID NO: 2194548 - DNA, 25 bp, Homo sapien
ctagacaatgactcagtgttatttc

SEQ ID NO: 2194549 - DNA, 25 bp, Homo sapien
cacctctgctacatctagacaatga

SEQ ID NO: 2194550 - DNA, 25 bp, Homo sapien
gctacatctagacaatgactcagtg

SEQ ID NO: 2194551 - DNA, 25 bp, Homo sapien
gattccacctctgctacatctagac

SEQ ID NO: 2194552 - DNA, 25 bp, Homo sapien
cttgcatgagggtaaatggcgaaca

SEQ ID NO: 2194553 - DNA, 25 bp, Homo sapien
gtaaatggcgaacaggagagcatgg

SEQ ID NO: 2194554 - DNA, 25 bp, Homo sapien
ttgcatgagggtaaatggcgaacag

SEQ ID NO: 2194555 - DNA, 25 bp, Homo sapien
agggtaaatggcgaacaggagagca

SEQ ID NO: 2194556 - DNA, 25 bp, Homo sapien
tttgtaatcaaatttgttaattcca

SEQ ID NO: 2194557 - DNA, 25 bp, Homo sapien
cgtgcatccgtcaaaggcttagctt

SEQ ID NO: 2194558 - DNA, 25 bp, Homo sapien
tctttcctgactaaagtttcttgca

SEQ ID NO: 2194559 - DNA, 25 bp, Homo sapien
ctatcatctccttctaagcattctg

SEQ ID NO: 2194560 - DNA, 25 bp, Homo sapien
tcctgctatcatctccttctaagca

SEQ ID NO: 2194561 - DNA, 25 bp, Homo sapien
gtgcggttgtatgctaatcctagtc

SEQ ID NO: 2194562 - DNA, 25 bp, Homo sapien
gcaatgcagcctttcgtataactag

SEQ ID NO: 2194563 - DNA, 25 bp, Homo sapien
gcctttcgtataactaggctcctag

SEQ ID NO: 2194564 - DNA, 25 bp, Homo sapien
taggctcctagtgcggttgtatgct

SEQ ID NO: 2194565 - DNA, 25 bp, Homo sapien
tcagtaactcctgagatgaacacaa

SEQ ID NO: 2194566 - DNA, 25 bp, Homo sapien
gatgaacacaatgcccatatataac

SEQ ID NO: 2194567 - DNA, 25 bp, Homo sapien
tatataactaggatctccggtgtac

SEQ ID NO: 2194568 - DNA, 25 bp, Homo sapien
cacaatgcccatatataactaggat

SEQ ID NO: 2194569 - DNA, 25 bp, Homo sapien
tgtccactgtgatgtggccctttct

SEQ ID NO: 2194570 - DNA, 25 bp, Homo sapien
ccactgtgatgtggccctttctgtc

SEQ ID NO: 2194571 - DNA, 25 bp, Homo sapien
ctcatttgccttgtccactgtgatg

SEQ ID NO: 2194572 - DNA, 25 bp, Homo sapien
tgccttgtccactgtgatgtggccc

SEQ ID NO: 2194573 - DNA, 25 bp, Homo sapien
tagatgcataaagccctataccaag

SEQ ID NO: 2194574 - DNA, 25 bp, Homo sapien
agatgcataaagccctataccaagc

SEQ ID NO: 2194575 - DNA, 25 bp, Homo sapien
gtagatgcataaagccctataccaa

SEQ ID NO: 2194576 - DNA, 25 bp, Homo sapien
gatgcataaagccctataccaagca

SEQ ID NO: 2194577 - DNA, 25 bp, Homo sapien
gggactgattccacagccctgggtg

SEQ ID NO: 2194578 - DNA, 25 bp, Homo sapien
cattttgggactgattccacagccc

SEQ ID NO: 2194579 - DNA, 25 bp, Homo sapien
tttgggactgattccacagccctgg

SEQ ID NO: 2194580 - DNA, 25 bp, Homo sapien
ccttccctgctttcattcttcattt

SEQ ID NO: 2194581 - DNA, 25 bp, Homo sapien
gaggtctcagtgacatataggtcag

SEQ ID NO: 2194582 - DNA, 25 bp, Homo sapien
cacactggtgcaagtggtgcagaaa

SEQ ID NO: 2194583 - DNA, 25 bp, Homo sapien
tcagaaagtttgagtgttacacaca

SEQ ID NO: 2194584 - DNA, 25 bp, Homo sapien
taggtcagggacgtctttaccaatg

SEQ ID NO: 2194585 - DNA, 25 bp, Homo sapien
gcttctctgtctggtgttatgtctc

SEQ ID NO: 2194586 - DNA, 25 bp, Homo sapien
taagttgactatgcaattgcacgct

SEQ ID NO: 2194587 - DNA, 25 bp, Homo sapien
tgcctctgtcactattcaggttcct

SEQ ID NO: 2194588 - DNA, 25 bp, Homo sapien
cacactgctcacttttctgtataag

SEQ ID NO: 2194589 - DNA, 25 bp, Homo sapien
aaatgtctccaaggttttctcgtga

SEQ ID NO: 2194590 - DNA, 25 bp, Homo sapien
aaggttttctcgtgacgagccaagg

SEQ ID NO: 2194591 - DNA, 25 bp, Homo sapien
ttaaattgatctgctgagtccagca

SEQ ID NO: 2194592 - DNA, 25 bp, Homo sapien
tccaaggttttctcgtgacgagcca

SEQ ID NO: 2194593 - DNA, 25 bp, Homo sapien
aggacctgaacaccatagaagaagc

SEQ ID NO: 2194594 - DNA, 25 bp, Homo sapien
gaacaccatagaagaagcaattttc

SEQ ID NO: 2194595 - DNA, 25 bp, Homo sapien
ggtgagggtgctcgttcaggacctg

SEQ ID NO: 2194596 - DNA, 25 bp, Homo sapien
tggaggtgagggtgctcgttcagga

SEQ ID NO: 2194597 - DNA, 25 bp, Homo sapien
tgtagcaaaggctctaaagaaatcc

SEQ ID NO: 2194598 - DNA, 25 bp, Homo sapien
aaagctttgccattgctagtgtgaa

SEQ ID NO: 2194599 - DNA, 25 bp, Homo sapien
gtccccacggatgcttttagttcag

SEQ ID NO: 2194600 - DNA, 25 bp, Homo sapien
catcagccaactttgtgtgtagcaa

SEQ ID NO: 2194601 - DNA, 25 bp, Homo sapien
ccagctctcagatgaaggtacgtca

SEQ ID NO: 2194602 - DNA, 25 bp, Homo sapien
gaaggtacgtcagctctctcttgac

SEQ ID NO: 2194603 - DNA, 25 bp, Homo sapien
ctcttgactaatggtgtggtctgca

SEQ ID NO: 2194604 - DNA, 25 bp, Homo sapien
gactaatggtgtggtctgcatcatg

SEQ ID NO: 2194605 - DNA, 25 bp, Homo sapien
tggaatgccttcatgtactcccagg

SEQ ID NO: 2194606 - DNA, 25 bp, Homo sapien
tatctgtgcctactccttggaatgc

SEQ ID NO: 2194607 - DNA, 25 bp, Homo sapien
gatactgttgtccaagcatcgcccc

SEQ ID NO: 2194608 - DNA, 25 bp, Homo sapien
tcagcagcaaaagatgtcaggagca

SEQ ID NO: 2194609 - DNA, 25 bp, Homo sapien
taaaatgccctgataagaagtaatc

SEQ ID NO: 2194610 - DNA, 25 bp, Homo sapien
taaaaagaattagacagcaccgtga

SEQ ID NO: 2194611 - DNA, 25 bp, Homo sapien
taacggaacatatcagcagatgtgg

SEQ ID NO: 2194612 - DNA, 25 bp, Homo sapien
aatcttagccagaaggattgcttcc

SEQ ID NO: 2194613 - DNA, 25 bp, Homo sapien
catgaatagtcaattacgagacact

SEQ ID NO: 2194614 - DNA, 25 bp, Homo sapien
aaaaatctgtctcccatgaagctta

SEQ ID NO: 2194615 - DNA, 25 bp, Homo sapien
tctctagccttatgccagcacactg

SEQ ID NO: 2194616 - DNA, 25 bp, Homo sapien
tagctccttaatctagtagggcgtt

SEQ ID NO: 2194617 - DNA, 25 bp, Homo sapien
caaacatcctatagtggacagggca

SEQ ID NO: 2194618 - DNA, 25 bp, Homo sapien
tgacagagactatttgggccacaaa

SEQ ID NO: 2194619 - DNA, 25 bp, Homo sapien
gggcagtccaccacaacaaagatgt

SEQ ID NO: 2194620 - DNA, 25 bp, Homo sapien
ccaaaggtcacgtgggtggcaaata

SEQ ID NO: 2194621 - DNA, 25 bp, Homo sapien
atgctgccacattaaatttattcat

SEQ ID NO: 2194622 - DNA, 25 bp, Homo sapien
tgctgccacattaaatttattcatt

SEQ ID NO: 2194623 - DNA, 25 bp, Homo sapien
tatgctgccacattaaatttattca

SEQ ID NO: 2194624 - DNA, 25 bp, Homo sapien
ctatgctgccacattaaatttattc

SEQ ID NO: 2194625 - DNA, 25 bp, Homo sapien
actccaactccattgtgctctctga

SEQ ID NO: 2194626 - DNA, 25 bp, Homo sapien
agaggaggacggtcttttcatggac

SEQ ID NO: 2194627 - DNA, 25 bp, Homo sapien
tcaatcactaataaccatggtaagg

SEQ ID NO: 2194628 - DNA, 25 bp, Homo sapien
tcatggactcgcttgtctcaaactt

SEQ ID NO: 2194629 - DNA, 25 bp, Homo sapien
gccgccatttctcaacagatctgtc

SEQ ID NO: 2194630 - DNA, 25 bp, Homo sapien
gtatttagcatgttcccaattctca

SEQ ID NO: 2194631 - DNA, 25 bp, Homo sapien
tatcataatgaaaacgccgccattt

SEQ ID NO: 2194632 - DNA, 25 bp, Homo sapien
taccatttgtatttagcatgttccc

SEQ ID NO: 2194633 - DNA, 25 bp, Homo sapien
gactgacatggtgaacgctaaagct

SEQ ID NO: 2194634 - DNA, 25 bp, Homo sapien
tagaatactagagactgaatcagct

SEQ ID NO: 2194635 - DNA, 25 bp, Homo sapien
gatcagaacccttgactgacttgtg

SEQ ID NO: 2194636 - DNA, 25 bp, Homo sapien
gacatatatcactcctacatagagg

SEQ ID NO: 2194637 - DNA, 25 bp, Homo sapien
gaaccattaagtacacaagtatatt

SEQ ID NO: 2194638 - DNA, 25 bp, Homo sapien
caaacgccttgaaccattaagtaca

SEQ ID NO: 2194639 - DNA, 25 bp, Homo sapien
ccttgaaccattaagtacacaagta

SEQ ID NO: 2194640 - DNA, 25 bp, Homo sapien
aacgccttgaaccattaagtacaca

SEQ ID NO: 2194641 - DNA, 25 bp, Homo sapien
caagagacataaaccagatggtctt

SEQ ID NO: 2194642 - DNA, 25 bp, Homo sapien
aagagacataaaccagatggtcttc

SEQ ID NO: 2194643 - DNA, 25 bp, Homo sapien
ctgtgatagtcagcttatggtagtt

SEQ ID NO: 2194644 - DNA, 25 bp, Homo sapien
cttatggtagttttgagcagcagac

SEQ ID NO: 2194645 - DNA, 25 bp, Homo sapien
tagtcagcttatggtagttttgagc

SEQ ID NO: 2194646 - DNA, 25 bp, Homo sapien
tggtagttttgagcagcagacagct

SEQ ID NO: 2194647 - DNA, 25 bp, Homo sapien
tcaccctttccacaggcgttgcact

SEQ ID NO: 2194648 - DNA, 25 bp, Homo sapien
gagctttgttgtagactatctttta

SEQ ID NO: 2194649 - DNA, 25 bp, Homo sapien
tgtcaatccgacctgagctttgttg

SEQ ID NO: 2194650 - DNA, 25 bp, Homo sapien
gtcttcttgctatgaataatgtcaa

SEQ ID NO: 2194651 - DNA, 25 bp, Homo sapien
gtactacaacccctgcactcacaga

SEQ ID NO: 2194652 - DNA, 25 bp, Homo sapien
tctatataatctccaagatccacaa

SEQ ID NO: 2194653 - DNA, 25 bp, Homo sapien
aacccctgcactcacagataaacat

SEQ ID NO: 2194654 - DNA, 25 bp, Homo sapien
ttctctcctgtactacaacccctgc

SEQ ID NO: 2194655 - DNA, 25 bp, Homo sapien
cagtccaatggcaaagatacataac

SEQ ID NO: 2194656 - DNA, 25 bp, Homo sapien
aacgtgcaccaacatatcttcttgg

SEQ ID NO: 2194657 - DNA, 25 bp, Homo sapien
gatacataactctgccaagtcctcc

SEQ ID NO: 2194658 - DNA, 25 bp, Homo sapien
tgttaacttgcctgacctgggcagc

SEQ ID NO: 2194659 - DNA, 25 bp, Homo sapien
atgacatatagctttttggacactt

SEQ ID NO: 2194660 - DNA, 25 bp, Homo sapien
gccttctgaaattcatagcctattt

SEQ ID NO: 2194661 - DNA, 25 bp, Homo sapien
gctggattttgttggtagcctttaa

SEQ ID NO: 2194662 - DNA, 25 bp, Homo sapien
cattatttgccttacttgagaattt

SEQ ID NO: 2194663 - DNA, 25 bp, Homo sapien
agacactgccttctgaaattcatag

SEQ ID NO: 2194664 - DNA, 25 bp, Homo sapien
tgcttaaagagatcttcaaagtcct

SEQ ID NO: 2194665 - DNA, 25 bp, Homo sapien
agagactcctcttgcttaaagagat

SEQ ID NO: 2194666 - DNA, 25 bp, Homo sapien
ccacttctaatagggcttgtgagac

SEQ ID NO: 2194667 - DNA, 25 bp, Homo sapien
gatttcagtcaaataagtagaaggc

SEQ ID NO: 2194668 - DNA, 25 bp, Homo sapien
ggtatagatatacaaaagaacaatt

SEQ ID NO: 2194669 - DNA, 25 bp, Homo sapien
ctggtatagatatacaaaagaacaa

SEQ ID NO: 2194670 - DNA, 25 bp, Homo sapien
gtatagatatacaaaagaacaattt

SEQ ID NO: 2194671 - DNA, 25 bp, Homo sapien
atagatatacaaaagaacaattttt

SEQ ID NO: 2194672 - DNA, 25 bp, Homo sapien
taggatcttaggaaacctgcttgac

SEQ ID NO: 2194673 - DNA, 25 bp, Homo sapien
tatttaacgtgctacttgaagccag

SEQ ID NO: 2194674 - DNA, 25 bp, Homo sapien
gaatggaaggaatatgggcatccca

SEQ ID NO: 2194675 - DNA, 25 bp, Homo sapien
taatgcggaatgactgtaacatcag

SEQ ID NO: 2194676 - DNA, 25 bp, Homo sapien
aattttctatcagccttccaagagc

SEQ ID NO: 2194677 - DNA, 25 bp, Homo sapien
gatgttctgaacgagcagtcttaaa

SEQ ID NO: 2194678 - DNA, 25 bp, Homo sapien
tatagcacctatgcaaaattctagg

SEQ ID NO: 2194679 - DNA, 25 bp, Homo sapien
taggacaagctatccattgcaatac

SEQ ID NO: 2194680 - DNA, 25 bp, Homo sapien
tagaacacattatgcacaagcctta

SEQ ID NO: 2194681 - DNA, 25 bp, Homo sapien
ttacacaggatcagtcaaacactgc

SEQ ID NO: 2194682 - DNA, 25 bp, Homo sapien
tcttggaaaggtcatgtatgtatac

SEQ ID NO: 2194683 - DNA, 25 bp, Homo sapien
tacatatttcagaggtttagcactt

SEQ ID NO: 2194684 - DNA, 25 bp, Homo sapien
cttgaatcatgttttacctggtatt

SEQ ID NO: 2194685 - DNA, 25 bp, Homo sapien
taagcttatgttccttagcagtttc

SEQ ID NO: 2194686 - DNA, 25 bp, Homo sapien
tcttggcagtcatcagatttgtgtg

SEQ ID NO: 2194687 - DNA, 25 bp, Homo sapien
gggctctctgaggttattttccaaa

SEQ ID NO: 2194688 - DNA, 25 bp, Homo sapien
tattctgtgaatctagagaaaagta

SEQ ID NO: 2194689 - DNA, 25 bp, Homo sapien
ttaagagtaccgcttactatttcaa

SEQ ID NO: 2194690 - DNA, 25 bp, Homo sapien
tcacatactaagcattttaagagta

SEQ ID NO: 2194691 - DNA, 25 bp, Homo sapien
gagtaccgcttactatttcaacatg

SEQ ID NO: 2194692 - DNA, 25 bp, Homo sapien
cattttaagagtaccgcttactatt

SEQ ID NO: 2194693 - DNA, 25 bp, Homo sapien
cattattacgttgtacaaatatttg

SEQ ID NO: 2194694 - DNA, 25 bp, Homo sapien
taagaataaatcgtttatgaggaaa

SEQ ID NO: 2194695 - DNA, 25 bp, Homo sapien
gagagcctactatgaatagggacat

SEQ ID NO: 2194696 - DNA, 25 bp, Homo sapien
tatatactggttcacacatgcttcc

SEQ ID NO: 2194697 - DNA, 25 bp, Homo sapien
tagcaacttgattagtttgtaacga

SEQ ID NO: 2194698 - DNA, 25 bp, Homo sapien
gcattagcaacttgattagtttgta

SEQ ID NO: 2194699 - DNA, 25 bp, Homo sapien
ttagcaacttgattagtttgtaacg

SEQ ID NO: 2194700 - DNA, 25 bp, Homo sapien
gcaacttgattagtttgtaacgaat

SEQ ID NO: 2194701 - DNA, 25 bp, Homo sapien
attcaaagcaaaggactcccccttg

SEQ ID NO: 2194702 - DNA, 25 bp, Homo sapien
aagcaaaggactcccccttgaatga

SEQ ID NO: 2194703 - DNA, 25 bp, Homo sapien
ggagaaatgagttagtagtcagata

SEQ ID NO: 2194704 - DNA, 25 bp, Homo sapien
gaatggagaaatgagttagtagtca

SEQ ID NO: 2194705 - DNA, 25 bp, Homo sapien
ttcagccaggtggaattagacttca

SEQ ID NO: 2194706 - DNA, 25 bp, Homo sapien
aattcacctgctattaaactttagg

SEQ ID NO: 2194707 - DNA, 25 bp, Homo sapien
tgcaatacagtttcgctatttctcg

SEQ ID NO: 2194708 - DNA, 25 bp, Homo sapien
tttcgcttcattttgcatctgcaga

SEQ ID NO: 2194709 - DNA, 25 bp, Homo sapien
tagagtagtagttgcaaacacatac

SEQ ID NO: 2194710 - DNA, 25 bp, Homo sapien
atagagtagtagttgcaaacacata

SEQ ID NO: 2194711 - DNA, 25 bp, Homo sapien
aatagagtagtagttgcaaacacat

SEQ ID NO: 2194712 - DNA, 25 bp, Homo sapien
caaagttgagtcttcgaaactgagc

SEQ ID NO: 2194713 - DNA, 25 bp, Homo sapien
tgagttggctccactgccattgcgg

SEQ ID NO: 2194714 - DNA, 25 bp, Homo sapien
aatttcccgccagcgcttgctgagc

SEQ ID NO: 2194715 - DNA, 25 bp, Homo sapien
tcagcttgcctacgcactgcattca

SEQ ID NO: 2194716 - DNA, 25 bp, Homo sapien
agggcccagggcagttagctaacca

SEQ ID NO: 2194717 - DNA, 25 bp, Homo sapien
gagcaaaaccaatacagggcccagg

SEQ ID NO: 2194718 - DNA, 25 bp, Homo sapien
acatcaaccgacttgcaagcagcaa

SEQ ID NO: 2194719 - DNA, 25 bp, Homo sapien
acttctctcaaaatttcaaaggctg

SEQ ID NO: 2194720 - DNA, 25 bp, Homo sapien
gaaatgaatgggctaacatgagtaa

SEQ ID NO: 2194721 - DNA, 25 bp, Homo sapien
gtgaagatgctctgatgaaatgaat

SEQ ID NO: 2194722 - DNA, 25 bp, Homo sapien
tgaggaactcaacagagaatgaagc

SEQ ID NO: 2194723 - DNA, 25 bp, Homo sapien
catgagtaagaagtcgtccatatac

SEQ ID NO: 2194724 - DNA, 25 bp, Homo sapien
tgagaaatttctagagccttttttc

SEQ ID NO: 2194725 - DNA, 25 bp, Homo sapien
tgcctcttgtactgataccactgat

SEQ ID NO: 2194726 - DNA, 25 bp, Homo sapien
ccactgatgagaaatttctagagcc

SEQ ID NO: 2194727 - DNA, 25 bp, Homo sapien
atctttatttcctctcgctttctct

SEQ ID NO: 2194728 - DNA, 25 bp, Homo sapien
atttcctctcgctttctctcatctg

SEQ ID NO: 2194729 - DNA, 25 bp, Homo sapien
tcttttacagtaccctcattgtctt

SEQ ID NO: 2194730 - DNA, 25 bp, Homo sapien
tatgttttgtctgtaacagctgctg

SEQ ID NO: 2194731 - DNA, 25 bp, Homo sapien
gatcaaaaacaacaagtacagtctt

SEQ ID NO: 2194732 - DNA, 25 bp, Homo sapien
ctgatcaaaaacaacaagtacagtc

SEQ ID NO: 2194733 - DNA, 25 bp, Homo sapien
caaaaacaacaagtacagtcttcat

SEQ ID NO: 2194734 - DNA, 25 bp, Homo sapien
tcaaaaacaacaagtacagtcttca

SEQ ID NO: 2194735 - DNA, 25 bp, Homo sapien
tctttattgaagtcttcctctttca

SEQ ID NO: 2194736 - DNA, 25 bp, Homo sapien
aatttcagcctccagtggttcaagc

SEQ ID NO: 2194737 - DNA, 25 bp, Homo sapien
tgtatatctgagttaaactgctcca

SEQ ID NO: 2194738 - DNA, 25 bp, Homo sapien
tctttcagattcaccccctgctgaa

SEQ ID NO: 2194739 - DNA, 25 bp, Homo sapien
tataagaacaactgatgaggactgc

SEQ ID NO: 2194740 - DNA, 25 bp, Homo sapien
gaacttttatagtagtgcagctcaa

SEQ ID NO: 2194741 - DNA, 25 bp, Homo sapien
tactgatttcactgagatgtccaaa

SEQ ID NO: 2194742 - DNA, 25 bp, Homo sapien
ggttcatgaccaccttattaggcag

SEQ ID NO: 2194743 - DNA, 25 bp, Homo sapien
gagaacttggtcaactcactgacac

SEQ ID NO: 2194744 - DNA, 25 bp, Homo sapien
tagaggcagtaaactatgctgagtc

SEQ ID NO: 2194745 - DNA, 25 bp, Homo sapien
gatctagtatttgctaaccacactg

SEQ ID NO: 2194746 - DNA, 25 bp, Homo sapien
caaagcaatggactgagatctagta

SEQ ID NO: 2194747 - DNA, 25 bp, Homo sapien
catcttgccctatcatcaaacagta

SEQ ID NO: 2194748 - DNA, 25 bp, Homo sapien
tctcaatctagtatccatgaacaca

SEQ ID NO: 2194749 - DNA, 25 bp, Homo sapien
tatatggttggtgagaattcatcct

SEQ ID NO: 2194750 - DNA, 25 bp, Homo sapien
cagtaagctccttgaatccatcgta

SEQ ID NO: 2194751 - DNA, 25 bp, Homo sapien
gcaaccttcgcaagagaccatttag

SEQ ID NO: 2194752 - DNA, 25 bp, Homo sapien
cttgcccctttcagagtactgcgca

SEQ ID NO: 2194753 - DNA, 25 bp, Homo sapien
gaccatttagcacaagtttccacct

SEQ ID NO: 2194754 - DNA, 25 bp, Homo sapien
gtttccaccttggagtagatcttcc

SEQ ID NO: 2194755 - DNA, 25 bp, Homo sapien
ggtcacgtgtagagtccacctttgg

SEQ ID NO: 2194756 - DNA, 25 bp, Homo sapien
tggtcaccgcggtttgccatcaagt

SEQ ID NO: 2194757 - DNA, 25 bp, Homo sapien
ccacctttgggcgtatgtcattcag

SEQ ID NO: 2194758 - DNA, 25 bp, Homo sapien
tactaatttcctgcagtggtcaccg

SEQ ID NO: 2194759 - DNA, 25 bp, Homo sapien
cttaagcacgtcttctttttgctgg

SEQ ID NO: 2194760 - DNA, 25 bp, Homo sapien
cacattctggtcaaaagtttccatg

SEQ ID NO: 2194761 - DNA, 25 bp, Homo sapien
gtgtcagcctgaatgatccactttg

SEQ ID NO: 2194762 - DNA, 25 bp, Homo sapien
ctttttctctgattcatccaaaagt

SEQ ID NO: 2194763 - DNA, 25 bp, Homo sapien
gacagctatccagttactattcaga

SEQ ID NO: 2194764 - DNA, 25 bp, Homo sapien
gttttcaaggcctctcctacctctg

SEQ ID NO: 2194765 - DNA, 25 bp, Homo sapien
cttcttgcccaaaactgttttcaag

SEQ ID NO: 2194766 - DNA, 25 bp, Homo sapien
gagtttatcttccaccaacgtctcc

SEQ ID NO: 2194767 - DNA, 25 bp, Homo sapien
tacatggcacggctgacagacaatg

SEQ ID NO: 2194768 - DNA, 25 bp, Homo sapien
gacagacaatgtggccactcggcat

SEQ ID NO: 2194769 - DNA, 25 bp, Homo sapien
aagcccctttcctggtacatggcac

SEQ ID NO: 2194770 - DNA, 25 bp, Homo sapien
ttcctggtacatggcacggctgaca

SEQ ID NO: 2194771 - DNA, 25 bp, Homo sapien
ctggaccaattttcagactaatgac

SEQ ID NO: 2194772 - DNA, 25 bp, Homo sapien
gtccttgccctcttcatggctgtgg

SEQ ID NO: 2194773 - DNA, 25 bp, Homo sapien
cattataggatctcatctctggacc

SEQ ID NO: 2194774 - DNA, 25 bp, Homo sapien
aagtcctgtccagcccaactgtctt

SEQ ID NO: 2194775 - DNA, 25 bp, Homo sapien
cagccattctgtcaagacattcatt

SEQ ID NO: 2194776 - DNA, 25 bp, Homo sapien
gcatcttacgggacaatttcaagca

SEQ ID NO: 2194777 - DNA, 25 bp, Homo sapien
ttcagaatccaaattactaggcatt

SEQ ID NO: 2194778 - DNA, 25 bp, Homo sapien
caattccatatctgtagctgccagc

SEQ ID NO: 2194779 - DNA, 25 bp, Homo sapien
tctgtacaatctgacgtccagtctt

SEQ ID NO: 2194780 - DNA, 25 bp, Homo sapien
tttctgtacaatctgacgtccagtc

SEQ ID NO: 2194781 - DNA, 25 bp, Homo sapien
tttttctgtacaatctgacgtccag

SEQ ID NO: 2194782 - DNA, 25 bp, Homo sapien
ctctttcatcaagttctttgggatt

SEQ ID NO: 2194783 - DNA, 25 bp, Homo sapien
cttgtagacgctgctcaaaattggc

SEQ ID NO: 2194784 - DNA, 25 bp, Homo sapien
cacaatgatttagctgtgactgtac

SEQ ID NO: 2194785 - DNA, 25 bp, Homo sapien
taatcgaaacttcatggagacatct

SEQ ID NO: 2194786 - DNA, 25 bp, Homo sapien
caaaattggctggtttctggaataa

SEQ ID NO: 2194787 - DNA, 25 bp, Homo sapien
caacatcaatctgagacaggactct

SEQ ID NO: 2194788 - DNA, 25 bp, Homo sapien
tccttcccctgattatgtttcttca

SEQ ID NO: 2194789 - DNA, 25 bp, Homo sapien
caatctgagacaggactctttgggc

SEQ ID NO: 2194790 - DNA, 25 bp, Homo sapien
agacaggactctttgggcagcctcc

SEQ ID NO: 2194791 - DNA, 25 bp, Homo sapien
gatctcatgacttgtcaaatcagat

SEQ ID NO: 2194792 - DNA, 25 bp, Homo sapien
ttcttctaaactgatctcatgactt

SEQ ID NO: 2194793 - DNA, 25 bp, Homo sapien
tctcatgacttgtcaaatcagattg

SEQ ID NO: 2194794 - DNA, 25 bp, Homo sapien
catgacttgtcaaatcagattggat

SEQ ID NO: 2194795 - DNA, 25 bp, Homo sapien
tcaatagtaatcagggtacatgagc

SEQ ID NO: 2194796 - DNA, 25 bp, Homo sapien
cagggtacatgagctcgtcaatgac

SEQ ID NO: 2194797 - DNA, 25 bp, Homo sapien
catgagctcgtcaatgaccattgca

SEQ ID NO: 2194798 - DNA, 25 bp, Homo sapien
taatcagggtacatgagctcgtcaa

SEQ ID NO: 2194799 - DNA, 25 bp, Homo sapien
cgacaacgataatagaagagttcat

SEQ ID NO: 2194800 - DNA, 25 bp, Homo sapien
ctgagaaacgatgttacgcttagtc

SEQ ID NO: 2194801 - DNA, 25 bp, Homo sapien
gcttagtcataataacgacaacgat

SEQ ID NO: 2194802 - DNA, 25 bp, Homo sapien
gttacgcttagtcataataacgaca

SEQ ID NO: 2194803 - DNA, 25 bp, Homo sapien
ttcctgaggcatttgagctgcgtcc

SEQ ID NO: 2194804 - DNA, 25 bp, Homo sapien
tcctgaggcatttgagctgcgtcca

SEQ ID NO: 2194805 - DNA, 25 bp, Homo sapien
cctgaggcatttgagctgcgtccac

SEQ ID NO: 2194806 - DNA, 25 bp, Homo sapien
ctggattaagtgtaaggatttttca

SEQ ID NO: 2194807 - DNA, 25 bp, Homo sapien
aatataagctgccaactgcttgtca

SEQ ID NO: 2194808 - DNA, 25 bp, Homo sapien
cttgtcaatgaatgtgagggactcc

SEQ ID NO: 2194809 - DNA, 25 bp, Homo sapien
gagggactcctggattaagtgtaag

SEQ ID NO: 2194810 - DNA, 25 bp, Homo sapien
tttttgtaagacagatttcgcagct

SEQ ID NO: 2194811 - DNA, 25 bp, Homo sapien
ttgtaagacagatttcgcagcttcc

SEQ ID NO: 2194812 - DNA, 25 bp, Homo sapien
ctttttgtaagacagatttcgcagc

SEQ ID NO: 2194813 - DNA, 25 bp, Homo sapien
tttgtaagacagatttcgcagcttc

SEQ ID NO: 2194814 - DNA, 25 bp, Homo sapien
aatagcaaacaaaactataggatca

SEQ ID NO: 2194815 - DNA, 25 bp, Homo sapien
gaaaatcaatcacaatatcacgtac

SEQ ID NO: 2194816 - DNA, 25 bp, Homo sapien
agggatctctgcatgaaaatcaatc

SEQ ID NO: 2194817 - DNA, 25 bp, Homo sapien
tctgcatgaaaatcaatcacaatat

SEQ ID NO: 2194818 - DNA, 25 bp, Homo sapien
aaattagcaaaatcatctcagtcat

SEQ ID NO: 2194819 - DNA, 25 bp, Homo sapien
aaaaaattagcaaaatcatctcagt

SEQ ID NO: 2194820 - DNA, 25 bp, Homo sapien
aaaattagcaaaatcatctcagtca

SEQ ID NO: 2194821 - DNA, 25 bp, Homo sapien
aaaaaaaattagcaaaatcatctca

SEQ ID NO: 2194822 - DNA, 25 bp, Homo sapien
ttctcaggtcgaatgttcctcctga

SEQ ID NO: 2194823 - DNA, 25 bp, Homo sapien
tctcaggtcgaatgttcctcctgat

SEQ ID NO: 2194824 - DNA, 25 bp, Homo sapien
tcaggtcgaatgttcctcctgatct

SEQ ID NO: 2194825 - DNA, 25 bp, Homo sapien
ctcaggtcgaatgttcctcctgatc

SEQ ID NO: 2194826 - DNA, 25 bp, Homo sapien
gaggccagaaagcaaagggatctat

SEQ ID NO: 2194827 - DNA, 25 bp, Homo sapien
ctcagaggccagaaagcaaagggat

SEQ ID NO: 2194828 - DNA, 25 bp, Homo sapien
tcagaggccagaaagcaaagggatc

SEQ ID NO: 2194829 - DNA, 25 bp, Homo sapien
ccagaaagcaaagggatctattcat

SEQ ID NO: 2194830 - DNA, 25 bp, Homo sapien
cctggatgatgtaaaagcatttcat

SEQ ID NO: 2194831 - DNA, 25 bp, Homo sapien
aacaatagagtgcagataatctcct

SEQ ID NO: 2194832 - DNA, 25 bp, Homo sapien
tagactaactataggcaatatgctt

SEQ ID NO: 2194833 - DNA, 25 bp, Homo sapien
tctaacagatgtgaagacatatatc

SEQ ID NO: 2194834 - DNA, 25 bp, Homo sapien
catgttgttacagcgaaatggtagg

SEQ ID NO: 2194835 - DNA, 25 bp, Homo sapien
tttgttgtattactaaatcatcttc

SEQ ID NO: 2194836 - DNA, 25 bp, Homo sapien
attttgttgtattactaaatcatct

SEQ ID NO: 2194837 - DNA, 25 bp, Homo sapien
ttttgttgtattactaaatcatctt

SEQ ID NO: 2194838 - DNA, 25 bp, Homo sapien
tagggtctgtgccaatatgcgaatc

SEQ ID NO: 2194839 - DNA, 25 bp, Homo sapien
gactccgccatctgttagggtctgt

SEQ ID NO: 2194840 - DNA, 25 bp, Homo sapien
gggttatcctctgaatgtcgcatca

SEQ ID NO: 2194841 - DNA, 25 bp, Homo sapien
tcatgtagttccctccaacgagaat

SEQ ID NO: 2194842 - DNA, 25 bp, Homo sapien
ttctctgatagctagtggtgtccac

SEQ ID NO: 2194843 - DNA, 25 bp, Homo sapien
tctgatagctagtggtgtccacgtg

SEQ ID NO: 2194844 - DNA, 25 bp, Homo sapien
gctagtggtgtccacgtgacacaat

SEQ ID NO: 2194845 - DNA, 25 bp, Homo sapien
gatagctagtggtgtccacgtgaca

SEQ ID NO: 2194846 - DNA, 25 bp, Homo sapien
tccgccaggaatgttttcagtggtt

SEQ ID NO: 2194847 - DNA, 25 bp, Homo sapien
tctacttcatttagccacttgtttg

SEQ ID NO: 2194848 - DNA, 25 bp, Homo sapien
tgacaataactcatgccaacatgcc

SEQ ID NO: 2194849 - DNA, 25 bp, Homo sapien
tctagcacctcagagatttcctcag

SEQ ID NO: 2194850 - DNA, 25 bp, Homo sapien
tcgcttctttttgttgggcctcttc

SEQ ID NO: 2194851 - DNA, 25 bp, Homo sapien
gcttgagctatgacactatttacag

SEQ ID NO: 2194852 - DNA, 25 bp, Homo sapien
ctcagtaaggagtttcactttcgct

SEQ ID NO: 2194853 - DNA, 25 bp, Homo sapien
ttcccattcagcctagtgcagagcc

SEQ ID NO: 2194854 - DNA, 25 bp, Homo sapien
atctctgatagatctttctggaggc

SEQ ID NO: 2194855 - DNA, 25 bp, Homo sapien
tctgatagatctttctggaggctta

SEQ ID NO: 2194856 - DNA, 25 bp, Homo sapien
cttgtgtcatccattcgtgcatctc

SEQ ID NO: 2194857 - DNA, 25 bp, Homo sapien
catccattcgtgcatctctgataga

SEQ ID NO: 2194858 - DNA, 25 bp, Homo sapien
gactgggctgaattgtctgaatatc

SEQ ID NO: 2194859 - DNA, 25 bp, Homo sapien
ccaccttcattgacactgtttagac

SEQ ID NO: 2194860 - DNA, 25 bp, Homo sapien
gagttctgtctcaagtctcgaagca

SEQ ID NO: 2194861 - DNA, 25 bp, Homo sapien
tgttggcacatgtgatcccactgag

SEQ ID NO: 2194862 - DNA, 25 bp, Homo sapien
atttctgaatccccaagggcaggcc

SEQ ID NO: 2194863 - DNA, 25 bp, Homo sapien
tttctgaatccccaagggcaggcca

SEQ ID NO: 2194864 - DNA, 25 bp, Homo sapien
ctgaatccccaagggcaggccattc

SEQ ID NO: 2194865 - DNA, 25 bp, Homo sapien
acatcaacttcagccatccatttct

SEQ ID NO: 2194866 - DNA, 25 bp, Homo sapien
cagtggtgctgagatagtataggcc

SEQ ID NO: 2194867 - DNA, 25 bp, Homo sapien
ttcgacatctctttcacagtggtgc

SEQ ID NO: 2194868 - DNA, 25 bp, Homo sapien
tatttccggctaatttcagagggcg

SEQ ID NO: 2194869 - DNA, 25 bp, Homo sapien
ggccactttgttgctcttgcagaga

SEQ ID NO: 2194870 - DNA, 25 bp, Homo sapien
tatggagagtttggtttctgactgc

SEQ ID NO: 2194871 - DNA, 25 bp, Homo sapien
tctgctccatgatttcatagtcggt

SEQ ID NO: 2194872 - DNA, 25 bp, Homo sapien
tgctggacccatgtcctgatggcac

SEQ ID NO: 2194873 - DNA, 25 bp, Homo sapien
gacactaagttgaggtatggagagt

SEQ ID NO: 2194874 - DNA, 25 bp, Homo sapien
ctcctgatagcgcattggtggcaaa

SEQ ID NO: 2194875 - DNA, 25 bp, Homo sapien
ggtctcctgatagcgcattggtggc

SEQ ID NO: 2194876 - DNA, 25 bp, Homo sapien
tctcctgatagcgcattggtggcaa

SEQ ID NO: 2194877 - DNA, 25 bp, Homo sapien
tcctgatagcgcattggtggcaaag

SEQ ID NO: 2194878 - DNA, 25 bp, Homo sapien
tccaatttgaattccccattattac

SEQ ID NO: 2194879 - DNA, 25 bp, Homo sapien
tgttgtgaatatgaaatcgagtcca

SEQ ID NO: 2194880 - DNA, 25 bp, Homo sapien
tagaagtcctgttgtgaatatgaaa

SEQ ID NO: 2194881 - DNA, 25 bp, Homo sapien
agtccaatttgaattccccattatt

SEQ ID NO: 2194882 - DNA, 25 bp, Homo sapien
tctctttcagggctatgctttgaat

SEQ ID NO: 2194883 - DNA, 25 bp, Homo sapien
ccaggaacatgggtccttgtccttt

SEQ ID NO: 2194884 - DNA, 25 bp, Homo sapien
gaagatctgatagccggttgacttc

SEQ ID NO: 2194885 - DNA, 25 bp, Homo sapien
taatcgttcaatttgaggttgaaga

SEQ ID NO: 2194886 - DNA, 25 bp, Homo sapien
gaatccgggtatctacgtcttacat

SEQ ID NO: 2194887 - DNA, 25 bp, Homo sapien
cattttgaactttattgcgcttagc

SEQ ID NO: 2194888 - DNA, 25 bp, Homo sapien
tgcgcttagctaaatccttagaagg

SEQ ID NO: 2194889 - DNA, 25 bp, Homo sapien
gcgctgtgtaactacgccaaataca

SEQ ID NO: 2194890 - DNA, 25 bp, Homo sapien
gatactccagccagttaagtctctc

SEQ ID NO: 2194891 - DNA, 25 bp, Homo sapien
tgtcatctgctccaattgttgtagc

SEQ ID NO: 2194892 - DNA, 25 bp, Homo sapien
aactggcagaattcgatccaccggc

SEQ ID NO: 2194893 - DNA, 25 bp, Homo sapien
agcgatgatgttgttctgatactcc

SEQ ID NO: 2194894 - DNA, 25 bp, Homo sapien
ccagggcctgagctgatctgctggc

SEQ ID NO: 2194895 - DNA, 25 bp, Homo sapien
cattcaccatctgttccaccagggc

SEQ ID NO: 2194896 - DNA, 25 bp, Homo sapien
agggcctgagctgatctgctggcat

SEQ ID NO: 2194897 - DNA, 25 bp, Homo sapien
tctgctggcatcttgcagttttctg

SEQ ID NO: 2194898 - DNA, 25 bp, Homo sapien
tatgaaaggcatccctagtcagtca

SEQ ID NO: 2194899 - DNA, 25 bp, Homo sapien
catctcagaagggaataacaacaac

SEQ ID NO: 2194900 - DNA, 25 bp, Homo sapien
aaagcacggagtttacaagcagcac

SEQ ID NO: 2194901 - DNA, 25 bp, Homo sapien
tgtgcaagcttgctaaggcctagcc

SEQ ID NO: 2194902 - DNA, 25 bp, Homo sapien
gagaagttgccttccttccgaaaga

SEQ ID NO: 2194903 - DNA, 25 bp, Homo sapien
cagcttctgagcgagtaatccagct

SEQ ID NO: 2194904 - DNA, 25 bp, Homo sapien
aattcaggactctgcaacacagctt

SEQ ID NO: 2194905 - DNA, 25 bp, Homo sapien
gcgagtaatccagctgtgaagttca

SEQ ID NO: 2194906 - DNA, 25 bp, Homo sapien
ggagttcttccctttcatttctatc

SEQ ID NO: 2194907 - DNA, 25 bp, Homo sapien
ctgttggagttcttccctttcattt

SEQ ID NO: 2194908 - DNA, 25 bp, Homo sapien
agttcttccctttcatttctatcat

SEQ ID NO: 2194909 - DNA, 25 bp, Homo sapien
ttggagttcttccctttcatttcta

SEQ ID NO: 2194910 - DNA, 25 bp, Homo sapien
attctagtccaagcacaaaatattg

SEQ ID NO: 2194911 - DNA, 25 bp, Homo sapien
aaatcaatttctgtggcgtttacct

SEQ ID NO: 2194912 - DNA, 25 bp, Homo sapien
cacagcacctggaacaatgtgacag

SEQ ID NO: 2194913 - DNA, 25 bp, Homo sapien
gattgcactgaaaggcatctttaaa

SEQ ID NO: 2194914 - DNA, 25 bp, Homo sapien
aaactagggactcaacaagcaggcc

SEQ ID NO: 2194915 - DNA, 25 bp, Homo sapien
caagcaggccctttataaggaagaa

SEQ ID NO: 2194916 - DNA, 25 bp, Homo sapien
taactgacattacaggtacccgagg

SEQ ID NO: 2194917 - DNA, 25 bp, Homo sapien
gaaaatgcactttccgttactggaa

SEQ ID NO: 2194918 - DNA, 25 bp, Homo sapien
agttgtctgtgttagtgatggctga

SEQ ID NO: 2194919 - DNA, 25 bp, Homo sapien
cttgagcatgctttaccaggatctg

SEQ ID NO: 2194920 - DNA, 25 bp, Homo sapien
gatctgttcccttgtggtcaccgta

SEQ ID NO: 2194921 - DNA, 25 bp, Homo sapien
tactgtttccattacagttgtctgt

SEQ ID NO: 2194922 - DNA, 25 bp, Homo sapien
ctcctgttcatacttttggcagcgg

SEQ ID NO: 2194923 - DNA, 25 bp, Homo sapien
gttcatacttttggcagcgggccgg

SEQ ID NO: 2194924 - DNA, 25 bp, Homo sapien
tgttcatacttttggcagcgggccg

SEQ ID NO: 2194925 - DNA, 25 bp, Homo sapien
cctgttcatacttttggcagcgggc

SEQ ID NO: 2194926 - DNA, 25 bp, Homo sapien
caatctttcttaacacggcaactga

SEQ ID NO: 2194927 - DNA, 25 bp, Homo sapien
cacggcaactgaccattttatggca

SEQ ID NO: 2194928 - DNA, 25 bp, Homo sapien
tcttaacacggcaactgaccatttt

SEQ ID NO: 2194929 - DNA, 25 bp, Homo sapien
gcaactgaccattttatggcagcaa

SEQ ID NO: 2194930 - DNA, 25 bp, Homo sapien
caacaccgggcaaagttatccagcc

SEQ ID NO: 2194931 - DNA, 25 bp, Homo sapien
cccaacaccgggcaaagttatccag

SEQ ID NO: 2194932 - DNA, 25 bp, Homo sapien
agtgaatacagtttgcccatggatt

SEQ ID NO: 2194933 - DNA, 25 bp, Homo sapien
cagtttgcccatggattgctttttc

SEQ ID NO: 2194934 - DNA, 25 bp, Homo sapien
tctttaaagccagttgtgtgaatct

SEQ ID NO: 2194935 - DNA, 25 bp, Homo sapien
cagttgtgtgaatcttgttcactgc

SEQ ID NO: 2194936 - DNA, 25 bp, Homo sapien
ttttgaagacttgataacatttcat

SEQ ID NO: 2194937 - DNA, 25 bp, Homo sapien
tcattttgatctttaaagccagttg

SEQ ID NO: 2194938 - DNA, 25 bp, Homo sapien
gccatttgagaaggatgtcttgtaa

SEQ ID NO: 2194939 - DNA, 25 bp, Homo sapien
tctgtccatctacagatgtttgccc

SEQ ID NO: 2194940 - DNA, 25 bp, Homo sapien
tcttcagtaagacgttgccatttga

SEQ ID NO: 2194941 - DNA, 25 bp, Homo sapien
tgtaaaagaacccagcggtcttctg

SEQ ID NO: 2194942 - DNA, 25 bp, Homo sapien
gaattgaccctgacttgttcttgtt

SEQ ID NO: 2194943 - DNA, 25 bp, Homo sapien
gagtgagagaattgaccctgacttg

SEQ ID NO: 2194944 - DNA, 25 bp, Homo sapien
gattcatcaactaccaccaccatgt

SEQ ID NO: 2194945 - DNA, 25 bp, Homo sapien
gcgtgatctccactagattcatcaa

SEQ ID NO: 2194946 - DNA, 25 bp, Homo sapien
ttgtacttggcgttttaggtcttca

SEQ ID NO: 2194947 - DNA, 25 bp, Homo sapien
tgtacttggcgttttaggtcttcaa

SEQ ID NO: 2194948 - DNA, 25 bp, Homo sapien
agtcattcaactctttcagtttctg

SEQ ID NO: 2194949 - DNA, 25 bp, Homo sapien
ctgtttttgttagccagtcattcaa

SEQ ID NO: 2194950 - DNA, 25 bp, Homo sapien
tcttctgtttttgttagccagtcat

SEQ ID NO: 2194951 - DNA, 25 bp, Homo sapien
tcagtttctgattctggagatccat

SEQ ID NO: 2194952 - DNA, 25 bp, Homo sapien
ttagcctccaggagaggatggaaac

SEQ ID NO: 2194953 - DNA, 25 bp, Homo sapien
ccttgggaacaaactgagaatcgta

SEQ ID NO: 2194954 - DNA, 25 bp, Homo sapien
tatgaaaatccaaccagtctccctt

SEQ ID NO: 2194955 - DNA, 25 bp, Homo sapien
gaagtttcgtgtcaactatagctaa

SEQ ID NO: 2194956 - DNA, 25 bp, Homo sapien
ccttgaaagaaagctgtgtgccttg

SEQ ID NO: 2194957 - DNA, 25 bp, Homo sapien
ggccctgatgggctgtcaaatccat

SEQ ID NO: 2194958 - DNA, 25 bp, Homo sapien
taccctgaggcattcccatcttgaa

SEQ ID NO: 2194959 - DNA, 25 bp, Homo sapien
gaatattaccaacccggccctgatg

SEQ ID NO: 2194960 - DNA, 25 bp, Homo sapien
tttttccatgctagctaccctgagg

SEQ ID NO: 2194961 - DNA, 25 bp, Homo sapien
ttgtgcttgcaatgtgtcctcagca

SEQ ID NO: 2194962 - DNA, 25 bp, Homo sapien
gcagaaagaagccacgataatactt

SEQ ID NO: 2194963 - DNA, 25 bp, Homo sapien
taaagctgtttgataacggtccagg

SEQ ID NO: 2194964 - DNA, 25 bp, Homo sapien
ggtttacttcactctccatcaatga

SEQ ID NO: 2194965 - DNA, 25 bp, Homo sapien
gccaaatgacttgtcttcaggagct

SEQ ID NO: 2194966 - DNA, 25 bp, Homo sapien
aaatgacttgtcttcaggagcttcc

SEQ ID NO: 2194967 - DNA, 25 bp, Homo sapien
ctgccaaatgacttgtcttcaggag

SEQ ID NO: 2194968 - DNA, 25 bp, Homo sapien
caaatgacttgtcttcaggagcttc

SEQ ID NO: 2194969 - DNA, 25 bp, Homo sapien
ttatatttacatacctctgcaatgg

SEQ ID NO: 2194970 - DNA, 25 bp, Homo sapien
tatatttacatacctctgcaatggc

SEQ ID NO: 2194971 - DNA, 25 bp, Homo sapien
tatttacatacctctgcaatggcat

SEQ ID NO: 2194972 - DNA, 25 bp, Homo sapien
aattatatttacatacctctgcaat

SEQ ID NO: 2194973 - DNA, 25 bp, Homo sapien
cgatggaccattgtaggatgcataa

SEQ ID NO: 2194974 - DNA, 25 bp, Homo sapien
tctatggaaatcttcctgagtacga

SEQ ID NO: 2194975 - DNA, 25 bp, Homo sapien
taaactgccgattcttggatcccat

SEQ ID NO: 2194976 - DNA, 25 bp, Homo sapien
gcataaactgccgattcttggatcc

SEQ ID NO: 2194977 - DNA, 25 bp, Homo sapien
gagcctggatatttgaagatctgta

SEQ ID NO: 2194978 - DNA, 25 bp, Homo sapien
gaaatgggctccgtgtagggtcaga

SEQ ID NO: 2194979 - DNA, 25 bp, Homo sapien
catagctcttgaatcgaggcttagg

SEQ ID NO: 2194980 - DNA, 25 bp, Homo sapien
cctgtgtgtaggcatagctcttgaa

SEQ ID NO: 2194981 - DNA, 25 bp, Homo sapien
gtcagaggtggtgacataagcagcc

SEQ ID NO: 2194982 - DNA, 25 bp, Homo sapien
gtttgtgcctgagaaagcataggaa

SEQ ID NO: 2194983 - DNA, 25 bp, Homo sapien
tttgtgcctgagaaagcataggaaa

SEQ ID NO: 2194984 - DNA, 25 bp, Homo sapien
tgtttgtgcctgagaaagcatagga

SEQ ID NO: 2194985 - DNA, 25 bp, Homo sapien
cttctttagtcactttaggtggcct

SEQ ID NO: 2194986 - DNA, 25 bp, Homo sapien
gtcactttaggtggccttggcaaca

SEQ ID NO: 2194987 - DNA, 25 bp, Homo sapien
gaatagtgcatttgatgatgtaact

SEQ ID NO: 2194988 - DNA, 25 bp, Homo sapien
ctgttgagaatagtgcatttgatga

SEQ ID NO: 2194989 - DNA, 25 bp, Homo sapien
tcctggatggcttcaatgctcactt

SEQ ID NO: 2194990 - DNA, 25 bp, Homo sapien
tcttatctggataggtggtatcaac

SEQ ID NO: 2194991 - DNA, 25 bp, Homo sapien
tgtgatgtacattaagatggacttc

SEQ ID NO: 2194992 - DNA, 25 bp, Homo sapien
ttgaggcaaaacttggaagagtgat

SEQ ID NO: 2194993 - DNA, 25 bp, Homo sapien
tacacatcaatttttggtttctata

SEQ ID NO: 2194994 - DNA, 25 bp, Homo sapien
aacactacacatcaatttttggttt

SEQ ID NO: 2194995 - DNA, 25 bp, Homo sapien
actacacatcaatttttggtttcta

SEQ ID NO: 2194996 - DNA, 25 bp, Homo sapien
cactacacatcaatttttggtttct

SEQ ID NO: 2194997 - DNA, 25 bp, Homo sapien
tacttagctcacatccaaatgagca

SEQ ID NO: 2194998 - DNA, 25 bp, Homo sapien
gaatacatgtttcacttggaataaa

SEQ ID NO: 2194999 - DNA, 25 bp, Homo sapien
gccacctggtgcttcaagacgtgaa

SEQ ID NO: 2195000 - DNA, 25 bp, Homo sapien
tttaccttgaacacaaagtaatgtg

SEQ ID NO: 2195001 - DNA, 25 bp, Homo sapien
tcaagacgtgaagtgtgaatacatg

SEQ ID NO: 2195002 - DNA, 25 bp, Homo sapien
tactaggagattcaaaaacggcttc

SEQ ID NO: 2195003 - DNA, 25 bp, Homo sapien
gcctatagacatacaggaagctgta

SEQ ID NO: 2195004 - DNA, 25 bp, Homo sapien
ttgggtctatagaagcaaaagccta

SEQ ID NO: 2195005 - DNA, 25 bp, Homo sapien
gccaaaatcacagagggttaccagt

SEQ ID NO: 2195006 - DNA, 25 bp, Homo sapien
tatcaatttcaaagaaattctctcc

SEQ ID NO: 2195007 - DNA, 25 bp, Homo sapien
tttcaaagaaattctctcctctaaa

SEQ ID NO: 2195008 - DNA, 25 bp, Homo sapien
agtatcaatttcaaagaaattctct

SEQ ID NO: 2195009 - DNA, 25 bp, Homo sapien
caatttcaaagaaattctctcctct

SEQ ID NO: 2195010 - DNA, 25 bp, Homo sapien
ctggggtcctctggcacaatactaa

SEQ ID NO: 2195011 - DNA, 25 bp, Homo sapien
cacaatactaaacttatcaggcact

SEQ ID NO: 2195012 - DNA, 25 bp, Homo sapien
ctagaaggaaaggatcatttctaat

SEQ ID NO: 2195013 - DNA, 25 bp, Homo sapien
cttatcaggcactgaatgcttaatc

SEQ ID NO: 2195014 - DNA, 25 bp, Homo sapien
ctcaatttctctatggcaataaggc

SEQ ID NO: 2195015 - DNA, 25 bp, Homo sapien
taaggctatcatatccaaacagaag

SEQ ID NO: 2195016 - DNA, 25 bp, Homo sapien
tctctatggcaataaggctatcata

SEQ ID NO: 2195017 - DNA, 25 bp, Homo sapien
gaagaactaagctaaatggattcat

SEQ ID NO: 2195018 - DNA, 25 bp, Homo sapien
tactgtcacaagaaccgatgctttc

SEQ ID NO: 2195019 - DNA, 25 bp, Homo sapien
gactgtaagttctatatgtgccatt

SEQ ID NO: 2195020 - DNA, 25 bp, Homo sapien
tagacttatagtcccaattctgacg

SEQ ID NO: 2195021 - DNA, 25 bp, Homo sapien
caaagcatctaattacttggagccc

SEQ ID NO: 2195022 - DNA, 25 bp, Homo sapien
ggcgtgaggcctatatagcagcata

SEQ ID NO: 2195023 - DNA, 25 bp, Homo sapien
taattaagagtatgcaacacgctcc

SEQ ID NO: 2195024 - DNA, 25 bp, Homo sapien
tatccagttttatagggcgtgaggc

SEQ ID NO: 2195025 - DNA, 25 bp, Homo sapien
gtgacacctcaaaactaaaccactg

SEQ ID NO: 2195026 - DNA, 25 bp, Homo sapien
cacttttacgatgtcatatgacgta

SEQ ID NO: 2195027 - DNA, 25 bp, Homo sapien
ccaattcaaccacttttacgatgtc

SEQ ID NO: 2195028 - DNA, 25 bp, Homo sapien
tcaaccacttttacgatgtcatatg

SEQ ID NO: 2195029 - DNA, 25 bp, Homo sapien
gttgagtttttctgagagtctggga

SEQ ID NO: 2195030 - DNA, 25 bp, Homo sapien
agaaatcataacgggaagagaattg

SEQ ID NO: 2195031 - DNA, 25 bp, Homo sapien
aaatcataacgggaagagaattgtc

SEQ ID NO: 2195032 - DNA, 25 bp, Homo sapien
gaaatcataacgggaagagaattgt

SEQ ID NO: 2195033 - DNA, 25 bp, Homo sapien
cccacagattctgctacattgtgtg

SEQ ID NO: 2195034 - DNA, 25 bp, Homo sapien
tccctcttctaaacacttctttagc

SEQ ID NO: 2195035 - DNA, 25 bp, Homo sapien
gatgtcgattatagatctttcccac

SEQ ID NO: 2195036 - DNA, 25 bp, Homo sapien
aaaaaacagctcctgaattgagttt

SEQ ID NO: 2195037 - DNA, 25 bp, Homo sapien
gaatgcatgttccagtcgttgtgtg

SEQ ID NO: 2195038 - DNA, 25 bp, Homo sapien
tcgttgtgtggctgactgctggcaa

SEQ ID NO: 2195039 - DNA, 25 bp, Homo sapien
tctctatgcctaattgatatctggc

SEQ ID NO: 2195040 - DNA, 25 bp, Homo sapien
caggatcgagtagtttctctatgcc

SEQ ID NO: 2195041 - DNA, 25 bp, Homo sapien
tgactatggatgagagcattcaaag

SEQ ID NO: 2195042 - DNA, 25 bp, Homo sapien
ctatgactatggatgagagcattca

SEQ ID NO: 2195043 - DNA, 25 bp, Homo sapien
tatgactatggatgagagcattcaa

SEQ ID NO: 2195044 - DNA, 25 bp, Homo sapien
gactatggatgagagcattcaaagc

SEQ ID NO: 2195045 - DNA, 25 bp, Homo sapien
cactgttggtttgttgcaatccagc

SEQ ID NO: 2195046 - DNA, 25 bp, Homo sapien
ggtttgttgcaatccagccatgata

SEQ ID NO: 2195047 - DNA, 25 bp, Homo sapien
cagctcaggagaatcttttcactgt

SEQ ID NO: 2195048 - DNA, 25 bp, Homo sapien
taattacgagttgattgtcggaccc

SEQ ID NO: 2195049 - DNA, 25 bp, Homo sapien
ggaggattatattccaaatcaaacc

SEQ ID NO: 2195050 - DNA, 25 bp, Homo sapien
acgatgtcagtacttccaatattca

SEQ ID NO: 2195051 - DNA, 25 bp, Homo sapien
aatcaaaccaagagtcagtttatga

SEQ ID NO: 2195052 - DNA, 25 bp, Homo sapien
ttatgatttccatctacgatgtcag

SEQ ID NO: 2195053 - DNA, 25 bp, Homo sapien
tgacattgttcagggcatgaactct

SEQ ID NO: 2195054 - DNA, 25 bp, Homo sapien
cagtgccttgttgacattgttcagg

SEQ ID NO: 2195055 - DNA, 25 bp, Homo sapien
catgaactcttgtggatcctttttc

SEQ ID NO: 2195056 - DNA, 25 bp, Homo sapien
tgcaaaacccgcagtgccttgttga

SEQ ID NO: 2195057 - DNA, 25 bp, Homo sapien
taatgctattactaattaggttcat

SEQ ID NO: 2195058 - DNA, 25 bp, Homo sapien
cttatactggccaatctcatggata

SEQ ID NO: 2195059 - DNA, 25 bp, Homo sapien
tatactggccaatctcatggatatt

SEQ ID NO: 2195060 - DNA, 25 bp, Homo sapien
tggccaatctcatggatattttgtt

SEQ ID NO: 2195061 - DNA, 25 bp, Homo sapien
cctgtcaggccttcgaggaggtcta

SEQ ID NO: 2195062 - DNA, 25 bp, Homo sapien
gaggttctcaatatgctgcttccca

SEQ ID NO: 2195063 - DNA, 25 bp, Homo sapien
taggaggcgcctcccatcctgtagg

SEQ ID NO: 2195064 - DNA, 25 bp, Homo sapien
gtttttgccctgtcaggccttcgag

SEQ ID NO: 2195065 - DNA, 25 bp, Homo sapien
tgtttctcagtaattccctggaatc

SEQ ID NO: 2195066 - DNA, 25 bp, Homo sapien
gacattatctatctcgtaaataaga

SEQ ID NO: 2195067 - DNA, 25 bp, Homo sapien
atgtgtttctcagtaattccctgga

SEQ ID NO: 2195068 - DNA, 25 bp, Homo sapien
ccttagtatattgagcaccaatgac

SEQ ID NO: 2195069 - DNA, 25 bp, Homo sapien
gcttatcattagtcaggtaactgca

SEQ ID NO: 2195070 - DNA, 25 bp, Homo sapien
ggcagtattcacattagacaagata

SEQ ID NO: 2195071 - DNA, 25 bp, Homo sapien
taatgggaacataaataggtacagc

SEQ ID NO: 2195072 - DNA, 25 bp, Homo sapien
tcaacgagcatgtcttaagggaaac

SEQ ID NO: 2195073 - DNA, 25 bp, Homo sapien
gacactggcgttttggaagtcaaac

SEQ ID NO: 2195074 - DNA, 25 bp, Homo sapien
tatttgagcctccacgtaagtcttt

SEQ ID NO: 2195075 - DNA, 25 bp, Homo sapien
gatgtcaggcaataaagcatatcct

SEQ ID NO: 2195076 - DNA, 25 bp, Homo sapien
tacacagtagagagtcacttcctgc

SEQ ID NO: 2195077 - DNA, 25 bp, Homo sapien
cggaagtgctaaaagtctggcagca

SEQ ID NO: 2195078 - DNA, 25 bp, Homo sapien
tgggaaatatcagccatcatatggc

SEQ ID NO: 2195079 - DNA, 25 bp, Homo sapien
tcctgttctaccatgcagcagagca

SEQ ID NO: 2195080 - DNA, 25 bp, Homo sapien
tctttagcactaaccgggatcactt

SEQ ID NO: 2195081 - DNA, 25 bp, Homo sapien
tctgatattcaaggtagcatggtgc

SEQ ID NO: 2195082 - DNA, 25 bp, Homo sapien
catggtgcacacacggattatttga

SEQ ID NO: 2195083 - DNA, 25 bp, Homo sapien
ttccctaaccgcttgtaaaatgcag

SEQ ID NO: 2195084 - DNA, 25 bp, Homo sapien
gatttcccaactaggatatcctgga

SEQ ID NO: 2195085 - DNA, 25 bp, Homo sapien
ttctttacttgaacaggagtgaggc

SEQ ID NO: 2195086 - DNA, 25 bp, Homo sapien
aggagtgaggctccaccaagacgct

SEQ ID NO: 2195087 - DNA, 25 bp, Homo sapien
tacttgaacaggagtgaggctccac

SEQ ID NO: 2195088 - DNA, 25 bp, Homo sapien
tgaacaggagtgaggctccaccaag

SEQ ID NO: 2195089 - DNA, 25 bp, Homo sapien
tgatgatgtgagatgtgacccgata

SEQ ID NO: 2195090 - DNA, 25 bp, Homo sapien
gataactgtccttcatggatctaca

SEQ ID NO: 2195091 - DNA, 25 bp, Homo sapien
tcatacaataccctgaagggtacta

SEQ ID NO: 2195092 - DNA, 25 bp, Homo sapien
ccctgaagggtactagtgtaagaca

SEQ ID NO: 2195093 - DNA, 25 bp, Homo sapien
ctgcacttacaaccaaaacagccat

SEQ ID NO: 2195094 - DNA, 25 bp, Homo sapien
ttatctatagggaaatctgacagca

SEQ ID NO: 2195095 - DNA, 25 bp, Homo sapien
taaggtagcagatgtagacgttatc

SEQ ID NO: 2195096 - DNA, 25 bp, Homo sapien
cacttgatttggcttacaggttcag

SEQ ID NO: 2195097 - DNA, 25 bp, Homo sapien
gggcctgaattacagtttgctacag

SEQ ID NO: 2195098 - DNA, 25 bp, Homo sapien
gtcttcttcagtgggtcaaatccca

SEQ ID NO: 2195099 - DNA, 25 bp, Homo sapien
aaagtcttcttcagtgggtcaaatc

SEQ ID NO: 2195100 - DNA, 25 bp, Homo sapien
ctttaagagaaaagtcttcttcagt

SEQ ID NO: 2195101 - DNA, 25 bp, Homo sapien
gagaaaagtcttcttcagtgggtca

SEQ ID NO: 2195102 - DNA, 25 bp, Homo sapien
tgatcaccagagacacatggagtgt

SEQ ID NO: 2195103 - DNA, 25 bp, Homo sapien
tgtgtttactcagagcaagctgaac

SEQ ID NO: 2195104 - DNA, 25 bp, Homo sapien
ggttctcagccataattaatacaca

SEQ ID NO: 2195105 - DNA, 25 bp, Homo sapien
aaaaatgctacatgatatgacctta

SEQ ID NO: 2195106 - DNA, 25 bp, Homo sapien
cagtaaagctagacggatcaaaagg

SEQ ID NO: 2195107 - DNA, 25 bp, Homo sapien
aaaggtgcctccaatgcccgtgtca

SEQ ID NO: 2195108 - DNA, 25 bp, Homo sapien
tgcttgagtgctttgcagtcctggc

SEQ ID NO: 2195109 - DNA, 25 bp, Homo sapien
ccaatgcccgtgtcagcgtcagctt

SEQ ID NO: 2195110 - DNA, 25 bp, Homo sapien
tgtacaacccgtttatgtgtcataa

SEQ ID NO: 2195111 - DNA, 25 bp, Homo sapien
tagctgagacccctatagcaaaaga

SEQ ID NO: 2195112 - DNA, 25 bp, Homo sapien
ggtactggatcatcaagagtgctca

SEQ ID NO: 2195113 - DNA, 25 bp, Homo sapien
tgatttcctcgcctatcacaaggtt

SEQ ID NO: 2195114 - DNA, 25 bp, Homo sapien
ttagaaaattgtgcatttacccatt

SEQ ID NO: 2195115 - DNA, 25 bp, Homo sapien
gaaaattgtgcatttacccattttg

SEQ ID NO: 2195116 - DNA, 25 bp, Homo sapien
cttagaaaattgtgcatttacccat

SEQ ID NO: 2195117 - DNA, 25 bp, Homo sapien
tagaaaattgtgcatttacccattt

SEQ ID NO: 2195118 - DNA, 25 bp, Homo sapien
gaagctgaggaatataaagaagcac

SEQ ID NO: 2195119 - DNA, 25 bp, Homo sapien
tataaagaagcacgtttagtactgg

SEQ ID NO: 2195120 - DNA, 25 bp, Homo sapien
ttagtactggattcagtgaagttag

SEQ ID NO: 2195121 - DNA, 25 bp, Homo sapien
gaagcacgtttagtactggattcag

SEQ ID NO: 2195122 - DNA, 25 bp, Homo sapien
tggcataaacagatatagaagaatc

SEQ ID NO: 2195123 - DNA, 25 bp, Homo sapien
tgattctggcataaacagatataga

SEQ ID NO: 2195124 - DNA, 25 bp, Homo sapien
cataaacagatatagaagaatcctg

SEQ ID NO: 2195125 - DNA, 25 bp, Homo sapien
acagatatagaagaatcctgtttaa

SEQ ID NO: 2195126 - DNA, 25 bp, Homo sapien
agtctttcaagggtgtggtaatcag

SEQ ID NO: 2195127 - DNA, 25 bp, Homo sapien
ttaggaggagcaagctggcagtctt

SEQ ID NO: 2195128 - DNA, 25 bp, Homo sapien
catgtgtcggtgcttgagaaggtca

SEQ ID NO: 2195129 - DNA, 25 bp, Homo sapien
tctcatcaggtttgtgataagcagc

SEQ ID NO: 2195130 - DNA, 25 bp, Homo sapien
tcagaccaaggaaggcataacttgt

SEQ ID NO: 2195131 - DNA, 25 bp, Homo sapien
agcagaactagtcttctctctctca

SEQ ID NO: 2195132 - DNA, 25 bp, Homo sapien
caaggaaggcataacttgtgttcca

SEQ ID NO: 2195133 - DNA, 25 bp, Homo sapien
tgagcagaactagtcttctctctct

SEQ ID NO: 2195134 - DNA, 25 bp, Homo sapien
gaggaagaattgcttagaaggcagt

SEQ ID NO: 2195135 - DNA, 25 bp, Homo sapien
catacatgagcataactgatgggca

SEQ ID NO: 2195136 - DNA, 25 bp, Homo sapien
aaaatctgagggtcatggttaagag

SEQ ID NO: 2195137 - DNA, 25 bp, Homo sapien
gcattaagattgaagctcaacgtta

SEQ ID NO: 2195138 - DNA, 25 bp, Homo sapien
gaaatgtacatgctgcctactggca

SEQ ID NO: 2195139 - DNA, 25 bp, Homo sapien
tacagtcctagacacccatagaggc

SEQ ID NO: 2195140 - DNA, 25 bp, Homo sapien
tcagggaattcgtagaccgacagct

SEQ ID NO: 2195141 - DNA, 25 bp, Homo sapien
ctacaagtgcgtggttctgaacaga

SEQ ID NO: 2195142 - DNA, 25 bp, Homo sapien
tatgcactcctaaaatttagtgttg

SEQ ID NO: 2195143 - DNA, 25 bp, Homo sapien
atgcactcctaaaatttagtgttga

SEQ ID NO: 2195144 - DNA, 25 bp, Homo sapien
cttaaaagaaatgttcgcagattct

SEQ ID NO: 2195145 - DNA, 25 bp, Homo sapien
taaaagaaatgttcgcagattctac

SEQ ID NO: 2195146 - DNA, 25 bp, Homo sapien
gaaatgttcgcagattctacttgta

SEQ ID NO: 2195147 - DNA, 25 bp, Homo sapien
tgttcgcagattctacttgtatcat

SEQ ID NO: 2195148 - DNA, 25 bp, Homo sapien
ttacttctgccaaatcaagcaacac

SEQ ID NO: 2195149 - DNA, 25 bp, Homo sapien
caacacacatatgacaacgttttga

SEQ ID NO: 2195150 - DNA, 25 bp, Homo sapien
taaaatcttaatgtgtacaacacac

SEQ ID NO: 2195151 - DNA, 25 bp, Homo sapien
ctcacacgggtggtataagtacaca

SEQ ID NO: 2195152 - DNA, 25 bp, Homo sapien
ttggatttctgggaattaaaggcaa

SEQ ID NO: 2195153 - DNA, 25 bp, Homo sapien
ttccaaagaggagatattaccccag

SEQ ID NO: 2195154 - DNA, 25 bp, Homo sapien
taggctcacggacttcatagactgt

SEQ ID NO: 2195155 - DNA, 25 bp, Homo sapien
caggtttgttgtttgccacaataga

SEQ ID NO: 2195156 - DNA, 25 bp, Homo sapien
gaacttcattataatctggaaattc

SEQ ID NO: 2195157 - DNA, 25 bp, Homo sapien
taaagcacacatttagaaagcctaa

SEQ ID NO: 2195158 - DNA, 25 bp, Homo sapien
aactgaataacagccgtgtagtgta

SEQ ID NO: 2195159 - DNA, 25 bp, Homo sapien
tataatctggaaattcacattgaca

SEQ ID NO: 2195160 - DNA, 25 bp, Homo sapien
gcttctgaatgcttgtggaatttat

SEQ ID NO: 2195161 - DNA, 25 bp, Homo sapien
gcatttatctgcagcttttactcac

SEQ ID NO: 2195162 - DNA, 25 bp, Homo sapien
ctgaatgcttgtggaatttatcatt

SEQ ID NO: 2195163 - DNA, 25 bp, Homo sapien
tatcattcttctgaatggctgttgc

SEQ ID NO: 2195164 - DNA, 25 bp, Homo sapien
gaatctctgaccagcctcacaaaag

SEQ ID NO: 2195165 - DNA, 25 bp, Homo sapien
tttgcacctgtttcttccactccgg

SEQ ID NO: 2195166 - DNA, 25 bp, Homo sapien
tcaaattctgcggaggctggctaca

SEQ ID NO: 2195167 - DNA, 25 bp, Homo sapien
ggtagagtcatagccaagcacagat

SEQ ID NO: 2195168 - DNA, 25 bp, Homo sapien
ctcgagggcggcaaaacaggaatga

SEQ ID NO: 2195169 - DNA, 25 bp, Homo sapien
aattataagcatggaccgtgctggc

SEQ ID NO: 2195170 - DNA, 25 bp, Homo sapien
ccgtgctggcagtaagttaaaatgt

SEQ ID NO: 2195171 - DNA, 25 bp, Homo sapien
taagttccatgtcctagctcgaggg

SEQ ID NO: 2195172 - DNA, 25 bp, Homo sapien
tgagaaactctatcaaatgcccttg

SEQ ID NO: 2195173 - DNA, 25 bp, Homo sapien
gcactggtggctaaaatgtcctaac

SEQ ID NO: 2195174 - DNA, 25 bp, Homo sapien
ctttgaagataagcaagagagccag

SEQ ID NO: 2195175 - DNA, 25 bp, Homo sapien
tacagttatttacatgcacagaagg

SEQ ID NO: 2195176 - DNA, 25 bp, Homo sapien
agccagtattatgcagagatcagcc

SEQ ID NO: 2195177 - DNA, 25 bp, Homo sapien
tgaatgagtgcaccatttgccaaaa

SEQ ID NO: 2195178 - DNA, 25 bp, Homo sapien
cgcccggcccagcaaggatttattt

SEQ ID NO: 2195179 - DNA, 25 bp, Homo sapien
gtctctcatgaatgagtgcaccatt

SEQ ID NO: 2195180 - DNA, 25 bp, Homo sapien
gtagggctcaaaatctcatatctgc

SEQ ID NO: 2195181 - DNA, 25 bp, Homo sapien
tatctccatgtaagtgattctcaag

SEQ ID NO: 2195182 - DNA, 25 bp, Homo sapien
tattatctacccacctggatagccc

SEQ ID NO: 2195183 - DNA, 25 bp, Homo sapien
tgatagtgtattccctccgttagaa

SEQ ID NO: 2195184 - DNA, 25 bp, Homo sapien
atttgggcatacttgtatggggctc

SEQ ID NO: 2195185 - DNA, 25 bp, Homo sapien
tgggcatacttgtatggggctccat

SEQ ID NO: 2195186 - DNA, 25 bp, Homo sapien
cttgaatttgggcatacttgtatgg

SEQ ID NO: 2195187 - DNA, 25 bp, Homo sapien
ttgaatttgggcatacttgtatggg

SEQ ID NO: 2195188 - DNA, 25 bp, Homo sapien
ggctgtatggtgactgcatgtttaa

SEQ ID NO: 2195189 - DNA, 25 bp, Homo sapien
atgtcaaggtttttgggtgaacata

SEQ ID NO: 2195190 - DNA, 25 bp, Homo sapien
tgtttaacagtcactcattgatgga

SEQ ID NO: 2195191 - DNA, 25 bp, Homo sapien
ttcttgtttctagctactgcattca

SEQ ID NO: 2195192 - DNA, 25 bp, Homo sapien
ctttcactaacggtcctccagaatt

SEQ ID NO: 2195193 - DNA, 25 bp, Homo sapien
acggtcctccagaatttttagacat

SEQ ID NO: 2195194 - DNA, 25 bp, Homo sapien
gggataatcactttcactaacggtc

SEQ ID NO: 2195195 - DNA, 25 bp, Homo sapien
ggataatcactttcactaacggtcc

SEQ ID NO: 2195196 - DNA, 25 bp, Homo sapien
attctgtattctctaaaggatgatt

SEQ ID NO: 2195197 - DNA, 25 bp, Homo sapien
ttgtcataactatgcaattctgtat

SEQ ID NO: 2195198 - DNA, 25 bp, Homo sapien
cttgtcataactatgcaattctgta

SEQ ID NO: 2195199 - DNA, 25 bp, Homo sapien
caacaattctgactgagcaattgaa

SEQ ID NO: 2195200 - DNA, 25 bp, Homo sapien
aattgagactatgataaatgtttta

SEQ ID NO: 2195201 - DNA, 25 bp, Homo sapien
tcaacaattctgactgagcaattga

SEQ ID NO: 2195202 - DNA, 25 bp, Homo sapien
tgagactatgataaatgttttacac

SEQ ID NO: 2195203 - DNA, 25 bp, Homo sapien
ccttgtcattgtgatttggcgtgcc

SEQ ID NO: 2195204 - DNA, 25 bp, Homo sapien
aaaacgtttatttcccacactgcag

SEQ ID NO: 2195205 - DNA, 25 bp, Homo sapien
cctaggactatagcaggactttgtg

SEQ ID NO: 2195206 - DNA, 25 bp, Homo sapien
tatttcaaataactgcaccgcctcc

SEQ ID NO: 2195207 - DNA, 25 bp, Homo sapien
gcaattcagtactgtctagctggaa

SEQ ID NO: 2195208 - DNA, 25 bp, Homo sapien
tatgtagcaaatgacatggagtaca

SEQ ID NO: 2195209 - DNA, 25 bp, Homo sapien
tgtcatgtaagatacaccaaaagct

SEQ ID NO: 2195210 - DNA, 25 bp, Homo sapien
gctggaatagtgtcagccaacacct

SEQ ID NO: 2195211 - DNA, 25 bp, Homo sapien
aacagtcctctacttcttcccacca

SEQ ID NO: 2195212 - DNA, 25 bp, Homo sapien
tattgctccagtaggcttaaaaaca

SEQ ID NO: 2195213 - DNA, 25 bp, Homo sapien
tatttcaaattccaggacctgcgca

SEQ ID NO: 2195214 - DNA, 25 bp, Homo sapien
ttctccgaaggtaattgcctcccag

SEQ ID NO: 2195215 - DNA, 25 bp, Homo sapien
gaaagtgagtgatcccaacactgag

SEQ ID NO: 2195216 - DNA, 25 bp, Homo sapien
tgtataggtctcatgggacatgttt

SEQ ID NO: 2195217 - DNA, 25 bp, Homo sapien
tgtattgatgatgccaacagtctga

SEQ ID NO: 2195218 - DNA, 25 bp, Homo sapien
tataggtctcatgggacatgttttc

SEQ ID NO: 2195219 - DNA, 25 bp, Homo sapien
ttatgtattgatgatgccaacagtc

SEQ ID NO: 2195220 - DNA, 25 bp, Homo sapien
gttgctttatcactattgcttgtca

SEQ ID NO: 2195221 - DNA, 25 bp, Homo sapien
ttagttgctttatcactattgcttg

SEQ ID NO: 2195222 - DNA, 25 bp, Homo sapien
catcaaaacagttgtgtcttccttt

SEQ ID NO: 2195223 - DNA, 25 bp, Homo sapien
tccatcaaaacagttgtgtcttcct

SEQ ID NO: 2195224 - DNA, 25 bp, Homo sapien
gatagactatgtcagccccattacc

SEQ ID NO: 2195225 - DNA, 25 bp, Homo sapien
cagcgagcaaaaacccagactactt

SEQ ID NO: 2195226 - DNA, 25 bp, Homo sapien
ttttggaggccttatcaaacaccag

SEQ ID NO: 2195227 - DNA, 25 bp, Homo sapien
caaacaccagggcagaatgatctgt

SEQ ID NO: 2195228 - DNA, 25 bp, Homo sapien
gactgtcacaggtacagatgaattc

SEQ ID NO: 2195229 - DNA, 25 bp, Homo sapien
aacacacccggagggctcttgttgg

SEQ ID NO: 2195230 - DNA, 25 bp, Homo sapien
agatgaattcaacacacccggaggg

SEQ ID NO: 2195231 - DNA, 25 bp, Homo sapien
tgaattttgcctagatcctgactgt

SEQ ID NO: 2195232 - DNA, 25 bp, Homo sapien
gcttacccaccacgattaagtcgac

SEQ ID NO: 2195233 - DNA, 25 bp, Homo sapien
tatttcccaccaattatgagacaca

SEQ ID NO: 2195234 - DNA, 25 bp, Homo sapien
aagtcgaatttctttcctcctagct

SEQ ID NO: 2195235 - DNA, 25 bp, Homo sapien
cacaaaataagctgccagaaagtcg

SEQ ID NO: 2195236 - DNA, 25 bp, Homo sapien
ggttcgataaagcagtatccatgca

SEQ ID NO: 2195237 - DNA, 25 bp, Homo sapien
ttaacaaggttcgataaagcagtat

SEQ ID NO: 2195238 - DNA, 25 bp, Homo sapien
agtatccatgcactcgctgtccttc

SEQ ID NO: 2195239 - DNA, 25 bp, Homo sapien
taaagcagtatccatgcactcgctg

SEQ ID NO: 2195240 - DNA, 25 bp, Homo sapien
aattcctctccccaattgagtgttt

SEQ ID NO: 2195241 - DNA, 25 bp, Homo sapien
caattcctctccccaattgagtgtt

SEQ ID NO: 2195242 - DNA, 25 bp, Homo sapien
attcctctccccaattgagtgtttt

SEQ ID NO: 2195243 - DNA, 25 bp, Homo sapien
tctccccaattgagtgttttccaaa

SEQ ID NO: 2195244 - DNA, 25 bp, Homo sapien
tactggaaccaataccacgtgcatg

SEQ ID NO: 2195245 - DNA, 25 bp, Homo sapien
cacgtgcatgctgagggacaactgt

SEQ ID NO: 2195246 - DNA, 25 bp, Homo sapien
gaaacctacgtatatagagggccaa

SEQ ID NO: 2195247 - DNA, 25 bp, Homo sapien
aattttgcctgtgtgcgggttctgc

SEQ ID NO: 2195248 - DNA, 25 bp, Homo sapien
cgtatgagacctgaagcaagaatgc

SEQ ID NO: 2195249 - DNA, 25 bp, Homo sapien
gacagaaattcaccatcatgcttgg

SEQ ID NO: 2195250 - DNA, 25 bp, Homo sapien
tgagaactcccaaacacagaatgtg

SEQ ID NO: 2195251 - DNA, 25 bp, Homo sapien
taaatacaccgctgaaaggacactt

SEQ ID NO: 2195252 - DNA, 25 bp, Homo sapien
tcaaaatctgacaagttggcttaaa

SEQ ID NO: 2195253 - DNA, 25 bp, Homo sapien
caaaatctgacaagttggcttaaaa

SEQ ID NO: 2195254 - DNA, 25 bp, Homo sapien
aagggaagatgtgttcataacagtt

SEQ ID NO: 2195255 - DNA, 25 bp, Homo sapien
gatgtgttcataacagtttctttca

SEQ ID NO: 2195256 - DNA, 25 bp, Homo sapien
gttgttgaaaaaccctgcaggagat

SEQ ID NO: 2195257 - DNA, 25 bp, Homo sapien
cagctgggtcgacatcaacttggca

SEQ ID NO: 2195258 - DNA, 25 bp, Homo sapien
gcgagaaatcatagaccagctgggt

SEQ ID NO: 2195259 - DNA, 25 bp, Homo sapien
caacttggcaaaacgtgaatacagt

SEQ ID NO: 2195260 - DNA, 25 bp, Homo sapien
tgtttttcctgtcactccatcatgc

SEQ ID NO: 2195261 - DNA, 25 bp, Homo sapien
gtttttcctgtcactccatcatgcc

SEQ ID NO: 2195262 - DNA, 25 bp, Homo sapien
tttttcctgtcactccatcatgcca

SEQ ID NO: 2195263 - DNA, 25 bp, Homo sapien
ctccatcatgccaataagttggctg

SEQ ID NO: 2195264 - DNA, 25 bp, Homo sapien
caaatcaagatagtgcaaaacagca

SEQ ID NO: 2195265 - DNA, 25 bp, Homo sapien
ctgtaacaaatcaagatagtgcaaa

SEQ ID NO: 2195266 - DNA, 25 bp, Homo sapien
aacaaatcaagatagtgcaaaacag

SEQ ID NO: 2195267 - DNA, 25 bp, Homo sapien
cctgattctgtcatcttcctgaaag

SEQ ID NO: 2195268 - DNA, 25 bp, Homo sapien
tatacctcggagcaaacacatgagc

SEQ ID NO: 2195269 - DNA, 25 bp, Homo sapien
tattatgcagctgctacaacgtcgg

SEQ ID NO: 2195270 - DNA, 25 bp, Homo sapien
gatacgtcagtcgaacaaaacctat

SEQ ID NO: 2195271 - DNA, 25 bp, Homo sapien
cagctcccctttcgcatgattcaag

SEQ ID NO: 2195272 - DNA, 25 bp, Homo sapien
aaggggaaacaccatatgacggcct

SEQ ID NO: 2195273 - DNA, 25 bp, Homo sapien
ggaaggggaaacaccatatgacggc

SEQ ID NO: 2195274 - DNA, 25 bp, Homo sapien
ttagtagtagatccaggaaggggaa

SEQ ID NO: 2195275 - DNA, 25 bp, Homo sapien
caggaaggggaaacaccatatgacg

SEQ ID NO: 2195276 - DNA, 25 bp, Homo sapien
ctgcagacagtgtacaattagattc

SEQ ID NO: 2195277 - DNA, 25 bp, Homo sapien
ctaatgcatgcaggtgccttctgaa

SEQ ID NO: 2195278 - DNA, 25 bp, Homo sapien
tagtttggtgagtctaatgcatgca

SEQ ID NO: 2195279 - DNA, 25 bp, Homo sapien
tttggtgagtctaatgcatgcaggt

SEQ ID NO: 2195280 - DNA, 25 bp, Homo sapien
tgagtctaatgcatgcaggtgcctt

SEQ ID NO: 2195281 - DNA, 25 bp, Homo sapien
aaatgccacataagcgtccaagggg

SEQ ID NO: 2195282 - DNA, 25 bp, Homo sapien
cgtacattcgagtccagatttgttt

SEQ ID NO: 2195283 - DNA, 25 bp, Homo sapien
cagtaccccataaagagtctagacg

SEQ ID NO: 2195284 - DNA, 25 bp, Homo sapien
acatcttggtcagtaccccataaag

SEQ ID NO: 2195285 - DNA, 25 bp, Homo sapien
atcttctgcagggccaaaatgttca

SEQ ID NO: 2195286 - DNA, 25 bp, Homo sapien
aaatgttcatgtgcttaataagtac

SEQ ID NO: 2195287 - DNA, 25 bp, Homo sapien
cacaagtgggaccagtctgcttgta

SEQ ID NO: 2195288 - DNA, 25 bp, Homo sapien
taataagtacaatatgagtagcaca

SEQ ID NO: 2195289 - DNA, 25 bp, Homo sapien
caaattcatgctgttggagggtcaa

SEQ ID NO: 2195290 - DNA, 25 bp, Homo sapien
cacttatataaggtacccagagtag

SEQ ID NO: 2195291 - DNA, 25 bp, Homo sapien
tatgggacccataaatgaagaagga

SEQ ID NO: 2195292 - DNA, 25 bp, Homo sapien
ggagggtcaactacatatacagata

SEQ ID NO: 2195293 - DNA, 25 bp, Homo sapien
cagtcataggccttcttgaaatgca

SEQ ID NO: 2195294 - DNA, 25 bp, Homo sapien
tcagctatatccagcactgagctga

SEQ ID NO: 2195295 - DNA, 25 bp, Homo sapien
aaatgcacctgatctatcatggctg

SEQ ID NO: 2195296 - DNA, 25 bp, Homo sapien
ctatcatggctgcaataatcacagg

SEQ ID NO: 2195297 - DNA, 25 bp, Homo sapien
ctgccacagatcttcagctgggaac

SEQ ID NO: 2195298 - DNA, 25 bp, Homo sapien
gctgccacagatcttcagctgggaa

SEQ ID NO: 2195299 - DNA, 25 bp, Homo sapien
ggctgccacagatcttcagctggga

SEQ ID NO: 2195300 - DNA, 25 bp, Homo sapien
tggctgccacagatcttcagctggg

SEQ ID NO: 2195301 - DNA, 25 bp, Homo sapien
tcagttcaggcctactgttaagccc

SEQ ID NO: 2195302 - DNA, 25 bp, Homo sapien
aatgaggtcccatatttgtctgagc

SEQ ID NO: 2195303 - DNA, 25 bp, Homo sapien
ggtactcccactgcaagtatattgt

SEQ ID NO: 2195304 - DNA, 25 bp, Homo sapien
tgttaagccctactagtcaatgtca

SEQ ID NO: 2195305 - DNA, 25 bp, Homo sapien
taggcggatcaatgttgctctctgg

SEQ ID NO: 2195306 - DNA, 25 bp, Homo sapien
gaaggtcacactttggcatgcaaac

SEQ ID NO: 2195307 - DNA, 25 bp, Homo sapien
gatacccagcctcttggcaggagct

SEQ ID NO: 2195308 - DNA, 25 bp, Homo sapien
catggctgggctacttcaatgaagt

SEQ ID NO: 2195309 - DNA, 25 bp, Homo sapien
cctttagcctgggtatacaggtagc

SEQ ID NO: 2195310 - DNA, 25 bp, Homo sapien
ggtagcataaaagaacagggaagcc

SEQ ID NO: 2195311 - DNA, 25 bp, Homo sapien
tgttggcactgttcatacacttacc

SEQ ID NO: 2195312 - DNA, 25 bp, Homo sapien
gaaagatgcctgcaatactgtccat

SEQ ID NO: 2195313 - DNA, 25 bp, Homo sapien
tgggctgcctgctctaacactgagg

SEQ ID NO: 2195314 - DNA, 25 bp, Homo sapien
ccttgaggttagaagcatgctatgc

SEQ ID NO: 2195315 - DNA, 25 bp, Homo sapien
agatgttcccggactgttcactgca

SEQ ID NO: 2195316 - DNA, 25 bp, Homo sapien
gacaaggcttggtttagcactcctg

SEQ ID NO: 2195317 - DNA, 25 bp, Homo sapien
aaagctaccttcaaactgggagtgg

SEQ ID NO: 2195318 - DNA, 25 bp, Homo sapien
gttcccagtcactatgaaactttga

SEQ ID NO: 2195319 - DNA, 25 bp, Homo sapien
gccttactgcaacgtctagaactta

SEQ ID NO: 2195320 - DNA, 25 bp, Homo sapien
agatcaccctttttcgccccagagt

SEQ ID NO: 2195321 - DNA, 25 bp, Homo sapien
gaattcatattgctctctcactcgc

SEQ ID NO: 2195322 - DNA, 25 bp, Homo sapien
ttctggtggatagagaatcccttcc

SEQ ID NO: 2195323 - DNA, 25 bp, Homo sapien
tctttctcaggtaaatcaggtgtct

SEQ ID NO: 2195324 - DNA, 25 bp, Homo sapien
tataggccttgttgcttagctacaa

SEQ ID NO: 2195325 - DNA, 25 bp, Homo sapien
tcaatatttgatttatgaggcttac

SEQ ID NO: 2195326 - DNA, 25 bp, Homo sapien
ctttcaatatttgatttatgaggct

SEQ ID NO: 2195327 - DNA, 25 bp, Homo sapien
ttcaatatttgatttatgaggctta

SEQ ID NO: 2195328 - DNA, 25 bp, Homo sapien
tttcaatatttgatttatgaggctt

SEQ ID NO: 2195329 - DNA, 25 bp, Homo sapien
caaacttccagtgccggtatgtttc

SEQ ID NO: 2195330 - DNA, 25 bp, Homo sapien
gtatgtttctcaatagttagtacca

SEQ ID NO: 2195331 - DNA, 25 bp, Homo sapien
tattttatacaaacttccagtgccg

SEQ ID NO: 2195332 - DNA, 25 bp, Homo sapien
cagtgccggtatgtttctcaatagt

SEQ ID NO: 2195333 - DNA, 25 bp, Homo sapien
gtctgggctgtcatgaaacttttat

SEQ ID NO: 2195334 - DNA, 25 bp, Homo sapien
cttttattgcctataagaaatgcta

SEQ ID NO: 2195335 - DNA, 25 bp, Homo sapien
aacttttattgcctataagaaatgc

SEQ ID NO: 2195336 - DNA, 25 bp, Homo sapien
tttattgcctataagaaatgctagt

SEQ ID NO: 2195337 - DNA, 25 bp, Homo sapien
gggttgactgtctttggttactatc

SEQ ID NO: 2195338 - DNA, 25 bp, Homo sapien
ctgggttgactgtctttggttacta

SEQ ID NO: 2195339 - DNA, 25 bp, Homo sapien
gttgactgtctttggttactatcgt

SEQ ID NO: 2195340 - DNA, 25 bp, Homo sapien
actgggttgactgtctttggttact

SEQ ID NO: 2195341 - DNA, 25 bp, Homo sapien
ttcagcatccagcaatgtacataaa

SEQ ID NO: 2195342 - DNA, 25 bp, Homo sapien
tgtgattttaacgtccacaatttgc

SEQ ID NO: 2195343 - DNA, 25 bp, Homo sapien
caatttgctgcgtgtccaaaggcga

SEQ ID NO: 2195344 - DNA, 25 bp, Homo sapien
tccaaaggcgaaaggagcgggctca

SEQ ID NO: 2195345 - DNA, 25 bp, Homo sapien
tagagagagcttaacagctgcttcc

SEQ ID NO: 2195346 - DNA, 25 bp, Homo sapien
cttagagagagcttaacagctgctt

SEQ ID NO: 2195347 - DNA, 25 bp, Homo sapien
ccttagagagagcttaacagctgct

SEQ ID NO: 2195348 - DNA, 25 bp, Homo sapien
gagagagcttaacagctgcttccat

SEQ ID NO: 2195349 - DNA, 25 bp, Homo sapien
cagcgcggcttttgatgacgtcggt

SEQ ID NO: 2195350 - DNA, 25 bp, Homo sapien
acgtcggtgaatccgtcctcagcgg

SEQ ID NO: 2195351 - DNA, 25 bp, Homo sapien
tcctcagcggcattttctggggtct

SEQ ID NO: 2195352 - DNA, 25 bp, Homo sapien
gcttttgatgacgtcggtgaatccg

SEQ ID NO: 2195353 - DNA, 25 bp, Homo sapien
tgggtagactggtcacttggcccct

SEQ ID NO: 2195354 - DNA, 25 bp, Homo sapien
cacacgagcaccagtagtggcagca

SEQ ID NO: 2195355 - DNA, 25 bp, Homo sapien
aggtcaaccgttgggcctctgagca

SEQ ID NO: 2195356 - DNA, 25 bp, Homo sapien
gattagattgattcccagttcccct

SEQ ID NO: 2195357 - DNA, 25 bp, Homo sapien
gagggagctccctttgcgctgtgta

SEQ ID NO: 2195358 - DNA, 25 bp, Homo sapien
gagaaccttggtacctcaattgaag

SEQ ID NO: 2195359 - DNA, 25 bp, Homo sapien
tcctcaggttgcaaggatccgtggg

SEQ ID NO: 2195360 - DNA, 25 bp, Homo sapien
tgatcttcagggaggctagcacaat

SEQ ID NO: 2195361 - DNA, 25 bp, Homo sapien
ggtaatgaatcctaccaggactagg

SEQ ID NO: 2195362 - DNA, 25 bp, Homo sapien
caggactaggtcattctttcccagg

SEQ ID NO: 2195363 - DNA, 25 bp, Homo sapien
tattcaaggcactcagactcttcag

SEQ ID NO: 2195364 - DNA, 25 bp, Homo sapien
tagttcccgggtatcactgctggtt

SEQ ID NO: 2195365 - DNA, 25 bp, Homo sapien
cttagcatcagctaggctacattcc

SEQ ID NO: 2195366 - DNA, 25 bp, Homo sapien
acttagcatcagctaggctacattc

SEQ ID NO: 2195367 - DNA, 25 bp, Homo sapien
gtttcaaggctgaactatccagatg

SEQ ID NO: 2195368 - DNA, 25 bp, Homo sapien
cagtgtgcctattgcataaatatcc

SEQ ID NO: 2195369 - DNA, 25 bp, Homo sapien
tgttctgcaacaataggagtgtgtg

SEQ ID NO: 2195370 - DNA, 25 bp, Homo sapien
gaagatttcacctctaagcagctca

SEQ ID NO: 2195371 - DNA, 25 bp, Homo sapien
tcagagacttcatgtgtttccctat

SEQ ID NO: 2195372 - DNA, 25 bp, Homo sapien
tgagaggcttgtccttcagagactt

SEQ ID NO: 2195373 - DNA, 25 bp, Homo sapien
tttatgaacgtattagtggcagcaa

SEQ ID NO: 2195374 - DNA, 25 bp, Homo sapien
gggatagatttttcgaaagcataaa

SEQ ID NO: 2195375 - DNA, 25 bp, Homo sapien
tatcttccgccgaatttctgactgt

SEQ ID NO: 2195376 - DNA, 25 bp, Homo sapien
ttatttatatcttccgccgaatttc

SEQ ID NO: 2195377 - DNA, 25 bp, Homo sapien
gctttgcctcttgggccgcttttag

SEQ ID NO: 2195378 - DNA, 25 bp, Homo sapien
gccgcttttagaggatccaagtgtc

SEQ ID NO: 2195379 - DNA, 25 bp, Homo sapien
ttcagtgatgattctttagtgccag

SEQ ID NO: 2195380 - DNA, 25 bp, Homo sapien
tctttagtgccagaatggtctgggt

SEQ ID NO: 2195381 - DNA, 25 bp, Homo sapien
gatacgcctcgaggggcttttgcct

SEQ ID NO: 2195382 - DNA, 25 bp, Homo sapien
atgtgatacgcctcgaggggctttt

SEQ ID NO: 2195383 - DNA, 25 bp, Homo sapien
ctccttccaacacattaaattccaa

SEQ ID NO: 2195384 - DNA, 25 bp, Homo sapien
tctccttccaacacattaaattcca

SEQ ID NO: 2195385 - DNA, 25 bp, Homo sapien
tccttccaacacattaaattccaaa

SEQ ID NO: 2195386 - DNA, 25 bp, Homo sapien
ataacctctacggaaaacctctatg

SEQ ID NO: 2195387 - DNA, 25 bp, Homo sapien
cactactgcatataacgccaaagga

SEQ ID NO: 2195388 - DNA, 25 bp, Homo sapien
tctatggagggttcacaaataacta

SEQ ID NO: 2195389 - DNA, 25 bp, Homo sapien
tgtgttgtacgcacgtgcatgtgca

SEQ ID NO: 2195390 - DNA, 25 bp, Homo sapien
cttccttcagctcaagctatttagt

SEQ ID NO: 2195391 - DNA, 25 bp, Homo sapien
ccttcagctcaagctatttagtagt

SEQ ID NO: 2195392 - DNA, 25 bp, Homo sapien
ttctacttctgaagggaaattgtcc

SEQ ID NO: 2195393 - DNA, 25 bp, Homo sapien
tctacttctgaagggaaattgtcct

SEQ ID NO: 2195394 - DNA, 25 bp, Homo sapien
catccacggggccagtcatcataaa

SEQ ID NO: 2195395 - DNA, 25 bp, Homo sapien
aattgagtagtaaattgaaaactgc

SEQ ID NO: 2195396 - DNA, 25 bp, Homo sapien
gagcaagaaatacccaattgagtag

SEQ ID NO: 2195397 - DNA, 25 bp, Homo sapien
tgttgccaaagttgtgcatccacgg

SEQ ID NO: 2195398 - DNA, 25 bp, Homo sapien
ccagcccacttgaagaattcacgga

SEQ ID NO: 2195399 - DNA, 25 bp, Homo sapien
cacgctgtgcggtataagaattcga

SEQ ID NO: 2195400 - DNA, 25 bp, Homo sapien
taaacttttggtcctcatgggttgc

SEQ ID NO: 2195401 - DNA, 25 bp, Homo sapien
taatcttcttccgatgcctctacga

SEQ ID NO: 2195402 - DNA, 25 bp, Homo sapien
tatgtaggatgctcgaatcttggga

SEQ ID NO: 2195403 - DNA, 25 bp, Homo sapien
tttatgtaggatgctcgaatcttgg

SEQ ID NO: 2195404 - DNA, 25 bp, Homo sapien
cttttatgtaggatgctcgaatctt

SEQ ID NO: 2195405 - DNA, 25 bp, Homo sapien
ttatgtaggatgctcgaatcttggg

SEQ ID NO: 2195406 - DNA, 25 bp, Homo sapien
acacccgacgactcttgggaagctc

SEQ ID NO: 2195407 - DNA, 25 bp, Homo sapien
ggtggagactggacacccgacgact

SEQ ID NO: 2195408 - DNA, 25 bp, Homo sapien
tcttgggaggctccggaccgagact

SEQ ID NO: 2195409 - DNA, 25 bp, Homo sapien
gggcggagactggacactcgacgag

SEQ ID NO: 2195410 - DNA, 25 bp, Homo sapien
gtccgacgagtcttgggaggctccg

SEQ ID NO: 2195411 - DNA, 25 bp, Homo sapien
gggaggctccgagcggagactggac

SEQ ID NO: 2195412 - DNA, 25 bp, Homo sapien
cttgggaggctccgagcggagactg

SEQ ID NO: 2195413 - DNA, 25 bp, Homo sapien
tccgacgagtcttgggaggctccga

SEQ ID NO: 2195414 - DNA, 25 bp, Homo sapien
gtccgacgagtcttgggaggctccg

SEQ ID NO: 2195415 - DNA, 25 bp, Homo sapien
gtcttgggaggctccgagcggagac

SEQ ID NO: 2195416 - DNA, 25 bp, Homo sapien
cgagtcttgggaggctccgagcgga

SEQ ID NO: 2195417 - DNA, 25 bp, Homo sapien
tccgacgagtcttgggaggctccga

SEQ ID NO: 2195418 - DNA, 25 bp, Homo sapien
tatgtatagtaggagattggacacc

SEQ ID NO: 2195419 - DNA, 25 bp, Homo sapien
cctgactagtgtcgggaggttccag

SEQ ID NO: 2195420 - DNA, 25 bp, Homo sapien
tggacctccgacgtgtcttgggatg

SEQ ID NO: 2195421 - DNA, 25 bp, Homo sapien
tgctctaggcggagatgggactctc

SEQ ID NO: 2195422 - DNA, 25 bp, Homo sapien
tctccgacgagtgatgggaggcccc

SEQ ID NO: 2195423 - DNA, 25 bp, Homo sapien
ggttcgtcagttgtcttctcccggc

SEQ ID NO: 2195424 - DNA, 25 bp, Homo sapien
cagcagctgtcgtaggagactggat

SEQ ID NO: 2195425 - DNA, 25 bp, Homo sapien
tcgaaaggccgaggacagaatttcc

SEQ ID NO: 2195426 - DNA, 25 bp, Homo sapien
gctccgggcttagatgggacactcc

SEQ ID NO: 2195427 - DNA, 25 bp, Homo sapien
agtctcgggaggcttcaggcagaat

SEQ ID NO: 2195428 - DNA, 25 bp, Homo sapien
tccagtctcgggaggctctgggagg

SEQ ID NO: 2195429 - DNA, 25 bp, Homo sapien
caggcagaattccccacagggatgt

SEQ ID NO: 2195430 - DNA, 25 bp, Homo sapien
gccttccgtgctagctgggctggag

SEQ ID NO: 2195431 - DNA, 25 bp, Homo sapien
caaacgagagtatcttcgggagacg

SEQ ID NO: 2195432 - DNA, 25 bp, Homo sapien
cggcgacaaacgagagtatcttcgg

SEQ ID NO: 2195433 - DNA, 25 bp, Homo sapien
tcctgggtctcacaacaagcccaag

SEQ ID NO: 2195434 - DNA, 25 bp, Homo sapien
aacctcaggcgcctgtgcttgcact

SEQ ID NO: 2195435 - DNA, 25 bp, Homo sapien
gcctgtgcttgcacttcgcgaagca

SEQ ID NO: 2195436 - DNA, 25 bp, Homo sapien
aaatacccagttctgggtgtccatg

SEQ ID NO: 2195437 - DNA, 25 bp, Homo sapien
agccgtagcggaagtcgtccatgcc

SEQ ID NO: 2195438 - DNA, 25 bp, Homo sapien
tggaaggccgtttgttacagtacca

SEQ ID NO: 2195439 - DNA, 25 bp, Homo sapien
agtaccagggcttggagtccatgcc

SEQ ID NO: 2195440 - DNA, 25 bp, Homo sapien
tggagtccatgcccggggacctcag

SEQ ID NO: 2195441 - DNA, 25 bp, Homo sapien
atgcccggggacctcagccagtcct

SEQ ID NO: 2195442 - DNA, 25 bp, Homo sapien
ggtggccctcgctgtggtgccacgt

SEQ ID NO: 2195443 - DNA, 25 bp, Homo sapien
gtggccctcgctgtggtgccacgtc

SEQ ID NO: 2195444 - DNA, 25 bp, Homo sapien
taagtccgtcaagccatagaacagc

SEQ ID NO: 2195445 - DNA, 25 bp, Homo sapien
cgtcaagccatagaacagcagccac

SEQ ID NO: 2195446 - DNA, 25 bp, Homo sapien
taactaagtccgtcaagccatagaa

SEQ ID NO: 2195447 - DNA, 25 bp, Homo sapien
ttaggtaactaagtccgtcaagcca

SEQ ID NO: 2195448 - DNA, 25 bp, Homo sapien
ttaagattgaaataaagcaagtcac

SEQ ID NO: 2195449 - DNA, 25 bp, Homo sapien
aatccagtgtccatagcatctctga

SEQ ID NO: 2195450 - DNA, 25 bp, Homo sapien
tcacgctgtataaaatccagtgtcc

SEQ ID NO: 2195451 - DNA, 25 bp, Homo sapien
aagtcacatatcacgctgtataaaa

SEQ ID NO: 2195452 - DNA, 25 bp, Homo sapien
tttgatctgtagtcactccttgctg

SEQ ID NO: 2195453 - DNA, 25 bp, Homo sapien
ctttttgatctgtagtcactccttg

SEQ ID NO: 2195454 - DNA, 25 bp, Homo sapien
tttttgatctgtagtcactccttgc

SEQ ID NO: 2195455 - DNA, 25 bp, Homo sapien
ttctttttgatctgtagtcactcct

SEQ ID NO: 2195456 - DNA, 25 bp, Homo sapien
tcaaaatgccatagaacttttccag

SEQ ID NO: 2195457 - DNA, 25 bp, Homo sapien
taaatcaatcaaaatgccatagaac

SEQ ID NO: 2195458 - DNA, 25 bp, Homo sapien
tttccagttgtacttcatccatgaa

SEQ ID NO: 2195459 - DNA, 25 bp, Homo sapien
tgccatagaacttttccagttgtac

SEQ ID NO: 2195460 - DNA, 25 bp, Homo sapien
ttcagattgagcagtaacaggtctg

SEQ ID NO: 2195461 - DNA, 25 bp, Homo sapien
gagttcctcaaccatttcaattcta

SEQ ID NO: 2195462 - DNA, 25 bp, Homo sapien
tgagttcctcaaccatttcaattct

SEQ ID NO: 2195463 - DNA, 25 bp, Homo sapien
gttcctcaaccatttcaattctatt

SEQ ID NO: 2195464 - DNA, 25 bp, Homo sapien
tttgagttcctcaaccatttcaatt

SEQ ID NO: 2195465 - DNA, 25 bp, Homo sapien
tattaagttttcctatggtcatatt

SEQ ID NO: 2195466 - DNA, 25 bp, Homo sapien
ttctcttgatcatctcccacattgg

SEQ ID NO: 2195467 - DNA, 25 bp, Homo sapien
cactgatgatatggtgtatattaag

SEQ ID NO: 2195468 - DNA, 25 bp, Homo sapien
gagcatagggcatataatcttctgc

SEQ ID NO: 2195469 - DNA, 25 bp, Homo sapien
aaataattctaggatgtatgtctgg

SEQ ID NO: 2195470 - DNA, 25 bp, Homo sapien
aaattgaaaataattctaggatgta

SEQ ID NO: 2195471 - DNA, 25 bp, Homo sapien
gaaaataattctaggatgtatgtct

SEQ ID NO: 2195472 - DNA, 25 bp, Homo sapien
attgaaaataattctaggatgtatg

SEQ ID NO: 2195473 - DNA, 25 bp, Homo sapien
ctctgcatcatcaaaacctagagcc

SEQ ID NO: 2195474 - DNA, 25 bp, Homo sapien
catcatcaaaacctagagcccaggc

SEQ ID NO: 2195475 - DNA, 25 bp, Homo sapien
tgcatcatcaaaacctagagcccag

SEQ ID NO: 2195476 - DNA, 25 bp, Homo sapien
tcatcaaaacctagagcccaggcca

SEQ ID NO: 2195477 - DNA, 25 bp, Homo sapien
gagcattccttgctacccaatagga

SEQ ID NO: 2195478 - DNA, 25 bp, Homo sapien
tacccaataggaatttgtttgctga

SEQ ID NO: 2195479 - DNA, 25 bp, Homo sapien
ctgcacagacattgcggcttgagca

SEQ ID NO: 2195480 - DNA, 25 bp, Homo sapien
cattgcggcttgagcattccttgct

SEQ ID NO: 2195481 - DNA, 25 bp, Homo sapien
taagcagtacagccactctcttcaa

SEQ ID NO: 2195482 - DNA, 25 bp, Homo sapien
ataaaagttcatgaattacttcact

SEQ ID NO: 2195483 - DNA, 25 bp, Homo sapien
tgcttcctctaatacactcctgttc

SEQ ID NO: 2195484 - DNA, 25 bp, Homo sapien
tgctgcttcctctaatacactcctg

SEQ ID NO: 2195485 - DNA, 25 bp, Homo sapien
aaaagttcatgaattacttcactca

SEQ ID NO: 2195486 - DNA, 25 bp, Homo sapien
tccgacatacagtctccctggcaat

SEQ ID NO: 2195487 - DNA, 25 bp, Homo sapien
cagtctccctggcaatatatttttg

SEQ ID NO: 2195488 - DNA, 25 bp, Homo sapien
taactccgacatacagtctccctgg

SEQ ID NO: 2195489 - DNA, 25 bp, Homo sapien
gacatacagtctccctggcaatata

SEQ ID NO: 2195490 - DNA, 25 bp, Homo sapien
tcttcactccgcatcccactgggat

SEQ ID NO: 2195491 - DNA, 25 bp, Homo sapien
tcctcagaactcaccggcaaggctc

SEQ ID NO: 2195492 - DNA, 25 bp, Homo sapien
tgccttcgccactgccagtcttgtt

SEQ ID NO: 2195493 - DNA, 25 bp, Homo sapien
gaactcaccggcaaggctcggcctg

SEQ ID NO: 2195494 - DNA, 25 bp, Homo sapien
ttcttattcatctgccctctttcat

SEQ ID NO: 2195495 - DNA, 25 bp, Homo sapien
tcttcttattcatctgccctctttc

SEQ ID NO: 2195496 - DNA, 25 bp, Homo sapien
tgtgggagaccctacaaactgcttc

SEQ ID NO: 2195497 - DNA, 25 bp, Homo sapien
tgttatcagaaaataggctccattc

SEQ ID NO: 2195498 - DNA, 25 bp, Homo sapien
tctcttcaaggtcattgttatcaga

SEQ ID NO: 2195499 - DNA, 25 bp, Homo sapien
cagccgtctaggtatgtgggtaagc

SEQ ID NO: 2195500 - DNA, 25 bp, Homo sapien
ctcttcaataataggcgataagtga

SEQ ID NO: 2195501 - DNA, 25 bp, Homo sapien
aataggcgataagtgatgtattgtc

SEQ ID NO: 2195502 - DNA, 25 bp, Homo sapien
taggcgataagtgatgtattgtcat

SEQ ID NO: 2195503 - DNA, 25 bp, Homo sapien
caataataggcgataagtgatgtat

SEQ ID NO: 2195504 - DNA, 25 bp, Homo sapien
tcattacaagctacaatggaaaagc

SEQ ID NO: 2195505 - DNA, 25 bp, Homo sapien
gagtcatagaatcttttcaggagct

SEQ ID NO: 2195506 - DNA, 25 bp, Homo sapien
caaattctgcttgcacataccccat

SEQ ID NO: 2195507 - DNA, 25 bp, Homo sapien
aatagaagagaattcttgattccaa

SEQ ID NO: 2195508 - DNA, 25 bp, Homo sapien
aatgtcatttgataggatgaaagcc

SEQ ID NO: 2195509 - DNA, 25 bp, Homo sapien
gtctttgtaatgtcaatgcacttgg

SEQ ID NO: 2195510 - DNA, 25 bp, Homo sapien
tgagtgcttgaagggcactcatcca

SEQ ID NO: 2195511 - DNA, 25 bp, Homo sapien
tgataggatgaaagccaaccatttt

SEQ ID NO: 2195512 - DNA, 25 bp, Homo sapien
tccaccttcattattcctgaactgt

SEQ ID NO: 2195513 - DNA, 25 bp, Homo sapien
cattattcctgaactgttggtggat

SEQ ID NO: 2195514 - DNA, 25 bp, Homo sapien
gaaagcctgagccaaacgtaagaca

SEQ ID NO: 2195515 - DNA, 25 bp, Homo sapien
caaacgtaagacactgtaatcatca

SEQ ID NO: 2195516 - DNA, 25 bp, Homo sapien
gaaatcatgaacgaaacttaagtaa

SEQ ID NO: 2195517 - DNA, 25 bp, Homo sapien
ttaagtaattactttccatgtcagg

SEQ ID NO: 2195518 - DNA, 25 bp, Homo sapien
acttaagtaattactttccatgtca

SEQ ID NO: 2195519 - DNA, 25 bp, Homo sapien
ctgaaatcatgaacgaaacttaagt

SEQ ID NO: 2195520 - DNA, 25 bp, Homo sapien
acactgggtgcaggtcagtgggtgt

SEQ ID NO: 2195521 - DNA, 25 bp, Homo sapien
ccaggagattatatctcacacctgg

SEQ ID NO: 2195522 - DNA, 25 bp, Homo sapien
ctgggtgcaggtcagtgggtgtgcg

SEQ ID NO: 2195523 - DNA, 25 bp, Homo sapien
ctgggatttgggagccaagatggcc

SEQ ID NO: 2195524 - DNA, 25 bp, Homo sapien
gagggattggagtagatctccttaa

SEQ ID NO: 2195525 - DNA, 25 bp, Homo sapien
aggtatcctgagaataggagttagc

SEQ ID NO: 2195526 - DNA, 25 bp, Homo sapien
tttagatgagggattggagtagatc

SEQ ID NO: 2195527 - DNA, 25 bp, Homo sapien
ccttaaaggtatcctgagaatagga

SEQ ID NO: 2195528 - DNA, 25 bp, Homo sapien
tggttctttatgctcatcctgctcc

SEQ ID NO: 2195529 - DNA, 25 bp, Homo sapien
gttctttatgctcatcctgctcctc

SEQ ID NO: 2195530 - DNA, 25 bp, Homo sapien
ggttctttatgctcatcctgctcct

SEQ ID NO: 2195531 - DNA, 25 bp, Homo sapien
atcatccctttgtcttgtgttctga

SEQ ID NO: 2195532 - DNA, 25 bp, Homo sapien
tctgagtgtatgtggctttgctacc

SEQ ID NO: 2195533 - DNA, 25 bp, Homo sapien
atccctttgtcttgtgttctgagtg

SEQ ID NO: 2195534 - DNA, 25 bp, Homo sapien
tgtggctttgctaccaaacttgaag

SEQ ID NO: 2195535 - DNA, 25 bp, Homo sapien
cacagaggcataggttagagtgcac

SEQ ID NO: 2195536 - DNA, 25 bp, Homo sapien
tgtgtgcacaaatcggttagcccat

SEQ ID NO: 2195537 - DNA, 25 bp, Homo sapien
caagagaagtgcctcattggtgtca

SEQ ID NO: 2195538 - DNA, 25 bp, Homo sapien
aagaaatcggaataactagccctgc

SEQ ID NO: 2195539 - DNA, 25 bp, Homo sapien
taaagggtacaaaagcaactcatgc

SEQ ID NO: 2195540 - DNA, 25 bp, Homo sapien
ccagtctagatagggctgaggcacc

SEQ ID NO: 2195541 - DNA, 25 bp, Homo sapien
cagggagacgctgattgccaaagca

SEQ ID NO: 2195542 - DNA, 25 bp, Homo sapien
caatgtgtacaaggttagtgctcaa

SEQ ID NO: 2195543 - DNA, 25 bp, Homo sapien
tgattgggtaaaggaccaggctgca

SEQ ID NO: 2195544 - DNA, 25 bp, Homo sapien
cgaaaatatagttgcaccccaggcc

SEQ ID NO: 2195545 - DNA, 25 bp, Homo sapien
ttcaggcaataaaggatggcacccc

SEQ ID NO: 2195546 - DNA, 25 bp, Homo sapien
aggccaggccataaccccagttgaa

SEQ ID NO: 2195547 - DNA, 25 bp, Homo sapien
taccataggacagcttccaccctca

SEQ ID NO: 2195548 - DNA, 25 bp, Homo sapien
ctaccataggacagcttccaccctc

SEQ ID NO: 2195549 - DNA, 25 bp, Homo sapien
cagagggacatcatttgaattggtt

SEQ ID NO: 2195550 - DNA, 25 bp, Homo sapien
tcagagggacatcatttgaattggt

SEQ ID NO: 2195551 - DNA, 25 bp, Homo sapien
ccgcaacaggtctatagaaacgcct

SEQ ID NO: 2195552 - DNA, 25 bp, Homo sapien
ccaccaggaatgcaatgagaatgat

SEQ ID NO: 2195553 - DNA, 25 bp, Homo sapien
gagatcccacgcagatagaaatcaa

SEQ ID NO: 2195554 - DNA, 25 bp, Homo sapien
ctgctgcaaaaagcatgaccgcaac

SEQ ID NO: 2195555 - DNA, 25 bp, Homo sapien
tggttaccgaagaaagaaattctgc

SEQ ID NO: 2195556 - DNA, 25 bp, Homo sapien
tgttgctctgcaaactcgagctggc

SEQ ID NO: 2195557 - DNA, 25 bp, Homo sapien
tagttgtaaactgccaaccctgaaa

SEQ ID NO: 2195558 - DNA, 25 bp, Homo sapien
ccaaggagtcgtgcagtagctgtca

SEQ ID NO: 2195559 - DNA, 25 bp, Homo sapien
tcagcgctggcggaataaagcacaa

SEQ ID NO: 2195560 - DNA, 25 bp, Homo sapien
taggcaaattcgtcctcgagagagg

SEQ ID NO: 2195561 - DNA, 25 bp, Homo sapien
tggaaccggcagaaatgtgaacact

SEQ ID NO: 2195562 - DNA, 25 bp, Homo sapien
aactcacaatcaacggcggcgtcac

SEQ ID NO: 2195563 - DNA, 25 bp, Homo sapien
tgttactccagaacaggaggaatgg

SEQ ID NO: 2195564 - DNA, 25 bp, Homo sapien
caaatacccaaaatagcgtacgtgt

SEQ ID NO: 2195565 - DNA, 25 bp, Homo sapien
cgctttaggtttggcgaccagggat

SEQ ID NO: 2195566 - DNA, 25 bp, Homo sapien
ccacatggctctcgcctcaaatgat

SEQ ID NO: 2195567 - DNA, 25 bp, Homo sapien
acagcgccaggaagatgcacaccag

SEQ ID NO: 2195568 - DNA, 25 bp, Homo sapien
tgagcgtggactcgcagtgccagat

SEQ ID NO: 2195569 - DNA, 25 bp, Homo sapien
cagatgtccaagctggcgggtttcc

SEQ ID NO: 2195570 - DNA, 25 bp, Homo sapien
cgacaggtagtactggtggtcagct

SEQ ID NO: 2195571 - DNA, 25 bp, Homo sapien
gccaaggtgggtctgcggaggcggc

SEQ ID NO: 2195572 - DNA, 25 bp, Homo sapien
ggcagccgcagcgacgtcgattcca

SEQ ID NO: 2195573 - DNA, 25 bp, Homo sapien
cgggtgtgggtcgtcggcagccgca

SEQ ID NO: 2195574 - DNA, 25 bp, Homo sapien
acgccaggcgggtccggagagccgg

SEQ ID NO: 2195575 - DNA, 25 bp, Homo sapien
tctgtccattgggtacagggccacc

SEQ ID NO: 2195576 - DNA, 25 bp, Homo sapien
cgacttccatccatatagagtaggc

SEQ ID NO: 2195577 - DNA, 25 bp, Homo sapien
ccattttttagatgggcagtgggaa

SEQ ID NO: 2195578 - DNA, 25 bp, Homo sapien
gcagtgggaaggtatcctccagttt

SEQ ID NO: 2195579 - DNA, 25 bp, Homo sapien
tattggccatcttttactcctgatt

SEQ ID NO: 2195580 - DNA, 25 bp, Homo sapien
aagcaatttgcatcaccgaaggtag

SEQ ID NO: 2195581 - DNA, 25 bp, Homo sapien
caccgaaggtagcttcttttctctc

SEQ ID NO: 2195582 - DNA, 25 bp, Homo sapien
tcccttacagaagattgattagcac

SEQ ID NO: 2195583 - DNA, 25 bp, Homo sapien
caagattgaggttgcctgagtgttt

SEQ ID NO: 2195584 - DNA, 25 bp, Homo sapien
ccattgaaaagcattgcagcaattt

SEQ ID NO: 2195585 - DNA, 25 bp, Homo sapien
ttgtaaacactaactcaatcacctg

SEQ ID NO: 2195586 - DNA, 25 bp, Homo sapien
actgaatatcataggagaaatcaag

SEQ ID NO: 2195587 - DNA, 25 bp, Homo sapien
gagttttctttaaatgcgagtttgc

SEQ ID NO: 2195588 - DNA, 25 bp, Homo sapien
tccccagcagtcaggaatggtacta

SEQ ID NO: 2195589 - DNA, 25 bp, Homo sapien
cgagtttgccgtccccagcagtcag

SEQ ID NO: 2195590 - DNA, 25 bp, Homo sapien
tactaatctggtggaaggactcttc

SEQ ID NO: 2195591 - DNA, 25 bp, Homo sapien
caagttttaaactcatctcctggag

SEQ ID NO: 2195592 - DNA, 25 bp, Homo sapien
tcaagttttaaactcatctcctgga

SEQ ID NO: 2195593 - DNA, 25 bp, Homo sapien
tacaggcaatggcatttcctgactt

SEQ ID NO: 2195594 - DNA, 25 bp, Homo sapien
ggcaatggcatttcctgacttgaaa

SEQ ID NO: 2195595 - DNA, 25 bp, Homo sapien
ggcatttcctgacttgaaagcctac

SEQ ID NO: 2195596 - DNA, 25 bp, Homo sapien
caatggcatttcctgacttgaaagc

SEQ ID NO: 2195597 - DNA, 25 bp, Homo sapien
agatttggtgatttctacttgggcc

SEQ ID NO: 2195598 - DNA, 25 bp, Homo sapien
cagacacactatgatggtgtcaagc

SEQ ID NO: 2195599 - DNA, 25 bp, Homo sapien
gagtaagatctttatgaaaggcttc

SEQ ID NO: 2195600 - DNA, 25 bp, Homo sapien
aggcttcttgagatttggtgatttc

SEQ ID NO: 2195601 - DNA, 25 bp, Homo sapien
ggcctggctcttccatggtgatgta

SEQ ID NO: 2195602 - DNA, 25 bp, Homo sapien
taggcctggctcttccatggtgatg

SEQ ID NO: 2195603 - DNA, 25 bp, Homo sapien
aggcctggctcttccatggtgatgt

SEQ ID NO: 2195604 - DNA, 25 bp, Homo sapien
tgtgatgaaatagccacgtgggacc

SEQ ID NO: 2195605 - DNA, 25 bp, Homo sapien
gcaacttggccctgaagtggcacct

SEQ ID NO: 2195606 - DNA, 25 bp, Homo sapien
tttgtgatgaaatagccacgtggga

SEQ ID NO: 2195607 - DNA, 25 bp, Homo sapien
cctgagcaacttggccctgaagtgg

SEQ ID NO: 2195608 - DNA, 25 bp, Homo sapien
tgttccttagattcatgtagttcat

SEQ ID NO: 2195609 - DNA, 25 bp, Homo sapien
ttgttccttagattcatgtagttca

SEQ ID NO: 2195610 - DNA, 25 bp, Homo sapien
tttgttccttagattcatgtagttc

SEQ ID NO: 2195611 - DNA, 25 bp, Homo sapien
gaacgaccaaatagtacacagaagt

SEQ ID NO: 2195612 - DNA, 25 bp, Homo sapien
cacagaagttattatcctgtagtct

SEQ ID NO: 2195613 - DNA, 25 bp, Homo sapien
tattatcctgtagtctccacacagc

SEQ ID NO: 2195614 - DNA, 25 bp, Homo sapien
cagctgcctaaagcaggcaattaca

SEQ ID NO: 2195615 - DNA, 25 bp, Homo sapien
ttcccacattcgctgaacagatagt

SEQ ID NO: 2195616 - DNA, 25 bp, Homo sapien
cagatagtgtcttgcgccagtgtga

SEQ ID NO: 2195617 - DNA, 25 bp, Homo sapien
gctatgttcatgaggcctttctcca

SEQ ID NO: 2195618 - DNA, 25 bp, Homo sapien
ggtcaccaaaactgctatgttcatg

SEQ ID NO: 2195619 - DNA, 25 bp, Homo sapien
tttctgacatatgacattagagctc

SEQ ID NO: 2195620 - DNA, 25 bp, Homo sapien
catatgacattagagctctgctcac

SEQ ID NO: 2195621 - DNA, 25 bp, Homo sapien
tgaaatagccagtgaattttaacat

SEQ ID NO: 2195622 - DNA, 25 bp, Homo sapien
tctgctcacttagcacctcagtaat

SEQ ID NO: 2195623 - DNA, 25 bp, Homo sapien
catgtggtccttcagctattgttcg

SEQ ID NO: 2195624 - DNA, 25 bp, Homo sapien
ctgcatgtggtccttcagctattgt

SEQ ID NO: 2195625 - DNA, 25 bp, Homo sapien
tgtggtccttcagctattgttcgct

SEQ ID NO: 2195626 - DNA, 25 bp, Homo sapien
gtccttcagctattgttcgcttttg

SEQ ID NO: 2195627 - DNA, 25 bp, Homo sapien
tccatccttctatagtccctggagc

SEQ ID NO: 2195628 - DNA, 25 bp, Homo sapien
cctggagcctgatccccaatttcag

SEQ ID NO: 2195629 - DNA, 25 bp, Homo sapien
tcaagttcaacaaagaggcaacagt

SEQ ID NO: 2195630 - DNA, 25 bp, Homo sapien
aatatgcattgattgtagtgacaca

SEQ ID NO: 2195631 - DNA, 25 bp, Homo sapien
tattgtcttgagaatttgttcaagc

SEQ ID NO: 2195632 - DNA, 25 bp, Homo sapien
gtcttgagaatttgttcaagctgga

SEQ ID NO: 2195633 - DNA, 25 bp, Homo sapien
gaatttgttcaagctggataagtga

SEQ ID NO: 2195634 - DNA, 25 bp, Homo sapien
caagctggataagtgaattcagtgg

SEQ ID NO: 2195635 - DNA, 25 bp, Homo sapien
gcgaagattgatggtataagaagct

SEQ ID NO: 2195636 - DNA, 25 bp, Homo sapien
atattctgactctgcgaagattgat

SEQ ID NO: 2195637 - DNA, 25 bp, Homo sapien
tctgactctgcgaagattgatggta

SEQ ID NO: 2195638 - DNA, 25 bp, Homo sapien
gactctgcgaagattgatggtataa

SEQ ID NO: 2195639 - DNA, 25 bp, Homo sapien
caacagaggtatctccattgataga

SEQ ID NO: 2195640 - DNA, 25 bp, Homo sapien
tctccattgatagattggcttgaaa

SEQ ID NO: 2195641 - DNA, 25 bp, Homo sapien
aattgtgtagttgggctctgaagac

SEQ ID NO: 2195642 - DNA, 25 bp, Homo sapien
aacagtcatgttccaatttgggcac

SEQ ID NO: 2195643 - DNA, 25 bp, Homo sapien
ctgtgaataaataagcactgctctc

SEQ ID NO: 2195644 - DNA, 25 bp, Homo sapien
ataagcactgctctccattattctt

SEQ ID NO: 2195645 - DNA, 25 bp, Homo sapien
attcttttaagcttaaagcttcaag

SEQ ID NO: 2195646 - DNA, 25 bp, Homo sapien
ctgcactctgtgaataaataagcac

SEQ ID NO: 2195647 - DNA, 25 bp, Homo sapien
gataggacagagtcagatagaccct

SEQ ID NO: 2195648 - DNA, 25 bp, Homo sapien
gatagacccttagtaaatgcattaa

SEQ ID NO: 2195649 - DNA, 25 bp, Homo sapien
tttttgtagcaagcgcagataggac

SEQ ID NO: 2195650 - DNA, 25 bp, Homo sapien
taaacatcgaaagagtgactgcttc

SEQ ID NO: 2195651 - DNA, 25 bp, Homo sapien
acttagttgttgtccaatagctgcc

SEQ ID NO: 2195652 - DNA, 25 bp, Homo sapien
tagcagtagaccatatttagtacag

SEQ ID NO: 2195653 - DNA, 25 bp, Homo sapien
gaagatttccagaaccttatcaagt

SEQ ID NO: 2195654 - DNA, 25 bp, Homo sapien
gagctggagaccgaaccattgcact

SEQ ID NO: 2195655 - DNA, 25 bp, Homo sapien
atattggattagtttatgtctccct

SEQ ID NO: 2195656 - DNA, 25 bp, Homo sapien
caccaatatgctaagcacatcatca

SEQ ID NO: 2195657 - DNA, 25 bp, Homo sapien
gattagtttatgtctccctattaca

SEQ ID NO: 2195658 - DNA, 25 bp, Homo sapien
ccaatatgctaagcacatcatcatg

SEQ ID NO: 2195659 - DNA, 25 bp, Homo sapien
ttatgttgctctccctaattgtctg

SEQ ID NO: 2195660 - DNA, 25 bp, Homo sapien
tgctctccctaattgtctgaggcat

SEQ ID NO: 2195661 - DNA, 25 bp, Homo sapien
gttgctctccctaattgtctgaggc

SEQ ID NO: 2195662 - DNA, 25 bp, Homo sapien
tttattatgttgctctccctaattg

SEQ ID NO: 2195663 - DNA, 25 bp, Homo sapien
tagttgtgttaatgatgaaagtgcc

SEQ ID NO: 2195664 - DNA, 25 bp, Homo sapien
gtgccttccaagctttggccccatg

SEQ ID NO: 2195665 - DNA, 25 bp, Homo sapien
gctttggccccatgagtagttgtgt

SEQ ID NO: 2195666 - DNA, 25 bp, Homo sapien
gatgctcttcaatgggggactgcca

SEQ ID NO: 2195667 - DNA, 25 bp, Homo sapien
tacacggaaatgctctgaagctttc

SEQ ID NO: 2195668 - DNA, 25 bp, Homo sapien
taagagaataccaatccattcttcc

SEQ ID NO: 2195669 - DNA, 25 bp, Homo sapien
caaacattttgtatgtcgttatgta

SEQ ID NO: 2195670 - DNA, 25 bp, Homo sapien
ttcccacttatggtcagacactgag

SEQ ID NO: 2195671 - DNA, 25 bp, Homo sapien
ttccattgaaatcctcctgtccctt

SEQ ID NO: 2195672 - DNA, 25 bp, Homo sapien
tccattgaaatcctcctgtcccttc

SEQ ID NO: 2195673 - DNA, 25 bp, Homo sapien
tcacatcttcaagcaggcttccatt

SEQ ID NO: 2195674 - DNA, 25 bp, Homo sapien
gtgtcacatcttcaagcaggcttcc

SEQ ID NO: 2195675 - DNA, 25 bp, Homo sapien
tcttcccaatttcctttcgtcatgt

SEQ ID NO: 2195676 - DNA, 25 bp, Homo sapien
tgtttattctctgctaaagtgtgct

SEQ ID NO: 2195677 - DNA, 25 bp, Homo sapien
ttctctgctaaagtgtgctgagcca

SEQ ID NO: 2195678 - DNA, 25 bp, Homo sapien
cctttcgtcatgtccagtgtttgtt

SEQ ID NO: 2195679 - DNA, 25 bp, Homo sapien
tccctgaacccctccatttggacac

SEQ ID NO: 2195680 - DNA, 25 bp, Homo sapien
caggtccctgaacccctccatttgg

SEQ ID NO: 2195681 - DNA, 25 bp, Homo sapien
gaacccctccatttggacacagcag

SEQ ID NO: 2195682 - DNA, 25 bp, Homo sapien
ttggacacagcagctttcagacaca

SEQ ID NO: 2195683 - DNA, 25 bp, Homo sapien
gatgataattgtatgaaactcagat

SEQ ID NO: 2195684 - DNA, 25 bp, Homo sapien
caagaactcttgcactatcagagca

SEQ ID NO: 2195685 - DNA, 25 bp, Homo sapien
tacaagggtttcaacctgtaacagc

SEQ ID NO: 2195686 - DNA, 25 bp, Homo sapien
cagagcactgaacctaagatgataa

SEQ ID NO: 2195687 - DNA, 25 bp, Homo sapien
tagtcatggagtccaagactggaca

SEQ ID NO: 2195688 - DNA, 25 bp, Homo sapien
aatagttgtagacattcaaatagtc

SEQ ID NO: 2195689 - DNA, 25 bp, Homo sapien
agagagggagaatagttgtagacat

SEQ ID NO: 2195690 - DNA, 25 bp, Homo sapien
tcatagctcctgagagatagcacag

SEQ ID NO: 2195691 - DNA, 25 bp, Homo sapien
tcctcttctttcttcatgagcacca

SEQ ID NO: 2195692 - DNA, 25 bp, Homo sapien
cctcttctttcttcatgagcaccat

SEQ ID NO: 2195693 - DNA, 25 bp, Homo sapien
ctggtccacaggcttctagaagccc

SEQ ID NO: 2195694 - DNA, 25 bp, Homo sapien
ccagaactatattggacatggtcat

SEQ ID NO: 2195695 - DNA, 25 bp, Homo sapien
ctagaagccccttcccctactgcct

SEQ ID NO: 2195696 - DNA, 25 bp, Homo sapien
gcctcctccagaactatattggaca

SEQ ID NO: 2195697 - DNA, 25 bp, Homo sapien
ttgttctcaagccaaaatgaattct

SEQ ID NO: 2195698 - DNA, 25 bp, Homo sapien
gaagcaaatcgaaattgttctcaag

SEQ ID NO: 2195699 - DNA, 25 bp, Homo sapien
ttccaacatcatggctggcatataa

SEQ ID NO: 2195700 - DNA, 25 bp, Homo sapien
taagtgggactgaagcaaatcgaaa

SEQ ID NO: 2195701 - DNA, 25 bp, Homo sapien
tcaactgatcttcatttcacttgaa

SEQ ID NO: 2195702 - DNA, 25 bp, Homo sapien
ctgatcttcatttcacttgaattta

SEQ ID NO: 2195703 - DNA, 25 bp, Homo sapien
aactgatcttcatttcacttgaatt

SEQ ID NO: 2195704 - DNA, 25 bp, Homo sapien
tgatcttcatttcacttgaatttac

SEQ ID NO: 2195705 - DNA, 25 bp, Homo sapien
gggaccagcctgttgctactactgt

SEQ ID NO: 2195706 - DNA, 25 bp, Homo sapien
cagcctgttgctactactgttattg

SEQ ID NO: 2195707 - DNA, 25 bp, Homo sapien
tattgtgagacttctagcctgtgtc

SEQ ID NO: 2195708 - DNA, 25 bp, Homo sapien
actgttattgtgagacttctagcct

SEQ ID NO: 2195709 - DNA, 25 bp, Homo sapien
caacttaagaacctccactaggtca

SEQ ID NO: 2195710 - DNA, 25 bp, Homo sapien
taagaacctccactaggtcagggag

SEQ ID NO: 2195711 - DNA, 25 bp, Homo sapien
tccactaggtcagggagtgttagta

SEQ ID NO: 2195712 - DNA, 25 bp, Homo sapien
tgtccaacttaagaacctccactag

SEQ ID NO: 2195713 - DNA, 25 bp, Homo sapien
caacagagctgctagtaaatcttgc

SEQ ID NO: 2195714 - DNA, 25 bp, Homo sapien
ggctggaaaagttctcagatggcag

SEQ ID NO: 2195715 - DNA, 25 bp, Homo sapien
atccaccgagtcaccaccacattca

SEQ ID NO: 2195716 - DNA, 25 bp, Homo sapien
agtaaatcttgcacaagagattctg

SEQ ID NO: 2195717 - DNA, 25 bp, Homo sapien
ctctagtaagtgaggcaggggacag

SEQ ID NO: 2195718 - DNA, 25 bp, Homo sapien
aggtcatgcagacctccttgatggc

SEQ ID NO: 2195719 - DNA, 25 bp, Homo sapien
tgatggcatccagaagtttgatcag

SEQ ID NO: 2195720 - DNA, 25 bp, Homo sapien
ttaggtcatgcagacctccttgatg

SEQ ID NO: 2195721 - DNA, 25 bp, Homo sapien
ccttgatggcatccagaagtttgat

SEQ ID NO: 2195722 - DNA, 25 bp, Homo sapien
tttggaaataagaacagcttcagag

SEQ ID NO: 2195723 - DNA, 25 bp, Homo sapien
ttggaaataagaacagcttcagaga

SEQ ID NO: 2195724 - DNA, 25 bp, Homo sapien
gccctctttttggaggccacgatag

SEQ ID NO: 2195725 - DNA, 25 bp, Homo sapien
agcaggaaggatagagccctctttt

SEQ ID NO: 2195726 - DNA, 25 bp, Homo sapien
agaacaaagatgcatcagcaggaag

SEQ ID NO: 2195727 - DNA, 25 bp, Homo sapien
tcagaacaaagatgcatcagcagga

SEQ ID NO: 2195728 - DNA, 25 bp, Homo sapien
gccccagaaggtcccacggagagcc

SEQ ID NO: 2195729 - DNA, 25 bp, Homo sapien
cacagggtggacctcagggatgtgg

SEQ ID NO: 2195730 - DNA, 25 bp, Homo sapien
cagaaggtcccacggagagcctcct

SEQ ID NO: 2195731 - DNA, 25 bp, Homo sapien
gacacagggtggacctcagggatgt

SEQ ID NO: 2195732 - DNA, 25 bp, Homo sapien
gtgggcaccaaaagtgggcaccact

SEQ ID NO: 2195733 - DNA, 25 bp, Homo sapien
cactgccattgtgtaagggaaggtg

SEQ ID NO: 2195734 - DNA, 25 bp, Homo sapien
tcactgccattgtgtaagggaaggt

SEQ ID NO: 2195735 - DNA, 25 bp, Homo sapien
tgccattgtgtaagggaaggtgatg

SEQ ID NO: 2195736 - DNA, 25 bp, Homo sapien
actgccattgtgtaagggaaggtga

SEQ ID NO: 2195737 - DNA, 25 bp, Homo sapien
atgggtatggctgccccatgatttc

SEQ ID NO: 2195738 - DNA, 25 bp, Homo sapien
gaagagatgggtatggctgccccat

SEQ ID NO: 2195739 - DNA, 25 bp, Homo sapien
ctgaagagatgggtatggctgcccc

SEQ ID NO: 2195740 - DNA, 25 bp, Homo sapien
agagatgggtatggctgccccatga

SEQ ID NO: 2195741 - DNA, 25 bp, Homo sapien
tctgtgtatctgattgggtttgtat

SEQ ID NO: 2195742 - DNA, 25 bp, Homo sapien
ttaatcaaattacccttgggcatgc

SEQ ID NO: 2195743 - DNA, 25 bp, Homo sapien
gggtttcctccactgaacatatcta

SEQ ID NO: 2195744 - DNA, 25 bp, Homo sapien
gaactaatgtgctgtaactctgtgt

SEQ ID NO: 2195745 - DNA, 25 bp, Homo sapien
tcaaagttgtttgtagcgtgggaga

SEQ ID NO: 2195746 - DNA, 25 bp, Homo sapien
tttgtagcgtgggagatagtcagtc

SEQ ID NO: 2195747 - DNA, 25 bp, Homo sapien
ttgtttgtagcgtgggagatagtca

SEQ ID NO: 2195748 - DNA, 25 bp, Homo sapien
cgtgggagatagtcagtcttgtttt

SEQ ID NO: 2195749 - DNA, 25 bp, Homo sapien
gaaggtgtagccatatagacagttt

SEQ ID NO: 2195750 - DNA, 25 bp, Homo sapien
catgctgaactttcctgatgagtct

SEQ ID NO: 2195751 - DNA, 25 bp, Homo sapien
ggtttcagagaacataaggcttctc

SEQ ID NO: 2195752 - DNA, 25 bp, Homo sapien
tacaccaatgatagggtagggtctg

SEQ ID NO: 2195753 - DNA, 25 bp, Homo sapien
caggtggagaagcatcgacaaagac

SEQ ID NO: 2195754 - DNA, 25 bp, Homo sapien
taacacatattaaggaccaggcact

SEQ ID NO: 2195755 - DNA, 25 bp, Homo sapien
ggaaaataatttccagcaggtggag

SEQ ID NO: 2195756 - DNA, 25 bp, Homo sapien
ggacatttgagggactttagcacag

SEQ ID NO: 2195757 - DNA, 25 bp, Homo sapien
ctgactggcattatttagcagtctt

SEQ ID NO: 2195758 - DNA, 25 bp, Homo sapien
ctggcattatttagcagtcttctgt

SEQ ID NO: 2195759 - DNA, 25 bp, Homo sapien
ggcattatttagcagtcttctgtga

SEQ ID NO: 2195760 - DNA, 25 bp, Homo sapien
tttagcagtcttctgtgatttgcat

SEQ ID NO: 2195761 - DNA, 25 bp, Homo sapien
ggggaaaaccttcagcatccaccat

SEQ ID NO: 2195762 - DNA, 25 bp, Homo sapien
tctgaagacatatgtcctcattgat

SEQ ID NO: 2195763 - DNA, 25 bp, Homo sapien
tttctgcaggggaaaaccttcagca

SEQ ID NO: 2195764 - DNA, 25 bp, Homo sapien
cctcattgatgacattcagtttctg

SEQ ID NO: 2195765 - DNA, 25 bp, Homo sapien
cctttacatgtaatagctaagaagt

SEQ ID NO: 2195766 - DNA, 25 bp, Homo sapien
aaatgtcagttactaggtgtcccag

SEQ ID NO: 2195767 - DNA, 25 bp, Homo sapien
tcttgagtggcatcaggatctctct

SEQ ID NO: 2195768 - DNA, 25 bp, Homo sapien
aagttgagccttttccacatacaaa

SEQ ID NO: 2195769 - DNA, 25 bp, Homo sapien
ccctgagggcccaaaagcatggcac

SEQ ID NO: 2195770 - DNA, 25 bp, Homo sapien
tagtcctggatattgcagtctctga

SEQ ID NO: 2195771 - DNA, 25 bp, Homo sapien
tatcttgatcttaatagtgactgaa

SEQ ID NO: 2195772 - DNA, 25 bp, Homo sapien
ggaacaactctgagagccaatcttg

SEQ ID NO: 2195773 - DNA, 25 bp, Homo sapien
ttagcaaggagtagtgaaaatgaga

SEQ ID NO: 2195774 - DNA, 25 bp, Homo sapien
aaggagtagtgaaaatgagaagaca

SEQ ID NO: 2195775 - DNA, 25 bp, Homo sapien
caaggagtagtgaaaatgagaagac

SEQ ID NO: 2195776 - DNA, 25 bp, Homo sapien
gagtagtgaaaatgagaagacatac

SEQ ID NO: 2195777 - DNA, 25 bp, Homo sapien
gaaattcaatggagagagctcccga

SEQ ID NO: 2195778 - DNA, 25 bp, Homo sapien
tgacttttccatcggcatttgggaa

SEQ ID NO: 2195779 - DNA, 25 bp, Homo sapien
attcagtggagacaacaggaaattc

SEQ ID NO: 2195780 - DNA, 25 bp, Homo sapien
tcctgagcctcaggaaattcagtgg

SEQ ID NO: 2195781 - DNA, 25 bp, Homo sapien
tcaagataataccagactcttaaac

SEQ ID NO: 2195782 - DNA, 25 bp, Homo sapien
gagagcaatacacttcattgcaatt

SEQ ID NO: 2195783 - DNA, 25 bp, Homo sapien
tatatttatggatggtccagcagag

SEQ ID NO: 2195784 - DNA, 25 bp, Homo sapien
gatggtccagcagagatacggatct

SEQ ID NO: 2195785 - DNA, 25 bp, Homo sapien
caggtgatctctagcaggtgtgaca

SEQ ID NO: 2195786 - DNA, 25 bp, Homo sapien
ttccctgaagatgtacgtgacctaa

SEQ ID NO: 2195787 - DNA, 25 bp, Homo sapien
tgacctaatctccaacacctgtgaa

SEQ ID NO: 2195788 - DNA, 25 bp, Homo sapien
gcaaataatcgattctctcctagag

SEQ ID NO: 2195789 - DNA, 25 bp, Homo sapien
ctattacttgatgatccttcttcag

SEQ ID NO: 2195790 - DNA, 25 bp, Homo sapien
aacatcgtaggcaacagaaagacag

SEQ ID NO: 2195791 - DNA, 25 bp, Homo sapien
agaaagacagtctattacttgatga

SEQ ID NO: 2195792 - DNA, 25 bp, Homo sapien
tcaatcaacatcgtaggcaacagaa

SEQ ID NO: 2195793 - DNA, 25 bp, Homo sapien
ttttatgtagcattcctctgcacat

SEQ ID NO: 2195794 - DNA, 25 bp, Homo sapien
tatttcctgtgtttcaagatcttcc

SEQ ID NO: 2195795 - DNA, 25 bp, Homo sapien
ctgataacaatactctatttcctgt

SEQ ID NO: 2195796 - DNA, 25 bp, Homo sapien
ccccacttttatgtagcattcctct

SEQ ID NO: 2195797 - DNA, 25 bp, Homo sapien
aggcactgtcaggtgtcgaggtaaa

SEQ ID NO: 2195798 - DNA, 25 bp, Homo sapien
aggaacgagtcgctgcaggcactgt

SEQ ID NO: 2195799 - DNA, 25 bp, Homo sapien
caggtgtcgaggtaaaactctgaga

SEQ ID NO: 2195800 - DNA, 25 bp, Homo sapien
ctagtcatcagaggaacgagtcgct

SEQ ID NO: 2195801 - DNA, 25 bp, Homo sapien
caagggcagccggaagtgttgctta

SEQ ID NO: 2195802 - DNA, 25 bp, Homo sapien
ttgcttactgacttccgcctgcgga

SEQ ID NO: 2195803 - DNA, 25 bp, Homo sapien
gagggccggcctgtttgtcagccct

SEQ ID NO: 2195804 - DNA, 25 bp, Homo sapien
gaacattggcggacacactgagtga

SEQ ID NO: 2195805 - DNA, 25 bp, Homo sapien
agtgcctggagccaaattgtagaca

SEQ ID NO: 2195806 - DNA, 25 bp, Homo sapien
tcacatccttggtagtcactgaggg

SEQ ID NO: 2195807 - DNA, 25 bp, Homo sapien
gatatctagatgaagtgtcccctca

SEQ ID NO: 2195808 - DNA, 25 bp, Homo sapien
tgtcagtcataggaggctggatatc

SEQ ID NO: 2195809 - DNA, 25 bp, Homo sapien
cttccccagtagttggaactataga

SEQ ID NO: 2195810 - DNA, 25 bp, Homo sapien
gtgacgtaatcatggctcagctcac

SEQ ID NO: 2195811 - DNA, 25 bp, Homo sapien
cagtgacgtaatcatggctcagctc

SEQ ID NO: 2195812 - DNA, 25 bp, Homo sapien
ccagtagttggaactatagacacat

SEQ ID NO: 2195813 - DNA, 25 bp, Homo sapien
accaaacactggtttgaccacaagt

SEQ ID NO: 2195814 - DNA, 25 bp, Homo sapien
ggtcaatgggatctatgaagagcca

SEQ ID NO: 2195815 - DNA, 25 bp, Homo sapien
gtttgaccacaagtatggaacgtga

SEQ ID NO: 2195816 - DNA, 25 bp, Homo sapien
gaacgtgataggtcaatgggatcta

SEQ ID NO: 2195817 - DNA, 25 bp, Homo sapien
aacaggcctcctgctatcaagctag

SEQ ID NO: 2195818 - DNA, 25 bp, Homo sapien
tgctatcaagctagtccctcgcttg

SEQ ID NO: 2195819 - DNA, 25 bp, Homo sapien
tactgtccaacaggcctcctgctat

SEQ ID NO: 2195820 - DNA, 25 bp, Homo sapien
tagtccctcgcttgtgatccttccg

SEQ ID NO: 2195821 - DNA, 25 bp, Homo sapien
tctgttttctggctaccgagagggc

SEQ ID NO: 2195822 - DNA, 25 bp, Homo sapien
tgaagttcctggacacgatggccgg

SEQ ID NO: 2195823 - DNA, 25 bp, Homo sapien
tgatggttgcctagcgacggtcgtc

SEQ ID NO: 2195824 - DNA, 25 bp, Homo sapien
ggtgtaccgcctcccgattactgtg

SEQ ID NO: 2195825 - DNA, 25 bp, Homo sapien
aggagcccgtcaagccacaggtgac

SEQ ID NO: 2195826 - DNA, 25 bp, Homo sapien
tttaaggagcccgtcaagccacagg

SEQ ID NO: 2195827 - DNA, 25 bp, Homo sapien
cagaaaatccgatttaaggagcccg

SEQ ID NO: 2195828 - DNA, 25 bp, Homo sapien
ttaaggagcccgtcaagccacaggt

SEQ ID NO: 2195829 - DNA, 25 bp, Homo sapien
ccttatgactcagacttctttttct

SEQ ID NO: 2195830 - DNA, 25 bp, Homo sapien
ctctcccttatgactcagacttctt

SEQ ID NO: 2195831 - DNA, 25 bp, Homo sapien
ctcccttatgactcagacttctttt

SEQ ID NO: 2195832 - DNA, 25 bp, Homo sapien
cccctctcccttatgactcagactt

SEQ ID NO: 2195833 - DNA, 25 bp, Homo sapien
gtatatgtgcctctgacgtgagcac

SEQ ID NO: 2195834 - DNA, 25 bp, Homo sapien
tagtatatgtgcctctgacgtgagc

SEQ ID NO: 2195835 - DNA, 25 bp, Homo sapien
tttagtatatgtgcctctgacgtga

SEQ ID NO: 2195836 - DNA, 25 bp, Homo sapien
agtatatgtgcctctgacgtgagca

SEQ ID NO: 2195837 - DNA, 25 bp, Homo sapien
ctaagtgccacttttgaacatggtc

SEQ ID NO: 2195838 - DNA, 25 bp, Homo sapien
tgaagatacccttgatggccccaat

SEQ ID NO: 2195839 - DNA, 25 bp, Homo sapien
taatggccttcagtacagagagcac

SEQ ID NO: 2195840 - DNA, 25 bp, Homo sapien
tggtcttgcatcacccagtgcactg

SEQ ID NO: 2195841 - DNA, 25 bp, Homo sapien
tctattggtcccgtctctgtgtccg

SEQ ID NO: 2195842 - DNA, 25 bp, Homo sapien
agtgtctattggtcccgtctctgtg

SEQ ID NO: 2195843 - DNA, 25 bp, Homo sapien
tattggtcccgtctctgtgtccgtg

SEQ ID NO: 2195844 - DNA, 25 bp, Homo sapien
cccagtgtctattggtcccgtctct

SEQ ID NO: 2195845 - DNA, 25 bp, Homo sapien
tatttgatccatttctcgagggctg

SEQ ID NO: 2195846 - DNA, 25 bp, Homo sapien
taacagttgtccagctttatggtca

SEQ ID NO: 2195847 - DNA, 25 bp, Homo sapien
gttagctttgcatatatttgatcca

SEQ ID NO: 2195848 - DNA, 25 bp, Homo sapien
gataggataaccacaaaattcactg

SEQ ID NO: 2195849 - DNA, 25 bp, Homo sapien
gccagtgtaaccacacttcatcatc

SEQ ID NO: 2195850 - DNA, 25 bp, Homo sapien
tggagcatgacctaataagaacctg

SEQ ID NO: 2195851 - DNA, 25 bp, Homo sapien
catcacactgagaagctggatgatg

SEQ ID NO: 2195852 - DNA, 25 bp, Homo sapien
atttgccagtgtaaccacacttcat

SEQ ID NO: 2195853 - DNA, 25 bp, Homo sapien
cttttaacacaaacggaactctcat

SEQ ID NO: 2195854 - DNA, 25 bp, Homo sapien
ggcagcgatctggagttttttgtaa

SEQ ID NO: 2195855 - DNA, 25 bp, Homo sapien
taacacaaacggaactctcatcact

SEQ ID NO: 2195856 - DNA, 25 bp, Homo sapien
cactgtaggatttaaacctaaaatg

SEQ ID NO: 2195857 - DNA, 25 bp, Homo sapien
atgaggcaagtcctttccacctatg

SEQ ID NO: 2195858 - DNA, 25 bp, Homo sapien
ctgagatgaggcaagtcctttccac

SEQ ID NO: 2195859 - DNA, 25 bp, Homo sapien
gatgaggcaagtcctttccacctat

SEQ ID NO: 2195860 - DNA, 25 bp, Homo sapien
gagatgaggcaagtcctttccacct

SEQ ID NO: 2195861 - DNA, 25 bp, Homo sapien
tccatatccttatcgacacggtcac

SEQ ID NO: 2195862 - DNA, 25 bp, Homo sapien
gttgctccatatccttatcgacacg

SEQ ID NO: 2195863 - DNA, 25 bp, Homo sapien
cagttgctccatatccttatcgaca

SEQ ID NO: 2195864 - DNA, 25 bp, Homo sapien
tgctccatatccttatcgacacggt

SEQ ID NO: 2195865 - DNA, 25 bp, Homo sapien
tcatctagagcctcagacaactaga

SEQ ID NO: 2195866 - DNA, 25 bp, Homo sapien
ttcagttagaacacaaacaagacta

SEQ ID NO: 2195867 - DNA, 25 bp, Homo sapien
tgatttctttggagtactgttccca

SEQ ID NO: 2195868 - DNA, 25 bp, Homo sapien
ttcttccgttcaagcttcaccataa

SEQ ID NO: 2195869 - DNA, 25 bp, Homo sapien
gaagtgtttgattccaccaatttgt

SEQ ID NO: 2195870 - DNA, 25 bp, Homo sapien
tcttcagaagtgtttgattccacca

SEQ ID NO: 2195871 - DNA, 25 bp, Homo sapien
tctcttcagaagtgtttgattccac

SEQ ID NO: 2195872 - DNA, 25 bp, Homo sapien
ttttctcttcagaagtgtttgattc

SEQ ID NO: 2195873 - DNA, 25 bp, Homo sapien
cagagctcagagacaaggaacaatg

SEQ ID NO: 2195874 - DNA, 25 bp, Homo sapien
tgaaaatgtaaggtgtgaatctccc

SEQ ID NO: 2195875 - DNA, 25 bp, Homo sapien
ttaagaattcagtgatggaccccat

SEQ ID NO: 2195876 - DNA, 25 bp, Homo sapien
caggctagttccttgagtggacaaa

SEQ ID NO: 2195877 - DNA, 25 bp, Homo sapien
catctgtggttttgcgagcagcatg

SEQ ID NO: 2195878 - DNA, 25 bp, Homo sapien
ttgagcatctgtggttttgcgagca

SEQ ID NO: 2195879 - DNA, 25 bp, Homo sapien
tgtggttttgcgagcagcatggttt

SEQ ID NO: 2195880 - DNA, 25 bp, Homo sapien
ggttttgcgagcagcatggttttgt

SEQ ID NO: 2195881 - DNA, 25 bp, Homo sapien
ggagaccattggctcatcactgtgc

SEQ ID NO: 2195882 - DNA, 25 bp, Homo sapien
tcaaagatttacaacctgatccagc

SEQ ID NO: 2195883 - DNA, 25 bp, Homo sapien
tgctactgttttgtcctggcagcct

SEQ ID NO: 2195884 - DNA, 25 bp, Homo sapien
gaatgtgcaacctagaacatgagca

SEQ ID NO: 2195885 - DNA, 25 bp, Homo sapien
ccactgaggagaactttgcagctgg

SEQ ID NO: 2195886 - DNA, 25 bp, Homo sapien
tctgtttgggctagtttttgatctc

SEQ ID NO: 2195887 - DNA, 25 bp, Homo sapien
tagtttttgatctcagagcctcagc

SEQ ID NO: 2195888 - DNA, 25 bp, Homo sapien
agtaagggcccattctttcctgcca

SEQ ID NO: 2195889 - DNA, 25 bp, Homo sapien
ataaaagacttgtggttcatcaggg

SEQ ID NO: 2195890 - DNA, 25 bp, Homo sapien
ccaaatataaaagacttgtggttca

SEQ ID NO: 2195891 - DNA, 25 bp, Homo sapien
tcatcaggggcaatgataattggtg

SEQ ID NO: 2195892 - DNA, 25 bp, Homo sapien
caatgataattggtggaaagaggta

SEQ ID NO: 2195893 - DNA, 25 bp, Homo sapien
tttgttcttctgcaaggccattcag

SEQ ID NO: 2195894 - DNA, 25 bp, Homo sapien
ccatgataggaatctttgaaagcct

SEQ ID NO: 2195895 - DNA, 25 bp, Homo sapien
gggcaatccagagtgccatgatagg

SEQ ID NO: 2195896 - DNA, 25 bp, Homo sapien
gttcttctgcaaggccattcagcat

SEQ ID NO: 2195897 - DNA, 25 bp, Homo sapien
ttctcagagtatcagctggcatcac

SEQ ID NO: 2195898 - DNA, 25 bp, Homo sapien
tggtatttcctaggtgcatggataa

SEQ ID NO: 2195899 - DNA, 25 bp, Homo sapien
atttcctaggtgcatggataatgtg

SEQ ID NO: 2195900 - DNA, 25 bp, Homo sapien
tttctcagagtatcagctggcatca

SEQ ID NO: 2195901 - DNA, 25 bp, Homo sapien
tgtgccaatacctaggtacactgcc

SEQ ID NO: 2195902 - DNA, 25 bp, Homo sapien
gctttgtctggtgatacaagcaatg

SEQ ID NO: 2195903 - DNA, 25 bp, Homo sapien
caagaagtgatggtttgtgccaata

SEQ ID NO: 2195904 - DNA, 25 bp, Homo sapien
caatggaattcaccacacaggcttt

SEQ ID NO: 2195905 - DNA, 25 bp, Homo sapien
tgtttcaccatatcagatttcattg

SEQ ID NO: 2195906 - DNA, 25 bp, Homo sapien
ctgtttcaccatatcagatttcatt

SEQ ID NO: 2195907 - DNA, 25 bp, Homo sapien
gtttcaccatatcagatttcattgt

SEQ ID NO: 2195908 - DNA, 25 bp, Homo sapien
ctgtgaagaggtatcctgtgcagta

SEQ ID NO: 2195909 - DNA, 25 bp, Homo sapien
tatcctgtgcagtaggacgtcctca

SEQ ID NO: 2195910 - DNA, 25 bp, Homo sapien
ctgtgcagtaggacgtcctcaggga

SEQ ID NO: 2195911 - DNA, 25 bp, Homo sapien
gaggtatcctgtgcagtaggacgtc

SEQ ID NO: 2195912 - DNA, 25 bp, Homo sapien
catcaaatgtgttggggtcactatc

SEQ ID NO: 2195913 - DNA, 25 bp, Homo sapien
cagggggaacagtggcatcaaatgt

SEQ ID NO: 2195914 - DNA, 25 bp, Homo sapien
gtcactatcgccttcgcctctcagt

SEQ ID NO: 2195915 - DNA, 25 bp, Homo sapien
gaactttccttatgcaggtgtagat

SEQ ID NO: 2195916 - DNA, 25 bp, Homo sapien
ttatctctgccaaaagcagtacgtt

SEQ ID NO: 2195917 - DNA, 25 bp, Homo sapien
tgaaaatatccaccaaaatttgtac

SEQ ID NO: 2195918 - DNA, 25 bp, Homo sapien
caaaaatagtctctgcaaaagcttc

SEQ ID NO: 2195919 - DNA, 25 bp, Homo sapien
tcttgttcactcctaaatcaaaaat

SEQ ID NO: 2195920 - DNA, 25 bp, Homo sapien
accaatcagactttccacatagtcc

SEQ ID NO: 2195921 - DNA, 25 bp, Homo sapien
caccaatcagactttccacatagtc

SEQ ID NO: 2195922 - DNA, 25 bp, Homo sapien
caatcagactttccacatagtccca

SEQ ID NO: 2195923 - DNA, 25 bp, Homo sapien
tcagactttccacatagtcccatat

SEQ ID NO: 2195924 - DNA, 25 bp, Homo sapien
aaaacacaaatatctgagcatggga

SEQ ID NO: 2195925 - DNA, 25 bp, Homo sapien
atctgagcatgggataagcagttac

SEQ ID NO: 2195926 - DNA, 25 bp, Homo sapien
taagcagttaccattcaccaccatg

SEQ ID NO: 2195927 - DNA, 25 bp, Homo sapien
ggataagcagttaccattcaccacc

SEQ ID NO: 2195928 - DNA, 25 bp, Homo sapien
cttccagtctagaggagaactagga

SEQ ID NO: 2195929 - DNA, 25 bp, Homo sapien
tgaatggaggtcacagttatcttac

SEQ ID NO: 2195930 - DNA, 25 bp, Homo sapien
catgaatggaggtcacagttatctt

SEQ ID NO: 2195931 - DNA, 25 bp, Homo sapien
tcaggaagtgcatgggtcatggaac

SEQ ID NO: 2195932 - DNA, 25 bp, Homo sapien
gaaggctatggtacatgcatgcaga

SEQ ID NO: 2195933 - DNA, 25 bp, Homo sapien
aggagaatcctgcaggaagtgcatg

SEQ ID NO: 2195934 - DNA, 25 bp, Homo sapien
taggacccagaccatggaaggctat

SEQ ID NO: 2195935 - DNA, 25 bp, Homo sapien
tgcatgggtgtagatagtatccatc

SEQ ID NO: 2195936 - DNA, 25 bp, Homo sapien
cagcagagggaaggccacgggaagt

SEQ ID NO: 2195937 - DNA, 25 bp, Homo sapien
gagggaaggccacgggaagtataga

SEQ ID NO: 2195938 - DNA, 25 bp, Homo sapien
aagtggaggttatattcagcagagg

SEQ ID NO: 2195939 - DNA, 25 bp, Homo sapien
ggtagaagaccaggcagtacatgtg

SEQ ID NO: 2195940 - DNA, 25 bp, Homo sapien
gatgggagtatacagcctagaagaa

SEQ ID NO: 2195941 - DNA, 25 bp, Homo sapien
gtgagtacagctggctttagggaaa

SEQ ID NO: 2195942 - DNA, 25 bp, Homo sapien
tggaggatgcaaccagcctataggg

SEQ ID NO: 2195943 - DNA, 25 bp, Homo sapien
gggacccaatatcaggttcagtagt

SEQ ID NO: 2195944 - DNA, 25 bp, Homo sapien
agctgccattgtgttgtgactgtca

SEQ ID NO: 2195945 - DNA, 25 bp, Homo sapien
taactgaatccaacagagagtaaat

SEQ ID NO: 2195946 - DNA, 25 bp, Homo sapien
ctgaatccaacagagagtaaatact

SEQ ID NO: 2195947 - DNA, 25 bp, Homo sapien
gctgccattgtgttgtgactgtcag

SEQ ID NO: 2195948 - DNA, 25 bp, Homo sapien
caaccacgatgctcctgttgaatgc

SEQ ID NO: 2195949 - DNA, 25 bp, Homo sapien
ctctggatgctctctctaccagtgg

SEQ ID NO: 2195950 - DNA, 25 bp, Homo sapien
tgctccactggctaatgctcccatt

SEQ ID NO: 2195951 - DNA, 25 bp, Homo sapien
ggatgctctctctaccagtggattt

SEQ ID NO: 2195952 - DNA, 25 bp, Homo sapien
tagattctcttctgctcatgagagc

SEQ ID NO: 2195953 - DNA, 25 bp, Homo sapien
tgctgctcctcgtgtggacaggagt

SEQ ID NO: 2195954 - DNA, 25 bp, Homo sapien
gttttgctgctcctcgtgtggacag

SEQ ID NO: 2195955 - DNA, 25 bp, Homo sapien
ctgatagattctcttctgctcatga

SEQ ID NO: 2195956 - DNA, 25 bp, Homo sapien
aggaacaatgtcatgatgcaggtca

SEQ ID NO: 2195957 - DNA, 25 bp, Homo sapien
aggaattcactttcaagttgagtgg

SEQ ID NO: 2195958 - DNA, 25 bp, Homo sapien
tgaggaacaatgtcatgatgcaggt

SEQ ID NO: 2195959 - DNA, 25 bp, Homo sapien
actttcaagttgagtggctggatgg

SEQ ID NO: 2195960 - DNA, 25 bp, Homo sapien
gatagttgtcaccaagagttgtccg

SEQ ID NO: 2195961 - DNA, 25 bp, Homo sapien
taggatgccctacacaggcggtctg

SEQ ID NO: 2195962 - DNA, 25 bp, Homo sapien
gaatagtcaccaaccacgatctggg

SEQ ID NO: 2195963 - DNA, 25 bp, Homo sapien
tctgggctcacacatagcaaagagg

SEQ ID NO: 2195964 - DNA, 25 bp, Homo sapien
aagagtacgcgatgaggagaaatga

SEQ ID NO: 2195965 - DNA, 25 bp, Homo sapien
tcaccagggctgaagagtacgcgat

SEQ ID NO: 2195966 - DNA, 25 bp, Homo sapien
ctgaagagtacgcgatgaggagaaa

SEQ ID NO: 2195967 - DNA, 25 bp, Homo sapien
accagggctgaagagtacgcgatga

SEQ ID NO: 2195968 - DNA, 25 bp, Homo sapien
ggtttacaggctggaagtccgcaca

SEQ ID NO: 2195969 - DNA, 25 bp, Homo sapien
gggtgtcccagcttcaagttcagtc

SEQ ID NO: 2195970 - DNA, 25 bp, Homo sapien
gacttcggttctgcgaggagaaacc

SEQ ID NO: 2195971 - DNA, 25 bp, Homo sapien
gaaacccgtcagatatgcggtagcg

SEQ ID NO: 2195972 - DNA, 25 bp, Homo sapien
tgtaaattagcgacataattacttc

SEQ ID NO: 2195973 - DNA, 25 bp, Homo sapien
gtaaattagcgacataattacttct

SEQ ID NO: 2195974 - DNA, 25 bp, Homo sapien
acatgtagtattgatttttgcctcc

SEQ ID NO: 2195975 - DNA, 25 bp, Homo sapien
agatggctgcctccagtgatgcttg

SEQ ID NO: 2195976 - DNA, 25 bp, Homo sapien
tactgaaacgctcggtgaggtggct

SEQ ID NO: 2195977 - DNA, 25 bp, Homo sapien
cctccagtgatgcttgttgtctcca

SEQ ID NO: 2195978 - DNA, 25 bp, Homo sapien
tattgaccagtacagatagatatgt

SEQ ID NO: 2195979 - DNA, 25 bp, Homo sapien
gcctccttgctctaaatgtcacaaa

SEQ ID NO: 2195980 - DNA, 25 bp, Homo sapien
tgtctggaatcctagaattggcact

SEQ ID NO: 2195981 - DNA, 25 bp, Homo sapien
cctgcatgtgcagtagttgtgtctg

SEQ ID NO: 2195982 - DNA, 25 bp, Homo sapien
gcaatgccgtgtggaaaccatggca

SEQ ID NO: 2195983 - DNA, 25 bp, Homo sapien
aaaggccattctaccattgtatcag

SEQ ID NO: 2195984 - DNA, 25 bp, Homo sapien
caaagtgaagttctaaatcagaagc

SEQ ID NO: 2195985 - DNA, 25 bp, Homo sapien
acatgagtgaatttcatgagcacgg

SEQ ID NO: 2195986 - DNA, 25 bp, Homo sapien
gatttcacaacaatgcgactatagt

SEQ ID NO: 2195987 - DNA, 25 bp, Homo sapien
aacaattgaattcatggacgtagag

SEQ ID NO: 2195988 - DNA, 25 bp, Homo sapien
gagatcaagaactctgggtgtcacc

SEQ ID NO: 2195989 - DNA, 25 bp, Homo sapien
catatttggtatgtccacgtccttg

SEQ ID NO: 2195990 - DNA, 25 bp, Homo sapien
ccatatttattgctagaggcagcca

SEQ ID NO: 2195991 - DNA, 25 bp, Homo sapien
tatttattgctagaggcagccaaag

SEQ ID NO: 2195992 - DNA, 25 bp, Homo sapien
tattgctagaggcagccaaaggctg

SEQ ID NO: 2195993 - DNA, 25 bp, Homo sapien
tgccatatttattgctagaggcagc

SEQ ID NO: 2195994 - DNA, 25 bp, Homo sapien
cgttataggctccattctcttcatc

SEQ ID NO: 2195995 - DNA, 25 bp, Homo sapien
ttcatccttcccctcacttcttttc

SEQ ID NO: 2195996 - DNA, 25 bp, Homo sapien
tctcttcatccttcccctcacttct

SEQ ID NO: 2195997 - DNA, 25 bp, Homo sapien
catccttcccctcacttcttttctc

SEQ ID NO: 2195998 - DNA, 25 bp, Homo sapien
gaagaatcagtatcactcagaaacg

SEQ ID NO: 2195999 - DNA, 25 bp, Homo sapien
taagatcaaggtcatgagtgttacc

SEQ ID NO: 2196000 - DNA, 25 bp, Homo sapien
tgtttgaggcagacagtcatgagca

SEQ ID NO: 2196001 - DNA, 25 bp, Homo sapien
catgcatgttaaaggttgagaagcg

SEQ ID NO: 2196002 - DNA, 25 bp, Homo sapien
aagttgtacatctacagggccagtc

SEQ ID NO: 2196003 - DNA, 25 bp, Homo sapien
gcttaggcttaaggtaccatactcc

SEQ ID NO: 2196004 - DNA, 25 bp, Homo sapien
aaagtctcattgcacgttgaacagg

SEQ ID NO: 2196005 - DNA, 25 bp, Homo sapien
tgcagtgtaagaattcggtgccatc

SEQ ID NO: 2196006 - DNA, 25 bp, Homo sapien
tagacaggacgctcgaatcttggga

SEQ ID NO: 2196007 - DNA, 25 bp, Homo sapien
gcatttttctcgatgtgtatctatg

SEQ ID NO: 2196008 - DNA, 25 bp, Homo sapien
gcccacttgaagtcatgcatttttc

SEQ ID NO: 2196009 - DNA, 25 bp, Homo sapien
tcttcatcaactcccatgtctcgag

SEQ ID NO: 2196010 - DNA, 25 bp, Homo sapien
tctctggaagccgtaggcagaattc

SEQ ID NO: 2196011 - DNA, 25 bp, Homo sapien
ctctggaagccgtaggcagaattcc

SEQ ID NO: 2196012 - DNA, 25 bp, Homo sapien
ccctcacaataagcccatgccttct

SEQ ID NO: 2196013 - DNA, 25 bp, Homo sapien
ccggccctcacaataagcccatgcc

SEQ ID NO: 2196014 - DNA, 25 bp, Homo sapien
tcccggccctcacaataagcccatg

SEQ ID NO: 2196015 - DNA, 25 bp, Homo sapien
ggccctcacaataagcccatgcctt

SEQ ID NO: 2196016 - DNA, 25 bp, Homo sapien
ttgggaggttctgggcggagatgga

SEQ ID NO: 2196017 - DNA, 25 bp, Homo sapien
gaggttgggaggttctgggcggaga

SEQ ID NO: 2196018 - DNA, 25 bp, Homo sapien
gggaggttctgggcggagatggaac

SEQ ID NO: 2196019 - DNA, 25 bp, Homo sapien
ccaactagtgttgggaggttgggag

SEQ ID NO: 2196020 - DNA, 25 bp, Homo sapien
ggccccaggtggagattggacacca

SEQ ID NO: 2196021 - DNA, 25 bp, Homo sapien
tccaggtggagactgtacatccgag

SEQ ID NO: 2196022 - DNA, 25 bp, Homo sapien
gacattccagtctcgggaggctcca

SEQ ID NO: 2196023 - DNA, 25 bp, Homo sapien
ctacagtcttgggaggttccgggca

SEQ ID NO: 2196024 - DNA, 25 bp, Homo sapien
actcgggaggcctcgtgcagaattc

SEQ ID NO: 2196025 - DNA, 25 bp, Homo sapien
ggacacctgagactcgggaggcctc

SEQ ID NO: 2196026 - DNA, 25 bp, Homo sapien
cctgagactcgggaggcctcgtgca

SEQ ID NO: 2196027 - DNA, 25 bp, Homo sapien
gactcgggaggcctcgtgcagaatt

SEQ ID NO: 2196028 - DNA, 25 bp, Homo sapien
cctggccctcacaatgaacccattc

SEQ ID NO: 2196029 - DNA, 25 bp, Homo sapien
cacaatgaacccattcgtcctccag

SEQ ID NO: 2196030 - DNA, 25 bp, Homo sapien
aatgaacccattcgtcctccagctt

SEQ ID NO: 2196031 - DNA, 25 bp, Homo sapien
tggccctcacaatgaacccattcgt

SEQ ID NO: 2196032 - DNA, 25 bp, Homo sapien
taggagactggacactcgatgagta

SEQ ID NO: 2196033 - DNA, 25 bp, Homo sapien
ccgggtggaggctggacacctgcat

SEQ ID NO: 2196034 - DNA, 25 bp, Homo sapien
gatgagtattgggaggttccgggtg

SEQ ID NO: 2196035 - DNA, 25 bp, Homo sapien
ggcagacactggacacctccgtctt

SEQ ID NO: 2196036 - DNA, 25 bp, Homo sapien
agtggacacccgttgagtcttggga

SEQ ID NO: 2196037 - DNA, 25 bp, Homo sapien
gaggctccgggagaacactggacac

SEQ ID NO: 2196038 - DNA, 25 bp, Homo sapien
gacacccaaagaatcttgggaggct

SEQ ID NO: 2196039 - DNA, 25 bp, Homo sapien
cactggacagccgaccagtcttggg

SEQ ID NO: 2196040 - DNA, 25 bp, Homo sapien
ctgcgcggagatgggacactccagt

SEQ ID NO: 2196041 - DNA, 25 bp, Homo sapien
ggacactccagtctcggggggctcc

SEQ ID NO: 2196042 - DNA, 25 bp, Homo sapien
acactccagtctcggggggctccgg

SEQ ID NO: 2196043 - DNA, 25 bp, Homo sapien
agtctcggggggctccgggcagagg

SEQ ID NO: 2196044 - DNA, 25 bp, Homo sapien
ggagacccaatgagtcttgggaggc

SEQ ID NO: 2196045 - DNA, 25 bp, Homo sapien
ctggagacccaatgagtcttgggag

SEQ ID NO: 2196046 - DNA, 25 bp, Homo sapien
tggagacccaatgagtcttgggagg

SEQ ID NO: 2196047 - DNA, 25 bp, Homo sapien
ctgggcagagataggacactccagt

SEQ ID NO: 2196048 - DNA, 25 bp, Homo sapien
tccagtctcaggaggctctgggtga

SEQ ID NO: 2196049 - DNA, 25 bp, Homo sapien
agtctcaggaggctctgggtgagac

SEQ ID NO: 2196050 - DNA, 25 bp, Homo sapien
acactccagtctcaggaggctctgg

SEQ ID NO: 2196051 - DNA, 25 bp, Homo sapien
tggagatggaacacctgagtctcag

SEQ ID NO: 2196052 - DNA, 25 bp, Homo sapien
tctcaggaggcctcgggcagaattc

SEQ ID NO: 2196053 - DNA, 25 bp, Homo sapien
ctccgggtggagatggaacacctga

SEQ ID NO: 2196054 - DNA, 25 bp, Homo sapien
aacacctgagtctcaggaggcctcg

SEQ ID NO: 2196055 - DNA, 25 bp, Homo sapien
caaatgccttccatgctggctgggc

SEQ ID NO: 2196056 - DNA, 25 bp, Homo sapien
gcaagagcttggaaaacagggccac

SEQ ID NO: 2196057 - DNA, 25 bp, Homo sapien
ctacaaatgccttccatgctggctg

SEQ ID NO: 2196058 - DNA, 25 bp, Homo sapien
ttccagccctcacgagcccatgcgt

SEQ ID NO: 2196059 - DNA, 25 bp, Homo sapien
taagaactcgttaagtctacaaatg

SEQ ID NO: 2196060 - DNA, 25 bp, Homo sapien
gagacggacagccatagtggaagct

SEQ ID NO: 2196061 - DNA, 25 bp, Homo sapien
acggacagccatagtggaagctgtc

SEQ ID NO: 2196062 - DNA, 25 bp, Homo sapien
gacggacagccatagtggaagctgt

SEQ ID NO: 2196063 - DNA, 25 bp, Homo sapien
ggagacggacagccatagtggaagc

SEQ ID NO: 2196064 - DNA, 25 bp, Homo sapien
ggcttgcagtccatgcccggggacc

SEQ ID NO: 2196065 - DNA, 25 bp, Homo sapien
gcttgcagtccatgcccggggacct

SEQ ID NO: 2196066 - DNA, 25 bp, Homo sapien
cagggcttgcagtccatgcccgggg

SEQ ID NO: 2196067 - DNA, 25 bp, Homo sapien
acctcggccggtcccgcggcctctg

SEQ ID NO: 2196068 - DNA, 25 bp, Homo sapien
agttcccgcggttcctgatccctgc

SEQ ID NO: 2196069 - DNA, 25 bp, Homo sapien
gatccctgccactctagtcgctagg

SEQ ID NO: 2196070 - DNA, 25 bp, Homo sapien
tagtcgctaggagaccgcgagccac

SEQ ID NO: 2196071 - DNA, 25 bp, Homo sapien
cactctagtcgctaggagaccgcga

SEQ ID NO: 2196072 - DNA, 25 bp, Homo sapien
aggttcttcctcgaagaggggcagc

SEQ ID NO: 2196073 - DNA, 25 bp, Homo sapien
ttcttcctcgaagaggggcagcgga

SEQ ID NO: 2196074 - DNA, 25 bp, Homo sapien
ggttcttcctcgaagaggggcagcg

SEQ ID NO: 2196075 - DNA, 25 bp, Homo sapien
cttcctcgaagaggggcagcggaga

SEQ ID NO: 2196076 - DNA, 25 bp, Homo sapien
gattctccagggtatggtcagcaac

SEQ ID NO: 2196077 - DNA, 25 bp, Homo sapien
ttctccagggtatggtcagcaacgg

SEQ ID NO: 2196078 - DNA, 25 bp, Homo sapien
tctccagggtatggtcagcaacgga

SEQ ID NO: 2196079 - DNA, 25 bp, Homo sapien
tggattctccagggtatggtcagca

SEQ ID NO: 2196080 - DNA, 25 bp, Homo sapien
cctcctttatccattcgcttttcat

SEQ ID NO: 2196081 - DNA, 25 bp, Homo sapien
tcattgacaggtaccgacacgaaaa

SEQ ID NO: 2196082 - DNA, 25 bp, Homo sapien
ccttggcaaggtctgtcttgtgacc

SEQ ID NO: 2196083 - DNA, 25 bp, Homo sapien
gcatctgccatttggcgtcccttgg

SEQ ID NO: 2196084 - DNA, 25 bp, Homo sapien
tcaggtactacagactctcttggca

SEQ ID NO: 2196085 - DNA, 25 bp, Homo sapien
tacttgtagcccaaagtagggctct

SEQ ID NO: 2196086 - DNA, 25 bp, Homo sapien
tacagactctcttggcatgctgctg

SEQ ID NO: 2196087 - DNA, 25 bp, Homo sapien
gctgaagttgtacttgtagcccaaa

SEQ ID NO: 2196088 - DNA, 25 bp, Homo sapien
ccccttcctgctcaatgattaaaca

SEQ ID NO: 2196089 - DNA, 25 bp, Homo sapien
aacagcgttgttggagaacatttat

SEQ ID NO: 2196090 - DNA, 25 bp, Homo sapien
cctgctcaatgattaaacagcgttg

SEQ ID NO: 2196091 - DNA, 25 bp, Homo sapien
caatgattaaacagcgttgttggag

SEQ ID NO: 2196092 - DNA, 25 bp, Homo sapien
ttgagcagagaatgttcccaacatt

SEQ ID NO: 2196093 - DNA, 25 bp, Homo sapien
tgtgagaatctgccctttgttgtac

SEQ ID NO: 2196094 - DNA, 25 bp, Homo sapien
gtgagaatctgccctttgttgtact

SEQ ID NO: 2196095 - DNA, 25 bp, Homo sapien
tttatgtcagcaatttcgcagtttc

SEQ ID NO: 2196096 - DNA, 25 bp, Homo sapien
tcagcaatttcgcagtttcttcttc

SEQ ID NO: 2196097 - DNA, 25 bp, Homo sapien
cagtggctggttttgacatttatgt

SEQ ID NO: 2196098 - DNA, 25 bp, Homo sapien
caagttaaatgattcccctctccca

SEQ ID NO: 2196099 - DNA, 25 bp, Homo sapien
tgagactcttgaatgttgtcaactt

SEQ ID NO: 2196100 - DNA, 25 bp, Homo sapien
ggatgtcaaaggaagcggctttttc

SEQ ID NO: 2196101 - DNA, 25 bp, Homo sapien
ttataaatcttagggagcgatttat

SEQ ID NO: 2196102 - DNA, 25 bp, Homo sapien
cttagggagcgatttatatgagaac

SEQ ID NO: 2196103 - DNA, 25 bp, Homo sapien
cccagaaactgctactttgaccctg

SEQ ID NO: 2196104 - DNA, 25 bp, Homo sapien
cagaaactgctactttgaccctgcc

SEQ ID NO: 2196105 - DNA, 25 bp, Homo sapien
aaactgctactttgaccctgccaca

SEQ ID NO: 2196106 - DNA, 25 bp, Homo sapien
gaaactgctactttgaccctgccac

SEQ ID NO: 2196107 - DNA, 25 bp, Homo sapien
tgctttttgcagataccacatgtga

SEQ ID NO: 2196108 - DNA, 25 bp, Homo sapien
tgtgtatgcgtttttgtggtgttgc

SEQ ID NO: 2196109 - DNA, 25 bp, Homo sapien
ctgtgtctcttaattccattcctga

SEQ ID NO: 2196110 - DNA, 25 bp, Homo sapien
ttgcagataccacatgtgaccctgt

SEQ ID NO: 2196111 - DNA, 25 bp, Homo sapien
agagttgtaaccagaatcttcctaa

SEQ ID NO: 2196112 - DNA, 25 bp, Homo sapien
tgtctgcggaaaatcctttacttag

SEQ ID NO: 2196113 - DNA, 25 bp, Homo sapien
ggatgtttcctgacaggattgtctg

SEQ ID NO: 2196114 - DNA, 25 bp, Homo sapien
gcttgacaataaattctccttgagg

SEQ ID NO: 2196115 - DNA, 25 bp, Homo sapien
gaagcaagttgcagagaaatttcaa

SEQ ID NO: 2196116 - DNA, 25 bp, Homo sapien
attccaacattcctatggcggtctt

SEQ ID NO: 2196117 - DNA, 25 bp, Homo sapien
tatggcggtcttactttccgttgcc

SEQ ID NO: 2196118 - DNA, 25 bp, Homo sapien
gcagattttcattgccgatggcccc

SEQ ID NO: 2196119 - DNA, 25 bp, Homo sapien
ggggcactactccagcacaaattcc

SEQ ID NO: 2196120 - DNA, 25 bp, Homo sapien
catgctgccttcaggtccagggaag

SEQ ID NO: 2196121 - DNA, 25 bp, Homo sapien
tcatgctgccttcaggtccagggaa

SEQ ID NO: 2196122 - DNA, 25 bp, Homo sapien
tgccttcaggtccagggaaggcttc

SEQ ID NO: 2196123 - DNA, 25 bp, Homo sapien
tgctgccttcaggtccagggaaggc

SEQ ID NO: 2196124 - DNA, 25 bp, Homo sapien
gctgctggctgaatctgccccttaa

SEQ ID NO: 2196125 - DNA, 25 bp, Homo sapien
cagtgtatgtatcttggcccaggac

SEQ ID NO: 2196126 - DNA, 25 bp, Homo sapien
ggccttctgggttctataaatagac

SEQ ID NO: 2196127 - DNA, 25 bp, Homo sapien
agggaaagggcctgctacctctcag

SEQ ID NO: 2196128 - DNA, 25 bp, Homo sapien
ctagccatcaaaatcaagtacgatg

SEQ ID NO: 2196129 - DNA, 25 bp, Homo sapien
tgagtatgaagtcaaagtgaagcct

SEQ ID NO: 2196130 - DNA, 25 bp, Homo sapien
tggtcctctttacctccgtcctgaa

SEQ ID NO: 2196131 - DNA, 25 bp, Homo sapien
gattgccactcgagttgtagtcctg

SEQ ID NO: 2196132 - DNA, 25 bp, Homo sapien
gagtgtatgtgccagtacttaccag

SEQ ID NO: 2196133 - DNA, 25 bp, Homo sapien
caatgcattgtggatatgagctttc

SEQ ID NO: 2196134 - DNA, 25 bp, Homo sapien
ccaccttaaaacattagtgctatgg

SEQ ID NO: 2196135 - DNA, 25 bp, Homo sapien
gagctttcgttgactgcttctctgc

SEQ ID NO: 2196136 - DNA, 25 bp, Homo sapien
gagacccaagcattgctcataattg

SEQ ID NO: 2196137 - DNA, 25 bp, Homo sapien
gctgtttcatgagagttttgggatc

SEQ ID NO: 2196138 - DNA, 25 bp, Homo sapien
tgggatctatagtcaaatgtgtatc

SEQ ID NO: 2196139 - DNA, 25 bp, Homo sapien
tcataattgggacatattgctagct

SEQ ID NO: 2196140 - DNA, 25 bp, Homo sapien
gaaatttgaatacttgcaggctttg

SEQ ID NO: 2196141 - DNA, 25 bp, Homo sapien
tactctaagaatgatgaagcattgt

SEQ ID NO: 2196142 - DNA, 25 bp, Homo sapien
tgtgaataattctagcgggggacct

SEQ ID NO: 2196143 - DNA, 25 bp, Homo sapien
agcatttattaacaggtactctaag

SEQ ID NO: 2196144 - DNA, 25 bp, Homo sapien
gccacaattgctgctgataccatta

SEQ ID NO: 2196145 - DNA, 25 bp, Homo sapien
actgctgctggtgttagtagtattg

SEQ ID NO: 2196146 - DNA, 25 bp, Homo sapien
gataccattatcagtactgctgctg

SEQ ID NO: 2196147 - DNA, 25 bp, Homo sapien
agtattgaagcttggacagtcttcc

SEQ ID NO: 2196148 - DNA, 25 bp, Homo sapien
gattatttgatctgtgggctatgca

SEQ ID NO: 2196149 - DNA, 25 bp, Homo sapien
tccccaagctgaagggcaggattat

SEQ ID NO: 2196150 - DNA, 25 bp, Homo sapien
ctatgcaatttctgctaacaggagg

SEQ ID NO: 2196151 - DNA, 25 bp, Homo sapien
taacaggaggtattgagtaggccat

SEQ ID NO: 2196152 - DNA, 25 bp, Homo sapien
gtttgagatcttttcggccgggcag

SEQ ID NO: 2196153 - DNA, 25 bp, Homo sapien
cagtttgcaactagacaaagtgggc

SEQ ID NO: 2196154 - DNA, 25 bp, Homo sapien
tgggctagagtctcctaaactactg

SEQ ID NO: 2196155 - DNA, 25 bp, Homo sapien
tatcatactagcagtcctgcaagtg

SEQ ID NO: 2196156 - DNA, 25 bp, Homo sapien
tagaaacagagcagatagcaagttc

SEQ ID NO: 2196157 - DNA, 25 bp, Homo sapien
ttaactagaaacagagcagatagca

SEQ ID NO: 2196158 - DNA, 25 bp, Homo sapien
tgaataatgactgagaatttttgat

SEQ ID NO: 2196159 - DNA, 25 bp, Homo sapien
gcagatagcaagttcaccaggtaaa

SEQ ID NO: 2196160 - DNA, 25 bp, Homo sapien
taagccctgagataacgtgctaagg

SEQ ID NO: 2196161 - DNA, 25 bp, Homo sapien
caatgagttatggttccgctctcta

SEQ ID NO: 2196162 - DNA, 25 bp, Homo sapien
gattgacttcgcatttggtggccag

SEQ ID NO: 2196163 - DNA, 25 bp, Homo sapien
tatgcacttttaacttgctaggagc

SEQ ID NO: 2196164 - DNA, 25 bp, Homo sapien
ggagttccccatcaccttaggtaca

SEQ ID NO: 2196165 - DNA, 25 bp, Homo sapien
tgtatagaatatgagctaatctgcc

SEQ ID NO: 2196166 - DNA, 25 bp, Homo sapien
ggctttagcccaacatttttagtca

SEQ ID NO: 2196167 - DNA, 25 bp, Homo sapien
gcacgcttttcatctagcacactag

SEQ ID NO: 2196168 - DNA, 25 bp, Homo sapien
caatagcaatggcaaaaacgttgac

SEQ ID NO: 2196169 - DNA, 25 bp, Homo sapien
ttaaagaacaatagcaatggcaaaa

SEQ ID NO: 2196170 - DNA, 25 bp, Homo sapien
gaacaatagcaatggcaaaaacgtt

SEQ ID NO: 2196171 - DNA, 25 bp, Homo sapien
aagaacaatagcaatggcaaaaacg

SEQ ID NO: 2196172 - DNA, 25 bp, Homo sapien
ttctcccatcttacggtacaggttc

SEQ ID NO: 2196173 - DNA, 25 bp, Homo sapien
tccggttctcccatcttacggtaca

SEQ ID NO: 2196174 - DNA, 25 bp, Homo sapien
atggtccggttctcccatcttacgg

SEQ ID NO: 2196175 - DNA, 25 bp, Homo sapien
gttcatggtccggttctcccatctt

SEQ ID NO: 2196176 - DNA, 25 bp, Homo sapien
gccatatgcgctcttctggaccact

SEQ ID NO: 2196177 - DNA, 25 bp, Homo sapien
aagccatatgcgctcttctggacca

SEQ ID NO: 2196178 - DNA, 25 bp, Homo sapien
gaaagccatatgcgctcttctggac

SEQ ID NO: 2196179 - DNA, 25 bp, Homo sapien
ccatatgcgctcttctggaccactg

SEQ ID NO: 2196180 - DNA, 25 bp, Homo sapien
tgttccactatgcttgcagtccact

SEQ ID NO: 2196181 - DNA, 25 bp, Homo sapien
taatcatctaggaagtgctaaactg

SEQ ID NO: 2196182 - DNA, 25 bp, Homo sapien
gccgagtatgtatttcccagttgaa

SEQ ID NO: 2196183 - DNA, 25 bp, Homo sapien
aatgcatccagtgacttctagcacc

SEQ ID NO: 2196184 - DNA, 25 bp, Homo sapien
tagctgcaagtaacctgtagcaaag

SEQ ID NO: 2196185 - DNA, 25 bp, Homo sapien
ccaaatgtgttgaacttgggcttta

SEQ ID NO: 2196186 - DNA, 25 bp, Homo sapien
ccaaaccaatgaaaggcaccagcct

SEQ ID NO: 2196187 - DNA, 25 bp, Homo sapien
tctaacatctcatttgggagtctcc

SEQ ID NO: 2196188 - DNA, 25 bp, Homo sapien
ggtgggtgataaccattgttctaac

SEQ ID NO: 2196189 - DNA, 25 bp, Homo sapien
tctttgacaatattgtgggcttcct

SEQ ID NO: 2196190 - DNA, 25 bp, Homo sapien
ctttgacaatattgtgggcttcctc

SEQ ID NO: 2196191 - DNA, 25 bp, Homo sapien
ccaggaccccgagactccgagccat

SEQ ID NO: 2196192 - DNA, 25 bp, Homo sapien
caccaggaccccgagactccgagcc

SEQ ID NO: 2196193 - DNA, 25 bp, Homo sapien
cgggagcgggaatggcagtgccacc

SEQ ID NO: 2196194 - DNA, 25 bp, Homo sapien
atggcagtgccaccaggaccccgag

SEQ ID NO: 2196195 - DNA, 25 bp, Homo sapien
ctcgtcgcagtggcgatggtactcc

SEQ ID NO: 2196196 - DNA, 25 bp, Homo sapien
cgcagtggcgatggtactcctccat

SEQ ID NO: 2196197 - DNA, 25 bp, Homo sapien
gtcgcagtggcgatggtactcctcc

SEQ ID NO: 2196198 - DNA, 25 bp, Homo sapien
cgtcgcagtggcgatggtactcctc

SEQ ID NO: 2196199 - DNA, 25 bp, Homo sapien
tggggcggagcgacacgccggtaga

SEQ ID NO: 2196200 - DNA, 25 bp, Homo sapien
ggcggagcgacacgccggtagagca

SEQ ID NO: 2196201 - DNA, 25 bp, Homo sapien
accgcggccgcgcactggcctccgg

SEQ ID NO: 2196202 - DNA, 25 bp, Homo sapien
agcgacacgccggtagagcaccgcg

SEQ ID NO: 2196203 - DNA, 25 bp, Homo sapien
gaatcctcatactgtccacacgaag

SEQ ID NO: 2196204 - DNA, 25 bp, Homo sapien
cagagaaggagcgaggagacattat

SEQ ID NO: 2196205 - DNA, 25 bp, Homo sapien
gcatggagcagtaaacagctgagtc

SEQ ID NO: 2196206 - DNA, 25 bp, Homo sapien
ttatttactgggattgctgtcactg

SEQ ID NO: 2196207 - DNA, 25 bp, Homo sapien
ctctccaacctcgttccattcctgg

SEQ ID NO: 2196208 - DNA, 25 bp, Homo sapien
aacttctctccaacctcgttccatt

SEQ ID NO: 2196209 - DNA, 25 bp, Homo sapien
aaacttctctccaacctcgttccat

SEQ ID NO: 2196210 - DNA, 25 bp, Homo sapien
ccatcttgcttagcccatggacttt

SEQ ID NO: 2196211 - DNA, 25 bp, Homo sapien
tcttgcttagcccatggacttttga

SEQ ID NO: 2196212 - DNA, 25 bp, Homo sapien
atcttccatcttgcttagcccatgg

SEQ ID NO: 2196213 - DNA, 25 bp, Homo sapien
gcttagcccatggacttttgatttt

SEQ ID NO: 2196214 - DNA, 25 bp, Homo sapien
cttctgttacttgcagagttagcaa

SEQ ID NO: 2196215 - DNA, 25 bp, Homo sapien
gcagagttagcaaccgctgtggtta

SEQ ID NO: 2196216 - DNA, 25 bp, Homo sapien
tgtggttaccttaggttctgaaaga

SEQ ID NO: 2196217 - DNA, 25 bp, Homo sapien
aaaagcagatggtgcttctgttact

SEQ ID NO: 2196218 - DNA, 25 bp, Homo sapien
cgtggggatattttctagggtatct

SEQ ID NO: 2196219 - DNA, 25 bp, Homo sapien
ctgcccgtggggatattttctaggg

SEQ ID NO: 2196220 - DNA, 25 bp, Homo sapien
tgctgctgcccgtggggatattttc

SEQ ID NO: 2196221 - DNA, 25 bp, Homo sapien
tggggatattttctagggtatctgt

SEQ ID NO: 2196222 - DNA, 25 bp, Homo sapien
tctttgggcccctcatcattactca

SEQ ID NO: 2196223 - DNA, 25 bp, Homo sapien
caactcctcctctcctagcttagct

SEQ ID NO: 2196224 - DNA, 25 bp, Homo sapien
tactcaaggcccctagatctactgg

SEQ ID NO: 2196225 - DNA, 25 bp, Homo sapien
ctcagtcctcctagtccctcaacca

SEQ ID NO: 2196226 - DNA, 25 bp, Homo sapien
gaaacagctctgttgcaaagaaatt

SEQ ID NO: 2196227 - DNA, 25 bp, Homo sapien
cgtgtgagaagaaacagctctgttg

SEQ ID NO: 2196228 - DNA, 25 bp, Homo sapien
ctctatccacagcatgacagttctt

SEQ ID NO: 2196229 - DNA, 25 bp, Homo sapien
cacacagaattgcccgtgtgagaag

SEQ ID NO: 2196230 - DNA, 25 bp, Homo sapien
cagctgctttgcaggatgactgctc

SEQ ID NO: 2196231 - DNA, 25 bp, Homo sapien
gcgtatgtgatttagcttgtattct

SEQ ID NO: 2196232 - DNA, 25 bp, Homo sapien
tatttgaaaggcatcctcaagggta

SEQ ID NO: 2196233 - DNA, 25 bp, Homo sapien
gactgctgtgcttgtggtaatccaa

SEQ ID NO: 2196234 - DNA, 25 bp, Homo sapien
cagaaatgacaccatagtaacagaa

SEQ ID NO: 2196235 - DNA, 25 bp, Homo sapien
gattctgatgaacaaagctaggtgc

SEQ ID NO: 2196236 - DNA, 25 bp, Homo sapien
ttcaagctccaatgcagccatagag

SEQ ID NO: 2196237 - DNA, 25 bp, Homo sapien
aatgcatctgtaccctgcacattca

SEQ ID NO: 2196238 - DNA, 25 bp, Homo sapien
tgtgctagatacctcaaggcaggaa

SEQ ID NO: 2196239 - DNA, 25 bp, Homo sapien
gagccaaatactctctaggaagtcc

SEQ ID NO: 2196240 - DNA, 25 bp, Homo sapien
gattcctgtgtaacctgtgctagat

SEQ ID NO: 2196241 - DNA, 25 bp, Homo sapien
gcctccaccataaggtcagttctgg

SEQ ID NO: 2196242 - DNA, 25 bp, Homo sapien
tcctctatgagccatgccattgacc

SEQ ID NO: 2196243 - DNA, 25 bp, Homo sapien
tattggcagttcagcaatcgccctg

SEQ ID NO: 2196244 - DNA, 25 bp, Homo sapien
tctataaggtccaaaaggtgcacag

SEQ ID NO: 2196245 - DNA, 25 bp, Homo sapien
caaaaactggcttctagtatgctct

SEQ ID NO: 2196246 - DNA, 25 bp, Homo sapien
ctgatcataggcgatgacgaagact

SEQ ID NO: 2196247 - DNA, 25 bp, Homo sapien
atgacgaagactttacctggcaggc

SEQ ID NO: 2196248 - DNA, 25 bp, Homo sapien
cagccagcgtatggcagtctctgtg

SEQ ID NO: 2196249 - DNA, 25 bp, Homo sapien
ggtgcacagccagcgtatggcagtc

SEQ ID NO: 2196250 - DNA, 25 bp, Homo sapien
gcttgtggctttaattggctacttg

SEQ ID NO: 2196251 - DNA, 25 bp, Homo sapien
cactgaccacactgaacaagtatgg

SEQ ID NO: 2196252 - DNA, 25 bp, Homo sapien
gctcagcagagctcctaaaaagact

SEQ ID NO: 2196253 - DNA, 25 bp, Homo sapien
tggctacttgaacacctgacagctc

SEQ ID NO: 2196254 - DNA, 25 bp, Homo sapien
ttccaagtacaaaaagcagcatgct

SEQ ID NO: 2196255 - DNA, 25 bp, Homo sapien
ttgaataacatgttgatagcctgtg

SEQ ID NO: 2196256 - DNA, 25 bp, Homo sapien
gcctgtgtatggttatgggttctaa

SEQ ID NO: 2196257 - DNA, 25 bp, Homo sapien
tctacaaaatcaagcagccatgatg

SEQ ID NO: 2196258 - DNA, 25 bp, Homo sapien
catcaccagggagacatagcgctct

SEQ ID NO: 2196259 - DNA, 25 bp, Homo sapien
tcaatcaggttgaacagggccacag

SEQ ID NO: 2196260 - DNA, 25 bp, Homo sapien
tcaggtgttacaggtctggctcatt

SEQ ID NO: 2196261 - DNA, 25 bp, Homo sapien
catttcggcttgtaggaccatctct

SEQ ID NO: 2196262 - DNA, 25 bp, Homo sapien
ccactagcaccatactgaaggagta

SEQ ID NO: 2196263 - DNA, 25 bp, Homo sapien
tagcaccatactgaaggagtagagt

SEQ ID NO: 2196264 - DNA, 25 bp, Homo sapien
caccatactgaaggagtagagtggg

SEQ ID NO: 2196265 - DNA, 25 bp, Homo sapien
catactgaaggagtagagtgggatt

SEQ ID NO: 2196266 - DNA, 25 bp, Homo sapien
ggctccaactttgtaagggttatga

SEQ ID NO: 2196267 - DNA, 25 bp, Homo sapien
gctccaactttgtaagggttatgaa

SEQ ID NO: 2196268 - DNA, 25 bp, Homo sapien
tggctccaactttgtaagggttatg

SEQ ID NO: 2196269 - DNA, 25 bp, Homo sapien
catggctccaactttgtaagggtta

SEQ ID NO: 2196270 - DNA, 25 bp, Homo sapien
tgccaatgagagtcgggaacacacc

SEQ ID NO: 2196271 - DNA, 25 bp, Homo sapien
ctttgctcctatcctgccaatgaga

SEQ ID NO: 2196272 - DNA, 25 bp, Homo sapien
gctccaccacggtgatgtgtcgaag

SEQ ID NO: 2196273 - DNA, 25 bp, Homo sapien
tgtcgaagatcaaggccacactgtg

SEQ ID NO: 2196274 - DNA, 25 bp, Homo sapien
gagcatggctaaaaaagacatcctt

SEQ ID NO: 2196275 - DNA, 25 bp, Homo sapien
ccaacaggggaagtatgagcatggc

SEQ ID NO: 2196276 - DNA, 25 bp, Homo sapien
aacccaacaggggaagtatgagcat

SEQ ID NO: 2196277 - DNA, 25 bp, Homo sapien
caggggaagtatgagcatggctaaa

SEQ ID NO: 2196278 - DNA, 25 bp, Homo sapien
ctgacacccacattgacgttcatgg

SEQ ID NO: 2196279 - DNA, 25 bp, Homo sapien
gacacaatgaggagtctccttttct

SEQ ID NO: 2196280 - DNA, 25 bp, Homo sapien
ctccttttctcataaaactgatcca

SEQ ID NO: 2196281 - DNA, 25 bp, Homo sapien
cattcctagctggagccggtaaagg

SEQ ID NO: 2196282 - DNA, 25 bp, Homo sapien
caccgtcgctggagcacttcatgta

SEQ ID NO: 2196283 - DNA, 25 bp, Homo sapien
gccgatgcaggagaactcacaggtg

SEQ ID NO: 2196284 - DNA, 25 bp, Homo sapien
gattgacatactcgggcagggctac

SEQ ID NO: 2196285 - DNA, 25 bp, Homo sapien
ccgtgccagaccaagccaggttgga

SEQ ID NO: 2196286 - DNA, 25 bp, Homo sapien
tgtgtactggatcttgtggtctcct

SEQ ID NO: 2196287 - DNA, 25 bp, Homo sapien
ctcttactttaactcgaaatttgca

SEQ ID NO: 2196288 - DNA, 25 bp, Homo sapien
aaatttgcaagtgcccttattctca

SEQ ID NO: 2196289 - DNA, 25 bp, Homo sapien
tcagctctgtcatagactgtgtact

SEQ ID NO: 2196290 - DNA, 25 bp, Homo sapien
tggggggaggccttttagaatgaca

SEQ ID NO: 2196291 - DNA, 25 bp, Homo sapien
tgcaatgcgttccttcacacttggg

SEQ ID NO: 2196292 - DNA, 25 bp, Homo sapien
gtctcttccttcgggtgtctcccag

SEQ ID NO: 2196293 - DNA, 25 bp, Homo sapien
aggacacccggactgtcagtttgtt

SEQ ID NO: 2196294 - DNA, 25 bp, Homo sapien
ccggactgtcagtttgttgggttct

SEQ ID NO: 2196295 - DNA, 25 bp, Homo sapien
catggcaagggtaggacatcgcttt

SEQ ID NO: 2196296 - DNA, 25 bp, Homo sapien
tcacaccgggagttaaagtaggcac

SEQ ID NO: 2196297 - DNA, 25 bp, Homo sapien
tgtccatacatgtgacggtccgctc

SEQ ID NO: 2196298 - DNA, 25 bp, Homo sapien
tcccctttcaacgtgtatcctggtg

SEQ ID NO: 2196299 - DNA, 25 bp, Homo sapien
tcagatattcagcatttcttagttt

SEQ ID NO: 2196300 - DNA, 25 bp, Homo sapien
aaaatcagatattcagcatttctta

SEQ ID NO: 2196301 - DNA, 25 bp, Homo sapien
cagatattcagcatttcttagtttt

SEQ ID NO: 2196302 - DNA, 25 bp, Homo sapien
aatcagatattcagcatttcttagt

SEQ ID NO: 2196303 - DNA, 25 bp, Homo sapien
gcagatgaccttgtcagaccatcgt

SEQ ID NO: 2196304 - DNA, 25 bp, Homo sapien
gaccatcgtttgtttgactggcaga

SEQ ID NO: 2196305 - DNA, 25 bp, Homo sapien
tagggaagagccatgcagctcgtag

SEQ ID NO: 2196306 - DNA, 25 bp, Homo sapien
agcgaatgtcgcacctggttcccag

SEQ ID NO: 2196307 - DNA, 25 bp, Homo sapien
accaggcaccagtcattatattgga

SEQ ID NO: 2196308 - DNA, 25 bp, Homo sapien
tggaaatattgttcacttgtgtaga

SEQ ID NO: 2196309 - DNA, 25 bp, Homo sapien
cagtcaaaagttgtccagtcctacc

SEQ ID NO: 2196310 - DNA, 25 bp, Homo sapien
cagtcctaccctgattctcctgtat

SEQ ID NO: 2196311 - DNA, 25 bp, Homo sapien
tcatcccaggaattaggacaaattt

SEQ ID NO: 2196312 - DNA, 25 bp, Homo sapien
tcccaggaattaggacaaatttcca

SEQ ID NO: 2196313 - DNA, 25 bp, Homo sapien
catcccaggaattaggacaaatttc

SEQ ID NO: 2196314 - DNA, 25 bp, Homo sapien
tgtgttgtctggtcactttattaca

SEQ ID NO: 2196315 - DNA, 25 bp, Homo sapien
atgtgttgtctggtcactttattac

SEQ ID NO: 2196316 - DNA, 25 bp, Homo sapien
tttatatctagggtgtgaatacccg

SEQ ID NO: 2196317 - DNA, 25 bp, Homo sapien
tacccgacttcatcgtcttctagtg

SEQ ID NO: 2196318 - DNA, 25 bp, Homo sapien
cgtcttctagtggtgagtctcccga

SEQ ID NO: 2196319 - DNA, 25 bp, Homo sapien
tctagggtgtgaatacccgacttca

SEQ ID NO: 2196320 - DNA, 25 bp, Homo sapien
acagaccatgcaggaggtgctatta

SEQ ID NO: 2196321 - DNA, 25 bp, Homo sapien
gaaaagccacatagtatggacgcat

SEQ ID NO: 2196322 - DNA, 25 bp, Homo sapien
tagtatggacgcatatttcaaagca

SEQ ID NO: 2196323 - DNA, 25 bp, Homo sapien
gaggtgctattagaatgcagagcca

SEQ ID NO: 2196324 - DNA, 25 bp, Homo sapien
gagtctttctgagcaattttccagc

SEQ ID NO: 2196325 - DNA, 25 bp, Homo sapien
aaaggcagtatgtgccctaaaggga

SEQ ID NO: 2196326 - DNA, 25 bp, Homo sapien
agaaaccatgggccagtgaaaaagg

SEQ ID NO: 2196327 - DNA, 25 bp, Homo sapien
tatgtgccctaaagggaactttgcc

SEQ ID NO: 2196328 - DNA, 25 bp, Homo sapien
tggtcactgccaccagtaaatgctt

SEQ ID NO: 2196329 - DNA, 25 bp, Homo sapien
gcaggtagcaaaagccagtccacct

SEQ ID NO: 2196330 - DNA, 25 bp, Homo sapien
gaaatccaggaagcattaagaaata

SEQ ID NO: 2196331 - DNA, 25 bp, Homo sapien
aaatatgtcagcaggtagcaaaagc

SEQ ID NO: 2196332 - DNA, 25 bp, Homo sapien
cagcctcagattaggacactggatc

SEQ ID NO: 2196333 - DNA, 25 bp, Homo sapien
acccacacaataagcggcaggcgag

SEQ ID NO: 2196334 - DNA, 25 bp, Homo sapien
gcgtcatccattagcagatcatggg

SEQ ID NO: 2196335 - DNA, 25 bp, Homo sapien
atttaaccgtgtttgcgaacaatct

SEQ ID NO: 2196336 - DNA, 25 bp, Homo sapien
cgtgtttgcgaacaatcttggatca

SEQ ID NO: 2196337 - DNA, 25 bp, Homo sapien
gctaggcaccgtgggaaatacaaat

SEQ ID NO: 2196338 - DNA, 25 bp, Homo sapien
taagggtaagacatagcacggcccc

SEQ ID NO: 2196339 - DNA, 25 bp, Homo sapien
tacaggcactgttaatccattacgc

SEQ ID NO: 2196340 - DNA, 25 bp, Homo sapien
cattacgcacaaatatccatgtggc

SEQ ID NO: 2196341 - DNA, 25 bp, Homo sapien
tccagatgtaagattcacgaagcct

SEQ ID NO: 2196342 - DNA, 25 bp, Homo sapien
tctccagatgtaagattcacgaagc

SEQ ID NO: 2196343 - DNA, 25 bp, Homo sapien
ttttctccagatgtaagattcacga

SEQ ID NO: 2196344 - DNA, 25 bp, Homo sapien
agatgtaagattcacgaagcctttc

SEQ ID NO: 2196345 - DNA, 25 bp, Homo sapien
gaggcgcagactttctcggaatccc

SEQ ID NO: 2196346 - DNA, 25 bp, Homo sapien
cgtgccttccacaaaagtcgcttta

SEQ ID NO: 2196347 - DNA, 25 bp, Homo sapien
tgggagggcatagaggctccttcca

SEQ ID NO: 2196348 - DNA, 25 bp, Homo sapien
tttaccgtggctcgtgtcctgcggc

SEQ ID NO: 2196349 - DNA, 25 bp, Homo sapien
cagcagcagcgcgggccgatgtgcg

SEQ ID NO: 2196350 - DNA, 25 bp, Homo sapien
agctgcggctgggcgggacgcgcag

SEQ ID NO: 2196351 - DNA, 25 bp, Homo sapien
gcagcagcgcgggccgatgtgcggg

SEQ ID NO: 2196352 - DNA, 25 bp, Homo sapien
agcgcgggccgatgtgcggggctcc

SEQ ID NO: 2196353 - DNA, 25 bp, Homo sapien
cggcaggagaccgaagagaccaagg

SEQ ID NO: 2196354 - DNA, 25 bp, Homo sapien
cttagctcgcctcggcagcgcagcg

SEQ ID NO: 2196355 - DNA, 25 bp, Homo sapien
cgggggcggcaggagaccgaagaga

SEQ ID NO: 2196356 - DNA, 25 bp, Homo sapien
aggagaccgaagagaccaagggact

SEQ ID NO: 2196357 - DNA, 25 bp, Homo sapien
gcgggcgggcgaaggccgggctgga

SEQ ID NO: 2196358 - DNA, 25 bp, Homo sapien
tagcgggcgggcgaaggccgggctg

SEQ ID NO: 2196359 - DNA, 25 bp, Homo sapien
agcgggcgggcgaaggccgggctgg

SEQ ID NO: 2196360 - DNA, 25 bp, Homo sapien
ctagcgggcgggcgaaggccgggct

SEQ ID NO: 2196361 - DNA, 25 bp, Homo sapien
gggatccagctgtaggttcctgcag

SEQ ID NO: 2196362 - DNA, 25 bp, Homo sapien
aagataccacgaccagactggagcc

SEQ ID NO: 2196363 - DNA, 25 bp, Homo sapien
catggggatccagctgtaggttcct

SEQ ID NO: 2196364 - DNA, 25 bp, Homo sapien
tcaaccaccccaaagataccacgac

SEQ ID NO: 2196365 - DNA, 25 bp, Homo sapien
tttgtttatccagaaggagtgccat

SEQ ID NO: 2196366 - DNA, 25 bp, Homo sapien
gccccagacttgaacgtccatctta

SEQ ID NO: 2196367 - DNA, 25 bp, Homo sapien
tccagaaggagtgccatttcccaat

SEQ ID NO: 2196368 - DNA, 25 bp, Homo sapien
gaaggagtgccatttcccaattctc

SEQ ID NO: 2196369 - DNA, 25 bp, Homo sapien
cctctctagcacttggggggacttc

SEQ ID NO: 2196370 - DNA, 25 bp, Homo sapien
ctagcacttggggggacttcgctcc

SEQ ID NO: 2196371 - DNA, 25 bp, Homo sapien
agcacttggggggacttcgctccat

SEQ ID NO: 2196372 - DNA, 25 bp, Homo sapien
tctctagcacttggggggacttcgc

SEQ ID NO: 2196373 - DNA, 25 bp, Homo sapien
taggagttgccagtagtggcttcac

SEQ ID NO: 2196374 - DNA, 25 bp, Homo sapien
gacagtgtctgtcttgtcatctgaa

SEQ ID NO: 2196375 - DNA, 25 bp, Homo sapien
ttgcctataagctaagtctccaagg

SEQ ID NO: 2196376 - DNA, 25 bp, Homo sapien
ttcacagtacaacctacgacagtgc

SEQ ID NO: 2196377 - DNA, 25 bp, Homo sapien
tgaatgccggacatcatctgttggc

SEQ ID NO: 2196378 - DNA, 25 bp, Homo sapien
tgatgtcttagtagttttgaaggac

SEQ ID NO: 2196379 - DNA, 25 bp, Homo sapien
tttgaaggactttgtgaatgccgga

SEQ ID NO: 2196380 - DNA, 25 bp, Homo sapien
gactttgtgaatgccggacatcatc

SEQ ID NO: 2196381 - DNA, 25 bp, Homo sapien
ggacagatttttaccactgaaccag

SEQ ID NO: 2196382 - DNA, 25 bp, Homo sapien
ggacagactgcttttaaacctcaaa

SEQ ID NO: 2196383 - DNA, 25 bp, Homo sapien
aggtgttcaccttgggacagatttt

SEQ ID NO: 2196384 - DNA, 25 bp, Homo sapien
atactattttgacaggttctgaaca

SEQ ID NO: 2196385 - DNA, 25 bp, Homo sapien
gaggtcacaacttggccccttgaga

SEQ ID NO: 2196386 - DNA, 25 bp, Homo sapien
ttagcctgcagttatggcttggccc

SEQ ID NO: 2196387 - DNA, 25 bp, Homo sapien
ttacaactaagataaatccagggcc

SEQ ID NO: 2196388 - DNA, 25 bp, Homo sapien
ccccttgagagccaaatttagcctg

SEQ ID NO: 2196389 - DNA, 25 bp, Homo sapien
taatactagttgaccaaatgttccc

SEQ ID NO: 2196390 - DNA, 25 bp, Homo sapien
agtgggcagaaaatctcggaattca

SEQ ID NO: 2196391 - DNA, 25 bp, Homo sapien
tctaatcctgttgccacttgggtct

SEQ ID NO: 2196392 - DNA, 25 bp, Homo sapien
tgggtagaggtctatgacaataact

SEQ ID NO: 2196393 - DNA, 25 bp, Homo sapien
tgtcaaactgaagcaccgatacggg

SEQ ID NO: 2196394 - DNA, 25 bp, Homo sapien
agagagacctgggacagatccttcc

SEQ ID NO: 2196395 - DNA, 25 bp, Homo sapien
gaactgcgaggcaacacatatctgc

SEQ ID NO: 2196396 - DNA, 25 bp, Homo sapien
caagccatggaatgcctgagactac

SEQ ID NO: 2196397 - DNA, 25 bp, Homo sapien
ctgttacagtgtcgtaagattgcaa

SEQ ID NO: 2196398 - DNA, 25 bp, Homo sapien
aaaaactgttacagtgtcgtaagat

SEQ ID NO: 2196399 - DNA, 25 bp, Homo sapien
tacagtgtcgtaagattgcaaatat

SEQ ID NO: 2196400 - DNA, 25 bp, Homo sapien
tgtcgtaagattgcaaatattgcct

SEQ ID NO: 2196401 - DNA, 25 bp, Homo sapien
taaagactactatcagaaactttac

SEQ ID NO: 2196402 - DNA, 25 bp, Homo sapien
taaggccacaacactttagggagaa

SEQ ID NO: 2196403 - DNA, 25 bp, Homo sapien
atatcaaaactggtcacacttatag

SEQ ID NO: 2196404 - DNA, 25 bp, Homo sapien
tattgcaatactgaacagttaaggc

SEQ ID NO: 2196405 - DNA, 25 bp, Homo sapien
taaaatgatctggtctcctatggat

SEQ ID NO: 2196406 - DNA, 25 bp, Homo sapien
catgtggttctggtcggcatcttta

SEQ ID NO: 2196407 - DNA, 25 bp, Homo sapien
gagcggctcattgttattcttgaca

SEQ ID NO: 2196408 - DNA, 25 bp, Homo sapien
tgaggggactcttttgaacagaaaa

SEQ ID NO: 2196409 - DNA, 25 bp, Homo sapien
tgagaaatgaacttaaagtggtcct

SEQ ID NO: 2196410 - DNA, 25 bp, Homo sapien
tagatagacttactctaacagaggc

SEQ ID NO: 2196411 - DNA, 25 bp, Homo sapien
ctccagagctaataaaggctaatgc

SEQ ID NO: 2196412 - DNA, 25 bp, Homo sapien
taatgcaaactctctatagatagac

SEQ ID NO: 2196413 - DNA, 25 bp, Homo sapien
catgtctttgcttggtgttgtttca

SEQ ID NO: 2196414 - DNA, 25 bp, Homo sapien
ttctaggatttctaatgaactgcta

SEQ ID NO: 2196415 - DNA, 25 bp, Homo sapien
tgcttggtgttgtttcactgttttc

SEQ ID NO: 2196416 - DNA, 25 bp, Homo sapien
gaactgctatctgcatcatcaagca

SEQ ID NO: 2196417 - DNA, 25 bp, Homo sapien
aaagacaagacctgatgctctcagt

SEQ ID NO: 2196418 - DNA, 25 bp, Homo sapien
tgaaactctatgaaccctgagttgt

SEQ ID NO: 2196419 - DNA, 25 bp, Homo sapien
gacctgatgctctcagtgaaactct

SEQ ID NO: 2196420 - DNA, 25 bp, Homo sapien
gatgctctcagtgaaactctatgaa

SEQ ID NO: 2196421 - DNA, 25 bp, Homo sapien
aatggcccgttcctctaggttggct

SEQ ID NO: 2196422 - DNA, 25 bp, Homo sapien
cacaaatggcccgttcctctaggtt

SEQ ID NO: 2196423 - DNA, 25 bp, Homo sapien
tgtactcacaaatggcccgttcctc

SEQ ID NO: 2196424 - DNA, 25 bp, Homo sapien
ttttcattgtactcacaaatggccc

SEQ ID NO: 2196425 - DNA, 25 bp, Homo sapien
atagtttcagctgagctatcatcat

SEQ ID NO: 2196426 - DNA, 25 bp, Homo sapien
taattcaaatattgaagccgaagaa

SEQ ID NO: 2196427 - DNA, 25 bp, Homo sapien
tatcaagttactgtattaacaagga

SEQ ID NO: 2196428 - DNA, 25 bp, Homo sapien
actgtacagtccatgctgaatatca

SEQ ID NO: 2196429 - DNA, 25 bp, Homo sapien
ttaacaaggattttacgcatgccac

SEQ ID NO: 2196430 - DNA, 25 bp, Homo sapien
tagctgtctggctaaggataaagcc

SEQ ID NO: 2196431 - DNA, 25 bp, Homo sapien
taaagcctgactgatactcaacaga

SEQ ID NO: 2196432 - DNA, 25 bp, Homo sapien
cactgtaattagcttttgatggtca

SEQ ID NO: 2196433 - DNA, 25 bp, Homo sapien
gaagcagttatcagtgccatttact

SEQ ID NO: 2196434 - DNA, 25 bp, Homo sapien
aaaatataaaatgcgagagtccagg

SEQ ID NO: 2196435 - DNA, 25 bp, Homo sapien
tcctcaggccaattgcaaaggcgtg

SEQ ID NO: 2196436 - DNA, 25 bp, Homo sapien
tagtaaacattagtgtcatcctcag

SEQ ID NO: 2196437 - DNA, 25 bp, Homo sapien
tatacagtacaccttaatagtaaac

SEQ ID NO: 2196438 - DNA, 25 bp, Homo sapien
caaaggcgtggcctaatagcattcc

SEQ ID NO: 2196439 - DNA, 25 bp, Homo sapien
ctaagtaaataaagctttgagattt

SEQ ID NO: 2196440 - DNA, 25 bp, Homo sapien
ttaaaaagagtttcagaagctactc

SEQ ID NO: 2196441 - DNA, 25 bp, Homo sapien
aaaagagtttcagaagctactcagg

SEQ ID NO: 2196442 - DNA, 25 bp, Homo sapien
tgagattttaaaaagagtttcagaa

SEQ ID NO: 2196443 - DNA, 25 bp, Homo sapien
taaactgaaacaatttgggagtgac

SEQ ID NO: 2196444 - DNA, 25 bp, Homo sapien
acaatttgggagtgactggcagaat

SEQ ID NO: 2196445 - DNA, 25 bp, Homo sapien
aactgaaacaatttgggagtgactg

SEQ ID NO: 2196446 - DNA, 25 bp, Homo sapien
gaaacaatttgggagtgactggcag

SEQ ID NO: 2196447 - DNA, 25 bp, Homo sapien
gataggcacttttgtccgtgggtat

SEQ ID NO: 2196448 - DNA, 25 bp, Homo sapien
tgtttcccagataggttaatatagc

SEQ ID NO: 2196449 - DNA, 25 bp, Homo sapien
gggacacatgtatgagataggcact

SEQ ID NO: 2196450 - DNA, 25 bp, Homo sapien
tcaatgtcatgtagggtagaaaatg

SEQ ID NO: 2196451 - DNA, 25 bp, Homo sapien
atacattccagtttgataggcaggc

SEQ ID NO: 2196452 - DNA, 25 bp, Homo sapien
ctgaatacattccagtttgataggc

SEQ ID NO: 2196453 - DNA, 25 bp, Homo sapien
gaatacattccagtttgataggcag

SEQ ID NO: 2196454 - DNA, 25 bp, Homo sapien
cactgaatacattccagtttgatag

SEQ ID NO: 2196455 - DNA, 25 bp, Homo sapien
ttctcatcaaaatcctccttaataa

SEQ ID NO: 2196456 - DNA, 25 bp, Homo sapien
tacattgagggcatataacacatac

SEQ ID NO: 2196457 - DNA, 25 bp, Homo sapien
ctgacaaggaacagacaaactgaaa

SEQ ID NO: 2196458 - DNA, 25 bp, Homo sapien
aactgaaattacagaacagtcagtg

SEQ ID NO: 2196459 - DNA, 25 bp, Homo sapien
gtgaatacattgagggcatataaca

SEQ ID NO: 2196460 - DNA, 25 bp, Homo sapien
aggctctgataaagtacagttaaag

SEQ ID NO: 2196461 - DNA, 25 bp, Homo sapien
gagttagaagggactgcagttatca

SEQ ID NO: 2196462 - DNA, 25 bp, Homo sapien
cacgtttttgggatctaagctctga

SEQ ID NO: 2196463 - DNA, 25 bp, Homo sapien
tacagaagacaagagacgttaaagc

SEQ ID NO: 2196464 - DNA, 25 bp, Homo sapien
ggcccaatgagtacctttgcctgga

SEQ ID NO: 2196465 - DNA, 25 bp, Homo sapien
gtgttctgctcctgaactaccttcc

SEQ ID NO: 2196466 - DNA, 25 bp, Homo sapien
agtgttctgctcctgaactaccttc

SEQ ID NO: 2196467 - DNA, 25 bp, Homo sapien
ccttctgatggccctgctccctctc

SEQ ID NO: 2196468 - DNA, 25 bp, Homo sapien
cagtgttctgctcctgaactacctt

SEQ ID NO: 2196469 - DNA, 25 bp, Homo sapien
tgctttgtctgtaaggtcatctgat

SEQ ID NO: 2196470 - DNA, 25 bp, Homo sapien
ctgctttgtctgtaaggtcatctga

SEQ ID NO: 2196471 - DNA, 25 bp, Homo sapien
tcctccatgcaccttcacattttcc

SEQ ID NO: 2196472 - DNA, 25 bp, Homo sapien
ctgacaagcgatcacatttaaaatc

SEQ ID NO: 2196473 - DNA, 25 bp, Homo sapien
tggatattatgggtttagtctcttt

SEQ ID NO: 2196474 - DNA, 25 bp, Homo sapien
attatgggtttagtctctttttcat

SEQ ID NO: 2196475 - DNA, 25 bp, Homo sapien
tcatttccttgttcaatcaatttcc

SEQ ID NO: 2196476 - DNA, 25 bp, Homo sapien
tattatgggtttagtctctttttca

SEQ ID NO: 2196477 - DNA, 25 bp, Homo sapien
ttggtcagtttccacttcatcatcc

SEQ ID NO: 2196478 - DNA, 25 bp, Homo sapien
ttttggtcagtttccacttcatcat

SEQ ID NO: 2196479 - DNA, 25 bp, Homo sapien
tttggtcagtttccacttcatcatc

SEQ ID NO: 2196480 - DNA, 25 bp, Homo sapien
gttttggtcagtttccacttcatca

SEQ ID NO: 2196481 - DNA, 25 bp, Homo sapien
gctggaatccatcagctataccctg

SEQ ID NO: 2196482 - DNA, 25 bp, Homo sapien
ggctgctggaatccatcagctatac

SEQ ID NO: 2196483 - DNA, 25 bp, Homo sapien
atcagctataccctgttgactctca

SEQ ID NO: 2196484 - DNA, 25 bp, Homo sapien
gaatccatcagctataccctgttga

SEQ ID NO: 2196485 - DNA, 25 bp, Homo sapien
tcactgtcaaagatcacatcttgct

SEQ ID NO: 2196486 - DNA, 25 bp, Homo sapien
ttgcaccttccatgtaactgtctgg

SEQ ID NO: 2196487 - DNA, 25 bp, Homo sapien
cttccatgtaactgtctggcttttc

SEQ ID NO: 2196488 - DNA, 25 bp, Homo sapien
catcttgcttgcaactttccctttt

SEQ ID NO: 2196489 - DNA, 25 bp, Homo sapien
gaaaggactcatcttttttgtactc

SEQ ID NO: 2196490 - DNA, 25 bp, Homo sapien
taagttgccaaagaaaggactcatc

SEQ ID NO: 2196491 - DNA, 25 bp, Homo sapien
ctggtaagttgccaaagaaaggact

SEQ ID NO: 2196492 - DNA, 25 bp, Homo sapien
tccctttctcttaaatccttcatac

SEQ ID NO: 2196493 - DNA, 25 bp, Homo sapien
ttttgtaaaccctctccatcagtgt

SEQ ID NO: 2196494 - DNA, 25 bp, Homo sapien
ccttagcatcaagttgatcaacacc

SEQ ID NO: 2196495 - DNA, 25 bp, Homo sapien
gcatcaagttgatcaacaccattat

SEQ ID NO: 2196496 - DNA, 25 bp, Homo sapien
tttcatgtctatatacctctttttg

SEQ ID NO: 2196497 - DNA, 25 bp, Homo sapien
tcgatagtcgtagctggctgcgtca

SEQ ID NO: 2196498 - DNA, 25 bp, Homo sapien
gcgtcagttccccaattgtttgttg

SEQ ID NO: 2196499 - DNA, 25 bp, Homo sapien
ggctgcgtcatgaaaatcccttgtg

SEQ ID NO: 2196500 - DNA, 25 bp, Homo sapien
taagagctgtatcctgcgtcagttc

SEQ ID NO: 2196501 - DNA, 25 bp, Homo sapien
tgtaaattttttgaagtaattatca

SEQ ID NO: 2196502 - DNA, 25 bp, Homo sapien
actactattagttgacaaggacaac

SEQ ID NO: 2196503 - DNA, 25 bp, Homo sapien
gtcatactactattagttgacaagg

SEQ ID NO: 2196504 - DNA, 25 bp, Homo sapien
gacaaggacaacttatctactttaa

SEQ ID NO: 2196505 - DNA, 25 bp, Homo sapien
aacttatctactttaaatactgcca

SEQ ID NO: 2196506 - DNA, 25 bp, Homo sapien
cttttaagagccctaagagaggaag

SEQ ID NO: 2196507 - DNA, 25 bp, Homo sapien
taaattgtgatgagttaggcctagg

SEQ ID NO: 2196508 - DNA, 25 bp, Homo sapien
tccctagcacaataaagcagcccag

SEQ ID NO: 2196509 - DNA, 25 bp, Homo sapien
gaagaggttcctattgtgccaaaga

SEQ ID NO: 2196510 - DNA, 25 bp, Homo sapien
tgcttggaagtatggtcagtcaaaa

SEQ ID NO: 2196511 - DNA, 25 bp, Homo sapien
gcttggaagtatggtcagtcaaaaa

SEQ ID NO: 2196512 - DNA, 25 bp, Homo sapien
tctgcttggaagtatggtcagtcaa

SEQ ID NO: 2196513 - DNA, 25 bp, Homo sapien
tggaagtatggtcagtcaaaaatca

SEQ ID NO: 2196514 - DNA, 25 bp, Homo sapien
tgtttctgaactggtgataatttta

SEQ ID NO: 2196515 - DNA, 25 bp, Homo sapien
ttgtttctgaactggtgataatttt

SEQ ID NO: 2196516 - DNA, 25 bp, Homo sapien
ttctgaactggtgataattttaatg

SEQ ID NO: 2196517 - DNA, 25 bp, Homo sapien
cttttgtttctgaactggtgataat

SEQ ID NO: 2196518 - DNA, 25 bp, Homo sapien
ttggaattcaggctcatgatgtgtg

SEQ ID NO: 2196519 - DNA, 25 bp, Homo sapien
tggaattcaggctcatgatgtgtgt

SEQ ID NO: 2196520 - DNA, 25 bp, Homo sapien
tcattggaattcaggctcatgatgt

SEQ ID NO: 2196521 - DNA, 25 bp, Homo sapien
cattggaattcaggctcatgatgtg

SEQ ID NO: 2196522 - DNA, 25 bp, Homo sapien
gtttaagatatcagtagtttctcca

SEQ ID NO: 2196523 - DNA, 25 bp, Homo sapien
catgtttaagatatcagtagtttct

SEQ ID NO: 2196524 - DNA, 25 bp, Homo sapien
ctacagttgaagaattatctatctc

SEQ ID NO: 2196525 - DNA, 25 bp, Homo sapien
tttctacagttgaagaattatctat

SEQ ID NO: 2196526 - DNA, 25 bp, Homo sapien
aatccagatttcaacagaaaagtga

SEQ ID NO: 2196527 - DNA, 25 bp, Homo sapien
gaaaaaggaaatccagatttcaaca

SEQ ID NO: 2196528 - DNA, 25 bp, Homo sapien
ctgaatgattaaatgggaaaaagga

SEQ ID NO: 2196529 - DNA, 25 bp, Homo sapien
ccagatttcaacagaaaagtgaaag

SEQ ID NO: 2196530 - DNA, 25 bp, Homo sapien
ctgatggtgctttctacttgtaagg

SEQ ID NO: 2196531 - DNA, 25 bp, Homo sapien
ttacatggcagtcttaggagcactg

SEQ ID NO: 2196532 - DNA, 25 bp, Homo sapien
ttctacttgtaaggatattcccgga

SEQ ID NO: 2196533 - DNA, 25 bp, Homo sapien
cccggatttgagttcaaatgagtga

SEQ ID NO: 2196534 - DNA, 25 bp, Homo sapien
atgaggtcctgttcagataagacac

SEQ ID NO: 2196535 - DNA, 25 bp, Homo sapien
tgaggtcctgttcagataagacact

SEQ ID NO: 2196536 - DNA, 25 bp, Homo sapien
tttctctcagaacatcgtggaaaga

SEQ ID NO: 2196537 - DNA, 25 bp, Homo sapien
cagataagacactctcttggaggtt

SEQ ID NO: 2196538 - DNA, 25 bp, Homo sapien
gtagtgttctcctcattgaaaaaga

SEQ ID NO: 2196539 - DNA, 25 bp, Homo sapien
gtcccttctattggaggtagtgttc

SEQ ID NO: 2196540 - DNA, 25 bp, Homo sapien
ttctattggaggtagtgttctcctc

SEQ ID NO: 2196541 - DNA, 25 bp, Homo sapien
ccaagagtcccttctattggaggta

SEQ ID NO: 2196542 - DNA, 25 bp, Homo sapien
tctaattgaagtccttattcctttg

SEQ ID NO: 2196543 - DNA, 25 bp, Homo sapien
tatagtatataagctcccactgctc

SEQ ID NO: 2196544 - DNA, 25 bp, Homo sapien
ctaattgaagtccttattcctttgt

SEQ ID NO: 2196545 - DNA, 25 bp, Homo sapien
ctctctaattgaagtccttattcct

SEQ ID NO: 2196546 - DNA, 25 bp, Homo sapien
gagtcctctgcagtacatttcctga

SEQ ID NO: 2196547 - DNA, 25 bp, Homo sapien
tcttttgccacaccacgatgaggag

SEQ ID NO: 2196548 - DNA, 25 bp, Homo sapien
cctgaggttaaactgctatacggca

SEQ ID NO: 2196549 - DNA, 25 bp, Homo sapien
taccatgtgacatccaccacaagca

SEQ ID NO: 2196550 - DNA, 25 bp, Homo sapien
ccacagaaaaactcatcaacattgg

SEQ ID NO: 2196551 - DNA, 25 bp, Homo sapien
aaatccacagaaaaactcatcaaca

SEQ ID NO: 2196552 - DNA, 25 bp, Homo sapien
ctgcagcataaatccacagaaaaac

SEQ ID NO: 2196553 - DNA, 25 bp, Homo sapien
gcataaatccacagaaaaactcatc

SEQ ID NO: 2196554 - DNA, 25 bp, Homo sapien
acacaaatgagtttttaacagttat

SEQ ID NO: 2196555 - DNA, 25 bp, Homo sapien
caaacacaaatgagtttttaacagt

SEQ ID NO: 2196556 - DNA, 25 bp, Homo sapien
caaatgagtttttaacagttatcag

SEQ ID NO: 2196557 - DNA, 25 bp, Homo sapien
tcaaacacaaatgagtttttaacag

SEQ ID NO: 2196558 - DNA, 25 bp, Homo sapien
tttccgtggcgaccatctccaaaag

SEQ ID NO: 2196559 - DNA, 25 bp, Homo sapien
cagtccaagtcctaattttccgtgg

SEQ ID NO: 2196560 - DNA, 25 bp, Homo sapien
tccaaaagtatacataaggccgata

SEQ ID NO: 2196561 - DNA, 25 bp, Homo sapien
gattggtaaaattctccagtccaag

SEQ ID NO: 2196562 - DNA, 25 bp, Homo sapien
cactcctttcttcaagccgctccat

SEQ ID NO: 2196563 - DNA, 25 bp, Homo sapien
acactcctttcttcaagccgctcca

SEQ ID NO: 2196564 - DNA, 25 bp, Homo sapien
gataaagtgacattaggaccctata

SEQ ID NO: 2196565 - DNA, 25 bp, Homo sapien
ccctccagggacgattgatgaacaa

SEQ ID NO: 2196566 - DNA, 25 bp, Homo sapien
tgcatttgctgattcctagtttccc

SEQ ID NO: 2196567 - DNA, 25 bp, Homo sapien
gcaagagcttgcagataacccacta

SEQ ID NO: 2196568 - DNA, 25 bp, Homo sapien
cagcccaaaggtatacacagcattc

SEQ ID NO: 2196569 - DNA, 25 bp, Homo sapien
caatgactttgggttctgaagtttc

SEQ ID NO: 2196570 - DNA, 25 bp, Homo sapien
gaaatataacttattgtttgatccc

SEQ ID NO: 2196571 - DNA, 25 bp, Homo sapien
gccaagacccagctgaccaaattgt

SEQ ID NO: 2196572 - DNA, 25 bp, Homo sapien
tctgtagtagaaatcttagtggcaa

SEQ ID NO: 2196573 - DNA, 25 bp, Homo sapien
gcaaaaaataactgttccaggtctg

SEQ ID NO: 2196574 - DNA, 25 bp, Homo sapien
tgttggctgccacaatcagaaagga

SEQ ID NO: 2196575 - DNA, 25 bp, Homo sapien
cagaaaggaaatgcaaggacacttc

SEQ ID NO: 2196576 - DNA, 25 bp, Homo sapien
ccacgactggggctagaacaggaag

SEQ ID NO: 2196577 - DNA, 25 bp, Homo sapien
accacgactggggctagaacaggaa

SEQ ID NO: 2196578 - DNA, 25 bp, Homo sapien
ttaataaccacgactggggctagaa

SEQ ID NO: 2196579 - DNA, 25 bp, Homo sapien
ataaccacgactggggctagaacag

SEQ ID NO: 2196580 - DNA, 25 bp, Homo sapien
cgtgagaaccacagtatgctctcca

SEQ ID NO: 2196581 - DNA, 25 bp, Homo sapien
cattctcaggttctccaaacacata

SEQ ID NO: 2196582 - DNA, 25 bp, Homo sapien
caggagctgattgggaagacctaac

SEQ ID NO: 2196583 - DNA, 25 bp, Homo sapien
ggctacttggatcaccttctccgga

SEQ ID NO: 2196584 - DNA, 25 bp, Homo sapien
ccagttgctagcaggaggtgcctac

SEQ ID NO: 2196585 - DNA, 25 bp, Homo sapien
cttgcccaacccctgagaaggtggc

SEQ ID NO: 2196586 - DNA, 25 bp, Homo sapien
tatgccagattaggtttgtcagggc

SEQ ID NO: 2196587 - DNA, 25 bp, Homo sapien
cattgatgatgtgcacctggcttca

SEQ ID NO: 2196588 - DNA, 25 bp, Homo sapien
taacaacatagaagtgggagataac

SEQ ID NO: 2196589 - DNA, 25 bp, Homo sapien
gtgggagataacatgatgacttcaa

SEQ ID NO: 2196590 - DNA, 25 bp, Homo sapien
aataacaacatagaagtgggagata

SEQ ID NO: 2196591 - DNA, 25 bp, Homo sapien
acaacatagaagtgggagataacat

SEQ ID NO: 2196592 - DNA, 25 bp, Homo sapien
agacaggtttcccaatggtcacttg

SEQ ID NO: 2196593 - DNA, 25 bp, Homo sapien
tggtcacttgctgagggacacagac

SEQ ID NO: 2196594 - DNA, 25 bp, Homo sapien
gtaatatccacaagagatccaggag

SEQ ID NO: 2196595 - DNA, 25 bp, Homo sapien
ttcggaattgtcaccccacataaaa

SEQ ID NO: 2196596 - DNA, 25 bp, Homo sapien
tgaagtattagatccagcagacagc

SEQ ID NO: 2196597 - DNA, 25 bp, Homo sapien
tgtttctttcttcggtgtcaccaag

SEQ ID NO: 2196598 - DNA, 25 bp, Homo sapien
gacagctgcttaatcttatgctcgg

SEQ ID NO: 2196599 - DNA, 25 bp, Homo sapien
cattatttccaccagttgcatatac

SEQ ID NO: 2196600 - DNA, 25 bp, Homo sapien
tggaaaatacaaggtcacatgcaat

SEQ ID NO: 2196601 - DNA, 25 bp, Homo sapien
ttaacacttaatgggatctcaagaa

SEQ ID NO: 2196602 - DNA, 25 bp, Homo sapien
gcaattggagtgcacaatttcacac

SEQ ID NO: 2196603 - DNA, 25 bp, Homo sapien
aacaagactagctttcaaatggaaa

SEQ ID NO: 2196604 - DNA, 25 bp, Homo sapien
ccttccacaggcagctaatttcact

SEQ ID NO: 2196605 - DNA, 25 bp, Homo sapien
tgttgacaccagggtgtggttcctt

SEQ ID NO: 2196606 - DNA, 25 bp, Homo sapien
ccacaggcagctaatttcacttttt

SEQ ID NO: 2196607 - DNA, 25 bp, Homo sapien
tggttccttccacaggcagctaatt

SEQ ID NO: 2196608 - DNA, 25 bp, Homo sapien
actgaccccagttgttactgccaaa

SEQ ID NO: 2196609 - DNA, 25 bp, Homo sapien
taatcctaactgaccccagttgtta

SEQ ID NO: 2196610 - DNA, 25 bp, Homo sapien
tggctgactttgatcctaatcctaa

SEQ ID NO: 2196611 - DNA, 25 bp, Homo sapien
gttgttactgccaaacatgtaaagt

SEQ ID NO: 2196612 - DNA, 25 bp, Homo sapien
tgaaagatgtacagggacatcattt

SEQ ID NO: 2196613 - DNA, 25 bp, Homo sapien
cagaatttaccgggattattttcag

SEQ ID NO: 2196614 - DNA, 25 bp, Homo sapien
atgtacagggacatcatttttaaac

SEQ ID NO: 2196615 - DNA, 25 bp, Homo sapien
gaatttaccgggattattttcagca

SEQ ID NO: 2196616 - DNA, 25 bp, Homo sapien
gggcatcagctcttccggctccctc

SEQ ID NO: 2196617 - DNA, 25 bp, Homo sapien
ggcagcctgcgccggggccaggagg

SEQ ID NO: 2196618 - DNA, 25 bp, Homo sapien
cacgggcagtacgggcagcctgcgc

SEQ ID NO: 2196619 - DNA, 25 bp, Homo sapien
ccacgggcagtacgggcagcctgcg

SEQ ID NO: 2196620 - DNA, 25 bp, Homo sapien
acgggcagtacgggcagcctgcgcc

SEQ ID NO: 2196621 - DNA, 25 bp, Homo sapien
gcgaaagcccccaagttccgcatgg

SEQ ID NO: 2196622 - DNA, 25 bp, Homo sapien
aaagcccccaagttccgcatggcga

SEQ ID NO: 2196623 - DNA, 25 bp, Homo sapien
caagttccgcatggcgaaactccgg

SEQ ID NO: 2196624 - DNA, 25 bp, Homo sapien
ccccaagttccgcatggcgaaactc

SEQ ID NO: 2196625 - DNA, 25 bp, Homo sapien
aatgcaaggcgggacaggcgccgtt

SEQ ID NO: 2196626 - DNA, 25 bp, Homo sapien
gccacgccgcgcagtgatgctgtgg

SEQ ID NO: 2196627 - DNA, 25 bp, Homo sapien
gggcagtagagaccacgcgccctct

SEQ ID NO: 2196628 - DNA, 25 bp, Homo sapien
agtcaacaaacagccgctacgggca

SEQ ID NO: 2196629 - DNA, 25 bp, Homo sapien
gaacatacacaaaggggtagcccaa

SEQ ID NO: 2196630 - DNA, 25 bp, Homo sapien
acatacacaaaggggtagcccaaca

SEQ ID NO: 2196631 - DNA, 25 bp, Homo sapien
catacacaaaggggtagcccaacat

SEQ ID NO: 2196632 - DNA, 25 bp, Homo sapien
tagacatggtgcatctagatggagc

SEQ ID NO: 2196633 - DNA, 25 bp, Homo sapien
tctagatggagccagattaatagct

SEQ ID NO: 2196634 - DNA, 25 bp, Homo sapien
gcagccctgcagttagacatggtgc

SEQ ID NO: 2196635 - DNA, 25 bp, Homo sapien
cctgcagttagacatggtgcatcta

SEQ ID NO: 2196636 - DNA, 25 bp, Homo sapien
ggagagagttaaactaagatattca

SEQ ID NO: 2196637 - DNA, 25 bp, Homo sapien
gagttaaactaagatattcagggcc

SEQ ID NO: 2196638 - DNA, 25 bp, Homo sapien
tctggaggagagagttaaactaaga

SEQ ID NO: 2196639 - DNA, 25 bp, Homo sapien
gagagttaaactaagatattcaggg

SEQ ID NO: 2196640 - DNA, 25 bp, Homo sapien
atgtacatacggctgactttctttt

SEQ ID NO: 2196641 - DNA, 25 bp, Homo sapien
cacaatgtacatacggctgactttc

SEQ ID NO: 2196642 - DNA, 25 bp, Homo sapien
acttgggcacaatgtacatacggct

SEQ ID NO: 2196643 - DNA, 25 bp, Homo sapien
tgggcacaatgtacatacggctgac

SEQ ID NO: 2196644 - DNA, 25 bp, Homo sapien
tccatccataggaggaagggaagac

SEQ ID NO: 2196645 - DNA, 25 bp, Homo sapien
gaagacacaaaagcaccccagcgtg

SEQ ID NO: 2196646 - DNA, 25 bp, Homo sapien
ttcttgggcagccagatgacatggt

SEQ ID NO: 2196647 - DNA, 25 bp, Homo sapien
gcagccagatgacatggtgcacaga

SEQ ID NO: 2196648 - DNA, 25 bp, Homo sapien
tggcacaaactctgaaataaggatg

SEQ ID NO: 2196649 - DNA, 25 bp, Homo sapien
atggcacaaactctgaaataaggat

SEQ ID NO: 2196650 - DNA, 25 bp, Homo sapien
ctaattctagttcaaatgcttttga

SEQ ID NO: 2196651 - DNA, 25 bp, Homo sapien
gccaactaattctagttcaaatgct

SEQ ID NO: 2196652 - DNA, 25 bp, Homo sapien
ctggccaactaattctagttcaaat

SEQ ID NO: 2196653 - DNA, 25 bp, Homo sapien
actaattctagttcaaatgcttttg

SEQ ID NO: 2196654 - DNA, 25 bp, Homo sapien
tgtgtacaggtcgttgacttctcca

SEQ ID NO: 2196655 - DNA, 25 bp, Homo sapien
cttcttgaaagactcatgtgtacag

SEQ ID NO: 2196656 - DNA, 25 bp, Homo sapien
aggtcgttgacttctccaattgttc

SEQ ID NO: 2196657 - DNA, 25 bp, Homo sapien
gactcatgtgtacaggtcgttgact

SEQ ID NO: 2196658 - DNA, 25 bp, Homo sapien
ggaggacaatcaatattggcagaac

SEQ ID NO: 2196659 - DNA, 25 bp, Homo sapien
aatattggcagaactagctccagga

SEQ ID NO: 2196660 - DNA, 25 bp, Homo sapien
aatcaatattggcagaactagctcc

SEQ ID NO: 2196661 - DNA, 25 bp, Homo sapien
ctgggaggacaatcaatattggcag

SEQ ID NO: 2196662 - DNA, 25 bp, Homo sapien
ttccatgcaactcttgatcacacac

SEQ ID NO: 2196663 - DNA, 25 bp, Homo sapien
ggattccatgcaactcttgatcaca

SEQ ID NO: 2196664 - DNA, 25 bp, Homo sapien
tcaggattccatgcaactcttgatc

SEQ ID NO: 2196665 - DNA, 25 bp, Homo sapien
caggattccatgcaactcttgatca

SEQ ID NO: 2196666 - DNA, 25 bp, Homo sapien
agtctgtcatcagaagtccctcctt

SEQ ID NO: 2196667 - DNA, 25 bp, Homo sapien
cagcatagaagctctcaaacaagtc

SEQ ID NO: 2196668 - DNA, 25 bp, Homo sapien
tcaaacaagtctgtcatcagaagtc

SEQ ID NO: 2196669 - DNA, 25 bp, Homo sapien
ccagcatagaagctctcaaacaagt

SEQ ID NO: 2196670 - DNA, 25 bp, Homo sapien
cagcttgtatctgttgtccatacca

SEQ ID NO: 2196671 - DNA, 25 bp, Homo sapien
tgtatctgttgtccataccagccat

SEQ ID NO: 2196672 - DNA, 25 bp, Homo sapien
gcagccgcagcttgtatctgttgtc

SEQ ID NO: 2196673 - DNA, 25 bp, Homo sapien
ccgcagcttgtatctgttgtccata

SEQ ID NO: 2196674 - DNA, 25 bp, Homo sapien
tctgtaaagtaagccgttgtgaccc

SEQ ID NO: 2196675 - DNA, 25 bp, Homo sapien
ccaagatgggagtttcaagagaatc

SEQ ID NO: 2196676 - DNA, 25 bp, Homo sapien
tctccttaggccagactacttgctg

SEQ ID NO: 2196677 - DNA, 25 bp, Homo sapien
agtccgtgactctatatctgtaaag

SEQ ID NO: 2196678 - DNA, 25 bp, Homo sapien
gcttccctccatactgatgagtgtt

SEQ ID NO: 2196679 - DNA, 25 bp, Homo sapien
tgcaaactttagttcacagaaacct

SEQ ID NO: 2196680 - DNA, 25 bp, Homo sapien
tctcactgctagttaagcatctgct

SEQ ID NO: 2196681 - DNA, 25 bp, Homo sapien
tcaagagtgactgggcacatgaagt

SEQ ID NO: 2196682 - DNA, 25 bp, Homo sapien
gccttctgaagagatactccaccag

SEQ ID NO: 2196683 - DNA, 25 bp, Homo sapien
tggaagctcccagtcgtccttgagc

SEQ ID NO: 2196684 - DNA, 25 bp, Homo sapien
gatgagtttcacctctcggtctagg

SEQ ID NO: 2196685 - DNA, 25 bp, Homo sapien
cagaggttggtcaagtagttgccca

SEQ ID NO: 2196686 - DNA, 25 bp, Homo sapien
ggctggttctgcatcaaaagatgct

SEQ ID NO: 2196687 - DNA, 25 bp, Homo sapien
ggttctgcatcaaaagatgcttggc

SEQ ID NO: 2196688 - DNA, 25 bp, Homo sapien
ctggttctgcatcaaaagatgcttg

SEQ ID NO: 2196689 - DNA, 25 bp, Homo sapien
ttctgcatcaaaagatgcttggcac

SEQ ID NO: 2196690 - DNA, 25 bp, Homo sapien
cgtcgccttcgaaatagctcagaga

SEQ ID NO: 2196691 - DNA, 25 bp, Homo sapien
cagaggtatacttttggcggctccg

SEQ ID NO: 2196692 - DNA, 25 bp, Homo sapien
aaagaagtggcccacgcccttgaga

SEQ ID NO: 2196693 - DNA, 25 bp, Homo sapien
gttgatcaggcggtcaatagcggcc

SEQ ID NO: 2196694 - DNA, 25 bp, Homo sapien
caaatcaggtccaaagctctagcta

SEQ ID NO: 2196695 - DNA, 25 bp, Homo sapien
ccatttacagggaatacagcggttt

SEQ ID NO: 2196696 - DNA, 25 bp, Homo sapien
tgaccctctactccgtttgacagca

SEQ ID NO: 2196697 - DNA, 25 bp, Homo sapien
tgaaactccgtcactctcatcaggg

SEQ ID NO: 2196698 - DNA, 25 bp, Homo sapien
aagagctggcaagtctgtccttggc

SEQ ID NO: 2196699 - DNA, 25 bp, Homo sapien
ccaagaggtgggttggacagataca

SEQ ID NO: 2196700 - DNA, 25 bp, Homo sapien
gacagatacagcttgagctggaaac

SEQ ID NO: 2196701 - DNA, 25 bp, Homo sapien
ccagccttgaaatttgaagtggcaa

SEQ ID NO: 2196702 - DNA, 25 bp, Homo sapien
ttatggtgaccagtccatccatgac

SEQ ID NO: 2196703 - DNA, 25 bp, Homo sapien
tggtgaccagtccatccatgacatc

SEQ ID NO: 2196704 - DNA, 25 bp, Homo sapien
cagttgtaactagcttcaaaggtta

SEQ ID NO: 2196705 - DNA, 25 bp, Homo sapien
gtgactgccagttgtaactagcttc

SEQ ID NO: 2196706 - DNA, 25 bp, Homo sapien
gccggtgactcagagtcaacagagt

SEQ ID NO: 2196707 - DNA, 25 bp, Homo sapien
caggtgccggtgactcagagtcaac

SEQ ID NO: 2196708 - DNA, 25 bp, Homo sapien
ggtgccggtgactcagagtcaacag

SEQ ID NO: 2196709 - DNA, 25 bp, Homo sapien
cagcaggtgccggtgactcagagtc

SEQ ID NO: 2196710 - DNA, 25 bp, Homo sapien
cagatggctgtaccctctcaacctg

SEQ ID NO: 2196711 - DNA, 25 bp, Homo sapien
ctctgctgttccagatggctgtacc

SEQ ID NO: 2196712 - DNA, 25 bp, Homo sapien
ctgtaccctctcaacctggcaggtg

SEQ ID NO: 2196713 - DNA, 25 bp, Homo sapien
tttcctcgccccgttctctgctgtt

SEQ ID NO: 2196714 - DNA, 25 bp, Homo sapien
gttccacattccttcttgaaaaata

SEQ ID NO: 2196715 - DNA, 25 bp, Homo sapien
taggttccacattccttcttgaaaa

SEQ ID NO: 2196716 - DNA, 25 bp, Homo sapien
ttccacattccttcttgaaaaatac

SEQ ID NO: 2196717 - DNA, 25 bp, Homo sapien
ctaggttccacattccttcttgaaa

SEQ ID NO: 2196718 - DNA, 25 bp, Homo sapien
gttatagcatgcagctgggatagag

SEQ ID NO: 2196719 - DNA, 25 bp, Homo sapien
gctcaggcatgggacatccaggtta

SEQ ID NO: 2196720 - DNA, 25 bp, Homo sapien
tgatcagacacacaaaggtctgtgt

SEQ ID NO: 2196721 - DNA, 25 bp, Homo sapien
tagtctctgggaccatatgctgcaa

SEQ ID NO: 2196722 - DNA, 25 bp, Homo sapien
aattttcttgttgcaagtgatcatt

SEQ ID NO: 2196723 - DNA, 25 bp, Homo sapien
ttttcttgttgcaagtgatcattca

SEQ ID NO: 2196724 - DNA, 25 bp, Homo sapien
attttcttgttgcaagtgatcattc

SEQ ID NO: 2196725 - DNA, 25 bp, Homo sapien
ggcacaggcactggactgaagaccc

SEQ ID NO: 2196726 - DNA, 25 bp, Homo sapien
cacaggcactggactgaagacccac

SEQ ID NO: 2196727 - DNA, 25 bp, Homo sapien
atggcacaggcactggactgaagac

SEQ ID NO: 2196728 - DNA, 25 bp, Homo sapien
ctgtatatggcacaggcactggact

SEQ ID NO: 2196729 - DNA, 25 bp, Homo sapien
gggtcaaagagtgttctgtggggtc

SEQ ID NO: 2196730 - DNA, 25 bp, Homo sapien
tgagtatcggggcagggtcctgaag

SEQ ID NO: 2196731 - DNA, 25 bp, Homo sapien
agcccaatgtggtgggcaatagctc

SEQ ID NO: 2196732 - DNA, 25 bp, Homo sapien
gggtcctgaaggcagcccaatgtgg

SEQ ID NO: 2196733 - DNA, 25 bp, Homo sapien
gtccactcccccataagcgggtcca

SEQ ID NO: 2196734 - DNA, 25 bp, Homo sapien
cactcccccataagcgggtccaggc

SEQ ID NO: 2196735 - DNA, 25 bp, Homo sapien
tccactcccccataagcgggtccag

SEQ ID NO: 2196736 - DNA, 25 bp, Homo sapien
tgtccactcccccataagcgggtcc

SEQ ID NO: 2196737 - DNA, 25 bp, Homo sapien
ctcccgaaatgctccatgcctccag

SEQ ID NO: 2196738 - DNA, 25 bp, Homo sapien
tcccctcccgaaatgctccatgcct

SEQ ID NO: 2196739 - DNA, 25 bp, Homo sapien
cctcccctcccgaaatgctccatgc

SEQ ID NO: 2196740 - DNA, 25 bp, Homo sapien
ctccagttccaataccgggggccag

SEQ ID NO: 2196741 - DNA, 25 bp, Homo sapien
tgtggaggaccttgctgaactcttt

SEQ ID NO: 2196742 - DNA, 25 bp, Homo sapien
cagtcaggtggttgctctccctgga

SEQ ID NO: 2196743 - DNA, 25 bp, Homo sapien
aactggtctggtgttggctcagtca

SEQ ID NO: 2196744 - DNA, 25 bp, Homo sapien
ccatattttgtgaggtgagctcctg

SEQ ID NO: 2196745 - DNA, 25 bp, Homo sapien
tcagaatctgaggagtcccttgaag

SEQ ID NO: 2196746 - DNA, 25 bp, Homo sapien
agtcagaatctgaggagtcccttga

SEQ ID NO: 2196747 - DNA, 25 bp, Homo sapien
ggaagagctggtggattcattatct

SEQ ID NO: 2196748 - DNA, 25 bp, Homo sapien
agaatctgaggagtcccttgaagag

SEQ ID NO: 2196749 - DNA, 25 bp, Homo sapien
cagaggagtcactagtctcatcatc

SEQ ID NO: 2196750 - DNA, 25 bp, Homo sapien
tccccaccatcagaggagtcactag

SEQ ID NO: 2196751 - DNA, 25 bp, Homo sapien
catcagaggagtcactagtctcatc

SEQ ID NO: 2196752 - DNA, 25 bp, Homo sapien
ccaccatcagaggagtcactagtct

SEQ ID NO: 2196753 - DNA, 25 bp, Homo sapien
gagacagactcttgatgcagaggcc

SEQ ID NO: 2196754 - DNA, 25 bp, Homo sapien
gacagactcttgatgcagaggccca

SEQ ID NO: 2196755 - DNA, 25 bp, Homo sapien
agacagactcttgatgcagaggccc

SEQ ID NO: 2196756 - DNA, 25 bp, Homo sapien
cttgcacacttctgctgcttcttgg

SEQ ID NO: 2196757 - DNA, 25 bp, Homo sapien
cttcttggccagctttttgtagtgc

SEQ ID NO: 2196758 - DNA, 25 bp, Homo sapien
ccttctggctctgggagatgtgctg

SEQ ID NO: 2196759 - DNA, 25 bp, Homo sapien
ttggccagctttttgtagtgctcct

SEQ ID NO: 2196760 - DNA, 25 bp, Homo sapien
agcggctgccattctccaccatgcg

SEQ ID NO: 2196761 - DNA, 25 bp, Homo sapien
tccttcagtggcaggtggttcagct

SEQ ID NO: 2196762 - DNA, 25 bp, Homo sapien
ttcagctccccattggacagcagct

SEQ ID NO: 2196763 - DNA, 25 bp, Homo sapien
gtggcaggtggttcagctccccatt

SEQ ID NO: 2196764 - DNA, 25 bp, Homo sapien
ggaactgttcatgggaggcttcttg

SEQ ID NO: 2196765 - DNA, 25 bp, Homo sapien
gaggcttcttggtttctcccaggaa

SEQ ID NO: 2196766 - DNA, 25 bp, Homo sapien
ctgggaactgttcatgggaggcttc

SEQ ID NO: 2196767 - DNA, 25 bp, Homo sapien
ggaggcttcttggtttctcccagga

SEQ ID NO: 2196768 - DNA, 25 bp, Homo sapien
gaccccactgatattcggctcaagg

SEQ ID NO: 2196769 - DNA, 25 bp, Homo sapien
tctcagtacggcaagtagctgttgg

SEQ ID NO: 2196770 - DNA, 25 bp, Homo sapien
tggcttggtgggtcatccatcaaac

SEQ ID NO: 2196771 - DNA, 25 bp, Homo sapien
ggtgaacttggtgatgccgacccca

SEQ ID NO: 2196772 - DNA, 25 bp, Homo sapien
ggcatctgggctcactttgaaatac

SEQ ID NO: 2196773 - DNA, 25 bp, Homo sapien
cttcttctcatgagtgtaccacagt

SEQ ID NO: 2196774 - DNA, 25 bp, Homo sapien
tcatgagtgtaccacagttgctggg

SEQ ID NO: 2196775 - DNA, 25 bp, Homo sapien
catctgggctcactttgaaatacac

SEQ ID NO: 2196776 - DNA, 25 bp, Homo sapien
ggtaccagcagtcttggcctttggg

SEQ ID NO: 2196777 - DNA, 25 bp, Homo sapien
aatgctacattttcccactccgtat

SEQ ID NO: 2196778 - DNA, 25 bp, Homo sapien
tggtaccagcagtcttggcctttgg

SEQ ID NO: 2196779 - DNA, 25 bp, Homo sapien
cgtatgtgacttggtagttttgaac

SEQ ID NO: 2196780 - DNA, 25 bp, Homo sapien
tcagaacagttctaatcctctgacg

SEQ ID NO: 2196781 - DNA, 25 bp, Homo sapien
agaacagttctaatcctctgacgct

SEQ ID NO: 2196782 - DNA, 25 bp, Homo sapien
acagttctaatcctctgacgctaac

SEQ ID NO: 2196783 - DNA, 25 bp, Homo sapien
gaacagttctaatcctctgacgcta

SEQ ID NO: 2196784 - DNA, 25 bp, Homo sapien
ccttgacaggtctagtctcagtcct

SEQ ID NO: 2196785 - DNA, 25 bp, Homo sapien
tgcaaacatacccttgacaggtcta

SEQ ID NO: 2196786 - DNA, 25 bp, Homo sapien
gagtgacttgcaaacatacccttga

SEQ ID NO: 2196787 - DNA, 25 bp, Homo sapien
cagtcgagtgacttgcaaacatacc

SEQ ID NO: 2196788 - DNA, 25 bp, Homo sapien
gtccatcggtccgtatgatgatgct

SEQ ID NO: 2196789 - DNA, 25 bp, Homo sapien
ttctgggtaagtgcccacgccgggc

SEQ ID NO: 2196790 - DNA, 25 bp, Homo sapien
atcatctactccttcgtcttctggg

SEQ ID NO: 2196791 - DNA, 25 bp, Homo sapien
gccggtggccgagtcgctgtccatc

SEQ ID NO: 2196792 - DNA, 25 bp, Homo sapien
cagccggttcgcggcgcctcttgga

SEQ ID NO: 2196793 - DNA, 25 bp, Homo sapien
agccggttcgcggcgcctcttggag

SEQ ID NO: 2196794 - DNA, 25 bp, Homo sapien
gccggttcgcggcgcctcttggagc

SEQ ID NO: 2196795 - DNA, 25 bp, Homo sapien
ctgtggcgggctaggagaggacacg

SEQ ID NO: 2196796 - DNA, 25 bp, Homo sapien
tggcgggctaggagaggacacggga

SEQ ID NO: 2196797 - DNA, 25 bp, Homo sapien
cacgggagcgtggggtttaatctca

SEQ ID NO: 2196798 - DNA, 25 bp, Homo sapien
gctaggagaggacacgggagcgtgg

SEQ ID NO: 2196799 - DNA, 25 bp, Homo sapien
caggggaatgaatatcgaccctctt

SEQ ID NO: 2196800 - DNA, 25 bp, Homo sapien
cccgcaggggaatgaatatcgaccc

SEQ ID NO: 2196801 - DNA, 25 bp, Homo sapien
ggggaatgaatatcgaccctcttcc

SEQ ID NO: 2196802 - DNA, 25 bp, Homo sapien
ggaatgaatatcgaccctcttcccc

SEQ ID NO: 2196803 - DNA, 25 bp, Homo sapien
ctcctcattgcaagcagatttttgg

SEQ ID NO: 2196804 - DNA, 25 bp, Homo sapien
attttggctgttattccccttgcca

SEQ ID NO: 2196805 - DNA, 25 bp, Homo sapien
cattgcaagcagatttttggaatgc

SEQ ID NO: 2196806 - DNA, 25 bp, Homo sapien
caagcagatttttggaatgctgctc

SEQ ID NO: 2196807 - DNA, 25 bp, Homo sapien
gaagcatggctatttgagtgagact

SEQ ID NO: 2196808 - DNA, 25 bp, Homo sapien
ctgttgttgattgagaagcatgttc

SEQ ID NO: 2196809 - DNA, 25 bp, Homo sapien
tgaccttgaatcgtgtgaagctcat

SEQ ID NO: 2196810 - DNA, 25 bp, Homo sapien
gtaattggcttccagaagtgtgttc

SEQ ID NO: 2196811 - DNA, 25 bp, Homo sapien
tggctatgtttagtgtctgcagaaa

SEQ ID NO: 2196812 - DNA, 25 bp, Homo sapien
aacatggctatgtttagtgtctgca

SEQ ID NO: 2196813 - DNA, 25 bp, Homo sapien
ggctatgtttagtgtctgcagaaag

SEQ ID NO: 2196814 - DNA, 25 bp, Homo sapien
catggctatgtttagtgtctgcaga

SEQ ID NO: 2196815 - DNA, 25 bp, Homo sapien
cccatcattgttttcaggtttaacg

SEQ ID NO: 2196816 - DNA, 25 bp, Homo sapien
cattgttttcaggtttaacggcagc

SEQ ID NO: 2196817 - DNA, 25 bp, Homo sapien
tgttttcaggtttaacggcagcagg

SEQ ID NO: 2196818 - DNA, 25 bp, Homo sapien
tttcaggtttaacggcagcaggcat

SEQ ID NO: 2196819 - DNA, 25 bp, Homo sapien
tctggatagaacagcagacctggct

SEQ ID NO: 2196820 - DNA, 25 bp, Homo sapien
agccagctgacttcctttttactgg

SEQ ID NO: 2196821 - DNA, 25 bp, Homo sapien
cttgtgcatttccggagaatgggga

SEQ ID NO: 2196822 - DNA, 25 bp, Homo sapien
agaaagcccccagactgtcagccag

SEQ ID NO: 2196823 - DNA, 25 bp, Homo sapien
tttcatactagctaggagagtcttc

SEQ ID NO: 2196824 - DNA, 25 bp, Homo sapien
cacaaatcctggctgtatggggttg

SEQ ID NO: 2196825 - DNA, 25 bp, Homo sapien
tcagtgagttcagcagtttacaggg

SEQ ID NO: 2196826 - DNA, 25 bp, Homo sapien
tcattggacaatgggcacaaatcct

SEQ ID NO: 2196827 - DNA, 25 bp, Homo sapien
tgcgggtggtggtaggtggtaggtg

SEQ ID NO: 2196828 - DNA, 25 bp, Homo sapien
tggtaggtggtaggtggggaggcat

SEQ ID NO: 2196829 - DNA, 25 bp, Homo sapien
taggtggtaggtggggaggcatctg

SEQ ID NO: 2196830 - DNA, 25 bp, Homo sapien
ctgcgggtggtggtaggtggtaggt

SEQ ID NO: 2196831 - DNA, 25 bp, Homo sapien
tcgctctgctttgagtacttggtgc

SEQ ID NO: 2196832 - DNA, 25 bp, Homo sapien
cccattgcattggagtctgccctac

SEQ ID NO: 2196833 - DNA, 25 bp, Homo sapien
gctgcccttgttgcattcgctctgc

SEQ ID NO: 2196834 - DNA, 25 bp, Homo sapien
tgtggaatttgggatgctgcccttg

SEQ ID NO: 2196835 - DNA, 25 bp, Homo sapien
cagagtatagtacccctctgtggag

SEQ ID NO: 2196836 - DNA, 25 bp, Homo sapien
tgcatagtgggcagagtatagtacc

SEQ ID NO: 2196837 - DNA, 25 bp, Homo sapien
tgggcagagtatagtacccctctgt

SEQ ID NO: 2196838 - DNA, 25 bp, Homo sapien
tagtgggcagagtatagtacccctc

SEQ ID NO: 2196839 - DNA, 25 bp, Homo sapien
ggcagaggtggtgtcataaagggat

SEQ ID NO: 2196840 - DNA, 25 bp, Homo sapien
tggtgtcataaagggatcttctata

SEQ ID NO: 2196841 - DNA, 25 bp, Homo sapien
gaggtggtgtcataaagggatcttc

SEQ ID NO: 2196842 - DNA, 25 bp, Homo sapien
ggctttggcaagacttttgggggca

SEQ ID NO: 2196843 - DNA, 25 bp, Homo sapien
tagttattgttgaggctgctgaact

SEQ ID NO: 2196844 - DNA, 25 bp, Homo sapien
ttagttattgttgaggctgctgaac

SEQ ID NO: 2196845 - DNA, 25 bp, Homo sapien
cacacagcagtttgccaacgtggat

SEQ ID NO: 2196846 - DNA, 25 bp, Homo sapien
ccatctttccccacaggagagtaag

SEQ ID NO: 2196847 - DNA, 25 bp, Homo sapien
ggaatcttcccatgtgccacatgca

SEQ ID NO: 2196848 - DNA, 25 bp, Homo sapien
gatggctgccaatggttttctccta

SEQ ID NO: 2196849 - DNA, 25 bp, Homo sapien
ttctttgtggagaagtgcctctggt

SEQ ID NO: 2196850 - DNA, 25 bp, Homo sapien
tggtccgtgacacactaggcttccc

SEQ ID NO: 2196851 - DNA, 25 bp, Homo sapien
ctctggtgtacttggggttcccaca

SEQ ID NO: 2196852 - DNA, 25 bp, Homo sapien
taggcttcccattgatagaagcttc

SEQ ID NO: 2196853 - DNA, 25 bp, Homo sapien
ccgttcttgggttgcggttcttatg

SEQ ID NO: 2196854 - DNA, 25 bp, Homo sapien
ggtgagaatgtatgcactgtcttca

SEQ ID NO: 2196855 - DNA, 25 bp, Homo sapien
gtcttcatcagtggggtctgctttg

SEQ ID NO: 2196856 - DNA, 25 bp, Homo sapien
tatgggatggttctattgcttcttc

SEQ ID NO: 2196857 - DNA, 25 bp, Homo sapien
ttttctcaggccttatgaagccttt

SEQ ID NO: 2196858 - DNA, 25 bp, Homo sapien
tttttctcaggccttatgaagcctt

SEQ ID NO: 2196859 - DNA, 25 bp, Homo sapien
tatgctgtattgtccacactgacac

SEQ ID NO: 2196860 - DNA, 25 bp, Homo sapien
cgtatgctgtattgtccacactgac

SEQ ID NO: 2196861 - DNA, 25 bp, Homo sapien
ttcgtatgctgtattgtccacactg

SEQ ID NO: 2196862 - DNA, 25 bp, Homo sapien
tcttcgtatgctgtattgtccacac

SEQ ID NO: 2196863 - DNA, 25 bp, Homo sapien
tccttgtaggccccctggttagcca

SEQ ID NO: 2196864 - DNA, 25 bp, Homo sapien
taggtctatcaccacagttttctga

SEQ ID NO: 2196865 - DNA, 25 bp, Homo sapien
tccgttcagggcaaagggttgtgct

SEQ ID NO: 2196866 - DNA, 25 bp, Homo sapien
ctgcttgtggctacccgagttgggt

SEQ ID NO: 2196867 - DNA, 25 bp, Homo sapien
gattctgttctctcgctggtacagg

SEQ ID NO: 2196868 - DNA, 25 bp, Homo sapien
agccaagtctcgcagtgacaggcat

SEQ ID NO: 2196869 - DNA, 25 bp, Homo sapien
aggaaagggatagccaagtctcgca

SEQ ID NO: 2196870 - DNA, 25 bp, Homo sapien
tcaggctgaacacataggctgcttc

SEQ ID NO: 2196871 - DNA, 25 bp, Homo sapien
caggatgcagtgtttaaagtcaggc

SEQ ID NO: 2196872 - DNA, 25 bp, Homo sapien
agggcttcagacagcccttggctgt

SEQ ID NO: 2196873 - DNA, 25 bp, Homo sapien
gagtgaagacatgtggtaagagcca

SEQ ID NO: 2196874 - DNA, 25 bp, Homo sapien
cttggccataacttgtgtggagcac

SEQ ID NO: 2196875 - DNA, 25 bp, Homo sapien
tgtggagcacaggtaggactcaacc

SEQ ID NO: 2196876 - DNA, 25 bp, Homo sapien
tggtccaactgcaactcatcatcgg

SEQ ID NO: 2196877 - DNA, 25 bp, Homo sapien
cctgcatgtagtgtgggaggctcct

SEQ ID NO: 2196878 - DNA, 25 bp, Homo sapien
tgactggttatcacaccatcgctgg

SEQ ID NO: 2196879 - DNA, 25 bp, Homo sapien
tcaggctgcctaagacatgtaacga

SEQ ID NO: 2196880 - DNA, 25 bp, Homo sapien
tgcttgagcccgatcacttatatac

SEQ ID NO: 2196881 - DNA, 25 bp, Homo sapien
gcctcgtccttgctgtgatcaatag

SEQ ID NO: 2196882 - DNA, 25 bp, Homo sapien
ccagaaaaatgtgcctcgtccttgc

SEQ ID NO: 2196883 - DNA, 25 bp, Homo sapien
tgatcaatagtcacagtagtcatgg

SEQ ID NO: 2196884 - DNA, 25 bp, Homo sapien
gatgtcttctccaatcacactgaca

SEQ ID NO: 2196885 - DNA, 25 bp, Homo sapien
gatgactgcttaaaatcgtttctgc

SEQ ID NO: 2196886 - DNA, 25 bp, Homo sapien
ttaacagcgctgctagatgactgct

SEQ ID NO: 2196887 - DNA, 25 bp, Homo sapien
ttaaccgttgcttggaattctgtgc

SEQ ID NO: 2196888 - DNA, 25 bp, Homo sapien
taacactaatgggagaacaacccta

SEQ ID NO: 2196889 - DNA, 25 bp, Homo sapien
taaagacggcctcaaattttgacag

SEQ ID NO: 2196890 - DNA, 25 bp, Homo sapien
cctggttgactaaagacggcctcaa

SEQ ID NO: 2196891 - DNA, 25 bp, Homo sapien
tggaccatgtccctggttgactaaa

SEQ ID NO: 2196892 - DNA, 25 bp, Homo sapien
tgtccctggttgactaaagacggcc

SEQ ID NO: 2196893 - DNA, 25 bp, Homo sapien
tgagaagcatccaccagaactgtac

SEQ ID NO: 2196894 - DNA, 25 bp, Homo sapien
tctcttggtgcggaagtttcctgag

SEQ ID NO: 2196895 - DNA, 25 bp, Homo sapien
tgctcctaaggccactaaagctgcc

SEQ ID NO: 2196896 - DNA, 25 bp, Homo sapien
cactgcgtgaccttgctctgatttc

SEQ ID NO: 2196897 - DNA, 25 bp, Homo sapien
agaaaagacaccatggatatgccat

SEQ ID NO: 2196898 - DNA, 25 bp, Homo sapien
ggggaatcaatgttgaagaaaagac

SEQ ID NO: 2196899 - DNA, 25 bp, Homo sapien
agaagtacaggggaatcaatgttga

SEQ ID NO: 2196900 - DNA, 25 bp, Homo sapien
tacaggggaatcaatgttgaagaaa

SEQ ID NO: 2196901 - DNA, 25 bp, Homo sapien
tcatggcgggaatcagagatcctcc

SEQ ID NO: 2196902 - DNA, 25 bp, Homo sapien
tatctatgtagtgactctctccaga

SEQ ID NO: 2196903 - DNA, 25 bp, Homo sapien
gagatcctcctcacattatctatgt

SEQ ID NO: 2196904 - DNA, 25 bp, Homo sapien
catggcttgtatagcgatattagca

SEQ ID NO: 2196905 - DNA, 25 bp, Homo sapien
gtgacttctcagttctttctttcct

SEQ ID NO: 2196906 - DNA, 25 bp, Homo sapien
tgtgacttctcagttctttctttcc

SEQ ID NO: 2196907 - DNA, 25 bp, Homo sapien
tgacttctcagttctttctttcctt

SEQ ID NO: 2196908 - DNA, 25 bp, Homo sapien
ctgtgacttctcagttctttctttc

SEQ ID NO: 2196909 - DNA, 25 bp, Homo sapien
ttttccagacggccacagagaaatt

SEQ ID NO: 2196910 - DNA, 25 bp, Homo sapien
agtttttccagacggccacagagaa

SEQ ID NO: 2196911 - DNA, 25 bp, Homo sapien
taaagtttttccagacggccacaga

SEQ ID NO: 2196912 - DNA, 25 bp, Homo sapien
tttccagacggccacagagaaattt

SEQ ID NO: 2196913 - DNA, 25 bp, Homo sapien
tgcttcatatgatctgcaggaatag

SEQ ID NO: 2196914 - DNA, 25 bp, Homo sapien
aacccaagatctaattactatgtga

SEQ ID NO: 2196915 - DNA, 25 bp, Homo sapien
gaatcacctcagcattcgtatttac

SEQ ID NO: 2196916 - DNA, 25 bp, Homo sapien
taaatcatggttgttctttctaaaa

SEQ ID NO: 2196917 - DNA, 25 bp, Homo sapien
gggttatctcgagactagacggaag

SEQ ID NO: 2196918 - DNA, 25 bp, Homo sapien
aagaacagcggccagagtcaagaaa

SEQ ID NO: 2196919 - DNA, 25 bp, Homo sapien
gaacagcggccagagtcaagaaact

SEQ ID NO: 2196920 - DNA, 25 bp, Homo sapien
gatgaagggttatctcgagactaga

SEQ ID NO: 2196921 - DNA, 25 bp, Homo sapien
tgctagatcccttggatttccgttt

SEQ ID NO: 2196922 - DNA, 25 bp, Homo sapien
tggcgtttttgctgggtggaatcct

SEQ ID NO: 2196923 - DNA, 25 bp, Homo sapien
gtggaatccttttgctagatccctt

SEQ ID NO: 2196924 - DNA, 25 bp, Homo sapien
tcccaagctggcgtttttgctgggt

SEQ ID NO: 2196925 - DNA, 25 bp, Homo sapien
tcaaagttatataatgcttcctgcc

SEQ ID NO: 2196926 - DNA, 25 bp, Homo sapien
atgcttcaaagttatataatgcttc

SEQ ID NO: 2196927 - DNA, 25 bp, Homo sapien
ctgaggctagaaaagtttctatgtg

SEQ ID NO: 2196928 - DNA, 25 bp, Homo sapien
tagaaaagtttctatgtgtgcagag

SEQ ID NO: 2196929 - DNA, 25 bp, Homo sapien
tgatgtagagctaatacgttttggg

SEQ ID NO: 2196930 - DNA, 25 bp, Homo sapien
taagtgtaggtcttaatgtgaaaga

SEQ ID NO: 2196931 - DNA, 25 bp, Homo sapien
tagtgggtcctcagacttaggtctg

SEQ ID NO: 2196932 - DNA, 25 bp, Homo sapien
aacagattagtccttgtggcaccaa

SEQ ID NO: 2196933 - DNA, 25 bp, Homo sapien
taggccctattaaatgacccagtgc

SEQ ID NO: 2196934 - DNA, 25 bp, Homo sapien
gaaattcaaggtgcaaggctcttaa

SEQ ID NO: 2196935 - DNA, 25 bp, Homo sapien
cgattcggtacatagcttaggccct

SEQ ID NO: 2196936 - DNA, 25 bp, Homo sapien
taattgtaggactgccagagaggac

SEQ ID NO: 2196937 - DNA, 25 bp, Homo sapien
tattacgtaagagtcccaggatgga

SEQ ID NO: 2196938 - DNA, 25 bp, Homo sapien
gcagatctgatagtgtgcccctctt

SEQ ID NO: 2196939 - DNA, 25 bp, Homo sapien
gcatgcccggtcaccctttattacg

SEQ ID NO: 2196940 - DNA, 25 bp, Homo sapien
attgggaaagatcccaccccgccag

SEQ ID NO: 2196941 - DNA, 25 bp, Homo sapien
cccggccgcggccactccagattcg

SEQ ID NO: 2196942 - DNA, 25 bp, Homo sapien
cactctgcaaccaaggcacgtgcat

SEQ ID NO: 2196943 - DNA, 25 bp, Homo sapien
gcggccactccagattcggggctga

SEQ ID NO: 2196944 - DNA, 25 bp, Homo sapien
tcactctgcaaccaaggcacgtgca

SEQ ID NO: 2196945 - DNA, 25 bp, Homo sapien
taacagatacaagcaggagatcggc

SEQ ID NO: 2196946 - DNA, 25 bp, Homo sapien
gataagcgcacaaacagcactgtct

SEQ ID NO: 2196947 - DNA, 25 bp, Homo sapien
cgtgtatcaaacaggccagggctcg

SEQ ID NO: 2196948 - DNA, 25 bp, Homo sapien
cattggcgccgtgaacaacatggac

SEQ ID NO: 2196949 - DNA, 25 bp, Homo sapien
acagggtctggttccatgtgaccca

SEQ ID NO: 2196950 - DNA, 25 bp, Homo sapien
cagggtctggttccatgtgacccat

SEQ ID NO: 2196951 - DNA, 25 bp, Homo sapien
cacagggtctggttccatgtgaccc

SEQ ID NO: 2196952 - DNA, 25 bp, Homo sapien
tcccagtcatcttatctcggatgtg

SEQ ID NO: 2196953 - DNA, 25 bp, Homo sapien
tatcatttgcttactgttcccagtc

SEQ ID NO: 2196954 - DNA, 25 bp, Homo sapien
tttgcatttggattgctccaactat

SEQ ID NO: 2196955 - DNA, 25 bp, Homo sapien
cacagaagtcgctgcttgcctttgc

SEQ ID NO: 2196956 - DNA, 25 bp, Homo sapien
cagggacaagcccattggaagtctt

SEQ ID NO: 2196957 - DNA, 25 bp, Homo sapien
ggtgccagtggcaacttagctggca

SEQ ID NO: 2196958 - DNA, 25 bp, Homo sapien
tggcactccaatggccttggagtgt

SEQ ID NO: 2196959 - DNA, 25 bp, Homo sapien
ttcctggtatatgaggagggtgcca

SEQ ID NO: 2196960 - DNA, 25 bp, Homo sapien
ggttcctctcattggcaagatgtct

SEQ ID NO: 2196961 - DNA, 25 bp, Homo sapien
tcctctcattggcaagatgtcttga

SEQ ID NO: 2196962 - DNA, 25 bp, Homo sapien
ttaggttcctctcattggcaagatg

SEQ ID NO: 2196963 - DNA, 25 bp, Homo sapien
ctcattggcaagatgtcttgaagtg

SEQ ID NO: 2196964 - DNA, 25 bp, Homo sapien
gagggaatgtgaactgacttactga

SEQ ID NO: 2196965 - DNA, 25 bp, Homo sapien
aactaaagggtacagagggaatgtg

SEQ ID NO: 2196966 - DNA, 25 bp, Homo sapien
ggtacagagggaatgtgaactgact

SEQ ID NO: 2196967 - DNA, 25 bp, Homo sapien
gaactgacttactgaatcttcagtg

SEQ ID NO: 2196968 - DNA, 25 bp, Homo sapien
tgattgggcactgagtcacactccc

SEQ ID NO: 2196969 - DNA, 25 bp, Homo sapien
gcttccagagaatgagtccagtgac

SEQ ID NO: 2196970 - DNA, 25 bp, Homo sapien
ccaactggcgttcctgcaagctttc

SEQ ID NO: 2196971 - DNA, 25 bp, Homo sapien
tggttgattgttgaagcttccagag

SEQ ID NO: 2196972 - DNA, 25 bp, Homo sapien
tcagagcattgagttttaatggcct

SEQ ID NO: 2196973 - DNA, 25 bp, Homo sapien
tgtccacgagctgtcaggtcgaggc

SEQ ID NO: 2196974 - DNA, 25 bp, Homo sapien
tgttgtacacaacttgtccacgagc

SEQ ID NO: 2196975 - DNA, 25 bp, Homo sapien
tatccctttgtctgtgttttgtact

SEQ ID NO: 2196976 - DNA, 25 bp, Homo sapien
tgaccatccctcatcataactgtga

SEQ ID NO: 2196977 - DNA, 25 bp, Homo sapien
cacaaatgggacactggcctgtagt

SEQ ID NO: 2196978 - DNA, 25 bp, Homo sapien
taactgtgactggtatgcttctagt

SEQ ID NO: 2196979 - DNA, 25 bp, Homo sapien
gacactggatttatgctgtacggca

SEQ ID NO: 2196980 - DNA, 25 bp, Homo sapien
tccgaaagcagtcatgactgcagct

SEQ ID NO: 2196981 - DNA, 25 bp, Homo sapien
cccttacagaggagaccctgggctg

SEQ ID NO: 2196982 - DNA, 25 bp, Homo sapien
tgtctgtccttgtccgaaagcagtc

SEQ ID NO: 2196983 - DNA, 25 bp, Homo sapien
ccttacagaggagaccctgggctgg

SEQ ID NO: 2196984 - DNA, 25 bp, Homo sapien
gaaaatctatttgcagagcccagca

SEQ ID NO: 2196985 - DNA, 25 bp, Homo sapien
ccttcataataaccctggcaggcag

SEQ ID NO: 2196986 - DNA, 25 bp, Homo sapien
gcaagctagacgctcgttctgaaga

SEQ ID NO: 2196987 - DNA, 25 bp, Homo sapien
cagcaagctcttggtaccggatgga

SEQ ID NO: 2196988 - DNA, 25 bp, Homo sapien
tgagcatgaccttaagctgccctca

SEQ ID NO: 2196989 - DNA, 25 bp, Homo sapien
tgttcagctcgtgagcaagatcagg

SEQ ID NO: 2196990 - DNA, 25 bp, Homo sapien
catgaccttaagctgccctcacagt

SEQ ID NO: 2196991 - DNA, 25 bp, Homo sapien
cacagtccgaccctgtcctgttcag

SEQ ID NO: 2196992 - DNA, 25 bp, Homo sapien
tgctggtgatatccacaaatgctga

SEQ ID NO: 2196993 - DNA, 25 bp, Homo sapien
gcctattgaagtgtggccattgctg

SEQ ID NO: 2196994 - DNA, 25 bp, Homo sapien
cagaaccaagggcattgctcaccat

SEQ ID NO: 2196995 - DNA, 25 bp, Homo sapien
gaagtcgtagcccactaagcctatt

SEQ ID NO: 2196996 - DNA, 25 bp, Homo sapien
gctttttctgtagttgaggtggact

SEQ ID NO: 2196997 - DNA, 25 bp, Homo sapien
tgaggtggactcttctggggactgg

SEQ ID NO: 2196998 - DNA, 25 bp, Homo sapien
gaggtggactcttctggggactgga

SEQ ID NO: 2196999 - DNA, 25 bp, Homo sapien
ttttctgtagttgaggtggactctt

SEQ ID NO: 2197000 - DNA, 25 bp, Homo sapien
tcgatggctccctttttcttttgga

SEQ ID NO: 2197001 - DNA, 25 bp, Homo sapien
cttcgatggctccctttttcttttg

SEQ ID NO: 2197002 - DNA, 25 bp, Homo sapien
tttcttttggaattggcatttcttc

SEQ ID NO: 2197003 - DNA, 25 bp, Homo sapien
tcttttggaattggcatttcttcat

SEQ ID NO: 2197004 - DNA, 25 bp, Homo sapien
taagtgttcagcctcgtaatttcta

SEQ ID NO: 2197005 - DNA, 25 bp, Homo sapien
taatttctatttggggccttcatcc

SEQ ID NO: 2197006 - DNA, 25 bp, Homo sapien
ctaagtgttcagcctcgtaatttct

SEQ ID NO: 2197007 - DNA, 25 bp, Homo sapien
tcgtaatttctatttggggccttca

SEQ ID NO: 2197008 - DNA, 25 bp, Homo sapien
tacgcgtagtgtgcaatcctttccc

SEQ ID NO: 2197009 - DNA, 25 bp, Homo sapien
cctcggcatgggaaggtaaactgct

SEQ ID NO: 2197010 - DNA, 25 bp, Homo sapien
gactgctgacagctaagccggctgc

SEQ ID NO: 2197011 - DNA, 25 bp, Homo sapien
gctgtcgtcttaagcagggaggact

SEQ ID NO: 2197012 - DNA, 25 bp, Homo sapien
tattttgtatgagatgacaggaggc

SEQ ID NO: 2197013 - DNA, 25 bp, Homo sapien
tgtagctgtttggaacaggatctat

SEQ ID NO: 2197014 - DNA, 25 bp, Homo sapien
tggaacgagattgagctcttgtctc

SEQ ID NO: 2197015 - DNA, 25 bp, Homo sapien
cgagattgagctcttgtctcagaat

SEQ ID NO: 2197016 - DNA, 25 bp, Homo sapien
gatgtctctgttgaggaatcttcct

SEQ ID NO: 2197017 - DNA, 25 bp, Homo sapien
gctgatattcacgatgatgtctctg

SEQ ID NO: 2197018 - DNA, 25 bp, Homo sapien
tagaaactgtatctgctgttgtcat

SEQ ID NO: 2197019 - DNA, 25 bp, Homo sapien
attttgatattctatggcagccacc

SEQ ID NO: 2197020 - DNA, 25 bp, Homo sapien
gaagcctccttggaagtttgcaagt

SEQ ID NO: 2197021 - DNA, 25 bp, Homo sapien
agtttgcaagtgaactttcttcagg

SEQ ID NO: 2197022 - DNA, 25 bp, Homo sapien
gaggccagaagcctccttggaagtt

SEQ ID NO: 2197023 - DNA, 25 bp, Homo sapien
ccttggaagtttgcaagtgaacttt

SEQ ID NO: 2197024 - DNA, 25 bp, Homo sapien
ctcagacttccatacatgctcctta

SEQ ID NO: 2197025 - DNA, 25 bp, Homo sapien
tctcagacttccatacatgctcctt

SEQ ID NO: 2197026 - DNA, 25 bp, Homo sapien
tcagacttccatacatgctccttac

SEQ ID NO: 2197027 - DNA, 25 bp, Homo sapien
ctctcagacttccatacatgctcct

SEQ ID NO: 2197028 - DNA, 25 bp, Homo sapien
tctgtagctctgccctatgtattca

SEQ ID NO: 2197029 - DNA, 25 bp, Homo sapien
gctctgccctatgtattcatgggtt

SEQ ID NO: 2197030 - DNA, 25 bp, Homo sapien
gccctatgtattcatgggtttgtag

SEQ ID NO: 2197031 - DNA, 25 bp, Homo sapien
tagctctgccctatgtattcatggg

SEQ ID NO: 2197032 - DNA, 25 bp, Homo sapien
tccagagccccagcgggacatgtct

SEQ ID NO: 2197033 - DNA, 25 bp, Homo sapien
tgtgttatctagacagttggaggca

SEQ ID NO: 2197034 - DNA, 25 bp, Homo sapien
acgcccagtccactctccatttgaa

SEQ ID NO: 2197035 - DNA, 25 bp, Homo sapien
ccatggttaaacattgtccagagcc

SEQ ID NO: 2197036 - DNA, 25 bp, Homo sapien
ttagctggctgtggataatcaatcc

SEQ ID NO: 2197037 - DNA, 25 bp, Homo sapien
cttcccctttggtgatgcctgagtg

SEQ ID NO: 2197038 - DNA, 25 bp, Homo sapien
gataatcaatcctgctggttaatga

SEQ ID NO: 2197039 - DNA, 25 bp, Homo sapien
ccacttcagctaggcctgaggaaac

SEQ ID NO: 2197040 - DNA, 25 bp, Homo sapien
ctcgccagtagggtggatgtagcca

SEQ ID NO: 2197041 - DNA, 25 bp, Homo sapien
tagccaatgaaggagccatcacatc

SEQ ID NO: 2197042 - DNA, 25 bp, Homo sapien
tgtagccaatgaaggagccatcaca

SEQ ID NO: 2197043 - DNA, 25 bp, Homo sapien
ccagtagggtggatgtagccaatga

SEQ ID NO: 2197044 - DNA, 25 bp, Homo sapien
cttgaagcatagaaggcggagcagg

SEQ ID NO: 2197045 - DNA, 25 bp, Homo sapien
tcatggagcggtctgaagattttag

SEQ ID NO: 2197046 - DNA, 25 bp, Homo sapien
tgtattttcatggagcggtctgaag

SEQ ID NO: 2197047 - DNA, 25 bp, Homo sapien
tggagcggtctgaagattttagcag

SEQ ID NO: 2197048 - DNA, 25 bp, Homo sapien
gattgagttaaccagaggacatgca

SEQ ID NO: 2197049 - DNA, 25 bp, Homo sapien
gcagattgagttaaccagaggacat

SEQ ID NO: 2197050 - DNA, 25 bp, Homo sapien
tgacagcagattgagttaaccagag

SEQ ID NO: 2197051 - DNA, 25 bp, Homo sapien
cagcagattgagttaaccagaggac

SEQ ID NO: 2197052 - DNA, 25 bp, Homo sapien
ctgagaggggccagggcgagcacag

SEQ ID NO: 2197053 - DNA, 25 bp, Homo sapien
gggccagggcgagcacaggcctggg

SEQ ID NO: 2197054 - DNA, 25 bp, Homo sapien
agaggggccagggcgagcacaggcc

SEQ ID NO: 2197055 - DNA, 25 bp, Homo sapien
aggggccagggcgagcacaggcctg

SEQ ID NO: 2197056 - DNA, 25 bp, Homo sapien
cagttgtgagctgtgggttttatga

SEQ ID NO: 2197057 - DNA, 25 bp, Homo sapien
gttgtgagctgtgggttttatgact

SEQ ID NO: 2197058 - DNA, 25 bp, Homo sapien
gtgagctgtgggttttatgactgca

SEQ ID NO: 2197059 - DNA, 25 bp, Homo sapien
gctggcagttgtgagctgtgggttt

SEQ ID NO: 2197060 - DNA, 25 bp, Homo sapien
ttgcataaatcccagctgctagcca

SEQ ID NO: 2197061 - DNA, 25 bp, Homo sapien
ggactaatttgaagaatactttgca

SEQ ID NO: 2197062 - DNA, 25 bp, Homo sapien
tcccagctgctagccatatgtccaa

SEQ ID NO: 2197063 - DNA, 25 bp, Homo sapien
ttggactaatttgaagaatactttg

SEQ ID NO: 2197064 - DNA, 25 bp, Homo sapien
ctggtgagtaaccatcgcctcactt

SEQ ID NO: 2197065 - DNA, 25 bp, Homo sapien
gctgccatccgggtcctccagactt

SEQ ID NO: 2197066 - DNA, 25 bp, Homo sapien
gtaaccatcgcctcactttgcatct

SEQ ID NO: 2197067 - DNA, 25 bp, Homo sapien
gccatccgggtcctccagactttct

SEQ ID NO: 2197068 - DNA, 25 bp, Homo sapien
caagaacggttccttcgcaccagaa

SEQ ID NO: 2197069 - DNA, 25 bp, Homo sapien
tagtgtgttccacatcgcaaagcca

SEQ ID NO: 2197070 - DNA, 25 bp, Homo sapien
caccagaagatttgatgtatcaggc

SEQ ID NO: 2197071 - DNA, 25 bp, Homo sapien
gctgagggagcatttcaaggtcaca

SEQ ID NO: 2197072 - DNA, 25 bp, Homo sapien
ctgaagttttaactgctatattacc

SEQ ID NO: 2197073 - DNA, 25 bp, Homo sapien
tgcagggcctccagtcagccccatg

SEQ ID NO: 2197074 - DNA, 25 bp, Homo sapien
cagggcctccagtcagccccatgga

SEQ ID NO: 2197075 - DNA, 25 bp, Homo sapien
agggcctccagtcagccccatggag

SEQ ID NO: 2197076 - DNA, 25 bp, Homo sapien
aactgcagggcctccagtcagcccc

SEQ ID NO: 2197077 - DNA, 25 bp, Homo sapien
agggaggaggcggtgtgcaggggcc

SEQ ID NO: 2197078 - DNA, 25 bp, Homo sapien
ggaagagggaggaggcggtgtgcag

SEQ ID NO: 2197079 - DNA, 25 bp, Homo sapien
gaggaggcggtgtgcaggggccagg

SEQ ID NO: 2197080 - DNA, 25 bp, Homo sapien
aagagggaggaggcggtgtgcaggg

SEQ ID NO: 2197081 - DNA, 25 bp, Homo sapien
aaattgcctacactccttcagagac

SEQ ID NO: 2197082 - DNA, 25 bp, Homo sapien
tctagtctatttccctgagactcaa

SEQ ID NO: 2197083 - DNA, 25 bp, Homo sapien
aagtatctggccttcaaattgccta

SEQ ID NO: 2197084 - DNA, 25 bp, Homo sapien
tcctttcttgcactacaaacagtat

SEQ ID NO: 2197085 - DNA, 25 bp, Homo sapien
tgcaggctcataggattccagaatg

SEQ ID NO: 2197086 - DNA, 25 bp, Homo sapien
tttttgaaggagacactataaaagc

SEQ ID NO: 2197087 - DNA, 25 bp, Homo sapien
ctgcaggctcataggattccagaat

SEQ ID NO: 2197088 - DNA, 25 bp, Homo sapien
agaatgccagtgtttttttgaagga

SEQ ID NO: 2197089 - DNA, 25 bp, Homo sapien
tatattgcaaagcaccttgaaggtc

SEQ ID NO: 2197090 - DNA, 25 bp, Homo sapien
tggttactgaccatagcgaatatat

SEQ ID NO: 2197091 - DNA, 25 bp, Homo sapien
catagcgaatatattgcaaagcacc

SEQ ID NO: 2197092 - DNA, 25 bp, Homo sapien
gcttttgtgggtgtacgtgaggtcc

SEQ ID NO: 2197093 - DNA, 25 bp, Homo sapien
tatgtactctggtgtatccaagtgg

SEQ ID NO: 2197094 - DNA, 25 bp, Homo sapien
gggcagagatttgctttatatgtac

SEQ ID NO: 2197095 - DNA, 25 bp, Homo sapien
ggacaccattggcactgcattccct

SEQ ID NO: 2197096 - DNA, 25 bp, Homo sapien
gcacctagcgggcactcattgtggc

SEQ ID NO: 2197097 - DNA, 25 bp, Homo sapien
aggtggttttcagggcgccccacag

SEQ ID NO: 2197098 - DNA, 25 bp, Homo sapien
ctccataaaggtggctgggccagtc

SEQ ID NO: 2197099 - DNA, 25 bp, Homo sapien
agccctatgcaatgtgagctgccca

SEQ ID NO: 2197100 - DNA, 25 bp, Homo sapien
gatgatacagcagtcctcagggctt

SEQ ID NO: 2197101 - DNA, 25 bp, Homo sapien
gagctctaatgctacaaccgttgtg

SEQ ID NO: 2197102 - DNA, 25 bp, Homo sapien
ccgttgtgaatagattggcctgcca

SEQ ID NO: 2197103 - DNA, 25 bp, Homo sapien
tggccccactgatgatactgctggc

SEQ ID NO: 2197104 - DNA, 25 bp, Homo sapien
ggtggattgtccaactcaggaccca

SEQ ID NO: 2197105 - DNA, 25 bp, Homo sapien
agaactatgtctccgactctttgga

SEQ ID NO: 2197106 - DNA, 25 bp, Homo sapien
gagatttgaaaaccgagaactatgt

SEQ ID NO: 2197107 - DNA, 25 bp, Homo sapien
tacaggtaaaaaggctcatgtggtc

SEQ ID NO: 2197108 - DNA, 25 bp, Homo sapien
tgggcaattagggactgagctgaat

SEQ ID NO: 2197109 - DNA, 25 bp, Homo sapien
agagcttggtctcaagcctttgggc

SEQ ID NO: 2197110 - DNA, 25 bp, Homo sapien
tggctggggtgactccagtgccttt

SEQ ID NO: 2197111 - DNA, 25 bp, Homo sapien
ggtgactccagtgcctttggcccca

SEQ ID NO: 2197112 - DNA, 25 bp, Homo sapien
gcttggtctcaagcctttgggcaga

SEQ ID NO: 2197113 - DNA, 25 bp, Homo sapien
tgatctgtccatgactctgataagg

SEQ ID NO: 2197114 - DNA, 25 bp, Homo sapien
gataaggtgtcccttctccagacac

SEQ ID NO: 2197115 - DNA, 25 bp, Homo sapien
tccagacacattatctatatcacct

SEQ ID NO: 2197116 - DNA, 25 bp, Homo sapien
tatctatatcacctttcctcaccaa

SEQ ID NO: 2197117 - DNA, 25 bp, Homo sapien
tgtgtttgaccaactttgagagtgg

SEQ ID NO: 2197118 - DNA, 25 bp, Homo sapien
tgagctcaacatttgtgtttgacca

SEQ ID NO: 2197119 - DNA, 25 bp, Homo sapien
gagagtcattgagctcaacatttgt

SEQ ID NO: 2197120 - DNA, 25 bp, Homo sapien
catttgtgtttgaccaactttgaga

SEQ ID NO: 2197121 - DNA, 25 bp, Homo sapien
cagagctttaagagcttgtgcttca

SEQ ID NO: 2197122 - DNA, 25 bp, Homo sapien
aagtgtgatgcaaggacctccttgc

SEQ ID NO: 2197123 - DNA, 25 bp, Homo sapien
agaacaggattgacgcccctggacc

SEQ ID NO: 2197124 - DNA, 25 bp, Homo sapien
ccctggaccaggtccagagctttaa

SEQ ID NO: 2197125 - DNA, 25 bp, Homo sapien
ttagcagagttctgtcgctgccact

SEQ ID NO: 2197126 - DNA, 25 bp, Homo sapien
tctctgtcggaagctcctgtcctta

SEQ ID NO: 2197127 - DNA, 25 bp, Homo sapien
cactgctcgccagcgccagtgaaag

SEQ ID NO: 2197128 - DNA, 25 bp, Homo sapien
gatggtcttggactcacagctgaag

SEQ ID NO: 2197129 - DNA, 25 bp, Homo sapien
ctgcagccaggaagtccagagctgc

SEQ ID NO: 2197130 - DNA, 25 bp, Homo sapien
caggaagtccagagctgccctgagc

SEQ ID NO: 2197131 - DNA, 25 bp, Homo sapien
cagccaggaagtccagagctgccct

SEQ ID NO: 2197132 - DNA, 25 bp, Homo sapien
aggaagtccagagctgccctgagca

SEQ ID NO: 2197133 - DNA, 25 bp, Homo sapien
cttatagggctcactggttttcaga

SEQ ID NO: 2197134 - DNA, 25 bp, Homo sapien
gcagcactggtctgaggcaacttat

SEQ ID NO: 2197135 - DNA, 25 bp, Homo sapien
gaggcaacttatagggctcactggt

SEQ ID NO: 2197136 - DNA, 25 bp, Homo sapien
cttgattgtgcagcactggtctgag

SEQ ID NO: 2197137 - DNA, 25 bp, Homo sapien
gatatgaaatgctgtcaaatcctgc

SEQ ID NO: 2197138 - DNA, 25 bp, Homo sapien
caaatcctgcttcattaaagcccac

SEQ ID NO: 2197139 - DNA, 25 bp, Homo sapien
aagcccacaaaagctaatgcacagc

SEQ ID NO: 2197140 - DNA, 25 bp, Homo sapien
aaaagctaatgcacagctctccttg

SEQ ID NO: 2197141 - DNA, 25 bp, Homo sapien
tcccacgctacctcctcatttaatc

SEQ ID NO: 2197142 - DNA, 25 bp, Homo sapien
ccacgctacctcctcatttaatctc

SEQ ID NO: 2197143 - DNA, 25 bp, Homo sapien
acgctacctcctcatttaatctcct

SEQ ID NO: 2197144 - DNA, 25 bp, Homo sapien
catcccacgctacctcctcatttaa

SEQ ID NO: 2197145 - DNA, 25 bp, Homo sapien
aggaaacagtgagggttggacagcc

SEQ ID NO: 2197146 - DNA, 25 bp, Homo sapien
ggaaacagtgagggttggacagcca

SEQ ID NO: 2197147 - DNA, 25 bp, Homo sapien
cataagtgccttggggcagagagca

SEQ ID NO: 2197148 - DNA, 25 bp, Homo sapien
tgcagtgtcctggactcataagtgc

SEQ ID NO: 2197149 - DNA, 25 bp, Homo sapien
gcagtgtcctggactcataagtgcc

SEQ ID NO: 2197150 - DNA, 25 bp, Homo sapien
gcatgcagtgtcctggactcataag

SEQ ID NO: 2197151 - DNA, 25 bp, Homo sapien
actacactgtaatgagatcttctgg

SEQ ID NO: 2197152 - DNA, 25 bp, Homo sapien
gggtgataaaggaggtgaaactaca

SEQ ID NO: 2197153 - DNA, 25 bp, Homo sapien
ggaggtgaaactacactgtaatgag

SEQ ID NO: 2197154 - DNA, 25 bp, Homo sapien
gatcttctggatccaaccttaataa

SEQ ID NO: 2197155 - DNA, 25 bp, Homo sapien
ccagacacaggggtgatcatgaaag

SEQ ID NO: 2197156 - DNA, 25 bp, Homo sapien
cagacacaggggtgatcatgaaaga

SEQ ID NO: 2197157 - DNA, 25 bp, Homo sapien
attccagacacaggggtgatcatga

SEQ ID NO: 2197158 - DNA, 25 bp, Homo sapien
tccagacacaggggtgatcatgaaa

SEQ ID NO: 2197159 - DNA, 25 bp, Homo sapien
ctaatcttctccgtttgttctaaat

SEQ ID NO: 2197160 - DNA, 25 bp, Homo sapien
aagccacagctgttcaggtggactg

SEQ ID NO: 2197161 - DNA, 25 bp, Homo sapien
ccacagctgttcaggtggactgctg

SEQ ID NO: 2197162 - DNA, 25 bp, Homo sapien
gccacagctgttcaggtggactgct

SEQ ID NO: 2197163 - DNA, 25 bp, Homo sapien
tgctgagtagcacctctgctgaaga

SEQ ID NO: 2197164 - DNA, 25 bp, Homo sapien
agcctgcatgccgactggctgtcca

SEQ ID NO: 2197165 - DNA, 25 bp, Homo sapien
atgccgactggctgtccaagcgtgg

SEQ ID NO: 2197166 - DNA, 25 bp, Homo sapien
ggctgtctcagcctgcatgccgact

SEQ ID NO: 2197167 - DNA, 25 bp, Homo sapien
tctcagcctgcatgccgactggctg

SEQ ID NO: 2197168 - DNA, 25 bp, Homo sapien
tagcactcgctctgaaatcaggact

SEQ ID NO: 2197169 - DNA, 25 bp, Homo sapien
catggaatagcactcgctctgaaat

SEQ ID NO: 2197170 - DNA, 25 bp, Homo sapien
cctccatggaatagcactcgctctg

SEQ ID NO: 2197171 - DNA, 25 bp, Homo sapien
gaatagcactcgctctgaaatcagg

SEQ ID NO: 2197172 - DNA, 25 bp, Homo sapien
tgccatcttcttgacattaagatga

SEQ ID NO: 2197173 - DNA, 25 bp, Homo sapien
cactggtatttcttgccatcttctt

SEQ ID NO: 2197174 - DNA, 25 bp, Homo sapien
ttcttgccatcttcttgacattaag

SEQ ID NO: 2197175 - DNA, 25 bp, Homo sapien
catttgattttatcacactggtatt

SEQ ID NO: 2197176 - DNA, 25 bp, Homo sapien
cactgccagaggtttgagcaacttc

SEQ ID NO: 2197177 - DNA, 25 bp, Homo sapien
agacactgccagaggtttgagcaac

SEQ ID NO: 2197178 - DNA, 25 bp, Homo sapien
ctgccagaggtttgagcaacttcat

SEQ ID NO: 2197179 - DNA, 25 bp, Homo sapien
ccacacaccaaggactagatgactg

SEQ ID NO: 2197180 - DNA, 25 bp, Homo sapien
ctaaagcaaaccccacaggtaagtg

SEQ ID NO: 2197181 - DNA, 25 bp, Homo sapien
catttgcaagtcgtcttctaaagca

SEQ ID NO: 2197182 - DNA, 25 bp, Homo sapien
cagcaaacatttgcaagtcgtcttc

SEQ ID NO: 2197183 - DNA, 25 bp, Homo sapien
ttgcaagtcgtcttctaaagcaaac

SEQ ID NO: 2197184 - DNA, 25 bp, Homo sapien
tcatgttagattcaccttttgccat

SEQ ID NO: 2197185 - DNA, 25 bp, Homo sapien
gcacccagtgggctagattgtgccc

SEQ ID NO: 2197186 - DNA, 25 bp, Homo sapien
ctagattgtgccctggcagttggca

SEQ ID NO: 2197187 - DNA, 25 bp, Homo sapien
cctgggtcgatgtgtttgcagactt

SEQ ID NO: 2197188 - DNA, 25 bp, Homo sapien
gagtgtcgggtaaagtttcaggcca

SEQ ID NO: 2197189 - DNA, 25 bp, Homo sapien
catttgggcctgtgcctatgccctg

SEQ ID NO: 2197190 - DNA, 25 bp, Homo sapien
caagccagcgaatgaaaggttaact

SEQ ID NO: 2197191 - DNA, 25 bp, Homo sapien
ggacttcagacaagccagcgaatga

SEQ ID NO: 2197192 - DNA, 25 bp, Homo sapien
ttttctcttatcatgacagaaatgc

SEQ ID NO: 2197193 - DNA, 25 bp, Homo sapien
cttatcatgacagaaatgcttgtcc

SEQ ID NO: 2197194 - DNA, 25 bp, Homo sapien
tcttgctgggtcttatctgtgtctg

SEQ ID NO: 2197195 - DNA, 25 bp, Homo sapien
ttgtcctgataaaataattacccac

SEQ ID NO: 2197196 - DNA, 25 bp, Homo sapien
catttctacgtagagatcaattaga

SEQ ID NO: 2197197 - DNA, 25 bp, Homo sapien
ctacgtagagatcaattagaggcat

SEQ ID NO: 2197198 - DNA, 25 bp, Homo sapien
cacagtggttatcatcaccagctgc

SEQ ID NO: 2197199 - DNA, 25 bp, Homo sapien
agcacagtggttatcatcaccagct

SEQ ID NO: 2197200 - DNA, 25 bp, Homo sapien
aaatcccattcggattctttctgca

SEQ ID NO: 2197201 - DNA, 25 bp, Homo sapien
cccattcggattctttctgcaaaat

SEQ ID NO: 2197202 - DNA, 25 bp, Homo sapien
gggaagtggtcaggccaacttacta

SEQ ID NO: 2197203 - DNA, 25 bp, Homo sapien
tggtcaggccaacttactaaaaatc

SEQ ID NO: 2197204 - DNA, 25 bp, Homo sapien
tgttttggtcttccaatgcagttgt

SEQ ID NO: 2197205 - DNA, 25 bp, Homo sapien
ttttggtcttccaatgcagttgtta

SEQ ID NO: 2197206 - DNA, 25 bp, Homo sapien
gttttggtcttccaatgcagttgtt

SEQ ID NO: 2197207 - DNA, 25 bp, Homo sapien
acgaagtggcttctgaactccccag

SEQ ID NO: 2197208 - DNA, 25 bp, Homo sapien
tggcttgcaggaaagtcacgttcca

SEQ ID NO: 2197209 - DNA, 25 bp, Homo sapien
aacacttgattagattggcttgcag

SEQ ID NO: 2197210 - DNA, 25 bp, Homo sapien
aactggaactcagaagcgtcaggaa

SEQ ID NO: 2197211 - DNA, 25 bp, Homo sapien
ctgaacccctctgaagtgtcaggga

SEQ ID NO: 2197212 - DNA, 25 bp, Homo sapien
tgaacccctctgaagtgtcagggat

SEQ ID NO: 2197213 - DNA, 25 bp, Homo sapien
gaacccctctgaagtgtcagggatg

SEQ ID NO: 2197214 - DNA, 25 bp, Homo sapien
cgaagggcaatttgattcattaaca

SEQ ID NO: 2197215 - DNA, 25 bp, Homo sapien
cccatctaccgcaagtagtgggtga

SEQ ID NO: 2197216 - DNA, 25 bp, Homo sapien
tcattgcaacaaggccagtgtggat

SEQ ID NO: 2197217 - DNA, 25 bp, Homo sapien
ggtgaggctgctttccccgtaattc

SEQ ID NO: 2197218 - DNA, 25 bp, Homo sapien
ctgccttagaggactgccacccttg

SEQ ID NO: 2197219 - DNA, 25 bp, Homo sapien
gggaaggcggcttgtcttgccctct

SEQ ID NO: 2197220 - DNA, 25 bp, Homo sapien
cagctcagggcggattctcctgtgg

SEQ ID NO: 2197221 - DNA, 25 bp, Homo sapien
ccgcccacagatgaaccaaggtctg

SEQ ID NO: 2197222 - DNA, 25 bp, Homo sapien
tttattgcggcaggcccagtgttcc

SEQ ID NO: 2197223 - DNA, 25 bp, Homo sapien
tcttgactcccttaggttctcttta

SEQ ID NO: 2197224 - DNA, 25 bp, Homo sapien
ctgggagcatcagtgccacactcgc

SEQ ID NO: 2197225 - DNA, 25 bp, Homo sapien
aaaggaagccgcgatgcccggcgct

SEQ ID NO: 2197226 - DNA, 25 bp, Homo sapien
gagggcgtgcatggactgaggattt

SEQ ID NO: 2197227 - DNA, 25 bp, Homo sapien
gggcgtgcatggactgaggattttg

SEQ ID NO: 2197228 - DNA, 25 bp, Homo sapien
ggcgtgcatggactgaggattttga

SEQ ID NO: 2197229 - DNA, 25 bp, Homo sapien
tggagggcgtgcatggactgaggat

SEQ ID NO: 2197230 - DNA, 25 bp, Homo sapien
aggccacagttgacccactctcctc

SEQ ID NO: 2197231 - DNA, 25 bp, Homo sapien
ctcctgagtacttttccccatgcaa

SEQ ID NO: 2197232 - DNA, 25 bp, Homo sapien
tacttttccccatgcaagacaactg

SEQ ID NO: 2197233 - DNA, 25 bp, Homo sapien
gaggcttcaattgaccaccaggcca

SEQ ID NO: 2197234 - DNA, 25 bp, Homo sapien
actgctactctttgcactattgccc

SEQ ID NO: 2197235 - DNA, 25 bp, Homo sapien
gaatgccagtgtaacctacaaccac

SEQ ID NO: 2197236 - DNA, 25 bp, Homo sapien
tgtgaatgccagtgtaacctacaac

SEQ ID NO: 2197237 - DNA, 25 bp, Homo sapien
accactgctactctttgcactattg

SEQ ID NO: 2197238 - DNA, 25 bp, Homo sapien
caagagtcaggaggggtttggcttt

SEQ ID NO: 2197239 - DNA, 25 bp, Homo sapien
gacataacaattggcaagagtcagg

SEQ ID NO: 2197240 - DNA, 25 bp, Homo sapien
ctgtgacataacaattggcaagagt

SEQ ID NO: 2197241 - DNA, 25 bp, Homo sapien
cataacaattggcaagagtcaggag

SEQ ID NO: 2197242 - DNA, 25 bp, Homo sapien
tttttcaaaatgtccagctccactt

SEQ ID NO: 2197243 - DNA, 25 bp, Homo sapien
aaggctttggcttcgacttctcagc

SEQ ID NO: 2197244 - DNA, 25 bp, Homo sapien
tctcagctggttgcatcagcataaa

SEQ ID NO: 2197245 - DNA, 25 bp, Homo sapien
catgaagtggcagcttgagctctaa

SEQ ID NO: 2197246 - DNA, 25 bp, Homo sapien
gacttctgggcccttggagaaagaa

SEQ ID NO: 2197247 - DNA, 25 bp, Homo sapien
gggccataggcagcattctcattat

SEQ ID NO: 2197248 - DNA, 25 bp, Homo sapien
gccttcgatcctgcgcgggcctggg

SEQ ID NO: 2197249 - DNA, 25 bp, Homo sapien
taggcagcattctcattatgagggc

SEQ ID NO: 2197250 - DNA, 25 bp, Homo sapien
cctgctgacaaggctgtaccaagcc

SEQ ID NO: 2197251 - DNA, 25 bp, Homo sapien
tcagcatgaacctcaagcttgttgc

SEQ ID NO: 2197252 - DNA, 25 bp, Homo sapien
catcttttatgttgccacctgaggc

SEQ ID NO: 2197253 - DNA, 25 bp, Homo sapien
gctgttttagctttggctgcatctt

SEQ ID NO: 2197254 - DNA, 25 bp, Homo sapien
gcttgttgcagccaccgtattggga

SEQ ID NO: 2197255 - DNA, 25 bp, Homo sapien
caagtgactctggtgagaggacttg

SEQ ID NO: 2197256 - DNA, 25 bp, Homo sapien
gagcactttgacacctgtactcctc

SEQ ID NO: 2197257 - DNA, 25 bp, Homo sapien
ctgcttaccagctgctgacttaccc

SEQ ID NO: 2197258 - DNA, 25 bp, Homo sapien
tggaaagcctcccaacggcaaagga

SEQ ID NO: 2197259 - DNA, 25 bp, Homo sapien
ggctcttctcgagacttccagctta

SEQ ID NO: 2197260 - DNA, 25 bp, Homo sapien
ctcgagacttccagcttaagggacc

SEQ ID NO: 2197261 - DNA, 25 bp, Homo sapien
cccaaagagcagattagaatgctcg

SEQ ID NO: 2197262 - DNA, 25 bp, Homo sapien
tagaatgctcggtgactgtgcccag

SEQ ID NO: 2197263 - DNA, 25 bp, Homo sapien
agatacacccctcaatgcatccatc

SEQ ID NO: 2197264 - DNA, 25 bp, Homo sapien
ccatagatacacccctcaatgcatc

SEQ ID NO: 2197265 - DNA, 25 bp, Homo sapien
aaccagtcagaagccagcatttctt

SEQ ID NO: 2197266 - DNA, 25 bp, Homo sapien
atagatacacccctcaatgcatcca

SEQ ID NO: 2197267 - DNA, 25 bp, Homo sapien
cattaaactaaactgccttcctccg

SEQ ID NO: 2197268 - DNA, 25 bp, Homo sapien
cctccgattactgacagcaccgaag

SEQ ID NO: 2197269 - DNA, 25 bp, Homo sapien
ggcccctgagcacggcctggtaatg

SEQ ID NO: 2197270 - DNA, 25 bp, Homo sapien
ttataagcattgctgcggctcaggt

SEQ ID NO: 2197271 - DNA, 25 bp, Homo sapien
aacactgattgtcggctgctttcca

SEQ ID NO: 2197272 - DNA, 25 bp, Homo sapien
ggccgactttgaccgagaatattaa

SEQ ID NO: 2197273 - DNA, 25 bp, Homo sapien
aatacgcccactgttatgtgtaaca

SEQ ID NO: 2197274 - DNA, 25 bp, Homo sapien
tataaaataaaaggcgtctgcaaac

SEQ ID NO: 2197275 - DNA, 25 bp, Homo sapien
gacatactctcgattggcatccaga

SEQ ID NO: 2197276 - DNA, 25 bp, Homo sapien
cagggacatactctcgattggcatc

SEQ ID NO: 2197277 - DNA, 25 bp, Homo sapien
tccagaggtctgaagcggttgtagg

SEQ ID NO: 2197278 - DNA, 25 bp, Homo sapien
ccattacagggacatactctcgatt

SEQ ID NO: 2197279 - DNA, 25 bp, Homo sapien
aagttgctgtgaccaaattcccaat

SEQ ID NO: 2197280 - DNA, 25 bp, Homo sapien
taagttgctgtgaccaaattcccaa

SEQ ID NO: 2197281 - DNA, 25 bp, Homo sapien
ttaagttgctgtgaccaaattccca

SEQ ID NO: 2197282 - DNA, 25 bp, Homo sapien
gttgctgtgaccaaattcccaattc

SEQ ID NO: 2197283 - DNA, 25 bp, Homo sapien
tcattcctgaactgagtccatatca

SEQ ID NO: 2197284 - DNA, 25 bp, Homo sapien
ttcatctgcattcgctgaaggtcca

SEQ ID NO: 2197285 - DNA, 25 bp, Homo sapien
tctgcattcgctgaaggtccagctc

SEQ ID NO: 2197286 - DNA, 25 bp, Homo sapien
gaactgagtccatatcaaacatcca

SEQ ID NO: 2197287 - DNA, 25 bp, Homo sapien
caaagcccctgaggcaaaggagtgc

SEQ ID NO: 2197288 - DNA, 25 bp, Homo sapien
tattccttatgtccaaccctgttgc

SEQ ID NO: 2197289 - DNA, 25 bp, Homo sapien
aatggcagggattgtagttttccac

SEQ ID NO: 2197290 - DNA, 25 bp, Homo sapien
tttaggtttctgtaaagccacaggc

SEQ ID NO: 2197291 - DNA, 25 bp, Homo sapien
tcctcacctgaggagttcttcactt

SEQ ID NO: 2197292 - DNA, 25 bp, Homo sapien
gttgccagtaacacacaattccagg

SEQ ID NO: 2197293 - DNA, 25 bp, Homo sapien
cggtccacaggaattagttgccagt

SEQ ID NO: 2197294 - DNA, 25 bp, Homo sapien
ggacacgtgtgcaggtcgtggctca

SEQ ID NO: 2197295 - DNA, 25 bp, Homo sapien
cagggctcccttagaacctcctgga

SEQ ID NO: 2197296 - DNA, 25 bp, Homo sapien
aatctgaggagtgtggaaatgaaag

SEQ ID NO: 2197297 - DNA, 25 bp, Homo sapien
aacaatctgaggagtgtggaaatga

SEQ ID NO: 2197298 - DNA, 25 bp, Homo sapien
tgaggagtgtggaaatgaaagggcc

SEQ ID NO: 2197299 - DNA, 25 bp, Homo sapien
aggagtgtggaaatgaaagggcctt

SEQ ID NO: 2197300 - DNA, 25 bp, Homo sapien
ggattttatgacctgaacctttagc

SEQ ID NO: 2197301 - DNA, 25 bp, Homo sapien
agtttggattttatgacctgaacct

SEQ ID NO: 2197302 - DNA, 25 bp, Homo sapien
gattttatgacctgaacctttagcc

SEQ ID NO: 2197303 - DNA, 25 bp, Homo sapien
ttggattttatgacctgaaccttta

SEQ ID NO: 2197304 - DNA, 25 bp, Homo sapien
tcagtctgttgtcatcgatcctgga

SEQ ID NO: 2197305 - DNA, 25 bp, Homo sapien
gttgccagaggcagttaacgtttgg

SEQ ID NO: 2197306 - DNA, 25 bp, Homo sapien
agaagttgccagaggcagttaacgt

SEQ ID NO: 2197307 - DNA, 25 bp, Homo sapien
cagaggcagttaacgtttggccttg

SEQ ID NO: 2197308 - DNA, 25 bp, Homo sapien
tcctatgactactcaaagggcagac

SEQ ID NO: 2197309 - DNA, 25 bp, Homo sapien
tactcaaagggcagacataggcagt

SEQ ID NO: 2197310 - DNA, 25 bp, Homo sapien
gggtcttcctatgactactcaaagg

SEQ ID NO: 2197311 - DNA, 25 bp, Homo sapien
cagacataggcagtttgagaagaag

SEQ ID NO: 2197312 - DNA, 25 bp, Homo sapien
tcctccacccagacaatgtttctct

SEQ ID NO: 2197313 - DNA, 25 bp, Homo sapien
cttttcctccacccagacaatgttt

SEQ ID NO: 2197314 - DNA, 25 bp, Homo sapien
tttcctccacccagacaatgtttct

SEQ ID NO: 2197315 - DNA, 25 bp, Homo sapien
ctccacccagacaatgtttctcttc

SEQ ID NO: 2197316 - DNA, 25 bp, Homo sapien
ataaatcttgtaatacaaactgctg

SEQ ID NO: 2197317 - DNA, 25 bp, Homo sapien
gataaatcttgtaatacaaactgct

SEQ ID NO: 2197318 - DNA, 25 bp, Homo sapien
tttaaaaaccactcagagagataaa

SEQ ID NO: 2197319 - DNA, 25 bp, Homo sapien
tgaggcagcagaacctggtgcagca

SEQ ID NO: 2197320 - DNA, 25 bp, Homo sapien
ttcaccaaattcctccccaggtgct

SEQ ID NO: 2197321 - DNA, 25 bp, Homo sapien
tttcaccaaattcctccccaggtgc

SEQ ID NO: 2197322 - DNA, 25 bp, Homo sapien
gcagcagaacctggtgcagcagtac

SEQ ID NO: 2197323 - DNA, 25 bp, Homo sapien
actcaccagatcaacctcccaggcc

SEQ ID NO: 2197324 - DNA, 25 bp, Homo sapien
cactttaaagggcggacactcacca

SEQ ID NO: 2197325 - DNA, 25 bp, Homo sapien
ctccacaaggtcccgcaacccactt

SEQ ID NO: 2197326 - DNA, 25 bp, Homo sapien
tggtgcttttcccagatcctcctgc

SEQ ID NO: 2197327 - DNA, 25 bp, Homo sapien
taatgaatctgcatagacttccagt

SEQ ID NO: 2197328 - DNA, 25 bp, Homo sapien
tagaaggctgtttcttcgcagcact

SEQ ID NO: 2197329 - DNA, 25 bp, Homo sapien
aaatgggaggagatgagcaacccct

SEQ ID NO: 2197330 - DNA, 25 bp, Homo sapien
tctgacttcattgcagagcggtgaa

SEQ ID NO: 2197331 - DNA, 25 bp, Homo sapien
gcctttctgatgaagccaaggtggg

SEQ ID NO: 2197332 - DNA, 25 bp, Homo sapien
tcgcctttctgatgaagccaaggtg

SEQ ID NO: 2197333 - DNA, 25 bp, Homo sapien
ttccagaatgttgggtcgcctttct

SEQ ID NO: 2197334 - DNA, 25 bp, Homo sapien
tgaagccaaggtggggattcagagc

SEQ ID NO: 2197335 - DNA, 25 bp, Homo sapien
atacttcttgctcatcacattgact

SEQ ID NO: 2197336 - DNA, 25 bp, Homo sapien
tccaatttctgcttgctcatacttc

SEQ ID NO: 2197337 - DNA, 25 bp, Homo sapien
ttcttgctcatcacattgacttgca

SEQ ID NO: 2197338 - DNA, 25 bp, Homo sapien
tcacattgacttgcatagggcccat

SEQ ID NO: 2197339 - DNA, 25 bp, Homo sapien
ttgggctcctttggtgctagtgaaa

SEQ ID NO: 2197340 - DNA, 25 bp, Homo sapien
tgggctcctttggtgctagtgaaat

SEQ ID NO: 2197341 - DNA, 25 bp, Homo sapien
ggctcctttggtgctagtgaaatcc

SEQ ID NO: 2197342 - DNA, 25 bp, Homo sapien
gggctcctttggtgctagtgaaatc

SEQ ID NO: 2197343 - DNA, 25 bp, Homo sapien
caaacattgagctcttcgtgaagaa

SEQ ID NO: 2197344 - DNA, 25 bp, Homo sapien
cgtgaagaagtttcattgctaaggg

SEQ ID NO: 2197345 - DNA, 25 bp, Homo sapien
cattgctaaggggtaacgggatcca

SEQ ID NO: 2197346 - DNA, 25 bp, Homo sapien
gctaaggggtaacgggatccagcat

SEQ ID NO: 2197347 - DNA, 25 bp, Homo sapien
cataaacgagctccatgtttaactt

SEQ ID NO: 2197348 - DNA, 25 bp, Homo sapien
accaaaagccataaacgagctccat

SEQ ID NO: 2197349 - DNA, 25 bp, Homo sapien
ccagtggcaagccacaacactggag

SEQ ID NO: 2197350 - DNA, 25 bp, Homo sapien
ctgagtgtcacttccagtggcaagc

SEQ ID NO: 2197351 - DNA, 25 bp, Homo sapien
catcccctcatgctctgatactgga

SEQ ID NO: 2197352 - DNA, 25 bp, Homo sapien
ctgatactggagcaaatggaggctc

SEQ ID NO: 2197353 - DNA, 25 bp, Homo sapien
ggaggctcttccaatggagggattt

SEQ ID NO: 2197354 - DNA, 25 bp, Homo sapien
tgaattcaatcactggcatcccctc

SEQ ID NO: 2197355 - DNA, 25 bp, Homo sapien
gattagggacagaagaaattcttgg

SEQ ID NO: 2197356 - DNA, 25 bp, Homo sapien
ttagggacagaagaaattcttggga

SEQ ID NO: 2197357 - DNA, 25 bp, Homo sapien
ctgattagggacagaagaaattctt

SEQ ID NO: 2197358 - DNA, 25 bp, Homo sapien
agggacagaagaaattcttgggatc

SEQ ID NO: 2197359 - DNA, 25 bp, Homo sapien
caagtgtctcaaatgccaagtatcc

SEQ ID NO: 2197360 - DNA, 25 bp, Homo sapien
tcaagtgtctcaaatgccaagtatc

SEQ ID NO: 2197361 - DNA, 25 bp, Homo sapien
ctgttccttctacctggatttttca

SEQ ID NO: 2197362 - DNA, 25 bp, Homo sapien
tgttccttctacctggatttttcat

SEQ ID NO: 2197363 - DNA, 25 bp, Homo sapien
gctgttccttctacctggatttttc

SEQ ID NO: 2197364 - DNA, 25 bp, Homo sapien
ctgagctgatgctgtaccaccagcc

SEQ ID NO: 2197365 - DNA, 25 bp, Homo sapien
gagctgatgctgtaccaccagcctc

SEQ ID NO: 2197366 - DNA, 25 bp, Homo sapien
tgagctgatgctgtaccaccagcct

SEQ ID NO: 2197367 - DNA, 25 bp, Homo sapien
agcagagggacactgattcggttcg

SEQ ID NO: 2197368 - DNA, 25 bp, Homo sapien
agtgtcctgatgcaatcacctgtca

SEQ ID NO: 2197369 - DNA, 25 bp, Homo sapien
cttccacaaggcaagcaattatgct

SEQ ID NO: 2197370 - DNA, 25 bp, Homo sapien
tcacctgtcactaacactatcagca

SEQ ID NO: 2197371 - DNA, 25 bp, Homo sapien
catttcctcagagctatgctgggtg

SEQ ID NO: 2197372 - DNA, 25 bp, Homo sapien
ttcctcagagctatgctgggtgact

SEQ ID NO: 2197373 - DNA, 25 bp, Homo sapien
atttcctcagagctatgctgggtga

SEQ ID NO: 2197374 - DNA, 25 bp, Homo sapien
tttcctcagagctatgctgggtgac

SEQ ID NO: 2197375 - DNA, 25 bp, Homo sapien
tggctacaccatggctggacttcat

SEQ ID NO: 2197376 - DNA, 25 bp, Homo sapien
tcttagtgggtctccttggctacac

SEQ ID NO: 2197377 - DNA, 25 bp, Homo sapien
ggacttcatgtgcattctgttaagg

SEQ ID NO: 2197378 - DNA, 25 bp, Homo sapien
tataatgccgtcctttgcccctgca

SEQ ID NO: 2197379 - DNA, 25 bp, Homo sapien
tttcattcttcacacttggatgctc

SEQ ID NO: 2197380 - DNA, 25 bp, Homo sapien
gtgtgtttcattcttcacacttgga

SEQ ID NO: 2197381 - DNA, 25 bp, Homo sapien
tcacacttggatgctctttagtatt

SEQ ID NO: 2197382 - DNA, 25 bp, Homo sapien
cttcacacttggatgctctttagta

SEQ ID NO: 2197383 - DNA, 25 bp, Homo sapien
tatggctgcagagcataggactggc

SEQ ID NO: 2197384 - DNA, 25 bp, Homo sapien
ttggcacagcaatcctccctatggc

SEQ ID NO: 2197385 - DNA, 25 bp, Homo sapien
gatggcagccccaaggtttgtgagc

SEQ ID NO: 2197386 - DNA, 25 bp, Homo sapien
cttagcagaccccaagacgaggatt

SEQ ID NO: 2197387 - DNA, 25 bp, Homo sapien
gatcatgaacatgccttggagtgga

SEQ ID NO: 2197388 - DNA, 25 bp, Homo sapien
tggcacttgaacctcacaacagaac

SEQ ID NO: 2197389 - DNA, 25 bp, Homo sapien
gcagttaacctcctgagtggaccac

SEQ ID NO: 2197390 - DNA, 25 bp, Homo sapien
catttatttgggacgtggtccagga

SEQ ID NO: 2197391 - DNA, 25 bp, Homo sapien
gatgaggtattgttgaggacttaac

SEQ ID NO: 2197392 - DNA, 25 bp, Homo sapien
gacttaacaatggttgattgtgcat

SEQ ID NO: 2197393 - DNA, 25 bp, Homo sapien
ttgctgatgaggtattgttgaggac

SEQ ID NO: 2197394 - DNA, 25 bp, Homo sapien
tgtgcatctgagtgttcagagagca

SEQ ID NO: 2197395 - DNA, 25 bp, Homo sapien
ctgcccccactagaccttctgccat

SEQ ID NO: 2197396 - DNA, 25 bp, Homo sapien
ggctggtggagtcccagctgccccc

SEQ ID NO: 2197397 - DNA, 25 bp, Homo sapien
cagctgcccccactagaccttctgc

SEQ ID NO: 2197398 - DNA, 25 bp, Homo sapien
ccagctgcccccactagaccttctg

SEQ ID NO: 2197399 - DNA, 25 bp, Homo sapien
gacctacatacaatctggcccagga

SEQ ID NO: 2197400 - DNA, 25 bp, Homo sapien
gagtatgctactttcaggacccaat

SEQ ID NO: 2197401 - DNA, 25 bp, Homo sapien
gctgccttaagggagacagattctc

SEQ ID NO: 2197402 - DNA, 25 bp, Homo sapien
cagccactggaggtgttgacctaca

SEQ ID NO: 2197403 - DNA, 25 bp, Homo sapien
caacttcagagaacaagctgatgaa

SEQ ID NO: 2197404 - DNA, 25 bp, Homo sapien
ggtgaagcttgaaacaacttcagag

SEQ ID NO: 2197405 - DNA, 25 bp, Homo sapien
aacaggaaatgaaggggcctgtcgg

SEQ ID NO: 2197406 - DNA, 25 bp, Homo sapien
gggatggtgaagcttgaaacaactt

SEQ ID NO: 2197407 - DNA, 25 bp, Homo sapien
tttaaccgcacttgaataccatttg

SEQ ID NO: 2197408 - DNA, 25 bp, Homo sapien
tatagcatgtgcctccggcttatca

SEQ ID NO: 2197409 - DNA, 25 bp, Homo sapien
ttattgcatattctctagtaggaag

SEQ ID NO: 2197410 - DNA, 25 bp, Homo sapien
tctggatgctgttccttgtgtatag

SEQ ID NO: 2197411 - DNA, 25 bp, Homo sapien
caaatcgttgagagaaaacagatga

SEQ ID NO: 2197412 - DNA, 25 bp, Homo sapien
tagtttgtaacaaatcgttgagaga

SEQ ID NO: 2197413 - DNA, 25 bp, Homo sapien
ggtcgtaggtcttgcagcttttgga

SEQ ID NO: 2197414 - DNA, 25 bp, Homo sapien
atgtgaaagatgctgtttggtcgta

SEQ ID NO: 2197415 - DNA, 25 bp, Homo sapien
agcatctgcaagaaccagatcttga

SEQ ID NO: 2197416 - DNA, 25 bp, Homo sapien
gcatctgcaagaaccagatcttgag

SEQ ID NO: 2197417 - DNA, 25 bp, Homo sapien
tggagaccaacaatgactggagctg

SEQ ID NO: 2197418 - DNA, 25 bp, Homo sapien
accaacaatgactggagctgagatt

SEQ ID NO: 2197419 - DNA, 25 bp, Homo sapien
ctggagaccaacaatgactggagct

SEQ ID NO: 2197420 - DNA, 25 bp, Homo sapien
gagaccaacaatgactggagctgag

SEQ ID NO: 2197421 - DNA, 25 bp, Homo sapien
ccagcctgggtgatcctagttgggc

SEQ ID NO: 2197422 - DNA, 25 bp, Homo sapien
gggcagaacccctccatacaatgat

SEQ ID NO: 2197423 - DNA, 25 bp, Homo sapien
acacaaggctctcaaagttgccatc

SEQ ID NO: 2197424 - DNA, 25 bp, Homo sapien
aaagttgccatcttccatacaaggc

SEQ ID NO: 2197425 - DNA, 25 bp, Homo sapien
cagagaggttgtgacgtgcatttaa

SEQ ID NO: 2197426 - DNA, 25 bp, Homo sapien
taaatgctacagctgcaatccaaat

SEQ ID NO: 2197427 - DNA, 25 bp, Homo sapien
tgaaacgtggggaaaacgaagctca

SEQ ID NO: 2197428 - DNA, 25 bp, Homo sapien
gtaggcaacagggtccactgcatcc

SEQ ID NO: 2197429 - DNA, 25 bp, Homo sapien
cagcatccagcagaactaatagaat

SEQ ID NO: 2197430 - DNA, 25 bp, Homo sapien
tcagccaatctcgtcttcttgcttc

SEQ ID NO: 2197431 - DNA, 25 bp, Homo sapien
gaactaatagaatttcttctaccaa

SEQ ID NO: 2197432 - DNA, 25 bp, Homo sapien
tcatcttctgattgggactcagacc

SEQ ID NO: 2197433 - DNA, 25 bp, Homo sapien
cgggctttgattcaatttcaaacct

SEQ ID NO: 2197434 - DNA, 25 bp, Homo sapien
tgtcgggctttgattcaatttcaaa

SEQ ID NO: 2197435 - DNA, 25 bp, Homo sapien
ctattgaatgtcgggctttgattca

SEQ ID NO: 2197436 - DNA, 25 bp, Homo sapien
tgaatgtcgggctttgattcaattt

SEQ ID NO: 2197437 - DNA, 25 bp, Homo sapien
aaactcggtgccctgagaggcccca

SEQ ID NO: 2197438 - DNA, 25 bp, Homo sapien
gatctaatgttagtggcagcccagc

SEQ ID NO: 2197439 - DNA, 25 bp, Homo sapien
gccccaggtatcaagggatctaatg

SEQ ID NO: 2197440 - DNA, 25 bp, Homo sapien
aattcccttaactgcaaactcggtg

SEQ ID NO: 2197441 - DNA, 25 bp, Homo sapien
ctttgaggtcagattggaagaggta

SEQ ID NO: 2197442 - DNA, 25 bp, Homo sapien
ggtcagattggaagaggtactgcct

SEQ ID NO: 2197443 - DNA, 25 bp, Homo sapien
ttgaggtcagattggaagaggtact

SEQ ID NO: 2197444 - DNA, 25 bp, Homo sapien
gaggtcagattggaagaggtactgc

SEQ ID NO: 2197445 - DNA, 25 bp, Homo sapien
ccactcgcattactgtaggctgagc

SEQ ID NO: 2197446 - DNA, 25 bp, Homo sapien
tgcagagagtatccaagtcagtgag

SEQ ID NO: 2197447 - DNA, 25 bp, Homo sapien
gagctgcagagagtatccaagtcag

SEQ ID NO: 2197448 - DNA, 25 bp, Homo sapien
ccgtacactgaaaccactcgcatta

SEQ ID NO: 2197449 - DNA, 25 bp, Homo sapien
aatcaggagtgagggcaattccagg

SEQ ID NO: 2197450 - DNA, 25 bp, Homo sapien
ttaaccaatagcaatcaggagtgag

SEQ ID NO: 2197451 - DNA, 25 bp, Homo sapien
cgggaagcacgctgagccaaggtca

SEQ ID NO: 2197452 - DNA, 25 bp, Homo sapien
aatggtaattgtctggaagttctgg

SEQ ID NO: 2197453 - DNA, 25 bp, Homo sapien
tctaagtggagttgaaagataaaca

SEQ ID NO: 2197454 - DNA, 25 bp, Homo sapien
ggaacattcccaggcttcagtcagg

SEQ ID NO: 2197455 - DNA, 25 bp, Homo sapien
aactctcatttgtccgggccacagg

SEQ ID NO: 2197456 - DNA, 25 bp, Homo sapien
ttaacatcactgaggagttaagccc

SEQ ID NO: 2197457 - DNA, 25 bp, Homo sapien
tttgtgatataagatggctgttaga

SEQ ID NO: 2197458 - DNA, 25 bp, Homo sapien
ggaagcagagatgacgtttgtgata

SEQ ID NO: 2197459 - DNA, 25 bp, Homo sapien
cagagatgacgtttgtgatataaga

SEQ ID NO: 2197460 - DNA, 25 bp, Homo sapien
taagatggctgttagaagtccacac

SEQ ID NO: 2197461 - DNA, 25 bp, Homo sapien
ggatgctgtcttgcatgaggtgaat

SEQ ID NO: 2197462 - DNA, 25 bp, Homo sapien
tcagaggtgattagactgtgggcat

SEQ ID NO: 2197463 - DNA, 25 bp, Homo sapien
tgaattggaacacacggaactgtcc

SEQ ID NO: 2197464 - DNA, 25 bp, Homo sapien
tgtccaccacagctgtgactgaagt

SEQ ID NO: 2197465 - DNA, 25 bp, Homo sapien
gaagcaagccttccaggtttgaaga

SEQ ID NO: 2197466 - DNA, 25 bp, Homo sapien
acctctccataataaccctcttagg

SEQ ID NO: 2197467 - DNA, 25 bp, Homo sapien
ctctccataataaccctcttaggct

SEQ ID NO: 2197468 - DNA, 25 bp, Homo sapien
aatcctgtagttggagtagagctgg

SEQ ID NO: 2197469 - DNA, 25 bp, Homo sapien
gcttattgctaataacaagcctggc

SEQ ID NO: 2197470 - DNA, 25 bp, Homo sapien
gcttgtacctccagcagtgactgca

SEQ ID NO: 2197471 - DNA, 25 bp, Homo sapien
tgactgcaggtgctgtcaaaaggag

SEQ ID NO: 2197472 - DNA, 25 bp, Homo sapien
gctctcctgagaatggcttgatgct

SEQ ID NO: 2197473 - DNA, 25 bp, Homo sapien
tccttactgtggaatgggttcagtt

SEQ ID NO: 2197474 - DNA, 25 bp, Homo sapien
tattttcaggttggccatgggtcgg

SEQ ID NO: 2197475 - DNA, 25 bp, Homo sapien
gtcggcttatgtggcatgggtccca

SEQ ID NO: 2197476 - DNA, 25 bp, Homo sapien
tgggtcccactgagcaactttggtt

SEQ ID NO: 2197477 - DNA, 25 bp, Homo sapien
tttccaactgtcacaaaacaatgca

SEQ ID NO: 2197478 - DNA, 25 bp, Homo sapien
tgttgacaaaccgaacacagggccc

SEQ ID NO: 2197479 - DNA, 25 bp, Homo sapien
tgtttgcataaacccagcaaggtat

SEQ ID NO: 2197480 - DNA, 25 bp, Homo sapien
cagctccacggcttcagcttgttga

SEQ ID NO: 2197481 - DNA, 25 bp, Homo sapien
ttttatcattcctcgcaacaagtcc

SEQ ID NO: 2197482 - DNA, 25 bp, Homo sapien
tttatcattcctcgcaacaagtcca

SEQ ID NO: 2197483 - DNA, 25 bp, Homo sapien
aattttatcattcctcgcaacaagt

SEQ ID NO: 2197484 - DNA, 25 bp, Homo sapien
ttatcattcctcgcaacaagtccat

SEQ ID NO: 2197485 - DNA, 25 bp, Homo sapien
ctgctgcaggcgtagtgggccacag

SEQ ID NO: 2197486 - DNA, 25 bp, Homo sapien
gaatgggtatcagtcctgcaagcct

SEQ ID NO: 2197487 - DNA, 25 bp, Homo sapien
caatcctgaaggtcattggttgagg

SEQ ID NO: 2197488 - DNA, 25 bp, Homo sapien
tgggatatttatccacccaatcctg

SEQ ID NO: 2197489 - DNA, 25 bp, Homo sapien
tctgaattcttgacctagctgggag

SEQ ID NO: 2197490 - DNA, 25 bp, Homo sapien
tctgtgcctcaaagtaatcgcctgc

SEQ ID NO: 2197491 - DNA, 25 bp, Homo sapien
taaatgagacatccacgaagagcac

SEQ ID NO: 2197492 - DNA, 25 bp, Homo sapien
ctaacaggatggtcaaggagcaact

SEQ ID NO: 2197493 - DNA, 25 bp, Homo sapien
tatcatcagagcacaacggacacgt

SEQ ID NO: 2197494 - DNA, 25 bp, Homo sapien
caccttgtgaaattatgagactcca

SEQ ID NO: 2197495 - DNA, 25 bp, Homo sapien
gagactccattccagttgcgtttgt

SEQ ID NO: 2197496 - DNA, 25 bp, Homo sapien
tgaatgacaatatgtttgccgtgac

SEQ ID NO: 2197497 - DNA, 25 bp, Homo sapien
cttgattgtcatttggacttggttc

SEQ ID NO: 2197498 - DNA, 25 bp, Homo sapien
cattcctttagcatagaccacagtc

SEQ ID NO: 2197499 - DNA, 25 bp, Homo sapien
ggttcattcaatgcagatgaccatt

SEQ ID NO: 2197500 - DNA, 25 bp, Homo sapien
tcctggattcatttaagaaggaggg

SEQ ID NO: 2197501 - DNA, 25 bp, Homo sapien
tgatcccctcaggcccggcctaagg

SEQ ID NO: 2197502 - DNA, 25 bp, Homo sapien
attgcccagtctgatcccctcaggc

SEQ ID NO: 2197503 - DNA, 25 bp, Homo sapien
cctgtcttctctgacacactggagt

SEQ ID NO: 2197504 - DNA, 25 bp, Homo sapien
tccaggaacctttgaggattcaatt

SEQ ID NO: 2197505 - DNA, 25 bp, Homo sapien
gaagaccctcaattggttggtggca

SEQ ID NO: 2197506 - DNA, 25 bp, Homo sapien
tggaattccagtgcacaggttgagc

SEQ ID NO: 2197507 - DNA, 25 bp, Homo sapien
cctctgaagagggttgccaggtgcc

SEQ ID NO: 2197508 - DNA, 25 bp, Homo sapien
tggcaggctctattgcacagataag

SEQ ID NO: 2197509 - DNA, 25 bp, Homo sapien
agcaagatatctgggcaattgagac

SEQ ID NO: 2197510 - DNA, 25 bp, Homo sapien
aaattcttatgagcacagcctctgc

SEQ ID NO: 2197511 - DNA, 25 bp, Homo sapien
gagaccatccaatgatggcagagca

SEQ ID NO: 2197512 - DNA, 25 bp, Homo sapien
ggcagagcaataacctgctctttta

SEQ ID NO: 2197513 - DNA, 25 bp, Homo sapien
tgcaatgctctactctcctgggtgg

SEQ ID NO: 2197514 - DNA, 25 bp, Homo sapien
gggaaatcctgaaacaagggctgga

SEQ ID NO: 2197515 - DNA, 25 bp, Homo sapien
tgtgagggcacggactctgcaatgc

SEQ ID NO: 2197516 - DNA, 25 bp, Homo sapien
tcagctgcatgaccggtgactggca

SEQ ID NO: 2197517 - DNA, 25 bp, Homo sapien
tatttctgactgtgcgataaactca

SEQ ID NO: 2197518 - DNA, 25 bp, Homo sapien
gcagctatttctgactgtgcgataa

SEQ ID NO: 2197519 - DNA, 25 bp, Homo sapien
ctggcagctatttctgactgtgcga

SEQ ID NO: 2197520 - DNA, 25 bp, Homo sapien
tctgactgtgcgataaactcatggc

SEQ ID NO: 2197521 - DNA, 25 bp, Homo sapien
ccctaggacctcccccttagagatg

SEQ ID NO: 2197522 - DNA, 25 bp, Homo sapien
ggtaattgcatgatattttcccaaa

SEQ ID NO: 2197523 - DNA, 25 bp, Homo sapien
tcaggatgggtttccaaacttcctg

SEQ ID NO: 2197524 - DNA, 25 bp, Homo sapien
agctgtcattagggtaattgcatga

SEQ ID NO: 2197525 - DNA, 25 bp, Homo sapien
cagcttcaggatgggtttccaaact

SEQ ID NO: 2197526 - DNA, 25 bp, Homo sapien
gaggaacaagctgctttatcttcct

SEQ ID NO: 2197527 - DNA, 25 bp, Homo sapien
tgtggaagatggatgcacagcatct

SEQ ID NO: 2197528 - DNA, 25 bp, Homo sapien
tagtgcaggaggaacaagctgcttt

SEQ ID NO: 2197529 - DNA, 25 bp, Homo sapien
ggtaatgtattagtgcaggaggaac

SEQ ID NO: 2197530 - DNA, 25 bp, Homo sapien
ttgatttgcgatcagctcctttgaa

SEQ ID NO: 2197531 - DNA, 25 bp, Homo sapien
ctgagagtgaatatgatcctgcttc

SEQ ID NO: 2197532 - DNA, 25 bp, Homo sapien
tttgatttgcgatcagctcctttga

SEQ ID NO: 2197533 - DNA, 25 bp, Homo sapien
tgagagtgaatatgatcctgcttca

SEQ ID NO: 2197534 - DNA, 25 bp, Homo sapien
ccaggtcgcgaatctgtcagatgca

SEQ ID NO: 2197535 - DNA, 25 bp, Homo sapien
gcccacgtgactgccgttcaaaggg

SEQ ID NO: 2197536 - DNA, 25 bp, Homo sapien
gaatttctggtgctcgtgactgttg

SEQ ID NO: 2197537 - DNA, 25 bp, Homo sapien
aatgagagtcaatggaccaggtcgc

SEQ ID NO: 2197538 - DNA, 25 bp, Homo sapien
ctaaagccagcgtgtaaagggattt

SEQ ID NO: 2197539 - DNA, 25 bp, Homo sapien
ggtgtgggcccagttgtagatgatc

SEQ ID NO: 2197540 - DNA, 25 bp, Homo sapien
accaggccaatgcgggcatccctaa

SEQ ID NO: 2197541 - DNA, 25 bp, Homo sapien
caatgcgggcatccctaaagccagc

SEQ ID NO: 2197542 - DNA, 25 bp, Homo sapien
tcttcatcgcggaatgattccttca

SEQ ID NO: 2197543 - DNA, 25 bp, Homo sapien
gctctcccttcttcatcgcggaatg

SEQ ID NO: 2197544 - DNA, 25 bp, Homo sapien
gttataattacagcggctctccctt

SEQ ID NO: 2197545 - DNA, 25 bp, Homo sapien
aatcagtgtgtcagttataattaca

SEQ ID NO: 2197546 - DNA, 25 bp, Homo sapien
tgggctgcctcggtaataaccactc

SEQ ID NO: 2197547 - DNA, 25 bp, Homo sapien
aagaaattcagatacgacagcagcg

SEQ ID NO: 2197548 - DNA, 25 bp, Homo sapien
cggagcgagggccaagccccacatg

SEQ ID NO: 2197549 - DNA, 25 bp, Homo sapien
tcgccagacccggagcgagggccaa

SEQ ID NO: 2197550 - DNA, 25 bp, Homo sapien
tttttggtgtaaggcagctttgtca

SEQ ID NO: 2197551 - DNA, 25 bp, Homo sapien
ttttggtgtaaggcagctttgtcat

SEQ ID NO: 2197552 - DNA, 25 bp, Homo sapien
ctttttggtgtaaggcagctttgtc

SEQ ID NO: 2197553 - DNA, 25 bp, Homo sapien
tgcccgtgacacagataaggacctg

SEQ ID NO: 2197554 - DNA, 25 bp, Homo sapien
taaggacctggaggactgctctgag

SEQ ID NO: 2197555 - DNA, 25 bp, Homo sapien
tgagtggcagcaaagataaacggcg

SEQ ID NO: 2197556 - DNA, 25 bp, Homo sapien
tctgagcttctgtgtgtgccctggg

SEQ ID NO: 2197557 - DNA, 25 bp, Homo sapien
cctcacaaagaggatcgctgcgtgt

SEQ ID NO: 2197558 - DNA, 25 bp, Homo sapien
tgaatgccccgacacaaaaggccgc

SEQ ID NO: 2197559 - DNA, 25 bp, Homo sapien
caaagaggatcgctgcgtgtctttt

SEQ ID NO: 2197560 - DNA, 25 bp, Homo sapien
tcacaaagaggatcgctgcgtgtct

SEQ ID NO: 2197561 - DNA, 25 bp, Homo sapien
taaaaaaaaaaagccattgctcaca

SEQ ID NO: 2197562 - DNA, 25 bp, Homo sapien
aaaaaaagccattgctcacaaagga

SEQ ID NO: 2197563 - DNA, 25 bp, Homo sapien
aaaaaaaaagccattgctcacaaag

SEQ ID NO: 2197564 - DNA, 25 bp, Homo sapien
aaaaaagccattgctcacaaaggac

SEQ ID NO: 2197565 - DNA, 25 bp, Homo sapien
cattccttgttgcactcaaagagct

SEQ ID NO: 2197566 - DNA, 25 bp, Homo sapien
tctgcttgttctacacggcctcgta

SEQ ID NO: 2197567 - DNA, 25 bp, Homo sapien
tggaaaggatccaattggcaagacc

SEQ ID NO: 2197568 - DNA, 25 bp, Homo sapien
gcagcccggcatttcttccgactgt

SEQ ID NO: 2197569 - DNA, 25 bp, Homo sapien
caaattcatggtgaccagggatctc

SEQ ID NO: 2197570 - DNA, 25 bp, Homo sapien
attcatggtgaccagggatctccat

SEQ ID NO: 2197571 - DNA, 25 bp, Homo sapien
aaattcatggtgaccagggatctcc

SEQ ID NO: 2197572 - DNA, 25 bp, Homo sapien
aattcatggtgaccagggatctcca

SEQ ID NO: 2197573 - DNA, 25 bp, Homo sapien
tcttttgccgtctggatggttgcag

SEQ ID NO: 2197574 - DNA, 25 bp, Homo sapien
tgagttatgtggagggtcaccgtct

SEQ ID NO: 2197575 - DNA, 25 bp, Homo sapien
tacaaataaagaggcaacaaatgac

SEQ ID NO: 2197576 - DNA, 25 bp, Homo sapien
ggcaacaaatgactcccagaagtga

SEQ ID NO: 2197577 - DNA, 25 bp, Homo sapien
cttcgaggaggttgcagctattggc

SEQ ID NO: 2197578 - DNA, 25 bp, Homo sapien
ccacagacctggtacaaggaatcca

SEQ ID NO: 2197579 - DNA, 25 bp, Homo sapien
aatccagcaatatgtgcaacacttg

SEQ ID NO: 2197580 - DNA, 25 bp, Homo sapien
cagcagagccccctgatgttgggaa

SEQ ID NO: 2197581 - DNA, 25 bp, Homo sapien
cgtgaaattatcgacctggaatagc

SEQ ID NO: 2197582 - DNA, 25 bp, Homo sapien
ccaccattaatttctcagctcggat

SEQ ID NO: 2197583 - DNA, 25 bp, Homo sapien
catgaaggccattgtccaccattaa

SEQ ID NO: 2197584 - DNA, 25 bp, Homo sapien
tgtaacatactcaatatcggacgtg

SEQ ID NO: 2197585 - DNA, 25 bp, Homo sapien
ccttgtacctatgagtcagggcctc

SEQ ID NO: 2197586 - DNA, 25 bp, Homo sapien
atgagtcagggcctcacagcccttc

SEQ ID NO: 2197587 - DNA, 25 bp, Homo sapien
caagaaggcccttgtacctatgagt

SEQ ID NO: 2197588 - DNA, 25 bp, Homo sapien
tcacgaatcaagaaggcccttgtac

SEQ ID NO: 2197589 - DNA, 25 bp, Homo sapien
gccacacgcagccacaacgtgtctc

SEQ ID NO: 2197590 - DNA, 25 bp, Homo sapien
agttgctgatgtaccccgtggctca

SEQ ID NO: 2197591 - DNA, 25 bp, Homo sapien
tgggaggattgacagccacacgcag

SEQ ID NO: 2197592 - DNA, 25 bp, Homo sapien
caacgtgtctcccaggccagttgct

SEQ ID NO: 2197593 - DNA, 25 bp, Homo sapien
gtttgcagtaacagctcgctcgagc

SEQ ID NO: 2197594 - DNA, 25 bp, Homo sapien
taaaaagagttctccggcatcctcg

SEQ ID NO: 2197595 - DNA, 25 bp, Homo sapien
tgaatgtgcatgctacccgaggctg

SEQ ID NO: 2197596 - DNA, 25 bp, Homo sapien
tcgctcgagctggaaattgccgtga

SEQ ID NO: 2197597 - DNA, 25 bp, Homo sapien
gagagtgcacccgtggagccagggt

SEQ ID NO: 2197598 - DNA, 25 bp, Homo sapien
gtctgtgcccaagaaccagctcgct

SEQ ID NO: 2197599 - DNA, 25 bp, Homo sapien
gtggagccagggtgactgcaatcct

SEQ ID NO: 2197600 - DNA, 25 bp, Homo sapien
tgtctgtgcccaagaaccagctcgc

SEQ ID NO: 2197601 - DNA, 25 bp, Homo sapien
gaagctatggggccattcccatgca

SEQ ID NO: 2197602 - DNA, 25 bp, Homo sapien
tgaagctatggggccattcccatgc

SEQ ID NO: 2197603 - DNA, 25 bp, Homo sapien
ctgaagctatggggccattcccatg

SEQ ID NO: 2197604 - DNA, 25 bp, Homo sapien
tcaggccaattagcttaaccatcac

SEQ ID NO: 2197605 - DNA, 25 bp, Homo sapien
tcttccaggttgacatgaacaccct

SEQ ID NO: 2197606 - DNA, 25 bp, Homo sapien
gcagcaggtgttgtcagtgcctcac

SEQ ID NO: 2197607 - DNA, 25 bp, Homo sapien
tttaataccaaggacaaggcagcag

SEQ ID NO: 2197608 - DNA, 25 bp, Homo sapien
ccacttgagacttttgggccacaaa

SEQ ID NO: 2197609 - DNA, 25 bp, Homo sapien
tctccttgagccttgaaccttgacc

SEQ ID NO: 2197610 - DNA, 25 bp, Homo sapien
ccttgaccgtgtccacttgagactt

SEQ ID NO: 2197611 - DNA, 25 bp, Homo sapien
tgggccacaaaactcaatccattca

SEQ ID NO: 2197612 - DNA, 25 bp, Homo sapien
cctttcaatcgtggcttctcagact

SEQ ID NO: 2197613 - DNA, 25 bp, Homo sapien
cattaacaggatccttcgtggccgc

SEQ ID NO: 2197614 - DNA, 25 bp, Homo sapien
gctgcgttctgggttcttgaagtca

SEQ ID NO: 2197615 - DNA, 25 bp, Homo sapien
gtcactaatgcttagcattaacagg

SEQ ID NO: 2197616 - DNA, 25 bp, Homo sapien
tctttagctgaaggttggtcccaga

SEQ ID NO: 2197617 - DNA, 25 bp, Homo sapien
tagctgaaggttggtcccagaactc

SEQ ID NO: 2197618 - DNA, 25 bp, Homo sapien
gctgaaggttggtcccagaactcaa

SEQ ID NO: 2197619 - DNA, 25 bp, Homo sapien
gacaatctttagctgaaggttggtc

SEQ ID NO: 2197620 - DNA, 25 bp, Homo sapien
cagcaaaggcctctgcatgcaggtt

SEQ ID NO: 2197621 - DNA, 25 bp, Homo sapien
gtcagcaaaggcctctgcatgcagg

SEQ ID NO: 2197622 - DNA, 25 bp, Homo sapien
caaaggcctctgcatgcaggttcca

SEQ ID NO: 2197623 - DNA, 25 bp, Homo sapien
catgcaggttccagctccaccacat

SEQ ID NO: 2197624 - DNA, 25 bp, Homo sapien
cagctccatcattatgacagccgga

SEQ ID NO: 2197625 - DNA, 25 bp, Homo sapien
tcagatcggctgtgcgggagattca

SEQ ID NO: 2197626 - DNA, 25 bp, Homo sapien
cggctgtgcgggagattcagctcca

SEQ ID NO: 2197627 - DNA, 25 bp, Homo sapien
acagccggatacatcacaggcacca

SEQ ID NO: 2197628 - DNA, 25 bp, Homo sapien
caagagagcctgaactttggcctct

SEQ ID NO: 2197629 - DNA, 25 bp, Homo sapien
ctgggcttgagcaccaccttggttg

SEQ ID NO: 2197630 - DNA, 25 bp, Homo sapien
ctgtaaagggctgggcttgagcacc

SEQ ID NO: 2197631 - DNA, 25 bp, Homo sapien
ccaagagagcctgaactttggcctc

SEQ ID NO: 2197632 - DNA, 25 bp, Homo sapien
gacatcataactgctccagacaaag

SEQ ID NO: 2197633 - DNA, 25 bp, Homo sapien
ccagagggaatgacatcataactgc

SEQ ID NO: 2197634 - DNA, 25 bp, Homo sapien
cggaggaatcccagctgccaacatc

SEQ ID NO: 2197635 - DNA, 25 bp, Homo sapien
ctgtgatgtcacttgctccagcaga

SEQ ID NO: 2197636 - DNA, 25 bp, Homo sapien
acatcggccgccagtctcgtgtgtg

SEQ ID NO: 2197637 - DNA, 25 bp, Homo sapien
gggctgcgatgacaatgccaggatt

SEQ ID NO: 2197638 - DNA, 25 bp, Homo sapien
caggattcacaagcccctcgcagaa

SEQ ID NO: 2197639 - DNA, 25 bp, Homo sapien
gtgtgtcagcgaagataacagatgt

SEQ ID NO: 2197640 - DNA, 25 bp, Homo sapien
gaaggtaattattatgtcaagcctg

SEQ ID NO: 2197641 - DNA, 25 bp, Homo sapien
caattcccttgatcctttgacatcc

SEQ ID NO: 2197642 - DNA, 25 bp, Homo sapien
tcaagcctggttgagggcgttggtg

SEQ ID NO: 2197643 - DNA, 25 bp, Homo sapien
cctaatgagttgtgctggccttgcc

SEQ ID NO: 2197644 - DNA, 25 bp, Homo sapien
tcccggtgcaccatagcatgaaagt

SEQ ID NO: 2197645 - DNA, 25 bp, Homo sapien
tttaccatggctgggacctccgaga

SEQ ID NO: 2197646 - DNA, 25 bp, Homo sapien
aggcctgagcctcgtgtgtttgtca

SEQ ID NO: 2197647 - DNA, 25 bp, Homo sapien
tctttgaagtaaattgcatcccggt

SEQ ID NO: 2197648 - DNA, 25 bp, Homo sapien
tgaaagccaacgtgcatcccaaacc

SEQ ID NO: 2197649 - DNA, 25 bp, Homo sapien
tgagctgaaagccaacgtgcatccc

SEQ ID NO: 2197650 - DNA, 25 bp, Homo sapien
cccaaaccctagagatgtccataaa

SEQ ID NO: 2197651 - DNA, 25 bp, Homo sapien
gctgaaagccaacgtgcatcccaaa

SEQ ID NO: 2197652 - DNA, 25 bp, Homo sapien
gctgaggaagagtgttcgcatgtta

SEQ ID NO: 2197653 - DNA, 25 bp, Homo sapien
gttcgcatgttaggcttgccaaagc

SEQ ID NO: 2197654 - DNA, 25 bp, Homo sapien
gctaagaatagggataggatttcct

SEQ ID NO: 2197655 - DNA, 25 bp, Homo sapien
ttgaagtaggaaaagcgccccagaa

SEQ ID NO: 2197656 - DNA, 25 bp, Homo sapien
ctactccatcatgcgcagaaaccaa

SEQ ID NO: 2197657 - DNA, 25 bp, Homo sapien
tactccatcatgcgcagaaaccaac

SEQ ID NO: 2197658 - DNA, 25 bp, Homo sapien
gatattcatgcccaagatagtgtcc

SEQ ID NO: 2197659 - DNA, 25 bp, Homo sapien
gtgactcagacgctccagaattcgg

SEQ ID NO: 2197660 - DNA, 25 bp, Homo sapien
tgcaggctcataaaaagaaatcgct

SEQ ID NO: 2197661 - DNA, 25 bp, Homo sapien
ctggaggctgacaaagatctgcttc

SEQ ID NO: 2197662 - DNA, 25 bp, Homo sapien
tctttggtaccttgtattctttgct

SEQ ID NO: 2197663 - DNA, 25 bp, Homo sapien
ctcagatgcccagacggtgacagct

SEQ ID NO: 2197664 - DNA, 25 bp, Homo sapien
gctgaggcagtaagaattggctgct

SEQ ID NO: 2197665 - DNA, 25 bp, Homo sapien
agaagcggcagtgggcaatatgggc

SEQ ID NO: 2197666 - DNA, 25 bp, Homo sapien
tcatgtatgaatcccggcttcaggt

SEQ ID NO: 2197667 - DNA, 25 bp, Homo sapien
tcttcccggcttatctccctgctgt

SEQ ID NO: 2197668 - DNA, 25 bp, Homo sapien
aagtgactgctcgttatttgaacac

SEQ ID NO: 2197669 - DNA, 25 bp, Homo sapien
cccggcttcaggttcatttggtatg

SEQ ID NO: 2197670 - DNA, 25 bp, Homo sapien
acttgatcagcatagcgtgctacag

SEQ ID NO: 2197671 - DNA, 25 bp, Homo sapien
cttgatcagcatagcgtgctacagc

SEQ ID NO: 2197672 - DNA, 25 bp, Homo sapien
gtatatgacaaggtggggctcccta

SEQ ID NO: 2197673 - DNA, 25 bp, Homo sapien
tggtatatgacaaggtggggctccc

SEQ ID NO: 2197674 - DNA, 25 bp, Homo sapien
gggtactttattgatggtatatgac

SEQ ID NO: 2197675 - DNA, 25 bp, Homo sapien
gatggtatatgacaaggtggggctc

SEQ ID NO: 2197676 - DNA, 25 bp, Homo sapien
cctcccctcttcaaggggtctacat

SEQ ID NO: 2197677 - DNA, 25 bp, Homo sapien
aggaggggagattcagtgtggtggg

SEQ ID NO: 2197678 - DNA, 25 bp, Homo sapien
ctgtgaggaggggagattcagtgtg

SEQ ID NO: 2197679 - DNA, 25 bp, Homo sapien
cccctcttcaaggggtctacatgga

SEQ ID NO: 2197680 - DNA, 25 bp, Homo sapien
tctcttcctcttgtgctcttactgg

SEQ ID NO: 2197681 - DNA, 25 bp, Homo sapien
ctcttgtgctcttactggggctggt

SEQ ID NO: 2197682 - DNA, 25 bp, Homo sapien
tccccagcagtgagggtctctctct

SEQ ID NO: 2197683 - DNA, 25 bp, Homo sapien
gactccccagcagtgagggtctctc

SEQ ID NO: 2197684 - DNA, 25 bp, Homo sapien
tccaccactgacacggcagtgggga

SEQ ID NO: 2197685 - DNA, 25 bp, Homo sapien
tgacacggcagtggggacacagaag

SEQ ID NO: 2197686 - DNA, 25 bp, Homo sapien
ggtccaccactgacacggcagtggg

SEQ ID NO: 2197687 - DNA, 25 bp, Homo sapien
caggtccaccactgacacggcagtg

SEQ ID NO: 2197688 - DNA, 25 bp, Homo sapien
cttgcccatagccttcgcagtgcca

SEQ ID NO: 2197689 - DNA, 25 bp, Homo sapien
tgcccatagccttcgcagtgccagt

SEQ ID NO: 2197690 - DNA, 25 bp, Homo sapien
catagccttcgcagtgccagtagag

SEQ ID NO: 2197691 - DNA, 25 bp, Homo sapien
ccatagccttcgcagtgccagtaga

SEQ ID NO: 2197692 - DNA, 25 bp, Homo sapien
cccgtggccatcacgccacagtttc

SEQ ID NO: 2197693 - DNA, 25 bp, Homo sapien
agtgatggcgtggactatggtcatg

SEQ ID NO: 2197694 - DNA, 25 bp, Homo sapien
ggagagccccgtggccatcacgcca

SEQ ID NO: 2197695 - DNA, 25 bp, Homo sapien
tgatggcgtggactatggtcatgag

SEQ ID NO: 2197696 - DNA, 25 bp, Homo sapien
ttccacgataccaaagttgtcatgg

SEQ ID NO: 2197697 - DNA, 25 bp, Homo sapien
cgataccaaagttgtcatggatgac

SEQ ID NO: 2197698 - DNA, 25 bp, Homo sapien
ccacgataccaaagttgtcatggat

SEQ ID NO: 2197699 - DNA, 25 bp, Homo sapien
cttccacgataccaaagttgtcatg

SEQ ID NO: 2197700 - DNA, 25 bp, Homo sapien
gaaggcactgccgacaatcttgagg

SEQ ID NO: 2197701 - DNA, 25 bp, Homo sapien
ggcactgccgacaatcttgaggttg

SEQ ID NO: 2197702 - DNA, 25 bp, Homo sapien
actgccgacaatcttgaggttgttg

SEQ ID NO: 2197703 - DNA, 25 bp, Homo sapien
aaggcactgccgacaatcttgaggt

SEQ ID NO: 2197704 - DNA, 25 bp, Homo sapien
tttgctatgggtggagtcatattgg

SEQ ID NO: 2197705 - DNA, 25 bp, Homo sapien
aatttgctatgggtggagtcatatt

SEQ ID NO: 2197706 - DNA, 25 bp, Homo sapien
tggagtcatattggaacatgtaaac

SEQ ID NO: 2197707 - DNA, 25 bp, Homo sapien
tatgggtggagtcatattggaacat

SEQ ID NO: 2197708 - DNA, 25 bp, Homo sapien
agggatgtggtttggctgacgatgc

SEQ ID NO: 2197709 - DNA, 25 bp, Homo sapien
gatgtggtttggctgacgatgcaaa

SEQ ID NO: 2197710 - DNA, 25 bp, Homo sapien
ggctgacgatgcaaaagaagatgcg

SEQ ID NO: 2197711 - DNA, 25 bp, Homo sapien
tggtttggctgacgatgcaaaagaa

SEQ ID NO: 2197712 - DNA, 25 bp, Homo sapien
gatgctcctgacaataattatgttg

SEQ ID NO: 2197713 - DNA, 25 bp, Homo sapien
gaacgttctcaagatgctcctgaca

SEQ ID NO: 2197714 - DNA, 25 bp, Homo sapien
gcaaaagtaggaacgttctcaagat

SEQ ID NO: 2197715 - DNA, 25 bp, Homo sapien
cttcagcagcaaaagtaggaacgtt

SEQ ID NO: 2197716 - DNA, 25 bp, Homo sapien
gcacaatgttctcggtgaaaccatg

SEQ ID NO: 2197717 - DNA, 25 bp, Homo sapien
gccaggcacaggagcatcctcttca

SEQ ID NO: 2197718 - DNA, 25 bp, Homo sapien
caatgttctcggtgaaaccatgcca

SEQ ID NO: 2197719 - DNA, 25 bp, Homo sapien
tcaggcacaatgttctcggtgaaac

SEQ ID NO: 2197720 - DNA, 25 bp, Homo sapien
tggtgatttccactaggttcccaga

SEQ ID NO: 2197721 - DNA, 25 bp, Homo sapien
agagtccactatgcccactgtcagc

SEQ ID NO: 2197722 - DNA, 25 bp, Homo sapien
catttctagagttatggctccatct

SEQ ID NO: 2197723 - DNA, 25 bp, Homo sapien
aatggtgatttccactaggttccca

SEQ ID NO: 2197724 - DNA, 25 bp, Homo sapien
ctgcaccggaaaccacccgaaacat

SEQ ID NO: 2197725 - DNA, 25 bp, Homo sapien
taaaaatgcatacagggagagggag

SEQ ID NO: 2197726 - DNA, 25 bp, Homo sapien
ggagagggaggccaggttgatcagc

SEQ ID NO: 2197727 - DNA, 25 bp, Homo sapien
gagagggaggccaggttgatcagcc

SEQ ID NO: 2197728 - DNA, 25 bp, Homo sapien
ctactgcttaattaaaaatgcatac

SEQ ID NO: 2197729 - DNA, 25 bp, Homo sapien
ctaggtggtcaccttcagggacttg

SEQ ID NO: 2197730 - DNA, 25 bp, Homo sapien
ggtggtcaccttcagggacttgctg

SEQ ID NO: 2197731 - DNA, 25 bp, Homo sapien
tggtcaccttcagggacttgctgct

SEQ ID NO: 2197732 - DNA, 25 bp, Homo sapien
taggtggtcaccttcagggacttgc

SEQ ID NO: 2197733 - DNA, 25 bp, Homo sapien
acttctgcattgaagcctctttctc

SEQ ID NO: 2197734 - DNA, 25 bp, Homo sapien
ggattgaacttgtacccttggccaa

SEQ ID NO: 2197735 - DNA, 25 bp, Homo sapien
taacaattgagaagggaactcagcc

SEQ ID NO: 2197736 - DNA, 25 bp, Homo sapien
gagggaaccttctagatggctggaa

SEQ ID NO: 2197737 - DNA, 25 bp, Homo sapien
caagaaattggcatgtgaccgctac

SEQ ID NO: 2197738 - DNA, 25 bp, Homo sapien
gagactttgcgtctgaggccctcca

SEQ ID NO: 2197739 - DNA, 25 bp, Homo sapien
tatttgagatacctgcagtaactgt

SEQ ID NO: 2197740 - DNA, 25 bp, Homo sapien
ttggcgacaaagtcacagctcctgc

SEQ ID NO: 2197741 - DNA, 25 bp, Homo sapien
attgtgttccgagcccaatagggtc

SEQ ID NO: 2197742 - DNA, 25 bp, Homo sapien
tgaagtaagaatgcccttccccgcc

SEQ ID NO: 2197743 - DNA, 25 bp, Homo sapien
gctggcgttggccagtgtagacacc

SEQ ID NO: 2197744 - DNA, 25 bp, Homo sapien
ggactctctgaagtaagaatgccct

SEQ ID NO: 2197745 - DNA, 25 bp, Homo sapien
tagacacctgctgctgcgtcttttt

SEQ ID NO: 2197746 - DNA, 25 bp, Homo sapien
cagggaaagcccaatgccattgcca

SEQ ID NO: 2197747 - DNA, 25 bp, Homo sapien
ttagaagcctccgtgccagggaaag

SEQ ID NO: 2197748 - DNA, 25 bp, Homo sapien
aagcccaatgccattgccaactgca

SEQ ID NO: 2197749 - DNA, 25 bp, Homo sapien
tccgtgccagggaaagcccaatgcc

SEQ ID NO: 2197750 - DNA, 25 bp, Homo sapien
gggacagccaaggattcccgtgcca

SEQ ID NO: 2197751 - DNA, 25 bp, Homo sapien
aattactattgatcccacagctctc

SEQ ID NO: 2197752 - DNA, 25 bp, Homo sapien
ccccatgctgtttgccggggacagc

SEQ ID NO: 2197753 - DNA, 25 bp, Homo sapien
tctgaaggaaattactattgatccc

SEQ ID NO: 2197754 - DNA, 25 bp, Homo sapien
gcaccagatggccagaccaacaccc

SEQ ID NO: 2197755 - DNA, 25 bp, Homo sapien
cagatggccagaccaacaccctctg

SEQ ID NO: 2197756 - DNA, 25 bp, Homo sapien
tgccgcacgctccctgggagacgag

SEQ ID NO: 2197757 - DNA, 25 bp, Homo sapien
ctctggctgccgcacgctccctggg

SEQ ID NO: 2197758 - DNA, 25 bp, Homo sapien
ggaaatcaccccagataaggcggct

SEQ ID NO: 2197759 - DNA, 25 bp, Homo sapien
gagtctgcgtttcttgccagctgag

SEQ ID NO: 2197760 - DNA, 25 bp, Homo sapien
gaggcgtctcctaacacattgctgt

SEQ ID NO: 2197761 - DNA, 25 bp, Homo sapien
gacggcgcagcaggattaagaaatc

SEQ ID NO: 2197762 - DNA, 25 bp, Homo sapien
gggccgcagagtgaatacattgcac

SEQ ID NO: 2197763 - DNA, 25 bp, Homo sapien
tgcacgcggtatttattatgcggcc

SEQ ID NO: 2197764 - DNA, 25 bp, Homo sapien
ggctcccggacgtggcaaatcttgt

SEQ ID NO: 2197765 - DNA, 25 bp, Homo sapien
tggcaaatcttgtccggagcgccgc

SEQ ID NO: 2197766 - DNA, 25 bp, Homo sapien
tatggtgatcatctgattcccgtga

SEQ ID NO: 2197767 - DNA, 25 bp, Homo sapien
gctcttctttgccacagcctgactt

SEQ ID NO: 2197768 - DNA, 25 bp, Homo sapien
tgatgatctggtgcccctgatgttt

SEQ ID NO: 2197769 - DNA, 25 bp, Homo sapien
ggcaaatgacgtggattcaccagga

SEQ ID NO: 2197770 - DNA, 25 bp, Homo sapien
acatcttgccgtcacccacgtcacc

SEQ ID NO: 2197771 - DNA, 25 bp, Homo sapien
atcttgccgtcacccacgtcaccca

SEQ ID NO: 2197772 - DNA, 25 bp, Homo sapien
acacatcttgccgtcacccacgtca

SEQ ID NO: 2197773 - DNA, 25 bp, Homo sapien
tcttgccgtcacccacgtcacccat

SEQ ID NO: 2197774 - DNA, 25 bp, Homo sapien
aaagcttctatgagctaggccaggg

SEQ ID NO: 2197775 - DNA, 25 bp, Homo sapien
tccaaagggcttgatcatggcagcg

SEQ ID NO: 2197776 - DNA, 25 bp, Homo sapien
taggccagggtaacagaccaacaag

SEQ ID NO: 2197777 - DNA, 25 bp, Homo sapien
tcctcatagaagtgcaacaacgaca

SEQ ID NO: 2197778 - DNA, 25 bp, Homo sapien
accagcgggtccttgcaggaggcca

SEQ ID NO: 2197779 - DNA, 25 bp, Homo sapien
accaccagcgggtccttgcaggagg

SEQ ID NO: 2197780 - DNA, 25 bp, Homo sapien
gaccaccagcgggtccttgcaggag

SEQ ID NO: 2197781 - DNA, 25 bp, Homo sapien
aaggaccaccagcgggtccttgcag

SEQ ID NO: 2197782 - DNA, 25 bp, Homo sapien
tcagagggccttgttagctgcagtg

SEQ ID NO: 2197783 - DNA, 25 bp, Homo sapien
ctgtttggtgccgtttcagagggcc

SEQ ID NO: 2197784 - DNA, 25 bp, Homo sapien
taaccacgagacagaggaagcgccc

SEQ ID NO: 2197785 - DNA, 25 bp, Homo sapien
agaagcgcccggaattaaccacgag

SEQ ID NO: 2197786 - DNA, 25 bp, Homo sapien
tcccacaagaatcgggcaccattct

SEQ ID NO: 2197787 - DNA, 25 bp, Homo sapien
tcaacttgagcagagtggattcttc

SEQ ID NO: 2197788 - DNA, 25 bp, Homo sapien
ctgaagtacttgctgagttgcaagt

SEQ ID NO: 2197789 - DNA, 25 bp, Homo sapien
gcaccattctttttacattggggaa

SEQ ID NO: 2197790 - DNA, 25 bp, Homo sapien
tgagtcaaagccctcacggaatggt

SEQ ID NO: 2197791 - DNA, 25 bp, Homo sapien
gtcaaagccctcacggaatggtcca

SEQ ID NO: 2197792 - DNA, 25 bp, Homo sapien
ttgggtgagacgctgtcagtgtgag

SEQ ID NO: 2197793 - DNA, 25 bp, Homo sapien
cgctgtcagtgtgagttgagtcaaa

SEQ ID NO: 2197794 - DNA, 25 bp, Homo sapien
gtgaacacggtggacaagccaatcc

SEQ ID NO: 2197795 - DNA, 25 bp, Homo sapien
cgtccagtgaacacggtggacaagc

SEQ ID NO: 2197796 - DNA, 25 bp, Homo sapien
ctcattcccgcaggcctcgttaatg

SEQ ID NO: 2197797 - DNA, 25 bp, Homo sapien
aggcctcgttaatgaacctgcagca

SEQ ID NO: 2197798 - DNA, 25 bp, Homo sapien
tgaatggatttttcgaccccagaat

SEQ ID NO: 2197799 - DNA, 25 bp, Homo sapien
cataattgttgctccctgaagctca

SEQ ID NO: 2197800 - DNA, 25 bp, Homo sapien
gaagctcacgtgcaactagggaaaa

SEQ ID NO: 2197801 - DNA, 25 bp, Homo sapien
tcctcgctgataataagaactggct

SEQ ID NO: 2197802 - DNA, 25 bp, Homo sapien
tgacatgcctaagtaggtgtgggcc

SEQ ID NO: 2197803 - DNA, 25 bp, Homo sapien
catcatatggctttagtgacatgcc

SEQ ID NO: 2197804 - DNA, 25 bp, Homo sapien
ttctgttggatgctttaggagccca

SEQ ID NO: 2197805 - DNA, 25 bp, Homo sapien
ccaggagtgggtcggttgttattca

SEQ ID NO: 2197806 - DNA, 25 bp, Homo sapien
gatgaggatgaacgtcatggaaacc

SEQ ID NO: 2197807 - DNA, 25 bp, Homo sapien
tgaggatgaacgtcatggaaaccca

SEQ ID NO: 2197808 - DNA, 25 bp, Homo sapien
gaggatgaacgtcatggaaacccat

SEQ ID NO: 2197809 - DNA, 25 bp, Homo sapien
ctgatgaggatgaacgtcatggaaa

SEQ ID NO: 2197810 - DNA, 25 bp, Homo sapien
ggtggttgaaataaccagcacattc

SEQ ID NO: 2197811 - DNA, 25 bp, Homo sapien
ggttgaaataaccagcacattcttc

SEQ ID NO: 2197812 - DNA, 25 bp, Homo sapien
gaaataaccagcacattcttcacat

SEQ ID NO: 2197813 - DNA, 25 bp, Homo sapien
cctggtggttgaaataaccagcaca

SEQ ID NO: 2197814 - DNA, 25 bp, Homo sapien
tctctctctggattaatattaaggg

SEQ ID NO: 2197815 - DNA, 25 bp, Homo sapien
tattaagggtcttgaagaggagcag

SEQ ID NO: 2197816 - DNA, 25 bp, Homo sapien
tgccagcttcccaacttgcctaggc

SEQ ID NO: 2197817 - DNA, 25 bp, Homo sapien
agcttcccaacttgcctaggctgtt

SEQ ID NO: 2197818 - DNA, 25 bp, Homo sapien
aaatcatcgttctgggaacacaaag

SEQ ID NO: 2197819 - DNA, 25 bp, Homo sapien
agtctggaaggaaagcccgttgtca

SEQ ID NO: 2197820 - DNA, 25 bp, Homo sapien
tgggaacacaaagccgcagggaccc

SEQ ID NO: 2197821 - DNA, 25 bp, Homo sapien
tgtctcctgtgtggcgctgaagccc

SEQ ID NO: 2197822 - DNA, 25 bp, Homo sapien
cacgtgtgtgttaccccggcagttg

SEQ ID NO: 2197823 - DNA, 25 bp, Homo sapien
aaacctggcagcgttatccacacgg

SEQ ID NO: 2197824 - DNA, 25 bp, Homo sapien
tttgtagtattcaacagccgggcgc

SEQ ID NO: 2197825 - DNA, 25 bp, Homo sapien
acacggccgttttcagtccaaatgg

SEQ ID NO: 2197826 - DNA, 25 bp, Homo sapien
acaccatcgaatggtccggatgccc

SEQ ID NO: 2197827 - DNA, 25 bp, Homo sapien
caggcacaccatcgaatggtccgga

SEQ ID NO: 2197828 - DNA, 25 bp, Homo sapien
cacaccatcgaatggtccggatgcc

SEQ ID NO: 2197829 - DNA, 25 bp, Homo sapien
ggcacaccatcgaatggtccggatg

SEQ ID NO: 2197830 - DNA, 25 bp, Homo sapien
aaaattaaagaggagcactcctggg

SEQ ID NO: 2197831 - DNA, 25 bp, Homo sapien
ttttaacccagataagacttcagcc

SEQ ID NO: 2197832 - DNA, 25 bp, Homo sapien
ctttcagagcgtggatagcagatct

SEQ ID NO: 2197833 - DNA, 25 bp, Homo sapien
tagcagatctgcacgtgaaacacag

SEQ ID NO: 2197834 - DNA, 25 bp, Homo sapien
tctccagaactaaactggacagact

SEQ ID NO: 2197835 - DNA, 25 bp, Homo sapien
cttttctccagaactaaactggaca

SEQ ID NO: 2197836 - DNA, 25 bp, Homo sapien
agaactaaactggacagactttgcc

SEQ ID NO: 2197837 - DNA, 25 bp, Homo sapien
tccagaactaaactggacagacttt

SEQ ID NO: 2197838 - DNA, 25 bp, Homo sapien
ccagggaaagcccgcagcccagcca

SEQ ID NO: 2197839 - DNA, 25 bp, Homo sapien
gtgggccccagggaaagcccgcagc

SEQ ID NO: 2197840 - DNA, 25 bp, Homo sapien
gccccagggaaagcccgcagcccag

SEQ ID NO: 2197841 - DNA, 25 bp, Homo sapien
cagggaaagcccgcagcccagccat

SEQ ID NO: 2197842 - DNA, 25 bp, Homo sapien
cattggaggtgctaagaaatggcag

SEQ ID NO: 2197843 - DNA, 25 bp, Homo sapien
actatctgttgtttgggatcttggc

SEQ ID NO: 2197844 - DNA, 25 bp, Homo sapien
tgtgcagaggttctcactatctgtt

SEQ ID NO: 2197845 - DNA, 25 bp, Homo sapien
ttctcctccactcggtgtcagctgg

SEQ ID NO: 2197846 - DNA, 25 bp, Homo sapien
gtgaagcaaacagccatcttagtac

SEQ ID NO: 2197847 - DNA, 25 bp, Homo sapien
catgtgtgaagcaaacagccatctt

SEQ ID NO: 2197848 - DNA, 25 bp, Homo sapien
tgcatgtgtgaagcaaacagccatc

SEQ ID NO: 2197849 - DNA, 25 bp, Homo sapien
cagctgcatgtgtgaagcaaacagc

SEQ ID NO: 2197850 - DNA, 25 bp, Homo sapien
tggacgacaggtctcttctttgtcc

SEQ ID NO: 2197851 - DNA, 25 bp, Homo sapien
ggtttctcgtaggtgacatctgctt

SEQ ID NO: 2197852 - DNA, 25 bp, Homo sapien
tggattttttggacgacaggtctct

SEQ ID NO: 2197853 - DNA, 25 bp, Homo sapien
gttcctgtggtttctcgtaggtgac

SEQ ID NO: 2197854 - DNA, 25 bp, Homo sapien
ctaaggagaagctcaccaccagttt

SEQ ID NO: 2197855 - DNA, 25 bp, Homo sapien
taaggagaagctcaccaccagtttc

SEQ ID NO: 2197856 - DNA, 25 bp, Homo sapien
tctcagggagtctaggtatattcag

SEQ ID NO: 2197857 - DNA, 25 bp, Homo sapien
aactggtggccatgttagaactaac

SEQ ID NO: 2197858 - DNA, 25 bp, Homo sapien
tggtggccctttcacaaagggtcca

SEQ ID NO: 2197859 - DNA, 25 bp, Homo sapien
gggtccatccaaaagcaggcattga

SEQ ID NO: 2197860 - DNA, 25 bp, Homo sapien
agtctgttcctaaatcctccacaac

SEQ ID NO: 2197861 - DNA, 25 bp, Homo sapien
aaggcactgcctttggctttagagt

SEQ ID NO: 2197862 - DNA, 25 bp, Homo sapien
cttcccttatgaaagtcgacacttt

SEQ ID NO: 2197863 - DNA, 25 bp, Homo sapien
ctaaatcctccacaacaataaagtt

SEQ ID NO: 2197864 - DNA, 25 bp, Homo sapien
tgggacgttgcttcctagaccttcg

SEQ ID NO: 2197865 - DNA, 25 bp, Homo sapien
gaccttcgtgctgcctgaacctttg

SEQ ID NO: 2197866 - DNA, 25 bp, Homo sapien
tgtctgcagcttaatgagggtccga

SEQ ID NO: 2197867 - DNA, 25 bp, Homo sapien
aacctttgctgcagcggctggaaca

SEQ ID NO: 2197868 - DNA, 25 bp, Homo sapien
taagtgcaacccttaatacaggaag

SEQ ID NO: 2197869 - DNA, 25 bp, Homo sapien
gtctgttgttgatattccagtcata

SEQ ID NO: 2197870 - DNA, 25 bp, Homo sapien
cagcagcagtacagtatagatgcaa

SEQ ID NO: 2197871 - DNA, 25 bp, Homo sapien
tagaaatggagtaaggcgtaagtgc

SEQ ID NO: 2197872 - DNA, 25 bp, Homo sapien
aacatccagttgaggcaagagagcc

SEQ ID NO: 2197873 - DNA, 25 bp, Homo sapien
agaacatccagttgaggcaagagag

SEQ ID NO: 2197874 - DNA, 25 bp, Homo sapien
ccagttgaggcaagagagccaagtg

SEQ ID NO: 2197875 - DNA, 25 bp, Homo sapien
tcagtttgtgggcaattgagagcag

SEQ ID NO: 2197876 - DNA, 25 bp, Homo sapien
cctgcaaagccgcctgcagaaatca

SEQ ID NO: 2197877 - DNA, 25 bp, Homo sapien
tattgaaaatccagcaaaagcctgg

SEQ ID NO: 2197878 - DNA, 25 bp, Homo sapien
gtccatggagggaaatcacttattg

SEQ ID NO: 2197879 - DNA, 25 bp, Homo sapien
gagggaaatcacttattgaaaatcc

SEQ ID NO: 2197880 - DNA, 25 bp, Homo sapien
aagcctggccaactgagggctgctc

SEQ ID NO: 2197881 - DNA, 25 bp, Homo sapien
ttcaagaactggagccgcttgtgtg

SEQ ID NO: 2197882 - DNA, 25 bp, Homo sapien
caatccatcattggggggaccccag

SEQ ID NO: 2197883 - DNA, 25 bp, Homo sapien
tgtgtttattagtgccttgaaagaa

SEQ ID NO: 2197884 - DNA, 25 bp, Homo sapien
gaaagctccccaacaatccatcatt

SEQ ID NO: 2197885 - DNA, 25 bp, Homo sapien
accccgtgcacatgacccttacagt

SEQ ID NO: 2197886 - DNA, 25 bp, Homo sapien
cagcgcttcccaccccgtgcacatg

SEQ ID NO: 2197887 - DNA, 25 bp, Homo sapien
ctccacaggaagtagcagccaccat

SEQ ID NO: 2197888 - DNA, 25 bp, Homo sapien
ccttacagtccacgttcctcttgct

SEQ ID NO: 2197889 - DNA, 25 bp, Homo sapien
ggcctggcagtagcatttctcagaa

SEQ ID NO: 2197890 - DNA, 25 bp, Homo sapien
cctggcagtagcatttctcagaaac

SEQ ID NO: 2197891 - DNA, 25 bp, Homo sapien
gcctggcagtagcatttctcagaaa

SEQ ID NO: 2197892 - DNA, 25 bp, Homo sapien
ggacccacggccaagtgccgcgcag

SEQ ID NO: 2197893 - DNA, 25 bp, Homo sapien
agagactgccccgacggcccttcta

SEQ ID NO: 2197894 - DNA, 25 bp, Homo sapien
ctgggacccacggccaagtgccgcg

SEQ ID NO: 2197895 - DNA, 25 bp, Homo sapien
gggagatccgggggcgcagagactg

SEQ ID NO: 2197896 - DNA, 25 bp, Homo sapien
gggcagagggaagtgggccccgcgc

SEQ ID NO: 2197897 - DNA, 25 bp, Homo sapien
tgtccaagcggcgagggctaggagt

SEQ ID NO: 2197898 - DNA, 25 bp, Homo sapien
ttctcggccaaaagccagctccgcg

SEQ ID NO: 2197899 - DNA, 25 bp, Homo sapien
gctaggagtggcctcgcctagcgct

SEQ ID NO: 2197900 - DNA, 25 bp, Homo sapien
gacacatcccacaaaccgaggtgaa

SEQ ID NO: 2197901 - DNA, 25 bp, Homo sapien
tgaggacattaaaagtgaagtaggc

SEQ ID NO: 2197902 - DNA, 25 bp, Homo sapien
gtaagcctcgcggagtcctaggaca

SEQ ID NO: 2197903 - DNA, 25 bp, Homo sapien
catatggccagaactgtgaggacat

SEQ ID NO: 2197904 - DNA, 25 bp, Homo sapien
cctaaggcttaaacttggcgcggcg

SEQ ID NO: 2197905 - DNA, 25 bp, Homo sapien
aatttagcccgaaggcagcggctcc

SEQ ID NO: 2197906 - DNA, 25 bp, Homo sapien
ccagatctgcaacgcctaaggctta

SEQ ID NO: 2197907 - DNA, 25 bp, Homo sapien
tggcgcggcggtaaatttagcccga

SEQ ID NO: 2197908 - DNA, 25 bp, Homo sapien
gggctgcaaacctacgccggctctg

SEQ ID NO: 2197909 - DNA, 25 bp, Homo sapien
actttggataggccattattttgca

SEQ ID NO: 2197910 - DNA, 25 bp, Homo sapien
tttgagtaattcgttgcttagctac

SEQ ID NO: 2197911 - DNA, 25 bp, Homo sapien
tggaaacatttgcaagtggtgatat

SEQ ID NO: 2197912 - DNA, 25 bp, Homo sapien
gaagcaggaggaacccgaagcctgc

SEQ ID NO: 2197913 - DNA, 25 bp, Homo sapien
ccgaagcctgctccgtcttgcagaa

SEQ ID NO: 2197914 - DNA, 25 bp, Homo sapien
gaccatctgttttttatggcccctc

SEQ ID NO: 2197915 - DNA, 25 bp, Homo sapien
taaattgttcctaatgagaccatct

SEQ ID NO: 2197916 - DNA, 25 bp, Homo sapien
gaaaccacgagcctgtagctgctct

SEQ ID NO: 2197917 - DNA, 25 bp, Homo sapien
aacatcgccagagccacaacgcgaa

SEQ ID NO: 2197918 - DNA, 25 bp, Homo sapien
cgacgtcgcccactatctagggcct

SEQ ID NO: 2197919 - DNA, 25 bp, Homo sapien
tccatatctggaacatcgccagagc

SEQ ID NO: 2197920 - DNA, 25 bp, Homo sapien
gggttcggtgcgtcgcctctcgcgg

SEQ ID NO: 2197921 - DNA, 25 bp, Homo sapien
agcgcctcgcttcttccagactgta

SEQ ID NO: 2197922 - DNA, 25 bp, Homo sapien
gactgtaattccacactcccgcaag

SEQ ID NO: 2197923 - DNA, 25 bp, Homo sapien
cgcttccgcactcccgggttcggtg

SEQ ID NO: 2197924 - DNA, 25 bp, Homo sapien
gcggaatcgtttgagggagttggaa

SEQ ID NO: 2197925 - DNA, 25 bp, Homo sapien
ctgcggaatcgtttgagggagttgg

SEQ ID NO: 2197926 - DNA, 25 bp, Homo sapien
tgcggaatcgtttgagggagttgga

SEQ ID NO: 2197927 - DNA, 25 bp, Homo sapien
gccttgacctccactcgaggcgcca

SEQ ID NO: 2197928 - DNA, 25 bp, Homo sapien
gaggccttccagtcgcctggctggc

SEQ ID NO: 2197929 - DNA, 25 bp, Homo sapien
aaccagaggccttccagtcgcctgg

SEQ ID NO: 2197930 - DNA, 25 bp, Homo sapien
ggaatcccgagagaccaagacctgg

SEQ ID NO: 2197931 - DNA, 25 bp, Homo sapien
aattgccaaatggtcgctgggcagg

SEQ ID NO: 2197932 - DNA, 25 bp, Homo sapien
aaattgccaaatggtcgctgggcag

SEQ ID NO: 2197933 - DNA, 25 bp, Homo sapien
ccaacagcccgaaattgccaaatgg

SEQ ID NO: 2197934 - DNA, 25 bp, Homo sapien
agccgcgctccaacagcccgaaatt

SEQ ID NO: 2197935 - DNA, 25 bp, Homo sapien
agctcccggcccagatcgtaaacca

SEQ ID NO: 2197936 - DNA, 25 bp, Homo sapien
ccaccctaggctcaggccgcgctag

SEQ ID NO: 2197937 - DNA, 25 bp, Homo sapien
cagatcgtaaaccacccgccggaat

SEQ ID NO: 2197938 - DNA, 25 bp, Homo sapien
aggccgcgctaggaccagctcccgg

SEQ ID NO: 2197939 - DNA, 25 bp, Homo sapien
ccaggcgacgcggcgcgagattcca

SEQ ID NO: 2197940 - DNA, 25 bp, Homo sapien
aggcgacgcggcgcgagattccaca

SEQ ID NO: 2197941 - DNA, 25 bp, Homo sapien
gcgacgcggcgcgagattccacagc

SEQ ID NO: 2197942 - DNA, 25 bp, Homo sapien
gacgcggcgcgagattccacagctc

SEQ ID NO: 2197943 - DNA, 25 bp, Homo sapien
tttaatctccgccacgactcggcac

SEQ ID NO: 2197944 - DNA, 25 bp, Homo sapien
ctcgggccgtatggcactttaatct

SEQ ID NO: 2197945 - DNA, 25 bp, Homo sapien
cttgctcgggccgtatggcacttta

SEQ ID NO: 2197946 - DNA, 25 bp, Homo sapien
cacgactcggcacaaatgcacttgt

SEQ ID NO: 2197947 - DNA, 25 bp, Homo sapien
gcgagtgtctgactcggccgagata

SEQ ID NO: 2197948 - DNA, 25 bp, Homo sapien
taagggtgcgcggttggccccgcgc

SEQ ID NO: 2197949 - DNA, 25 bp, Homo sapien
tctgactcggccgagataagggtgc

SEQ ID NO: 2197950 - DNA, 25 bp, Homo sapien
taaatgtcaacagattccgcgcggc

SEQ ID NO: 2197951 - DNA, 25 bp, Homo sapien
ccactttcaagatagctcacacaca

SEQ ID NO: 2197952 - DNA, 25 bp, Homo sapien
ctttcaagatagctcacacacattg

SEQ ID NO: 2197953 - DNA, 25 bp, Homo sapien
tttcaagatagctcacacacattgt

SEQ ID NO: 2197954 - DNA, 25 bp, Homo sapien
ggatgattaagttctgcaggagtaa

SEQ ID NO: 2197955 - DNA, 25 bp, Homo sapien
cttataagaagccgccaaaggtgtg

SEQ ID NO: 2197956 - DNA, 25 bp, Homo sapien
agaagccgccaaaggtgtgaagagc

SEQ ID NO: 2197957 - DNA, 25 bp, Homo sapien
caaaactaggatgattaagttctgc

SEQ ID NO: 2197958 - DNA, 25 bp, Homo sapien
ttttgggtcaatcagccagtctctc

SEQ ID NO: 2197959 - DNA, 25 bp, Homo sapien
ggatcccactccctggcaatattaa

SEQ ID NO: 2197960 - DNA, 25 bp, Homo sapien
cagtctctcagttgtctcctaagtg

SEQ ID NO: 2197961 - DNA, 25 bp, Homo sapien
gtatggaccttgcaaatttagcaga

SEQ ID NO: 2197962 - DNA, 25 bp, Homo sapien
cttctggtgacgcgtccctctccct

SEQ ID NO: 2197963 - DNA, 25 bp, Homo sapien
ctggtgacgcgtccctctccctgtg

SEQ ID NO: 2197964 - DNA, 25 bp, Homo sapien
tctggtgacgcgtccctctccctgt

SEQ ID NO: 2197965 - DNA, 25 bp, Homo sapien
ttctggtgacgcgtccctctccctg

SEQ ID NO: 2197966 - DNA, 25 bp, Homo sapien
catggtgagctctattacccatggg

SEQ ID NO: 2197967 - DNA, 25 bp, Homo sapien
tctatgttcatggtgagctctatta

SEQ ID NO: 2197968 - DNA, 25 bp, Homo sapien
ggatctcatctatacccccagtcag

SEQ ID NO: 2197969 - DNA, 25 bp, Homo sapien
tctatacccccagtcagttctacgt

SEQ ID NO: 2197970 - DNA, 25 bp, Homo sapien
aatagcatttacctggcccgagcag

SEQ ID NO: 2197971 - DNA, 25 bp, Homo sapien
aacaatccggtttgatgcgtgaaaa

SEQ ID NO: 2197972 - DNA, 25 bp, Homo sapien
actgtacatggtgggtccagcttgc

SEQ ID NO: 2197973 - DNA, 25 bp, Homo sapien
tacagtcatggcctgtcatcagagc

SEQ ID NO: 2197974 - DNA, 25 bp, Homo sapien
gcctctgcaatggtgacaatttcca

SEQ ID NO: 2197975 - DNA, 25 bp, Homo sapien
tccacgtttggaaaattgcagcgaa

SEQ ID NO: 2197976 - DNA, 25 bp, Homo sapien
gaaacctgccgataaaattctgcct

SEQ ID NO: 2197977 - DNA, 25 bp, Homo sapien
ggacatccgaaagcagtagccagtt

SEQ ID NO: 2197978 - DNA, 25 bp, Homo sapien
gtaggaactctggactcatctgtcc

SEQ ID NO: 2197979 - DNA, 25 bp, Homo sapien
gactcatctgtccatctagggagga

SEQ ID NO: 2197980 - DNA, 25 bp, Homo sapien
taactacttctagcagtaggaactc

SEQ ID NO: 2197981 - DNA, 25 bp, Homo sapien
catcgccattcctttctaaggtgag

SEQ ID NO: 2197982 - DNA, 25 bp, Homo sapien
actgcattgtgtgaggttcgtggac

SEQ ID NO: 2197983 - DNA, 25 bp, Homo sapien
aggtttataccatgctgtgccccac

SEQ ID NO: 2197984 - DNA, 25 bp, Homo sapien
gaagctgatgtgtaccctttctgga

SEQ ID NO: 2197985 - DNA, 25 bp, Homo sapien
ccaagatgattggtcactggcgaat

SEQ ID NO: 2197986 - DNA, 25 bp, Homo sapien
ctcaagagcagctcagctagttttc

SEQ ID NO: 2197987 - DNA, 25 bp, Homo sapien
ctggggggttggctaaaacatcata

SEQ ID NO: 2197988 - DNA, 25 bp, Homo sapien
atcgctataggcatcgtcatcatca

SEQ ID NO: 2197989 - DNA, 25 bp, Homo sapien
tacttggatgttataacacggtaag

SEQ ID NO: 2197990 - DNA, 25 bp, Homo sapien
aattcaaacacatcgctataggcat

SEQ ID NO: 2197991 - DNA, 25 bp, Homo sapien
agctgccatagaagtcccaagtgcc

SEQ ID NO: 2197992 - DNA, 25 bp, Homo sapien
tcatcattgcgaccctggaggtcat

SEQ ID NO: 2197993 - DNA, 25 bp, Homo sapien
cacaaacagagctgccatagaagtc

SEQ ID NO: 2197994 - DNA, 25 bp, Homo sapien
tcattgcgaccctggaggtcattta

SEQ ID NO: 2197995 - DNA, 25 bp, Homo sapien
acttttccataagttcactgtgggt

SEQ ID NO: 2197996 - DNA, 25 bp, Homo sapien
tgttaagaacttttccataagttca

SEQ ID NO: 2197997 - DNA, 25 bp, Homo sapien
tttccataagttcactgtgggtcat

SEQ ID NO: 2197998 - DNA, 25 bp, Homo sapien
agaacttttccataagttcactgtg

SEQ ID NO: 2197999 - DNA, 25 bp, Homo sapien
caagtgatcgttctcaacagcatcg

SEQ ID NO: 2198000 - DNA, 25 bp, Homo sapien
tacctgagtacgtagccaaggtggg

SEQ ID NO: 2198001 - DNA, 25 bp, Homo sapien
tagtcggacaatttccaagtgatcg

SEQ ID NO: 2198002 - DNA, 25 bp, Homo sapien
accataagagagaagtagtcggaca

SEQ ID NO: 2198003 - DNA, 25 bp, Homo sapien
gaggtgtcgcacaatgttgagccag

SEQ ID NO: 2198004 - DNA, 25 bp, Homo sapien
cacaagcttcatgcagggcgcagta

SEQ ID NO: 2198005 - DNA, 25 bp, Homo sapien
gcagtaacctgcgttgtcccgatga

SEQ ID NO: 2198006 - DNA, 25 bp, Homo sapien
gacatcagcgccatattcaaggagg

SEQ ID NO: 2198007 - DNA, 25 bp, Homo sapien
gtatctgccaccagacaacaggtta

SEQ ID NO: 2198008 - DNA, 25 bp, Homo sapien
gccaccagacaacaggttacactgt

SEQ ID NO: 2198009 - DNA, 25 bp, Homo sapien
tctgccaccagacaacaggttacac

SEQ ID NO: 2198010 - DNA, 25 bp, Homo sapien
tatctgccaccagacaacaggttac

SEQ ID NO: 2198011 - DNA, 25 bp, Homo sapien
gccccgagcactggtatccaggata

SEQ ID NO: 2198012 - DNA, 25 bp, Homo sapien
tccaggataccgcatgaagctgctg

SEQ ID NO: 2198013 - DNA, 25 bp, Homo sapien
gctgctcttttagcaggccctcact

SEQ ID NO: 2198014 - DNA, 25 bp, Homo sapien
cagaaagcccacaatcctctgagct

SEQ ID NO: 2198015 - DNA, 25 bp, Homo sapien
gaaaccttcatcactactagggctg

SEQ ID NO: 2198016 - DNA, 25 bp, Homo sapien
aaccttcatcactactagggctgat

SEQ ID NO: 2198017 - DNA, 25 bp, Homo sapien
tggaaaccttcatcactactagggc

SEQ ID NO: 2198018 - DNA, 25 bp, Homo sapien
ctggaaaccttcatcactactaggg

SEQ ID NO: 2198019 - DNA, 25 bp, Homo sapien
gcagaagggtctcgccagcgttctt

SEQ ID NO: 2198020 - DNA, 25 bp, Homo sapien
caagcggtcgaagggctttggctcc

SEQ ID NO: 2198021 - DNA, 25 bp, Homo sapien
gatcatagtccgaactgggctccgg

SEQ ID NO: 2198022 - DNA, 25 bp, Homo sapien
caataagtctccgtgcttccggcgg

SEQ ID NO: 2198023 - DNA, 25 bp, Homo sapien
cgtagtattcccctgtcagtggcaa

SEQ ID NO: 2198024 - DNA, 25 bp, Homo sapien
aagactcttcatgggcggagagccg

SEQ ID NO: 2198025 - DNA, 25 bp, Homo sapien
tgcactggtggatgaaagactcttc

SEQ ID NO: 2198026 - DNA, 25 bp, Homo sapien
ggttttgcacagtctcttcccggat

SEQ ID NO: 2198027 - DNA, 25 bp, Homo sapien
tgggttgctcaggacccagagactg

SEQ ID NO: 2198028 - DNA, 25 bp, Homo sapien
gcaagttgcttcaaagggcccggaa

SEQ ID NO: 2198029 - DNA, 25 bp, Homo sapien
cctgtgcaaccacgggcaaggacat

SEQ ID NO: 2198030 - DNA, 25 bp, Homo sapien
aaaagccctttcctacagagagtgg

SEQ ID NO: 2198031 - DNA, 25 bp, Homo sapien
tcgttctctaaggtgcagcaagtgg

SEQ ID NO: 2198032 - DNA, 25 bp, Homo sapien
ttaagagactcttccgaccagcttc

SEQ ID NO: 2198033 - DNA, 25 bp, Homo sapien
gtttgccatctgctgccgacacctg

SEQ ID NO: 2198034 - DNA, 25 bp, Homo sapien
gatgttagtcccctgaggaatggcc

SEQ ID NO: 2198035 - DNA, 25 bp, Homo sapien
caggttggtcagctcactataatgt

SEQ ID NO: 2198036 - DNA, 25 bp, Homo sapien
taattcaatgcacaccttcaggttg

SEQ ID NO: 2198037 - DNA, 25 bp, Homo sapien
tcttctaagtggttagaggaactgt

SEQ ID NO: 2198038 - DNA, 25 bp, Homo sapien
ttagaggaactgtttgtcatttccc

SEQ ID NO: 2198039 - DNA, 25 bp, Homo sapien
gggcttcaaagggatcacggtgctt

SEQ ID NO: 2198040 - DNA, 25 bp, Homo sapien
gggctgtgaggcatgtccgaggcca

SEQ ID NO: 2198041 - DNA, 25 bp, Homo sapien
gtcacctgagactttgcgtttcctg

SEQ ID NO: 2198042 - DNA, 25 bp, Homo sapien
tcgtcggcgtttggctttcagcaga

SEQ ID NO: 2198043 - DNA, 25 bp, Homo sapien
tctcgggggcattgccagcggttca

SEQ ID NO: 2198044 - DNA, 25 bp, Homo sapien
ttctctcgggggcattgccagcggt

SEQ ID NO: 2198045 - DNA, 25 bp, Homo sapien
ggcattgccagcggttcacggcagt

SEQ ID NO: 2198046 - DNA, 25 bp, Homo sapien
attgccagcggttcacggcagtcag

SEQ ID NO: 2198047 - DNA, 25 bp, Homo sapien
ttgactgccgaagatacgtatggca

SEQ ID NO: 2198048 - DNA, 25 bp, Homo sapien
cttgactgccgaagatacgtatggc

SEQ ID NO: 2198049 - DNA, 25 bp, Homo sapien
gactgccgaagatacgtatggcaaa

SEQ ID NO: 2198050 - DNA, 25 bp, Homo sapien
tgccgaagatacgtatggcaaacag

SEQ ID NO: 2198051 - DNA, 25 bp, Homo sapien
tgatggccgagatagctcagtgaat

SEQ ID NO: 2198052 - DNA, 25 bp, Homo sapien
gtgacacccatgaagagacgtgatg

SEQ ID NO: 2198053 - DNA, 25 bp, Homo sapien
caaacggatccagcgcatgctgtac

SEQ ID NO: 2198054 - DNA, 25 bp, Homo sapien
gaatttgaagccaaacggatccagc

SEQ ID NO: 2198055 - DNA, 25 bp, Homo sapien
aggacaacatttcctctaggttcct

SEQ ID NO: 2198056 - DNA, 25 bp, Homo sapien
ggatcctggcaggtggccttagtct

SEQ ID NO: 2198057 - DNA, 25 bp, Homo sapien
tggccttagtctgctcccagggatg

SEQ ID NO: 2198058 - DNA, 25 bp, Homo sapien
ggtggccttagtctgctcccaggga

SEQ ID NO: 2198059 - DNA, 25 bp, Homo sapien
ccaggatcctggcaggtggccttag

SEQ ID NO: 2198060 - DNA, 25 bp, Homo sapien
actttcgttctgttctgcaatggcc

SEQ ID NO: 2198061 - DNA, 25 bp, Homo sapien
gaatttgcacatctcggagtctttg

SEQ ID NO: 2198062 - DNA, 25 bp, Homo sapien
agtctttggttgctgggtggccacc

SEQ ID NO: 2198063 - DNA, 25 bp, Homo sapien
tcctccagggtgaccgactttggct

SEQ ID NO: 2198064 - DNA, 25 bp, Homo sapien
acaatgaataaagacgaccatggcc

SEQ ID NO: 2198065 - DNA, 25 bp, Homo sapien
aatgaataaagacgaccatggccca

SEQ ID NO: 2198066 - DNA, 25 bp, Homo sapien
aagacgaccatggcccacaaacttc

SEQ ID NO: 2198067 - DNA, 25 bp, Homo sapien
taaagacgaccatggcccacaaact

SEQ ID NO: 2198068 - DNA, 25 bp, Homo sapien
ctcacagtaagcagcgggtagacat

SEQ ID NO: 2198069 - DNA, 25 bp, Homo sapien
cagcgggtagacataaaatactgtc

SEQ ID NO: 2198070 - DNA, 25 bp, Homo sapien
aatactgtcctcttgtaatccttcc

SEQ ID NO: 2198071 - DNA, 25 bp, Homo sapien
taaaatactgtcctcttgtaatcct

SEQ ID NO: 2198072 - DNA, 25 bp, Homo sapien
gcactcaatggatcatttagataac

SEQ ID NO: 2198073 - DNA, 25 bp, Homo sapien
tttcttaacattgcaaaacaatttg

SEQ ID NO: 2198074 - DNA, 25 bp, Homo sapien
tgggcactcaatggatcatttagat

SEQ ID NO: 2198075 - DNA, 25 bp, Homo sapien
aaaatgggcactcaatggatcattt

SEQ ID NO: 2198076 - DNA, 25 bp, Homo sapien
tgaatcccacagacatgcggctgct

SEQ ID NO: 2198077 - DNA, 25 bp, Homo sapien
taccaggtatcaagtaaggcattct

SEQ ID NO: 2198078 - DNA, 25 bp, Homo sapien
tatcagcaattgagtggagttccct

SEQ ID NO: 2198079 - DNA, 25 bp, Homo sapien
ttaaagcatccagacacgcctcagt

SEQ ID NO: 2198080 - DNA, 25 bp, Homo sapien
gaactccgagtaggtgtctgcagca

SEQ ID NO: 2198081 - DNA, 25 bp, Homo sapien
tagaatagacgatgtttcccgggac

SEQ ID NO: 2198082 - DNA, 25 bp, Homo sapien
taggtcacaaactctggacggccgg

SEQ ID NO: 2198083 - DNA, 25 bp, Homo sapien
tctctcagggcgatgaaatcacggt

SEQ ID NO: 2198084 - DNA, 25 bp, Homo sapien
tctggcttttgaagcgtcaccatca

SEQ ID NO: 2198085 - DNA, 25 bp, Homo sapien
tctcgctgttcatccagctgtgaac

SEQ ID NO: 2198086 - DNA, 25 bp, Homo sapien
cttcgctcgccccacacatgcggac

SEQ ID NO: 2198087 - DNA, 25 bp, Homo sapien
cagctgtgaacgttcccatacaggg

SEQ ID NO: 2198088 - DNA, 25 bp, Homo sapien
acatgcggaccctctcgctgttcat

SEQ ID NO: 2198089 - DNA, 25 bp, Homo sapien
gtcgtcttctgggatggcagctttg

SEQ ID NO: 2198090 - DNA, 25 bp, Homo sapien
tgggatggcagctttgcttcaagcg

SEQ ID NO: 2198091 - DNA, 25 bp, Homo sapien
gatggcagctttgcttcaagcgtct

SEQ ID NO: 2198092 - DNA, 25 bp, Homo sapien
ggcagctttgcttcaagcgtctagt

SEQ ID NO: 2198093 - DNA, 25 bp, Homo sapien
ggagcctttaatgcctgggaccgat

SEQ ID NO: 2198094 - DNA, 25 bp, Homo sapien
taattgctctttggaggttgagccg

SEQ ID NO: 2198095 - DNA, 25 bp, Homo sapien
catggcatttttccacgggacccaa

SEQ ID NO: 2198096 - DNA, 25 bp, Homo sapien
ggttgagccgtttcttttgactgcg

SEQ ID NO: 2198097 - DNA, 25 bp, Homo sapien
cacccacacagtttccgaaagccca

SEQ ID NO: 2198098 - DNA, 25 bp, Homo sapien
ccacacagtttccgaaagcccaaat

SEQ ID NO: 2198099 - DNA, 25 bp, Homo sapien
cacagtttccgaaagcccaaatgtt

SEQ ID NO: 2198100 - DNA, 25 bp, Homo sapien
cccaaatgttccctaagtcgacaca

SEQ ID NO: 2198101 - DNA, 25 bp, Homo sapien
aggcccagccccgaaaaggccagca

SEQ ID NO: 2198102 - DNA, 25 bp, Homo sapien
gaaacagaatcattatactgaggcc

SEQ ID NO: 2198103 - DNA, 25 bp, Homo sapien
ccagccccgaaaaggccagcagctg

SEQ ID NO: 2198104 - DNA, 25 bp, Homo sapien
tgcgaagctgcaccttggatctggg

SEQ ID NO: 2198105 - DNA, 25 bp, Homo sapien
gctgcgaagctgcaccttggatctg

SEQ ID NO: 2198106 - DNA, 25 bp, Homo sapien
gagctgcgaagctgcaccttggatc

SEQ ID NO: 2198107 - DNA, 25 bp, Homo sapien
gtgagctgcgaagctgcaccttgga

SEQ ID NO: 2198108 - DNA, 25 bp, Homo sapien
tgattggcagaaggggggcgtcgag

SEQ ID NO: 2198109 - DNA, 25 bp, Homo sapien
tcgagggaccaagatcataagccat

SEQ ID NO: 2198110 - DNA, 25 bp, Homo sapien
cgtcgagggaccaagatcataagcc

SEQ ID NO: 2198111 - DNA, 25 bp, Homo sapien
gggcgtcgagggaccaagatcataa

SEQ ID NO: 2198112 - DNA, 25 bp, Homo sapien
tacagcccggctgctttaagagagc

SEQ ID NO: 2198113 - DNA, 25 bp, Homo sapien
cagtgttttggcgttgcaggcttgt

SEQ ID NO: 2198114 - DNA, 25 bp, Homo sapien
tcctccaaggcgaaactcgttttgc

SEQ ID NO: 2198115 - DNA, 25 bp, Homo sapien
gaaagactgccagtgttttggcgtt

SEQ ID NO: 2198116 - DNA, 25 bp, Homo sapien
gccgccccactgatcaaaatgtctc

SEQ ID NO: 2198117 - DNA, 25 bp, Homo sapien
ggccgccccactgatcaaaatgtct

SEQ ID NO: 2198118 - DNA, 25 bp, Homo sapien
cgccccactgatcaaaatgtctcct

SEQ ID NO: 2198119 - DNA, 25 bp, Homo sapien
tggccgccccactgatcaaaatgtc

SEQ ID NO: 2198120 - DNA, 25 bp, Homo sapien
tgcaaagcaggcacgctgtgcttgt

SEQ ID NO: 2198121 - DNA, 25 bp, Homo sapien
gctgtgcttgttaaatgctgtgtaa

SEQ ID NO: 2198122 - DNA, 25 bp, Homo sapien
tttccaccctttcgcctgcttagag

SEQ ID NO: 2198123 - DNA, 25 bp, Homo sapien
tagagtcctggtgcaaagcaggcac

SEQ ID NO: 2198124 - DNA, 25 bp, Homo sapien
ggcaccgaggcaataaggaggctcc

SEQ ID NO: 2198125 - DNA, 25 bp, Homo sapien
gaggctcctcttgacccgcagcact

SEQ ID NO: 2198126 - DNA, 25 bp, Homo sapien
tcttgacccgcagcactgctttctc

SEQ ID NO: 2198127 - DNA, 25 bp, Homo sapien
gggcctaacaaagggccttgtgagc

SEQ ID NO: 2198128 - DNA, 25 bp, Homo sapien
ccgcacggttcacggcggacagaac

SEQ ID NO: 2198129 - DNA, 25 bp, Homo sapien
acagaacccggggagcgtgacggtg

SEQ ID NO: 2198130 - DNA, 25 bp, Homo sapien
gcgagagcgcggagaccctgcccag

SEQ ID NO: 2198131 - DNA, 25 bp, Homo sapien
gcacaccaacaacacccgcgagagc

SEQ ID NO: 2198132 - DNA, 25 bp, Homo sapien
tgtgcgtggcggtgtatacccgcac

SEQ ID NO: 2198133 - DNA, 25 bp, Homo sapien
gtgtatacccgcacactgaaggcca

SEQ ID NO: 2198134 - DNA, 25 bp, Homo sapien
ccccaaggcaattggtgtgcgtggc

SEQ ID NO: 2198135 - DNA, 25 bp, Homo sapien
tggtgacagcgcctcaaaggacagc

SEQ ID NO: 2198136 - DNA, 25 bp, Homo sapien
gcacacgccgacgttccacttggag

SEQ ID NO: 2198137 - DNA, 25 bp, Homo sapien
ctcgcgcacgcacacgccgacgttc

SEQ ID NO: 2198138 - DNA, 25 bp, Homo sapien
gccgacgttccacttggaggaacga

SEQ ID NO: 2198139 - DNA, 25 bp, Homo sapien
ggcccccggagaggcgagacgaggc

SEQ ID NO: 2198140 - DNA, 25 bp, Homo sapien
aaacttccactctgcgaactccctg

SEQ ID NO: 2198141 - DNA, 25 bp, Homo sapien
ttcctgctcgcgagctaacgccgaa

SEQ ID NO: 2198142 - DNA, 25 bp, Homo sapien
aaaagaaagcagacggcaacccgct

SEQ ID NO: 2198143 - DNA, 25 bp, Homo sapien
ttcccgagtcgaaaaagaaagcaga

SEQ ID NO: 2198144 - DNA, 25 bp, Homo sapien
gcagcaaagtttgcggtccccggct

SEQ ID NO: 2198145 - DNA, 25 bp, Homo sapien
cctgcgatccggctctttgaagttt

SEQ ID NO: 2198146 - DNA, 25 bp, Homo sapien
aagcggactcgaggcggcgagaagg

SEQ ID NO: 2198147 - DNA, 25 bp, Homo sapien
cgttaacgagcggagaaggagccgg

SEQ ID NO: 2198148 - DNA, 25 bp, Homo sapien
gtggcgacagccccgtgcgatcctc

SEQ ID NO: 2198149 - DNA, 25 bp, Homo sapien
ggcgacagccccgtgcgatcctccg

SEQ ID NO: 2198150 - DNA, 25 bp, Homo sapien
ggtggcgacagccccgtgcgatcct

SEQ ID NO: 2198151 - DNA, 25 bp, Homo sapien
cgacagccccgtgcgatcctccggg

SEQ ID NO: 2198152 - DNA, 25 bp, Homo sapien
ccagcgccatgttgacggttcgccg

SEQ ID NO: 2198153 - DNA, 25 bp, Homo sapien
gagccccagcgccatgttgacggtt

SEQ ID NO: 2198154 - DNA, 25 bp, Homo sapien
atgttgacggttcgccgcgagcgcc

SEQ ID NO: 2198155 - DNA, 25 bp, Homo sapien
gcgccatgttgacggttcgccgcga

SEQ ID NO: 2198156 - DNA, 25 bp, Homo sapien
ttggccaagtcgtccctgcgcggcg

SEQ ID NO: 2198157 - DNA, 25 bp, Homo sapien
agctcggcccgcgttcagcgaggag

SEQ ID NO: 2198158 - DNA, 25 bp, Homo sapien
ccgcgttcagcgaggagcgcagctc

SEQ ID NO: 2198159 - DNA, 25 bp, Homo sapien
tgtgtgagtgttggccaagtcgtcc

SEQ ID NO: 2198160 - DNA, 25 bp, Homo sapien
ttgccgctgggagcccaggctccgt

SEQ ID NO: 2198161 - DNA, 25 bp, Homo sapien
cttgccgctgggagcccaggctccg

SEQ ID NO: 2198162 - DNA, 25 bp, Homo sapien
ccgctgggagcccaggctccgtctg

SEQ ID NO: 2198163 - DNA, 25 bp, Homo sapien
gccgctgggagcccaggctccgtct

SEQ ID NO: 2198164 - DNA, 25 bp, Homo sapien
cctccgctgcggcgcctccgcggcg

SEQ ID NO: 2198165 - DNA, 25 bp, Homo sapien
tgcggcgcctccgcggcggggtttc

SEQ ID NO: 2198166 - DNA, 25 bp, Homo sapien
gctgcggcgcctccgcggcggggtt

SEQ ID NO: 2198167 - DNA, 25 bp, Homo sapien
ccgctgcggcgcctccgcggcgggg

SEQ ID NO: 2198168 - DNA, 25 bp, Homo sapien
ggttctcgagcattttcacggtctg

SEQ ID NO: 2198169 - DNA, 25 bp, Homo sapien
aaggccagtggaggaccgcaattac

SEQ ID NO: 2198170 - DNA, 25 bp, Homo sapien
gcaattaccataaagcgcctcgcac

SEQ ID NO: 2198171 - DNA, 25 bp, Homo sapien
gagatccgcctgtatttctcccggt

SEQ ID NO: 2198172 - DNA, 25 bp, Homo sapien
taacgtcgtgctgatcggtgcttgg

SEQ ID NO: 2198173 - DNA, 25 bp, Homo sapien
cataaatttccactcggtaacgtcg

SEQ ID NO: 2198174 - DNA, 25 bp, Homo sapien
gacacgtattgagcttctccagcgc

SEQ ID NO: 2198175 - DNA, 25 bp, Homo sapien
gacagggagcaacttttggcttaca

SEQ ID NO: 2198176 - DNA, 25 bp, Homo sapien
ggcacaggcttttctcggagttcga

SEQ ID NO: 2198177 - DNA, 25 bp, Homo sapien
cgcatgcgagttacagacacagctg

SEQ ID NO: 2198178 - DNA, 25 bp, Homo sapien
ttcgaagtcgcatgtaaacgtccag

SEQ ID NO: 2198179 - DNA, 25 bp, Homo sapien
tagaaaatccaggaaccgagctcgg

SEQ ID NO: 2198180 - DNA, 25 bp, Homo sapien
gaactctgggcttatccaatggcac

SEQ ID NO: 2198181 - DNA, 25 bp, Homo sapien
cacttggtactggaacaggtgggac

SEQ ID NO: 2198182 - DNA, 25 bp, Homo sapien
ttctcagggcgatgacacttggtac

SEQ ID NO: 2198183 - DNA, 25 bp, Homo sapien
aagactgctggacttaagggtcgcc

SEQ ID NO: 2198184 - DNA, 25 bp, Homo sapien
cgggtccctgcgaagacgcaccacc

SEQ ID NO: 2198185 - DNA, 25 bp, Homo sapien
cgcggtaccactcccgaactggagg

SEQ ID NO: 2198186 - DNA, 25 bp, Homo sapien
ctgcgaagacgcaccaccccgaacc

SEQ ID NO: 2198187 - DNA, 25 bp, Homo sapien
ccttcgcggtaccactcccgaactg

SEQ ID NO: 2198188 - DNA, 25 bp, Homo sapien
aacggactgggcattccaaacggtg

SEQ ID NO: 2198189 - DNA, 25 bp, Homo sapien
taatcttcggcacatttcacccgct

SEQ ID NO: 2198190 - DNA, 25 bp, Homo sapien
ccaaacggtgtaatcttcggcacat

SEQ ID NO: 2198191 - DNA, 25 bp, Homo sapien
tgggcattccaaacggtgtaatctt

SEQ ID NO: 2198192 - DNA, 25 bp, Homo sapien
tccgaaccactctgctctcggtgct

SEQ ID NO: 2198193 - DNA, 25 bp, Homo sapien
gaaccactctgctctcggtgctcat

SEQ ID NO: 2198194 - DNA, 25 bp, Homo sapien
cttccgaaccactctgctctcggtg

SEQ ID NO: 2198195 - DNA, 25 bp, Homo sapien
cgaaccactctgctctcggtgctca

SEQ ID NO: 2198196 - DNA, 25 bp, Homo sapien
ttcccagcgcgttagcagccgcgca

SEQ ID NO: 2198197 - DNA, 25 bp, Homo sapien
tgcgttcccagcgcgttagcagccg

SEQ ID NO: 2198198 - DNA, 25 bp, Homo sapien
cgttcccagcgcgttagcagccgcg

SEQ ID NO: 2198199 - DNA, 25 bp, Homo sapien
ccagcgcgttagcagccgcgcagcc

SEQ ID NO: 2198200 - DNA, 25 bp, Homo sapien
ttaatgcgaaataagaagaaactct

SEQ ID NO: 2198201 - DNA, 25 bp, Homo sapien
catgaagtggttgttaatgcgaaat

SEQ ID NO: 2198202 - DNA, 25 bp, Homo sapien
ggttgttaatgcgaaataagaagaa

SEQ ID NO: 2198203 - DNA, 25 bp, Homo sapien
ctatgtcaacatgaagtggttgtta

SEQ ID NO: 2198204 - DNA, 25 bp, Homo sapien
gtgacacggaaacatggcgcagcgc

SEQ ID NO: 2198205 - DNA, 25 bp, Homo sapien
ccagcgccgacgactcggcgggtga

SEQ ID NO: 2198206 - DNA, 25 bp, Homo sapien
tctgctgttacggaggcaggcggga

SEQ ID NO: 2198207 - DNA, 25 bp, Homo sapien
cgactcggcgggtgacacggaaaca

SEQ ID NO: 2198208 - DNA, 25 bp, Homo sapien
ttttaagcctgcaattaagcgaggc

SEQ ID NO: 2198209 - DNA, 25 bp, Homo sapien
tgctcaggcggcaattttttaagcc

SEQ ID NO: 2198210 - DNA, 25 bp, Homo sapien
gccgtgtcctctgctagtgtcggtc

SEQ ID NO: 2198211 - DNA, 25 bp, Homo sapien
gaggcgtcgccgtgtcctctgctag

SEQ ID NO: 2198212 - DNA, 25 bp, Homo sapien
acttggcggcgctggcagggagcca

SEQ ID NO: 2198213 - DNA, 25 bp, Homo sapien
atggccttggtgctccggtccgagg

SEQ ID NO: 2198214 - DNA, 25 bp, Homo sapien
tccctaatccgcctctgcaggcagc

SEQ ID NO: 2198215 - DNA, 25 bp, Homo sapien
gaggccccgcgattagtcacaggct

SEQ ID NO: 2198216 - DNA, 25 bp, Homo sapien
aagtccttctcaactccttcggcgg

SEQ ID NO: 2198217 - DNA, 25 bp, Homo sapien
tgtgttgccttctacaagaaaggag

SEQ ID NO: 2198218 - DNA, 25 bp, Homo sapien
gatttagggtgtttgtgttgccttc

SEQ ID NO: 2198219 - DNA, 25 bp, Homo sapien
tctgtgtggagccttcgattgtcgg

SEQ ID NO: 2198220 - DNA, 25 bp, Homo sapien
taaaagccccggttcgctctggctc

SEQ ID NO: 2198221 - DNA, 25 bp, Homo sapien
gctaaaccaaactgatcgcaccctg

SEQ ID NO: 2198222 - DNA, 25 bp, Homo sapien
caggcaggtcgcgttacagcgctgc

SEQ ID NO: 2198223 - DNA, 25 bp, Homo sapien
gcttgaacattaacgagtcgcctcg

SEQ ID NO: 2198224 - DNA, 25 bp, Homo sapien
caggtgtcagatcgcactgggccat

SEQ ID NO: 2198225 - DNA, 25 bp, Homo sapien
taagcagaagctatggatgatccac

SEQ ID NO: 2198226 - DNA, 25 bp, Homo sapien
tctgacaccgatgattaatgcgcct

SEQ ID NO: 2198227 - DNA, 25 bp, Homo sapien
tggtgttgccctgaaagcgtcccag

SEQ ID NO: 2198228 - DNA, 25 bp, Homo sapien
ggtagaatgtgtaccctgggcctac

SEQ ID NO: 2198229 - DNA, 25 bp, Homo sapien
aaatgttgacgaaacaggactccca

SEQ ID NO: 2198230 - DNA, 25 bp, Homo sapien
aatgctgtgaaaatggtggccctcg

SEQ ID NO: 2198231 - DNA, 25 bp, Homo sapien
ggtacatgcatcagagtcccagagg

SEQ ID NO: 2198232 - DNA, 25 bp, Homo sapien
gtctcggagactgttcccttctgca

SEQ ID NO: 2198233 - DNA, 25 bp, Homo sapien
tgttcccttctgcatggttgtcctt

SEQ ID NO: 2198234 - DNA, 25 bp, Homo sapien
aggccacaagaactaccccatctgg

SEQ ID NO: 2198235 - DNA, 25 bp, Homo sapien
cttgttggcacttggtgtctcggag

SEQ ID NO: 2198236 - DNA, 25 bp, Homo sapien
ggatattcttagcagccttcggtca

SEQ ID NO: 2198237 - DNA, 25 bp, Homo sapien
tgctgagggactccacaagtactgg

SEQ ID NO: 2198238 - DNA, 25 bp, Homo sapien
ttaacgcacagtaagtaccccatgg

SEQ ID NO: 2198239 - DNA, 25 bp, Homo sapien
cgttaactggcttgtggtcaggcct

SEQ ID NO: 2198240 - DNA, 25 bp, Homo sapien
tactggccttcctgtagagatgtcc

SEQ ID NO: 2198241 - DNA, 25 bp, Homo sapien
gcttttggccacatcagagccgtta

SEQ ID NO: 2198242 - DNA, 25 bp, Homo sapien
cctgacgagcgggactgtttggaac

SEQ ID NO: 2198243 - DNA, 25 bp, Homo sapien
tatcacatctgacctcgttcctggg

SEQ ID NO: 2198244 - DNA, 25 bp, Homo sapien
tggccccagtggtctccatgtgacc

SEQ ID NO: 2198245 - DNA, 25 bp, Homo sapien
tggtctccatgtgacctttcctcag

SEQ ID NO: 2198246 - DNA, 25 bp, Homo sapien
ccagtggtctccatgtgacctttcc

SEQ ID NO: 2198247 - DNA, 25 bp, Homo sapien
tctccatgtgacctttcctcagctc

SEQ ID NO: 2198248 - DNA, 25 bp, Homo sapien
gccccaggggtgtgctctgtggcag

SEQ ID NO: 2198249 - DNA, 25 bp, Homo sapien
gctgccccaggggtgtgctctgtgg

SEQ ID NO: 2198250 - DNA, 25 bp, Homo sapien
tgccccaggggtgtgctctgtggca

SEQ ID NO: 2198251 - DNA, 25 bp, Homo sapien
tgggctgccccaggggtgtgctctg

SEQ ID NO: 2198252 - DNA, 25 bp, Homo sapien
ttgggtcacccctggttcactctga

SEQ ID NO: 2198253 - DNA, 25 bp, Homo sapien
gggatccccgtcttgacccattggc

SEQ ID NO: 2198254 - DNA, 25 bp, Homo sapien
cacaattgcccaacatggcctgaag

SEQ ID NO: 2198255 - DNA, 25 bp, Homo sapien
aaacagtgaccgagtgtccacaatt

SEQ ID NO: 2198256 - DNA, 25 bp, Homo sapien
ctgaagagggcacgctgccagctct

SEQ ID NO: 2198257 - DNA, 25 bp, Homo sapien
ggcccagggccagtaagtctgactg

SEQ ID NO: 2198258 - DNA, 25 bp, Homo sapien
gaactagcaacccacaactagaagg

SEQ ID NO: 2198259 - DNA, 25 bp, Homo sapien
tttgaaggttccagcgtgtttcgcc

SEQ ID NO: 2198260 - DNA, 25 bp, Homo sapien
tagcgtgtgcttttctagctagaaa

SEQ ID NO: 2198261 - DNA, 25 bp, Homo sapien
ttctgcttgttcagggcaagagaga

SEQ ID NO: 2198262 - DNA, 25 bp, Homo sapien
cttttggggataagctgtgctcttc

SEQ ID NO: 2198263 - DNA, 25 bp, Homo sapien
aaagttgcctccttcgttggcatta

SEQ ID NO: 2198264 - DNA, 25 bp, Homo sapien
caataggaaggctccggtttgaact

SEQ ID NO: 2198265 - DNA, 25 bp, Homo sapien
ataggaaggctccggtttgaactct

SEQ ID NO: 2198266 - DNA, 25 bp, Homo sapien
taggaaggctccggtttgaactcta

SEQ ID NO: 2198267 - DNA, 25 bp, Homo sapien
tgttcatggggacagatgctgagac

SEQ ID NO: 2198268 - DNA, 25 bp, Homo sapien
ctgttcatggggacagatgctgaga

SEQ ID NO: 2198269 - DNA, 25 bp, Homo sapien
gctgaaaagaaaacggtgctcgcct

SEQ ID NO: 2198270 - DNA, 25 bp, Homo sapien
gcctttgatgtgtgaagttgcccca

SEQ ID NO: 2198271 - DNA, 25 bp, Homo sapien
aacggtgctcgcctttgatgtgtga

SEQ ID NO: 2198272 - DNA, 25 bp, Homo sapien
ggagaagaaggccaatttatagaaa

SEQ ID NO: 2198273 - DNA, 25 bp, Homo sapien
tgtttagccaggattcctcttgcct

SEQ ID NO: 2198274 - DNA, 25 bp, Homo sapien
tcccaatcctggaggtgaacggctc

SEQ ID NO: 2198275 - DNA, 25 bp, Homo sapien
tcagagttggcttccacgacttgcg

SEQ ID NO: 2198276 - DNA, 25 bp, Homo sapien
ttcaggccacataaaagcgatttat

SEQ ID NO: 2198277 - DNA, 25 bp, Homo sapien
cacatgagcctgaaaatgtcgacaa

SEQ ID NO: 2198278 - DNA, 25 bp, Homo sapien
tctgattgctaaaatatgccgacct

SEQ ID NO: 2198279 - DNA, 25 bp, Homo sapien
agaaaggacctcttgaccactctgg

SEQ ID NO: 2198280 - DNA, 25 bp, Homo sapien
aatgtcgacaaatttgaaacatctg

SEQ ID NO: 2198281 - DNA, 25 bp, Homo sapien
aaatcgggaagcctgaacatgcagc

SEQ ID NO: 2198282 - DNA, 25 bp, Homo sapien
tctcgatgctatcgtgggacgcggc

SEQ ID NO: 2198283 - DNA, 25 bp, Homo sapien
gcgggaaatcgggaagcctgaacat

SEQ ID NO: 2198284 - DNA, 25 bp, Homo sapien
tcaagttccctgtcgactggcgttc

SEQ ID NO: 2198285 - DNA, 25 bp, Homo sapien
acccgccgacctaggagactggcga

SEQ ID NO: 2198286 - DNA, 25 bp, Homo sapien
caggttgcaggaagaccgccacatg

SEQ ID NO: 2198287 - DNA, 25 bp, Homo sapien
gaagaccgccacatgtgcgcaaaga

SEQ ID NO: 2198288 - DNA, 25 bp, Homo sapien
tgcgcaaagacgcactcggagaggc

SEQ ID NO: 2198289 - DNA, 25 bp, Homo sapien
aagacaaagcgggagtagagagcca

SEQ ID NO: 2198290 - DNA, 25 bp, Homo sapien
agtcccgaagcggaggcgtgcgcag

SEQ ID NO: 2198291 - DNA, 25 bp, Homo sapien
agacccgaaaacgaaggcagcagca

SEQ ID NO: 2198292 - DNA, 25 bp, Homo sapien
cagggaggctcggtcgaagacccga

SEQ ID NO: 2198293 - DNA, 25 bp, Homo sapien
tcgagtctgagtcttacatgcaggc

SEQ ID NO: 2198294 - DNA, 25 bp, Homo sapien
gcacagtgcgatcctgcttcgggaa

SEQ ID NO: 2198295 - DNA, 25 bp, Homo sapien
aaaggaatggtgtgcccctaggctc

SEQ ID NO: 2198296 - DNA, 25 bp, Homo sapien
tttgtttccaagcagggtaccagcc

SEQ ID NO: 2198297 - DNA, 25 bp, Homo sapien
ctggaactgctggggtgaactcgga

SEQ ID NO: 2198298 - DNA, 25 bp, Homo sapien
ggaactgctggggtgaactcggagc

SEQ ID NO: 2198299 - DNA, 25 bp, Homo sapien
tggaactgctggggtgaactcggag

SEQ ID NO: 2198300 - DNA, 25 bp, Homo sapien
gctggggtgaactcggagcctgagg

SEQ ID NO: 2198301 - DNA, 25 bp, Homo sapien
ccaccaagttgccggcagaggtaac

SEQ ID NO: 2198302 - DNA, 25 bp, Homo sapien
ccaccaccaccaagttgccggcaga

SEQ ID NO: 2198303 - DNA, 25 bp, Homo sapien
ccaccaccaagttgccggcagaggt

SEQ ID NO: 2198304 - DNA, 25 bp, Homo sapien
accaagttgccggcagaggtaacag

SEQ ID NO: 2198305 - DNA, 25 bp, Homo sapien
gagggctcgccgctgcgcatctcct

SEQ ID NO: 2198306 - DNA, 25 bp, Homo sapien
ccacgctgtcaagcggcggcgggtg

SEQ ID NO: 2198307 - DNA, 25 bp, Homo sapien
cggaggcctcgggtggagtgctgga

SEQ ID NO: 2198308 - DNA, 25 bp, Homo sapien
gcagccagcgggtgccccacgctgt

SEQ ID NO: 2198309 - DNA, 25 bp, Homo sapien
gagccagcgttctgaatctgcagga

SEQ ID NO: 2198310 - DNA, 25 bp, Homo sapien
cccggagccagcgttctgaatctgc

SEQ ID NO: 2198311 - DNA, 25 bp, Homo sapien
agcgttctgaatctgcaggagtgcg

SEQ ID NO: 2198312 - DNA, 25 bp, Homo sapien
gccccggagccagcgttctgaatct

SEQ ID NO: 2198313 - DNA, 25 bp, Homo sapien
ttgaatctcgggaaaggcggttgac

SEQ ID NO: 2198314 - DNA, 25 bp, Homo sapien
tgtctgctttgttccggaaaacaag

SEQ ID NO: 2198315 - DNA, 25 bp, Homo sapien
gactgcattaaggagctcccgagac

SEQ ID NO: 2198316 - DNA, 25 bp, Homo sapien
acaagggaagcattaggcggctgcc

SEQ ID NO: 2198317 - DNA, 25 bp, Homo sapien
gtagccaggccgcaagtaaactcgc

SEQ ID NO: 2198318 - DNA, 25 bp, Homo sapien
taaactcgcactagagctttctgca

SEQ ID NO: 2198319 - DNA, 25 bp, Homo sapien
caggaacccgattcggcgcgaaggt

SEQ ID NO: 2198320 - DNA, 25 bp, Homo sapien
gaggcgtcggctttggccttccaac

SEQ ID NO: 2198321 - DNA, 25 bp, Homo sapien
cagatgtgagcgcttgatgtgcccg

SEQ ID NO: 2198322 - DNA, 25 bp, Homo sapien
atgtgcccgcggagcggcggatcct

SEQ ID NO: 2198323 - DNA, 25 bp, Homo sapien
ccatcgatcgcggagtgtacagatg

SEQ ID NO: 2198324 - DNA, 25 bp, Homo sapien
ggtctgcagctgacaaatattatcc

SEQ ID NO: 2198325 - DNA, 25 bp, Homo sapien
actgcaccgcgagcccctgggagcc

SEQ ID NO: 2198326 - DNA, 25 bp, Homo sapien
tttggacccctcgtgctgttccttg

SEQ ID NO: 2198327 - DNA, 25 bp, Homo sapien
cacccacgtccactgcaccgcgagc

SEQ ID NO: 2198328 - DNA, 25 bp, Homo sapien
gcctttggacccctcgtgctgttcc

SEQ ID NO: 2198329 - DNA, 25 bp, Homo sapien
cgtgggtcacgctaacagggtacag

SEQ ID NO: 2198330 - DNA, 25 bp, Homo sapien
cggctctcgcagacggaaggcatta

SEQ ID NO: 2198331 - DNA, 25 bp, Homo sapien
tcagtttccgaaaggtcagccaagg

SEQ ID NO: 2198332 - DNA, 25 bp, Homo sapien
ttaaatgattgtcctccgctccgct

SEQ ID NO: 2198333 - DNA, 25 bp, Homo sapien
gtcaggcggcgtggatatcacccgc

SEQ ID NO: 2198334 - DNA, 25 bp, Homo sapien
aaaagaggcgagaaggggcgcaccg

SEQ ID NO: 2198335 - DNA, 25 bp, Homo sapien
atatcacccgcggagtgacccaggg

SEQ ID NO: 2198336 - DNA, 25 bp, Homo sapien
tgcggagcagaggagtccgcacccc

SEQ ID NO: 2198337 - DNA, 25 bp, Homo sapien
agtcccagcgcggtgtctgaagacg

SEQ ID NO: 2198338 - DNA, 25 bp, Homo sapien
agtcgtccatcagcaaccagtccaa

SEQ ID NO: 2198339 - DNA, 25 bp, Homo sapien
tcccagcgcggtgtctgaagacgct

SEQ ID NO: 2198340 - DNA, 25 bp, Homo sapien
gccgccgctagaagtcgtccatcag

SEQ ID NO: 2198341 - DNA, 25 bp, Homo sapien
accatgtctagccaggcggccatcc

SEQ ID NO: 2198342 - DNA, 25 bp, Homo sapien
ctgcggttactaatgtcgaattgcg

SEQ ID NO: 2198343 - DNA, 25 bp, Homo sapien
gaattgcgcaccagaggtgtcccag

SEQ ID NO: 2198344 - DNA, 25 bp, Homo sapien
taaaggaggagcggcttcgcgccct

SEQ ID NO: 2198345 - DNA, 25 bp, Homo sapien
cctctgatgaaaggcgcttaagtgc

SEQ ID NO: 2198346 - DNA, 25 bp, Homo sapien
tctgatgaaaggcgcttaagtgcat

SEQ ID NO: 2198347 - DNA, 25 bp, Homo sapien
ctctgatgaaaggcgcttaagtgca

SEQ ID NO: 2198348 - DNA, 25 bp, Homo sapien
cctggtctgcgtggatccagcacgt

SEQ ID NO: 2198349 - DNA, 25 bp, Homo sapien
tcagccgcctgctcggcttttattg

SEQ ID NO: 2198350 - DNA, 25 bp, Homo sapien
tattgtgcacgcagcctggtctgcg

SEQ ID NO: 2198351 - DNA, 25 bp, Homo sapien
tggatccagcacgtcgtgaccgcct

SEQ ID NO: 2198352 - DNA, 25 bp, Homo sapien
catttctataagagctgggcgcatt

SEQ ID NO: 2198353 - DNA, 25 bp, Homo sapien
tctataagagctgggcgcattgtct

SEQ ID NO: 2198354 - DNA, 25 bp, Homo sapien
ctcggattggcatttctataagagc

SEQ ID NO: 2198355 - DNA, 25 bp, Homo sapien
ttggcatttctataagagctgggcg

SEQ ID NO: 2198356 - DNA, 25 bp, Homo sapien
ttttccatcggtcgggatcgggctg

SEQ ID NO: 2198357 - DNA, 25 bp, Homo sapien
tcagcacggatcgttgggttttccc

SEQ ID NO: 2198358 - DNA, 25 bp, Homo sapien
gatcttggttggaatatacacgggc

SEQ ID NO: 2198359 - DNA, 25 bp, Homo sapien
cacgggcaacctgtatttagatggg

SEQ ID NO: 2198360 - DNA, 25 bp, Homo sapien
tccaagcagacgttgcagcaaactg

SEQ ID NO: 2198361 - DNA, 25 bp, Homo sapien
gatgcaaatggcgtctcgcgtcgtc

SEQ ID NO: 2198362 - DNA, 25 bp, Homo sapien
ttcgggttgagcaaacgtggtcgcc

SEQ ID NO: 2198363 - DNA, 25 bp, Homo sapien
tttccaacagaaagtgtgtgcgcac

SEQ ID NO: 2198364 - DNA, 25 bp, Homo sapien
caggtttcggacctgaacctcgtgg

SEQ ID NO: 2198365 - DNA, 25 bp, Homo sapien
ccaggtttcggacctgaacctcgtg

SEQ ID NO: 2198366 - DNA, 25 bp, Homo sapien
gggaagcgtgagaccgttcaccacc

SEQ ID NO: 2198367 - DNA, 25 bp, Homo sapien
cggtcgttccgggatttgcgtgcaa

SEQ ID NO: 2198368 - DNA, 25 bp, Homo sapien
ctttccctcccacgctagagtagcg

SEQ ID NO: 2198369 - DNA, 25 bp, Homo sapien
acaaggccggcgactacaagagcgg

SEQ ID NO: 2198370 - DNA, 25 bp, Homo sapien
tcctccgaggtgagtttttagacta

SEQ ID NO: 2198371 - DNA, 25 bp, Homo sapien
tctaagatttcactccgctctgggc

SEQ ID NO: 2198372 - DNA, 25 bp, Homo sapien
gaaacgcgagcagccgcgtgcaaag

SEQ ID NO: 2198373 - DNA, 25 bp, Homo sapien
ggtgtctcagatcgaaagagccact

SEQ ID NO: 2198374 - DNA, 25 bp, Homo sapien
atcatcgtaagggttccaacaaatc

SEQ ID NO: 2198375 - DNA, 25 bp, Homo sapien
ttcatcatcgtaagggttccaacaa

SEQ ID NO: 2198376 - DNA, 25 bp, Homo sapien
ccattcatcatcgtaagggttccaa

SEQ ID NO: 2198377 - DNA, 25 bp, Homo sapien
ttcccattcatcatcgtaagggttc

SEQ ID NO: 2198378 - DNA, 25 bp, Homo sapien
ctctttggcctgtgatactggtcac

SEQ ID NO: 2198379 - DNA, 25 bp, Homo sapien
ttggcctgtgatactggtcacactt

SEQ ID NO: 2198380 - DNA, 25 bp, Homo sapien
ctctggcttccttgacactattctc

SEQ ID NO: 2198381 - DNA, 25 bp, Homo sapien
tattctccttgtgtcctgtcctcat

SEQ ID NO: 2198382 - DNA, 25 bp, Homo sapien
tcattcccctgcattcagtagaacc

SEQ ID NO: 2198383 - DNA, 25 bp, Homo sapien
ttcccctgcattcagtagaaccacc

SEQ ID NO: 2198384 - DNA, 25 bp, Homo sapien
cctgcattcagtagaaccacctccc

SEQ ID NO: 2198385 - DNA, 25 bp, Homo sapien
tcccctgcattcagtagaaccacct

SEQ ID NO: 2198386 - DNA, 25 bp, Homo sapien
cgattacatatagaggagctgagaa

SEQ ID NO: 2198387 - DNA, 25 bp, Homo sapien
gtgaaagaaatttccgattacatat

SEQ ID NO: 2198388 - DNA, 25 bp, Homo sapien
agaaatttccgattacatatagagg

SEQ ID NO: 2198389 - DNA, 25 bp, Homo sapien
aatttccgattacatatagaggagc

SEQ ID NO: 2198390 - DNA, 25 bp, Homo sapien
cagtgtgaagggatctaggtacccc

SEQ ID NO: 2198391 - DNA, 25 bp, Homo sapien
accccccgcaggagtctggcgacca

SEQ ID NO: 2198392 - DNA, 25 bp, Homo sapien
gaggcagtgtgaagggatctaggta

SEQ ID NO: 2198393 - DNA, 25 bp, Homo sapien
gtaccccccgcaggagtctggcgac

SEQ ID NO: 2198394 - DNA, 25 bp, Homo sapien
tgagattgcttttcataggtgaggc

SEQ ID NO: 2198395 - DNA, 25 bp, Homo sapien
cgggcagcctttgtctcggatgaga

SEQ ID NO: 2198396 - DNA, 25 bp, Homo sapien
gccgaacacaactttgctgcgtgtg

SEQ ID NO: 2198397 - DNA, 25 bp, Homo sapien
cataatgcaatggacgccgaacaca

SEQ ID NO: 2198398 - DNA, 25 bp, Homo sapien
agtagcacgtggctacaggccacat

SEQ ID NO: 2198399 - DNA, 25 bp, Homo sapien
tagcacgtggctacaggccacatct

SEQ ID NO: 2198400 - DNA, 25 bp, Homo sapien
gcagtagcacgtggctacaggccac

SEQ ID NO: 2198401 - DNA, 25 bp, Homo sapien
gtagcacgtggctacaggccacatc

SEQ ID NO: 2198402 - DNA, 25 bp, Homo sapien
ccaagatgaataatctatattctcc

SEQ ID NO: 2198403 - DNA, 25 bp, Homo sapien
cagattccaagatgaataatctata

SEQ ID NO: 2198404 - DNA, 25 bp, Homo sapien
gatgaataatctatattctccacct

SEQ ID NO: 2198405 - DNA, 25 bp, Homo sapien
tgctcagattccaagatgaataatc

SEQ ID NO: 2198406 - DNA, 25 bp, Homo sapien
gggagagaacagttgaaccactttc

SEQ ID NO: 2198407 - DNA, 25 bp, Homo sapien
tgcgcttcggctctgggtagtgata

SEQ ID NO: 2198408 - DNA, 25 bp, Homo sapien
tagtgatagggagagaacagttgaa

SEQ ID NO: 2198409 - DNA, 25 bp, Homo sapien
ctgcgcttcggctctgggtagtgat

SEQ ID NO: 2198410 - DNA, 25 bp, Homo sapien
gtaacgcagcgggaacgccgacctc

SEQ ID NO: 2198411 - DNA, 25 bp, Homo sapien
ggtagcacccgtaacgcagcgggaa

SEQ ID NO: 2198412 - DNA, 25 bp, Homo sapien
tgcgcccttcgtgcgcatccgtggg

SEQ ID NO: 2198413 - DNA, 25 bp, Homo sapien
gcatccgtgggtagcacccgtaacg

SEQ ID NO: 2198414 - DNA, 25 bp, Homo sapien
agaaattcaaatgagcctctgccat

SEQ ID NO: 2198415 - DNA, 25 bp, Homo sapien
gagcttgccataaacgccgcgtgct

SEQ ID NO: 2198416 - DNA, 25 bp, Homo sapien
gaaacttcgttttaatcagagcttg

SEQ ID NO: 2198417 - DNA, 25 bp, Homo sapien
gatattccgtgcacacgatatctaa

SEQ ID NO: 2198418 - DNA, 25 bp, Homo sapien
tggccgtgaccatagagctactgat

SEQ ID NO: 2198419 - DNA, 25 bp, Homo sapien
tagagctactgatccccattagctg

SEQ ID NO: 2198420 - DNA, 25 bp, Homo sapien
gaaacaagctgccttttggccgtga

SEQ ID NO: 2198421 - DNA, 25 bp, Homo sapien
ggatccttgaggcactctagtggcg

SEQ ID NO: 2198422 - DNA, 25 bp, Homo sapien
cttgctgtcattcgattttctgcca

SEQ ID NO: 2198423 - DNA, 25 bp, Homo sapien
tcttgctgtcattcgattttctgcc

SEQ ID NO: 2198424 - DNA, 25 bp, Homo sapien
ctcttgctgtcattcgattttctgc

SEQ ID NO: 2198425 - DNA, 25 bp, Homo sapien
atccctcgcgggcaggcctttggct

SEQ ID NO: 2198426 - DNA, 25 bp, Homo sapien
cctttggctggctccgggctaggct

SEQ ID NO: 2198427 - DNA, 25 bp, Homo sapien
cgagcactcggcgtgcagatgtctg

SEQ ID NO: 2198428 - DNA, 25 bp, Homo sapien
gctgtgcgcgggagaggaagtctgc

SEQ ID NO: 2198429 - DNA, 25 bp, Homo sapien
tgcagttggcatatttaagttgatt

SEQ ID NO: 2198430 - DNA, 25 bp, Homo sapien
gattatacatgatcagtcttgtagg

SEQ ID NO: 2198431 - DNA, 25 bp, Homo sapien
gatcagtcttgtaggttccttgaaa

SEQ ID NO: 2198432 - DNA, 25 bp, Homo sapien
ttaagttgattatacatgatcagtc

SEQ ID NO: 2198433 - DNA, 25 bp, Homo sapien
tctccctgacctctaagggcagctg

SEQ ID NO: 2198434 - DNA, 25 bp, Homo sapien
ttctccctgacctctaagggcagct

SEQ ID NO: 2198435 - DNA, 25 bp, Homo sapien
aggctgcggtgtcctcggcctggaa

SEQ ID NO: 2198436 - DNA, 25 bp, Homo sapien
gaggctgcggtgtcctcggcctgga

SEQ ID NO: 2198437 - DNA, 25 bp, Homo sapien
tatctcaaaggtcactagtaagcac

SEQ ID NO: 2198438 - DNA, 25 bp, Homo sapien
tcactagtaagcaccggtgagccca

SEQ ID NO: 2198439 - DNA, 25 bp, Homo sapien
gtaagcaccggtgagcccagctcct

SEQ ID NO: 2198440 - DNA, 25 bp, Homo sapien
tggaagacaggtcctcccgccgctc

SEQ ID NO: 2198441 - DNA, 25 bp, Homo sapien
cagctttcctgttcaggggccaggg

SEQ ID NO: 2198442 - DNA, 25 bp, Homo sapien
ccagaagcccgaattcttcctttag

SEQ ID NO: 2198443 - DNA, 25 bp, Homo sapien
ctttagatctccctgagttccacat

SEQ ID NO: 2198444 - DNA, 25 bp, Homo sapien
cttcctttagatctccctgagttcc

SEQ ID NO: 2198445 - DNA, 25 bp, Homo sapien
ggagagaggagcaatggatttctca

SEQ ID NO: 2198446 - DNA, 25 bp, Homo sapien
aggagagaggagcaatggatttctc

SEQ ID NO: 2198447 - DNA, 25 bp, Homo sapien
cgcaactgtatcctttccctgtgtt

SEQ ID NO: 2198448 - DNA, 25 bp, Homo sapien
cgaatgtttaacttcagcggagatg

SEQ ID NO: 2198449 - DNA, 25 bp, Homo sapien
aactccatacggttctcatttgcag

SEQ ID NO: 2198450 - DNA, 25 bp, Homo sapien
taactttcccatggacgcaactgta

SEQ ID NO: 2198451 - DNA, 25 bp, Homo sapien
tttcaagggcaaagatgcaagccag

SEQ ID NO: 2198452 - DNA, 25 bp, Homo sapien
agatgcaagccaggatgctgtccag

SEQ ID NO: 2198453 - DNA, 25 bp, Homo sapien
cagtaatgctgctaggagtggaggt

SEQ ID NO: 2198454 - DNA, 25 bp, Homo sapien
ggaagtgtttgaccattggagaaga

SEQ ID NO: 2198455 - DNA, 25 bp, Homo sapien
cagtgcttatggatgatcgtgggca

SEQ ID NO: 2198456 - DNA, 25 bp, Homo sapien
tcagtgcttatggatgatcgtgggc

SEQ ID NO: 2198457 - DNA, 25 bp, Homo sapien
catcaggaggaccaaattctgccac

SEQ ID NO: 2198458 - DNA, 25 bp, Homo sapien
caaattctgccactcggttgtcagc

SEQ ID NO: 2198459 - DNA, 25 bp, Homo sapien
tgccactcggttgtcagcaaacctt

SEQ ID NO: 2198460 - DNA, 25 bp, Homo sapien
ggaggaccaaattctgccactcggt

SEQ ID NO: 2198461 - DNA, 25 bp, Homo sapien
tctctttaggaagggccgtgaaatc

SEQ ID NO: 2198462 - DNA, 25 bp, Homo sapien
gctgggaattttgcaggaccaatca

SEQ ID NO: 2198463 - DNA, 25 bp, Homo sapien
gccgtgaaatcctggctgggaattt

SEQ ID NO: 2198464 - DNA, 25 bp, Homo sapien
cagagacattgctttcgatgctcat

SEQ ID NO: 2198465 - DNA, 25 bp, Homo sapien
cgatctgggccgacacggtcccctt

SEQ ID NO: 2198466 - DNA, 25 bp, Homo sapien
agtacagccacctctcgtaagagtg

SEQ ID NO: 2198467 - DNA, 25 bp, Homo sapien
ccacctctcgtaagagtgcaggcca

SEQ ID NO: 2198468 - DNA, 25 bp, Homo sapien
gatctgggccgacacggtccccttc

SEQ ID NO: 2198469 - DNA, 25 bp, Homo sapien
atggagcccaagataccctgcgaga

SEQ ID NO: 2198470 - DNA, 25 bp, Homo sapien
ggatggagcccaagataccctgcga

SEQ ID NO: 2198471 - DNA, 25 bp, Homo sapien
gatggagcccaagataccctgcgag

SEQ ID NO: 2198472 - DNA, 25 bp, Homo sapien
atccacagagcccatgccctgatac

SEQ ID NO: 2198473 - DNA, 25 bp, Homo sapien
cgcctcgctgaagtatcgtttctgg

SEQ ID NO: 2198474 - DNA, 25 bp, Homo sapien
cttcaccttatccgcctcgctgaag

SEQ ID NO: 2198475 - DNA, 25 bp, Homo sapien
gcatccacagagcccatgccctgat

SEQ ID NO: 2198476 - DNA, 25 bp, Homo sapien
agaagtattcaccggaggcctccgt

SEQ ID NO: 2198477 - DNA, 25 bp, Homo sapien
gaagtattcaccggaggcctccgtg

SEQ ID NO: 2198478 - DNA, 25 bp, Homo sapien
aagaagtattcaccggaggcctccg

SEQ ID NO: 2198479 - DNA, 25 bp, Homo sapien
gtctgagaagaagtattcaccggag

SEQ ID NO: 2198480 - DNA, 25 bp, Homo sapien
atcactgtggaggctccaagggcca

SEQ ID NO: 2198481 - DNA, 25 bp, Homo sapien
catcactgtggaggctccaagggcc

SEQ ID NO: 2198482 - DNA, 25 bp, Homo sapien
aggctccaagggccagggccttgac

SEQ ID NO: 2198483 - DNA, 25 bp, Homo sapien
tggaggctccaagggccagggcctt

SEQ ID NO: 2198484 - DNA, 25 bp, Homo sapien
gtacacagcagtgccgtgggtccga

SEQ ID NO: 2198485 - DNA, 25 bp, Homo sapien
tgggcacaccaaaacgccaggcata

SEQ ID NO: 2198486 - DNA, 25 bp, Homo sapien
acaccaaaacgccaggcatactcgg

SEQ ID NO: 2198487 - DNA, 25 bp, Homo sapien
ggtctggatgccaccatcagctatg

SEQ ID NO: 2198488 - DNA, 25 bp, Homo sapien
tttccagggtgatgcagatggagcc

SEQ ID NO: 2198489 - DNA, 25 bp, Homo sapien
cacgtgcagcccatccacaccagcg

SEQ ID NO: 2198490 - DNA, 25 bp, Homo sapien
gtgcagcccatccacaccagcgtca

SEQ ID NO: 2198491 - DNA, 25 bp, Homo sapien
gctgtcaccacattcctcccaatca

SEQ ID NO: 2198492 - DNA, 25 bp, Homo sapien
gatgtaacgcaccatggcaatctga

SEQ ID NO: 2198493 - DNA, 25 bp, Homo sapien
ggtgagcaggcccaggcggaatttg

SEQ ID NO: 2198494 - DNA, 25 bp, Homo sapien
aggcccaggcggaatttgtcatctt

SEQ ID NO: 2198495 - DNA, 25 bp, Homo sapien
aagactatgacatcgacgcccgcct

SEQ ID NO: 2198496 - DNA, 25 bp, Homo sapien
tcatgatcattgacaacaggcagct

SEQ ID NO: 2198497 - DNA, 25 bp, Homo sapien
agctcatcatgatcattgacaacag

SEQ ID NO: 2198498 - DNA, 25 bp, Homo sapien
tcatcatgatcattgacaacaggca

SEQ ID NO: 2198499 - DNA, 25 bp, Homo sapien
catgatcattgacaacaggcagctt

SEQ ID NO: 2198500 - DNA, 25 bp, Homo sapien
tggtccttctcagcaaggaagtcga

SEQ ID NO: 2198501 - DNA, 25 bp, Homo sapien
agggtgtgtggtccttctcagcaag

SEQ ID NO: 2198502 - DNA, 25 bp, Homo sapien
tgtgtggtccttctcagcaaggaag

SEQ ID NO: 2198503 - DNA, 25 bp, Homo sapien
ggtgtgtggtccttctcagcaagga

SEQ ID NO: 2198504 - DNA, 25 bp, Homo sapien
gctgccgatggtgccggtctcagta

SEQ ID NO: 2198505 - DNA, 25 bp, Homo sapien
ccgatggtgccggtctcagtaatgg

SEQ ID NO: 2198506 - DNA, 25 bp, Homo sapien
caaggggctcagtaccacagggtct

SEQ ID NO: 2198507 - DNA, 25 bp, Homo sapien
cagtaccacagggtctgtgatgaag

SEQ ID NO: 2198508 - DNA, 25 bp, Homo sapien
gcgatggccatgtcggcctctatca

SEQ ID NO: 2198509 - DNA, 25 bp, Homo sapien
tcgcgatggccatgtcggcctctat

SEQ ID NO: 2198510 - DNA, 25 bp, Homo sapien
agccatcgcgatggccatgtcggcc

SEQ ID NO: 2198511 - DNA, 25 bp, Homo sapien
catcgcgatggccatgtcggcctct

SEQ ID NO: 2198512 - DNA, 25 bp, Homo sapien
gtgaggtcgtcagcgctggcaaaga

SEQ ID NO: 2198513 - DNA, 25 bp, Homo sapien
gctggtagcgggtgccgccgctgat

SEQ ID NO: 2198514 - DNA, 25 bp, Homo sapien
tccgtgggaaaggagatcagtggcg

SEQ ID NO: 2198515 - DNA, 25 bp, Homo sapien
catcctcgggctggtagcgggtgcc

SEQ ID NO: 2198516 - DNA, 25 bp, Homo sapien
caagtggacacattattcacataaa

SEQ ID NO: 2198517 - DNA, 25 bp, Homo sapien
ccaagtggacacattattcacataa

SEQ ID NO: 2198518 - DNA, 25 bp, Homo sapien
aagtggacacattattcacataaac

SEQ ID NO: 2198519 - DNA, 25 bp, Homo sapien
agtggacacattattcacataaaca

SEQ ID NO: 2198520 - DNA, 25 bp, Homo sapien
tgagggccagatgcaggattggggt

SEQ ID NO: 2198521 - DNA, 25 bp, Homo sapien
taggatggcaggtagatcagtgggt

SEQ ID NO: 2198522 - DNA, 25 bp, Homo sapien
tattcagtgacactcccaggaccca

SEQ ID NO: 2198523 - DNA, 25 bp, Homo sapien
gccagatgcaggattggggttggga

SEQ ID NO: 2198524 - DNA, 25 bp, Homo sapien
gaaagctcagatcatgcccagagct

SEQ ID NO: 2198525 - DNA, 25 bp, Homo sapien
cccagagctggcgatgatggagtga

SEQ ID NO: 2198526 - DNA, 25 bp, Homo sapien
agagctatgtccaagaacctcccag

SEQ ID NO: 2198527 - DNA, 25 bp, Homo sapien
agtgaagtgaaggagagctatgtcc

SEQ ID NO: 2198528 - DNA, 25 bp, Homo sapien
agttccccttcgaggcggtgctcca

SEQ ID NO: 2198529 - DNA, 25 bp, Homo sapien
ctgcaccgaggacatttcccttggc

SEQ ID NO: 2198530 - DNA, 25 bp, Homo sapien
gttccccttcgaggcggtgctccag

SEQ ID NO: 2198531 - DNA, 25 bp, Homo sapien
gctccaggccctaatccccactgca

SEQ ID NO: 2198532 - DNA, 25 bp, Homo sapien
atggctgtctttgctcttcctgtcc

SEQ ID NO: 2198533 - DNA, 25 bp, Homo sapien
tcatccatggctgtctttgctcttc

SEQ ID NO: 2198534 - DNA, 25 bp, Homo sapien
catccatggctgtctttgctcttcc

SEQ ID NO: 2198535 - DNA, 25 bp, Homo sapien
tccatggctgtctttgctcttcctg

SEQ ID NO: 2198536 - DNA, 25 bp, Homo sapien
tgcatcaggagctcttgacacccag

SEQ ID NO: 2198537 - DNA, 25 bp, Homo sapien
tagcatcagcaagacggagttccca

SEQ ID NO: 2198538 - DNA, 25 bp, Homo sapien
ccggccttctttgtgctgggatatg

SEQ ID NO: 2198539 - DNA, 25 bp, Homo sapien
tgggatatgggcaccaatccaggct

SEQ ID NO: 2198540 - DNA, 25 bp, Homo sapien
tacaactccgttctgtgctttgacc

SEQ ID NO: 2198541 - DNA, 25 bp, Homo sapien
ttacaactccgttctgtgctttgac

SEQ ID NO: 2198542 - DNA, 25 bp, Homo sapien
acctgggtcaatgttctcatttggg

SEQ ID NO: 2198543 - DNA, 25 bp, Homo sapien
gacctgggtcaatgttctcatttgg

SEQ ID NO: 2198544 - DNA, 25 bp, Homo sapien
ttgacctgggtcaatgttctcattt

SEQ ID NO: 2198545 - DNA, 25 bp, Homo sapien
ttattgacctgggtcaatgttctca

SEQ ID NO: 2198546 - DNA, 25 bp, Homo sapien
ctatttacatacacgggaaacatga

SEQ ID NO: 2198547 - DNA, 25 bp, Homo sapien
tggtgacaactgctgggtacaactc

SEQ ID NO: 2198548 - DNA, 25 bp, Homo sapien
actgctgggtacaactccatttgcc

SEQ ID NO: 2198549 - DNA, 25 bp, Homo sapien
gaaacatgatcggatcttcctttgc

SEQ ID NO: 2198550 - DNA, 25 bp, Homo sapien
agcccagggtttgccaccactgatg

SEQ ID NO: 2198551 - DNA, 25 bp, Homo sapien
ttactagcccaggactgaaccacac

SEQ ID NO: 2198552 - DNA, 25 bp, Homo sapien
gtttggcaagacttgtgtttactag

SEQ ID NO: 2198553 - DNA, 25 bp, Homo sapien
ccagggtttgccaccactgatgttc

SEQ ID NO: 2198554 - DNA, 25 bp, Homo sapien
tgctccaggcaagtcggccctggga

SEQ ID NO: 2198555 - DNA, 25 bp, Homo sapien
ggtcaaatccagtgctccaggcaag

SEQ ID NO: 2198556 - DNA, 25 bp, Homo sapien
cagaagctgcctcagagttggtcca

SEQ ID NO: 2198557 - DNA, 25 bp, Homo sapien
agcagaagctgcctcagagttggtc

SEQ ID NO: 2198558 - DNA, 25 bp, Homo sapien
tacagaccgctgacatcatcctcac

SEQ ID NO: 2198559 - DNA, 25 bp, Homo sapien
ctacagaccgctgacatcatcctca

SEQ ID NO: 2198560 - DNA, 25 bp, Homo sapien
tggcttgtgttcacagccgcctgcc

SEQ ID NO: 2198561 - DNA, 25 bp, Homo sapien
ccgcctgccgggagctggagcctgt

SEQ ID NO: 2198562 - DNA, 25 bp, Homo sapien
agcctgtcagctcgagcggcagcga

SEQ ID NO: 2198563 - DNA, 25 bp, Homo sapien
gaagggatgggattactgccctctc

SEQ ID NO: 2198564 - DNA, 25 bp, Homo sapien
ggtctaatgagtgccctcacagagg

SEQ ID NO: 2198565 - DNA, 25 bp, Homo sapien
ccaggtctaatgagtgccctcacag

SEQ ID NO: 2198566 - DNA, 25 bp, Homo sapien
gatgtaggagactgctcagagggga

SEQ ID NO: 2198567 - DNA, 25 bp, Homo sapien
aggatgtaggagactgctcagaggg

SEQ ID NO: 2198568 - DNA, 25 bp, Homo sapien
atcgggctcttccagtgacaagggc

SEQ ID NO: 2198569 - DNA, 25 bp, Homo sapien
gcagccatcagataatcgggctctt

SEQ ID NO: 2198570 - DNA, 25 bp, Homo sapien
gccatcagataatcgggctcttcca

SEQ ID NO: 2198571 - DNA, 25 bp, Homo sapien
gccagcagccatcagataatcgggc

SEQ ID NO: 2198572 - DNA, 25 bp, Homo sapien
gcggggcctttatgatgcccatctc

SEQ ID NO: 2198573 - DNA, 25 bp, Homo sapien
cggggcctttatgatgcccatctct

SEQ ID NO: 2198574 - DNA, 25 bp, Homo sapien
ggggcctttatgatgcccatctctc

SEQ ID NO: 2198575 - DNA, 25 bp, Homo sapien
tgcctgagtgtccatgaacttgtgt

SEQ ID NO: 2198576 - DNA, 25 bp, Homo sapien
ttgtgtgtccgtgggtgtctctgag

SEQ ID NO: 2198577 - DNA, 25 bp, Homo sapien
cttgtgtgtccgtgggtgtctctga

SEQ ID NO: 2198578 - DNA, 25 bp, Homo sapien
tggtgtctggatgtgtgcatctagt

SEQ ID NO: 2198579 - DNA, 25 bp, Homo sapien
ctggtgtctggatgtgtgcatctag

SEQ ID NO: 2198580 - DNA, 25 bp, Homo sapien
ggtgtctggatgtgtgcatctagtg

SEQ ID NO: 2198581 - DNA, 25 bp, Homo sapien
gtgtctggatgtgtgcatctagtgg

SEQ ID NO: 2198582 - DNA, 25 bp, Homo sapien
tcccagaagaagtagcgctgatggg

SEQ ID NO: 2198583 - DNA, 25 bp, Homo sapien
cttcccagaagaagtagcgctgatg

SEQ ID NO: 2198584 - DNA, 25 bp, Homo sapien
ttcccagaagaagtagcgctgatgg

SEQ ID NO: 2198585 - DNA, 25 bp, Homo sapien
ggtcagccactgtgtcggtggctcc

SEQ ID NO: 2198586 - DNA, 25 bp, Homo sapien
tcctcttggcccctccacatctctg

SEQ ID NO: 2198587 - DNA, 25 bp, Homo sapien
tctctgcccaccgtcctatgcaggt

SEQ ID NO: 2198588 - DNA, 25 bp, Homo sapien
tgcccaccgtcctatgcaggttctg

SEQ ID NO: 2198589 - DNA, 25 bp, Homo sapien
cactgccctctcccagggtttgggc

SEQ ID NO: 2198590 - DNA, 25 bp, Homo sapien
gcactgccctctcccagggtttggg

SEQ ID NO: 2198591 - DNA, 25 bp, Homo sapien
cccaacagagggcactgccctctcc

SEQ ID NO: 2198592 - DNA, 25 bp, Homo sapien
aacagagggcactgccctctcccag

SEQ ID NO: 2198593 - DNA, 25 bp, Homo sapien
gccctgctgatcactccggtactca

SEQ ID NO: 2198594 - DNA, 25 bp, Homo sapien
ctgccctgctgatcactccggtact

SEQ ID NO: 2198595 - DNA, 25 bp, Homo sapien
tgccctgctgatcactccggtactc

SEQ ID NO: 2198596 - DNA, 25 bp, Homo sapien
ccctgctgatcactccggtactcac

SEQ ID NO: 2198597 - DNA, 25 bp, Homo sapien
ctggaagcggtctggagcttggggc

SEQ ID NO: 2198598 - DNA, 25 bp, Homo sapien
gctggaagcggtctggagcttgggg

SEQ ID NO: 2198599 - DNA, 25 bp, Homo sapien
tggaagcggtctggagcttggggcc

SEQ ID NO: 2198600 - DNA, 25 bp, Homo sapien
tgctggaagcggtctggagcttggg

SEQ ID NO: 2198601 - DNA, 25 bp, Homo sapien
gtccaagcagcttgtagagccccag

SEQ ID NO: 2198602 - DNA, 25 bp, Homo sapien
tacactgtggagcagtaaatctgcg

SEQ ID NO: 2198603 - DNA, 25 bp, Homo sapien
taaatctgcgcagctctgagctggc

SEQ ID NO: 2198604 - DNA, 25 bp, Homo sapien
tcagggtagactgaacagccagctg

SEQ ID NO: 2198605 - DNA, 25 bp, Homo sapien
gccagcagctcaacaggcaagtggc

SEQ ID NO: 2198606 - DNA, 25 bp, Homo sapien
cagagagcaccccggataggcagct

SEQ ID NO: 2198607 - DNA, 25 bp, Homo sapien
gagcaccccggataggcagctccat

SEQ ID NO: 2198608 - DNA, 25 bp, Homo sapien
gagagcaccccggataggcagctcc

SEQ ID NO: 2198609 - DNA, 25 bp, Homo sapien
gaggggttttattggcaggatgctg

SEQ ID NO: 2198610 - DNA, 25 bp, Homo sapien
ttgcttagcacaatgaggggtttta

SEQ ID NO: 2198611 - DNA, 25 bp, Homo sapien
atgaggggttttattggcaggatgc

SEQ ID NO: 2198612 - DNA, 25 bp, Homo sapien
actcagcccagctttgcttagcaca

SEQ ID NO: 2198613 - DNA, 25 bp, Homo sapien
tgctctgaacaacagcttggatcct

SEQ ID NO: 2198614 - DNA, 25 bp, Homo sapien
tttggccttgtataaatgtcctgct

SEQ ID NO: 2198615 - DNA, 25 bp, Homo sapien
tctcgctccagatcctgattattct

SEQ ID NO: 2198616 - DNA, 25 bp, Homo sapien
agtctgtttcctctgcaaagtgcct

SEQ ID NO: 2198617 - DNA, 25 bp, Homo sapien
aaggcccaagaacccagtcacaaag

SEQ ID NO: 2198618 - DNA, 25 bp, Homo sapien
atgtattcatgctggaagtggctgc

SEQ ID NO: 2198619 - DNA, 25 bp, Homo sapien
ggcccaagaacccagtcacaaagat

SEQ ID NO: 2198620 - DNA, 25 bp, Homo sapien
gatgtattcatgctggaagtggctg

SEQ ID NO: 2198621 - DNA, 25 bp, Homo sapien
tatagctctcgactccaatccaaag

SEQ ID NO: 2198622 - DNA, 25 bp, Homo sapien
ctctcgactccaatccaaagagcat

SEQ ID NO: 2198623 - DNA, 25 bp, Homo sapien
cacggtctatagctctcgactccaa

SEQ ID NO: 2198624 - DNA, 25 bp, Homo sapien
gctgggacacggtctatagctctcg

SEQ ID NO: 2198625 - DNA, 25 bp, Homo sapien
tctttgaaggctaagacttggttaa

SEQ ID NO: 2198626 - DNA, 25 bp, Homo sapien
tgggttattcattcttgttacactc

SEQ ID NO: 2198627 - DNA, 25 bp, Homo sapien
taaggtctgataattggcttatatg

SEQ ID NO: 2198628 - DNA, 25 bp, Homo sapien
ggcttatatgatacctcttttggaa

SEQ ID NO: 2198629 - DNA, 25 bp, Homo sapien
tgttggacccaaagagtcccctgag

SEQ ID NO: 2198630 - DNA, 25 bp, Homo sapien
tccttagaactacggagaataggcc

SEQ ID NO: 2198631 - DNA, 25 bp, Homo sapien
tatgctgtgcagagtggttctttgc

SEQ ID NO: 2198632 - DNA, 25 bp, Homo sapien
tggaatttacaaagcacctgaagga

SEQ ID NO: 2198633 - DNA, 25 bp, Homo sapien
gataatgatcgccttggccttggct

SEQ ID NO: 2198634 - DNA, 25 bp, Homo sapien
gagtagccctaaaatatggatgtgc

SEQ ID NO: 2198635 - DNA, 25 bp, Homo sapien
caagtttgttgacctacatgggcta

SEQ ID NO: 2198636 - DNA, 25 bp, Homo sapien
tagtattgacgtgaatcccactgtg

SEQ ID NO: 2198637 - DNA, 25 bp, Homo sapien
tcaagcaggatttcgtaggaactgt

SEQ ID NO: 2198638 - DNA, 25 bp, Homo sapien
gatttcgtaggaactgtgaccaaga

SEQ ID NO: 2198639 - DNA, 25 bp, Homo sapien
aagatttgtgtaggtccagggtcgt

SEQ ID NO: 2198640 - DNA, 25 bp, Homo sapien
gtccagggtcgttcccatcaagcag

SEQ ID NO: 2198641 - DNA, 25 bp, Homo sapien
ctgtgataaggaacctttgctttag

SEQ ID NO: 2198642 - DNA, 25 bp, Homo sapien
cctgtgataaggaacctttgcttta

SEQ ID NO: 2198643 - DNA, 25 bp, Homo sapien
tgtgataaggaacctttgctttagt

SEQ ID NO: 2198644 - DNA, 25 bp, Homo sapien
tacagatgacatccttggtgggcgg

SEQ ID NO: 2198645 - DNA, 25 bp, Homo sapien
tgtaccataaaccagctgccaagcg

SEQ ID NO: 2198646 - DNA, 25 bp, Homo sapien
cagtcattgcgcagtttgggaaacc

SEQ ID NO: 2198647 - DNA, 25 bp, Homo sapien
tgtgaatactcccaagctatgaggg

SEQ ID NO: 2198648 - DNA, 25 bp, Homo sapien
gactttcacagaacatgcctgattt

SEQ ID NO: 2198649 - DNA, 25 bp, Homo sapien
gcaatagattatacaaccccaagtt

SEQ ID NO: 2198650 - DNA, 25 bp, Homo sapien
ttagaggaaagtccaggacaaaaca

SEQ ID NO: 2198651 - DNA, 25 bp, Homo sapien
tgcctgatttttgttgacgggcaac

SEQ ID NO: 2198652 - DNA, 25 bp, Homo sapien
ggcctcacatgagagaatagacatg

SEQ ID NO: 2198653 - DNA, 25 bp, Homo sapien
tattaatgccatggtaagagctagg

SEQ ID NO: 2198654 - DNA, 25 bp, Homo sapien
tctccttatggaaattgactagtca

SEQ ID NO: 2198655 - DNA, 25 bp, Homo sapien
agattgttgtgtgttcatgatggcc

SEQ ID NO: 2198656 - DNA, 25 bp, Homo sapien
tcagaaattccttcaccacttccag

SEQ ID NO: 2198657 - DNA, 25 bp, Homo sapien
ggccatttctaagatcctcattgtt

SEQ ID NO: 2198658 - DNA, 25 bp, Homo sapien
tgtgaatccagtttttgatgtagac

SEQ ID NO: 2198659 - DNA, 25 bp, Homo sapien
attgtttctcagaaattccttcacc

SEQ ID NO: 2198660 - DNA, 25 bp, Homo sapien
gtggccaggacgcacggggagcggg

SEQ ID NO: 2198661 - DNA, 25 bp, Homo sapien
gttatcgtgaagtaagcaaatgaaa

SEQ ID NO: 2198662 - DNA, 25 bp, Homo sapien
tatcgtgaagtaagcaaatgaaaga

SEQ ID NO: 2198663 - DNA, 25 bp, Homo sapien
tggacagctgtggccaggacgcacg

SEQ ID NO: 2198664 - DNA, 25 bp, Homo sapien
cacttaggtggcagccgaattctgg

SEQ ID NO: 2198665 - DNA, 25 bp, Homo sapien
gagatggtgagctctctgtggcact

SEQ ID NO: 2198666 - DNA, 25 bp, Homo sapien
caagcagctgctactcccatttggc

SEQ ID NO: 2198667 - DNA, 25 bp, Homo sapien
ggcaggactatgtgaagggcactta

SEQ ID NO: 2198668 - DNA, 25 bp, Homo sapien
gctgccagctcctcattatataaga

SEQ ID NO: 2198669 - DNA, 25 bp, Homo sapien
ctgccagctcctcattatataagat

SEQ ID NO: 2198670 - DNA, 25 bp, Homo sapien
agctgccagctcctcattatataag

SEQ ID NO: 2198671 - DNA, 25 bp, Homo sapien
tcttcaggcaacacctcttgttctt

SEQ ID NO: 2198672 - DNA, 25 bp, Homo sapien
ttcctcggggatgtgaacagcccag

SEQ ID NO: 2198673 - DNA, 25 bp, Homo sapien
gaagatatatctcttgaagtttctc

SEQ ID NO: 2198674 - DNA, 25 bp, Homo sapien
gaagtttctcctttagtaactgcat

SEQ ID NO: 2198675 - DNA, 25 bp, Homo sapien
gagtgcatgatctcattacgacatt

SEQ ID NO: 2198676 - DNA, 25 bp, Homo sapien
tgaaaatctcgaagccacgtagaag

SEQ ID NO: 2198677 - DNA, 25 bp, Homo sapien
agaagatactttcatctctgaagag

SEQ ID NO: 2198678 - DNA, 25 bp, Homo sapien
tgttctattctggagtatactgcca

SEQ ID NO: 2198679 - DNA, 25 bp, Homo sapien
ggtccttgtttgtctgctagtcctc

SEQ ID NO: 2198680 - DNA, 25 bp, Homo sapien
acgaagtgatcgcaggagttgatga

SEQ ID NO: 2198681 - DNA, 25 bp, Homo sapien
gagacttaaaagagcaactgcatca

SEQ ID NO: 2198682 - DNA, 25 bp, Homo sapien
tgtgactttctttcgatcaaccacg

SEQ ID NO: 2198683 - DNA, 25 bp, Homo sapien
agggggacctgagtctcttccaact

SEQ ID NO: 2198684 - DNA, 25 bp, Homo sapien
aggagggggacctgagtctcttcca

SEQ ID NO: 2198685 - DNA, 25 bp, Homo sapien
ggaggagggggacctgagtctcttc

SEQ ID NO: 2198686 - DNA, 25 bp, Homo sapien
gagggggacctgagtctcttccaac

SEQ ID NO: 2198687 - DNA, 25 bp, Homo sapien
taggctaagaatcacaagggtacac

SEQ ID NO: 2198688 - DNA, 25 bp, Homo sapien
taggcacgtgctagtaaccaggaca

SEQ ID NO: 2198689 - DNA, 25 bp, Homo sapien
ccaagggcaataactgaagggctgt

SEQ ID NO: 2198690 - DNA, 25 bp, Homo sapien
cagaagggcctcaagctagcaggat

SEQ ID NO: 2198691 - DNA, 25 bp, Homo sapien
gtttccccagtgcacatctccattt

SEQ ID NO: 2198692 - DNA, 25 bp, Homo sapien
gcccggccggcagtttccccagtgc

SEQ ID NO: 2198693 - DNA, 25 bp, Homo sapien
tccattcagcgcacacctgacactg

SEQ ID NO: 2198694 - DNA, 25 bp, Homo sapien
tcccaggcgtccacgggccagcggc

SEQ ID NO: 2198695 - DNA, 25 bp, Homo sapien
ggaacaggacacttgcgctctgggt

SEQ ID NO: 2198696 - DNA, 25 bp, Homo sapien
ccaggagggagggacgtcgcggtgg

SEQ ID NO: 2198697 - DNA, 25 bp, Homo sapien
ggcggtggtcaaggccccgagccag

SEQ ID NO: 2198698 - DNA, 25 bp, Homo sapien
tgggccccgcatcgcggagggaaca

SEQ ID NO: 2198699 - DNA, 25 bp, Homo sapien
cagttcttgtactcggcgcagttga

SEQ ID NO: 2198700 - DNA, 25 bp, Homo sapien
agtaacaggcagtggcccgccttca

SEQ ID NO: 2198701 - DNA, 25 bp, Homo sapien
gtaggccgcggtggaaggagagcac

SEQ ID NO: 2198702 - DNA, 25 bp, Homo sapien
aggagagcacctcgcggccgacgaa

SEQ ID NO: 2198703 - DNA, 25 bp, Homo sapien
cgtggcggacggcagtgcgcaggcg

SEQ ID NO: 2198704 - DNA, 25 bp, Homo sapien
ctgcgcggcgcggtgccaccgatcc

SEQ ID NO: 2198705 - DNA, 25 bp, Homo sapien
cgcggagcctgggaagtacccgagg

SEQ ID NO: 2198706 - DNA, 25 bp, Homo sapien
gcgcaggcgcggagcctgggaagta

SEQ ID NO: 2198707 - DNA, 25 bp, Homo sapien
gcgacttgacacgttctgctgaagc

SEQ ID NO: 2198708 - DNA, 25 bp, Homo sapien
gatatcaataacctaccacattggg

SEQ ID NO: 2198709 - DNA, 25 bp, Homo sapien
tgtgagcataccatggagttcctgg

SEQ ID NO: 2198710 - DNA, 25 bp, Homo sapien
gcatcagaatccagggtagcaaagt

SEQ ID NO: 2198711 - DNA, 25 bp, Homo sapien
aatcacattgaaaacaccttaaagt

SEQ ID NO: 2198712 - DNA, 25 bp, Homo sapien
tcacattgaaaacaccttaaagtta

SEQ ID NO: 2198713 - DNA, 25 bp, Homo sapien
taagtcccaacccgattattagaga

SEQ ID NO: 2198714 - DNA, 25 bp, Homo sapien
atcacattgaaaacaccttaaagtt

SEQ ID NO: 2198715 - DNA, 25 bp, Homo sapien
ttgtgatgaaacttactattcaaat

SEQ ID NO: 2198716 - DNA, 25 bp, Homo sapien
gctccaaatagaaaagggctgaccc

SEQ ID NO: 2198717 - DNA, 25 bp, Homo sapien
gattcgggattcttcacaatgaggg

SEQ ID NO: 2198718 - DNA, 25 bp, Homo sapien
tagaagacctttgcatcagaccatg

SEQ ID NO: 2198719 - DNA, 25 bp, Homo sapien
gggctgacccttgataaagacatct

SEQ ID NO: 2198720 - DNA, 25 bp, Homo sapien
tgtaaggattcaaagcggtcatatt

SEQ ID NO: 2198721 - DNA, 25 bp, Homo sapien
caactcccagaacatttcatgtaag

SEQ ID NO: 2198722 - DNA, 25 bp, Homo sapien
tattactggcaaacggacactgatt

SEQ ID NO: 2198723 - DNA, 25 bp, Homo sapien
tgcaccctgaaaatttttgccagtt

SEQ ID NO: 2198724 - DNA, 25 bp, Homo sapien
cattaaatcacgaacagctgcaaat

SEQ ID NO: 2198725 - DNA, 25 bp, Homo sapien
taagattagccattaaatcacgaac

SEQ ID NO: 2198726 - DNA, 25 bp, Homo sapien
tagccattaaatcacgaacagctgc

SEQ ID NO: 2198727 - DNA, 25 bp, Homo sapien
gggcagtgtaagattagccattaaa

SEQ ID NO: 2198728 - DNA, 25 bp, Homo sapien
tatgcattagttacaactttggtgg

SEQ ID NO: 2198729 - DNA, 25 bp, Homo sapien
gaaacactgtagcattagataagcc

SEQ ID NO: 2198730 - DNA, 25 bp, Homo sapien
ctactgagtgcttataagggcattt

SEQ ID NO: 2198731 - DNA, 25 bp, Homo sapien
agcaagtcccagttaggtttgtatt

SEQ ID NO: 2198732 - DNA, 25 bp, Homo sapien
caaggaaatggtcaacttccagagt

SEQ ID NO: 2198733 - DNA, 25 bp, Homo sapien
tactggacagtgcatgtctctgaca

SEQ ID NO: 2198734 - DNA, 25 bp, Homo sapien
gggtgctggcgattcatcctgtcaa

SEQ ID NO: 2198735 - DNA, 25 bp, Homo sapien
gagactgaagtatggtacaccaaca

SEQ ID NO: 2198736 - DNA, 25 bp, Homo sapien
aatccaaaggtctgcccagtccaag

SEQ ID NO: 2198737 - DNA, 25 bp, Homo sapien
tcctctacagcatggtctaacactg

SEQ ID NO: 2198738 - DNA, 25 bp, Homo sapien
ggagaactgaagacctcatgtgaac

SEQ ID NO: 2198739 - DNA, 25 bp, Homo sapien
gaaaacttgcttgatcccaatagga

SEQ ID NO: 2198740 - DNA, 25 bp, Homo sapien
tctactgcccagtgtattccttata

SEQ ID NO: 2198741 - DNA, 25 bp, Homo sapien
tatcaaggttctactggactgttac

SEQ ID NO: 2198742 - DNA, 25 bp, Homo sapien
gacagccatctgcttgtgaaggaat

SEQ ID NO: 2198743 - DNA, 25 bp, Homo sapien
gaactcgcctgcatatccaatgtgg

SEQ ID NO: 2198744 - DNA, 25 bp, Homo sapien
tgtgctataaatacaagcttctggc

SEQ ID NO: 2198745 - DNA, 25 bp, Homo sapien
gcagacattaagagggccacggcaa

SEQ ID NO: 2198746 - DNA, 25 bp, Homo sapien
gggtcagtcccaatagtaaatcact

SEQ ID NO: 2198747 - DNA, 25 bp, Homo sapien
gcttctggcattagcaactgggtca

SEQ ID NO: 2198748 - DNA, 25 bp, Homo sapien
gtcgtggtggattcatctctgcaaa

SEQ ID NO: 2198749 - DNA, 25 bp, Homo sapien
ctgggttgtacctgaagccatgtca

SEQ ID NO: 2198750 - DNA, 25 bp, Homo sapien
atgttgctgaccatcatgggagcag

SEQ ID NO: 2198751 - DNA, 25 bp, Homo sapien
gagggaccgatgttttctgagttag

SEQ ID NO: 2198752 - DNA, 25 bp, Homo sapien
ctgggagggatcgtcaggcaaaact

SEQ ID NO: 2198753 - DNA, 25 bp, Homo sapien
cgcgctgggagggatcgtcaggcaa

SEQ ID NO: 2198754 - DNA, 25 bp, Homo sapien
aggaggtgcaatcggcggcgcgctg

SEQ ID NO: 2198755 - DNA, 25 bp, Homo sapien
agcaccacagcaggcgtcccaggag

SEQ ID NO: 2198756 - DNA, 25 bp, Homo sapien
tgaggaccaacacctagcattcaag

SEQ ID NO: 2198757 - DNA, 25 bp, Homo sapien
tataggtcctacaacatggttccag

SEQ ID NO: 2198758 - DNA, 25 bp, Homo sapien
taaggcctatggattcggcttctgc

SEQ ID NO: 2198759 - DNA, 25 bp, Homo sapien
cattgaggccaccatgtgcagggct

SEQ ID NO: 2198760 - DNA, 25 bp, Homo sapien
gatgtgtgtaggagctcctaatagc

SEQ ID NO: 2198761 - DNA, 25 bp, Homo sapien
gaaggctattaacgtattagcttta

SEQ ID NO: 2198762 - DNA, 25 bp, Homo sapien
gagctcctaatagcttggtgaaggc

SEQ ID NO: 2198763 - DNA, 25 bp, Homo sapien
tggtgaaggctattaacgtattagc

SEQ ID NO: 2198764 - DNA, 25 bp, Homo sapien
gttttgggactaagagctactctgc

SEQ ID NO: 2198765 - DNA, 25 bp, Homo sapien
gaagttcatcaggtttccactgtcc

SEQ ID NO: 2198766 - DNA, 25 bp, Homo sapien
caggtgtcacttttagctgaagcgt

SEQ ID NO: 2198767 - DNA, 25 bp, Homo sapien
cagtcttaaacatgatcactccggg

SEQ ID NO: 2198768 - DNA, 25 bp, Homo sapien
caaattaacatgtaagtcaaagaga

SEQ ID NO: 2198769 - DNA, 25 bp, Homo sapien
gcaacactgcaaaaagagatgcgat

SEQ ID NO: 2198770 - DNA, 25 bp, Homo sapien
ggcacctacagcattgagcatcagc

SEQ ID NO: 2198771 - DNA, 25 bp, Homo sapien
gagatgcgatcagacattatgtgcc

SEQ ID NO: 2198772 - DNA, 25 bp, Homo sapien
taattactggtatgctattctctgc

SEQ ID NO: 2198773 - DNA, 25 bp, Homo sapien
tagttcagatcctatcctgcaggac

SEQ ID NO: 2198774 - DNA, 25 bp, Homo sapien
gcaaggccagatcctgtgcgcagtg

SEQ ID NO: 2198775 - DNA, 25 bp, Homo sapien
gaaggaatgtcacgttagttcagat

SEQ ID NO: 2198776 - DNA, 25 bp, Homo sapien
ctttgaagatgtcgtctcatgatga

SEQ ID NO: 2198777 - DNA, 25 bp, Homo sapien
caaaggtaactacctgccaggccgg

SEQ ID NO: 2198778 - DNA, 25 bp, Homo sapien
tgaagatgtcgtctcatgatgactg

SEQ ID NO: 2198779 - DNA, 25 bp, Homo sapien
agtggagaacaaaggtaactacctg

SEQ ID NO: 2198780 - DNA, 25 bp, Homo sapien
aatgttcaaggcactgtgagtgagg

SEQ ID NO: 2198781 - DNA, 25 bp, Homo sapien
tggagttggagagggcagcagtaaa

SEQ ID NO: 2198782 - DNA, 25 bp, Homo sapien
gatggtaggtatggatgccgcccaa

SEQ ID NO: 2198783 - DNA, 25 bp, Homo sapien
tgccgcccaagagcgctgaggtagt

SEQ ID NO: 2198784 - DNA, 25 bp, Homo sapien
ttgaggagatcctggccagttccct

SEQ ID NO: 2198785 - DNA, 25 bp, Homo sapien
tgttccagctcgaggggaatgagaa

SEQ ID NO: 2198786 - DNA, 25 bp, Homo sapien
gacattccaggcatgcgtgctgctg

SEQ ID NO: 2198787 - DNA, 25 bp, Homo sapien
gaatgagaagcatctggaaccggag

SEQ ID NO: 2198788 - DNA, 25 bp, Homo sapien
ttggtgacaccatagtgtatgggga

SEQ ID NO: 2198789 - DNA, 25 bp, Homo sapien
tggtgacaccatagtgtatggggaa

SEQ ID NO: 2198790 - DNA, 25 bp, Homo sapien
cttggtgacaccatagtgtatgggg

SEQ ID NO: 2198791 - DNA, 25 bp, Homo sapien
catgtggactagcaaaactggcccc

SEQ ID NO: 2198792 - DNA, 25 bp, Homo sapien
cccctggtcctattgagattccatg

SEQ ID NO: 2198793 - DNA, 25 bp, Homo sapien
tgtggactagcaaaactggcccctg

SEQ ID NO: 2198794 - DNA, 25 bp, Homo sapien
tattgagattccatgcgaggatggg

SEQ ID NO: 2198795 - DNA, 25 bp, Homo sapien
gactgtgctatgataagatgtaggg

SEQ ID NO: 2198796 - DNA, 25 bp, Homo sapien
tgtgtgtgcatcattgagggagact

SEQ ID NO: 2198797 - DNA, 25 bp, Homo sapien
cattgagggagactgattgactgtg

SEQ ID NO: 2198798 - DNA, 25 bp, Homo sapien
gataagcacctgatgttcctggctg

SEQ ID NO: 2198799 - DNA, 25 bp, Homo sapien
tgctcttagccaaatcagaatatct

SEQ ID NO: 2198800 - DNA, 25 bp, Homo sapien
tatctaataaactagcgctgcaggc

SEQ ID NO: 2198801 - DNA, 25 bp, Homo sapien
taaactagcgctgcaggctctcact

SEQ ID NO: 2198802 - DNA, 25 bp, Homo sapien
tagaaatctcatgttcagtatgaaa

SEQ ID NO: 2198803 - DNA, 25 bp, Homo sapien
gctggagctgcgatattaaagaatc

SEQ ID NO: 2198804 - DNA, 25 bp, Homo sapien
tttacagaccttcttcgagcatcct

SEQ ID NO: 2198805 - DNA, 25 bp, Homo sapien
gagaagggggattatcgtcctcatt

SEQ ID NO: 2198806 - DNA, 25 bp, Homo sapien
gattgctgtcaacaaacatattcag

SEQ ID NO: 2198807 - DNA, 25 bp, Homo sapien
tcctggtgcaggatagaaaccttca

SEQ ID NO: 2198808 - DNA, 25 bp, Homo sapien
ttctctgggtcaagcccaacatcgg

SEQ ID NO: 2198809 - DNA, 25 bp, Homo sapien
taatggagcctgagtatcaaacagt

SEQ ID NO: 2198810 - DNA, 25 bp, Homo sapien
caaaaagactataggcaccatcccg

SEQ ID NO: 2198811 - DNA, 25 bp, Homo sapien
tgggccaacagttcccaaagaaatg

SEQ ID NO: 2198812 - DNA, 25 bp, Homo sapien
cagttactgcaacctgagtttgggc

SEQ ID NO: 2198813 - DNA, 25 bp, Homo sapien
gatggatcgaattccattggatact

SEQ ID NO: 2198814 - DNA, 25 bp, Homo sapien
tgtaataactgaaccacatttggtg

SEQ ID NO: 2198815 - DNA, 25 bp, Homo sapien
tattgaacagtacactccctgacca

SEQ ID NO: 2198816 - DNA, 25 bp, Homo sapien
tccctgaccatgtgttagtcctctt

SEQ ID NO: 2198817 - DNA, 25 bp, Homo sapien
ccagatgtgctgttaatattgaaca

SEQ ID NO: 2198818 - DNA, 25 bp, Homo sapien
taaaataagactggattcgaactcc

SEQ ID NO: 2198819 - DNA, 25 bp, Homo sapien
taaacacgaacttctgagaaaatat

SEQ ID NO: 2198820 - DNA, 25 bp, Homo sapien
tcccttggtggttccataacacaag

SEQ ID NO: 2198821 - DNA, 25 bp, Homo sapien
cggtaattataaacacgaacttctg

SEQ ID NO: 2198822 - DNA, 25 bp, Homo sapien
cataacacaagataagttttcggta

SEQ ID NO: 2198823 - DNA, 25 bp, Homo sapien
ggtagagaacgtgcaaattccaaca

SEQ ID NO: 2198824 - DNA, 25 bp, Homo sapien
gacaacagattttcatatgtcaggt

SEQ ID NO: 2198825 - DNA, 25 bp, Homo sapien
taatcgtgcaatgctattccagtca

SEQ ID NO: 2198826 - DNA, 25 bp, Homo sapien
tttctaccaccaacaggctcagaca

SEQ ID NO: 2198827 - DNA, 25 bp, Homo sapien
actaactctgctacccaagtgcggt

SEQ ID NO: 2198828 - DNA, 25 bp, Homo sapien
tcctcagttatacccttacagggag

SEQ ID NO: 2198829 - DNA, 25 bp, Homo sapien
gcaatcaagaagagagcggtccaga

SEQ ID NO: 2198830 - DNA, 25 bp, Homo sapien
tctaccttgtaatcggaaagtgcaa

SEQ ID NO: 2198831 - DNA, 25 bp, Homo sapien
tgataaaagacagcatatgaagtat

SEQ ID NO: 2198832 - DNA, 25 bp, Homo sapien
ggtgataaaagacagcatatgaagt

SEQ ID NO: 2198833 - DNA, 25 bp, Homo sapien
gataaaagacagcatatgaagtata

SEQ ID NO: 2198834 - DNA, 25 bp, Homo sapien
ctggtgataaaagacagcatatgaa

SEQ ID NO: 2198835 - DNA, 25 bp, Homo sapien
tttaataagcgaattgcatggctga

SEQ ID NO: 2198836 - DNA, 25 bp, Homo sapien
taagcgaattgcatggctgaagcca

SEQ ID NO: 2198837 - DNA, 25 bp, Homo sapien
tgcactccttgatgtggaatctcca

SEQ ID NO: 2198838 - DNA, 25 bp, Homo sapien
accttccacttgcactccttgatgt

SEQ ID NO: 2198839 - DNA, 25 bp, Homo sapien
catagcgacgaagtgggctaaaact

SEQ ID NO: 2198840 - DNA, 25 bp, Homo sapien
caaccgaagtcctacaaatggcata

SEQ ID NO: 2198841 - DNA, 25 bp, Homo sapien
tgtatcacacatagcgacgaagtgg

SEQ ID NO: 2198842 - DNA, 25 bp, Homo sapien
tctactggacatggatcatcagaca

SEQ ID NO: 2198843 - DNA, 25 bp, Homo sapien
tagtacttgtacgacagttgtgtgg

SEQ ID NO: 2198844 - DNA, 25 bp, Homo sapien
gcagggctgtcttcacgatctgcag

SEQ ID NO: 2198845 - DNA, 25 bp, Homo sapien
cgatctgcagcattcacagacataa

SEQ ID NO: 2198846 - DNA, 25 bp, Homo sapien
ttattgggaacctccaacatctcca

SEQ ID NO: 2198847 - DNA, 25 bp, Homo sapien
caagcatgaggagcaacgagaactc

SEQ ID NO: 2198848 - DNA, 25 bp, Homo sapien
ggaatgctactctgcaacaaaagga

SEQ ID NO: 2198849 - DNA, 25 bp, Homo sapien
taaattaggcctacgataagacacc

SEQ ID NO: 2198850 - DNA, 25 bp, Homo sapien
tcaacatcttcagccattagggcag

SEQ ID NO: 2198851 - DNA, 25 bp, Homo sapien
tgagttgagtaattggaaagctgca

SEQ ID NO: 2198852 - DNA, 25 bp, Homo sapien
caatgtttcactgcttatcgtaggc

SEQ ID NO: 2198853 - DNA, 25 bp, Homo sapien
aatgtagtattgtggaaggcgggta

SEQ ID NO: 2198854 - DNA, 25 bp, Homo sapien
tagaaaggtttccaataggatgagt

SEQ ID NO: 2198855 - DNA, 25 bp, Homo sapien
gattcccatcaacatacctttgtga

SEQ ID NO: 2198856 - DNA, 25 bp, Homo sapien
tctacggatcaaatgcaagaactgg

SEQ ID NO: 2198857 - DNA, 25 bp, Homo sapien
gaaacaagctcatgtgtcacattaa

SEQ ID NO: 2198858 - DNA, 25 bp, Homo sapien
tatcatcaatccaacgtggacaagt

SEQ ID NO: 2198859 - DNA, 25 bp, Homo sapien
gctgaatccagggtatgattcgttt

SEQ ID NO: 2198860 - DNA, 25 bp, Homo sapien
tcattcacagacttctccatgtcat

SEQ ID NO: 2198861 - DNA, 25 bp, Homo sapien
gattcgtttcatatcatcattcaca

SEQ ID NO: 2198862 - DNA, 25 bp, Homo sapien
tccatgtcatccagagtggcctggt

SEQ ID NO: 2198863 - DNA, 25 bp, Homo sapien
gggctccaagatgggaacaacaaga

SEQ ID NO: 2198864 - DNA, 25 bp, Homo sapien
tgcagacactctgaattaccacagg

SEQ ID NO: 2198865 - DNA, 25 bp, Homo sapien
aagtccataaagcatcaattgaaac

SEQ ID NO: 2198866 - DNA, 25 bp, Homo sapien
gcatcaattgaaacattccagaatg

SEQ ID NO: 2198867 - DNA, 25 bp, Homo sapien
agcagaactgaggagatcaaccccg

SEQ ID NO: 2198868 - DNA, 25 bp, Homo sapien
gaatggcccaaatagtgtaaatgac

SEQ ID NO: 2198869 - DNA, 25 bp, Homo sapien
taacacctgggactctacaaaacac

SEQ ID NO: 2198870 - DNA, 25 bp, Homo sapien
ttcagaacctaggtgaacagcacac

SEQ ID NO: 2198871 - DNA, 25 bp, Homo sapien
cattgaagcctctaagaatggcctt

SEQ ID NO: 2198872 - DNA, 25 bp, Homo sapien
ttcattggcattgaagcctctaaga

SEQ ID NO: 2198873 - DNA, 25 bp, Homo sapien
ggacactgtcaatcaggagtttttc

SEQ ID NO: 2198874 - DNA, 25 bp, Homo sapien
agctcttgcatggacactgtcaatc

SEQ ID NO: 2198875 - DNA, 25 bp, Homo sapien
taattgtaactttgtgaacagatgc

SEQ ID NO: 2198876 - DNA, 25 bp, Homo sapien
ggcttggagacatcattctcatcaa

SEQ ID NO: 2198877 - DNA, 25 bp, Homo sapien
gctggcaaaggaggatcgtgaaaaa

SEQ ID NO: 2198878 - DNA, 25 bp, Homo sapien
actttgtgaacagatgctgttccag

SEQ ID NO: 2198879 - DNA, 25 bp, Homo sapien
tggaaaactgtgataagcatgcatg

SEQ ID NO: 2198880 - DNA, 25 bp, Homo sapien
tttaacaggcacaattcaaagtgga

SEQ ID NO: 2198881 - DNA, 25 bp, Homo sapien
gaattgagagttacaaacagtccaa

SEQ ID NO: 2198882 - DNA, 25 bp, Homo sapien
gatacccaacaatctaacctaatgg

SEQ ID NO: 2198883 - DNA, 25 bp, Homo sapien
aagtcttagtacaaacaggtaaatg

SEQ ID NO: 2198884 - DNA, 25 bp, Homo sapien
gaatagtaagtcttagtacaaacag

SEQ ID NO: 2198885 - DNA, 25 bp, Homo sapien
tttaagaatagtaagtcttagtaca

SEQ ID NO: 2198886 - DNA, 25 bp, Homo sapien
tagtaagtcttagtacaaacaggta

SEQ ID NO: 2198887 - DNA, 25 bp, Homo sapien
tatgggaccttactacacaaaagca

SEQ ID NO: 2198888 - DNA, 25 bp, Homo sapien
caaaagcatgttactagaggtgcat

SEQ ID NO: 2198889 - DNA, 25 bp, Homo sapien
tggtatacttgggagactggctcca

SEQ ID NO: 2198890 - DNA, 25 bp, Homo sapien
acaggtgtcaactatggatgtccta

SEQ ID NO: 2198891 - DNA, 25 bp, Homo sapien
ggcactttccagcatgatacctttc

SEQ ID NO: 2198892 - DNA, 25 bp, Homo sapien
tttccacctgcacaaggtctcccca

SEQ ID NO: 2198893 - DNA, 25 bp, Homo sapien
actttccagcatgatacctttccac

SEQ ID NO: 2198894 - DNA, 25 bp, Homo sapien
ttccagcatgatacctttccacctg

SEQ ID NO: 2198895 - DNA, 25 bp, Homo sapien
cgttctcggattaacattagagttt

SEQ ID NO: 2198896 - DNA, 25 bp, Homo sapien
agagtttgggaatgtaacacttcta

SEQ ID NO: 2198897 - DNA, 25 bp, Homo sapien
tctcggattaacattagagtttggg

SEQ ID NO: 2198898 - DNA, 25 bp, Homo sapien
gagtttgggaatgtaacacttctaa

SEQ ID NO: 2198899 - DNA, 25 bp, Homo sapien
ttgcttttacctgcaaagtcaacag

SEQ ID NO: 2198900 - DNA, 25 bp, Homo sapien
ggcaaggaatgtaggctgctacagt

SEQ ID NO: 2198901 - DNA, 25 bp, Homo sapien
tacagttcaagactaaggacaaatg

SEQ ID NO: 2198902 - DNA, 25 bp, Homo sapien
taggctgctacagttcaagactaag

SEQ ID NO: 2198903 - DNA, 25 bp, Homo sapien
tatatgtctcaaatttcagaaggat

SEQ ID NO: 2198904 - DNA, 25 bp, Homo sapien
tatgtctcaaatttcagaaggatac

SEQ ID NO: 2198905 - DNA, 25 bp, Homo sapien
aaatatatgtctcaaatttcagaag

SEQ ID NO: 2198906 - DNA, 25 bp, Homo sapien
aatatatgtctcaaatttcagaagg

SEQ ID NO: 2198907 - DNA, 25 bp, Homo sapien
gatttgcatgctatgaaccaaagct

SEQ ID NO: 2198908 - DNA, 25 bp, Homo sapien
tgcaccagttgatggatgaagctga

SEQ ID NO: 2198909 - DNA, 25 bp, Homo sapien
gaagctgatttgcatgctatgaacc

SEQ ID NO: 2198910 - DNA, 25 bp, Homo sapien
gcctagactgcaccagttgatggat

SEQ ID NO: 2198911 - DNA, 25 bp, Homo sapien
gtgtacaagtgtgtcactataccaa

SEQ ID NO: 2198912 - DNA, 25 bp, Homo sapien
aattaaataggtgtacaagtgtgtc

SEQ ID NO: 2198913 - DNA, 25 bp, Homo sapien
taaataggtgtacaagtgtgtcact

SEQ ID NO: 2198914 - DNA, 25 bp, Homo sapien
aagcagttaattaaataggtgtaca

SEQ ID NO: 2198915 - DNA, 25 bp, Homo sapien
ccttatcctcaactagaatttctag

SEQ ID NO: 2198916 - DNA, 25 bp, Homo sapien
ctcccatcacagtcaaggtggcttc

SEQ ID NO: 2198917 - DNA, 25 bp, Homo sapien
gcttcaaattctccttcaacacgaa

SEQ ID NO: 2198918 - DNA, 25 bp, Homo sapien
acacgaaacttcacccggccatttg

SEQ ID NO: 2198919 - DNA, 25 bp, Homo sapien
cagctggcaagtcgtagaatcaaac

SEQ ID NO: 2198920 - DNA, 25 bp, Homo sapien
taaggttccaacaattcaatggttc

SEQ ID NO: 2198921 - DNA, 25 bp, Homo sapien
caatggttcctgaataagaagtagc

SEQ ID NO: 2198922 - DNA, 25 bp, Homo sapien
gccagcttccaggtcaagaaatgaa

SEQ ID NO: 2198923 - DNA, 25 bp, Homo sapien
atctgattcagctgatggagtgtgg

SEQ ID NO: 2198924 - DNA, 25 bp, Homo sapien
gaggaagatctgtggttacaagccg

SEQ ID NO: 2198925 - DNA, 25 bp, Homo sapien
tacaagccgatgtctaagaatctga

SEQ ID NO: 2198926 - DNA, 25 bp, Homo sapien
ttgggtctggaggaataattttgtc

SEQ ID NO: 2198927 - DNA, 25 bp, Homo sapien
tacagtgttgcgtactttacctaag

SEQ ID NO: 2198928 - DNA, 25 bp, Homo sapien
gatatctactcacatctggccccaa

SEQ ID NO: 2198929 - DNA, 25 bp, Homo sapien
gatgttatgtctgcacatccgcgca

SEQ ID NO: 2198930 - DNA, 25 bp, Homo sapien
tatggcaccaagtcagtaaactacc

SEQ ID NO: 2198931 - DNA, 25 bp, Homo sapien
tatgggatggcaaaactaggcaggc

SEQ ID NO: 2198932 - DNA, 25 bp, Homo sapien
tggcagccgtgggtaagatccagta

SEQ ID NO: 2198933 - DNA, 25 bp, Homo sapien
catctctagctaacgaggccaggcg

SEQ ID NO: 2198934 - DNA, 25 bp, Homo sapien
caggcgatcagcagtgtccacaaac

SEQ ID NO: 2198935 - DNA, 25 bp, Homo sapien
agtaaagggtaaatgtattaagcat

SEQ ID NO: 2198936 - DNA, 25 bp, Homo sapien
gaaaactatctccttttcacactaa

SEQ ID NO: 2198937 - DNA, 25 bp, Homo sapien
cttcaaggggaattagtatcagttt

SEQ ID NO: 2198938 - DNA, 25 bp, Homo sapien
cacacacataatatcaaagttagga

SEQ ID NO: 2198939 - DNA, 25 bp, Homo sapien
tcacatgtcactcaaatcagcaggg

SEQ ID NO: 2198940 - DNA, 25 bp, Homo sapien
ctttctgatcaggtgtccataaaca

SEQ ID NO: 2198941 - DNA, 25 bp, Homo sapien
cagtctcatatttaaagtctcctca

SEQ ID NO: 2198942 - DNA, 25 bp, Homo sapien
tctcctcacgtaatgatgtctccag

SEQ ID NO: 2198943 - DNA, 25 bp, Homo sapien
taatcgaacgaagagttggcgtgtc

SEQ ID NO: 2198944 - DNA, 25 bp, Homo sapien
cccatttcactaaagctaataatcg

SEQ ID NO: 2198945 - DNA, 25 bp, Homo sapien
actttgccagcattattagcccatt

SEQ ID NO: 2198946 - DNA, 25 bp, Homo sapien
agagttggcgtgtccggctagcaaa

SEQ ID NO: 2198947 - DNA, 25 bp, Homo sapien
ttccacatcagatttccttggcagt

SEQ ID NO: 2198948 - DNA, 25 bp, Homo sapien
ctttccacatcagatttccttggca

SEQ ID NO: 2198949 - DNA, 25 bp, Homo sapien
tttccacatcagatttccttggcag

SEQ ID NO: 2198950 - DNA, 25 bp, Homo sapien
caagtctctgttgcatcgttgccag

SEQ ID NO: 2198951 - DNA, 25 bp, Homo sapien
tagactaagcagtccagcggagaac

SEQ ID NO: 2198952 - DNA, 25 bp, Homo sapien
gaggtgcaaacgtctcagccggttg

SEQ ID NO: 2198953 - DNA, 25 bp, Homo sapien
tttcagtggaagtgtaacaacacgc

SEQ ID NO: 2198954 - DNA, 25 bp, Homo sapien
aggtccgtcaacaccataagctccg

SEQ ID NO: 2198955 - DNA, 25 bp, Homo sapien
tcaatgagggtgctcagccggtagc

SEQ ID NO: 2198956 - DNA, 25 bp, Homo sapien
cagcagaaattcaatgagggtgctc

SEQ ID NO: 2198957 - DNA, 25 bp, Homo sapien
ataagctccgagtaggcccggtgca

SEQ ID NO: 2198958 - DNA, 25 bp, Homo sapien
ctcggtcaccgcgccgaaacgggag

SEQ ID NO: 2198959 - DNA, 25 bp, Homo sapien
gagcgggcagagtcgccaccgccta

SEQ ID NO: 2198960 - DNA, 25 bp, Homo sapien
cgggcttggcgcaacggcacacgat

SEQ ID NO: 2198961 - DNA, 25 bp, Homo sapien
aacggcacacgatgcggtcctcgag

SEQ ID NO: 2198962 - DNA, 25 bp, Homo sapien
gaagtcgatcggcagagcggaaggg

SEQ ID NO: 2198963 - DNA, 25 bp, Homo sapien
tgcccgaggcggaagtcgatcggca

SEQ ID NO: 2198964 - DNA, 25 bp, Homo sapien
ttctctcagctgtctagcaccgcag

SEQ ID NO: 2198965 - DNA, 25 bp, Homo sapien
gacctgcagaggaccttccgacagg

SEQ ID NO: 2198966 - DNA, 25 bp, Homo sapien
gattggtcaagtaaagtgttgaagg

SEQ ID NO: 2198967 - DNA, 25 bp, Homo sapien
tggggtctcactggattggtcaagt

SEQ ID NO: 2198968 - DNA, 25 bp, Homo sapien
gtgccatctagtttcttcttgccga

SEQ ID NO: 2198969 - DNA, 25 bp, Homo sapien
ttcttgccgattatagtaaaaccca

SEQ ID NO: 2198970 - DNA, 25 bp, Homo sapien
agagcaagagaatagtacacctcct

SEQ ID NO: 2198971 - DNA, 25 bp, Homo sapien
tagagtaagagtgaggtacacagta

SEQ ID NO: 2198972 - DNA, 25 bp, Homo sapien
gtacacctcctaggggggtcagaga

SEQ ID NO: 2198973 - DNA, 25 bp, Homo sapien
ttagagtaagagtgaggtacacagt

SEQ ID NO: 2198974 - DNA, 25 bp, Homo sapien
ccataccagaagaaagctaccaagt

SEQ ID NO: 2198975 - DNA, 25 bp, Homo sapien
ctcatacctaatattcaaggggatc

SEQ ID NO: 2198976 - DNA, 25 bp, Homo sapien
tattcaaggggatcaaggggttgta

SEQ ID NO: 2198977 - DNA, 25 bp, Homo sapien
gctaccaagtcagcaagacctgcca

SEQ ID NO: 2198978 - DNA, 25 bp, Homo sapien
ctgcatggctgctggcagggtgagc

SEQ ID NO: 2198979 - DNA, 25 bp, Homo sapien
gcatggctgctggcagggtgagcac

SEQ ID NO: 2198980 - DNA, 25 bp, Homo sapien
tcaaaggtcctgcatggctgctggc

SEQ ID NO: 2198981 - DNA, 25 bp, Homo sapien
aaaggtcctgcatggctgctggcag

SEQ ID NO: 2198982 - DNA, 25 bp, Homo sapien
tgtgatgatgctgttgcccacacat

SEQ ID NO: 2198983 - DNA, 25 bp, Homo sapien
gatgtagtccatccacagtcccttg

SEQ ID NO: 2198984 - DNA, 25 bp, Homo sapien
gcagagccacggaaaagttcagcaa

SEQ ID NO: 2198985 - DNA, 25 bp, Homo sapien
atttcacagctcatcaagcccatgc

SEQ ID NO: 2198986 - DNA, 25 bp, Homo sapien
ctcagaaagaaactgggggtgctgg

SEQ ID NO: 2198987 - DNA, 25 bp, Homo sapien
gaaagaaactgggggtgctgggcag

SEQ ID NO: 2198988 - DNA, 25 bp, Homo sapien
cagaaagaaactgggggtgctgggc

SEQ ID NO: 2198989 - DNA, 25 bp, Homo sapien
ttccactctcagaaagaaactgggg

SEQ ID NO: 2198990 - DNA, 25 bp, Homo sapien
agttcatcatcgcattcacacaagc

SEQ ID NO: 2198991 - DNA, 25 bp, Homo sapien
accgaataagttacagctgagttca

SEQ ID NO: 2198992 - DNA, 25 bp, Homo sapien
gttgtcgtcatcgtaaccgaataag

SEQ ID NO: 2198993 - DNA, 25 bp, Homo sapien
cctgtcctcaaagaaacggttgtcg

SEQ ID NO: 2198994 - DNA, 25 bp, Homo sapien
caggctagctaaatcgaagactata

SEQ ID NO: 2198995 - DNA, 25 bp, Homo sapien
tagctaaatcgaagactatagccat

SEQ ID NO: 2198996 - DNA, 25 bp, Homo sapien
aatcttcaatttggccaggctagct

SEQ ID NO: 2198997 - DNA, 25 bp, Homo sapien
tggccaggctagctaaatcgaagac

SEQ ID NO: 2198998 - DNA, 25 bp, Homo sapien
agtgaaaactgccttatgtctcctt

SEQ ID NO: 2198999 - DNA, 25 bp, Homo sapien
gcaagagagccttcaatctccctgg

SEQ ID NO: 2199000 - DNA, 25 bp, Homo sapien
tcttcggcctcaaatagttctttcc

SEQ ID NO: 2199001 - DNA, 25 bp, Homo sapien
tagagttgatcattgagagggcaag

SEQ ID NO: 2199002 - DNA, 25 bp, Homo sapien
agtgtcccaagtatagctccagcag

SEQ ID NO: 2199003 - DNA, 25 bp, Homo sapien
agcacagtgtcccaagtatagctcc

SEQ ID NO: 2199004 - DNA, 25 bp, Homo sapien
ctccagcaggaagaggcgtttttcc

SEQ ID NO: 2199005 - DNA, 25 bp, Homo sapien
gaagaggcgtttttccaatgtactc

SEQ ID NO: 2199006 - DNA, 25 bp, Homo sapien
ggtccatactgctaagctgtgtctt

SEQ ID NO: 2199007 - DNA, 25 bp, Homo sapien
tactgctaagctgtgtctttccact

SEQ ID NO: 2199008 - DNA, 25 bp, Homo sapien
gtggtccatactgctaagctgtgtc

SEQ ID NO: 2199009 - DNA, 25 bp, Homo sapien
catactgctaagctgtgtctttcca

SEQ ID NO: 2199010 - DNA, 25 bp, Homo sapien
gaaggttggcatttatggagtgaat

SEQ ID NO: 2199011 - DNA, 25 bp, Homo sapien
ggaaggttggcatttatggagtgaa

SEQ ID NO: 2199012 - DNA, 25 bp, Homo sapien
attgggaaggttggcatttatggag

SEQ ID NO: 2199013 - DNA, 25 bp, Homo sapien
tgggaaggttggcatttatggagtg

SEQ ID NO: 2199014 - DNA, 25 bp, Homo sapien
catgttgtagactacagtatgaatg

SEQ ID NO: 2199015 - DNA, 25 bp, Homo sapien
ggaggtgctttctattgttctattg

SEQ ID NO: 2199016 - DNA, 25 bp, Homo sapien
tccatatcgtttcactccagaaagc

SEQ ID NO: 2199017 - DNA, 25 bp, Homo sapien
aagcaccatattcacattttcagtg

SEQ ID NO: 2199018 - DNA, 25 bp, Homo sapien
ctttgttaccaatggaaggcgtcca

SEQ ID NO: 2199019 - DNA, 25 bp, Homo sapien
tcatgctggtttggagcgtagtccc

SEQ ID NO: 2199020 - DNA, 25 bp, Homo sapien
tcataggttacagcgtcctcctggt

SEQ ID NO: 2199021 - DNA, 25 bp, Homo sapien
tagcataacatttcgtggaggaggt

SEQ ID NO: 2199022 - DNA, 25 bp, Homo sapien
ctcaaagttagaggtcagaaaatac

SEQ ID NO: 2199023 - DNA, 25 bp, Homo sapien
atctcaaagttagaggtcagaaaat

SEQ ID NO: 2199024 - DNA, 25 bp, Homo sapien
aagttagaggtcagaaaatacaatc

SEQ ID NO: 2199025 - DNA, 25 bp, Homo sapien
caaagttagaggtcagaaaatacaa

SEQ ID NO: 2199026 - DNA, 25 bp, Homo sapien
gcagcactcagccacgtgcctgagg

SEQ ID NO: 2199027 - DNA, 25 bp, Homo sapien
cttcaccttgttcgtcactgaagca

SEQ ID NO: 2199028 - DNA, 25 bp, Homo sapien
agcactcagccacgtgcctgaggag

SEQ ID NO: 2199029 - DNA, 25 bp, Homo sapien
tgcctgaggagctcttcaccttgtt

SEQ ID NO: 2199030 - DNA, 25 bp, Homo sapien
agggcactgaagttccccctggcct

SEQ ID NO: 2199031 - DNA, 25 bp, Homo sapien
gcagtgagggcactgaagttccccc

SEQ ID NO: 2199032 - DNA, 25 bp, Homo sapien
tggcctctctgggctgcgccaggat

SEQ ID NO: 2199033 - DNA, 25 bp, Homo sapien
gcctctctgggctgcgccaggatgc

SEQ ID NO: 2199034 - DNA, 25 bp, Homo sapien
taagctccactgcatcggtggccaa

SEQ ID NO: 2199035 - DNA, 25 bp, Homo sapien
cgtctggctcttgagaatcctgtct

SEQ ID NO: 2199036 - DNA, 25 bp, Homo sapien
tgcatcggtggccaagtacttggca

SEQ ID NO: 2199037 - DNA, 25 bp, Homo sapien
caggcacgataagctccactgcatc

SEQ ID NO: 2199038 - DNA, 25 bp, Homo sapien
agcgagaatctgctattccagtatc

SEQ ID NO: 2199039 - DNA, 25 bp, Homo sapien
gaggctgccagcttctacgtcaatt

SEQ ID NO: 2199040 - DNA, 25 bp, Homo sapien
attccagtgcagcatcccgtgccgt

SEQ ID NO: 2199041 - DNA, 25 bp, Homo sapien
tacgtcaattctgcacagtcgttta

SEQ ID NO: 2199042 - DNA, 25 bp, Homo sapien
tttgtgcatgctgtcgttcatccag

SEQ ID NO: 2199043 - DNA, 25 bp, Homo sapien
tgtgcatgctgtcgttcatccagac

SEQ ID NO: 2199044 - DNA, 25 bp, Homo sapien
tcctttgtgcatgctgtcgttcatc

SEQ ID NO: 2199045 - DNA, 25 bp, Homo sapien
cctttgtgcatgctgtcgttcatcc

SEQ ID NO: 2199046 - DNA, 25 bp, Homo sapien
attggccaaggagctgcacagaacg

SEQ ID NO: 2199047 - DNA, 25 bp, Homo sapien
gggacggcgcagtgtacccctccag

SEQ ID NO: 2199048 - DNA, 25 bp, Homo sapien
gcgcatccaccagggacggcgcagt

SEQ ID NO: 2199049 - DNA, 25 bp, Homo sapien
tggaggcacgcgatgagggagtcgc

SEQ ID NO: 2199050 - DNA, 25 bp, Homo sapien
tgtgtttatggagaccgctgcagat

SEQ ID NO: 2199051 - DNA, 25 bp, Homo sapien
gtgcaagtattttcagcgagggtgc

SEQ ID NO: 2199052 - DNA, 25 bp, Homo sapien
gtgctgtgtttatggagaccgctgc

SEQ ID NO: 2199053 - DNA, 25 bp, Homo sapien
tttcagcgagggtgctgtgtttatg

SEQ ID NO: 2199054 - DNA, 25 bp, Homo sapien
cattattgcacttcatcagcgttgc

SEQ ID NO: 2199055 - DNA, 25 bp, Homo sapien
caaatgccagaaagtacgtgtccaa

SEQ ID NO: 2199056 - DNA, 25 bp, Homo sapien
tcaataggctatagaggtcaccgtc

SEQ ID NO: 2199057 - DNA, 25 bp, Homo sapien
tgttcctgtgagaatccattgataa

SEQ ID NO: 2199058 - DNA, 25 bp, Homo sapien
gcctctgtagatctgagcacactcc

SEQ ID NO: 2199059 - DNA, 25 bp, Homo sapien
cagcctctgtagatctgagcacact

SEQ ID NO: 2199060 - DNA, 25 bp, Homo sapien
gtaaagtcagcctctgtagatctga

SEQ ID NO: 2199061 - DNA, 25 bp, Homo sapien
aagtcagcctctgtagatctgagca

SEQ ID NO: 2199062 - DNA, 25 bp, Homo sapien
gctcagtaagtaccattaaactgtt

SEQ ID NO: 2199063 - DNA, 25 bp, Homo sapien
aaacaactaagcagctatgctatag

SEQ ID NO: 2199064 - DNA, 25 bp, Homo sapien
gctatgctatagctcagtaagtacc

SEQ ID NO: 2199065 - DNA, 25 bp, Homo sapien
taagcagctatgctatagctcagta

SEQ ID NO: 2199066 - DNA, 25 bp, Homo sapien
aatagtaagattcccaatcataatg

SEQ ID NO: 2199067 - DNA, 25 bp, Homo sapien
gatgaaatagtaagattcccaatca

SEQ ID NO: 2199068 - DNA, 25 bp, Homo sapien
tgaaatagtaagattcccaatcata

SEQ ID NO: 2199069 - DNA, 25 bp, Homo sapien
cataattaaggcaacagttcaagct

SEQ ID NO: 2199070 - DNA, 25 bp, Homo sapien
gaaggaaactggagacgttcagtta

SEQ ID NO: 2199071 - DNA, 25 bp, Homo sapien
gcatatgctcgctggctctgggaaa

SEQ ID NO: 2199072 - DNA, 25 bp, Homo sapien
ctctgggaaagctacatgtgcataa

SEQ ID NO: 2199073 - DNA, 25 bp, Homo sapien
cagttatatttccatggtgccgtga

SEQ ID NO: 2199074 - DNA, 25 bp, Homo sapien
tctgcagtttgagagtccttcgatt

SEQ ID NO: 2199075 - DNA, 25 bp, Homo sapien
tgagagtccttcgattcaatgacat

SEQ ID NO: 2199076 - DNA, 25 bp, Homo sapien
gcagtttgagagtccttcgattcaa

SEQ ID NO: 2199077 - DNA, 25 bp, Homo sapien
gtttgagagtccttcgattcaatga

SEQ ID NO: 2199078 - DNA, 25 bp, Homo sapien
ggtcatggtaatctctccaaaattc

SEQ ID NO: 2199079 - DNA, 25 bp, Homo sapien
catggtaatctctccaaaattctgt

SEQ ID NO: 2199080 - DNA, 25 bp, Homo sapien
tcatgaatggtcatggtaatctctc

SEQ ID NO: 2199081 - DNA, 25 bp, Homo sapien
tgaatggtcatggtaatctctccaa

SEQ ID NO: 2199082 - DNA, 25 bp, Homo sapien
tttcactattaatctggagtacttg

SEQ ID NO: 2199083 - DNA, 25 bp, Homo sapien
ttcactattaatctggagtacttgg

SEQ ID NO: 2199084 - DNA, 25 bp, Homo sapien
agtagtttgagccccaattactttg

SEQ ID NO: 2199085 - DNA, 25 bp, Homo sapien
atggatagagagacatttttgcagg

SEQ ID NO: 2199086 - DNA, 25 bp, Homo sapien
cttcaagttttcaagagatggatag

SEQ ID NO: 2199087 - DNA, 25 bp, Homo sapien
ggatagagagacatttttgcagggt

SEQ ID NO: 2199088 - DNA, 25 bp, Homo sapien
tcaagttttcaagagatggatagag

SEQ ID NO: 2199089 - DNA, 25 bp, Homo sapien
tcaatgatgattgattttgctagac

SEQ ID NO: 2199090 - DNA, 25 bp, Homo sapien
aatgatgattgattttgctagacca

SEQ ID NO: 2199091 - DNA, 25 bp, Homo sapien
tgatgattgattttgctagaccagc

SEQ ID NO: 2199092 - DNA, 25 bp, Homo sapien
gatgattgattttgctagaccagct

SEQ ID NO: 2199093 - DNA, 25 bp, Homo sapien
ctggagcctgagtccgctgcacgga

SEQ ID NO: 2199094 - DNA, 25 bp, Homo sapien
taagcagcttcttaggcacaggtgc

SEQ ID NO: 2199095 - DNA, 25 bp, Homo sapien
gatggccccacggatggcggtggcc

SEQ ID NO: 2199096 - DNA, 25 bp, Homo sapien
cataagcagcttcttaggcacaggt

SEQ ID NO: 2199097 - DNA, 25 bp, Homo sapien
tgcctccgcgagctccgcggcctcg

SEQ ID NO: 2199098 - DNA, 25 bp, Homo sapien
agaggcccccaagcaaaagtcaatg

SEQ ID NO: 2199099 - DNA, 25 bp, Homo sapien
gccggcacggatctgcttctgcact

SEQ ID NO: 2199100 - DNA, 25 bp, Homo sapien
caagcggcccaacttggtgacgggc

SEQ ID NO: 2199101 - DNA, 25 bp, Homo sapien
tcgctgcaccggcgtcatccgccat

SEQ ID NO: 2199102 - DNA, 25 bp, Homo sapien
ccggaccctcctcgctgcaccggcg

SEQ ID NO: 2199103 - DNA, 25 bp, Homo sapien
ggaccctcctcgctgcaccggcgtc

SEQ ID NO: 2199104 - DNA, 25 bp, Homo sapien
ctccggaccctcctcgctgcaccgg

SEQ ID NO: 2199105 - DNA, 25 bp, Homo sapien
gttgctcttgccatcctttgaaacc

SEQ ID NO: 2199106 - DNA, 25 bp, Homo sapien
ccaattgtcttcagggaccacagaa

SEQ ID NO: 2199107 - DNA, 25 bp, Homo sapien
tgagaaaacttgctttgcgaggaag

SEQ ID NO: 2199108 - DNA, 25 bp, Homo sapien
accaaaacggacacaccaattgtct

SEQ ID NO: 2199109 - DNA, 25 bp, Homo sapien
ttgactttactagtatttctgaagc

SEQ ID NO: 2199110 - DNA, 25 bp, Homo sapien
tcgaaattcagtatctcgttttaaa

SEQ ID NO: 2199111 - DNA, 25 bp, Homo sapien
gttctcgaaattcagtatctcgttt

SEQ ID NO: 2199112 - DNA, 25 bp, Homo sapien
tcagttttgactttactagtatttc

SEQ ID NO: 2199113 - DNA, 25 bp, Homo sapien
tattctatgcttgcaggaaccattc

SEQ ID NO: 2199114 - DNA, 25 bp, Homo sapien
tggtattctatgcttgcaggaacca

SEQ ID NO: 2199115 - DNA, 25 bp, Homo sapien
ttctatgcttgcaggaaccattccc

SEQ ID NO: 2199116 - DNA, 25 bp, Homo sapien
tctatgcttgcaggaaccattccca

SEQ ID NO: 2199117 - DNA, 25 bp, Homo sapien
gaatgcccagtgttcctgacatgtg

SEQ ID NO: 2199118 - DNA, 25 bp, Homo sapien
catgtggtcaccctgcgttgtgcca

SEQ ID NO: 2199119 - DNA, 25 bp, Homo sapien
aagttggcccaactgccgtttgagg

SEQ ID NO: 2199120 - DNA, 25 bp, Homo sapien
cgttgtgccaggtgtaagaaccgca

SEQ ID NO: 2199121 - DNA, 25 bp, Homo sapien
tgtccagagagcactgcggcgggag

SEQ ID NO: 2199122 - DNA, 25 bp, Homo sapien
cattgagctcctcgtcaaagctggc

SEQ ID NO: 2199123 - DNA, 25 bp, Homo sapien
cagccgtcgccgtttgcggagcgca

SEQ ID NO: 2199124 - DNA, 25 bp, Homo sapien
gccatggcgttgtcgatgccgttga

SEQ ID NO: 2199125 - DNA, 25 bp, Homo sapien
gacgcctaaacgctttgaggtagtg

SEQ ID NO: 2199126 - DNA, 25 bp, Homo sapien
aaaaaggtggtcagtcccgtcagct

SEQ ID NO: 2199127 - DNA, 25 bp, Homo sapien
tcagctaggctgtgaggacgcctaa

SEQ ID NO: 2199128 - DNA, 25 bp, Homo sapien
gcctaaacgctttgaggacgcctaa

SEQ ID NO: 2199129 - DNA, 25 bp, Homo sapien
ccgccggagccgcaacctctccgca

SEQ ID NO: 2199130 - DNA, 25 bp, Homo sapien
tgcggacgctagtctccgccgccgc

SEQ ID NO: 2199131 - DNA, 25 bp, Homo sapien
ggagccgcaacctctccgcacccgg

SEQ ID NO: 2199132 - DNA, 25 bp, Homo sapien
aggacgggcatccgcggctgcggac

SEQ ID NO: 2199133 - DNA, 25 bp, Homo sapien
gcggccgccttagcgcccggtgctt

SEQ ID NO: 2199134 - DNA, 25 bp, Homo sapien
ccgggagcgaggagcgagctacttc

SEQ ID NO: 2199135 - DNA, 25 bp, Homo sapien
gcgaggagcgagctacttcaaagcc

SEQ ID NO: 2199136 - DNA, 25 bp, Homo sapien
cggtgcttgggtcggcgccgggagc

SEQ ID NO: 2199137 - DNA, 25 bp, Homo sapien
aggaggtgacgcaggagaaacgcac

SEQ ID NO: 2199138 - DNA, 25 bp, Homo sapien
gagcaggaggaggtgacgcaggaga

SEQ ID NO: 2199139 - DNA, 25 bp, Homo sapien
aggaggaggtgacgcaggagaaacg

SEQ ID NO: 2199140 - DNA, 25 bp, Homo sapien
gcaggaggaggtgacgcaggagaaa

SEQ ID NO: 2199141 - DNA, 25 bp, Homo sapien
cgtctgagctcagcgagagccccag

SEQ ID NO: 2199142 - DNA, 25 bp, Homo sapien
cgcccggagcccgtctgagctcagc

SEQ ID NO: 2199143 - DNA, 25 bp, Homo sapien
gagcccgtctgagctcagcgagagc

SEQ ID NO: 2199144 - DNA, 25 bp, Homo sapien
cccggagcccgtctgagctcagcga

SEQ ID NO: 2199145 - DNA, 25 bp, Homo sapien
gttccggcgccggtgtgcagccttt

SEQ ID NO: 2199146 - DNA, 25 bp, Homo sapien
agccttttggttgagacgcccgcag

SEQ ID NO: 2199147 - DNA, 25 bp, Homo sapien
cgatacactttgttgccggtcaccc

SEQ ID NO: 2199148 - DNA, 25 bp, Homo sapien
gccgcagcctttcgatacactttgt

SEQ ID NO: 2199149 - DNA, 25 bp, Homo sapien
cgtctgtgtcgtgcggtgagtggcc

SEQ ID NO: 2199150 - DNA, 25 bp, Homo sapien
cgtgcggtgagtggccagctgcact

SEQ ID NO: 2199151 - DNA, 25 bp, Homo sapien
tgcactggggcgacgctctttcccg

SEQ ID NO: 2199152 - DNA, 25 bp, Homo sapien
ccgtgtgccctggttgtgagaagac

SEQ ID NO: 2199153 - DNA, 25 bp, Homo sapien
tgtaattctggttatcagcgttctc

SEQ ID NO: 2199154 - DNA, 25 bp, Homo sapien
tttgtttgctgaccttggtagtttc

SEQ ID NO: 2199155 - DNA, 25 bp, Homo sapien
ggttatcagcgttctcatgtttctt

SEQ ID NO: 2199156 - DNA, 25 bp, Homo sapien
ctgaccttggtagtttctgagaatt

SEQ ID NO: 2199157 - DNA, 25 bp, Homo sapien
tcaccaggttattggggtctctagt

SEQ ID NO: 2199158 - DNA, 25 bp, Homo sapien
ttcaccaggttattggggtctctag

SEQ ID NO: 2199159 - DNA, 25 bp, Homo sapien
ctttcaccaggttattggggtctct

SEQ ID NO: 2199160 - DNA, 25 bp, Homo sapien
caccaggttattggggtctctagtt

SEQ ID NO: 2199161 - DNA, 25 bp, Homo sapien
ggcagaaagaacacccagtggaggc

SEQ ID NO: 2199162 - DNA, 25 bp, Homo sapien
caatctggttttggaagatacaggc

SEQ ID NO: 2199163 - DNA, 25 bp, Homo sapien
aatatactgagaacctttgacttgt

SEQ ID NO: 2199164 - DNA, 25 bp, Homo sapien
acgccgctggactcaagtctgggcg

SEQ ID NO: 2199165 - DNA, 25 bp, Homo sapien
ggtgtgtataccaggagcagcaaat

SEQ ID NO: 2199166 - DNA, 25 bp, Homo sapien
gattatatttatagggaccctctga

SEQ ID NO: 2199167 - DNA, 25 bp, Homo sapien
taaaaacctaagcaattgtggtgtg

SEQ ID NO: 2199168 - DNA, 25 bp, Homo sapien
tatatcagtaaaactgttgaggctg

SEQ ID NO: 2199169 - DNA, 25 bp, Homo sapien
aagatttttaagcagtgctgtgaca

SEQ ID NO: 2199170 - DNA, 25 bp, Homo sapien
tgcgcccagccagtctttgaagatt

SEQ ID NO: 2199171 - DNA, 25 bp, Homo sapien
tcagtaaaactcatagtgatgattt

SEQ ID NO: 2199172 - DNA, 25 bp, Homo sapien
tgcatttcagtaaaactcatagtga

SEQ ID NO: 2199173 - DNA, 25 bp, Homo sapien
tccccgtttgaatttatagagaaca

SEQ ID NO: 2199174 - DNA, 25 bp, Homo sapien
tgatcttgtataagctcagtgtact

SEQ ID NO: 2199175 - DNA, 25 bp, Homo sapien
tctgttaaattggactgatggctgt

SEQ ID NO: 2199176 - DNA, 25 bp, Homo sapien
ccttcatggtatagttggaagagcc

SEQ ID NO: 2199177 - DNA, 25 bp, Homo sapien
tttccacatactgacttggccaagt

SEQ ID NO: 2199178 - DNA, 25 bp, Homo sapien
aggtcaaggtgatgccccaccacag

SEQ ID NO: 2199179 - DNA, 25 bp, Homo sapien
gcatttccacatactgacttggcca

SEQ ID NO: 2199180 - DNA, 25 bp, Homo sapien
aaggtcaaggtgatgccccaccaca

SEQ ID NO: 2199181 - DNA, 25 bp, Homo sapien
cagtactacgtcatgcactgtgcta

SEQ ID NO: 2199182 - DNA, 25 bp, Homo sapien
cctttgactttaagtcagtactacg

SEQ ID NO: 2199183 - DNA, 25 bp, Homo sapien
actacagtacaaccacgtaactctt

SEQ ID NO: 2199184 - DNA, 25 bp, Homo sapien
gtacaaccacgtaactcttactgtg

SEQ ID NO: 2199185 - DNA, 25 bp, Homo sapien
ggccaacgagcacaagaaaattatg

SEQ ID NO: 2199186 - DNA, 25 bp, Homo sapien
tgtcaatatataacccgcctgcagt

SEQ ID NO: 2199187 - DNA, 25 bp, Homo sapien
taactggttccatcaagactgtgca

SEQ ID NO: 2199188 - DNA, 25 bp, Homo sapien
ggcagtgaagaagtatccccacctc

SEQ ID NO: 2199189 - DNA, 25 bp, Homo sapien
ggagtacctctctgcaccaagatag

SEQ ID NO: 2199190 - DNA, 25 bp, Homo sapien
tggaagtcatcagaaccccacggta

SEQ ID NO: 2199191 - DNA, 25 bp, Homo sapien
ccaagttagtgtagccaatgaggaa

SEQ ID NO: 2199192 - DNA, 25 bp, Homo sapien
tctgttggatcccagtgacgtggaa

SEQ ID NO: 2199193 - DNA, 25 bp, Homo sapien
gccttatttaggattatagctggat

SEQ ID NO: 2199194 - DNA, 25 bp, Homo sapien
gaatattcagatgactacttcgaag

SEQ ID NO: 2199195 - DNA, 25 bp, Homo sapien
cttaaatccttaatcctcgtagtgg

SEQ ID NO: 2199196 - DNA, 25 bp, Homo sapien
gtgataatttcccagccttgtgtct

SEQ ID NO: 2199197 - DNA, 25 bp, Homo sapien
tttaactgctgttccgctatgctga

SEQ ID NO: 2199198 - DNA, 25 bp, Homo sapien
gctgttccgctatgctgaagtgcaa

SEQ ID NO: 2199199 - DNA, 25 bp, Homo sapien
aagtgcaatgggcaatactcatcac

SEQ ID NO: 2199200 - DNA, 25 bp, Homo sapien
agtgcaatgggcaatactcatcaca

SEQ ID NO: 2199201 - DNA, 25 bp, Homo sapien
ttgtgtagagccttgccttgtaggg

SEQ ID NO: 2199202 - DNA, 25 bp, Homo sapien
tatggtttgagtcgtatgagcaaga

SEQ ID NO: 2199203 - DNA, 25 bp, Homo sapien
taggggactttgattctgcccaaga

SEQ ID NO: 2199204 - DNA, 25 bp, Homo sapien
agaaaagtactgaggcccaactttg

SEQ ID NO: 2199205 - DNA, 25 bp, Homo sapien
ttttcagggctgaccaatggcggtt

SEQ ID NO: 2199206 - DNA, 25 bp, Homo sapien
gcttggctttgttgctgaaattagc

SEQ ID NO: 2199207 - DNA, 25 bp, Homo sapien
tgaaattagcaataagaatcttctg

SEQ ID NO: 2199208 - DNA, 25 bp, Homo sapien
tctggaacatctgcctatctagttc

SEQ ID NO: 2199209 - DNA, 25 bp, Homo sapien
aagcatccccgcgtcagctgatgaa

SEQ ID NO: 2199210 - DNA, 25 bp, Homo sapien
tcaagaggagtgtcctgtgctccag

SEQ ID NO: 2199211 - DNA, 25 bp, Homo sapien
ccttgttgtctaggtggtgtgccca

SEQ ID NO: 2199212 - DNA, 25 bp, Homo sapien
tgccagacacccgaaatcaagagga

SEQ ID NO: 2199213 - DNA, 25 bp, Homo sapien
gtcctctcgcgtggagcacgactgc

SEQ ID NO: 2199214 - DNA, 25 bp, Homo sapien
tgcgcgaggctaggcttgttgacat

SEQ ID NO: 2199215 - DNA, 25 bp, Homo sapien
ttgacatatttcttgctggcggcgt

SEQ ID NO: 2199216 - DNA, 25 bp, Homo sapien
cagccgggtcttccgaagtgaggat

SEQ ID NO: 2199217 - DNA, 25 bp, Homo sapien
gaggccgcggggtgacatggcccat

SEQ ID NO: 2199218 - DNA, 25 bp, Homo sapien
agaggccgcggggtgacatggccca

SEQ ID NO: 2199219 - DNA, 25 bp, Homo sapien
tagaggccgcggggtgacatggccc

SEQ ID NO: 2199220 - DNA, 25 bp, Homo sapien
ctagaggccgcggggtgacatggcc

SEQ ID NO: 2199221 - DNA, 25 bp, Homo sapien
tctgtcgggtattttaagattgtca

SEQ ID NO: 2199222 - DNA, 25 bp, Homo sapien
cgctttgggccattatcgcataatt

SEQ ID NO: 2199223 - DNA, 25 bp, Homo sapien
tctcagacagaaggggtggttttcc

SEQ ID NO: 2199224 - DNA, 25 bp, Homo sapien
cccaaaaaattgcagaggaccgctt

SEQ ID NO: 2199225 - DNA, 25 bp, Homo sapien
gtggatgcaacctgaagaggggtac

SEQ ID NO: 2199226 - DNA, 25 bp, Homo sapien
aagtggatgcaacctgaagaggggt

SEQ ID NO: 2199227 - DNA, 25 bp, Homo sapien
ttaagtggatgcaacctgaagaggg

SEQ ID NO: 2199228 - DNA, 25 bp, Homo sapien
taagtggatgcaacctgaagagggg

SEQ ID NO: 2199229 - DNA, 25 bp, Homo sapien
aatctatgataacatcctccttggt

SEQ ID NO: 2199230 - DNA, 25 bp, Homo sapien
gtcccatgatgggatttttgctgac

SEQ ID NO: 2199231 - DNA, 25 bp, Homo sapien
tccttggtagggaggctctggtccc

SEQ ID NO: 2199232 - DNA, 25 bp, Homo sapien
ctcgtcccctgaaatctatgataac

SEQ ID NO: 2199233 - DNA, 25 bp, Homo sapien
ttgacctccaagaagtcctagcttc

SEQ ID NO: 2199234 - DNA, 25 bp, Homo sapien
ccttcatactagattctaatgtcca

SEQ ID NO: 2199235 - DNA, 25 bp, Homo sapien
tactagattctaatgtccaagaacc

SEQ ID NO: 2199236 - DNA, 25 bp, Homo sapien
gaaccttgacctccaagaagtccta

SEQ ID NO: 2199237 - DNA, 25 bp, Homo sapien
tatgttgttaggagtcccatagaaa

SEQ ID NO: 2199238 - DNA, 25 bp, Homo sapien
aaatcaaatggtacgcacgcgtgcg

SEQ ID NO: 2199239 - DNA, 25 bp, Homo sapien
taggtatgttacatggctataccac

SEQ ID NO: 2199240 - DNA, 25 bp, Homo sapien
tacacaacaaaacaattgcctgtgg

SEQ ID NO: 2199241 - DNA, 25 bp, Homo sapien
cagcctgggtgctacagtaagactc

SEQ ID NO: 2199242 - DNA, 25 bp, Homo sapien
actccagcctgggtgctacagtaag

SEQ ID NO: 2199243 - DNA, 25 bp, Homo sapien
tccagcctgggtgctacagtaagac

SEQ ID NO: 2199244 - DNA, 25 bp, Homo sapien
agcctgggtgctacagtaagactcc

SEQ ID NO: 2199245 - DNA, 25 bp, Homo sapien
gaagccagtcagcgcgtttatggat

SEQ ID NO: 2199246 - DNA, 25 bp, Homo sapien
gccagtcagcgcgtttatggattct

SEQ ID NO: 2199247 - DNA, 25 bp, Homo sapien
gtcagcgcgtttatggattctaccc

SEQ ID NO: 2199248 - DNA, 25 bp, Homo sapien
gcgcgtttatggattctaccctagc

SEQ ID NO: 2199249 - DNA, 25 bp, Homo sapien
gacggcatgcccattgtaggtggac

SEQ ID NO: 2199250 - DNA, 25 bp, Homo sapien
tccaggacggcatgcccattgtagg

SEQ ID NO: 2199251 - DNA, 25 bp, Homo sapien
catgcccattgtaggtggacttcca

SEQ ID NO: 2199252 - DNA, 25 bp, Homo sapien
gagagatgttccaggacggcatgcc

SEQ ID NO: 2199253 - DNA, 25 bp, Homo sapien
tctcccataattagaataaccagtc

SEQ ID NO: 2199254 - DNA, 25 bp, Homo sapien
aaagacacaaatgtagcctctccca

SEQ ID NO: 2199255 - DNA, 25 bp, Homo sapien
taggtaatagtctcatagatcctca

SEQ ID NO: 2199256 - DNA, 25 bp, Homo sapien
tagtctcatagatcctcaaagacac

SEQ ID NO: 2199257 - DNA, 25 bp, Homo sapien
gcctcaagtgatccacccgcctagg

SEQ ID NO: 2199258 - DNA, 25 bp, Homo sapien
ggcctcaagtgatccacccgcctag

SEQ ID NO: 2199259 - DNA, 25 bp, Homo sapien
ccacacctggctaatttttgtgttt

SEQ ID NO: 2199260 - DNA, 25 bp, Homo sapien
ggattacctgcgtgtgccaccacac

SEQ ID NO: 2199261 - DNA, 25 bp, Homo sapien
gaaggtcacgatcttgggtccagtg

SEQ ID NO: 2199262 - DNA, 25 bp, Homo sapien
taaccccgtgactgtggttctccag

SEQ ID NO: 2199263 - DNA, 25 bp, Homo sapien
tgcctctgacagtaaccccgtgact

SEQ ID NO: 2199264 - DNA, 25 bp, Homo sapien
tccagtgggactaaggtttgaagct

SEQ ID NO: 2199265 - DNA, 25 bp, Homo sapien
atgctgggcttgtggacaggcaaga

SEQ ID NO: 2199266 - DNA, 25 bp, Homo sapien
gtgtcacaggctgggtgtactgctc

SEQ ID NO: 2199267 - DNA, 25 bp, Homo sapien
tttgggtaccaatagccgaagggca

SEQ ID NO: 2199268 - DNA, 25 bp, Homo sapien
ctgctgctgtcacaactcttccttc

SEQ ID NO: 2199269 - DNA, 25 bp, Homo sapien
ccagacatgtgacgaaagaagattc

SEQ ID NO: 2199270 - DNA, 25 bp, Homo sapien
gattcagataagtccagctttatcc

SEQ ID NO: 2199271 - DNA, 25 bp, Homo sapien
cagacactccagacatgtgacgaaa

SEQ ID NO: 2199272 - DNA, 25 bp, Homo sapien
aagtccagctttatccaccatctga

SEQ ID NO: 2199273 - DNA, 25 bp, Homo sapien
tattccatgaagccggtgtcagggg

SEQ ID NO: 2199274 - DNA, 25 bp, Homo sapien
atattccatgaagccggtgtcaggg

SEQ ID NO: 2199275 - DNA, 25 bp, Homo sapien
catattccatgaagccggtgtcagg

SEQ ID NO: 2199276 - DNA, 25 bp, Homo sapien
gtatcatactcacagaaagctgcgc

SEQ ID NO: 2199277 - DNA, 25 bp, Homo sapien
gtctctggctctgcgaagggtaccc

SEQ ID NO: 2199278 - DNA, 25 bp, Homo sapien
ttatgtctctggctctgcgaagggt

SEQ ID NO: 2199279 - DNA, 25 bp, Homo sapien
aatcaggacacatctgtatcatact

SEQ ID NO: 2199280 - DNA, 25 bp, Homo sapien
cagggtctcgaagtaggccggcggg

SEQ ID NO: 2199281 - DNA, 25 bp, Homo sapien
gcatccatgtagtctgggttggaag

SEQ ID NO: 2199282 - DNA, 25 bp, Homo sapien
gtgatgggtactgcactgggtagga

SEQ ID NO: 2199283 - DNA, 25 bp, Homo sapien
ccgggtaaggtgatgggtactgcac

SEQ ID NO: 2199284 - DNA, 25 bp, Homo sapien
tgatgatagtgacgacagacagcac

SEQ ID NO: 2199285 - DNA, 25 bp, Homo sapien
gatgatgatagtgacgacagacagc

SEQ ID NO: 2199286 - DNA, 25 bp, Homo sapien
agatgatgatagtgacgacagacag

SEQ ID NO: 2199287 - DNA, 25 bp, Homo sapien
tgatagtgacgacagacagcacaaa

SEQ ID NO: 2199288 - DNA, 25 bp, Homo sapien
cctttccatcatgggccactcagtt

SEQ ID NO: 2199289 - DNA, 25 bp, Homo sapien
gcaaatctcccgatgatgtcagcca

SEQ ID NO: 2199290 - DNA, 25 bp, Homo sapien
caggggcttcctgttcccctagact

SEQ ID NO: 2199291 - DNA, 25 bp, Homo sapien
atgaactttcgagtccatgatggca

SEQ ID NO: 2199292 - DNA, 25 bp, Homo sapien
cggtgcgctccagagccgcagttct

SEQ ID NO: 2199293 - DNA, 25 bp, Homo sapien
tatattagatccgtggccgcgcggt

SEQ ID NO: 2199294 - DNA, 25 bp, Homo sapien
tgacgtagccggctttccagcgggt

SEQ ID NO: 2199295 - DNA, 25 bp, Homo sapien
agagccgcagttctcccgtgagagg

SEQ ID NO: 2199296 - DNA, 25 bp, Homo sapien
tgcttccgggaggttaccatgttga

SEQ ID NO: 2199297 - DNA, 25 bp, Homo sapien
ccttgcttccgggaggttaccatgt

SEQ ID NO: 2199298 - DNA, 25 bp, Homo sapien
tgctcccttgcttccgggaggttac

SEQ ID NO: 2199299 - DNA, 25 bp, Homo sapien
tggtgctcccttgcttccgggaggt

SEQ ID NO: 2199300 - DNA, 25 bp, Homo sapien
agcagccctgttcagaaggtggttt

SEQ ID NO: 2199301 - DNA, 25 bp, Homo sapien
cctgttggctcagtaatgctcaaga

SEQ ID NO: 2199302 - DNA, 25 bp, Homo sapien
gctgtagtttggattaactcccctc

SEQ ID NO: 2199303 - DNA, 25 bp, Homo sapien
ggcacacaggtgtgatacaacttaa

SEQ ID NO: 2199304 - DNA, 25 bp, Homo sapien
aaaacgctccatctttttacagtgg

SEQ ID NO: 2199305 - DNA, 25 bp, Homo sapien
gcggtgatcaaaacgctccatcttt

SEQ ID NO: 2199306 - DNA, 25 bp, Homo sapien
ggccagaatgcggtgatcaaaacgc

SEQ ID NO: 2199307 - DNA, 25 bp, Homo sapien
tggcataggaagacggcaaaaattt

SEQ ID NO: 2199308 - DNA, 25 bp, Homo sapien
tgtattgtgccttgttctaaaactt

SEQ ID NO: 2199309 - DNA, 25 bp, Homo sapien
tatggtgctatttcaattagtctag

SEQ ID NO: 2199310 - DNA, 25 bp, Homo sapien
tatttcaattagtctaggtttaggc

SEQ ID NO: 2199311 - DNA, 25 bp, Homo sapien
tttgttatggtgctatttcaattag

SEQ ID NO: 2199312 - DNA, 25 bp, Homo sapien
tcttgtgtgcgtgtccttaaacttc

SEQ ID NO: 2199313 - DNA, 25 bp, Homo sapien
atatatatgtcttgtgtgcgtgtcc

SEQ ID NO: 2199314 - DNA, 25 bp, Homo sapien
ttggagattgttgaacgcagcttgt

SEQ ID NO: 2199315 - DNA, 25 bp, Homo sapien
ctcttggagattgttgaacgcagct

SEQ ID NO: 2199316 - DNA, 25 bp, Homo sapien
agacccggcgttggcagtgtagcca

SEQ ID NO: 2199317 - DNA, 25 bp, Homo sapien
caccgtatgcgtgaaattatatatt

SEQ ID NO: 2199318 - DNA, 25 bp, Homo sapien
cacacgacagatttctagatacttt

SEQ ID NO: 2199319 - DNA, 25 bp, Homo sapien
tatttgggaccatgggaatgatagt

SEQ ID NO: 2199320 - DNA, 25 bp, Homo sapien
gaatgtctggcacattgcaatcctc

SEQ ID NO: 2199321 - DNA, 25 bp, Homo sapien
actgcatgtgctgtgcatattctga

SEQ ID NO: 2199322 - DNA, 25 bp, Homo sapien
tattagtttagatgctagcactgca

SEQ ID NO: 2199323 - DNA, 25 bp, Homo sapien
aagtgtccagattctcagatgtttg

SEQ ID NO: 2199324 - DNA, 25 bp, Homo sapien
tggaatatccaaccaacagtaaaga

SEQ ID NO: 2199325 - DNA, 25 bp, Homo sapien
tacctagtacttcctaacatgggat

SEQ ID NO: 2199326 - DNA, 25 bp, Homo sapien
tcagttttgaggagaatcgacatct

SEQ ID NO: 2199327 - DNA, 25 bp, Homo sapien
taacgttgggtaggagtgattcctc

SEQ ID NO: 2199328 - DNA, 25 bp, Homo sapien
ggtgctctgcagtcgacctagcaca

SEQ ID NO: 2199329 - DNA, 25 bp, Homo sapien
ggaccccagcctgaagcgcatttgg

SEQ ID NO: 2199330 - DNA, 25 bp, Homo sapien
ccatgttgcaggttctgctccttta

SEQ ID NO: 2199331 - DNA, 25 bp, Homo sapien
agtgaagtttaagtccagcgcaccc

SEQ ID NO: 2199332 - DNA, 25 bp, Homo sapien
gtgctgggaccccttccgtgggctc

SEQ ID NO: 2199333 - DNA, 25 bp, Homo sapien
gacacatgagtcagaatggaaactg

SEQ ID NO: 2199334 - DNA, 25 bp, Homo sapien
aaacctgtgttcctgtaacagtgca

SEQ ID NO: 2199335 - DNA, 25 bp, Homo sapien
accagaaggagccttgccgtcctct

SEQ ID NO: 2199336 - DNA, 25 bp, Homo sapien
ctgtgggacaggtctacggggttgg

SEQ ID NO: 2199337 - DNA, 25 bp, Homo sapien
tcatggagcggagtgtaggaaccct

SEQ ID NO: 2199338 - DNA, 25 bp, Homo sapien
tgacagcatgaggtgctcatggagc

SEQ ID NO: 2199339 - DNA, 25 bp, Homo sapien
gaggtgctcatggagcggagtgtag

SEQ ID NO: 2199340 - DNA, 25 bp, Homo sapien
catgaggtgctcatggagcggagtg

SEQ ID NO: 2199341 - DNA, 25 bp, Homo sapien
caggctgaccagggccgtgatagtg

SEQ ID NO: 2199342 - DNA, 25 bp, Homo sapien
gctgaccagggccgtgatagtgacc

SEQ ID NO: 2199343 - DNA, 25 bp, Homo sapien
aggctgaccagggccgtgatagtga

SEQ ID NO: 2199344 - DNA, 25 bp, Homo sapien
ggctgaccagggccgtgatagtgac

SEQ ID NO: 2199345 - DNA, 25 bp, Homo sapien
tttagtaggaggatatgacctgcag

SEQ ID NO: 2199346 - DNA, 25 bp, Homo sapien
tgccaacctcagtcaagccgtgaga

SEQ ID NO: 2199347 - DNA, 25 bp, Homo sapien
tgagagaaagaagatacccctatgc

SEQ ID NO: 2199348 - DNA, 25 bp, Homo sapien
agccgtgagacttgttgccttttag

SEQ ID NO: 2199349 - DNA, 25 bp, Homo sapien
ccaggtgggtgtacaggcagcacca

SEQ ID NO: 2199350 - DNA, 25 bp, Homo sapien
tctgtgcctgtctgcaagtggacat

SEQ ID NO: 2199351 - DNA, 25 bp, Homo sapien
cccggcagggagtcgttctcacagg

SEQ ID NO: 2199352 - DNA, 25 bp, Homo sapien
tgggtgtacaggcagcaccagaacc

SEQ ID NO: 2199353 - DNA, 25 bp, Homo sapien
cactggattgtctggccacttgtca

SEQ ID NO: 2199354 - DNA, 25 bp, Homo sapien
gctctgcactggcttggctgtagac

SEQ ID NO: 2199355 - DNA, 25 bp, Homo sapien
tggctgtagacggaatccccagcac

SEQ ID NO: 2199356 - DNA, 25 bp, Homo sapien
cccagcactggattgtctggccact

SEQ ID NO: 2199357 - DNA, 25 bp, Homo sapien
ctgagacagaggtgccagggacatg

SEQ ID NO: 2199358 - DNA, 25 bp, Homo sapien
gagacagaggtgccagggacatgcc

SEQ ID NO: 2199359 - DNA, 25 bp, Homo sapien
tgagacagaggtgccagggacatgc

SEQ ID NO: 2199360 - DNA, 25 bp, Homo sapien
tacatcttcagctcggtcactggct

SEQ ID NO: 2199361 - DNA, 25 bp, Homo sapien
tctccattgctgtggtggcatctac

SEQ ID NO: 2199362 - DNA, 25 bp, Homo sapien
ctgtggtggcatctacatcttcagc

SEQ ID NO: 2199363 - DNA, 25 bp, Homo sapien
ctacatcttcagctcggtcactggc

SEQ ID NO: 2199364 - DNA, 25 bp, Homo sapien
ataatgtcactacatcggagcagcg

SEQ ID NO: 2199365 - DNA, 25 bp, Homo sapien
taatgtcactacatcggagcagcgc

SEQ ID NO: 2199366 - DNA, 25 bp, Homo sapien
atgtcactacatcggagcagcgcct

SEQ ID NO: 2199367 - DNA, 25 bp, Homo sapien
gtcactacatcggagcagcgcctct

SEQ ID NO: 2199368 - DNA, 25 bp, Homo sapien
attattatgggctgcacacttcggg

SEQ ID NO: 2199369 - DNA, 25 bp, Homo sapien
tggatgattccattaggtgtggaaa

SEQ ID NO: 2199370 - DNA, 25 bp, Homo sapien
gaatgtccggaagacacagagagcg

SEQ ID NO: 2199371 - DNA, 25 bp, Homo sapien
ctgactaacggccaagagggaagga

SEQ ID NO: 2199372 - DNA, 25 bp, Homo sapien
gcttttctcagggttgcagtgggaa

SEQ ID NO: 2199373 - DNA, 25 bp, Homo sapien
gaaccgtcctaagctggtcacaaca

SEQ ID NO: 2199374 - DNA, 25 bp, Homo sapien
catatgctgcaagaataaggctttg

SEQ ID NO: 2199375 - DNA, 25 bp, Homo sapien
caggatcagcagctcgtttagcata

SEQ ID NO: 2199376 - DNA, 25 bp, Homo sapien
ccatggtaactgagtgaagatcacg

SEQ ID NO: 2199377 - DNA, 25 bp, Homo sapien
tatccatggaagtccgtggctgaca

SEQ ID NO: 2199378 - DNA, 25 bp, Homo sapien
gatcacgagaatcctggagaccaga

SEQ ID NO: 2199379 - DNA, 25 bp, Homo sapien
catgcagcctgggttactgaggaac

SEQ ID NO: 2199380 - DNA, 25 bp, Homo sapien
tttgctgacttttacaactgtgatc

SEQ ID NO: 2199381 - DNA, 25 bp, Homo sapien
cattttgctgacttttacaactgtg

SEQ ID NO: 2199382 - DNA, 25 bp, Homo sapien
gacattttgctgacttttacaactg

SEQ ID NO: 2199383 - DNA, 25 bp, Homo sapien
attttgctgacttttacaactgtga

SEQ ID NO: 2199384 - DNA, 25 bp, Homo sapien
ctctcctcggagtgctgaagcttcc

SEQ ID NO: 2199385 - DNA, 25 bp, Homo sapien
ttccattcctatggccacctgcagt

SEQ ID NO: 2199386 - DNA, 25 bp, Homo sapien
tgctttcagcctggcgcttgaacac

SEQ ID NO: 2199387 - DNA, 25 bp, Homo sapien
tcccatatgggagacatcgagcagt

SEQ ID NO: 2199388 - DNA, 25 bp, Homo sapien
gtccccgaagggaaaactgctctca

SEQ ID NO: 2199389 - DNA, 25 bp, Homo sapien
acctggtggttcaacatctatatca

SEQ ID NO: 2199390 - DNA, 25 bp, Homo sapien
ctgaaaacatacaggggatgggagt

SEQ ID NO: 2199391 - DNA, 25 bp, Homo sapien
tctctctagaacctggtggttcaac

SEQ ID NO: 2199392 - DNA, 25 bp, Homo sapien
tctagaacctggtggttcaacatct

SEQ ID NO: 2199393 - DNA, 25 bp, Homo sapien
tttggcagaactctctccttgccca

SEQ ID NO: 2199394 - DNA, 25 bp, Homo sapien
ctccctccaggtgccaaccaaggag

SEQ ID NO: 2199395 - DNA, 25 bp, Homo sapien
gaccatggggcaaacatgccactct

SEQ ID NO: 2199396 - DNA, 25 bp, Homo sapien
tctgaccccgaaggcaatgggcaga

SEQ ID NO: 2199397 - DNA, 25 bp, Homo sapien
tagtagctctctgtatagtctgtgc

SEQ ID NO: 2199398 - DNA, 25 bp, Homo sapien
ccatggctgaagactgaaacctgca

SEQ ID NO: 2199399 - DNA, 25 bp, Homo sapien
gcaggatgccgtctgttaacagcca

SEQ ID NO: 2199400 - DNA, 25 bp, Homo sapien
caactgagctggaactgcttgcagg

SEQ ID NO: 2199401 - DNA, 25 bp, Homo sapien
ggtcgtgctcctttacagggccagg

SEQ ID NO: 2199402 - DNA, 25 bp, Homo sapien
gaatggcgacgtgcctacactgcaa

SEQ ID NO: 2199403 - DNA, 25 bp, Homo sapien
cagcattctggttgttccggcgaca

SEQ ID NO: 2199404 - DNA, 25 bp, Homo sapien
tcaacttgtactgtgccggcagcgc

SEQ ID NO: 2199405 - DNA, 25 bp, Homo sapien
cactaagctggaaaatctgggactc

SEQ ID NO: 2199406 - DNA, 25 bp, Homo sapien
gaaccttcaaaatgtggctctccaa

SEQ ID NO: 2199407 - DNA, 25 bp, Homo sapien
gcagggatttcaccatcggaatgat

SEQ ID NO: 2199408 - DNA, 25 bp, Homo sapien
gaagtcaatgagttctgcatgcagg

SEQ ID NO: 2199409 - DNA, 25 bp, Homo sapien
ttctcagaggacgtataaagccact

SEQ ID NO: 2199410 - DNA, 25 bp, Homo sapien
tataaagttgcccaaaatgcaaggg

SEQ ID NO: 2199411 - DNA, 25 bp, Homo sapien
gacacaccgacagcataaacgctcg

SEQ ID NO: 2199412 - DNA, 25 bp, Homo sapien
gtgtgccccatgaacggaatgtaga

SEQ ID NO: 2199413 - DNA, 25 bp, Homo sapien
ggtttacagggtgcttcaaagagac

SEQ ID NO: 2199414 - DNA, 25 bp, Homo sapien
aacattccaaaggattgaataatac

SEQ ID NO: 2199415 - DNA, 25 bp, Homo sapien
aaatataacattccaaaggattgaa

SEQ ID NO: 2199416 - DNA, 25 bp, Homo sapien
tataacattccaaaggattgaataa

SEQ ID NO: 2199417 - DNA, 25 bp, Homo sapien
cattccaaaggattgaataatacat

SEQ ID NO: 2199418 - DNA, 25 bp, Homo sapien
tgtaggtcacactacaactaggtag

SEQ ID NO: 2199419 - DNA, 25 bp, Homo sapien
ctgctgacacaaggccgataacaaa

SEQ ID NO: 2199420 - DNA, 25 bp, Homo sapien
tctcctcctatctattcggacatga

SEQ ID NO: 2199421 - DNA, 25 bp, Homo sapien
tattaaagtttaggagaactgatta

SEQ ID NO: 2199422 - DNA, 25 bp, Homo sapien
tatgctcagatatctggggagaggc

SEQ ID NO: 2199423 - DNA, 25 bp, Homo sapien
atgaggtgctcccagttatgctcag

SEQ ID NO: 2199424 - DNA, 25 bp, Homo sapien
tgctcccagttatgctcagatatct

SEQ ID NO: 2199425 - DNA, 25 bp, Homo sapien
gaggtgctcccagttatgctcagat

SEQ ID NO: 2199426 - DNA, 25 bp, Homo sapien
aatagacccaggagacagggaccca

SEQ ID NO: 2199427 - DNA, 25 bp, Homo sapien
ctaatagacccaggagacagggacc

SEQ ID NO: 2199428 - DNA, 25 bp, Homo sapien
taatagacccaggagacagggaccc

SEQ ID NO: 2199429 - DNA, 25 bp, Homo sapien
atagacccaggagacagggacccac

SEQ ID NO: 2199430 - DNA, 25 bp, Homo sapien
gatcgaagtagtgtgcatatgttct

SEQ ID NO: 2199431 - DNA, 25 bp, Homo sapien
cattgttgataattgtgagatcgaa

SEQ ID NO: 2199432 - DNA, 25 bp, Homo sapien
gattgtctcatcaatttcattgttg

SEQ ID NO: 2199433 - DNA, 25 bp, Homo sapien
tctgtaagatgtcagactccttctg

SEQ ID NO: 2199434 - DNA, 25 bp, Homo sapien
agagagaaatcagttggattcgttc

SEQ ID NO: 2199435 - DNA, 25 bp, Homo sapien
gaggagggaaaagcaaacagaagag

SEQ ID NO: 2199436 - DNA, 25 bp, Homo sapien
acagaagagagaaatcagttggatt

SEQ ID NO: 2199437 - DNA, 25 bp, Homo sapien
ctaaatggtgatgagatggaggtag

SEQ ID NO: 2199438 - DNA, 25 bp, Homo sapien
cttgtgtgccctgtaattgctgtgc

SEQ ID NO: 2199439 - DNA, 25 bp, Homo sapien
aagtctgcctctatatcttcgcaag

SEQ ID NO: 2199440 - DNA, 25 bp, Homo sapien
tgccaaacactaggtgggtgagctc

SEQ ID NO: 2199441 - DNA, 25 bp, Homo sapien
tagtggctatgtctccagctagggc

SEQ ID NO: 2199442 - DNA, 25 bp, Homo sapien
agataaagagacttgcttgattctg

SEQ ID NO: 2199443 - DNA, 25 bp, Homo sapien
agagacttgcttgattctgtcctgg

SEQ ID NO: 2199444 - DNA, 25 bp, Homo sapien
cttgcttgattctgtcctggcactg

SEQ ID NO: 2199445 - DNA, 25 bp, Homo sapien
taaagagacttgcttgattctgtcc

SEQ ID NO: 2199446 - DNA, 25 bp, Homo sapien
agctggcttgacagtggacagagct

SEQ ID NO: 2199447 - DNA, 25 bp, Homo sapien
gtttctgacttgagctggcttgaca

SEQ ID NO: 2199448 - DNA, 25 bp, Homo sapien
gagctgatttctaggtttggtagtc

SEQ ID NO: 2199449 - DNA, 25 bp, Homo sapien
acagagctgatttctaggtttggta

SEQ ID NO: 2199450 - DNA, 25 bp, Homo sapien
catttaaacctggagtaatagttgg

SEQ ID NO: 2199451 - DNA, 25 bp, Homo sapien
aacctggagtaatagttggtgcagc

SEQ ID NO: 2199452 - DNA, 25 bp, Homo sapien
ttaaacctggagtaatagttggtgc

SEQ ID NO: 2199453 - DNA, 25 bp, Homo sapien
ctcatttaaacctggagtaatagtt

SEQ ID NO: 2199454 - DNA, 25 bp, Homo sapien
cagcagaaaacgacgttcaggtgaa

SEQ ID NO: 2199455 - DNA, 25 bp, Homo sapien
cagaaaacgacgttcaggtgaagac

SEQ ID NO: 2199456 - DNA, 25 bp, Homo sapien
agcagaaaacgacgttcaggtgaag

SEQ ID NO: 2199457 - DNA, 25 bp, Homo sapien
gcagaaaacgacgttcaggtgaaga

SEQ ID NO: 2199458 - DNA, 25 bp, Homo sapien
caaggagaggatgtcgaagaccagg

SEQ ID NO: 2199459 - DNA, 25 bp, Homo sapien
cacccctggccagaagatttttcca

SEQ ID NO: 2199460 - DNA, 25 bp, Homo sapien
ccaggaccaggattgagactttgcc

SEQ ID NO: 2199461 - DNA, 25 bp, Homo sapien
agactttgcctctagccacccctgg

SEQ ID NO: 2199462 - DNA, 25 bp, Homo sapien
tgaggctccacgtccagtattgcaa

SEQ ID NO: 2199463 - DNA, 25 bp, Homo sapien
tgctcgtggatcttccggatggtct

SEQ ID NO: 2199464 - DNA, 25 bp, Homo sapien
acatcgcatcctcgtggctgccgta

SEQ ID NO: 2199465 - DNA, 25 bp, Homo sapien
gtattgcaatcagcccctgctcgtg

SEQ ID NO: 2199466 - DNA, 25 bp, Homo sapien
aaaccggtctgggtgctttgtgatg

SEQ ID NO: 2199467 - DNA, 25 bp, Homo sapien
acgcaaaccggtctgggtgctttgt

SEQ ID NO: 2199468 - DNA, 25 bp, Homo sapien
aaccggtctgggtgctttgtgatga

SEQ ID NO: 2199469 - DNA, 25 bp, Homo sapien
gcaaaccggtctgggtgctttgtga

SEQ ID NO: 2199470 - DNA, 25 bp, Homo sapien
tactacttcttcatatgtgacaaga

SEQ ID NO: 2199471 - DNA, 25 bp, Homo sapien
ctaataagactagtgttttcctctt

SEQ ID NO: 2199472 - DNA, 25 bp, Homo sapien
ttttactacttcttcatatgtgaca

SEQ ID NO: 2199473 - DNA, 25 bp, Homo sapien
ttcctcttgaatgctggcagtttta

SEQ ID NO: 2199474 - DNA, 25 bp, Homo sapien
ttgccaaaccaagtacagctggcct

SEQ ID NO: 2199475 - DNA, 25 bp, Homo sapien
tcttgccaaaccaagtacagctggc

SEQ ID NO: 2199476 - DNA, 25 bp, Homo sapien
tgccaaaccaagtacagctggcctg

SEQ ID NO: 2199477 - DNA, 25 bp, Homo sapien
caaaccaagtacagctggcctgctg

SEQ ID NO: 2199478 - DNA, 25 bp, Homo sapien
aataatgtccctagtacagtaccag

SEQ ID NO: 2199479 - DNA, 25 bp, Homo sapien
tcacttgttagctggtactgagcac

SEQ ID NO: 2199480 - DNA, 25 bp, Homo sapien
tagaatgtttcaacacaggcctggt

SEQ ID NO: 2199481 - DNA, 25 bp, Homo sapien
gattagatgcctaaacatgtggcca

SEQ ID NO: 2199482 - DNA, 25 bp, Homo sapien
cagtaatagtatcaaagtccatctc

SEQ ID NO: 2199483 - DNA, 25 bp, Homo sapien
tattacccacgtggcatacagagga

SEQ ID NO: 2199484 - DNA, 25 bp, Homo sapien
cagaggaggctgataaaggcttgct

SEQ ID NO: 2199485 - DNA, 25 bp, Homo sapien
attggaaaatactgcgaactctcag

SEQ ID NO: 2199486 - DNA, 25 bp, Homo sapien
ttcaggagaaggaatgagacctgca

SEQ ID NO: 2199487 - DNA, 25 bp, Homo sapien
gaatcgaatgccagcttctttacag

SEQ ID NO: 2199488 - DNA, 25 bp, Homo sapien
ccagtttaccctgccaccaattatg

SEQ ID NO: 2199489 - DNA, 25 bp, Homo sapien
gccaccaattatgatcatccttact

SEQ ID NO: 2199490 - DNA, 25 bp, Homo sapien
cgtccttttggttgggtagttgatg

SEQ ID NO: 2199491 - DNA, 25 bp, Homo sapien
gctgctatgaccattagctggggac

SEQ ID NO: 2199492 - DNA, 25 bp, Homo sapien
tgctgctatgaccattagctgggga

SEQ ID NO: 2199493 - DNA, 25 bp, Homo sapien
tgctatgaccattagctggggactg

SEQ ID NO: 2199494 - DNA, 25 bp, Homo sapien
ctgctatgaccattagctggggact

SEQ ID NO: 2199495 - DNA, 25 bp, Homo sapien
acatctatgatactggttccacccc

SEQ ID NO: 2199496 - DNA, 25 bp, Homo sapien
gagaaacttatgttgtattaataac

SEQ ID NO: 2199497 - DNA, 25 bp, Homo sapien
tgagaaatgatataaggacatctgt

SEQ ID NO: 2199498 - DNA, 25 bp, Homo sapien
ataactaacagtaccttctggttag

SEQ ID NO: 2199499 - DNA, 25 bp, Homo sapien
ttccctctagtgaagtcaattatca

SEQ ID NO: 2199500 - DNA, 25 bp, Homo sapien
tgaacaactgtatctcaacagaaat

SEQ ID NO: 2199501 - DNA, 25 bp, Homo sapien
caattcattgcagacttaacttcca

SEQ ID NO: 2199502 - DNA, 25 bp, Homo sapien
taacttccatctagagacctgtcac

SEQ ID NO: 2199503 - DNA, 25 bp, Homo sapien
taaaattggtgtgcagtgatctaac

SEQ ID NO: 2199504 - DNA, 25 bp, Homo sapien
aggagatccacatggaagcagggct

SEQ ID NO: 2199505 - DNA, 25 bp, Homo sapien
cctgcaaaaagttcaaagtgctgag

SEQ ID NO: 2199506 - DNA, 25 bp, Homo sapien
ggtggatgggacctactctgttccg

SEQ ID NO: 2199507 - DNA, 25 bp, Homo sapien
gactgagtgcggtaacttggcacaa

SEQ ID NO: 2199508 - DNA, 25 bp, Homo sapien
ggtaacttggcacaatcttgaaggt

SEQ ID NO: 2199509 - DNA, 25 bp, Homo sapien
ctcacaggacgaagactgagtgcgg

SEQ ID NO: 2199510 - DNA, 25 bp, Homo sapien
cgaagactgagtgcggtaacttggc

SEQ ID NO: 2199511 - DNA, 25 bp, Homo sapien
tccactgtttggttagccacactga

SEQ ID NO: 2199512 - DNA, 25 bp, Homo sapien
ttccactgtttggttagccacactg

SEQ ID NO: 2199513 - DNA, 25 bp, Homo sapien
ccactgtttggttagccacactgat

SEQ ID NO: 2199514 - DNA, 25 bp, Homo sapien
cactgtttggttagccacactgatg

SEQ ID NO: 2199515 - DNA, 25 bp, Homo sapien
catgcataattcttgcaacaataca

SEQ ID NO: 2199516 - DNA, 25 bp, Homo sapien
tcatgcccccatgcataattcttgc

SEQ ID NO: 2199517 - DNA, 25 bp, Homo sapien
gcaacaatacaatgatttagttcat

SEQ ID NO: 2199518 - DNA, 25 bp, Homo sapien
ttgcaacaatacaatgatttagttc

SEQ ID NO: 2199519 - DNA, 25 bp, Homo sapien
aagatctggaacacttcatgcattt

SEQ ID NO: 2199520 - DNA, 25 bp, Homo sapien
gaggccatgataatattttctgtac

SEQ ID NO: 2199521 - DNA, 25 bp, Homo sapien
tccttatacagaggccatgataata

SEQ ID NO: 2199522 - DNA, 25 bp, Homo sapien
ttgtatgtcatccttatacagaggc

SEQ ID NO: 2199523 - DNA, 25 bp, Homo sapien
taatcccatagtgtattttcctgct

SEQ ID NO: 2199524 - DNA, 25 bp, Homo sapien
cgttcatgatccattaggcaggtct

SEQ ID NO: 2199525 - DNA, 25 bp, Homo sapien
ctgaagttgtcccacggctcagtga

SEQ ID NO: 2199526 - DNA, 25 bp, Homo sapien
cagttactcggacatagtttgatcc

SEQ ID NO: 2199527 - DNA, 25 bp, Homo sapien
gagaatcgccgtttaaatagggaga

SEQ ID NO: 2199528 - DNA, 25 bp, Homo sapien
catgtctccgttagcactttctgga

SEQ ID NO: 2199529 - DNA, 25 bp, Homo sapien
tgaaactgtaccagccgaactctgg

SEQ ID NO: 2199530 - DNA, 25 bp, Homo sapien
actgtaaacttcatgtgccactacg

SEQ ID NO: 2199531 - DNA, 25 bp, Homo sapien
tgaggttgtgttaaaatacgcttta

SEQ ID NO: 2199532 - DNA, 25 bp, Homo sapien
tattctcagggtaacatgaaatttc

SEQ ID NO: 2199533 - DNA, 25 bp, Homo sapien
aatacgctttagttcctttgcgtcg

SEQ ID NO: 2199534 - DNA, 25 bp, Homo sapien
agttcctttgcgtcgttattctcag

SEQ ID NO: 2199535 - DNA, 25 bp, Homo sapien
cgcttggaggattcctgatttgtgg

SEQ ID NO: 2199536 - DNA, 25 bp, Homo sapien
gatttgtggtgaagactttgtgtta

SEQ ID NO: 2199537 - DNA, 25 bp, Homo sapien
tggctctctgtactgcatcgcttgg

SEQ ID NO: 2199538 - DNA, 25 bp, Homo sapien
agactttgtgttaattttgtcatac

SEQ ID NO: 2199539 - DNA, 25 bp, Homo sapien
ttcctctgacagaagcaactttcaa

SEQ ID NO: 2199540 - DNA, 25 bp, Homo sapien
ggaccaaaattctgtcaatgtggca

SEQ ID NO: 2199541 - DNA, 25 bp, Homo sapien
aaaggcaggctgatgatttcagtgg

SEQ ID NO: 2199542 - DNA, 25 bp, Homo sapien
gaagaaaatccagtaaacactcaca

SEQ ID NO: 2199543 - DNA, 25 bp, Homo sapien
agtcttggactttcagctaaagccc

SEQ ID NO: 2199544 - DNA, 25 bp, Homo sapien
tcttggactttcagctaaagcccaa

SEQ ID NO: 2199545 - DNA, 25 bp, Homo sapien
ttggactttcagctaaagcccaaag

SEQ ID NO: 2199546 - DNA, 25 bp, Homo sapien
cagtagtcttggactttcagctaaa

SEQ ID NO: 2199547 - DNA, 25 bp, Homo sapien
aagctgagttccagtcaggtgaact

SEQ ID NO: 2199548 - DNA, 25 bp, Homo sapien
aaaagaggagatcttagatgtcaac

SEQ ID NO: 2199549 - DNA, 25 bp, Homo sapien
gtcaacatgattcaactcctccatt

SEQ ID NO: 2199550 - DNA, 25 bp, Homo sapien
gagttccagtcaggtgaactgtcat

SEQ ID NO: 2199551 - DNA, 25 bp, Homo sapien
aacactgtgtagaaaatctaggtcc

SEQ ID NO: 2199552 - DNA, 25 bp, Homo sapien
actgcagtctgtaagcgcatgaatc

SEQ ID NO: 2199553 - DNA, 25 bp, Homo sapien
gtaagcgcatgaatctcttccaggc

SEQ ID NO: 2199554 - DNA, 25 bp, Homo sapien
agaaaatctaggtccttttcactgc

SEQ ID NO: 2199555 - DNA, 25 bp, Homo sapien
tgttttacatcgtaaacaatatacc

SEQ ID NO: 2199556 - DNA, 25 bp, Homo sapien
atatacctaaacatgtttgacttct

SEQ ID NO: 2199557 - DNA, 25 bp, Homo sapien
gaattctagtaaatgcataatgtat

SEQ ID NO: 2199558 - DNA, 25 bp, Homo sapien
caagcaatacacagttcatcataag

SEQ ID NO: 2199559 - DNA, 25 bp, Homo sapien
cagggggatccccatagaatgagtt

SEQ ID NO: 2199560 - DNA, 25 bp, Homo sapien
ttgacacagcggctagtactgcacc

SEQ ID NO: 2199561 - DNA, 25 bp, Homo sapien
aatttgtgacttgacacagcggcta

SEQ ID NO: 2199562 - DNA, 25 bp, Homo sapien
ggtcttcggagaaatctggtaactc

SEQ ID NO: 2199563 - DNA, 25 bp, Homo sapien
cattatactactctgcatgcctctg

SEQ ID NO: 2199564 - DNA, 25 bp, Homo sapien
tacccaacaggtgattttctatccc

SEQ ID NO: 2199565 - DNA, 25 bp, Homo sapien
tctagtgtccattatactactctgc

SEQ ID NO: 2199566 - DNA, 25 bp, Homo sapien
taaatggtacagtagtgaagtgtgg

SEQ ID NO: 2199567 - DNA, 25 bp, Homo sapien
gtccagagaggcttagcaacctgtt

SEQ ID NO: 2199568 - DNA, 25 bp, Homo sapien
gcaacctgttaaggtctctgtcaac

SEQ ID NO: 2199569 - DNA, 25 bp, Homo sapien
tctgaacccagtgactatagatggt

SEQ ID NO: 2199570 - DNA, 25 bp, Homo sapien
aacatcattctgaaataggtcacgg

SEQ ID NO: 2199571 - DNA, 25 bp, Homo sapien
gaggatagggagagtagtaagaggg

SEQ ID NO: 2199572 - DNA, 25 bp, Homo sapien
aggatagggagagtagtaagaggga

SEQ ID NO: 2199573 - DNA, 25 bp, Homo sapien
tggaggatagggagagtagtaagag

SEQ ID NO: 2199574 - DNA, 25 bp, Homo sapien
ggtggaggatagggagagtagtaag

SEQ ID NO: 2199575 - DNA, 25 bp, Homo sapien
gactcatactgatatactaccttaa

SEQ ID NO: 2199576 - DNA, 25 bp, Homo sapien
acaatggccagcattagtacatatt

SEQ ID NO: 2199577 - DNA, 25 bp, Homo sapien
tgagaatttagctacaacaaaaaca

SEQ ID NO: 2199578 - DNA, 25 bp, Homo sapien
tttattgttcagactcatactgata

SEQ ID NO: 2199579 - DNA, 25 bp, Homo sapien
tcttgtaggcgtaacgatcccgctc

SEQ ID NO: 2199580 - DNA, 25 bp, Homo sapien
agtttcctccttgcattgaatttcc

SEQ ID NO: 2199581 - DNA, 25 bp, Homo sapien
gaagatgaatcttgtaggcgtaacg

SEQ ID NO: 2199582 - DNA, 25 bp, Homo sapien
gatgaatcttgtaggcgtaacgatc

SEQ ID NO: 2199583 - DNA, 25 bp, Homo sapien
gtgcatggcatcatgcctggttttt

SEQ ID NO: 2199584 - DNA, 25 bp, Homo sapien
tgcatggcatcatgcctggtttttg

SEQ ID NO: 2199585 - DNA, 25 bp, Homo sapien
tatggaactggataattatgactgg

SEQ ID NO: 2199586 - DNA, 25 bp, Homo sapien
gaaatgtaaatctgcacttcgagaa

SEQ ID NO: 2199587 - DNA, 25 bp, Homo sapien
taattggacacgctaactaggcacc

SEQ ID NO: 2199588 - DNA, 25 bp, Homo sapien
tggagaacacttcccctacccagta

SEQ ID NO: 2199589 - DNA, 25 bp, Homo sapien
gagcaacgcattcctgtcactggaa

SEQ ID NO: 2199590 - DNA, 25 bp, Homo sapien
gctgcatgacactcaaatggtatgt

SEQ ID NO: 2199591 - DNA, 25 bp, Homo sapien
cagagaaaaaagaggccttcccctg

SEQ ID NO: 2199592 - DNA, 25 bp, Homo sapien
gttttttaccctctgatagctgcat

SEQ ID NO: 2199593 - DNA, 25 bp, Homo sapien
catgcgacgtactaggtctttggca

SEQ ID NO: 2199594 - DNA, 25 bp, Homo sapien
taaacagtgatcctttcagctggat

SEQ ID NO: 2199595 - DNA, 25 bp, Homo sapien
ctttcagagatatggctccactgcc

SEQ ID NO: 2199596 - DNA, 25 bp, Homo sapien
gccatgggtgattcagtgcttcata

SEQ ID NO: 2199597 - DNA, 25 bp, Homo sapien
aatgagacattaacattcactatta

SEQ ID NO: 2199598 - DNA, 25 bp, Homo sapien
taaatgagacattaacattcactat

SEQ ID NO: 2199599 - DNA, 25 bp, Homo sapien
gagacattaacattcactattattt

SEQ ID NO: 2199600 - DNA, 25 bp, Homo sapien
tgagacattaacattcactattatt

SEQ ID NO: 2199601 - DNA, 25 bp, Homo sapien
ggataaaaaggatcacaccgcaccc

SEQ ID NO: 2199602 - DNA, 25 bp, Homo sapien
taaaaaggcaaacaaccactgagca

SEQ ID NO: 2199603 - DNA, 25 bp, Homo sapien
aggcaaacaaccactgagcaggata

SEQ ID NO: 2199604 - DNA, 25 bp, Homo sapien
cagacgtctacaggctttccgtaag

SEQ ID NO: 2199605 - DNA, 25 bp, Homo sapien
ttgaaagtcaccaaatatatagagc

SEQ ID NO: 2199606 - DNA, 25 bp, Homo sapien
tcacatggttgaaagtcaccaaata

SEQ ID NO: 2199607 - DNA, 25 bp, Homo sapien
tggttgaaagtcaccaaatatatag

SEQ ID NO: 2199608 - DNA, 25 bp, Homo sapien
gaaagtcaccaaatatatagagcag

SEQ ID NO: 2199609 - DNA, 25 bp, Homo sapien
aataatcagagcgaccatggccagt

SEQ ID NO: 2199610 - DNA, 25 bp, Homo sapien
caagccactcaaaatgggggcctta

SEQ ID NO: 2199611 - DNA, 25 bp, Homo sapien
tttggatgatgctttgaaactcaac

SEQ ID NO: 2199612 - DNA, 25 bp, Homo sapien
caacttgactcctaccacttcctgg

SEQ ID NO: 2199613 - DNA, 25 bp, Homo sapien
acaagtccagactcccctaattgaa

SEQ ID NO: 2199614 - DNA, 25 bp, Homo sapien
agactcccctaattgaatagctacc

SEQ ID NO: 2199615 - DNA, 25 bp, Homo sapien
aacaggtgccgagttttcttttgag

SEQ ID NO: 2199616 - DNA, 25 bp, Homo sapien
ctccaagtttaacaggtgccgagtt

SEQ ID NO: 2199617 - DNA, 25 bp, Homo sapien
aaaagtgatttggaagcacaaaact

SEQ ID NO: 2199618 - DNA, 25 bp, Homo sapien
aagtgatttggaagcacaaaactta

SEQ ID NO: 2199619 - DNA, 25 bp, Homo sapien
aaagtgatttggaagcacaaaactt

SEQ ID NO: 2199620 - DNA, 25 bp, Homo sapien
gccacaatgtaccaaaagtactatg

SEQ ID NO: 2199621 - DNA, 25 bp, Homo sapien
agccacaatgtaccaaaagtactat

SEQ ID NO: 2199622 - DNA, 25 bp, Homo sapien
cacaatgtaccaaaagtactatgcc

SEQ ID NO: 2199623 - DNA, 25 bp, Homo sapien
caatgtaccaaaagtactatgccaa

SEQ ID NO: 2199624 - DNA, 25 bp, Homo sapien
gtggcaacctctgccaagtaatggt

SEQ ID NO: 2199625 - DNA, 25 bp, Homo sapien
ccagacctggtctgataggatgtgt

SEQ ID NO: 2199626 - DNA, 25 bp, Homo sapien
ttgtcatcaccagtggcaacctctg

SEQ ID NO: 2199627 - DNA, 25 bp, Homo sapien
gttaagggccagacctggtctgata

SEQ ID NO: 2199628 - DNA, 25 bp, Homo sapien
agtgggctcccctcgcgccggcacg

SEQ ID NO: 2199629 - DNA, 25 bp, Homo sapien
tgactggatgttcccgcagtgggct

SEQ ID NO: 2199630 - DNA, 25 bp, Homo sapien
ggcacgcggcctcgcctgggtctac

SEQ ID NO: 2199631 - DNA, 25 bp, Homo sapien
catgactggatgttcccgcagtggg

SEQ ID NO: 2199632 - DNA, 25 bp, Homo sapien
gaaaaagctgaattgcttgatatgt

SEQ ID NO: 2199633 - DNA, 25 bp, Homo sapien
gaattgcttgatatgtattgtagat

SEQ ID NO: 2199634 - DNA, 25 bp, Homo sapien
cttgatatgtattgtagattgaggt

SEQ ID NO: 2199635 - DNA, 25 bp, Homo sapien
agctgaattgcttgatatgtattgt

SEQ ID NO: 2199636 - DNA, 25 bp, Homo sapien
ccccctcccgggagatcatattgat

SEQ ID NO: 2199637 - DNA, 25 bp, Homo sapien
ttttgacctgctccgctgacaacct

SEQ ID NO: 2199638 - DNA, 25 bp, Homo sapien
gattggcataatgcaccacatccca

SEQ ID NO: 2199639 - DNA, 25 bp, Homo sapien
gctccgctgacaacctgggccagtt

SEQ ID NO: 2199640 - DNA, 25 bp, Homo sapien
aagaatcatgattgtcaagggcagg

SEQ ID NO: 2199641 - DNA, 25 bp, Homo sapien
cctcgaggatatgacaccaagtgaa

SEQ ID NO: 2199642 - DNA, 25 bp, Homo sapien
ttttgcacgatgaaaaacttctaga

SEQ ID NO: 2199643 - DNA, 25 bp, Homo sapien
gagagaaatcgtttagtggtgaaga

SEQ ID NO: 2199644 - DNA, 25 bp, Homo sapien
ttgatactgcatttggatactgcca

SEQ ID NO: 2199645 - DNA, 25 bp, Homo sapien
tgttgatactgcatttggatactgc

SEQ ID NO: 2199646 - DNA, 25 bp, Homo sapien
tgatactgcatttggatactgccat

SEQ ID NO: 2199647 - DNA, 25 bp, Homo sapien
attgttgatactgcatttggatact

SEQ ID NO: 2199648 - DNA, 25 bp, Homo sapien
tgaaccatggcgctcagctgtcaat

SEQ ID NO: 2199649 - DNA, 25 bp, Homo sapien
gaagtaaagctagatggcataacct

SEQ ID NO: 2199650 - DNA, 25 bp, Homo sapien
tctgtgggtagtggcaatcattctg

SEQ ID NO: 2199651 - DNA, 25 bp, Homo sapien
gctttgtgctaacagctttctggag

SEQ ID NO: 2199652 - DNA, 25 bp, Homo sapien
caatgtttggcattccgttgtagga

SEQ ID NO: 2199653 - DNA, 25 bp, Homo sapien
gaagacataagaactacacatgagg

SEQ ID NO: 2199654 - DNA, 25 bp, Homo sapien
gaagtcataccataacaatgacgac

SEQ ID NO: 2199655 - DNA, 25 bp, Homo sapien
cacatgaggaatatgtcatttagca

SEQ ID NO: 2199656 - DNA, 25 bp, Homo sapien
tgaaccaagtaggagtgaaagcact

SEQ ID NO: 2199657 - DNA, 25 bp, Homo sapien
caatagttgcttagatccagtcatg

SEQ ID NO: 2199658 - DNA, 25 bp, Homo sapien
tagacgatttcaaggtgaaccaagt

SEQ ID NO: 2199659 - DNA, 25 bp, Homo sapien
tactccctgcatgatacatctgtgg

SEQ ID NO: 2199660 - DNA, 25 bp, Homo sapien
gagagagagaattcccgggcttcct

SEQ ID NO: 2199661 - DNA, 25 bp, Homo sapien
ccttctgaaaagagtcatagggctt

SEQ ID NO: 2199662 - DNA, 25 bp, Homo sapien
aattggcattgttaccgatcatggg

SEQ ID NO: 2199663 - DNA, 25 bp, Homo sapien
gaaattgatatgaggccaaaagcgc

SEQ ID NO: 2199664 - DNA, 25 bp, Homo sapien
acgatcagagctgcttgtggcaggc

SEQ ID NO: 2199665 - DNA, 25 bp, Homo sapien
tgggacacccacgatcagagctgct

SEQ ID NO: 2199666 - DNA, 25 bp, Homo sapien
gtgtgactggaaacaaggctgtggc

SEQ ID NO: 2199667 - DNA, 25 bp, Homo sapien
cactctgattaagggtgggacaccc

SEQ ID NO: 2199668 - DNA, 25 bp, Homo sapien
atagagatcatggttcttatttgac

SEQ ID NO: 2199669 - DNA, 25 bp, Homo sapien
tagagatcatggttcttatttgacc

SEQ ID NO: 2199670 - DNA, 25 bp, Homo sapien
aatagagatcatggttcttatttga

SEQ ID NO: 2199671 - DNA, 25 bp, Homo sapien
ggcacattctgaatagagatcatgg

SEQ ID NO: 2199672 - DNA, 25 bp, Homo sapien
caatttgctgaggactctaggccta

SEQ ID NO: 2199673 - DNA, 25 bp, Homo sapien
gaaaggaaatcctgccggcaaacca

SEQ ID NO: 2199674 - DNA, 25 bp, Homo sapien
tgatggcccctacactcaaatggaa

SEQ ID NO: 2199675 - DNA, 25 bp, Homo sapien
gaacactggtaatctgctaagcata

SEQ ID NO: 2199676 - DNA, 25 bp, Homo sapien
tttttgtaggagtaggctgggcaaa

SEQ ID NO: 2199677 - DNA, 25 bp, Homo sapien
aactgagagttctcattaacccgat

SEQ ID NO: 2199678 - DNA, 25 bp, Homo sapien
actgagagttctcattaacccgata

SEQ ID NO: 2199679 - DNA, 25 bp, Homo sapien
gcagtagcgtagagcttccagtatc

SEQ ID NO: 2199680 - DNA, 25 bp, Homo sapien
catggcagtagcgtagagcttccag

SEQ ID NO: 2199681 - DNA, 25 bp, Homo sapien
gtagcgtagagcttccagtatctgt

SEQ ID NO: 2199682 - DNA, 25 bp, Homo sapien
tattatcatggcagtagcgtagagc

SEQ ID NO: 2199683 - DNA, 25 bp, Homo sapien
ttatcctgacatgtagcccagtggc

SEQ ID NO: 2199684 - DNA, 25 bp, Homo sapien
tctaccgcgtatagatcagaagcct

SEQ ID NO: 2199685 - DNA, 25 bp, Homo sapien
tagccccagcagtacaaaaacacag

SEQ ID NO: 2199686 - DNA, 25 bp, Homo sapien
taggagagaccacaagtcatgtcat

SEQ ID NO: 2199687 - DNA, 25 bp, Homo sapien
tttccagctatgtttgtctaagatg

SEQ ID NO: 2199688 - DNA, 25 bp, Homo sapien
tttgaagacattcaagtcatgctga

SEQ ID NO: 2199689 - DNA, 25 bp, Homo sapien
gagctcaaagctgtattaaggtggt

SEQ ID NO: 2199690 - DNA, 25 bp, Homo sapien
ctccaagttgtttccagctatgttt

SEQ ID NO: 2199691 - DNA, 25 bp, Homo sapien
ttcactgtacacaaaaccagcgtca

SEQ ID NO: 2199692 - DNA, 25 bp, Homo sapien
tcgctttacgatttcaaaacacaga

SEQ ID NO: 2199693 - DNA, 25 bp, Homo sapien
tgtacacaaaaccagcgtcagctcg

SEQ ID NO: 2199694 - DNA, 25 bp, Homo sapien
aaccagcgtcagctcgctttacgat

SEQ ID NO: 2199695 - DNA, 25 bp, Homo sapien
aagaggaaattccaggaagacaaca

SEQ ID NO: 2199696 - DNA, 25 bp, Homo sapien
acataagaaaagaggaaattccagg

SEQ ID NO: 2199697 - DNA, 25 bp, Homo sapien
atgtgaaaaagaacataagaaaaga

SEQ ID NO: 2199698 - DNA, 25 bp, Homo sapien
tgtgaaaaagaacataagaaaagag

SEQ ID NO: 2199699 - DNA, 25 bp, Homo sapien
ggcagaatggtcttattatcactcc

SEQ ID NO: 2199700 - DNA, 25 bp, Homo sapien
tattatcactccctgagtacaccat

SEQ ID NO: 2199701 - DNA, 25 bp, Homo sapien
ctctctaggcagaatggtcttatta

SEQ ID NO: 2199702 - DNA, 25 bp, Homo sapien
cttattatcactccctgagtacacc

SEQ ID NO: 2199703 - DNA, 25 bp, Homo sapien
atttgggagatgttctgagagctag

SEQ ID NO: 2199704 - DNA, 25 bp, Homo sapien
ataaaatgcctcaatggactctggt

SEQ ID NO: 2199705 - DNA, 25 bp, Homo sapien
tgcctcaatggactctggtgtttcc

SEQ ID NO: 2199706 - DNA, 25 bp, Homo sapien
tttgggagatgttctgagagctaga

SEQ ID NO: 2199707 - DNA, 25 bp, Homo sapien
tggagggacccagaagggatgaggg

SEQ ID NO: 2199708 - DNA, 25 bp, Homo sapien
ctggagggacccagaagggatgagg

SEQ ID NO: 2199709 - DNA, 25 bp, Homo sapien
ccagaagggatgagggaaaagacgg

SEQ ID NO: 2199710 - DNA, 25 bp, Homo sapien
gaagggatgagggaaaagacggagc

SEQ ID NO: 2199711 - DNA, 25 bp, Homo sapien
gagaaaagacacatatagcacccag

SEQ ID NO: 2199712 - DNA, 25 bp, Homo sapien
cacccagtattaacaatgaaggaga

SEQ ID NO: 2199713 - DNA, 25 bp, Homo sapien
gaatctctggcaagactgataacaa

SEQ ID NO: 2199714 - DNA, 25 bp, Homo sapien
gctaaaagttgttccctgtgaaatg

SEQ ID NO: 2199715 - DNA, 25 bp, Homo sapien
tatgagacaattaaaagacaacctc

SEQ ID NO: 2199716 - DNA, 25 bp, Homo sapien
cctcactaaagaacatagatgcaag

SEQ ID NO: 2199717 - DNA, 25 bp, Homo sapien
taaaacctactgtggacagtatgag

SEQ ID NO: 2199718 - DNA, 25 bp, Homo sapien
tagatgcaagtaacctaaacaaaag

SEQ ID NO: 2199719 - DNA, 25 bp, Homo sapien
tattgacactaggacagacaacagc

SEQ ID NO: 2199720 - DNA, 25 bp, Homo sapien
taaccatacatacatagaggcttga

SEQ ID NO: 2199721 - DNA, 25 bp, Homo sapien
tgacaaaggaggatactgggcaaac

SEQ ID NO: 2199722 - DNA, 25 bp, Homo sapien
cacagtagaacataacagagagcct

SEQ ID NO: 2199723 - DNA, 25 bp, Homo sapien
tataagcctgtctgcctattctagc

SEQ ID NO: 2199724 - DNA, 25 bp, Homo sapien
tctgactcctacactggtgctgatg

SEQ ID NO: 2199725 - DNA, 25 bp, Homo sapien
tcacaaatgtcccataactaccatc

SEQ ID NO: 2199726 - DNA, 25 bp, Homo sapien
tagctcctaactgtttcttccaatg

SEQ ID NO: 2199727 - DNA, 25 bp, Homo sapien
atcctctgccaccccaaaccaaatc

SEQ ID NO: 2199728 - DNA, 25 bp, Homo sapien
ttttgcaggtagaagctgggatgga

SEQ ID NO: 2199729 - DNA, 25 bp, Homo sapien
tgtaattgtttccatgtgtagccat

SEQ ID NO: 2199730 - DNA, 25 bp, Homo sapien
tagaaaataccacaaggtatacctc

SEQ ID NO: 2199731 - DNA, 25 bp, Homo sapien
tttggtcacaaagctgacgaaagag

SEQ ID NO: 2199732 - DNA, 25 bp, Homo sapien
aaattagtgaatagattaacatcag

SEQ ID NO: 2199733 - DNA, 25 bp, Homo sapien
gaaaagaaggtagaagacatagaaa

SEQ ID NO: 2199734 - DNA, 25 bp, Homo sapien
gaagagtaactgaatatgcccagct

SEQ ID NO: 2199735 - DNA, 25 bp, Homo sapien
tgccactgtaaaccttatgatgaca

SEQ ID NO: 2199736 - DNA, 25 bp, Homo sapien
tagcattatccaacaccaacattgc

SEQ ID NO: 2199737 - DNA, 25 bp, Homo sapien
tcttctctgaagcatgctgaaagca

SEQ ID NO: 2199738 - DNA, 25 bp, Homo sapien
attcgaaaaccatgtaaagcattcc

SEQ ID NO: 2199739 - DNA, 25 bp, Homo sapien
cagcatatgacagatactggcttcc

SEQ ID NO: 2199740 - DNA, 25 bp, Homo sapien
ctctacaatgtgtggatgtttcagc

SEQ ID NO: 2199741 - DNA, 25 bp, Homo sapien
tccatctgagctatatgtctccaat

SEQ ID NO: 2199742 - DNA, 25 bp, Homo sapien
gtctaccaaatcagttggagagggc

SEQ ID NO: 2199743 - DNA, 25 bp, Homo sapien
caaatcagttggagagggcagtgtt

SEQ ID NO: 2199744 - DNA, 25 bp, Homo sapien
ggcagtgttaagattctaatgagaa

SEQ ID NO: 2199745 - DNA, 25 bp, Homo sapien
cagtgttaagattctaatgagaagc

SEQ ID NO: 2199746 - DNA, 25 bp, Homo sapien
cgctatgttgcccgggttgatctcg

SEQ ID NO: 2199747 - DNA, 25 bp, Homo sapien
gttgcccgggttgatctcgaattcc

SEQ ID NO: 2199748 - DNA, 25 bp, Homo sapien
tttaaatagtttatagagacagagt

SEQ ID NO: 2199749 - DNA, 25 bp, Homo sapien
ttaaatagtttatagagacagagtc

SEQ ID NO: 2199750 - DNA, 25 bp, Homo sapien
gcttgatgcactgttaatggagtac

SEQ ID NO: 2199751 - DNA, 25 bp, Homo sapien
tcctactttaacgtaagcactcatt

SEQ ID NO: 2199752 - DNA, 25 bp, Homo sapien
caaacagactactggaaacaactcc

SEQ ID NO: 2199753 - DNA, 25 bp, Homo sapien
tactgtctcaattcataaggagctt

SEQ ID NO: 2199754 - DNA, 25 bp, Homo sapien
tactgtgttaactgaaacatgaata

SEQ ID NO: 2199755 - DNA, 25 bp, Homo sapien
cagtgctagtactgtgttaactgaa

SEQ ID NO: 2199756 - DNA, 25 bp, Homo sapien
tttgcacagtgctagtactgtgtta

SEQ ID NO: 2199757 - DNA, 25 bp, Homo sapien
gctagtactgtgttaactgaaacat

SEQ ID NO: 2199758 - DNA, 25 bp, Homo sapien
ctaaggtctacagatagaacttgcc

SEQ ID NO: 2199759 - DNA, 25 bp, Homo sapien
tgaagtcaagtactgaagtcaggta

SEQ ID NO: 2199760 - DNA, 25 bp, Homo sapien
tgtggatctacttctagggtctcta

SEQ ID NO: 2199761 - DNA, 25 bp, Homo sapien
gtagccttaaagtattgaagtcaag

SEQ ID NO: 2199762 - DNA, 25 bp, Homo sapien
gcgtagactgtcatgtcatcagcaa

SEQ ID NO: 2199763 - DNA, 25 bp, Homo sapien
tggagatggaataaagccagacatc

SEQ ID NO: 2199764 - DNA, 25 bp, Homo sapien
ttttggagatggaataaagccagac

SEQ ID NO: 2199765 - DNA, 25 bp, Homo sapien
taaagccagacatcaaataacttac

SEQ ID NO: 2199766 - DNA, 25 bp, Homo sapien
taggttggtaaatggattttggaga

SEQ ID NO: 2199767 - DNA, 25 bp, Homo sapien
ttaaccctggacttgatgtgaactt

SEQ ID NO: 2199768 - DNA, 25 bp, Homo sapien
ccctggacttgatgtgaacttggct

SEQ ID NO: 2199769 - DNA, 25 bp, Homo sapien
catcgtcgtacaacactgaagggac

SEQ ID NO: 2199770 - DNA, 25 bp, Homo sapien
tctctgttgatacatcgtcgtacaa

SEQ ID NO: 2199771 - DNA, 25 bp, Homo sapien
tacacttgtgatactgctggcctta

SEQ ID NO: 2199772 - DNA, 25 bp, Homo sapien
cagtacacctagatgcatgtgctca

SEQ ID NO: 2199773 - DNA, 25 bp, Homo sapien
acacacggttccctgtggttaccag

SEQ ID NO: 2199774 - DNA, 25 bp, Homo sapien
tcttctttcaactacaggacgaact

SEQ ID NO: 2199775 - DNA, 25 bp, Homo sapien
aagacacatggcttcgctgcggctg

SEQ ID NO: 2199776 - DNA, 25 bp, Homo sapien
agctgcttactgctccctacagaag

SEQ ID NO: 2199777 - DNA, 25 bp, Homo sapien
cacatggcttcgctgcggctgcagc

SEQ ID NO: 2199778 - DNA, 25 bp, Homo sapien
agcagaggcagtatagcctgggctt

SEQ ID NO: 2199779 - DNA, 25 bp, Homo sapien
tcaattctgcttcaagtgaattcag

SEQ ID NO: 2199780 - DNA, 25 bp, Homo sapien
aattctgcttcaagtgaattcagca

SEQ ID NO: 2199781 - DNA, 25 bp, Homo sapien
cttcaattctgcttcaagtgaattc

SEQ ID NO: 2199782 - DNA, 25 bp, Homo sapien
ctcttcaattctgcttcaagtgaat

SEQ ID NO: 2199783 - DNA, 25 bp, Homo sapien
ccctcggaacgtctagaatgtaact

SEQ ID NO: 2199784 - DNA, 25 bp, Homo sapien
tcggaacgtctagaatgtaacttaa

SEQ ID NO: 2199785 - DNA, 25 bp, Homo sapien
ctcggaacgtctagaatgtaactta

SEQ ID NO: 2199786 - DNA, 25 bp, Homo sapien
cctcggaacgtctagaatgtaactt

SEQ ID NO: 2199787 - DNA, 25 bp, Homo sapien
tattttaatgcaatgctggtgagtc

SEQ ID NO: 2199788 - DNA, 25 bp, Homo sapien
tacaaataaatgttgggaagagtaa

SEQ ID NO: 2199789 - DNA, 25 bp, Homo sapien
tatacagtggtcatttaaagataaa

SEQ ID NO: 2199790 - DNA, 25 bp, Homo sapien
tagaacctatcaacaccaaacaata

SEQ ID NO: 2199791 - DNA, 25 bp, Homo sapien
gcctttgaagaatgcactggctatg

SEQ ID NO: 2199792 - DNA, 25 bp, Homo sapien
atctttgcctttgaagaatgcactg

SEQ ID NO: 2199793 - DNA, 25 bp, Homo sapien
ctttgcctttgaagaatgcactggc

SEQ ID NO: 2199794 - DNA, 25 bp, Homo sapien
tttgcctttgaagaatgcactggct

SEQ ID NO: 2199795 - DNA, 25 bp, Homo sapien
aacttgagcaactagcacatctgat

SEQ ID NO: 2199796 - DNA, 25 bp, Homo sapien
tctgatgtcgccaaatatacaatgc

SEQ ID NO: 2199797 - DNA, 25 bp, Homo sapien
acaatgcaacagataaggatgctgc

SEQ ID NO: 2199798 - DNA, 25 bp, Homo sapien
tatacaatgcaacagataaggatgc

SEQ ID NO: 2199799 - DNA, 25 bp, Homo sapien
tctggagaggttgaatcagagcccc

SEQ ID NO: 2199800 - DNA, 25 bp, Homo sapien
gcaagtaagccagttcactcctgag

SEQ ID NO: 2199801 - DNA, 25 bp, Homo sapien
tcaggaattgcagcttatgggcaca

SEQ ID NO: 2199802 - DNA, 25 bp, Homo sapien
gaaaaaagaactgataggctcccca

SEQ ID NO: 2199803 - DNA, 25 bp, Homo sapien
cctacaaagataacatgagttaccc

SEQ ID NO: 2199804 - DNA, 25 bp, Homo sapien
aagataacatgagttacccaaggag

SEQ ID NO: 2199805 - DNA, 25 bp, Homo sapien
taacatgagttacccaaggagaaga

SEQ ID NO: 2199806 - DNA, 25 bp, Homo sapien
cccaaggagaagaccgacaaatcat

SEQ ID NO: 2199807 - DNA, 25 bp, Homo sapien
aatcccacagcataaatccagagcc

SEQ ID NO: 2199808 - DNA, 25 bp, Homo sapien
tatattctagaccagcccggtgact

SEQ ID NO: 2199809 - DNA, 25 bp, Homo sapien
ccaacaacagtcgaggggagtctcg

SEQ ID NO: 2199810 - DNA, 25 bp, Homo sapien
gtgactcaaagcagacggctctacc

SEQ ID NO: 2199811 - DNA, 25 bp, Homo sapien
gaaaggatgagcatttggactgtca

SEQ ID NO: 2199812 - DNA, 25 bp, Homo sapien
cactcccgctccctcgcgtggagac

SEQ ID NO: 2199813 - DNA, 25 bp, Homo sapien
gaccggggcatcactgaaatgcatt

SEQ ID NO: 2199814 - DNA, 25 bp, Homo sapien
acgtctataaatactccaggatgag

SEQ ID NO: 2199815 - DNA, 25 bp, Homo sapien
gcatttttccacactcccgctccct

SEQ ID NO: 2199816 - DNA, 25 bp, Homo sapien
agctcgtacacatcctcgaacagca

SEQ ID NO: 2199817 - DNA, 25 bp, Homo sapien
tacacatcctcgaacagcacgtcgt

SEQ ID NO: 2199818 - DNA, 25 bp, Homo sapien
cgaacagcacgtcgtcgtcggccat

SEQ ID NO: 2199819 - DNA, 25 bp, Homo sapien
tcctcgaacagcacgtcgtcgtcgg

SEQ ID NO: 2199820 - DNA, 25 bp, Homo sapien
aggggatagcggccgcagcgtggag

SEQ ID NO: 2199821 - DNA, 25 bp, Homo sapien
gaggggatagcggccgcagcgtgga

SEQ ID NO: 2199822 - DNA, 25 bp, Homo sapien
ggtccggaggggatagcggccgcag

SEQ ID NO: 2199823 - DNA, 25 bp, Homo sapien
gggatagcggccgcagcgtggaggg

SEQ ID NO: 2199824 - DNA, 25 bp, Homo sapien
tcggtgccgaggacgctcgagtggg

SEQ ID NO: 2199825 - DNA, 25 bp, Homo sapien
tcgagtggggccgcgaggcccagag

SEQ ID NO: 2199826 - DNA, 25 bp, Homo sapien
acccgcgagccctcggtgccgagga

SEQ ID NO: 2199827 - DNA, 25 bp, Homo sapien
ggtgggggcgcccaagagctcagtg

SEQ ID NO: 2199828 - DNA, 25 bp, Homo sapien
ctgcccggcgtgcggatcctcgggg

SEQ ID NO: 2199829 - DNA, 25 bp, Homo sapien
tgcccggcgtgcggatcctcgggga

SEQ ID NO: 2199830 - DNA, 25 bp, Homo sapien
gcccggcgtgcggatcctcggggac

SEQ ID NO: 2199831 - DNA, 25 bp, Homo sapien
ctcgggccgcgctgcccggcgtgcg

SEQ ID NO: 2199832 - DNA, 25 bp, Homo sapien
gcaggaccatggagcgaggatcgcc

SEQ ID NO: 2199833 - DNA, 25 bp, Homo sapien
ggctccgtcgcgtcgcggagcagct

SEQ ID NO: 2199834 - DNA, 25 bp, Homo sapien
ggcgtcgcgctctccgctcgtcagc

SEQ ID NO: 2199835 - DNA, 25 bp, Homo sapien
gaccgctccctctgtccgaggccgg

SEQ ID NO: 2199836 - DNA, 25 bp, Homo sapien
cttcttttgtaatcgcagggagcct

SEQ ID NO: 2199837 - DNA, 25 bp, Homo sapien
tagccgcgaccaagccgcgaaaggg

SEQ ID NO: 2199838 - DNA, 25 bp, Homo sapien
caagaggcacgaaactctggccgct

SEQ ID NO: 2199839 - DNA, 25 bp, Homo sapien
ggctggagacaaaaggtccacggct

SEQ ID NO: 2199840 - DNA, 25 bp, Homo sapien
tctaatgaataaggcgtcactccat

SEQ ID NO: 2199841 - DNA, 25 bp, Homo sapien
aatgaataaggcgtcactccattct

SEQ ID NO: 2199842 - DNA, 25 bp, Homo sapien
atgtctaatgaataaggcgtcactc

SEQ ID NO: 2199843 - DNA, 25 bp, Homo sapien
gaataaggcgtcactccattctgcc

SEQ ID NO: 2199844 - DNA, 25 bp, Homo sapien
ggacttcccacaagctactggaatc

SEQ ID NO: 2199845 - DNA, 25 bp, Homo sapien
aggacttcccacaagctactggaat

SEQ ID NO: 2199846 - DNA, 25 bp, Homo sapien
aaggacttcccacaagctactggaa

SEQ ID NO: 2199847 - DNA, 25 bp, Homo sapien
ctctgagagaccaggcgctgaggct

SEQ ID NO: 2199848 - DNA, 25 bp, Homo sapien
gcaggagaatgatggaaggcgtcat

SEQ ID NO: 2199849 - DNA, 25 bp, Homo sapien
tgagagaccaggcgctgaggctgtg

SEQ ID NO: 2199850 - DNA, 25 bp, Homo sapien
ttgcaggagaatgatggaaggcgtc

SEQ ID NO: 2199851 - DNA, 25 bp, Homo sapien
agctctcagaaatgaagggatggaa

SEQ ID NO: 2199852 - DNA, 25 bp, Homo sapien
tctcagaaatgaagggatggaacac

SEQ ID NO: 2199853 - DNA, 25 bp, Homo sapien
tcagaaatgaagggatggaacacat

SEQ ID NO: 2199854 - DNA, 25 bp, Homo sapien
gctctcagaaatgaagggatggaac

SEQ ID NO: 2199855 - DNA, 25 bp, Homo sapien
tcctgttaacatcgcagggatgtga

SEQ ID NO: 2199856 - DNA, 25 bp, Homo sapien
tgaaaccggttttatagcctgcgtg

SEQ ID NO: 2199857 - DNA, 25 bp, Homo sapien
taactgacacagagtaggcagaagg

SEQ ID NO: 2199858 - DNA, 25 bp, Homo sapien
ccgattggataatggaacctggtac

SEQ ID NO: 2199859 - DNA, 25 bp, Homo sapien
tgtttctgggatgcttcgttgccca

SEQ ID NO: 2199860 - DNA, 25 bp, Homo sapien
ctgggatgcttcgttgcccaatttc

SEQ ID NO: 2199861 - DNA, 25 bp, Homo sapien
gcttcgttgcccaatttctaattct

SEQ ID NO: 2199862 - DNA, 25 bp, Homo sapien
ggatgcttcgttgcccaatttctaa

SEQ ID NO: 2199863 - DNA, 25 bp, Homo sapien
gaacttcattcgctgattctctaga

SEQ ID NO: 2199864 - DNA, 25 bp, Homo sapien
taactctttagcctcccagatgtgg

SEQ ID NO: 2199865 - DNA, 25 bp, Homo sapien
tccgggactctcacttaagcatgca

SEQ ID NO: 2199866 - DNA, 25 bp, Homo sapien
gatgtggctttcgtcttggtttccg

SEQ ID NO: 2199867 - DNA, 25 bp, Homo sapien
actttcagtgcagtgaacttgcaaa

SEQ ID NO: 2199868 - DNA, 25 bp, Homo sapien
gctccaactttcagtgcagtgaact

SEQ ID NO: 2199869 - DNA, 25 bp, Homo sapien
cactgatttctgctaggctccaact

SEQ ID NO: 2199870 - DNA, 25 bp, Homo sapien
ctgatttctgctaggctccaacttt

SEQ ID NO: 2199871 - DNA, 25 bp, Homo sapien
aacgtatctctaggaattgagaagc

SEQ ID NO: 2199872 - DNA, 25 bp, Homo sapien
tttttagggagcaaacgtatctcta

SEQ ID NO: 2199873 - DNA, 25 bp, Homo sapien
gccacaggaatttcctagactctag

SEQ ID NO: 2199874 - DNA, 25 bp, Homo sapien
ttgccacaggaatttcctagactct

SEQ ID NO: 2199875 - DNA, 25 bp, Homo sapien
ggccttcctcacacttttcagccct

SEQ ID NO: 2199876 - DNA, 25 bp, Homo sapien
cttcctcacacttttcagccctcac

SEQ ID NO: 2199877 - DNA, 25 bp, Homo sapien
gccttcctcacacttttcagccctc

SEQ ID NO: 2199878 - DNA, 25 bp, Homo sapien
caggccttcctcacacttttcagcc

SEQ ID NO: 2199879 - DNA, 25 bp, Homo sapien
acattggattggcgatgtgaggcat

SEQ ID NO: 2199880 - DNA, 25 bp, Homo sapien
gcccctgtgcacattggattggcga

SEQ ID NO: 2199881 - DNA, 25 bp, Homo sapien
cctgtgcacattggattggcgatgt

SEQ ID NO: 2199882 - DNA, 25 bp, Homo sapien
tgtgcacattggattggcgatgtga

SEQ ID NO: 2199883 - DNA, 25 bp, Homo sapien
gttgacatctttctagaatcctttt

SEQ ID NO: 2199884 - DNA, 25 bp, Homo sapien
ggcagcagggatgaatgtttctgtt

SEQ ID NO: 2199885 - DNA, 25 bp, Homo sapien
gggatgaatgtttctgttgacatct

SEQ ID NO: 2199886 - DNA, 25 bp, Homo sapien
tctgttgacatctttctagaatcct

SEQ ID NO: 2199887 - DNA, 25 bp, Homo sapien
gcccaattaatgtgtgttgactgaa

SEQ ID NO: 2199888 - DNA, 25 bp, Homo sapien
tggcctgtgccggacaggagcccaa

SEQ ID NO: 2199889 - DNA, 25 bp, Homo sapien
caagacacttgtagagagatagatg

SEQ ID NO: 2199890 - DNA, 25 bp, Homo sapien
tgccggacaggagcccaattaatgt

SEQ ID NO: 2199891 - DNA, 25 bp, Homo sapien
aaaggaggacttattgtttggatgt

SEQ ID NO: 2199892 - DNA, 25 bp, Homo sapien
gaaaggaggacttattgtttggatg

SEQ ID NO: 2199893 - DNA, 25 bp, Homo sapien
gagaaaggaggacttattgtttgga

SEQ ID NO: 2199894 - DNA, 25 bp, Homo sapien
ctggagaaaggaggacttattgttt

SEQ ID NO: 2199895 - DNA, 25 bp, Homo sapien
taaatgattgaaaatcagattttcc

SEQ ID NO: 2199896 - DNA, 25 bp, Homo sapien
cctttaaatgattgaaaatcagatt

SEQ ID NO: 2199897 - DNA, 25 bp, Homo sapien
tgattgaaaatcagattttcccact

SEQ ID NO: 2199898 - DNA, 25 bp, Homo sapien
cactttaataccctttaaatgattg

SEQ ID NO: 2199899 - DNA, 25 bp, Homo sapien
tcctttctccgtctggttctgagcg

SEQ ID NO: 2199900 - DNA, 25 bp, Homo sapien
ggttctgagcgttgttcaaaataag

SEQ ID NO: 2199901 - DNA, 25 bp, Homo sapien
gccggctctttgcactgagtttttg

SEQ ID NO: 2199902 - DNA, 25 bp, Homo sapien
tgtgccttttgtcccgaatgataaa

SEQ ID NO: 2199903 - DNA, 25 bp, Homo sapien
tttatgtaggatgtgagctgagcta

SEQ ID NO: 2199904 - DNA, 25 bp, Homo sapien
taggatgtgagctgagctatggcaa

SEQ ID NO: 2199905 - DNA, 25 bp, Homo sapien
tatgtaggatgtgagctgagctatg

SEQ ID NO: 2199906 - DNA, 25 bp, Homo sapien
ctgtcaggggatttatgtaggatgt

SEQ ID NO: 2199907 - DNA, 25 bp, Homo sapien
caatgattggataacggttccttca

SEQ ID NO: 2199908 - DNA, 25 bp, Homo sapien
tgattggataacggttccttcagag

SEQ ID NO: 2199909 - DNA, 25 bp, Homo sapien
atgattggataacggttccttcaga

SEQ ID NO: 2199910 - DNA, 25 bp, Homo sapien
aatgattggataacggttccttcag

SEQ ID NO: 2199911 - DNA, 25 bp, Homo sapien
catctgaggccttcgagttctcatg

SEQ ID NO: 2199912 - DNA, 25 bp, Homo sapien
ctcatctgaggccttcgagttctca

SEQ ID NO: 2199913 - DNA, 25 bp, Homo sapien
tcatctgaggccttcgagttctcat

SEQ ID NO: 2199914 - DNA, 25 bp, Homo sapien
tgtgaatcagccatgccatttgagg

SEQ ID NO: 2199915 - DNA, 25 bp, Homo sapien
tccaagggattcacattccaaggga

SEQ ID NO: 2199916 - DNA, 25 bp, Homo sapien
tggcactcagtctcaccaagttctt

SEQ ID NO: 2199917 - DNA, 25 bp, Homo sapien
agttcttcctacatatggcactcag

SEQ ID NO: 2199918 - DNA, 25 bp, Homo sapien
cagcaacttctgctgtatcttaaag

SEQ ID NO: 2199919 - DNA, 25 bp, Homo sapien
tactgttagaaagttcacctgccag

SEQ ID NO: 2199920 - DNA, 25 bp, Homo sapien
tcttaaagcacaaattgatttcttt

SEQ ID NO: 2199921 - DNA, 25 bp, Homo sapien
gaaagttcacctgccagattatact

SEQ ID NO: 2199922 - DNA, 25 bp, Homo sapien
tgtcaaaacctgagccaaccacgtt

SEQ ID NO: 2199923 - DNA, 25 bp, Homo sapien
ctctgtcaaaacctgagccaaccac

SEQ ID NO: 2199924 - DNA, 25 bp, Homo sapien
tgaggaggtataggaaaaggaacac

SEQ ID NO: 2199925 - DNA, 25 bp, Homo sapien
gctgcctgaggaggtataggaaaag

SEQ ID NO: 2199926 - DNA, 25 bp, Homo sapien
tcaggcaaaagcaccccatggcgtc

SEQ ID NO: 2199927 - DNA, 25 bp, Homo sapien
aacacagtcccaatctgagccgcag

SEQ ID NO: 2199928 - DNA, 25 bp, Homo sapien
acagtcccaatctgagccgcagagc

SEQ ID NO: 2199929 - DNA, 25 bp, Homo sapien
caggcaaaagcaccccatggcgtct

SEQ ID NO: 2199930 - DNA, 25 bp, Homo sapien
caggcgaacgttttccggggctgag

SEQ ID NO: 2199931 - DNA, 25 bp, Homo sapien
agcaggcgaacgttttccggggctg

SEQ ID NO: 2199932 - DNA, 25 bp, Homo sapien
agaggagacgagcttggagcaggcg

SEQ ID NO: 2199933 - DNA, 25 bp, Homo sapien
aggagacgagcttggagcaggcgaa

SEQ ID NO: 2199934 - DNA, 25 bp, Homo sapien
tgaagaaagcggaggaccatatttg

SEQ ID NO: 2199935 - DNA, 25 bp, Homo sapien
gattgattgatagactctaaagggc

SEQ ID NO: 2199936 - DNA, 25 bp, Homo sapien
ggaagagggattccgccaatcatct

SEQ ID NO: 2199937 - DNA, 25 bp, Homo sapien
taaagggctgtactttgcttgtcca

SEQ ID NO: 2199938 - DNA, 25 bp, Homo sapien
ctccataccctgtttgaactggatg

SEQ ID NO: 2199939 - DNA, 25 bp, Homo sapien
ccataccctgtttgaactggatgag

SEQ ID NO: 2199940 - DNA, 25 bp, Homo sapien
ataccctgtttgaactggatgaggt

SEQ ID NO: 2199941 - DNA, 25 bp, Homo sapien
cataccctgtttgaactggatgagg

SEQ ID NO: 2199942 - DNA, 25 bp, Homo sapien
gctggatacgtaaacaatccctttc

SEQ ID NO: 2199943 - DNA, 25 bp, Homo sapien
cttctggccattccttgtagcctct

SEQ ID NO: 2199944 - DNA, 25 bp, Homo sapien
taaagggctgctggatacgtaaaca

SEQ ID NO: 2199945 - DNA, 25 bp, Homo sapien
gggctgctggatacgtaaacaatcc

SEQ ID NO: 2199946 - DNA, 25 bp, Homo sapien
ctgcaaacactaaactcagagacat

SEQ ID NO: 2199947 - DNA, 25 bp, Homo sapien
tcctgcaaacactaaactcagagac

SEQ ID NO: 2199948 - DNA, 25 bp, Homo sapien
cctgcaaacactaaactcagagaca

SEQ ID NO: 2199949 - DNA, 25 bp, Homo sapien
tatcattgatattttagtgtatgtg

SEQ ID NO: 2199950 - DNA, 25 bp, Homo sapien
aaagtatgtggaacacttcgtgaat

SEQ ID NO: 2199951 - DNA, 25 bp, Homo sapien
cattcttgcacgaagccatgctaat

SEQ ID NO: 2199952 - DNA, 25 bp, Homo sapien
atgtcattcttgcacgaagccatgc

SEQ ID NO: 2199953 - DNA, 25 bp, Homo sapien
tggtgaagtggataccttttccctg

SEQ ID NO: 2199954 - DNA, 25 bp, Homo sapien
ggtgaagtggataccttttccctga

SEQ ID NO: 2199955 - DNA, 25 bp, Homo sapien
atggtgaagtggataccttttccct

SEQ ID NO: 2199956 - DNA, 25 bp, Homo sapien
tccaattctagtatatgtgctgcgg

SEQ ID NO: 2199957 - DNA, 25 bp, Homo sapien
attctagtatatgtgctgcggaagc

SEQ ID NO: 2199958 - DNA, 25 bp, Homo sapien
ttctagtatatgtgctgcggaagca

SEQ ID NO: 2199959 - DNA, 25 bp, Homo sapien
caattctagtatatgtgctgcggaa

SEQ ID NO: 2199960 - DNA, 25 bp, Homo sapien
gtcatgagcagagttttcccacagg

SEQ ID NO: 2199961 - DNA, 25 bp, Homo sapien
tagtgctatggagggtgtcaatgtc

SEQ ID NO: 2199962 - DNA, 25 bp, Homo sapien
tctgaaaggaggtatgcatgttggc

SEQ ID NO: 2199963 - DNA, 25 bp, Homo sapien
gtcaatgtccttggactggcagaag

SEQ ID NO: 2199964 - DNA, 25 bp, Homo sapien
agttcagcaagaaacctagcgtcct

SEQ ID NO: 2199965 - DNA, 25 bp, Homo sapien
gaaacctagcgtcctagttttctgc

SEQ ID NO: 2199966 - DNA, 25 bp, Homo sapien
acctagcgtcctagttttctgcaga

SEQ ID NO: 2199967 - DNA, 25 bp, Homo sapien
tcagcaagaaacctagcgtcctagt

SEQ ID NO: 2199968 - DNA, 25 bp, Homo sapien
gggcatcctgcaggtaatgggcatc

SEQ ID NO: 2199969 - DNA, 25 bp, Homo sapien
tgatgacgagaaatgggatgactgc

SEQ ID NO: 2199970 - DNA, 25 bp, Homo sapien
actctggattttggtgattgatgac

SEQ ID NO: 2199971 - DNA, 25 bp, Homo sapien
taggtaatgggcatcctgcaggtaa

SEQ ID NO: 2199972 - DNA, 25 bp, Homo sapien
gaccatctgatataccaggaaggtg

SEQ ID NO: 2199973 - DNA, 25 bp, Homo sapien
caggttctgggctggctcggtttta

SEQ ID NO: 2199974 - DNA, 25 bp, Homo sapien
gatttccgttgattagccctcttga

SEQ ID NO: 2199975 - DNA, 25 bp, Homo sapien
gaagttagcaagcagccaggttctg

SEQ ID NO: 2199976 - DNA, 25 bp, Homo sapien
gacagagggtccccacaacttgggc

SEQ ID NO: 2199977 - DNA, 25 bp, Homo sapien
ggccaagccattgtcctttgtacat

SEQ ID NO: 2199978 - DNA, 25 bp, Homo sapien
cccacaacttgggccaagccattgt

SEQ ID NO: 2199979 - DNA, 25 bp, Homo sapien
gccaagccattgtcctttgtacatt

SEQ ID NO: 2199980 - DNA, 25 bp, Homo sapien
catgtgccaagcccttgtgtagagg

SEQ ID NO: 2199981 - DNA, 25 bp, Homo sapien
atgtgccaagcccttgtgtagaggc

SEQ ID NO: 2199982 - DNA, 25 bp, Homo sapien
tacagtatggtgcaagacaggcatg

SEQ ID NO: 2199983 - DNA, 25 bp, Homo sapien
agatgaggatacagtatggtgcaag

SEQ ID NO: 2199984 - DNA, 25 bp, Homo sapien
tatggtgcaagacaggcatgttaag

SEQ ID NO: 2199985 - DNA, 25 bp, Homo sapien
tgcaagacaggcatgttaaggagat

SEQ ID NO: 2199986 - DNA, 25 bp, Homo sapien
tgataaacaagaccgttttgcaact

SEQ ID NO: 2199987 - DNA, 25 bp, Homo sapien
gaccgttttgcaactcttgtattca

SEQ ID NO: 2199988 - DNA, 25 bp, Homo sapien
gtcttgataaacaagaccgttttgc

SEQ ID NO: 2199989 - DNA, 25 bp, Homo sapien
aaacaagaccgttttgcaactcttg

SEQ ID NO: 2199990 - DNA, 25 bp, Homo sapien
ggccactattagctgttctgtgaag

SEQ ID NO: 2199991 - DNA, 25 bp, Homo sapien
gtattcccagtagcttctctcatgg

SEQ ID NO: 2199992 - DNA, 25 bp, Homo sapien
ttcagtaaaccttcagcagcagtgc

SEQ ID NO: 2199993 - DNA, 25 bp, Homo sapien
tctctgctactaaggccagcttctc

SEQ ID NO: 2199994 - DNA, 25 bp, Homo sapien
ggaatcacagatgtaagcttaaagt

SEQ ID NO: 2199995 - DNA, 25 bp, Homo sapien
taagcttaaagtgagaagtccagct

SEQ ID NO: 2199996 - DNA, 25 bp, Homo sapien
gctcagggggttcatcattagcaga

SEQ ID NO: 2199997 - DNA, 25 bp, Homo sapien
tcatcattagcagaaggaatcacag

SEQ ID NO: 2199998 - DNA, 25 bp, Homo sapien
aaaatttgataaaattccattcagt

SEQ ID NO: 2199999 - DNA, 25 bp, Homo sapien
taaaattccattcagtgatgtccac

SEQ ID NO: 2200000 - DNA, 25 bp, Homo sapien
aaattccattcagtgatgtccacat

SEQ ID NO: 2200001 - DNA, 25 bp, Homo sapien
gataaaattccattcagtgatgtcc

SEQ ID NO: 2200002 - DNA, 25 bp, Homo sapien
cacagcgcctgagaggaggaaaaac

SEQ ID NO: 2200003 - DNA, 25 bp, Homo sapien
tcacagcgcctgagaggaggaaaaa

SEQ ID NO: 2200004 - DNA, 25 bp, Homo sapien
tgtgcaagggaaataagtccccagg

SEQ ID NO: 2200005 - DNA, 25 bp, Homo sapien
tgcaagggaaataagtccccaggca

SEQ ID NO: 2200006 - DNA, 25 bp, Homo sapien
ggtgtgcaagggaaataagtcccca

SEQ ID NO: 2200007 - DNA, 25 bp, Homo sapien
ctgcgagtggtgtggctaggaggtg

SEQ ID NO: 2200008 - DNA, 25 bp, Homo sapien
ctagagtgtatatgcaacaggaaga

SEQ ID NO: 2200009 - DNA, 25 bp, Homo sapien
caacaggaagagattttgctttcca

SEQ ID NO: 2200010 - DNA, 25 bp, Homo sapien
aattttactttttggccagacatga

SEQ ID NO: 2200011 - DNA, 25 bp, Homo sapien
tggtggtatccatcaaattttactt

SEQ ID NO: 2200012 - DNA, 25 bp, Homo sapien
tatatgagctggttccttacatctg

SEQ ID NO: 2200013 - DNA, 25 bp, Homo sapien
tatctctgtatatgagctggttcct

SEQ ID NO: 2200014 - DNA, 25 bp, Homo sapien
gctggttccttacatctgattgctg

SEQ ID NO: 2200015 - DNA, 25 bp, Homo sapien
atctgattgctgtatccttgaatcc

SEQ ID NO: 2200016 - DNA, 25 bp, Homo sapien
ttaaatgtggcattgcaatttttac

SEQ ID NO: 2200017 - DNA, 25 bp, Homo sapien
ttatgattaaatgtggcattgcaat

SEQ ID NO: 2200018 - DNA, 25 bp, Homo sapien
ttcatttgtgccagctttgatagag

SEQ ID NO: 2200019 - DNA, 25 bp, Homo sapien
gagaggtgtaggaaattatgattaa

SEQ ID NO: 2200020 - DNA, 25 bp, Homo sapien
tatctacagagccaaccctgacatc

SEQ ID NO: 2200021 - DNA, 25 bp, Homo sapien
taagccgaaaagtatctacagagcc

SEQ ID NO: 2200022 - DNA, 25 bp, Homo sapien
cagaattaaacagcagccctttaag

SEQ ID NO: 2200023 - DNA, 25 bp, Homo sapien
cagcagccctttaagccgaaaagta

SEQ ID NO: 2200024 - DNA, 25 bp, Homo sapien
gtttctgtattgaagatgctgtctt

SEQ ID NO: 2200025 - DNA, 25 bp, Homo sapien
ctttgtaacacagtgtggttgagat

SEQ ID NO: 2200026 - DNA, 25 bp, Homo sapien
tgtttctgtattgaagatgctgtct

SEQ ID NO: 2200027 - DNA, 25 bp, Homo sapien
tgtctttgtaacacagtgtggttga

SEQ ID NO: 2200028 - DNA, 25 bp, Homo sapien
tgctaggcttctgccccgtcagagt

SEQ ID NO: 2200029 - DNA, 25 bp, Homo sapien
gcccgtgtggatctgtagctctcat

SEQ ID NO: 2200030 - DNA, 25 bp, Homo sapien
agtctggccatctaagttgtgtgca

SEQ ID NO: 2200031 - DNA, 25 bp, Homo sapien
cattctaagagtgtgcctgctaggc

SEQ ID NO: 2200032 - DNA, 25 bp, Homo sapien
tcctttcgtggaggtggtggaggga

SEQ ID NO: 2200033 - DNA, 25 bp, Homo sapien
tcgtggaggtggtggagggaagaaa

SEQ ID NO: 2200034 - DNA, 25 bp, Homo sapien
ctttcgtggaggtggtggagggaag

SEQ ID NO: 2200035 - DNA, 25 bp, Homo sapien
tttcgtggaggtggtggagggaaga

SEQ ID NO: 2200036 - DNA, 25 bp, Homo sapien
ggatgatcaaagactccggtcttct

SEQ ID NO: 2200037 - DNA, 25 bp, Homo sapien
tgtggcaaagaatactctttagtgc

SEQ ID NO: 2200038 - DNA, 25 bp, Homo sapien
ctttagtgcagacatgaggatgatc

SEQ ID NO: 2200039 - DNA, 25 bp, Homo sapien
tgttcacggcagcttcagaagacga

SEQ ID NO: 2200040 - DNA, 25 bp, Homo sapien
tgtaagaaggatccaggaggcatgc

SEQ ID NO: 2200041 - DNA, 25 bp, Homo sapien
taagaaggatccaggaggcatgcat

SEQ ID NO: 2200042 - DNA, 25 bp, Homo sapien
tttgtaagaaggatccaggaggcat

SEQ ID NO: 2200043 - DNA, 25 bp, Homo sapien
atttgtaagaaggatccaggaggca

SEQ ID NO: 2200044 - DNA, 25 bp, Homo sapien
agtgcaaaaacaaggccaccacgtt

SEQ ID NO: 2200045 - DNA, 25 bp, Homo sapien
tttcctgtgattgatgaaaccatct

SEQ ID NO: 2200046 - DNA, 25 bp, Homo sapien
tgaagctgcaatgggatcataactc

SEQ ID NO: 2200047 - DNA, 25 bp, Homo sapien
caccacgttattaaaactggattca

SEQ ID NO: 2200048 - DNA, 25 bp, Homo sapien
tctgctcagctataatgctagcatc

SEQ ID NO: 2200049 - DNA, 25 bp, Homo sapien
tcataaggtattggaaacagattct

SEQ ID NO: 2200050 - DNA, 25 bp, Homo sapien
gctagcatctgccaagttaggtgtg

SEQ ID NO: 2200051 - DNA, 25 bp, Homo sapien
gattcttcatcataaggtattggaa

SEQ ID NO: 2200052 - DNA, 25 bp, Homo sapien
taggctttagcagcttgcagtgaaa

SEQ ID NO: 2200053 - DNA, 25 bp, Homo sapien
gcttgcagtgaaaaccatccgtcct

SEQ ID NO: 2200054 - DNA, 25 bp, Homo sapien
taaacactcatgtacgtgaagtagg

SEQ ID NO: 2200055 - DNA, 25 bp, Homo sapien
gaaaaccatccgtccttgtcttcat

SEQ ID NO: 2200056 - DNA, 25 bp, Homo sapien
gctccacatgaaggatctcttctgt

SEQ ID NO: 2200057 - DNA, 25 bp, Homo sapien
ccaatgtgcaggaaatagattctgt

SEQ ID NO: 2200058 - DNA, 25 bp, Homo sapien
tgtccgctccacatgaaggatctct

SEQ ID NO: 2200059 - DNA, 25 bp, Homo sapien
ggaaatagattctgtccgctccaca

SEQ ID NO: 2200060 - DNA, 25 bp, Homo sapien
ctgtactccttgtcaactccagtgg

SEQ ID NO: 2200061 - DNA, 25 bp, Homo sapien
tgactgtactccttgtcaactccag

SEQ ID NO: 2200062 - DNA, 25 bp, Homo sapien
ggagctgactgtactccttgtcaac

SEQ ID NO: 2200063 - DNA, 25 bp, Homo sapien
tactccttgtcaactccagtgggca

SEQ ID NO: 2200064 - DNA, 25 bp, Homo sapien
tcatcatcaggctttatttgttcac

SEQ ID NO: 2200065 - DNA, 25 bp, Homo sapien
gataaagaacacagacctttctctg

SEQ ID NO: 2200066 - DNA, 25 bp, Homo sapien
ttgttcactgcataattccctctgg

SEQ ID NO: 2200067 - DNA, 25 bp, Homo sapien
ttcactgcataattccctctggtcc

SEQ ID NO: 2200068 - DNA, 25 bp, Homo sapien
caaggtcttggtgcactgagttggg

SEQ ID NO: 2200069 - DNA, 25 bp, Homo sapien
catgactatcccacatctttcgcta

SEQ ID NO: 2200070 - DNA, 25 bp, Homo sapien
tatcccacatctttcgctactgcaa

SEQ ID NO: 2200071 - DNA, 25 bp, Homo sapien
ggtcttggtgcactgagttgggaga

SEQ ID NO: 2200072 - DNA, 25 bp, Homo sapien
ccaccccaacaccaggcccattctt

SEQ ID NO: 2200073 - DNA, 25 bp, Homo sapien
ctcactcccatcttccaccccaaca

SEQ ID NO: 2200074 - DNA, 25 bp, Homo sapien
caccccaacaccaggcccattctta

SEQ ID NO: 2200075 - DNA, 25 bp, Homo sapien
cttccaccccaacaccaggcccatt

SEQ ID NO: 2200076 - DNA, 25 bp, Homo sapien
ttagctcagttccattcagcgacat

SEQ ID NO: 2200077 - DNA, 25 bp, Homo sapien
tcaattagctcagttccattcagcg

SEQ ID NO: 2200078 - DNA, 25 bp, Homo sapien
catttcaattagctcagttccattc

SEQ ID NO: 2200079 - DNA, 25 bp, Homo sapien
aaatctcatttcaattagctcagtt

SEQ ID NO: 2200080 - DNA, 25 bp, Homo sapien
ggcctactgactcccatagaagtat

SEQ ID NO: 2200081 - DNA, 25 bp, Homo sapien
tgttggctgggcatgcaagccagtt

SEQ ID NO: 2200082 - DNA, 25 bp, Homo sapien
gtcatcctcagtccatgcttttgca

SEQ ID NO: 2200083 - DNA, 25 bp, Homo sapien
cgaagcacacgaaaaatctcacaaa

SEQ ID NO: 2200084 - DNA, 25 bp, Homo sapien
tgtgcgtgccttgggagagatggct

SEQ ID NO: 2200085 - DNA, 25 bp, Homo sapien
gagagatggcttgattcagcttaca

SEQ ID NO: 2200086 - DNA, 25 bp, Homo sapien
ttgatgccaatcagaggcaaaggag

SEQ ID NO: 2200087 - DNA, 25 bp, Homo sapien
gattcagcttacattcttgatgcca

SEQ ID NO: 2200088 - DNA, 25 bp, Homo sapien
cagcatactgatgttcgtggtcatt

SEQ ID NO: 2200089 - DNA, 25 bp, Homo sapien
actgatgttcgtggtcattttcaaa

SEQ ID NO: 2200090 - DNA, 25 bp, Homo sapien
tgttcgtggtcattttcaaagtagc

SEQ ID NO: 2200091 - DNA, 25 bp, Homo sapien
aaatcagcatactgatgttcgtggt

SEQ ID NO: 2200092 - DNA, 25 bp, Homo sapien
ttcctattgggatatgggttcacaa

SEQ ID NO: 2200093 - DNA, 25 bp, Homo sapien
tacagggctagaaccaaaaacactc

SEQ ID NO: 2200094 - DNA, 25 bp, Homo sapien
cacaataaggaaatggacggcagat

SEQ ID NO: 2200095 - DNA, 25 bp, Homo sapien
cagatggtgggagctagttttctca

SEQ ID NO: 2200096 - DNA, 25 bp, Homo sapien
aactgtaatttggccctattttcat

SEQ ID NO: 2200097 - DNA, 25 bp, Homo sapien
tattgtcttgggtaccaaactgtaa

SEQ ID NO: 2200098 - DNA, 25 bp, Homo sapien
tgacagaccattagcatgatgaaag

SEQ ID NO: 2200099 - DNA, 25 bp, Homo sapien
gatgaaagattgattattgtcttgg

SEQ ID NO: 2200100 - DNA, 25 bp, Homo sapien
ccatagacttggagttgagaatcca

SEQ ID NO: 2200101 - DNA, 25 bp, Homo sapien
aactttgtggtactgccagtgttca

SEQ ID NO: 2200102 - DNA, 25 bp, Homo sapien
cctggacttggagttaccatagact

SEQ ID NO: 2200103 - DNA, 25 bp, Homo sapien
tgagaatccatggacttttcccagg

SEQ ID NO: 2200104 - DNA, 25 bp, Homo sapien
tgccagctcagctataccaagttcc

SEQ ID NO: 2200105 - DNA, 25 bp, Homo sapien
cctgtctggcccaatgttcataaac

SEQ ID NO: 2200106 - DNA, 25 bp, Homo sapien
ctgtctggcccaatgttcataaaca

SEQ ID NO: 2200107 - DNA, 25 bp, Homo sapien
gctcagctataccaagttccctgtc

SEQ ID NO: 2200108 - DNA, 25 bp, Homo sapien
cctatagaaggtaaactgccagtca

SEQ ID NO: 2200109 - DNA, 25 bp, Homo sapien
ctatagaaggtaaactgccagtcac

SEQ ID NO: 2200110 - DNA, 25 bp, Homo sapien
gtagaaagaagtaggatatgttgtc

SEQ ID NO: 2200111 - DNA, 25 bp, Homo sapien
ggtggtaactgagactgtgaagcct

SEQ ID NO: 2200112 - DNA, 25 bp, Homo sapien
ggtaactgagactgtgaagcctgta

SEQ ID NO: 2200113 - DNA, 25 bp, Homo sapien
ctgtgaagcctgtagaaagaagtag

SEQ ID NO: 2200114 - DNA, 25 bp, Homo sapien
ttttatgggccctggatattgctca

SEQ ID NO: 2200115 - DNA, 25 bp, Homo sapien
ctcagtgtgtagatatattagtcca

SEQ ID NO: 2200116 - DNA, 25 bp, Homo sapien
gctttcattccaagaggactggtca

SEQ ID NO: 2200117 - DNA, 25 bp, Homo sapien
tcattccaagaggactggtcatttt

SEQ ID NO: 2200118 - DNA, 25 bp, Homo sapien
ttcatggccttggtatctgtggtct

SEQ ID NO: 2200119 - DNA, 25 bp, Homo sapien
attcatggccttggtatctgtggtc

SEQ ID NO: 2200120 - DNA, 25 bp, Homo sapien
aagtcccattcatggccttggtatc

SEQ ID NO: 2200121 - DNA, 25 bp, Homo sapien
tcccattcatggccttggtatctgt

SEQ ID NO: 2200122 - DNA, 25 bp, Homo sapien
cttataacttcccactggtatagcc

SEQ ID NO: 2200123 - DNA, 25 bp, Homo sapien
agcctgtttcccacgtctgtttggc

SEQ ID NO: 2200124 - DNA, 25 bp, Homo sapien
aagacatttacagtttccctagcct

SEQ ID NO: 2200125 - DNA, 25 bp, Homo sapien
gactgccaggatcaatggtccaatt

SEQ ID NO: 2200126 - DNA, 25 bp, Homo sapien
cgtctgtttggcacagagactgcca

SEQ ID NO: 2200127 - DNA, 25 bp, Homo sapien
gactgatgcaattagagtgtataat

SEQ ID NO: 2200128 - DNA, 25 bp, Homo sapien
ggagcctcagtgaaggtattttgga

SEQ ID NO: 2200129 - DNA, 25 bp, Homo sapien
cagaggtaagacatcacagtggggt

SEQ ID NO: 2200130 - DNA, 25 bp, Homo sapien
taagacacagttcttgcctaaagaa

SEQ ID NO: 2200131 - DNA, 25 bp, Homo sapien
gatgagtgggaatagccataggaaa

SEQ ID NO: 2200132 - DNA, 25 bp, Homo sapien
gaattgctgatacaaggcttggtga

SEQ ID NO: 2200133 - DNA, 25 bp, Homo sapien
gaaaaaataatccagtggttggagc

SEQ ID NO: 2200134 - DNA, 25 bp, Homo sapien
tggagcataggttgtagtgtatggg

SEQ ID NO: 2200135 - DNA, 25 bp, Homo sapien
tggcaggcaggtataaggaagaaaa

SEQ ID NO: 2200136 - DNA, 25 bp, Homo sapien
aattcggtaattcacacctgtgagc

SEQ ID NO: 2200137 - DNA, 25 bp, Homo sapien
gacatctctggtaattcggtaattc

SEQ ID NO: 2200138 - DNA, 25 bp, Homo sapien
gaaaatgcttcattctggacaggca

SEQ ID NO: 2200139 - DNA, 25 bp, Homo sapien
gcaacaccacatcactgcagtactt

SEQ ID NO: 2200140 - DNA, 25 bp, Homo sapien
ccactgtgctcccactgttgctcca

SEQ ID NO: 2200141 - DNA, 25 bp, Homo sapien
taaggaatatgcagtcaaaatgtag

SEQ ID NO: 2200142 - DNA, 25 bp, Homo sapien
ggtgtatcaggcagttaattcatca

SEQ ID NO: 2200143 - DNA, 25 bp, Homo sapien
catcatttgcgctagaaaaaaggct

SEQ ID NO: 2200144 - DNA, 25 bp, Homo sapien
tggcaatcctaataatgcacctgtc

SEQ ID NO: 2200145 - DNA, 25 bp, Homo sapien
tccctggaccaaggtagaccatcag

SEQ ID NO: 2200146 - DNA, 25 bp, Homo sapien
tggtgcttctcccaagtgtggccaa

SEQ ID NO: 2200147 - DNA, 25 bp, Homo sapien
ttacaactcggcaaagctggcaaca

SEQ ID NO: 2200148 - DNA, 25 bp, Homo sapien
gggtatcttcctgaacttggtgctt

SEQ ID NO: 2200149 - DNA, 25 bp, Homo sapien
tcttttgagtatcaagtctgatttt

SEQ ID NO: 2200150 - DNA, 25 bp, Homo sapien
tttattgtatggatgttgtaagaca

SEQ ID NO: 2200151 - DNA, 25 bp, Homo sapien
ttattgtatggatgttgtaagacat

SEQ ID NO: 2200152 - DNA, 25 bp, Homo sapien
ggctcttttgagtatcaagtctgat

SEQ ID NO: 2200153 - DNA, 25 bp, Homo sapien
gatagcaccatgtcctagaagcgga

SEQ ID NO: 2200154 - DNA, 25 bp, Homo sapien
caaggagcgaatctctaggtttgcc

SEQ ID NO: 2200155 - DNA, 25 bp, Homo sapien
gcaatagacggagtgggaaacccat

SEQ ID NO: 2200156 - DNA, 25 bp, Homo sapien
cccggaaccagcagatgacacatag

SEQ ID NO: 2200157 - DNA, 25 bp, Homo sapien
acagcgttgcccagtgcctgaggcc

SEQ ID NO: 2200158 - DNA, 25 bp, Homo sapien
catgatgattaatattgtaagctgc

SEQ ID NO: 2200159 - DNA, 25 bp, Homo sapien
gatgattaatattgtaagctgctgg

SEQ ID NO: 2200160 - DNA, 25 bp, Homo sapien
tgccatggcaacacacacagcgttg

SEQ ID NO: 2200161 - DNA, 25 bp, Homo sapien
gagaagctggagctatggagatcaa

SEQ ID NO: 2200162 - DNA, 25 bp, Homo sapien
ggccctaggaaaactggactggcag

SEQ ID NO: 2200163 - DNA, 25 bp, Homo sapien
gctggagctatggagatcaatcaaa

SEQ ID NO: 2200164 - DNA, 25 bp, Homo sapien
ctgaacagggagcaatacatgaaaa

SEQ ID NO: 2200165 - DNA, 25 bp, Homo sapien
gattatcagtagctataatctccag

SEQ ID NO: 2200166 - DNA, 25 bp, Homo sapien
tataatctccaggttcgtgtaatgc

SEQ ID NO: 2200167 - DNA, 25 bp, Homo sapien
gtagctataatctccaggttcgtgt

SEQ ID NO: 2200168 - DNA, 25 bp, Homo sapien
tccaggttcgtgtaatgctcaaaac

SEQ ID NO: 2200169 - DNA, 25 bp, Homo sapien
tttctgcttccccagtcctatccat

SEQ ID NO: 2200170 - DNA, 25 bp, Homo sapien
tgcctcgctttctgcttccccagtc

SEQ ID NO: 2200171 - DNA, 25 bp, Homo sapien
ctgcctcgctttctgcttccccagt

SEQ ID NO: 2200172 - DNA, 25 bp, Homo sapien
cgctttctgcttccccagtcctatc

SEQ ID NO: 2200173 - DNA, 25 bp, Homo sapien
agcaagttggcttttacagccagca

SEQ ID NO: 2200174 - DNA, 25 bp, Homo sapien
tcctaactcgggcaatctctttgtt

SEQ ID NO: 2200175 - DNA, 25 bp, Homo sapien
ggtgtgccggagagctcctgttcct

SEQ ID NO: 2200176 - DNA, 25 bp, Homo sapien
gagcaagttggcttttacagcaagt

SEQ ID NO: 2200177 - DNA, 25 bp, Homo sapien
ttaacattccaggtatagaacatgt

SEQ ID NO: 2200178 - DNA, 25 bp, Homo sapien
cattcaacttctgttcacatgactc

SEQ ID NO: 2200179 - DNA, 25 bp, Homo sapien
gcagctccgtcagtggggctcagtt

SEQ ID NO: 2200180 - DNA, 25 bp, Homo sapien
tgtttaatcagagcctggatagtcc

SEQ ID NO: 2200181 - DNA, 25 bp, Homo sapien
aatgagagcacaggataggtcatcc

SEQ ID NO: 2200182 - DNA, 25 bp, Homo sapien
gagcacaggataggtcatcctggcc

SEQ ID NO: 2200183 - DNA, 25 bp, Homo sapien
gccctgacagatcaccagggcaaca

SEQ ID NO: 2200184 - DNA, 25 bp, Homo sapien
atttgaatgagagcacaggataggt

SEQ ID NO: 2200185 - DNA, 25 bp, Homo sapien
taaattgcagagatcagcgtaaagc

SEQ ID NO: 2200186 - DNA, 25 bp, Homo sapien
aaattgcagagatcagcgtaaagca

SEQ ID NO: 2200187 - DNA, 25 bp, Homo sapien
aataaattgcagagatcagcgtaaa

SEQ ID NO: 2200188 - DNA, 25 bp, Homo sapien
aattgcagagatcagcgtaaagcat

SEQ ID NO: 2200189 - DNA, 25 bp, Homo sapien
tgatggaagggaccgcacgagtatc

SEQ ID NO: 2200190 - DNA, 25 bp, Homo sapien
gggaccgcacgagtatcttgtccaa

SEQ ID NO: 2200191 - DNA, 25 bp, Homo sapien
gaagggaccgcacgagtatcttgtc

SEQ ID NO: 2200192 - DNA, 25 bp, Homo sapien
ttcagtgatggaagggaccgcacga

SEQ ID NO: 2200193 - DNA, 25 bp, Homo sapien
tggtggaactaagagcccctgatgt

SEQ ID NO: 2200194 - DNA, 25 bp, Homo sapien
ccaacgagagtgcactggtggaact

SEQ ID NO: 2200195 - DNA, 25 bp, Homo sapien
actaagagcccctgatgtgctatac

SEQ ID NO: 2200196 - DNA, 25 bp, Homo sapien
ctgcatctggtaccaacgagagtgc

SEQ ID NO: 2200197 - DNA, 25 bp, Homo sapien
ttcccaggaacctggtaacttcaca

SEQ ID NO: 2200198 - DNA, 25 bp, Homo sapien
ttattagtttgatgcctttggttgc

SEQ ID NO: 2200199 - DNA, 25 bp, Homo sapien
tgtttatttgctcctccgagttctt

SEQ ID NO: 2200200 - DNA, 25 bp, Homo sapien
gtttatttgctcctccgagttctta

SEQ ID NO: 2200201 - DNA, 25 bp, Homo sapien
tatccatctgtgaaagtcttattat

SEQ ID NO: 2200202 - DNA, 25 bp, Homo sapien
tatgtgcaaagctttttgcaaacat

SEQ ID NO: 2200203 - DNA, 25 bp, Homo sapien
aacagatatgggcaactcatatcca

SEQ ID NO: 2200204 - DNA, 25 bp, Homo sapien
gtcttattatgtgcaaagctttttg

SEQ ID NO: 2200205 - DNA, 25 bp, Homo sapien
ggatctatggttgataagggaactc

SEQ ID NO: 2200206 - DNA, 25 bp, Homo sapien
tatggttgataagggaactccaaac

SEQ ID NO: 2200207 - DNA, 25 bp, Homo sapien
tctatggttgataagggaactccaa

SEQ ID NO: 2200208 - DNA, 25 bp, Homo sapien
gttggatctatggttgataagggaa

SEQ ID NO: 2200209 - DNA, 25 bp, Homo sapien
tgtagctatttctgagatggtattt

SEQ ID NO: 2200210 - DNA, 25 bp, Homo sapien
gttgtagctatttctgagatggtat

SEQ ID NO: 2200211 - DNA, 25 bp, Homo sapien
ctgttgtagctatttctgagatggt

SEQ ID NO: 2200212 - DNA, 25 bp, Homo sapien
tgttgtagctatttctgagatggta

SEQ ID NO: 2200213 - DNA, 25 bp, Homo sapien
taagtaatttagtactcgacgcatg

SEQ ID NO: 2200214 - DNA, 25 bp, Homo sapien
tctatgactctctaagattaccatt

SEQ ID NO: 2200215 - DNA, 25 bp, Homo sapien
gacgcatgcgctacagaaaacaaga

SEQ ID NO: 2200216 - DNA, 25 bp, Homo sapien
tctgcattacaatttaactaagtaa

SEQ ID NO: 2200217 - DNA, 25 bp, Homo sapien
ttctaagcgtcacatattcacaaac

SEQ ID NO: 2200218 - DNA, 25 bp, Homo sapien
tatcttctaagcgtcacatattcac

SEQ ID NO: 2200219 - DNA, 25 bp, Homo sapien
agggtgaagcagatatcttctaagc

SEQ ID NO: 2200220 - DNA, 25 bp, Homo sapien
gcagatatcttctaagcgtcacata

SEQ ID NO: 2200221 - DNA, 25 bp, Homo sapien
tctctgtacgttgcgcggtgtgccg

SEQ ID NO: 2200222 - DNA, 25 bp, Homo sapien
taagggtcgcatgactgggtttgca

SEQ ID NO: 2200223 - DNA, 25 bp, Homo sapien
actcatgtaggaagtgccgggctca

SEQ ID NO: 2200224 - DNA, 25 bp, Homo sapien
tgcagtccaccggtcagaggagctt

SEQ ID NO: 2200225 - DNA, 25 bp, Homo sapien
ctccagactgctgaccggaagtcgc

SEQ ID NO: 2200226 - DNA, 25 bp, Homo sapien
ctgaccggaagtcgccaccgaggaa

SEQ ID NO: 2200227 - DNA, 25 bp, Homo sapien
caccgaggaacccgacgagcttttg

SEQ ID NO: 2200228 - DNA, 25 bp, Homo sapien
cttgaatagtccctccagactgctg

SEQ ID NO: 2200229 - DNA, 25 bp, Homo sapien
caacgccctagttaaagcaccaggg

SEQ ID NO: 2200230 - DNA, 25 bp, Homo sapien
agttgggccgctgagtagccgtcca

SEQ ID NO: 2200231 - DNA, 25 bp, Homo sapien
tttgcggagagaagggctgcgagag

SEQ ID NO: 2200232 - DNA, 25 bp, Homo sapien
tgtgtgggcaacaggtcccaacgcc

SEQ ID NO: 2200233 - DNA, 25 bp, Homo sapien
gtcacaaagggcgctgcgtatgacg

SEQ ID NO: 2200234 - DNA, 25 bp, Homo sapien
ctggtgtcacaaagggcgctgcgta

SEQ ID NO: 2200235 - DNA, 25 bp, Homo sapien
tggtgtcacaaagggcgctgcgtat

SEQ ID NO: 2200236 - DNA, 25 bp, Homo sapien
gtgtcacaaagggcgctgcgtatga

SEQ ID NO: 2200237 - DNA, 25 bp, Homo sapien
actcttccatggcctttgtctctat

SEQ ID NO: 2200238 - DNA, 25 bp, Homo sapien
aactcttccatggcctttgtctcta

SEQ ID NO: 2200239 - DNA, 25 bp, Homo sapien
tgtgaactcttccatggcctttgtc

SEQ ID NO: 2200240 - DNA, 25 bp, Homo sapien
ttatgtgaactcttccatggccttt

SEQ ID NO: 2200241 - DNA, 25 bp, Homo sapien
aatgtcttatctatcattcatccca

SEQ ID NO: 2200242 - DNA, 25 bp, Homo sapien
tagctttttggacatacggaataga

SEQ ID NO: 2200243 - DNA, 25 bp, Homo sapien
ttggacatacggaatagagttatat

SEQ ID NO: 2200244 - DNA, 25 bp, Homo sapien
tatcattcatcccatccagtatatt

SEQ ID NO: 2200245 - DNA, 25 bp, Homo sapien
gacttctctgcgtttctatctggga

SEQ ID NO: 2200246 - DNA, 25 bp, Homo sapien
cactatgttgttatgctggtgatta

SEQ ID NO: 2200247 - DNA, 25 bp, Homo sapien
cattatcattacagctttatgcagc

SEQ ID NO: 2200248 - DNA, 25 bp, Homo sapien
tttcctgttacatgaagaaatcctt

SEQ ID NO: 2200249 - DNA, 25 bp, Homo sapien
agaacaagttgtagtgtgtcacccc

SEQ ID NO: 2200250 - DNA, 25 bp, Homo sapien
tgtaagtcctacctggctcatggtg

SEQ ID NO: 2200251 - DNA, 25 bp, Homo sapien
tgctgcagtggttcttgtcccagtg

SEQ ID NO: 2200252 - DNA, 25 bp, Homo sapien
gcacagcagagatggcggctttggt

SEQ ID NO: 2200253 - DNA, 25 bp, Homo sapien
ctccttcactccataacctggcttg

SEQ ID NO: 2200254 - DNA, 25 bp, Homo sapien
cactccataacctggcttgtgcttg

SEQ ID NO: 2200255 - DNA, 25 bp, Homo sapien
taacctggcttgtgcttgtaaaaca

SEQ ID NO: 2200256 - DNA, 25 bp, Homo sapien
cctggcttgtgcttgtaaaacaatg

SEQ ID NO: 2200257 - DNA, 25 bp, Homo sapien
tctgtgcttgacaatggcccccaag

SEQ ID NO: 2200258 - DNA, 25 bp, Homo sapien
caagggagattcttgtgacagagtg

SEQ ID NO: 2200259 - DNA, 25 bp, Homo sapien
aatataactcccctaacactcctgg

SEQ ID NO: 2200260 - DNA, 25 bp, Homo sapien
gcacctcagtaaaggccggaaatat

SEQ ID NO: 2200261 - DNA, 25 bp, Homo sapien
gagaaaggatgatgtaactagagcc

SEQ ID NO: 2200262 - DNA, 25 bp, Homo sapien
gacttgagttcaaggatttcatatc

SEQ ID NO: 2200263 - DNA, 25 bp, Homo sapien
gtttgactgagttgcccactttcca

SEQ ID NO: 2200264 - DNA, 25 bp, Homo sapien
tgttattatcatagctttctggtca

SEQ ID NO: 2200265 - DNA, 25 bp, Homo sapien
ttttcctgatggcagtttgactgag

SEQ ID NO: 2200266 - DNA, 25 bp, Homo sapien
ttcagctgctccgatcgacaagatt

SEQ ID NO: 2200267 - DNA, 25 bp, Homo sapien
aaatcgtgtagttaacttcagctgc

SEQ ID NO: 2200268 - DNA, 25 bp, Homo sapien
tgataaagacaggaaatcgtgtagt

SEQ ID NO: 2200269 - DNA, 25 bp, Homo sapien
aacttcagctgctccgatcgacaag

SEQ ID NO: 2200270 - DNA, 25 bp, Homo sapien
aggaaaagagggtactcagccacat

SEQ ID NO: 2200271 - DNA, 25 bp, Homo sapien
gtaggaaaagagggtactcagccac

SEQ ID NO: 2200272 - DNA, 25 bp, Homo sapien
atgttggatattcctcagatttctc

SEQ ID NO: 2200273 - DNA, 25 bp, Homo sapien
ttggatattcctcagatttctcctc

SEQ ID NO: 2200274 - DNA, 25 bp, Homo sapien
ttcataggtgagattgttggagact

SEQ ID NO: 2200275 - DNA, 25 bp, Homo sapien
tcatctgtgaattatctgtccattc

SEQ ID NO: 2200276 - DNA, 25 bp, Homo sapien
tccattcatgtcagcaagtttagta

SEQ ID NO: 2200277 - DNA, 25 bp, Homo sapien
tcataggtgagattgttggagactg

SEQ ID NO: 2200278 - DNA, 25 bp, Homo sapien
ttcttgctgcatcaagaagaatggt

SEQ ID NO: 2200279 - DNA, 25 bp, Homo sapien
ttgctgcatcaagaagaatggtctc

SEQ ID NO: 2200280 - DNA, 25 bp, Homo sapien
tgctgcatcaagaagaatggtctct

SEQ ID NO: 2200281 - DNA, 25 bp, Homo sapien
atcaagaagaatggtctcttttctc

SEQ ID NO: 2200282 - DNA, 25 bp, Homo sapien
tttgcatcaatcacaacactgtcca

SEQ ID NO: 2200283 - DNA, 25 bp, Homo sapien
aaccatctccataaatttctatgac

SEQ ID NO: 2200284 - DNA, 25 bp, Homo sapien
tagcagtgactgattgcctctttgc

SEQ ID NO: 2200285 - DNA, 25 bp, Homo sapien
taaagttgacatcctctagcagtga

SEQ ID NO: 2200286 - DNA, 25 bp, Homo sapien
ggcgtgtttgtagagccccagagtt

SEQ ID NO: 2200287 - DNA, 25 bp, Homo sapien
ctggcgtgtttgtagagccccagag

SEQ ID NO: 2200288 - DNA, 25 bp, Homo sapien
gtgtttgtagagccccagagttatt

SEQ ID NO: 2200289 - DNA, 25 bp, Homo sapien
gcgtgtttgtagagccccagagtta

SEQ ID NO: 2200290 - DNA, 25 bp, Homo sapien
gatctcataacttgggacagcaaat

SEQ ID NO: 2200291 - DNA, 25 bp, Homo sapien
ggcttagagcatgggaaaccctctg

SEQ ID NO: 2200292 - DNA, 25 bp, Homo sapien
tagagcatgggaaaccctctgggct

SEQ ID NO: 2200293 - DNA, 25 bp, Homo sapien
tgtctttcaagatctcataacttgg

SEQ ID NO: 2200294 - DNA, 25 bp, Homo sapien
ggacaccacgcttgatctgagccaa

SEQ ID NO: 2200295 - DNA, 25 bp, Homo sapien
accacgcttgatctgagccaacatg

SEQ ID NO: 2200296 - DNA, 25 bp, Homo sapien
tggacaccacgcttgatctgagcca

SEQ ID NO: 2200297 - DNA, 25 bp, Homo sapien
acaccacgcttgatctgagccaaca

SEQ ID NO: 2200298 - DNA, 25 bp, Homo sapien
gctgtggaccccgatatcctggtag

SEQ ID NO: 2200299 - DNA, 25 bp, Homo sapien
ggaccccgatatcctggtagccatg

SEQ ID NO: 2200300 - DNA, 25 bp, Homo sapien
tggaccccgatatcctggtagccat

SEQ ID NO: 2200301 - DNA, 25 bp, Homo sapien
tgtggaccccgatatcctggtagcc

SEQ ID NO: 2200302 - DNA, 25 bp, Homo sapien
ggatggagcccgagataccctgtgt

SEQ ID NO: 2200303 - DNA, 25 bp, Homo sapien
atggagcccgagataccctgtgtga

SEQ ID NO: 2200304 - DNA, 25 bp, Homo sapien
ctggatggagcccgagataccctgt

SEQ ID NO: 2200305 - DNA, 25 bp, Homo sapien
tggagcccgagataccctgtgtgat

SEQ ID NO: 2200306 - DNA, 25 bp, Homo sapien
catgccccggtacttcctgagccac

SEQ ID NO: 2200307 - DNA, 25 bp, Homo sapien
tccatggcatccagcgagcccatgc

SEQ ID NO: 2200308 - DNA, 25 bp, Homo sapien
agcgagcccatgccccggtacttcc

SEQ ID NO: 2200309 - DNA, 25 bp, Homo sapien
cccatgccccggtacttcctgagcc

SEQ ID NO: 2200310 - DNA, 25 bp, Homo sapien
agaggcctccgtggtagcggccagc

SEQ ID NO: 2200311 - DNA, 25 bp, Homo sapien
cagaggcctccgtggtagcggccag

SEQ ID NO: 2200312 - DNA, 25 bp, Homo sapien
tccaagggccagcactgtggaggct

SEQ ID NO: 2200313 - DNA, 25 bp, Homo sapien
tgtggaggctccaagggccagcact

SEQ ID NO: 2200314 - DNA, 25 bp, Homo sapien
tggaggctccaagggccagcactgt

SEQ ID NO: 2200315 - DNA, 25 bp, Homo sapien
aggctccaagggccagcactgtgga

SEQ ID NO: 2200316 - DNA, 25 bp, Homo sapien
acaggccatcacttccccggtgatg

SEQ ID NO: 2200317 - DNA, 25 bp, Homo sapien
gctgccatcggctatgacgggcaca

SEQ ID NO: 2200318 - DNA, 25 bp, Homo sapien
acaccaaagcgccagacatactcgg

SEQ ID NO: 2200319 - DNA, 25 bp, Homo sapien
cagtgccgtgggtctgaccacaggc

SEQ ID NO: 2200320 - DNA, 25 bp, Homo sapien
ctgtcaccacgttccccgcaatcac

SEQ ID NO: 2200321 - DNA, 25 bp, Homo sapien
caggcagaatttgtcatcttcacgg

SEQ ID NO: 2200322 - DNA, 25 bp, Homo sapien
agaatttgtcatcttcacgggtgcc

SEQ ID NO: 2200323 - DNA, 25 bp, Homo sapien
atcgacgcccgcctgagtgagcagg

SEQ ID NO: 2200324 - DNA, 25 bp, Homo sapien
gactatgacatcgacgcccgcctga

SEQ ID NO: 2200325 - DNA, 25 bp, Homo sapien
gctctttcaatgtcacgcctgctgg

SEQ ID NO: 2200326 - DNA, 25 bp, Homo sapien
caccagctcattgtgatcattgacg

SEQ ID NO: 2200327 - DNA, 25 bp, Homo sapien
atttgctctttcaatgtcacgcctg

SEQ ID NO: 2200328 - DNA, 25 bp, Homo sapien
ctcatttgctctttcaatgtcacgc

SEQ ID NO: 2200329 - DNA, 25 bp, Homo sapien
cagctcggtccttggcgtcatcatc

SEQ ID NO: 2200330 - DNA, 25 bp, Homo sapien
agctcggtccttggcgtcatcatct

SEQ ID NO: 2200331 - DNA, 25 bp, Homo sapien
gctcggtccttggcgtcatcatctc

SEQ ID NO: 2200332 - DNA, 25 bp, Homo sapien
tcggtccttggcgtcatcatctcac

SEQ ID NO: 2200333 - DNA, 25 bp, Homo sapien
aggaggatggtgtccttctcagcaa

SEQ ID NO: 2200334 - DNA, 25 bp, Homo sapien
cgatgtctcgggaggcgatgatacc

SEQ ID NO: 2200335 - DNA, 25 bp, Homo sapien
gaaagtcgatgtctcgggaggcgat

SEQ ID NO: 2200336 - DNA, 25 bp, Homo sapien
gaggaggatggtgtccttctcagca

SEQ ID NO: 2200337 - DNA, 25 bp, Homo sapien
tccagtacatcacccacggtgtgcg

SEQ ID NO: 2200338 - DNA, 25 bp, Homo sapien
gtacatcacccacggtgtgcgaggg

SEQ ID NO: 2200339 - DNA, 25 bp, Homo sapien
ctccagtacatcacccacggtgtgc

SEQ ID NO: 2200340 - DNA, 25 bp, Homo sapien
cagtacatcacccacggtgtgcgag

SEQ ID NO: 2200341 - DNA, 25 bp, Homo sapien
ggtgcagttgtggtgaatgaaacta

SEQ ID NO: 2200342 - DNA, 25 bp, Homo sapien
tgcagttgtggtgaatgaaactaat

SEQ ID NO: 2200343 - DNA, 25 bp, Homo sapien
cagttgtggtgaatgaaactaatac

SEQ ID NO: 2200344 - DNA, 25 bp, Homo sapien
tggggtgcagttgtggtgaatgaaa

SEQ ID NO: 2200345 - DNA, 25 bp, Homo sapien
agagccctcccatcagagccatcac

SEQ ID NO: 2200346 - DNA, 25 bp, Homo sapien
tcagagccctcccatcagagccatc

SEQ ID NO: 2200347 - DNA, 25 bp, Homo sapien
cctatcagagccctcccatcagagc

SEQ ID NO: 2200348 - DNA, 25 bp, Homo sapien
ctcctatcagagccctcccatcaga

SEQ ID NO: 2200349 - DNA, 25 bp, Homo sapien
cggcctcggacacgtagcgggtgct

SEQ ID NO: 2200350 - DNA, 25 bp, Homo sapien
gaggccggcctcggacacgtagcgg

SEQ ID NO: 2200351 - DNA, 25 bp, Homo sapien
aggccggcctcggacacgtagcggg

SEQ ID NO: 2200352 - DNA, 25 bp, Homo sapien
gccggcctcggacacgtagcgggtg

SEQ ID NO: 2200353 - DNA, 25 bp, Homo sapien
tgcagcctcgggccgggcgggccgg

SEQ ID NO: 2200354 - DNA, 25 bp, Homo sapien
gctgcagcctcgggccgggcgggcc

SEQ ID NO: 2200355 - DNA, 25 bp, Homo sapien
ctgcagcctcgggccgggcgggccg

SEQ ID NO: 2200356 - DNA, 25 bp, Homo sapien
gcttcgtaaaacattgctgctggta

SEQ ID NO: 2200357 - DNA, 25 bp, Homo sapien
tacaggcttcgtaaaacattgctgc

SEQ ID NO: 2200358 - DNA, 25 bp, Homo sapien
aaacattgctgctggtatgtttgcc

SEQ ID NO: 2200359 - DNA, 25 bp, Homo sapien
tgattacaggcttcgtaaaacattg

SEQ ID NO: 2200360 - DNA, 25 bp, Homo sapien
acagcaattgcccttacccttgaat

SEQ ID NO: 2200361 - DNA, 25 bp, Homo sapien
tcaggctccaataccttatatccac

SEQ ID NO: 2200362 - DNA, 25 bp, Homo sapien
tgtcaatcatgtactgaaaacagca

SEQ ID NO: 2200363 - DNA, 25 bp, Homo sapien
aatgtcatacttgccaccaggtctg

SEQ ID NO: 2200364 - DNA, 25 bp, Homo sapien
agcttccccatcgaatccctccctg

SEQ ID NO: 2200365 - DNA, 25 bp, Homo sapien
tcctttcctttggtatgagcagctt

SEQ ID NO: 2200366 - DNA, 25 bp, Homo sapien
ttcctttggtatgagcagcttcccc

SEQ ID NO: 2200367 - DNA, 25 bp, Homo sapien
gagtgaagcagaagttaaaaaggga

SEQ ID NO: 2200368 - DNA, 25 bp, Homo sapien
caaggctcctcagtagtcatatcca

SEQ ID NO: 2200369 - DNA, 25 bp, Homo sapien
caagtgcatgagtcagggtcccaac

SEQ ID NO: 2200370 - DNA, 25 bp, Homo sapien
ctttgggaaagggacatagctgacc

SEQ ID NO: 2200371 - DNA, 25 bp, Homo sapien
tgacctcaaaaggagacgttcaggg

SEQ ID NO: 2200372 - DNA, 25 bp, Homo sapien
gaagtagcaggatttctaggtacag

SEQ ID NO: 2200373 - DNA, 25 bp, Homo sapien
cagagtaaggttgtacttgaccatc

SEQ ID NO: 2200374 - DNA, 25 bp, Homo sapien
ttgaccatcccttaacactgtgcat

SEQ ID NO: 2200375 - DNA, 25 bp, Homo sapien
gaggcagatggccataatatacaga

SEQ ID NO: 2200376 - DNA, 25 bp, Homo sapien
gccattagcacaatgcagttcttcc

SEQ ID NO: 2200377 - DNA, 25 bp, Homo sapien
tactaaaatacgtagtggtctgctg

SEQ ID NO: 2200378 - DNA, 25 bp, Homo sapien
taaatctatggcttgtggagtacta

SEQ ID NO: 2200379 - DNA, 25 bp, Homo sapien
tgtattacattatggctttccccag

SEQ ID NO: 2200380 - DNA, 25 bp, Homo sapien
tttccccagcagtttccaaggcaac

SEQ ID NO: 2200381 - DNA, 25 bp, Homo sapien
ggaatggatgttccgggtgtggttg

SEQ ID NO: 2200382 - DNA, 25 bp, Homo sapien
gaaggtttccagtcatgttcaccag

SEQ ID NO: 2200383 - DNA, 25 bp, Homo sapien
actgggtgcaccaggagtggttgct

SEQ ID NO: 2200384 - DNA, 25 bp, Homo sapien
gctccaggaatggatgttccgggtg

SEQ ID NO: 2200385 - DNA, 25 bp, Homo sapien
ccttctgagtcacaccactactatt

SEQ ID NO: 2200386 - DNA, 25 bp, Homo sapien
ggccttctgagtcacaccactacta

SEQ ID NO: 2200387 - DNA, 25 bp, Homo sapien
gaggccttctgagtcacaccactac

SEQ ID NO: 2200388 - DNA, 25 bp, Homo sapien
tgaggccttctgagtcacaccacta

SEQ ID NO: 2200389 - DNA, 25 bp, Homo sapien
tctggttctggaaccaggtcttaac

SEQ ID NO: 2200390 - DNA, 25 bp, Homo sapien
ctcttagatttcattctctggttct

SEQ ID NO: 2200391 - DNA, 25 bp, Homo sapien
tctctggttctggaaccaggtctta

SEQ ID NO: 2200392 - DNA, 25 bp, Homo sapien
cttagatttcattctctggttctgg

SEQ ID NO: 2200393 - DNA, 25 bp, Homo sapien
agtacacacagctgggtggaacgga

SEQ ID NO: 2200394 - DNA, 25 bp, Homo sapien
ggtggaacggaacacagttctggtc

SEQ ID NO: 2200395 - DNA, 25 bp, Homo sapien
tctgtccgtgaaatctatcattgag

SEQ ID NO: 2200396 - DNA, 25 bp, Homo sapien
tgtagctaaggttcaggatgttgga

SEQ ID NO: 2200397 - DNA, 25 bp, Homo sapien
tcaggcccacaagtcaccggcgtag

SEQ ID NO: 2200398 - DNA, 25 bp, Homo sapien
ggctttgggcataggttggattcat

SEQ ID NO: 2200399 - DNA, 25 bp, Homo sapien
gtcaccggcgtaggtgaagattctt

SEQ ID NO: 2200400 - DNA, 25 bp, Homo sapien
gggcataggttggattcatgatcat

SEQ ID NO: 2200401 - DNA, 25 bp, Homo sapien
ggagcacggcatgatgccacaaggg

SEQ ID NO: 2200402 - DNA, 25 bp, Homo sapien
gcacggcatgatgccacaagggcag

SEQ ID NO: 2200403 - DNA, 25 bp, Homo sapien
tctgaggcagtgtcttgcaattctt

SEQ ID NO: 2200404 - DNA, 25 bp, Homo sapien
ttctgaggcagtgtcttgcaattct

SEQ ID NO: 2200405 - DNA, 25 bp, Homo sapien
tgcccagtgcatcctcacatttaca

SEQ ID NO: 2200406 - DNA, 25 bp, Homo sapien
cctcacatttacatgcagagcacat

SEQ ID NO: 2200407 - DNA, 25 bp, Homo sapien
tcctcacatttacatgcagagcaca

SEQ ID NO: 2200408 - DNA, 25 bp, Homo sapien
agtgcatcctcacatttacatgcag

SEQ ID NO: 2200409 - DNA, 25 bp, Homo sapien
caaaggtggccttattatgcagatg

SEQ ID NO: 2200410 - DNA, 25 bp, Homo sapien
ttatttacgggcacatggacacagg

SEQ ID NO: 2200411 - DNA, 25 bp, Homo sapien
caacttggctaggacgaagttcctc

SEQ ID NO: 2200412 - DNA, 25 bp, Homo sapien
caggagttcggcaaatatgagaccc

SEQ ID NO: 2200413 - DNA, 25 bp, Homo sapien
cctgtgaggctttacgtgacctgct

SEQ ID NO: 2200414 - DNA, 25 bp, Homo sapien
ggaaattccgttggccctgccttca

SEQ ID NO: 2200415 - DNA, 25 bp, Homo sapien
gatcttccttaaggccgctgttcca

SEQ ID NO: 2200416 - DNA, 25 bp, Homo sapien
gatggcaacttcgaaaaaactcaga

SEQ ID NO: 2200417 - DNA, 25 bp, Homo sapien
ctttcacttcttatggaggagagtg

SEQ ID NO: 2200418 - DNA, 25 bp, Homo sapien
gaactgtcattacagagcctagagg

SEQ ID NO: 2200419 - DNA, 25 bp, Homo sapien
tgtagtccctccgacttctctagac

SEQ ID NO: 2200420 - DNA, 25 bp, Homo sapien
ggacatcttgtggtctgctgcctca

SEQ ID NO: 2200421 - DNA, 25 bp, Homo sapien
tgaagtttgccccagtgctacacgt

SEQ ID NO: 2200422 - DNA, 25 bp, Homo sapien
gaatgccagtccagatgtgcctaga

SEQ ID NO: 2200423 - DNA, 25 bp, Homo sapien
ccagtacataaggagttgccgcata

SEQ ID NO: 2200424 - DNA, 25 bp, Homo sapien
tcaaacctaagttgctggaccctgg

SEQ ID NO: 2200425 - DNA, 25 bp, Homo sapien
ggtgaaaagaacatcgatgggagat

SEQ ID NO: 2200426 - DNA, 25 bp, Homo sapien
gctttcaccttagaaagggcaggga

SEQ ID NO: 2200427 - DNA, 25 bp, Homo sapien
ggagatgagacaggtggaattgctt

SEQ ID NO: 2200428 - DNA, 25 bp, Homo sapien
tgcatctgggtaatgggtgaaaaga

SEQ ID NO: 2200429 - DNA, 25 bp, Homo sapien
gccttatatttagactgtgtagagc

SEQ ID NO: 2200430 - DNA, 25 bp, Homo sapien
cagctggtattagatgggccttata

SEQ ID NO: 2200431 - DNA, 25 bp, Homo sapien
agatgcaggtatgaggtccctagat

SEQ ID NO: 2200432 - DNA, 25 bp, Homo sapien
tccctagatgagtccaatgaggcag

SEQ ID NO: 2200433 - DNA, 25 bp, Homo sapien
agggctaggactgacaccgggtgta

SEQ ID NO: 2200434 - DNA, 25 bp, Homo sapien
gtacccaggaagggtgctcttggct

SEQ ID NO: 2200435 - DNA, 25 bp, Homo sapien
aagggctaggactgacaccgggtgt

SEQ ID NO: 2200436 - DNA, 25 bp, Homo sapien
caagggctaggactgacaccgggtg

SEQ ID NO: 2200437 - DNA, 25 bp, Homo sapien
tgtaagcgtcgtttggcatcaggtg

SEQ ID NO: 2200438 - DNA, 25 bp, Homo sapien
cacggatcggcattgagggaaatga

SEQ ID NO: 2200439 - DNA, 25 bp, Homo sapien
gcagatcacatccttcacggatcgg

SEQ ID NO: 2200440 - DNA, 25 bp, Homo sapien
tcaggtgggtgcttttgagcactca

SEQ ID NO: 2200441 - DNA, 25 bp, Homo sapien
gagaaggggcccatgtatggcacaa

SEQ ID NO: 2200442 - DNA, 25 bp, Homo sapien
gaaggggcccatgtatggcacaatg

SEQ ID NO: 2200443 - DNA, 25 bp, Homo sapien
aggggcccatgtatggcacaatgcc

SEQ ID NO: 2200444 - DNA, 25 bp, Homo sapien
gggcccatgtatggcacaatgccct

SEQ ID NO: 2200445 - DNA, 25 bp, Homo sapien
cataattttctataacccagggaat

SEQ ID NO: 2200446 - DNA, 25 bp, Homo sapien
gaacgctaagccaggtaagggacac

SEQ ID NO: 2200447 - DNA, 25 bp, Homo sapien
gcacagagtaaacccacacaacggg

SEQ ID NO: 2200448 - DNA, 25 bp, Homo sapien
gagacacaccgcacaaaacagtaag

SEQ ID NO: 2200449 - DNA, 25 bp, Homo sapien
gacaccatcggtaactatgacaggg

SEQ ID NO: 2200450 - DNA, 25 bp, Homo sapien
aaagatggtggtcaatccaatcagc

SEQ ID NO: 2200451 - DNA, 25 bp, Homo sapien
caagagccgttgctgaaaagatggt

SEQ ID NO: 2200452 - DNA, 25 bp, Homo sapien
ttgctgaaaagatggtggtcaatcc

SEQ ID NO: 2200453 - DNA, 25 bp, Homo sapien
ggccaggaagccaagagccgttgct

SEQ ID NO: 2200454 - DNA, 25 bp, Homo sapien
gcctggcacggagggcaaatgtctc

SEQ ID NO: 2200455 - DNA, 25 bp, Homo sapien
agcaggcctggcacggagggcaaat

SEQ ID NO: 2200456 - DNA, 25 bp, Homo sapien
tgtctctccaaaaaggtggtggtga

SEQ ID NO: 2200457 - DNA, 25 bp, Homo sapien
caaatgtctctccaaaaaggtggtg

SEQ ID NO: 2200458 - DNA, 25 bp, Homo sapien
actctggttctgactgccagatttc

SEQ ID NO: 2200459 - DNA, 25 bp, Homo sapien
ctctggttctgactgccagatttca

SEQ ID NO: 2200460 - DNA, 25 bp, Homo sapien
tggttctgactgccagatttcatcc

SEQ ID NO: 2200461 - DNA, 25 bp, Homo sapien
ctggttctgactgccagatttcatc

SEQ ID NO: 2200462 - DNA, 25 bp, Homo sapien
tcggtgcctgcaaagtaaatcctgt

SEQ ID NO: 2200463 - DNA, 25 bp, Homo sapien
tctcggtgcctgcaaagtaaatcct

SEQ ID NO: 2200464 - DNA, 25 bp, Homo sapien
ctctccccggcctctacagccccct

SEQ ID NO: 2200465 - DNA, 25 bp, Homo sapien
ggtgcctgcaaagtaaatcctgtcc

SEQ ID NO: 2200466 - DNA, 25 bp, Homo sapien
gggaaataagttgtgtagcagcccc

SEQ ID NO: 2200467 - DNA, 25 bp, Homo sapien
tccatattgagtcaggatcccaggg

SEQ ID NO: 2200468 - DNA, 25 bp, Homo sapien
cttccatattgagtcaggatcccag

SEQ ID NO: 2200469 - DNA, 25 bp, Homo sapien
caggggggaaataagttgtgtagca

SEQ ID NO: 2200470 - DNA, 25 bp, Homo sapien
ccagaaccttggcatagagttcaca

SEQ ID NO: 2200471 - DNA, 25 bp, Homo sapien
cttggcatagagttcacaaagtttc

SEQ ID NO: 2200472 - DNA, 25 bp, Homo sapien
aaccttggcatagagttcacaaagt

SEQ ID NO: 2200473 - DNA, 25 bp, Homo sapien
cagaaccttggcatagagttcacaa

SEQ ID NO: 2200474 - DNA, 25 bp, Homo sapien
gtaagacgtgccagttttctggctt

SEQ ID NO: 2200475 - DNA, 25 bp, Homo sapien
ctttggtaagacgtgccagttttct

SEQ ID NO: 2200476 - DNA, 25 bp, Homo sapien
ttggtaagacgtgccagttttctgg

SEQ ID NO: 2200477 - DNA, 25 bp, Homo sapien
ggtaagacgtgccagttttctggct

SEQ ID NO: 2200478 - DNA, 25 bp, Homo sapien
cccattatggcagcatagttgcctt

SEQ ID NO: 2200479 - DNA, 25 bp, Homo sapien
cgtgtaggcaactggagcttcttct

SEQ ID NO: 2200480 - DNA, 25 bp, Homo sapien
catagttgccttcaggtttggtatc

SEQ ID NO: 2200481 - DNA, 25 bp, Homo sapien
ggtttggtatcatccaacgtgtagg

SEQ ID NO: 2200482 - DNA, 25 bp, Homo sapien
tctgccactggcttgaggggtgttt

SEQ ID NO: 2200483 - DNA, 25 bp, Homo sapien
tgcacctgttagaatcaatgtccca

SEQ ID NO: 2200484 - DNA, 25 bp, Homo sapien
cctgttagaatcaatgtcccaatct

SEQ ID NO: 2200485 - DNA, 25 bp, Homo sapien
ttagaatcaatgtcccaatctgcca

SEQ ID NO: 2200486 - DNA, 25 bp, Homo sapien
aatagcagtcctaaacgtgattatc

SEQ ID NO: 2200487 - DNA, 25 bp, Homo sapien
ttacttgcccaactgatgcaccaat

SEQ ID NO: 2200488 - DNA, 25 bp, Homo sapien
tgcccaactgatgcaccaatccaat

SEQ ID NO: 2200489 - DNA, 25 bp, Homo sapien
gatgcaccaatccaatagcagtcct

SEQ ID NO: 2200490 - DNA, 25 bp, Homo sapien
tcttcatgcccagagtaggaggaat

SEQ ID NO: 2200491 - DNA, 25 bp, Homo sapien
actgaacccaaaggcacacgagtga

SEQ ID NO: 2200492 - DNA, 25 bp, Homo sapien
gtaggaggaatagcactaatcacat

SEQ ID NO: 2200493 - DNA, 25 bp, Homo sapien
taaactatacacttgatgactgaac

SEQ ID NO: 2200494 - DNA, 25 bp, Homo sapien
ttagggtctccacaaggacattttc

SEQ ID NO: 2200495 - DNA, 25 bp, Homo sapien
atacatctcatggtttagggtctcc

SEQ ID NO: 2200496 - DNA, 25 bp, Homo sapien
acttgaccagatccgcccacaaatt

SEQ ID NO: 2200497 - DNA, 25 bp, Homo sapien
ggtcaatgtagatcacaggcctctc

SEQ ID NO: 2200498 - DNA, 25 bp, Homo sapien
cctccatttgttgtcgagatgattc

SEQ ID NO: 2200499 - DNA, 25 bp, Homo sapien
aagagagtggcaagctgctttgcag

SEQ ID NO: 2200500 - DNA, 25 bp, Homo sapien
ttcacataccacaggaaccagagag

SEQ ID NO: 2200501 - DNA, 25 bp, Homo sapien
cttgttgtgcctccacactgcttca

SEQ ID NO: 2200502 - DNA, 25 bp, Homo sapien
tgaatgggaaccctcataatccttt

SEQ ID NO: 2200503 - DNA, 25 bp, Homo sapien
tgcttgaatgggaaccctcataatc

SEQ ID NO: 2200504 - DNA, 25 bp, Homo sapien
tccatgtggtctgtctatacaagcc

SEQ ID NO: 2200505 - DNA, 25 bp, Homo sapien
gccttcacaatttctctacagttcc

SEQ ID NO: 2200506 - DNA, 25 bp, Homo sapien
gagccaattccaatggttttcagca

SEQ ID NO: 2200507 - DNA, 25 bp, Homo sapien
tacttgtcccatacttgttgaacgg

SEQ ID NO: 2200508 - DNA, 25 bp, Homo sapien
tagacacaaagcagctacttgtccc

SEQ ID NO: 2200509 - DNA, 25 bp, Homo sapien
cagggtaataccacctttgtgatac

SEQ ID NO: 2200510 - DNA, 25 bp, Homo sapien
gcttgtccagtagctccttcattgt

SEQ ID NO: 2200511 - DNA, 25 bp, Homo sapien
ccactcttctgcaaggggagccttc

SEQ ID NO: 2200512 - DNA, 25 bp, Homo sapien
caaggggagccttccatggggcatc

SEQ ID NO: 2200513 - DNA, 25 bp, Homo sapien
tcagtccagcagagcttgtccagta

SEQ ID NO: 2200514 - DNA, 25 bp, Homo sapien
atacaggtgggaatggccccctgaa

SEQ ID NO: 2200515 - DNA, 25 bp, Homo sapien
catgtcatccattgtcctccaaaag

SEQ ID NO: 2200516 - DNA, 25 bp, Homo sapien
tcctccaaaagttgttatgatctaa

SEQ ID NO: 2200517 - DNA, 25 bp, Homo sapien
taggtaattggattccatacaggtg

SEQ ID NO: 2200518 - DNA, 25 bp, Homo sapien
cttttatcaagagagtggtatttag

SEQ ID NO: 2200519 - DNA, 25 bp, Homo sapien
caagccctaggatctgtcatttgtc

SEQ ID NO: 2200520 - DNA, 25 bp, Homo sapien
tctgcccaagccctaggatctgtca

SEQ ID NO: 2200521 - DNA, 25 bp, Homo sapien
cctaggatctgtcatttgtccaaga

SEQ ID NO: 2200522 - DNA, 25 bp, Homo sapien
ctgaaaacctccacttatccctcct

SEQ ID NO: 2200523 - DNA, 25 bp, Homo sapien
tcaatacataaaacttgctcagcag

SEQ ID NO: 2200524 - DNA, 25 bp, Homo sapien
tacataaaacttgctcagcagaaac

SEQ ID NO: 2200525 - DNA, 25 bp, Homo sapien
tccacttatccctccttcatcagag

SEQ ID NO: 2200526 - DNA, 25 bp, Homo sapien
tctccacgaagaagaagtcaatccc

SEQ ID NO: 2200527 - DNA, 25 bp, Homo sapien
tccacgaagaagaagtcaatcccca

SEQ ID NO: 2200528 - DNA, 25 bp, Homo sapien
ctccacgaagaagaagtcaatcccc

SEQ ID NO: 2200529 - DNA, 25 bp, Homo sapien
ttcaatttataagatggcaagtata

SEQ ID NO: 2200530 - DNA, 25 bp, Homo sapien
agattctcaatttcaatttataaga

SEQ ID NO: 2200531 - DNA, 25 bp, Homo sapien
caagtatagagagatagagccacaa

SEQ ID NO: 2200532 - DNA, 25 bp, Homo sapien
gatggcaagtatagagagatagagc

SEQ ID NO: 2200533 - DNA, 25 bp, Homo sapien
tggagattatacaaggtacacagga

SEQ ID NO: 2200534 - DNA, 25 bp, Homo sapien
cactaaatggatattgctgatggtt

SEQ ID NO: 2200535 - DNA, 25 bp, Homo sapien
tacacaggatgcatgcactaaatgg

SEQ ID NO: 2200536 - DNA, 25 bp, Homo sapien
cctatcttggatgtactgtaggaat

SEQ ID NO: 2200537 - DNA, 25 bp, Homo sapien
tgaattcctagcataagaattcctg

SEQ ID NO: 2200538 - DNA, 25 bp, Homo sapien
gaatctcctctggatgaattcctag

SEQ ID NO: 2200539 - DNA, 25 bp, Homo sapien
ccataaatccatgaccacacttttg

SEQ ID NO: 2200540 - DNA, 25 bp, Homo sapien
acacttttgatgaatctcctctgga

SEQ ID NO: 2200541 - DNA, 25 bp, Homo sapien
tgggaagcccttttgccatcatatt

SEQ ID NO: 2200542 - DNA, 25 bp, Homo sapien
aatttctgtcacatttgggaagccc

SEQ ID NO: 2200543 - DNA, 25 bp, Homo sapien
cacggcctcattttggagcctgtat

SEQ ID NO: 2200544 - DNA, 25 bp, Homo sapien
tctgttctggaggtaaagacccaac

SEQ ID NO: 2200545 - DNA, 25 bp, Homo sapien
cttcttctgttcgtgtgcctatttc

SEQ ID NO: 2200546 - DNA, 25 bp, Homo sapien
cctatttcatgacccttgttcacat

SEQ ID NO: 2200547 - DNA, 25 bp, Homo sapien
tttcatgacccttgttcacatttcc

SEQ ID NO: 2200548 - DNA, 25 bp, Homo sapien
tgtagttgggcaaatggttgtcttc

SEQ ID NO: 2200549 - DNA, 25 bp, Homo sapien
cactagacaaggtaatttccctgga

SEQ ID NO: 2200550 - DNA, 25 bp, Homo sapien
ggatgttcaatgtccatacttgctg

SEQ ID NO: 2200551 - DNA, 25 bp, Homo sapien
tgtaaagacatccatatcactagac

SEQ ID NO: 2200552 - DNA, 25 bp, Homo sapien
ggaaagggatgttcaatgtccatac

SEQ ID NO: 2200553 - DNA, 25 bp, Homo sapien
gaacagctgctttgggatctagact

SEQ ID NO: 2200554 - DNA, 25 bp, Homo sapien
cataaataacgtggccaaggacaca

SEQ ID NO: 2200555 - DNA, 25 bp, Homo sapien
gagatctgctagaaacactgggcct

SEQ ID NO: 2200556 - DNA, 25 bp, Homo sapien
cagcagcctcgtgacaatgatgtta

SEQ ID NO: 2200557 - DNA, 25 bp, Homo sapien
atgcccaggacatgtgatacgcagc

SEQ ID NO: 2200558 - DNA, 25 bp, Homo sapien
gaatccacgcctaagcctttctgca

SEQ ID NO: 2200559 - DNA, 25 bp, Homo sapien
gatacgcagcctgggaatccacgcc

SEQ ID NO: 2200560 - DNA, 25 bp, Homo sapien
aaatgcccaggacatgtgatacgca

SEQ ID NO: 2200561 - DNA, 25 bp, Homo sapien
taaatgtttcatgatttatggtcag

SEQ ID NO: 2200562 - DNA, 25 bp, Homo sapien
cacaaataatatgaggatgtcaaaa

SEQ ID NO: 2200563 - DNA, 25 bp, Homo sapien
tatttgtttcgatattatcactcac

SEQ ID NO: 2200564 - DNA, 25 bp, Homo sapien
taactgcttagttcccattttatta

SEQ ID NO: 2200565 - DNA, 25 bp, Homo sapien
tctgtcttctaaggggatgttttct

SEQ ID NO: 2200566 - DNA, 25 bp, Homo sapien
tgtcttctaaggggatgttttctac

SEQ ID NO: 2200567 - DNA, 25 bp, Homo sapien
ctgtcttctaaggggatgttttcta

SEQ ID NO: 2200568 - DNA, 25 bp, Homo sapien
gaggaataagttcctgtgctgctta

SEQ ID NO: 2200569 - DNA, 25 bp, Homo sapien
agattaggtgactgtctgattgtca

SEQ ID NO: 2200570 - DNA, 25 bp, Homo sapien
agagaacatgagtgactttgtggac

SEQ ID NO: 2200571 - DNA, 25 bp, Homo sapien
tgtcagagaacatgagtgactttgt

SEQ ID NO: 2200572 - DNA, 25 bp, Homo sapien
gggcccagattaggtgactgtctga

SEQ ID NO: 2200573 - DNA, 25 bp, Homo sapien
tgaacccaggttggcataagcaaag

SEQ ID NO: 2200574 - DNA, 25 bp, Homo sapien
cacatatgcttgtggcggtctgaga

SEQ ID NO: 2200575 - DNA, 25 bp, Homo sapien
gagaaatgtgaccagtgagaaatcc

SEQ ID NO: 2200576 - DNA, 25 bp, Homo sapien
ggacaaagaggtgagtgtgaaccca

SEQ ID NO: 2200577 - DNA, 25 bp, Homo sapien
catggtggatcagacgctcaacctc

SEQ ID NO: 2200578 - DNA, 25 bp, Homo sapien
tcaagatacgattctgggttggtcc

SEQ ID NO: 2200579 - DNA, 25 bp, Homo sapien
gtaggtctccaatcctagctccttg

SEQ ID NO: 2200580 - DNA, 25 bp, Homo sapien
tggtccaacataggatcctccaagg

SEQ ID NO: 2200581 - DNA, 25 bp, Homo sapien
ggaagtagggcatttccttgcagag

SEQ ID NO: 2200582 - DNA, 25 bp, Homo sapien
tatatgtcttatctctctggaaatg

SEQ ID NO: 2200583 - DNA, 25 bp, Homo sapien
gctttgcttgactctgtgtttaaat

SEQ ID NO: 2200584 - DNA, 25 bp, Homo sapien
tggtgcctggaacaccagtgggaca

SEQ ID NO: 2200585 - DNA, 25 bp, Homo sapien
ctaagagtgtaagtcctgcctccca

SEQ ID NO: 2200586 - DNA, 25 bp, Homo sapien
cctaagagtgtaagtcctgcctccc

SEQ ID NO: 2200587 - DNA, 25 bp, Homo sapien
ctgcctcccacacggtcccgggctt

SEQ ID NO: 2200588 - DNA, 25 bp, Homo sapien
ggcttccagaacaaccacattcagt

SEQ ID NO: 2200589 - DNA, 25 bp, Homo sapien
aaagtccatgctggctcacgtgcac

SEQ ID NO: 2200590 - DNA, 25 bp, Homo sapien
catgctaacagccaatgagaaaagt

SEQ ID NO: 2200591 - DNA, 25 bp, Homo sapien
cgtgcaccgcctattgttacattca

SEQ ID NO: 2200592 - DNA, 25 bp, Homo sapien
tcaacttacaagtggatacggtttg

SEQ ID NO: 2200593 - DNA, 25 bp, Homo sapien
tcaacttgactggatggtgggatac

SEQ ID NO: 2200594 - DNA, 25 bp, Homo sapien
aactggcatgggagttggcagactg

SEQ ID NO: 2200595 - DNA, 25 bp, Homo sapien
tagatggcaggtgaagcattgtttc

SEQ ID NO: 2200596 - DNA, 25 bp, Homo sapien
aaaccggctctcaatgtagtgggca

SEQ ID NO: 2200597 - DNA, 25 bp, Homo sapien
gggcaccatccaatccaatcggctg

SEQ ID NO: 2200598 - DNA, 25 bp, Homo sapien
agaacagaaatctggtgctcttccc

SEQ ID NO: 2200599 - DNA, 25 bp, Homo sapien
gagaacagaaatctggtgctcttcc

SEQ ID NO: 2200600 - DNA, 25 bp, Homo sapien
tgctttatgagaccaaatattaagg

SEQ ID NO: 2200601 - DNA, 25 bp, Homo sapien
gaccaaatattaaggccatgccaag

SEQ ID NO: 2200602 - DNA, 25 bp, Homo sapien
tgagaccaaatattaaggccatgcc

SEQ ID NO: 2200603 - DNA, 25 bp, Homo sapien
tattaaggccatgccaagatgctct

SEQ ID NO: 2200604 - DNA, 25 bp, Homo sapien
ctagtgagtctgccccaacaagaac

SEQ ID NO: 2200605 - DNA, 25 bp, Homo sapien
ttttggcacgcccaggcacaagaag

SEQ ID NO: 2200606 - DNA, 25 bp, Homo sapien
aagttttggcacgcccaggcacaag

SEQ ID NO: 2200607 - DNA, 25 bp, Homo sapien
tggcttcagagcctcattgtctttc

SEQ ID NO: 2200608 - DNA, 25 bp, Homo sapien
ttggcacgcccaggcacaagaagtt

SEQ ID NO: 2200609 - DNA, 25 bp, Homo sapien
cagaaacatgtgtgtgggaaaatcc

SEQ ID NO: 2200610 - DNA, 25 bp, Homo sapien
gcctaacccgaaagactcatattaa

SEQ ID NO: 2200611 - DNA, 25 bp, Homo sapien
tgggcacccagaccaggtaggatga

SEQ ID NO: 2200612 - DNA, 25 bp, Homo sapien
tggtggcaggtcaagactgtgaact

SEQ ID NO: 2200613 - DNA, 25 bp, Homo sapien
taggaagactacacgtgacagaagc

SEQ ID NO: 2200614 - DNA, 25 bp, Homo sapien
gcatccgaagtaggccaagttcagg

SEQ ID NO: 2200615 - DNA, 25 bp, Homo sapien
gatcagtgtagctacaggccctagg

SEQ ID NO: 2200616 - DNA, 25 bp, Homo sapien
taacacaggtcacctcaggagggca

SEQ ID NO: 2200617 - DNA, 25 bp, Homo sapien
tgagagcagtcaaatgcatagagac

SEQ ID NO: 2200618 - DNA, 25 bp, Homo sapien
tgtttgcttcacttctgacaataaa

SEQ ID NO: 2200619 - DNA, 25 bp, Homo sapien
tgaactagaaggatgaaccttgagg

SEQ ID NO: 2200620 - DNA, 25 bp, Homo sapien
tgtgactaaaaaatatccaatctgc

SEQ ID NO: 2200621 - DNA, 25 bp, Homo sapien
gagaagtgacgttttagaatgccca

SEQ ID NO: 2200622 - DNA, 25 bp, Homo sapien
gcactagcgatttaggagggaagca

SEQ ID NO: 2200623 - DNA, 25 bp, Homo sapien
caaaggagactggtggagcactagc

SEQ ID NO: 2200624 - DNA, 25 bp, Homo sapien
tacagaccaccttataggaacgctg

SEQ ID NO: 2200625 - DNA, 25 bp, Homo sapien
ttctcagacctgtccactggaagct

SEQ ID NO: 2200626 - DNA, 25 bp, Homo sapien
tggccaactgatttatctacagaaa

SEQ ID NO: 2200627 - DNA, 25 bp, Homo sapien
gacctgtccactggaagctcaatac

SEQ ID NO: 2200628 - DNA, 25 bp, Homo sapien
gccaactgatttatctacagaaaac

SEQ ID NO: 2200629 - DNA, 25 bp, Homo sapien
gtggtaagagattgggattccccag

SEQ ID NO: 2200630 - DNA, 25 bp, Homo sapien
cagatcggaggctctaaatttcagc

SEQ ID NO: 2200631 - DNA, 25 bp, Homo sapien
tcttggctgtactgccacggattcc

SEQ ID NO: 2200632 - DNA, 25 bp, Homo sapien
cacggattcctccagtaaaagaagg

SEQ ID NO: 2200633 - DNA, 25 bp, Homo sapien
aattgctcgtttttggatcctgccc

SEQ ID NO: 2200634 - DNA, 25 bp, Homo sapien
tactgtcctgtaaatataaagatca

SEQ ID NO: 2200635 - DNA, 25 bp, Homo sapien
actgaagtctctggccctatgattt

SEQ ID NO: 2200636 - DNA, 25 bp, Homo sapien
gacaagctggactttctactgtcct

SEQ ID NO: 2200637 - DNA, 25 bp, Homo sapien
tcaaggtcgttttcctgacgccagg

SEQ ID NO: 2200638 - DNA, 25 bp, Homo sapien
gacgccaggacaacaatacgatgtg

SEQ ID NO: 2200639 - DNA, 25 bp, Homo sapien
catgcttgctctaagcgagggtgcg

SEQ ID NO: 2200640 - DNA, 25 bp, Homo sapien
tggcaatcgattggccaggctccaa

SEQ ID NO: 2200641 - DNA, 25 bp, Homo sapien
ctgcgtccgggaacgcacccaaaat

SEQ ID NO: 2200642 - DNA, 25 bp, Homo sapien
agagccctgcccgtgcgtggacagt

SEQ ID NO: 2200643 - DNA, 25 bp, Homo sapien
tttccctggcttcgaaaattccagc

SEQ ID NO: 2200644 - DNA, 25 bp, Homo sapien
aaattccagcaagcgaaggcctagc

SEQ ID NO: 2200645 - DNA, 25 bp, Homo sapien
ccccaccacgaccacgtcgcatttg

SEQ ID NO: 2200646 - DNA, 25 bp, Homo sapien
caccacgaccacgtcgcatttgttg

SEQ ID NO: 2200647 - DNA, 25 bp, Homo sapien
cgaccacgtcgcatttgttgctcat

SEQ ID NO: 2200648 - DNA, 25 bp, Homo sapien
ccacgaccacgtcgcatttgttgct

SEQ ID NO: 2200649 - DNA, 25 bp, Homo sapien
ccccgtgcaccagcgcctcggcgag

SEQ ID NO: 2200650 - DNA, 25 bp, Homo sapien
gcctcgatcccagtcctgcgtgcca

SEQ ID NO: 2200651 - DNA, 25 bp, Homo sapien
ccagtcctgcgtgccagccagcccg

SEQ ID NO: 2200652 - DNA, 25 bp, Homo sapien
tgctccgttttctgggcctcgatcc

SEQ ID NO: 2200653 - DNA, 25 bp, Homo sapien
gtcctcagaccagaagacaatttgg

SEQ ID NO: 2200654 - DNA, 25 bp, Homo sapien
tggtataaaacagtcagaccctgtg

SEQ ID NO: 2200655 - DNA, 25 bp, Homo sapien
caatttgggcacttctgtgactgag

SEQ ID NO: 2200656 - DNA, 25 bp, Homo sapien
tgctagaaaggtatcctgagcttct

SEQ ID NO: 2200657 - DNA, 25 bp, Homo sapien
caccaagtaaacttagccatttaag

SEQ ID NO: 2200658 - DNA, 25 bp, Homo sapien
cacaccatggtttcccaatagttct

SEQ ID NO: 2200659 - DNA, 25 bp, Homo sapien
taccagaacatcacataagtttatt

SEQ ID NO: 2200660 - DNA, 25 bp, Homo sapien
taatctggacaaactatatattgca

SEQ ID NO: 2200661 - DNA, 25 bp, Homo sapien
tggatggaatgatttaatataagtt

SEQ ID NO: 2200662 - DNA, 25 bp, Homo sapien
acaaagcttgatgcaactgtcctga

SEQ ID NO: 2200663 - DNA, 25 bp, Homo sapien
ggacctctttatactgaatagcata

SEQ ID NO: 2200664 - DNA, 25 bp, Homo sapien
tgagaaaaagtgggtgttattgaaa

SEQ ID NO: 2200665 - DNA, 25 bp, Homo sapien
tgtctaggacctctttatactgaat

SEQ ID NO: 2200666 - DNA, 25 bp, Homo sapien
gcttttagggcaggaacaacctcac

SEQ ID NO: 2200667 - DNA, 25 bp, Homo sapien
agcttttagggcaggaacaacctca

SEQ ID NO: 2200668 - DNA, 25 bp, Homo sapien
tgggcactgctagactctcggttgc

SEQ ID NO: 2200669 - DNA, 25 bp, Homo sapien
gctagactctcggttgcagctttta

SEQ ID NO: 2200670 - DNA, 25 bp, Homo sapien
gtctttcaaaatgtcctctctgccc

SEQ ID NO: 2200671 - DNA, 25 bp, Homo sapien
cactgtttctgagtatctgccatgg

SEQ ID NO: 2200672 - DNA, 25 bp, Homo sapien
tctctgcccactgtttctgagtatc

SEQ ID NO: 2200673 - DNA, 25 bp, Homo sapien
tttctgagtatctgccatggctctg

SEQ ID NO: 2200674 - DNA, 25 bp, Homo sapien
caaacgttcagaagacaagccaggc

SEQ ID NO: 2200675 - DNA, 25 bp, Homo sapien
gagtcccgggagaattgttgcatcc

SEQ ID NO: 2200676 - DNA, 25 bp, Homo sapien
tattagagaatgatgcccgtgacac

SEQ ID NO: 2200677 - DNA, 25 bp, Homo sapien
ccagagtcagtgcaggatccgtatt

SEQ ID NO: 2200678 - DNA, 25 bp, Homo sapien
accaaaggctcggagcgtgacgcct

SEQ ID NO: 2200679 - DNA, 25 bp, Homo sapien
cagccgcagtgccttcagcttggaa

SEQ ID NO: 2200680 - DNA, 25 bp, Homo sapien
ggaattgcattcctcgcagtgacag

SEQ ID NO: 2200681 - DNA, 25 bp, Homo sapien
gaggacagtgctgaacgacaccaaa

SEQ ID NO: 2200682 - DNA, 25 bp, Homo sapien
tgcgattttactccgacagagtgga

SEQ ID NO: 2200683 - DNA, 25 bp, Homo sapien
tcaggaacaagattcacccatgctt

SEQ ID NO: 2200684 - DNA, 25 bp, Homo sapien
tgtcccaccctagaagagcattttt

SEQ ID NO: 2200685 - DNA, 25 bp, Homo sapien
ttgcctttttcgcagcagtgaacac

SEQ ID NO: 2200686 - DNA, 25 bp, Homo sapien
cggttcagatagtcatgccctggtt

SEQ ID NO: 2200687 - DNA, 25 bp, Homo sapien
ccattcctgaaatcccctccctggc

SEQ ID NO: 2200688 - DNA, 25 bp, Homo sapien
gttcagatagtcatgccctggttcc

SEQ ID NO: 2200689 - DNA, 25 bp, Homo sapien
ccactcctcacccaactgagacttt

SEQ ID NO: 2200690 - DNA, 25 bp, Homo sapien
tatcaggcacatcctaatctgtggc

SEQ ID NO: 2200691 - DNA, 25 bp, Homo sapien
tccctctcagtcctttccggaattg

SEQ ID NO: 2200692 - DNA, 25 bp, Homo sapien
caggatcttttgtacccaaacccag

SEQ ID NO: 2200693 - DNA, 25 bp, Homo sapien
tgctactcccaggatcttttgtacc

SEQ ID NO: 2200694 - DNA, 25 bp, Homo sapien
gctgggatgaacagtctcattgaaa

SEQ ID NO: 2200695 - DNA, 25 bp, Homo sapien
tattactgccagcagatcagaagca

SEQ ID NO: 2200696 - DNA, 25 bp, Homo sapien
tctagaaacattgctgagtataaat

SEQ ID NO: 2200697 - DNA, 25 bp, Homo sapien
tcccagaaaggctttcactattatt

SEQ ID NO: 2200698 - DNA, 25 bp, Homo sapien
tgaatgagctgtccgttttactgtc

SEQ ID NO: 2200699 - DNA, 25 bp, Homo sapien
gaatccacatagtggtgcctcatgc

SEQ ID NO: 2200700 - DNA, 25 bp, Homo sapien
ctcatgcagcgtcgagggtccgagt

SEQ ID NO: 2200701 - DNA, 25 bp, Homo sapien
acaatgggtgactgatagaatccac

SEQ ID NO: 2200702 - DNA, 25 bp, Homo sapien
caccagcagggagagcatagaaaag

SEQ ID NO: 2200703 - DNA, 25 bp, Homo sapien
cagggagagcatagaaaaggatgca

SEQ ID NO: 2200704 - DNA, 25 bp, Homo sapien
atcaccagcagggagagcatagaaa

SEQ ID NO: 2200705 - DNA, 25 bp, Homo sapien
cagcagggagagcatagaaaaggat

SEQ ID NO: 2200706 - DNA, 25 bp, Homo sapien
gagggaggcagaggacaaaaaattg

SEQ ID NO: 2200707 - DNA, 25 bp, Homo sapien
gaggcagaggacaaaaaattggaaa

SEQ ID NO: 2200708 - DNA, 25 bp, Homo sapien
gggaggcagaggacaaaaaattgga

SEQ ID NO: 2200709 - DNA, 25 bp, Homo sapien
ctagaagaacagcagagggaggcag

SEQ ID NO: 2200710 - DNA, 25 bp, Homo sapien
caggatcgggctgaagctttctggt

SEQ ID NO: 2200711 - DNA, 25 bp, Homo sapien
ctcctaggatccagtcccgttcaag

SEQ ID NO: 2200712 - DNA, 25 bp, Homo sapien
gctggagttttgtcttactctttgc

SEQ ID NO: 2200713 - DNA, 25 bp, Homo sapien
cagtcccgttcaaggaaagggcagg

SEQ ID NO: 2200714 - DNA, 25 bp, Homo sapien
aatccatcatcacagtatctgctgc

SEQ ID NO: 2200715 - DNA, 25 bp, Homo sapien
catcatcacagtatctgctgcacag

SEQ ID NO: 2200716 - DNA, 25 bp, Homo sapien
tccatcatcacagtatctgctgcac

SEQ ID NO: 2200717 - DNA, 25 bp, Homo sapien
cttgcaatccatcatcacagtatct

SEQ ID NO: 2200718 - DNA, 25 bp, Homo sapien
aattttccacttctgtgctctaggc

SEQ ID NO: 2200719 - DNA, 25 bp, Homo sapien
tttccacttctgtgctctaggctca

SEQ ID NO: 2200720 - DNA, 25 bp, Homo sapien
ctaattttccacttctgtgctctag

SEQ ID NO: 2200721 - DNA, 25 bp, Homo sapien
ttttccacttctgtgctctaggctc

SEQ ID NO: 2200722 - DNA, 25 bp, Homo sapien
gaagacttagaaccttggcccaggc

SEQ ID NO: 2200723 - DNA, 25 bp, Homo sapien
tctctgagacatggacttggccgac

SEQ ID NO: 2200724 - DNA, 25 bp, Homo sapien
cctgtggccacgctatgctctggat

SEQ ID NO: 2200725 - DNA, 25 bp, Homo sapien
tcaaatgctgcctacgaagacttag

SEQ ID NO: 2200726 - DNA, 25 bp, Homo sapien
ctgatgggcgaggagtggatactac

SEQ ID NO: 2200727 - DNA, 25 bp, Homo sapien
taccagctggaacattgccactggc

SEQ ID NO: 2200728 - DNA, 25 bp, Homo sapien
agaaaacctttgatggacaaaagag

SEQ ID NO: 2200729 - DNA, 25 bp, Homo sapien
gaatgctcttaatgtcctcccaaag

SEQ ID NO: 2200730 - DNA, 25 bp, Homo sapien
ctcgaaggccgctggccaagaagct

SEQ ID NO: 2200731 - DNA, 25 bp, Homo sapien
gaagcagtcactggccgtcatggga

SEQ ID NO: 2200732 - DNA, 25 bp, Homo sapien
ccactggctgctggcctagtgcaga

SEQ ID NO: 2200733 - DNA, 25 bp, Homo sapien
aagaggtgaggatgggctcgaaggc

SEQ ID NO: 2200734 - DNA, 25 bp, Homo sapien
cgagctgatgactaaaaataacccc

SEQ ID NO: 2200735 - DNA, 25 bp, Homo sapien
ggactttttgcccaatcaaaatcat

SEQ ID NO: 2200736 - DNA, 25 bp, Homo sapien
agcatgcatttcctcggactttttg

SEQ ID NO: 2200737 - DNA, 25 bp, Homo sapien
cctgcaataagtccaaggcaaacag

SEQ ID NO: 2200738 - DNA, 25 bp, Homo sapien
tagaaagaggtcctgttacttccaa

SEQ ID NO: 2200739 - DNA, 25 bp, Homo sapien
agagctagaaagaggtcctgttact

SEQ ID NO: 2200740 - DNA, 25 bp, Homo sapien
cacacaaaagttaggactgttgttt

SEQ ID NO: 2200741 - DNA, 25 bp, Homo sapien
tgttgtttaagcgacacagggagag

SEQ ID NO: 2200742 - DNA, 25 bp, Homo sapien
cctattcgggcatgcttggagggct

SEQ ID NO: 2200743 - DNA, 25 bp, Homo sapien
tcttctagtgttacgaaagtgcagg

SEQ ID NO: 2200744 - DNA, 25 bp, Homo sapien
gaagaatcaaagctccatgctgcag

SEQ ID NO: 2200745 - DNA, 25 bp, Homo sapien
ttcatgactggagaagcatcggccc

SEQ ID NO: 2200746 - DNA, 25 bp, Homo sapien
tgttcagaatgatggtttccggctt

SEQ ID NO: 2200747 - DNA, 25 bp, Homo sapien
gtttgttcagaatgatggtttccgg

SEQ ID NO: 2200748 - DNA, 25 bp, Homo sapien
ccccatgacaggccctggtgtatga

SEQ ID NO: 2200749 - DNA, 25 bp, Homo sapien
ccatgacaggccctggtgtatgatg

SEQ ID NO: 2200750 - DNA, 25 bp, Homo sapien
ttctgccgtgtagtgaggacagaca

SEQ ID NO: 2200751 - DNA, 25 bp, Homo sapien
ccatggctcatgaaggttggggatg

SEQ ID NO: 2200752 - DNA, 25 bp, Homo sapien
accatggctcatgaaggttggggat

SEQ ID NO: 2200753 - DNA, 25 bp, Homo sapien
cttctgccgtgtagtgaggacagac

SEQ ID NO: 2200754 - DNA, 25 bp, Homo sapien
aacacgtacagtttcctgaatgccc

SEQ ID NO: 2200755 - DNA, 25 bp, Homo sapien
cctggaggagtatctggctctgtac

SEQ ID NO: 2200756 - DNA, 25 bp, Homo sapien
gacttccccgatctgagtgtgagtg

SEQ ID NO: 2200757 - DNA, 25 bp, Homo sapien
atgtcccaaatgtcccaacagtctg

SEQ ID NO: 2200758 - DNA, 25 bp, Homo sapien
ccccaggagtactagcgtccattga

SEQ ID NO: 2200759 - DNA, 25 bp, Homo sapien
tccattgacctatccctgttgctta

SEQ ID NO: 2200760 - DNA, 25 bp, Homo sapien
tttgaggcattacttagcattcccc

SEQ ID NO: 2200761 - DNA, 25 bp, Homo sapien
caacctcttgggtacaagacagaag

SEQ ID NO: 2200762 - DNA, 25 bp, Homo sapien
ggttgcccaacttgaatcaagtgat

SEQ ID NO: 2200763 - DNA, 25 bp, Homo sapien
ttggtcacaatagcttgctctcctg

SEQ ID NO: 2200764 - DNA, 25 bp, Homo sapien
caagtgatgctttcagtcaagttgc

SEQ ID NO: 2200765 - DNA, 25 bp, Homo sapien
tccttcagggactttggtcacaata

SEQ ID NO: 2200766 - DNA, 25 bp, Homo sapien
aaataacatcttgggaataatcatc

SEQ ID NO: 2200767 - DNA, 25 bp, Homo sapien
gggaataatcatcacatggttcttt

SEQ ID NO: 2200768 - DNA, 25 bp, Homo sapien
aatgcataccaaatgtcgccttgta

SEQ ID NO: 2200769 - DNA, 25 bp, Homo sapien
gaaaccaaagacagaccgcagttaa

SEQ ID NO: 2200770 - DNA, 25 bp, Homo sapien
cattcaaatccctctagcatgacca

SEQ ID NO: 2200771 - DNA, 25 bp, Homo sapien
gcgagtggctcattcaaatccctct

SEQ ID NO: 2200772 - DNA, 25 bp, Homo sapien
aaatccctctagcatgaccatacgt

SEQ ID NO: 2200773 - DNA, 25 bp, Homo sapien
cttttggatgcgagtggctcattca

SEQ ID NO: 2200774 - DNA, 25 bp, Homo sapien
atggccatctgggaacaaccttcct

SEQ ID NO: 2200775 - DNA, 25 bp, Homo sapien
ccatctgggaacaaccttcctgatg

SEQ ID NO: 2200776 - DNA, 25 bp, Homo sapien
ggccatctgggaacaaccttcctga

SEQ ID NO: 2200777 - DNA, 25 bp, Homo sapien
tggccatctgggaacaaccttcctg

SEQ ID NO: 2200778 - DNA, 25 bp, Homo sapien
agggagcttgccaacgccgtcgcag

SEQ ID NO: 2200779 - DNA, 25 bp, Homo sapien
agcagcggccgccattccagggagc

SEQ ID NO: 2200780 - DNA, 25 bp, Homo sapien
gtgctaagaaaattactacagcgtg

SEQ ID NO: 2200781 - DNA, 25 bp, Homo sapien
attactacagcgtgaagcagcggcc

SEQ ID NO: 2200782 - DNA, 25 bp, Homo sapien
ggttttgtctggttgcatataatct

SEQ ID NO: 2200783 - DNA, 25 bp, Homo sapien
aaatgactttcatattgcaacaatc

SEQ ID NO: 2200784 - DNA, 25 bp, Homo sapien
gtctggttgcatataatctttgctc

SEQ ID NO: 2200785 - DNA, 25 bp, Homo sapien
agaaataggttttgtctggttgcat

SEQ ID NO: 2200786 - DNA, 25 bp, Homo sapien
gagggctggtattataacctgagac

SEQ ID NO: 2200787 - DNA, 25 bp, Homo sapien
acacctcttgattattcccagaagc

SEQ ID NO: 2200788 - DNA, 25 bp, Homo sapien
cagaagatcttctgccaagagcttc

SEQ ID NO: 2200789 - DNA, 25 bp, Homo sapien
gaatcttcaaatgggtagtacctga

SEQ ID NO: 2200790 - DNA, 25 bp, Homo sapien
cattcagggatatggccgtattgct

SEQ ID NO: 2200791 - DNA, 25 bp, Homo sapien
tcagaaaagggtgtgagctcttgtt

SEQ ID NO: 2200792 - DNA, 25 bp, Homo sapien
cagagcttgcctgttacttgttgag

SEQ ID NO: 2200793 - DNA, 25 bp, Homo sapien
ggatgtgtgccttactcgactttgt

SEQ ID NO: 2200794 - DNA, 25 bp, Homo sapien
gggccagcaagatttcactggaaca

SEQ ID NO: 2200795 - DNA, 25 bp, Homo sapien
tgtgctcttccaataggtcacagta

SEQ ID NO: 2200796 - DNA, 25 bp, Homo sapien
caataggtcacagtagtctagggcc

SEQ ID NO: 2200797 - DNA, 25 bp, Homo sapien
ctagggccagcaagatttcactgga

SEQ ID NO: 2200798 - DNA, 25 bp, Homo sapien
cagggcataagggaatttgcccagt

SEQ ID NO: 2200799 - DNA, 25 bp, Homo sapien
gagagacaccatccacagggcataa

SEQ ID NO: 2200800 - DNA, 25 bp, Homo sapien
tctttctttccagggacacagagag

SEQ ID NO: 2200801 - DNA, 25 bp, Homo sapien
catgtggatatgacttgatctatct

SEQ ID NO: 2200802 - DNA, 25 bp, Homo sapien
cacggtttctataattcactaaaag

SEQ ID NO: 2200803 - DNA, 25 bp, Homo sapien
tagtttgttgtgataacacaaagtg

SEQ ID NO: 2200804 - DNA, 25 bp, Homo sapien
gttgtgataacacaaagtgtccttt

SEQ ID NO: 2200805 - DNA, 25 bp, Homo sapien
tggatccacggtttctataattcac

SEQ ID NO: 2200806 - DNA, 25 bp, Homo sapien
gaatgatagtcacccttgcacttat

SEQ ID NO: 2200807 - DNA, 25 bp, Homo sapien
tcgaatgatagtcacccttgcactt

SEQ ID NO: 2200808 - DNA, 25 bp, Homo sapien
atgatagtcacccttgcacttataa

SEQ ID NO: 2200809 - DNA, 25 bp, Homo sapien
aatcgaatgatagtcacccttgcac

SEQ ID NO: 2200810 - DNA, 25 bp, Homo sapien
tatcgcagctccttgataccgacac

SEQ ID NO: 2200811 - DNA, 25 bp, Homo sapien
ctatcgcagctccttgataccgaca

SEQ ID NO: 2200812 - DNA, 25 bp, Homo sapien
agctccttgataccgacaccaaaac

SEQ ID NO: 2200813 - DNA, 25 bp, Homo sapien
cgcagctccttgataccgacaccaa

SEQ ID NO: 2200814 - DNA, 25 bp, Homo sapien
gctggtacccctgtgggataggcca

SEQ ID NO: 2200815 - DNA, 25 bp, Homo sapien
tcctgtgagggcctcagtcaaaggc

SEQ ID NO: 2200816 - DNA, 25 bp, Homo sapien
caattactccttttggctcagagaa

SEQ ID NO: 2200817 - DNA, 25 bp, Homo sapien
tcaaaggcgttgttgttcccagagc

SEQ ID NO: 2200818 - DNA, 25 bp, Homo sapien
tgtacacgtcctcccatatacctta

SEQ ID NO: 2200819 - DNA, 25 bp, Homo sapien
aaagtaaagacaactatagtccgag

SEQ ID NO: 2200820 - DNA, 25 bp, Homo sapien
gaacctgtggtactataacaaaaga

SEQ ID NO: 2200821 - DNA, 25 bp, Homo sapien
tagaaacaatcacaatgagctacag

SEQ ID NO: 2200822 - DNA, 25 bp, Homo sapien
aatgcatcagcatttcaggaccacc

SEQ ID NO: 2200823 - DNA, 25 bp, Homo sapien
gccagagttatctactgcttgaaac

SEQ ID NO: 2200824 - DNA, 25 bp, Homo sapien
taccctggaacaatgacaatagttg

SEQ ID NO: 2200825 - DNA, 25 bp, Homo sapien
gaggcagaaattccagtcctcctcc

SEQ ID NO: 2200826 - DNA, 25 bp, Homo sapien
gactgggatagacttcttacactga

SEQ ID NO: 2200827 - DNA, 25 bp, Homo sapien
gaattcccagaggtacatggctatg

SEQ ID NO: 2200828 - DNA, 25 bp, Homo sapien
cactacatgacaagagttctgctga

SEQ ID NO: 2200829 - DNA, 25 bp, Homo sapien
aataatgagtccgaagggtcccttg

SEQ ID NO: 2200830 - DNA, 25 bp, Homo sapien
taaatagtaacagtacgtcggcaat

SEQ ID NO: 2200831 - DNA, 25 bp, Homo sapien
tgttggatcaaaaattatcagaaga

SEQ ID NO: 2200832 - DNA, 25 bp, Homo sapien
tagtaatgaatcaaattatgttgga

SEQ ID NO: 2200833 - DNA, 25 bp, Homo sapien
tgtcatgtataaccttcaaaagtca

SEQ ID NO: 2200834 - DNA, 25 bp, Homo sapien
gagaagtaaatcatagagaattgac

SEQ ID NO: 2200835 - DNA, 25 bp, Homo sapien
agagaattgaccaaaactggcatgg

SEQ ID NO: 2200836 - DNA, 25 bp, Homo sapien
gagagaagtaaatcatagagaattg

SEQ ID NO: 2200837 - DNA, 25 bp, Homo sapien
catagagaattgaccaaaactggca

SEQ ID NO: 2200838 - DNA, 25 bp, Homo sapien
gtccttcaaaaaggtccagtagtca

SEQ ID NO: 2200839 - DNA, 25 bp, Homo sapien
agtcaatgtatttcgcaggaatagg

SEQ ID NO: 2200840 - DNA, 25 bp, Homo sapien
gatggcataccaagccaaacatctt

SEQ ID NO: 2200841 - DNA, 25 bp, Homo sapien
tattcctcctctaagccaaacgcgt

SEQ ID NO: 2200842 - DNA, 25 bp, Homo sapien
ttaggttcataaggactttgtggtc

SEQ ID NO: 2200843 - DNA, 25 bp, Homo sapien
gttcataaggactttgtggtctact

SEQ ID NO: 2200844 - DNA, 25 bp, Homo sapien
tggatacttgttcttgattcttcat

SEQ ID NO: 2200845 - DNA, 25 bp, Homo sapien
tttgtggtctactggatacttgttc

SEQ ID NO: 2200846 - DNA, 25 bp, Homo sapien
gagtccaatgagaatccaggctaca

SEQ ID NO: 2200847 - DNA, 25 bp, Homo sapien
gctacaggccattggctacaggcca

SEQ ID NO: 2200848 - DNA, 25 bp, Homo sapien
gccaggcagagggataaccaaggga

SEQ ID NO: 2200849 - DNA, 25 bp, Homo sapien
aggctacaggccattggctacaggc

SEQ ID NO: 2200850 - DNA, 25 bp, Homo sapien
tatgatgctggttgcaattcaggca

SEQ ID NO: 2200851 - DNA, 25 bp, Homo sapien
taaggtatgatgctggttgcaattc

SEQ ID NO: 2200852 - DNA, 25 bp, Homo sapien
aggtatgatgctggttgcaattcag

SEQ ID NO: 2200853 - DNA, 25 bp, Homo sapien
ctttaaggtatgatgctggttgcaa

SEQ ID NO: 2200854 - DNA, 25 bp, Homo sapien
gcaaaggtcacctcatcatttaggg

SEQ ID NO: 2200855 - DNA, 25 bp, Homo sapien
tctatttccacccttgatagaggta

SEQ ID NO: 2200856 - DNA, 25 bp, Homo sapien
cttcttctcctctattgcaaaggtc

SEQ ID NO: 2200857 - DNA, 25 bp, Homo sapien
gggaataatcctgaactgctctatt

SEQ ID NO: 2200858 - DNA, 25 bp, Homo sapien
gctcccacagcacaaactgacaggg

SEQ ID NO: 2200859 - DNA, 25 bp, Homo sapien
agctcccacagcacaaactgacagg

SEQ ID NO: 2200860 - DNA, 25 bp, Homo sapien
ctcccacagcacaaactgacagggg

SEQ ID NO: 2200861 - DNA, 25 bp, Homo sapien
cagctcccacagcacaaactgacag

SEQ ID NO: 2200862 - DNA, 25 bp, Homo sapien
cttagcgtgccataaggagggctgt

SEQ ID NO: 2200863 - DNA, 25 bp, Homo sapien
cattaggaattagggcagtctttga

SEQ ID NO: 2200864 - DNA, 25 bp, Homo sapien
gaatataaatgtaagctgcaggctg

SEQ ID NO: 2200865 - DNA, 25 bp, Homo sapien
gcatgtgacccaaatcatggcaggg

SEQ ID NO: 2200866 - DNA, 25 bp, Homo sapien
tttaatgtctttggtgggtaataca

SEQ ID NO: 2200867 - DNA, 25 bp, Homo sapien
tagaagatcatcactcaaaggtaat

SEQ ID NO: 2200868 - DNA, 25 bp, Homo sapien
cactcaaaggtaatctggaggattt

SEQ ID NO: 2200869 - DNA, 25 bp, Homo sapien
gatttgcacagccttttaatgtctt

SEQ ID NO: 2200870 - DNA, 25 bp, Homo sapien
ttttctcgatcttcatacacacagg

SEQ ID NO: 2200871 - DNA, 25 bp, Homo sapien
cacggtagtgacgtgcaatggttac

SEQ ID NO: 2200872 - DNA, 25 bp, Homo sapien
tatctgaacatgtgccctcaggcac

SEQ ID NO: 2200873 - DNA, 25 bp, Homo sapien
tcttgaacttttcgtgggccagtgc

SEQ ID NO: 2200874 - DNA, 25 bp, Homo sapien
gactctgaaaccttagaatctatct

SEQ ID NO: 2200875 - DNA, 25 bp, Homo sapien
gaaaccttagaatctatctgcagga

SEQ ID NO: 2200876 - DNA, 25 bp, Homo sapien
tgatgactctgaaaccttagaatct

SEQ ID NO: 2200877 - DNA, 25 bp, Homo sapien
tctgaaaccttagaatctatctgca

SEQ ID NO: 2200878 - DNA, 25 bp, Homo sapien
tgtgtatacatatagcgagaaatcc

SEQ ID NO: 2200879 - DNA, 25 bp, Homo sapien
tatagcgagaaatccaggaaagctt

SEQ ID NO: 2200880 - DNA, 25 bp, Homo sapien
gtggtagcagagcagatcttgaaga

SEQ ID NO: 2200881 - DNA, 25 bp, Homo sapien
tcatccagtctgacatgtgtataca

SEQ ID NO: 2200882 - DNA, 25 bp, Homo sapien
gcatctgccattagctgtttctgga

SEQ ID NO: 2200883 - DNA, 25 bp, Homo sapien
atctgccattagctgtttctggaaa

SEQ ID NO: 2200884 - DNA, 25 bp, Homo sapien
cagcatctgccattagctgtttctg

SEQ ID NO: 2200885 - DNA, 25 bp, Homo sapien
tcagaacattctgccagcatctgcc

SEQ ID NO: 2200886 - DNA, 25 bp, Homo sapien
gaatctgatagaccatgccaaaaag

SEQ ID NO: 2200887 - DNA, 25 bp, Homo sapien
tctgcactctcttggataacgatca

SEQ ID NO: 2200888 - DNA, 25 bp, Homo sapien
tcttggataacgatcagcagctctc

SEQ ID NO: 2200889 - DNA, 25 bp, Homo sapien
tcacaggcgaatctgatagaccatg

SEQ ID NO: 2200890 - DNA, 25 bp, Homo sapien
aggtgtatgctgagagtgccaggta

SEQ ID NO: 2200891 - DNA, 25 bp, Homo sapien
ggtgtatgctgagagtgccaggtat

SEQ ID NO: 2200892 - DNA, 25 bp, Homo sapien
cccgaagccccaggtgtatgctgag

SEQ ID NO: 2200893 - DNA, 25 bp, Homo sapien
ccccgaagccccaggtgtatgctga

SEQ ID NO: 2200894 - DNA, 25 bp, Homo sapien
gacctcagagaccaatatatgaaca

SEQ ID NO: 2200895 - DNA, 25 bp, Homo sapien
acctcagagaccaatatatgaacaa

SEQ ID NO: 2200896 - DNA, 25 bp, Homo sapien
cctcagagaccaatatatgaacaaa

SEQ ID NO: 2200897 - DNA, 25 bp, Homo sapien
ggacctcagagaccaatatatgaac

SEQ ID NO: 2200898 - DNA, 25 bp, Homo sapien
caagtttgaggttactgaaaggata

SEQ ID NO: 2200899 - DNA, 25 bp, Homo sapien
tgtgtgcttagagtcagcagcttta

SEQ ID NO: 2200900 - DNA, 25 bp, Homo sapien
gctttaaatacctgcttgagctctc

SEQ ID NO: 2200901 - DNA, 25 bp, Homo sapien
atgtattataatccaccatatttgt

SEQ ID NO: 2200902 - DNA, 25 bp, Homo sapien
gctcctcggccttgatatattcaga

SEQ ID NO: 2200903 - DNA, 25 bp, Homo sapien
tattctgctccatgtagtttaaggt

SEQ ID NO: 2200904 - DNA, 25 bp, Homo sapien
tcagcattgagcaaacgaaataggt

SEQ ID NO: 2200905 - DNA, 25 bp, Homo sapien
tgtccaggcttcttaacgcgacttc

SEQ ID NO: 2200906 - DNA, 25 bp, Homo sapien
caaacactgaaatggtgtcatcacc

SEQ ID NO: 2200907 - DNA, 25 bp, Homo sapien
tgtccaagtcaacacatttgtctgt

SEQ ID NO: 2200908 - DNA, 25 bp, Homo sapien
tgtctgtgactagttttgcaaaaaa

SEQ ID NO: 2200909 - DNA, 25 bp, Homo sapien
gaattcctctctataggttcaaaca

SEQ ID NO: 2200910 - DNA, 25 bp, Homo sapien
gcagttacggagagaatcctcttca

SEQ ID NO: 2200911 - DNA, 25 bp, Homo sapien
ttcctccgatgaggtgtgggcttga

SEQ ID NO: 2200912 - DNA, 25 bp, Homo sapien
tgtgggcttgaggtctatgcagtta

SEQ ID NO: 2200913 - DNA, 25 bp, Homo sapien
cttcttgaagttcctccgatgaggt

SEQ ID NO: 2200914 - DNA, 25 bp, Homo sapien
ggagaaggaggcttgcatgaaactg

SEQ ID NO: 2200915 - DNA, 25 bp, Homo sapien
aggagaaggaggcttgcatgaaact

SEQ ID NO: 2200916 - DNA, 25 bp, Homo sapien
ggaggagaaggaggcttgcatgaaa

SEQ ID NO: 2200917 - DNA, 25 bp, Homo sapien
gaggagaaggaggcttgcatgaaac

SEQ ID NO: 2200918 - DNA, 25 bp, Homo sapien
tgtccacagtccccaaggcaaatat

SEQ ID NO: 2200919 - DNA, 25 bp, Homo sapien
aagacggattccaaacaggcatcta

SEQ ID NO: 2200920 - DNA, 25 bp, Homo sapien
caggcatctacatttattaaaggcc

SEQ ID NO: 2200921 - DNA, 25 bp, Homo sapien
tccacagtccccaaggcaaatatgc

SEQ ID NO: 2200922 - DNA, 25 bp, Homo sapien
gacaggtcactatctttgtaaaact

SEQ ID NO: 2200923 - DNA, 25 bp, Homo sapien
tagacttataataagacttcgtaaa

SEQ ID NO: 2200924 - DNA, 25 bp, Homo sapien
tgatggtgactcctagggacaggtc

SEQ ID NO: 2200925 - DNA, 25 bp, Homo sapien
ttcttccccacacattgatggtgac

SEQ ID NO: 2200926 - DNA, 25 bp, Homo sapien
tagaaacaggtaataaaatatgagg

SEQ ID NO: 2200927 - DNA, 25 bp, Homo sapien
caggtaataaaatatgaggttcctt

SEQ ID NO: 2200928 - DNA, 25 bp, Homo sapien
acaggtaataaaatatgaggttcct

SEQ ID NO: 2200929 - DNA, 25 bp, Homo sapien
agaaacaggtaataaaatatgaggt

SEQ ID NO: 2200930 - DNA, 25 bp, Homo sapien
gttatctggcctggttgatagactc

SEQ ID NO: 2200931 - DNA, 25 bp, Homo sapien
gaacaggtagccatccgcttggttc

SEQ ID NO: 2200932 - DNA, 25 bp, Homo sapien
cttatatctatcgaacaggtagcca

SEQ ID NO: 2200933 - DNA, 25 bp, Homo sapien
gaactgctcgatctgttatctggcc

SEQ ID NO: 2200934 - DNA, 25 bp, Homo sapien
ttttagagcatctcggcctgagctg

SEQ ID NO: 2200935 - DNA, 25 bp, Homo sapien
caggatgagttctctacggtctcca

SEQ ID NO: 2200936 - DNA, 25 bp, Homo sapien
caaaatcttgccatgatactggagg

SEQ ID NO: 2200937 - DNA, 25 bp, Homo sapien
cttgggtagcttactcctccggagg

SEQ ID NO: 2200938 - DNA, 25 bp, Homo sapien
tgtttcagggtgtcgagggattcgt

SEQ ID NO: 2200939 - DNA, 25 bp, Homo sapien
gtaagggctctacgtgttctacaac

SEQ ID NO: 2200940 - DNA, 25 bp, Homo sapien
tgtcgagggattcgtagggacgtaa

SEQ ID NO: 2200941 - DNA, 25 bp, Homo sapien
gattcgtagggacgtaagggctcta

SEQ ID NO: 2200942 - DNA, 25 bp, Homo sapien
aagggggtatatcagaatcatggtc

SEQ ID NO: 2200943 - DNA, 25 bp, Homo sapien
ggtcttccttattcttccagagcat

SEQ ID NO: 2200944 - DNA, 25 bp, Homo sapien
gggtcagaccttgtacataaacatc

SEQ ID NO: 2200945 - DNA, 25 bp, Homo sapien
tggcatccaatgccatcctaagagg

SEQ ID NO: 2200946 - DNA, 25 bp, Homo sapien
tctccgaatcttcatgtaaggatct

SEQ ID NO: 2200947 - DNA, 25 bp, Homo sapien
catcaggaggcggaagagtaatccg

SEQ ID NO: 2200948 - DNA, 25 bp, Homo sapien
gacaacctctgtgccgacattaaaa

SEQ ID NO: 2200949 - DNA, 25 bp, Homo sapien
taaatcttgaatgtccggccataga

SEQ ID NO: 2200950 - DNA, 25 bp, Homo sapien
caatgtgagcacactcaacaggcat

SEQ ID NO: 2200951 - DNA, 25 bp, Homo sapien
atcttcagggtagaagtagatttta

SEQ ID NO: 2200952 - DNA, 25 bp, Homo sapien
tcttcagggtagaagtagattttat

SEQ ID NO: 2200953 - DNA, 25 bp, Homo sapien
tgctgccagtataaatttgagaatg

SEQ ID NO: 2200954 - DNA, 25 bp, Homo sapien
ctgaatgctgccagtataaatttga

SEQ ID NO: 2200955 - DNA, 25 bp, Homo sapien
gactacactggcataggtcaattga

SEQ ID NO: 2200956 - DNA, 25 bp, Homo sapien
gacaactggcataggtcaactgtca

SEQ ID NO: 2200957 - DNA, 25 bp, Homo sapien
tagaacaggacaatgttcaaatagc

SEQ ID NO: 2200958 - DNA, 25 bp, Homo sapien
caggacaatgttcaaatagcgaata

SEQ ID NO: 2200959 - DNA, 25 bp, Homo sapien
caatgttcaaatagcgaatacaatt

SEQ ID NO: 2200960 - DNA, 25 bp, Homo sapien
ctaacaatagaacaggacaatgttc

SEQ ID NO: 2200961 - DNA, 25 bp, Homo sapien
atgggctctctactccgaaaacctt

SEQ ID NO: 2200962 - DNA, 25 bp, Homo sapien
attcttgttctatctgaacagcatt

SEQ ID NO: 2200963 - DNA, 25 bp, Homo sapien
gggctctctactccgaaaaccttgc

SEQ ID NO: 2200964 - DNA, 25 bp, Homo sapien
tgggctctctactccgaaaaccttg

SEQ ID NO: 2200965 - DNA, 25 bp, Homo sapien
cttgagccagaatatcgatgcaaaa

SEQ ID NO: 2200966 - DNA, 25 bp, Homo sapien
agaaccagaaaagaagatgccttct

SEQ ID NO: 2200967 - DNA, 25 bp, Homo sapien
accagaaaagaagatgccttctact

SEQ ID NO: 2200968 - DNA, 25 bp, Homo sapien
aatatcgatgcaaaagaaccagaaa

SEQ ID NO: 2200969 - DNA, 25 bp, Homo sapien
tgtccccaatccagcgcaaggccca

SEQ ID NO: 2200970 - DNA, 25 bp, Homo sapien
cttcttcttgacacaaggcatcgtt

SEQ ID NO: 2200971 - DNA, 25 bp, Homo sapien
ctttgtccccaatccagcgcaaggc

SEQ ID NO: 2200972 - DNA, 25 bp, Homo sapien
ccttcttcttgacacaaggcatcgt

SEQ ID NO: 2200973 - DNA, 25 bp, Homo sapien
ccacctcctcggtggtccagaagga

SEQ ID NO: 2200974 - DNA, 25 bp, Homo sapien
agatgacaaagcggcaagggtttcc

SEQ ID NO: 2200975 - DNA, 25 bp, Homo sapien
atgacaaagcggcaagggtttcctc

SEQ ID NO: 2200976 - DNA, 25 bp, Homo sapien
ggtccacctcctcggtggtccagaa

SEQ ID NO: 2200977 - DNA, 25 bp, Homo sapien
tagttttcggctcgcgggctcctgg

SEQ ID NO: 2200978 - DNA, 25 bp, Homo sapien
ttagttttcggctcgcgggctcctg

SEQ ID NO: 2200979 - DNA, 25 bp, Homo sapien
ttcggctcgcgggctcctggaagat

SEQ ID NO: 2200980 - DNA, 25 bp, Homo sapien
ttttcggctcgcgggctcctggaag

SEQ ID NO: 2200981 - DNA, 25 bp, Homo sapien
ggtcccgctcagggccggcggcctg

SEQ ID NO: 2200982 - DNA, 25 bp, Homo sapien
tcccgctcagggccggcggcctgtt

SEQ ID NO: 2200983 - DNA, 25 bp, Homo sapien
ccgctcagggccggcggcctgttca

SEQ ID NO: 2200984 - DNA, 25 bp, Homo sapien
cgctcagggccggcggcctgttcac

SEQ ID NO: 2200985 - DNA, 25 bp, Homo sapien
gccccttcagcggcgagagctgcag

SEQ ID NO: 2200986 - DNA, 25 bp, Homo sapien
cccttcagcggcgagagctgcagct

SEQ ID NO: 2200987 - DNA, 25 bp, Homo sapien
ccccttcagcggcgagagctgcagc

SEQ ID NO: 2200988 - DNA, 25 bp, Homo sapien
ctgcgggtccgtaatgtgcagcagc

SEQ ID NO: 2200989 - DNA, 25 bp, Homo sapien
gggtccgtaatgtgcagcagcggga

SEQ ID NO: 2200990 - DNA, 25 bp, Homo sapien
agcagcgggacgcggacggagagca

SEQ ID NO: 2200991 - DNA, 25 bp, Homo sapien
gcagcgggacgcggacggagagcat

SEQ ID NO: 2200992 - DNA, 25 bp, Homo sapien
tctttggcccatgcaaagtaaacat

SEQ ID NO: 2200993 - DNA, 25 bp, Homo sapien
ctttggcccatgcaaagtaaacatc

SEQ ID NO: 2200994 - DNA, 25 bp, Homo sapien
taggctttatcttttgccccagaag

SEQ ID NO: 2200995 - DNA, 25 bp, Homo sapien
gtttatcaaaggctacccatgatgg

SEQ ID NO: 2200996 - DNA, 25 bp, Homo sapien
tttaggatatatgctacatttaggc

SEQ ID NO: 2200997 - DNA, 25 bp, Homo sapien
cctattccaggcttttcatcactca

SEQ ID NO: 2200998 - DNA, 25 bp, Homo sapien
cattgttgcaaaagccccaatgttg

SEQ ID NO: 2200999 - DNA, 25 bp, Homo sapien
caacatcataacattgttgcaaaag

SEQ ID NO: 2201000 - DNA, 25 bp, Homo sapien
caaaagccccaatgttgggatttgt

SEQ ID NO: 2201001 - DNA, 25 bp, Homo sapien
tcataacattgttgcaaaagcccca

SEQ ID NO: 2201002 - DNA, 25 bp, Homo sapien
actgatgtgctggagtagtagtgtt

SEQ ID NO: 2201003 - DNA, 25 bp, Homo sapien
taggagtgatgtactgcagctgagc

SEQ ID NO: 2201004 - DNA, 25 bp, Homo sapien
ggcaaggatgttccaagcagggtta

SEQ ID NO: 2201005 - DNA, 25 bp, Homo sapien
tgaggttctgtggataactggatac

SEQ ID NO: 2201006 - DNA, 25 bp, Homo sapien
aaaacttgagtggtagattcactgg

SEQ ID NO: 2201007 - DNA, 25 bp, Homo sapien
cccataaaacttgagtggtagattc

SEQ ID NO: 2201008 - DNA, 25 bp, Homo sapien
tgagtggtagattcactggttgcca

SEQ ID NO: 2201009 - DNA, 25 bp, Homo sapien
gaagcccataaaacttgagtggtag

SEQ ID NO: 2201010 - DNA, 25 bp, Homo sapien
catgtttcacgaaacagtagtctgc

SEQ ID NO: 2201011 - DNA, 25 bp, Homo sapien
ccatcctctatcttcatgtttcacg

SEQ ID NO: 2201012 - DNA, 25 bp, Homo sapien
tatcatacaacctcccctgttaggc

SEQ ID NO: 2201013 - DNA, 25 bp, Homo sapien
cactcctgcactctggattatcata

SEQ ID NO: 2201014 - DNA, 25 bp, Homo sapien
ttgcaggacaccacattattctggt

SEQ ID NO: 2201015 - DNA, 25 bp, Homo sapien
cttgcaggacaccacattattctgg

SEQ ID NO: 2201016 - DNA, 25 bp, Homo sapien
tgcaggacaccacattattctggtg

SEQ ID NO: 2201017 - DNA, 25 bp, Homo sapien
gcaggacaccacattattctggtgt

SEQ ID NO: 2201018 - DNA, 25 bp, Homo sapien
gatttgccattatagcctcttaaga

SEQ ID NO: 2201019 - DNA, 25 bp, Homo sapien
gatggcatggcaacctgcctttgcc

SEQ ID NO: 2201020 - DNA, 25 bp, Homo sapien
gcctcttaagatggcatggcaacct

SEQ ID NO: 2201021 - DNA, 25 bp, Homo sapien
cattatagcctcttaagatggcatg

SEQ ID NO: 2201022 - DNA, 25 bp, Homo sapien
ttcagctggtcaagctgttcacttt

SEQ ID NO: 2201023 - DNA, 25 bp, Homo sapien
cagtattcagctggtcaagctgttc

SEQ ID NO: 2201024 - DNA, 25 bp, Homo sapien
gctggtcaagctgttcactttgcca

SEQ ID NO: 2201025 - DNA, 25 bp, Homo sapien
gtcaagctgttcactttgccacact

SEQ ID NO: 2201026 - DNA, 25 bp, Homo sapien
gttgcggttgaagctgttgcccggc

SEQ ID NO: 2201027 - DNA, 25 bp, Homo sapien
tgcggttgaagctgttgcccggcag

SEQ ID NO: 2201028 - DNA, 25 bp, Homo sapien
ggttgaagctgttgcccggcagcag

SEQ ID NO: 2201029 - DNA, 25 bp, Homo sapien
cggttgaagctgttgcccggcagca

SEQ ID NO: 2201030 - DNA, 25 bp, Homo sapien
gtgtccgaaaatccagggtcccaga

SEQ ID NO: 2201031 - DNA, 25 bp, Homo sapien
ggcgctcagtgtccgaaaatccagg

SEQ ID NO: 2201032 - DNA, 25 bp, Homo sapien
tcagtgtccgaaaatccagggtccc

SEQ ID NO: 2201033 - DNA, 25 bp, Homo sapien
gctcagtgtccgaaaatccagggtc

SEQ ID NO: 2201034 - DNA, 25 bp, Homo sapien
gagagagtttggttgaccacaatcc

SEQ ID NO: 2201035 - DNA, 25 bp, Homo sapien
tcctctcttgaggaccattgctatg

SEQ ID NO: 2201036 - DNA, 25 bp, Homo sapien
actggagagagtttggttgaccaca

SEQ ID NO: 2201037 - DNA, 25 bp, Homo sapien
tgaggaccattgctatggcttttct

SEQ ID NO: 2201038 - DNA, 25 bp, Homo sapien
gaaggcatttaaatcctgctgcaaa

SEQ ID NO: 2201039 - DNA, 25 bp, Homo sapien
taaaaacaattgtagccaccttggc

SEQ ID NO: 2201040 - DNA, 25 bp, Homo sapien
ctggttgaaggcatttaaatcctgc

SEQ ID NO: 2201041 - DNA, 25 bp, Homo sapien
aggcctgcagtctctttaagataaa

SEQ ID NO: 2201042 - DNA, 25 bp, Homo sapien
ctcataataggctttaatgattcct

SEQ ID NO: 2201043 - DNA, 25 bp, Homo sapien
tcataataggctttaatgattcctt

SEQ ID NO: 2201044 - DNA, 25 bp, Homo sapien
cagttctctcatggggtccttggcc

SEQ ID NO: 2201045 - DNA, 25 bp, Homo sapien
tctcatggggtccttggcccctttc

SEQ ID NO: 2201046 - DNA, 25 bp, Homo sapien
actgtagctgggcactcagttctct

SEQ ID NO: 2201047 - DNA, 25 bp, Homo sapien
actcagttctctcatggggtccttg

SEQ ID NO: 2201048 - DNA, 25 bp, Homo sapien
cttgttgttgaccatttctgttttg

SEQ ID NO: 2201049 - DNA, 25 bp, Homo sapien
tgatttttcaaatgtccaggtaggt

SEQ ID NO: 2201050 - DNA, 25 bp, Homo sapien
ttctgttttgggtgtgatttttcaa

SEQ ID NO: 2201051 - DNA, 25 bp, Homo sapien
ttaaggtggttcttgttgttgacca

SEQ ID NO: 2201052 - DNA, 25 bp, Homo sapien
attaagttcaaataattggctgata

SEQ ID NO: 2201053 - DNA, 25 bp, Homo sapien
ttaagttcaaataattggctgataa

SEQ ID NO: 2201054 - DNA, 25 bp, Homo sapien
gagcaccaggttcacttgctttctg

SEQ ID NO: 2201055 - DNA, 25 bp, Homo sapien
agagcaccaggttcacttgctttct

SEQ ID NO: 2201056 - DNA, 25 bp, Homo sapien
ttatggttgtaattcttgaccacac

SEQ ID NO: 2201057 - DNA, 25 bp, Homo sapien
atggttgtaattcttgaccacactc

SEQ ID NO: 2201058 - DNA, 25 bp, Homo sapien
tatggttgtaattcttgaccacact

SEQ ID NO: 2201059 - DNA, 25 bp, Homo sapien
gcatgggcaccaatcatagtacaat

SEQ ID NO: 2201060 - DNA, 25 bp, Homo sapien
gtacaataatgaactgttgattcct

SEQ ID NO: 2201061 - DNA, 25 bp, Homo sapien
gtagggtggcatgggcaccaatcat

SEQ ID NO: 2201062 - DNA, 25 bp, Homo sapien
gggcaccaatcatagtacaataatg

SEQ ID NO: 2201063 - DNA, 25 bp, Homo sapien
gggcaccaatcatagtacaataatg

SEQ ID NO: 2201064 - DNA, 25 bp, Homo sapien
gcatgggcaccaatcatagtacaat

SEQ ID NO: 2201065 - DNA, 25 bp, Homo sapien
gtacaataatgaactgttgattcct

SEQ ID NO: 2201066 - DNA, 25 bp, Homo sapien
gtagggtggcatgggcaccaatcat

SEQ ID NO: 2201067 - DNA, 25 bp, Homo sapien
taaggttcatgggacggtaatagtc

SEQ ID NO: 2201068 - DNA, 25 bp, Homo sapien
catgggacggtaatagtcgttattt

SEQ ID NO: 2201069 - DNA, 25 bp, Homo sapien
ttgttttctgtaaggttcatgggac

SEQ ID NO: 2201070 - DNA, 25 bp, Homo sapien
taatagtcgttattttctaccctca

SEQ ID NO: 2201071 - DNA, 25 bp, Homo sapien
aaggaagagccttctgtgatatgga

SEQ ID NO: 2201072 - DNA, 25 bp, Homo sapien
ttaaccttccgctctgcttctgaca

SEQ ID NO: 2201073 - DNA, 25 bp, Homo sapien
tgcttctgacagtaacttgcttcag

SEQ ID NO: 2201074 - DNA, 25 bp, Homo sapien
gagccttctgtgatatggatgatga

SEQ ID NO: 2201075 - DNA, 25 bp, Homo sapien
tgaatgccaggcatagacacatgca

SEQ ID NO: 2201076 - DNA, 25 bp, Homo sapien
agagcagatggccacgcaccaggat

SEQ ID NO: 2201077 - DNA, 25 bp, Homo sapien
gagaaactcgaagaagccactggca

SEQ ID NO: 2201078 - DNA, 25 bp, Homo sapien
aactgtcgagtgcatctgaaggagc

SEQ ID NO: 2201079 - DNA, 25 bp, Homo sapien
aataatttattgagagcctcctctc

SEQ ID NO: 2201080 - DNA, 25 bp, Homo sapien
ctctccctgcccttgcagtctctag

SEQ ID NO: 2201081 - DNA, 25 bp, Homo sapien
aatttattgagagcctcctctccct

SEQ ID NO: 2201082 - DNA, 25 bp, Homo sapien
tctccctgcccttgcagtctctagt

SEQ ID NO: 2201083 - DNA, 25 bp, Homo sapien
cttatagattttgcgcaccagcccc

SEQ ID NO: 2201084 - DNA, 25 bp, Homo sapien
tcctcagatagtgccttaacctggg

SEQ ID NO: 2201085 - DNA, 25 bp, Homo sapien
attcagctcctcagatagtgcctta

SEQ ID NO: 2201086 - DNA, 25 bp, Homo sapien
tttttctgcttatagattttgcgca

SEQ ID NO: 2201087 - DNA, 25 bp, Homo sapien
tctggagtggcctgttgcagacact

SEQ ID NO: 2201088 - DNA, 25 bp, Homo sapien
ttctggagtggcctgttgcagacac

SEQ ID NO: 2201089 - DNA, 25 bp, Homo sapien
ctattctggagtggcctgttgcaga

SEQ ID NO: 2201090 - DNA, 25 bp, Homo sapien
tggagtggcctgttgcagacactga

SEQ ID NO: 2201091 - DNA, 25 bp, Homo sapien
gcaggatcttcttgccattagcatg

SEQ ID NO: 2201092 - DNA, 25 bp, Homo sapien
cctggatgtcagtgccaactttgct

SEQ ID NO: 2201093 - DNA, 25 bp, Homo sapien
atctgaaagaactctcccatctcca

SEQ ID NO: 2201094 - DNA, 25 bp, Homo sapien
cagtgccaactttgctggtcacact

SEQ ID NO: 2201095 - DNA, 25 bp, Homo sapien
ttgtcgccatcaattcctgctgtac

SEQ ID NO: 2201096 - DNA, 25 bp, Homo sapien
cttgtcgccatcaattcctgctgta

SEQ ID NO: 2201097 - DNA, 25 bp, Homo sapien
aaggtaggagtagaaagctgccttg

SEQ ID NO: 2201098 - DNA, 25 bp, Homo sapien
tgcaggaagagctcgattaggtcca

SEQ ID NO: 2201099 - DNA, 25 bp, Homo sapien
gagctcgattaggtccaggtaatag

SEQ ID NO: 2201100 - DNA, 25 bp, Homo sapien
tcgattaggtccaggtaatagggct

SEQ ID NO: 2201101 - DNA, 25 bp, Homo sapien
gaagagctcgattaggtccaggtaa

SEQ ID NO: 2201102 - DNA, 25 bp, Homo sapien
atagagcttcagcaggtggtagata

SEQ ID NO: 2201103 - DNA, 25 bp, Homo sapien
gcaatagagcttcagcaggtggtag

SEQ ID NO: 2201104 - DNA, 25 bp, Homo sapien
gcttcagcaggtggtagatacatac

SEQ ID NO: 2201105 - DNA, 25 bp, Homo sapien
gggcaatagagcttcagcaggtggt

SEQ ID NO: 2201106 - DNA, 25 bp, Homo sapien
ttccagaagcatagcatcattgatg

SEQ ID NO: 2201107 - DNA, 25 bp, Homo sapien
ttgatggcatccaaacccatgcccg

SEQ ID NO: 2201108 - DNA, 25 bp, Homo sapien
tccagaagcatagcatcattgatgg

SEQ ID NO: 2201109 - DNA, 25 bp, Homo sapien
caaacccatgcccggcttctgatac

SEQ ID NO: 2201110 - DNA, 25 bp, Homo sapien
cggcgggagacggatgaatccatga

SEQ ID NO: 2201111 - DNA, 25 bp, Homo sapien
ggcgggagacggatgaatccatgat

SEQ ID NO: 2201112 - DNA, 25 bp, Homo sapien
catcaaatcctggtgatacttgcct

SEQ ID NO: 2201113 - DNA, 25 bp, Homo sapien
atcaaatcctggtgatacttgcctc

SEQ ID NO: 2201114 - DNA, 25 bp, Homo sapien
ggaggagcaaagggctctgttcctg

SEQ ID NO: 2201115 - DNA, 25 bp, Homo sapien
gggaggagcaaagggctctgttcct

SEQ ID NO: 2201116 - DNA, 25 bp, Homo sapien
gagggaggagcaaagggctctgttc

SEQ ID NO: 2201117 - DNA, 25 bp, Homo sapien
ctgagggaggagcaaagggctctgt

SEQ ID NO: 2201118 - DNA, 25 bp, Homo sapien
catgtgtccaagacgttggctgtcc

SEQ ID NO: 2201119 - DNA, 25 bp, Homo sapien
tgtgtccaagacgttggctgtcccc

SEQ ID NO: 2201120 - DNA, 25 bp, Homo sapien
tcatgtgtccaagacgttggctgtc

SEQ ID NO: 2201121 - DNA, 25 bp, Homo sapien
tgtccaagacgttggctgtcccctc

SEQ ID NO: 2201122 - DNA, 25 bp, Homo sapien
tgaacagaactgctagcagtaaaag

SEQ ID NO: 2201123 - DNA, 25 bp, Homo sapien
caaaaccggagaagtagaactggca

SEQ ID NO: 2201124 - DNA, 25 bp, Homo sapien
aactgctagcagtaaaagtctaaga

SEQ ID NO: 2201125 - DNA, 25 bp, Homo sapien
gaaactggccctacggagggtgtca

SEQ ID NO: 2201126 - DNA, 25 bp, Homo sapien
catttgccactaagtcatatgccaa

SEQ ID NO: 2201127 - DNA, 25 bp, Homo sapien
gaaaacagcatagatacgagacaga

SEQ ID NO: 2201128 - DNA, 25 bp, Homo sapien
agacagaacaagaagcactaacaga

SEQ ID NO: 2201129 - DNA, 25 bp, Homo sapien
tctattcaattgaaagctcaagggc

SEQ ID NO: 2201130 - DNA, 25 bp, Homo sapien
cacactcatgaatatccgtcacttt

SEQ ID NO: 2201131 - DNA, 25 bp, Homo sapien
ggctttacctaatgtgacctgatca

SEQ ID NO: 2201132 - DNA, 25 bp, Homo sapien
ggcacacagaagtgcggccaaggct

SEQ ID NO: 2201133 - DNA, 25 bp, Homo sapien
actgtatcagataagagcatcgtgc

SEQ ID NO: 2201134 - DNA, 25 bp, Homo sapien
taacgaaagcatgcagcctgtaacc

SEQ ID NO: 2201135 - DNA, 25 bp, Homo sapien
taaggagtctcacgataacgaaagc

SEQ ID NO: 2201136 - DNA, 25 bp, Homo sapien
ccctgagaaataagtgaactggcct

SEQ ID NO: 2201137 - DNA, 25 bp, Homo sapien
gaactggcctagtgtttaaccaaca

SEQ ID NO: 2201138 - DNA, 25 bp, Homo sapien
gagagactgccttattgctgccact

SEQ ID NO: 2201139 - DNA, 25 bp, Homo sapien
tacagcagatactagtttgccaagc

SEQ ID NO: 2201140 - DNA, 25 bp, Homo sapien
tatcatattacatcagcagagtctg

SEQ ID NO: 2201141 - DNA, 25 bp, Homo sapien
gatgaaagccacgttttgctcagga

SEQ ID NO: 2201142 - DNA, 25 bp, Homo sapien
taagatgcaagtccgagcaaaaagc

SEQ ID NO: 2201143 - DNA, 25 bp, Homo sapien
ttaagatgcaagtccgagcaaaaag

SEQ ID NO: 2201144 - DNA, 25 bp, Homo sapien
ggtgctgctttgttcgctcgtttct

SEQ ID NO: 2201145 - DNA, 25 bp, Homo sapien
gtgctgctttgttcgctcgtttctt

SEQ ID NO: 2201146 - DNA, 25 bp, Homo sapien
agccaccacctactgcagttgctgc

SEQ ID NO: 2201147 - DNA, 25 bp, Homo sapien
gccaccacctactgcagttgctgca

SEQ ID NO: 2201148 - DNA, 25 bp, Homo sapien
aagccaccacctactgcagttgctg

SEQ ID NO: 2201149 - DNA, 25 bp, Homo sapien
aaagccaccacctactgcagttgct

SEQ ID NO: 2201150 - DNA, 25 bp, Homo sapien
tgagtatttttctaccataggtccc

SEQ ID NO: 2201151 - DNA, 25 bp, Homo sapien
actgagtatttttctaccataggtc

SEQ ID NO: 2201152 - DNA, 25 bp, Homo sapien
cagccagtaacgccacccattacaa

SEQ ID NO: 2201153 - DNA, 25 bp, Homo sapien
ccagtaacgccacccattacaatct

SEQ ID NO: 2201154 - DNA, 25 bp, Homo sapien
tgcccacatagaaactactgacttt

SEQ ID NO: 2201155 - DNA, 25 bp, Homo sapien
taaaaatctgttacaactcattagt

SEQ ID NO: 2201156 - DNA, 25 bp, Homo sapien
tcaattcttgagaccagggcctcaa

SEQ ID NO: 2201157 - DNA, 25 bp, Homo sapien
tggcctacagctaaaaatgcccaca

SEQ ID NO: 2201158 - DNA, 25 bp, Homo sapien
tactccaggcgcgtagtcctgtctc

SEQ ID NO: 2201159 - DNA, 25 bp, Homo sapien
tggaagtctatggtctcttttttcc

SEQ ID NO: 2201160 - DNA, 25 bp, Homo sapien
ttaagggccgctctaggccaggatg

SEQ ID NO: 2201161 - DNA, 25 bp, Homo sapien
agcggccaattctggagtggtcccc

SEQ ID NO: 2201162 - DNA, 25 bp, Homo sapien
gacctgaggtgtgatccacccttct

SEQ ID NO: 2201163 - DNA, 25 bp, Homo sapien
cgcacccagccaatcagtgatcttt

SEQ ID NO: 2201164 - DNA, 25 bp, Homo sapien
tgttttggggcaccaggaacagctc

SEQ ID NO: 2201165 - DNA, 25 bp, Homo sapien
gaacagctcccatagaagagaacaa

SEQ ID NO: 2201166 - DNA, 25 bp, Homo sapien
ccaaggtgaccagacaacatttgcc

SEQ ID NO: 2201167 - DNA, 25 bp, Homo sapien
tcctctgtcaatgtcactctcttca

SEQ ID NO: 2201168 - DNA, 25 bp, Homo sapien
aggccccagaggttgctccccagga

SEQ ID NO: 2201169 - DNA, 25 bp, Homo sapien
cagtcaggtatgaccaccaaggtga

SEQ ID NO: 2201170 - DNA, 25 bp, Homo sapien
caccaacgtccccaagaaagtatga

SEQ ID NO: 2201171 - DNA, 25 bp, Homo sapien
gagcttggccgcaagactggcactt

SEQ ID NO: 2201172 - DNA, 25 bp, Homo sapien
cattatcaccaacgtccccaagaaa

SEQ ID NO: 2201173 - DNA, 25 bp, Homo sapien
gactgtgatgagcttggccgcaaga

SEQ ID NO: 2201174 - DNA, 25 bp, Homo sapien
cggccaactccttggactggtgctc

SEQ ID NO: 2201175 - DNA, 25 bp, Homo sapien
gagagcggccaactccttggactgg

SEQ ID NO: 2201176 - DNA, 25 bp, Homo sapien
ctagagagcggccaactccttggac

SEQ ID NO: 2201177 - DNA, 25 bp, Homo sapien
gagcggccaactccttggactggtg

SEQ ID NO: 2201178 - DNA, 25 bp, Homo sapien
ggacgacaggggggtcctgttctga

SEQ ID NO: 2201179 - DNA, 25 bp, Homo sapien
cgacaggggggtcctgttctgaaca

SEQ ID NO: 2201180 - DNA, 25 bp, Homo sapien
caggggggtcctgttctgaacacag

SEQ ID NO: 2201181 - DNA, 25 bp, Homo sapien
acaggggggtcctgttctgaacaca

SEQ ID NO: 2201182 - DNA, 25 bp, Homo sapien
tgggcctgggccgtaatctagatgc

SEQ ID NO: 2201183 - DNA, 25 bp, Homo sapien
ttccccattctaagagcggcaggtc

SEQ ID NO: 2201184 - DNA, 25 bp, Homo sapien
gaccaaaccccaatctgagatcagg

SEQ ID NO: 2201185 - DNA, 25 bp, Homo sapien
tggatctggacctaacctgagagca

SEQ ID NO: 2201186 - DNA, 25 bp, Homo sapien
tcaagaaaacccgacagagctctcg

SEQ ID NO: 2201187 - DNA, 25 bp, Homo sapien
taataggcaattcttgggctggtcc

SEQ ID NO: 2201188 - DNA, 25 bp, Homo sapien
gggctggtccgtacaattccttgaa

SEQ ID NO: 2201189 - DNA, 25 bp, Homo sapien
tctcgaactctgctgacttagtagt

SEQ ID NO: 2201190 - DNA, 25 bp, Homo sapien
gccgtgagtatactcagtcttcaga

SEQ ID NO: 2201191 - DNA, 25 bp, Homo sapien
catactgtttccctggaacccttga

SEQ ID NO: 2201192 - DNA, 25 bp, Homo sapien
aaagattaaatccaacatactgttt

SEQ ID NO: 2201193 - DNA, 25 bp, Homo sapien
gaacccttgaagttttgctcccatg

SEQ ID NO: 2201194 - DNA, 25 bp, Homo sapien
gggctgatcatttgcaagcctgtga

SEQ ID NO: 2201195 - DNA, 25 bp, Homo sapien
gctgatcatttgcaagcctgtgact

SEQ ID NO: 2201196 - DNA, 25 bp, Homo sapien
tgatcatttgcaagcctgtgactgt

SEQ ID NO: 2201197 - DNA, 25 bp, Homo sapien
agatgggctgatcatttgcaagcct

SEQ ID NO: 2201198 - DNA, 25 bp, Homo sapien
cataggcatgggtaagcaaaagggt

SEQ ID NO: 2201199 - DNA, 25 bp, Homo sapien
caatgcctgaatgtcacagaaggac

SEQ ID NO: 2201200 - DNA, 25 bp, Homo sapien
aagggtacagtcaatgcctgaatgt

SEQ ID NO: 2201201 - DNA, 25 bp, Homo sapien
attgccacgtgtatcccagcctgta

SEQ ID NO: 2201202 - DNA, 25 bp, Homo sapien
caccaggctatacatgttttcttgt

SEQ ID NO: 2201203 - DNA, 25 bp, Homo sapien
tagagctatttgacccaagccaagg

SEQ ID NO: 2201204 - DNA, 25 bp, Homo sapien
cttttacttgtcctgttggatatca

SEQ ID NO: 2201205 - DNA, 25 bp, Homo sapien
gaagttctcctagactattgaggta

SEQ ID NO: 2201206 - DNA, 25 bp, Homo sapien
tcttgaaacgtaacagggcactctg

SEQ ID NO: 2201207 - DNA, 25 bp, Homo sapien
gattttctccctgagcaaacagtga

SEQ ID NO: 2201208 - DNA, 25 bp, Homo sapien
tgcccatcgcactatccggagtgaa

SEQ ID NO: 2201209 - DNA, 25 bp, Homo sapien
caaacagtgacccttgaacggtgtt

SEQ ID NO: 2201210 - DNA, 25 bp, Homo sapien
actctcgtgggttataaactaaatg

SEQ ID NO: 2201211 - DNA, 25 bp, Homo sapien
ccactgttatttcacgagaaatgta

SEQ ID NO: 2201212 - DNA, 25 bp, Homo sapien
ctctcgtgggttataaactaaatgc

SEQ ID NO: 2201213 - DNA, 25 bp, Homo sapien
tttcacgagaaatgtactctcgtgg

SEQ ID NO: 2201214 - DNA, 25 bp, Homo sapien
tcaattggattcatggtccactcag

SEQ ID NO: 2201215 - DNA, 25 bp, Homo sapien
cactcatcaattggattcatggtcc

SEQ ID NO: 2201216 - DNA, 25 bp, Homo sapien
catcaattggattcatggtccactc

SEQ ID NO: 2201217 - DNA, 25 bp, Homo sapien
gtccactcatcaattggattcatgg

SEQ ID NO: 2201218 - DNA, 25 bp, Homo sapien
ttgaacttagttcgggccagcatag

SEQ ID NO: 2201219 - DNA, 25 bp, Homo sapien
atcaatgttgaacttagttcgggcc

SEQ ID NO: 2201220 - DNA, 25 bp, Homo sapien
aatgttgaacttagttcgggccagc

SEQ ID NO: 2201221 - DNA, 25 bp, Homo sapien
ccatttcaacgtgggccagttcacc

SEQ ID NO: 2201222 - DNA, 25 bp, Homo sapien
agccatcacattgctttactgctgc

SEQ ID NO: 2201223 - DNA, 25 bp, Homo sapien
cagccatcacattgctttactgctg

SEQ ID NO: 2201224 - DNA, 25 bp, Homo sapien
acagccatcacattgctttactgct

SEQ ID NO: 2201225 - DNA, 25 bp, Homo sapien
aatgactcatcccagagcatgctgc

SEQ ID NO: 2201226 - DNA, 25 bp, Homo sapien
tcttggcgcatgatccaaaatgact

SEQ ID NO: 2201227 - DNA, 25 bp, Homo sapien
tacacatcgtggagaatcttggcgc

SEQ ID NO: 2201228 - DNA, 25 bp, Homo sapien
cattgaattgcccacatgagaagct

SEQ ID NO: 2201229 - DNA, 25 bp, Homo sapien
cgccaccctccaatttaaatgtatt

SEQ ID NO: 2201230 - DNA, 25 bp, Homo sapien
gccaccctccaatttaaatgtatta

SEQ ID NO: 2201231 - DNA, 25 bp, Homo sapien
tcaacctcttgccttaactctcctt

SEQ ID NO: 2201232 - DNA, 25 bp, Homo sapien
agagcctgatccataggaagtttgg

SEQ ID NO: 2201233 - DNA, 25 bp, Homo sapien
cctttcaggacatcaaactctccag

SEQ ID NO: 2201234 - DNA, 25 bp, Homo sapien
gatccataggaagtttggtattcca

SEQ ID NO: 2201235 - DNA, 25 bp, Homo sapien
tgctctcttacaaccagccctgatg

SEQ ID NO: 2201236 - DNA, 25 bp, Homo sapien
aattagtcacaactgtccaccacag

SEQ ID NO: 2201237 - DNA, 25 bp, Homo sapien
taaaatagactcatgcggtaagtca

SEQ ID NO: 2201238 - DNA, 25 bp, Homo sapien
tgtacaaatggactatgacacagct

SEQ ID NO: 2201239 - DNA, 25 bp, Homo sapien
aatatatgtgtcacgtggcatctgg

SEQ ID NO: 2201240 - DNA, 25 bp, Homo sapien
gcatctgggccacaccactagtata

SEQ ID NO: 2201241 - DNA, 25 bp, Homo sapien
cagggagaggatgagatctttctgc

SEQ ID NO: 2201242 - DNA, 25 bp, Homo sapien
actagtatatctgtccactgcaggg

SEQ ID NO: 2201243 - DNA, 25 bp, Homo sapien
gaatcttgtccttatatgtctatca

SEQ ID NO: 2201244 - DNA, 25 bp, Homo sapien
tggttacaggtggaaaacctattga

SEQ ID NO: 2201245 - DNA, 25 bp, Homo sapien
ttcctatccctgttataagacatac

SEQ ID NO: 2201246 - DNA, 25 bp, Homo sapien
tgagaagagtagtcgaaaggcctat

SEQ ID NO: 2201247 - DNA, 25 bp, Homo sapien
tcagactaaagcctttcccctgcac

SEQ ID NO: 2201248 - DNA, 25 bp, Homo sapien
cattctgcagatcccgcttcacaat

SEQ ID NO: 2201249 - DNA, 25 bp, Homo sapien
ccagctgtgatgatttaattatgtc

SEQ ID NO: 2201250 - DNA, 25 bp, Homo sapien
tctctcaggtctgtccacaagcagc

SEQ ID NO: 2201251 - DNA, 25 bp, Homo sapien
ggcaatagaacccaacattctgcag

SEQ ID NO: 2201252 - DNA, 25 bp, Homo sapien
ttcttgtaagactgtaatgaactac

SEQ ID NO: 2201253 - DNA, 25 bp, Homo sapien
gaactactgataagacacagggtaa

SEQ ID NO: 2201254 - DNA, 25 bp, Homo sapien
tggccccaaagtgccgccaacagac

SEQ ID NO: 2201255 - DNA, 25 bp, Homo sapien
tgataagacacagggtaaacacagc

SEQ ID NO: 2201256 - DNA, 25 bp, Homo sapien
ccccttcactttcggcgcgggtgag

SEQ ID NO: 2201257 - DNA, 25 bp, Homo sapien
gcgggcgactcttcattccctccgg

SEQ ID NO: 2201258 - DNA, 25 bp, Homo sapien
gggagccatggtcggcaagccaggc

SEQ ID NO: 2201259 - DNA, 25 bp, Homo sapien
gcgcaggtctggcctagggcggcac

SEQ ID NO: 2201260 - DNA, 25 bp, Homo sapien
gccctcctcgcggaggccattattt

SEQ ID NO: 2201261 - DNA, 25 bp, Homo sapien
cttcggagggcagaggtcgagggcc

SEQ ID NO: 2201262 - DNA, 25 bp, Homo sapien
agcagtgccaaaagtctgagccttc

SEQ ID NO: 2201263 - DNA, 25 bp, Homo sapien
tcccggctacgcgacctgtaccagg

SEQ ID NO: 2201264 - DNA, 25 bp, Homo sapien
gtcactcgcccggtcggctccggac

SEQ ID NO: 2201265 - DNA, 25 bp, Homo sapien
ggccgccgtcactcgcccggtcggc

SEQ ID NO: 2201266 - DNA, 25 bp, Homo sapien
tggacaggtacgggccgccgtcact

SEQ ID NO: 2201267 - DNA, 25 bp, Homo sapien
ccgtcactcgcccggtcggctccgg

SEQ ID NO: 2201268 - DNA, 25 bp, Homo sapien
gtcggtggcgttccctgagcgttaa

SEQ ID NO: 2201269 - DNA, 25 bp, Homo sapien
gggcacctcggtttggcgctcttcg

SEQ ID NO: 2201270 - DNA, 25 bp, Homo sapien
cacagccgcctctttgggttcgtga

SEQ ID NO: 2201271 - DNA, 25 bp, Homo sapien
acgagtaaactgtgtctgtctccac

SEQ ID NO: 2201272 - DNA, 25 bp, Homo sapien
tggaattgaataactcccagaattc

SEQ ID NO: 2201273 - DNA, 25 bp, Homo sapien
ggaattgaataactcccagaattcc

SEQ ID NO: 2201274 - DNA, 25 bp, Homo sapien
atggaattgaataactcccagaatt

SEQ ID NO: 2201275 - DNA, 25 bp, Homo sapien
gaattgaataactcccagaattccc

SEQ ID NO: 2201276 - DNA, 25 bp, Homo sapien
gactaacacaggaccatctttggga

SEQ ID NO: 2201277 - DNA, 25 bp, Homo sapien
taatgtacactatgtgcaagccttc

SEQ ID NO: 2201278 - DNA, 25 bp, Homo sapien
taacaattcacaagttagaatggct

SEQ ID NO: 2201279 - DNA, 25 bp, Homo sapien
tatttcttgcccgtgttgaacttaa

SEQ ID NO: 2201280 - DNA, 25 bp, Homo sapien
gatggctttgtgacagtcactgcgc

SEQ ID NO: 2201281 - DNA, 25 bp, Homo sapien
ttgggacctgattaagaactgtaac

SEQ ID NO: 2201282 - DNA, 25 bp, Homo sapien
tggcacaggctgatacttgggacct

SEQ ID NO: 2201283 - DNA, 25 bp, Homo sapien
tagagatgtacccaattaggtccta

SEQ ID NO: 2201284 - DNA, 25 bp, Homo sapien
ccgccactacgcacatctaatattt

SEQ ID NO: 2201285 - DNA, 25 bp, Homo sapien
gcccgccactacgcacatctaatat

SEQ ID NO: 2201286 - DNA, 25 bp, Homo sapien
cgccactacgcacatctaatatttg

SEQ ID NO: 2201287 - DNA, 25 bp, Homo sapien
ccactacgcacatctaatatttgta

SEQ ID NO: 2201288 - DNA, 25 bp, Homo sapien
gttttatatcaggtgtgaggttgaa

SEQ ID NO: 2201289 - DNA, 25 bp, Homo sapien
tagttgcgtatatatttgtaggggt

SEQ ID NO: 2201290 - DNA, 25 bp, Homo sapien
attcatgttttatatcaggtgtgag

SEQ ID NO: 2201291 - DNA, 25 bp, Homo sapien
tgttcaactgctccaccattatttg

SEQ ID NO: 2201292 - DNA, 25 bp, Homo sapien
ccatggagtatttagtagtgtgtta

SEQ ID NO: 2201293 - DNA, 25 bp, Homo sapien
acaatttggtgctataaatttacat

SEQ ID NO: 2201294 - DNA, 25 bp, Homo sapien
aatttacatttcagcactactttag

SEQ ID NO: 2201295 - DNA, 25 bp, Homo sapien
tctttgatccatggagtatttagta

SEQ ID NO: 2201296 - DNA, 25 bp, Homo sapien
gggtgcaggttcaggttcttgctgg

SEQ ID NO: 2201297 - DNA, 25 bp, Homo sapien
ccttgttcagtcttgttgatggctg

SEQ ID NO: 2201298 - DNA, 25 bp, Homo sapien
ttgctgggtcctgttgacaccaggc

SEQ ID NO: 2201299 - DNA, 25 bp, Homo sapien
atctccttgttcagtcttgttgatg

SEQ ID NO: 2201300 - DNA, 25 bp, Homo sapien
tctccccggattaagctatcttcct

SEQ ID NO: 2201301 - DNA, 25 bp, Homo sapien
tagaggtagaaccaattcctctttg

SEQ ID NO: 2201302 - DNA, 25 bp, Homo sapien
aggtagaaccaattcctctttgtgc

SEQ ID NO: 2201303 - DNA, 25 bp, Homo sapien
cagccacactctccccggattaagc

SEQ ID NO: 2201304 - DNA, 25 bp, Homo sapien
tctagggttgctgtcttttaattcc

SEQ ID NO: 2201305 - DNA, 25 bp, Homo sapien
gatgttggaagggaacagagataac

SEQ ID NO: 2201306 - DNA, 25 bp, Homo sapien
ttctagggttgctgtcttttaattc

SEQ ID NO: 2201307 - DNA, 25 bp, Homo sapien
ttggaagggaacagagataactcca

SEQ ID NO: 2201308 - DNA, 25 bp, Homo sapien
tgacacggtctgtctatatactcac

SEQ ID NO: 2201309 - DNA, 25 bp, Homo sapien
tatttctgtgatgacacggtctgtc

SEQ ID NO: 2201310 - DNA, 25 bp, Homo sapien
ttttaatttaagtagagttgcgctc

SEQ ID NO: 2201311 - DNA, 25 bp, Homo sapien
ttgtctttcctgcatgattgctatt

SEQ ID NO: 2201312 - DNA, 25 bp, Homo sapien
tcttaaaatgttgagttttgaatgt

SEQ ID NO: 2201313 - DNA, 25 bp, Homo sapien
aaagtactgggcctcattgtgattt

SEQ ID NO: 2201314 - DNA, 25 bp, Homo sapien
tgaagttggacaccttttcttgtgc

SEQ ID NO: 2201315 - DNA, 25 bp, Homo sapien
ctctaatagtggatgaagttggaca

SEQ ID NO: 2201316 - DNA, 25 bp, Homo sapien
tcctggtacacactcctattgttcg

SEQ ID NO: 2201317 - DNA, 25 bp, Homo sapien
tacgttcaatattccggccgcatgc

SEQ ID NO: 2201318 - DNA, 25 bp, Homo sapien
tgttttttacctcaagacattgtaa

SEQ ID NO: 2201319 - DNA, 25 bp, Homo sapien
tatgaaatacagtttgactaatgct

SEQ ID NO: 2201320 - DNA, 25 bp, Homo sapien
cctaataagttttgaggcagtttag

SEQ ID NO: 2201321 - DNA, 25 bp, Homo sapien
aagttttgaggcagtttagaatagt

SEQ ID NO: 2201322 - DNA, 25 bp, Homo sapien
taagttttgaggcagtttagaatag

SEQ ID NO: 2201323 - DNA, 25 bp, Homo sapien
ttctacctaataagttttgaggcag

SEQ ID NO: 2201324 - DNA, 25 bp, Homo sapien
taatgtatggtagtgctagggcacc

SEQ ID NO: 2201325 - DNA, 25 bp, Homo sapien
gtggcatgctttgttcatgaactaa

SEQ ID NO: 2201326 - DNA, 25 bp, Homo sapien
gattttcctggctgtcgttggtggc

SEQ ID NO: 2201327 - DNA, 25 bp, Homo sapien
ccccactgttcttgcttctaggatt

SEQ ID NO: 2201328 - DNA, 25 bp, Homo sapien
taaactgttgtataacacttcctgt

SEQ ID NO: 2201329 - DNA, 25 bp, Homo sapien
ggtgttctgacaataccattagact

SEQ ID NO: 2201330 - DNA, 25 bp, Homo sapien
cattttgagataagcagtggtgttc

SEQ ID NO: 2201331 - DNA, 25 bp, Homo sapien
ccattagacttctacttggattttc

SEQ ID NO: 2201332 - DNA, 25 bp, Homo sapien
tattgacggtgcctgaaacaagcag

SEQ ID NO: 2201333 - DNA, 25 bp, Homo sapien
caatgtgggtactggaacctgtgac

SEQ ID NO: 2201334 - DNA, 25 bp, Homo sapien
tggagagacacctaacagcactgcc

SEQ ID NO: 2201335 - DNA, 25 bp, Homo sapien
actgccagtgtcgagggacttccta

SEQ ID NO: 2201336 - DNA, 25 bp, Homo sapien
gaagaatcaaaggatcaggcagcat

SEQ ID NO: 2201337 - DNA, 25 bp, Homo sapien
gaggacatatagattcttactggcc

SEQ ID NO: 2201338 - DNA, 25 bp, Homo sapien
catattctgctagtctaggaagggc

SEQ ID NO: 2201339 - DNA, 25 bp, Homo sapien
caatgggcagtggagagacatgaca

SEQ ID NO: 2201340 - DNA, 25 bp, Homo sapien
ctcattttgggatacactgctttat

SEQ ID NO: 2201341 - DNA, 25 bp, Homo sapien
caaaagttgtgtggccaaggtaaca

SEQ ID NO: 2201342 - DNA, 25 bp, Homo sapien
caaattatagcgagtaatgtactac

SEQ ID NO: 2201343 - DNA, 25 bp, Homo sapien
ggatcttaggtaccatactctcgat

SEQ ID NO: 2201344 - DNA, 25 bp, Homo sapien
tctccatggcatggggagtaatcgg

SEQ ID NO: 2201345 - DNA, 25 bp, Homo sapien
gatcccttcttgagtgccataggac

SEQ ID NO: 2201346 - DNA, 25 bp, Homo sapien
tgatcccttcttgagtgccatagga

SEQ ID NO: 2201347 - DNA, 25 bp, Homo sapien
taatgatcccttcttgagtgccata

SEQ ID NO: 2201348 - DNA, 25 bp, Homo sapien
aaccatatcacagcttacactgtgg

SEQ ID NO: 2201349 - DNA, 25 bp, Homo sapien
ttctgcaggtggtacaggaagtgtg

SEQ ID NO: 2201350 - DNA, 25 bp, Homo sapien
ttgagtgagctcagcgagaactcac

SEQ ID NO: 2201351 - DNA, 25 bp, Homo sapien
tcacatggtgagagcgggagtgaga

SEQ ID NO: 2201352 - DNA, 25 bp, Homo sapien
gcatcaccaagggttacatgatagt

SEQ ID NO: 2201353 - DNA, 25 bp, Homo sapien
catttgctccgttctgggactcgga

SEQ ID NO: 2201354 - DNA, 25 bp, Homo sapien
ctttctgctgatacaggtgggtccc

SEQ ID NO: 2201355 - DNA, 25 bp, Homo sapien
cctgtctggactcagcatcaccaag

SEQ ID NO: 2201356 - DNA, 25 bp, Homo sapien
ctcagaatttcaggcgactggtctg

SEQ ID NO: 2201357 - DNA, 25 bp, Homo sapien
tcagaatttcaggcgactggtctgg

SEQ ID NO: 2201358 - DNA, 25 bp, Homo sapien
aggtggacagatgtgtggtggaggc

SEQ ID NO: 2201359 - DNA, 25 bp, Homo sapien
gtggacagatgtgtggtggaggcat

SEQ ID NO: 2201360 - DNA, 25 bp, Homo sapien
ggtggacagatgtgtggtggaggca

SEQ ID NO: 2201361 - DNA, 25 bp, Homo sapien
gcaggtggacagatgtgtggtggag

SEQ ID NO: 2201362 - DNA, 25 bp, Homo sapien
ccagaattgggtagcacaggtgaaa

SEQ ID NO: 2201363 - DNA, 25 bp, Homo sapien
tcaaagacattgagtgagcgtccac

SEQ ID NO: 2201364 - DNA, 25 bp, Homo sapien
caaagtcgctcattgtgtggaggca

SEQ ID NO: 2201365 - DNA, 25 bp, Homo sapien
tgtttccgccaaccactgagtgcag

SEQ ID NO: 2201366 - DNA, 25 bp, Homo sapien
tctgggtaacgataggcaaatctgg

SEQ ID NO: 2201367 - DNA, 25 bp, Homo sapien
aatctggagtcacacgttctcaggg

SEQ ID NO: 2201368 - DNA, 25 bp, Homo sapien
tcagagatgctttcgcaggagggca

SEQ ID NO: 2201369 - DNA, 25 bp, Homo sapien
tcccctggagaagtcgaggcagcaa

SEQ ID NO: 2201370 - DNA, 25 bp, Homo sapien
ttcctgcttgtcgatgacgcccact

SEQ ID NO: 2201371 - DNA, 25 bp, Homo sapien
cactgcactggcatcccggatgaac

SEQ ID NO: 2201372 - DNA, 25 bp, Homo sapien
cggatgaacagatgcccgttgttaa

SEQ ID NO: 2201373 - DNA, 25 bp, Homo sapien
gatgcccgttgttaaagacgccgaa

SEQ ID NO: 2201374 - DNA, 25 bp, Homo sapien
gaagaaatagttcaaatcgttgctc

SEQ ID NO: 2201375 - DNA, 25 bp, Homo sapien
caaatcgttgctcctcaaagactcc

SEQ ID NO: 2201376 - DNA, 25 bp, Homo sapien
tggtaggcaaggtcggctgcctgat

SEQ ID NO: 2201377 - DNA, 25 bp, Homo sapien
cccaggagctggtaggcaaggtcgg

SEQ ID NO: 2201378 - DNA, 25 bp, Homo sapien
attcctgcagcggtctggtgctggt

SEQ ID NO: 2201379 - DNA, 25 bp, Homo sapien
gtgctgacgaggaatctgccacagg

SEQ ID NO: 2201380 - DNA, 25 bp, Homo sapien
tgctggtgctgacgaggaatctgcc

SEQ ID NO: 2201381 - DNA, 25 bp, Homo sapien
acttgggcagcggccatccctcagc

SEQ ID NO: 2201382 - DNA, 25 bp, Homo sapien
ctaaaagtgcaaagatcagccagga

SEQ ID NO: 2201383 - DNA, 25 bp, Homo sapien
ctaaaagtgcaaagatcggccagga

SEQ ID NO: 2201384 - DNA, 25 bp, Homo sapien
aaaataacagtggctgggtacagtg

SEQ ID NO: 2201385 - DNA, 25 bp, Homo sapien
tactaaaagtgcaaagatcggccag

SEQ ID NO: 2201386 - DNA, 25 bp, Homo sapien
ccccaacctagagggcttgccaggt

SEQ ID NO: 2201387 - DNA, 25 bp, Homo sapien
gagggcttgccaggtcgctgcatac

SEQ ID NO: 2201388 - DNA, 25 bp, Homo sapien
aaggagggagagagctcaatccagg

SEQ ID NO: 2201389 - DNA, 25 bp, Homo sapien
agattgacccccaacctagagggct

SEQ ID NO: 2201390 - DNA, 25 bp, Homo sapien
tgcgagttgacagccagcgtgtaga

SEQ ID NO: 2201391 - DNA, 25 bp, Homo sapien
gcctgaccacgcgatccaggagtcg

SEQ ID NO: 2201392 - DNA, 25 bp, Homo sapien
tctgcatagcgcctgaccacgcgat

SEQ ID NO: 2201393 - DNA, 25 bp, Homo sapien
agagcaggcgcagcttgtcacggtc

SEQ ID NO: 2201394 - DNA, 25 bp, Homo sapien
cgaagggcagcgcaggagcgggctg

SEQ ID NO: 2201395 - DNA, 25 bp, Homo sapien
tgcgaagggcagcgcaggagcgggc

SEQ ID NO: 2201396 - DNA, 25 bp, Homo sapien
ctgcgaagggcagcgcaggagcggg

SEQ ID NO: 2201397 - DNA, 25 bp, Homo sapien
gaagggcagcgcaggagcgggctgg

SEQ ID NO: 2201398 - DNA, 25 bp, Homo sapien
catccatcactagggcaagaacagg

SEQ ID NO: 2201399 - DNA, 25 bp, Homo sapien
ggtaatctgggtgggcctgatccaa

SEQ ID NO: 2201400 - DNA, 25 bp, Homo sapien
tatctcatagggaagacctgtccag

SEQ ID NO: 2201401 - DNA, 25 bp, Homo sapien
tgttgtcagaattgccctagctcct

SEQ ID NO: 2201402 - DNA, 25 bp, Homo sapien
tgaaaatgtggttggtataacacag

SEQ ID NO: 2201403 - DNA, 25 bp, Homo sapien
cagttgggagaaggctaacactttc

SEQ ID NO: 2201404 - DNA, 25 bp, Homo sapien
gatgcagaagcctctttaatgatta

SEQ ID NO: 2201405 - DNA, 25 bp, Homo sapien
agaaggctaacactttctggaagtt

SEQ ID NO: 2201406 - DNA, 25 bp, Homo sapien
gcatacacaggaactttagttctct

SEQ ID NO: 2201407 - DNA, 25 bp, Homo sapien
agcatacacaggaactttagttctc

SEQ ID NO: 2201408 - DNA, 25 bp, Homo sapien
gaaatatccataggaggtcagtggc

SEQ ID NO: 2201409 - DNA, 25 bp, Homo sapien
gctgtgcaaagctcctgttggccca

SEQ ID NO: 2201410 - DNA, 25 bp, Homo sapien
tcattcgtgcatccaagcttgcaga

SEQ ID NO: 2201411 - DNA, 25 bp, Homo sapien
acttgcctgagagcaggcgctgcca

SEQ ID NO: 2201412 - DNA, 25 bp, Homo sapien
gcaaaaccagggatagagggactac

SEQ ID NO: 2201413 - DNA, 25 bp, Homo sapien
tatccaagatagctagcaaaacgtg

SEQ ID NO: 2201414 - DNA, 25 bp, Homo sapien
tatatgttagcaacagagactagga

SEQ ID NO: 2201415 - DNA, 25 bp, Homo sapien
cagactacagttgaccatgggtgac

SEQ ID NO: 2201416 - DNA, 25 bp, Homo sapien
caggttgctttggacttgttaggcc

SEQ ID NO: 2201417 - DNA, 25 bp, Homo sapien
cctgggataatctctactgtactgt

SEQ ID NO: 2201418 - DNA, 25 bp, Homo sapien
gaatacccaggatgttgcagcacag

SEQ ID NO: 2201419 - DNA, 25 bp, Homo sapien
tatcaactataatgccgggtggtga

SEQ ID NO: 2201420 - DNA, 25 bp, Homo sapien
tcagctagcctggcggctggcaaag

SEQ ID NO: 2201421 - DNA, 25 bp, Homo sapien
agctagcctggcggctggcaaagag

SEQ ID NO: 2201422 - DNA, 25 bp, Homo sapien
cagctagcctggcggctggcaaaga

SEQ ID NO: 2201423 - DNA, 25 bp, Homo sapien
aaactgagatatgagatgggaatga

SEQ ID NO: 2201424 - DNA, 25 bp, Homo sapien
ctgagatatgagatgggaatgaatc

SEQ ID NO: 2201425 - DNA, 25 bp, Homo sapien
aactgagatatgagatgggaatgaa

SEQ ID NO: 2201426 - DNA, 25 bp, Homo sapien
tcacacttcagacagaccacagctt

SEQ ID NO: 2201427 - DNA, 25 bp, Homo sapien
agccatttctggaacctctctgttt

SEQ ID NO: 2201428 - DNA, 25 bp, Homo sapien
aggtccggcgtgaggcgcttggcct

SEQ ID NO: 2201429 - DNA, 25 bp, Homo sapien
acctctctgttttccgcaggacacg

SEQ ID NO: 2201430 - DNA, 25 bp, Homo sapien
ggacacgctcaatgctgcaggtctt

SEQ ID NO: 2201431 - DNA, 25 bp, Homo sapien
aaagcaaggaatcgggaggcagtcc

SEQ ID NO: 2201432 - DNA, 25 bp, Homo sapien
tgctgaccagtctaaagatctccac

SEQ ID NO: 2201433 - DNA, 25 bp, Homo sapien
tctcgttttgatatttgctgaccag

SEQ ID NO: 2201434 - DNA, 25 bp, Homo sapien
cacagggcgccagattttggaatca

SEQ ID NO: 2201435 - DNA, 25 bp, Homo sapien
agccctttgaggattggcctgtgag

SEQ ID NO: 2201436 - DNA, 25 bp, Homo sapien
atagccctttgaggattggcctgtg

SEQ ID NO: 2201437 - DNA, 25 bp, Homo sapien
aatagccctttgaggattggcctgt

SEQ ID NO: 2201438 - DNA, 25 bp, Homo sapien
tagccctttgaggattggcctgtga

SEQ ID NO: 2201439 - DNA, 25 bp, Homo sapien
tagggagaccactctacctccatac

SEQ ID NO: 2201440 - DNA, 25 bp, Homo sapien
actagggagaccactctacctccat

SEQ ID NO: 2201441 - DNA, 25 bp, Homo sapien
gctgggtcttggaaccacagaggtt

SEQ ID NO: 2201442 - DNA, 25 bp, Homo sapien
gagaccactctacctccatacccaa

SEQ ID NO: 2201443 - DNA, 25 bp, Homo sapien
aaattgtagctggttctgacttggg

SEQ ID NO: 2201444 - DNA, 25 bp, Homo sapien
caaggagaaagaacagctcagggct

SEQ ID NO: 2201445 - DNA, 25 bp, Homo sapien
tagatgtcccgatgcaggcattgca

SEQ ID NO: 2201446 - DNA, 25 bp, Homo sapien
tatcaagaccgaggaaagtccttcc

SEQ ID NO: 2201447 - DNA, 25 bp, Homo sapien
ctcgctggcagatttcgggaaggac

SEQ ID NO: 2201448 - DNA, 25 bp, Homo sapien
cttggccaaagaggaagctgtcaga

SEQ ID NO: 2201449 - DNA, 25 bp, Homo sapien
ggctgtccactcgaggctgtacaga

SEQ ID NO: 2201450 - DNA, 25 bp, Homo sapien
cagtggaggatgctgataacgctgt

SEQ ID NO: 2201451 - DNA, 25 bp, Homo sapien
catcaaggagtagtaatttttcaga

SEQ ID NO: 2201452 - DNA, 25 bp, Homo sapien
cagatttagaattgtctagagactc

SEQ ID NO: 2201453 - DNA, 25 bp, Homo sapien
tagagactcattgacttgaccgatg

SEQ ID NO: 2201454 - DNA, 25 bp, Homo sapien
taaaatgcaggtagatttcatcaag

SEQ ID NO: 2201455 - DNA, 25 bp, Homo sapien
atcctaagggccctcaggactttgg

SEQ ID NO: 2201456 - DNA, 25 bp, Homo sapien
cttgcccagaatttctatccccgtg

SEQ ID NO: 2201457 - DNA, 25 bp, Homo sapien
gcatcacagggcaagcacctaggaa

SEQ ID NO: 2201458 - DNA, 25 bp, Homo sapien
tgtccagtcgttgttcgggtgccca

SEQ ID NO: 2201459 - DNA, 25 bp, Homo sapien
ccctaaagctttcacgagggccagg

SEQ ID NO: 2201460 - DNA, 25 bp, Homo sapien
tgtgggaaagcggtatcccctatcc

SEQ ID NO: 2201461 - DNA, 25 bp, Homo sapien
ctaaagctttcacgagggccaggca

SEQ ID NO: 2201462 - DNA, 25 bp, Homo sapien
cctatcccctaaagctttcacgagg

SEQ ID NO: 2201463 - DNA, 25 bp, Homo sapien
tccaccctcacaagcaccttctcga

SEQ ID NO: 2201464 - DNA, 25 bp, Homo sapien
cccagggatactggcgttaaagagt

SEQ ID NO: 2201465 - DNA, 25 bp, Homo sapien
ccctcccttattcaatagcttagtt

SEQ ID NO: 2201466 - DNA, 25 bp, Homo sapien
acaagcaccttctcgatttttccct

SEQ ID NO: 2201467 - DNA, 25 bp, Homo sapien
taaggtggagaactgaggcaaaatg

SEQ ID NO: 2201468 - DNA, 25 bp, Homo sapien
caaactccaaaggatgacttgtctg

SEQ ID NO: 2201469 - DNA, 25 bp, Homo sapien
tcaatactagagctaaagactctgg

SEQ ID NO: 2201470 - DNA, 25 bp, Homo sapien
gacttgtctgcttgggccggcaatt

SEQ ID NO: 2201471 - DNA, 25 bp, Homo sapien
ccagaatgttaggttgatggctgca

SEQ ID NO: 2201472 - DNA, 25 bp, Homo sapien
catttctctctagctgacagtgtgt

SEQ ID NO: 2201473 - DNA, 25 bp, Homo sapien
ggtgaaggtatcctgggctcacact

SEQ ID NO: 2201474 - DNA, 25 bp, Homo sapien
gtaactctcgactcacttgttggtg

SEQ ID NO: 2201475 - DNA, 25 bp, Homo sapien
aggacctggagtgggtacagctcta

SEQ ID NO: 2201476 - DNA, 25 bp, Homo sapien
actagcaggacctggagtgggtaca

SEQ ID NO: 2201477 - DNA, 25 bp, Homo sapien
ggagtgggtacagctctaggttcca

SEQ ID NO: 2201478 - DNA, 25 bp, Homo sapien
tgggtacagctctaggttccaggat

SEQ ID NO: 2201479 - DNA, 25 bp, Homo sapien
aagtggatcatttgcttattgtcag

SEQ ID NO: 2201480 - DNA, 25 bp, Homo sapien
ttattgtcagtatcagggcaacatt

SEQ ID NO: 2201481 - DNA, 25 bp, Homo sapien
catttgcttattgtcagtatcaggg

SEQ ID NO: 2201482 - DNA, 25 bp, Homo sapien
tgtctgtgcttgaagtggatcattt

SEQ ID NO: 2201483 - DNA, 25 bp, Homo sapien
ttccaagagaagtgtaatcaccctt

SEQ ID NO: 2201484 - DNA, 25 bp, Homo sapien
ttttctcccttgacaatgctgagta

SEQ ID NO: 2201485 - DNA, 25 bp, Homo sapien
taagctatgttcatgtgcaagggtc

SEQ ID NO: 2201486 - DNA, 25 bp, Homo sapien
tatgttcatgtgcaagggtcccttt

SEQ ID NO: 2201487 - DNA, 25 bp, Homo sapien
gctgagtagacactgccaattttga

SEQ ID NO: 2201488 - DNA, 25 bp, Homo sapien
tagccgccagccatctgactggtgg

SEQ ID NO: 2201489 - DNA, 25 bp, Homo sapien
ttaggcatagccgccagccatctga

SEQ ID NO: 2201490 - DNA, 25 bp, Homo sapien
aggcatagccgccagccatctgact

SEQ ID NO: 2201491 - DNA, 25 bp, Homo sapien
gcatagccgccagccatctgactgg

SEQ ID NO: 2201492 - DNA, 25 bp, Homo sapien
ttatacggctgcgtgcccttcaggg

SEQ ID NO: 2201493 - DNA, 25 bp, Homo sapien
cggtggcactgacgttaaacatcat

SEQ ID NO: 2201494 - DNA, 25 bp, Homo sapien
cattaacactagtggccagggcacc

SEQ ID NO: 2201495 - DNA, 25 bp, Homo sapien
catggtagctgaagaagtcgctcac

SEQ ID NO: 2201496 - DNA, 25 bp, Homo sapien
tacggggtgtctgcaatcagggccc

SEQ ID NO: 2201497 - DNA, 25 bp, Homo sapien
tgtctgcaatcagggcccacaccag

SEQ ID NO: 2201498 - DNA, 25 bp, Homo sapien
ggtacaggtggtacggggtgtctgc

SEQ ID NO: 2201499 - DNA, 25 bp, Homo sapien
cacccagccataggccgggtacagg

SEQ ID NO: 2201500 - DNA, 25 bp, Homo sapien
ggcggatccgctcgcctccctaggt

SEQ ID NO: 2201501 - DNA, 25 bp, Homo sapien
cttttgacgggaactcggccatggc

SEQ ID NO: 2201502 - DNA, 25 bp, Homo sapien
tccagcgtcctgcgcgggactgctg

SEQ ID NO: 2201503 - DNA, 25 bp, Homo sapien
gggactgctggtccgcgtgctcact

SEQ ID NO: 2201504 - DNA, 25 bp, Homo sapien
cacttaaagctagcacatccatcgt

SEQ ID NO: 2201505 - DNA, 25 bp, Homo sapien
ggtgatgccttgtttcaaccacact

SEQ ID NO: 2201506 - DNA, 25 bp, Homo sapien
cacatccatcgttttgaggattagg

SEQ ID NO: 2201507 - DNA, 25 bp, Homo sapien
ggattaggctgcagaaaaagacatt

SEQ ID NO: 2201508 - DNA, 25 bp, Homo sapien
cccctgccaagaaaccttgtatcag

SEQ ID NO: 2201509 - DNA, 25 bp, Homo sapien
taagggctgtcatccaattcacccc

SEQ ID NO: 2201510 - DNA, 25 bp, Homo sapien
tggacattgaaagtaagtaagggct

SEQ ID NO: 2201511 - DNA, 25 bp, Homo sapien
ctgccaagaaaccttgtatcaggtg

SEQ ID NO: 2201512 - DNA, 25 bp, Homo sapien
tttgtgtctttcacactcatctcca

SEQ ID NO: 2201513 - DNA, 25 bp, Homo sapien
tttaaaagcttggtgatttgtctgt

SEQ ID NO: 2201514 - DNA, 25 bp, Homo sapien
tgtctttcacactcatctccagggt

SEQ ID NO: 2201515 - DNA, 25 bp, Homo sapien
tccagggtccctgaaagccttcttc

SEQ ID NO: 2201516 - DNA, 25 bp, Homo sapien
gcagcagtctctggtacagagccct

SEQ ID NO: 2201517 - DNA, 25 bp, Homo sapien
tgagctgatggtggctgcttttaca

SEQ ID NO: 2201518 - DNA, 25 bp, Homo sapien
cagtctctggtacagagccctggag

SEQ ID NO: 2201519 - DNA, 25 bp, Homo sapien
tacatagtttggagaacaggtgaga

SEQ ID NO: 2201520 - DNA, 25 bp, Homo sapien
taggcagtaagtttggactaaatcc

SEQ ID NO: 2201521 - DNA, 25 bp, Homo sapien
tgctgcacggagatctgccttgaga

SEQ ID NO: 2201522 - DNA, 25 bp, Homo sapien
ctttcagcactaagtagaagagata

SEQ ID NO: 2201523 - DNA, 25 bp, Homo sapien
tggagaggcctagttggagagtgac

SEQ ID NO: 2201524 - DNA, 25 bp, Homo sapien
ccctggtctccctgattatacattg

SEQ ID NO: 2201525 - DNA, 25 bp, Homo sapien
tttcttcaggcttgaccccatggtc

SEQ ID NO: 2201526 - DNA, 25 bp, Homo sapien
ttcaacccattctgtctagtgtgcg

SEQ ID NO: 2201527 - DNA, 25 bp, Homo sapien
ggcacaggtagggaacaatctctct

SEQ ID NO: 2201528 - DNA, 25 bp, Homo sapien
accaatgactggccctcctgagtga

SEQ ID NO: 2201529 - DNA, 25 bp, Homo sapien
caccaatgactggccctcctgagtg

SEQ ID NO: 2201530 - DNA, 25 bp, Homo sapien
ccccagaatgtttgcaggtctgcct

SEQ ID NO: 2201531 - DNA, 25 bp, Homo sapien
cagccatcaacagagctgtcatatg

SEQ ID NO: 2201532 - DNA, 25 bp, Homo sapien
ttttggcttgtcagccccagaatgt

SEQ ID NO: 2201533 - DNA, 25 bp, Homo sapien
aggtctgcctccagccatcaacaga

SEQ ID NO: 2201534 - DNA, 25 bp, Homo sapien
tagagataatcaaggatctgctctc

SEQ ID NO: 2201535 - DNA, 25 bp, Homo sapien
taatcaaggatctgctctccaagct

SEQ ID NO: 2201536 - DNA, 25 bp, Homo sapien
tagaagtgtcttttttatcatggct

SEQ ID NO: 2201537 - DNA, 25 bp, Homo sapien
gcttttgacaaagccaggaattcag

SEQ ID NO: 2201538 - DNA, 25 bp, Homo sapien
caggcttttggagccacctcattaa

SEQ ID NO: 2201539 - DNA, 25 bp, Homo sapien
tctacgtaagtgagtgtttcccgga

SEQ ID NO: 2201540 - DNA, 25 bp, Homo sapien
cattaagaagagcagtatattctac

SEQ ID NO: 2201541 - DNA, 25 bp, Homo sapien
agcatcaggcttttggagccacctc

SEQ ID NO: 2201542 - DNA, 25 bp, Homo sapien
ccatgtgtgccaatggtaaccaaac

SEQ ID NO: 2201543 - DNA, 25 bp, Homo sapien
cacatcatgtagctctggtccatgc

SEQ ID NO: 2201544 - DNA, 25 bp, Homo sapien
tggtccatgccatgtgtgccaatgg

SEQ ID NO: 2201545 - DNA, 25 bp, Homo sapien
tttccacatcatgtagctctggtcc

SEQ ID NO: 2201546 - DNA, 25 bp, Homo sapien
tttcatcctgaccatcactaactgg

SEQ ID NO: 2201547 - DNA, 25 bp, Homo sapien
ctggattggcgtcccagccaaaagc

SEQ ID NO: 2201548 - DNA, 25 bp, Homo sapien
catcactaactggattggcgtccca

SEQ ID NO: 2201549 - DNA, 25 bp, Homo sapien
tcctgaccatcactaactggattgg

SEQ ID NO: 2201550 - DNA, 25 bp, Homo sapien
cttgggcaggatgtcagaggactgg

SEQ ID NO: 2201551 - DNA, 25 bp, Homo sapien
ttgggcaggatgtcagaggactgga

SEQ ID NO: 2201552 - DNA, 25 bp, Homo sapien
gggcaggatgtcagaggactggaac

SEQ ID NO: 2201553 - DNA, 25 bp, Homo sapien
gcaggatgtcagaggactggaacac

SEQ ID NO: 2201554 - DNA, 25 bp, Homo sapien
tttgtgaggccctcataggcggagc

SEQ ID NO: 2201555 - DNA, 25 bp, Homo sapien
gtttgtgaggccctcataggcggag

SEQ ID NO: 2201556 - DNA, 25 bp, Homo sapien
tagcccctggtggtcttcctatggg

SEQ ID NO: 2201557 - DNA, 25 bp, Homo sapien
cctatgggtgctcatgttctgcatc

SEQ ID NO: 2201558 - DNA, 25 bp, Homo sapien
agctcctggtattcacgcagaggcc

SEQ ID NO: 2201559 - DNA, 25 bp, Homo sapien
gtattcacgcagaggccgcgccatg

SEQ ID NO: 2201560 - DNA, 25 bp, Homo sapien
tcctggtattcacgcagaggccgcg

SEQ ID NO: 2201561 - DNA, 25 bp, Homo sapien
tggtattcacgcagaggccgcgcca

SEQ ID NO: 2201562 - DNA, 25 bp, Homo sapien
cggacaacttggccttggcatcctc

SEQ ID NO: 2201563 - DNA, 25 bp, Homo sapien
ggacaacttggccttggcatcctca

SEQ ID NO: 2201564 - DNA, 25 bp, Homo sapien
caacttggccttggcatcctcaacg

SEQ ID NO: 2201565 - DNA, 25 bp, Homo sapien
acttggccttggcatcctcaacggc

SEQ ID NO: 2201566 - DNA, 25 bp, Homo sapien
agggaagcccgccctcaatctcagc

SEQ ID NO: 2201567 - DNA, 25 bp, Homo sapien
atgttccggctgatgttcatctcag

SEQ ID NO: 2201568 - DNA, 25 bp, Homo sapien
ttccggctgatgttcatctcagaga

SEQ ID NO: 2201569 - DNA, 25 bp, Homo sapien
cagctgatgttccggctgatgttca

SEQ ID NO: 2201570 - DNA, 25 bp, Homo sapien
aatctccttgtactgctccttgatt

SEQ ID NO: 2201571 - DNA, 25 bp, Homo sapien
ttcattctccatctctgtacactta

SEQ ID NO: 2201572 - DNA, 25 bp, Homo sapien
tctccatctctgtacacttattgat

SEQ ID NO: 2201573 - DNA, 25 bp, Homo sapien
ctttgatgaggaaaaattcattctc

SEQ ID NO: 2201574 - DNA, 25 bp, Homo sapien
cattctccatctctgtacacttatt

SEQ ID NO: 2201575 - DNA, 25 bp, Homo sapien
gcccctgcatgcctgcatgttgcca

SEQ ID NO: 2201576 - DNA, 25 bp, Homo sapien
cccctgcatgcctgcatgttgccaa

SEQ ID NO: 2201577 - DNA, 25 bp, Homo sapien
agcccctgcatgcctgcatgttgcc

SEQ ID NO: 2201578 - DNA, 25 bp, Homo sapien
tgaaggaagcaaacttgttgagggt

SEQ ID NO: 2201579 - DNA, 25 bp, Homo sapien
tcttctcctgggtgtgcacagcctg

SEQ ID NO: 2201580 - DNA, 25 bp, Homo sapien
cctccaggtgaaggggactcagcag

SEQ ID NO: 2201581 - DNA, 25 bp, Homo sapien
gtccacctccaggtgaaggggactc

SEQ ID NO: 2201582 - DNA, 25 bp, Homo sapien
caccatagccttcacccatgccatc

SEQ ID NO: 2201583 - DNA, 25 bp, Homo sapien
agccttcacccatgccatcccggaa

SEQ ID NO: 2201584 - DNA, 25 bp, Homo sapien
tgaccccaccatagccttcacccat

SEQ ID NO: 2201585 - DNA, 25 bp, Homo sapien
cttcacccatgccatcccggaagct

SEQ ID NO: 2201586 - DNA, 25 bp, Homo sapien
tgtgggcactgggcccatgtgtgta

SEQ ID NO: 2201587 - DNA, 25 bp, Homo sapien
gatgtgggcactgggcccatgtgtg

SEQ ID NO: 2201588 - DNA, 25 bp, Homo sapien
cactgggcccatgtgtgtaggagca

SEQ ID NO: 2201589 - DNA, 25 bp, Homo sapien
gggcactgggcccatgtgtgtagga

SEQ ID NO: 2201590 - DNA, 25 bp, Homo sapien
ggcggagattccagaaggagcagag

SEQ ID NO: 2201591 - DNA, 25 bp, Homo sapien
ggcaggctgaaccaggcggagattc

SEQ ID NO: 2201592 - DNA, 25 bp, Homo sapien
cggagattccagaaggagcagagaa

SEQ ID NO: 2201593 - DNA, 25 bp, Homo sapien
tgaaccaggcggagattccagaagg

SEQ ID NO: 2201594 - DNA, 25 bp, Homo sapien
tgagtgagagaaaggtatcagtgct

SEQ ID NO: 2201595 - DNA, 25 bp, Homo sapien
acacatgagtgagagaaaggtatca

SEQ ID NO: 2201596 - DNA, 25 bp, Homo sapien
tcagtgctgattatctctgcacaaa

SEQ ID NO: 2201597 - DNA, 25 bp, Homo sapien
gattcccttctggaagacacatgag

SEQ ID NO: 2201598 - DNA, 25 bp, Homo sapien
tccgtgtccgcaaagctgctacaat

SEQ ID NO: 2201599 - DNA, 25 bp, Homo sapien
cctaggtgcttttctccgtgtccgc

SEQ ID NO: 2201600 - DNA, 25 bp, Homo sapien
ccgcaaagctgctacaatggagacc

SEQ ID NO: 2201601 - DNA, 25 bp, Homo sapien
ttttctccgtgtccgcaaagctgct

SEQ ID NO: 2201602 - DNA, 25 bp, Homo sapien
gattgaagccttattgatactacag

SEQ ID NO: 2201603 - DNA, 25 bp, Homo sapien
gacctctgggattgaagccttattg

SEQ ID NO: 2201604 - DNA, 25 bp, Homo sapien
gaagccttattgatactacagagaa

SEQ ID NO: 2201605 - DNA, 25 bp, Homo sapien
tctgggattgaagccttattgatac

SEQ ID NO: 2201606 - DNA, 25 bp, Homo sapien
aatgccttcaagacgtgtatgtgga

SEQ ID NO: 2201607 - DNA, 25 bp, Homo sapien
tagtgccaccataacagatagccaa

SEQ ID NO: 2201608 - DNA, 25 bp, Homo sapien
tatacctgttagaatgacccaggcc

SEQ ID NO: 2201609 - DNA, 25 bp, Homo sapien
tcagcagcctgttagagtagaaatt

SEQ ID NO: 2201610 - DNA, 25 bp, Homo sapien
tcattggccattggtaactgctgtg

SEQ ID NO: 2201611 - DNA, 25 bp, Homo sapien
catggatgggattatggctcttata

SEQ ID NO: 2201612 - DNA, 25 bp, Homo sapien
tgccatgtaaggatagttcatctct

SEQ ID NO: 2201613 - DNA, 25 bp, Homo sapien
ttaagtcataatggcagagtcctca

SEQ ID NO: 2201614 - DNA, 25 bp, Homo sapien
caatctttgacagttgaggcaggga

SEQ ID NO: 2201615 - DNA, 25 bp, Homo sapien
gaggtgatcagctttcttgcggtcc

SEQ ID NO: 2201616 - DNA, 25 bp, Homo sapien
tatctctggtttactaggctggtgt

SEQ ID NO: 2201617 - DNA, 25 bp, Homo sapien
tatgcagttcatataagcaagggca

SEQ ID NO: 2201618 - DNA, 25 bp, Homo sapien
ttccaggtagcctgaaacccagcag

SEQ ID NO: 2201619 - DNA, 25 bp, Homo sapien
tgcctaacgaacacagaaatctaca

SEQ ID NO: 2201620 - DNA, 25 bp, Homo sapien
cattgtatgccaggttcatgcccca

SEQ ID NO: 2201621 - DNA, 25 bp, Homo sapien
acccagcagacaatgtagctgttgc

SEQ ID NO: 2201622 - DNA, 25 bp, Homo sapien
gacttaacaccctagaacttgactc

SEQ ID NO: 2201623 - DNA, 25 bp, Homo sapien
gattcctcccccttgtagtattgaa

SEQ ID NO: 2201624 - DNA, 25 bp, Homo sapien
gaaagcaaatagacctcatcattca

SEQ ID NO: 2201625 - DNA, 25 bp, Homo sapien
gccccagctgataatgttggactta

SEQ ID NO: 2201626 - DNA, 25 bp, Homo sapien
ataatctctctcaggacactgaagc

SEQ ID NO: 2201627 - DNA, 25 bp, Homo sapien
ccaataatctctctcaggacactga

SEQ ID NO: 2201628 - DNA, 25 bp, Homo sapien
gactgcccaataatctctctcagga

SEQ ID NO: 2201629 - DNA, 25 bp, Homo sapien
taaagactgcccaataatctctctc

SEQ ID NO: 2201630 - DNA, 25 bp, Homo sapien
actgagccattgagggtacctacac

SEQ ID NO: 2201631 - DNA, 25 bp, Homo sapien
cagagacccagtagccagatgtagc

SEQ ID NO: 2201632 - DNA, 25 bp, Homo sapien
tacgaaagacaggatctacactggc

SEQ ID NO: 2201633 - DNA, 25 bp, Homo sapien
gatgtagctgctgattacgaaagac

SEQ ID NO: 2201634 - DNA, 25 bp, Homo sapien
gatcctttgccttctggggaggggc

SEQ ID NO: 2201635 - DNA, 25 bp, Homo sapien
tgggtgatcctttgccttctgggga

SEQ ID NO: 2201636 - DNA, 25 bp, Homo sapien
gtgatcctttgccttctggggaggg

SEQ ID NO: 2201637 - DNA, 25 bp, Homo sapien
atcctttgccttctggggaggggct

SEQ ID NO: 2201638 - DNA, 25 bp, Homo sapien
cagtggacgtgtgatcagttcttca

SEQ ID NO: 2201639 - DNA, 25 bp, Homo sapien
cagagtggctgccacacagtggacg

SEQ ID NO: 2201640 - DNA, 25 bp, Homo sapien
cagttcttcaacaggttgtaaggaa

SEQ ID NO: 2201641 - DNA, 25 bp, Homo sapien
aagtccagtatttgctcccagagtg

SEQ ID NO: 2201642 - DNA, 25 bp, Homo sapien
agctccagaattgcctgatcttctt

SEQ ID NO: 2201643 - DNA, 25 bp, Homo sapien
gatcttcttcttgactcaatgcccc

SEQ ID NO: 2201644 - DNA, 25 bp, Homo sapien
atgcccccaacctcacattcatccc

SEQ ID NO: 2201645 - DNA, 25 bp, Homo sapien
ctagctccagaattgcctgatcttc

SEQ ID NO: 2201646 - DNA, 25 bp, Homo sapien
aggagataagccagcagggacagca

SEQ ID NO: 2201647 - DNA, 25 bp, Homo sapien
ggagataagccagcagggacagcat

SEQ ID NO: 2201648 - DNA, 25 bp, Homo sapien
gtgatcattaattgtaaacgctact

SEQ ID NO: 2201649 - DNA, 25 bp, Homo sapien
gatcattaattgtaaacgctactgc

SEQ ID NO: 2201650 - DNA, 25 bp, Homo sapien
tgatcattaattgtaaacgctactg

SEQ ID NO: 2201651 - DNA, 25 bp, Homo sapien
tcattaattgtaaacgctactgcac

SEQ ID NO: 2201652 - DNA, 25 bp, Homo sapien
gaggaaattctcaatgtgaaacccc

SEQ ID NO: 2201653 - DNA, 25 bp, Homo sapien
ggataacatgccctcatcttctaag

SEQ ID NO: 2201654 - DNA, 25 bp, Homo sapien
tgatgtaagtgcatccctaggactc

SEQ ID NO: 2201655 - DNA, 25 bp, Homo sapien
tgaacccacgggctaggataacatg

SEQ ID NO: 2201656 - DNA, 25 bp, Homo sapien
tttcaataccataagcacatcaggg

SEQ ID NO: 2201657 - DNA, 25 bp, Homo sapien
taccaacaccaacaatgggctttca

SEQ ID NO: 2201658 - DNA, 25 bp, Homo sapien
gaaacctcagcctactcttcatagt

SEQ ID NO: 2201659 - DNA, 25 bp, Homo sapien
catagtctaccttaaatagttatac

SEQ ID NO: 2201660 - DNA, 25 bp, Homo sapien
tgtcaggacattggaagtgtcatca

SEQ ID NO: 2201661 - DNA, 25 bp, Homo sapien
gggcatttaagaactccaattccac

SEQ ID NO: 2201662 - DNA, 25 bp, Homo sapien
tggagcctgctaaggccagtgcaga

SEQ ID NO: 2201663 - DNA, 25 bp, Homo sapien
aatactcatccagttttacatctga

SEQ ID NO: 2201664 - DNA, 25 bp, Homo sapien
caggagctcagagaatagagtcttt

SEQ ID NO: 2201665 - DNA, 25 bp, Homo sapien
tagagtctttatcacattgtcgggt

SEQ ID NO: 2201666 - DNA, 25 bp, Homo sapien
gctcagagaatagagtctttatcac

SEQ ID NO: 2201667 - DNA, 25 bp, Homo sapien
ttatcacattgtcgggttttccaaa

SEQ ID NO: 2201668 - DNA, 25 bp, Homo sapien
gacatgtaggcttctcttaggactg

SEQ ID NO: 2201669 - DNA, 25 bp, Homo sapien
ctccagttctagctaaatcccttct

SEQ ID NO: 2201670 - DNA, 25 bp, Homo sapien
cagcagccaggattgttctatttgc

SEQ ID NO: 2201671 - DNA, 25 bp, Homo sapien
ttttaagaaggcagtgattttccag

SEQ ID NO: 2201672 - DNA, 25 bp, Homo sapien
tttttcaagcccactgcattagacc

SEQ ID NO: 2201673 - DNA, 25 bp, Homo sapien
ggatgtgtggccacaacggcccctg

SEQ ID NO: 2201674 - DNA, 25 bp, Homo sapien
cattagaccatggaaactcaggatg

SEQ ID NO: 2201675 - DNA, 25 bp, Homo sapien
ggcgtggccgtgaccttagtcacac

SEQ ID NO: 2201676 - DNA, 25 bp, Homo sapien
tgcagcctaaggagacacgatgact

SEQ ID NO: 2201677 - DNA, 25 bp, Homo sapien
tgagagacagctacacaagttaagg

SEQ ID NO: 2201678 - DNA, 25 bp, Homo sapien
cacggttaacagagaaagctgggca

SEQ ID NO: 2201679 - DNA, 25 bp, Homo sapien
tgactaaaaacactgtgggatcctg

SEQ ID NO: 2201680 - DNA, 25 bp, Homo sapien
aactggttgctcttgcttactggac

SEQ ID NO: 2201681 - DNA, 25 bp, Homo sapien
gggaatccttattgtgaccgcttca

SEQ ID NO: 2201682 - DNA, 25 bp, Homo sapien
tacaggatggtttctctggacccct

SEQ ID NO: 2201683 - DNA, 25 bp, Homo sapien
ttgcccagggtcaagtgaagttagg

SEQ ID NO: 2201684 - DNA, 25 bp, Homo sapien
agaactgctgcttcaactctgagtg

SEQ ID NO: 2201685 - DNA, 25 bp, Homo sapien
tctggcagcacttcttagactaaag

SEQ ID NO: 2201686 - DNA, 25 bp, Homo sapien
aaatctttgtcttcgggttctctgg

SEQ ID NO: 2201687 - DNA, 25 bp, Homo sapien
gaccacagagcgtattgctggtgtg

SEQ ID NO: 2201688 - DNA, 25 bp, Homo sapien
tcctcagaccagaggttcaaactca

SEQ ID NO: 2201689 - DNA, 25 bp, Homo sapien
gaccagaggttcaaactcaacacca

SEQ ID NO: 2201690 - DNA, 25 bp, Homo sapien
agaggttcaaactcaacaccaaagc

SEQ ID NO: 2201691 - DNA, 25 bp, Homo sapien
ctgggatcctcagaccagaggttca

SEQ ID NO: 2201692 - DNA, 25 bp, Homo sapien
ttaactgttaaagacttggtccgca

SEQ ID NO: 2201693 - DNA, 25 bp, Homo sapien
taactgttaaagacttggtccgcat

SEQ ID NO: 2201694 - DNA, 25 bp, Homo sapien
ctccatagcagattcacggtcctcg

SEQ ID NO: 2201695 - DNA, 25 bp, Homo sapien
gaagggctcacagcccaccacaagg

SEQ ID NO: 2201696 - DNA, 25 bp, Homo sapien
tcctcgatgaccaaaccatgcagtt

SEQ ID NO: 2201697 - DNA, 25 bp, Homo sapien
cacaaggcggcaccccagggaagga

SEQ ID NO: 2201698 - DNA, 25 bp, Homo sapien
catgggtggtgtatcagagacgttt

SEQ ID NO: 2201699 - DNA, 25 bp, Homo sapien
gagttcctgcgttgtatactgtaac

SEQ ID NO: 2201700 - DNA, 25 bp, Homo sapien
aatgtagtctagtcctcaaaaaagg

SEQ ID NO: 2201701 - DNA, 25 bp, Homo sapien
tgtaacagctgggaaagcacacaga

SEQ ID NO: 2201702 - DNA, 25 bp, Homo sapien
tgaatctaagtctcatgcagtgcaa

SEQ ID NO: 2201703 - DNA, 25 bp, Homo sapien
tacatgttcctaaatgttcaagagc

SEQ ID NO: 2201704 - DNA, 25 bp, Homo sapien
tccttgagcagtacactttagacca

SEQ ID NO: 2201705 - DNA, 25 bp, Homo sapien
caagagctttcctgaagccactcct

SEQ ID NO: 2201706 - DNA, 25 bp, Homo sapien
cttaagaagggatctcactgtcaca

SEQ ID NO: 2201707 - DNA, 25 bp, Homo sapien
taagaagggatctcactgtcacacc

SEQ ID NO: 2201708 - DNA, 25 bp, Homo sapien
agaagggatctcactgtcacaccca

SEQ ID NO: 2201709 - DNA, 25 bp, Homo sapien
gaagggatctcactgtcacacccag

SEQ ID NO: 2201710 - DNA, 25 bp, Homo sapien
taaggcagaatgtcgaggtaacacc

SEQ ID NO: 2201711 - DNA, 25 bp, Homo sapien
aacaaatccctcctcagctgtaagg

SEQ ID NO: 2201712 - DNA, 25 bp, Homo sapien
tcattagcagggacgaaacaaatcc

SEQ ID NO: 2201713 - DNA, 25 bp, Homo sapien
ctgccaggctcaagggaggctccca

SEQ ID NO: 2201714 - DNA, 25 bp, Homo sapien
aaagcttcattctcttgagcggcca

SEQ ID NO: 2201715 - DNA, 25 bp, Homo sapien
gccagcacaataactttagcatccg

SEQ ID NO: 2201716 - DNA, 25 bp, Homo sapien
ttttgatgcctgacccttaacacgg

SEQ ID NO: 2201717 - DNA, 25 bp, Homo sapien
catccgtgtgaaagtaccaatagcg

SEQ ID NO: 2201718 - DNA, 25 bp, Homo sapien
tacattttagtgagaatcaaaggca

SEQ ID NO: 2201719 - DNA, 25 bp, Homo sapien
tacaaacatgtctctcatcagcaca

SEQ ID NO: 2201720 - DNA, 25 bp, Homo sapien
gagttgctcagttgttgaaaaagga

SEQ ID NO: 2201721 - DNA, 25 bp, Homo sapien
cgtccttattttagtcaagcaggca

SEQ ID NO: 2201722 - DNA, 25 bp, Homo sapien
atcagaaggttaatagcagaagggc

SEQ ID NO: 2201723 - DNA, 25 bp, Homo sapien
catcagaaggttaatagcagaaggg

SEQ ID NO: 2201724 - DNA, 25 bp, Homo sapien
tcatcagaaggttaatagcagaagg

SEQ ID NO: 2201725 - DNA, 25 bp, Homo sapien
tcagaaggttaatagcagaagggct

SEQ ID NO: 2201726 - DNA, 25 bp, Homo sapien
cccggcgtgttgtgggaggttgtag

SEQ ID NO: 2201727 - DNA, 25 bp, Homo sapien
tacgtcaattcaacagtgagatgca

SEQ ID NO: 2201728 - DNA, 25 bp, Homo sapien
catctgtattctgatcggtgttacg

SEQ ID NO: 2201729 - DNA, 25 bp, Homo sapien
ttaaaagctgatacttggctgggtg

SEQ ID NO: 2201730 - DNA, 25 bp, Homo sapien
aaatagattagaccctgcttctcct

SEQ ID NO: 2201731 - DNA, 25 bp, Homo sapien
atcaaacaactggttaaatgcaaag

SEQ ID NO: 2201732 - DNA, 25 bp, Homo sapien
aaagcagatatcaaacaactggtta

SEQ ID NO: 2201733 - DNA, 25 bp, Homo sapien
gatatcaaacaactggttaaatgca

SEQ ID NO: 2201734 - DNA, 25 bp, Homo sapien
agctcccggtctggcttctacactg

SEQ ID NO: 2201735 - DNA, 25 bp, Homo sapien
tcctgtgcttgcttactcatgtaca

SEQ ID NO: 2201736 - DNA, 25 bp, Homo sapien
tctggaagctcccggtctggcttct

SEQ ID NO: 2201737 - DNA, 25 bp, Homo sapien
agattcctgtgcttgcttactcatg

SEQ ID NO: 2201738 - DNA, 25 bp, Homo sapien
ttaattgcgaataaccgcgccgcga

SEQ ID NO: 2201739 - DNA, 25 bp, Homo sapien
taggacgcacattcacacggaacac

SEQ ID NO: 2201740 - DNA, 25 bp, Homo sapien
tctacctaggacaagtaagcccggc

SEQ ID NO: 2201741 - DNA, 25 bp, Homo sapien
gcatgtgcagtatcagccctcagag

SEQ ID NO: 2201742 - DNA, 25 bp, Homo sapien
aagagcgggcgtccggcccgcggtg

SEQ ID NO: 2201743 - DNA, 25 bp, Homo sapien
agtggcctggaagagcgggcgtccg

SEQ ID NO: 2201744 - DNA, 25 bp, Homo sapien
cctcgcccccaagcgcagtggcctg

SEQ ID NO: 2201745 - DNA, 25 bp, Homo sapien
ggagccggcagagcgccgcgctcgg

SEQ ID NO: 2201746 - DNA, 25 bp, Homo sapien
agggtcgtcgctgctgccggtgcac

SEQ ID NO: 2201747 - DNA, 25 bp, Homo sapien
ctgcgcgcagggtcgtcgctgctgc

SEQ ID NO: 2201748 - DNA, 25 bp, Homo sapien
gcgcagggtcgtcgctgctgccggt

SEQ ID NO: 2201749 - DNA, 25 bp, Homo sapien
gctgccggtgcacccgccgctgttg

SEQ ID NO: 2201750 - DNA, 25 bp, Homo sapien
gagcccccggactccacgcgcctac

SEQ ID NO: 2201751 - DNA, 25 bp, Homo sapien
ccccggactccacgcgcctactcgc

SEQ ID NO: 2201752 - DNA, 25 bp, Homo sapien
cggactccacgcgcctactcgcgcc

SEQ ID NO: 2201753 - DNA, 25 bp, Homo sapien
actccacgcgcctactcgcgccccg

SEQ ID NO: 2201754 - DNA, 25 bp, Homo sapien
gaaattaccatgtgaattgccaggg

SEQ ID NO: 2201755 - DNA, 25 bp, Homo sapien
ttgccaggggatgcaagttgctgcc

SEQ ID NO: 2201756 - DNA, 25 bp, Homo sapien
gagagtggaagcgaagaaattacca

SEQ ID NO: 2201757 - DNA, 25 bp, Homo sapien
tctacattaactacctggatgtgct

SEQ ID NO: 2201758 - DNA, 25 bp, Homo sapien
gccaagagataataaaattctcatt

SEQ ID NO: 2201759 - DNA, 25 bp, Homo sapien
atgtacaatatataaagccatattt

SEQ ID NO: 2201760 - DNA, 25 bp, Homo sapien
ggctttttgtcatagttctaaaatg

SEQ ID NO: 2201761 - DNA, 25 bp, Homo sapien
tgtgtatgtgttatttaaacccacg

SEQ ID NO: 2201762 - DNA, 25 bp, Homo sapien
gtccttcaagtttagtctcttttga

SEQ ID NO: 2201763 - DNA, 25 bp, Homo sapien
taatccatagcccacttgacaatca

SEQ ID NO: 2201764 - DNA, 25 bp, Homo sapien
agaccctaatccatagcccacttga

SEQ ID NO: 2201765 - DNA, 25 bp, Homo sapien
gaggtctttggtaagaatccagcat

SEQ ID NO: 2201766 - DNA, 25 bp, Homo sapien
catcctgtgttttgccgttttgatg

SEQ ID NO: 2201767 - DNA, 25 bp, Homo sapien
gttttgccgttttgatgttacaaga

SEQ ID NO: 2201768 - DNA, 25 bp, Homo sapien
gccgttttgatgttacaagaattat

SEQ ID NO: 2201769 - DNA, 25 bp, Homo sapien
tcatcctgtgttttgccgttttgat

SEQ ID NO: 2201770 - DNA, 25 bp, Homo sapien
cccagtcactgactacctctggctc

SEQ ID NO: 2201771 - DNA, 25 bp, Homo sapien
ccagtcactgactacctctggctcc

SEQ ID NO: 2201772 - DNA, 25 bp, Homo sapien
tctgctgaactatgcaactatcata

SEQ ID NO: 2201773 - DNA, 25 bp, Homo sapien
cagatacatcagacaaatattaaat

SEQ ID NO: 2201774 - DNA, 25 bp, Homo sapien
tattaaatctcttgatgattcaatc

SEQ ID NO: 2201775 - DNA, 25 bp, Homo sapien
aatctcttgatgattcaatctgctg

SEQ ID NO: 2201776 - DNA, 25 bp, Homo sapien
cattcattgcgcactattatggaac

SEQ ID NO: 2201777 - DNA, 25 bp, Homo sapien
gaagcttgctttggacaaactggat

SEQ ID NO: 2201778 - DNA, 25 bp, Homo sapien
cataggcgatctgattctggaagca

SEQ ID NO: 2201779 - DNA, 25 bp, Homo sapien
gcaggtctctgtcccgatcttccaa

SEQ ID NO: 2201780 - DNA, 25 bp, Homo sapien
ctttcttcttttaccatcctgaatt

SEQ ID NO: 2201781 - DNA, 25 bp, Homo sapien
ttcttttaccatcctgaattttgtg

SEQ ID NO: 2201782 - DNA, 25 bp, Homo sapien
tcttttaccatcctgaattttgtgt

SEQ ID NO: 2201783 - DNA, 25 bp, Homo sapien
tcttcttttaccatcctgaattttg

SEQ ID NO: 2201784 - DNA, 25 bp, Homo sapien
catgacctctagctggtacttaata

SEQ ID NO: 2201785 - DNA, 25 bp, Homo sapien
gttgctatagtaagttcatgacctc

SEQ ID NO: 2201786 - DNA, 25 bp, Homo sapien
tcatccaggtgaagtaaattggtgg

SEQ ID NO: 2201787 - DNA, 25 bp, Homo sapien
tagcacagcacctaaatcagcaatc

SEQ ID NO: 2201788 - DNA, 25 bp, Homo sapien
gggatattggcagatgcctgctcaa

SEQ ID NO: 2201789 - DNA, 25 bp, Homo sapien
tgcctgctcaaggtaggccaaggag

SEQ ID NO: 2201790 - DNA, 25 bp, Homo sapien
cagaggtggagggatattggcagat

SEQ ID NO: 2201791 - DNA, 25 bp, Homo sapien
agatgcctgctcaaggtaggccaag

SEQ ID NO: 2201792 - DNA, 25 bp, Homo sapien
atgttgatgtcctttagcacctgct

SEQ ID NO: 2201793 - DNA, 25 bp, Homo sapien
catgttgatgtcctttagcacctgc

SEQ ID NO: 2201794 - DNA, 25 bp, Homo sapien
cacactgatctttgtagtatgatct

SEQ ID NO: 2201795 - DNA, 25 bp, Homo sapien
taaagccttcaatcatccaccccat

SEQ ID NO: 2201796 - DNA, 25 bp, Homo sapien
aagcacacttagtaccatgttattc

SEQ ID NO: 2201797 - DNA, 25 bp, Homo sapien
taccatgttattcacctccttaaag

SEQ ID NO: 2201798 - DNA, 25 bp, Homo sapien
agaagccttcagctccaattaaaat

SEQ ID NO: 2201799 - DNA, 25 bp, Homo sapien
tttgtgtggtaatggcttcagtata

SEQ ID NO: 2201800 - DNA, 25 bp, Homo sapien
tgaagtggttctgattagtggtgaa

SEQ ID NO: 2201801 - DNA, 25 bp, Homo sapien
aaacctcagcccttaatttggctct

SEQ ID NO: 2201802 - DNA, 25 bp, Homo sapien
tctaggttaactagaccagatctga

SEQ ID NO: 2201803 - DNA, 25 bp, Homo sapien
ttctaggttaactagaccagatctg

SEQ ID NO: 2201804 - DNA, 25 bp, Homo sapien
ctaggttaactagaccagatctgac

SEQ ID NO: 2201805 - DNA, 25 bp, Homo sapien
gaaaagacttcagtatatgctggca

SEQ ID NO: 2201806 - DNA, 25 bp, Homo sapien
aaagacttcagtatatgctggcatc

SEQ ID NO: 2201807 - DNA, 25 bp, Homo sapien
aaaagacttcagtatatgctggcat

SEQ ID NO: 2201808 - DNA, 25 bp, Homo sapien
aagacttcagtatatgctggcatct

SEQ ID NO: 2201809 - DNA, 25 bp, Homo sapien
tatagtctacaacaaggtgtatgtc

SEQ ID NO: 2201810 - DNA, 25 bp, Homo sapien
tagtactttaagtgtcccacatcag

SEQ ID NO: 2201811 - DNA, 25 bp, Homo sapien
catcagcaattttatagtctacaac

SEQ ID NO: 2201812 - DNA, 25 bp, Homo sapien
gtatgtctgcagacatattgagtgt

SEQ ID NO: 2201813 - DNA, 25 bp, Homo sapien
ttttacaccggaaattacaacagca

SEQ ID NO: 2201814 - DNA, 25 bp, Homo sapien
caatatggctgagatctcagcatat

SEQ ID NO: 2201815 - DNA, 25 bp, Homo sapien
catctccaatatggctgagatctca

SEQ ID NO: 2201816 - DNA, 25 bp, Homo sapien
ccggaaattacaacagcatctccaa

SEQ ID NO: 2201817 - DNA, 25 bp, Homo sapien
catagtggtactcttgttctgcaat

SEQ ID NO: 2201818 - DNA, 25 bp, Homo sapien
atagtggtactcttgttctgcaatt

SEQ ID NO: 2201819 - DNA, 25 bp, Homo sapien
acatagtggtactcttgttctgcaa

SEQ ID NO: 2201820 - DNA, 25 bp, Homo sapien
tacatagtggtactcttgttctgca

SEQ ID NO: 2201821 - DNA, 25 bp, Homo sapien
cggtaagtgtcaaagccctcagacg

SEQ ID NO: 2201822 - DNA, 25 bp, Homo sapien
gcagtcacagcggtaagtgtcaaag

SEQ ID NO: 2201823 - DNA, 25 bp, Homo sapien
tagcaccaaggtattcacattatct

SEQ ID NO: 2201824 - DNA, 25 bp, Homo sapien
atccttagtgtaacgatatcttcat

SEQ ID NO: 2201825 - DNA, 25 bp, Homo sapien
gccgctcgagctgatgtcccagcag

SEQ ID NO: 2201826 - DNA, 25 bp, Homo sapien
tctgtactttccattcaaagctagg

SEQ ID NO: 2201827 - DNA, 25 bp, Homo sapien
tactttccattcaaagctaggtcta

SEQ ID NO: 2201828 - DNA, 25 bp, Homo sapien
tccctctgtactttccattcaaagc

SEQ ID NO: 2201829 - DNA, 25 bp, Homo sapien
ccattcaaagctaggtctaataata

SEQ ID NO: 2201830 - DNA, 25 bp, Homo sapien
ctgaatacaactggtaacattttga

SEQ ID NO: 2201831 - DNA, 25 bp, Homo sapien
cctgaatacaactggtaacattttg

SEQ ID NO: 2201832 - DNA, 25 bp, Homo sapien
taccaaaagagtttgctgatcgact

SEQ ID NO: 2201833 - DNA, 25 bp, Homo sapien
aagagtttgctgatcgactatttga

SEQ ID NO: 2201834 - DNA, 25 bp, Homo sapien
agtttgctgatcgactatttgaggg

SEQ ID NO: 2201835 - DNA, 25 bp, Homo sapien
cttatattaccaaaagagtttgctg

SEQ ID NO: 2201836 - DNA, 25 bp, Homo sapien
tcttgcccttagttctgagttcccc

SEQ ID NO: 2201837 - DNA, 25 bp, Homo sapien
ctgcatcccagtccttgagtctaca

SEQ ID NO: 2201838 - DNA, 25 bp, Homo sapien
gagtctacactcatctaagctcagc

SEQ ID NO: 2201839 - DNA, 25 bp, Homo sapien
tgagttcccccaaagtgtctgcatc

SEQ ID NO: 2201840 - DNA, 25 bp, Homo sapien
taatggagggcttgatagctcgtcc

SEQ ID NO: 2201841 - DNA, 25 bp, Homo sapien
tgatagctcgtccaaccagttggtg

SEQ ID NO: 2201842 - DNA, 25 bp, Homo sapien
actccatcttaatggagggcttgat

SEQ ID NO: 2201843 - DNA, 25 bp, Homo sapien
gtccaaccagttggtggacagaata

SEQ ID NO: 2201844 - DNA, 25 bp, Homo sapien
tctgatgacaccaggtttgtcatag

SEQ ID NO: 2201845 - DNA, 25 bp, Homo sapien
tggcatgatcatcatggttgaagct

SEQ ID NO: 2201846 - DNA, 25 bp, Homo sapien
ctggcatgatcatcatggttgaagc

SEQ ID NO: 2201847 - DNA, 25 bp, Homo sapien
ctcttccagtagagagctggccaca

SEQ ID NO: 2201848 - DNA, 25 bp, Homo sapien
tgccagttcatccaatggcatacaa

SEQ ID NO: 2201849 - DNA, 25 bp, Homo sapien
actaccggttgaccatgggcttgcc

SEQ ID NO: 2201850 - DNA, 25 bp, Homo sapien
tagagagctggccacactaccggtt

SEQ ID NO: 2201851 - DNA, 25 bp, Homo sapien
tatcatttagctctcctgggtgaag

SEQ ID NO: 2201852 - DNA, 25 bp, Homo sapien
gggtgaagctggctcaatgacattc

SEQ ID NO: 2201853 - DNA, 25 bp, Homo sapien
tgcgtgggaccttggctcaaatgac

SEQ ID NO: 2201854 - DNA, 25 bp, Homo sapien
gtccaattggctggcaaaaaccagt

SEQ ID NO: 2201855 - DNA, 25 bp, Homo sapien
tgtagctctttcagatgcaagtgcc

SEQ ID NO: 2201856 - DNA, 25 bp, Homo sapien
tgtgcaaggatcagatacggaccgt

SEQ ID NO: 2201857 - DNA, 25 bp, Homo sapien
gaaagatcgggcttctaatcacagc

SEQ ID NO: 2201858 - DNA, 25 bp, Homo sapien
gaagagatcttggtctatcactagc

SEQ ID NO: 2201859 - DNA, 25 bp, Homo sapien
gagtctccctaaatcatgttggtta

SEQ ID NO: 2201860 - DNA, 25 bp, Homo sapien
gactgacttcacttaacttccagca

SEQ ID NO: 2201861 - DNA, 25 bp, Homo sapien
gtgaaccttgcaaaacccagaacag

SEQ ID NO: 2201862 - DNA, 25 bp, Homo sapien
gatctttggttttgatggcgtgaga

SEQ ID NO: 2201863 - DNA, 25 bp, Homo sapien
caggatggagccatcgaaacacaca

SEQ ID NO: 2201864 - DNA, 25 bp, Homo sapien
cacagagtatttatgcacaggagga

SEQ ID NO: 2201865 - DNA, 25 bp, Homo sapien
gtatttatgcacaggaggagcaatg

SEQ ID NO: 2201866 - DNA, 25 bp, Homo sapien
ggagccatcgaaacacacagagtat

SEQ ID NO: 2201867 - DNA, 25 bp, Homo sapien
tgacctggccgttgagcagctccta

SEQ ID NO: 2201868 - DNA, 25 bp, Homo sapien
gatgacctggccgttgagcagctcc

SEQ ID NO: 2201869 - DNA, 25 bp, Homo sapien
acctggccgttgagcagctcctagc

SEQ ID NO: 2201870 - DNA, 25 bp, Homo sapien
cctggccgttgagcagctcctagct

SEQ ID NO: 2201871 - DNA, 25 bp, Homo sapien
ggcatagtgtgggtgatcccatcgc

SEQ ID NO: 2201872 - DNA, 25 bp, Homo sapien
catagtgtgggtgatcccatcgcta

SEQ ID NO: 2201873 - DNA, 25 bp, Homo sapien
tcccatcgctagagtccatcacgat

SEQ ID NO: 2201874 - DNA, 25 bp, Homo sapien
tgatcccatcgctagagtccatcac

SEQ ID NO: 2201875 - DNA, 25 bp, Homo sapien
tgctcctcgggagccgcacatagct

SEQ ID NO: 2201876 - DNA, 25 bp, Homo sapien
cctcgggagccgcacatagcttgtt

SEQ ID NO: 2201877 - DNA, 25 bp, Homo sapien
tcctcgggagccgcacatagcttgt

SEQ ID NO: 2201878 - DNA, 25 bp, Homo sapien
cgggagccgcacatagcttgttgta

SEQ ID NO: 2201879 - DNA, 25 bp, Homo sapien
acatgccagagcctttgttgaagac

SEQ ID NO: 2201880 - DNA, 25 bp, Homo sapien
gggcatcatcgcccatgaaggcagc

SEQ ID NO: 2201881 - DNA, 25 bp, Homo sapien
tgccacgggcaccacatgatggagg

SEQ ID NO: 2201882 - DNA, 25 bp, Homo sapien
cagagcctttgttgaagacgagagc

SEQ ID NO: 2201883 - DNA, 25 bp, Homo sapien
agcccgtttgtgacccgagcagcac

SEQ ID NO: 2201884 - DNA, 25 bp, Homo sapien
agaagcccgtttgtgacccgagcag

SEQ ID NO: 2201885 - DNA, 25 bp, Homo sapien
gcaagaagcccgtttgtgacccgag

SEQ ID NO: 2201886 - DNA, 25 bp, Homo sapien
aagaagcccgtttgtgacccgagca

SEQ ID NO: 2201887 - DNA, 25 bp, Homo sapien
ctccagaaccaaagcctttaccctg

SEQ ID NO: 2201888 - DNA, 25 bp, Homo sapien
caactttgggattgtatctcttggc

SEQ ID NO: 2201889 - DNA, 25 bp, Homo sapien
atagttgagggcatatcactttctc

SEQ ID NO: 2201890 - DNA, 25 bp, Homo sapien
ggcagataatagcaggaaggcctag

SEQ ID NO: 2201891 - DNA, 25 bp, Homo sapien
cttcatcccctaacaggactgtaaa

SEQ ID NO: 2201892 - DNA, 25 bp, Homo sapien
ttgcaatgccttggctagagctaga

SEQ ID NO: 2201893 - DNA, 25 bp, Homo sapien
aatgccttggctagagctagacaca

SEQ ID NO: 2201894 - DNA, 25 bp, Homo sapien
cattctttgcaatgccttggctaga

SEQ ID NO: 2201895 - DNA, 25 bp, Homo sapien
aggcctttccaggagttcttcctca

SEQ ID NO: 2201896 - DNA, 25 bp, Homo sapien
tctactcagttggaggaagttggct

SEQ ID NO: 2201897 - DNA, 25 bp, Homo sapien
catggcctctgcatctctaggccat

SEQ ID NO: 2201898 - DNA, 25 bp, Homo sapien
gttggctttatctgccatggcctct

SEQ ID NO: 2201899 - DNA, 25 bp, Homo sapien
tattactcaaacgagcctctctgaa

SEQ ID NO: 2201900 - DNA, 25 bp, Homo sapien
ctgaaaatgtggaggctaggttgtt

SEQ ID NO: 2201901 - DNA, 25 bp, Homo sapien
ctcaaacgagcctctctgaaaatgt

SEQ ID NO: 2201902 - DNA, 25 bp, Homo sapien
ttactcaaacgagcctctctgaaaa

SEQ ID NO: 2201903 - DNA, 25 bp, Homo sapien
taaatctgggaacgagacttaattc

SEQ ID NO: 2201904 - DNA, 25 bp, Homo sapien
agagactctcaggaaaataagccca

SEQ ID NO: 2201905 - DNA, 25 bp, Homo sapien
gattagggaacatactggcccaaac

SEQ ID NO: 2201906 - DNA, 25 bp, Homo sapien
taacagacccctttgatgcaacagg

SEQ ID NO: 2201907 - DNA, 25 bp, Homo sapien
tctctcaacttgctggtttcccacg

SEQ ID NO: 2201908 - DNA, 25 bp, Homo sapien
gctggtttcccacgctctcgacttg

SEQ ID NO: 2201909 - DNA, 25 bp, Homo sapien
tagaaggggttacttctggatcctc

SEQ ID NO: 2201910 - DNA, 25 bp, Homo sapien
tacttctggatcctctctcaacttg

SEQ ID NO: 2201911 - DNA, 25 bp, Homo sapien
cttttctcgtgctgaagtgtgtgac

SEQ ID NO: 2201912 - DNA, 25 bp, Homo sapien
gcttttctcgtgctgaagtgtgtga

SEQ ID NO: 2201913 - DNA, 25 bp, Homo sapien
tcatcgttccacaattgcttgaggc

SEQ ID NO: 2201914 - DNA, 25 bp, Homo sapien
aattgcttgaggcattatcacagca

SEQ ID NO: 2201915 - DNA, 25 bp, Homo sapien
tgaggccctgattagggctgattag

SEQ ID NO: 2201916 - DNA, 25 bp, Homo sapien
gaggccctgattagggctgattagg

SEQ ID NO: 2201917 - DNA, 25 bp, Homo sapien
catgaggccctgattagggctgatt

SEQ ID NO: 2201918 - DNA, 25 bp, Homo sapien
tccatgaggccctgattagggctga

SEQ ID NO: 2201919 - DNA, 25 bp, Homo sapien
aagagaaagtgactgtgtcggatat

SEQ ID NO: 2201920 - DNA, 25 bp, Homo sapien
gatttgacaaggtgcttgtctctaa

SEQ ID NO: 2201921 - DNA, 25 bp, Homo sapien
tgactgtgtcggatatgcttttctc

SEQ ID NO: 2201922 - DNA, 25 bp, Homo sapien
tcactgatttgacaaggtgcttgtc

SEQ ID NO: 2201923 - DNA, 25 bp, Homo sapien
agcactggaggtagaactcatcccc

SEQ ID NO: 2201924 - DNA, 25 bp, Homo sapien
tggacataatgcagcagatgcactg

SEQ ID NO: 2201925 - DNA, 25 bp, Homo sapien
tgcatccaagcactggaggtagaac

SEQ ID NO: 2201926 - DNA, 25 bp, Homo sapien
ggacactggcattgcagatcttgga

SEQ ID NO: 2201927 - DNA, 25 bp, Homo sapien
tttcaggaccctgctccgtgagatc

SEQ ID NO: 2201928 - DNA, 25 bp, Homo sapien
gaagtgctcacgattggaagtgagc

SEQ ID NO: 2201929 - DNA, 25 bp, Homo sapien
ggaccctgctccgtgagatcttctt

SEQ ID NO: 2201930 - DNA, 25 bp, Homo sapien
aggaagtgctcacgattggaagtga

SEQ ID NO: 2201931 - DNA, 25 bp, Homo sapien
ccacaataacaagagtgttatggac

SEQ ID NO: 2201932 - DNA, 25 bp, Homo sapien
tatggacaccattgacctgctcctt

SEQ ID NO: 2201933 - DNA, 25 bp, Homo sapien
tcaatgagtacttctgctccctctc

SEQ ID NO: 2201934 - DNA, 25 bp, Homo sapien
tctccactctcatagaagatgtcta

SEQ ID NO: 2201935 - DNA, 25 bp, Homo sapien
gtattattgtgtccaagcaaaccaa

SEQ ID NO: 2201936 - DNA, 25 bp, Homo sapien
gcattcagctccagcaagaggtaca

SEQ ID NO: 2201937 - DNA, 25 bp, Homo sapien
tggacacgtctgtattattgtgtcc

SEQ ID NO: 2201938 - DNA, 25 bp, Homo sapien
agctccagcaagaggtacaggtctg

SEQ ID NO: 2201939 - DNA, 25 bp, Homo sapien
catgtaggtccagttgggattccat

SEQ ID NO: 2201940 - DNA, 25 bp, Homo sapien
tgatgtcatgtaggtccagttggga

SEQ ID NO: 2201941 - DNA, 25 bp, Homo sapien
aatgatgtcatgtaggtccagttgg

SEQ ID NO: 2201942 - DNA, 25 bp, Homo sapien
tgtcatgtaggtccagttgggattc

SEQ ID NO: 2201943 - DNA, 25 bp, Homo sapien
ttcaaatgcaaggatcattttcttc

SEQ ID NO: 2201944 - DNA, 25 bp, Homo sapien
caaatgcaaggatcattttcttcac

SEQ ID NO: 2201945 - DNA, 25 bp, Homo sapien
ctattcaaatgcaaggatcattttc

SEQ ID NO: 2201946 - DNA, 25 bp, Homo sapien
tattcaaatgcaaggatcattttct

SEQ ID NO: 2201947 - DNA, 25 bp, Homo sapien
tgagctttcatccaatggctcctcc

SEQ ID NO: 2201948 - DNA, 25 bp, Homo sapien
aatggctcctcctctttctcttcct

SEQ ID NO: 2201949 - DNA, 25 bp, Homo sapien
gagctttcatccaatggctcctcct

SEQ ID NO: 2201950 - DNA, 25 bp, Homo sapien
cctctgtgtcaataatctgaagcag

SEQ ID NO: 2201951 - DNA, 25 bp, Homo sapien
tgagtactagtttgtttctgatgca

SEQ ID NO: 2201952 - DNA, 25 bp, Homo sapien
tcctctttgccatctcggggacgtt

SEQ ID NO: 2201953 - DNA, 25 bp, Homo sapien
cttcccaatcttgagtactagtttg

SEQ ID NO: 2201954 - DNA, 25 bp, Homo sapien
gaagaagactgtgtctgctgaacca

SEQ ID NO: 2201955 - DNA, 25 bp, Homo sapien
tgacagtgatgtactccaaaggaga

SEQ ID NO: 2201956 - DNA, 25 bp, Homo sapien
taatctgagcaatatgagccattcg

SEQ ID NO: 2201957 - DNA, 25 bp, Homo sapien
tcagtgtgtgcacatgatggcagcc

SEQ ID NO: 2201958 - DNA, 25 bp, Homo sapien
tctaaatgaatgagtccagtccagc

SEQ ID NO: 2201959 - DNA, 25 bp, Homo sapien
taagacagagtatgtggatccagca

SEQ ID NO: 2201960 - DNA, 25 bp, Homo sapien
ggctactttgtaggaccccatgtct

SEQ ID NO: 2201961 - DNA, 25 bp, Homo sapien
tggaggccattatcacaagtctaaa

SEQ ID NO: 2201962 - DNA, 25 bp, Homo sapien
ggtccctccctcttcaagtggtctg

SEQ ID NO: 2201963 - DNA, 25 bp, Homo sapien
ctcttgtgctctcgctggagttggt

SEQ ID NO: 2201964 - DNA, 25 bp, Homo sapien
taggtccctccctcttcaagtggtc

SEQ ID NO: 2201965 - DNA, 25 bp, Homo sapien
tcctcttgtgctctcgctggagttg

SEQ ID NO: 2201966 - DNA, 25 bp, Homo sapien
gagggggtgtcactgttgaaatcgg

SEQ ID NO: 2201967 - DNA, 25 bp, Homo sapien
tcactgttgaaatcggaggagacca

SEQ ID NO: 2201968 - DNA, 25 bp, Homo sapien
ggtgtcactgttgaaatcggaggag

SEQ ID NO: 2201969 - DNA, 25 bp, Homo sapien
cactgttgaaatcggaggagaccac

SEQ ID NO: 2201970 - DNA, 25 bp, Homo sapien
atgcccttgaggggggccttcaacg

SEQ ID NO: 2201971 - DNA, 25 bp, Homo sapien
ttgaggggggccttcaacgcctgct

SEQ ID NO: 2201972 - DNA, 25 bp, Homo sapien
ggggggccttcaacgcctgcttcac

SEQ ID NO: 2201973 - DNA, 25 bp, Homo sapien
ccttgaggggggccttcaacgcctg

SEQ ID NO: 2201974 - DNA, 25 bp, Homo sapien
tgacacattggcagtgggggcatgg

SEQ ID NO: 2201975 - DNA, 25 bp, Homo sapien
cagacagcaggtcaggtccaccact

SEQ ID NO: 2201976 - DNA, 25 bp, Homo sapien
gggttttccagacagcaggtcaggt

SEQ ID NO: 2201977 - DNA, 25 bp, Homo sapien
tgatgttgtcatatttggcagggtt

SEQ ID NO: 2201978 - DNA, 25 bp, Homo sapien
tggcagcgtcagtagaggcaggaat

SEQ ID NO: 2201979 - DNA, 25 bp, Homo sapien
cagcgtcagtagaggcaggaatgat

SEQ ID NO: 2201980 - DNA, 25 bp, Homo sapien
ggagagccccgtggccgtcatgcca

SEQ ID NO: 2201981 - DNA, 25 bp, Homo sapien
agccccgtggccgtcatgccacagt

SEQ ID NO: 2201982 - DNA, 25 bp, Homo sapien
catggttcatgcccatcacaaacat

SEQ ID NO: 2201983 - DNA, 25 bp, Homo sapien
aggggcgctaagtagttggtggtgc

SEQ ID NO: 2201984 - DNA, 25 bp, Homo sapien
cttggccaggggcgctaagtagttg

SEQ ID NO: 2201985 - DNA, 25 bp, Homo sapien
ttgctgacgatcttgaggttgttgt

SEQ ID NO: 2201986 - DNA, 25 bp, Homo sapien
tggtgaagacgccagtggactccac

SEQ ID NO: 2201987 - DNA, 25 bp, Homo sapien
acatggtggtgaagacgccagtgga

SEQ ID NO: 2201988 - DNA, 25 bp, Homo sapien
ctacatggtggtgaagacgccagtg

SEQ ID NO: 2201989 - DNA, 25 bp, Homo sapien
ccttctacatggtggtgaagacgcc

SEQ ID NO: 2201990 - DNA, 25 bp, Homo sapien
tactcagcaccagcatcgccccact

SEQ ID NO: 2201991 - DNA, 25 bp, Homo sapien
cacttgattttagagggatcttgct

SEQ ID NO: 2201992 - DNA, 25 bp, Homo sapien
gattttagagggatcttgctcctga

SEQ ID NO: 2201993 - DNA, 25 bp, Homo sapien
gcatcgccccacttgattttagagg

SEQ ID NO: 2201994 - DNA, 25 bp, Homo sapien
cttgatggtgccatggaatttgcca

SEQ ID NO: 2201995 - DNA, 25 bp, Homo sapien
tggaatttgccatgggtggaatcat

SEQ ID NO: 2201996 - DNA, 25 bp, Homo sapien
catggaatttgccatgggtggaatc

SEQ ID NO: 2201997 - DNA, 25 bp, Homo sapien
gaatttgccatgggtggaatcatac

SEQ ID NO: 2201998 - DNA, 25 bp, Homo sapien
tccactttaacagagttaaacgcaa

SEQ ID NO: 2201999 - DNA, 25 bp, Homo sapien
aacagagttaaacgcaaccctgctg

SEQ ID NO: 2202000 - DNA, 25 bp, Homo sapien
cagagttaaacgcaaccctgctgac

SEQ ID NO: 2202001 - DNA, 25 bp, Homo sapien
ttaacagagttaaacgcaaccctgc

SEQ ID NO: 2202002 - DNA, 25 bp, Homo sapien
cgcctaatacgaccaaatccgttga

SEQ ID NO: 2202003 - DNA, 25 bp, Homo sapien
gcgcctaatacgaccaaatccgttg

SEQ ID NO: 2202004 - DNA, 25 bp, Homo sapien
caggcgcctaatacgaccaaatccg

SEQ ID NO: 2202005 - DNA, 25 bp, Homo sapien
cctaatacgaccaaatccgttgact

SEQ ID NO: 2202006 - DNA, 25 bp, Homo sapien
gtgtctcatggatgcggctggcaat

SEQ ID NO: 2202007 - DNA, 25 bp, Homo sapien
catggatgcggctggcaatgcaaga

SEQ ID NO: 2202008 - DNA, 25 bp, Homo sapien
ctggcaatgcaagagaagatgtggt

SEQ ID NO: 2202009 - DNA, 25 bp, Homo sapien
tggcaatgcaagagaagatgtggtt

SEQ ID NO: 2202010 - DNA, 25 bp, Homo sapien
tggaatgtcatcaaggcattgcctg

SEQ ID NO: 2202011 - DNA, 25 bp, Homo sapien
agtggaatgtcatcaaggcattgcc

SEQ ID NO: 2202012 - DNA, 25 bp, Homo sapien
gaatgtcatcaaggcattgcctgat

SEQ ID NO: 2202013 - DNA, 25 bp, Homo sapien
aagagtggaatgtcatcaaggcatt

SEQ ID NO: 2202014 - DNA, 25 bp, Homo sapien
tcgccacggaaaatggtcacacgct

SEQ ID NO: 2202015 - DNA, 25 bp, Homo sapien
catcttggccattggcggtggcgca

SEQ ID NO: 2202016 - DNA, 25 bp, Homo sapien
ggccttttgtaccactcgccacgga

SEQ ID NO: 2202017 - DNA, 25 bp, Homo sapien
caatggctttcaggacggagggaca

SEQ ID NO: 2202018 - DNA, 25 bp, Homo sapien
gaatgacggtggcaccgttgagtct

SEQ ID NO: 2202019 - DNA, 25 bp, Homo sapien
atgacggtggcaccgttgagtctcc

SEQ ID NO: 2202020 - DNA, 25 bp, Homo sapien
gacggtggcaccgttgagtctccgt

SEQ ID NO: 2202021 - DNA, 25 bp, Homo sapien
tgaatgacggtggcaccgttgagtc

SEQ ID NO: 2202022 - DNA, 25 bp, Homo sapien
tgaaactacttcttagttccaagcc

SEQ ID NO: 2202023 - DNA, 25 bp, Homo sapien
cataagaaatgccataacccaagta

SEQ ID NO: 2202024 - DNA, 25 bp, Homo sapien
tgccataacccaagtacttttgaaa

SEQ ID NO: 2202025 - DNA, 25 bp, Homo sapien
gccccagcatgtatcaattgtatga

SEQ ID NO: 2202026 - DNA, 25 bp, Homo sapien
gtgccagcctctgctgaatggaagt

SEQ ID NO: 2202027 - DNA, 25 bp, Homo sapien
ctgaatggaagtctgtaaggactcc

SEQ ID NO: 2202028 - DNA, 25 bp, Homo sapien
tgtgccagcctctgctgaatggaag

SEQ ID NO: 2202029 - DNA, 25 bp, Homo sapien
ttgagattcatcttcgccctcacat

SEQ ID NO: 2202030 - DNA, 25 bp, Homo sapien
aggggtagtggccagaacgcctcca

SEQ ID NO: 2202031 - DNA, 25 bp, Homo sapien
ggaggggtagtggccagaacgcctc

SEQ ID NO: 2202032 - DNA, 25 bp, Homo sapien
gagattcatcttcgccctcacattg

SEQ ID NO: 2202033 - DNA, 25 bp, Homo sapien
acacagcatgatcactaagtagaag

SEQ ID NO: 2202034 - DNA, 25 bp, Homo sapien
atgatcactaagtagaagttataac

SEQ ID NO: 2202035 - DNA, 25 bp, Homo sapien
gatcactaagtagaagttataacca

SEQ ID NO: 2202036 - DNA, 25 bp, Homo sapien
cacagcatgatcactaagtagaagt

SEQ ID NO: 2202037 - DNA, 25 bp, Homo sapien
tagagtaggctgcatcaaagttacc

SEQ ID NO: 2202038 - DNA, 25 bp, Homo sapien
gggttttcacacactacctcaggct

SEQ ID NO: 2202039 - DNA, 25 bp, Homo sapien
caaagttaccactgtacagtatggg

SEQ ID NO: 2202040 - DNA, 25 bp, Homo sapien
agggagtggatctttgtcggcaatg

SEQ ID NO: 2202041 - DNA, 25 bp, Homo sapien
ttgtacactgctgtgtgaacgttat

SEQ ID NO: 2202042 - DNA, 25 bp, Homo sapien
ggagctgcaagttgtacactgctgt

SEQ ID NO: 2202043 - DNA, 25 bp, Homo sapien
catggagctgcaagttgtacactgc

SEQ ID NO: 2202044 - DNA, 25 bp, Homo sapien
tacactgctgtgtgaacgttattca

SEQ ID NO: 2202045 - DNA, 25 bp, Homo sapien
caggcatagtaagcatgaggtagac

SEQ ID NO: 2202046 - DNA, 25 bp, Homo sapien
caaatcagataacatatgatgaggc

SEQ ID NO: 2202047 - DNA, 25 bp, Homo sapien
aagtactgatagaattcagagttgc

SEQ ID NO: 2202048 - DNA, 25 bp, Homo sapien
ctgtaggaagtaataagactaacca

SEQ ID NO: 2202049 - DNA, 25 bp, Homo sapien
ccaagcaggaagcataacgagcaaa

SEQ ID NO: 2202050 - DNA, 25 bp, Homo sapien
ggaagataacatccaccaagcagga

SEQ ID NO: 2202051 - DNA, 25 bp, Homo sapien
catactctcaaagctcttatgacca

SEQ ID NO: 2202052 - DNA, 25 bp, Homo sapien
tgtagtttagctgtcctccatactc

SEQ ID NO: 2202053 - DNA, 25 bp, Homo sapien
actggaatcaagtagctcagtgagc

SEQ ID NO: 2202054 - DNA, 25 bp, Homo sapien
ggaatcaagtagctcagtgagctcc

SEQ ID NO: 2202055 - DNA, 25 bp, Homo sapien
atactggaatcaagtagctcagtga

SEQ ID NO: 2202056 - DNA, 25 bp, Homo sapien
ctggaatcaagtagctcagtgagct

SEQ ID NO: 2202057 - DNA, 25 bp, Homo sapien
tttagccacttttaacagaatgcgt

SEQ ID NO: 2202058 - DNA, 25 bp, Homo sapien
cagaatgcgttgcttaataacccat

SEQ ID NO: 2202059 - DNA, 25 bp, Homo sapien
cacttttaacagaatgcgttgctta

SEQ ID NO: 2202060 - DNA, 25 bp, Homo sapien
atgcgttgcttaataacccattccc

SEQ ID NO: 2202061 - DNA, 25 bp, Homo sapien
ttgagtcactatggacaccaaagct

SEQ ID NO: 2202062 - DNA, 25 bp, Homo sapien
tactacttgttatcagattcctcca

SEQ ID NO: 2202063 - DNA, 25 bp, Homo sapien
tttgccagtgacctttacccagcca

SEQ ID NO: 2202064 - DNA, 25 bp, Homo sapien
tcactttgtggttaacactgtaaac

SEQ ID NO: 2202065 - DNA, 25 bp, Homo sapien
tttccctaagtgtcggccggtctga

SEQ ID NO: 2202066 - DNA, 25 bp, Homo sapien
cacatgttggcaggttccatgatgc

SEQ ID NO: 2202067 - DNA, 25 bp, Homo sapien
tcggccggtctgagaaataaaggga

SEQ ID NO: 2202068 - DNA, 25 bp, Homo sapien
agacatcacatgttggcaggttcca

SEQ ID NO: 2202069 - DNA, 25 bp, Homo sapien
cctgtgggcctgcttctattgtcca

SEQ ID NO: 2202070 - DNA, 25 bp, Homo sapien
tatttccttgaccatattattcaat

SEQ ID NO: 2202071 - DNA, 25 bp, Homo sapien
tttgattgaatgccattgtgcataa

SEQ ID NO: 2202072 - DNA, 25 bp, Homo sapien
ggcctgcttctattgtccacttttt

SEQ ID NO: 2202073 - DNA, 25 bp, Homo sapien
tgaataatatacgtaaggtctcctg

SEQ ID NO: 2202074 - DNA, 25 bp, Homo sapien
actgctgttatggaagatactctga

SEQ ID NO: 2202075 - DNA, 25 bp, Homo sapien
aaaatgtcatactcactgagcgtgg

SEQ ID NO: 2202076 - DNA, 25 bp, Homo sapien
taatctgggagtttgccccacatgg

SEQ ID NO: 2202077 - DNA, 25 bp, Homo sapien
aaagaatatagagcatgattcctct

SEQ ID NO: 2202078 - DNA, 25 bp, Homo sapien
tcctctcatttataccatgggtttg

SEQ ID NO: 2202079 - DNA, 25 bp, Homo sapien
aggatcaattaacgctacgagttca

SEQ ID NO: 2202080 - DNA, 25 bp, Homo sapien
tcaattaacgctacgagttcaagac

SEQ ID NO: 2202081 - DNA, 25 bp, Homo sapien
gagttgatttcacactgaaggcctt

SEQ ID NO: 2202082 - DNA, 25 bp, Homo sapien
gattactcgccatgattatttgaca

SEQ ID NO: 2202083 - DNA, 25 bp, Homo sapien
cagtggtgacttctcactaaaggct

SEQ ID NO: 2202084 - DNA, 25 bp, Homo sapien
gttttcctcggcatacatactctga

SEQ ID NO: 2202085 - DNA, 25 bp, Homo sapien
tatgaactcttaaaggcttttggac

SEQ ID NO: 2202086 - DNA, 25 bp, Homo sapien
ggctggacgtagtacatttaatacc

SEQ ID NO: 2202087 - DNA, 25 bp, Homo sapien
tttagtgggactgggcttctcatca

SEQ ID NO: 2202088 - DNA, 25 bp, Homo sapien
tgcttgtctaatgtgtgttttttca

SEQ ID NO: 2202089 - DNA, 25 bp, Homo sapien
tgtatgagttcgttgatgtttaatc

SEQ ID NO: 2202090 - DNA, 25 bp, Homo sapien
tcgttgatgtttaatcagagttgac

SEQ ID NO: 2202091 - DNA, 25 bp, Homo sapien
gttcgttgatgtttaatcagagttg

SEQ ID NO: 2202092 - DNA, 25 bp, Homo sapien
tgagttcgttgatgtttaatcagag

SEQ ID NO: 2202093 - DNA, 25 bp, Homo sapien
ggcttttgcacattcgcagcattca

SEQ ID NO: 2202094 - DNA, 25 bp, Homo sapien
ctggtgtgctatgagggttgacttc

SEQ ID NO: 2202095 - DNA, 25 bp, Homo sapien
tttgaacacctttcccatgaataat

SEQ ID NO: 2202096 - DNA, 25 bp, Homo sapien
ttttgaacacctttcccatgaataa

SEQ ID NO: 2202097 - DNA, 25 bp, Homo sapien
ttccttgcctatgaatgcagcttgc

SEQ ID NO: 2202098 - DNA, 25 bp, Homo sapien
ccttgcctatgaatgcagcttgcca

SEQ ID NO: 2202099 - DNA, 25 bp, Homo sapien
tccttgcctatgaatgcagcttgcc

SEQ ID NO: 2202100 - DNA, 25 bp, Homo sapien
aaatgcaatgaatcatcaaacttgt

SEQ ID NO: 2202101 - DNA, 25 bp, Homo sapien
aaaatgcaatgaatcatcaaacttg

SEQ ID NO: 2202102 - DNA, 25 bp, Homo sapien
tggccaagattcctataatttgagt

SEQ ID NO: 2202103 - DNA, 25 bp, Homo sapien
ctggccaagattcctataatttgag

SEQ ID NO: 2202104 - DNA, 25 bp, Homo sapien
ggccaagattcctataatttgagtg

SEQ ID NO: 2202105 - DNA, 25 bp, Homo sapien
ggtagagtcgtagttctcaacctga

SEQ ID NO: 2202106 - DNA, 25 bp, Homo sapien
tatcaggagaacaacattacagatc

SEQ ID NO: 2202107 - DNA, 25 bp, Homo sapien
tcttctgaaaagtacgcacgtgttc

SEQ ID NO: 2202108 - DNA, 25 bp, Homo sapien
tcaacctgagtggtgattatccagg

SEQ ID NO: 2202109 - DNA, 25 bp, Homo sapien
ttctcactaacaagccaggaggctg

SEQ ID NO: 2202110 - DNA, 25 bp, Homo sapien
ccaggctgggtagagtaaaggtcac

SEQ ID NO: 2202111 - DNA, 25 bp, Homo sapien
tccacaagtccgaggctctgagaag

SEQ ID NO: 2202112 - DNA, 25 bp, Homo sapien
agaacacagagcctgtaaccggcgg

SEQ ID NO: 2202113 - DNA, 25 bp, Homo sapien
gtcccttttccctggcctgactcac

SEQ ID NO: 2202114 - DNA, 25 bp, Homo sapien
ctggtcccaacctgaagatcacatc

SEQ ID NO: 2202115 - DNA, 25 bp, Homo sapien
tgccatccaggactcgtcacctggt

SEQ ID NO: 2202116 - DNA, 25 bp, Homo sapien
atcacatctggcttcccaactagat

SEQ ID NO: 2202117 - DNA, 25 bp, Homo sapien
cacatctggcttcccaactagatgc

SEQ ID NO: 2202118 - DNA, 25 bp, Homo sapien
actacacagtgggcagtaacccaaa

SEQ ID NO: 2202119 - DNA, 25 bp, Homo sapien
tgggcagtaacccaaactcactgag

SEQ ID NO: 2202120 - DNA, 25 bp, Homo sapien
ctacacagtgggcagtaacccaaac

SEQ ID NO: 2202121 - DNA, 25 bp, Homo sapien
cagtgggcagtaacccaaactcact

SEQ ID NO: 2202122 - DNA, 25 bp, Homo sapien
gaaagaaacacagtactggaggcat

SEQ ID NO: 2202123 - DNA, 25 bp, Homo sapien
agaaacacagtactggaggcattct

SEQ ID NO: 2202124 - DNA, 25 bp, Homo sapien
gaaacacagtactggaggcattctg

SEQ ID NO: 2202125 - DNA, 25 bp, Homo sapien
aagaaacacagtactggaggcattc

SEQ ID NO: 2202126 - DNA, 25 bp, Homo sapien
cagggtgaagtccacaaacacgtcc

SEQ ID NO: 2202127 - DNA, 25 bp, Homo sapien
gttctcaagcatgacatccctgtag

SEQ ID NO: 2202128 - DNA, 25 bp, Homo sapien
tagaggttcttctgggcagagtcca

SEQ ID NO: 2202129 - DNA, 25 bp, Homo sapien
caaacacgtccttgaaggtcaatga

SEQ ID NO: 2202130 - DNA, 25 bp, Homo sapien
ctttagcaccccaggaccagcctgg

SEQ ID NO: 2202131 - DNA, 25 bp, Homo sapien
tttagcaccccaggaccagcctggg

SEQ ID NO: 2202132 - DNA, 25 bp, Homo sapien
ttagcaccccaggaccagcctgggg

SEQ ID NO: 2202133 - DNA, 25 bp, Homo sapien
agcaccccaggaccagcctggggca

SEQ ID NO: 2202134 - DNA, 25 bp, Homo sapien
tcgccgccaccctagaaggaacttg

SEQ ID NO: 2202135 - DNA, 25 bp, Homo sapien
gattgatacaaaatgacaccttggc

SEQ ID NO: 2202136 - DNA, 25 bp, Homo sapien
cacacggagggcttactctgtgccc

SEQ ID NO: 2202137 - DNA, 25 bp, Homo sapien
gcctaaataaccagtccaggtcaca

SEQ ID NO: 2202138 - DNA, 25 bp, Homo sapien
cttgttgtgctcctgcaaaggatgg

SEQ ID NO: 2202139 - DNA, 25 bp, Homo sapien
ttgttgtgctcctgcaaaggatgga

SEQ ID NO: 2202140 - DNA, 25 bp, Homo sapien
tgttgtgctcctgcaaaggatggag

SEQ ID NO: 2202141 - DNA, 25 bp, Homo sapien
ttgtgctcctgcaaaggatggagat

SEQ ID NO: 2202142 - DNA, 25 bp, Homo sapien
ggtctgggctcttgctgaggcttct

SEQ ID NO: 2202143 - DNA, 25 bp, Homo sapien
cggcaggaccaagggattcagagac

SEQ ID NO: 2202144 - DNA, 25 bp, Homo sapien
tctcttgtgtccaaggcggcaggac

SEQ ID NO: 2202145 - DNA, 25 bp, Homo sapien
ccgtgagcctcctttgctctgagga

SEQ ID NO: 2202146 - DNA, 25 bp, Homo sapien
acagccagtgtgaacgaagcgccac

SEQ ID NO: 2202147 - DNA, 25 bp, Homo sapien
tcggcccgcgcttcagtggttatga

SEQ ID NO: 2202148 - DNA, 25 bp, Homo sapien
aagtcaaagcaatgcgcacgcgcag

SEQ ID NO: 2202149 - DNA, 25 bp, Homo sapien
tccgggtcagccgagcatttccgct

SEQ ID NO: 2202150 - DNA, 25 bp, Homo sapien
caacaaagcctgtggccgatgtggc

SEQ ID NO: 2202151 - DNA, 25 bp, Homo sapien
aaggaatgtgtgaccatttccaacg

SEQ ID NO: 2202152 - DNA, 25 bp, Homo sapien
tgaccatttccaacggtaagtcgta

SEQ ID NO: 2202153 - DNA, 25 bp, Homo sapien
tgtgtgaccatttccaacggtaagt

SEQ ID NO: 2202154 - DNA, 25 bp, Homo sapien
gaatgtgtgaccatttccaacggta

SEQ ID NO: 2202155 - DNA, 25 bp, Homo sapien
ttgcagtggacgtggggtgttccca

SEQ ID NO: 2202156 - DNA, 25 bp, Homo sapien
agaactccgcgcgggctttccagtg

SEQ ID NO: 2202157 - DNA, 25 bp, Homo sapien
tccgaagccgaaatcccttcttcca

SEQ ID NO: 2202158 - DNA, 25 bp, Homo sapien
gcccctgccggctccgaagccgaaa

SEQ ID NO: 2202159 - DNA, 25 bp, Homo sapien
ttgggcctcagtcccctcttttctg

SEQ ID NO: 2202160 - DNA, 25 bp, Homo sapien
gcctcagtcccctcttttctgccat

SEQ ID NO: 2202161 - DNA, 25 bp, Homo sapien
cttcttgggcctcagtcccctcttt

SEQ ID NO: 2202162 - DNA, 25 bp, Homo sapien
tagcttcttgggcctcagtcccctc

SEQ ID NO: 2202163 - DNA, 25 bp, Homo sapien
caaaatctctattcttgagcacagt

SEQ ID NO: 2202164 - DNA, 25 bp, Homo sapien
tgatcatggcatactatagcctcgg

SEQ ID NO: 2202165 - DNA, 25 bp, Homo sapien
cagtgtctatttagaggcgtgatca

SEQ ID NO: 2202166 - DNA, 25 bp, Homo sapien
tcaaaggaccctggtctcaaaggac

SEQ ID NO: 2202167 - DNA, 25 bp, Homo sapien
gttcttattttcttgacgcacacaa

SEQ ID NO: 2202168 - DNA, 25 bp, Homo sapien
ggttcttattttcttgacgcacaca

SEQ ID NO: 2202169 - DNA, 25 bp, Homo sapien
ttaaatgtcttcactgtcccagtga

SEQ ID NO: 2202170 - DNA, 25 bp, Homo sapien
cagttagatttctttgttaaatgtc

SEQ ID NO: 2202171 - DNA, 25 bp, Homo sapien
tcttgacattccacgttactctgtg

SEQ ID NO: 2202172 - DNA, 25 bp, Homo sapien
ttgaatgtccatgtcttgggaggtc

SEQ ID NO: 2202173 - DNA, 25 bp, Homo sapien
tgcccctaggtatgggtttctgggc

SEQ ID NO: 2202174 - DNA, 25 bp, Homo sapien
tcttgctctcaaacacatggagtct

SEQ ID NO: 2202175 - DNA, 25 bp, Homo sapien
ttatttgaattctttctgctaatac

SEQ ID NO: 2202176 - DNA, 25 bp, Homo sapien
tgaattctttctgctaatacaatga

SEQ ID NO: 2202177 - DNA, 25 bp, Homo sapien
atttgaattctttctgctaatacaa

SEQ ID NO: 2202178 - DNA, 25 bp, Homo sapien
gtttatttgaattctttctgctaat

SEQ ID NO: 2202179 - DNA, 25 bp, Homo sapien
agttatttgctgttctacatcagtc

SEQ ID NO: 2202180 - DNA, 25 bp, Homo sapien
gttatttgctgttctacatcagtct

SEQ ID NO: 2202181 - DNA, 25 bp, Homo sapien
cttagttatttgctgttctacatca

SEQ ID NO: 2202182 - DNA, 25 bp, Homo sapien
atttgctgttctacatcagtcttac

SEQ ID NO: 2202183 - DNA, 25 bp, Homo sapien
cgggtgatttgcctctcaccctggg

SEQ ID NO: 2202184 - DNA, 25 bp, Homo sapien
ggttcctgtgacacttccatctttt

SEQ ID NO: 2202185 - DNA, 25 bp, Homo sapien
tcctctggtgcaggcatgcagtgcg

SEQ ID NO: 2202186 - DNA, 25 bp, Homo sapien
gactgagtcttgtaattcgtattcc

SEQ ID NO: 2202187 - DNA, 25 bp, Homo sapien
agtgtctactagttctggtggtgat

SEQ ID NO: 2202188 - DNA, 25 bp, Homo sapien
tccttgggcactcttggcaatctcc

SEQ ID NO: 2202189 - DNA, 25 bp, Homo sapien
ggttctttattggtgtgcgtggtct

SEQ ID NO: 2202190 - DNA, 25 bp, Homo sapien
gagcttgccgactgctaatagctct

SEQ ID NO: 2202191 - DNA, 25 bp, Homo sapien
tcttctagggcttgcgccttttccc

SEQ ID NO: 2202192 - DNA, 25 bp, Homo sapien
gcttgcgccttttccctgggtgctc

SEQ ID NO: 2202193 - DNA, 25 bp, Homo sapien
agggcttgcgccttttccctgggtg

SEQ ID NO: 2202194 - DNA, 25 bp, Homo sapien
cttctagggcttgcgccttttccct

SEQ ID NO: 2202195 - DNA, 25 bp, Homo sapien
caagcaacctcagcggcgctgtcgg

SEQ ID NO: 2202196 - DNA, 25 bp, Homo sapien
ggcgacgccgagagtactgcaagtt

SEQ ID NO: 2202197 - DNA, 25 bp, Homo sapien
gcagtgtctcgcgagaagcagcaca

SEQ ID NO: 2202198 - DNA, 25 bp, Homo sapien
tgctgtacacgctggtgctgttgct

SEQ ID NO: 2202199 - DNA, 25 bp, Homo sapien
gcgacttctccgtgctgcggctgta

SEQ ID NO: 2202200 - DNA, 25 bp, Homo sapien
tgtatccgggcgacgccgagagctt

SEQ ID NO: 2202201 - DNA, 25 bp, Homo sapien
ccatgtggcatctatggcaggcgct

SEQ ID NO: 2202202 - DNA, 25 bp, Homo sapien
tgctgcgttcgctcttccgctgcga

SEQ ID NO: 2202203 - DNA, 25 bp, Homo sapien
gaaggtggtgcagcttttccgcgac

SEQ ID NO: 2202204 - DNA, 25 bp, Homo sapien
ttccgctggcggactaacaaggtca

SEQ ID NO: 2202205 - DNA, 25 bp, Homo sapien
tggtggtcatcaaggacgtgcgcct

SEQ ID NO: 2202206 - DNA, 25 bp, Homo sapien
ccctgttgcgtgatccaggcctcaa

SEQ ID NO: 2202207 - DNA, 25 bp, Homo sapien
tgccgacggcgccacgtagcctccc

SEQ ID NO: 2202208 - DNA, 25 bp, Homo sapien
tggtcttccgggagcctggaatggc

SEQ ID NO: 2202209 - DNA, 25 bp, Homo sapien
agacgccgctggagatggatgccga

SEQ ID NO: 2202210 - DNA, 25 bp, Homo sapien
cctcgcagcggagaggagggcgacg

SEQ ID NO: 2202211 - DNA, 25 bp, Homo sapien
aaacatgcaggcacagtccagcggc

SEQ ID NO: 2202212 - DNA, 25 bp, Homo sapien
cctacctatccctaatctttctgtt

SEQ ID NO: 2202213 - DNA, 25 bp, Homo sapien
tgtctgttttatgcgcaggctccag

SEQ ID NO: 2202214 - DNA, 25 bp, Homo sapien
cttgcaacacttcttgcacattgtg

SEQ ID NO: 2202215 - DNA, 25 bp, Homo sapien
ggacacagccgttgcaaaggacgct

SEQ ID NO: 2202216 - DNA, 25 bp, Homo sapien
caggacttgctgaatactcggaaat

SEQ ID NO: 2202217 - DNA, 25 bp, Homo sapien
tcggaaatctcagctctctcaagtg

SEQ ID NO: 2202218 - DNA, 25 bp, Homo sapien
tggtggtcaatccagggtgcctcac

SEQ ID NO: 2202219 - DNA, 25 bp, Homo sapien
gctggacttggttcaggagccagct

SEQ ID NO: 2202220 - DNA, 25 bp, Homo sapien
caaccccaggcctaaagaaagctgg

SEQ ID NO: 2202221 - DNA, 25 bp, Homo sapien
aaagaacctctcagtgagggaaaca

SEQ ID NO: 2202222 - DNA, 25 bp, Homo sapien
ggagaggaatagcttacacccagaa

SEQ ID NO: 2202223 - DNA, 25 bp, Homo sapien
gggcaggaacacacatggctagctt

SEQ ID NO: 2202224 - DNA, 25 bp, Homo sapien
taaaggttgtggataacgccaagtc

SEQ ID NO: 2202225 - DNA, 25 bp, Homo sapien
tgttaaatatcagtaaagggcagga

SEQ ID NO: 2202226 - DNA, 25 bp, Homo sapien
gcaaacattgagtaaaatgctaggg

SEQ ID NO: 2202227 - DNA, 25 bp, Homo sapien
agctggccctactatgaagtcacac

SEQ ID NO: 2202228 - DNA, 25 bp, Homo sapien
aataatcacaacacaagtcagcccc

SEQ ID NO: 2202229 - DNA, 25 bp, Homo sapien
caaaaggacaacttaggaggagctg

SEQ ID NO: 2202230 - DNA, 25 bp, Homo sapien
tgcttctccaaagcccacaattgga

SEQ ID NO: 2202231 - DNA, 25 bp, Homo sapien
tcaggtagcagaaaaccggctgcct

SEQ ID NO: 2202232 - DNA, 25 bp, Homo sapien
cctgtgtgttccatatgggccacga

SEQ ID NO: 2202233 - DNA, 25 bp, Homo sapien
tgtgtgcgctcctgtctgctttgga

SEQ ID NO: 2202234 - DNA, 25 bp, Homo sapien
tgggccacgactatagtataccctg

SEQ ID NO: 2202235 - DNA, 25 bp, Homo sapien
tgggtgacaagatgtgtttaatttt

SEQ ID NO: 2202236 - DNA, 25 bp, Homo sapien
tgacaagatgtgtttaattttttaa

SEQ ID NO: 2202237 - DNA, 25 bp, Homo sapien
gtgacaagatgtgtttaatttttta

SEQ ID NO: 2202238 - DNA, 25 bp, Homo sapien
ctgggtgacaagatgtgtttaattt

SEQ ID NO: 2202239 - DNA, 25 bp, Homo sapien
tgtatcagaatgtagcagccgacac

SEQ ID NO: 2202240 - DNA, 25 bp, Homo sapien
cacaacgggtgcacagtaggtttcc

SEQ ID NO: 2202241 - DNA, 25 bp, Homo sapien
tgatgggatgacgtcaaacagacca

SEQ ID NO: 2202242 - DNA, 25 bp, Homo sapien
tctgatgagatgctctaacaccctg

SEQ ID NO: 2202243 - DNA, 25 bp, Homo sapien
tctttgtcctagaccgaatcgttca

SEQ ID NO: 2202244 - DNA, 25 bp, Homo sapien
tcgttcatggatagctgagataccc

SEQ ID NO: 2202245 - DNA, 25 bp, Homo sapien
ctgagatacccttttgcatgttttc

SEQ ID NO: 2202246 - DNA, 25 bp, Homo sapien
gaccgaatcgttcatggatagctga

SEQ ID NO: 2202247 - DNA, 25 bp, Homo sapien
gagaacacagcctgaagagatcctt

SEQ ID NO: 2202248 - DNA, 25 bp, Homo sapien
tcggatccatatgcccttcctgtga

SEQ ID NO: 2202249 - DNA, 25 bp, Homo sapien
cagtaaccaccctggatgctcggat

SEQ ID NO: 2202250 - DNA, 25 bp, Homo sapien
aatgcttatttgtctgatcacccca

SEQ ID NO: 2202251 - DNA, 25 bp, Homo sapien
agttcaggtttctggtagttctcaa

SEQ ID NO: 2202252 - DNA, 25 bp, Homo sapien
aagttcaggtttctggtagttctca

SEQ ID NO: 2202253 - DNA, 25 bp, Homo sapien
ttgctccagcagtaaatgggcccac

SEQ ID NO: 2202254 - DNA, 25 bp, Homo sapien
tggctgcacatcaagaacactcctg

SEQ ID NO: 2202255 - DNA, 25 bp, Homo sapien
tctgctctagaacatcggactcggc

SEQ ID NO: 2202256 - DNA, 25 bp, Homo sapien
tcctgaggttccaaacaaagcatgg

SEQ ID NO: 2202257 - DNA, 25 bp, Homo sapien
tgtgttgaatgatgcctgacatggc

SEQ ID NO: 2202258 - DNA, 25 bp, Homo sapien
agggttattctccacatcttacaaa

SEQ ID NO: 2202259 - DNA, 25 bp, Homo sapien
aatctgatcttatgccagactggca

SEQ ID NO: 2202260 - DNA, 25 bp, Homo sapien
gatgtggaaccacttgacgaatgga

SEQ ID NO: 2202261 - DNA, 25 bp, Homo sapien
tgacagctcggggttagtgacaaag

SEQ ID NO: 2202262 - DNA, 25 bp, Homo sapien
ttccaaatggctgacagctcggggt

SEQ ID NO: 2202263 - DNA, 25 bp, Homo sapien
cagctcggggttagtgacaaaggca

SEQ ID NO: 2202264 - DNA, 25 bp, Homo sapien
atttgtaatcaaataaggacttaga

SEQ ID NO: 2202265 - DNA, 25 bp, Homo sapien
cagtgaagactacaagaccctttgg

SEQ ID NO: 2202266 - DNA, 25 bp, Homo sapien
aaatgctgcaactagattctgggcc

SEQ ID NO: 2202267 - DNA, 25 bp, Homo sapien
tgtcgtagacagcaattcagggaag

SEQ ID NO: 2202268 - DNA, 25 bp, Homo sapien
tgtttacattggaactacactgtcg

SEQ ID NO: 2202269 - DNA, 25 bp, Homo sapien
catcaccagggtgtgtctgttagtt

SEQ ID NO: 2202270 - DNA, 25 bp, Homo sapien
aagacccaaccaaagacccaagcag

SEQ ID NO: 2202271 - DNA, 25 bp, Homo sapien
gcaaagctttataaagacccaacca

SEQ ID NO: 2202272 - DNA, 25 bp, Homo sapien
gtaagcaatataagataagcaaagc

SEQ ID NO: 2202273 - DNA, 25 bp, Homo sapien
catgggtttggataggttgtttagc

SEQ ID NO: 2202274 - DNA, 25 bp, Homo sapien
aggatataagaacttcccttccagg

SEQ ID NO: 2202275 - DNA, 25 bp, Homo sapien
cttccaggggctatgaaagctcttt

SEQ ID NO: 2202276 - DNA, 25 bp, Homo sapien
tcactagcctagttgaccctgaggg

SEQ ID NO: 2202277 - DNA, 25 bp, Homo sapien
gaaaagcccacgttattgaaagcat

SEQ ID NO: 2202278 - DNA, 25 bp, Homo sapien
tacgggtggactagactgggacaca

SEQ ID NO: 2202279 - DNA, 25 bp, Homo sapien
tgggttgccaaaaataagctagcac

SEQ ID NO: 2202280 - DNA, 25 bp, Homo sapien
aaatgactgatttcactacgggtgg

SEQ ID NO: 2202281 - DNA, 25 bp, Homo sapien
gacagagctttctagtgggctgaaa

SEQ ID NO: 2202282 - DNA, 25 bp, Homo sapien
cactcagtggtgtaaagacactcgg

SEQ ID NO: 2202283 - DNA, 25 bp, Homo sapien
gcattcgtcggctcaaagtttggaa

SEQ ID NO: 2202284 - DNA, 25 bp, Homo sapien
gacactcggactcttaagcttatag

SEQ ID NO: 2202285 - DNA, 25 bp, Homo sapien
tatggatatagccagagaaggaact

SEQ ID NO: 2202286 - DNA, 25 bp, Homo sapien
tcttcgttccatgttgaaatgttcg

SEQ ID NO: 2202287 - DNA, 25 bp, Homo sapien
ttcgttccatgttgaaatgttcgtg

SEQ ID NO: 2202288 - DNA, 25 bp, Homo sapien
acttctttatggatatagccagaga

SEQ ID NO: 2202289 - DNA, 25 bp, Homo sapien
gcagtcaagcagacttcgttgccag

SEQ ID NO: 2202290 - DNA, 25 bp, Homo sapien
gtcaagcagacttcgttgccagagc

SEQ ID NO: 2202291 - DNA, 25 bp, Homo sapien
gccttccttctctttaacttgataa

SEQ ID NO: 2202292 - DNA, 25 bp, Homo sapien
agcctctcatgggaggaatcccccc

SEQ ID NO: 2202293 - DNA, 25 bp, Homo sapien
ccaacaacactagggcttgcagctg

SEQ ID NO: 2202294 - DNA, 25 bp, Homo sapien
ctccaacaacactagggcttgcagc

SEQ ID NO: 2202295 - DNA, 25 bp, Homo sapien
gtgggaataggtctacgtttgtctg

SEQ ID NO: 2202296 - DNA, 25 bp, Homo sapien
ctaccccatcgcgccagggcttggg

SEQ ID NO: 2202297 - DNA, 25 bp, Homo sapien
cactaggcgggtgccccggctcgaa

SEQ ID NO: 2202298 - DNA, 25 bp, Homo sapien
tccaggggaaacactaggcgggtgc

SEQ ID NO: 2202299 - DNA, 25 bp, Homo sapien
tcaagcattatcttccaggggaaac

SEQ ID NO: 2202300 - DNA, 25 bp, Homo sapien
atcttccaggggaaacactaggcgg

SEQ ID NO: 2202301 - DNA, 25 bp, Homo sapien
gtcgccttcggtcaggatgaaatca

SEQ ID NO: 2202302 - DNA, 25 bp, Homo sapien
gtaggtcaatgtcaggtcgccttcg

SEQ ID NO: 2202303 - DNA, 25 bp, Homo sapien
tgtgcgaacttgaggagccatttgc

SEQ ID NO: 2202304 - DNA, 25 bp, Homo sapien
attcccaggtctcgctccagcactt

SEQ ID NO: 2202305 - DNA, 25 bp, Homo sapien
ggcatgaactgtgatgtggtccgct

SEQ ID NO: 2202306 - DNA, 25 bp, Homo sapien
gaactgtgatgtggtccgctttcac

SEQ ID NO: 2202307 - DNA, 25 bp, Homo sapien
tgatgtggtccgctttcactctttg

SEQ ID NO: 2202308 - DNA, 25 bp, Homo sapien
tgtggtccgctttcactctttgcag

SEQ ID NO: 2202309 - DNA, 25 bp, Homo sapien
tgacttggcagttgtcatccctgtt

SEQ ID NO: 2202310 - DNA, 25 bp, Homo sapien
gtccgagggcctagggatgacagac

SEQ ID NO: 2202311 - DNA, 25 bp, Homo sapien
cagcgggtttaggacacatggtgac

SEQ ID NO: 2202312 - DNA, 25 bp, Homo sapien
gagctctctgcagcagcgggtttag

SEQ ID NO: 2202313 - DNA, 25 bp, Homo sapien
aatctaagacgtccaccagtgtaca

SEQ ID NO: 2202314 - DNA, 25 bp, Homo sapien
tgcaggagtcagccctaaatctaag

SEQ ID NO: 2202315 - DNA, 25 bp, Homo sapien
taaatctaagacgtccaccagtgta

SEQ ID NO: 2202316 - DNA, 25 bp, Homo sapien
cctaaatctaagacgtccaccagtg

SEQ ID NO: 2202317 - DNA, 25 bp, Homo sapien
tggccatttctaatcagcttattag

SEQ ID NO: 2202318 - DNA, 25 bp, Homo sapien
aaaagctttctctgttactatgcga

SEQ ID NO: 2202319 - DNA, 25 bp, Homo sapien
gttactatgcgaaatctataaacat

SEQ ID NO: 2202320 - DNA, 25 bp, Homo sapien
gaagatggccatttctaatcagctt

SEQ ID NO: 2202321 - DNA, 25 bp, Homo sapien
gaggcatgagtatgatggtttcttc

SEQ ID NO: 2202322 - DNA, 25 bp, Homo sapien
ccaggactccaaccctgatgtgcag

SEQ ID NO: 2202323 - DNA, 25 bp, Homo sapien
cttcctacgtaagacactaccctgg

SEQ ID NO: 2202324 - DNA, 25 bp, Homo sapien
tggcatggtgaccaggactccaacc

SEQ ID NO: 2202325 - DNA, 25 bp, Homo sapien
tggtcagacatcgagctagtaagcc

SEQ ID NO: 2202326 - DNA, 25 bp, Homo sapien
gacatcgagctagtaagccacacca

SEQ ID NO: 2202327 - DNA, 25 bp, Homo sapien
gtcagacatcgagctagtaagccac

SEQ ID NO: 2202328 - DNA, 25 bp, Homo sapien
atcgagctagtaagccacaccaggc

SEQ ID NO: 2202329 - DNA, 25 bp, Homo sapien
cctctccaggtagtgtctctaactt

SEQ ID NO: 2202330 - DNA, 25 bp, Homo sapien
ctttaggtatctgtggcttgaagaa

SEQ ID NO: 2202331 - DNA, 25 bp, Homo sapien
tctccaggtagtgtctctaactttc

SEQ ID NO: 2202332 - DNA, 25 bp, Homo sapien
ctctccaggtagtgtctctaacttt

SEQ ID NO: 2202333 - DNA, 25 bp, Homo sapien
acatgagtctaccaggctgtgggct

SEQ ID NO: 2202334 - DNA, 25 bp, Homo sapien
taaaaaggcatagttccctggacac

SEQ ID NO: 2202335 - DNA, 25 bp, Homo sapien
tacaagatcagacttggccgagttc

SEQ ID NO: 2202336 - DNA, 25 bp, Homo sapien
cacacgttccataagaggatgggct

SEQ ID NO: 2202337 - DNA, 25 bp, Homo sapien
agcctgaatatccatgcgctctcct

SEQ ID NO: 2202338 - DNA, 25 bp, Homo sapien
cacagcctgaatatccatgcgctct

SEQ ID NO: 2202339 - DNA, 25 bp, Homo sapien
ccatgcgctctcctgttttgtccgg

SEQ ID NO: 2202340 - DNA, 25 bp, Homo sapien
tgttttgtccggtttcctctggcag

SEQ ID NO: 2202341 - DNA, 25 bp, Homo sapien
ttctaatgagtcaaacttaccaggg

SEQ ID NO: 2202342 - DNA, 25 bp, Homo sapien
tcaagaccagtgaggagaattgtgc

SEQ ID NO: 2202343 - DNA, 25 bp, Homo sapien
catgactctgtttatagccttgggc

SEQ ID NO: 2202344 - DNA, 25 bp, Homo sapien
tgaagcaaagttctagccaacagct

SEQ ID NO: 2202345 - DNA, 25 bp, Homo sapien
cagggtttcacccaaaaatgagaag

SEQ ID NO: 2202346 - DNA, 25 bp, Homo sapien
acactgagcatgtgacctggatcta

SEQ ID NO: 2202347 - DNA, 25 bp, Homo sapien
actgagccctgctgttagtggctca

SEQ ID NO: 2202348 - DNA, 25 bp, Homo sapien
atggccacagagtgcactgagccct

SEQ ID NO: 2202349 - DNA, 25 bp, Homo sapien
catgtttttccccatatgacagcaa

SEQ ID NO: 2202350 - DNA, 25 bp, Homo sapien
ctggagaaccaagcttgaagtttgc

SEQ ID NO: 2202351 - DNA, 25 bp, Homo sapien
tggagaaataaggtcctctctgcac

SEQ ID NO: 2202352 - DNA, 25 bp, Homo sapien
ctctctgcacaagggcgtgagtcat

SEQ ID NO: 2202353 - DNA, 25 bp, Homo sapien
tagcaaattttcaaagagaactcac

SEQ ID NO: 2202354 - DNA, 25 bp, Homo sapien
caaatagcaaattttcaaagagaac

SEQ ID NO: 2202355 - DNA, 25 bp, Homo sapien
agagtcaaatagcaaattttcaaag

SEQ ID NO: 2202356 - DNA, 25 bp, Homo sapien
agtcaaatagcaaattttcaaagag

SEQ ID NO: 2202357 - DNA, 25 bp, Homo sapien
gctcattaaagtgggtgccaaatct

SEQ ID NO: 2202358 - DNA, 25 bp, Homo sapien
ccaactgacataatggccaattcta

SEQ ID NO: 2202359 - DNA, 25 bp, Homo sapien
gggtgccaaatctccaatgaagctt

SEQ ID NO: 2202360 - DNA, 25 bp, Homo sapien
cataatggccaattctaagatcatc

SEQ ID NO: 2202361 - DNA, 25 bp, Homo sapien
gctgtggccacccttaaagagaaag

SEQ ID NO: 2202362 - DNA, 25 bp, Homo sapien
ggaatcatttagaagatcctatgga

SEQ ID NO: 2202363 - DNA, 25 bp, Homo sapien
ctagaatggacatcaatgctataaa

SEQ ID NO: 2202364 - DNA, 25 bp, Homo sapien
tataaatgccttatcaggctgtggc

SEQ ID NO: 2202365 - DNA, 25 bp, Homo sapien
tgatagactcggaaccagttgtaga

SEQ ID NO: 2202366 - DNA, 25 bp, Homo sapien
tgggctggagagtcaaatcgtattg

SEQ ID NO: 2202367 - DNA, 25 bp, Homo sapien
gagtcaaatcgtattgctctctttc

SEQ ID NO: 2202368 - DNA, 25 bp, Homo sapien
ctgggcaccactgatagactcggaa

SEQ ID NO: 2202369 - DNA, 25 bp, Homo sapien
acttgaaagctgtcgttgttgggtg

SEQ ID NO: 2202370 - DNA, 25 bp, Homo sapien
gtgggtcttgatcggggtcaacacc

SEQ ID NO: 2202371 - DNA, 25 bp, Homo sapien
gtcttgatcggggtcaacaccaact

SEQ ID NO: 2202372 - DNA, 25 bp, Homo sapien
cccttgtaagacttgaaagctgtcg

SEQ ID NO: 2202373 - DNA, 25 bp, Homo sapien
cagaggggcgatgaatcccatgtgc

SEQ ID NO: 2202374 - DNA, 25 bp, Homo sapien
atgtgctcacactctaagcaaggcc

SEQ ID NO: 2202375 - DNA, 25 bp, Homo sapien
tcccagttatcaaaatgggggtctc

SEQ ID NO: 2202376 - DNA, 25 bp, Homo sapien
ggaacacaacacatgctggcaactg

SEQ ID NO: 2202377 - DNA, 25 bp, Homo sapien
gagaactcacacatttgagagcaac

SEQ ID NO: 2202378 - DNA, 25 bp, Homo sapien
catcaagatagccttgagaactcac

SEQ ID NO: 2202379 - DNA, 25 bp, Homo sapien
tgctttcaatcctggtgcccctata

SEQ ID NO: 2202380 - DNA, 25 bp, Homo sapien
tataccctcttgcatcaagatagcc

SEQ ID NO: 2202381 - DNA, 25 bp, Homo sapien
ctgacagcagagagtctaaaagaac

SEQ ID NO: 2202382 - DNA, 25 bp, Homo sapien
cagagagtctaaaagaacctcctgg

SEQ ID NO: 2202383 - DNA, 25 bp, Homo sapien
gacagcagagagtctaaaagaacct

SEQ ID NO: 2202384 - DNA, 25 bp, Homo sapien
cagcagagagtctaaaagaacctcc

SEQ ID NO: 2202385 - DNA, 25 bp, Homo sapien
gttgagggcctcttggaccaatccc

SEQ ID NO: 2202386 - DNA, 25 bp, Homo sapien
gaccaatccccaaggatgacacggg

SEQ ID NO: 2202387 - DNA, 25 bp, Homo sapien
tggcttcctacaaagagccccaccc

SEQ ID NO: 2202388 - DNA, 25 bp, Homo sapien
ggcagagcccagaaccaaactgatc

SEQ ID NO: 2202389 - DNA, 25 bp, Homo sapien
ggtcctcttcggagggctcctcgac

SEQ ID NO: 2202390 - DNA, 25 bp, Homo sapien
gtcctcttcggagggctcctcgacg

SEQ ID NO: 2202391 - DNA, 25 bp, Homo sapien
ctcttcggagggctcctcgacgcca

SEQ ID NO: 2202392 - DNA, 25 bp, Homo sapien
ttcggagggctcctcgacgccaact

SEQ ID NO: 2202393 - DNA, 25 bp, Homo sapien
agaagggaacgtgagtgtgacaggg

SEQ ID NO: 2202394 - DNA, 25 bp, Homo sapien
gctctgggcaaatgatctggaccat

SEQ ID NO: 2202395 - DNA, 25 bp, Homo sapien
cagaagaagggaacgtgagtgtgac

SEQ ID NO: 2202396 - DNA, 25 bp, Homo sapien
agcagaagaagggaacgtgagtgtg

SEQ ID NO: 2202397 - DNA, 25 bp, Homo sapien
aacagctcatcagggcctctatcag

SEQ ID NO: 2202398 - DNA, 25 bp, Homo sapien
cagctcatcagggcctctatcagta

SEQ ID NO: 2202399 - DNA, 25 bp, Homo sapien
ttaacagctcatcagggcctctatc

SEQ ID NO: 2202400 - DNA, 25 bp, Homo sapien
gctcatcagggcctctatcagtagc

SEQ ID NO: 2202401 - DNA, 25 bp, Homo sapien
gtcgggcattctacagtctagagaa

SEQ ID NO: 2202402 - DNA, 25 bp, Homo sapien
tctgcagctgtgtcgggcattctac

SEQ ID NO: 2202403 - DNA, 25 bp, Homo sapien
ctctgcagctgtgtcgggcattcta

SEQ ID NO: 2202404 - DNA, 25 bp, Homo sapien
gctgtgtcgggcattctacagtcta

SEQ ID NO: 2202405 - DNA, 25 bp, Homo sapien
tttgcactacccaagtgtcttcttg

SEQ ID NO: 2202406 - DNA, 25 bp, Homo sapien
ctttgcactacccaagtgtcttctt

SEQ ID NO: 2202407 - DNA, 25 bp, Homo sapien
gtcgtgaacatcatctggcgagcat

SEQ ID NO: 2202408 - DNA, 25 bp, Homo sapien
ggtggtcgtgaacatcatctggcga

SEQ ID NO: 2202409 - DNA, 25 bp, Homo sapien
atgagaagggtggtcgtgaacatca

SEQ ID NO: 2202410 - DNA, 25 bp, Homo sapien
gaagggtggtcgtgaacatcatctg

SEQ ID NO: 2202411 - DNA, 25 bp, Homo sapien
actgaaaatctgtgccctccccgga

SEQ ID NO: 2202412 - DNA, 25 bp, Homo sapien
ctcaactcttttggataaggggagt

SEQ ID NO: 2202413 - DNA, 25 bp, Homo sapien
gactgaaaatctgtgccctccccgg

SEQ ID NO: 2202414 - DNA, 25 bp, Homo sapien
agattgtgtgaagacagtgggtgca

SEQ ID NO: 2202415 - DNA, 25 bp, Homo sapien
ctagattgtgtgaagacagtgggtg

SEQ ID NO: 2202416 - DNA, 25 bp, Homo sapien
aagacagtgggtgcaggagaaaaat

SEQ ID NO: 2202417 - DNA, 25 bp, Homo sapien
gacagtgggtgcaggagaaaaatgg

SEQ ID NO: 2202418 - DNA, 25 bp, Homo sapien
tagacaacgagaatagcagtcagca

SEQ ID NO: 2202419 - DNA, 25 bp, Homo sapien
ttcatagacaacgagaatagcagtc

SEQ ID NO: 2202420 - DNA, 25 bp, Homo sapien
actgcatgcgcctgatgtgcttcaa

SEQ ID NO: 2202421 - DNA, 25 bp, Homo sapien
ccaggaactgcatgcgcctgatgtg

SEQ ID NO: 2202422 - DNA, 25 bp, Homo sapien
atgcttgacaatgccggggaagctg

SEQ ID NO: 2202423 - DNA, 25 bp, Homo sapien
ccatgggctgtaatcagtacccatt

SEQ ID NO: 2202424 - DNA, 25 bp, Homo sapien
tgacaatgccggggaagctgttgcc

SEQ ID NO: 2202425 - DNA, 25 bp, Homo sapien
caatgccggggaagctgttgccatg

SEQ ID NO: 2202426 - DNA, 25 bp, Homo sapien
gggcagagctctggcagaagtgtcc

SEQ ID NO: 2202427 - DNA, 25 bp, Homo sapien
cttcattccaaagggcagagctctg

SEQ ID NO: 2202428 - DNA, 25 bp, Homo sapien
gctctggcagaagtgtccttcagac

SEQ ID NO: 2202429 - DNA, 25 bp, Homo sapien
gcagagctctggcagaagtgtcctt

SEQ ID NO: 2202430 - DNA, 25 bp, Homo sapien
tagctgatcttcagtgaggggtaca

SEQ ID NO: 2202431 - DNA, 25 bp, Homo sapien
gctgatcttcagtgaggggtacata

SEQ ID NO: 2202432 - DNA, 25 bp, Homo sapien
gggtagctgatcttcagtgaggggt

SEQ ID NO: 2202433 - DNA, 25 bp, Homo sapien
ctgatcttcagtgaggggtacatac

SEQ ID NO: 2202434 - DNA, 25 bp, Homo sapien
gctgctgtagaagggatgatcgggc

SEQ ID NO: 2202435 - DNA, 25 bp, Homo sapien
tgctgctgtagaagggatgatcggg

SEQ ID NO: 2202436 - DNA, 25 bp, Homo sapien
ctgctgtagaagggatgatcgggct

SEQ ID NO: 2202437 - DNA, 25 bp, Homo sapien
gacatcacaggagcgcctccagatc

SEQ ID NO: 2202438 - DNA, 25 bp, Homo sapien
atgagaggtggtgggacatcacagg

SEQ ID NO: 2202439 - DNA, 25 bp, Homo sapien
catcacaggagcgcctccagatctt

SEQ ID NO: 2202440 - DNA, 25 bp, Homo sapien
cacaggagcgcctccagatctttac

SEQ ID NO: 2202441 - DNA, 25 bp, Homo sapien
acatcaggtcagtggcatctggcac

SEQ ID NO: 2202442 - DNA, 25 bp, Homo sapien
gagtgccactcattaagatgccaag

SEQ ID NO: 2202443 - DNA, 25 bp, Homo sapien
tagccagtatcttgcagtgcctgtc

SEQ ID NO: 2202444 - DNA, 25 bp, Homo sapien
tgctttacggaggtcggtcagacca

SEQ ID NO: 2202445 - DNA, 25 bp, Homo sapien
cttccagccactgaagcagttctcc

SEQ ID NO: 2202446 - DNA, 25 bp, Homo sapien
actgaagcagttctccaggttccag

SEQ ID NO: 2202447 - DNA, 25 bp, Homo sapien
gccactgaagcagttctccaggttc

SEQ ID NO: 2202448 - DNA, 25 bp, Homo sapien
ttccagccactgaagcagttctcca

SEQ ID NO: 2202449 - DNA, 25 bp, Homo sapien
tcaccgtgccagatcagcaacagct

SEQ ID NO: 2202450 - DNA, 25 bp, Homo sapien
ttcaccgtgccagatcagcaacagc

SEQ ID NO: 2202451 - DNA, 25 bp, Homo sapien
caccgtgccagatcagcaacagctg

SEQ ID NO: 2202452 - DNA, 25 bp, Homo sapien
accgtgccagatcagcaacagctgg

SEQ ID NO: 2202453 - DNA, 25 bp, Homo sapien
tcagtggcttctccagacttctcag

SEQ ID NO: 2202454 - DNA, 25 bp, Homo sapien
tattgtcctttgtcccctcagtggc

SEQ ID NO: 2202455 - DNA, 25 bp, Homo sapien
ctttattgtcctttgtcccctcagt

SEQ ID NO: 2202456 - DNA, 25 bp, Homo sapien
cagctttctttattgtcctttgtcc

SEQ ID NO: 2202457 - DNA, 25 bp, Homo sapien
aattccagccaatcttatgccttct

SEQ ID NO: 2202458 - DNA, 25 bp, Homo sapien
ttccagccaatcttatgccttctgc

SEQ ID NO: 2202459 - DNA, 25 bp, Homo sapien
agccaatcttatgccttctgcccaa

SEQ ID NO: 2202460 - DNA, 25 bp, Homo sapien
aaaattccagccaatcttatgcctt

SEQ ID NO: 2202461 - DNA, 25 bp, Homo sapien
tcatccaaatcagggaacctcctgg

SEQ ID NO: 2202462 - DNA, 25 bp, Homo sapien
aaatcagggaacctcctggattgga

SEQ ID NO: 2202463 - DNA, 25 bp, Homo sapien
ctttgggtcatccaaatcagggaac

SEQ ID NO: 2202464 - DNA, 25 bp, Homo sapien
acctcctggattggaattcatacag

SEQ ID NO: 2202465 - DNA, 25 bp, Homo sapien
aaagctccgatgatgaaaatggggc

SEQ ID NO: 2202466 - DNA, 25 bp, Homo sapien
aaaagctccgatgatgaaaatgggg

SEQ ID NO: 2202467 - DNA, 25 bp, Homo sapien
cgatgatgaaaatggggctgaaaac

SEQ ID NO: 2202468 - DNA, 25 bp, Homo sapien
gctccgatgatgaaaatggggctga

SEQ ID NO: 2202469 - DNA, 25 bp, Homo sapien
gaagttctctgccaggaaatgtaac

SEQ ID NO: 2202470 - DNA, 25 bp, Homo sapien
ccaggaaatgtaacacctcaaagag

SEQ ID NO: 2202471 - DNA, 25 bp, Homo sapien
gtgcttctggaaggtaaacagtgcc

SEQ ID NO: 2202472 - DNA, 25 bp, Homo sapien
agtgccaggcccatgtaggagaaga

SEQ ID NO: 2202473 - DNA, 25 bp, Homo sapien
gtaatgagcttgtgtgattccacag

SEQ ID NO: 2202474 - DNA, 25 bp, Homo sapien
ttcttgattccaccgacagattgtt

SEQ ID NO: 2202475 - DNA, 25 bp, Homo sapien
aggtgtaatgagcttgtgtgattcc

SEQ ID NO: 2202476 - DNA, 25 bp, Homo sapien
cttcttgattccaccgacagattgt

SEQ ID NO: 2202477 - DNA, 25 bp, Homo sapien
tgccaagagaaacgtgctccaggac

SEQ ID NO: 2202478 - DNA, 25 bp, Homo sapien
gcttctgccaagagaaacgtgctcc

SEQ ID NO: 2202479 - DNA, 25 bp, Homo sapien
tctgccaagagaaacgtgctccagg

SEQ ID NO: 2202480 - DNA, 25 bp, Homo sapien
agagaaacgtgctccaggacatgag

SEQ ID NO: 2202481 - DNA, 25 bp, Homo sapien
gctacatgacattgtgaatgcggaa

SEQ ID NO: 2202482 - DNA, 25 bp, Homo sapien
ttctgaaagtagacagggagatggc

SEQ ID NO: 2202483 - DNA, 25 bp, Homo sapien
gaatgcggaattgtgcacgtaaaga

SEQ ID NO: 2202484 - DNA, 25 bp, Homo sapien
tacaaattaagctttccagtggaac

SEQ ID NO: 2202485 - DNA, 25 bp, Homo sapien
tgttgggttggttccagcagggctg

SEQ ID NO: 2202486 - DNA, 25 bp, Homo sapien
gaggccacctgagtccacaacaggt

SEQ ID NO: 2202487 - DNA, 25 bp, Homo sapien
ctgtgaagacaaggcctgtgagacc

SEQ ID NO: 2202488 - DNA, 25 bp, Homo sapien
tcatgacgtcaggctggcttgttgg

SEQ ID NO: 2202489 - DNA, 25 bp, Homo sapien
acataccatatttcaaaggcttgga

SEQ ID NO: 2202490 - DNA, 25 bp, Homo sapien
atttttatcatgattgggggaagag

SEQ ID NO: 2202491 - DNA, 25 bp, Homo sapien
ggcttggaacaaagattgaatgtat

SEQ ID NO: 2202492 - DNA, 25 bp, Homo sapien
gcacacataccatatttcaaaggct

SEQ ID NO: 2202493 - DNA, 25 bp, Homo sapien
cacagctcccatggtaaaagagcca

SEQ ID NO: 2202494 - DNA, 25 bp, Homo sapien
tcacagctcccatggtaaaagagcc

SEQ ID NO: 2202495 - DNA, 25 bp, Homo sapien
gctcccatggtaaaagagccactaa

SEQ ID NO: 2202496 - DNA, 25 bp, Homo sapien
catggtaaaagagccactaaatata

SEQ ID NO: 2202497 - DNA, 25 bp, Homo sapien
gcgtgagtgttcagtcccgctggct

SEQ ID NO: 2202498 - DNA, 25 bp, Homo sapien
ggcgtgagtgttcagtcccgctggc

SEQ ID NO: 2202499 - DNA, 25 bp, Homo sapien
aaggcgtgagtgttcagtcccgctg

SEQ ID NO: 2202500 - DNA, 25 bp, Homo sapien
aggcgtgagtgttcagtcccgctgg

SEQ ID NO: 2202501 - DNA, 25 bp, Homo sapien
gcgtaaagatccacgtctgcatgca

SEQ ID NO: 2202502 - DNA, 25 bp, Homo sapien
gacgctctctccaaaaagaagtgcg

SEQ ID NO: 2202503 - DNA, 25 bp, Homo sapien
ggcaacagcatcatttaggacgctc

SEQ ID NO: 2202504 - DNA, 25 bp, Homo sapien
ttcattaaatatcgccagcacagtc

SEQ ID NO: 2202505 - DNA, 25 bp, Homo sapien
agagaggccagacaccaacgcagtc

SEQ ID NO: 2202506 - DNA, 25 bp, Homo sapien
agaggccagacaccaacgcagtcat

SEQ ID NO: 2202507 - DNA, 25 bp, Homo sapien
gagaggccagacaccaacgcagtca

SEQ ID NO: 2202508 - DNA, 25 bp, Homo sapien
cagagaggccagacaccaacgcagt

SEQ ID NO: 2202509 - DNA, 25 bp, Homo sapien
ccaaaaaagagacaatctgtgtagt

SEQ ID NO: 2202510 - DNA, 25 bp, Homo sapien
gagacaatctgtgtagtaaaattta

SEQ ID NO: 2202511 - DNA, 25 bp, Homo sapien
gagagctgtcccataatcttcatga

SEQ ID NO: 2202512 - DNA, 25 bp, Homo sapien
gcttcaccacaccatacatgagatt

SEQ ID NO: 2202513 - DNA, 25 bp, Homo sapien
aaggcataggccagtatagatccaa

SEQ ID NO: 2202514 - DNA, 25 bp, Homo sapien
ggcataggccagtatagatccaaga

SEQ ID NO: 2202515 - DNA, 25 bp, Homo sapien
cataggccagtatagatccaagatt

SEQ ID NO: 2202516 - DNA, 25 bp, Homo sapien
gcataggccagtatagatccaagat

SEQ ID NO: 2202517 - DNA, 25 bp, Homo sapien
ggaacctgaagcgtctccttatatt

SEQ ID NO: 2202518 - DNA, 25 bp, Homo sapien
tatattcatctagattaatgtctga

SEQ ID NO: 2202519 - DNA, 25 bp, Homo sapien
attcatctagattaatgtctgaagc

SEQ ID NO: 2202520 - DNA, 25 bp, Homo sapien
cctgaagcgtctccttatattcatc

SEQ ID NO: 2202521 - DNA, 25 bp, Homo sapien
tgtatccagcatgaaaaataattgg

SEQ ID NO: 2202522 - DNA, 25 bp, Homo sapien
tgaaaaatacttctggatcgaatgt

SEQ ID NO: 2202523 - DNA, 25 bp, Homo sapien
tctttaagctgtatccagcatgaaa

SEQ ID NO: 2202524 - DNA, 25 bp, Homo sapien
aataattggaggcagaagaatgttg

SEQ ID NO: 2202525 - DNA, 25 bp, Homo sapien
ctggatctcccaagaccgctataca

SEQ ID NO: 2202526 - DNA, 25 bp, Homo sapien
agaccgctatacagaaggcttcctt

SEQ ID NO: 2202527 - DNA, 25 bp, Homo sapien
tcccaagaccgctatacagaaggct

SEQ ID NO: 2202528 - DNA, 25 bp, Homo sapien
gatctcccaagaccgctatacagaa

SEQ ID NO: 2202529 - DNA, 25 bp, Homo sapien
tcgaagaactttccgctgacattca

SEQ ID NO: 2202530 - DNA, 25 bp, Homo sapien
atttgtcacggccactggtagcagg

SEQ ID NO: 2202531 - DNA, 25 bp, Homo sapien
cctttcagagtgtattcgaagaact

SEQ ID NO: 2202532 - DNA, 25 bp, Homo sapien
cactaataaggtactgaaggccctg

SEQ ID NO: 2202533 - DNA, 25 bp, Homo sapien
aagagtggaaaaaaactcatcaggc

SEQ ID NO: 2202534 - DNA, 25 bp, Homo sapien
ctgaaagagtggaaaaaaactcatc

SEQ ID NO: 2202535 - DNA, 25 bp, Homo sapien
aaagagtggaaaaaaactcatcagg

SEQ ID NO: 2202536 - DNA, 25 bp, Homo sapien
gaaagagtggaaaaaaactcatcag

SEQ ID NO: 2202537 - DNA, 25 bp, Homo sapien
tacctcttctccttcaccctggttg

SEQ ID NO: 2202538 - DNA, 25 bp, Homo sapien
tcttctccttcaccctggttgtcac

SEQ ID NO: 2202539 - DNA, 25 bp, Homo sapien
ctacctcttctccttcaccctggtt

SEQ ID NO: 2202540 - DNA, 25 bp, Homo sapien
cctcttctccttcaccctggttgtc

SEQ ID NO: 2202541 - DNA, 25 bp, Homo sapien
gggataaccttcttgtcctgtttgc

SEQ ID NO: 2202542 - DNA, 25 bp, Homo sapien
tgggataaccttcttgtcctgtttg

SEQ ID NO: 2202543 - DNA, 25 bp, Homo sapien
cactgggataaccttcttgtcctgt

SEQ ID NO: 2202544 - DNA, 25 bp, Homo sapien
ctttcactgggataaccttcttgtc

SEQ ID NO: 2202545 - DNA, 25 bp, Homo sapien
tgtaaagtacttgatgtttgtgacc

SEQ ID NO: 2202546 - DNA, 25 bp, Homo sapien
tttgtgacccacacctattcacaca

SEQ ID NO: 2202547 - DNA, 25 bp, Homo sapien
taccttgtaaagtacttgatgtttg

SEQ ID NO: 2202548 - DNA, 25 bp, Homo sapien
atgtttgtgacccacacctattcac

SEQ ID NO: 2202549 - DNA, 25 bp, Homo sapien
ctgtaggttgagcacagagttctcc

SEQ ID NO: 2202550 - DNA, 25 bp, Homo sapien
tgtaggttgagcacagagttctccc

SEQ ID NO: 2202551 - DNA, 25 bp, Homo sapien
gcagttctagcaactgtaggttgag

SEQ ID NO: 2202552 - DNA, 25 bp, Homo sapien
cagttctagcaactgtaggttgagc

SEQ ID NO: 2202553 - DNA, 25 bp, Homo sapien
tggcttaaaggcttccaatggctcc

SEQ ID NO: 2202554 - DNA, 25 bp, Homo sapien
catagctcactcctgttatgacagc

SEQ ID NO: 2202555 - DNA, 25 bp, Homo sapien
gcaatgtaattaaactttccttcaa

SEQ ID NO: 2202556 - DNA, 25 bp, Homo sapien
aagagcaatgtaattaaactttcct

SEQ ID NO: 2202557 - DNA, 25 bp, Homo sapien
gtcccataatatgtgtttgttttac

SEQ ID NO: 2202558 - DNA, 25 bp, Homo sapien
gagcaatgtaattaaactttccttc

SEQ ID NO: 2202559 - DNA, 25 bp, Homo sapien
catccttgtttttcgtatcagtggg

SEQ ID NO: 2202560 - DNA, 25 bp, Homo sapien
ccatccttgtttttcgtatcagtgg

SEQ ID NO: 2202561 - DNA, 25 bp, Homo sapien
ctattgggcaagattgccctgctgc

SEQ ID NO: 2202562 - DNA, 25 bp, Homo sapien
aaactcacgaggctttctgcttaac

SEQ ID NO: 2202563 - DNA, 25 bp, Homo sapien
ccacttttgctttaaaactcacgag

SEQ ID NO: 2202564 - DNA, 25 bp, Homo sapien
tcatacatccacttttgctttaaaa

SEQ ID NO: 2202565 - DNA, 25 bp, Homo sapien
tctcatcttcttgatctgatcctta

SEQ ID NO: 2202566 - DNA, 25 bp, Homo sapien
agcatccaatcgagaaatcttcttg

SEQ ID NO: 2202567 - DNA, 25 bp, Homo sapien
catcttcttgatctgatccttatac

SEQ ID NO: 2202568 - DNA, 25 bp, Homo sapien
gagaaatcttcttgtcaatggattc

SEQ ID NO: 2202569 - DNA, 25 bp, Homo sapien
cccgaagaattggttgatcttgagc

SEQ ID NO: 2202570 - DNA, 25 bp, Homo sapien
ggttgatcttgagcggccgcaaaga

SEQ ID NO: 2202571 - DNA, 25 bp, Homo sapien
aattggttgatcttgagcggccgca

SEQ ID NO: 2202572 - DNA, 25 bp, Homo sapien
cactttcccgaagaattggttgatc

SEQ ID NO: 2202573 - DNA, 25 bp, Homo sapien
ctggagcaaaaccataaaccactta

SEQ ID NO: 2202574 - DNA, 25 bp, Homo sapien
tggagcaaaaccataaaccacttat

SEQ ID NO: 2202575 - DNA, 25 bp, Homo sapien
gatccctggtatccatgaacagtaa

SEQ ID NO: 2202576 - DNA, 25 bp, Homo sapien
tcatataaatgaaaccgcacagtgg

SEQ ID NO: 2202577 - DNA, 25 bp, Homo sapien
aaagcaactatttatatggagggtc

SEQ ID NO: 2202578 - DNA, 25 bp, Homo sapien
caatcactccaataagatccctggt

SEQ ID NO: 2202579 - DNA, 25 bp, Homo sapien
gatatctaggcagattttggcagtg

SEQ ID NO: 2202580 - DNA, 25 bp, Homo sapien
tatgcagatactgtgaacctgggtc

SEQ ID NO: 2202581 - DNA, 25 bp, Homo sapien
cagtgggtttccaccagtagtctca

SEQ ID NO: 2202582 - DNA, 25 bp, Homo sapien
tgagtatttggcaggaatcctggag

SEQ ID NO: 2202583 - DNA, 25 bp, Homo sapien
ttcacacacaaaggtttccttctca

SEQ ID NO: 2202584 - DNA, 25 bp, Homo sapien
cagaaacttcactgtcagtgtgaag

SEQ ID NO: 2202585 - DNA, 25 bp, Homo sapien
agaaacttcactgtcagtgtgaagc

SEQ ID NO: 2202586 - DNA, 25 bp, Homo sapien
tcagaaacttcactgtcagtgtgaa

SEQ ID NO: 2202587 - DNA, 25 bp, Homo sapien
ttagggggaccttgcagtagaagac

SEQ ID NO: 2202588 - DNA, 25 bp, Homo sapien
cagattagggggaccttgcagtaga

SEQ ID NO: 2202589 - DNA, 25 bp, Homo sapien
gggaccttgcagtagaagaccaaac

SEQ ID NO: 2202590 - DNA, 25 bp, Homo sapien
tagaattcagattagggggaccttg

SEQ ID NO: 2202591 - DNA, 25 bp, Homo sapien
tgggttcccaatgcagaaacgtgga

SEQ ID NO: 2202592 - DNA, 25 bp, Homo sapien
caacaccgtcgcagcgggaaacgta

SEQ ID NO: 2202593 - DNA, 25 bp, Homo sapien
tgaccttgggaaccaacaccgtcgc

SEQ ID NO: 2202594 - DNA, 25 bp, Homo sapien
tttttaacggtagcagagagccaga

SEQ ID NO: 2202595 - DNA, 25 bp, Homo sapien
gcagaaagcgcacccggcggtgctt

SEQ ID NO: 2202596 - DNA, 25 bp, Homo sapien
tctcgtgcagaaagcgcacccggcg

SEQ ID NO: 2202597 - DNA, 25 bp, Homo sapien
cacgctgtcttgccggtggctctcc

SEQ ID NO: 2202598 - DNA, 25 bp, Homo sapien
gtgcagaaagcgcacccggcggtgc

SEQ ID NO: 2202599 - DNA, 25 bp, Homo sapien
gcggccgcgactcgcagcccccaac

SEQ ID NO: 2202600 - DNA, 25 bp, Homo sapien
ggacctgccggagtggccgtggccg

SEQ ID NO: 2202601 - DNA, 25 bp, Homo sapien
ggcagcaccgcggacctgccggagt

SEQ ID NO: 2202602 - DNA, 25 bp, Homo sapien
cgccgtcggcgggttctggcagcac

SEQ ID NO: 2202603 - DNA, 25 bp, Homo sapien
cctccgagcggggaccagcagcccg

SEQ ID NO: 2202604 - DNA, 25 bp, Homo sapien
ggttggagatgtctgcgtgcaacag

SEQ ID NO: 2202605 - DNA, 25 bp, Homo sapien
gactcgaggaaaggctagagcaccg

SEQ ID NO: 2202606 - DNA, 25 bp, Homo sapien
ggactgcagcatacaggggactcga

SEQ ID NO: 2202607 - DNA, 25 bp, Homo sapien
ccttgagagtggacatcagcatggg

SEQ ID NO: 2202608 - DNA, 25 bp, Homo sapien
cattaggcttgtaccatttccccaa

SEQ ID NO: 2202609 - DNA, 25 bp, Homo sapien
gatgtcttactagccacacatgtca

SEQ ID NO: 2202610 - DNA, 25 bp, Homo sapien
aactgaaggtctggcccaaaagcac

SEQ ID NO: 2202611 - DNA, 25 bp, Homo sapien
gcaccaaatccatagacacgtgtgt

SEQ ID NO: 2202612 - DNA, 25 bp, Homo sapien
tcacttgggttaagtcatgggaaaa

SEQ ID NO: 2202613 - DNA, 25 bp, Homo sapien
tagtgtcacagaggctaccctttag

SEQ ID NO: 2202614 - DNA, 25 bp, Homo sapien
taccctttagctttgcatgcccaga

SEQ ID NO: 2202615 - DNA, 25 bp, Homo sapien
gaccctggtactctacaaagcttag

SEQ ID NO: 2202616 - DNA, 25 bp, Homo sapien
tcccacctcagactcgcaaggagct

SEQ ID NO: 2202617 - DNA, 25 bp, Homo sapien
acctcagactcgcaaggagctagga

SEQ ID NO: 2202618 - DNA, 25 bp, Homo sapien
ctaggactacaggttcactccacca

SEQ ID NO: 2202619 - DNA, 25 bp, Homo sapien
taggactacaggttcactccaccat

SEQ ID NO: 2202620 - DNA, 25 bp, Homo sapien
attgagacatgagaaagcattggtt

SEQ ID NO: 2202621 - DNA, 25 bp, Homo sapien
aattgagacatgagaaagcattggt

SEQ ID NO: 2202622 - DNA, 25 bp, Homo sapien
ttgagacatgagaaagcattggttc

SEQ ID NO: 2202623 - DNA, 25 bp, Homo sapien
cctacatttattatcaaccttttct

SEQ ID NO: 2202624 - DNA, 25 bp, Homo sapien
aatttccaaatgtactaaatgtaga

SEQ ID NO: 2202625 - DNA, 25 bp, Homo sapien
aatgtactaaatgtagagagtacaa

SEQ ID NO: 2202626 - DNA, 25 bp, Homo sapien
gtactaaatgtagagagtacaatga

SEQ ID NO: 2202627 - DNA, 25 bp, Homo sapien
tgtattcttctgttagataagacct

SEQ ID NO: 2202628 - DNA, 25 bp, Homo sapien
tatgatatttgagcaacaactcagg

SEQ ID NO: 2202629 - DNA, 25 bp, Homo sapien
tctcttgcattaatagtactgctgt

SEQ ID NO: 2202630 - DNA, 25 bp, Homo sapien
ggccatgatgatattattaaacacc

SEQ ID NO: 2202631 - DNA, 25 bp, Homo sapien
caggcatgagccaagattttcaggg

SEQ ID NO: 2202632 - DNA, 25 bp, Homo sapien
ggtactctccttgattggctttcga

SEQ ID NO: 2202633 - DNA, 25 bp, Homo sapien
ttcctagagagtagcttagagtcca

SEQ ID NO: 2202634 - DNA, 25 bp, Homo sapien
ccattgaggctcctaggaagcttta

SEQ ID NO: 2202635 - DNA, 25 bp, Homo sapien
ttcagggataagcttgggcatcacc

SEQ ID NO: 2202636 - DNA, 25 bp, Homo sapien
aagttagtcactcggtccctctcag

SEQ ID NO: 2202637 - DNA, 25 bp, Homo sapien
caataaaacatgtacaggactgtcc

SEQ ID NO: 2202638 - DNA, 25 bp, Homo sapien
aagttgcataaacccagagtggtga

SEQ ID NO: 2202639 - DNA, 25 bp, Homo sapien
ctgtggtacagcctagtgccatgga

SEQ ID NO: 2202640 - DNA, 25 bp, Homo sapien
ttcccaatccagattaacattcctt

SEQ ID NO: 2202641 - DNA, 25 bp, Homo sapien
tagtgccatggaatcttcccaatcc

SEQ ID NO: 2202642 - DNA, 25 bp, Homo sapien
tttctatgactgtggtacagcctag

SEQ ID NO: 2202643 - DNA, 25 bp, Homo sapien
gggtgtcttcttggcacccaattcc

SEQ ID NO: 2202644 - DNA, 25 bp, Homo sapien
gttttagctagatttggtatgtcat

SEQ ID NO: 2202645 - DNA, 25 bp, Homo sapien
ttcttcacatgttttagctagattt

SEQ ID NO: 2202646 - DNA, 25 bp, Homo sapien
tccaaccacattgccaaaagcaagt

SEQ ID NO: 2202647 - DNA, 25 bp, Homo sapien
ctcctgattggggtcctcacttggg

SEQ ID NO: 2202648 - DNA, 25 bp, Homo sapien
ctgattggggtcctcacttgggatc

SEQ ID NO: 2202649 - DNA, 25 bp, Homo sapien
gattggggtcctcacttgggatctt

SEQ ID NO: 2202650 - DNA, 25 bp, Homo sapien
cagcctcctgattggggtcctcact

SEQ ID NO: 2202651 - DNA, 25 bp, Homo sapien
tcgcaccaccgcactctagtctggg

SEQ ID NO: 2202652 - DNA, 25 bp, Homo sapien
gcaccaccgcactctagtctgggcg

SEQ ID NO: 2202653 - DNA, 25 bp, Homo sapien
atcgcaccaccgcactctagtctgg

SEQ ID NO: 2202654 - DNA, 25 bp, Homo sapien
agatcgcaccaccgcactctagtct

SEQ ID NO: 2202655 - DNA, 25 bp, Homo sapien
caggtggctgggcaaaaagccgcct

SEQ ID NO: 2202656 - DNA, 25 bp, Homo sapien
ggaagcactttcctaccacgctggg

SEQ ID NO: 2202657 - DNA, 25 bp, Homo sapien
gtagggactggaagagctctgtccc

SEQ ID NO: 2202658 - DNA, 25 bp, Homo sapien
ccatgggaacaccagacaggattga

SEQ ID NO: 2202659 - DNA, 25 bp, Homo sapien
cggaggaggcgtgctcagccctgct

SEQ ID NO: 2202660 - DNA, 25 bp, Homo sapien
ccctgctggcagcatcagcgtatac

SEQ ID NO: 2202661 - DNA, 25 bp, Homo sapien
taggcaggattagtactttcaaccc

SEQ ID NO: 2202662 - DNA, 25 bp, Homo sapien
catcagcgtatacccagcacggagt

SEQ ID NO: 2202663 - DNA, 25 bp, Homo sapien
tcccaacccctcacccagtggcacc

SEQ ID NO: 2202664 - DNA, 25 bp, Homo sapien
gggaggcactttccatcacaggcac

SEQ ID NO: 2202665 - DNA, 25 bp, Homo sapien
cagggaggcactttccatcacaggc

SEQ ID NO: 2202666 - DNA, 25 bp, Homo sapien
cggcctagcatctcccaacccctca

SEQ ID NO: 2202667 - DNA, 25 bp, Homo sapien
aattgagcgccataactgttgcggc

SEQ ID NO: 2202668 - DNA, 25 bp, Homo sapien
tgttgcggctctttcctccggtgcc

SEQ ID NO: 2202669 - DNA, 25 bp, Homo sapien
cgcgccctggctgtttagctgttgg

SEQ ID NO: 2202670 - DNA, 25 bp, Homo sapien
aggacctgctctgtcggccgccagg

SEQ ID NO: 2202671 - DNA, 25 bp, Homo sapien
tactcaggggtgcaagtctggctct

SEQ ID NO: 2202672 - DNA, 25 bp, Homo sapien
tgtccagtcaattctggaatactca

SEQ ID NO: 2202673 - DNA, 25 bp, Homo sapien
tagcttttaacccaatattgttgcc

SEQ ID NO: 2202674 - DNA, 25 bp, Homo sapien
tttaacccaatattgttgccttgct

SEQ ID NO: 2202675 - DNA, 25 bp, Homo sapien
gcttgccctcggcaatgcgatgtga

SEQ ID NO: 2202676 - DNA, 25 bp, Homo sapien
tgcttgccctcggcaatgcgatgtg

SEQ ID NO: 2202677 - DNA, 25 bp, Homo sapien
ttgccctcggcaatgcgatgtgaat

SEQ ID NO: 2202678 - DNA, 25 bp, Homo sapien
gttgcttgccctcggcaatgcgatg

SEQ ID NO: 2202679 - DNA, 25 bp, Homo sapien
tcaggcccgtaggggagattcccag

SEQ ID NO: 2202680 - DNA, 25 bp, Homo sapien
ttcaggcccgtaggggagattccca

SEQ ID NO: 2202681 - DNA, 25 bp, Homo sapien
tgtaggtttagtattgtcctctcct

SEQ ID NO: 2202682 - DNA, 25 bp, Homo sapien
ttttccctctcttgtgttccaccaa

SEQ ID NO: 2202683 - DNA, 25 bp, Homo sapien
gtgttgaagacttgtaggtttagta

SEQ ID NO: 2202684 - DNA, 25 bp, Homo sapien
gaagacttgtaggtttagtattgtc

SEQ ID NO: 2202685 - DNA, 25 bp, Homo sapien
ccaaatgtgtaggtcttaaacagtt

SEQ ID NO: 2202686 - DNA, 25 bp, Homo sapien
cagtttttatcgactgccattaaca

SEQ ID NO: 2202687 - DNA, 25 bp, Homo sapien
tgcaatccaatagaggcaatgtctc

SEQ ID NO: 2202688 - DNA, 25 bp, Homo sapien
tgtctctggaccaaatgtgtaggtc

SEQ ID NO: 2202689 - DNA, 25 bp, Homo sapien
tccctctcccgtaccatcaacaatc

SEQ ID NO: 2202690 - DNA, 25 bp, Homo sapien
tctcccgtaccatcaacaatccaac

SEQ ID NO: 2202691 - DNA, 25 bp, Homo sapien
gtaccatcaacaatccaacactcat

SEQ ID NO: 2202692 - DNA, 25 bp, Homo sapien
cccgtaccatcaacaatccaacact

SEQ ID NO: 2202693 - DNA, 25 bp, Homo sapien
caagtccgactcaacttccttctgg

SEQ ID NO: 2202694 - DNA, 25 bp, Homo sapien
tctctgtgtcaccatattccaagtc

SEQ ID NO: 2202695 - DNA, 25 bp, Homo sapien
ccttgtttcccaccctcaccactag

SEQ ID NO: 2202696 - DNA, 25 bp, Homo sapien
ggactgctgtccataaagatgcaga

SEQ ID NO: 2202697 - DNA, 25 bp, Homo sapien
tgctctgagtttgttccatcctgtg

SEQ ID NO: 2202698 - DNA, 25 bp, Homo sapien
tgagtcattctgaccgtctgcctct

SEQ ID NO: 2202699 - DNA, 25 bp, Homo sapien
tattgctctgagtttgttccatcct

SEQ ID NO: 2202700 - DNA, 25 bp, Homo sapien
gagtcattctgaccgtctgcctctg

SEQ ID NO: 2202701 - DNA, 25 bp, Homo sapien
caactaagggtactagtgtctgtgc

SEQ ID NO: 2202702 - DNA, 25 bp, Homo sapien
taccactgacttgcttgacttccca

SEQ ID NO: 2202703 - DNA, 25 bp, Homo sapien
tcctgactaggtactttatagcacc

SEQ ID NO: 2202704 - DNA, 25 bp, Homo sapien
cactcatgcagtactcaactaaggg

SEQ ID NO: 2202705 - DNA, 25 bp, Homo sapien
caggaattcagataggcacagcagt

SEQ ID NO: 2202706 - DNA, 25 bp, Homo sapien
tagcagagactacctccagagtgcc

SEQ ID NO: 2202707 - DNA, 25 bp, Homo sapien
gcataggtggcttctcaatagtcaa

SEQ ID NO: 2202708 - DNA, 25 bp, Homo sapien
gagccatcttgacgagaagccctca

SEQ ID NO: 2202709 - DNA, 25 bp, Homo sapien
gccattcctaaagtcagcagcctgt

SEQ ID NO: 2202710 - DNA, 25 bp, Homo sapien
gataaccacagagcctaacacggtg

SEQ ID NO: 2202711 - DNA, 25 bp, Homo sapien
taagctaggtcgacaagtcagccaa

SEQ ID NO: 2202712 - DNA, 25 bp, Homo sapien
gaaagtgagttacccatatggacca

SEQ ID NO: 2202713 - DNA, 25 bp, Homo sapien
gaggacctccagtgctatgtgaagc

SEQ ID NO: 2202714 - DNA, 25 bp, Homo sapien
ccaataggtgggtgaagaacacaga

SEQ ID NO: 2202715 - DNA, 25 bp, Homo sapien
gccaaccaagaatatgagccccaag

SEQ ID NO: 2202716 - DNA, 25 bp, Homo sapien
cagtcagggcagctttagaaaatcc

SEQ ID NO: 2202717 - DNA, 25 bp, Homo sapien
catgcctttcaattctgagtgggag

SEQ ID NO: 2202718 - DNA, 25 bp, Homo sapien
gccagtgcggtagcctttgtccctt

SEQ ID NO: 2202719 - DNA, 25 bp, Homo sapien
tattcctaggtaaatgaaggagcct

SEQ ID NO: 2202720 - DNA, 25 bp, Homo sapien
catagcatgtgtggtaggtgtcctg

SEQ ID NO: 2202721 - DNA, 25 bp, Homo sapien
ctgctggatccaccgtggctgaatc

SEQ ID NO: 2202722 - DNA, 25 bp, Homo sapien
gcctgaggagttgcccataggtttg

SEQ ID NO: 2202723 - DNA, 25 bp, Homo sapien
tagcctttggtacttcttaggtagc

SEQ ID NO: 2202724 - DNA, 25 bp, Homo sapien
cttggataatcctccatgggcctgc

SEQ ID NO: 2202725 - DNA, 25 bp, Homo sapien
aaggtgggaatcattaggggctatc

SEQ ID NO: 2202726 - DNA, 25 bp, Homo sapien
ggttgcagaatgacttacatgcagg

SEQ ID NO: 2202727 - DNA, 25 bp, Homo sapien
actctaagtccacacaaatatcctg

SEQ ID NO: 2202728 - DNA, 25 bp, Homo sapien
gaaccaaagtttactatgatggttg

SEQ ID NO: 2202729 - DNA, 25 bp, Homo sapien
tctccatctctactattcccacctt

SEQ ID NO: 2202730 - DNA, 25 bp, Homo sapien
ccttctgagttagccgaagttgatt

SEQ ID NO: 2202731 - DNA, 25 bp, Homo sapien
ataaccttctgagttagccgaagtt

SEQ ID NO: 2202732 - DNA, 25 bp, Homo sapien
gagttagccgaagttgattctccat

SEQ ID NO: 2202733 - DNA, 25 bp, Homo sapien
aagaggccacgtttgtagggctagt

SEQ ID NO: 2202734 - DNA, 25 bp, Homo sapien
gcatctgtacgaatcctagtttgga

SEQ ID NO: 2202735 - DNA, 25 bp, Homo sapien
atggtggcccagaagtcgctatgac

SEQ ID NO: 2202736 - DNA, 25 bp, Homo sapien
gaaagcggattctggatgaggacaa

SEQ ID NO: 2202737 - DNA, 25 bp, Homo sapien
cattccccaaaccattgtcccacaa

SEQ ID NO: 2202738 - DNA, 25 bp, Homo sapien
taacagagccaaaacttcgaagtag

SEQ ID NO: 2202739 - DNA, 25 bp, Homo sapien
acttcgaagtagtgactgccagggt

SEQ ID NO: 2202740 - DNA, 25 bp, Homo sapien
gagctcaatcaatctatccgccttg

SEQ ID NO: 2202741 - DNA, 25 bp, Homo sapien
ggaaggcggtgcttcttgagcccca

SEQ ID NO: 2202742 - DNA, 25 bp, Homo sapien
cccctttaattaggtgctctgagaa

SEQ ID NO: 2202743 - DNA, 25 bp, Homo sapien
gcccctttaattaggtgctctgaga

SEQ ID NO: 2202744 - DNA, 25 bp, Homo sapien
ttcgcggcgggaccactctttcatc

SEQ ID NO: 2202745 - DNA, 25 bp, Homo sapien
cagcttcgcggcgggaccactcttt

SEQ ID NO: 2202746 - DNA, 25 bp, Homo sapien
gcttcgcggcgggaccactctttca

SEQ ID NO: 2202747 - DNA, 25 bp, Homo sapien
cttcgcggcgggaccactctttcat

SEQ ID NO: 2202748 - DNA, 25 bp, Homo sapien
tagacgtgagggagcctcaactgat

SEQ ID NO: 2202749 - DNA, 25 bp, Homo sapien
cattcccaatggtgcaggaacaaaa

SEQ ID NO: 2202750 - DNA, 25 bp, Homo sapien
ggaacaaaactcctggcagaatccc

SEQ ID NO: 2202751 - DNA, 25 bp, Homo sapien
ggagcctcaactgataccaatccct

SEQ ID NO: 2202752 - DNA, 25 bp, Homo sapien
ccatcccacgctcttggacaccctg

SEQ ID NO: 2202753 - DNA, 25 bp, Homo sapien
ccacgctcttggacaccctgtgcac

SEQ ID NO: 2202754 - DNA, 25 bp, Homo sapien
atcccacgctcttggacaccctgtg

SEQ ID NO: 2202755 - DNA, 25 bp, Homo sapien
tcccacgctcttggacaccctgtgc

SEQ ID NO: 2202756 - DNA, 25 bp, Homo sapien
agaagacaagtcgcatgttccagac

SEQ ID NO: 2202757 - DNA, 25 bp, Homo sapien
aagacaagtcgcatgttccagacgt

SEQ ID NO: 2202758 - DNA, 25 bp, Homo sapien
gaagacaagtcgcatgttccagacg

SEQ ID NO: 2202759 - DNA, 25 bp, Homo sapien
agacaagtcgcatgttccagacgtc

SEQ ID NO: 2202760 - DNA, 25 bp, Homo sapien
ccacaaagccttattctggccctgc

SEQ ID NO: 2202761 - DNA, 25 bp, Homo sapien
cacaaagccttattctggccctgca

SEQ ID NO: 2202762 - DNA, 25 bp, Homo sapien
acaaagccttattctggccctgcat

SEQ ID NO: 2202763 - DNA, 25 bp, Homo sapien
cagttatgtgagctagggcaatcca

SEQ ID NO: 2202764 - DNA, 25 bp, Homo sapien
tctaacgtgttttgagcgctgtcca

SEQ ID NO: 2202765 - DNA, 25 bp, Homo sapien
tctggccctggaacgaagataccga

SEQ ID NO: 2202766 - DNA, 25 bp, Homo sapien
aatgcagacggcaacgagcaagtgc

SEQ ID NO: 2202767 - DNA, 25 bp, Homo sapien
tcttgccacggtgtggtcggttctg

SEQ ID NO: 2202768 - DNA, 25 bp, Homo sapien
tttcccgccacagcggacggggcga

SEQ ID NO: 2202769 - DNA, 25 bp, Homo sapien
tctcatacaagttttcgtcctcggg

SEQ ID NO: 2202770 - DNA, 25 bp, Homo sapien
cgtcctcgggttctgggtcctcttg

SEQ ID NO: 2202771 - DNA, 25 bp, Homo sapien
aaaagacggcgagcgctcaaaccaa

SEQ ID NO: 2202772 - DNA, 25 bp, Homo sapien
gacggcgagcgctcaaaccaaacag

SEQ ID NO: 2202773 - DNA, 25 bp, Homo sapien
agacggcgagcgctcaaaccaaaca

SEQ ID NO: 2202774 - DNA, 25 bp, Homo sapien
aaagacggcgagcgctcaaaccaaa

SEQ ID NO: 2202775 - DNA, 25 bp, Homo sapien
cagtctcggacttggttgttgcgcg

SEQ ID NO: 2202776 - DNA, 25 bp, Homo sapien
ccagagcgcgcttccttagtaggtg

SEQ ID NO: 2202777 - DNA, 25 bp, Homo sapien
gcgggccctgccgaattggctaata

SEQ ID NO: 2202778 - DNA, 25 bp, Homo sapien
tcctgcataggaagaaatcggtgac

SEQ ID NO: 2202779 - DNA, 25 bp, Homo sapien
ctcgggtgcggcagcttggaggtac

SEQ ID NO: 2202780 - DNA, 25 bp, Homo sapien
agagtctcgggtgcggcagcttgga

SEQ ID NO: 2202781 - DNA, 25 bp, Homo sapien
gtgcagcagagtctcgggtgcggca

SEQ ID NO: 2202782 - DNA, 25 bp, Homo sapien
tggtggtgcagcagagtctcgggtg

SEQ ID NO: 2202783 - DNA, 25 bp, Homo sapien
tgctcacaccctcgtaggctgggaa

SEQ ID NO: 2202784 - DNA, 25 bp, Homo sapien
cgaacagcaatactcccagtgcctg

SEQ ID NO: 2202785 - DNA, 25 bp, Homo sapien
tgatgatgtcggtgccgaacagcaa

SEQ ID NO: 2202786 - DNA, 25 bp, Homo sapien
tgacggcatgctgccccatctggtt

SEQ ID NO: 2202787 - DNA, 25 bp, Homo sapien
tccagctccatcaggaccaatgatg

SEQ ID NO: 2202788 - DNA, 25 bp, Homo sapien
ggctgctcttgaacagaccagaccc

SEQ ID NO: 2202789 - DNA, 25 bp, Homo sapien
tttgctcggctgctcttgaacagac

SEQ ID NO: 2202790 - DNA, 25 bp, Homo sapien
tgactctggctttgacacactgtgg

SEQ ID NO: 2202791 - DNA, 25 bp, Homo sapien
tattgaggaagatggattcgtggtc

SEQ ID NO: 2202792 - DNA, 25 bp, Homo sapien
ctattgaggaagatggattcgtggt

SEQ ID NO: 2202793 - DNA, 25 bp, Homo sapien
gaacaccttgtacagaacggtgttg

SEQ ID NO: 2202794 - DNA, 25 bp, Homo sapien
cacgaacaccttgtacagaacggtg

SEQ ID NO: 2202795 - DNA, 25 bp, Homo sapien
tgtacagaacggtgttgtggttgat

SEQ ID NO: 2202796 - DNA, 25 bp, Homo sapien
caccttgtacagaacggtgttgtgg

SEQ ID NO: 2202797 - DNA, 25 bp, Homo sapien
agatcctgccgccttccatgtagat

SEQ ID NO: 2202798 - DNA, 25 bp, Homo sapien
gatgtagtcctgaaacctgtgcacc

SEQ ID NO: 2202799 - DNA, 25 bp, Homo sapien
ccatgaagggcagcaagcagatcct

SEQ ID NO: 2202800 - DNA, 25 bp, Homo sapien
gaaggagtccaggacgatggtttca

SEQ ID NO: 2202801 - DNA, 25 bp, Homo sapien
cctccgctaaagccgggaaattgag

SEQ ID NO: 2202802 - DNA, 25 bp, Homo sapien
gctaaagccgggaaattgagcttct

SEQ ID NO: 2202803 - DNA, 25 bp, Homo sapien
cgctaaagccgggaaattgagcttc

SEQ ID NO: 2202804 - DNA, 25 bp, Homo sapien
tccgctaaagccgggaaattgagct

SEQ ID NO: 2202805 - DNA, 25 bp, Homo sapien
tacacgatggatggaagccaatcag

SEQ ID NO: 2202806 - DNA, 25 bp, Homo sapien
tactactttgtaatcgagcgctccc

SEQ ID NO: 2202807 - DNA, 25 bp, Homo sapien
tcacttgcaggacgctacacgatgg

SEQ ID NO: 2202808 - DNA, 25 bp, Homo sapien
aatgctgtctccaggtcagagccgg

SEQ ID NO: 2202809 - DNA, 25 bp, Homo sapien
cagatgctggctatgccatcctcga

SEQ ID NO: 2202810 - DNA, 25 bp, Homo sapien
cagcctatcagctccctgcgagatg

SEQ ID NO: 2202811 - DNA, 25 bp, Homo sapien
ccactgcagatgctggctatgccat

SEQ ID NO: 2202812 - DNA, 25 bp, Homo sapien
agctccctgcgagatgacgagaggc

SEQ ID NO: 2202813 - DNA, 25 bp, Homo sapien
ggagcactagccgagagacagcaca

SEQ ID NO: 2202814 - DNA, 25 bp, Homo sapien
cactagccgagagacagcacaccag

SEQ ID NO: 2202815 - DNA, 25 bp, Homo sapien
cccgaaattggccagtgacgaccgc

SEQ ID NO: 2202816 - DNA, 25 bp, Homo sapien
caccagcatggatctcccgaaattg

SEQ ID NO: 2202817 - DNA, 25 bp, Homo sapien
taaggcctgcactatctgggcccag

SEQ ID NO: 2202818 - DNA, 25 bp, Homo sapien
ggggtcctacataattggtcagaga

SEQ ID NO: 2202819 - DNA, 25 bp, Homo sapien
gaaaaccctcttctcagcatctacc

SEQ ID NO: 2202820 - DNA, 25 bp, Homo sapien
gggacctagccagtgtttgcttatt

SEQ ID NO: 2202821 - DNA, 25 bp, Homo sapien
ccagggaagcttgttagactcagca

SEQ ID NO: 2202822 - DNA, 25 bp, Homo sapien
tctaggagtcttctcccagcgggag

SEQ ID NO: 2202823 - DNA, 25 bp, Homo sapien
cagcgggagttaaacaaggcggcct

SEQ ID NO: 2202824 - DNA, 25 bp, Homo sapien
gggtcctcaaaactactctcaagct

SEQ ID NO: 2202825 - DNA, 25 bp, Homo sapien
actccctactatttcagtgcctctg

SEQ ID NO: 2202826 - DNA, 25 bp, Homo sapien
gcatgcctaagtgtaagatgtgcct

SEQ ID NO: 2202827 - DNA, 25 bp, Homo sapien
ccaagtgaggatatgttgctgtaga

SEQ ID NO: 2202828 - DNA, 25 bp, Homo sapien
tcgagcacaccctgcaggtgataag

SEQ ID NO: 2202829 - DNA, 25 bp, Homo sapien
aaacttctgccaagatcggaactga

SEQ ID NO: 2202830 - DNA, 25 bp, Homo sapien
acagttctccctggtgccgtctccg

SEQ ID NO: 2202831 - DNA, 25 bp, Homo sapien
gaactgagtactaaacagcctccac

SEQ ID NO: 2202832 - DNA, 25 bp, Homo sapien
tcctctgggctcgcgatggccgcgt

SEQ ID NO: 2202833 - DNA, 25 bp, Homo sapien
tgagcactcggattcaagccggcgc

SEQ ID NO: 2202834 - DNA, 25 bp, Homo sapien
tctgtgccgcgagccgccgtgagca

SEQ ID NO: 2202835 - DNA, 25 bp, Homo sapien
gcatcgcccgcagcggccaagctca

SEQ ID NO: 2202836 - DNA, 25 bp, Homo sapien
tcaagccggcgccaacgagtccggg

SEQ ID NO: 2202837 - DNA, 25 bp, Homo sapien
ccggcgaatttcccagaatgcaccg

SEQ ID NO: 2202838 - DNA, 25 bp, Homo sapien
cccggcgaatttcccagaatgcacc

SEQ ID NO: 2202839 - DNA, 25 bp, Homo sapien
tcacagacaaccttgtggcactcaa

SEQ ID NO: 2202840 - DNA, 25 bp, Homo sapien
tatgccaccgtctacaaaggcaaaa

SEQ ID NO: 2202841 - DNA, 25 bp, Homo sapien
caaaagcaagctcacagacaacctt

SEQ ID NO: 2202842 - DNA, 25 bp, Homo sapien
ccttgtggcactcaaggagatcaga

SEQ ID NO: 2202843 - DNA, 25 bp, Homo sapien
tatttggaaccctgatcatcaccag

SEQ ID NO: 2202844 - DNA, 25 bp, Homo sapien
tatctctgtatacagactggctggg

SEQ ID NO: 2202845 - DNA, 25 bp, Homo sapien
cagcgaggagccataatgtgcatat

SEQ ID NO: 2202846 - DNA, 25 bp, Homo sapien
ccagaccctgggattggctatggga

SEQ ID NO: 2202847 - DNA, 25 bp, Homo sapien
gaccagaatccggaagtggctgttg

SEQ ID NO: 2202848 - DNA, 25 bp, Homo sapien
cactgaagattttaccccacctagc

SEQ ID NO: 2202849 - DNA, 25 bp, Homo sapien
tctgcttccgtttccgggaccagaa

SEQ ID NO: 2202850 - DNA, 25 bp, Homo sapien
aatatggcagtagccccgcgactgt

SEQ ID NO: 2202851 - DNA, 25 bp, Homo sapien
cgaggagcggtttccgattgctccg

SEQ ID NO: 2202852 - DNA, 25 bp, Homo sapien
gaacgaggcgagctttgtgacgtca

SEQ ID NO: 2202853 - DNA, 25 bp, Homo sapien
gcggcctgcgctgcgtaatgcaact

SEQ ID NO: 2202854 - DNA, 25 bp, Homo sapien
aaggtgggttctgctacataaggcg

SEQ ID NO: 2202855 - DNA, 25 bp, Homo sapien
attgtgtcactggtaggacatgaca

SEQ ID NO: 2202856 - DNA, 25 bp, Homo sapien
tgattgtgtcactggtaggacatga

SEQ ID NO: 2202857 - DNA, 25 bp, Homo sapien
tgtgtcactggtaggacatgacatc

SEQ ID NO: 2202858 - DNA, 25 bp, Homo sapien
actggtaggacatgacatcctgtca

SEQ ID NO: 2202859 - DNA, 25 bp, Homo sapien
gaccaaacccaactcagatgatgag

SEQ ID NO: 2202860 - DNA, 25 bp, Homo sapien
tgttgcagacgctacgtgaccaaac

SEQ ID NO: 2202861 - DNA, 25 bp, Homo sapien
gaacggtttacatgtggatctacca

SEQ ID NO: 2202862 - DNA, 25 bp, Homo sapien
actgtccttgtacccgtcttgggag

SEQ ID NO: 2202863 - DNA, 25 bp, Homo sapien
aggtgttggaacaatcgtgccaata

SEQ ID NO: 2202864 - DNA, 25 bp, Homo sapien
tcatcctggtattagaaatgcatca

SEQ ID NO: 2202865 - DNA, 25 bp, Homo sapien
tggaacaatcgtgccaatatggcca

SEQ ID NO: 2202866 - DNA, 25 bp, Homo sapien
gtattagaaatgcatcagtgctccc

SEQ ID NO: 2202867 - DNA, 25 bp, Homo sapien
aagtggcctatcctcgcggaggtgt

SEQ ID NO: 2202868 - DNA, 25 bp, Homo sapien
gtggcctatcctcgcggaggtgtga

SEQ ID NO: 2202869 - DNA, 25 bp, Homo sapien
tggcctatcctcgcggaggtgtgac

SEQ ID NO: 2202870 - DNA, 25 bp, Homo sapien
agtggcctatcctcgcggaggtgtg

SEQ ID NO: 2202871 - DNA, 25 bp, Homo sapien
actgtgaaagacagccacagtggtg

SEQ ID NO: 2202872 - DNA, 25 bp, Homo sapien
tgggttgggcatcagacagtagtcc

SEQ ID NO: 2202873 - DNA, 25 bp, Homo sapien
tctgttgcttgaacagcgacacata

SEQ ID NO: 2202874 - DNA, 25 bp, Homo sapien
gggcatcagacagtagtcccacagg

SEQ ID NO: 2202875 - DNA, 25 bp, Homo sapien
tggccatgtcacacagtatctgttg

SEQ ID NO: 2202876 - DNA, 25 bp, Homo sapien
acatggcaaggcaccaaaacgcggg

SEQ ID NO: 2202877 - DNA, 25 bp, Homo sapien
ggcaaggcaccaaaacgcgggacat

SEQ ID NO: 2202878 - DNA, 25 bp, Homo sapien
cctttcacatggcaaggcaccaaaa

SEQ ID NO: 2202879 - DNA, 25 bp, Homo sapien
ttcacatggcaaggcaccaaaacgc

SEQ ID NO: 2202880 - DNA, 25 bp, Homo sapien
tagcagccgcgattaagtgcaatag

SEQ ID NO: 2202881 - DNA, 25 bp, Homo sapien
gctagcagccgcgattaagtgcaat

SEQ ID NO: 2202882 - DNA, 25 bp, Homo sapien
agccgcgattaagtgcaatagctgc

SEQ ID NO: 2202883 - DNA, 25 bp, Homo sapien
ggtgctagcagccgcgattaagtgc

SEQ ID NO: 2202884 - DNA, 25 bp, Homo sapien
tgagtgctttttacatgtagcagtg

SEQ ID NO: 2202885 - DNA, 25 bp, Homo sapien
agtgctttttacatgtagcagtgcc

SEQ ID NO: 2202886 - DNA, 25 bp, Homo sapien
tatgagtgctttttacatgtagcag

SEQ ID NO: 2202887 - DNA, 25 bp, Homo sapien
ctatgagtgctttttacatgtagca

SEQ ID NO: 2202888 - DNA, 25 bp, Homo sapien
gtcaagcggccaagcagttgttaag

SEQ ID NO: 2202889 - DNA, 25 bp, Homo sapien
gcagcacagtaaagttggcttgtca

SEQ ID NO: 2202890 - DNA, 25 bp, Homo sapien
cagttgttaagcagcagcacagtaa

SEQ ID NO: 2202891 - DNA, 25 bp, Homo sapien
ggcttcacgttggatgccaatttgt

SEQ ID NO: 2202892 - DNA, 25 bp, Homo sapien
aaagctgacaatctccttcgggcaa

SEQ ID NO: 2202893 - DNA, 25 bp, Homo sapien
ggctccatctagaaagctgacaatc

SEQ ID NO: 2202894 - DNA, 25 bp, Homo sapien
gacaatctccttcgggcaagctcac

SEQ ID NO: 2202895 - DNA, 25 bp, Homo sapien
cttggcacaattcccataggctcca

SEQ ID NO: 2202896 - DNA, 25 bp, Homo sapien
gaacatagccctcccgacagcggtg

SEQ ID NO: 2202897 - DNA, 25 bp, Homo sapien
cagcggtgctactcgtccttcagca

SEQ ID NO: 2202898 - DNA, 25 bp, Homo sapien
atggcggcgcccacactgtagcctt

SEQ ID NO: 2202899 - DNA, 25 bp, Homo sapien
gcatcctttgccttaacctcaaaca

SEQ ID NO: 2202900 - DNA, 25 bp, Homo sapien
tcagtttgtccacagccaatatggc

SEQ ID NO: 2202901 - DNA, 25 bp, Homo sapien
ttgagggtcttgctccttcgggtgc

SEQ ID NO: 2202902 - DNA, 25 bp, Homo sapien
agggtcttgctccttcgggtgcttg

SEQ ID NO: 2202903 - DNA, 25 bp, Homo sapien
cacagccaatatggccttggtggcc

SEQ ID NO: 2202904 - DNA, 25 bp, Homo sapien
gcgtatgtgctgccaaagtgagcac

SEQ ID NO: 2202905 - DNA, 25 bp, Homo sapien
ctgtatcattccagttttagcgtat

SEQ ID NO: 2202906 - DNA, 25 bp, Homo sapien
tatcattccagttttagcgtatgtg

SEQ ID NO: 2202907 - DNA, 25 bp, Homo sapien
agcgtatgtgctgccaaagtgagca

SEQ ID NO: 2202908 - DNA, 25 bp, Homo sapien
acagctctaaagaaatacctggggc

SEQ ID NO: 2202909 - DNA, 25 bp, Homo sapien
cagctctaaagaaatacctggggcc

SEQ ID NO: 2202910 - DNA, 25 bp, Homo sapien
cacagggcattgtagtgtgctttaa

SEQ ID NO: 2202911 - DNA, 25 bp, Homo sapien
caagctactgttagtcctgcctgaa

SEQ ID NO: 2202912 - DNA, 25 bp, Homo sapien
gccaaaccctatcagcaagctactg

SEQ ID NO: 2202913 - DNA, 25 bp, Homo sapien
aattgactttaatcacagggcattg

SEQ ID NO: 2202914 - DNA, 25 bp, Homo sapien
gagtatatctgctgaccatacatga

SEQ ID NO: 2202915 - DNA, 25 bp, Homo sapien
tgcccatgtattacagcccatgagt

SEQ ID NO: 2202916 - DNA, 25 bp, Homo sapien
caaaaatagcccctaatggtgtatc

SEQ ID NO: 2202917 - DNA, 25 bp, Homo sapien
gatttttaagcttgaggacccagtg

SEQ ID NO: 2202918 - DNA, 25 bp, Homo sapien
ccctaaactgtcctttctgaaagat

SEQ ID NO: 2202919 - DNA, 25 bp, Homo sapien
catatccatgtccactgaatcttcc

SEQ ID NO: 2202920 - DNA, 25 bp, Homo sapien
gagctcagggggctcatatccatgt

SEQ ID NO: 2202921 - DNA, 25 bp, Homo sapien
ttctgggagctcagggggctcatat

SEQ ID NO: 2202922 - DNA, 25 bp, Homo sapien
tgggagctcagggggctcatatcca

SEQ ID NO: 2202923 - DNA, 25 bp, Homo sapien
ggtgcacttttacaaatttgcccat

SEQ ID NO: 2202924 - DNA, 25 bp, Homo sapien
gtccaagttgtctaatttattagca

SEQ ID NO: 2202925 - DNA, 25 bp, Homo sapien
ttgtccaagttgtctaatttattag

SEQ ID NO: 2202926 - DNA, 25 bp, Homo sapien
tcagttttgataattggtgcacttt

SEQ ID NO: 2202927 - DNA, 25 bp, Homo sapien
cctgtgtatggaccagaattctctg

SEQ ID NO: 2202928 - DNA, 25 bp, Homo sapien
caacatgtggacatcctcagagaca

SEQ ID NO: 2202929 - DNA, 25 bp, Homo sapien
caccaagtctttaactattaaatgc

SEQ ID NO: 2202930 - DNA, 25 bp, Homo sapien
gtaattctggattatgaccccaccc

SEQ ID NO: 2202931 - DNA, 25 bp, Homo sapien
tgcatacccagttgtgatttccagg

SEQ ID NO: 2202932 - DNA, 25 bp, Homo sapien
gaatctatggcctgcagcttatgca

SEQ ID NO: 2202933 - DNA, 25 bp, Homo sapien
tcagttccattgtcgtagggtcagt

SEQ ID NO: 2202934 - DNA, 25 bp, Homo sapien
tctagagtgccgtggatcagttcca

SEQ ID NO: 2202935 - DNA, 25 bp, Homo sapien
agtatgagacttctgatgtatattg

SEQ ID NO: 2202936 - DNA, 25 bp, Homo sapien
gcatacttagtgtggctttctggat

SEQ ID NO: 2202937 - DNA, 25 bp, Homo sapien
ttactacattcatagtgtctttctc

SEQ ID NO: 2202938 - DNA, 25 bp, Homo sapien
ggccttctgacattctgtacaagca

SEQ ID NO: 2202939 - DNA, 25 bp, Homo sapien
gatttgatcggtcagtgaaggcctt

SEQ ID NO: 2202940 - DNA, 25 bp, Homo sapien
gatgtgttatgagatttgatcggtc

SEQ ID NO: 2202941 - DNA, 25 bp, Homo sapien
tcagcacatatattgggcttctcac

SEQ ID NO: 2202942 - DNA, 25 bp, Homo sapien
ggtgaaggttttcccgcagtcacca

SEQ ID NO: 2202943 - DNA, 25 bp, Homo sapien
tgaggcgcgacttccatatgaaggc

SEQ ID NO: 2202944 - DNA, 25 bp, Homo sapien
gaagtgcgatttctggataaaggcc

SEQ ID NO: 2202945 - DNA, 25 bp, Homo sapien
gttttcctgacgttgctctagctgg

SEQ ID NO: 2202946 - DNA, 25 bp, Homo sapien
cacagtcagcgcatacataaggttt

SEQ ID NO: 2202947 - DNA, 25 bp, Homo sapien
ttgatcaaatctctcacagtggaag

SEQ ID NO: 2202948 - DNA, 25 bp, Homo sapien
ttctcctatgggttgatcaaatctc

SEQ ID NO: 2202949 - DNA, 25 bp, Homo sapien
ttgctgcattttcccaatagcctca

SEQ ID NO: 2202950 - DNA, 25 bp, Homo sapien
ccaggaattccctgttgctgcattt

SEQ ID NO: 2202951 - DNA, 25 bp, Homo sapien
agcctctgacttgggaatttggtac

SEQ ID NO: 2202952 - DNA, 25 bp, Homo sapien
gttaacaggacatgatacacgattg

SEQ ID NO: 2202953 - DNA, 25 bp, Homo sapien
catgatacacgattgggtccagctg

SEQ ID NO: 2202954 - DNA, 25 bp, Homo sapien
tttcaggggcctttcagtgacactt

SEQ ID NO: 2202955 - DNA, 25 bp, Homo sapien
attgggtccagctgattgggtttca

SEQ ID NO: 2202956 - DNA, 25 bp, Homo sapien
taggttaggtgtcgggcagcactca

SEQ ID NO: 2202957 - DNA, 25 bp, Homo sapien
caggatgacaccatcacataggtta

SEQ ID NO: 2202958 - DNA, 25 bp, Homo sapien
cattagcagatgcatagggcggccg

SEQ ID NO: 2202959 - DNA, 25 bp, Homo sapien
tggaaataccctcattagcagatgc

SEQ ID NO: 2202960 - DNA, 25 bp, Homo sapien
gtcacatcccagtacaggcgtctct

SEQ ID NO: 2202961 - DNA, 25 bp, Homo sapien
gtgtcacatcccagtacaggcgtct

SEQ ID NO: 2202962 - DNA, 25 bp, Homo sapien
ctagtgtcacatcccagtacaggcg

SEQ ID NO: 2202963 - DNA, 25 bp, Homo sapien
ctctagtgtcacatcccagtacagg

SEQ ID NO: 2202964 - DNA, 25 bp, Homo sapien
tgttgtcaccgccaacttgagaggc

SEQ ID NO: 2202965 - DNA, 25 bp, Homo sapien
tcctaatgactgcatgaccctgagt

SEQ ID NO: 2202966 - DNA, 25 bp, Homo sapien
caatgggaactctgatctgaaaggg

SEQ ID NO: 2202967 - DNA, 25 bp, Homo sapien
gaccctgagtccctgagataatgaa

SEQ ID NO: 2202968 - DNA, 25 bp, Homo sapien
tttttctctacctaaatcaggatag

SEQ ID NO: 2202969 - DNA, 25 bp, Homo sapien
gggatcagccgacatctgtaaagag

SEQ ID NO: 2202970 - DNA, 25 bp, Homo sapien
gctccctggctatggatagtggctg

SEQ ID NO: 2202971 - DNA, 25 bp, Homo sapien
tcaggatagaggagaaatcgccaga

SEQ ID NO: 2202972 - DNA, 25 bp, Homo sapien
cactgaaacacacggggctttggat

SEQ ID NO: 2202973 - DNA, 25 bp, Homo sapien
gccacattacactgtccactgaaac

SEQ ID NO: 2202974 - DNA, 25 bp, Homo sapien
tgtctccagggtggcaggtccggaa

SEQ ID NO: 2202975 - DNA, 25 bp, Homo sapien
ctccagggtggcaggtccggaatct

SEQ ID NO: 2202976 - DNA, 25 bp, Homo sapien
gggacaggtcagggtatctcttcac

SEQ ID NO: 2202977 - DNA, 25 bp, Homo sapien
caggtcagggtatctcttcactgaa

SEQ ID NO: 2202978 - DNA, 25 bp, Homo sapien
ctggggacaggtcagggtatctctt

SEQ ID NO: 2202979 - DNA, 25 bp, Homo sapien
gacaggtcagggtatctcttcactg

SEQ ID NO: 2202980 - DNA, 25 bp, Homo sapien
atgggggagagtccccattagctgc

SEQ ID NO: 2202981 - DNA, 25 bp, Homo sapien
gaccatgggggagagtccccattag

SEQ ID NO: 2202982 - DNA, 25 bp, Homo sapien
ggggagagtccccattagctgccat

SEQ ID NO: 2202983 - DNA, 25 bp, Homo sapien
ccatgggggagagtccccattagct

SEQ ID NO: 2202984 - DNA, 25 bp, Homo sapien
ctcctgctgacaaccccactcttcc

SEQ ID NO: 2202985 - DNA, 25 bp, Homo sapien
ggcatctgtggactcaaccggagct

SEQ ID NO: 2202986 - DNA, 25 bp, Homo sapien
gatcctgcagtttccactaagaagc

SEQ ID NO: 2202987 - DNA, 25 bp, Homo sapien
aggaagatcctgcagtttccactaa

SEQ ID NO: 2202988 - DNA, 25 bp, Homo sapien
acatggtcatcactccacgttcact

SEQ ID NO: 2202989 - DNA, 25 bp, Homo sapien
cactcacaaatgttttctggtggtg

SEQ ID NO: 2202990 - DNA, 25 bp, Homo sapien
atcactccacgttcactcacaaatg

SEQ ID NO: 2202991 - DNA, 25 bp, Homo sapien
tccacgttcactcacaaatgttttc

SEQ ID NO: 2202992 - DNA, 25 bp, Homo sapien
caattacacctggtgggtgccctta

SEQ ID NO: 2202993 - DNA, 25 bp, Homo sapien
ctgaaaactgcttcgaggaaccccg

SEQ ID NO: 2202994 - DNA, 25 bp, Homo sapien
aaccccggcgcttctggacttgatc

SEQ ID NO: 2202995 - DNA, 25 bp, Homo sapien
gcttagtgtcagctccgaagcggcc

SEQ ID NO: 2202996 - DNA, 25 bp, Homo sapien
gtgactctcaggcaaggaacatggc

SEQ ID NO: 2202997 - DNA, 25 bp, Homo sapien
cactgggccatggaatgtaccacca

SEQ ID NO: 2202998 - DNA, 25 bp, Homo sapien
tgggattttccagtggccgaggcac

SEQ ID NO: 2202999 - DNA, 25 bp, Homo sapien
cctactcgatatacccctgtgggat

SEQ ID NO: 2203000 - DNA, 25 bp, Homo sapien
accgaacctgtgcagttgccgcggg

SEQ ID NO: 2203001 - DNA, 25 bp, Homo sapien
cactggctacatttccgacctggac

SEQ ID NO: 2203002 - DNA, 25 bp, Homo sapien
tctcggctgtcaccgaacctgtgca

SEQ ID NO: 2203003 - DNA, 25 bp, Homo sapien
tgcgggaaacactcggcgtctcggc

SEQ ID NO: 2203004 - DNA, 25 bp, Homo sapien
tcattaaggcaaatcccctccagcg

SEQ ID NO: 2203005 - DNA, 25 bp, Homo sapien
taaagtttcctagtcctaccagcaa

SEQ ID NO: 2203006 - DNA, 25 bp, Homo sapien
tccagcgctggatgttgatgctgtc

SEQ ID NO: 2203007 - DNA, 25 bp, Homo sapien
tctgactactttgtgcaattgagga

SEQ ID NO: 2203008 - DNA, 25 bp, Homo sapien
gcttttgtatatcccatcttgccta

SEQ ID NO: 2203009 - DNA, 25 bp, Homo sapien
tatgtaactagtgaaatgtagcctc

SEQ ID NO: 2203010 - DNA, 25 bp, Homo sapien
ggtatatggtatgaaatcaagatca

SEQ ID NO: 2203011 - DNA, 25 bp, Homo sapien
gcctctgatcagatatgtctaaact

SEQ ID NO: 2203012 - DNA, 25 bp, Homo sapien
ggttctggaatgactacatctgaaa

SEQ ID NO: 2203013 - DNA, 25 bp, Homo sapien
cttgatgatgtacaacttgtgatgc

SEQ ID NO: 2203014 - DNA, 25 bp, Homo sapien
taaacctttactggcttgggctata

SEQ ID NO: 2203015 - DNA, 25 bp, Homo sapien
ctttactggcttgggctatattcca

SEQ ID NO: 2203016 - DNA, 25 bp, Homo sapien
caagtcatacttttgaacccagaat

SEQ ID NO: 2203017 - DNA, 25 bp, Homo sapien
tcagaacccagaatacagagcaact

SEQ ID NO: 2203018 - DNA, 25 bp, Homo sapien
tctccaatacgtccccatttataag

SEQ ID NO: 2203019 - DNA, 25 bp, Homo sapien
tacacacagtaaccatcaggattta

SEQ ID NO: 2203020 - DNA, 25 bp, Homo sapien
tttcccagacgctgttcacaggctg

SEQ ID NO: 2203021 - DNA, 25 bp, Homo sapien
tcccagacgctgttcacaggctgca

SEQ ID NO: 2203022 - DNA, 25 bp, Homo sapien
ccagacgctgttcacaggctgcata

SEQ ID NO: 2203023 - DNA, 25 bp, Homo sapien
ctttcccagacgctgttcacaggct

SEQ ID NO: 2203024 - DNA, 25 bp, Homo sapien
gcttctccaaggaacgaccgtccgc

SEQ ID NO: 2203025 - DNA, 25 bp, Homo sapien
ccagcgcatccggtggtgtgcggct

SEQ ID NO: 2203026 - DNA, 25 bp, Homo sapien
gtggtgacggcggttcctgccgact

SEQ ID NO: 2203027 - DNA, 25 bp, Homo sapien
tgacggcggttcctgccgactgccg

SEQ ID NO: 2203028 - DNA, 25 bp, Homo sapien
cgcagcgcgacggctttttatccgc

SEQ ID NO: 2203029 - DNA, 25 bp, Homo sapien
gcagcgcgacggctttttatccgcc

SEQ ID NO: 2203030 - DNA, 25 bp, Homo sapien
ccgcagcgcgacggctttttatccg

SEQ ID NO: 2203031 - DNA, 25 bp, Homo sapien
gatgcaatcgttgacatttctgggc

SEQ ID NO: 2203032 - DNA, 25 bp, Homo sapien
gatttcataagactaaggccccacc

SEQ ID NO: 2203033 - DNA, 25 bp, Homo sapien
ctggcccagtacacacgctataaat

SEQ ID NO: 2203034 - DNA, 25 bp, Homo sapien
gaagcccaccagtcactatcttgta

SEQ ID NO: 2203035 - DNA, 25 bp, Homo sapien
ctccccgtgctcctgggaagaggtt

SEQ ID NO: 2203036 - DNA, 25 bp, Homo sapien
ttaggcccgggtgagtgagcaggac

SEQ ID NO: 2203037 - DNA, 25 bp, Homo sapien
agccagctgctgtcgttaggcccgg

SEQ ID NO: 2203038 - DNA, 25 bp, Homo sapien
tgagcaggacgagagggcacggctg

SEQ ID NO: 2203039 - DNA, 25 bp, Homo sapien
tgcaatcggggtggcgcacaatcgc

SEQ ID NO: 2203040 - DNA, 25 bp, Homo sapien
acgaccgaatctgggtgcaatcggg

SEQ ID NO: 2203041 - DNA, 25 bp, Homo sapien
gaaacgaccgaatctgggtgcaatc

SEQ ID NO: 2203042 - DNA, 25 bp, Homo sapien
ctggaaacgaccgaatctgggtgca

SEQ ID NO: 2203043 - DNA, 25 bp, Homo sapien
taattgctgaccatactgaattgca

SEQ ID NO: 2203044 - DNA, 25 bp, Homo sapien
gtggtgaaatctactgtgggtcagt

SEQ ID NO: 2203045 - DNA, 25 bp, Homo sapien
tattgatccctttgcttaactagta

SEQ ID NO: 2203046 - DNA, 25 bp, Homo sapien
ccctaccaagggagctaccagggag

SEQ ID NO: 2203047 - DNA, 25 bp, Homo sapien
gggatgtcagaaaactataatcaac

SEQ ID NO: 2203048 - DNA, 25 bp, Homo sapien
gcgctgtgacatgcgtctgtggtcc

SEQ ID NO: 2203049 - DNA, 25 bp, Homo sapien
catgctttaaagtgtcaggtacctg

SEQ ID NO: 2203050 - DNA, 25 bp, Homo sapien
tacctgtaaggtacttggctgaagt

SEQ ID NO: 2203051 - DNA, 25 bp, Homo sapien
agatcttgacgtttcaggcggcccc

SEQ ID NO: 2203052 - DNA, 25 bp, Homo sapien
ggttaaagccctaggcacgcaggtc

SEQ ID NO: 2203053 - DNA, 25 bp, Homo sapien
gacccgctgtcctcaaaggctatga

SEQ ID NO: 2203054 - DNA, 25 bp, Homo sapien
gcagagccaataacgagagtccgag

SEQ ID NO: 2203055 - DNA, 25 bp, Homo sapien
tcttctcttggggttcagagccgct

SEQ ID NO: 2203056 - DNA, 25 bp, Homo sapien
tctcttggggttcagagccgctgag

SEQ ID NO: 2203057 - DNA, 25 bp, Homo sapien
cacataaacagcgtcactgcacgca

SEQ ID NO: 2203058 - DNA, 25 bp, Homo sapien
gggggaggtgcggaccacataaaca

SEQ ID NO: 2203059 - DNA, 25 bp, Homo sapien
ccacatatgccaagcacggcacaaa

SEQ ID NO: 2203060 - DNA, 25 bp, Homo sapien
gcggagaccactggccttccgtgtg

SEQ ID NO: 2203061 - DNA, 25 bp, Homo sapien
gaacgaggaccacatatgccaagca

SEQ ID NO: 2203062 - DNA, 25 bp, Homo sapien
caccacaggcggcacgatgaacgag

SEQ ID NO: 2203063 - DNA, 25 bp, Homo sapien
cacatgtgagaaccggatttagggc

SEQ ID NO: 2203064 - DNA, 25 bp, Homo sapien
agtcaggtttctcaaggtactcggg

SEQ ID NO: 2203065 - DNA, 25 bp, Homo sapien
aaagtgagaaatggattcagggccc

SEQ ID NO: 2203066 - DNA, 25 bp, Homo sapien
gaagtagatcctgaagtgaccacga

SEQ ID NO: 2203067 - DNA, 25 bp, Homo sapien
tcagtcggagaagaggctggcgaaa

SEQ ID NO: 2203068 - DNA, 25 bp, Homo sapien
tcggagaagaggctggcgaaagact

SEQ ID NO: 2203069 - DNA, 25 bp, Homo sapien
ggtctcagctttcacctcgtcctgg

SEQ ID NO: 2203070 - DNA, 25 bp, Homo sapien
cctcaggctgcggatggtctcagct

SEQ ID NO: 2203071 - DNA, 25 bp, Homo sapien
aggctgggcctgggcggggctggct

SEQ ID NO: 2203072 - DNA, 25 bp, Homo sapien
ctaaggctgggcctgggcggggctg

SEQ ID NO: 2203073 - DNA, 25 bp, Homo sapien
aaggctgggcctgggcggggctggc

SEQ ID NO: 2203074 - DNA, 25 bp, Homo sapien
taaggctgggcctgggcggggctgg

SEQ ID NO: 2203075 - DNA, 25 bp, Homo sapien
ctggaaggttgaaggcattggtcag

SEQ ID NO: 2203076 - DNA, 25 bp, Homo sapien
aaggcattggtcagagactgggatt

SEQ ID NO: 2203077 - DNA, 25 bp, Homo sapien
ttggaatggaccagaaaaggcagat

SEQ ID NO: 2203078 - DNA, 25 bp, Homo sapien
tagaaagggcttggaccaaggacag

SEQ ID NO: 2203079 - DNA, 25 bp, Homo sapien
ctaacaggttctcaaggctgggagc

SEQ ID NO: 2203080 - DNA, 25 bp, Homo sapien
gttgggcaagtcagcctaaggcaga

SEQ ID NO: 2203081 - DNA, 25 bp, Homo sapien
ttgagctgggggtgcggaggtcccc

SEQ ID NO: 2203082 - DNA, 25 bp, Homo sapien
cactggccgggattggcggccttga

SEQ ID NO: 2203083 - DNA, 25 bp, Homo sapien
gacggatgtctgacgggtagcctgt

SEQ ID NO: 2203084 - DNA, 25 bp, Homo sapien
cagctgtggtttgggacgtccagcg

SEQ ID NO: 2203085 - DNA, 25 bp, Homo sapien
gtggcggcacgtcctggctgggttt

SEQ ID NO: 2203086 - DNA, 25 bp, Homo sapien
cctggacccggctgtggagggccgc

SEQ ID NO: 2203087 - DNA, 25 bp, Homo sapien
cgcggcctgggacgcgggctgctgg

SEQ ID NO: 2203088 - DNA, 25 bp, Homo sapien
ggcgcggcctgggacgcgggctgct

SEQ ID NO: 2203089 - DNA, 25 bp, Homo sapien
gcgctgctgcaatgggggtccctgg

SEQ ID NO: 2203090 - DNA, 25 bp, Homo sapien
gggaggtctggcggcccaagggcag

SEQ ID NO: 2203091 - DNA, 25 bp, Homo sapien
tgttgaccacgagctctacgatgag

SEQ ID NO: 2203092 - DNA, 25 bp, Homo sapien
accaatgagcggcatggaggaaccc

SEQ ID NO: 2203093 - DNA, 25 bp, Homo sapien
catcctggtggtcaccaatgagcgg

SEQ ID NO: 2203094 - DNA, 25 bp, Homo sapien
cagggcctgagccatcttgttgacc

SEQ ID NO: 2203095 - DNA, 25 bp, Homo sapien
aatctctgagcacgtgtccacccac

SEQ ID NO: 2203096 - DNA, 25 bp, Homo sapien
tccttgccatgtagcgcttccactg

SEQ ID NO: 2203097 - DNA, 25 bp, Homo sapien
tgtgatcccttccgtccttgccatg

SEQ ID NO: 2203098 - DNA, 25 bp, Homo sapien
gcttccactgcgcagatgtccagtc

SEQ ID NO: 2203099 - DNA, 25 bp, Homo sapien
catcgcagagccagtattggtcttc

SEQ ID NO: 2203100 - DNA, 25 bp, Homo sapien
tccagttccctgacactgacgtcct

SEQ ID NO: 2203101 - DNA, 25 bp, Homo sapien
tgtcagacatggcaatttgctccag

SEQ ID NO: 2203102 - DNA, 25 bp, Homo sapien
ggcaatttgctccagcatcgcagag

SEQ ID NO: 2203103 - DNA, 25 bp, Homo sapien
gcatacgtcttggtcagtgccacga

SEQ ID NO: 2203104 - DNA, 25 bp, Homo sapien
gacacgcacgtcatatttggcatcg

SEQ ID NO: 2203105 - DNA, 25 bp, Homo sapien
tgtaggccttgtagttctgcccaat

SEQ ID NO: 2203106 - DNA, 25 bp, Homo sapien
aagggctcggcagtggcatacgtct

SEQ ID NO: 2203107 - DNA, 25 bp, Homo sapien
catcccagagtgtgcgtgccccatc

SEQ ID NO: 2203108 - DNA, 25 bp, Homo sapien
caaccacggggtacgttgtactgct

SEQ ID NO: 2203109 - DNA, 25 bp, Homo sapien
cacaaccacggggtacgttgtactg

SEQ ID NO: 2203110 - DNA, 25 bp, Homo sapien
cagagtgtgcgtgccccatcttcac

SEQ ID NO: 2203111 - DNA, 25 bp, Homo sapien
ggaaaaggcagaggagacatgctca

SEQ ID NO: 2203112 - DNA, 25 bp, Homo sapien
tgctcagggcagaaagggtgacctc

SEQ ID NO: 2203113 - DNA, 25 bp, Homo sapien
cagaggagacatgctcagggcagaa

SEQ ID NO: 2203114 - DNA, 25 bp, Homo sapien
ggtgacctccaggggtggggcggca

SEQ ID NO: 2203115 - DNA, 25 bp, Homo sapien
gaactcagatgtacatcgccaaacc

SEQ ID NO: 2203116 - DNA, 25 bp, Homo sapien
gccagtgacattgagactgacagcc

SEQ ID NO: 2203117 - DNA, 25 bp, Homo sapien
tgtacatcgccaaacccagagatgc

SEQ ID NO: 2203118 - DNA, 25 bp, Homo sapien
taaactattgagaggcatgagccct

SEQ ID NO: 2203119 - DNA, 25 bp, Homo sapien
aagatcccagctctttacgccataa

SEQ ID NO: 2203120 - DNA, 25 bp, Homo sapien
cctcacagacaatccagtttcctag

SEQ ID NO: 2203121 - DNA, 25 bp, Homo sapien
gctctttacgccataaatgttcctc

SEQ ID NO: 2203122 - DNA, 25 bp, Homo sapien
tggagtcctgaacctgtggctcaca

SEQ ID NO: 2203123 - DNA, 25 bp, Homo sapien
taagcataaggaaattcacggtaga

SEQ ID NO: 2203124 - DNA, 25 bp, Homo sapien
cttgtaagcataaggaaattcacgg

SEQ ID NO: 2203125 - DNA, 25 bp, Homo sapien
ttgtaagcataaggaaattcacggt

SEQ ID NO: 2203126 - DNA, 25 bp, Homo sapien
cataaggaaattcacggtagaccct

SEQ ID NO: 2203127 - DNA, 25 bp, Homo sapien
cacaaagcaacttcatgactccacg

SEQ ID NO: 2203128 - DNA, 25 bp, Homo sapien
tcacaaagcaacttcatgactccac

SEQ ID NO: 2203129 - DNA, 25 bp, Homo sapien
acaaagcaacttcatgactccacgt

SEQ ID NO: 2203130 - DNA, 25 bp, Homo sapien
ttattgcagtagttatgactcttcc

SEQ ID NO: 2203131 - DNA, 25 bp, Homo sapien
attattgcagtagttatgactcttc

SEQ ID NO: 2203132 - DNA, 25 bp, Homo sapien
tatgcagtcgaaccatctgggcaaa

SEQ ID NO: 2203133 - DNA, 25 bp, Homo sapien
tctgtccccagtttcttatgcagtc

SEQ ID NO: 2203134 - DNA, 25 bp, Homo sapien
ggtctgatcaattagagggaattct

SEQ ID NO: 2203135 - DNA, 25 bp, Homo sapien
agaaggtctgatcaattagagggaa

SEQ ID NO: 2203136 - DNA, 25 bp, Homo sapien
cagtggcacccttcctgttacttac

SEQ ID NO: 2203137 - DNA, 25 bp, Homo sapien
ccagtggcacccttcctgttactta

SEQ ID NO: 2203138 - DNA, 25 bp, Homo sapien
gccagtggcacccttcctgttactt

SEQ ID NO: 2203139 - DNA, 25 bp, Homo sapien
gcagcccaatgaccaaactgcggta

SEQ ID NO: 2203140 - DNA, 25 bp, Homo sapien
ttgcgtgccatgctgaaggcgtgct

SEQ ID NO: 2203141 - DNA, 25 bp, Homo sapien
caaactgcggtagtctccgttgcgt

SEQ ID NO: 2203142 - DNA, 25 bp, Homo sapien
caaggagttaacactggggattcca

SEQ ID NO: 2203143 - DNA, 25 bp, Homo sapien
gagtgttgagagttcccccagaagc

SEQ ID NO: 2203144 - DNA, 25 bp, Homo sapien
ggagtgttgagagttcccccagaag

SEQ ID NO: 2203145 - DNA, 25 bp, Homo sapien
aggagtgttgagagttcccccagaa

SEQ ID NO: 2203146 - DNA, 25 bp, Homo sapien
cattccgaagaacttccatatccac

SEQ ID NO: 2203147 - DNA, 25 bp, Homo sapien
accccattccgaagaacttccatat

SEQ ID NO: 2203148 - DNA, 25 bp, Homo sapien
caaggttgagatcagagaattcggc

SEQ ID NO: 2203149 - DNA, 25 bp, Homo sapien
agagaatccaccattggcatgggcc

SEQ ID NO: 2203150 - DNA, 25 bp, Homo sapien
tccatggatctttttccctttgaag

SEQ ID NO: 2203151 - DNA, 25 bp, Homo sapien
tgttctactttaatgtcaatttctc

SEQ ID NO: 2203152 - DNA, 25 bp, Homo sapien
gttctactttaatgtcaatttctcc

SEQ ID NO: 2203153 - DNA, 25 bp, Homo sapien
tcaatttctccatggatctttttcc

SEQ ID NO: 2203154 - DNA, 25 bp, Homo sapien
cagtgtagctggcaatgatgggggg

SEQ ID NO: 2203155 - DNA, 25 bp, Homo sapien
tgtagctggcaatgatggggggcag

SEQ ID NO: 2203156 - DNA, 25 bp, Homo sapien
taggtgggcagctgcatccgataag

SEQ ID NO: 2203157 - DNA, 25 bp, Homo sapien
gagtggattgagtggtgcaggctgg

SEQ ID NO: 2203158 - DNA, 25 bp, Homo sapien
gaaaggcaaagcttttggagagaag

SEQ ID NO: 2203159 - DNA, 25 bp, Homo sapien
tgctcacaagatccattagaggaca

SEQ ID NO: 2203160 - DNA, 25 bp, Homo sapien
gggctcttggatgaggcatactgca

SEQ ID NO: 2203161 - DNA, 25 bp, Homo sapien
cacaagatccattagaggacaaggc

SEQ ID NO: 2203162 - DNA, 25 bp, Homo sapien
caggtactagataagtgctcacaag

SEQ ID NO: 2203163 - DNA, 25 bp, Homo sapien
cgttggacagcgacgagaagaagcc

SEQ ID NO: 2203164 - DNA, 25 bp, Homo sapien
tcggtgtgcggctcgtcgatgacca

SEQ ID NO: 2203165 - DNA, 25 bp, Homo sapien
ctgcttgaccgcgttggacagcgac

SEQ ID NO: 2203166 - DNA, 25 bp, Homo sapien
gccgccgtggtctgcttgaccgcgt

SEQ ID NO: 2203167 - DNA, 25 bp, Homo sapien
gcggacgctgcaggtctgtcatgta

SEQ ID NO: 2203168 - DNA, 25 bp, Homo sapien
gggcggctgcggacgctgcaggtct

SEQ ID NO: 2203169 - DNA, 25 bp, Homo sapien
gctgcggacgctgcaggtctgtcat

SEQ ID NO: 2203170 - DNA, 25 bp, Homo sapien
aggacctctcggcagtggcggtccc

SEQ ID NO: 2203171 - DNA, 25 bp, Homo sapien
taaagttgctgtccgacaggcggcg

SEQ ID NO: 2203172 - DNA, 25 bp, Homo sapien
gattggccataaagttgctgtccga

SEQ ID NO: 2203173 - DNA, 25 bp, Homo sapien
ggcagattggccataaagttgctgt

SEQ ID NO: 2203174 - DNA, 25 bp, Homo sapien
tggccataaagttgctgtccgacag

SEQ ID NO: 2203175 - DNA, 25 bp, Homo sapien
tctcaggcacgacacgactcctccg

SEQ ID NO: 2203176 - DNA, 25 bp, Homo sapien
tgcgctctcaggcacgacacgactc

SEQ ID NO: 2203177 - DNA, 25 bp, Homo sapien
aggcacgacacgactcctccgctgc

SEQ ID NO: 2203178 - DNA, 25 bp, Homo sapien
gcgggggcggactgcgcggtgccca

SEQ ID NO: 2203179 - DNA, 25 bp, Homo sapien
tcggagtcggccggcagaggctcct

SEQ ID NO: 2203180 - DNA, 25 bp, Homo sapien
ctgacgcggagtcggagtcggccgg

SEQ ID NO: 2203181 - DNA, 25 bp, Homo sapien
tcatcctcgactgacgcggagtcgg

SEQ ID NO: 2203182 - DNA, 25 bp, Homo sapien
ctccagggttccggctggtgggaat

SEQ ID NO: 2203183 - DNA, 25 bp, Homo sapien
gaggctagtttattgaggtttggaa

SEQ ID NO: 2203184 - DNA, 25 bp, Homo sapien
gaagaggctagtttattgaggtttg

SEQ ID NO: 2203185 - DNA, 25 bp, Homo sapien
agaggctagtttattgaggtttgga

SEQ ID NO: 2203186 - DNA, 25 bp, Homo sapien
aggctagtttattgaggtttggaag

SEQ ID NO: 2203187 - DNA, 25 bp, Homo sapien
ttgtagctcctcacaccgtggcagc

SEQ ID NO: 2203188 - DNA, 25 bp, Homo sapien
tggcagcggtctcccccagaaggtc

SEQ ID NO: 2203189 - DNA, 25 bp, Homo sapien
caagcaggcacgtgtagacatggtc

SEQ ID NO: 2203190 - DNA, 25 bp, Homo sapien
tgaccttcgaccatggaaacggtgg

SEQ ID NO: 2203191 - DNA, 25 bp, Homo sapien
taattcaggtaaagtgctcagagca

SEQ ID NO: 2203192 - DNA, 25 bp, Homo sapien
tggcacctggaaacacttatagcgg

SEQ ID NO: 2203193 - DNA, 25 bp, Homo sapien
taaaagcatgggtaactgaaggtcg

SEQ ID NO: 2203194 - DNA, 25 bp, Homo sapien
tgaaaaagccttggagtgccttggc

SEQ ID NO: 2203195 - DNA, 25 bp, Homo sapien
tactccactctgaccatgatccttt

SEQ ID NO: 2203196 - DNA, 25 bp, Homo sapien
gcgctggcgggcacgggtaggatta

SEQ ID NO: 2203197 - DNA, 25 bp, Homo sapien
ccaggtactccactctgaccatgat

SEQ ID NO: 2203198 - DNA, 25 bp, Homo sapien
gcacgggtaggattaggtccacagg

SEQ ID NO: 2203199 - DNA, 25 bp, Homo sapien
cctcagagcacagtctgtgggacac

SEQ ID NO: 2203200 - DNA, 25 bp, Homo sapien
agagcacagtctgtgggacactcac

SEQ ID NO: 2203201 - DNA, 25 bp, Homo sapien
tcagagcacagtctgtgggacactc

SEQ ID NO: 2203202 - DNA, 25 bp, Homo sapien
cagagcacagtctgtgggacactca

SEQ ID NO: 2203203 - DNA, 25 bp, Homo sapien
tgctgtagcagtgccggatatcctg

SEQ ID NO: 2203204 - DNA, 25 bp, Homo sapien
gatgtccgtcaaacttgcggcccct

SEQ ID NO: 2203205 - DNA, 25 bp, Homo sapien
tggcccgggatttcttgacagctga

SEQ ID NO: 2203206 - DNA, 25 bp, Homo sapien
tgttgcccggcacatcgatgtccgt

SEQ ID NO: 2203207 - DNA, 25 bp, Homo sapien
cagagacagggcaacaggggattgg

SEQ ID NO: 2203208 - DNA, 25 bp, Homo sapien
caacaggggattggaccaaagcagg

SEQ ID NO: 2203209 - DNA, 25 bp, Homo sapien
ggcaacaggggattggaccaaagca

SEQ ID NO: 2203210 - DNA, 25 bp, Homo sapien
gacagggcaacaggggattggacca

SEQ ID NO: 2203211 - DNA, 25 bp, Homo sapien
tggcatcgccagcacagaaggggcc

SEQ ID NO: 2203212 - DNA, 25 bp, Homo sapien
gggcacagctgtgttgcagatgtgg

SEQ ID NO: 2203213 - DNA, 25 bp, Homo sapien
tgcagatgtgggtccgggtggcatc

SEQ ID NO: 2203214 - DNA, 25 bp, Homo sapien
tgcacgtccgttgttccatggtctg

SEQ ID NO: 2203215 - DNA, 25 bp, Homo sapien
tgtctccttaggttcgtggggtcca

SEQ ID NO: 2203216 - DNA, 25 bp, Homo sapien
ggtggcaggccggtgcacctccgct

SEQ ID NO: 2203217 - DNA, 25 bp, Homo sapien
aggtgcagaacacttgcggcttcgt

SEQ ID NO: 2203218 - DNA, 25 bp, Homo sapien
ctgctcgtaggctagccccgggcag

SEQ ID NO: 2203219 - DNA, 25 bp, Homo sapien
ctgagcagggggtccaggggcccca

SEQ ID NO: 2203220 - DNA, 25 bp, Homo sapien
tccaggggccccaggtggcccaggc

SEQ ID NO: 2203221 - DNA, 25 bp, Homo sapien
ccccaggtggcccaggccccgtgtg

SEQ ID NO: 2203222 - DNA, 25 bp, Homo sapien
tgagcagggggtccaggggccccag

SEQ ID NO: 2203223 - DNA, 25 bp, Homo sapien
tccgggtccctttggagcaggtgac

SEQ ID NO: 2203224 - DNA, 25 bp, Homo sapien
tgattacaggctcgcctgcgggtcc

SEQ ID NO: 2203225 - DNA, 25 bp, Homo sapien
ccgggtccctttggagcaggtgaca

SEQ ID NO: 2203226 - DNA, 25 bp, Homo sapien
agcagggtgattacaggctcgcctg

SEQ ID NO: 2203227 - DNA, 25 bp, Homo sapien
acacagcgccggtaccgcagctggg

SEQ ID NO: 2203228 - DNA, 25 bp, Homo sapien
cacctttccagagcactgcccattc

SEQ ID NO: 2203229 - DNA, 25 bp, Homo sapien
cctcagagcacgtcaccgaacaggg

SEQ ID NO: 2203230 - DNA, 25 bp, Homo sapien
tgtggaccacagggaccatcgtggg

SEQ ID NO: 2203231 - DNA, 25 bp, Homo sapien
ccaggtccgcagtaagcaaaggtaa

SEQ ID NO: 2203232 - DNA, 25 bp, Homo sapien
tacggtaagggctcaatccatgcaa

SEQ ID NO: 2203233 - DNA, 25 bp, Homo sapien
catgatcaggagactagagctaccc

SEQ ID NO: 2203234 - DNA, 25 bp, Homo sapien
gtatggtcacgatcagggcctcagg

SEQ ID NO: 2203235 - DNA, 25 bp, Homo sapien
tgcacttgccggaggattcttcata

SEQ ID NO: 2203236 - DNA, 25 bp, Homo sapien
caccactacgtttctggtaggcaaa

SEQ ID NO: 2203237 - DNA, 25 bp, Homo sapien
gagacagcagtcttccacgctgaca

SEQ ID NO: 2203238 - DNA, 25 bp, Homo sapien
aaaggcagtgttgagacagcagtct

SEQ ID NO: 2203239 - DNA, 25 bp, Homo sapien
tgggtgaagcagagcacggggtctg

SEQ ID NO: 2203240 - DNA, 25 bp, Homo sapien
ctgggtgaagcagagcacggggtct

SEQ ID NO: 2203241 - DNA, 25 bp, Homo sapien
gggtgaagcagagcacggggtctga

SEQ ID NO: 2203242 - DNA, 25 bp, Homo sapien
gtgaagcagagcacggggtctgagc

SEQ ID NO: 2203243 - DNA, 25 bp, Homo sapien
cggcagcaacaatcgaggggcctgc

SEQ ID NO: 2203244 - DNA, 25 bp, Homo sapien
gcggcagcaacaatcgaggggcctg

SEQ ID NO: 2203245 - DNA, 25 bp, Homo sapien
gcagcaacaatcgaggggcctgcgc

SEQ ID NO: 2203246 - DNA, 25 bp, Homo sapien
agcaacaatcgaggggcctgcgctc

SEQ ID NO: 2203247 - DNA, 25 bp, Homo sapien
aggaggtcccgctttatctgggttg

SEQ ID NO: 2203248 - DNA, 25 bp, Homo sapien
aggtcccgctttatctgggttgata

SEQ ID NO: 2203249 - DNA, 25 bp, Homo sapien
gaggtcccgctttatctgggttgat

SEQ ID NO: 2203250 - DNA, 25 bp, Homo sapien
ggaggtcccgctttatctgggttga

SEQ ID NO: 2203251 - DNA, 25 bp, Homo sapien
ggaatcagcagggaaagaggaacct

SEQ ID NO: 2203252 - DNA, 25 bp, Homo sapien
gaatcagcagggaaagaggaaccta

SEQ ID NO: 2203253 - DNA, 25 bp, Homo sapien
tggaatcagcagggaaagaggaacc

SEQ ID NO: 2203254 - DNA, 25 bp, Homo sapien
ctggaatcagcagggaaagaggaac

SEQ ID NO: 2203255 - DNA, 25 bp, Homo sapien
cataatgacggggtcaacctcgtgg

SEQ ID NO: 2203256 - DNA, 25 bp, Homo sapien
tgcagcaacttcctagccgtgtgac

SEQ ID NO: 2203257 - DNA, 25 bp, Homo sapien
aaatggagcataggagcgtgcagca

SEQ ID NO: 2203258 - DNA, 25 bp, Homo sapien
ccagggtgaagtgagtgtgcggtgc

SEQ ID NO: 2203259 - DNA, 25 bp, Homo sapien
cacaatctcatgaaacgtttaggca

SEQ ID NO: 2203260 - DNA, 25 bp, Homo sapien
ggacacacgtgcacagctttacaag

SEQ ID NO: 2203261 - DNA, 25 bp, Homo sapien
tcttcatatggtcagctcatcacgg

SEQ ID NO: 2203262 - DNA, 25 bp, Homo sapien
gacactgtcgtcacctagtctcacg

SEQ ID NO: 2203263 - DNA, 25 bp, Homo sapien
actaactcttctactcacatccaaa

SEQ ID NO: 2203264 - DNA, 25 bp, Homo sapien
ctttgtacccgcccgcaggaaattg

SEQ ID NO: 2203265 - DNA, 25 bp, Homo sapien
aaaaacgcagacagggctccctcat

SEQ ID NO: 2203266 - DNA, 25 bp, Homo sapien
ctgggccagcgctaacaggtgagcc

SEQ ID NO: 2203267 - DNA, 25 bp, Homo sapien
ggagacgtgtaagggcggccactgg

SEQ ID NO: 2203268 - DNA, 25 bp, Homo sapien
agtaggagacgtgtaagggcggcca

SEQ ID NO: 2203269 - DNA, 25 bp, Homo sapien
cattgaagtaggagacgtgtaaggg

SEQ ID NO: 2203270 - DNA, 25 bp, Homo sapien
gaagtaggagacgtgtaagggcggc

SEQ ID NO: 2203271 - DNA, 25 bp, Homo sapien
caatcagagcatgagtctttcagtt

SEQ ID NO: 2203272 - DNA, 25 bp, Homo sapien
cagagcatgagtctttcagttgaac

SEQ ID NO: 2203273 - DNA, 25 bp, Homo sapien
agagcatgagtctttcagttgaact

SEQ ID NO: 2203274 - DNA, 25 bp, Homo sapien
aatcagagcatgagtctttcagttg

SEQ ID NO: 2203275 - DNA, 25 bp, Homo sapien
tcatggcttctggggccctggggag

SEQ ID NO: 2203276 - DNA, 25 bp, Homo sapien
tggcttctggggccctggggagagc

SEQ ID NO: 2203277 - DNA, 25 bp, Homo sapien
gcttctggggccctggggagagcac

SEQ ID NO: 2203278 - DNA, 25 bp, Homo sapien
catggcttctggggccctggggaga

SEQ ID NO: 2203279 - DNA, 25 bp, Homo sapien
gccatccacgctgatagaagggatg

SEQ ID NO: 2203280 - DNA, 25 bp, Homo sapien
ggtcgagaggccatccacgctgata

SEQ ID NO: 2203281 - DNA, 25 bp, Homo sapien
agaggccatccacgctgatagaagg

SEQ ID NO: 2203282 - DNA, 25 bp, Homo sapien
tccacgctgatagaagggatgtgca

SEQ ID NO: 2203283 - DNA, 25 bp, Homo sapien
tgctccagaagtgaatgctaggagg

SEQ ID NO: 2203284 - DNA, 25 bp, Homo sapien
ccacatgccaatcccattggtgctg

SEQ ID NO: 2203285 - DNA, 25 bp, Homo sapien
cccgccacatgccaatcccattggt

SEQ ID NO: 2203286 - DNA, 25 bp, Homo sapien
gattcctgtcagtcacccgccacat

SEQ ID NO: 2203287 - DNA, 25 bp, Homo sapien
cccattggtgctggcgcccacacac

SEQ ID NO: 2203288 - DNA, 25 bp, Homo sapien
tggggtcagcgccggccccggagcc

SEQ ID NO: 2203289 - DNA, 25 bp, Homo sapien
ctggaggccggagccacttcccgat

SEQ ID NO: 2203290 - DNA, 25 bp, Homo sapien
gagcctggaggccggagccacttcc

SEQ ID NO: 2203291 - DNA, 25 bp, Homo sapien
ggaggccggagccacttcccgatcc

SEQ ID NO: 2203292 - DNA, 25 bp, Homo sapien
aaacccggctccacattaagctctt

SEQ ID NO: 2203293 - DNA, 25 bp, Homo sapien
gtgtccataacaaccgcgggcagcc

SEQ ID NO: 2203294 - DNA, 25 bp, Homo sapien
cattaagctcttccgatttcaggtt

SEQ ID NO: 2203295 - DNA, 25 bp, Homo sapien
ttcacttctgggggcaaagcccggc

SEQ ID NO: 2203296 - DNA, 25 bp, Homo sapien
aggattctcctgtgggccacccagt

SEQ ID NO: 2203297 - DNA, 25 bp, Homo sapien
tcctccaacaggacataggacttcg

SEQ ID NO: 2203298 - DNA, 25 bp, Homo sapien
cacaaagagggtgtgtaaggattgt

SEQ ID NO: 2203299 - DNA, 25 bp, Homo sapien
ctcagggcatgactgcacatcagag

SEQ ID NO: 2203300 - DNA, 25 bp, Homo sapien
catgtactcgttccggctgctgcgt

SEQ ID NO: 2203301 - DNA, 25 bp, Homo sapien
ggaggtaacagacacctctggctgg

SEQ ID NO: 2203302 - DNA, 25 bp, Homo sapien
gctgctgcgtgccaaaccgcctggg

SEQ ID NO: 2203303 - DNA, 25 bp, Homo sapien
ggcatggtggaggtaacagacacct

SEQ ID NO: 2203304 - DNA, 25 bp, Homo sapien
aacttctggccgctcaccttgcgga

SEQ ID NO: 2203305 - DNA, 25 bp, Homo sapien
ttgtcatagtagtaccgcaaggccc

SEQ ID NO: 2203306 - DNA, 25 bp, Homo sapien
catcccgtgaagtccaggagatgat

SEQ ID NO: 2203307 - DNA, 25 bp, Homo sapien
gcttgaattcaccaccatcccgtga

SEQ ID NO: 2203308 - DNA, 25 bp, Homo sapien
gaaactgccacagcgtcacagatgg

SEQ ID NO: 2203309 - DNA, 25 bp, Homo sapien
agtgctcacgccatcccaggggtac

SEQ ID NO: 2203310 - DNA, 25 bp, Homo sapien
ggagtgctcacgccatcccaggggt

SEQ ID NO: 2203311 - DNA, 25 bp, Homo sapien
tgggggagtgctcacgccatcccag

SEQ ID NO: 2203312 - DNA, 25 bp, Homo sapien
cgctgggggagtgctcacgccatcc

SEQ ID NO: 2203313 - DNA, 25 bp, Homo sapien
ggagagcaaacagctgagttgagag

SEQ ID NO: 2203314 - DNA, 25 bp, Homo sapien
gagagcaaacagctgagttgagagg

SEQ ID NO: 2203315 - DNA, 25 bp, Homo sapien
ctggagagcaaacagctgagttgag

SEQ ID NO: 2203316 - DNA, 25 bp, Homo sapien
tggagagcaaacagctgagttgaga

SEQ ID NO: 2203317 - DNA, 25 bp, Homo sapien
aatgtctacgtaccttccacaggcc

SEQ ID NO: 2203318 - DNA, 25 bp, Homo sapien
ctctgagaagtaggtagtcttcctg

SEQ ID NO: 2203319 - DNA, 25 bp, Homo sapien
tgacttatttatccctgatcatgcc

SEQ ID NO: 2203320 - DNA, 25 bp, Homo sapien
tcaggttccagttgactaagcattt

SEQ ID NO: 2203321 - DNA, 25 bp, Homo sapien
ggcattactatcatcactggcgcta

SEQ ID NO: 2203322 - DNA, 25 bp, Homo sapien
tttaaggactgaggcctcacgtggg

SEQ ID NO: 2203323 - DNA, 25 bp, Homo sapien
gttacgagtgtgaccaggctgaccc

SEQ ID NO: 2203324 - DNA, 25 bp, Homo sapien
aaatcactcatctaaggtcacacag

SEQ ID NO: 2203325 - DNA, 25 bp, Homo sapien
agtgcggcgccacggattgattcgc

SEQ ID NO: 2203326 - DNA, 25 bp, Homo sapien
agggatgcggaggagtgcggcgcca

SEQ ID NO: 2203327 - DNA, 25 bp, Homo sapien
ctacgatgtacaggaagggtggaat

SEQ ID NO: 2203328 - DNA, 25 bp, Homo sapien
cgccacggattgattcgctacgatg

SEQ ID NO: 2203329 - DNA, 25 bp, Homo sapien
cacgcaggtccaccagccgtggtgg

SEQ ID NO: 2203330 - DNA, 25 bp, Homo sapien
cactataagggacgaagggcttgag

SEQ ID NO: 2203331 - DNA, 25 bp, Homo sapien
aggccacggtcagatccactataag

SEQ ID NO: 2203332 - DNA, 25 bp, Homo sapien
aagggcttgagcaatgccacacgca

SEQ ID NO: 2203333 - DNA, 25 bp, Homo sapien
gcaatgttggcagctccggggggcg

SEQ ID NO: 2203334 - DNA, 25 bp, Homo sapien
gcgttggcaatgttggcagctccgg

SEQ ID NO: 2203335 - DNA, 25 bp, Homo sapien
aatgttggcagctccggggggcggg

SEQ ID NO: 2203336 - DNA, 25 bp, Homo sapien
tgtgtgtagcgtggcggtggcgttg

SEQ ID NO: 2203337 - DNA, 25 bp, Homo sapien
cggcggcagcacctagaagccgccc

SEQ ID NO: 2203338 - DNA, 25 bp, Homo sapien
gcggcggcagcacctagaagccgcc

SEQ ID NO: 2203339 - DNA, 25 bp, Homo sapien
tccctacagctcacgtgggcccgag

SEQ ID NO: 2203340 - DNA, 25 bp, Homo sapien
ctacagctcacgtgggcccgaggag

SEQ ID NO: 2203341 - DNA, 25 bp, Homo sapien
cctacagctcacgtgggcccgagga

SEQ ID NO: 2203342 - DNA, 25 bp, Homo sapien
tttccctacagctcacgtgggcccg

SEQ ID NO: 2203343 - DNA, 25 bp, Homo sapien
cttcacggtgctccacgccgattgg

SEQ ID NO: 2203344 - DNA, 25 bp, Homo sapien
acgccgattggctcaaggactgacg

SEQ ID NO: 2203345 - DNA, 25 bp, Homo sapien
ccgaggaggcgcgttcggccttcac

SEQ ID NO: 2203346 - DNA, 25 bp, Homo sapien
gactgtgagcaactgaaaaggctcg

SEQ ID NO: 2203347 - DNA, 25 bp, Homo sapien
gggtctgcctcacactgattggctt

SEQ ID NO: 2203348 - DNA, 25 bp, Homo sapien
gtctgcctcacactgattggcttac

SEQ ID NO: 2203349 - DNA, 25 bp, Homo sapien
gcgggggtctgcctcacactgattg

SEQ ID NO: 2203350 - DNA, 25 bp, Homo sapien
gggcgggggtctgcctcacactgat

SEQ ID NO: 2203351 - DNA, 25 bp, Homo sapien
ttttctctgattggcggacgaggga

SEQ ID NO: 2203352 - DNA, 25 bp, Homo sapien
tggcggacgagggacttctagaccc

SEQ ID NO: 2203353 - DNA, 25 bp, Homo sapien
gtttttctctgattggcggacgagg

SEQ ID NO: 2203354 - DNA, 25 bp, Homo sapien
tctgattggcggacgagggacttct

SEQ ID NO: 2203355 - DNA, 25 bp, Homo sapien
aacaccaagggggcggtgtcgcacg

SEQ ID NO: 2203356 - DNA, 25 bp, Homo sapien
ggggcggtgtcgcacgccatgctgc

SEQ ID NO: 2203357 - DNA, 25 bp, Homo sapien
agggggcggtgtcgcacgccatgct

SEQ ID NO: 2203358 - DNA, 25 bp, Homo sapien
accaagggggcggtgtcgcacgcca

SEQ ID NO: 2203359 - DNA, 25 bp, Homo sapien
tcagcggaagcagggcttgtataga

SEQ ID NO: 2203360 - DNA, 25 bp, Homo sapien
agcagccggcgggagtgggtcggac

SEQ ID NO: 2203361 - DNA, 25 bp, Homo sapien
ttgtatagaaatgggcgtagcagcc

SEQ ID NO: 2203362 - DNA, 25 bp, Homo sapien
actgggctccgcgtaggcgggcagg

SEQ ID NO: 2203363 - DNA, 25 bp, Homo sapien
tcaggcacacgaaagagcattgagt

SEQ ID NO: 2203364 - DNA, 25 bp, Homo sapien
gaatttagaacacagcggaggtagg

SEQ ID NO: 2203365 - DNA, 25 bp, Homo sapien
tacggttagacaagaccatagagct

SEQ ID NO: 2203366 - DNA, 25 bp, Homo sapien
catagagctgggtaaagacgaattt

SEQ ID NO: 2203367 - DNA, 25 bp, Homo sapien
taactttgtgccctaggaacaggcc

SEQ ID NO: 2203368 - DNA, 25 bp, Homo sapien
cattttggaggttccacagagagac

SEQ ID NO: 2203369 - DNA, 25 bp, Homo sapien
ctatggcaattcaaagggtggcgtc

SEQ ID NO: 2203370 - DNA, 25 bp, Homo sapien
ccgtggcaactagcagggtttatgg

SEQ ID NO: 2203371 - DNA, 25 bp, Homo sapien
ggcattcaggctctttaatgtctga

SEQ ID NO: 2203372 - DNA, 25 bp, Homo sapien
gcattcaggctctttaatgtctgag

SEQ ID NO: 2203373 - DNA, 25 bp, Homo sapien
tcaatggtgaggcttctctgggaaa

SEQ ID NO: 2203374 - DNA, 25 bp, Homo sapien
caatggtgaggcttctctgggaaat

SEQ ID NO: 2203375 - DNA, 25 bp, Homo sapien
ctctgggaaattctgcaggccttgt

SEQ ID NO: 2203376 - DNA, 25 bp, Homo sapien
gcaggccttgtagttctctaagccc

SEQ ID NO: 2203377 - DNA, 25 bp, Homo sapien
gaggacagaagagattgaacaaaga

SEQ ID NO: 2203378 - DNA, 25 bp, Homo sapien
cagtttagagggaaagatggtcctt

SEQ ID NO: 2203379 - DNA, 25 bp, Homo sapien
tgaacaaagactgggtctgggttac

SEQ ID NO: 2203380 - DNA, 25 bp, Homo sapien
tcaggtcaccaccctaaacacagag

SEQ ID NO: 2203381 - DNA, 25 bp, Homo sapien
ttgatattcatggagtccttggtga

SEQ ID NO: 2203382 - DNA, 25 bp, Homo sapien
tgatattcatggagtccttggtgag

SEQ ID NO: 2203383 - DNA, 25 bp, Homo sapien
acatgtggatatgggctttgatatt

SEQ ID NO: 2203384 - DNA, 25 bp, Homo sapien
atgtggatatgggctttgatattca

SEQ ID NO: 2203385 - DNA, 25 bp, Homo sapien
caattttaggcactgggagatagca

SEQ ID NO: 2203386 - DNA, 25 bp, Homo sapien
aatgggccccacatgattatgatga

SEQ ID NO: 2203387 - DNA, 25 bp, Homo sapien
aaactcccggcctgatggacttcaa

SEQ ID NO: 2203388 - DNA, 25 bp, Homo sapien
tgtggaaatgccaagccaccatctg

SEQ ID NO: 2203389 - DNA, 25 bp, Homo sapien
taatggttaagcagtaggaaggcct

SEQ ID NO: 2203390 - DNA, 25 bp, Homo sapien
tttgaccttaagtgagatgggagcc

SEQ ID NO: 2203391 - DNA, 25 bp, Homo sapien
tgtgtgaagcctacaaggccatggt

SEQ ID NO: 2203392 - DNA, 25 bp, Homo sapien
tggatcagatctcgcccaaaagaat

SEQ ID NO: 2203393 - DNA, 25 bp, Homo sapien
cctgatcagctcctaagggacaatt

SEQ ID NO: 2203394 - DNA, 25 bp, Homo sapien
gaatgtcagctgtatgagggcagat

SEQ ID NO: 2203395 - DNA, 25 bp, Homo sapien
taaatgaagtatgggtgttgttgcc

SEQ ID NO: 2203396 - DNA, 25 bp, Homo sapien
gaggaggcacccaacgtatgttgaa

SEQ ID NO: 2203397 - DNA, 25 bp, Homo sapien
cttatgaaaacctatgagttcaaca

SEQ ID NO: 2203398 - DNA, 25 bp, Homo sapien
caccaaatgctagctgtaacacaaa

SEQ ID NO: 2203399 - DNA, 25 bp, Homo sapien
gctatgtgagaagcaaattactact

SEQ ID NO: 2203400 - DNA, 25 bp, Homo sapien
tatgtaaggcagtgtgaatagtcat

SEQ ID NO: 2203401 - DNA, 25 bp, Homo sapien
aaagggatatgtttattactgctga

SEQ ID NO: 2203402 - DNA, 25 bp, Homo sapien
aatggtggtgtttttacacactatc

SEQ ID NO: 2203403 - DNA, 25 bp, Homo sapien
ggtggtgtttttacacactatcctc

SEQ ID NO: 2203404 - DNA, 25 bp, Homo sapien
tgtttttacacactatcctcatgga

SEQ ID NO: 2203405 - DNA, 25 bp, Homo sapien
ttacacactatcctcatggaatgga

SEQ ID NO: 2203406 - DNA, 25 bp, Homo sapien
gcttctgccagtgtcaactccagga

SEQ ID NO: 2203407 - DNA, 25 bp, Homo sapien
gaacttgagagcttctgccagtgtc

SEQ ID NO: 2203408 - DNA, 25 bp, Homo sapien
ggagagagctcttacgatcaatgaa

SEQ ID NO: 2203409 - DNA, 25 bp, Homo sapien
cacatagatgcgtgaagtatctggg

SEQ ID NO: 2203410 - DNA, 25 bp, Homo sapien
gggagaagtccttatcactgtttag

SEQ ID NO: 2203411 - DNA, 25 bp, Homo sapien
aaatataagttgcatgagggaaggg

SEQ ID NO: 2203412 - DNA, 25 bp, Homo sapien
tataaaacctcgcatagtgcctggt

SEQ ID NO: 2203413 - DNA, 25 bp, Homo sapien
gcacctagcttatatcctactggga

SEQ ID NO: 2203414 - DNA, 25 bp, Homo sapien
gaagaagttacagcccaaatccacc

SEQ ID NO: 2203415 - DNA, 25 bp, Homo sapien
tatataactccgagtgcttagcttc

SEQ ID NO: 2203416 - DNA, 25 bp, Homo sapien
tccacctgcatatataactccgagt

SEQ ID NO: 2203417 - DNA, 25 bp, Homo sapien
ccactgtgtcaacgaagaagttaca

SEQ ID NO: 2203418 - DNA, 25 bp, Homo sapien
aaaatggtacccaatcccatagtct

SEQ ID NO: 2203419 - DNA, 25 bp, Homo sapien
atggtacccaatcccatagtcttta

SEQ ID NO: 2203420 - DNA, 25 bp, Homo sapien
cagggttgggtctggagtctctctt

SEQ ID NO: 2203421 - DNA, 25 bp, Homo sapien
cagtggtgaactcttaggtcaggtg

SEQ ID NO: 2203422 - DNA, 25 bp, Homo sapien
gctgctcatataccttgtctcgatg

SEQ ID NO: 2203423 - DNA, 25 bp, Homo sapien
cttgtctcgatggtccagcaccttt

SEQ ID NO: 2203424 - DNA, 25 bp, Homo sapien
ttgaaggtatttggccagctgctca

SEQ ID NO: 2203425 - DNA, 25 bp, Homo sapien
tctcagttgaaggtatttggccagc

SEQ ID NO: 2203426 - DNA, 25 bp, Homo sapien
tgatgaaggtctcgtagcgcagcac

SEQ ID NO: 2203427 - DNA, 25 bp, Homo sapien
gcacgtcactgatgaaggtctcgta

SEQ ID NO: 2203428 - DNA, 25 bp, Homo sapien
aagtcccgctgcagcacgtcactga

SEQ ID NO: 2203429 - DNA, 25 bp, Homo sapien
ggtctcgtagcgcagcactttctcc

SEQ ID NO: 2203430 - DNA, 25 bp, Homo sapien
accctctcaacgctgggaatcggct

SEQ ID NO: 2203431 - DNA, 25 bp, Homo sapien
caagctggaggttcagccttccgcc

SEQ ID NO: 2203432 - DNA, 25 bp, Homo sapien
ccagtttggcctcacacacagttca

SEQ ID NO: 2203433 - DNA, 25 bp, Homo sapien
gaatcggcttgtccggctcaagctg

SEQ ID NO: 2203434 - DNA, 25 bp, Homo sapien
aggccgccagcaataagaacggttg

SEQ ID NO: 2203435 - DNA, 25 bp, Homo sapien
ccagcaataagaacggttggtagga

SEQ ID NO: 2203436 - DNA, 25 bp, Homo sapien
ctcaggccgccagcaataagaacgg

SEQ ID NO: 2203437 - DNA, 25 bp, Homo sapien
gccgccagcaataagaacggttggt

SEQ ID NO: 2203438 - DNA, 25 bp, Homo sapien
tttaaaggaggtcactgcattgtaa

SEQ ID NO: 2203439 - DNA, 25 bp, Homo sapien
gacagtggtacgcataacagtgaac

SEQ ID NO: 2203440 - DNA, 25 bp, Homo sapien
tcctcatctaagctctatatcaggg

SEQ ID NO: 2203441 - DNA, 25 bp, Homo sapien
tttcctatagcctgcaaactaggaa

SEQ ID NO: 2203442 - DNA, 25 bp, Homo sapien
tgttgtattcaaccaggagtccatc

SEQ ID NO: 2203443 - DNA, 25 bp, Homo sapien
gagtccatctgcggtgggccagtat

SEQ ID NO: 2203444 - DNA, 25 bp, Homo sapien
ttgtattcaaccaggagtccatctg

SEQ ID NO: 2203445 - DNA, 25 bp, Homo sapien
tctatgttgtattcaaccaggagtc

SEQ ID NO: 2203446 - DNA, 25 bp, Homo sapien
tggtaattgcctcatctgccaacta

SEQ ID NO: 2203447 - DNA, 25 bp, Homo sapien
taattgcctcatctgccaactactg

SEQ ID NO: 2203448 - DNA, 25 bp, Homo sapien
ctataggtggtaattgcctcatctg

SEQ ID NO: 2203449 - DNA, 25 bp, Homo sapien
taggtggtaattgcctcatctgcca

SEQ ID NO: 2203450 - DNA, 25 bp, Homo sapien
aaacagcggtgtggtcctgcccggt

SEQ ID NO: 2203451 - DNA, 25 bp, Homo sapien
agcggtgtggtcctgcccggtgtcc

SEQ ID NO: 2203452 - DNA, 25 bp, Homo sapien
ctaaacagcggtgtggtcctgcccg

SEQ ID NO: 2203453 - DNA, 25 bp, Homo sapien
acagcggtgtggtcctgcccggtgt

SEQ ID NO: 2203454 - DNA, 25 bp, Homo sapien
gtgtgctgtgccatgccgctgccat

SEQ ID NO: 2203455 - DNA, 25 bp, Homo sapien
atccagcacgacccgttcaccagtg

SEQ ID NO: 2203456 - DNA, 25 bp, Homo sapien
tccagcacgacccgttcaccagtga

SEQ ID NO: 2203457 - DNA, 25 bp, Homo sapien
ccagcacgacccgttcaccagtgac

SEQ ID NO: 2203458 - DNA, 25 bp, Homo sapien
gatccagcacgacccgttcaccagt

SEQ ID NO: 2203459 - DNA, 25 bp, Homo sapien
catgctcattcacttgggatttgga

SEQ ID NO: 2203460 - DNA, 25 bp, Homo sapien
tgagtcttctggtgtgcaaggagat

SEQ ID NO: 2203461 - DNA, 25 bp, Homo sapien
cagtacagacataagctctctacag

SEQ ID NO: 2203462 - DNA, 25 bp, Homo sapien
caaggagattggatcttttggagaa

SEQ ID NO: 2203463 - DNA, 25 bp, Homo sapien
cctcccagtgagaaattttggatga

SEQ ID NO: 2203464 - DNA, 25 bp, Homo sapien
cctacataggctatcctcccagtga

SEQ ID NO: 2203465 - DNA, 25 bp, Homo sapien
acattcattgcctacataggctatc

SEQ ID NO: 2203466 - DNA, 25 bp, Homo sapien
ttggatgaagaatggacacattctt

SEQ ID NO: 2203467 - DNA, 25 bp, Homo sapien
gccggcttatctggctttcagagcc

SEQ ID NO: 2203468 - DNA, 25 bp, Homo sapien
aaattggcttctgccggcttatctg

SEQ ID NO: 2203469 - DNA, 25 bp, Homo sapien
tgccggcttatctggctttcagagc

SEQ ID NO: 2203470 - DNA, 25 bp, Homo sapien
gctgaaattggcttctgccggctta

SEQ ID NO: 2203471 - DNA, 25 bp, Homo sapien
attgccaaagccctcgtaaagccct

SEQ ID NO: 2203472 - DNA, 25 bp, Homo sapien
aatggttgtagtaattgccaaagcc

SEQ ID NO: 2203473 - DNA, 25 bp, Homo sapien
tgtagtaattgccaaagccctcgta

SEQ ID NO: 2203474 - DNA, 25 bp, Homo sapien
ccagcacagcaaatggttgtagtaa

SEQ ID NO: 2203475 - DNA, 25 bp, Homo sapien
gaagccgaaggtgctttcatcagaa

SEQ ID NO: 2203476 - DNA, 25 bp, Homo sapien
ggcttctggaatggactgagtccat

SEQ ID NO: 2203477 - DNA, 25 bp, Homo sapien
atggactgagtccatcgtggaaagg

SEQ ID NO: 2203478 - DNA, 25 bp, Homo sapien
tctggaatggactgagtccatcgtg

SEQ ID NO: 2203479 - DNA, 25 bp, Homo sapien
tgaagggggcggtgttggcctggct

SEQ ID NO: 2203480 - DNA, 25 bp, Homo sapien
tggcgctgatcctccgactctgcag

SEQ ID NO: 2203481 - DNA, 25 bp, Homo sapien
cgtggcgctgatcctccgactctgc

SEQ ID NO: 2203482 - DNA, 25 bp, Homo sapien
cccgtggcgctgatcctccgactct

SEQ ID NO: 2203483 - DNA, 25 bp, Homo sapien
ttcccgtggcgctgatcctccgact

SEQ ID NO: 2203484 - DNA, 25 bp, Homo sapien
ccattgaacctgatacttttcacaa

SEQ ID NO: 2203485 - DNA, 25 bp, Homo sapien
gccattgaacctgatacttttcaca

SEQ ID NO: 2203486 - DNA, 25 bp, Homo sapien
agccattgaacctgatacttttcac

SEQ ID NO: 2203487 - DNA, 25 bp, Homo sapien
cattgaacctgatacttttcacaaa

SEQ ID NO: 2203488 - DNA, 25 bp, Homo sapien
cctaggagggcttgcataaccatga

SEQ ID NO: 2203489 - DNA, 25 bp, Homo sapien
taggagaagcctgtaaccagcctga

SEQ ID NO: 2203490 - DNA, 25 bp, Homo sapien
cagtttctcggagcggtatcacaca

SEQ ID NO: 2203491 - DNA, 25 bp, Homo sapien
ccccttgtggtatgtcctaggagaa

SEQ ID NO: 2203492 - DNA, 25 bp, Homo sapien
cctgccaccagcgggacagctccac

SEQ ID NO: 2203493 - DNA, 25 bp, Homo sapien
ttagagcagacagctctaaactcac

SEQ ID NO: 2203494 - DNA, 25 bp, Homo sapien
gagtttagagcagacagctctaaac

SEQ ID NO: 2203495 - DNA, 25 bp, Homo sapien
ctgagtttagagcagacagctctaa

SEQ ID NO: 2203496 - DNA, 25 bp, Homo sapien
gtttagagcagacagctctaaactc

SEQ ID NO: 2203497 - DNA, 25 bp, Homo sapien
cctcatcctcaatacggatggacac

SEQ ID NO: 2203498 - DNA, 25 bp, Homo sapien
ctctgtgagttcagaggtgtcctca

SEQ ID NO: 2203499 - DNA, 25 bp, Homo sapien
ggaagcgcgacgtgggcgcggccat

SEQ ID NO: 2203500 - DNA, 25 bp, Homo sapien
cctccaacatggtgtatcccatggg

SEQ ID NO: 2203501 - DNA, 25 bp, Homo sapien
tgttagccactgctcttggctttgt

SEQ ID NO: 2203502 - DNA, 25 bp, Homo sapien
cattttagactacaggttaagcatc

SEQ ID NO: 2203503 - DNA, 25 bp, Homo sapien
ctgtgtagaataagtactaattttt

SEQ ID NO: 2203504 - DNA, 25 bp, Homo sapien
tttgatcatggcttcaatgtctgta

SEQ ID NO: 2203505 - DNA, 25 bp, Homo sapien
ccgcgcccggcgagctactgtcttt

SEQ ID NO: 2203506 - DNA, 25 bp, Homo sapien
ctggtggatgagcagattgatgtgt

SEQ ID NO: 2203507 - DNA, 25 bp, Homo sapien
tgaccttggcttgtctatgtttaaa

SEQ ID NO: 2203508 - DNA, 25 bp, Homo sapien
agctggtggatgagcagattgatgt

SEQ ID NO: 2203509 - DNA, 25 bp, Homo sapien
gtggatgagcagattgatgtgttca

SEQ ID NO: 2203510 - DNA, 25 bp, Homo sapien
tctttaggcggtcttgcagtggttc

SEQ ID NO: 2203511 - DNA, 25 bp, Homo sapien
aattttctttaggcggtcttgcagt

SEQ ID NO: 2203512 - DNA, 25 bp, Homo sapien
ctttaggcggtcttgcagtggttct

SEQ ID NO: 2203513 - DNA, 25 bp, Homo sapien
tttctttaggcggtcttgcagtggt

SEQ ID NO: 2203514 - DNA, 25 bp, Homo sapien
tcaatcctttcgatgtgtatgacaa

SEQ ID NO: 2203515 - DNA, 25 bp, Homo sapien
aatcctttcgatgtgtatgacaaag

SEQ ID NO: 2203516 - DNA, 25 bp, Homo sapien
caatcctttcgatgtgtatgacaaa

SEQ ID NO: 2203517 - DNA, 25 bp, Homo sapien
atgattccagtcacttaaacctaag

SEQ ID NO: 2203518 - DNA, 25 bp, Homo sapien
ttgtcacgtttctgccgccaggaat

SEQ ID NO: 2203519 - DNA, 25 bp, Homo sapien
attccagtcacttaaacctaagcct

SEQ ID NO: 2203520 - DNA, 25 bp, Homo sapien
tgtcacgtttctgccgccaggaatc

SEQ ID NO: 2203521 - DNA, 25 bp, Homo sapien
caaaaaggttttctgttcagcgaag

SEQ ID NO: 2203522 - DNA, 25 bp, Homo sapien
caaccactgtgctgttcaagtcctg

SEQ ID NO: 2203523 - DNA, 25 bp, Homo sapien
ccccggtgtggtctatttggagaat

SEQ ID NO: 2203524 - DNA, 25 bp, Homo sapien
tcctggtccgttaacaggaatggct

SEQ ID NO: 2203525 - DNA, 25 bp, Homo sapien
gaacatgccagctaacgaggacgct

SEQ ID NO: 2203526 - DNA, 25 bp, Homo sapien
ggctgaagtccaagtccgtcgggaa

SEQ ID NO: 2203527 - DNA, 25 bp, Homo sapien
taacgaggacgctccccagccaggg

SEQ ID NO: 2203528 - DNA, 25 bp, Homo sapien
tgagtccaccgatcccactggaatt

SEQ ID NO: 2203529 - DNA, 25 bp, Homo sapien
tgcttaccttgggagtggtctgtga

SEQ ID NO: 2203530 - DNA, 25 bp, Homo sapien
tggtctgtgaagacttttgctgaca

SEQ ID NO: 2203531 - DNA, 25 bp, Homo sapien
gcattgattctatgaaatccagctg

SEQ ID NO: 2203532 - DNA, 25 bp, Homo sapien
cttctgcgggcattgattctatgaa

SEQ ID NO: 2203533 - DNA, 25 bp, Homo sapien
gacttgggtgctataagcagcagtg

SEQ ID NO: 2203534 - DNA, 25 bp, Homo sapien
gggtacattctcaagcaacatggcc

SEQ ID NO: 2203535 - DNA, 25 bp, Homo sapien
gctgctggccttataccatcatcag

SEQ ID NO: 2203536 - DNA, 25 bp, Homo sapien
cagaggtttagcactgggctcttcc

SEQ ID NO: 2203537 - DNA, 25 bp, Homo sapien
gacccagtgaaaataatagggagag

SEQ ID NO: 2203538 - DNA, 25 bp, Homo sapien
gagtggaactcatgaagccaaaaga

SEQ ID NO: 2203539 - DNA, 25 bp, Homo sapien
tactgcccttttggttgaagaggta

SEQ ID NO: 2203540 - DNA, 25 bp, Homo sapien
tattatccctattctttactgccct

SEQ ID NO: 2203541 - DNA, 25 bp, Homo sapien
tacaaacattgcctagctgctgcca

SEQ ID NO: 2203542 - DNA, 25 bp, Homo sapien
taaaaggcgtgggacatacgaccag

SEQ ID NO: 2203543 - DNA, 25 bp, Homo sapien
tgagtccagtgaggtcatagcagtg

SEQ ID NO: 2203544 - DNA, 25 bp, Homo sapien
agtgtatgctccttgcccttacgga

SEQ ID NO: 2203545 - DNA, 25 bp, Homo sapien
ggtggtcccaatgtctggattgctg

SEQ ID NO: 2203546 - DNA, 25 bp, Homo sapien
ccacgaggtggtcccaatgtctgga

SEQ ID NO: 2203547 - DNA, 25 bp, Homo sapien
gcccaatggagttgaattgccagtt

SEQ ID NO: 2203548 - DNA, 25 bp, Homo sapien
tgcagggagatgcccaatggagttg

SEQ ID NO: 2203549 - DNA, 25 bp, Homo sapien
cggtccctatgactttgtttaaatg

SEQ ID NO: 2203550 - DNA, 25 bp, Homo sapien
ctggtacggtccctatgactttgtt

SEQ ID NO: 2203551 - DNA, 25 bp, Homo sapien
gtagttcagccaataatctatgtga

SEQ ID NO: 2203552 - DNA, 25 bp, Homo sapien
caaaagagtatctgttccccgttga

SEQ ID NO: 2203553 - DNA, 25 bp, Homo sapien
actgtggcctttgttgtagttcagc

SEQ ID NO: 2203554 - DNA, 25 bp, Homo sapien
tatccaatgatcctgataagttcac

SEQ ID NO: 2203555 - DNA, 25 bp, Homo sapien
attccgtgatgtcccctgagctgta

SEQ ID NO: 2203556 - DNA, 25 bp, Homo sapien
gtggaactagaattactaatgaact

SEQ ID NO: 2203557 - DNA, 25 bp, Homo sapien
agggcagaaggtcagggcgagatca

SEQ ID NO: 2203558 - DNA, 25 bp, Homo sapien
tatgagtagggtgagtcacagagat

SEQ ID NO: 2203559 - DNA, 25 bp, Homo sapien
tattcattgttgtctacccaggagt

SEQ ID NO: 2203560 - DNA, 25 bp, Homo sapien
aaccagggccacattctaagcagat

SEQ ID NO: 2203561 - DNA, 25 bp, Homo sapien
ttatatctatggttccgcgcctcgg

SEQ ID NO: 2203562 - DNA, 25 bp, Homo sapien
gtatatcccgaacctcagctaagag

SEQ ID NO: 2203563 - DNA, 25 bp, Homo sapien
tgaactttgacttccgagtgtggcc

SEQ ID NO: 2203564 - DNA, 25 bp, Homo sapien
tttgacttccgagtgtggcctcttc

SEQ ID NO: 2203565 - DNA, 25 bp, Homo sapien
actttgacttccgagtgtggcctct

SEQ ID NO: 2203566 - DNA, 25 bp, Homo sapien
ttcctgcatgggttcgctgatgtac

SEQ ID NO: 2203567 - DNA, 25 bp, Homo sapien
tgtacaccaaggtttgacttttgcg

SEQ ID NO: 2203568 - DNA, 25 bp, Homo sapien
caaggtttgacttttgcgtgaaggt

SEQ ID NO: 2203569 - DNA, 25 bp, Homo sapien
gaatgttgacttttctcggaaggct

SEQ ID NO: 2203570 - DNA, 25 bp, Homo sapien
gatgtataatgagctttgacttttc

SEQ ID NO: 2203571 - DNA, 25 bp, Homo sapien
agattctccacatttagtgcattca

SEQ ID NO: 2203572 - DNA, 25 bp, Homo sapien
tgtataattagatcaagcttctgta

SEQ ID NO: 2203573 - DNA, 25 bp, Homo sapien
gtatgaaagattctccacatttagt

SEQ ID NO: 2203574 - DNA, 25 bp, Homo sapien
gatgtataattagatcaagcttctg

SEQ ID NO: 2203575 - DNA, 25 bp, Homo sapien
tgtgagtcctgtaatgtatgatgac

SEQ ID NO: 2203576 - DNA, 25 bp, Homo sapien
ctgtgtgagtcctgtaatgtatgat

SEQ ID NO: 2203577 - DNA, 25 bp, Homo sapien
cgcaagtgtataatgagctgagatt

SEQ ID NO: 2203578 - DNA, 25 bp, Homo sapien
atgagttcgcaagtgtataatgagc

SEQ ID NO: 2203579 - DNA, 25 bp, Homo sapien
caacaaggtttgtactcagatgaag

SEQ ID NO: 2203580 - DNA, 25 bp, Homo sapien
caaatgattcgtgtttatcgggtct

SEQ ID NO: 2203581 - DNA, 25 bp, Homo sapien
cacactctttatagccatagggctt

SEQ ID NO: 2203582 - DNA, 25 bp, Homo sapien
tcatgacagtcacgagcactcttgg

SEQ ID NO: 2203583 - DNA, 25 bp, Homo sapien
ataaaccacctttatgctttgacat

SEQ ID NO: 2203584 - DNA, 25 bp, Homo sapien
aataaaccacctttatgctttgaca

SEQ ID NO: 2203585 - DNA, 25 bp, Homo sapien
acaataaaccacctttatgctttga

SEQ ID NO: 2203586 - DNA, 25 bp, Homo sapien
caataaaccacctttatgctttgac

SEQ ID NO: 2203587 - DNA, 25 bp, Homo sapien
ccagagcctgggtcaaaattccact

SEQ ID NO: 2203588 - DNA, 25 bp, Homo sapien
tcacctctgactaatagggtggaac

SEQ ID NO: 2203589 - DNA, 25 bp, Homo sapien
tagggtggaacttcatgtccccaga

SEQ ID NO: 2203590 - DNA, 25 bp, Homo sapien
ctgactaatagggtggaacttcatg

SEQ ID NO: 2203591 - DNA, 25 bp, Homo sapien
cttgaggatgaggtttggtttggta

SEQ ID NO: 2203592 - DNA, 25 bp, Homo sapien
tgaggtttggtttggtaacctgctg

SEQ ID NO: 2203593 - DNA, 25 bp, Homo sapien
gatgaggtttggtttggtaacctgc

SEQ ID NO: 2203594 - DNA, 25 bp, Homo sapien
tgaggatgaggtttggtttggtaac

SEQ ID NO: 2203595 - DNA, 25 bp, Homo sapien
agaaatgacagtgatacctccttgg

SEQ ID NO: 2203596 - DNA, 25 bp, Homo sapien
tgagaaatgacagtgatacctcctt

SEQ ID NO: 2203597 - DNA, 25 bp, Homo sapien
aaatgacagtgatacctccttggct

SEQ ID NO: 2203598 - DNA, 25 bp, Homo sapien
atgacagtgatacctccttggcttt

SEQ ID NO: 2203599 - DNA, 25 bp, Homo sapien
tctgtggtgggttcaggtactgcca

SEQ ID NO: 2203600 - DNA, 25 bp, Homo sapien
gtggtgggttcaggtactgccactc

SEQ ID NO: 2203601 - DNA, 25 bp, Homo sapien
ctgtggtgggttcaggtactgccac

SEQ ID NO: 2203602 - DNA, 25 bp, Homo sapien
tgtggtgggttcaggtactgccact

SEQ ID NO: 2203603 - DNA, 25 bp, Homo sapien
ccccattagcaatcaggtaagtgaa

SEQ ID NO: 2203604 - DNA, 25 bp, Homo sapien
taagccacattgagacaccactata

SEQ ID NO: 2203605 - DNA, 25 bp, Homo sapien
aggttcacctgcttcgaaactcgaa

SEQ ID NO: 2203606 - DNA, 25 bp, Homo sapien
ggtttgcatataccatgacccagca

SEQ ID NO: 2203607 - DNA, 25 bp, Homo sapien
caccagatgcagatgctggtgtcat

SEQ ID NO: 2203608 - DNA, 25 bp, Homo sapien
tgagtagaagcttcctgagtcctca

SEQ ID NO: 2203609 - DNA, 25 bp, Homo sapien
catgagtagaagcttcctgagtcct

SEQ ID NO: 2203610 - DNA, 25 bp, Homo sapien
ccagatgcagatgctggtgtcatgc

SEQ ID NO: 2203611 - DNA, 25 bp, Homo sapien
gaaaattgtcatttggcacccatca

SEQ ID NO: 2203612 - DNA, 25 bp, Homo sapien
agccagcttaaagggactctcactg

SEQ ID NO: 2203613 - DNA, 25 bp, Homo sapien
gaaggtctgcctcatagtaaaatga

SEQ ID NO: 2203614 - DNA, 25 bp, Homo sapien
cagggacaactgagcatcgaaataa

SEQ ID NO: 2203615 - DNA, 25 bp, Homo sapien
ctggggtttggccatttcctgctct

SEQ ID NO: 2203616 - DNA, 25 bp, Homo sapien
tggggtttggccatttcctgctctt

SEQ ID NO: 2203617 - DNA, 25 bp, Homo sapien
aaaaagcagagatgtgtgacggccg

SEQ ID NO: 2203618 - DNA, 25 bp, Homo sapien
aaaagcagagatgtgtgacggccga

SEQ ID NO: 2203619 - DNA, 25 bp, Homo sapien
aaagcagagatgtgtgacggccgag

SEQ ID NO: 2203620 - DNA, 25 bp, Homo sapien
gaaaaagcagagatgtgtgacggcc

SEQ ID NO: 2203621 - DNA, 25 bp, Homo sapien
tctaaaactattatcccaattacat

SEQ ID NO: 2203622 - DNA, 25 bp, Homo sapien
actacactctaaaactattatccca

SEQ ID NO: 2203623 - DNA, 25 bp, Homo sapien
gggtcaggtgagacctcgcaggtgc

SEQ ID NO: 2203624 - DNA, 25 bp, Homo sapien
caggtgagacctcgcaggtgcctct

SEQ ID NO: 2203625 - DNA, 25 bp, Homo sapien
ccagaagccggaaagaggccttcgg

SEQ ID NO: 2203626 - DNA, 25 bp, Homo sapien
ttcggccggagcattcacaccaggc

SEQ ID NO: 2203627 - DNA, 25 bp, Homo sapien
gtgcaggttcacttcggccggagca

SEQ ID NO: 2203628 - DNA, 25 bp, Homo sapien
ccttgcccagaagccggaaagaggc

SEQ ID NO: 2203629 - DNA, 25 bp, Homo sapien
cgcatgaacctttaggggcaggtca

SEQ ID NO: 2203630 - DNA, 25 bp, Homo sapien
tgagggatgcgcatgaacctttagg

SEQ ID NO: 2203631 - DNA, 25 bp, Homo sapien
gggcgcgtctaaagaggggtctgag

SEQ ID NO: 2203632 - DNA, 25 bp, Homo sapien
gggtctgagggatgcgcatgaacct

SEQ ID NO: 2203633 - DNA, 25 bp, Homo sapien
tgcttagcccccataactttgttca

SEQ ID NO: 2203634 - DNA, 25 bp, Homo sapien
ccccataactttgttcaccagtgag

SEQ ID NO: 2203635 - DNA, 25 bp, Homo sapien
gtgagcccctagaacctcgtccact

SEQ ID NO: 2203636 - DNA, 25 bp, Homo sapien
cataactttgttcaccagtgagccc

SEQ ID NO: 2203637 - DNA, 25 bp, Homo sapien
cactcagcccacgacccctagcact

SEQ ID NO: 2203638 - DNA, 25 bp, Homo sapien
catcactcagcccacgacccctagc

SEQ ID NO: 2203639 - DNA, 25 bp, Homo sapien
ccccatcactcagcccacgacccct

SEQ ID NO: 2203640 - DNA, 25 bp, Homo sapien
ctcagcccacgacccctagcacttg

SEQ ID NO: 2203641 - DNA, 25 bp, Homo sapien
gcttcgggaccgactctttggcacc

SEQ ID NO: 2203642 - DNA, 25 bp, Homo sapien
aagcacttccgcttcgggaccgact

SEQ ID NO: 2203643 - DNA, 25 bp, Homo sapien
tgctcgctgctcaggagaccgttac

SEQ ID NO: 2203644 - DNA, 25 bp, Homo sapien
caggagaccgttacaaagcctggcc

SEQ ID NO: 2203645 - DNA, 25 bp, Homo sapien
gcattctatttgagtctttctcccc

SEQ ID NO: 2203646 - DNA, 25 bp, Homo sapien
tgctacccttccaatttccttccaa

SEQ ID NO: 2203647 - DNA, 25 bp, Homo sapien
ccttccaagtgttggccggatgtag

SEQ ID NO: 2203648 - DNA, 25 bp, Homo sapien
tttctccccctaaatcctggatctg

SEQ ID NO: 2203649 - DNA, 25 bp, Homo sapien
gggtaatcatgtatactgaggaaca

SEQ ID NO: 2203650 - DNA, 25 bp, Homo sapien
tattctgtgaagagggctgagacag

SEQ ID NO: 2203651 - DNA, 25 bp, Homo sapien
ctgagacagtttgagggtgagcaaa

SEQ ID NO: 2203652 - DNA, 25 bp, Homo sapien
tctgagggcctaagcagatcattct

SEQ ID NO: 2203653 - DNA, 25 bp, Homo sapien
tgctgggaagattcaaggcctttca

SEQ ID NO: 2203654 - DNA, 25 bp, Homo sapien
taatgagctgtgttttccgagggaa

SEQ ID NO: 2203655 - DNA, 25 bp, Homo sapien
acgactgatgactgtgacctgcctc

SEQ ID NO: 2203656 - DNA, 25 bp, Homo sapien
gaacatgggcttgcttatgactgag

SEQ ID NO: 2203657 - DNA, 25 bp, Homo sapien
gttccaacttaaagattacatctgg

SEQ ID NO: 2203658 - DNA, 25 bp, Homo sapien
tctctatgatccatgggtcctttcc

SEQ ID NO: 2203659 - DNA, 25 bp, Homo sapien
gacaactcactctctatgatccatg

SEQ ID NO: 2203660 - DNA, 25 bp, Homo sapien
caccttgacaactcactctctatga

SEQ ID NO: 2203661 - DNA, 25 bp, Homo sapien
gaccaggtgattataggtctccagc

SEQ ID NO: 2203662 - DNA, 25 bp, Homo sapien
cagggtcttctgagcaggattcaac

SEQ ID NO: 2203663 - DNA, 25 bp, Homo sapien
ccacggagaccaggtgattataggt

SEQ ID NO: 2203664 - DNA, 25 bp, Homo sapien
gagcaggattcaactgctgccactc

SEQ ID NO: 2203665 - DNA, 25 bp, Homo sapien
gccacatcctcaaatgtcactggtt

SEQ ID NO: 2203666 - DNA, 25 bp, Homo sapien
agccacatcctcaaatgtcactggt

SEQ ID NO: 2203667 - DNA, 25 bp, Homo sapien
ccacatcctcaaatgtcactggttc

SEQ ID NO: 2203668 - DNA, 25 bp, Homo sapien
tgacttcactgcttgagaggtctgg

SEQ ID NO: 2203669 - DNA, 25 bp, Homo sapien
aatttataagtctgtgtgcctctga

SEQ ID NO: 2203670 - DNA, 25 bp, Homo sapien
caacaaggttctggtatcctgcaaa

SEQ ID NO: 2203671 - DNA, 25 bp, Homo sapien
aatgggaataacaatggtacctagc

SEQ ID NO: 2203672 - DNA, 25 bp, Homo sapien
gatcaagctgagttaaccactcttc

SEQ ID NO: 2203673 - DNA, 25 bp, Homo sapien
aagagtcttcggagatcaagctgag

SEQ ID NO: 2203674 - DNA, 25 bp, Homo sapien
gagatcaagctgagttaaccactct

SEQ ID NO: 2203675 - DNA, 25 bp, Homo sapien
agctgagttaaccactcttcaacag

SEQ ID NO: 2203676 - DNA, 25 bp, Homo sapien
tgactcggtaattccatttccggaa

SEQ ID NO: 2203677 - DNA, 25 bp, Homo sapien
ctggatgtgacaatgtgttgcttgt

SEQ ID NO: 2203678 - DNA, 25 bp, Homo sapien
aattcattgatgacttgtgtttctc

SEQ ID NO: 2203679 - DNA, 25 bp, Homo sapien
gtttctcatctgactcggtaattcc

SEQ ID NO: 2203680 - DNA, 25 bp, Homo sapien
tccccgcctgcccaaatgcgttcaa

SEQ ID NO: 2203681 - DNA, 25 bp, Homo sapien
atgcgttcaacatcccccgaaaggc

SEQ ID NO: 2203682 - DNA, 25 bp, Homo sapien
cggctctgctctcaagccgggcttg

SEQ ID NO: 2203683 - DNA, 25 bp, Homo sapien
ggctctgctctcaagccgggcttgg

SEQ ID NO: 2203684 - DNA, 25 bp, Homo sapien
gagcttatctttcggtggctccgaa

SEQ ID NO: 2203685 - DNA, 25 bp, Homo sapien
cagtcttcccggagagatgtcaggg

SEQ ID NO: 2203686 - DNA, 25 bp, Homo sapien
tggctccgaaacagccacgaagccg

SEQ ID NO: 2203687 - DNA, 25 bp, Homo sapien
tcagggtgacgagggagcttatctt

SEQ ID NO: 2203688 - DNA, 25 bp, Homo sapien
ggcgtcattccgccagcgccaggac

SEQ ID NO: 2203689 - DNA, 25 bp, Homo sapien
caaaaatggcgtcattccgccagcg

SEQ ID NO: 2203690 - DNA, 25 bp, Homo sapien
acaaaaatggcgtcattccgccagc

SEQ ID NO: 2203691 - DNA, 25 bp, Homo sapien
tgagtgggcgttcccggccaccaga

SEQ ID NO: 2203692 - DNA, 25 bp, Homo sapien
gccgtggtctcgcactgcttctgga

SEQ ID NO: 2203693 - DNA, 25 bp, Homo sapien
gggagtcctcgtgatatctccgagt

SEQ ID NO: 2203694 - DNA, 25 bp, Homo sapien
tcggaattgatcctacgaaagcagt

SEQ ID NO: 2203695 - DNA, 25 bp, Homo sapien
tcagaaagacaagatggtcttgtta

SEQ ID NO: 2203696 - DNA, 25 bp, Homo sapien
tcatcatcccacagcatcgcagaca

SEQ ID NO: 2203697 - DNA, 25 bp, Homo sapien
cctggcttaatggtcagcattacgt

SEQ ID NO: 2203698 - DNA, 25 bp, Homo sapien
gcattacgtcatcatcccacagcat

SEQ ID NO: 2203699 - DNA, 25 bp, Homo sapien
agcatcgcagacagagtatcagccc

SEQ ID NO: 2203700 - DNA, 25 bp, Homo sapien
tgagaagcagaatgtggtgaccttt

SEQ ID NO: 2203701 - DNA, 25 bp, Homo sapien
tcagcctcagggatatgacacatgc

SEQ ID NO: 2203702 - DNA, 25 bp, Homo sapien
tgacacatgcccatgatgagaagca

SEQ ID NO: 2203703 - DNA, 25 bp, Homo sapien
gaatgtggtgacctttcacgaacat

SEQ ID NO: 2203704 - DNA, 25 bp, Homo sapien
aaagagtcatggtaagccacagtca

SEQ ID NO: 2203705 - DNA, 25 bp, Homo sapien
aaaagagtcatggtaagccacagtc

SEQ ID NO: 2203706 - DNA, 25 bp, Homo sapien
cgcagccatgcccatgttcgtgaaa

SEQ ID NO: 2203707 - DNA, 25 bp, Homo sapien
gcagccatgcccatgttcgtgaaag

SEQ ID NO: 2203708 - DNA, 25 bp, Homo sapien
ccgcagccatgcccatgttcgtgaa

SEQ ID NO: 2203709 - DNA, 25 bp, Homo sapien
tccgcagccatgcccatgttcgtga

SEQ ID NO: 2203710 - DNA, 25 bp, Homo sapien
gtcatcttcctgagggtcgctgatc

SEQ ID NO: 2203711 - DNA, 25 bp, Homo sapien
tcgtcatcttcctgagggtcgctga

SEQ ID NO: 2203712 - DNA, 25 bp, Homo sapien
cagttgctttctctcacgcactctg

SEQ ID NO: 2203713 - DNA, 25 bp, Homo sapien
gttgctttctctcacgcactctgtg

SEQ ID NO: 2203714 - DNA, 25 bp, Homo sapien
gtcttgttaaccttctcagaggtat

SEQ ID NO: 2203715 - DNA, 25 bp, Homo sapien
tcagaggtatttagttttcctgagg

SEQ ID NO: 2203716 - DNA, 25 bp, Homo sapien
tctcagaggtatttagttttcctga

SEQ ID NO: 2203717 - DNA, 25 bp, Homo sapien
tgttaaccttctcagaggtatttag

SEQ ID NO: 2203718 - DNA, 25 bp, Homo sapien
aagattccctggagcctgccgaaag

SEQ ID NO: 2203719 - DNA, 25 bp, Homo sapien
ttccctggagcctgccgaaagtcat

SEQ ID NO: 2203720 - DNA, 25 bp, Homo sapien
cgggaagattccctggagcctgccg

SEQ ID NO: 2203721 - DNA, 25 bp, Homo sapien
attccctggagcctgccgaaagtca

SEQ ID NO: 2203722 - DNA, 25 bp, Homo sapien
gagacttcagttgcatgagggcatt

SEQ ID NO: 2203723 - DNA, 25 bp, Homo sapien
tagagagacttcagttgcatgaggg

SEQ ID NO: 2203724 - DNA, 25 bp, Homo sapien
ctctagagagacttcagttgcatga

SEQ ID NO: 2203725 - DNA, 25 bp, Homo sapien
gagagacttcagttgcatgagggca

SEQ ID NO: 2203726 - DNA, 25 bp, Homo sapien
tctgcgacccgtttattacgcatga

SEQ ID NO: 2203727 - DNA, 25 bp, Homo sapien
tgcgacccgtttattacgcatgaaa

SEQ ID NO: 2203728 - DNA, 25 bp, Homo sapien
ccctggaagtctgcgacccgtttat

SEQ ID NO: 2203729 - DNA, 25 bp, Homo sapien
gaagtctgcgacccgtttattacgc

SEQ ID NO: 2203730 - DNA, 25 bp, Homo sapien
cactctttctcagagaagtatttgg

SEQ ID NO: 2203731 - DNA, 25 bp, Homo sapien
cagagaagtatttggcaatatcatc

SEQ ID NO: 2203732 - DNA, 25 bp, Homo sapien
atgattttctccgaggctttcatct

SEQ ID NO: 2203733 - DNA, 25 bp, Homo sapien
acatagatgattttctccgaggctt

SEQ ID NO: 2203734 - DNA, 25 bp, Homo sapien
cccaccttccagaacggactgagat

SEQ ID NO: 2203735 - DNA, 25 bp, Homo sapien
gagattcaccaaatgtattccacgg

SEQ ID NO: 2203736 - DNA, 25 bp, Homo sapien
tagagctttaatgctgctggctggc

SEQ ID NO: 2203737 - DNA, 25 bp, Homo sapien
tgtattccacggtcacagacttgtc

SEQ ID NO: 2203738 - DNA, 25 bp, Homo sapien
tgagaaccaaccctaggtctccgta

SEQ ID NO: 2203739 - DNA, 25 bp, Homo sapien
tggaagaatcgaaacaatcagagcg

SEQ ID NO: 2203740 - DNA, 25 bp, Homo sapien
gattttggaagaatcgaaacaatca

SEQ ID NO: 2203741 - DNA, 25 bp, Homo sapien
tctgattttggaagaatcgaaacaa

SEQ ID NO: 2203742 - DNA, 25 bp, Homo sapien
tttggaagaatcgaaacaatcagag

SEQ ID NO: 2203743 - DNA, 25 bp, Homo sapien
tgtcggtggcgctgtgggacgatga

SEQ ID NO: 2203744 - DNA, 25 bp, Homo sapien
tgacactctgtgtcggtggcgctgt

SEQ ID NO: 2203745 - DNA, 25 bp, Homo sapien
tgggggctgacactctgtgtcggtg

SEQ ID NO: 2203746 - DNA, 25 bp, Homo sapien
gggctgacactctgtgtcggtggcg

SEQ ID NO: 2203747 - DNA, 25 bp, Homo sapien
gccacagtcatgccatccatcagat

SEQ ID NO: 2203748 - DNA, 25 bp, Homo sapien
tgcccatcactagtgaggtccagtt

SEQ ID NO: 2203749 - DNA, 25 bp, Homo sapien
aaaagagtcatggtaagccacagtc

SEQ ID NO: 2203750 - DNA, 25 bp, Homo sapien
atccatcagatgcagacattcttgg

SEQ ID NO: 2203751 - DNA, 25 bp, Homo sapien
ctctggttcttcgtgaaggcatcca

SEQ ID NO: 2203752 - DNA, 25 bp, Homo sapien
gggccctctggttcttcgtgaaggc

SEQ ID NO: 2203753 - DNA, 25 bp, Homo sapien
actggggccctctggttcttcgtga

SEQ ID NO: 2203754 - DNA, 25 bp, Homo sapien
catatggtcaaagacactggggccc

SEQ ID NO: 2203755 - DNA, 25 bp, Homo sapien
tggagtgaatgctattgtaaccatc

SEQ ID NO: 2203756 - DNA, 25 bp, Homo sapien
cttggagtgaatgctattgtaacca

SEQ ID NO: 2203757 - DNA, 25 bp, Homo sapien
aactccatcttggagtgaatgctat

SEQ ID NO: 2203758 - DNA, 25 bp, Homo sapien
gagtgaatgctattgtaaccatcct

SEQ ID NO: 2203759 - DNA, 25 bp, Homo sapien
tttgcacagttgttgtctccgttca

SEQ ID NO: 2203760 - DNA, 25 bp, Homo sapien
ctttgcacagttgttgtctccgttc

SEQ ID NO: 2203761 - DNA, 25 bp, Homo sapien
ttgcacagttgttgtctccgttcat

SEQ ID NO: 2203762 - DNA, 25 bp, Homo sapien
tctttgcacagttgttgtctccgtt

SEQ ID NO: 2203763 - DNA, 25 bp, Homo sapien
actggtagagggctggctgttgatc

SEQ ID NO: 2203764 - DNA, 25 bp, Homo sapien
agggctggctgttgatcatgaaaat

SEQ ID NO: 2203765 - DNA, 25 bp, Homo sapien
ccagaactggtagagggctggctgt

SEQ ID NO: 2203766 - DNA, 25 bp, Homo sapien
attggccagaactggtagagggctg

SEQ ID NO: 2203767 - DNA, 25 bp, Homo sapien
gctgggatggtccatttgggagtat

SEQ ID NO: 2203768 - DNA, 25 bp, Homo sapien
ctgggatggtccatttgggagtatg

SEQ ID NO: 2203769 - DNA, 25 bp, Homo sapien
gccacagtcatgccatccatcagat

SEQ ID NO: 2203770 - DNA, 25 bp, Homo sapien
atccatcagatgcagacattcttgg

SEQ ID NO: 2203771 - DNA, 25 bp, Homo sapien
aaagagtcatggtaagccacagtca

SEQ ID NO: 2203772 - DNA, 25 bp, Homo sapien
tgcccatcactagtgaggtccagtt

SEQ ID NO: 2203773 - DNA, 25 bp, Homo sapien
cctgatgcccatggttatagtcatt

SEQ ID NO: 2203774 - DNA, 25 bp, Homo sapien
ctgatgcccatggttatagtcatta

SEQ ID NO: 2203775 - DNA, 25 bp, Homo sapien
gaagtatttggcaatatcatcgaag

SEQ ID NO: 2203776 - DNA, 25 bp, Homo sapien
ccactcttccttagagaagtatttg

SEQ ID NO: 2203777 - DNA, 25 bp, Homo sapien
cttcatatacacatagaggattttc

SEQ ID NO: 2203778 - DNA, 25 bp, Homo sapien
ggattttctctgaggctttcatctt

SEQ ID NO: 2203779 - DNA, 25 bp, Homo sapien
tctggtatttgagcatcaaccctgg

SEQ ID NO: 2203780 - DNA, 25 bp, Homo sapien
cttgcaaaggcgtcgtctccattca

SEQ ID NO: 2203781 - DNA, 25 bp, Homo sapien
tttgagcatcaaccctgggtctcct

SEQ ID NO: 2203782 - DNA, 25 bp, Homo sapien
tcttctctggtatttgagcatcaac

SEQ ID NO: 2203783 - DNA, 25 bp, Homo sapien
aaactgcctgagactttccaggctc

SEQ ID NO: 2203784 - DNA, 25 bp, Homo sapien
aactgcctgagactttccaggctca

SEQ ID NO: 2203785 - DNA, 25 bp, Homo sapien
gaaactgcctgagactttccaggct

SEQ ID NO: 2203786 - DNA, 25 bp, Homo sapien
agttcactaactgccctgattggtc

SEQ ID NO: 2203787 - DNA, 25 bp, Homo sapien
ttggccagatgaagttcactaactg

SEQ ID NO: 2203788 - DNA, 25 bp, Homo sapien
gatgaagttcactaactgccctgat

SEQ ID NO: 2203789 - DNA, 25 bp, Homo sapien
gccagatgaagttcactaactgccc

SEQ ID NO: 2203790 - DNA, 25 bp, Homo sapien
tcctccagccacactttgttgccat

SEQ ID NO: 2203791 - DNA, 25 bp, Homo sapien
ctcctcctccagccacactttgttg

SEQ ID NO: 2203792 - DNA, 25 bp, Homo sapien
tcctcctccagccacactttgttgc

SEQ ID NO: 2203793 - DNA, 25 bp, Homo sapien
tgcacaatattgtctcctcctccag

SEQ ID NO: 2203794 - DNA, 25 bp, Homo sapien
atcgcagcccttgaggttttagaag

SEQ ID NO: 2203795 - DNA, 25 bp, Homo sapien
ccatcgcagcccttgaggttttaga

SEQ ID NO: 2203796 - DNA, 25 bp, Homo sapien
catcgcagcccttgaggttttagaa

SEQ ID NO: 2203797 - DNA, 25 bp, Homo sapien
caaaccgaaatacacattaagcatg

SEQ ID NO: 2203798 - DNA, 25 bp, Homo sapien
gactgatacggggaatcagaggagg

SEQ ID NO: 2203799 - DNA, 25 bp, Homo sapien
tacggggaatcagaggaggggagta

SEQ ID NO: 2203800 - DNA, 25 bp, Homo sapien
acacaaaccgaaatacacattaagc

SEQ ID NO: 2203801 - DNA, 25 bp, Homo sapien
gcagccatgcccacgttcgtgaaag

SEQ ID NO: 2203802 - DNA, 25 bp, Homo sapien
ttcgtgaaaggtcaccacattctgc

SEQ ID NO: 2203803 - DNA, 25 bp, Homo sapien
catcatgggcatgtgtcgtatcccc

SEQ ID NO: 2203804 - DNA, 25 bp, Homo sapien
cccacgttcgtgaaaggtcaccaca

SEQ ID NO: 2203805 - DNA, 25 bp, Homo sapien
ttcagggtcgctgatctcttcataa

SEQ ID NO: 2203806 - DNA, 25 bp, Homo sapien
tgctttctctcacgcagtctgtggg

SEQ ID NO: 2203807 - DNA, 25 bp, Homo sapien
tctgtgggtccaggcatgtttcccc

SEQ ID NO: 2203808 - DNA, 25 bp, Homo sapien
gtcttcttcagggtcgctgatctct

SEQ ID NO: 2203809 - DNA, 25 bp, Homo sapien
caaacttaatcgaccaatgttgtgt

SEQ ID NO: 2203810 - DNA, 25 bp, Homo sapien
aaacttaatcgaccaatgttgtgtg

SEQ ID NO: 2203811 - DNA, 25 bp, Homo sapien
tccaccgatgagctgttccacgtct

SEQ ID NO: 2203812 - DNA, 25 bp, Homo sapien
actgctccaccgatgagctgttcca

SEQ ID NO: 2203813 - DNA, 25 bp, Homo sapien
ttcccatcgttctgtaagccagatg

SEQ ID NO: 2203814 - DNA, 25 bp, Homo sapien
ctgtttcccatcgttctgtaagcca

SEQ ID NO: 2203815 - DNA, 25 bp, Homo sapien
cccatcgttctgtaagccagatgct

SEQ ID NO: 2203816 - DNA, 25 bp, Homo sapien
cagatgccttgttaatcttctcaga

SEQ ID NO: 2203817 - DNA, 25 bp, Homo sapien
ttcccatctgtggagggacaaaggt

SEQ ID NO: 2203818 - DNA, 25 bp, Homo sapien
tcctttagatttgagagatactcac

SEQ ID NO: 2203819 - DNA, 25 bp, Homo sapien
tctggtcctttagatttgagagata

SEQ ID NO: 2203820 - DNA, 25 bp, Homo sapien
agtgttcccatctgtggagggacaa

SEQ ID NO: 2203821 - DNA, 25 bp, Homo sapien
attccctggagcctgccgaaagtca

SEQ ID NO: 2203822 - DNA, 25 bp, Homo sapien
ttccctggagcctgccgaaagtcat

SEQ ID NO: 2203823 - DNA, 25 bp, Homo sapien
cgggaagattccctggagcctgccg

SEQ ID NO: 2203824 - DNA, 25 bp, Homo sapien
aagattccctggagcctgccgaaag

SEQ ID NO: 2203825 - DNA, 25 bp, Homo sapien
tggtaaagatttccaaactctatag

SEQ ID NO: 2203826 - DNA, 25 bp, Homo sapien
gagaatacatcagaatttttccttg

SEQ ID NO: 2203827 - DNA, 25 bp, Homo sapien
aagatttccaaactctatagagact

SEQ ID NO: 2203828 - DNA, 25 bp, Homo sapien
gtaaagatttccaaactctatagag

SEQ ID NO: 2203829 - DNA, 25 bp, Homo sapien
tgattcctgtggttacggtcattat

SEQ ID NO: 2203830 - DNA, 25 bp, Homo sapien
cctgattcctgtggttacggtcatt

SEQ ID NO: 2203831 - DNA, 25 bp, Homo sapien
tcattcccctggaggtctgtggccc

SEQ ID NO: 2203832 - DNA, 25 bp, Homo sapien
ttatcaaaatcattcccctggaggt

SEQ ID NO: 2203833 - DNA, 25 bp, Homo sapien
tgaaaggtgggagggtagccttgaa

SEQ ID NO: 2203834 - DNA, 25 bp, Homo sapien
ctgtattacacatgaaaggtgggag

SEQ ID NO: 2203835 - DNA, 25 bp, Homo sapien
cacatgaaaggtgggagggtagcct

SEQ ID NO: 2203836 - DNA, 25 bp, Homo sapien
tgtattacacatgaaaggtgggagg

SEQ ID NO: 2203837 - DNA, 25 bp, Homo sapien
acatagatgattttctccgaggatt

SEQ ID NO: 2203838 - DNA, 25 bp, Homo sapien
gaagtatttggcaatatcatcgaag

SEQ ID NO: 2203839 - DNA, 25 bp, Homo sapien
tagagaagtatttggcaatatcatc

SEQ ID NO: 2203840 - DNA, 25 bp, Homo sapien
tgattttctccgaggatttcatctt

SEQ ID NO: 2203841 - DNA, 25 bp, Homo sapien
aaccagccctaggtctccttgcaaa

SEQ ID NO: 2203842 - DNA, 25 bp, Homo sapien
cttgcaaaggcatcgtctccgttca

SEQ ID NO: 2203843 - DNA, 25 bp, Homo sapien
tctggtatttgagaaccagccctag

SEQ ID NO: 2203844 - DNA, 25 bp, Homo sapien
tccttgcaaaggcatcgtctccgtt

SEQ ID NO: 2203845 - DNA, 25 bp, Homo sapien
ggaaggcagagatgtgactgtgtaa

SEQ ID NO: 2203846 - DNA, 25 bp, Homo sapien
tacagacccttgttgggaaggcaga

SEQ ID NO: 2203847 - DNA, 25 bp, Homo sapien
gaaggcagagatgtgactgtgtaat

SEQ ID NO: 2203848 - DNA, 25 bp, Homo sapien
aaagatgtacagacccttgttggga

SEQ ID NO: 2203849 - DNA, 25 bp, Homo sapien
ctgaacttaaagtagccaatcccgg

SEQ ID NO: 2203850 - DNA, 25 bp, Homo sapien
taaagtagccaatcccgggggatgc

SEQ ID NO: 2203851 - DNA, 25 bp, Homo sapien
tactctgaacttaaagtagccaatc

SEQ ID NO: 2203852 - DNA, 25 bp, Homo sapien
catactctgaacttaaagtagccaa

SEQ ID NO: 2203853 - DNA, 25 bp, Homo sapien
ccatcgcagcccttgaggttttaga

SEQ ID NO: 2203854 - DNA, 25 bp, Homo sapien
atcgcagcccttgaggttttagaag

SEQ ID NO: 2203855 - DNA, 25 bp, Homo sapien
catcgcagcccttgaggttttagaa

SEQ ID NO: 2203856 - DNA, 25 bp, Homo sapien
ggaaacatgcctggacccacagact

SEQ ID NO: 2203857 - DNA, 25 bp, Homo sapien
tttccaactcttctccatcatagga

SEQ ID NO: 2203858 - DNA, 25 bp, Homo sapien
catcataggacccaaaagtgggaaa

SEQ ID NO: 2203859 - DNA, 25 bp, Homo sapien
gtgatttatgaagagatcagcgacc

SEQ ID NO: 2203860 - DNA, 25 bp, Homo sapien
agcctaggaatcgataaaccaggtg

SEQ ID NO: 2203861 - DNA, 25 bp, Homo sapien
tagcctaggaatcgataaaccaggt

SEQ ID NO: 2203862 - DNA, 25 bp, Homo sapien
cgataaaccaggtgaggaagtcact

SEQ ID NO: 2203863 - DNA, 25 bp, Homo sapien
gccacagtcatgccatccatcagat

SEQ ID NO: 2203864 - DNA, 25 bp, Homo sapien
gccttgagaaaagagtcatggtaag

SEQ ID NO: 2203865 - DNA, 25 bp, Homo sapien
aaagagtcatggtaagccacagtca

SEQ ID NO: 2203866 - DNA, 25 bp, Homo sapien
tgcccatcactagtgaggtccagtt

SEQ ID NO: 2203867 - DNA, 25 bp, Homo sapien
gtggtcaaagacactggggccctct

SEQ ID NO: 2203868 - DNA, 25 bp, Homo sapien
ttcatgaaggcatccagttctgtat

SEQ ID NO: 2203869 - DNA, 25 bp, Homo sapien
tgaaggcatccagttctgtattcat

SEQ ID NO: 2203870 - DNA, 25 bp, Homo sapien
ctggggccctctggttcttcatgaa

SEQ ID NO: 2203871 - DNA, 25 bp, Homo sapien
gggataaagacaaccggcacaggtc

SEQ ID NO: 2203872 - DNA, 25 bp, Homo sapien
catgggataaagacaaccggcacag

SEQ ID NO: 2203873 - DNA, 25 bp, Homo sapien
ggataaagacaaccggcacaggtcc

SEQ ID NO: 2203874 - DNA, 25 bp, Homo sapien
tgggataaagacaaccggcacaggt

SEQ ID NO: 2203875 - DNA, 25 bp, Homo sapien
tggaaacgctaatatcgtactcttg

SEQ ID NO: 2203876 - DNA, 25 bp, Homo sapien
aatacaatggaaacgctaatatcgt

SEQ ID NO: 2203877 - DNA, 25 bp, Homo sapien
gaaacgctaatatcgtactcttggc

SEQ ID NO: 2203878 - DNA, 25 bp, Homo sapien
caatggaaacgctaatatcgtactc

SEQ ID NO: 2203879 - DNA, 25 bp, Homo sapien
cacagccatgcccatgttcgtgaaa

SEQ ID NO: 2203880 - DNA, 25 bp, Homo sapien
atgggcatgtgtcatatccccaagg

SEQ ID NO: 2203881 - DNA, 25 bp, Homo sapien
atcatgggcatgtgtcatatcccca

SEQ ID NO: 2203882 - DNA, 25 bp, Homo sapien
tcgtgaaaggtcaccacgttctgct

SEQ ID NO: 2203883 - DNA, 25 bp, Homo sapien
tgctttctctcacgcagtctgtggg

SEQ ID NO: 2203884 - DNA, 25 bp, Homo sapien
tctgtgggtccaggcatgttccccc

SEQ ID NO: 2203885 - DNA, 25 bp, Homo sapien
ctcaggatcgctgatctcttcataa

SEQ ID NO: 2203886 - DNA, 25 bp, Homo sapien
catcatcttcctcaggatcgctgat

SEQ ID NO: 2203887 - DNA, 25 bp, Homo sapien
caccgatgagctgttccgcgtctct

SEQ ID NO: 2203888 - DNA, 25 bp, Homo sapien
tccaccgatgagctgttccgcgtct

SEQ ID NO: 2203889 - DNA, 25 bp, Homo sapien
actgctccaccgatgagctgttccg

SEQ ID NO: 2203890 - DNA, 25 bp, Homo sapien
tgctccaccgatgagctgttccgcg

SEQ ID NO: 2203891 - DNA, 25 bp, Homo sapien
cagtggtctggaaccgaacctgcag

SEQ ID NO: 2203892 - DNA, 25 bp, Homo sapien
gtctggaaccgaacctgcagtatct

SEQ ID NO: 2203893 - DNA, 25 bp, Homo sapien
aacctgcagtatctctgaaggacac

SEQ ID NO: 2203894 - DNA, 25 bp, Homo sapien
tggtctggaaccgaacctgcagtat

SEQ ID NO: 2203895 - DNA, 25 bp, Homo sapien
tggcacttccttcgaaacatttcct

SEQ ID NO: 2203896 - DNA, 25 bp, Homo sapien
cttctggcacttccttcgaaacatt

SEQ ID NO: 2203897 - DNA, 25 bp, Homo sapien
cagatatcatgttaatcttctcaga

SEQ ID NO: 2203898 - DNA, 25 bp, Homo sapien
gatatcatgttaatcttctcagagg

SEQ ID NO: 2203899 - DNA, 25 bp, Homo sapien
tgttcgcatccttggagggacaaag

SEQ ID NO: 2203900 - DNA, 25 bp, Homo sapien
cagtgttcgcatccttggagggaca

SEQ ID NO: 2203901 - DNA, 25 bp, Homo sapien
ctggtcctttagatctgaaagatac

SEQ ID NO: 2203902 - DNA, 25 bp, Homo sapien
tcctttagatctgaaagatactcac

SEQ ID NO: 2203903 - DNA, 25 bp, Homo sapien
aagattccctggagcctgccgaaag

SEQ ID NO: 2203904 - DNA, 25 bp, Homo sapien
ttccctggagcctgccgaaagtcat

SEQ ID NO: 2203905 - DNA, 25 bp, Homo sapien
cgggaagattccctggagcctgccg

SEQ ID NO: 2203906 - DNA, 25 bp, Homo sapien
attccctggagcctgccgaaagtca

SEQ ID NO: 2203907 - DNA, 25 bp, Homo sapien
ttattacgcatgaaagatgggagga

SEQ ID NO: 2203908 - DNA, 25 bp, Homo sapien
tgtgacccgtttattacgcatgaaa

SEQ ID NO: 2203909 - DNA, 25 bp, Homo sapien
gaagtctgtgacccgtttattacgc

SEQ ID NO: 2203910 - DNA, 25 bp, Homo sapien
cctggaagtctgtgacccgtttatt

SEQ ID NO: 2203911 - DNA, 25 bp, Homo sapien
gaagtatttggcaatatcatcgaag

SEQ ID NO: 2203912 - DNA, 25 bp, Homo sapien
tatacacatagacgattttctccga

SEQ ID NO: 2203913 - DNA, 25 bp, Homo sapien
acatagacgattttctccgagactt

SEQ ID NO: 2203914 - DNA, 25 bp, Homo sapien
tctccgagactttcatcttttccca

SEQ ID NO: 2203915 - DNA, 25 bp, Homo sapien
tgagcaccaaccgtgggtctccttg

SEQ ID NO: 2203916 - DNA, 25 bp, Homo sapien
accgtgggtctccttgcaaaggtgt

SEQ ID NO: 2203917 - DNA, 25 bp, Homo sapien
ggtatttgagcaccaaccgtgggtc

SEQ ID NO: 2203918 - DNA, 25 bp, Homo sapien
tcttctctggtatttgagcaccaac

SEQ ID NO: 2203919 - DNA, 25 bp, Homo sapien
gagaaacagattgagactttccagc

SEQ ID NO: 2203920 - DNA, 25 bp, Homo sapien
gattgagactttccagccgcaggac

SEQ ID NO: 2203921 - DNA, 25 bp, Homo sapien
gaaacagattgagactttccagccg

SEQ ID NO: 2203922 - DNA, 25 bp, Homo sapien
aacagattgagactttccagccgca

SEQ ID NO: 2203923 - DNA, 25 bp, Homo sapien
gagaaaatcagaccgtgcgtactct

SEQ ID NO: 2203924 - DNA, 25 bp, Homo sapien
ttggaagaatccaaagagaaaatca

SEQ ID NO: 2203925 - DNA, 25 bp, Homo sapien
tttggaagaatccaaagagaaaatc

SEQ ID NO: 2203926 - DNA, 25 bp, Homo sapien
aagagaaaatcagaccgtgcgtact

SEQ ID NO: 2203927 - DNA, 25 bp, Homo sapien
tcgccactgcgaaaaagtgggtggt

SEQ ID NO: 2203928 - DNA, 25 bp, Homo sapien
aaagtgggtggtcctcaggcgccgt

SEQ ID NO: 2203929 - DNA, 25 bp, Homo sapien
cttgtcgccactgcgaaaaagtggg

SEQ ID NO: 2203930 - DNA, 25 bp, Homo sapien
tcaggcgccgtcagattttgatctc

SEQ ID NO: 2203931 - DNA, 25 bp, Homo sapien
tagaaaccaggtttcgatatgttgc

SEQ ID NO: 2203932 - DNA, 25 bp, Homo sapien
caggccggcatcaagctcctgggct

SEQ ID NO: 2203933 - DNA, 25 bp, Homo sapien
acgcaccaccctgcccaagctattt

SEQ ID NO: 2203934 - DNA, 25 bp, Homo sapien
agccacgcaccaccctgcccaagct

SEQ ID NO: 2203935 - DNA, 25 bp, Homo sapien
gaggcaggctatcgctttgttggcc

SEQ ID NO: 2203936 - DNA, 25 bp, Homo sapien
aggcaggctatcgctttgttggcca

SEQ ID NO: 2203937 - DNA, 25 bp, Homo sapien
ggagaggcaggctatcgctttgttg

SEQ ID NO: 2203938 - DNA, 25 bp, Homo sapien
agaggcaggctatcgctttgttggc

SEQ ID NO: 2203939 - DNA, 25 bp, Homo sapien
ggtccacatacggtggcaatccact

SEQ ID NO: 2203940 - DNA, 25 bp, Homo sapien
gggtccacatacggtggcaatccac

SEQ ID NO: 2203941 - DNA, 25 bp, Homo sapien
tgggtccacatacggtggcaatcca

SEQ ID NO: 2203942 - DNA, 25 bp, Homo sapien
gataatggacttctggccaagccaa

SEQ ID NO: 2203943 - DNA, 25 bp, Homo sapien
caagccaacccatggtgacatcatc

SEQ ID NO: 2203944 - DNA, 25 bp, Homo sapien
tcaaagactcgagataatggacttc

SEQ ID NO: 2203945 - DNA, 25 bp, Homo sapien
gtgacatcatcaggtttgtgcctcc

SEQ ID NO: 2203946 - DNA, 25 bp, Homo sapien
aagacacatgggagtggaatgtgcc

SEQ ID NO: 2203947 - DNA, 25 bp, Homo sapien
ttgaagacacatgggagtggaatgt

SEQ ID NO: 2203948 - DNA, 25 bp, Homo sapien
gaagacacatgggagtggaatgtgc

SEQ ID NO: 2203949 - DNA, 25 bp, Homo sapien
agacacatgggagtggaatgtgccc

SEQ ID NO: 2203950 - DNA, 25 bp, Homo sapien
ggtcttgttaatgataacaattgac

SEQ ID NO: 2203951 - DNA, 25 bp, Homo sapien
aatgataacaattgaccctggaatc

SEQ ID NO: 2203952 - DNA, 25 bp, Homo sapien
tcttgttaatgataacaattgaccc

SEQ ID NO: 2203953 - DNA, 25 bp, Homo sapien
tgttaatgataacaattgaccctgg

SEQ ID NO: 2203954 - DNA, 25 bp, Homo sapien
gtcttagacacacactttccaagca

SEQ ID NO: 2203955 - DNA, 25 bp, Homo sapien
atctcgaagtcttagacacacactt

SEQ ID NO: 2203956 - DNA, 25 bp, Homo sapien
cttagacacacactttccaagcagc

SEQ ID NO: 2203957 - DNA, 25 bp, Homo sapien
gaagtcttagacacacactttccaa

SEQ ID NO: 2203958 - DNA, 25 bp, Homo sapien
gcagcctagtggattgccaccgtat

SEQ ID NO: 2203959 - DNA, 25 bp, Homo sapien
ggcagcctagtggattgccaccgta

SEQ ID NO: 2203960 - DNA, 25 bp, Homo sapien
tacaacatcagaaggtagcttcatg

SEQ ID NO: 2203961 - DNA, 25 bp, Homo sapien
agcctagtggattgccaccgtatgt

SEQ ID NO: 2203962 - DNA, 25 bp, Homo sapien
tcgtaacagtagaggaaaataggaa

SEQ ID NO: 2203963 - DNA, 25 bp, Homo sapien
caacattccatcgaactgggaagaa

SEQ ID NO: 2203964 - DNA, 25 bp, Homo sapien
tattttcaagggtcaattcgtaaca

SEQ ID NO: 2203965 - DNA, 25 bp, Homo sapien
ggaaagcgtgtcagcggtccaccag

SEQ ID NO: 2203966 - DNA, 25 bp, Homo sapien
gtgactgatacaacggaatcggatg

SEQ ID NO: 2203967 - DNA, 25 bp, Homo sapien
ctgatacaacggaatcggatgaggg

SEQ ID NO: 2203968 - DNA, 25 bp, Homo sapien
agtgactgatacaacggaatcggat

SEQ ID NO: 2203969 - DNA, 25 bp, Homo sapien
gtcagtgactgatacaacggaatcg

SEQ ID NO: 2203970 - DNA, 25 bp, Homo sapien
gctcatcaacgaaaacgctaatgtc

SEQ ID NO: 2203971 - DNA, 25 bp, Homo sapien
acacaagccgaaatatgcattaagc

SEQ ID NO: 2203972 - DNA, 25 bp, Homo sapien
tcaacgaaaacgctaatgtctaaca

SEQ ID NO: 2203973 - DNA, 25 bp, Homo sapien
tgtcttgctcatcaacgaaaacgct

SEQ ID NO: 2203974 - DNA, 25 bp, Homo sapien
aaaatacagcggaaacgccaacatc

SEQ ID NO: 2203975 - DNA, 25 bp, Homo sapien
cagcggaaacgccaacatcgaactc

SEQ ID NO: 2203976 - DNA, 25 bp, Homo sapien
atacagcggaaacgccaacatcgaa

SEQ ID NO: 2203977 - DNA, 25 bp, Homo sapien
gcggaaacgccaacatcgaactctt

SEQ ID NO: 2203978 - DNA, 25 bp, Homo sapien
cgcagccatgcccatgttcgtgaaa

SEQ ID NO: 2203979 - DNA, 25 bp, Homo sapien
ccgcagccatgcccatgttcgtgaa

SEQ ID NO: 2203980 - DNA, 25 bp, Homo sapien
tccgcagccatgcccatgttcgtga

SEQ ID NO: 2203981 - DNA, 25 bp, Homo sapien
gcagccatgcccatgttcgtgaaag

SEQ ID NO: 2203982 - DNA, 25 bp, Homo sapien
catgggcatgtgtcatatccccgag

SEQ ID NO: 2203983 - DNA, 25 bp, Homo sapien
tcatgggcatgtgtcatatccccga

SEQ ID NO: 2203984 - DNA, 25 bp, Homo sapien
atgggcatgtgtcatatccccgagg

SEQ ID NO: 2203985 - DNA, 25 bp, Homo sapien
cagggtcgctgatctcttcataaac

SEQ ID NO: 2203986 - DNA, 25 bp, Homo sapien
tgctttctctcacgcagtctgtggg

SEQ ID NO: 2203987 - DNA, 25 bp, Homo sapien
tcttcataaaccaccagctgctttc

SEQ ID NO: 2203988 - DNA, 25 bp, Homo sapien
tctgtgggtccaggcatgtttcccc

SEQ ID NO: 2203989 - DNA, 25 bp, Homo sapien
tgaacacagccagggaagccagagg

SEQ ID NO: 2203990 - DNA, 25 bp, Homo sapien
acagccagggaagccagaggggttg

SEQ ID NO: 2203991 - DNA, 25 bp, Homo sapien
cacagccagggaagccagaggggtt

SEQ ID NO: 2203992 - DNA, 25 bp, Homo sapien
gccagggaagccagaggggttgttc

SEQ ID NO: 2203993 - DNA, 25 bp, Homo sapien
cctctggcacttccttcaaaccatt

SEQ ID NO: 2203994 - DNA, 25 bp, Homo sapien
ttaatcttctccaaggtacttggat

SEQ ID NO: 2203995 - DNA, 25 bp, Homo sapien
tctggcacttccttcaaaccatttt

SEQ ID NO: 2203996 - DNA, 25 bp, Homo sapien
taatcttctccaaggtacttggatt

SEQ ID NO: 2203997 - DNA, 25 bp, Homo sapien
ggaagattctctggaggctgccgaa

SEQ ID NO: 2203998 - DNA, 25 bp, Homo sapien
cgggaagattctctggaggctgccg

SEQ ID NO: 2203999 - DNA, 25 bp, Homo sapien
aagattctctggaggctgccgaaag

SEQ ID NO: 2204000 - DNA, 25 bp, Homo sapien
cttcgggaagattctctggaggctg

SEQ ID NO: 2204001 - DNA, 25 bp, Homo sapien
ctctagagagacttctgtcgcatga

SEQ ID NO: 2204002 - DNA, 25 bp, Homo sapien
agagacttctgtcgcatgagggcat

SEQ ID NO: 2204003 - DNA, 25 bp, Homo sapien
tagagagacttctgtcgcatgaggg

SEQ ID NO: 2204004 - DNA, 25 bp, Homo sapien
tttccaaactctagagagacttctg

SEQ ID NO: 2204005 - DNA, 25 bp, Homo sapien
gattcctgtggtttcgatcgttacc

SEQ ID NO: 2204006 - DNA, 25 bp, Homo sapien
gtttcgatcgttaccaaaatcattc

SEQ ID NO: 2204007 - DNA, 25 bp, Homo sapien
cattcccgtggaagtctgcagcccg

SEQ ID NO: 2204008 - DNA, 25 bp, Homo sapien
tgcagcccgtttactacgcatgaaa

SEQ ID NO: 2204009 - DNA, 25 bp, Homo sapien
tagtcatgacctcatagtttagctt

SEQ ID NO: 2204010 - DNA, 25 bp, Homo sapien
gtttagtcatgacctcatagtttag

SEQ ID NO: 2204011 - DNA, 25 bp, Homo sapien
gtcatgacctcatagtttagcttca

SEQ ID NO: 2204012 - DNA, 25 bp, Homo sapien
tttagtcatgacctcatagtttagc

SEQ ID NO: 2204013 - DNA, 25 bp, Homo sapien
ctttcgtaacttctctgatatttga

SEQ ID NO: 2204014 - DNA, 25 bp, Homo sapien
gatatttgagcatcatccctgggtc

SEQ ID NO: 2204015 - DNA, 25 bp, Homo sapien
cgtaacttctctgatatttgagcat

SEQ ID NO: 2204016 - DNA, 25 bp, Homo sapien
acttctctgatatttgagcatcatc

SEQ ID NO: 2204017 - DNA, 25 bp, Homo sapien
tagccaatccaaggggacgctttcg

SEQ ID NO: 2204018 - DNA, 25 bp, Homo sapien
ggcaaatcggcgtgtgcgtactctg

SEQ ID NO: 2204019 - DNA, 25 bp, Homo sapien
cggcgtgtgcgtactctgaatttaa

SEQ ID NO: 2204020 - DNA, 25 bp, Homo sapien
atcaaaagggcaaatcggcgtgtgc

SEQ ID NO: 2204021 - DNA, 25 bp, Homo sapien
ggtccacatacggtggcaatccact

SEQ ID NO: 2204022 - DNA, 25 bp, Homo sapien
gggtccacatacggtggcaatccac

SEQ ID NO: 2204023 - DNA, 25 bp, Homo sapien
tgggtccacatacggtggcaatcca

SEQ ID NO: 2204024 - DNA, 25 bp, Homo sapien
gcttttacaagaccacctgtctcca

SEQ ID NO: 2204025 - DNA, 25 bp, Homo sapien
cagggaccactgaaaacagctgcta

SEQ ID NO: 2204026 - DNA, 25 bp, Homo sapien
gagcagagcttttacaagaccacct

SEQ ID NO: 2204027 - DNA, 25 bp, Homo sapien
acatttagagcagagcttttacaag

SEQ ID NO: 2204028 - DNA, 25 bp, Homo sapien
gttggcttggccagaagtccattat

SEQ ID NO: 2204029 - DNA, 25 bp, Homo sapien
tcagaaagacaagatggtcttgtta

SEQ ID NO: 2204030 - DNA, 25 bp, Homo sapien
ggttggcttggccagaagtccatta

SEQ ID NO: 2204031 - DNA, 25 bp, Homo sapien
agtcgtagacacaccttccaagcat

SEQ ID NO: 2204032 - DNA, 25 bp, Homo sapien
gacacaccttccaagcatcacaatc

SEQ ID NO: 2204033 - DNA, 25 bp, Homo sapien
caagcatcacaatctttggtttctt

SEQ ID NO: 2204034 - DNA, 25 bp, Homo sapien
tcgtagacacaccttccaagcatca

SEQ ID NO: 2204035 - DNA, 25 bp, Homo sapien
gcattatgtcatcgtcccacagcac

SEQ ID NO: 2204036 - DNA, 25 bp, Homo sapien
gctgcaattgtcacttggcagccta

SEQ ID NO: 2204037 - DNA, 25 bp, Homo sapien
cattatgtcatcgtcccacagcact

SEQ ID NO: 2204038 - DNA, 25 bp, Homo sapien
tcagcaatatacagatcctggtgcc

SEQ ID NO: 2204039 - DNA, 25 bp, Homo sapien
tcgaagccaggcataaacggtccaa

SEQ ID NO: 2204040 - DNA, 25 bp, Homo sapien
taactcgtcaggtctgtggaactgg

SEQ ID NO: 2204041 - DNA, 25 bp, Homo sapien
cagtgcaggcagatcattgcaggga

SEQ ID NO: 2204042 - DNA, 25 bp, Homo sapien
tcccttgactctttagtgcattcac

SEQ ID NO: 2204043 - DNA, 25 bp, Homo sapien
ctctagaggttaaggtcaatttctt

SEQ ID NO: 2204044 - DNA, 25 bp, Homo sapien
tcttcccttgactctttagtgcatt

SEQ ID NO: 2204045 - DNA, 25 bp, Homo sapien
tctagaggttaaggtcaatttcttc

SEQ ID NO: 2204046 - DNA, 25 bp, Homo sapien
ggtaattgtgcgcaccacacttaga

SEQ ID NO: 2204047 - DNA, 25 bp, Homo sapien
tgtgcgcaccacacttagattccct

SEQ ID NO: 2204048 - DNA, 25 bp, Homo sapien
tgcgcaccacacttagattcccttt

SEQ ID NO: 2204049 - DNA, 25 bp, Homo sapien
aaaggatggtaattgtgcgcaccac

SEQ ID NO: 2204050 - DNA, 25 bp, Homo sapien
gcaaacctctgcaaaggtgctagtt

SEQ ID NO: 2204051 - DNA, 25 bp, Homo sapien
ctccacgactaagtacagcaaacct

SEQ ID NO: 2204052 - DNA, 25 bp, Homo sapien
actgaagaatgagctccacgactaa

SEQ ID NO: 2204053 - DNA, 25 bp, Homo sapien
caacagatgtagcagaagccactga

SEQ ID NO: 2204054 - DNA, 25 bp, Homo sapien
gctgggcaaaggctccaccaggacc

SEQ ID NO: 2204055 - DNA, 25 bp, Homo sapien
cctctttagcccgagggtaatcctg

SEQ ID NO: 2204056 - DNA, 25 bp, Homo sapien
gggcaaaggctccaccaggacctgg

SEQ ID NO: 2204057 - DNA, 25 bp, Homo sapien
ggtaatcctgacaaacagcttcagc

SEQ ID NO: 2204058 - DNA, 25 bp, Homo sapien
tgacaaccacgttcatgggaaccag

SEQ ID NO: 2204059 - DNA, 25 bp, Homo sapien
ctccatgtgcatgcgcacagggacc

SEQ ID NO: 2204060 - DNA, 25 bp, Homo sapien
tagggagcggccctgacccctccat

SEQ ID NO: 2204061 - DNA, 25 bp, Homo sapien
gcaggagggaccctagggagcggcc

SEQ ID NO: 2204062 - DNA, 25 bp, Homo sapien
acatgcggctctggcctgtggccca

SEQ ID NO: 2204063 - DNA, 25 bp, Homo sapien
cccagttggcaaacataaagcctag

SEQ ID NO: 2204064 - DNA, 25 bp, Homo sapien
gacatgcggctctggcctgtggccc

SEQ ID NO: 2204065 - DNA, 25 bp, Homo sapien
aagcctagactgacggccatgaaga

SEQ ID NO: 2204066 - DNA, 25 bp, Homo sapien
agctctcttcccaatagtgctcttt

SEQ ID NO: 2204067 - DNA, 25 bp, Homo sapien
ccagccatcctggagtgagcactcc

SEQ ID NO: 2204068 - DNA, 25 bp, Homo sapien
ggagaatgctccctctatgccagcc

SEQ ID NO: 2204069 - DNA, 25 bp, Homo sapien
cctctgtttgagtgctccctgtctt

SEQ ID NO: 2204070 - DNA, 25 bp, Homo sapien
tggatcttgggccaggataagaaag

SEQ ID NO: 2204071 - DNA, 25 bp, Homo sapien
ctccacctcagagggtacaatgcgg

SEQ ID NO: 2204072 - DNA, 25 bp, Homo sapien
tacaatgcggaggtagaagatgctg

SEQ ID NO: 2204073 - DNA, 25 bp, Homo sapien
caggataagaaaggctccacctcag

SEQ ID NO: 2204074 - DNA, 25 bp, Homo sapien
aacaagcaggatcagagctatggcc

SEQ ID NO: 2204075 - DNA, 25 bp, Homo sapien
aaggacattgaccaaaacaagcagg

SEQ ID NO: 2204076 - DNA, 25 bp, Homo sapien
gcacacagatgacaaggacattgac

SEQ ID NO: 2204077 - DNA, 25 bp, Homo sapien
ctatggccacatgtcgtggccagct

SEQ ID NO: 2204078 - DNA, 25 bp, Homo sapien
ggaacagcacgactggcacagtgag

SEQ ID NO: 2204079 - DNA, 25 bp, Homo sapien
agggaacagcacgactggcacagtg

SEQ ID NO: 2204080 - DNA, 25 bp, Homo sapien
gaacagcacgactggcacagtgagg

SEQ ID NO: 2204081 - DNA, 25 bp, Homo sapien
aacagcacgactggcacagtgaggg

SEQ ID NO: 2204082 - DNA, 25 bp, Homo sapien
cacagaggatgagcgggtccttctg

SEQ ID NO: 2204083 - DNA, 25 bp, Homo sapien
acggccaggcgcacacagaggatga

SEQ ID NO: 2204084 - DNA, 25 bp, Homo sapien
ctgtacatgtgcagcatctccgcct

SEQ ID NO: 2204085 - DNA, 25 bp, Homo sapien
cttctggctgtacatgtgcagcatc

SEQ ID NO: 2204086 - DNA, 25 bp, Homo sapien
aatgccccagaaacccatacataca

SEQ ID NO: 2204087 - DNA, 25 bp, Homo sapien
ccatgagacagagggtacgggatgc

SEQ ID NO: 2204088 - DNA, 25 bp, Homo sapien
tgaggcacaccttctgtttggaaac

SEQ ID NO: 2204089 - DNA, 25 bp, Homo sapien
agcaccaggaccaatgccccagaaa

SEQ ID NO: 2204090 - DNA, 25 bp, Homo sapien
ggacacgttggccacggcctgcatc

SEQ ID NO: 2204091 - DNA, 25 bp, Homo sapien
gaacatggccccaatggacacgttg

SEQ ID NO: 2204092 - DNA, 25 bp, Homo sapien
ttgctgtgagcccatacatgcagaa

SEQ ID NO: 2204093 - DNA, 25 bp, Homo sapien
ggcctgcatcctgcgcttggagggc

SEQ ID NO: 2204094 - DNA, 25 bp, Homo sapien
agcaaaagccataatgggcactgtg

SEQ ID NO: 2204095 - DNA, 25 bp, Homo sapien
gcagagctccgtatagatgggcagc

SEQ ID NO: 2204096 - DNA, 25 bp, Homo sapien
cggcagagctccgtatagatgggca

SEQ ID NO: 2204097 - DNA, 25 bp, Homo sapien
tcagggtggcagacaaaagcaaaag

SEQ ID NO: 2204098 - DNA, 25 bp, Homo sapien
caagttggaacttcttgtagatgac

SEQ ID NO: 2204099 - DNA, 25 bp, Homo sapien
gcttcactctccattgctgtttcat

SEQ ID NO: 2204100 - DNA, 25 bp, Homo sapien
gcctatagcacagccaagttggaac

SEQ ID NO: 2204101 - DNA, 25 bp, Homo sapien
gggagtcccacgagagcttcactct

SEQ ID NO: 2204102 - DNA, 25 bp, Homo sapien
agaccactggtgtaccccaggtagc

SEQ ID NO: 2204103 - DNA, 25 bp, Homo sapien
agagaccactggtgtaccccaggta

SEQ ID NO: 2204104 - DNA, 25 bp, Homo sapien
gagaccactggtgtaccccaggtag

SEQ ID NO: 2204105 - DNA, 25 bp, Homo sapien
gattaacacactgacgatgatgatg

SEQ ID NO: 2204106 - DNA, 25 bp, Homo sapien
gggcaggatgattaacacactgacg

SEQ ID NO: 2204107 - DNA, 25 bp, Homo sapien
gatgattaacacactgacgatgatg

SEQ ID NO: 2204108 - DNA, 25 bp, Homo sapien
gcgaggggcaggatgattaacacac

SEQ ID NO: 2204109 - DNA, 25 bp, Homo sapien
gaaactgtcaggcagacactcacag

SEQ ID NO: 2204110 - DNA, 25 bp, Homo sapien
cagctttctgccctaagtcaggaga

SEQ ID NO: 2204111 - DNA, 25 bp, Homo sapien
gccagccaaaggaaactgtcaggca

SEQ ID NO: 2204112 - DNA, 25 bp, Homo sapien
caggcagctttctgccctaagtcag

SEQ ID NO: 2204113 - DNA, 25 bp, Homo sapien
aaccagggggagctcagatttgatg

SEQ ID NO: 2204114 - DNA, 25 bp, Homo sapien
gtacaggaaggtgccgataaccagg

SEQ ID NO: 2204115 - DNA, 25 bp, Homo sapien
ccatgtacaggaaggtgccgataac

SEQ ID NO: 2204116 - DNA, 25 bp, Homo sapien
gataaccagggggagctcagatttg

SEQ ID NO: 2204117 - DNA, 25 bp, Homo sapien
cattgtgcagacagatgactgtggc

SEQ ID NO: 2204118 - DNA, 25 bp, Homo sapien
ttgtgcagacagatgactgtggcca

SEQ ID NO: 2204119 - DNA, 25 bp, Homo sapien
cccaacattgtgcagacagatgact

SEQ ID NO: 2204120 - DNA, 25 bp, Homo sapien
aacattgtgcagacagatgactgtg

SEQ ID NO: 2204121 - DNA, 25 bp, Homo sapien
taggacgacagaagcgcaatgcaca

SEQ ID NO: 2204122 - DNA, 25 bp, Homo sapien
agaagcgcaatgcacagcagcaggg

SEQ ID NO: 2204123 - DNA, 25 bp, Homo sapien
atggagtaggacgacagaagcgcaa

SEQ ID NO: 2204124 - DNA, 25 bp, Homo sapien
aggtggatggagtaggacgacagaa

SEQ ID NO: 2204125 - DNA, 25 bp, Homo sapien
gacattccaaacgatgtcttcccct

SEQ ID NO: 2204126 - DNA, 25 bp, Homo sapien
tgacccccgtgtgggccatggcata

SEQ ID NO: 2204127 - DNA, 25 bp, Homo sapien
aacactgacattccaaacgatgtct

SEQ ID NO: 2204128 - DNA, 25 bp, Homo sapien
gatgacccccgtgtgggccatggca

SEQ ID NO: 2204129 - DNA, 25 bp, Homo sapien
gcaaagcccgggcacacattgggac

SEQ ID NO: 2204130 - DNA, 25 bp, Homo sapien
acgcaaggagcaaagcccgggcaca

SEQ ID NO: 2204131 - DNA, 25 bp, Homo sapien
ctgcacgcaaggagcaaagcccggg

SEQ ID NO: 2204132 - DNA, 25 bp, Homo sapien
gcaaggagcaaagcccgggcacaca

SEQ ID NO: 2204133 - DNA, 25 bp, Homo sapien
caaggagagaccatcggaggaggga

SEQ ID NO: 2204134 - DNA, 25 bp, Homo sapien
ccagggaaagactagagaagaagca

SEQ ID NO: 2204135 - DNA, 25 bp, Homo sapien
actaggacaaactttggagggagca

SEQ ID NO: 2204136 - DNA, 25 bp, Homo sapien
agccaccagaggtaaaacagctggg

SEQ ID NO: 2204137 - DNA, 25 bp, Homo sapien
caggaccacgactgggcaggaagcc

SEQ ID NO: 2204138 - DNA, 25 bp, Homo sapien
actggaccggcttgctcccaggagc

SEQ ID NO: 2204139 - DNA, 25 bp, Homo sapien
caggagcaggaccacgactgggcag

SEQ ID NO: 2204140 - DNA, 25 bp, Homo sapien
atccatgaactggaccggcttgctc

SEQ ID NO: 2204141 - DNA, 25 bp, Homo sapien
agcatccgaagggagggctccattc

SEQ ID NO: 2204142 - DNA, 25 bp, Homo sapien
cccacagcatccgaagggagggctc

SEQ ID NO: 2204143 - DNA, 25 bp, Homo sapien
acagcatccgaagggagggctccat

SEQ ID NO: 2204144 - DNA, 25 bp, Homo sapien
cacagcatccgaagggagggctcca

SEQ ID NO: 2204145 - DNA, 25 bp, Homo sapien
cagcgcagatgagccgaccacgtgg

SEQ ID NO: 2204146 - DNA, 25 bp, Homo sapien
cgtggagaagggatagcctctcctc

SEQ ID NO: 2204147 - DNA, 25 bp, Homo sapien
acgtggagaagggatagcctctcct

SEQ ID NO: 2204148 - DNA, 25 bp, Homo sapien
cagatgagccgaccacgtggagaag

SEQ ID NO: 2204149 - DNA, 25 bp, Homo sapien
catctgtgtctttcattccccggtc

SEQ ID NO: 2204150 - DNA, 25 bp, Homo sapien
gctgtctctcttgccatctgtgtct

SEQ ID NO: 2204151 - DNA, 25 bp, Homo sapien
gccatctgtgtctttcattccccgg

SEQ ID NO: 2204152 - DNA, 25 bp, Homo sapien
ttgccatctgtgtctttcattcccc

SEQ ID NO: 2204153 - DNA, 25 bp, Homo sapien
gctgagggttggggacagactcgga

SEQ ID NO: 2204154 - DNA, 25 bp, Homo sapien
gttgagtgagctgagggttggggac

SEQ ID NO: 2204155 - DNA, 25 bp, Homo sapien
gagctgagggttggggacagactcg

SEQ ID NO: 2204156 - DNA, 25 bp, Homo sapien
ctgttgagtgagctgagggttgggg

SEQ ID NO: 2204157 - DNA, 25 bp, Homo sapien
ctggagcccctgtcttgtaggtaca

SEQ ID NO: 2204158 - DNA, 25 bp, Homo sapien
gtgtctctgcaatccccacccgagc

SEQ ID NO: 2204159 - DNA, 25 bp, Homo sapien
tgtaggtacagcgtctctgaagaaa

SEQ ID NO: 2204160 - DNA, 25 bp, Homo sapien
gtctctgaagaaaccccagctccct

SEQ ID NO: 2204161 - DNA, 25 bp, Homo sapien
gcaattgggctcagtcatagacagg

SEQ ID NO: 2204162 - DNA, 25 bp, Homo sapien
aagtggccgcaactcagactcaggt

SEQ ID NO: 2204163 - DNA, 25 bp, Homo sapien
tgtagacccacagctagagagagtg

SEQ ID NO: 2204164 - DNA, 25 bp, Homo sapien
gtagggataggctcgtggaaacacc

SEQ ID NO: 2204165 - DNA, 25 bp, Homo sapien
gagagtggttgaggcagagagactc

SEQ ID NO: 2204166 - DNA, 25 bp, Homo sapien
cagagagagtggttgaggcagagag

SEQ ID NO: 2204167 - DNA, 25 bp, Homo sapien
ctcagagagatgaaggggcagagag

SEQ ID NO: 2204168 - DNA, 25 bp, Homo sapien
gggcagagagagtggttgaggcaga

SEQ ID NO: 2204169 - DNA, 25 bp, Homo sapien
aggggtagtagccaggctattccag

SEQ ID NO: 2204170 - DNA, 25 bp, Homo sapien
gaggcagattcaggcagagaggcct

SEQ ID NO: 2204171 - DNA, 25 bp, Homo sapien
caggtgcaggggtagtagccaggct

SEQ ID NO: 2204172 - DNA, 25 bp, Homo sapien
agagagaggcagattcaggcagaga

SEQ ID NO: 2204173 - DNA, 25 bp, Homo sapien
gcagacagcctaggcacgagaggac

SEQ ID NO: 2204174 - DNA, 25 bp, Homo sapien
cagcctaggcacgagaggaccctag

SEQ ID NO: 2204175 - DNA, 25 bp, Homo sapien
cctaggcacgagaggaccctagatc

SEQ ID NO: 2204176 - DNA, 25 bp, Homo sapien
agacagcctaggcacgagaggaccc

SEQ ID NO: 2204177 - DNA, 25 bp, Homo sapien
cactgcacgttaagagcaatggctc

SEQ ID NO: 2204178 - DNA, 25 bp, Homo sapien
taacacagggataggcttgtgccga

SEQ ID NO: 2204179 - DNA, 25 bp, Homo sapien
tcatgggacagtcacacacgtggcc

SEQ ID NO: 2204180 - DNA, 25 bp, Homo sapien
tatcaataccgacaggctcagagcc

SEQ ID NO: 2204181 - DNA, 25 bp, Homo sapien
caaagaatcgctggcaacttgcgcg

SEQ ID NO: 2204182 - DNA, 25 bp, Homo sapien
gagtggtaatttcgcttcccggcac

SEQ ID NO: 2204183 - DNA, 25 bp, Homo sapien
tactgtcacgtttatgccccgagtg

SEQ ID NO: 2204184 - DNA, 25 bp, Homo sapien
ttcccggcacgcgaaaaatgaatgg

SEQ ID NO: 2204185 - DNA, 25 bp, Homo sapien
atccacgatgccgagtttgccacgc

SEQ ID NO: 2204186 - DNA, 25 bp, Homo sapien
tggactacgaacacaaactgaagcc

SEQ ID NO: 2204187 - DNA, 25 bp, Homo sapien
ctgaagccctaggacttgtcgcccg

SEQ ID NO: 2204188 - DNA, 25 bp, Homo sapien
cacgctgcgacagcccataggcttg

SEQ ID NO: 2204189 - DNA, 25 bp, Homo sapien
taccgcctggccaaggagaatggct

SEQ ID NO: 2204190 - DNA, 25 bp, Homo sapien
tcatctggttactgatactggccgg

SEQ ID NO: 2204191 - DNA, 25 bp, Homo sapien
cctacagaggtaggtggtagcccat

SEQ ID NO: 2204192 - DNA, 25 bp, Homo sapien
tactggccggcatcagtggactgtc

SEQ ID NO: 2204193 - DNA, 25 bp, Homo sapien
gaaacaatcaagtccgcaaagccca

SEQ ID NO: 2204194 - DNA, 25 bp, Homo sapien
cccaggagcacatgtggtaagaatc

SEQ ID NO: 2204195 - DNA, 25 bp, Homo sapien
tacatttccctgagcagtaaagaga

SEQ ID NO: 2204196 - DNA, 25 bp, Homo sapien
tgacacaggtcaaaagcctagatgg

SEQ ID NO: 2204197 - DNA, 25 bp, Homo sapien
gaagtttgttcttggatggccagaa

SEQ ID NO: 2204198 - DNA, 25 bp, Homo sapien
aaatcctccggaggcagacggtctg

SEQ ID NO: 2204199 - DNA, 25 bp, Homo sapien
ttggagattcggaagtttgttcttg

SEQ ID NO: 2204200 - DNA, 25 bp, Homo sapien
cggtctggggctgaaaccgccacag

SEQ ID NO: 2204201 - DNA, 25 bp, Homo sapien
cgtgggaggccgctgccgtcgcgcg

SEQ ID NO: 2204202 - DNA, 25 bp, Homo sapien
gtgggaggccgctgccgtcgcgcgc

SEQ ID NO: 2204203 - DNA, 25 bp, Homo sapien
taacttcctgcctatacacacgcag

SEQ ID NO: 2204204 - DNA, 25 bp, Homo sapien
cagcccacaaagacatgactaccaa

SEQ ID NO: 2204205 - DNA, 25 bp, Homo sapien
gggccccttgcacccatactggcct

SEQ ID NO: 2204206 - DNA, 25 bp, Homo sapien
aaagacatgactaccaacgcgggcc

SEQ ID NO: 2204207 - DNA, 25 bp, Homo sapien
gatcgagggctggttcgttctctac

SEQ ID NO: 2204208 - DNA, 25 bp, Homo sapien
gacaactttgtacctaatgaccgcc

SEQ ID NO: 2204209 - DNA, 25 bp, Homo sapien
tctctactacgaagacctgcttgga

SEQ ID NO: 2204210 - DNA, 25 bp, Homo sapien
cacatggctgttgtcaggtcgtgct

SEQ ID NO: 2204211 - DNA, 25 bp, Homo sapien
gccaagggagacagccgatacatcc

SEQ ID NO: 2204212 - DNA, 25 bp, Homo sapien
caagggagacagccgatacatcctg

SEQ ID NO: 2204213 - DNA, 25 bp, Homo sapien
tgccaagggagacagccgatacatc

SEQ ID NO: 2204214 - DNA, 25 bp, Homo sapien
atgccaagggagacagccgatacat

SEQ ID NO: 2204215 - DNA, 25 bp, Homo sapien
cttcacagtgtgcatggaaaccatc

SEQ ID NO: 2204216 - DNA, 25 bp, Homo sapien
tcacagtgtgcatggaaaccatcac

SEQ ID NO: 2204217 - DNA, 25 bp, Homo sapien
ttcacagtgtgcatggaaaccatca

SEQ ID NO: 2204218 - DNA, 25 bp, Homo sapien
acttcacagtgtgcatggaaaccat

SEQ ID NO: 2204219 - DNA, 25 bp, Homo sapien
acagagcaccgcgacggattccagc

SEQ ID NO: 2204220 - DNA, 25 bp, Homo sapien
agagcaccgcgacggattccagcac

SEQ ID NO: 2204221 - DNA, 25 bp, Homo sapien
cctgacagagcaccgcgacggattc

SEQ ID NO: 2204222 - DNA, 25 bp, Homo sapien
tacttcctgacagagcaccgcgacg

SEQ ID NO: 2204223 - DNA, 25 bp, Homo sapien
tggagggacaaagctaattgatctg

SEQ ID NO: 2204224 - DNA, 25 bp, Homo sapien
accaggctcgaacactggccgagga

SEQ ID NO: 2204225 - DNA, 25 bp, Homo sapien
tcactcatgcccagagcacgctgga

SEQ ID NO: 2204226 - DNA, 25 bp, Homo sapien
gatgctgtgaagcacctcactcatg

SEQ ID NO: 2204227 - DNA, 25 bp, Homo sapien
gaacagccacgtatgcatgtcttgg

SEQ ID NO: 2204228 - DNA, 25 bp, Homo sapien
gatcacctcgctcgacgtgttgcag

SEQ ID NO: 2204229 - DNA, 25 bp, Homo sapien
tacccatggtcaacctcagtctgca

SEQ ID NO: 2204230 - DNA, 25 bp, Homo sapien
gtgttgcagcacatcctcatccgag

SEQ ID NO: 2204231 - DNA, 25 bp, Homo sapien
caggtaccgtgcagatgttaacaag

SEQ ID NO: 2204232 - DNA, 25 bp, Homo sapien
gagcgaggtgcatctcacacaagtg

SEQ ID NO: 2204233 - DNA, 25 bp, Homo sapien
tgttaacaaggtttgagcgaggtgc

SEQ ID NO: 2204234 - DNA, 25 bp, Homo sapien
gaaagcccaatcatcacattgttga

SEQ ID NO: 2204235 - DNA, 25 bp, Homo sapien
tcaggtcacggtctagccacaccag

SEQ ID NO: 2204236 - DNA, 25 bp, Homo sapien
caggtcacggtctagccacaccagc

SEQ ID NO: 2204237 - DNA, 25 bp, Homo sapien
tttatcaatcgtcttccggcgcagc

SEQ ID NO: 2204238 - DNA, 25 bp, Homo sapien
tgcatatgtcctgcgaaacggcggc

SEQ ID NO: 2204239 - DNA, 25 bp, Homo sapien
tgtatctgagtgtgaggcctaccgg

SEQ ID NO: 2204240 - DNA, 25 bp, Homo sapien
gggtgcaccagctgttcaaaagtcg

SEQ ID NO: 2204241 - DNA, 25 bp, Homo sapien
cccaatgtacctataagaaatgtgc

SEQ ID NO: 2204242 - DNA, 25 bp, Homo sapien
gctgaagaccttttagacagttcca

SEQ ID NO: 2204243 - DNA, 25 bp, Homo sapien
tatgggacgtttgtagaacctgagt

SEQ ID NO: 2204244 - DNA, 25 bp, Homo sapien
gcaagtttggccagactgacttcaa

SEQ ID NO: 2204245 - DNA, 25 bp, Homo sapien
gtgctttgtgatcatccagcccagg

SEQ ID NO: 2204246 - DNA, 25 bp, Homo sapien
cgaccacccttaaagtgcttgttgg

SEQ ID NO: 2204247 - DNA, 25 bp, Homo sapien
gctgtctatctgctctaaggaagag

SEQ ID NO: 2204248 - DNA, 25 bp, Homo sapien
taaagttccagatttgaggtcaacc

SEQ ID NO: 2204249 - DNA, 25 bp, Homo sapien
tttgtatttacttagaggaagtgcc

SEQ ID NO: 2204250 - DNA, 25 bp, Homo sapien
ttactcagtgggaatatgcatacag

SEQ ID NO: 2204251 - DNA, 25 bp, Homo sapien
gaggcttcttataacctttactcag

SEQ ID NO: 2204252 - DNA, 25 bp, Homo sapien
gtatttacttagaggaagtgccctg

SEQ ID NO: 2204253 - DNA, 25 bp, Homo sapien
atcttgttcagacagcgtcgctccc

SEQ ID NO: 2204254 - DNA, 25 bp, Homo sapien
aaatgtaagtacatctgggctgggt

SEQ ID NO: 2204255 - DNA, 25 bp, Homo sapien
tctgttacaggtgatcacattcaga

SEQ ID NO: 2204256 - DNA, 25 bp, Homo sapien
gtcgctcccatgtacaacaccatag

SEQ ID NO: 2204257 - DNA, 25 bp, Homo sapien
gaagcaggcctttccaaggatcgca

SEQ ID NO: 2204258 - DNA, 25 bp, Homo sapien
gtttttctgcacagtgtgcaacacc

SEQ ID NO: 2204259 - DNA, 25 bp, Homo sapien
ggagtctatgttcttagacaccacc

SEQ ID NO: 2204260 - DNA, 25 bp, Homo sapien
gatgcccagtttctaccaaggtctg

SEQ ID NO: 2204261 - DNA, 25 bp, Homo sapien
tatccttgctctctagtctgtctga

SEQ ID NO: 2204262 - DNA, 25 bp, Homo sapien
tggtttgaccttgaatctgatcctc

SEQ ID NO: 2204263 - DNA, 25 bp, Homo sapien
tactagtctagttagccaacacagc

SEQ ID NO: 2204264 - DNA, 25 bp, Homo sapien
ggtccctaatcagagctcttccact

SEQ ID NO: 2204265 - DNA, 25 bp, Homo sapien
ggtctgtgttaactattacgcctgg

SEQ ID NO: 2204266 - DNA, 25 bp, Homo sapien
tgagtttaccatcaataccttcccg

SEQ ID NO: 2204267 - DNA, 25 bp, Homo sapien
aatgttcctctagtctgagttcaag

SEQ ID NO: 2204268 - DNA, 25 bp, Homo sapien
tctggtagtgttgccttccacacag

SEQ ID NO: 2204269 - DNA, 25 bp, Homo sapien
gagcccacagacctgaccatttatc

SEQ ID NO: 2204270 - DNA, 25 bp, Homo sapien
tttcttcctcgtcttcacacttctt

SEQ ID NO: 2204271 - DNA, 25 bp, Homo sapien
tcatccacatagtgatcctccttac

SEQ ID NO: 2204272 - DNA, 25 bp, Homo sapien
tggcattggaatcttgaccctcagc

SEQ ID NO: 2204273 - DNA, 25 bp, Homo sapien
ttaaccataaatccaccattttcac

SEQ ID NO: 2204274 - DNA, 25 bp, Homo sapien
gctcttggttggtgaggtttaacca

SEQ ID NO: 2204275 - DNA, 25 bp, Homo sapien
gtgtgcttcagaccataatcatcag

SEQ ID NO: 2204276 - DNA, 25 bp, Homo sapien
tgcttcagaccataatcatcagccc

SEQ ID NO: 2204277 - DNA, 25 bp, Homo sapien
gtgcatacagagtggtccttttgtt

SEQ ID NO: 2204278 - DNA, 25 bp, Homo sapien
tctgcataccagtaaagactgttca

SEQ ID NO: 2204279 - DNA, 25 bp, Homo sapien
ccaccatgaactccatcatcagaag

SEQ ID NO: 2204280 - DNA, 25 bp, Homo sapien
gagtggtccttttgttcaggcacca

SEQ ID NO: 2204281 - DNA, 25 bp, Homo sapien
gtggatgtcctctgtttgactttgt

SEQ ID NO: 2204282 - DNA, 25 bp, Homo sapien
ctgtgtggcccgggcttgtcagctt

SEQ ID NO: 2204283 - DNA, 25 bp, Homo sapien
gaaagtggatgtcctctgtttgact

SEQ ID NO: 2204284 - DNA, 25 bp, Homo sapien
tgtggcccgggcttgtcagcttgtc

SEQ ID NO: 2204285 - DNA, 25 bp, Homo sapien
gccaggcctggggttctctttgttc

SEQ ID NO: 2204286 - DNA, 25 bp, Homo sapien
caggcctggggttctctttgttcca

SEQ ID NO: 2204287 - DNA, 25 bp, Homo sapien
agggccaggcctggggttctctttg

SEQ ID NO: 2204288 - DNA, 25 bp, Homo sapien
gatagctgcagatcatgataaatgc

SEQ ID NO: 2204289 - DNA, 25 bp, Homo sapien
tattccctcagtcatttagcctgta

SEQ ID NO: 2204290 - DNA, 25 bp, Homo sapien
catttattgtcaggtactattttag

SEQ ID NO: 2204291 - DNA, 25 bp, Homo sapien
ccttagggggtgaaatccacattct

SEQ ID NO: 2204292 - DNA, 25 bp, Homo sapien
gcgggtgctgcgagtcgggagccgc

SEQ ID NO: 2204293 - DNA, 25 bp, Homo sapien
tcgggagccgcggccaataggctgc

SEQ ID NO: 2204294 - DNA, 25 bp, Homo sapien
gctctccggttggtccgcgcgggtg

SEQ ID NO: 2204295 - DNA, 25 bp, Homo sapien
ataggctgcgcgttcccggccacgc

SEQ ID NO: 2204296 - DNA, 25 bp, Homo sapien
cccgcttagaggtctgctgctccag

SEQ ID NO: 2204297 - DNA, 25 bp, Homo sapien
tcctttaggacaattcatgttgcaa

SEQ ID NO: 2204298 - DNA, 25 bp, Homo sapien
gacatggagtttgaagctctggaaa

SEQ ID NO: 2204299 - DNA, 25 bp, Homo sapien
ctttcttttgcaaagtggagagagg

SEQ ID NO: 2204300 - DNA, 25 bp, Homo sapien
tggggtgaccatgctctgggagggg

SEQ ID NO: 2204301 - DNA, 25 bp, Homo sapien
gaggggacaggtcacaaggaagtta

SEQ ID NO: 2204302 - DNA, 25 bp, Homo sapien
caactgcccacatctgtttccaaag

SEQ ID NO: 2204303 - DNA, 25 bp, Homo sapien
aagttagtgtcctgccctcttgtcc

SEQ ID NO: 2204304 - DNA, 25 bp, Homo sapien
cacaaggacttagaaagggagctgc

SEQ ID NO: 2204305 - DNA, 25 bp, Homo sapien
tccgcgggccttcgtgtacatcaat

SEQ ID NO: 2204306 - DNA, 25 bp, Homo sapien
gctatgactgcccaaatcgtgtggt

SEQ ID NO: 2204307 - DNA, 25 bp, Homo sapien
caagtttgcctacaatgaccagggc

SEQ ID NO: 2204308 - DNA, 25 bp, Homo sapien
ggaactgccagcttacagcctgtct

SEQ ID NO: 2204309 - DNA, 25 bp, Homo sapien
tggagggcctgcagtatgactcact

SEQ ID NO: 2204310 - DNA, 25 bp, Homo sapien
cttgatcagacaagtggccagcttc

SEQ ID NO: 2204311 - DNA, 25 bp, Homo sapien
ccaagaagtgtttgtgccctggagg

SEQ ID NO: 2204312 - DNA, 25 bp, Homo sapien
gtcgttgggattcatggcctattaa

SEQ ID NO: 2204313 - DNA, 25 bp, Homo sapien
aggccagagtgcctagcccgacatg

SEQ ID NO: 2204314 - DNA, 25 bp, Homo sapien
atgaagctggttccccaaccacaga

SEQ ID NO: 2204315 - DNA, 25 bp, Homo sapien
catggcctattaaggaggtccaagg

SEQ ID NO: 2204316 - DNA, 25 bp, Homo sapien
tagggtactaaagtcaggtgtcaac

SEQ ID NO: 2204317 - DNA, 25 bp, Homo sapien
cctctgttgtggcatctcctttttg

SEQ ID NO: 2204318 - DNA, 25 bp, Homo sapien
taaggaagagcacgtttctttgcct

SEQ ID NO: 2204319 - DNA, 25 bp, Homo sapien
ctgatgtctacctctgttgtggcat

SEQ ID NO: 2204320 - DNA, 25 bp, Homo sapien
ttgcatgtcatccttgcacaggcgc

SEQ ID NO: 2204321 - DNA, 25 bp, Homo sapien
gtatcattctaattttagtatatgt

SEQ ID NO: 2204322 - DNA, 25 bp, Homo sapien
gcacaggcgccatactaatcttctg

SEQ ID NO: 2204323 - DNA, 25 bp, Homo sapien
aaattttctggaacacttcacgaat

SEQ ID NO: 2204324 - DNA, 25 bp, Homo sapien
tgatacaacgatagccacggacctc

SEQ ID NO: 2204325 - DNA, 25 bp, Homo sapien
agaaaaaggtcataagccttatatc

SEQ ID NO: 2204326 - DNA, 25 bp, Homo sapien
tacacaatgatacaacgatagccac

SEQ ID NO: 2204327 - DNA, 25 bp, Homo sapien
ccacggacctcacacacaacaagaa

SEQ ID NO: 2204328 - DNA, 25 bp, Homo sapien
gagactactaacaggtcaaagacat

SEQ ID NO: 2204329 - DNA, 25 bp, Homo sapien
gagaagacaagcctaaagagactac

SEQ ID NO: 2204330 - DNA, 25 bp, Homo sapien
tggaagcccatacagcccagagaag

SEQ ID NO: 2204331 - DNA, 25 bp, Homo sapien
ttgaacatggaagcccatacagccc

SEQ ID NO: 2204332 - DNA, 25 bp, Homo sapien
acatcacatcatgagacacaaaacc

SEQ ID NO: 2204333 - DNA, 25 bp, Homo sapien
gctctgggtccaaagagctcagata

SEQ ID NO: 2204334 - DNA, 25 bp, Homo sapien
gacatcacatcatgagacacaaaac

SEQ ID NO: 2204335 - DNA, 25 bp, Homo sapien
catcccagagcgtgaaaccatgcat

SEQ ID NO: 2204336 - DNA, 25 bp, Homo sapien
aaaattctccttgtagttgccacaa

SEQ ID NO: 2204337 - DNA, 25 bp, Homo sapien
cagcatcccagagcgtgaaaccatg

SEQ ID NO: 2204338 - DNA, 25 bp, Homo sapien
ccaaaattctccttgtagttgccac

SEQ ID NO: 2204339 - DNA, 25 bp, Homo sapien
tgccagcccttgagtacaagccaat

SEQ ID NO: 2204340 - DNA, 25 bp, Homo sapien
tgccagcttcttttacaggtgcaca

SEQ ID NO: 2204341 - DNA, 25 bp, Homo sapien
gacgggattcgaacctacgatctcc

SEQ ID NO: 2204342 - DNA, 25 bp, Homo sapien
cacaagttgaacttcccagacggga

SEQ ID NO: 2204343 - DNA, 25 bp, Homo sapien
acagtgtagattggagttcaagagc

SEQ ID NO: 2204344 - DNA, 25 bp, Homo sapien
tcaagagcaatggatgaggctgtag

SEQ ID NO: 2204345 - DNA, 25 bp, Homo sapien
tacaagggtggtccttatgaggaac

SEQ ID NO: 2204346 - DNA, 25 bp, Homo sapien
tctgcaaaggcccataaatgaaagg

SEQ ID NO: 2204347 - DNA, 25 bp, Homo sapien
gagatcaatagaggagattccaaac

SEQ ID NO: 2204348 - DNA, 25 bp, Homo sapien
taaggtaagcacttccccaaatgcc

SEQ ID NO: 2204349 - DNA, 25 bp, Homo sapien
gacaccaccatgttttattccaaga

SEQ ID NO: 2204350 - DNA, 25 bp, Homo sapien
taactttgcagtctctacatggaaa

SEQ ID NO: 2204351 - DNA, 25 bp, Homo sapien
ttataaccatattatctaaggcaga

SEQ ID NO: 2204352 - DNA, 25 bp, Homo sapien
ggcaacatttatttgatttccttat

SEQ ID NO: 2204353 - DNA, 25 bp, Homo sapien
aaccatattatctaaggcagaagtg

SEQ ID NO: 2204354 - DNA, 25 bp, Homo sapien
tatttgatttccttataaccatatt

SEQ ID NO: 2204355 - DNA, 25 bp, Homo sapien
gtacaaatctgagagaccgtacttc

SEQ ID NO: 2204356 - DNA, 25 bp, Homo sapien
ctggtacaaatctgagagaccgtac

SEQ ID NO: 2204357 - DNA, 25 bp, Homo sapien
ggtacaaatctgagagaccgtactt

SEQ ID NO: 2204358 - DNA, 25 bp, Homo sapien
cactggtacaaatctgagagaccgt

SEQ ID NO: 2204359 - DNA, 25 bp, Homo sapien
tatcaccatggcttgaacaaactca

SEQ ID NO: 2204360 - DNA, 25 bp, Homo sapien
gtatcaccatggcttgaacaaactc

SEQ ID NO: 2204361 - DNA, 25 bp, Homo sapien
atcaccatggcttgaacaaactcaa

SEQ ID NO: 2204362 - DNA, 25 bp, Homo sapien
gtagaataagagtgggtcacagtga

SEQ ID NO: 2204363 - DNA, 25 bp, Homo sapien
agaataagagtgggtcacagtgagc

SEQ ID NO: 2204364 - DNA, 25 bp, Homo sapien
tagaataagagtgggtcacagtgag

SEQ ID NO: 2204365 - DNA, 25 bp, Homo sapien
gacgccttaattcatcaaccaatcc

SEQ ID NO: 2204366 - DNA, 25 bp, Homo sapien
gccttaattcatcaaccaatccaga

SEQ ID NO: 2204367 - DNA, 25 bp, Homo sapien
tcgacgccttaattcatcaaccaat

SEQ ID NO: 2204368 - DNA, 25 bp, Homo sapien
taattcatcaaccaatccagatcct

SEQ ID NO: 2204369 - DNA, 25 bp, Homo sapien
ccagggttgtttggggcccagcatg

SEQ ID NO: 2204370 - DNA, 25 bp, Homo sapien
tttggggcccagcatgctcatctac

SEQ ID NO: 2204371 - DNA, 25 bp, Homo sapien
ggttgtttggggcccagcatgctca

SEQ ID NO: 2204372 - DNA, 25 bp, Homo sapien
ttccagggttgtttggggcccagca

SEQ ID NO: 2204373 - DNA, 25 bp, Homo sapien
tttacagcaagattctctgcagtca

SEQ ID NO: 2204374 - DNA, 25 bp, Homo sapien
tcattaaagtagccagcatcattag

SEQ ID NO: 2204375 - DNA, 25 bp, Homo sapien
ttacagcaagattctctgcagtcat

SEQ ID NO: 2204376 - DNA, 25 bp, Homo sapien
tgttttacagcaagattctctgcag

SEQ ID NO: 2204377 - DNA, 25 bp, Homo sapien
gctgatctgttaatcctatccataa

SEQ ID NO: 2204378 - DNA, 25 bp, Homo sapien
gatctgttaatcctatccataaaga

SEQ ID NO: 2204379 - DNA, 25 bp, Homo sapien
tctgttaatcctatccataaagaat

SEQ ID NO: 2204380 - DNA, 25 bp, Homo sapien
ctgatctgttaatcctatccataaa

SEQ ID NO: 2204381 - DNA, 25 bp, Homo sapien
tccgcataaaacaacttcagcttct

SEQ ID NO: 2204382 - DNA, 25 bp, Homo sapien
tcctccgcataaaacaacttcagct

SEQ ID NO: 2204383 - DNA, 25 bp, Homo sapien
tggttcctccgcataaaacaacttc

SEQ ID NO: 2204384 - DNA, 25 bp, Homo sapien
gcttttggttcctccgcataaaaca

SEQ ID NO: 2204385 - DNA, 25 bp, Homo sapien
ctttgggattcccacacgcaaacca

SEQ ID NO: 2204386 - DNA, 25 bp, Homo sapien
gaaccacagagcctattaatcgtga

SEQ ID NO: 2204387 - DNA, 25 bp, Homo sapien
tttgggattcccacacgcaaaccaa

SEQ ID NO: 2204388 - DNA, 25 bp, Homo sapien
cacagagcctattaatcgtgagagc

SEQ ID NO: 2204389 - DNA, 25 bp, Homo sapien
ctggccggggtaagttgctctggac

SEQ ID NO: 2204390 - DNA, 25 bp, Homo sapien
ggtagggatcctcgggtgagagggc

SEQ ID NO: 2204391 - DNA, 25 bp, Homo sapien
atggcgggggcacttctgggtccca

SEQ ID NO: 2204392 - DNA, 25 bp, Homo sapien
ctggcggggagcagtcctggtggcg

SEQ ID NO: 2204393 - DNA, 25 bp, Homo sapien
gggtctctaggcgtttcacacgcag

SEQ ID NO: 2204394 - DNA, 25 bp, Homo sapien
agagcccacatcgtggtcggcggca

SEQ ID NO: 2204395 - DNA, 25 bp, Homo sapien
taggcgtttcacacgcagcagcgcc

SEQ ID NO: 2204396 - DNA, 25 bp, Homo sapien
ctcagagcccacatcgtggtcggcg

SEQ ID NO: 2204397 - DNA, 25 bp, Homo sapien
ggagtccgcgcttcccgcaagaatc

SEQ ID NO: 2204398 - DNA, 25 bp, Homo sapien
tcggagtccgcgcttcccgcaagaa

SEQ ID NO: 2204399 - DNA, 25 bp, Homo sapien
ttcccgcaagaatccgtcccagcaa

SEQ ID NO: 2204400 - DNA, 25 bp, Homo sapien
cgcaagaatccgtcccagcaagtac

SEQ ID NO: 2204401 - DNA, 25 bp, Homo sapien
tccacggggtaagcaggcttcccag

SEQ ID NO: 2204402 - DNA, 25 bp, Homo sapien
tcgccctcgtcctctccggacgcag

SEQ ID NO: 2204403 - DNA, 25 bp, Homo sapien
ggatccaggacctcactccctctta

SEQ ID NO: 2204404 - DNA, 25 bp, Homo sapien
caggacttaggggttcgcactccac

SEQ ID NO: 2204405 - DNA, 25 bp, Homo sapien
ctcggggtccacgtcgggtgtctcg

SEQ ID NO: 2204406 - DNA, 25 bp, Homo sapien
acagctcggggtccacgtcgggtgt

SEQ ID NO: 2204407 - DNA, 25 bp, Homo sapien
ggtccacgtcgggtgtctcgtcgcc

SEQ ID NO: 2204408 - DNA, 25 bp, Homo sapien
acgtcgggtgtctcgtcgcctgcct

SEQ ID NO: 2204409 - DNA, 25 bp, Homo sapien
cccagagccggatcagagttgcggg

SEQ ID NO: 2204410 - DNA, 25 bp, Homo sapien
cagagcgcgagcgagctgcgctgca

SEQ ID NO: 2204411 - DNA, 25 bp, Homo sapien
gcgtcggggtcgtcgtccaggccca

SEQ ID NO: 2204412 - DNA, 25 bp, Homo sapien
tcaaggcgggcgcggagcagagcgc

SEQ ID NO: 2204413 - DNA, 25 bp, Homo sapien
agctgcgccaggacgcgcgcctgct

SEQ ID NO: 2204414 - DNA, 25 bp, Homo sapien
cgcgcccgctcctgacgttcggcct

SEQ ID NO: 2204415 - DNA, 25 bp, Homo sapien
cctccagcagatgcgccagcgcccg

SEQ ID NO: 2204416 - DNA, 25 bp, Homo sapien
acgcgcgcctgctgatcctcagcct

SEQ ID NO: 2204417 - DNA, 25 bp, Homo sapien
gggcggagacgctgcgcttaggccg

SEQ ID NO: 2204418 - DNA, 25 bp, Homo sapien
aagcggcgaggagcgccagtctcag

SEQ ID NO: 2204419 - DNA, 25 bp, Homo sapien
ggagacgctgcgcttaggccgcggg

SEQ ID NO: 2204420 - DNA, 25 bp, Homo sapien
gccggaagcggcgaggagcgccagt

SEQ ID NO: 2204421 - DNA, 25 bp, Homo sapien
tatggaatgtgcacacggagatgcg

SEQ ID NO: 2204422 - DNA, 25 bp, Homo sapien
cacaatgcagcagagagacatcatg

SEQ ID NO: 2204423 - DNA, 25 bp, Homo sapien
tgctcctgcagttacaatcgccaag

SEQ ID NO: 2204424 - DNA, 25 bp, Homo sapien
gaaacagtctcaggaacacgcaaac

SEQ ID NO: 2204425 - DNA, 25 bp, Homo sapien
cccagagcagcggcgaccccgccat

SEQ ID NO: 2204426 - DNA, 25 bp, Homo sapien
agcagcaccaaaaggccgacgcccc

SEQ ID NO: 2204427 - DNA, 25 bp, Homo sapien
gggggcggccgaaacaggccgagca

SEQ ID NO: 2204428 - DNA, 25 bp, Homo sapien
ggcggccgaaacaggccgagcagca

SEQ ID NO: 2204429 - DNA, 25 bp, Homo sapien
agccgggctccggacgggcggactg

SEQ ID NO: 2204430 - DNA, 25 bp, Homo sapien
cagcgagccgggctccggacgggcg

SEQ ID NO: 2204431 - DNA, 25 bp, Homo sapien
ccccagcgagccgggctccggacgg

SEQ ID NO: 2204432 - DNA, 25 bp, Homo sapien
gcgagccgggctccggacgggcgga

SEQ ID NO: 2204433 - DNA, 25 bp, Homo sapien
gtgccggggcgagctggcgaggctg

SEQ ID NO: 2204434 - DNA, 25 bp, Homo sapien
caagtgcgcagtgccggggcgagct

SEQ ID NO: 2204435 - DNA, 25 bp, Homo sapien
ctggcaagtgcgcagtgccggggcg

SEQ ID NO: 2204436 - DNA, 25 bp, Homo sapien
cagtgccggggcgagctggcgaggc

SEQ ID NO: 2204437 - DNA, 25 bp, Homo sapien
tccatgtggtgtaggctgcagcgct

SEQ ID NO: 2204438 - DNA, 25 bp, Homo sapien
cagaacttgcgacctcgagagaggc

SEQ ID NO: 2204439 - DNA, 25 bp, Homo sapien
gctgggcctataacatctggacctt

SEQ ID NO: 2204440 - DNA, 25 bp, Homo sapien
ctgggtcgtggatcctggccttgca

SEQ ID NO: 2204441 - DNA, 25 bp, Homo sapien
gctctccagagcatcaaaaatgcag

SEQ ID NO: 2204442 - DNA, 25 bp, Homo sapien
gaagccgacgctctccagagcatca

SEQ ID NO: 2204443 - DNA, 25 bp, Homo sapien
ggtgagtatgaagccgacgctctcc

SEQ ID NO: 2204444 - DNA, 25 bp, Homo sapien
ccagcagccataatggtgagtatga

SEQ ID NO: 2204445 - DNA, 25 bp, Homo sapien
tcctcacgtggcaaaaaaggtgaaa

SEQ ID NO: 2204446 - DNA, 25 bp, Homo sapien
gggaggcattccctccttcaagccc

SEQ ID NO: 2204447 - DNA, 25 bp, Homo sapien
gccctattctaacagcattaatctg

SEQ ID NO: 2204448 - DNA, 25 bp, Homo sapien
agagtcctcttgacctaaacacatc

SEQ ID NO: 2204449 - DNA, 25 bp, Homo sapien
catcagggtgccacacaaaggagct

SEQ ID NO: 2204450 - DNA, 25 bp, Homo sapien
ggtgagaacttcgtacatgtgagtg

SEQ ID NO: 2204451 - DNA, 25 bp, Homo sapien
gggagccagccctcccttcgaggta

SEQ ID NO: 2204452 - DNA, 25 bp, Homo sapien
ccgagaagtagctcccatggtggca

SEQ ID NO: 2204453 - DNA, 25 bp, Homo sapien
cagtggtactgctgatagctggggt

SEQ ID NO: 2204454 - DNA, 25 bp, Homo sapien
tactgctgatagctggggtagcctg

SEQ ID NO: 2204455 - DNA, 25 bp, Homo sapien
tggtactgctgatagctggggtagc

SEQ ID NO: 2204456 - DNA, 25 bp, Homo sapien
tcagtggtactgctgatagctgggg

SEQ ID NO: 2204457 - DNA, 25 bp, Homo sapien
atgccaacgccctcaatgagggcca

SEQ ID NO: 2204458 - DNA, 25 bp, Homo sapien
gatgccaacgccctcaatgagggcc

SEQ ID NO: 2204459 - DNA, 25 bp, Homo sapien
ggatgccaacgccctcaatgagggc

SEQ ID NO: 2204460 - DNA, 25 bp, Homo sapien
tgccaacgccctcaatgagggccaa

SEQ ID NO: 2204461 - DNA, 25 bp, Homo sapien
gaaacagaggtgagagcaggcagaa

SEQ ID NO: 2204462 - DNA, 25 bp, Homo sapien
gcagagaaacagaggtgagagcagg

SEQ ID NO: 2204463 - DNA, 25 bp, Homo sapien
aacagaggtgagagcaggcagaaca

SEQ ID NO: 2204464 - DNA, 25 bp, Homo sapien
gagaaacagaggtgagagcaggcag

SEQ ID NO: 2204465 - DNA, 25 bp, Homo sapien
agccccggtcaatgctccactggtg

SEQ ID NO: 2204466 - DNA, 25 bp, Homo sapien
tccactggtgatagagttccaggga

SEQ ID NO: 2204467 - DNA, 25 bp, Homo sapien
ggtcaatgctccactggtgatagag

SEQ ID NO: 2204468 - DNA, 25 bp, Homo sapien
tccttgccccgaagccgcaccaggc

SEQ ID NO: 2204469 - DNA, 25 bp, Homo sapien
agcattggcactacctctcaaccgg

SEQ ID NO: 2204470 - DNA, 25 bp, Homo sapien
tccaatctggggggctcggatcctc

SEQ ID NO: 2204471 - DNA, 25 bp, Homo sapien
actacctctcaaccggtgccgaatt

SEQ ID NO: 2204472 - DNA, 25 bp, Homo sapien
gctcggatcctcacagcattggcac

SEQ ID NO: 2204473 - DNA, 25 bp, Homo sapien
cagtgaatgattaacaagtacctac

SEQ ID NO: 2204474 - DNA, 25 bp, Homo sapien
tggccaagaactagtggcctggaga

SEQ ID NO: 2204475 - DNA, 25 bp, Homo sapien
tggagagcgccccaacatgggtgtt

SEQ ID NO: 2204476 - DNA, 25 bp, Homo sapien
caacatgggtgttctcagagctagg

SEQ ID NO: 2204477 - DNA, 25 bp, Homo sapien
accatgccatatgcagggatacagc

SEQ ID NO: 2204478 - DNA, 25 bp, Homo sapien
gccatgaacaaggtaggtctgctct

SEQ ID NO: 2204479 - DNA, 25 bp, Homo sapien
tctcagagctcacattaacggtggg

SEQ ID NO: 2204480 - DNA, 25 bp, Homo sapien
tgccaagcaccatgccatatgcagg

SEQ ID NO: 2204481 - DNA, 25 bp, Homo sapien
cttgagcaagagtagataaacaagg

SEQ ID NO: 2204482 - DNA, 25 bp, Homo sapien
tagataaacaagggagcttcagaca

SEQ ID NO: 2204483 - DNA, 25 bp, Homo sapien
gataaacaagggagcttcagacagc

SEQ ID NO: 2204484 - DNA, 25 bp, Homo sapien
aaacaagggagcttcagacagcaat

SEQ ID NO: 2204485 - DNA, 25 bp, Homo sapien
cctctaggtaaaatgcgcagtggct

SEQ ID NO: 2204486 - DNA, 25 bp, Homo sapien
catggcatttgcgatcttctgggag

SEQ ID NO: 2204487 - DNA, 25 bp, Homo sapien
cagagaccttggctaatagatggca

SEQ ID NO: 2204488 - DNA, 25 bp, Homo sapien
gatgacaaacttgggcaaagatcca

SEQ ID NO: 2204489 - DNA, 25 bp, Homo sapien
tgaataagtgcacgtgactggcagc

SEQ ID NO: 2204490 - DNA, 25 bp, Homo sapien
ttacaaaaattcgtcaggtctggtg

SEQ ID NO: 2204491 - DNA, 25 bp, Homo sapien
gaggccatgtttgcaatccctacaa

SEQ ID NO: 2204492 - DNA, 25 bp, Homo sapien
ccttgtgggcaagatagctaacccc

SEQ ID NO: 2204493 - DNA, 25 bp, Homo sapien
tgatggcctggaagactccgccacc

SEQ ID NO: 2204494 - DNA, 25 bp, Homo sapien
tgaattggcacacgcagagttgacg

SEQ ID NO: 2204495 - DNA, 25 bp, Homo sapien
tggttgtggcccctcataacggagc

SEQ ID NO: 2204496 - DNA, 25 bp, Homo sapien
cttggcgtcgcagcaatattccgga

SEQ ID NO: 2204497 - DNA, 25 bp, Homo sapien
ggaaaaaccactggcggcaactctg

SEQ ID NO: 2204498 - DNA, 25 bp, Homo sapien
cagggctcccgagcgtactcctcca

SEQ ID NO: 2204499 - DNA, 25 bp, Homo sapien
agggctcccgagcgtactcctccat

SEQ ID NO: 2204500 - DNA, 25 bp, Homo sapien
cgtagacgcacaccggcgtcggagc

SEQ ID NO: 2204501 - DNA, 25 bp, Homo sapien
gtctggccgcgcagtcaggccacgc

SEQ ID NO: 2204502 - DNA, 25 bp, Homo sapien
gctggcgtctggccgcgcagtcagg

SEQ ID NO: 2204503 - DNA, 25 bp, Homo sapien
ccccagcgtagacgcacaccggcgt

SEQ ID NO: 2204504 - DNA, 25 bp, Homo sapien
tgcacgagtgtattggtaacgttgg

SEQ ID NO: 2204505 - DNA, 25 bp, Homo sapien
ctgcacgagtgtattggtaacgttg

SEQ ID NO: 2204506 - DNA, 25 bp, Homo sapien
acgttggggtgggtgcactcttttg

SEQ ID NO: 2204507 - DNA, 25 bp, Homo sapien
ggtgggtgcactcttttggagctgg

SEQ ID NO: 2204508 - DNA, 25 bp, Homo sapien
aagagggcaaagaacggcgccacca

SEQ ID NO: 2204509 - DNA, 25 bp, Homo sapien
aacggcgccaccatcgccgggagga

SEQ ID NO: 2204510 - DNA, 25 bp, Homo sapien
accgcgggtatgacaaggcagaccg

SEQ ID NO: 2204511 - DNA, 25 bp, Homo sapien
tcgggaccgcgggtatgacaaggca

SEQ ID NO: 2204512 - DNA, 25 bp, Homo sapien
aacaggactccccaagcggaatgag

SEQ ID NO: 2204513 - DNA, 25 bp, Homo sapien
tggaccctagctcatactcagacgc

SEQ ID NO: 2204514 - DNA, 25 bp, Homo sapien
tgaagagttagaccccatggaccct

SEQ ID NO: 2204515 - DNA, 25 bp, Homo sapien
ccacagcagtaagccgaaaggatga

SEQ ID NO: 2204516 - DNA, 25 bp, Homo sapien
ttcctttgaggctgcccaacccaag

SEQ ID NO: 2204517 - DNA, 25 bp, Homo sapien
ccaccatacctgagtgcttcctttg

SEQ ID NO: 2204518 - DNA, 25 bp, Homo sapien
catacctgagtgcttcctttgaggc

SEQ ID NO: 2204519 - DNA, 25 bp, Homo sapien
ggctgcccaacccaagtcggcaaga

SEQ ID NO: 2204520 - DNA, 25 bp, Homo sapien
aagagagaacgaggccaggccaatg

SEQ ID NO: 2204521 - DNA, 25 bp, Homo sapien
gacagggagtccagtgtctacctca

SEQ ID NO: 2204522 - DNA, 25 bp, Homo sapien
gagagcttagtcatgttggccctgg

SEQ ID NO: 2204523 - DNA, 25 bp, Homo sapien
aatactgatcagagtttggtcccag

SEQ ID NO: 2204524 - DNA, 25 bp, Homo sapien
taggaacccttcaccttggtgagca

SEQ ID NO: 2204525 - DNA, 25 bp, Homo sapien
ggaacccttcaccttggtgagcaac

SEQ ID NO: 2204526 - DNA, 25 bp, Homo sapien
aggaacccttcaccttggtgagcaa

SEQ ID NO: 2204527 - DNA, 25 bp, Homo sapien
ctaggaacccttcaccttggtgagc

SEQ ID NO: 2204528 - DNA, 25 bp, Homo sapien
ttatttggcattggatatcctgaca

SEQ ID NO: 2204529 - DNA, 25 bp, Homo sapien
cattggatatcctgacatttgttca

SEQ ID NO: 2204530 - DNA, 25 bp, Homo sapien
ttggcattggatatcctgacatttg

SEQ ID NO: 2204531 - DNA, 25 bp, Homo sapien
tatttggcattggatatcctgacat

SEQ ID NO: 2204532 - DNA, 25 bp, Homo sapien
gaactagtaacatgatccagagcgg

SEQ ID NO: 2204533 - DNA, 25 bp, Homo sapien
ggttccacagttcatcaatcccaag

SEQ ID NO: 2204534 - DNA, 25 bp, Homo sapien
taccaggaagggttcacgtgacacc

SEQ ID NO: 2204535 - DNA, 25 bp, Homo sapien
taggcatcggtcattcctgaagagc

SEQ ID NO: 2204536 - DNA, 25 bp, Homo sapien
ttgggtcctgcagatgcccaacacc

SEQ ID NO: 2204537 - DNA, 25 bp, Homo sapien
cctcccttgtgtccccccattgctg

SEQ ID NO: 2204538 - DNA, 25 bp, Homo sapien
ccggagggtggcgacttgggtcctg

SEQ ID NO: 2204539 - DNA, 25 bp, Homo sapien
agggtggcgacttgggtcctgcaga

SEQ ID NO: 2204540 - DNA, 25 bp, Homo sapien
gaaagggctccgtgatgaggtctcc

SEQ ID NO: 2204541 - DNA, 25 bp, Homo sapien
gctccgtgatgaggtctccacggtg

SEQ ID NO: 2204542 - DNA, 25 bp, Homo sapien
ggcagaaagggctccgtgatgaggt

SEQ ID NO: 2204543 - DNA, 25 bp, Homo sapien
ggctccgtgatgaggtctccacggt

SEQ ID NO: 2204544 - DNA, 25 bp, Homo sapien
gctggtgaacgcagggcccggaggc

SEQ ID NO: 2204545 - DNA, 25 bp, Homo sapien
tgctggtgaacgcagggcccggagg

SEQ ID NO: 2204546 - DNA, 25 bp, Homo sapien
gctgctggtgaacgcagggcccgga

SEQ ID NO: 2204547 - DNA, 25 bp, Homo sapien
ggctgctggtgaacgcagggcccgg

SEQ ID NO: 2204548 - DNA, 25 bp, Homo sapien
caaagaggcgaatggaggcaacagt

SEQ ID NO: 2204549 - DNA, 25 bp, Homo sapien
gacagcaggtgtgtacccaaaaaag

SEQ ID NO: 2204550 - DNA, 25 bp, Homo sapien
cagtggacagcacaatggacaggga

SEQ ID NO: 2204551 - DNA, 25 bp, Homo sapien
tagacagcaccaatgacgagtccag

SEQ ID NO: 2204552 - DNA, 25 bp, Homo sapien
cctgccccagggttctgatccagtg

SEQ ID NO: 2204553 - DNA, 25 bp, Homo sapien
ttctgatccagtggccgtgggcctc

SEQ ID NO: 2204554 - DNA, 25 bp, Homo sapien
agacaggaggccacgacggctgcca

SEQ ID NO: 2204555 - DNA, 25 bp, Homo sapien
ctgcgaagccggaggagagacagga

SEQ ID NO: 2204556 - DNA, 25 bp, Homo sapien
catgagcacggagaacagcgctgtg

SEQ ID NO: 2204557 - DNA, 25 bp, Homo sapien
cactgcagccgggaaaggctgcgat

SEQ ID NO: 2204558 - DNA, 25 bp, Homo sapien
tggacaatggcgacgccagtgaaga

SEQ ID NO: 2204559 - DNA, 25 bp, Homo sapien
gaaaggctgcgattcagcatgagca

SEQ ID NO: 2204560 - DNA, 25 bp, Homo sapien
atagcccctgtcctctgcaacaccc

SEQ ID NO: 2204561 - DNA, 25 bp, Homo sapien
cacagacgagaaaagggaggttgaa

SEQ ID NO: 2204562 - DNA, 25 bp, Homo sapien
tatttccacccccaattttcacaga

SEQ ID NO: 2204563 - DNA, 25 bp, Homo sapien
caccacgctattcccatactccagt

SEQ ID NO: 2204564 - DNA, 25 bp, Homo sapien
gagatggcaacatactggaggttat

SEQ ID NO: 2204565 - DNA, 25 bp, Homo sapien
atgagagagggcactgcgagcttga

SEQ ID NO: 2204566 - DNA, 25 bp, Homo sapien
aaagtggcagctggtaggttagaga

SEQ ID NO: 2204567 - DNA, 25 bp, Homo sapien
gagcttgagcgtgtccacatactgc

SEQ ID NO: 2204568 - DNA, 25 bp, Homo sapien
ctacgcatagctggagtggcgctcc

SEQ ID NO: 2204569 - DNA, 25 bp, Homo sapien
gctacccggctgttagggctagaaa

SEQ ID NO: 2204570 - DNA, 25 bp, Homo sapien
tggcgctccaggcaggttgagattt

SEQ ID NO: 2204571 - DNA, 25 bp, Homo sapien
gctagaaaagtgtaagatgccgcta

SEQ ID NO: 2204572 - DNA, 25 bp, Homo sapien
agtgcagccccatccctggttcgta

SEQ ID NO: 2204573 - DNA, 25 bp, Homo sapien
gtgcagccccatccctggttcgtac

SEQ ID NO: 2204574 - DNA, 25 bp, Homo sapien
ggatatgtacttcaggcgcctgtga

SEQ ID NO: 2204575 - DNA, 25 bp, Homo sapien
tcccctggcaacgtgcgggcgtagc

SEQ ID NO: 2204576 - DNA, 25 bp, Homo sapien
tgagacctttgagcacttccgccat

SEQ ID NO: 2204577 - DNA, 25 bp, Homo sapien
ttccgccatgaccacagcagtggtg

SEQ ID NO: 2204578 - DNA, 25 bp, Homo sapien
gccactgtatgaggtatgttcaccc

SEQ ID NO: 2204579 - DNA, 25 bp, Homo sapien
gggtctgactcctaccggcttactg

SEQ ID NO: 2204580 - DNA, 25 bp, Homo sapien
tccaaaagaactgcgaggattccca

SEQ ID NO: 2204581 - DNA, 25 bp, Homo sapien
cacatcaatgcagggaatgaggcca

SEQ ID NO: 2204582 - DNA, 25 bp, Homo sapien
catattcagaatggtttcggtggcc

SEQ ID NO: 2204583 - DNA, 25 bp, Homo sapien
tactctccatatgcggaaggatccc

SEQ ID NO: 2204584 - DNA, 25 bp, Homo sapien
gaacggtctcctccgcacataatga

SEQ ID NO: 2204585 - DNA, 25 bp, Homo sapien
tctctgctataaggaaggacccggc

SEQ ID NO: 2204586 - DNA, 25 bp, Homo sapien
gtgaggaacattcccgactcccagc

SEQ ID NO: 2204587 - DNA, 25 bp, Homo sapien
tttagtgaggaacattcccgactcc

SEQ ID NO: 2204588 - DNA, 25 bp, Homo sapien
aggaacattcccgactcccagcgat

SEQ ID NO: 2204589 - DNA, 25 bp, Homo sapien
tagtgaggaacattcccgactccca

SEQ ID NO: 2204590 - DNA, 25 bp, Homo sapien
tcccatgcgactgctcgggcagact

SEQ ID NO: 2204591 - DNA, 25 bp, Homo sapien
catgcgactgctcgggcagactgtc

SEQ ID NO: 2204592 - DNA, 25 bp, Homo sapien
tccgcctcccatgcgactgctcggg

SEQ ID NO: 2204593 - DNA, 25 bp, Homo sapien
cgactgctcgggcagactgtctcac

SEQ ID NO: 2204594 - DNA, 25 bp, Homo sapien
gtccccggctccaatgcacccgcgg

SEQ ID NO: 2204595 - DNA, 25 bp, Homo sapien
atgcacccgcggaaaccgcccctgg

SEQ ID NO: 2204596 - DNA, 25 bp, Homo sapien
actggcggtccccggctccaatgca

SEQ ID NO: 2204597 - DNA, 25 bp, Homo sapien
cgggcgccgcggtggaaccaccagc

SEQ ID NO: 2204598 - DNA, 25 bp, Homo sapien
ttccgcgttcgtcacttccgctgcc

SEQ ID NO: 2204599 - DNA, 25 bp, Homo sapien
accacttccgcgttcgtcacttccg

SEQ ID NO: 2204600 - DNA, 25 bp, Homo sapien
acttccgcgttcgtcacttccgctg

SEQ ID NO: 2204601 - DNA, 25 bp, Homo sapien
gcgttcgtcacttccgctgccgggc

SEQ ID NO: 2204602 - DNA, 25 bp, Homo sapien
cgagagccgggatcgtcagggtggt

SEQ ID NO: 2204603 - DNA, 25 bp, Homo sapien
ggtggtggcttttctcctccgctcc

SEQ ID NO: 2204604 - DNA, 25 bp, Homo sapien
aatgtatgaatagccccgggatttc

SEQ ID NO: 2204605 - DNA, 25 bp, Homo sapien
caaattccgtcggatcgggaggccg

SEQ ID NO: 2204606 - DNA, 25 bp, Homo sapien
cttatcctgccgttcgtccgcttca

SEQ ID NO: 2204607 - DNA, 25 bp, Homo sapien
cgcttcactgatcgcgctttccaga

SEQ ID NO: 2204608 - DNA, 25 bp, Homo sapien
acagagcttcatcggcccattcctg

SEQ ID NO: 2204609 - DNA, 25 bp, Homo sapien
attcctgtcactagacccgccttat

SEQ ID NO: 2204610 - DNA, 25 bp, Homo sapien
gcgtactggcatcaggtgcgagtca

SEQ ID NO: 2204611 - DNA, 25 bp, Homo sapien
tggactgaaattccgctttcccgtc

SEQ ID NO: 2204612 - DNA, 25 bp, Homo sapien
ccccctggagagcacacgggaatct

SEQ ID NO: 2204613 - DNA, 25 bp, Homo sapien
caggtgcttcatggttggactgaaa

SEQ ID NO: 2204614 - DNA, 25 bp, Homo sapien
ggataacagagtagggtcccctcac

SEQ ID NO: 2204615 - DNA, 25 bp, Homo sapien
ggtaagcagcttgacccaatatggg

SEQ ID NO: 2204616 - DNA, 25 bp, Homo sapien
taattggacaatcccggctcaggag

SEQ ID NO: 2204617 - DNA, 25 bp, Homo sapien
ggtattggaaggaaagcacccttgc

SEQ ID NO: 2204618 - DNA, 25 bp, Homo sapien
tactggactttaatgactggtaatg

SEQ ID NO: 2204619 - DNA, 25 bp, Homo sapien
ctgtaaaaccaagtcaacaaatgtc

SEQ ID NO: 2204620 - DNA, 25 bp, Homo sapien
tgtaaaaccaagtcaacaaatgtcc

SEQ ID NO: 2204621 - DNA, 25 bp, Homo sapien
taaaaccaagtcaacaaatgtccat

SEQ ID NO: 2204622 - DNA, 25 bp, Homo sapien
gtaaaaccaagtcaacaaatgtcca

SEQ ID NO: 2204623 - DNA, 25 bp, Homo sapien
catggccatgggatggctcttctga

SEQ ID NO: 2204624 - DNA, 25 bp, Homo sapien
tgggatggctcttctgaccattggg

SEQ ID NO: 2204625 - DNA, 25 bp, Homo sapien
tgtgacatggccatgggatggctct

SEQ ID NO: 2204626 - DNA, 25 bp, Homo sapien
ctatccctgtgacatggccatggga

SEQ ID NO: 2204627 - DNA, 25 bp, Homo sapien
ccaggcaccggcggattagggcaca

SEQ ID NO: 2204628 - DNA, 25 bp, Homo sapien
caccggcggattagggcacagcagt

SEQ ID NO: 2204629 - DNA, 25 bp, Homo sapien
aggcaccggcggattagggcacagc

SEQ ID NO: 2204630 - DNA, 25 bp, Homo sapien
gcaccggcggattagggcacagcag

SEQ ID NO: 2204631 - DNA, 25 bp, Homo sapien
gctgggaagtggagctcagcttcca

SEQ ID NO: 2204632 - DNA, 25 bp, Homo sapien
catgtcatagaggaggatgcccagt

SEQ ID NO: 2204633 - DNA, 25 bp, Homo sapien
tctcaaagggaatgtccccacacac

SEQ ID NO: 2204634 - DNA, 25 bp, Homo sapien
tactggtgtcgagagatccactctg

SEQ ID NO: 2204635 - DNA, 25 bp, Homo sapien
ccagggagatttagagaagccttac

SEQ ID NO: 2204636 - DNA, 25 bp, Homo sapien
aatccctccagggagatttagagaa

SEQ ID NO: 2204637 - DNA, 25 bp, Homo sapien
cctccagggagatttagagaagcct

SEQ ID NO: 2204638 - DNA, 25 bp, Homo sapien
aacaatccctccagggagatttaga

SEQ ID NO: 2204639 - DNA, 25 bp, Homo sapien
aatcaatgagtttggcacagccacg

SEQ ID NO: 2204640 - DNA, 25 bp, Homo sapien
tacttggccaaagaagcagcggctt

SEQ ID NO: 2204641 - DNA, 25 bp, Homo sapien
gatgtcacgatggacaactccacgg

SEQ ID NO: 2204642 - DNA, 25 bp, Homo sapien
cagccacggcgtaggtctatcagga

SEQ ID NO: 2204643 - DNA, 25 bp, Homo sapien
aaggccgctcgaggaccagcatgaa

SEQ ID NO: 2204644 - DNA, 25 bp, Homo sapien
ggcaaaggccgctcgaggaccagca

SEQ ID NO: 2204645 - DNA, 25 bp, Homo sapien
ctgggcgggcaaaggccgctcgagg

SEQ ID NO: 2204646 - DNA, 25 bp, Homo sapien
aaaggccgctcgaggaccagcatga

SEQ ID NO: 2204647 - DNA, 25 bp, Homo sapien
aggcggatcacgccagggtgcccac

SEQ ID NO: 2204648 - DNA, 25 bp, Homo sapien
acttcgagtgggcatgtgactgagt

SEQ ID NO: 2204649 - DNA, 25 bp, Homo sapien
tgcacccactttccatagcagtgcg

SEQ ID NO: 2204650 - DNA, 25 bp, Homo sapien
tcaaaccagtcaagcaggcggatca

SEQ ID NO: 2204651 - DNA, 25 bp, Homo sapien
gacagtgtgtcgctaagcaactcac

SEQ ID NO: 2204652 - DNA, 25 bp, Homo sapien
cagcgattgagagggtgaaaccagc

SEQ ID NO: 2204653 - DNA, 25 bp, Homo sapien
aaagagcctgcacaaatctcgcatg

SEQ ID NO: 2204654 - DNA, 25 bp, Homo sapien
taaacgaaagaagttcggccaggca

SEQ ID NO: 2204655 - DNA, 25 bp, Homo sapien
cctagaaccagccaataaaaagcct

SEQ ID NO: 2204656 - DNA, 25 bp, Homo sapien
cacaaaaggacttagtgttatcatg

SEQ ID NO: 2204657 - DNA, 25 bp, Homo sapien
tacaaaggacctagcacaaaaggac

SEQ ID NO: 2204658 - DNA, 25 bp, Homo sapien
aaacagctgagtgatttattacaaa

SEQ ID NO: 2204659 - DNA, 25 bp, Homo sapien
gcagcagacgttttctcaccgagat

SEQ ID NO: 2204660 - DNA, 25 bp, Homo sapien
tttgggtcccatggactgcgcaggc

SEQ ID NO: 2204661 - DNA, 25 bp, Homo sapien
tcagaactgtatgtcaccccaaggg

SEQ ID NO: 2204662 - DNA, 25 bp, Homo sapien
aaaaataccgatattgcgcaggcgc

SEQ ID NO: 2204663 - DNA, 25 bp, Homo sapien
ttacagggcccagggagtcatacat

SEQ ID NO: 2204664 - DNA, 25 bp, Homo sapien
acagggcccagggagtcatacatcc

SEQ ID NO: 2204665 - DNA, 25 bp, Homo sapien
cagggcccagggagtcatacatccc

SEQ ID NO: 2204666 - DNA, 25 bp, Homo sapien
tgttacagggcccagggagtcatac

SEQ ID NO: 2204667 - DNA, 25 bp, Homo sapien
agcaaggaggtgaatacatcagtga

SEQ ID NO: 2204668 - DNA, 25 bp, Homo sapien
catcagtgatggagtaggtaggtta

SEQ ID NO: 2204669 - DNA, 25 bp, Homo sapien
ttaggaagggctccgaaggtactca

SEQ ID NO: 2204670 - DNA, 25 bp, Homo sapien
ggaaaagcaaggaggtgaatacatc

SEQ ID NO: 2204671 - DNA, 25 bp, Homo sapien
agcccagcacacgattccggggaat

SEQ ID NO: 2204672 - DNA, 25 bp, Homo sapien
cccagcacacgattccggggaatca

SEQ ID NO: 2204673 - DNA, 25 bp, Homo sapien
gcacacgattccggggaatcacttt

SEQ ID NO: 2204674 - DNA, 25 bp, Homo sapien
cagcacacgattccggggaatcact

SEQ ID NO: 2204675 - DNA, 25 bp, Homo sapien
ccccgccacacgcacctgaccctcc

SEQ ID NO: 2204676 - DNA, 25 bp, Homo sapien
ggctcactcctcggtcaaccagcat

SEQ ID NO: 2204677 - DNA, 25 bp, Homo sapien
gctcactcctcggtcaaccagcatt

SEQ ID NO: 2204678 - DNA, 25 bp, Homo sapien
acgcacctgaccctcccaagaccct

SEQ ID NO: 2204679 - DNA, 25 bp, Homo sapien
gagtcgatctgtgaggcggtgtcct

SEQ ID NO: 2204680 - DNA, 25 bp, Homo sapien
gggccgagtcgatactcggcctcga

SEQ ID NO: 2204681 - DNA, 25 bp, Homo sapien
ggcctcgaacgcttcccgatccttg

SEQ ID NO: 2204682 - DNA, 25 bp, Homo sapien
tcctgcgaagacggtgccaaagccc

SEQ ID NO: 2204683 - DNA, 25 bp, Homo sapien
ttgcagtaggggaggatgtactcac

SEQ ID NO: 2204684 - DNA, 25 bp, Homo sapien
agcccaccccgtctggttgcagtag

SEQ ID NO: 2204685 - DNA, 25 bp, Homo sapien
ggaagtcagggtggcggcgtgctga

SEQ ID NO: 2204686 - DNA, 25 bp, Homo sapien
cccgcgctgcaacccatcattccag

SEQ ID NO: 2204687 - DNA, 25 bp, Homo sapien
gggcgcgggaggcccctgtagaggc

SEQ ID NO: 2204688 - DNA, 25 bp, Homo sapien
aggcccctgtagaggcttggtcaac

SEQ ID NO: 2204689 - DNA, 25 bp, Homo sapien
cgcgggaggcccctgtagaggcttg

SEQ ID NO: 2204690 - DNA, 25 bp, Homo sapien
ggaggcccctgtagaggcttggtca

SEQ ID NO: 2204691 - DNA, 25 bp, Homo sapien
agcccgcagggcgtggacgcccggg

SEQ ID NO: 2204692 - DNA, 25 bp, Homo sapien
gtggcgctgcgcagattgagcccac

SEQ ID NO: 2204693 - DNA, 25 bp, Homo sapien
gcagattgagcccactgaacccgct

SEQ ID NO: 2204694 - DNA, 25 bp, Homo sapien
tgaacccgctaagcccgcagggcgt

SEQ ID NO: 2204695 - DNA, 25 bp, Homo sapien
cccgggagagtcaccctgggcgaca

SEQ ID NO: 2204696 - DNA, 25 bp, Homo sapien
ccgcagacggcgcagcgttgagatt

SEQ ID NO: 2204697 - DNA, 25 bp, Homo sapien
ggctttgatcaatccggacgcggca

SEQ ID NO: 2204698 - DNA, 25 bp, Homo sapien
tgctactgagcctgggcacgcgcct

SEQ ID NO: 2204699 - DNA, 25 bp, Homo sapien
cacagccaatcggagccagttctta

SEQ ID NO: 2204700 - DNA, 25 bp, Homo sapien
ctgtaccacagccaatcggagccag

SEQ ID NO: 2204701 - DNA, 25 bp, Homo sapien
gtaccacagccaatcggagccagtt

SEQ ID NO: 2204702 - DNA, 25 bp, Homo sapien
gccaatcggagccagttcttatttg

SEQ ID NO: 2204703 - DNA, 25 bp, Homo sapien
agggaggacaggcaaagaggtgtca

SEQ ID NO: 2204704 - DNA, 25 bp, Homo sapien
gggaggacaggcaaagaggtgtcag

SEQ ID NO: 2204705 - DNA, 25 bp, Homo sapien
ggaggacaggcaaagaggtgtcaga

SEQ ID NO: 2204706 - DNA, 25 bp, Homo sapien
ctagggaggacaggcaaagaggtgt

SEQ ID NO: 2204707 - DNA, 25 bp, Homo sapien
acctctgaggtcaagccaaggtccg

SEQ ID NO: 2204708 - DNA, 25 bp, Homo sapien
tgctggagagcattcacacctctga

SEQ ID NO: 2204709 - DNA, 25 bp, Homo sapien
aaggtccgtgccattgcatcctctg

SEQ ID NO: 2204710 - DNA, 25 bp, Homo sapien
ggtcaagccaaggtccgtgccattg

SEQ ID NO: 2204711 - DNA, 25 bp, Homo sapien
ggttttattgtgccaaggacattac

SEQ ID NO: 2204712 - DNA, 25 bp, Homo sapien
ttattgtgccaaggacattacagat

SEQ ID NO: 2204713 - DNA, 25 bp, Homo sapien
tggttttattgtgccaaggacatta

SEQ ID NO: 2204714 - DNA, 25 bp, Homo sapien
aggacattacagatggcggatcttg

SEQ ID NO: 2204715 - DNA, 25 bp, Homo sapien
gcccagaaagatgccaccttcacag

SEQ ID NO: 2204716 - DNA, 25 bp, Homo sapien
caagattccaaagaagctagtggtg

SEQ ID NO: 2204717 - DNA, 25 bp, Homo sapien
tcaaatcccgggtggcagccataat

SEQ ID NO: 2204718 - DNA, 25 bp, Homo sapien
gagccagtgctgtcgtctatatcat

SEQ ID NO: 2204719 - DNA, 25 bp, Homo sapien
attcaacattgaaggctcagacgtt

SEQ ID NO: 2204720 - DNA, 25 bp, Homo sapien
acattgaaggctcagacgttcttgg

SEQ ID NO: 2204721 - DNA, 25 bp, Homo sapien
caacattgaaggctcagacgttctt

SEQ ID NO: 2204722 - DNA, 25 bp, Homo sapien
cattgaaggctcagacgttcttggg

SEQ ID NO: 2204723 - DNA, 25 bp, Homo sapien
ctcttgtctatcttcggcacccttg

SEQ ID NO: 2204724 - DNA, 25 bp, Homo sapien
gggagactttcctctgtctgaatgt

SEQ ID NO: 2204725 - DNA, 25 bp, Homo sapien
tcttcggcacccttgcccgagtccc

SEQ ID NO: 2204726 - DNA, 25 bp, Homo sapien
tgcctggctgccagttggtctgtct

SEQ ID NO: 2204727 - DNA, 25 bp, Homo sapien
aagccaaagaaggtgaggtggcacc

SEQ ID NO: 2204728 - DNA, 25 bp, Homo sapien
cagagagacaggtgatagtggcagc

SEQ ID NO: 2204729 - DNA, 25 bp, Homo sapien
tagtggcagcggcaatgagagagag

SEQ ID NO: 2204730 - DNA, 25 bp, Homo sapien
caacagggcacatcagctggcagag

SEQ ID NO: 2204731 - DNA, 25 bp, Homo sapien
tggggttgggagatggtgtccaatc

SEQ ID NO: 2204732 - DNA, 25 bp, Homo sapien
gatggtgtccaatccctgggtctcc

SEQ ID NO: 2204733 - DNA, 25 bp, Homo sapien
gggagatggtgtccaatccctgggt

SEQ ID NO: 2204734 - DNA, 25 bp, Homo sapien
ggttgggagatggtgtccaatccct

SEQ ID NO: 2204735 - DNA, 25 bp, Homo sapien
caactcttgtctgggggcgggtctc

SEQ ID NO: 2204736 - DNA, 25 bp, Homo sapien
actcttgtctgggggcgggtctctg

SEQ ID NO: 2204737 - DNA, 25 bp, Homo sapien
tcaactcttgtctgggggcgggtct

SEQ ID NO: 2204738 - DNA, 25 bp, Homo sapien
aactcttgtctgggggcgggtctct

SEQ ID NO: 2204739 - DNA, 25 bp, Homo sapien
ccagcaccgaagctaggatctcatc

SEQ ID NO: 2204740 - DNA, 25 bp, Homo sapien
acatctgctgaatgagggcccggca

SEQ ID NO: 2204741 - DNA, 25 bp, Homo sapien
agttgcccggtcggcccctgccgag

SEQ ID NO: 2204742 - DNA, 25 bp, Homo sapien
gacatctgctgaatgagggcccggc

SEQ ID NO: 2204743 - DNA, 25 bp, Homo sapien
ggcccctgccgagaactgactgctt

SEQ ID NO: 2204744 - DNA, 25 bp, Homo sapien
aggacccaggacgtgcctcctaact

SEQ ID NO: 2204745 - DNA, 25 bp, Homo sapien
gaagcagacggacagtcaaaggtag

SEQ ID NO: 2204746 - DNA, 25 bp, Homo sapien
cagtcaaaggtagggacccaggatc

SEQ ID NO: 2204747 - DNA, 25 bp, Homo sapien
taactcccagcacattccctgtggg

SEQ ID NO: 2204748 - DNA, 25 bp, Homo sapien
cgcacagggcgaaggaggtttggca

SEQ ID NO: 2204749 - DNA, 25 bp, Homo sapien
ctgctgtggccgaactgcatgtggc

SEQ ID NO: 2204750 - DNA, 25 bp, Homo sapien
tgctcaggtgacgaggctgaactcc

SEQ ID NO: 2204751 - DNA, 25 bp, Homo sapien
tgcccaattcagcatgcagctcagg

SEQ ID NO: 2204752 - DNA, 25 bp, Homo sapien
tgtctctgccaacagacgagatcgt

SEQ ID NO: 2204753 - DNA, 25 bp, Homo sapien
ggtcaaggaccccaccattgagttg

SEQ ID NO: 2204754 - DNA, 25 bp, Homo sapien
ttgagggcagagtagtccagatctg

SEQ ID NO: 2204755 - DNA, 25 bp, Homo sapien
tgatctcccagtcagggtcaaggac

SEQ ID NO: 2204756 - DNA, 25 bp, Homo sapien
ggcctcggacctggcgagcctgttt

SEQ ID NO: 2204757 - DNA, 25 bp, Homo sapien
tgctgttcaatccatgactcctccg

SEQ ID NO: 2204758 - DNA, 25 bp, Homo sapien
actgcaggtaggattcccgagccac

SEQ ID NO: 2204759 - DNA, 25 bp, Homo sapien
gatggcttcatttgtggcctcccag

SEQ ID NO: 2204760 - DNA, 25 bp, Homo sapien
ggaacagggatgtgcaataacacac

SEQ ID NO: 2204761 - DNA, 25 bp, Homo sapien
ccagaacaggctcagcgaggtaggc

SEQ ID NO: 2204762 - DNA, 25 bp, Homo sapien
gctcagcgaggtaggcccacaggcc

SEQ ID NO: 2204763 - DNA, 25 bp, Homo sapien
aacacactgaacctgcccaagagcc

SEQ ID NO: 2204764 - DNA, 25 bp, Homo sapien
cagggaagtggaggctagctacagt

SEQ ID NO: 2204765 - DNA, 25 bp, Homo sapien
gagtcagtaaacagatcgaatacaa

SEQ ID NO: 2204766 - DNA, 25 bp, Homo sapien
aaggcaaaacgagagtcagtaaaca

SEQ ID NO: 2204767 - DNA, 25 bp, Homo sapien
gccattaaaccaggacaagtcacag

SEQ ID NO: 2204768 - DNA, 25 bp, Homo sapien
agaggagacaggatatttttgtgag

SEQ ID NO: 2204769 - DNA, 25 bp, Homo sapien
acagactccaacagaggtttctgac

SEQ ID NO: 2204770 - DNA, 25 bp, Homo sapien
gggcaaaacagactccaacagaggt

SEQ ID NO: 2204771 - DNA, 25 bp, Homo sapien
gacaggatatttttgtgagttaggg

SEQ ID NO: 2204772 - DNA, 25 bp, Homo sapien
atatccagcagccattctgggcaca

SEQ ID NO: 2204773 - DNA, 25 bp, Homo sapien
ctatatccagcagccattctgggca

SEQ ID NO: 2204774 - DNA, 25 bp, Homo sapien
ctctatatccagcagccattctggg

SEQ ID NO: 2204775 - DNA, 25 bp, Homo sapien
tccagcagccattctgggcacaggg

SEQ ID NO: 2204776 - DNA, 25 bp, Homo sapien
ttcgtcctcgttttgatgtatccca

SEQ ID NO: 2204777 - DNA, 25 bp, Homo sapien
ggccttgttaggattcaccactgaa

SEQ ID NO: 2204778 - DNA, 25 bp, Homo sapien
gctaacacgaatgggttcgtcctcg

SEQ ID NO: 2204779 - DNA, 25 bp, Homo sapien
gatattccgatggtagctaacacga

SEQ ID NO: 2204780 - DNA, 25 bp, Homo sapien
aaggagggagcatccacagcaggcc

SEQ ID NO: 2204781 - DNA, 25 bp, Homo sapien
aggttgggcaggctcgaatgaggca

SEQ ID NO: 2204782 - DNA, 25 bp, Homo sapien
gctcgaatgaggcaccatctttccc

SEQ ID NO: 2204783 - DNA, 25 bp, Homo sapien
ggcaggctcgaatgaggcaccatct

SEQ ID NO: 2204784 - DNA, 25 bp, Homo sapien
aaagtcctctgtgacatagttggag

SEQ ID NO: 2204785 - DNA, 25 bp, Homo sapien
gacggttgtacatctctgccatggc

SEQ ID NO: 2204786 - DNA, 25 bp, Homo sapien
tgtactggtacacctccacaggacg

SEQ ID NO: 2204787 - DNA, 25 bp, Homo sapien
ggcctgcatctcaatgtggttgcca

SEQ ID NO: 2204788 - DNA, 25 bp, Homo sapien
ctgcagaatagattggaaggttaag

SEQ ID NO: 2204789 - DNA, 25 bp, Homo sapien
tgcagaatagattggaaggttaagg

SEQ ID NO: 2204790 - DNA, 25 bp, Homo sapien
ctgtgtggagaagaaatcctcccac

SEQ ID NO: 2204791 - DNA, 25 bp, Homo sapien
gagaagaaatcctcccaccctgccc

SEQ ID NO: 2204792 - DNA, 25 bp, Homo sapien
ctgccccttccccaaaggcctccat

SEQ ID NO: 2204793 - DNA, 25 bp, Homo sapien
gtggagaagaaatcctcccaccctg

SEQ ID NO: 2204794 - DNA, 25 bp, Homo sapien
tgctttcgcacaacctcatgcatgt

SEQ ID NO: 2204795 - DNA, 25 bp, Homo sapien
gcacaacctcatgcatgtcctggtc

SEQ ID NO: 2204796 - DNA, 25 bp, Homo sapien
cagatagtccatgcaatgctttcgc

SEQ ID NO: 2204797 - DNA, 25 bp, Homo sapien
catgcaatgctttcgcacaacctca

SEQ ID NO: 2204798 - DNA, 25 bp, Homo sapien
caggcgtcgtgagatttggtcaaac

SEQ ID NO: 2204799 - DNA, 25 bp, Homo sapien
tgtggcccgaatagtccaggcgtcg

SEQ ID NO: 2204800 - DNA, 25 bp, Homo sapien
gcttgaggatcttcacacatgccgt

SEQ ID NO: 2204801 - DNA, 25 bp, Homo sapien
ttagcttaactcaggatgggcagcc

SEQ ID NO: 2204802 - DNA, 25 bp, Homo sapien
tgagaaaggctactctgagatagaa

SEQ ID NO: 2204803 - DNA, 25 bp, Homo sapien
cctggagtgttctgtgagaaaggct

SEQ ID NO: 2204804 - DNA, 25 bp, Homo sapien
tccagtcctcttggaggtgaagaga

SEQ ID NO: 2204805 - DNA, 25 bp, Homo sapien
gaaaatagggcccatgtttgtctcc

SEQ ID NO: 2204806 - DNA, 25 bp, Homo sapien
cacgagtcagccagaatgttgccat

SEQ ID NO: 2204807 - DNA, 25 bp, Homo sapien
caatacaggcttcataaaacagggt

SEQ ID NO: 2204808 - DNA, 25 bp, Homo sapien
tacacaggaggtttgccaagcacct

SEQ ID NO: 2204809 - DNA, 25 bp, Homo sapien
catatgctagttacccacgagtcag

SEQ ID NO: 2204810 - DNA, 25 bp, Homo sapien
tgcttggcagaatagagaggagacc

SEQ ID NO: 2204811 - DNA, 25 bp, Homo sapien
tctgaggcaccagtgaaaatggcat

SEQ ID NO: 2204812 - DNA, 25 bp, Homo sapien
cccacagacggagagaatagcagac

SEQ ID NO: 2204813 - DNA, 25 bp, Homo sapien
caagaatcagttgtgcagccaggga

SEQ ID NO: 2204814 - DNA, 25 bp, Homo sapien
tcttgtctcgtagggccttttcaaa

SEQ ID NO: 2204815 - DNA, 25 bp, Homo sapien
agagacaggcgccatcctccttcat

SEQ ID NO: 2204816 - DNA, 25 bp, Homo sapien
cagcccggaagagacaggcgccatc

SEQ ID NO: 2204817 - DNA, 25 bp, Homo sapien
tgatgaagcccttcttgtctcgtag

SEQ ID NO: 2204818 - DNA, 25 bp, Homo sapien
ggatttctagagatgacaaagacac

SEQ ID NO: 2204819 - DNA, 25 bp, Homo sapien
cccaggaaaatgtggctggatttct

SEQ ID NO: 2204820 - DNA, 25 bp, Homo sapien
gctggatttctagagatgacaaaga

SEQ ID NO: 2204821 - DNA, 25 bp, Homo sapien
aggaaaatgtggctggatttctaga

SEQ ID NO: 2204822 - DNA, 25 bp, Homo sapien
cttaatgagcttccatgcgcagcac

SEQ ID NO: 2204823 - DNA, 25 bp, Homo sapien
aaggactcctgtttgtgcacaacat

SEQ ID NO: 2204824 - DNA, 25 bp, Homo sapien
tgcacaacattccagtagtccaggt

SEQ ID NO: 2204825 - DNA, 25 bp, Homo sapien
gaagcccttaatgagcttccatgcg

SEQ ID NO: 2204826 - DNA, 25 bp, Homo sapien
ttgcagcccatccacagaatatcct

SEQ ID NO: 2204827 - DNA, 25 bp, Homo sapien
gcagcccatccacagaatatcctgg

SEQ ID NO: 2204828 - DNA, 25 bp, Homo sapien
catccacagaatatcctggtttgtc

SEQ ID NO: 2204829 - DNA, 25 bp, Homo sapien
gcccatccacagaatatcctggttt

SEQ ID NO: 2204830 - DNA, 25 bp, Homo sapien
tccctaggaccagtgatgtatggct

SEQ ID NO: 2204831 - DNA, 25 bp, Homo sapien
ggagaatttccccagagtggcgatg

SEQ ID NO: 2204832 - DNA, 25 bp, Homo sapien
tatgcccggcttactcctatgttct

SEQ ID NO: 2204833 - DNA, 25 bp, Homo sapien
tatcgtgccagaattaatgatggga

SEQ ID NO: 2204834 - DNA, 25 bp, Homo sapien
tcatgtccccaaaaggagttgggag

SEQ ID NO: 2204835 - DNA, 25 bp, Homo sapien
aagtaggaggaccttcttggccctg

SEQ ID NO: 2204836 - DNA, 25 bp, Homo sapien
tccccgaggcaggaagtcttatgtc

SEQ ID NO: 2204837 - DNA, 25 bp, Homo sapien
gcaaacggtatcttgtcccagagag

SEQ ID NO: 2204838 - DNA, 25 bp, Homo sapien
tcactgttgtagcctgcgccgacct

SEQ ID NO: 2204839 - DNA, 25 bp, Homo sapien
cccgggagcttgacgtcgccgcttg

SEQ ID NO: 2204840 - DNA, 25 bp, Homo sapien
gcctcatactcgtcctcactgttgt

SEQ ID NO: 2204841 - DNA, 25 bp, Homo sapien
gccgacctcctcacgctcgggactg

SEQ ID NO: 2204842 - DNA, 25 bp, Homo sapien
agccgcccacgcctacggcaccacc

SEQ ID NO: 2204843 - DNA, 25 bp, Homo sapien
ccacgcctacggcaccacccacacc

SEQ ID NO: 2204844 - DNA, 25 bp, Homo sapien
cgcccacgcctacggcaccacccac

SEQ ID NO: 2204845 - DNA, 25 bp, Homo sapien
gcagccgcccacgcctacggcacca

SEQ ID NO: 2204846 - DNA, 25 bp, Homo sapien
cagcgatgaagagcgcccggcggtc

SEQ ID NO: 2204847 - DNA, 25 bp, Homo sapien
ccagcgcccagcgatgaagagcgcc

SEQ ID NO: 2204848 - DNA, 25 bp, Homo sapien
ctgttgtggccggggacccgccact

SEQ ID NO: 2204849 - DNA, 25 bp, Homo sapien
agcgcccagcgatgaagagcgcccg

SEQ ID NO: 2204850 - DNA, 25 bp, Homo sapien
gaggcggtggcgaagctcgcggacg

SEQ ID NO: 2204851 - DNA, 25 bp, Homo sapien
cggcggctcgttggcggggtcggcg

SEQ ID NO: 2204852 - DNA, 25 bp, Homo sapien
acgccggagtcacggtcgcgatcgc

SEQ ID NO: 2204853 - DNA, 25 bp, Homo sapien
ggtggcgaagctcgcggacgggccc

SEQ ID NO: 2204854 - DNA, 25 bp, Homo sapien
ggcacgccgggagagaacccggatg

SEQ ID NO: 2204855 - DNA, 25 bp, Homo sapien
ggctgcactgccgagtaccccccaa

SEQ ID NO: 2204856 - DNA, 25 bp, Homo sapien
acgccgggagagaacccggatgagg

SEQ ID NO: 2204857 - DNA, 25 bp, Homo sapien
gcactgccgagtaccccccaacaaa

SEQ ID NO: 2204858 - DNA, 25 bp, Homo sapien
gagaacccggatgtaaagtccaaga

SEQ ID NO: 2204859 - DNA, 25 bp, Homo sapien
gacccggataaagggatcgcggcac

SEQ ID NO: 2204860 - DNA, 25 bp, Homo sapien
gcagtgcggcgagtttgtcttagcc

SEQ ID NO: 2204861 - DNA, 25 bp, Homo sapien
atcgcggcaccggttcgagaaccct

SEQ ID NO: 2204862 - DNA, 25 bp, Homo sapien
cacgggccaatcacaggcgagtgct

SEQ ID NO: 2204863 - DNA, 25 bp, Homo sapien
ggtgccctccgtctcaaatttcagt

SEQ ID NO: 2204864 - DNA, 25 bp, Homo sapien
tttcagtcaaagtcgacaccctggt

SEQ ID NO: 2204865 - DNA, 25 bp, Homo sapien
tcggaagtacgtgggcaaaatcgcc

SEQ ID NO: 2204866 - DNA, 25 bp, Homo sapien
ctgagttctgcggtgattggttaag

SEQ ID NO: 2204867 - DNA, 25 bp, Homo sapien
aagagacgccgtcactcgcggcata

SEQ ID NO: 2204868 - DNA, 25 bp, Homo sapien
cccggcaacagcctgagttctgcgg

SEQ ID NO: 2204869 - DNA, 25 bp, Homo sapien
tgattggttaagagacgccgtcact

SEQ ID NO: 2204870 - DNA, 25 bp, Homo sapien
gtgtcatcctttcgcatagtgccat

SEQ ID NO: 2204871 - DNA, 25 bp, Homo sapien
catcctttcgcatagtgccatgcta

SEQ ID NO: 2204872 - DNA, 25 bp, Homo sapien
ttgcgtgtcatcctttcgcatagtg

SEQ ID NO: 2204873 - DNA, 25 bp, Homo sapien
cctttcgcatagtgccatgctaatc

SEQ ID NO: 2204874 - DNA, 25 bp, Homo sapien
aactcagccacacactagcctagtg

SEQ ID NO: 2204875 - DNA, 25 bp, Homo sapien
tagcctagtgtagccagtagcccag

SEQ ID NO: 2204876 - DNA, 25 bp, Homo sapien
ggattggaacccagatcaacctgaa

SEQ ID NO: 2204877 - DNA, 25 bp, Homo sapien
tgtctgctcagtgctctatagaact

SEQ ID NO: 2204878 - DNA, 25 bp, Homo sapien
ccaaggaggaatgtctcaggacccc

SEQ ID NO: 2204879 - DNA, 25 bp, Homo sapien
tcccgatctgtgaatcaggaagctg

SEQ ID NO: 2204880 - DNA, 25 bp, Homo sapien
gaagctggcgcagatgatatccaag

SEQ ID NO: 2204881 - DNA, 25 bp, Homo sapien
cagagccaggagatactctcagtcc

SEQ ID NO: 2204882 - DNA, 25 bp, Homo sapien
taggctagagctcagatgtcggatc

SEQ ID NO: 2204883 - DNA, 25 bp, Homo sapien
tctcgtagaggccagatcagaggtg

SEQ ID NO: 2204884 - DNA, 25 bp, Homo sapien
agttcagaaacatcccaggccggag

SEQ ID NO: 2204885 - DNA, 25 bp, Homo sapien
tttgcataatgacacggcagcagct

SEQ ID NO: 2204886 - DNA, 25 bp, Homo sapien
ggatgagatcttgacagtctcgggg

SEQ ID NO: 2204887 - DNA, 25 bp, Homo sapien
gggatgagatcttgacagtctcggg

SEQ ID NO: 2204888 - DNA, 25 bp, Homo sapien
agggatgagatcttgacagtctcgg

SEQ ID NO: 2204889 - DNA, 25 bp, Homo sapien
ggctgtcgcagttcaggtcaaggct

SEQ ID NO: 2204890 - DNA, 25 bp, Homo sapien
acgaagtcccggctgtcgcagttca

SEQ ID NO: 2204891 - DNA, 25 bp, Homo sapien
tgctgataatggcagccacgaagtc

SEQ ID NO: 2204892 - DNA, 25 bp, Homo sapien
ggatgctgataatggcagccacgaa

SEQ ID NO: 2204893 - DNA, 25 bp, Homo sapien
aagacacagaggtgctacggctggt

SEQ ID NO: 2204894 - DNA, 25 bp, Homo sapien
gaaggtgagctcatctgtgaactca

SEQ ID NO: 2204895 - DNA, 25 bp, Homo sapien
tggagttggcaaggcggatggcgcg

SEQ ID NO: 2204896 - DNA, 25 bp, Homo sapien
cttggccctgcgagggcagcaagaa

SEQ ID NO: 2204897 - DNA, 25 bp, Homo sapien
aaggcagaacggttcctgacacaaa

SEQ ID NO: 2204898 - DNA, 25 bp, Homo sapien
aaagagcctgttcctcgccactgcc

SEQ ID NO: 2204899 - DNA, 25 bp, Homo sapien
tctctagacagtgcagcaagtggtg

SEQ ID NO: 2204900 - DNA, 25 bp, Homo sapien
tgttcaaaggcagaacggttcctga

SEQ ID NO: 2204901 - DNA, 25 bp, Homo sapien
ctggagtagatggagcagagcgata

SEQ ID NO: 2204902 - DNA, 25 bp, Homo sapien
tcctccccgttatggctcaccccaa

SEQ ID NO: 2204903 - DNA, 25 bp, Homo sapien
cagcaccttcctccccgttatggct

SEQ ID NO: 2204904 - DNA, 25 bp, Homo sapien
agtagatggagcagagcgataaggg

SEQ ID NO: 2204905 - DNA, 25 bp, Homo sapien
ttgccaatcggatccttgccaagcg

SEQ ID NO: 2204906 - DNA, 25 bp, Homo sapien
aatcggatccttgccaagcgcacct

SEQ ID NO: 2204907 - DNA, 25 bp, Homo sapien
ggaaggcattggtggtaccactctt

SEQ ID NO: 2204908 - DNA, 25 bp, Homo sapien
ggtaccactctttgccaatcggatc

SEQ ID NO: 2204909 - DNA, 25 bp, Homo sapien
gagaggagataaaaggtcaggtggg

SEQ ID NO: 2204910 - DNA, 25 bp, Homo sapien
gtgctcggatggaaagtgcggttac

SEQ ID NO: 2204911 - DNA, 25 bp, Homo sapien
cccaaagtagactggcttggggtgt

SEQ ID NO: 2204912 - DNA, 25 bp, Homo sapien
tcaggtgggtaagccccaaagtaga

SEQ ID NO: 2204913 - DNA, 25 bp, Homo sapien
ggctaaagttggacacaatgactgg

SEQ ID NO: 2204914 - DNA, 25 bp, Homo sapien
gatggacccgaaaatcttgccagca

SEQ ID NO: 2204915 - DNA, 25 bp, Homo sapien
tgaccaagacgccactgagtgagca

SEQ ID NO: 2204916 - DNA, 25 bp, Homo sapien
cagcccgctggttctggtggtagat

SEQ ID NO: 2204917 - DNA, 25 bp, Homo sapien
aacttgttcacagagagctcccctg

SEQ ID NO: 2204918 - DNA, 25 bp, Homo sapien
gccaaggtcaggaaaagtgcccacc

SEQ ID NO: 2204919 - DNA, 25 bp, Homo sapien
tcaactgtgagacatgggcagccat

SEQ ID NO: 2204920 - DNA, 25 bp, Homo sapien
tgatgtgtcatctcagagcgtgtcc

SEQ ID NO: 2204921 - DNA, 25 bp, Homo sapien
cggtagaagttcagcacatggcgga

SEQ ID NO: 2204922 - DNA, 25 bp, Homo sapien
catagtagaaaacgagggctgcggt

SEQ ID NO: 2204923 - DNA, 25 bp, Homo sapien
tattcttccaagtctcaaagcgccg

SEQ ID NO: 2204924 - DNA, 25 bp, Homo sapien
gacatcgtcgttcttgggcaccaaa

SEQ ID NO: 2204925 - DNA, 25 bp, Homo sapien
cgtgccactccccaagcccagggag

SEQ ID NO: 2204926 - DNA, 25 bp, Homo sapien
gtgccactccccaagcccagggaga

SEQ ID NO: 2204927 - DNA, 25 bp, Homo sapien
ctagagttgccaagaatagcccggg

SEQ ID NO: 2204928 - DNA, 25 bp, Homo sapien
gattctaaaggagtcagcctgtgcc

SEQ ID NO: 2204929 - DNA, 25 bp, Homo sapien
tgcttgaaagagactgagagtgcct

SEQ ID NO: 2204930 - DNA, 25 bp, Homo sapien
tctagacgggccaacaaagcctggt

SEQ ID NO: 2204931 - DNA, 25 bp, Homo sapien
cacacgtgttgctagaacgctgaac

SEQ ID NO: 2204932 - DNA, 25 bp, Homo sapien
acacacacacgtgttgctagaacgc

SEQ ID NO: 2204933 - DNA, 25 bp, Homo sapien
gccaggctccagacataaattaaaa

SEQ ID NO: 2204934 - DNA, 25 bp, Homo sapien
ctagaacgctgaacatggaccacac

SEQ ID NO: 2204935 - DNA, 25 bp, Homo sapien
cagcccaagggaatagcatcctagg

SEQ ID NO: 2204936 - DNA, 25 bp, Homo sapien
gtccagtctcccaagctatttgatt

SEQ ID NO: 2204937 - DNA, 25 bp, Homo sapien
ggatcattaacactaaccatcaggc

SEQ ID NO: 2204938 - DNA, 25 bp, Homo sapien
gcctctagcccctttaatgtccagt

SEQ ID NO: 2204939 - DNA, 25 bp, Homo sapien
gcactccttgctgagccgcacaatt

SEQ ID NO: 2204940 - DNA, 25 bp, Homo sapien
actccttgctgagccgcacaatttc

SEQ ID NO: 2204941 - DNA, 25 bp, Homo sapien
gtcaggaggccccacgcactccttg

SEQ ID NO: 2204942 - DNA, 25 bp, Homo sapien
ttgctgagccgcacaatttcctggg

SEQ ID NO: 2204943 - DNA, 25 bp, Homo sapien
ctatgtggctgggtaggcaggtggc

SEQ ID NO: 2204944 - DNA, 25 bp, Homo sapien
ggctgggtgaacagatgggtaggct

SEQ ID NO: 2204945 - DNA, 25 bp, Homo sapien
ggtggctgggtgaacagatgggtag

SEQ ID NO: 2204946 - DNA, 25 bp, Homo sapien
caggtggctgggtgaacagatgggt

SEQ ID NO: 2204947 - DNA, 25 bp, Homo sapien
ttcatctcccgaaggttctcgtcgc

SEQ ID NO: 2204948 - DNA, 25 bp, Homo sapien
gtgcatattcttggtgagctgctcc

SEQ ID NO: 2204949 - DNA, 25 bp, Homo sapien
tcttgttcatctcccgaaggttctc

SEQ ID NO: 2204950 - DNA, 25 bp, Homo sapien
cttgtgcaagtgcatattcttggtg

SEQ ID NO: 2204951 - DNA, 25 bp, Homo sapien
tcactaggtctctcaggacgctgcc

SEQ ID NO: 2204952 - DNA, 25 bp, Homo sapien
taggtctctcaggacgctgcccagc

SEQ ID NO: 2204953 - DNA, 25 bp, Homo sapien
ggcttcactaggtctctcaggacgc

SEQ ID NO: 2204954 - DNA, 25 bp, Homo sapien
cagcccgctgcggtctgtgtggcct

SEQ ID NO: 2204955 - DNA, 25 bp, Homo sapien
tatggccccgagaaatgaggataac

SEQ ID NO: 2204956 - DNA, 25 bp, Homo sapien
agtcctcagcacatgttggtcagta

SEQ ID NO: 2204957 - DNA, 25 bp, Homo sapien
taggacagaggctttgacatacaaa

SEQ ID NO: 2204958 - DNA, 25 bp, Homo sapien
caggaaaagccatgtcatgtaggac

SEQ ID NO: 2204959 - DNA, 25 bp, Homo sapien
catgacgtaggtctcaatgatggcg

SEQ ID NO: 2204960 - DNA, 25 bp, Homo sapien
ggtctcaatgatggcgctcttccgg

SEQ ID NO: 2204961 - DNA, 25 bp, Homo sapien
cgatccggctgtccatgacgtaggt

SEQ ID NO: 2204962 - DNA, 25 bp, Homo sapien
gcgctcttccggcagaggtcctctg

SEQ ID NO: 2204963 - DNA, 25 bp, Homo sapien
caagatggcccagcccacctgagac

SEQ ID NO: 2204964 - DNA, 25 bp, Homo sapien
ctgcaagatggcccagcccacctga

SEQ ID NO: 2204965 - DNA, 25 bp, Homo sapien
agatggcccagcccacctgagaccc

SEQ ID NO: 2204966 - DNA, 25 bp, Homo sapien
tgcaagatggcccagcccacctgag

SEQ ID NO: 2204967 - DNA, 25 bp, Homo sapien
caagggcacttcaagtggggatggg

SEQ ID NO: 2204968 - DNA, 25 bp, Homo sapien
cacaagggcacttcaagtggggatg

SEQ ID NO: 2204969 - DNA, 25 bp, Homo sapien
agggcacttcaagtggggatgggca

SEQ ID NO: 2204970 - DNA, 25 bp, Homo sapien
cccacaagggcacttcaagtgggga

SEQ ID NO: 2204971 - DNA, 25 bp, Homo sapien
tgccagccgctgaaagagctcagcc

SEQ ID NO: 2204972 - DNA, 25 bp, Homo sapien
ccagcatccatttctcctgctgtgt

SEQ ID NO: 2204973 - DNA, 25 bp, Homo sapien
ctctgccagccgctgaaagagctca

SEQ ID NO: 2204974 - DNA, 25 bp, Homo sapien
gccgctgaaagagctcagccacttc

SEQ ID NO: 2204975 - DNA, 25 bp, Homo sapien
ctggaagggtatgaactaagaattt

SEQ ID NO: 2204976 - DNA, 25 bp, Homo sapien
gggaaggtagagacaacagttgaat

SEQ ID NO: 2204977 - DNA, 25 bp, Homo sapien
ggaaggtagagacaacagttgaata

SEQ ID NO: 2204978 - DNA, 25 bp, Homo sapien
gagaattctggaagggtatgaacta

SEQ ID NO: 2204979 - DNA, 25 bp, Homo sapien
tctccttggatggtgcacctactat

SEQ ID NO: 2204980 - DNA, 25 bp, Homo sapien
gcctgtcctgcatgtcgcaatctga

SEQ ID NO: 2204981 - DNA, 25 bp, Homo sapien
ccacacccggccagacatttaaggt

SEQ ID NO: 2204982 - DNA, 25 bp, Homo sapien
tgtgctgcgcccaaagtaggagatg

SEQ ID NO: 2204983 - DNA, 25 bp, Homo sapien
ctggctggaacagccgagctctcct

SEQ ID NO: 2204984 - DNA, 25 bp, Homo sapien
ctgggtccggcttggtgagttcatc

SEQ ID NO: 2204985 - DNA, 25 bp, Homo sapien
tctgagagaaccagctcctcaaggc

SEQ ID NO: 2204986 - DNA, 25 bp, Homo sapien
caagatctcccggtagctgaaggag

SEQ ID NO: 2204987 - DNA, 25 bp, Homo sapien
tcgctcctgcagcttatctgcccgt

SEQ ID NO: 2204988 - DNA, 25 bp, Homo sapien
tgcagcttatctgcccgtttccgct

SEQ ID NO: 2204989 - DNA, 25 bp, Homo sapien
gtttccgctccaaatgcagctgccg

SEQ ID NO: 2204990 - DNA, 25 bp, Homo sapien
tatctgcccgtttccgctccaaatg

SEQ ID NO: 2204991 - DNA, 25 bp, Homo sapien
ggatcctctgcccatccactgtgtc

SEQ ID NO: 2204992 - DNA, 25 bp, Homo sapien
cgcagcactgcccttcttctccagg

SEQ ID NO: 2204993 - DNA, 25 bp, Homo sapien
ttctccaggatcctctgcccatcca

SEQ ID NO: 2204994 - DNA, 25 bp, Homo sapien
tccaggatcctctgcccatccactg

SEQ ID NO: 2204995 - DNA, 25 bp, Homo sapien
tgctcgagctgatcccgtacatcct

SEQ ID NO: 2204996 - DNA, 25 bp, Homo sapien
gcctgctcgagctgatcccgtacat

SEQ ID NO: 2204997 - DNA, 25 bp, Homo sapien
cgagctgatcccgtacatcctgtag

SEQ ID NO: 2204998 - DNA, 25 bp, Homo sapien
gctgatcccgtacatcctgtagctc

SEQ ID NO: 2204999 - DNA, 25 bp, Homo sapien
tgctcccgacactgcttgagggctt

SEQ ID NO: 2205000 - DNA, 25 bp, Homo sapien
tcaaacctagacaaacaactggctc

SEQ ID NO: 2205001 - DNA, 25 bp, Homo sapien
caatgcctttcagtgtattatgaga

SEQ ID NO: 2205002 - DNA, 25 bp, Homo sapien
tgctcttcactgctacatgacaatg

SEQ ID NO: 2205003 - DNA, 25 bp, Homo sapien
taatcctcccgtaatacctagatgg

SEQ ID NO: 2205004 - DNA, 25 bp, Homo sapien
tcggcttccttcaagcgccgttcaa

SEQ ID NO: 2205005 - DNA, 25 bp, Homo sapien
tggctccatccatggaatgtacctg

SEQ ID NO: 2205006 - DNA, 25 bp, Homo sapien
ggcttccttcaagcgccgttcaaac

SEQ ID NO: 2205007 - DNA, 25 bp, Homo sapien
gaatgtacctgagcttgaagttctt

SEQ ID NO: 2205008 - DNA, 25 bp, Homo sapien
gacttctcttgcagcgtttccattg

SEQ ID NO: 2205009 - DNA, 25 bp, Homo sapien
ccttctcatgccgtagacgaactgc

SEQ ID NO: 2205010 - DNA, 25 bp, Homo sapien
tcttgtcttcatgcagctctcggag

SEQ ID NO: 2205011 - DNA, 25 bp, Homo sapien
tcggagctcacgctcatagcgggca

SEQ ID NO: 2205012 - DNA, 25 bp, Homo sapien
gcagtcgactattggcccgtaatga

SEQ ID NO: 2205013 - DNA, 25 bp, Homo sapien
tgaagttgttccagcagtcgactat

SEQ ID NO: 2205014 - DNA, 25 bp, Homo sapien
tgttccagcagtcgactattggccc

SEQ ID NO: 2205015 - DNA, 25 bp, Homo sapien
atttcttgaagttgttccagcagtc

SEQ ID NO: 2205016 - DNA, 25 bp, Homo sapien
ggagttgaggtcatctttctgtccc

SEQ ID NO: 2205017 - DNA, 25 bp, Homo sapien
taaggtcctcgtactcagcctgctg

SEQ ID NO: 2205018 - DNA, 25 bp, Homo sapien
gggagttgaggtcatctttctgtcc

SEQ ID NO: 2205019 - DNA, 25 bp, Homo sapien
tttctgtcccataaggtcctcgtac

SEQ ID NO: 2205020 - DNA, 25 bp, Homo sapien
agttcttgggtctttgctgtttgga

SEQ ID NO: 2205021 - DNA, 25 bp, Homo sapien
gttcttgggtctttgctgtttggat

SEQ ID NO: 2205022 - DNA, 25 bp, Homo sapien
tcagttcttgggtctttgctgtttg

SEQ ID NO: 2205023 - DNA, 25 bp, Homo sapien
attcagttcttgggtctttgctgtt

SEQ ID NO: 2205024 - DNA, 25 bp, Homo sapien
cttgtgtaagaaagagttgaccctt

SEQ ID NO: 2205025 - DNA, 25 bp, Homo sapien
tgaaggtgatactttaaggatgtgc

SEQ ID NO: 2205026 - DNA, 25 bp, Homo sapien
ctgtggtattctaatgggaattttc

SEQ ID NO: 2205027 - DNA, 25 bp, Homo sapien
gatgtgcaactgtgtttcaccttaa

SEQ ID NO: 2205028 - DNA, 25 bp, Homo sapien
taatctaatattaccctttctgtta

SEQ ID NO: 2205029 - DNA, 25 bp, Homo sapien
tgaactataatctaatattaccctt

SEQ ID NO: 2205030 - DNA, 25 bp, Homo sapien
taaataagtatggaatcatggatgt

SEQ ID NO: 2205031 - DNA, 25 bp, Homo sapien
ggaatcatggatgttcattttttga

SEQ ID NO: 2205032 - DNA, 25 bp, Homo sapien
taaaagcgcatcaaacacgcctagc

SEQ ID NO: 2205033 - DNA, 25 bp, Homo sapien
caaagctgacaaccttgggtgtagg

SEQ ID NO: 2205034 - DNA, 25 bp, Homo sapien
cctagattctcagtatgcggagcaa

SEQ ID NO: 2205035 - DNA, 25 bp, Homo sapien
tatgcttttacaaccctcctccaag

SEQ ID NO: 2205036 - DNA, 25 bp, Homo sapien
gctcctccattcctagaaggccagg

SEQ ID NO: 2205037 - DNA, 25 bp, Homo sapien
ggctcagagccctcctaggttaggt

SEQ ID NO: 2205038 - DNA, 25 bp, Homo sapien
tccacaagcactagcggtggcctgg

SEQ ID NO: 2205039 - DNA, 25 bp, Homo sapien
ctgtgctgggctgttcctataggga

SEQ ID NO: 2205040 - DNA, 25 bp, Homo sapien
ttccaagacaaaggatggagcaaca

SEQ ID NO: 2205041 - DNA, 25 bp, Homo sapien
gcagagcttaaacccccagggctgg

SEQ ID NO: 2205042 - DNA, 25 bp, Homo sapien
ctcttctgtgccaggacggactaga

SEQ ID NO: 2205043 - DNA, 25 bp, Homo sapien
tctgtgccaggacggactagactgg

SEQ ID NO: 2205044 - DNA, 25 bp, Homo sapien
agggtcgagacctcatcctgtctcc

SEQ ID NO: 2205045 - DNA, 25 bp, Homo sapien
gagacctggctaggacagtccctag

SEQ ID NO: 2205046 - DNA, 25 bp, Homo sapien
ctaggggacagggtcgagacctcat

SEQ ID NO: 2205047 - DNA, 25 bp, Homo sapien
gacctggctaggacagtccctaggg

SEQ ID NO: 2205048 - DNA, 25 bp, Homo sapien
cccccaggatacctgggcagggcag

SEQ ID NO: 2205049 - DNA, 25 bp, Homo sapien
tcctccttgcctgattacaggggtg

SEQ ID NO: 2205050 - DNA, 25 bp, Homo sapien
ctgcactgggcggttcctttgggga

SEQ ID NO: 2205051 - DNA, 25 bp, Homo sapien
tcttcccccaggatacctgggcagg

SEQ ID NO: 2205052 - DNA, 25 bp, Homo sapien
gagagcaggggatcggaggcagccc

SEQ ID NO: 2205053 - DNA, 25 bp, Homo sapien
gagcaggggatcggaggcagcccgc

SEQ ID NO: 2205054 - DNA, 25 bp, Homo sapien
tgaagagagcaggggatcggaggca

SEQ ID NO: 2205055 - DNA, 25 bp, Homo sapien
ctgaagagagcaggggatcggaggc

SEQ ID NO: 2205056 - DNA, 25 bp, Homo sapien
tggcttgaggctgtcagaagccgaa

SEQ ID NO: 2205057 - DNA, 25 bp, Homo sapien
ccctacatggaacgttgctgcgcct

SEQ ID NO: 2205058 - DNA, 25 bp, Homo sapien
agccgaagtcgtggccaaggaaagc

SEQ ID NO: 2205059 - DNA, 25 bp, Homo sapien
atggaacgttgctgcgcctggcctg

SEQ ID NO: 2205060 - DNA, 25 bp, Homo sapien
tccttctgcagcttgcggatataat

SEQ ID NO: 2205061 - DNA, 25 bp, Homo sapien
tgctccagggatcgctgccggctct

SEQ ID NO: 2205062 - DNA, 25 bp, Homo sapien
cttgcggatataatccacagaggcc

SEQ ID NO: 2205063 - DNA, 25 bp, Homo sapien
tgcagcttgcggatataatccacag

SEQ ID NO: 2205064 - DNA, 25 bp, Homo sapien
cacatgaggagtttctcaggagctg

SEQ ID NO: 2205065 - DNA, 25 bp, Homo sapien
gatctcactacagccacattggtct

SEQ ID NO: 2205066 - DNA, 25 bp, Homo sapien
tctttcaaaggtatggagtatccag

SEQ ID NO: 2205067 - DNA, 25 bp, Homo sapien
gcctggaatcttacaatggtgcccc

SEQ ID NO: 2205068 - DNA, 25 bp, Homo sapien
ccaccaaggcacaattttagtagca

SEQ ID NO: 2205069 - DNA, 25 bp, Homo sapien
cctaaaattttaggtgctgacatag

SEQ ID NO: 2205070 - DNA, 25 bp, Homo sapien
aagaaccagacagaggagaaatgcc

SEQ ID NO: 2205071 - DNA, 25 bp, Homo sapien
ctaagtgaacagaaaagtaggtgca

SEQ ID NO: 2205072 - DNA, 25 bp, Homo sapien
gatgagagtgcccagttccttgatc

SEQ ID NO: 2205073 - DNA, 25 bp, Homo sapien
cttagggatgagagtgcccagttcc

SEQ ID NO: 2205074 - DNA, 25 bp, Homo sapien
actggacttagggatgagagtgccc

SEQ ID NO: 2205075 - DNA, 25 bp, Homo sapien
ctggacttagggatgagagtgccca

SEQ ID NO: 2205076 - DNA, 25 bp, Homo sapien
ctgtcgttaatgttgaatcgcctgc

SEQ ID NO: 2205077 - DNA, 25 bp, Homo sapien
tcgttaatgttgaatcgcctgcgac

SEQ ID NO: 2205078 - DNA, 25 bp, Homo sapien
gttaatgttgaatcgcctgcgacgc

SEQ ID NO: 2205079 - DNA, 25 bp, Homo sapien
atgttgaatcgcctgcgacgctcaa

SEQ ID NO: 2205080 - DNA, 25 bp, Homo sapien
tcttctgccgttccttcaaaagggc

SEQ ID NO: 2205081 - DNA, 25 bp, Homo sapien
atcaagcagattccctgacacaggc

SEQ ID NO: 2205082 - DNA, 25 bp, Homo sapien
gatctcccgtttgatgttgggcagc

SEQ ID NO: 2205083 - DNA, 25 bp, Homo sapien
tactgtacacatcaagcagattccc

SEQ ID NO: 2205084 - DNA, 25 bp, Homo sapien
gctggtgtggccacgccttgactac

SEQ ID NO: 2205085 - DNA, 25 bp, Homo sapien
tacagccacttggtatgctctaaag

SEQ ID NO: 2205086 - DNA, 25 bp, Homo sapien
taaagcaagttatgagaccaggcat

SEQ ID NO: 2205087 - DNA, 25 bp, Homo sapien
ccagtctggtggatataaggtccca

SEQ ID NO: 2205088 - DNA, 25 bp, Homo sapien
taaggtcccattctctagttgtgtc

SEQ ID NO: 2205089 - DNA, 25 bp, Homo sapien
tacacacagccagactgagtatggt

SEQ ID NO: 2205090 - DNA, 25 bp, Homo sapien
ttagcacaatcaaggcaagggtctc

SEQ ID NO: 2205091 - DNA, 25 bp, Homo sapien
gacataccctgttctcgtcataagg

SEQ ID NO: 2205092 - DNA, 25 bp, Homo sapien
cagtccaacaaggtccaaaggcatt

SEQ ID NO: 2205093 - DNA, 25 bp, Homo sapien
taactggactccaggctgatgatct

SEQ ID NO: 2205094 - DNA, 25 bp, Homo sapien
tcctgtggtgcctccgggcagatag

SEQ ID NO: 2205095 - DNA, 25 bp, Homo sapien
ctccgggcagatagctgagcatttc

SEQ ID NO: 2205096 - DNA, 25 bp, Homo sapien
gtgcctccgggcagatagctgagca

SEQ ID NO: 2205097 - DNA, 25 bp, Homo sapien
gggaagccagcttgggcccgagtgt

SEQ ID NO: 2205098 - DNA, 25 bp, Homo sapien
tggtagcgcgttgggttctccagat

SEQ ID NO: 2205099 - DNA, 25 bp, Homo sapien
gcagtggctgggcacttgcgggccc

SEQ ID NO: 2205100 - DNA, 25 bp, Homo sapien
ttgggttctccagatgggtctgcac

SEQ ID NO: 2205101 - DNA, 25 bp, Homo sapien
cagagacgccaaccacagagatggc

SEQ ID NO: 2205102 - DNA, 25 bp, Homo sapien
cgcagcaagaccctcgatgaagaag

SEQ ID NO: 2205103 - DNA, 25 bp, Homo sapien
cgcattagctgctgccgcagcaaga

SEQ ID NO: 2205104 - DNA, 25 bp, Homo sapien
tggacggctcaatgtgtggccccca

SEQ ID NO: 2205105 - DNA, 25 bp, Homo sapien
cgatgcagagagtgtagctggggtg

SEQ ID NO: 2205106 - DNA, 25 bp, Homo sapien
gatgcagagagtgtagctggggtgg

SEQ ID NO: 2205107 - DNA, 25 bp, Homo sapien
agacgatgcagagagtgtagctggg

SEQ ID NO: 2205108 - DNA, 25 bp, Homo sapien
agaagacgatgcagagagtgtagct

SEQ ID NO: 2205109 - DNA, 25 bp, Homo sapien
aagcagaattgaggctttggcagca

SEQ ID NO: 2205110 - DNA, 25 bp, Homo sapien
agaagaagcagaattgaggctttgg

SEQ ID NO: 2205111 - DNA, 25 bp, Homo sapien
gcagaagaagcagaattgaggcttt

SEQ ID NO: 2205112 - DNA, 25 bp, Homo sapien
ggagagcagaagaagcagaattgag

SEQ ID NO: 2205113 - DNA, 25 bp, Homo sapien
tgaaagaatgggttgggctggtact

SEQ ID NO: 2205114 - DNA, 25 bp, Homo sapien
attttaccaccactagaaaacgcag

SEQ ID NO: 2205115 - DNA, 25 bp, Homo sapien
tgacatgctctttctggtccctaat

SEQ ID NO: 2205116 - DNA, 25 bp, Homo sapien
gaaaacgcaggctggtgaaagaatg

SEQ ID NO: 2205117 - DNA, 25 bp, Homo sapien
ttttgagctcgtagaagctgtcagg

SEQ ID NO: 2205118 - DNA, 25 bp, Homo sapien
caacaatcccggattccggaagcaa

SEQ ID NO: 2205119 - DNA, 25 bp, Homo sapien
tgtcagcaacaatcccggattccgg

SEQ ID NO: 2205120 - DNA, 25 bp, Homo sapien
aagggttggcttttgagctcgtaga

SEQ ID NO: 2205121 - DNA, 25 bp, Homo sapien
tggcctctacgccatcccgagctgg

SEQ ID NO: 2205122 - DNA, 25 bp, Homo sapien
aacagcacgaacacggctcgagggc

SEQ ID NO: 2205123 - DNA, 25 bp, Homo sapien
gcagctgagccgagtcggccggcct

SEQ ID NO: 2205124 - DNA, 25 bp, Homo sapien
cccgagctggttcggccgcatgaga

SEQ ID NO: 2205125 - DNA, 25 bp, Homo sapien
gccctgccaggccggtcgggcctcg

SEQ ID NO: 2205126 - DNA, 25 bp, Homo sapien
tgccaggccggtcgggcctcggccc

SEQ ID NO: 2205127 - DNA, 25 bp, Homo sapien
cctgccaggccggtcgggcctcggc

SEQ ID NO: 2205128 - DNA, 25 bp, Homo sapien
ctgccaggccggtcgggcctcggcc

SEQ ID NO: 2205129 - DNA, 25 bp, Homo sapien
aagccatggagctagcactgcgcgg

SEQ ID NO: 2205130 - DNA, 25 bp, Homo sapien
ctcctccgctaagccatggagctag

SEQ ID NO: 2205131 - DNA, 25 bp, Homo sapien
cgggcggcgtctgggagatgggatg

SEQ ID NO: 2205132 - DNA, 25 bp, Homo sapien
tccgctaagccatggagctagcact

SEQ ID NO: 2205133 - DNA, 25 bp, Homo sapien
tgaagatgagccttgaagccagggt

SEQ ID NO: 2205134 - DNA, 25 bp, Homo sapien
ttggaccatgaggaaactagctgct

SEQ ID NO: 2205135 - DNA, 25 bp, Homo sapien
gggacatctcatgccccttgctgtt

SEQ ID NO: 2205136 - DNA, 25 bp, Homo sapien
cacatgacctgcattagtccatggg

SEQ ID NO: 2205137 - DNA, 25 bp, Homo sapien
caagacattacccacactggaaggg

SEQ ID NO: 2205138 - DNA, 25 bp, Homo sapien
tttaagcaaacccacacaagttgtg

SEQ ID NO: 2205139 - DNA, 25 bp, Homo sapien
tggacccaagacattacccacactg

SEQ ID NO: 2205140 - DNA, 25 bp, Homo sapien
tttctttttataccagtggatctgg

SEQ ID NO: 2205141 - DNA, 25 bp, Homo sapien
tgaaaagtaggccacttctgtcctt

SEQ ID NO: 2205142 - DNA, 25 bp, Homo sapien
tcctttgaaatgtacaaggacttta

SEQ ID NO: 2205143 - DNA, 25 bp, Homo sapien
gagtctagcagaattgaaaagtagg

SEQ ID NO: 2205144 - DNA, 25 bp, Homo sapien
tgctgatccagaggtcataagttca

SEQ ID NO: 2205145 - DNA, 25 bp, Homo sapien
ggcaaaatgcctaagcagagctgga

SEQ ID NO: 2205146 - DNA, 25 bp, Homo sapien
cccttggttgtcgatggtgtggaac

SEQ ID NO: 2205147 - DNA, 25 bp, Homo sapien
tagggcggtcacagatgtcctgttt

SEQ ID NO: 2205148 - DNA, 25 bp, Homo sapien
caagatttgagagtgccttgctcca

SEQ ID NO: 2205149 - DNA, 25 bp, Homo sapien
tggcgtccgcttgagaccaatgctc

SEQ ID NO: 2205150 - DNA, 25 bp, Homo sapien
cctctagtagcaggcccattggcgt

SEQ ID NO: 2205151 - DNA, 25 bp, Homo sapien
ttgttcttaaggttgcgcaggcgca

SEQ ID NO: 2205152 - DNA, 25 bp, Homo sapien
tgctcttgtcccagtgcctctagta

SEQ ID NO: 2205153 - DNA, 25 bp, Homo sapien
ccaagagtgagataggaaaggcgat

SEQ ID NO: 2205154 - DNA, 25 bp, Homo sapien
tggctgctttcctggctatctcggg

SEQ ID NO: 2205155 - DNA, 25 bp, Homo sapien
tggcctggtgccttaagcatgctct

SEQ ID NO: 2205156 - DNA, 25 bp, Homo sapien
tcagatactgaaagcgtggccgagt

SEQ ID NO: 2205157 - DNA, 25 bp, Homo sapien
aggccgacggcaagcactgcggcca

SEQ ID NO: 2205158 - DNA, 25 bp, Homo sapien
gcgcacagctgcgcgggtctcagct

SEQ ID NO: 2205159 - DNA, 25 bp, Homo sapien
ctcaggagcgtatgaagtggccgca

SEQ ID NO: 2205160 - DNA, 25 bp, Homo sapien
ctgaacaggaaggtgcaagcgccgc

SEQ ID NO: 2205161 - DNA, 25 bp, Homo sapien
ggccttgcacctccctcaggttccc

SEQ ID NO: 2205162 - DNA, 25 bp, Homo sapien
ttcccggccttgcacctccctcagg

SEQ ID NO: 2205163 - DNA, 25 bp, Homo sapien
cgtcctggtcctcaaagacctgtgg

SEQ ID NO: 2205164 - DNA, 25 bp, Homo sapien
tgggtctacccccacgctctgcaga

SEQ ID NO: 2205165 - DNA, 25 bp, Homo sapien
catcgctgcgggtcgcatggatccg

SEQ ID NO: 2205166 - DNA, 25 bp, Homo sapien
ttgatgacgcggtggcaccatcgct

SEQ ID NO: 2205167 - DNA, 25 bp, Homo sapien
acaaagtcgtccagggcgcgtagcg

SEQ ID NO: 2205168 - DNA, 25 bp, Homo sapien
catggatccggagccgccagacgcg

SEQ ID NO: 2205169 - DNA, 25 bp, Homo sapien
ccaccgcggggcacaccgggaaatg

SEQ ID NO: 2205170 - DNA, 25 bp, Homo sapien
gccaggagggggccggactacaaca

SEQ ID NO: 2205171 - DNA, 25 bp, Homo sapien
ctgccggttaatgtggctggaccag

SEQ ID NO: 2205172 - DNA, 25 bp, Homo sapien
ggttaatgtggctggaccagccagg

SEQ ID NO: 2205173 - DNA, 25 bp, Homo sapien
tattcatcacatcggagatcatctc

SEQ ID NO: 2205174 - DNA, 25 bp, Homo sapien
gcctggcccttggggcacacagtca

SEQ ID NO: 2205175 - DNA, 25 bp, Homo sapien
cctggcaatttcctccaggttaggg

SEQ ID NO: 2205176 - DNA, 25 bp, Homo sapien
acatcggagatcatctcttcctagg

SEQ ID NO: 2205177 - DNA, 25 bp, Homo sapien
tagacatagctctgctgagtggaaa

SEQ ID NO: 2205178 - DNA, 25 bp, Homo sapien
agacatagctctgctgagtggaaag

SEQ ID NO: 2205179 - DNA, 25 bp, Homo sapien
ttatttagacatagctctgctgagt

SEQ ID NO: 2205180 - DNA, 25 bp, Homo sapien
tttagacatagctctgctgagtgga

SEQ ID NO: 2205181 - DNA, 25 bp, Homo sapien
gttctgccactgcaggtccctagca

SEQ ID NO: 2205182 - DNA, 25 bp, Homo sapien
cactgcaggtccctagcacagcccc

SEQ ID NO: 2205183 - DNA, 25 bp, Homo sapien
gccactgcaggtccctagcacagcc

SEQ ID NO: 2205184 - DNA, 25 bp, Homo sapien
tctgccactgcaggtccctagcaca

SEQ ID NO: 2205185 - DNA, 25 bp, Homo sapien
tcatcatcatcacagatgtcaaggt

SEQ ID NO: 2205186 - DNA, 25 bp, Homo sapien
atcatcatcacagatgtcaaggtac

SEQ ID NO: 2205187 - DNA, 25 bp, Homo sapien
aagtcatcatcatcacagatgtcaa

SEQ ID NO: 2205188 - DNA, 25 bp, Homo sapien
gtcatcatcatcacagatgtcaagg

SEQ ID NO: 2205189 - DNA, 25 bp, Homo sapien
atcaggagtgaagacatatttgtgg

SEQ ID NO: 2205190 - DNA, 25 bp, Homo sapien
agtgaagacatatttgtggaaggtc

SEQ ID NO: 2205191 - DNA, 25 bp, Homo sapien
aagacatatttgtggaaggtcccat

SEQ ID NO: 2205192 - DNA, 25 bp, Homo sapien
caggagtgaagacatatttgtggaa

SEQ ID NO: 2205193 - DNA, 25 bp, Homo sapien
ctgcaggcctttgccccatgcagta

SEQ ID NO: 2205194 - DNA, 25 bp, Homo sapien
tgaagctgagcctcacatggcccta

SEQ ID NO: 2205195 - DNA, 25 bp, Homo sapien
tctcaggacctagggtctgcctcca

SEQ ID NO: 2205196 - DNA, 25 bp, Homo sapien
gctgtcccccttactgatgatgaag

SEQ ID NO: 2205197 - DNA, 25 bp, Homo sapien
caggctccactgagagtccacgtac

SEQ ID NO: 2205198 - DNA, 25 bp, Homo sapien
agtccacgtactgcccaatcatagg

SEQ ID NO: 2205199 - DNA, 25 bp, Homo sapien
gctccactgagagtccacgtactgc

SEQ ID NO: 2205200 - DNA, 25 bp, Homo sapien
ttcttggaagtattgcgaccgaagg

SEQ ID NO: 2205201 - DNA, 25 bp, Homo sapien
tgcaggcagcactggctaagcccag

SEQ ID NO: 2205202 - DNA, 25 bp, Homo sapien
tggctaagcccaggtatggtaaatg

SEQ ID NO: 2205203 - DNA, 25 bp, Homo sapien
actggctaagcccaggtatggtaaa

SEQ ID NO: 2205204 - DNA, 25 bp, Homo sapien
taagcccaggtatggtaaatgggca

SEQ ID NO: 2205205 - DNA, 25 bp, Homo sapien
ggcggttgaggcgggtatccttgag

SEQ ID NO: 2205206 - DNA, 25 bp, Homo sapien
cggcggttgaggcgggtatccttga

SEQ ID NO: 2205207 - DNA, 25 bp, Homo sapien
gagcaaagatatggacagtaccctt

SEQ ID NO: 2205208 - DNA, 25 bp, Homo sapien
aaagatatggacagtacccttatca

SEQ ID NO: 2205209 - DNA, 25 bp, Homo sapien
gaaggaggagtcgtggctgaagtta

SEQ ID NO: 2205210 - DNA, 25 bp, Homo sapien
aggaggagtcgtggctgaagttaat

SEQ ID NO: 2205211 - DNA, 25 bp, Homo sapien
aaggaggagtcgtggctgaagttaa

SEQ ID NO: 2205212 - DNA, 25 bp, Homo sapien
gaggctgaggccactacagtgcctg

SEQ ID NO: 2205213 - DNA, 25 bp, Homo sapien
aggctgaggccactacagtgcctgg

SEQ ID NO: 2205214 - DNA, 25 bp, Homo sapien
tgtcaaagaggcgaataagggtacc

SEQ ID NO: 2205215 - DNA, 25 bp, Homo sapien
attgtgtgtcaaagaggcgaataag

SEQ ID NO: 2205216 - DNA, 25 bp, Homo sapien
cattgatcgtgaatggagcagacga

SEQ ID NO: 2205217 - DNA, 25 bp, Homo sapien
attgatcgtgaatggagcagacgag

SEQ ID NO: 2205218 - DNA, 25 bp, Homo sapien
gatcgtgaatggagcagacgaggtg

SEQ ID NO: 2205219 - DNA, 25 bp, Homo sapien
cgtgaatggagcagacgaggtgcca

SEQ ID NO: 2205220 - DNA, 25 bp, Homo sapien
aggggccaagagtccacaaggaagc

SEQ ID NO: 2205221 - DNA, 25 bp, Homo sapien
cagtccaccaacctacccacccttg

SEQ ID NO: 2205222 - DNA, 25 bp, Homo sapien
aaggggccaagagtccacaaggaag

SEQ ID NO: 2205223 - DNA, 25 bp, Homo sapien
cagactcccacacttgtgtcccggg

SEQ ID NO: 2205224 - DNA, 25 bp, Homo sapien
gttgcagactcccacacttgtgtcc

SEQ ID NO: 2205225 - DNA, 25 bp, Homo sapien
tgcagactcccacacttgtgtcccg

SEQ ID NO: 2205226 - DNA, 25 bp, Homo sapien
caagttgcagactcccacacttgtg

SEQ ID NO: 2205227 - DNA, 25 bp, Homo sapien
ctagggtgtgaagatggggggtggg

SEQ ID NO: 2205228 - DNA, 25 bp, Homo sapien
catgtcctcacgaggtgtttttgct

SEQ ID NO: 2205229 - DNA, 25 bp, Homo sapien
atgtcctcacgaggtgtttttgctc

SEQ ID NO: 2205230 - DNA, 25 bp, Homo sapien
tgtcctcacgaggtgtttttgctct

SEQ ID NO: 2205231 - DNA, 25 bp, Homo sapien
ccatgtcctcacgaggtgtttttgc

SEQ ID NO: 2205232 - DNA, 25 bp, Homo sapien
aaggagtacacatagatgcggttct

SEQ ID NO: 2205233 - DNA, 25 bp, Homo sapien
gggaaggagtacacatagatgcggt

SEQ ID NO: 2205234 - DNA, 25 bp, Homo sapien
aggagtacacatagatgcggttctt

SEQ ID NO: 2205235 - DNA, 25 bp, Homo sapien
gaaggagtacacatagatgcggttc

SEQ ID NO: 2205236 - DNA, 25 bp, Homo sapien
gcgcatgcgcacagaaagcactggc

SEQ ID NO: 2205237 - DNA, 25 bp, Homo sapien
cgcatgcgcacagaaagcactggct

SEQ ID NO: 2205238 - DNA, 25 bp, Homo sapien
gcaggtgggtgggttgtcggggcca

SEQ ID NO: 2205239 - DNA, 25 bp, Homo sapien
ctgggcaggtgggtgggttgtcggg

SEQ ID NO: 2205240 - DNA, 25 bp, Homo sapien
tcaaagtggttgagtgtctggccaa

SEQ ID NO: 2205241 - DNA, 25 bp, Homo sapien
cacgagcacttgtggatatgatccc

SEQ ID NO: 2205242 - DNA, 25 bp, Homo sapien
tcggtaactatttctgcctccaggg

SEQ ID NO: 2205243 - DNA, 25 bp, Homo sapien
gctcatcagcaaccaaacagggact

SEQ ID NO: 2205244 - DNA, 25 bp, Homo sapien
gagatctctgagaacttgggactac

SEQ ID NO: 2205245 - DNA, 25 bp, Homo sapien
aaggttggagcggtgcagcatctcc

SEQ ID NO: 2205246 - DNA, 25 bp, Homo sapien
gcccatgctgcccacctgctcgtgg

SEQ ID NO: 2205247 - DNA, 25 bp, Homo sapien
gagaacttgggactactaccaccgc

SEQ ID NO: 2205248 - DNA, 25 bp, Homo sapien
agcccagctcttctgcccattgccc

SEQ ID NO: 2205249 - DNA, 25 bp, Homo sapien
cagtggaggtgggagccaatgccca

SEQ ID NO: 2205250 - DNA, 25 bp, Homo sapien
ggtgggagccaatgcccagcccagc

SEQ ID NO: 2205251 - DNA, 25 bp, Homo sapien
cagggaccagggtgtcagtggaggt

SEQ ID NO: 2205252 - DNA, 25 bp, Homo sapien
ctccatcaagggctccacgttgtag

SEQ ID NO: 2205253 - DNA, 25 bp, Homo sapien
gctccacgttgtagatgcgcacacc

SEQ ID NO: 2205254 - DNA, 25 bp, Homo sapien
tgtagatgcgcacacctgtctccat

SEQ ID NO: 2205255 - DNA, 25 bp, Homo sapien
cttctccatcaagggctccacgttg

SEQ ID NO: 2205256 - DNA, 25 bp, Homo sapien
ggttgaaacgcaggctggtcactcc

SEQ ID NO: 2205257 - DNA, 25 bp, Homo sapien
tggttgaaacgcaggctggtcactc

SEQ ID NO: 2205258 - DNA, 25 bp, Homo sapien
ttgaaacgcaggctggtcactcctc

SEQ ID NO: 2205259 - DNA, 25 bp, Homo sapien
ttggttgaaacgcaggctggtcact

SEQ ID NO: 2205260 - DNA, 25 bp, Homo sapien
gcccggctcgggtgtttacatcagg

SEQ ID NO: 2205261 - DNA, 25 bp, Homo sapien
gagcccggctcgggtgtttacatca

SEQ ID NO: 2205262 - DNA, 25 bp, Homo sapien
agcccggctcgggtgtttacatcag

SEQ ID NO: 2205263 - DNA, 25 bp, Homo sapien
agagtagccgcaccggttcgcaaca

SEQ ID NO: 2205264 - DNA, 25 bp, Homo sapien
ccgagactgtctgagggaacccgga

SEQ ID NO: 2205265 - DNA, 25 bp, Homo sapien
tagttcccgggtcttcggagcatcg

SEQ ID NO: 2205266 - DNA, 25 bp, Homo sapien
ttccctgctaacaagacgcggacct

SEQ ID NO: 2205267 - DNA, 25 bp, Homo sapien
tgtgggtgtcacatactgcttatcc

SEQ ID NO: 2205268 - DNA, 25 bp, Homo sapien
gcttagacctttctctggaacacca

SEQ ID NO: 2205269 - DNA, 25 bp, Homo sapien
tggaacaccagactcaaacgtactg

SEQ ID NO: 2205270 - DNA, 25 bp, Homo sapien
tggaagatcctctaggccttcagct

SEQ ID NO: 2205271 - DNA, 25 bp, Homo sapien
gaagatgcggtctcattatgttggc

SEQ ID NO: 2205272 - DNA, 25 bp, Homo sapien
tgtgaagatgcggtctcattatgtt

SEQ ID NO: 2205273 - DNA, 25 bp, Homo sapien
atattttttgtgaagatgcggtctc

SEQ ID NO: 2205274 - DNA, 25 bp, Homo sapien
tttttgtgaagatgcggtctcatta

SEQ ID NO: 2205275 - DNA, 25 bp, Homo sapien
tgaacactgaccttgagacatagtt

SEQ ID NO: 2205276 - DNA, 25 bp, Homo sapien
ccatgttgtttactgtagggctgaa

SEQ ID NO: 2205277 - DNA, 25 bp, Homo sapien
taagcaaccaattacggcctggtgg

SEQ ID NO: 2205278 - DNA, 25 bp, Homo sapien
tcgctattttggagctaagcaacca

SEQ ID NO: 2205279 - DNA, 25 bp, Homo sapien
ttcaatcttttggactcaagtaatc

SEQ ID NO: 2205280 - DNA, 25 bp, Homo sapien
tctttatagattcaaatggtaggca

SEQ ID NO: 2205281 - DNA, 25 bp, Homo sapien
tgctctggatttgacattgcacttg

SEQ ID NO: 2205282 - DNA, 25 bp, Homo sapien
taactgacatgtgccagagttggca

SEQ ID NO: 2205283 - DNA, 25 bp, Homo sapien
cgcgcccggccaaaatgtaacaatt

SEQ ID NO: 2205284 - DNA, 25 bp, Homo sapien
gcccggccaaaatgtaacaatttca

SEQ ID NO: 2205285 - DNA, 25 bp, Homo sapien
ctgtaaaaagataagtggtcacctt

SEQ ID NO: 2205286 - DNA, 25 bp, Homo sapien
tgtaaaaagataagtggtcacctta

SEQ ID NO: 2205287 - DNA, 25 bp, Homo sapien
tcactgctgcaaacgttggaccggc

SEQ ID NO: 2205288 - DNA, 25 bp, Homo sapien
gacagtaaatgaacgcaggaaccac

SEQ ID NO: 2205289 - DNA, 25 bp, Homo sapien
aaaaccatcagtttgcgcctggaaa

SEQ ID NO: 2205290 - DNA, 25 bp, Homo sapien
taaataagacgtgtcaacgcagcca

SEQ ID NO: 2205291 - DNA, 25 bp, Homo sapien
ggcgaacaaccccacacgaggcagt

SEQ ID NO: 2205292 - DNA, 25 bp, Homo sapien
cttcacgggcgaacaaccccacacg

SEQ ID NO: 2205293 - DNA, 25 bp, Homo sapien
gggcgaacaaccccacacgaggcag

SEQ ID NO: 2205294 - DNA, 25 bp, Homo sapien
cacgggcgaacaaccccacacgagg

SEQ ID NO: 2205295 - DNA, 25 bp, Homo sapien
agctaccgagaagcgccaatcaacc

SEQ ID NO: 2205296 - DNA, 25 bp, Homo sapien
aaagcacgactttcccggagcccag

SEQ ID NO: 2205297 - DNA, 25 bp, Homo sapien
cactgaatggcacccactgcgcatg

SEQ ID NO: 2205298 - DNA, 25 bp, Homo sapien
gcatgccccagagcggcgacgaatg

SEQ ID NO: 2205299 - DNA, 25 bp, Homo sapien
aatgtagcagatttttagtgtcccc

SEQ ID NO: 2205300 - DNA, 25 bp, Homo sapien
tgggaacaacaatttctcacgtttc

SEQ ID NO: 2205301 - DNA, 25 bp, Homo sapien
ttgacggagccggattgcttcagcc

SEQ ID NO: 2205302 - DNA, 25 bp, Homo sapien
caatctggacgcagagaaagaagta

SEQ ID NO: 2205303 - DNA, 25 bp, Homo sapien
tgaaggccacattgggacttgccct

SEQ ID NO: 2205304 - DNA, 25 bp, Homo sapien
ggttggaactaccactgcagaaggg

SEQ ID NO: 2205305 - DNA, 25 bp, Homo sapien
gactgctcagcgaacagtgtcacaa

SEQ ID NO: 2205306 - DNA, 25 bp, Homo sapien
tacccatttagtgtcgtctgtccag

SEQ ID NO: 2205307 - DNA, 25 bp, Homo sapien
tggactgaccttacagcactacagg

SEQ ID NO: 2205308 - DNA, 25 bp, Homo sapien
tgctagcaacagtgctaccacaggg

SEQ ID NO: 2205309 - DNA, 25 bp, Homo sapien
gcagtggctatatggaggcttctca

SEQ ID NO: 2205310 - DNA, 25 bp, Homo sapien
gtctagaccgctttccccagatagc

SEQ ID NO: 2205311 - DNA, 25 bp, Homo sapien
atctgctttagcattgtggcacggg

SEQ ID NO: 2205312 - DNA, 25 bp, Homo sapien
agctaggtgttctggacaaagggcc

SEQ ID NO: 2205313 - DNA, 25 bp, Homo sapien
gatcagcagggctcctttcaaggta

SEQ ID NO: 2205314 - DNA, 25 bp, Homo sapien
ccctgaatgtaaggagccctgtcct

SEQ ID NO: 2205315 - DNA, 25 bp, Homo sapien
gactactggacatgagaagttggga

SEQ ID NO: 2205316 - DNA, 25 bp, Homo sapien
ggaacatcctccctacgattaacaa

SEQ ID NO: 2205317 - DNA, 25 bp, Homo sapien
ctgctctaaactgagagtgaaagca

SEQ ID NO: 2205318 - DNA, 25 bp, Homo sapien
taacaaaatacaagccagagaccag

SEQ ID NO: 2205319 - DNA, 25 bp, Homo sapien
tgagtcctttaacttgtcctgtacc

SEQ ID NO: 2205320 - DNA, 25 bp, Homo sapien
aagcaaggcttaaaagtgaaatggt

SEQ ID NO: 2205321 - DNA, 25 bp, Homo sapien
gtcctgtaccctgagcagaaaagca

SEQ ID NO: 2205322 - DNA, 25 bp, Homo sapien
cactgtgcccaagcttatagtatct

SEQ ID NO: 2205323 - DNA, 25 bp, Homo sapien
atatggtacagaactggtaccagcc

SEQ ID NO: 2205324 - DNA, 25 bp, Homo sapien
gaggatggaacaatgatcttcccac

SEQ ID NO: 2205325 - DNA, 25 bp, Homo sapien
gaaggcaactttctcatatggtaca

SEQ ID NO: 2205326 - DNA, 25 bp, Homo sapien
ttgtccttgtcccaggactgcacca

SEQ ID NO: 2205327 - DNA, 25 bp, Homo sapien
agttgcaccaaagcccggctccgtg

SEQ ID NO: 2205328 - DNA, 25 bp, Homo sapien
tagggcccatgtactggcagatggc

SEQ ID NO: 2205329 - DNA, 25 bp, Homo sapien
caccacctgattttctcttggcagt

SEQ ID NO: 2205330 - DNA, 25 bp, Homo sapien
ggcagatggcatcgtagtgaagctc

SEQ ID NO: 2205331 - DNA, 25 bp, Homo sapien
caccaccatcacacggtcaccctct

SEQ ID NO: 2205332 - DNA, 25 bp, Homo sapien
agcaccaccatcacacggtcaccct

SEQ ID NO: 2205333 - DNA, 25 bp, Homo sapien
tctgccttgggaaccagggtctcca

SEQ ID NO: 2205334 - DNA, 25 bp, Homo sapien
gtcaccctctgccttgggaaccagg

SEQ ID NO: 2205335 - DNA, 25 bp, Homo sapien
ttcatctgtccgacatacacaggta

SEQ ID NO: 2205336 - DNA, 25 bp, Homo sapien
caggactcggccttcatctgtccga

SEQ ID NO: 2205337 - DNA, 25 bp, Homo sapien
ggactcggccttcatctgtccgaca

SEQ ID NO: 2205338 - DNA, 25 bp, Homo sapien
tgtccgacatacacaggtatctggg

SEQ ID NO: 2205339 - DNA, 25 bp, Homo sapien
gttgtccacaaaccgcacacgcagg

SEQ ID NO: 2205340 - DNA, 25 bp, Homo sapien
catgttgtccacaaaccgcacacgc

SEQ ID NO: 2205341 - DNA, 25 bp, Homo sapien
accgcacacgcaggtccctgtgcaa

SEQ ID NO: 2205342 - DNA, 25 bp, Homo sapien
cttggtgttgtaatattggcctcct

SEQ ID NO: 2205343 - DNA, 25 bp, Homo sapien
agggtcttccgtgatgaggcagttc

SEQ ID NO: 2205344 - DNA, 25 bp, Homo sapien
tgtcctgctggatgtagagttcttg

SEQ ID NO: 2205345 - DNA, 25 bp, Homo sapien
gtgtttccgcttcctctctgagttg

SEQ ID NO: 2205346 - DNA, 25 bp, Homo sapien
ctggaaggtgtttccgcttcctctc

SEQ ID NO: 2205347 - DNA, 25 bp, Homo sapien
ccgaacattgtcaggatcaaggcct

SEQ ID NO: 2205348 - DNA, 25 bp, Homo sapien
ggagacaggccgcaggtagtactca

SEQ ID NO: 2205349 - DNA, 25 bp, Homo sapien
acagccagacgaaccatggcccgaa

SEQ ID NO: 2205350 - DNA, 25 bp, Homo sapien
ggtagtactcactaacagtcaccac

SEQ ID NO: 2205351 - DNA, 25 bp, Homo sapien
ctcatctggtcttggcatgcgggag

SEQ ID NO: 2205352 - DNA, 25 bp, Homo sapien
gccagaaagaaccaccacagctcct

SEQ ID NO: 2205353 - DNA, 25 bp, Homo sapien
tgggcctcggtcaggttggcaccca

SEQ ID NO: 2205354 - DNA, 25 bp, Homo sapien
ctcagtgagttgacacggggcttca

SEQ ID NO: 2205355 - DNA, 25 bp, Homo sapien
tgattgaaggtgcggccgatgccct

SEQ ID NO: 2205356 - DNA, 25 bp, Homo sapien
gggaccgcctcataattagcctcct

SEQ ID NO: 2205357 - DNA, 25 bp, Homo sapien
aaggtgcggccgatgccctcgccag

SEQ ID NO: 2205358 - DNA, 25 bp, Homo sapien
cacggggaccgcctcataattagcc

SEQ ID NO: 2205359 - DNA, 25 bp, Homo sapien
gctcagccctttgcagtggtattgg

SEQ ID NO: 2205360 - DNA, 25 bp, Homo sapien
aaagagaggaattgaggatgactcc

SEQ ID NO: 2205361 - DNA, 25 bp, Homo sapien
gaaattactctaatagtccagatga

SEQ ID NO: 2205362 - DNA, 25 bp, Homo sapien
gatgataggattgtgctggcatatt

SEQ ID NO: 2205363 - DNA, 25 bp, Homo sapien
aaagaagaggtgaaaagtcaggtct

SEQ ID NO: 2205364 - DNA, 25 bp, Homo sapien
tatgaaagacagacttggttacttc

SEQ ID NO: 2205365 - DNA, 25 bp, Homo sapien
tagactcaaaagaagcagtgcaaga

SEQ ID NO: 2205366 - DNA, 25 bp, Homo sapien
tacttctgtagacatgcctctcacg

SEQ ID NO: 2205367 - DNA, 25 bp, Homo sapien
acagactttccctgctacgtgcagg

SEQ ID NO: 2205368 - DNA, 25 bp, Homo sapien
gatacccagattcatttggtaatgc

SEQ ID NO: 2205369 - DNA, 25 bp, Homo sapien
caggtggcgggcctctagcacacac

SEQ ID NO: 2205370 - DNA, 25 bp, Homo sapien
tttttagcatccagatacccagatt

SEQ ID NO: 2205371 - DNA, 25 bp, Homo sapien
gtggggtcgacacccgcattctctc

SEQ ID NO: 2205372 - DNA, 25 bp, Homo sapien
tgcccggggttcgctgtctgcccct

SEQ ID NO: 2205373 - DNA, 25 bp, Homo sapien
ggatagcgagcgtggggtcgacacc

SEQ ID NO: 2205374 - DNA, 25 bp, Homo sapien
ctggatcatggggatagcgagcgtg

SEQ ID NO: 2205375 - DNA, 25 bp, Homo sapien
cccatccgccaaggccccagtatct

SEQ ID NO: 2205376 - DNA, 25 bp, Homo sapien
tggtggctgcctgcgatggccattc

SEQ ID NO: 2205377 - DNA, 25 bp, Homo sapien
atcaaagggatgacgagttccttgg

SEQ ID NO: 2205378 - DNA, 25 bp, Homo sapien
gctgcctgcgatggccattctggat

SEQ ID NO: 2205379 - DNA, 25 bp, Homo sapien
ggcaaaacaccctctttggagtcag

SEQ ID NO: 2205380 - DNA, 25 bp, Homo sapien
ggaagcagccgtcagcggcaaaaca

SEQ ID NO: 2205381 - DNA, 25 bp, Homo sapien
gacgtgcgagtgaagccgaatgaaa

SEQ ID NO: 2205382 - DNA, 25 bp, Homo sapien
cttctcctccggagatggccccgcg

SEQ ID NO: 2205383 - DNA, 25 bp, Homo sapien
ctccttttcccaggccggcgcgctg

SEQ ID NO: 2205384 - DNA, 25 bp, Homo sapien
aggccggcgcgctgcttgctgggaa

SEQ ID NO: 2205385 - DNA, 25 bp, Homo sapien
ccaggccggcgcgctgcttgctggg

SEQ ID NO: 2205386 - DNA, 25 bp, Homo sapien
ttttcccaggccggcgcgctgcttg

SEQ ID NO: 2205387 - DNA, 25 bp, Homo sapien
tgcagaggctaggtcatggatagca

SEQ ID NO: 2205388 - DNA, 25 bp, Homo sapien
tgttaacaggtcctgcctccaagga

SEQ ID NO: 2205389 - DNA, 25 bp, Homo sapien
tacttccaaaatggaccgaagactg

SEQ ID NO: 2205390 - DNA, 25 bp, Homo sapien
tagggaagggtggtcaaacagacaa

SEQ ID NO: 2205391 - DNA, 25 bp, Homo sapien
aagtgtcttagactgtttatgttgc

SEQ ID NO: 2205392 - DNA, 25 bp, Homo sapien
tactttatcgataaataagtgtctt

SEQ ID NO: 2205393 - DNA, 25 bp, Homo sapien
ttatcgataaataagtgtcttagac

SEQ ID NO: 2205394 - DNA, 25 bp, Homo sapien
cgataaataagtgtcttagactgtt

SEQ ID NO: 2205395 - DNA, 25 bp, Homo sapien
tagttatttaaggctgggtaattca

SEQ ID NO: 2205396 - DNA, 25 bp, Homo sapien
cctaagtccaaggagagccaccatg

SEQ ID NO: 2205397 - DNA, 25 bp, Homo sapien
tgctgctttcattcatggcctaagt

SEQ ID NO: 2205398 - DNA, 25 bp, Homo sapien
tttatttatataattgggactcact

SEQ ID NO: 2205399 - DNA, 25 bp, Homo sapien
ggacagtaggagaaatggcctctct

SEQ ID NO: 2205400 - DNA, 25 bp, Homo sapien
tatggtatccctatgagtcgtcttg

SEQ ID NO: 2205401 - DNA, 25 bp, Homo sapien
catcggcaggcttgcgtctcaagaa

SEQ ID NO: 2205402 - DNA, 25 bp, Homo sapien
gggatccaggatcaaacctatgcca

SEQ ID NO: 2205403 - DNA, 25 bp, Homo sapien
ctacctgcccattgatcaggtaact

SEQ ID NO: 2205404 - DNA, 25 bp, Homo sapien
cctgcccattgatcaggtaactgag

SEQ ID NO: 2205405 - DNA, 25 bp, Homo sapien
cccattgatcaggtaactgagtgta

SEQ ID NO: 2205406 - DNA, 25 bp, Homo sapien
caggtaactgagtgtaggctctgtg

SEQ ID NO: 2205407 - DNA, 25 bp, Homo sapien
gggccaggctcaattatcgacagat

SEQ ID NO: 2205408 - DNA, 25 bp, Homo sapien
ttatctgcctctagtgctagcaggg

SEQ ID NO: 2205409 - DNA, 25 bp, Homo sapien
gctgccaaggctcttaagcacaggg

SEQ ID NO: 2205410 - DNA, 25 bp, Homo sapien
taattcttgtcgatactggtgctga

SEQ ID NO: 2205411 - DNA, 25 bp, Homo sapien
acccacctaggccaagagtcacttg

SEQ ID NO: 2205412 - DNA, 25 bp, Homo sapien
gaatagccatgccacaactgctagg

SEQ ID NO: 2205413 - DNA, 25 bp, Homo sapien
tcagaccttgccttagaaactccat

SEQ ID NO: 2205414 - DNA, 25 bp, Homo sapien
tacatctcgcatctttcagaccttg

SEQ ID NO: 2205415 - DNA, 25 bp, Homo sapien
atgttctaaatttacaatgggatga

SEQ ID NO: 2205416 - DNA, 25 bp, Homo sapien
aaatgttctaaatttacaatgggat

SEQ ID NO: 2205417 - DNA, 25 bp, Homo sapien
atatactaaaaccaagtgtacacct

SEQ ID NO: 2205418 - DNA, 25 bp, Homo sapien
cactgcgactggcatggggtttctt

SEQ ID NO: 2205419 - DNA, 25 bp, Homo sapien
tagccgcagctccttgaatttacgt

SEQ ID NO: 2205420 - DNA, 25 bp, Homo sapien
caaggttcattaaggcagactccag

SEQ ID NO: 2205421 - DNA, 25 bp, Homo sapien
gcaccagagtttggagtcttaccca

SEQ ID NO: 2205422 - DNA, 25 bp, Homo sapien
tattgtccttacagcccagaacgat

SEQ ID NO: 2205423 - DNA, 25 bp, Homo sapien
aatttgactcccgaaccttccagag

SEQ ID NO: 2205424 - DNA, 25 bp, Homo sapien
atttgactcccgaaccttccagagc

SEQ ID NO: 2205425 - DNA, 25 bp, Homo sapien
tccagagcacaccctttaatcagcc

SEQ ID NO: 2205426 - DNA, 25 bp, Homo sapien
caggcgcaatgtggcgcccgccctg

SEQ ID NO: 2205427 - DNA, 25 bp, Homo sapien
atcaacggagagtcaacgcagggcc

SEQ ID NO: 2205428 - DNA, 25 bp, Homo sapien
tccagcaccgttggttagagacatg

SEQ ID NO: 2205429 - DNA, 25 bp, Homo sapien
cctggttattcgtcggcctctggag

SEQ ID NO: 2205430 - DNA, 25 bp, Homo sapien
gacgtcgtgctccacatcaacggag

SEQ ID NO: 2205431 - DNA, 25 bp, Homo sapien
gagattgtgggaaatgatttctgag

SEQ ID NO: 2205432 - DNA, 25 bp, Homo sapien
gaaggaagggtcttagttctcagag

SEQ ID NO: 2205433 - DNA, 25 bp, Homo sapien
ccaaaaagccagtcaagagagattt

SEQ ID NO: 2205434 - DNA, 25 bp, Homo sapien
cgaaggcagagtggatcttagccgg

SEQ ID NO: 2205435 - DNA, 25 bp, Homo sapien
taatcgctgacgagcttcgtgctgc

SEQ ID NO: 2205436 - DNA, 25 bp, Homo sapien
tcgcagcgtcagtggtacgaccctt

SEQ ID NO: 2205437 - DNA, 25 bp, Homo sapien
gatccggtcttgacttgccaggcgc

SEQ ID NO: 2205438 - DNA, 25 bp, Homo sapien
tgcccgggccactctgtaaaggagc

SEQ ID NO: 2205439 - DNA, 25 bp, Homo sapien
tacccctgacttagagcctggtgga

SEQ ID NO: 2205440 - DNA, 25 bp, Homo sapien
cccagggagtgcagatagctacaga

SEQ ID NO: 2205441 - DNA, 25 bp, Homo sapien
gaatatgtccatttcgcagaggagg

SEQ ID NO: 2205442 - DNA, 25 bp, Homo sapien
gaagtcagcaaagggctcaagagcc

SEQ ID NO: 2205443 - DNA, 25 bp, Homo sapien
tattgtgaacgttcataccttttct

SEQ ID NO: 2205444 - DNA, 25 bp, Homo sapien
tttcaatccttacccagttattgtg

SEQ ID NO: 2205445 - DNA, 25 bp, Homo sapien
actgtgttgccgaggttgatctcca

SEQ ID NO: 2205446 - DNA, 25 bp, Homo sapien
acccagttattgtgaacgttcatac

SEQ ID NO: 2205447 - DNA, 25 bp, Homo sapien
gaattctggcaacatactgggcccc

SEQ ID NO: 2205448 - DNA, 25 bp, Homo sapien
gattcccgcggttctaagctgaagc

SEQ ID NO: 2205449 - DNA, 25 bp, Homo sapien
cgaagggtcccgctattactgctcc

SEQ ID NO: 2205450 - DNA, 25 bp, Homo sapien
aaaccccgctgagagtatatgcatg

SEQ ID NO: 2205451 - DNA, 25 bp, Homo sapien
tgaggtaaaagtgcctttattggga

SEQ ID NO: 2205452 - DNA, 25 bp, Homo sapien
ttttgtcttccagcctgccaatcaa

SEQ ID NO: 2205453 - DNA, 25 bp, Homo sapien
gtcctccttctgcacgatccaatag

SEQ ID NO: 2205454 - DNA, 25 bp, Homo sapien
ccatatgtgtgtgcctaggtcctcc

SEQ ID NO: 2205455 - DNA, 25 bp, Homo sapien
caataggagacaccagttctgactg

SEQ ID NO: 2205456 - DNA, 25 bp, Homo sapien
caataatacaaacgagaggcccggt

SEQ ID NO: 2205457 - DNA, 25 bp, Homo sapien
ggaacgctgacacgagcctggagtc

SEQ ID NO: 2205458 - DNA, 25 bp, Homo sapien
caaatgtgggtaaatttcaagcatc

SEQ ID NO: 2205459 - DNA, 25 bp, Homo sapien
tccaaataatctcctcggtgtgggt

SEQ ID NO: 2205460 - DNA, 25 bp, Homo sapien
atcatctactctgactggagaatgg

SEQ ID NO: 2205461 - DNA, 25 bp, Homo sapien
gggcatgggcctcatcatctactct

SEQ ID NO: 2205462 - DNA, 25 bp, Homo sapien
tgggcctcatcatctactctgactg

SEQ ID NO: 2205463 - DNA, 25 bp, Homo sapien
gaggatttatgacttaggttgtagg

SEQ ID NO: 2205464 - DNA, 25 bp, Homo sapien
cttgtctcgggcctgacgaggcatc

SEQ ID NO: 2205465 - DNA, 25 bp, Homo sapien
acgaggcatccctgcgcgagagtcc

SEQ ID NO: 2205466 - DNA, 25 bp, Homo sapien
ggcctgacgaggcatccctgcgcga

SEQ ID NO: 2205467 - DNA, 25 bp, Homo sapien
tcaagccacgatgcagttcttgtct

SEQ ID NO: 2205468 - DNA, 25 bp, Homo sapien
gggagcgataaagatggggagttga

SEQ ID NO: 2205469 - DNA, 25 bp, Homo sapien
gagcgataaagatggggagttgaag

SEQ ID NO: 2205470 - DNA, 25 bp, Homo sapien
ggagttgaaggtctccattgcagtg

SEQ ID NO: 2205471 - DNA, 25 bp, Homo sapien
agttgaaggtctccattgcagtgtc

SEQ ID NO: 2205472 - DNA, 25 bp, Homo sapien
ctgatcccgcgtcacattgatagtg

SEQ ID NO: 2205473 - DNA, 25 bp, Homo sapien
ggatgcgctctcctaggaagaagcc

SEQ ID NO: 2205474 - DNA, 25 bp, Homo sapien
gagcaagattccgagtctgaccctg

SEQ ID NO: 2205475 - DNA, 25 bp, Homo sapien
cctctgatgattcggaactggaact

SEQ ID NO: 2205476 - DNA, 25 bp, Homo sapien
attatgatgatggtggcggcgacgg

SEQ ID NO: 2205477 - DNA, 25 bp, Homo sapien
cttgggtggcggttgtgatggtgat

SEQ ID NO: 2205478 - DNA, 25 bp, Homo sapien
gtgattatgatgatggtggcggcga

SEQ ID NO: 2205479 - DNA, 25 bp, Homo sapien
ctgcttgggtggcggttgtgatggt

SEQ ID NO: 2205480 - DNA, 25 bp, Homo sapien
tccggcgcgggcctccttcagacac

SEQ ID NO: 2205481 - DNA, 25 bp, Homo sapien
cgctgggccgggggtgcactcaggg

SEQ ID NO: 2205482 - DNA, 25 bp, Homo sapien
cgggggtgcactcagggtccggcgc

SEQ ID NO: 2205483 - DNA, 25 bp, Homo sapien
tgcactcagggtccggcgcgggcct

SEQ ID NO: 2205484 - DNA, 25 bp, Homo sapien
ggagcccctctcagaaagcgggagg

SEQ ID NO: 2205485 - DNA, 25 bp, Homo sapien
gaaggcactatcatctgggcgcagg

SEQ ID NO: 2205486 - DNA, 25 bp, Homo sapien
gggtgctctgacgaccgaaggcact

SEQ ID NO: 2205487 - DNA, 25 bp, Homo sapien
cggagccccagttccggcatggagt

SEQ ID NO: 2205488 - DNA, 25 bp, Homo sapien
cttcggatggaagaggtgtggcata

SEQ ID NO: 2205489 - DNA, 25 bp, Homo sapien
gctggagtagatttggtttgcaata

SEQ ID NO: 2205490 - DNA, 25 bp, Homo sapien
gggtggcttcggatggaagaggtgt

SEQ ID NO: 2205491 - DNA, 25 bp, Homo sapien
gaggtgtggcataggctggagtaga

SEQ ID NO: 2205492 - DNA, 25 bp, Homo sapien
gcagaggatgaagggtgaccggctg

SEQ ID NO: 2205493 - DNA, 25 bp, Homo sapien
cttggggtcaagcagagacaagttg

SEQ ID NO: 2205494 - DNA, 25 bp, Homo sapien
tcaagcagagacaagttgaggtagg

SEQ ID NO: 2205495 - DNA, 25 bp, Homo sapien
gatgaagggtgaccggctggagaag

SEQ ID NO: 2205496 - DNA, 25 bp, Homo sapien
ccccttcacagcagagaaagaggct

SEQ ID NO: 2205497 - DNA, 25 bp, Homo sapien
ctaactctgtgctggtgcctttggt

SEQ ID NO: 2205498 - DNA, 25 bp, Homo sapien
ctggcgctaactctgtgctggtgcc

SEQ ID NO: 2205499 - DNA, 25 bp, Homo sapien
tgcccccttcacagcagagaaagag

SEQ ID NO: 2205500 - DNA, 25 bp, Homo sapien
gtgctggccctcgtaagccatctgg

SEQ ID NO: 2205501 - DNA, 25 bp, Homo sapien
agagcagaagattaggcctcggcgt

SEQ ID NO: 2205502 - DNA, 25 bp, Homo sapien
agaagcagcggtctgaggcatgcca

SEQ ID NO: 2205503 - DNA, 25 bp, Homo sapien
cacagcgactacagcagaagcagcg

SEQ ID NO: 2205504 - DNA, 25 bp, Homo sapien
ttggactctaagattcgggccaggc

SEQ ID NO: 2205505 - DNA, 25 bp, Homo sapien
tgggcattggactctaagattcggg

SEQ ID NO: 2205506 - DNA, 25 bp, Homo sapien
tgaacgagtcccttctcaagaagag

SEQ ID NO: 2205507 - DNA, 25 bp, Homo sapien
cctggagactggctggtgaacctct

SEQ ID NO: 2205508 - DNA, 25 bp, Homo sapien
gggcggctctgacgcatgacatagc

SEQ ID NO: 2205509 - DNA, 25 bp, Homo sapien
cagaagtgatccatgtgccagtggc

SEQ ID NO: 2205510 - DNA, 25 bp, Homo sapien
agtactccgcgtggcgggcctcgta

SEQ ID NO: 2205511 - DNA, 25 bp, Homo sapien
atgacatagcgctgccctcctagtg

SEQ ID NO: 2205512 - DNA, 25 bp, Homo sapien
tggtgacgcccgcagtagaccttgc

SEQ ID NO: 2205513 - DNA, 25 bp, Homo sapien
cagcgtggacgcaggcattcggcat

SEQ ID NO: 2205514 - DNA, 25 bp, Homo sapien
tgcacggctggcaaacactgcgatg

SEQ ID NO: 2205515 - DNA, 25 bp, Homo sapien
cgtggtacacacgaagcactgtggg

SEQ ID NO: 2205516 - DNA, 25 bp, Homo sapien
gccatgagacaagcaccaagatggt

SEQ ID NO: 2205517 - DNA, 25 bp, Homo sapien
ctgtgggtcagctcttgaggacaag

SEQ ID NO: 2205518 - DNA, 25 bp, Homo sapien
gtgggtcagctcttgaggacaagtt

SEQ ID NO: 2205519 - DNA, 25 bp, Homo sapien
tgtgggtcagctcttgaggacaagt

SEQ ID NO: 2205520 - DNA, 25 bp, Homo sapien
aggaccaaagagatagcccatgccc

SEQ ID NO: 2205521 - DNA, 25 bp, Homo sapien
gaggaccaaagagatagcccatgcc

SEQ ID NO: 2205522 - DNA, 25 bp, Homo sapien
gaccaaagagatagcccatgcccca

SEQ ID NO: 2205523 - DNA, 25 bp, Homo sapien
ggaccaaagagatagcccatgcccc

SEQ ID NO: 2205524 - DNA, 25 bp, Homo sapien
ctgctcactcgctgaggccctccac

SEQ ID NO: 2205525 - DNA, 25 bp, Homo sapien
ctggggcttaagtggcaggcctcat

SEQ ID NO: 2205526 - DNA, 25 bp, Homo sapien
actggggcttaagtggcaggcctca

SEQ ID NO: 2205527 - DNA, 25 bp, Homo sapien
gcactgctcactcgctgaggccctc

SEQ ID NO: 2205528 - DNA, 25 bp, Homo sapien
gctaaaggctcggagctctttcttt

SEQ ID NO: 2205529 - DNA, 25 bp, Homo sapien
gcttccgctgctggctaaaggctcg

SEQ ID NO: 2205530 - DNA, 25 bp, Homo sapien
tcaccgggaagatgcgcacgatgcc

SEQ ID NO: 2205531 - DNA, 25 bp, Homo sapien
ccagtgatggtcaccgggaagatgc

SEQ ID NO: 2205532 - DNA, 25 bp, Homo sapien
ctgccctgcattggcccaggctgtg

SEQ ID NO: 2205533 - DNA, 25 bp, Homo sapien
aaggaatgtcccctgatgacccctg

SEQ ID NO: 2205534 - DNA, 25 bp, Homo sapien
tggaccactcacctcagatcagctc

SEQ ID NO: 2205535 - DNA, 25 bp, Homo sapien
catgccccgcaagtttacttctagg

SEQ ID NO: 2205536 - DNA, 25 bp, Homo sapien
tgttgacgtaggggaccttgtcctc

SEQ ID NO: 2205537 - DNA, 25 bp, Homo sapien
ccaggactgttgacgtaggggacct

SEQ ID NO: 2205538 - DNA, 25 bp, Homo sapien
gactgttgacgtaggggaccttgtc

SEQ ID NO: 2205539 - DNA, 25 bp, Homo sapien
tgacgtaggggaccttgtcctctgg

SEQ ID NO: 2205540 - DNA, 25 bp, Homo sapien
cattaggagggaccttctgactccc

SEQ ID NO: 2205541 - DNA, 25 bp, Homo sapien
taaaggcggatcatttccctcagct

SEQ ID NO: 2205542 - DNA, 25 bp, Homo sapien
atgcagtgagatggcgggtccccat

SEQ ID NO: 2205543 - DNA, 25 bp, Homo sapien
acaactgaaatgagaggtgagttgg

SEQ ID NO: 2205544 - DNA, 25 bp, Homo sapien
cctcaaaaagttatgagcacttgtg

SEQ ID NO: 2205545 - DNA, 25 bp, Homo sapien
ctcaaaaagttatgagcacttgtgt

SEQ ID NO: 2205546 - DNA, 25 bp, Homo sapien
caaaaagttatgagcacttgtgttc

SEQ ID NO: 2205547 - DNA, 25 bp, Homo sapien
ttcctcaaaaagttatgagcacttg

SEQ ID NO: 2205548 - DNA, 25 bp, Homo sapien
tgatgatggtagcactgcaccgagc

SEQ ID NO: 2205549 - DNA, 25 bp, Homo sapien
acccctaaatgcaggaggatcctag

SEQ ID NO: 2205550 - DNA, 25 bp, Homo sapien
aggatcctaggactcagctcttggt

SEQ ID NO: 2205551 - DNA, 25 bp, Homo sapien
tgttcaggtctcagtcgtcatcaga

SEQ ID NO: 2205552 - DNA, 25 bp, Homo sapien
gaagtccgagattagccgacacatg

SEQ ID NO: 2205553 - DNA, 25 bp, Homo sapien
cacagcctgagtcgtcgtcggagat

SEQ ID NO: 2205554 - DNA, 25 bp, Homo sapien
acacatgatgcgttccaggtccaca

SEQ ID NO: 2205555 - DNA, 25 bp, Homo sapien
tcctcccgcgggcatttgcaatgct

SEQ ID NO: 2205556 - DNA, 25 bp, Homo sapien
ctcggcagcccaggtccaatggagg

SEQ ID NO: 2205557 - DNA, 25 bp, Homo sapien
catacagattatcaccaccaaaggt

SEQ ID NO: 2205558 - DNA, 25 bp, Homo sapien
ggtcaattactaaggagttgcccac

SEQ ID NO: 2205559 - DNA, 25 bp, Homo sapien
tccaatggaggagcggggacataca

SEQ ID NO: 2205560 - DNA, 25 bp, Homo sapien
gcactgctccctacaggagttgcag

SEQ ID NO: 2205561 - DNA, 25 bp, Homo sapien
ggctggccccggtctgggtcctctg

SEQ ID NO: 2205562 - DNA, 25 bp, Homo sapien
tgctccctacaggagttgcagggct

SEQ ID NO: 2205563 - DNA, 25 bp, Homo sapien
ccccggtctgggtcctctgcctctg

SEQ ID NO: 2205564 - DNA, 25 bp, Homo sapien
ggtgaggcgcggaagcagggaagga

SEQ ID NO: 2205565 - DNA, 25 bp, Homo sapien
ggagaagtcaacgcccgcccctcca

SEQ ID NO: 2205566 - DNA, 25 bp, Homo sapien
cagggaaggagaagtcaacgcccgc

SEQ ID NO: 2205567 - DNA, 25 bp, Homo sapien
gagaagtcaacgcccgcccctccac

SEQ ID NO: 2205568 - DNA, 25 bp, Homo sapien
cacgcccggagcggcgcctccggga

SEQ ID NO: 2205569 - DNA, 25 bp, Homo sapien
cgcacgcccggagcggcgcctccgg

SEQ ID NO: 2205570 - DNA, 25 bp, Homo sapien
gcctccgggacccacgcgcgaacat

SEQ ID NO: 2205571 - DNA, 25 bp, Homo sapien
gcgcctccgggacccacgcgcgaac

SEQ ID NO: 2205572 - DNA, 25 bp, Homo sapien
atgtaatccttgcgaccgtcaggcc

SEQ ID NO: 2205573 - DNA, 25 bp, Homo sapien
cgcgcccgggcagggtcaagccggg

SEQ ID NO: 2205574 - DNA, 25 bp, Homo sapien
gtaatccttgcgaccgtcaggccac

SEQ ID NO: 2205575 - DNA, 25 bp, Homo sapien
cgggccgggtcaggcgaatgtaatc

SEQ ID NO: 2205576 - DNA, 25 bp, Homo sapien
aaaatggcaacacacgatcacaggc

SEQ ID NO: 2205577 - DNA, 25 bp, Homo sapien
tcaagactgggcacctagtggatga

SEQ ID NO: 2205578 - DNA, 25 bp, Homo sapien
taacctagctgtttcatcacgggag

SEQ ID NO: 2205579 - DNA, 25 bp, Homo sapien
aggagagagtctgaagtcacgccca

SEQ ID NO: 2205580 - DNA, 25 bp, Homo sapien
tcccggattggtgagctcgtctgac

SEQ ID NO: 2205581 - DNA, 25 bp, Homo sapien
ttattggttcactgacccgctcgtc

SEQ ID NO: 2205582 - DNA, 25 bp, Homo sapien
caagaaggccggcaaacctttccag

SEQ ID NO: 2205583 - DNA, 25 bp, Homo sapien
ggagaggcggcagatctatcccctc

SEQ ID NO: 2205584 - DNA, 25 bp, Homo sapien
tgattggagaaggaggtgggtgcac

SEQ ID NO: 2205585 - DNA, 25 bp, Homo sapien
catctgattggagaaggaggtgggt

SEQ ID NO: 2205586 - DNA, 25 bp, Homo sapien
tctgattggagaaggaggtgggtgc

SEQ ID NO: 2205587 - DNA, 25 bp, Homo sapien
ctacatctgattggagaaggaggtg

SEQ ID NO: 2205588 - DNA, 25 bp, Homo sapien
tgaccatagtcaggctggtagccgc

SEQ ID NO: 2205589 - DNA, 25 bp, Homo sapien
gctggttgaccatagtcaggctggt

SEQ ID NO: 2205590 - DNA, 25 bp, Homo sapien
cgctgccggctggttgaccatagtc

SEQ ID NO: 2205591 - DNA, 25 bp, Homo sapien
ttgctgcccatagtcgccctgaggc

SEQ ID NO: 2205592 - DNA, 25 bp, Homo sapien
tgaggcccgtaggaatcctggggcc

SEQ ID NO: 2205593 - DNA, 25 bp, Homo sapien
ctgaggcccgtaggaatcctggggc

SEQ ID NO: 2205594 - DNA, 25 bp, Homo sapien
tgcccgtagcctgcatcgccgtagg

SEQ ID NO: 2205595 - DNA, 25 bp, Homo sapien
agagcaccaggttcaggaagccgaa

SEQ ID NO: 2205596 - DNA, 25 bp, Homo sapien
taaacacgaaccacaggttgccgac

SEQ ID NO: 2205597 - DNA, 25 bp, Homo sapien
agcctgtctccttaaacacgaacca

SEQ ID NO: 2205598 - DNA, 25 bp, Homo sapien
aatgaatccgtaggctccgcaaggt

SEQ ID NO: 2205599 - DNA, 25 bp, Homo sapien
cgagaacgtcgatgtgcagaaaaat

SEQ ID NO: 2205600 - DNA, 25 bp, Homo sapien
ccctgcgtgcaggaatgagcatgcg

SEQ ID NO: 2205601 - DNA, 25 bp, Homo sapien
gactctctgagtcccagtgcgagaa

SEQ ID NO: 2205602 - DNA, 25 bp, Homo sapien
cccttggcccatgccgatgagctaa

SEQ ID NO: 2205603 - DNA, 25 bp, Homo sapien
gagctaactagccacatgaaggcga

SEQ ID NO: 2205604 - DNA, 25 bp, Homo sapien
gtgttccctgtctggcggcagacag

SEQ ID NO: 2205605 - DNA, 25 bp, Homo sapien
tgagtcccgaggtcacagggtctct

SEQ ID NO: 2205606 - DNA, 25 bp, Homo sapien
caggtgggtgcatcaaagtacactt

SEQ ID NO: 2205607 - DNA, 25 bp, Homo sapien
cacggtgacaaagaattcggctgac

SEQ ID NO: 2205608 - DNA, 25 bp, Homo sapien
caactaagaagaccttggtggtgcc

SEQ ID NO: 2205609 - DNA, 25 bp, Homo sapien
ttcggctgacgaggagtagtcccca

SEQ ID NO: 2205610 - DNA, 25 bp, Homo sapien
cacagtctcagattggaggccagga

SEQ ID NO: 2205611 - DNA, 25 bp, Homo sapien
tgtggatccccaaaggactggctct

SEQ ID NO: 2205612 - DNA, 25 bp, Homo sapien
tgctgtaactacaagagggcagggc

SEQ ID NO: 2205613 - DNA, 25 bp, Homo sapien
tggcacctagcagacactcaagaaa

SEQ ID NO: 2205614 - DNA, 25 bp, Homo sapien
tattggctaacattaattgggtacc

SEQ ID NO: 2205615 - DNA, 25 bp, Homo sapien
taccccttcgctggaacagagccag

SEQ ID NO: 2205616 - DNA, 25 bp, Homo sapien
catgcttccagcactttgagtagta

SEQ ID NO: 2205617 - DNA, 25 bp, Homo sapien
gttgggtctgttttagttactatca

SEQ ID NO: 2205618 - DNA, 25 bp, Homo sapien
cacatagtcctagagtccagagcag

SEQ ID NO: 2205619 - DNA, 25 bp, Homo sapien
gctgggcaggagctacttgcggggg

SEQ ID NO: 2205620 - DNA, 25 bp, Homo sapien
gaggtattggccggttccaccctgc

SEQ ID NO: 2205621 - DNA, 25 bp, Homo sapien
caggtctgttggtatcccagggtgg

SEQ ID NO: 2205622 - DNA, 25 bp, Homo sapien
tagctgccgcatgtggcaaaggcga

SEQ ID NO: 2205623 - DNA, 25 bp, Homo sapien
ggtcactctcggtcttgttggcaca

SEQ ID NO: 2205624 - DNA, 25 bp, Homo sapien
tgttggcacaatccacgctcagctg

SEQ ID NO: 2205625 - DNA, 25 bp, Homo sapien
gggtactcgaactcgacctcgatgc

SEQ ID NO: 2205626 - DNA, 25 bp, Homo sapien
agggatggggatggccacagtgaac

SEQ ID NO: 2205627 - DNA, 25 bp, Homo sapien
agcagggatggggatggccacagtg

SEQ ID NO: 2205628 - DNA, 25 bp, Homo sapien
gcagcagggatggggatggccacag

SEQ ID NO: 2205629 - DNA, 25 bp, Homo sapien
cagggatggggatggccacagtgaa

SEQ ID NO: 2205630 - DNA, 25 bp, Homo sapien
gtgtgcatgtgggagggaggtgccc

SEQ ID NO: 2205631 - DNA, 25 bp, Homo sapien
gcatgtgggagggaggtgccctcct

SEQ ID NO: 2205632 - DNA, 25 bp, Homo sapien
ctgtgtgcatgtgggagggaggtgc

SEQ ID NO: 2205633 - DNA, 25 bp, Homo sapien
gtgcatgtgggagggaggtgccctc

SEQ ID NO: 2205634 - DNA, 25 bp, Homo sapien
gaggaggtaggacgtcacagtctcc

SEQ ID NO: 2205635 - DNA, 25 bp, Homo sapien
gtaccctcagccctatgtgacgtca

SEQ ID NO: 2205636 - DNA, 25 bp, Homo sapien
ccctaatcagggctcatcgggacca

SEQ ID NO: 2205637 - DNA, 25 bp, Homo sapien
ttacaagggtatggctgtctcttcc

SEQ ID NO: 2205638 - DNA, 25 bp, Homo sapien
agcaccttcacaaagccgaggggct

SEQ ID NO: 2205639 - DNA, 25 bp, Homo sapien
gcaccttcacaaagccgaggggctc

SEQ ID NO: 2205640 - DNA, 25 bp, Homo sapien
ggctccttgaccacccggaactgac

SEQ ID NO: 2205641 - DNA, 25 bp, Homo sapien
gctccttgaccacccggaactgacc

SEQ ID NO: 2205642 - DNA, 25 bp, Homo sapien
ctgtccacggtgctggagcgcgtac

SEQ ID NO: 2205643 - DNA, 25 bp, Homo sapien
tggcctgagcgacccggcctaggca

SEQ ID NO: 2205644 - DNA, 25 bp, Homo sapien
tcccagagtcggctggcctgagcga

SEQ ID NO: 2205645 - DNA, 25 bp, Homo sapien
ggggaccgggtctccgctgccagac

SEQ ID NO: 2205646 - DNA, 25 bp, Homo sapien
gcaggaggtttattgagcagttggg

SEQ ID NO: 2205647 - DNA, 25 bp, Homo sapien
gaggtttattgagcagttggggagg

SEQ ID NO: 2205648 - DNA, 25 bp, Homo sapien
gagggcaggaggtttattgagcagt

SEQ ID NO: 2205649 - DNA, 25 bp, Homo sapien
ggggagggcaggaggtttattgagc

SEQ ID NO: 2205650 - DNA, 25 bp, Homo sapien
gcgtcaggcgacacgcatctgcaat

SEQ ID NO: 2205651 - DNA, 25 bp, Homo sapien
aacgtgggtctcgagcaaagaggcc

SEQ ID NO: 2205652 - DNA, 25 bp, Homo sapien
tcctcgtcgctatagagagagctgg

SEQ ID NO: 2205653 - DNA, 25 bp, Homo sapien
tcctcctcatcgaagcgggagagga

SEQ ID NO: 2205654 - DNA, 25 bp, Homo sapien
cgtcttgtctatatgccctctggac

SEQ ID NO: 2205655 - DNA, 25 bp, Homo sapien
atccgtcttgtctatatgccctctg

SEQ ID NO: 2205656 - DNA, 25 bp, Homo sapien
tcttgtctatatgccctctggactc

SEQ ID NO: 2205657 - DNA, 25 bp, Homo sapien
ccgtcttgtctatatgccctctgga

SEQ ID NO: 2205658 - DNA, 25 bp, Homo sapien
acaggtgaaggtgcgcagtgggcca

SEQ ID NO: 2205659 - DNA, 25 bp, Homo sapien
tcttccaccaacaacagcggggcat

SEQ ID NO: 2205660 - DNA, 25 bp, Homo sapien
tacaggagccgaccccgctgaggtg

SEQ ID NO: 2205661 - DNA, 25 bp, Homo sapien
gtccgagtgggttccaggcacgtgc

SEQ ID NO: 2205662 - DNA, 25 bp, Homo sapien
gatgggtaaatcctcacaactgccc

SEQ ID NO: 2205663 - DNA, 25 bp, Homo sapien
ggccctgaatttcgcccacgatgat

SEQ ID NO: 2205664 - DNA, 25 bp, Homo sapien
cccacgatgataggtgcctgggatg

SEQ ID NO: 2205665 - DNA, 25 bp, Homo sapien
tggatggtgaaggagggcttccgac

SEQ ID NO: 2205666 - DNA, 25 bp, Homo sapien
ctctgtgaggtggcaaaaggactga

SEQ ID NO: 2205667 - DNA, 25 bp, Homo sapien
actgagcacgggggagtccctgcct

SEQ ID NO: 2205668 - DNA, 25 bp, Homo sapien
gtggggggcagcagacggcggcgtg

SEQ ID NO: 2205669 - DNA, 25 bp, Homo sapien
agacggcggcgtggtaccaggtgcc

SEQ ID NO: 2205670 - DNA, 25 bp, Homo sapien
caggggtgaacttgggtctgggcct

SEQ ID NO: 2205671 - DNA, 25 bp, Homo sapien
agggccaggggtgaacttgggtctg

SEQ ID NO: 2205672 - DNA, 25 bp, Homo sapien
gggtgaacttgggtctgggcctgga

SEQ ID NO: 2205673 - DNA, 25 bp, Homo sapien
tgaacttgggtctgggcctggacct

SEQ ID NO: 2205674 - DNA, 25 bp, Homo sapien
gctcatgggttcatcccatgtggca

SEQ ID NO: 2205675 - DNA, 25 bp, Homo sapien
cagctcatgggttcatcccatgtgg

SEQ ID NO: 2205676 - DNA, 25 bp, Homo sapien
agctcatgggttcatcccatgtggc

SEQ ID NO: 2205677 - DNA, 25 bp, Homo sapien
ctcatgggttcatcccatgtggcat

SEQ ID NO: 2205678 - DNA, 25 bp, Homo sapien
ggtgaaaatgagagccccagagcct

SEQ ID NO: 2205679 - DNA, 25 bp, Homo sapien
tggtgaaaatgagagccccagagcc

SEQ ID NO: 2205680 - DNA, 25 bp, Homo sapien
cgatcagggacttcctcatcctcat

SEQ ID NO: 2205681 - DNA, 25 bp, Homo sapien
tgggagtccccctgtcatcatcact

SEQ ID NO: 2205682 - DNA, 25 bp, Homo sapien
ctggaggtgggagtccccctgtcat

SEQ ID NO: 2205683 - DNA, 25 bp, Homo sapien
ctggggcacactgggctgactggag

SEQ ID NO: 2205684 - DNA, 25 bp, Homo sapien
agtctgtccccgacaggcagagaca

SEQ ID NO: 2205685 - DNA, 25 bp, Homo sapien
actcaggggattgacgaagtatttt

SEQ ID NO: 2205686 - DNA, 25 bp, Homo sapien
ttcccagaagcagtgtcaaaatcac

SEQ ID NO: 2205687 - DNA, 25 bp, Homo sapien
tttttctattgcagagggggcttct

SEQ ID NO: 2205688 - DNA, 25 bp, Homo sapien
ttgcgatagggtcttgtcctgtcac

SEQ ID NO: 2205689 - DNA, 25 bp, Homo sapien
catctcaggacccaagtcctgcagg

SEQ ID NO: 2205690 - DNA, 25 bp, Homo sapien
caggtgagggcctgccgcatctcag

SEQ ID NO: 2205691 - DNA, 25 bp, Homo sapien
aagtcctgcaggctccgcagaccag

SEQ ID NO: 2205692 - DNA, 25 bp, Homo sapien
tgagggcctgccgcatctcaggacc

SEQ ID NO: 2205693 - DNA, 25 bp, Homo sapien
ccacactaggccctgccccgaagac

SEQ ID NO: 2205694 - DNA, 25 bp, Homo sapien
tgcccatccacactaggccctgccc

SEQ ID NO: 2205695 - DNA, 25 bp, Homo sapien
gtgcccatccacactaggccctgcc

SEQ ID NO: 2205696 - DNA, 25 bp, Homo sapien
ccatccacactaggccctgccccga

SEQ ID NO: 2205697 - DNA, 25 bp, Homo sapien
tttgcggaaatagtcctggatcaga

SEQ ID NO: 2205698 - DNA, 25 bp, Homo sapien
tgtggcgtagaatttgcccacggtg

SEQ ID NO: 2205699 - DNA, 25 bp, Homo sapien
ggcggcgtcgttgcctagtagccct

SEQ ID NO: 2205700 - DNA, 25 bp, Homo sapien
tcctccgccggaatttgcggaaata

SEQ ID NO: 2205701 - DNA, 25 bp, Homo sapien
gatgacaatccgcagctcctggttg

SEQ ID NO: 2205702 - DNA, 25 bp, Homo sapien
cagatctttttgatgacaatccgca

SEQ ID NO: 2205703 - DNA, 25 bp, Homo sapien
tttttgatgacaatccgcagctcct

SEQ ID NO: 2205704 - DNA, 25 bp, Homo sapien
gcttctgtttcatccgcttccagat

SEQ ID NO: 2205705 - DNA, 25 bp, Homo sapien
gcgttgaatgtcaccgtcccatctg

SEQ ID NO: 2205706 - DNA, 25 bp, Homo sapien
cttcagggatgtccggaccagggca

SEQ ID NO: 2205707 - DNA, 25 bp, Homo sapien
tgtggcgttgaatgtcaccgtccca

SEQ ID NO: 2205708 - DNA, 25 bp, Homo sapien
ggcgttgaatgtcaccgtcccatct

SEQ ID NO: 2205709 - DNA, 25 bp, Homo sapien
ctggatacgtctcagcagggcaacc

SEQ ID NO: 2205710 - DNA, 25 bp, Homo sapien
gggctggatacgtctcagcagggca

SEQ ID NO: 2205711 - DNA, 25 bp, Homo sapien
ccagagggggctggatacgtctcag

SEQ ID NO: 2205712 - DNA, 25 bp, Homo sapien
ttgcaggccactcggtgtgggcaca

SEQ ID NO: 2205713 - DNA, 25 bp, Homo sapien
ctaggtaagggtatagagggcatac

SEQ ID NO: 2205714 - DNA, 25 bp, Homo sapien
actgtgtagggcaatacattgtccc

SEQ ID NO: 2205715 - DNA, 25 bp, Homo sapien
taatgagatgcagcagtcggaggtt

SEQ ID NO: 2205716 - DNA, 25 bp, Homo sapien
gaggtaccactggattggcgatgcc

SEQ ID NO: 2205717 - DNA, 25 bp, Homo sapien
tggccccagggtcatattcagacca

SEQ ID NO: 2205718 - DNA, 25 bp, Homo sapien
ttggccccagggtcatattcagacc

SEQ ID NO: 2205719 - DNA, 25 bp, Homo sapien
ccagggtcatattcagaccagatcc

SEQ ID NO: 2205720 - DNA, 25 bp, Homo sapien
gccccagggtcatattcagaccaga

SEQ ID NO: 2205721 - DNA, 25 bp, Homo sapien
caggtaaactcttcaccagggccga

SEQ ID NO: 2205722 - DNA, 25 bp, Homo sapien
ccagggccgaagtcagactcaggat

SEQ ID NO: 2205723 - DNA, 25 bp, Homo sapien
gatcacaccgatttccgggaaggct

SEQ ID NO: 2205724 - DNA, 25 bp, Homo sapien
taggcgatggcaaaattgctaccac

SEQ ID NO: 2205725 - DNA, 25 bp, Homo sapien
tggcaggggagtgagtagatgtcac

SEQ ID NO: 2205726 - DNA, 25 bp, Homo sapien
gtggcaggggagtgagtagatgtca

SEQ ID NO: 2205727 - DNA, 25 bp, Homo sapien
ccatcctgaagagccaccttgccga

SEQ ID NO: 2205728 - DNA, 25 bp, Homo sapien
gtgccatcctgaagagccaccttgc

SEQ ID NO: 2205729 - DNA, 25 bp, Homo sapien
atcctgaagagccaccttgccgaac

SEQ ID NO: 2205730 - DNA, 25 bp, Homo sapien
cctgaagagccaccttgccgaacat

SEQ ID NO: 2205731 - DNA, 25 bp, Homo sapien
gcagaggagtgcttaagggatgctt

SEQ ID NO: 2205732 - DNA, 25 bp, Homo sapien
aggagtgcttaagggatgcttccta

SEQ ID NO: 2205733 - DNA, 25 bp, Homo sapien
agaggagtgcttaagggatgcttcc

SEQ ID NO: 2205734 - DNA, 25 bp, Homo sapien
cagcagaggagtgcttaagggatgc

SEQ ID NO: 2205735 - DNA, 25 bp, Homo sapien
gatgaagaatatcattgcgatgaga

SEQ ID NO: 2205736 - DNA, 25 bp, Homo sapien
caatgacggcatagatgaagaatat

SEQ ID NO: 2205737 - DNA, 25 bp, Homo sapien
tgaagaatatcattgcgatgagaag

SEQ ID NO: 2205738 - DNA, 25 bp, Homo sapien
atgacggcatagatgaagaatatca

SEQ ID NO: 2205739 - DNA, 25 bp, Homo sapien
ctcggaagaggcgaaagaaggtaat

SEQ ID NO: 2205740 - DNA, 25 bp, Homo sapien
tgaccagccgcataactcggaagag

SEQ ID NO: 2205741 - DNA, 25 bp, Homo sapien
ccagagcaatgtgcggatcccttca

SEQ ID NO: 2205742 - DNA, 25 bp, Homo sapien
tcccttcacccttactgagaagctt

SEQ ID NO: 2205743 - DNA, 25 bp, Homo sapien
gatgacatcataggcccaaatgaac

SEQ ID NO: 2205744 - DNA, 25 bp, Homo sapien
tgaacaaggtgagatatgatggagc

SEQ ID NO: 2205745 - DNA, 25 bp, Homo sapien
aaaaggtgatacaggagatgatgac

SEQ ID NO: 2205746 - DNA, 25 bp, Homo sapien
tgagatatgatggagcagatatagg

SEQ ID NO: 2205747 - DNA, 25 bp, Homo sapien
tgacggcaatatccactatgctgcc

SEQ ID NO: 2205748 - DNA, 25 bp, Homo sapien
caataagagcgtcaaacgtgttcca

SEQ ID NO: 2205749 - DNA, 25 bp, Homo sapien
gctgcccaccacaataagagcgtca

SEQ ID NO: 2205750 - DNA, 25 bp, Homo sapien
ttgacttcagtgacggcaatatcca

SEQ ID NO: 2205751 - DNA, 25 bp, Homo sapien
gagcaccatctcaatagtgaagagg

SEQ ID NO: 2205752 - DNA, 25 bp, Homo sapien
tgagcaccatctcaatagtgaagag

SEQ ID NO: 2205753 - DNA, 25 bp, Homo sapien
cttgggcttgaaggcgatgattttg

SEQ ID NO: 2205754 - DNA, 25 bp, Homo sapien
ttttgagcaccatctcaatagtgaa

SEQ ID NO: 2205755 - DNA, 25 bp, Homo sapien
gcaggagaaaatcaggttgagatgg

SEQ ID NO: 2205756 - DNA, 25 bp, Homo sapien
ctgcaggagaaaatcaggttgagat

SEQ ID NO: 2205757 - DNA, 25 bp, Homo sapien
caggagaaaatcaggttgagatgga

SEQ ID NO: 2205758 - DNA, 25 bp, Homo sapien
tgcaggagaaaatcaggttgagatg

SEQ ID NO: 2205759 - DNA, 25 bp, Homo sapien
gttatttgcagccttaaatgttccc

SEQ ID NO: 2205760 - DNA, 25 bp, Homo sapien
cttaagttgctgttagttggcaggg

SEQ ID NO: 2205761 - DNA, 25 bp, Homo sapien
atgttcccaatggttcccaagggat

SEQ ID NO: 2205762 - DNA, 25 bp, Homo sapien
caagggattatgtggagataatagg

SEQ ID NO: 2205763 - DNA, 25 bp, Homo sapien
gcagcagagttcacagtggcccaca

SEQ ID NO: 2205764 - DNA, 25 bp, Homo sapien
catggctagggcaactgtgttgagc

SEQ ID NO: 2205765 - DNA, 25 bp, Homo sapien
ccttgagggcatattccacacattg

SEQ ID NO: 2205766 - DNA, 25 bp, Homo sapien
cacgatactgatgcgggttcttggg

SEQ ID NO: 2205767 - DNA, 25 bp, Homo sapien
ggaagggttggtgaccatccatagg

SEQ ID NO: 2205768 - DNA, 25 bp, Homo sapien
tgaccatccatagggggtcaggggt

SEQ ID NO: 2205769 - DNA, 25 bp, Homo sapien
gaagggttggtgaccatccataggg

SEQ ID NO: 2205770 - DNA, 25 bp, Homo sapien
agggaagggttggtgaccatccata

SEQ ID NO: 2205771 - DNA, 25 bp, Homo sapien
ttttggtactcctgctcgccctggg

SEQ ID NO: 2205772 - DNA, 25 bp, Homo sapien
ggaaagtgatgatgacgaagcccac

SEQ ID NO: 2205773 - DNA, 25 bp, Homo sapien
tctgcatatgcatcgatggccttgt

SEQ ID NO: 2205774 - DNA, 25 bp, Homo sapien
tcgccctgggcacggaaagtgatga

SEQ ID NO: 2205775 - DNA, 25 bp, Homo sapien
ttgaaatcactgttgacccagagcc

SEQ ID NO: 2205776 - DNA, 25 bp, Homo sapien
gggccgtgacacgtctccatctggg

SEQ ID NO: 2205777 - DNA, 25 bp, Homo sapien
catctgggtataccaggaaggagcc

SEQ ID NO: 2205778 - DNA, 25 bp, Homo sapien
aaatcactgttgacccagagccgct

SEQ ID NO: 2205779 - DNA, 25 bp, Homo sapien
tgtttggcctcgtccgtgcaggtgt

SEQ ID NO: 2205780 - DNA, 25 bp, Homo sapien
cgtccgtgcaggtgtagaatttccc

SEQ ID NO: 2205781 - DNA, 25 bp, Homo sapien
tgtgtttggcctcgtccgtgcaggt

SEQ ID NO: 2205782 - DNA, 25 bp, Homo sapien
ggcctcgtccgtgcaggtgtagaat

SEQ ID NO: 2205783 - DNA, 25 bp, Homo sapien
gcagaagtgtggtgacaatcatgat

SEQ ID NO: 2205784 - DNA, 25 bp, Homo sapien
tgcaccccgatgcaggcgaacataa

SEQ ID NO: 2205785 - DNA, 25 bp, Homo sapien
cataaattgcagaagtgtggtgaca

SEQ ID NO: 2205786 - DNA, 25 bp, Homo sapien
gccacaaatacacactgcaccacat

SEQ ID NO: 2205787 - DNA, 25 bp, Homo sapien
gaatcttcaccaccgagatggcgct

SEQ ID NO: 2205788 - DNA, 25 bp, Homo sapien
ggagtactcgcagaatcttcaccac

SEQ ID NO: 2205789 - DNA, 25 bp, Homo sapien
cttcaccaccgagatggcgctggag

SEQ ID NO: 2205790 - DNA, 25 bp, Homo sapien
ccgcagtactcggagtactcgcaga

SEQ ID NO: 2205791 - DNA, 25 bp, Homo sapien
catattaaaccagctacggcagaag

SEQ ID NO: 2205792 - DNA, 25 bp, Homo sapien
gatccaacatattaaaccagctacg

SEQ ID NO: 2205793 - DNA, 25 bp, Homo sapien
tattaaaccagctacggcagaagga

SEQ ID NO: 2205794 - DNA, 25 bp, Homo sapien
caacatattaaaccagctacggcag

SEQ ID NO: 2205795 - DNA, 25 bp, Homo sapien
aggcataatcgaagtaacccagaat

SEQ ID NO: 2205796 - DNA, 25 bp, Homo sapien
ctttagtagaatctccacagtgaaa

SEQ ID NO: 2205797 - DNA, 25 bp, Homo sapien
ggtgaaggcataatcgaagtaaccc

SEQ ID NO: 2205798 - DNA, 25 bp, Homo sapien
aaaatggaggtgaaggcataatcga

SEQ ID NO: 2205799 - DNA, 25 bp, Homo sapien
ggttgcggaaggagtgggctcggat

SEQ ID NO: 2205800 - DNA, 25 bp, Homo sapien
ggtcctcagcggccagggacacact

SEQ ID NO: 2205801 - DNA, 25 bp, Homo sapien
gaacaccaggataagattggtgaag

SEQ ID NO: 2205802 - DNA, 25 bp, Homo sapien
atggttgcggaaggagtgggctcgg

SEQ ID NO: 2205803 - DNA, 25 bp, Homo sapien
gaccacagaattgttcagggattcc

SEQ ID NO: 2205804 - DNA, 25 bp, Homo sapien
ccacagaattgttcagggattccaa

SEQ ID NO: 2205805 - DNA, 25 bp, Homo sapien
caggaccacagaattgttcagggat

SEQ ID NO: 2205806 - DNA, 25 bp, Homo sapien
ggaccacagaattgttcagggattc

SEQ ID NO: 2205807 - DNA, 25 bp, Homo sapien
ctgcctcaccccctgccacttccgg

SEQ ID NO: 2205808 - DNA, 25 bp, Homo sapien
accccctgccacttccggcactcac

SEQ ID NO: 2205809 - DNA, 25 bp, Homo sapien
cactcccaccttggctgctcctcca

SEQ ID NO: 2205810 - DNA, 25 bp, Homo sapien
ccacctgccctagcccctcctgcct

SEQ ID NO: 2205811 - DNA, 25 bp, Homo sapien
gcagaagaaggcgctgccctcaggg

SEQ ID NO: 2205812 - DNA, 25 bp, Homo sapien
tgccctcagggatgggtaccacctt

SEQ ID NO: 2205813 - DNA, 25 bp, Homo sapien
gaagaaggcgctgccctcagggatg

SEQ ID NO: 2205814 - DNA, 25 bp, Homo sapien
gccctcagggatgggtaccaccttc

SEQ ID NO: 2205815 - DNA, 25 bp, Homo sapien
cttcctctttctccacaccaggcac

SEQ ID NO: 2205816 - DNA, 25 bp, Homo sapien
tcttcctctttctccacaccaggca

SEQ ID NO: 2205817 - DNA, 25 bp, Homo sapien
cttccctccttgcaccctcctcttc

SEQ ID NO: 2205818 - DNA, 25 bp, Homo sapien
ctgctccttccctccttgcaccctc

SEQ ID NO: 2205819 - DNA, 25 bp, Homo sapien
ctcctgtgggagatccttctcattg

SEQ ID NO: 2205820 - DNA, 25 bp, Homo sapien
aaataggggtgattgctgcagatgg

SEQ ID NO: 2205821 - DNA, 25 bp, Homo sapien
ctgtgcgaggaaataggggtgattg

SEQ ID NO: 2205822 - DNA, 25 bp, Homo sapien
tgcgaggaaataggggtgattgctg

SEQ ID NO: 2205823 - DNA, 25 bp, Homo sapien
cgaggaaataggggtgattgctgca

SEQ ID NO: 2205824 - DNA, 25 bp, Homo sapien
ttaccagggtgactagaggcatctc

SEQ ID NO: 2205825 - DNA, 25 bp, Homo sapien
aaggactcttgtctgccttgacccc

SEQ ID NO: 2205826 - DNA, 25 bp, Homo sapien
ttgccttcctcaactagaatgttag

SEQ ID NO: 2205827 - DNA, 25 bp, Homo sapien
taggcagtcaatagatgcatgttga

SEQ ID NO: 2205828 - DNA, 25 bp, Homo sapien
ctgcatctccactggccaggttgtc

SEQ ID NO: 2205829 - DNA, 25 bp, Homo sapien
accccgactccaccatcatccagcc

SEQ ID NO: 2205830 - DNA, 25 bp, Homo sapien
caccccgactccaccatcatccagc

SEQ ID NO: 2205831 - DNA, 25 bp, Homo sapien
ccccgactccaccatcatccagccc

SEQ ID NO: 2205832 - DNA, 25 bp, Homo sapien
gatgcacaccaacattcctgggaag

SEQ ID NO: 2205833 - DNA, 25 bp, Homo sapien
agatgcacaccaacattcctgggaa

SEQ ID NO: 2205834 - DNA, 25 bp, Homo sapien
gaaggggccaccatatgccatgata

SEQ ID NO: 2205835 - DNA, 25 bp, Homo sapien
gataccatcatacatgaccacgttc

SEQ ID NO: 2205836 - DNA, 25 bp, Homo sapien
tttcattgaattgagcagggatgcc

SEQ ID NO: 2205837 - DNA, 25 bp, Homo sapien
caaagttgaacttgcccccaaacag

SEQ ID NO: 2205838 - DNA, 25 bp, Homo sapien
gggaacgtgtcaaaggtgcttcgct

SEQ ID NO: 2205839 - DNA, 25 bp, Homo sapien
agcagcaaggatgcgatggatttca

SEQ ID NO: 2205840 - DNA, 25 bp, Homo sapien
gggcagggtcgatgccatgtccact

SEQ ID NO: 2205841 - DNA, 25 bp, Homo sapien
tgggctcaaataggctttggtgtca

SEQ ID NO: 2205842 - DNA, 25 bp, Homo sapien
cacctcggcaggttgggctcaaata

SEQ ID NO: 2205843 - DNA, 25 bp, Homo sapien
ggctccagcttgagatgcacctcgg

SEQ ID NO: 2205844 - DNA, 25 bp, Homo sapien
taaagatcctgaggaggcgcacaca

SEQ ID NO: 2205845 - DNA, 25 bp, Homo sapien
tgagaagcatctccaccgtgaacag

SEQ ID NO: 2205846 - DNA, 25 bp, Homo sapien
caaagcggttgaagaaggaagacac

SEQ ID NO: 2205847 - DNA, 25 bp, Homo sapien
gggcccagaccgtacaatttgagaa

SEQ ID NO: 2205848 - DNA, 25 bp, Homo sapien
tgctcagaggcgatggtcaacgtgt

SEQ ID NO: 2205849 - DNA, 25 bp, Homo sapien
cccagtagcaggcattggacttcac

SEQ ID NO: 2205850 - DNA, 25 bp, Homo sapien
attggacttcactgcccgacggcag

SEQ ID NO: 2205851 - DNA, 25 bp, Homo sapien
ttgaggaagacgagcaacagcacag

SEQ ID NO: 2205852 - DNA, 25 bp, Homo sapien
cagactctggttttcatgatcttgt

SEQ ID NO: 2205853 - DNA, 25 bp, Homo sapien
agactctggttttcatgatcttgtt

SEQ ID NO: 2205854 - DNA, 25 bp, Homo sapien
gactctggttttcatgatcttgttt

SEQ ID NO: 2205855 - DNA, 25 bp, Homo sapien
gcagcgtgtacagctggccagagcc

SEQ ID NO: 2205856 - DNA, 25 bp, Homo sapien
tgggtctctgtcatggaaccggtgt

SEQ ID NO: 2205857 - DNA, 25 bp, Homo sapien
aggcagcgtgtacagctggccagag

SEQ ID NO: 2205858 - DNA, 25 bp, Homo sapien
cgccttgggtctctgtcatggaacc

SEQ ID NO: 2205859 - DNA, 25 bp, Homo sapien
tgtggagcgagtagaatgactgaac

SEQ ID NO: 2205860 - DNA, 25 bp, Homo sapien
tggagtgtgtggagcgagtagaatg

SEQ ID NO: 2205861 - DNA, 25 bp, Homo sapien
aatgactgaaccagcgcagacgtcc

SEQ ID NO: 2205862 - DNA, 25 bp, Homo sapien
gagtagaatgactgaaccagcgcag

SEQ ID NO: 2205863 - DNA, 25 bp, Homo sapien
ctattggtcagctcggccagctgtg

SEQ ID NO: 2205864 - DNA, 25 bp, Homo sapien
ttggtcagctcggccagctgtggcc

SEQ ID NO: 2205865 - DNA, 25 bp, Homo sapien
tattggtcagctcggccagctgtgg

SEQ ID NO: 2205866 - DNA, 25 bp, Homo sapien
attggtcagctcggccagctgtggc

SEQ ID NO: 2205867 - DNA, 25 bp, Homo sapien
tagagttgttgcagatcaggcctgg

SEQ ID NO: 2205868 - DNA, 25 bp, Homo sapien
tctaaggcatgcagggaatgggcca

SEQ ID NO: 2205869 - DNA, 25 bp, Homo sapien
aggacaattagggaggacatactgg

SEQ ID NO: 2205870 - DNA, 25 bp, Homo sapien
catttggagtctttatagctgaggc

SEQ ID NO: 2205871 - DNA, 25 bp, Homo sapien
ccgcccggccctcttcagccataga

SEQ ID NO: 2205872 - DNA, 25 bp, Homo sapien
gatggcccgcccggccctcttcagc

SEQ ID NO: 2205873 - DNA, 25 bp, Homo sapien
gcccggccctcttcagccatagaac

SEQ ID NO: 2205874 - DNA, 25 bp, Homo sapien
gcccgcccggccctcttcagccata

SEQ ID NO: 2205875 - DNA, 25 bp, Homo sapien
tgcttctggaagtccccgcgagctt

SEQ ID NO: 2205876 - DNA, 25 bp, Homo sapien
gaagtccccgcgagctttcgctttc

SEQ ID NO: 2205877 - DNA, 25 bp, Homo sapien
gctcttcggcttgagtgatccagtc

SEQ ID NO: 2205878 - DNA, 25 bp, Homo sapien
tccatgtccagctcttcggcttgag

SEQ ID NO: 2205879 - DNA, 25 bp, Homo sapien
caaggctcacaaagtacacccaggg

SEQ ID NO: 2205880 - DNA, 25 bp, Homo sapien
cacaaggttgaggacgaagaaggac

SEQ ID NO: 2205881 - DNA, 25 bp, Homo sapien
ccagggcagttcataccccatggca

SEQ ID NO: 2205882 - DNA, 25 bp, Homo sapien
cactcaggacgccaagcacaaggtt

SEQ ID NO: 2205883 - DNA, 25 bp, Homo sapien
tcggtccagccttccatggtgacac

SEQ ID NO: 2205884 - DNA, 25 bp, Homo sapien
gcccgcggcactcagtctggttcag

SEQ ID NO: 2205885 - DNA, 25 bp, Homo sapien
gcatggcgaagaagaagttgtcaaa

SEQ ID NO: 2205886 - DNA, 25 bp, Homo sapien
tcagtctggttcagcgtgcacgcac

SEQ ID NO: 2205887 - DNA, 25 bp, Homo sapien
gacgcacagggcgatgggtcctcct

SEQ ID NO: 2205888 - DNA, 25 bp, Homo sapien
agggcgatgggtcctcctccgcttc

SEQ ID NO: 2205889 - DNA, 25 bp, Homo sapien
tgatcccgaagacgcacagggcgat

SEQ ID NO: 2205890 - DNA, 25 bp, Homo sapien
atcccgaagacgcacagggcgatgg

SEQ ID NO: 2205891 - DNA, 25 bp, Homo sapien
aagccccgcccacttaggaagctcg

SEQ ID NO: 2205892 - DNA, 25 bp, Homo sapien
gaagcaggcccactctcagtcgctg

SEQ ID NO: 2205893 - DNA, 25 bp, Homo sapien
aggcccactctcagtcgctgccacc

SEQ ID NO: 2205894 - DNA, 25 bp, Homo sapien
cccactctcagtcgctgccaccctg

SEQ ID NO: 2205895 - DNA, 25 bp, Homo sapien
gaaccctgcgagctccgtattctga

SEQ ID NO: 2205896 - DNA, 25 bp, Homo sapien
tgaaccactgggaagctagggatcc

SEQ ID NO: 2205897 - DNA, 25 bp, Homo sapien
cctggcgtggagtcttgtaaataac

SEQ ID NO: 2205898 - DNA, 25 bp, Homo sapien
tcttgtgaatttggacgcgtctctt

SEQ ID NO: 2205899 - DNA, 25 bp, Homo sapien
gcagcattggatctaggaaccgaag

SEQ ID NO: 2205900 - DNA, 25 bp, Homo sapien
ggcaggaccttagcctgtgggtaca

SEQ ID NO: 2205901 - DNA, 25 bp, Homo sapien
aatcttgtgcatttcagtgggtttc

SEQ ID NO: 2205902 - DNA, 25 bp, Homo sapien
cagagtcttgaatatatgggtggga

SEQ ID NO: 2205903 - DNA, 25 bp, Homo sapien
tgatgatgacgaagagcacgagcag

SEQ ID NO: 2205904 - DNA, 25 bp, Homo sapien
cagtgcaatgtgcagcagcggcacc

SEQ ID NO: 2205905 - DNA, 25 bp, Homo sapien
tcccaggaagtagcacgtcttgtgc

SEQ ID NO: 2205906 - DNA, 25 bp, Homo sapien
gcattcgtccaaggaacagctcgag

SEQ ID NO: 2205907 - DNA, 25 bp, Homo sapien
cttcacatcgaagcctcctggcttt

SEQ ID NO: 2205908 - DNA, 25 bp, Homo sapien
gtgtgcggggcgtcgcctggccgtc

SEQ ID NO: 2205909 - DNA, 25 bp, Homo sapien
gtggccgcagcacccgaaacgccct

SEQ ID NO: 2205910 - DNA, 25 bp, Homo sapien
cgaaacgccctcaatgccttcacat

SEQ ID NO: 2205911 - DNA, 25 bp, Homo sapien
gagcaccgtctccacagtgaaaatc

SEQ ID NO: 2205912 - DNA, 25 bp, Homo sapien
agtcgagtaggttccagccattgcg

SEQ ID NO: 2205913 - DNA, 25 bp, Homo sapien
tgaaaatcaccaggaatacgtactc

SEQ ID NO: 2205914 - DNA, 25 bp, Homo sapien
cgtaggccacgatcttgagcaccgt

SEQ ID NO: 2205915 - DNA, 25 bp, Homo sapien
gctctactggggctctatttggctg

SEQ ID NO: 2205916 - DNA, 25 bp, Homo sapien
tctggctggaaggagtgagctctac

SEQ ID NO: 2205917 - DNA, 25 bp, Homo sapien
aggcagggccatccgggtcagagag

SEQ ID NO: 2205918 - DNA, 25 bp, Homo sapien
gagcatagtcaggaccgagggtggg

SEQ ID NO: 2205919 - DNA, 25 bp, Homo sapien
cagtgttggagtcgtcctcagggaa

SEQ ID NO: 2205920 - DNA, 25 bp, Homo sapien
ggcagtgttggagtcgtcctcaggg

SEQ ID NO: 2205921 - DNA, 25 bp, Homo sapien
gcagtgttggagtcgtcctcaggga

SEQ ID NO: 2205922 - DNA, 25 bp, Homo sapien
aaggccttgactttgtccctcctgg

SEQ ID NO: 2205923 - DNA, 25 bp, Homo sapien
ccctgggccctgcccctgccttcca

SEQ ID NO: 2205924 - DNA, 25 bp, Homo sapien
gggccctgcccctgccttccaggat

SEQ ID NO: 2205925 - DNA, 25 bp, Homo sapien
ctgggccctgcccctgccttccagg

SEQ ID NO: 2205926 - DNA, 25 bp, Homo sapien
gccctgcccctgccttccaggatgc

SEQ ID NO: 2205927 - DNA, 25 bp, Homo sapien
tgatgcaggaccgtcgcagaggatt

SEQ ID NO: 2205928 - DNA, 25 bp, Homo sapien
cgtcgcagaggattggccagggtga

SEQ ID NO: 2205929 - DNA, 25 bp, Homo sapien
gcccgaggtgaccgctgggcactgg

SEQ ID NO: 2205930 - DNA, 25 bp, Homo sapien
tgctggtttcttcgcttaggggtcc

SEQ ID NO: 2205931 - DNA, 25 bp, Homo sapien
tttctggaaagtcagagactgcaat

SEQ ID NO: 2205932 - DNA, 25 bp, Homo sapien
taggtcactttaggtctgtatctgg

SEQ ID NO: 2205933 - DNA, 25 bp, Homo sapien
tgggtcaggctgagcgttagggctc

SEQ ID NO: 2205934 - DNA, 25 bp, Homo sapien
ctggtagagtttgtgttaggtttca

SEQ ID NO: 2205935 - DNA, 25 bp, Homo sapien
ttgctccaagggtctgcagggatgg

SEQ ID NO: 2205936 - DNA, 25 bp, Homo sapien
tgctccaagggtctgcagggatgga

SEQ ID NO: 2205937 - DNA, 25 bp, Homo sapien
gctccaagggtctgcagggatggaa

SEQ ID NO: 2205938 - DNA, 25 bp, Homo sapien
cttgctccaagggtctgcagggatg

SEQ ID NO: 2205939 - DNA, 25 bp, Homo sapien
ctttcccgccttcagattccgacat

SEQ ID NO: 2205940 - DNA, 25 bp, Homo sapien
ctttctttcgagattgaagggccat

SEQ ID NO: 2205941 - DNA, 25 bp, Homo sapien
agattgaagggccatctgcacacaa

SEQ ID NO: 2205942 - DNA, 25 bp, Homo sapien
attgaagggccatctgcacacaacc

SEQ ID NO: 2205943 - DNA, 25 bp, Homo sapien
tctttcgagattgaagggccatctg

SEQ ID NO: 2205944 - DNA, 25 bp, Homo sapien
gcgggggcacggctagtggcggcgg

SEQ ID NO: 2205945 - DNA, 25 bp, Homo sapien
tgggtgcgggggcacggctagtggc

SEQ ID NO: 2205946 - DNA, 25 bp, Homo sapien
ggggcacggctagtggcggcggccg

SEQ ID NO: 2205947 - DNA, 25 bp, Homo sapien
ggtgcgggggcacggctagtggcgg

SEQ ID NO: 2205948 - DNA, 25 bp, Homo sapien
cgtgactccaaggtgatctcgttgg

SEQ ID NO: 2205949 - DNA, 25 bp, Homo sapien
tgggcccgtgactccaaggtgatct

SEQ ID NO: 2205950 - DNA, 25 bp, Homo sapien
gtcggatttcgcagctcctaggccc

SEQ ID NO: 2205951 - DNA, 25 bp, Homo sapien
tggctgcagactggtcggatttcgc

SEQ ID NO: 2205952 - DNA, 25 bp, Homo sapien
catcgggagatgtagccatgctcgt

SEQ ID NO: 2205953 - DNA, 25 bp, Homo sapien
cctcgtgcttgctggtgatctccac

SEQ ID NO: 2205954 - DNA, 25 bp, Homo sapien
ctcgtcctgccgctcctcgtgcttg

SEQ ID NO: 2205955 - DNA, 25 bp, Homo sapien
cagcgtgtatttccgggtgaagcat

SEQ ID NO: 2205956 - DNA, 25 bp, Homo sapien
gctgccggctgagcgcgtagctgta

SEQ ID NO: 2205957 - DNA, 25 bp, Homo sapien
tgatgtccagggatacgcgccagcg

SEQ ID NO: 2205958 - DNA, 25 bp, Homo sapien
cgtcggaggcgaagtagttgatgtc

SEQ ID NO: 2205959 - DNA, 25 bp, Homo sapien
cagcggtccgctgtgggccgattct

SEQ ID NO: 2205960 - DNA, 25 bp, Homo sapien
cgggggcaggggacgcacgtagcgg

SEQ ID NO: 2205961 - DNA, 25 bp, Homo sapien
gtcaaagaggcgactgtgcgggtac

SEQ ID NO: 2205962 - DNA, 25 bp, Homo sapien
gggacgcacgtagcggggccagcag

SEQ ID NO: 2205963 - DNA, 25 bp, Homo sapien
gctggtgcccaaccactgcgaccag

SEQ ID NO: 2205964 - DNA, 25 bp, Homo sapien
cccgcaggagcgagaaggggacgcg

SEQ ID NO: 2205965 - DNA, 25 bp, Homo sapien
gcaggagcgagaaggggacgcggcg

SEQ ID NO: 2205966 - DNA, 25 bp, Homo sapien
ccgcaggagcgagaaggggacgcgg

SEQ ID NO: 2205967 - DNA, 25 bp, Homo sapien
cgcaggagcgagaaggggacgcggc

SEQ ID NO: 2205968 - DNA, 25 bp, Homo sapien
ctgtccagtcacactctaacacaga

SEQ ID NO: 2205969 - DNA, 25 bp, Homo sapien
cagtcacactctaacacagaatagt

SEQ ID NO: 2205970 - DNA, 25 bp, Homo sapien
gtcacactctaacacagaatagtca

SEQ ID NO: 2205971 - DNA, 25 bp, Homo sapien
gtccagtcacactctaacacagaat

SEQ ID NO: 2205972 - DNA, 25 bp, Homo sapien
cagtccctgtctggtacacatgagg

SEQ ID NO: 2205973 - DNA, 25 bp, Homo sapien
gacgtttgcggtgactgatgagctt

SEQ ID NO: 2205974 - DNA, 25 bp, Homo sapien
agcttcagaaggaaatcaactccct

SEQ ID NO: 2205975 - DNA, 25 bp, Homo sapien
tcttgtctgatacgaaggagcttca

SEQ ID NO: 2205976 - DNA, 25 bp, Homo sapien
tcatccagaccatcgaggacacagg

SEQ ID NO: 2205977 - DNA, 25 bp, Homo sapien
gggcagcccactgatacctttgagg

SEQ ID NO: 2205978 - DNA, 25 bp, Homo sapien
ccatcatgcgggaggttcgagacct

SEQ ID NO: 2205979 - DNA, 25 bp, Homo sapien
tatctagctgctctgcacgaggtga

SEQ ID NO: 2205980 - DNA, 25 bp, Homo sapien
ccactgaccgcaacccttatatggg

SEQ ID NO: 2205981 - DNA, 25 bp, Homo sapien
gtagagggaacaccacacgaggcct

SEQ ID NO: 2205982 - DNA, 25 bp, Homo sapien
agaagatccgggaggactaccgagc

SEQ ID NO: 2205983 - DNA, 25 bp, Homo sapien
tgcctcagatcgagacagagctggg

SEQ ID NO: 2205984 - DNA, 25 bp, Homo sapien
tgtctgcacgggactcaagagaccc

SEQ ID NO: 2205985 - DNA, 25 bp, Homo sapien
tacacaggtgaattctaacaggccg

SEQ ID NO: 2205986 - DNA, 25 bp, Homo sapien
taagctgaggcatggatcagggctc

SEQ ID NO: 2205987 - DNA, 25 bp, Homo sapien
gaagtaatctgtgcgagcagctgag

SEQ ID NO: 2205988 - DNA, 25 bp, Homo sapien
tgggcctctggctccgtttcttgcg

SEQ ID NO: 2205989 - DNA, 25 bp, Homo sapien
ctctccacccgcacaaagcacttgt

SEQ ID NO: 2205990 - DNA, 25 bp, Homo sapien
aaagcacttgtgcagactcaggttg

SEQ ID NO: 2205991 - DNA, 25 bp, Homo sapien
ccaggtgtagggttggaacacctgc

SEQ ID NO: 2205992 - DNA, 25 bp, Homo sapien
gtcaccgccacctcagaggagctca

SEQ ID NO: 2205993 - DNA, 25 bp, Homo sapien
tgggcgtcaacctctgaggccagca

SEQ ID NO: 2205994 - DNA, 25 bp, Homo sapien
cctccccaatgtgcctatgagccca

SEQ ID NO: 2205995 - DNA, 25 bp, Homo sapien
gagctgcgatggcacttgaggccat

SEQ ID NO: 2205996 - DNA, 25 bp, Homo sapien
tggtagatctcattgagtgtccgct

SEQ ID NO: 2205997 - DNA, 25 bp, Homo sapien
aacatgcgtgtgaaccagtggtaga

SEQ ID NO: 2205998 - DNA, 25 bp, Homo sapien
tagatctcattgagtgtccgctgct

SEQ ID NO: 2205999 - DNA, 25 bp, Homo sapien
tgaagaaggcaaacatgcgtgtgaa

SEQ ID NO: 2206000 - DNA, 25 bp, Homo sapien
cagcggatgagcgtggcgtaggtga

SEQ ID NO: 2206001 - DNA, 25 bp, Homo sapien
gaaagggggtcgcatgttgtggaac

SEQ ID NO: 2206002 - DNA, 25 bp, Homo sapien
tgttgtggaacttgaagtagtccat

SEQ ID NO: 2206003 - DNA, 25 bp, Homo sapien
gaagtagtccatgttgtggaggaac

SEQ ID NO: 2206004 - DNA, 25 bp, Homo sapien
gtgcctccggacagcaaacaggctg

SEQ ID NO: 2206005 - DNA, 25 bp, Homo sapien
cacaggtgcctccggacagcaaaca

SEQ ID NO: 2206006 - DNA, 25 bp, Homo sapien
caggtgcctccggacagcaaacagg

SEQ ID NO: 2206007 - DNA, 25 bp, Homo sapien
cccacaggtgcctccggacagcaaa

SEQ ID NO: 2206008 - DNA, 25 bp, Homo sapien
cactgatgctgggaccatgaactgg

SEQ ID NO: 2206009 - DNA, 25 bp, Homo sapien
gaatcccacaaaacagcatgagccg

SEQ ID NO: 2206010 - DNA, 25 bp, Homo sapien
tgtttttcaaagcaaggacgccctc

SEQ ID NO: 2206011 - DNA, 25 bp, Homo sapien
gcaaagcgctcagaaacagtgcctg

SEQ ID NO: 2206012 - DNA, 25 bp, Homo sapien
tgaagccttggtcagtgccattttc

SEQ ID NO: 2206013 - DNA, 25 bp, Homo sapien
gtgggcctgcatggcactcagcttc

SEQ ID NO: 2206014 - DNA, 25 bp, Homo sapien
cacagatgaagccttggtcagtgcc

SEQ ID NO: 2206015 - DNA, 25 bp, Homo sapien
ccaggtgggcctgcatggcactcag

SEQ ID NO: 2206016 - DNA, 25 bp, Homo sapien
gcccttctcatccagaagatggtcc

SEQ ID NO: 2206017 - DNA, 25 bp, Homo sapien
gctccagagactgtaccatctctct

SEQ ID NO: 2206018 - DNA, 25 bp, Homo sapien
ccagaagatggtccgcctggcagtg

SEQ ID NO: 2206019 - DNA, 25 bp, Homo sapien
tctcatccagaagatggtccgcctg

SEQ ID NO: 2206020 - DNA, 25 bp, Homo sapien
atccgggccacttgcagacaccatt

SEQ ID NO: 2206021 - DNA, 25 bp, Homo sapien
tctggctcttcgaagaccttctcac

SEQ ID NO: 2206022 - DNA, 25 bp, Homo sapien
ttcgaagaccttctcacatccgggc

SEQ ID NO: 2206023 - DNA, 25 bp, Homo sapien
acttgcagacaccatttgccagcag

SEQ ID NO: 2206024 - DNA, 25 bp, Homo sapien
cactgggatttgggaaggtgcagag

SEQ ID NO: 2206025 - DNA, 25 bp, Homo sapien
ctgggatttgggaaggtgcagagca

SEQ ID NO: 2206026 - DNA, 25 bp, Homo sapien
actgggatttgggaaggtgcagagc

SEQ ID NO: 2206027 - DNA, 25 bp, Homo sapien
tccgggcgtgggcatccaccgttga

SEQ ID NO: 2206028 - DNA, 25 bp, Homo sapien
gtccgggcgtgggcatccaccgttg

SEQ ID NO: 2206029 - DNA, 25 bp, Homo sapien
gggcgtgggcatccaccgttgagag

SEQ ID NO: 2206030 - DNA, 25 bp, Homo sapien
cgggcgtgggcatccaccgttgaga

SEQ ID NO: 2206031 - DNA, 25 bp, Homo sapien
gccgtgccccggagggtgccaccat

SEQ ID NO: 2206032 - DNA, 25 bp, Homo sapien
tgccaccatgactaggggcagtgtg

SEQ ID NO: 2206033 - DNA, 25 bp, Homo sapien
tgcatgaaatgtggcctgtcctgga

SEQ ID NO: 2206034 - DNA, 25 bp, Homo sapien
tggtgcatgaaatgtggcctgtcct

SEQ ID NO: 2206035 - DNA, 25 bp, Homo sapien
gaagaggaggcatgggccccgcctc

SEQ ID NO: 2206036 - DNA, 25 bp, Homo sapien
gaggctttgggtgcagccctccagc

SEQ ID NO: 2206037 - DNA, 25 bp, Homo sapien
cctcgaagatctcggccctggaagg

SEQ ID NO: 2206038 - DNA, 25 bp, Homo sapien
cagctgcgatggtggcatggggttc

SEQ ID NO: 2206039 - DNA, 25 bp, Homo sapien
ggggccgagggcttgccaggcctgg

SEQ ID NO: 2206040 - DNA, 25 bp, Homo sapien
agtggagaaggcgagaagtgggtag

SEQ ID NO: 2206041 - DNA, 25 bp, Homo sapien
cttaatctgaagctggatcaggagc

SEQ ID NO: 2206042 - DNA, 25 bp, Homo sapien
ttaatctgaagctggatcaggagca

SEQ ID NO: 2206043 - DNA, 25 bp, Homo sapien
aaggcgagaagtgggtagattctga

SEQ ID NO: 2206044 - DNA, 25 bp, Homo sapien
ctccctgagggaagcactggctttt

SEQ ID NO: 2206045 - DNA, 25 bp, Homo sapien
tccacaatggctccgggccccctgc

SEQ ID NO: 2206046 - DNA, 25 bp, Homo sapien
cactccctgagggaagcactggctt

SEQ ID NO: 2206047 - DNA, 25 bp, Homo sapien
caatggctccgggccccctgctgag

SEQ ID NO: 2206048 - DNA, 25 bp, Homo sapien
cagatgccgagttccgtagtcccat

SEQ ID NO: 2206049 - DNA, 25 bp, Homo sapien
ggatgctcagatgccgagttccgta

SEQ ID NO: 2206050 - DNA, 25 bp, Homo sapien
tgctcagatgccgagttccgtagtc

SEQ ID NO: 2206051 - DNA, 25 bp, Homo sapien
cccagccaaccccattatacagaag

SEQ ID NO: 2206052 - DNA, 25 bp, Homo sapien
cacctcctgggggtggttgtcagag

SEQ ID NO: 2206053 - DNA, 25 bp, Homo sapien
agcagcccgggggagtatagaaggg

SEQ ID NO: 2206054 - DNA, 25 bp, Homo sapien
ttctgggggagcagttgctccttcc

SEQ ID NO: 2206055 - DNA, 25 bp, Homo sapien
tgggggtggttgtcagagctgtggt

SEQ ID NO: 2206056 - DNA, 25 bp, Homo sapien
tctgggccctgttgtcacagccccc

SEQ ID NO: 2206057 - DNA, 25 bp, Homo sapien
tcatatcggggtctgcatctgggcc

SEQ ID NO: 2206058 - DNA, 25 bp, Homo sapien
catctgggccctgttgtcacagccc

SEQ ID NO: 2206059 - DNA, 25 bp, Homo sapien
gggccctgttgtcacagcccccgac

SEQ ID NO: 2206060 - DNA, 25 bp, Homo sapien
ttgcccagatttttccgccattgac

SEQ ID NO: 2206061 - DNA, 25 bp, Homo sapien
catcgacaccacggaggaagagaag

SEQ ID NO: 2206062 - DNA, 25 bp, Homo sapien
gccggatgcgccgggcttcatcgac

SEQ ID NO: 2206063 - DNA, 25 bp, Homo sapien
atcgacaccacggaggaagagaaga

SEQ ID NO: 2206064 - DNA, 25 bp, Homo sapien
gatgcgccgggcttcatcgacacca

SEQ ID NO: 2206065 - DNA, 25 bp, Homo sapien
gtttcgttccgagaactggctgccc

SEQ ID NO: 2206066 - DNA, 25 bp, Homo sapien
aggtttcgttccgagaactggctgc

SEQ ID NO: 2206067 - DNA, 25 bp, Homo sapien
cacaggtttcgttccgagaactggc

SEQ ID NO: 2206068 - DNA, 25 bp, Homo sapien
cccacaggtttcgttccgagaactg

SEQ ID NO: 2206069 - DNA, 25 bp, Homo sapien
taagcctgcagaatcgagctcaccc

SEQ ID NO: 2206070 - DNA, 25 bp, Homo sapien
gccctgaacaacctgtttgcttcct

SEQ ID NO: 2206071 - DNA, 25 bp, Homo sapien
tgtgccaaacgctgtgctaagcctg

SEQ ID NO: 2206072 - DNA, 25 bp, Homo sapien
tgtgctaagcctgcagaatcgagct

SEQ ID NO: 2206073 - DNA, 25 bp, Homo sapien
aatcacggtagctgggtacatccca

SEQ ID NO: 2206074 - DNA, 25 bp, Homo sapien
cggtagctgggtacatcccactgta

SEQ ID NO: 2206075 - DNA, 25 bp, Homo sapien
gctggaatcacggtagctgggtaca

SEQ ID NO: 2206076 - DNA, 25 bp, Homo sapien
gtacatcccactgtaccagagggcc

SEQ ID NO: 2206077 - DNA, 25 bp, Homo sapien
gtgggaaactgtcacgtatcaaaaa

SEQ ID NO: 2206078 - DNA, 25 bp, Homo sapien
tgtacggtgtggaagccgcagacct

SEQ ID NO: 2206079 - DNA, 25 bp, Homo sapien
tataccgagaagaaaaaccacgctg

SEQ ID NO: 2206080 - DNA, 25 bp, Homo sapien
cttggtgaagtggactgacagaaaa

SEQ ID NO: 2206081 - DNA, 25 bp, Homo sapien
agctgatgtttatcttgaattttcc

SEQ ID NO: 2206082 - DNA, 25 bp, Homo sapien
atatccgccatcatctcagtagctg

SEQ ID NO: 2206083 - DNA, 25 bp, Homo sapien
tcagatacagtgctgaacatgtctc

SEQ ID NO: 2206084 - DNA, 25 bp, Homo sapien
tgggtcagatacagtgctgaacatg

SEQ ID NO: 2206085 - DNA, 25 bp, Homo sapien
tgtgggtcccgctttctttggtgct

SEQ ID NO: 2206086 - DNA, 25 bp, Homo sapien
acagatgagggaaacggaggtataa

SEQ ID NO: 2206087 - DNA, 25 bp, Homo sapien
cggaggtataagtagtcaagcaact

SEQ ID NO: 2206088 - DNA, 25 bp, Homo sapien
ctggcgagtgtgggtcccgctttct

SEQ ID NO: 2206089 - DNA, 25 bp, Homo sapien
caaagcccagggttctagtcgtcca

SEQ ID NO: 2206090 - DNA, 25 bp, Homo sapien
tttaggttgtccaggaattggcggc

SEQ ID NO: 2206091 - DNA, 25 bp, Homo sapien
gcaggcactctattcaaccactggt

SEQ ID NO: 2206092 - DNA, 25 bp, Homo sapien
gacaggccatggtgaagacttccag

SEQ ID NO: 2206093 - DNA, 25 bp, Homo sapien
gaaaagcccagaatgggcctgatgg

SEQ ID NO: 2206094 - DNA, 25 bp, Homo sapien
ccttctggaaaagcccagaatgggc

SEQ ID NO: 2206095 - DNA, 25 bp, Homo sapien
tggaaaagcccagaatgggcctgat

SEQ ID NO: 2206096 - DNA, 25 bp, Homo sapien
aaagcccagaatgggcctgatggcc

SEQ ID NO: 2206097 - DNA, 25 bp, Homo sapien
cactttttgggcctctgcgttcgtt

SEQ ID NO: 2206098 - DNA, 25 bp, Homo sapien
tgtacgtcatccgtgcatggctgcc

SEQ ID NO: 2206099 - DNA, 25 bp, Homo sapien
ccggctctcaattcgctgtacgtca

SEQ ID NO: 2206100 - DNA, 25 bp, Homo sapien
attggctgcgtgcttctccggctct

SEQ ID NO: 2206101 - DNA, 25 bp, Homo sapien
cgcgccgggccgtctggagcgcttg

SEQ ID NO: 2206102 - DNA, 25 bp, Homo sapien
cttggggcgcgtcatggtggagctg

SEQ ID NO: 2206103 - DNA, 25 bp, Homo sapien
cgccgggccgtctggagcgcttggg

SEQ ID NO: 2206104 - DNA, 25 bp, Homo sapien
ctggtccccacattttcgctgccgc

SEQ ID NO: 2206105 - DNA, 25 bp, Homo sapien
cacacccactgatgccgaagggctg

SEQ ID NO: 2206106 - DNA, 25 bp, Homo sapien
tcgtggtgcgctatgagacccctga

SEQ ID NO: 2206107 - DNA, 25 bp, Homo sapien
aactacacagtcctgctccggatcg

SEQ ID NO: 2206108 - DNA, 25 bp, Homo sapien
ctgaagagctgcatgaagccggtga

SEQ ID NO: 2206109 - DNA, 25 bp, Homo sapien
tgcctgaccctgtagattgggccag

SEQ ID NO: 2206110 - DNA, 25 bp, Homo sapien
ggccagggacccttattctagggca

SEQ ID NO: 2206111 - DNA, 25 bp, Homo sapien
taattcctcaaactcaccttgtcgg

SEQ ID NO: 2206112 - DNA, 25 bp, Homo sapien
tagcttcatgtatccaaactcggca

SEQ ID NO: 2206113 - DNA, 25 bp, Homo sapien
cctgccgaggaggaactgaagacga

SEQ ID NO: 2206114 - DNA, 25 bp, Homo sapien
ccgaggaggaactgaagacgaagaa

SEQ ID NO: 2206115 - DNA, 25 bp, Homo sapien
aggaggaactgaagacgaagaacat

SEQ ID NO: 2206116 - DNA, 25 bp, Homo sapien
ctgccgaggaggaactgaagacgaa

SEQ ID NO: 2206117 - DNA, 25 bp, Homo sapien
gatgtgtgtctcctcgtctcgtggt

SEQ ID NO: 2206118 - DNA, 25 bp, Homo sapien
tagagtggaactgggcatgtcctcc

SEQ ID NO: 2206119 - DNA, 25 bp, Homo sapien
caagctctccagtcaacacagggct

SEQ ID NO: 2206120 - DNA, 25 bp, Homo sapien
taagatgggatacatggcctgtgca

SEQ ID NO: 2206121 - DNA, 25 bp, Homo sapien
ggctttttcaagtcttcccattgaa

SEQ ID NO: 2206122 - DNA, 25 bp, Homo sapien
tttctggaaggtttgcttacctggc

SEQ ID NO: 2206123 - DNA, 25 bp, Homo sapien
tcttaatctaattctagaccatttt

SEQ ID NO: 2206124 - DNA, 25 bp, Homo sapien
tttatattgtttcactccttttgcc

SEQ ID NO: 2206125 - DNA, 25 bp, Homo sapien
tcggtgcctcgagactgacatttgt

SEQ ID NO: 2206126 - DNA, 25 bp, Homo sapien
cgcaggcgcaatggttgcttggcca

SEQ ID NO: 2206127 - DNA, 25 bp, Homo sapien
tccaattggccgctggttcggcgca

SEQ ID NO: 2206128 - DNA, 25 bp, Homo sapien
gattcgaatcctgtctcggtgcctc

SEQ ID NO: 2206129 - DNA, 25 bp, Homo sapien
gaattcacggagatcactggctcgt

SEQ ID NO: 2206130 - DNA, 25 bp, Homo sapien
ctgtagtagaattcacggagatcac

SEQ ID NO: 2206131 - DNA, 25 bp, Homo sapien
cactggctcgtagcagcgttctgcc

SEQ ID NO: 2206132 - DNA, 25 bp, Homo sapien
ggagatcactggctcgtagcagcgt

SEQ ID NO: 2206133 - DNA, 25 bp, Homo sapien
gagtagtccgggccacttgtttctg

SEQ ID NO: 2206134 - DNA, 25 bp, Homo sapien
tccctggagtagtccgggccacttg

SEQ ID NO: 2206135 - DNA, 25 bp, Homo sapien
tggagtagtccgggccacttgtttc

SEQ ID NO: 2206136 - DNA, 25 bp, Homo sapien
cctggagtagtccgggccacttgtt

SEQ ID NO: 2206137 - DNA, 25 bp, Homo sapien
caacatcaagaagcgagcctctcct

SEQ ID NO: 2206138 - DNA, 25 bp, Homo sapien
acaacatcaagaagcgagcctctcc

SEQ ID NO: 2206139 - DNA, 25 bp, Homo sapien
acatcaagaagcgagcctctcctca

SEQ ID NO: 2206140 - DNA, 25 bp, Homo sapien
cttggctgctattccaaagcgcgtg

SEQ ID NO: 2206141 - DNA, 25 bp, Homo sapien
tgttcactttagctgagaagcaggc

SEQ ID NO: 2206142 - DNA, 25 bp, Homo sapien
tgctattccaaagcgcgtgttactg

SEQ ID NO: 2206143 - DNA, 25 bp, Homo sapien
ctgagaagcaggcgtcagggtcaat

SEQ ID NO: 2206144 - DNA, 25 bp, Homo sapien
ccagaattcatcagtctcgtagcca

SEQ ID NO: 2206145 - DNA, 25 bp, Homo sapien
gtgaagccagaattcatcagtctcg

SEQ ID NO: 2206146 - DNA, 25 bp, Homo sapien
gaagccagaattcatcagtctcgta

SEQ ID NO: 2206147 - DNA, 25 bp, Homo sapien
aagccagaattcatcagtctcgtag

SEQ ID NO: 2206148 - DNA, 25 bp, Homo sapien
agcaccagagcaccccggatggaag

SEQ ID NO: 2206149 - DNA, 25 bp, Homo sapien
cttgtaacccagcaccagagcaccc

SEQ ID NO: 2206150 - DNA, 25 bp, Homo sapien
agagcaccccggatggaaggcccag

SEQ ID NO: 2206151 - DNA, 25 bp, Homo sapien
atggaaggcccagcaatgtcaaaat

SEQ ID NO: 2206152 - DNA, 25 bp, Homo sapien
gtccaagttaatgtgctcctgcttg

SEQ ID NO: 2206153 - DNA, 25 bp, Homo sapien
aagttaatgtgctcctgcttgtacc

SEQ ID NO: 2206154 - DNA, 25 bp, Homo sapien
ctatgtcgcagtccaagttaatgtg

SEQ ID NO: 2206155 - DNA, 25 bp, Homo sapien
ccaagttaatgtgctcctgcttgta

SEQ ID NO: 2206156 - DNA, 25 bp, Homo sapien
aggatgaatcgaaggtcagcttcag

SEQ ID NO: 2206157 - DNA, 25 bp, Homo sapien
tgagaaggatgaatcgaaggtcagc

SEQ ID NO: 2206158 - DNA, 25 bp, Homo sapien
ccccccagtgttaggtgagaaggat

SEQ ID NO: 2206159 - DNA, 25 bp, Homo sapien
gaaggatgaatcgaaggtcagcttc

SEQ ID NO: 2206160 - DNA, 25 bp, Homo sapien
tttctccgtaaacgtcaggccatac

SEQ ID NO: 2206161 - DNA, 25 bp, Homo sapien
tctccgtaaacgtcaggccatactc

SEQ ID NO: 2206162 - DNA, 25 bp, Homo sapien
catttctccgtaaacgtcaggccat

SEQ ID NO: 2206163 - DNA, 25 bp, Homo sapien
tccgtaaacgtcaggccatactcag

SEQ ID NO: 2206164 - DNA, 25 bp, Homo sapien
atccatagtccttggtgaagacatc

SEQ ID NO: 2206165 - DNA, 25 bp, Homo sapien
ctgagcttgtaaattccaatccatt

SEQ ID NO: 2206166 - DNA, 25 bp, Homo sapien
ttaagccaaatccatagtccttggt

SEQ ID NO: 2206167 - DNA, 25 bp, Homo sapien
tggtctcagtgttggctgagcctga

SEQ ID NO: 2206168 - DNA, 25 bp, Homo sapien
cggcatacgtgggtggcacagccgt

SEQ ID NO: 2206169 - DNA, 25 bp, Homo sapien
caagatcggcatacgtgggtggcac

SEQ ID NO: 2206170 - DNA, 25 bp, Homo sapien
cagatttgccaagatcggcatacgt

SEQ ID NO: 2206171 - DNA, 25 bp, Homo sapien
gatttgccaagatcggcatacgtgg

SEQ ID NO: 2206172 - DNA, 25 bp, Homo sapien
cagagacggtggcggcgggctcaga

SEQ ID NO: 2206173 - DNA, 25 bp, Homo sapien
tggctacagcgggcccttgcaacat

SEQ ID NO: 2206174 - DNA, 25 bp, Homo sapien
agacggtggcggcgggctcagaggt

SEQ ID NO: 2206175 - DNA, 25 bp, Homo sapien
cagaggtggctacagcgggcccttg

SEQ ID NO: 2206176 - DNA, 25 bp, Homo sapien
atggccttccaagtgtgctgtggac

SEQ ID NO: 2206177 - DNA, 25 bp, Homo sapien
tcatctaggtggcataagtgacaga

SEQ ID NO: 2206178 - DNA, 25 bp, Homo sapien
tagttgctcaatgataggcattgtc

SEQ ID NO: 2206179 - DNA, 25 bp, Homo sapien
taggcattgtcctgtacagctcccc

SEQ ID NO: 2206180 - DNA, 25 bp, Homo sapien
aattgcttgccattttccccaggcc

SEQ ID NO: 2206181 - DNA, 25 bp, Homo sapien
ctaattgcttgccattttccccagg

SEQ ID NO: 2206182 - DNA, 25 bp, Homo sapien
ggccggccagagaagcagtgggctc

SEQ ID NO: 2206183 - DNA, 25 bp, Homo sapien
gccggccagagaagcagtgggctct

SEQ ID NO: 2206184 - DNA, 25 bp, Homo sapien
ccaccattctgaatgacggaggtcc

SEQ ID NO: 2206185 - DNA, 25 bp, Homo sapien
ttggaatgccgtgctgcattctgat

SEQ ID NO: 2206186 - DNA, 25 bp, Homo sapien
cttcatcgccaacccgttggaatgc

SEQ ID NO: 2206187 - DNA, 25 bp, Homo sapien
tgaatgacggaggtcccgttgccct

SEQ ID NO: 2206188 - DNA, 25 bp, Homo sapien
ctagaaatgtcatgggcccatcccc

SEQ ID NO: 2206189 - DNA, 25 bp, Homo sapien
atgtcatgggcccatccccagagag

SEQ ID NO: 2206190 - DNA, 25 bp, Homo sapien
agaaatgtcatgggcccatccccag

SEQ ID NO: 2206191 - DNA, 25 bp, Homo sapien
aaatgtcatgggcccatccccagag

SEQ ID NO: 2206192 - DNA, 25 bp, Homo sapien
gttctgccaggcactcaacgagggg

SEQ ID NO: 2206193 - DNA, 25 bp, Homo sapien
tctgccaggcactcaacgaggggga

SEQ ID NO: 2206194 - DNA, 25 bp, Homo sapien
gagttctgccaggcactcaacgagg

SEQ ID NO: 2206195 - DNA, 25 bp, Homo sapien
tcaacgagggggaggttttgccaca

SEQ ID NO: 2206196 - DNA, 25 bp, Homo sapien
tgcacaaagccgttgatctccgttt

SEQ ID NO: 2206197 - DNA, 25 bp, Homo sapien
cgttgatctccgttttgctgagaga

SEQ ID NO: 2206198 - DNA, 25 bp, Homo sapien
tccgttttgctgagagatgacaacg

SEQ ID NO: 2206199 - DNA, 25 bp, Homo sapien
gaaatatgcacaaagccgttgatct

SEQ ID NO: 2206200 - DNA, 25 bp, Homo sapien
caagattggaactgggctgaaagag

SEQ ID NO: 2206201 - DNA, 25 bp, Homo sapien
agagctgtgatggtagatcttgcat

SEQ ID NO: 2206202 - DNA, 25 bp, Homo sapien
gctgaaagagctgtgatggtagatc

SEQ ID NO: 2206203 - DNA, 25 bp, Homo sapien
ctgattggggccaagattggaactg

SEQ ID NO: 2206204 - DNA, 25 bp, Homo sapien
gctgcttcaaattaccctttgtgga

SEQ ID NO: 2206205 - DNA, 25 bp, Homo sapien
ttctatagtgaatgtccaaggcact

SEQ ID NO: 2206206 - DNA, 25 bp, Homo sapien
ctatagtgaatgtccaaggcactct

SEQ ID NO: 2206207 - DNA, 25 bp, Homo sapien
tctatagtgaatgtccaaggcactc

SEQ ID NO: 2206208 - DNA, 25 bp, Homo sapien
gccacaaatgttgcaagcggtgttt

SEQ ID NO: 2206209 - DNA, 25 bp, Homo sapien
ccacaaatgttgcaagcggtgtttt

SEQ ID NO: 2206210 - DNA, 25 bp, Homo sapien
actggatgtcagatccaaagccccg

SEQ ID NO: 2206211 - DNA, 25 bp, Homo sapien
tggatgtcagatccaaagccccgcc

SEQ ID NO: 2206212 - DNA, 25 bp, Homo sapien
tatgtgactggatgtcagatccaaa

SEQ ID NO: 2206213 - DNA, 25 bp, Homo sapien
ctgtatgtgactggatgtcagatcc

SEQ ID NO: 2206214 - DNA, 25 bp, Homo sapien
caggacatcatcctcgaaggaccca

SEQ ID NO: 2206215 - DNA, 25 bp, Homo sapien
gcagacttgggcatatcagggaatc

SEQ ID NO: 2206216 - DNA, 25 bp, Homo sapien
tagaaggagcctatgtcagactcca

SEQ ID NO: 2206217 - DNA, 25 bp, Homo sapien
tatgcattcgagtgtgctgctgcgg

SEQ ID NO: 2206218 - DNA, 25 bp, Homo sapien
atgaaaacctggccacagatcttac

SEQ ID NO: 2206219 - DNA, 25 bp, Homo sapien
tgtgatgaaaacctggccacagatc

SEQ ID NO: 2206220 - DNA, 25 bp, Homo sapien
ctgtgatgaaaacctggccacagat

SEQ ID NO: 2206221 - DNA, 25 bp, Homo sapien
tgatgaaaacctggccacagatctt

SEQ ID NO: 2206222 - DNA, 25 bp, Homo sapien
tcgctgtcaggaccgagttggtgac

SEQ ID NO: 2206223 - DNA, 25 bp, Homo sapien
ggcactactgttcgctgtcaggacc

SEQ ID NO: 2206224 - DNA, 25 bp, Homo sapien
ggagctcagggcactactgttcgct

SEQ ID NO: 2206225 - DNA, 25 bp, Homo sapien
gtcaggaccgagttggtgaccacac

SEQ ID NO: 2206226 - DNA, 25 bp, Homo sapien
gactaaacctgtgggactggtggca

SEQ ID NO: 2206227 - DNA, 25 bp, Homo sapien
taggtttcttgtggccagctcggcg

SEQ ID NO: 2206228 - DNA, 25 bp, Homo sapien
cacagatgttgtacttgaacgccct

SEQ ID NO: 2206229 - DNA, 25 bp, Homo sapien
tcaaagacctttgtgcagaacctgc

SEQ ID NO: 2206230 - DNA, 25 bp, Homo sapien
tagcgggggccaactgatgtagaag

SEQ ID NO: 2206231 - DNA, 25 bp, Homo sapien
gggccaactgatgtagaagtggatc

SEQ ID NO: 2206232 - DNA, 25 bp, Homo sapien
ccaactgatgtagaagtggatcaga

SEQ ID NO: 2206233 - DNA, 25 bp, Homo sapien
tgtagaagtggatcagatgcaggac

SEQ ID NO: 2206234 - DNA, 25 bp, Homo sapien
ggaggccgcagctcttgaagccacc

SEQ ID NO: 2206235 - DNA, 25 bp, Homo sapien
tattgggagaaaagccactgttgga

SEQ ID NO: 2206236 - DNA, 25 bp, Homo sapien
tggaatgatggtgttgccagaacta

SEQ ID NO: 2206237 - DNA, 25 bp, Homo sapien
tgacaccaccaatatgttcatattg

SEQ ID NO: 2206238 - DNA, 25 bp, Homo sapien
ggtgttgccagaactactctgaagt

SEQ ID NO: 2206239 - DNA, 25 bp, Homo sapien
gggatggccaacttgccccaggaag

SEQ ID NO: 2206240 - DNA, 25 bp, Homo sapien
ggatggccaacttgccccaggaagc

SEQ ID NO: 2206241 - DNA, 25 bp, Homo sapien
tgggatggccaacttgccccaggaa

SEQ ID NO: 2206242 - DNA, 25 bp, Homo sapien
gagaagttgcccagtgttgtcaggt

SEQ ID NO: 2206243 - DNA, 25 bp, Homo sapien
gctctggaggttctcgatgatgacg

SEQ ID NO: 2206244 - DNA, 25 bp, Homo sapien
tctcgatgatgacgttgctgttgat

SEQ ID NO: 2206245 - DNA, 25 bp, Homo sapien
cagtgttgtcaggtccccgagttga

SEQ ID NO: 2206246 - DNA, 25 bp, Homo sapien
cgctgcagtccacttgatctgtttt

SEQ ID NO: 2206247 - DNA, 25 bp, Homo sapien
agtccacttgatctgttttgttaac

SEQ ID NO: 2206248 - DNA, 25 bp, Homo sapien
gttgtgttctgaaaggtcgctgcag

SEQ ID NO: 2206249 - DNA, 25 bp, Homo sapien
ctccatggactcttccctgtcaagt

SEQ ID NO: 2206250 - DNA, 25 bp, Homo sapien
gcctgaaccatttcagcgtgtcttc

SEQ ID NO: 2206251 - DNA, 25 bp, Homo sapien
cagcctgaaccatttcagcgtgtct

SEQ ID NO: 2206252 - DNA, 25 bp, Homo sapien
ctgaaccatttcagcgtgtcttctt

SEQ ID NO: 2206253 - DNA, 25 bp, Homo sapien
cctgaaccatttcagcgtgtcttct

SEQ ID NO: 2206254 - DNA, 25 bp, Homo sapien
gtgaacctgttcctggctatccgct

SEQ ID NO: 2206255 - DNA, 25 bp, Homo sapien
acacccagtcttcgggtgaacctgt

SEQ ID NO: 2206256 - DNA, 25 bp, Homo sapien
atttggcaggcccaactcctggaca

SEQ ID NO: 2206257 - DNA, 25 bp, Homo sapien
ctcaggtgttttcacctcctctgga

SEQ ID NO: 2206258 - DNA, 25 bp, Homo sapien
cgcaggcacaccctcttggtatcag

SEQ ID NO: 2206259 - DNA, 25 bp, Homo sapien
atttcgcaggcacaccctcttggta

SEQ ID NO: 2206260 - DNA, 25 bp, Homo sapien
tcatttcgcaggcacaccctcttgg

SEQ ID NO: 2206261 - DNA, 25 bp, Homo sapien
ctcttcatttcgcaggcacaccctc

SEQ ID NO: 2206262 - DNA, 25 bp, Homo sapien
attccacttcgtcaggttgctcatc

SEQ ID NO: 2206263 - DNA, 25 bp, Homo sapien
ccacttcgtcaggttgctcatcact

SEQ ID NO: 2206264 - DNA, 25 bp, Homo sapien
tccacttcgtcaggttgctcatcac

SEQ ID NO: 2206265 - DNA, 25 bp, Homo sapien
ttccacttcgtcaggttgctcatca

SEQ ID NO: 2206266 - DNA, 25 bp, Homo sapien
ggtctacgccgatagattaatcttc

SEQ ID NO: 2206267 - DNA, 25 bp, Homo sapien
tagatcattggtctacgccgataga

SEQ ID NO: 2206268 - DNA, 25 bp, Homo sapien
gattctacatagatcattggtctac

SEQ ID NO: 2206269 - DNA, 25 bp, Homo sapien
cagaagattctacatagatcattgg

SEQ ID NO: 2206270 - DNA, 25 bp, Homo sapien
ctcgggactttgacccctccaacag

SEQ ID NO: 2206271 - DNA, 25 bp, Homo sapien
cgggactttgacccctccaacagca

SEQ ID NO: 2206272 - DNA, 25 bp, Homo sapien
tcgggactttgacccctccaacagc

SEQ ID NO: 2206273 - DNA, 25 bp, Homo sapien
ccttcatggcccactttcctccctg

SEQ ID NO: 2206274 - DNA, 25 bp, Homo sapien
cccctgaccgcttccccttcatggc

SEQ ID NO: 2206275 - DNA, 25 bp, Homo sapien
tggccccttcacgaccacaaagccg

SEQ ID NO: 2206276 - DNA, 25 bp, Homo sapien
cacaaagccgatggcggcgtcgcag

SEQ ID NO: 2206277 - DNA, 25 bp, Homo sapien
ggaacgcgactgcacactctcacag

SEQ ID NO: 2206278 - DNA, 25 bp, Homo sapien
gcaggaacgcgactgcacactctca

SEQ ID NO: 2206279 - DNA, 25 bp, Homo sapien
aacgcgactgcacactctcacagct

SEQ ID NO: 2206280 - DNA, 25 bp, Homo sapien
aggaacgcgactgcacactctcaca

SEQ ID NO: 2206281 - DNA, 25 bp, Homo sapien
cagcatttgccagtcataactaatg

SEQ ID NO: 2206282 - DNA, 25 bp, Homo sapien
ctttaaagtcctctatgtgggtctc

SEQ ID NO: 2206283 - DNA, 25 bp, Homo sapien
tatgtgggtctctatcagcatttgc

SEQ ID NO: 2206284 - DNA, 25 bp, Homo sapien
cataactaatggactgagatagaag

SEQ ID NO: 2206285 - DNA, 25 bp, Homo sapien
taagggtagagtctaatggagtgca

SEQ ID NO: 2206286 - DNA, 25 bp, Homo sapien
cctgcgactgcatgggcatcttttg

SEQ ID NO: 2206287 - DNA, 25 bp, Homo sapien
tcccagtgcccaagataagggtaga

SEQ ID NO: 2206288 - DNA, 25 bp, Homo sapien
ggctccaggttcctgcgactgcatg

SEQ ID NO: 2206289 - DNA, 25 bp, Homo sapien
tactaataacagattgatttcatct

SEQ ID NO: 2206290 - DNA, 25 bp, Homo sapien
acaaaatactaataacagattgatt

SEQ ID NO: 2206291 - DNA, 25 bp, Homo sapien
taacagattgatttcatctaacaaa

SEQ ID NO: 2206292 - DNA, 25 bp, Homo sapien
gattgatttcatctaacaaaggatt

SEQ ID NO: 2206293 - DNA, 25 bp, Homo sapien
taaggcacgcaaaccctgtcagaga

SEQ ID NO: 2206294 - DNA, 25 bp, Homo sapien
gcaaaccctgtcagagagggtttcc

SEQ ID NO: 2206295 - DNA, 25 bp, Homo sapien
cttttaggtatattcccattagtgt

SEQ ID NO: 2206296 - DNA, 25 bp, Homo sapien
ctgtgatttttaaggcacgcaaacc

SEQ ID NO: 2206297 - DNA, 25 bp, Homo sapien
gacagtagtattgctgtgggactgc

SEQ ID NO: 2206298 - DNA, 25 bp, Homo sapien
ctgttgaggaatcgagtatggtacc

SEQ ID NO: 2206299 - DNA, 25 bp, Homo sapien
acatcttcatgacagtagtattgct

SEQ ID NO: 2206300 - DNA, 25 bp, Homo sapien
ttgaggaatcgagtatggtaccagg

SEQ ID NO: 2206301 - DNA, 25 bp, Homo sapien
caccgatcgttcctccatgggagtt

SEQ ID NO: 2206302 - DNA, 25 bp, Homo sapien
gtggcgccgccatgaccttgtggtt

SEQ ID NO: 2206303 - DNA, 25 bp, Homo sapien
aggagggtcgggcagcacagtccgt

SEQ ID NO: 2206304 - DNA, 25 bp, Homo sapien
tgggtgggtccaccgatcgttcctc

SEQ ID NO: 2206305 - DNA, 25 bp, Homo sapien
tagtgtcatctcagtaaagttctgc

SEQ ID NO: 2206306 - DNA, 25 bp, Homo sapien
tctatgcagtggttagcgttctggt

SEQ ID NO: 2206307 - DNA, 25 bp, Homo sapien
tctgctaagtaatgaactcaactgt

SEQ ID NO: 2206308 - DNA, 25 bp, Homo sapien
caagctgaagctacacacatggctg

SEQ ID NO: 2206309 - DNA, 25 bp, Homo sapien
ctggcagctagctccacaggcttct

SEQ ID NO: 2206310 - DNA, 25 bp, Homo sapien
gactgtgtcctgtagtttaggcccc

SEQ ID NO: 2206311 - DNA, 25 bp, Homo sapien
acgctgccagggcttaagggtcttg

SEQ ID NO: 2206312 - DNA, 25 bp, Homo sapien
tgggcacactcttcatgggctttgg

SEQ ID NO: 2206313 - DNA, 25 bp, Homo sapien
agcgctgataagatgggccagggac

SEQ ID NO: 2206314 - DNA, 25 bp, Homo sapien
tgcagagcgctgataagatgggcca

SEQ ID NO: 2206315 - DNA, 25 bp, Homo sapien
cctgcagagcgctgataagatgggc

SEQ ID NO: 2206316 - DNA, 25 bp, Homo sapien
agagcgctgataagatgggccaggg

SEQ ID NO: 2206317 - DNA, 25 bp, Homo sapien
tgcagagaaatacgataggataatc

SEQ ID NO: 2206318 - DNA, 25 bp, Homo sapien
ttgctgcagagaaatacgataggat

SEQ ID NO: 2206319 - DNA, 25 bp, Homo sapien
acttagagccttataatcagaggaa

SEQ ID NO: 2206320 - DNA, 25 bp, Homo sapien
gagccttataatcagaggaacattt

SEQ ID NO: 2206321 - DNA, 25 bp, Homo sapien
gtagacagtcccaggtacacagaga

SEQ ID NO: 2206322 - DNA, 25 bp, Homo sapien
agctcttggtacatctggccctcgg

SEQ ID NO: 2206323 - DNA, 25 bp, Homo sapien
gagtgaatggtgacagagccctcca

SEQ ID NO: 2206324 - DNA, 25 bp, Homo sapien
catctactgcgaaggagagctgtct

SEQ ID NO: 2206325 - DNA, 25 bp, Homo sapien
gatggcctgtcacggcttctgcctg

SEQ ID NO: 2206326 - DNA, 25 bp, Homo sapien
ggctcggccgccgaaatgatggcct

SEQ ID NO: 2206327 - DNA, 25 bp, Homo sapien
aaatgatggcctgtcacggcttctg

SEQ ID NO: 2206328 - DNA, 25 bp, Homo sapien
cttctgcctgcgctccctaggaccc

SEQ ID NO: 2206329 - DNA, 25 bp, Homo sapien
ggagtacctcccttcgagattctga

SEQ ID NO: 2206330 - DNA, 25 bp, Homo sapien
gggccctagttagagatacaggttc

SEQ ID NO: 2206331 - DNA, 25 bp, Homo sapien
gattctcgtgaacaagcaagtttgg

SEQ ID NO: 2206332 - DNA, 25 bp, Homo sapien
ggtggagccaaggaatctgtaattt

SEQ ID NO: 2206333 - DNA, 25 bp, Homo sapien
gattcccgggggcgtcgcctgcttc

SEQ ID NO: 2206334 - DNA, 25 bp, Homo sapien
gaggattcccgggggcgtcgcctgc

SEQ ID NO: 2206335 - DNA, 25 bp, Homo sapien
agaagcagcctccactagggggctt

SEQ ID NO: 2206336 - DNA, 25 bp, Homo sapien
cactagggggcttcggcgggaggat

SEQ ID NO: 2206337 - DNA, 25 bp, Homo sapien
cttgaggaacttggcgtcctgggac

SEQ ID NO: 2206338 - DNA, 25 bp, Homo sapien
tgaggaacttggcgtcctgggacat

SEQ ID NO: 2206339 - DNA, 25 bp, Homo sapien
tgggacatgtggctcagtatcttgc

SEQ ID NO: 2206340 - DNA, 25 bp, Homo sapien
ctgggacatgtggctcagtatcttg

SEQ ID NO: 2206341 - DNA, 25 bp, Homo sapien
cttcaaatcctcaaaaacattccct

SEQ ID NO: 2206342 - DNA, 25 bp, Homo sapien
gaaagatcttcaaatcctcaaaaac

SEQ ID NO: 2206343 - DNA, 25 bp, Homo sapien
aagtgaaagatcttcaaatcctcaa

SEQ ID NO: 2206344 - DNA, 25 bp, Homo sapien
gatcttcaaatcctcaaaaacattc

SEQ ID NO: 2206345 - DNA, 25 bp, Homo sapien
tgagcgccttgatccacacgggaaa

SEQ ID NO: 2206346 - DNA, 25 bp, Homo sapien
tagcaaagtggagaaactctcggaa

SEQ ID NO: 2206347 - DNA, 25 bp, Homo sapien
taacgcgcgtagctggttctctcca

SEQ ID NO: 2206348 - DNA, 25 bp, Homo sapien
ctctcggaaaagtagttgctgcgct

SEQ ID NO: 2206349 - DNA, 25 bp, Homo sapien
aagctgccccgagtaagtgagggaa

SEQ ID NO: 2206350 - DNA, 25 bp, Homo sapien
cctggagttcccagtgaagttgtac

SEQ ID NO: 2206351 - DNA, 25 bp, Homo sapien
gagcaaatcagttgcctggagttcc

SEQ ID NO: 2206352 - DNA, 25 bp, Homo sapien
tacctgtgcccgtgcgataacgtca

SEQ ID NO: 2206353 - DNA, 25 bp, Homo sapien
gctgcttagagggaaacttgacact

SEQ ID NO: 2206354 - DNA, 25 bp, Homo sapien
tcttcagagataccttgctgcttag

SEQ ID NO: 2206355 - DNA, 25 bp, Homo sapien
tagagggaaacttgacactacccat

SEQ ID NO: 2206356 - DNA, 25 bp, Homo sapien
gataccttgctgcttagagggaaac

SEQ ID NO: 2206357 - DNA, 25 bp, Homo sapien
gaagctgctgctagctataagttta

SEQ ID NO: 2206358 - DNA, 25 bp, Homo sapien
ccatgtggcagggtaagaaattagc

SEQ ID NO: 2206359 - DNA, 25 bp, Homo sapien
gctctgggaaactcagcctgtgacc

SEQ ID NO: 2206360 - DNA, 25 bp, Homo sapien
ccccagcgtgggtgaagataggatc

SEQ ID NO: 2206361 - DNA, 25 bp, Homo sapien
aaaaatgtgcatgtcatccctgtgc

SEQ ID NO: 2206362 - DNA, 25 bp, Homo sapien
tcaaaaatgtgcatgtcatccctgt

SEQ ID NO: 2206363 - DNA, 25 bp, Homo sapien
tttcaaaaatgtgcatgtcatccct

SEQ ID NO: 2206364 - DNA, 25 bp, Homo sapien
agggaccatgctaatcttctctgta

SEQ ID NO: 2206365 - DNA, 25 bp, Homo sapien
gacccattcgctgtcgtccataaac

SEQ ID NO: 2206366 - DNA, 25 bp, Homo sapien
tggacccattcgctgtcgtccataa

SEQ ID NO: 2206367 - DNA, 25 bp, Homo sapien
actggacccattcgctgtcgtccat

SEQ ID NO: 2206368 - DNA, 25 bp, Homo sapien
cccattcgctgtcgtccataaacat

SEQ ID NO: 2206369 - DNA, 25 bp, Homo sapien
tgtcccaagacacgcaaaacagagg

SEQ ID NO: 2206370 - DNA, 25 bp, Homo sapien
gtcccaagacacgcaaaacagagga

SEQ ID NO: 2206371 - DNA, 25 bp, Homo sapien
tgtgtcccaagacacgcaaaacaga

SEQ ID NO: 2206372 - DNA, 25 bp, Homo sapien
tatgtgtcccaagacacgcaaaaca

SEQ ID NO: 2206373 - DNA, 25 bp, Homo sapien
aaattcattgaagcttgttaaccag

SEQ ID NO: 2206374 - DNA, 25 bp, Homo sapien
cttgggcaaattcattgaagcttgt

SEQ ID NO: 2206375 - DNA, 25 bp, Homo sapien
ccagttaggtggtaactctacctct

SEQ ID NO: 2206376 - DNA, 25 bp, Homo sapien
ttcattgaagcttgttaaccagtta

SEQ ID NO: 2206377 - DNA, 25 bp, Homo sapien
gggcacagtcatagaagtccaaggc

SEQ ID NO: 2206378 - DNA, 25 bp, Homo sapien
tggggcacagtcatagaagtccaag

SEQ ID NO: 2206379 - DNA, 25 bp, Homo sapien
tgtctggggcacagtcatagaagtc

SEQ ID NO: 2206380 - DNA, 25 bp, Homo sapien
tctggggcacagtcatagaagtcca

SEQ ID NO: 2206381 - DNA, 25 bp, Homo sapien
ccctcatactcagggataggcacag

SEQ ID NO: 2206382 - DNA, 25 bp, Homo sapien
atggtgcagcccctcatactcaggg

SEQ ID NO: 2206383 - DNA, 25 bp, Homo sapien
ggtgcagcccctcatactcagggat

SEQ ID NO: 2206384 - DNA, 25 bp, Homo sapien
gcagcccctcatactcagggatagg

SEQ ID NO: 2206385 - DNA, 25 bp, Homo sapien
tggtcaggcatttagggatgtagac

SEQ ID NO: 2206386 - DNA, 25 bp, Homo sapien
ggatggtcaggcatttagggatgta

SEQ ID NO: 2206387 - DNA, 25 bp, Homo sapien
atggtcaggcatttagggatgtaga

SEQ ID NO: 2206388 - DNA, 25 bp, Homo sapien
caggatggtcaggcatttagggatg

SEQ ID NO: 2206389 - DNA, 25 bp, Homo sapien
gcttgggccttcagtcctgttcccc

SEQ ID NO: 2206390 - DNA, 25 bp, Homo sapien
tcaatgcggtgcacccaggcaagca

SEQ ID NO: 2206391 - DNA, 25 bp, Homo sapien
gatgcaagtgctgtgtcaatgcggt

SEQ ID NO: 2206392 - DNA, 25 bp, Homo sapien
gcaagcattccacggctgagccttt

SEQ ID NO: 2206393 - DNA, 25 bp, Homo sapien
cagtgtgcataggataatgagtgtc

SEQ ID NO: 2206394 - DNA, 25 bp, Homo sapien
tgcagccacagtgtgcataggataa

SEQ ID NO: 2206395 - DNA, 25 bp, Homo sapien
ccacagtgtgcataggataatgagt

SEQ ID NO: 2206396 - DNA, 25 bp, Homo sapien
taggataatgagtgtcattagcagc

SEQ ID NO: 2206397 - DNA, 25 bp, Homo sapien
aaaaaagtaagagttcctcagatca

SEQ ID NO: 2206398 - DNA, 25 bp, Homo sapien
cctcgtacatccttatatatggaaa

SEQ ID NO: 2206399 - DNA, 25 bp, Homo sapien
gctcagtagctgtgtcaatttgaag

SEQ ID NO: 2206400 - DNA, 25 bp, Homo sapien
cctcctcgtacatccttatatatgg

SEQ ID NO: 2206401 - DNA, 25 bp, Homo sapien
tcctggggtgatcgctgactctgct

SEQ ID NO: 2206402 - DNA, 25 bp, Homo sapien
agttgtcctggggtgatcgctgact

SEQ ID NO: 2206403 - DNA, 25 bp, Homo sapien
tcaatcagtgtagttgtcctggggt

SEQ ID NO: 2206404 - DNA, 25 bp, Homo sapien
tcagtgtagttgtcctggggtgatc

SEQ ID NO: 2206405 - DNA, 25 bp, Homo sapien
tagttcctgccaaagggccttcagc

SEQ ID NO: 2206406 - DNA, 25 bp, Homo sapien
tctaaacatctggatctgggtaaag

SEQ ID NO: 2206407 - DNA, 25 bp, Homo sapien
catttcttggatgggacctatcggg

SEQ ID NO: 2206408 - DNA, 25 bp, Homo sapien
gatacgtctgagttgatgggaccaa

SEQ ID NO: 2206409 - DNA, 25 bp, Homo sapien
aattcaggggcagtctaagatttgg

SEQ ID NO: 2206410 - DNA, 25 bp, Homo sapien
catctggcaaaatcgagaagagagt

SEQ ID NO: 2206411 - DNA, 25 bp, Homo sapien
ttggtgagtgaaatgccatctggca

SEQ ID NO: 2206412 - DNA, 25 bp, Homo sapien
ccatctggcaaaatcgagaagagag

SEQ ID NO: 2206413 - DNA, 25 bp, Homo sapien
taatagagcccaagtttccgcagga

SEQ ID NO: 2206414 - DNA, 25 bp, Homo sapien
taactagcctcgagatcttaaccgc

SEQ ID NO: 2206415 - DNA, 25 bp, Homo sapien
cctgttgagtgagccaatgaggcca

SEQ ID NO: 2206416 - DNA, 25 bp, Homo sapien
tagggctggctccaactgcagtagc

SEQ ID NO: 2206417 - DNA, 25 bp, Homo sapien
gtagacgttccccaggccatgtgac

SEQ ID NO: 2206418 - DNA, 25 bp, Homo sapien
ggctctaagcccaaaggagctctgt

SEQ ID NO: 2206419 - DNA, 25 bp, Homo sapien
ctccctcagggaggtaagaggaaat

SEQ ID NO: 2206420 - DNA, 25 bp, Homo sapien
ggagctctgtccttgtagacgttcc

SEQ ID NO: 2206421 - DNA, 25 bp, Homo sapien
tccgatgatgttctggaagttgccc

SEQ ID NO: 2206422 - DNA, 25 bp, Homo sapien
cataggtccgatgatgttctggaag

SEQ ID NO: 2206423 - DNA, 25 bp, Homo sapien
gaagttgcccaatgttgcacagcct

SEQ ID NO: 2206424 - DNA, 25 bp, Homo sapien
ggcattttcagacataggtccgatg

SEQ ID NO: 2206425 - DNA, 25 bp, Homo sapien
gtgttcttttgtctatccatatcca

SEQ ID NO: 2206426 - DNA, 25 bp, Homo sapien
tccacagcgattggatttataagtc

SEQ ID NO: 2206427 - DNA, 25 bp, Homo sapien
taagtgaccaaaagtgctgactggc

SEQ ID NO: 2206428 - DNA, 25 bp, Homo sapien
catgaccttgactaaatatagcttc

SEQ ID NO: 2206429 - DNA, 25 bp, Homo sapien
ggcttcaggtcgacctgtggcagtc

SEQ ID NO: 2206430 - DNA, 25 bp, Homo sapien
tctgcttcactagctatccctatgg

SEQ ID NO: 2206431 - DNA, 25 bp, Homo sapien
ttcaggtcgacctgtggcagtccag

SEQ ID NO: 2206432 - DNA, 25 bp, Homo sapien
ctatccctatggtgtcggtgtgcag

SEQ ID NO: 2206433 - DNA, 25 bp, Homo sapien
ttttatacaagtctggagtgcggtg

SEQ ID NO: 2206434 - DNA, 25 bp, Homo sapien
ttttttatacaagtctggagtgcgg

SEQ ID NO: 2206435 - DNA, 25 bp, Homo sapien
ttatacaagtctggagtgcggtgag

SEQ ID NO: 2206436 - DNA, 25 bp, Homo sapien
aattttttatacaagtctggagtgc

SEQ ID NO: 2206437 - DNA, 25 bp, Homo sapien
ggaaatcaaagttctcatcgtataa

SEQ ID NO: 2206438 - DNA, 25 bp, Homo sapien
aaagttctcatcgtataaagggcca

SEQ ID NO: 2206439 - DNA, 25 bp, Homo sapien
ttctcatcgtataaagggccataag

SEQ ID NO: 2206440 - DNA, 25 bp, Homo sapien
tcatcgtataaagggccataagttt

SEQ ID NO: 2206441 - DNA, 25 bp, Homo sapien
tctcctcagcaggaaatgggcactg

SEQ ID NO: 2206442 - DNA, 25 bp, Homo sapien
gaaacagacaaagaggcaggtggtg

SEQ ID NO: 2206443 - DNA, 25 bp, Homo sapien
ttaacccctgtcagtgccagaccct

SEQ ID NO: 2206444 - DNA, 25 bp, Homo sapien
tcagcaggaaatgggcactgaaaca

SEQ ID NO: 2206445 - DNA, 25 bp, Homo sapien
cagcccgcaggcagataagtctttg

SEQ ID NO: 2206446 - DNA, 25 bp, Homo sapien
tgaacgctgaggagttgctcgactt

SEQ ID NO: 2206447 - DNA, 25 bp, Homo sapien
tgggacccgtaataccactgacagc

SEQ ID NO: 2206448 - DNA, 25 bp, Homo sapien
tagctttggttgaagtggtgaacgc

SEQ ID NO: 2206449 - DNA, 25 bp, Homo sapien
ttctacccacacggaagttggcatg

SEQ ID NO: 2206450 - DNA, 25 bp, Homo sapien
tcttctacccacacggaagttggca

SEQ ID NO: 2206451 - DNA, 25 bp, Homo sapien
actcttctacccacacggaagttgg

SEQ ID NO: 2206452 - DNA, 25 bp, Homo sapien
cactcttctacccacacggaagttg

SEQ ID NO: 2206453 - DNA, 25 bp, Homo sapien
aatcctactacctggatgcccgcag

SEQ ID NO: 2206454 - DNA, 25 bp, Homo sapien
gctgcttcctctttagtcaaatccc

SEQ ID NO: 2206455 - DNA, 25 bp, Homo sapien
agttccactaggaattgagcagacc

SEQ ID NO: 2206456 - DNA, 25 bp, Homo sapien
gtcaaatcccttttcttgtcagctg

SEQ ID NO: 2206457 - DNA, 25 bp, Homo sapien
aaatctatcactggttgtggtcatt

SEQ ID NO: 2206458 - DNA, 25 bp, Homo sapien
gaaatctatcactggttgtggtcat

SEQ ID NO: 2206459 - DNA, 25 bp, Homo sapien
atctatcactggttgtggtcattag

SEQ ID NO: 2206460 - DNA, 25 bp, Homo sapien
ctatcactggttgtggtcattagct

SEQ ID NO: 2206461 - DNA, 25 bp, Homo sapien
ctcttgtgtccctcgcaggaatgag

SEQ ID NO: 2206462 - DNA, 25 bp, Homo sapien
tgtgtccctcgcaggaatgagctca

SEQ ID NO: 2206463 - DNA, 25 bp, Homo sapien
tccctcgcaggaatgagctcacctt

SEQ ID NO: 2206464 - DNA, 25 bp, Homo sapien
aggcactgctcttgtgtccctcgca

SEQ ID NO: 2206465 - DNA, 25 bp, Homo sapien
cttgctgccttcccatgcacactgc

SEQ ID NO: 2206466 - DNA, 25 bp, Homo sapien
ttgctgccttcccatgcacactgcc

SEQ ID NO: 2206467 - DNA, 25 bp, Homo sapien
tcttgctgccttcccatgcacactg

SEQ ID NO: 2206468 - DNA, 25 bp, Homo sapien
aaaggcatccgaagtctccaacagg

SEQ ID NO: 2206469 - DNA, 25 bp, Homo sapien
tcccttccctttagcagatagtttg

SEQ ID NO: 2206470 - DNA, 25 bp, Homo sapien
cacaggactcattgacaaaggcatc

SEQ ID NO: 2206471 - DNA, 25 bp, Homo sapien
gaccatttggttgcagaggagattt

SEQ ID NO: 2206472 - DNA, 25 bp, Homo sapien
atcacagctggggtttctagtcggt

SEQ ID NO: 2206473 - DNA, 25 bp, Homo sapien
cagctggggtttctagtcggtcata

SEQ ID NO: 2206474 - DNA, 25 bp, Homo sapien
tctagtcggtcataaggggcactgc

SEQ ID NO: 2206475 - DNA, 25 bp, Homo sapien
ggtttctagtcggtcataaggggca

SEQ ID NO: 2206476 - DNA, 25 bp, Homo sapien
gcaactgctcaagtgtattgggaaa

SEQ ID NO: 2206477 - DNA, 25 bp, Homo sapien
tacagttgtgtattgtgcagttgac

SEQ ID NO: 2206478 - DNA, 25 bp, Homo sapien
tgttgacacctcttacattcacagg

SEQ ID NO: 2206479 - DNA, 25 bp, Homo sapien
tattgtgcagttgactggcctgatg

SEQ ID NO: 2206480 - DNA, 25 bp, Homo sapien
aggttagcgagcagccagtccagca

SEQ ID NO: 2206481 - DNA, 25 bp, Homo sapien
cgttccttggcaaacttcatgacct

SEQ ID NO: 2206482 - DNA, 25 bp, Homo sapien
gaagaagacctcctacactgtaccc

SEQ ID NO: 2206483 - DNA, 25 bp, Homo sapien
gcttcatctggttgccgttccttgg

SEQ ID NO: 2206484 - DNA, 25 bp, Homo sapien
ggaaaacagagctagtgtgagttgc

SEQ ID NO: 2206485 - DNA, 25 bp, Homo sapien
aacagagctagtgtgagttgcgtga

SEQ ID NO: 2206486 - DNA, 25 bp, Homo sapien
acagagctagtgtgagttgcgtgat

SEQ ID NO: 2206487 - DNA, 25 bp, Homo sapien
aaaacagagctagtgtgagttgcgt

SEQ ID NO: 2206488 - DNA, 25 bp, Homo sapien
gagtcagtcatcaggaccccagtaa

SEQ ID NO: 2206489 - DNA, 25 bp, Homo sapien
tataagggcactgaccaagcgcttc

SEQ ID NO: 2206490 - DNA, 25 bp, Homo sapien
tgatttgcataaaccatgagcccct

SEQ ID NO: 2206491 - DNA, 25 bp, Homo sapien
gaattggcttcccagagctgtgcac

SEQ ID NO: 2206492 - DNA, 25 bp, Homo sapien
ggctcagtgcatgttggaaacccaa

SEQ ID NO: 2206493 - DNA, 25 bp, Homo sapien
gatgctctgtgatattcgccctctg

SEQ ID NO: 2206494 - DNA, 25 bp, Homo sapien
gaagccagttgaggacacttacagg

SEQ ID NO: 2206495 - DNA, 25 bp, Homo sapien
cttgatcggcatagacactgtagca

SEQ ID NO: 2206496 - DNA, 25 bp, Homo sapien
tgtccttgatcacgataatctcttt

SEQ ID NO: 2206497 - DNA, 25 bp, Homo sapien
cagacttcccaggtttaagttgcct

SEQ ID NO: 2206498 - DNA, 25 bp, Homo sapien
cttagactggtctttcttctcagtg

SEQ ID NO: 2206499 - DNA, 25 bp, Homo sapien
ctcagtgtccttgatcacgataatc

SEQ ID NO: 2206500 - DNA, 25 bp, Homo sapien
gattctgactctgagcagagaatac

SEQ ID NO: 2206501 - DNA, 25 bp, Homo sapien
cgattctgactctgagcagagaata

SEQ ID NO: 2206502 - DNA, 25 bp, Homo sapien
ttctgactctgagcagagaatacgc

SEQ ID NO: 2206503 - DNA, 25 bp, Homo sapien
ctgactctgagcagagaatacgcac

SEQ ID NO: 2206504 - DNA, 25 bp, Homo sapien
tatcttctacattcagggtggacac

SEQ ID NO: 2206505 - DNA, 25 bp, Homo sapien
tacattcagggtggacacatcgaca

SEQ ID NO: 2206506 - DNA, 25 bp, Homo sapien
tctttatcttctacattcagggtgg

SEQ ID NO: 2206507 - DNA, 25 bp, Homo sapien
gggtggacacatcgacaaagcatat

SEQ ID NO: 2206508 - DNA, 25 bp, Homo sapien
tgtagagatctaccttgcacacacc

SEQ ID NO: 2206509 - DNA, 25 bp, Homo sapien
gtggctgcgtaaccagtcaatatca

SEQ ID NO: 2206510 - DNA, 25 bp, Homo sapien
gctgcgtaaccagtcaatatcatca

SEQ ID NO: 2206511 - DNA, 25 bp, Homo sapien
ctgtccttctgggttgtagagatct

SEQ ID NO: 2206512 - DNA, 25 bp, Homo sapien
caagttcttgggcacctgcagttgg

SEQ ID NO: 2206513 - DNA, 25 bp, Homo sapien
ttcttgggcacctgcagttggctgc

SEQ ID NO: 2206514 - DNA, 25 bp, Homo sapien
agggagatgtgcccctttagatgga

SEQ ID NO: 2206515 - DNA, 25 bp, Homo sapien
gtttggctgaaaacgtgacacccag

SEQ ID NO: 2206516 - DNA, 25 bp, Homo sapien
agtctgcctcaagatactgcttttt

SEQ ID NO: 2206517 - DNA, 25 bp, Homo sapien
cagtctgcctcaagatactgctttt

SEQ ID NO: 2206518 - DNA, 25 bp, Homo sapien
ccagtctgcctcaagatactgcttt

SEQ ID NO: 2206519 - DNA, 25 bp, Homo sapien
cagttgttctgaggtgcatttctgt

SEQ ID NO: 2206520 - DNA, 25 bp, Homo sapien
catttctgtggaagcatttccgtca

SEQ ID NO: 2206521 - DNA, 25 bp, Homo sapien
gtgcatttctgtggaagcatttccg

SEQ ID NO: 2206522 - DNA, 25 bp, Homo sapien
agttgttctgaggtgcatttctgtg

SEQ ID NO: 2206523 - DNA, 25 bp, Homo sapien
tgggaggatggaaacccacctacag

SEQ ID NO: 2206524 - DNA, 25 bp, Homo sapien
gaagcactgctctacatagcatggt

SEQ ID NO: 2206525 - DNA, 25 bp, Homo sapien
tgagccttggttcagcagtatcagt

SEQ ID NO: 2206526 - DNA, 25 bp, Homo sapien
tcaacagaacagatgggaccaagat

SEQ ID NO: 2206527 - DNA, 25 bp, Homo sapien
gaagatgacgttgaccctgactgtt

SEQ ID NO: 2206528 - DNA, 25 bp, Homo sapien
tgcatgcagccatagaggagccaag

SEQ ID NO: 2206529 - DNA, 25 bp, Homo sapien
gctcttatggacacagcacagggcc

SEQ ID NO: 2206530 - DNA, 25 bp, Homo sapien
taactgagggattgagcaagccaca

SEQ ID NO: 2206531 - DNA, 25 bp, Homo sapien
cttgataagtgggaagggacagtta

SEQ ID NO: 2206532 - DNA, 25 bp, Homo sapien
ttgattagatttgccctgactggga

SEQ ID NO: 2206533 - DNA, 25 bp, Homo sapien
cagttaactaaaggtatgagtcaag

SEQ ID NO: 2206534 - DNA, 25 bp, Homo sapien
ggtttgattagatttgccctgactg

SEQ ID NO: 2206535 - DNA, 25 bp, Homo sapien
gaaggtgacttgaggactgacccaa

SEQ ID NO: 2206536 - DNA, 25 bp, Homo sapien
tccaggcccatgttttttctgatca

SEQ ID NO: 2206537 - DNA, 25 bp, Homo sapien
gggcctaggctgtgacttaattgtc

SEQ ID NO: 2206538 - DNA, 25 bp, Homo sapien
gtcaggcagtccctagttcaggcat

SEQ ID NO: 2206539 - DNA, 25 bp, Homo sapien
cacagagctcaaggcctggttgctc

SEQ ID NO: 2206540 - DNA, 25 bp, Homo sapien
ctaagtcacagagctcaaggcctgg

SEQ ID NO: 2206541 - DNA, 25 bp, Homo sapien
ccatatagtctttttattggggaag

SEQ ID NO: 2206542 - DNA, 25 bp, Homo sapien
gagctcaaggcctggttgctccata

SEQ ID NO: 2206543 - DNA, 25 bp, Homo sapien
atgccagcttaaaccccttctttag

SEQ ID NO: 2206544 - DNA, 25 bp, Homo sapien
catgccagcttaaaccccttcttta

SEQ ID NO: 2206545 - DNA, 25 bp, Homo sapien
cgatgtctgcggtgccataaattgc

SEQ ID NO: 2206546 - DNA, 25 bp, Homo sapien
tgcttcatcttcacgatgtctgcgg

SEQ ID NO: 2206547 - DNA, 25 bp, Homo sapien
tacagttgagatctcgatggtgtta

SEQ ID NO: 2206548 - DNA, 25 bp, Homo sapien
agatctcgatggtgttagaggatca

SEQ ID NO: 2206549 - DNA, 25 bp, Homo sapien
caagatatggcttggtatcacttac

SEQ ID NO: 2206550 - DNA, 25 bp, Homo sapien
tgtccaagatatggcttggtatcac

SEQ ID NO: 2206551 - DNA, 25 bp, Homo sapien
cttgtccaagatatggcttggtatc

SEQ ID NO: 2206552 - DNA, 25 bp, Homo sapien
tccaagatatggcttggtatcactt

SEQ ID NO: 2206553 - DNA, 25 bp, Homo sapien
ctgactcccagatggcctcccgctt

SEQ ID NO: 2206554 - DNA, 25 bp, Homo sapien
ggcctcccgcttcatcatcaccatt

SEQ ID NO: 2206555 - DNA, 25 bp, Homo sapien
tcccagatggcctcccgcttcatca

SEQ ID NO: 2206556 - DNA, 25 bp, Homo sapien
gatggcctcccgcttcatcatcacc

SEQ ID NO: 2206557 - DNA, 25 bp, Homo sapien
tgggggaagtcttcatgacccctct

SEQ ID NO: 2206558 - DNA, 25 bp, Homo sapien
gggggaagtcttcatgacccctctg

SEQ ID NO: 2206559 - DNA, 25 bp, Homo sapien
ttgggggaagtcttcatgacccctc

SEQ ID NO: 2206560 - DNA, 25 bp, Homo sapien
ctctggcctgatttaggcttgcgtt

SEQ ID NO: 2206561 - DNA, 25 bp, Homo sapien
taattttcagcctgaggcttctact

SEQ ID NO: 2206562 - DNA, 25 bp, Homo sapien
tactgtcagtgtccgaagatttttc

SEQ ID NO: 2206563 - DNA, 25 bp, Homo sapien
cctgatttaggcttgcgttcctctt

SEQ ID NO: 2206564 - DNA, 25 bp, Homo sapien
gcatccagggcgctttgtagtgcag

SEQ ID NO: 2206565 - DNA, 25 bp, Homo sapien
cagggcgctttgtagtgcagtctca

SEQ ID NO: 2206566 - DNA, 25 bp, Homo sapien
cagtcaatctcagatagctttttga

SEQ ID NO: 2206567 - DNA, 25 bp, Homo sapien
tctggaacaaagattggattcatcc

SEQ ID NO: 2206568 - DNA, 25 bp, Homo sapien
ctacggcatcatttctgcttagagt

SEQ ID NO: 2206569 - DNA, 25 bp, Homo sapien
taagactaaatgtaacatctacggc

SEQ ID NO: 2206570 - DNA, 25 bp, Homo sapien
catcgtagagacctttaagactaaa

SEQ ID NO: 2206571 - DNA, 25 bp, Homo sapien
gaaagctgtggtgtcatcgtagaga

SEQ ID NO: 2206572 - DNA, 25 bp, Homo sapien
actgtcttggccgtaaaatatatca

SEQ ID NO: 2206573 - DNA, 25 bp, Homo sapien
gacagacacatgctggtggatcttg

SEQ ID NO: 2206574 - DNA, 25 bp, Homo sapien
cattcaggatgttagcgctggcatt

SEQ ID NO: 2206575 - DNA, 25 bp, Homo sapien
gccgtaaaatatatcattcaggatg

SEQ ID NO: 2206576 - DNA, 25 bp, Homo sapien
ggttttctgcaagccgagctaagtg

SEQ ID NO: 2206577 - DNA, 25 bp, Homo sapien
ttctgcaagccgagctaagtgctgc

SEQ ID NO: 2206578 - DNA, 25 bp, Homo sapien
caagccgagctaagtgctgcatctg

SEQ ID NO: 2206579 - DNA, 25 bp, Homo sapien
gcttgaatttcagtatgcttgtatt

SEQ ID NO: 2206580 - DNA, 25 bp, Homo sapien
gtggcatatcctaatgattgctgta

SEQ ID NO: 2206581 - DNA, 25 bp, Homo sapien
cagcatctgggcagcgttcttgtat

SEQ ID NO: 2206582 - DNA, 25 bp, Homo sapien
caccatcaatggttatcatcacctc

SEQ ID NO: 2206583 - DNA, 25 bp, Homo sapien
ttcaccatcaatggttatcatcacc

SEQ ID NO: 2206584 - DNA, 25 bp, Homo sapien
caatggttatcatcacctcatggca

SEQ ID NO: 2206585 - DNA, 25 bp, Homo sapien
catcaatggttatcatcacctcatg

SEQ ID NO: 2206586 - DNA, 25 bp, Homo sapien
catcatcgattgcaggagcctcata

SEQ ID NO: 2206587 - DNA, 25 bp, Homo sapien
agaaccaaagattgccaccacctcc

SEQ ID NO: 2206588 - DNA, 25 bp, Homo sapien
ctgggcaatgcgatgatgatgcagg

SEQ ID NO: 2206589 - DNA, 25 bp, Homo sapien
caggttgatgatacgggacattgcc

SEQ ID NO: 2206590 - DNA, 25 bp, Homo sapien
ggtaatgttgagcactacaatgcct

SEQ ID NO: 2206591 - DNA, 25 bp, Homo sapien
cagaagttgatacctccagcatagc

SEQ ID NO: 2206592 - DNA, 25 bp, Homo sapien
tacaatgccttgcaggtttggcaag

SEQ ID NO: 2206593 - DNA, 25 bp, Homo sapien
gtgttgcttccccagaagttgatac

SEQ ID NO: 2206594 - DNA, 25 bp, Homo sapien
aaagagtagctctcattagctggat

SEQ ID NO: 2206595 - DNA, 25 bp, Homo sapien
gaaaagagtagctctcattagctgg

SEQ ID NO: 2206596 - DNA, 25 bp, Homo sapien
aaaagagtagctctcattagctgga

SEQ ID NO: 2206597 - DNA, 25 bp, Homo sapien
aagaaaagagtagctctcattagct

SEQ ID NO: 2206598 - DNA, 25 bp, Homo sapien
cagtttcctgtaagagcgctgcaaa

SEQ ID NO: 2206599 - DNA, 25 bp, Homo sapien
taagagcgctgcaaaagttctttgg

SEQ ID NO: 2206600 - DNA, 25 bp, Homo sapien
aatgcactcgttcttccagtttcct

SEQ ID NO: 2206601 - DNA, 25 bp, Homo sapien
tccaaatgcactcgttcttccagtt

SEQ ID NO: 2206602 - DNA, 25 bp, Homo sapien
ttgtattgccctgggtgttcatctc

SEQ ID NO: 2206603 - DNA, 25 bp, Homo sapien
gccctgggtgttcatctcttctggt

SEQ ID NO: 2206604 - DNA, 25 bp, Homo sapien
atccagtccaattccgaagtagttg

SEQ ID NO: 2206605 - DNA, 25 bp, Homo sapien
tccaattccgaagtagttgttcatg

SEQ ID NO: 2206606 - DNA, 25 bp, Homo sapien
aaagaagtgccgctatcaattgggc

SEQ ID NO: 2206607 - DNA, 25 bp, Homo sapien
tgcaggaaagaagtgccgctatcaa

SEQ ID NO: 2206608 - DNA, 25 bp, Homo sapien
gccgctatcaattgggcatgaagat

SEQ ID NO: 2206609 - DNA, 25 bp, Homo sapien
gaagtgccgctatcaattgggcatg

SEQ ID NO: 2206610 - DNA, 25 bp, Homo sapien
gagggagtgcctcgccagttgggaa

SEQ ID NO: 2206611 - DNA, 25 bp, Homo sapien
tgtagatatccttttgtgtgaacaa

SEQ ID NO: 2206612 - DNA, 25 bp, Homo sapien
gtgtgaacaactagcttattagctg

SEQ ID NO: 2206613 - DNA, 25 bp, Homo sapien
tccacactgggcactaactataaca

SEQ ID NO: 2206614 - DNA, 25 bp, Homo sapien
agtgatccaagttaaggttgtccag

SEQ ID NO: 2206615 - DNA, 25 bp, Homo sapien
ttcaggtgtaaaatgtaagtgatcc

SEQ ID NO: 2206616 - DNA, 25 bp, Homo sapien
tagaagacaaagtgccacgacgaga

SEQ ID NO: 2206617 - DNA, 25 bp, Homo sapien
ccaggtcctcacttttgagagaaga

SEQ ID NO: 2206618 - DNA, 25 bp, Homo sapien
tcacttgtatttcgccctattttct

SEQ ID NO: 2206619 - DNA, 25 bp, Homo sapien
ttcccctcacttgtatttcgcccta

SEQ ID NO: 2206620 - DNA, 25 bp, Homo sapien
tatttcgccctattttctctgtgga

SEQ ID NO: 2206621 - DNA, 25 bp, Homo sapien
aggcagggtcaagctcagtgacttt

SEQ ID NO: 2206622 - DNA, 25 bp, Homo sapien
aatatcttctgggtcatcttccagg

SEQ ID NO: 2206623 - DNA, 25 bp, Homo sapien
gcgtcgtgggcttgtctggttaata

SEQ ID NO: 2206624 - DNA, 25 bp, Homo sapien
gaactaaagttcttaacagatattg

SEQ ID NO: 2206625 - DNA, 25 bp, Homo sapien
taaagttcttaacagatattgtctg

SEQ ID NO: 2206626 - DNA, 25 bp, Homo sapien
tcaaggatttctggagactctgggc

SEQ ID NO: 2206627 - DNA, 25 bp, Homo sapien
ctcagccaggacatcgatcaggaca

SEQ ID NO: 2206628 - DNA, 25 bp, Homo sapien
gaagggcttcctatctgccttgctg

SEQ ID NO: 2206629 - DNA, 25 bp, Homo sapien
tcaggacactgagcctatcatacat

SEQ ID NO: 2206630 - DNA, 25 bp, Homo sapien
tccacaaagagtataagacaaaagg

SEQ ID NO: 2206631 - DNA, 25 bp, Homo sapien
ctgctccacaaagagtataagacaa

SEQ ID NO: 2206632 - DNA, 25 bp, Homo sapien
tcttttaccattcccagtgagaggc

SEQ ID NO: 2206633 - DNA, 25 bp, Homo sapien
tttcttttaccattcccagtgagag

SEQ ID NO: 2206634 - DNA, 25 bp, Homo sapien
cacagacactattgcagtgttgttc

SEQ ID NO: 2206635 - DNA, 25 bp, Homo sapien
gacactattgcagtgttgttctgtt

SEQ ID NO: 2206636 - DNA, 25 bp, Homo sapien
caaaatcacagacactattgcagtg

SEQ ID NO: 2206637 - DNA, 25 bp, Homo sapien
tttcaaaatcacagacactattgca

SEQ ID NO: 2206638 - DNA, 25 bp, Homo sapien
ggcacaatgttacatgaaccatgag

SEQ ID NO: 2206639 - DNA, 25 bp, Homo sapien
gttacatgaaccatgaggcccagag

SEQ ID NO: 2206640 - DNA, 25 bp, Homo sapien
taaaatagatggcacaatgttacat

SEQ ID NO: 2206641 - DNA, 25 bp, Homo sapien
tagatggcacaatgttacatgaacc

SEQ ID NO: 2206642 - DNA, 25 bp, Homo sapien
tgggaacagccccaaaggatgagag

SEQ ID NO: 2206643 - DNA, 25 bp, Homo sapien
cagccccaaaggatgagagccaaag

SEQ ID NO: 2206644 - DNA, 25 bp, Homo sapien
ccccaaaggatgagagccaaaggaa

SEQ ID NO: 2206645 - DNA, 25 bp, Homo sapien
aacagccccaaaggatgagagccaa

SEQ ID NO: 2206646 - DNA, 25 bp, Homo sapien
tacttggccttcaggattttgttca

SEQ ID NO: 2206647 - DNA, 25 bp, Homo sapien
ctgcagattctaagtgttggatggc

SEQ ID NO: 2206648 - DNA, 25 bp, Homo sapien
tggttgcgatgatcatctctgtggg

SEQ ID NO: 2206649 - DNA, 25 bp, Homo sapien
gattttgttcaactcggtggctgca

SEQ ID NO: 2206650 - DNA, 25 bp, Homo sapien
ggtacatccatttcaacctgtcctt

SEQ ID NO: 2206651 - DNA, 25 bp, Homo sapien
tgggagtctcacgaatcatcacact

SEQ ID NO: 2206652 - DNA, 25 bp, Homo sapien
gtctgggagtctcacgaatcatcac

SEQ ID NO: 2206653 - DNA, 25 bp, Homo sapien
aaatcgtggtacatccatttcaacc

SEQ ID NO: 2206654 - DNA, 25 bp, Homo sapien
tgtctaggatcctcacactagcctg

SEQ ID NO: 2206655 - DNA, 25 bp, Homo sapien
actagcctgctccactctgttgagg

SEQ ID NO: 2206656 - DNA, 25 bp, Homo sapien
ttttgttccagaatgcaccccagcc

SEQ ID NO: 2206657 - DNA, 25 bp, Homo sapien
cagaacacgagccagatcattgccg

SEQ ID NO: 2206658 - DNA, 25 bp, Homo sapien
taatccaaaggcatcaatcagagat

SEQ ID NO: 2206659 - DNA, 25 bp, Homo sapien
gataagacccagctcacgctgccat

SEQ ID NO: 2206660 - DNA, 25 bp, Homo sapien
gagcaaagttcttgaacatagacag

SEQ ID NO: 2206661 - DNA, 25 bp, Homo sapien
aaaccagaatgcgaaagcgagcaaa

SEQ ID NO: 2206662 - DNA, 25 bp, Homo sapien
gatcgccacttttggagttgatgaa

SEQ ID NO: 2206663 - DNA, 25 bp, Homo sapien
caggtccacccttcaataagtcgaa

SEQ ID NO: 2206664 - DNA, 25 bp, Homo sapien
tgaacaggctgatgaccaatcaaga

SEQ ID NO: 2206665 - DNA, 25 bp, Homo sapien
tgaattttcggaggaagacgatccc

SEQ ID NO: 2206666 - DNA, 25 bp, Homo sapien
tggcttctgaagcaacattccttgg

SEQ ID NO: 2206667 - DNA, 25 bp, Homo sapien
gaatgactgatgagcgatggcttct

SEQ ID NO: 2206668 - DNA, 25 bp, Homo sapien
aaccgtctcctacagtcatcatgca

SEQ ID NO: 2206669 - DNA, 25 bp, Homo sapien
cgcttagagcagtgggaggaatgac

SEQ ID NO: 2206670 - DNA, 25 bp, Homo sapien
taactgccacagctctcatgacaca

SEQ ID NO: 2206671 - DNA, 25 bp, Homo sapien
gacaggcatgtttccttctacccat

SEQ ID NO: 2206672 - DNA, 25 bp, Homo sapien
gtcttgaagtctttgataactgcca

SEQ ID NO: 2206673 - DNA, 25 bp, Homo sapien
cacaggcagcggaagtcttgaagtc

SEQ ID NO: 2206674 - DNA, 25 bp, Homo sapien
aatgtattccacttgcagtctttgc

SEQ ID NO: 2206675 - DNA, 25 bp, Homo sapien
gcacacaatctgtgagatttcactt

SEQ ID NO: 2206676 - DNA, 25 bp, Homo sapien
caggcagaaggaggtcatcagtgat

SEQ ID NO: 2206677 - DNA, 25 bp, Homo sapien
tcatcagtgatagacaatgtattcc

SEQ ID NO: 2206678 - DNA, 25 bp, Homo sapien
caaacattgcagtgctgggtccggt

SEQ ID NO: 2206679 - DNA, 25 bp, Homo sapien
gtccggtggctgtaactggagtacc

SEQ ID NO: 2206680 - DNA, 25 bp, Homo sapien
gcaggaatgctctctcgacaaacat

SEQ ID NO: 2206681 - DNA, 25 bp, Homo sapien
gatgatggcatctctagataaggca

SEQ ID NO: 2206682 - DNA, 25 bp, Homo sapien
ctaacagagaatcatgccatgaata

SEQ ID NO: 2206683 - DNA, 25 bp, Homo sapien
gggtgatgttgccactcgtgtaggt

SEQ ID NO: 2206684 - DNA, 25 bp, Homo sapien
catgaatagggccactgtagagagc

SEQ ID NO: 2206685 - DNA, 25 bp, Homo sapien
tggcactgccctgctgatctgtggg

SEQ ID NO: 2206686 - DNA, 25 bp, Homo sapien
tgatttttcgttgtggtgtaataac

SEQ ID NO: 2206687 - DNA, 25 bp, Homo sapien
ctttccggttgggtgcagccagagt

SEQ ID NO: 2206688 - DNA, 25 bp, Homo sapien
attcttccatgtctttccggttggg

SEQ ID NO: 2206689 - DNA, 25 bp, Homo sapien
ttttatgatgttaatccattcttcc

SEQ ID NO: 2206690 - DNA, 25 bp, Homo sapien
gatcaatcgtttcaaagtgtgcaaa

SEQ ID NO: 2206691 - DNA, 25 bp, Homo sapien
gccacagtggcttgagacagatcaa

SEQ ID NO: 2206692 - DNA, 25 bp, Homo sapien
ggcttgagacagatcaatcgtttca

SEQ ID NO: 2206693 - DNA, 25 bp, Homo sapien
gacagatcaatcgtttcaaagtgtg

SEQ ID NO: 2206694 - DNA, 25 bp, Homo sapien
cgcgggatggtgtgcaaagtagagc

SEQ ID NO: 2206695 - DNA, 25 bp, Homo sapien
tatctaagcttccatctcttgaaag

SEQ ID NO: 2206696 - DNA, 25 bp, Homo sapien
gcttctgtccttgaaccagaaaata

SEQ ID NO: 2206697 - DNA, 25 bp, Homo sapien
gttacagttcttcagcataggtcct

SEQ ID NO: 2206698 - DNA, 25 bp, Homo sapien
tacagtgttcacacaaaatggtctt

SEQ ID NO: 2206699 - DNA, 25 bp, Homo sapien
tctttgataaaccaatacccaaatc

SEQ ID NO: 2206700 - DNA, 25 bp, Homo sapien
aggtcctgtgtacagtgttcacaca

SEQ ID NO: 2206701 - DNA, 25 bp, Homo sapien
tgtgtacagtgttcacacaaaatgg

SEQ ID NO: 2206702 - DNA, 25 bp, Homo sapien
tttccctgttgaaacaccatccaga

SEQ ID NO: 2206703 - DNA, 25 bp, Homo sapien
ttccctgttgaaacaccatccagat

SEQ ID NO: 2206704 - DNA, 25 bp, Homo sapien
ttgtgctgctcaactcttgatagca

SEQ ID NO: 2206705 - DNA, 25 bp, Homo sapien
tgtgctgctcaactcttgatagcat

SEQ ID NO: 2206706 - DNA, 25 bp, Homo sapien
tttcctagaagttcctcctcttcca

SEQ ID NO: 2206707 - DNA, 25 bp, Homo sapien
ttcctagaagttcctcctcttccat

SEQ ID NO: 2206708 - DNA, 25 bp, Homo sapien
tgtcaatgcataaacagaatagcct

SEQ ID NO: 2206709 - DNA, 25 bp, Homo sapien
tcttggagaccttgtcagggtagcc

SEQ ID NO: 2206710 - DNA, 25 bp, Homo sapien
gagctcaggtctcttaatagtagca

SEQ ID NO: 2206711 - DNA, 25 bp, Homo sapien
gaagatatcatcaactgtgaggagc

SEQ ID NO: 2206712 - DNA, 25 bp, Homo sapien
gaatgtaaagttcactggtgccatt

SEQ ID NO: 2206713 - DNA, 25 bp, Homo sapien
ccatttgagagggatagtacctttt

SEQ ID NO: 2206714 - DNA, 25 bp, Homo sapien
tgagagggatagtaccttttctttg

SEQ ID NO: 2206715 - DNA, 25 bp, Homo sapien
tcatcctttagccttagtgctgaat

SEQ ID NO: 2206716 - DNA, 25 bp, Homo sapien
gagtaatcggttcagggtctctgcc

SEQ ID NO: 2206717 - DNA, 25 bp, Homo sapien
tatgctggccccctctgggagcatc

SEQ ID NO: 2206718 - DNA, 25 bp, Homo sapien
aaggtctttgtgagtaatcggttca

SEQ ID NO: 2206719 - DNA, 25 bp, Homo sapien
ctttgtgagtaatcggttcagggtc

SEQ ID NO: 2206720 - DNA, 25 bp, Homo sapien
tcttaacggatggtcgtggttctta

SEQ ID NO: 2206721 - DNA, 25 bp, Homo sapien
cactgattagttaatctgcatggcc

SEQ ID NO: 2206722 - DNA, 25 bp, Homo sapien
tgattagttaatctgcatggccttc

SEQ ID NO: 2206723 - DNA, 25 bp, Homo sapien
agagccactgattagttaatctgca

SEQ ID NO: 2206724 - DNA, 25 bp, Homo sapien
atggaatggtggcttcgacacacgc

SEQ ID NO: 2206725 - DNA, 25 bp, Homo sapien
cagatggaatggtggcttcgacaca

SEQ ID NO: 2206726 - DNA, 25 bp, Homo sapien
ggaatggtggcttcgacacacgcat

SEQ ID NO: 2206727 - DNA, 25 bp, Homo sapien
agacagatggaatggtggcttcgac

SEQ ID NO: 2206728 - DNA, 25 bp, Homo sapien
caagccacgatttatctggagagta

SEQ ID NO: 2206729 - DNA, 25 bp, Homo sapien
tctaccataaggcagttcgttggag

SEQ ID NO: 2206730 - DNA, 25 bp, Homo sapien
tcgttggagaataagatcaagccac

SEQ ID NO: 2206731 - DNA, 25 bp, Homo sapien
tactatgtagctagctttgtgccag

SEQ ID NO: 2206732 - DNA, 25 bp, Homo sapien
tcactcatttcaggatctctccact

SEQ ID NO: 2206733 - DNA, 25 bp, Homo sapien
catttcaggatctctccacttccgg

SEQ ID NO: 2206734 - DNA, 25 bp, Homo sapien
tgtttatcactcatttcaggatctc

SEQ ID NO: 2206735 - DNA, 25 bp, Homo sapien
tcaggatctctccacttccggattc

SEQ ID NO: 2206736 - DNA, 25 bp, Homo sapien
tatgtgcctcacatgtctgaacaga

SEQ ID NO: 2206737 - DNA, 25 bp, Homo sapien
tctgaacagacttataagagactag

SEQ ID NO: 2206738 - DNA, 25 bp, Homo sapien
tataagagactagcatgtgggagcg

SEQ ID NO: 2206739 - DNA, 25 bp, Homo sapien
gcattttagtatgtgcctcacatgt

SEQ ID NO: 2206740 - DNA, 25 bp, Homo sapien
tcatatcccgttttccacagttctg

SEQ ID NO: 2206741 - DNA, 25 bp, Homo sapien
tatgtaaagcctatatagagttgtg

SEQ ID NO: 2206742 - DNA, 25 bp, Homo sapien
tcttgtgtgcgtttggcagttggca

SEQ ID NO: 2206743 - DNA, 25 bp, Homo sapien
agagttgtggaagcagcccggaacc

SEQ ID NO: 2206744 - DNA, 25 bp, Homo sapien
gagtcacactctttcctgctcgggc

SEQ ID NO: 2206745 - DNA, 25 bp, Homo sapien
gctgtaaagtgggtctctgctgact

SEQ ID NO: 2206746 - DNA, 25 bp, Homo sapien
gggccaggagagtcacactctttcc

SEQ ID NO: 2206747 - DNA, 25 bp, Homo sapien
tgggatattatctataggctgtaaa

SEQ ID NO: 2206748 - DNA, 25 bp, Homo sapien
gcttccacatatgagattacgcagt

SEQ ID NO: 2206749 - DNA, 25 bp, Homo sapien
gcataataccctccgggttcatcca

SEQ ID NO: 2206750 - DNA, 25 bp, Homo sapien
tatagaacttatgctgtacatgaga

SEQ ID NO: 2206751 - DNA, 25 bp, Homo sapien
gctgcaactttgtagctttgaccaa

SEQ ID NO: 2206752 - DNA, 25 bp, Homo sapien
cccagggtgggaaactcaatgacat

SEQ ID NO: 2206753 - DNA, 25 bp, Homo sapien
tatagactagtcatcttgcaggcag

SEQ ID NO: 2206754 - DNA, 25 bp, Homo sapien
gtttcgcattgccataccagggtaa

SEQ ID NO: 2206755 - DNA, 25 bp, Homo sapien
ttcattaggataaaagccccacgag

SEQ ID NO: 2206756 - DNA, 25 bp, Homo sapien
ttatttgcccaatgagccgaagctc

SEQ ID NO: 2206757 - DNA, 25 bp, Homo sapien
ggttgtaatagtaaagtcactccca

SEQ ID NO: 2206758 - DNA, 25 bp, Homo sapien
ggaatgaagtacatgctcaccatca

SEQ ID NO: 2206759 - DNA, 25 bp, Homo sapien
gctgaagtcttagtacaaggctgag

SEQ ID NO: 2206760 - DNA, 25 bp, Homo sapien
taaataataccctactgtatgcata

SEQ ID NO: 2206761 - DNA, 25 bp, Homo sapien
atggctaaataataccctactgtat

SEQ ID NO: 2206762 - DNA, 25 bp, Homo sapien
tgcatatatcaaagtttgtttatcc

SEQ ID NO: 2206763 - DNA, 25 bp, Homo sapien
tatgagtaatgccactttaaacatt

SEQ ID NO: 2206764 - DNA, 25 bp, Homo sapien
gcaacacgagaagagcaagaatatg

SEQ ID NO: 2206765 - DNA, 25 bp, Homo sapien
gaattctgataagcactggattgaa

SEQ ID NO: 2206766 - DNA, 25 bp, Homo sapien
tcagtgtaaaagtttcgcacttctt

SEQ ID NO: 2206767 - DNA, 25 bp, Homo sapien
cctaaattcatccaggcaggtagtt

SEQ ID NO: 2206768 - DNA, 25 bp, Homo sapien
aagtcagtacttcccatgctgtaat

SEQ ID NO: 2206769 - DNA, 25 bp, Homo sapien
ctataataatggttaccatgtactg

SEQ ID NO: 2206770 - DNA, 25 bp, Homo sapien
tacttcccatgctgtaatatgttca

SEQ ID NO: 2206771 - DNA, 25 bp, Homo sapien
catgctgtaatatgttcatgaatct

SEQ ID NO: 2206772 - DNA, 25 bp, Homo sapien
tagcatcaataccatccctcagagg

SEQ ID NO: 2206773 - DNA, 25 bp, Homo sapien
tggcagatcctgctatttaactggg

SEQ ID NO: 2206774 - DNA, 25 bp, Homo sapien
gaatggcttaccttcgatcaggcta

SEQ ID NO: 2206775 - DNA, 25 bp, Homo sapien
gagctagtagcccaggttcattgaa

SEQ ID NO: 2206776 - DNA, 25 bp, Homo sapien
tggttgaatgagacatccctgctgc

SEQ ID NO: 2206777 - DNA, 25 bp, Homo sapien
tggtgggaacaattcaacgccttgg

SEQ ID NO: 2206778 - DNA, 25 bp, Homo sapien
gaaactagctactggtgtcagggcc

SEQ ID NO: 2206779 - DNA, 25 bp, Homo sapien
tagactttaagggaagcacaaggcc

SEQ ID NO: 2206780 - DNA, 25 bp, Homo sapien
ctagccacggtggattcaggctgat

SEQ ID NO: 2206781 - DNA, 25 bp, Homo sapien
tagccacggtggattcaggctgatc

SEQ ID NO: 2206782 - DNA, 25 bp, Homo sapien
aggccatttaaaatataacaataag

SEQ ID NO: 2206783 - DNA, 25 bp, Homo sapien
tcaaaaggccatttaaaatataaca

SEQ ID NO: 2206784 - DNA, 25 bp, Homo sapien
ggccatttaaaatataacaataaga

SEQ ID NO: 2206785 - DNA, 25 bp, Homo sapien
gccatttaaaatataacaataagaa

SEQ ID NO: 2206786 - DNA, 25 bp, Homo sapien
ctagccagggctaagagtaggcctc

SEQ ID NO: 2206787 - DNA, 25 bp, Homo sapien
gtggttctaagatcacaccttgctg

SEQ ID NO: 2206788 - DNA, 25 bp, Homo sapien
ggtagagggctggaacaaactgcta

SEQ ID NO: 2206789 - DNA, 25 bp, Homo sapien
aactggtgccaggtgaatgccctca

SEQ ID NO: 2206790 - DNA, 25 bp, Homo sapien
ggagtagactctccctgagacattt

SEQ ID NO: 2206791 - DNA, 25 bp, Homo sapien
gatgagagcagatttcatcttgaca

SEQ ID NO: 2206792 - DNA, 25 bp, Homo sapien
gacatttgagttgctcttccccgag

SEQ ID NO: 2206793 - DNA, 25 bp, Homo sapien
tccagctctcgctgttcaatgatga

SEQ ID NO: 2206794 - DNA, 25 bp, Homo sapien
cctgtagcaggagggtaaacatgac

SEQ ID NO: 2206795 - DNA, 25 bp, Homo sapien
cttcaatgtagggaccaccactggg

SEQ ID NO: 2206796 - DNA, 25 bp, Homo sapien
ctccatgcaaaagcctttgtttcct

SEQ ID NO: 2206797 - DNA, 25 bp, Homo sapien
tctttccatctctttaacgctgtct

SEQ ID NO: 2206798 - DNA, 25 bp, Homo sapien
tgtccaggtccccaacaaacaagtg

SEQ ID NO: 2206799 - DNA, 25 bp, Homo sapien
tgggcctcccgcaagacagaaagtt

SEQ ID NO: 2206800 - DNA, 25 bp, Homo sapien
cgggccagtcgtccagagagtgaca

SEQ ID NO: 2206801 - DNA, 25 bp, Homo sapien
cctggttggcctctgaatcgatgct

SEQ ID NO: 2206802 - DNA, 25 bp, Homo sapien
ctttttttgagccagttcatggtca

SEQ ID NO: 2206803 - DNA, 25 bp, Homo sapien
tcctaggccaatctctgccatctca

SEQ ID NO: 2206804 - DNA, 25 bp, Homo sapien
tttttgagccagttcatggtcaact

SEQ ID NO: 2206805 - DNA, 25 bp, Homo sapien
gccatctcaggttggtctttcagtt

SEQ ID NO: 2206806 - DNA, 25 bp, Homo sapien
aaggaggcgaaaagtgctgaaactc

SEQ ID NO: 2206807 - DNA, 25 bp, Homo sapien
caaagaatgaccatttgagcacctc

SEQ ID NO: 2206808 - DNA, 25 bp, Homo sapien
tttgagcacctctgttgagaggctg

SEQ ID NO: 2206809 - DNA, 25 bp, Homo sapien
ggaaacaaagaatgaccatttgagc

SEQ ID NO: 2206810 - DNA, 25 bp, Homo sapien
gaccatttgagcacctctgttgaga

SEQ ID NO: 2206811 - DNA, 25 bp, Homo sapien
ctggagcaagttacaagatctctag

SEQ ID NO: 2206812 - DNA, 25 bp, Homo sapien
cagggcttgtaactgctgcctctgg

SEQ ID NO: 2206813 - DNA, 25 bp, Homo sapien
ccaaggcaaagggagctacacaaag

SEQ ID NO: 2206814 - DNA, 25 bp, Homo sapien
gttacaagatctctagtaatagtga

SEQ ID NO: 2206815 - DNA, 25 bp, Homo sapien
taatagcaatgatggtcctggggct

SEQ ID NO: 2206816 - DNA, 25 bp, Homo sapien
ccagagcactgagcaataatagcaa

SEQ ID NO: 2206817 - DNA, 25 bp, Homo sapien
agagcactgagcaataatagcaatg

SEQ ID NO: 2206818 - DNA, 25 bp, Homo sapien
agccagagcactgagcaataatagc

SEQ ID NO: 2206819 - DNA, 25 bp, Homo sapien
ctgtcccgatgtcctccaaagccca

SEQ ID NO: 2206820 - DNA, 25 bp, Homo sapien
tgtcccgatgtcctccaaagcccac

SEQ ID NO: 2206821 - DNA, 25 bp, Homo sapien
tcctgtcccgatgtcctccaaagcc

SEQ ID NO: 2206822 - DNA, 25 bp, Homo sapien
cttcctgtcccgatgtcctccaaag

SEQ ID NO: 2206823 - DNA, 25 bp, Homo sapien
tgctcaggttgagatcccaagtgac

SEQ ID NO: 2206824 - DNA, 25 bp, Homo sapien
ctgagcctgctcaggttgagatccc

SEQ ID NO: 2206825 - DNA, 25 bp, Homo sapien
ctcaggttgagatcccaagtgaccc

SEQ ID NO: 2206826 - DNA, 25 bp, Homo sapien
gcctgctcaggttgagatcccaagt

SEQ ID NO: 2206827 - DNA, 25 bp, Homo sapien
ctcaggattgagagcacaggaacca

SEQ ID NO: 2206828 - DNA, 25 bp, Homo sapien
ggagtgcaaaggattcttgctctgc

SEQ ID NO: 2206829 - DNA, 25 bp, Homo sapien
tgctgggctgcacgaaagagcctgt

SEQ ID NO: 2206830 - DNA, 25 bp, Homo sapien
ctgctgggacactttgtgaaccctg

SEQ ID NO: 2206831 - DNA, 25 bp, Homo sapien
ccgagaagatccgactgggtctcat

SEQ ID NO: 2206832 - DNA, 25 bp, Homo sapien
cctggctccgagaagatccgactgg

SEQ ID NO: 2206833 - DNA, 25 bp, Homo sapien
gctccgagaagatccgactgggtct

SEQ ID NO: 2206834 - DNA, 25 bp, Homo sapien
gagaagatccgactgggtctcatca

SEQ ID NO: 2206835 - DNA, 25 bp, Homo sapien
ctctgagaaggcacggctgcgcagt

SEQ ID NO: 2206836 - DNA, 25 bp, Homo sapien
gtgactctctgagaaggcacggctg

SEQ ID NO: 2206837 - DNA, 25 bp, Homo sapien
ctttggggcgccaagctgatgtgac

SEQ ID NO: 2206838 - DNA, 25 bp, Homo sapien
tggggcgccaagctgatgtgactct

SEQ ID NO: 2206839 - DNA, 25 bp, Homo sapien
catgaaaagctagtcttggaatgag

SEQ ID NO: 2206840 - DNA, 25 bp, Homo sapien
ggagctcccctcctcataaactgaa

SEQ ID NO: 2206841 - DNA, 25 bp, Homo sapien
tagcttgacaagtccagtgctgggt

SEQ ID NO: 2206842 - DNA, 25 bp, Homo sapien
gaagaaattgctcggtagcttgaca

SEQ ID NO: 2206843 - DNA, 25 bp, Homo sapien
gaaaccactagtctgggaaaacagc

SEQ ID NO: 2206844 - DNA, 25 bp, Homo sapien
tctaacacaggtggttcagggacca

SEQ ID NO: 2206845 - DNA, 25 bp, Homo sapien
gaaaacagctcataatcaaagtggc

SEQ ID NO: 2206846 - DNA, 25 bp, Homo sapien
tctgagaagggtacatgatccaact

SEQ ID NO: 2206847 - DNA, 25 bp, Homo sapien
tctggtgccccaagtcatggaactg

SEQ ID NO: 2206848 - DNA, 25 bp, Homo sapien
gagtcacttatatcaagcaggcaga

SEQ ID NO: 2206849 - DNA, 25 bp, Homo sapien
tcatctgggccaacgtgtgtactag

SEQ ID NO: 2206850 - DNA, 25 bp, Homo sapien
catggaactgtgaccctatctggag

SEQ ID NO: 2206851 - DNA, 25 bp, Homo sapien
tgtcagtttgcagatgagactcctg

SEQ ID NO: 2206852 - DNA, 25 bp, Homo sapien
tacttgtgctacattcatcctcggg

SEQ ID NO: 2206853 - DNA, 25 bp, Homo sapien
ctcgggcgtccatgaaggctttagc

SEQ ID NO: 2206854 - DNA, 25 bp, Homo sapien
gtaaaaagcacagtgtccagacctg

SEQ ID NO: 2206855 - DNA, 25 bp, Homo sapien
tggaaggactagtaaacaaaatgtg

SEQ ID NO: 2206856 - DNA, 25 bp, Homo sapien
ccaacaatccattagtggaaggact

SEQ ID NO: 2206857 - DNA, 25 bp, Homo sapien
gaccacatattgtgcgattagagtc

SEQ ID NO: 2206858 - DNA, 25 bp, Homo sapien
gattagagtcatatgcagtgcacag

SEQ ID NO: 2206859 - DNA, 25 bp, Homo sapien
gccttgaaagactcaacttgtatct

SEQ ID NO: 2206860 - DNA, 25 bp, Homo sapien
catatcccaattcaaacttagcagc

SEQ ID NO: 2206861 - DNA, 25 bp, Homo sapien
gctgggtgtttgacaagccttgaaa

SEQ ID NO: 2206862 - DNA, 25 bp, Homo sapien
tcagctgcttgacccttcagtttcc

SEQ ID NO: 2206863 - DNA, 25 bp, Homo sapien
ctatgccaataacattctccaagtc

SEQ ID NO: 2206864 - DNA, 25 bp, Homo sapien
tatgccaataacattctccaagtca

SEQ ID NO: 2206865 - DNA, 25 bp, Homo sapien
tatgacttgaggaagcctgcatagc

SEQ ID NO: 2206866 - DNA, 25 bp, Homo sapien
taggtcccatcaaactgtatggcat

SEQ ID NO: 2206867 - DNA, 25 bp, Homo sapien
tattgtttgcactagtaatcccaac

SEQ ID NO: 2206868 - DNA, 25 bp, Homo sapien
taccacataatgcttagagaggaaa

SEQ ID NO: 2206869 - DNA, 25 bp, Homo sapien
tgactggctggtcttcctgtttcct

SEQ ID NO: 2206870 - DNA, 25 bp, Homo sapien
ctgactggctggtcttcctgtttcc

SEQ ID NO: 2206871 - DNA, 25 bp, Homo sapien
cctgactggctggtcttcctgtttc

SEQ ID NO: 2206872 - DNA, 25 bp, Homo sapien
cctttctgtcggcaggcttgctaaa

SEQ ID NO: 2206873 - DNA, 25 bp, Homo sapien
tttctgtcggcaggcttgctaaact

SEQ ID NO: 2206874 - DNA, 25 bp, Homo sapien
gctgcctttctgtcggcaggcttgc

SEQ ID NO: 2206875 - DNA, 25 bp, Homo sapien
agggctgcctttctgtcggcaggct

SEQ ID NO: 2206876 - DNA, 25 bp, Homo sapien
gactggtatccctcctgtggacggg

SEQ ID NO: 2206877 - DNA, 25 bp, Homo sapien
gcctcattgagtgggttggaatcca

SEQ ID NO: 2206878 - DNA, 25 bp, Homo sapien
catcctgtacgggtgggagctccat

SEQ ID NO: 2206879 - DNA, 25 bp, Homo sapien
tccttgcgggtagcacaggctctaa

SEQ ID NO: 2206880 - DNA, 25 bp, Homo sapien
ctgcaatgccgggagagtggacacc

SEQ ID NO: 2206881 - DNA, 25 bp, Homo sapien
caatgccgggagagtggacaccact

SEQ ID NO: 2206882 - DNA, 25 bp, Homo sapien
tgcaatgccgggagagtggacacca

SEQ ID NO: 2206883 - DNA, 25 bp, Homo sapien
aatgccgggagagtggacaccactg

SEQ ID NO: 2206884 - DNA, 25 bp, Homo sapien
caagctgaaggcttcagaagggaaa

SEQ ID NO: 2206885 - DNA, 25 bp, Homo sapien
aagctgaaggcttcagaagggaaat

SEQ ID NO: 2206886 - DNA, 25 bp, Homo sapien
gcggcctactgacaggggcgttcct

SEQ ID NO: 2206887 - DNA, 25 bp, Homo sapien
tggccacatgccatgagtgcggcct

SEQ ID NO: 2206888 - DNA, 25 bp, Homo sapien
catgccatgagtgcggcctactgac

SEQ ID NO: 2206889 - DNA, 25 bp, Homo sapien
gctgcttcagggcatccctccagca

SEQ ID NO: 2206890 - DNA, 25 bp, Homo sapien
cctggcatacttcgcatgagcagtt

SEQ ID NO: 2206891 - DNA, 25 bp, Homo sapien
aggacccatcgctgtcccctggcat

SEQ ID NO: 2206892 - DNA, 25 bp, Homo sapien
gcatgagcagttgccacccttgcga

SEQ ID NO: 2206893 - DNA, 25 bp, Homo sapien
gctgtcccctggcatacttcgcatg

SEQ ID NO: 2206894 - DNA, 25 bp, Homo sapien
ggtcacactcaagctggaggattcc

SEQ ID NO: 2206895 - DNA, 25 bp, Homo sapien
gtcacactcaagctggaggattcca

SEQ ID NO: 2206896 - DNA, 25 bp, Homo sapien
tcacactcaagctggaggattccat

SEQ ID NO: 2206897 - DNA, 25 bp, Homo sapien
tagcactgaaggcaaggtatgacca

SEQ ID NO: 2206898 - DNA, 25 bp, Homo sapien
ggctcaggcacagtcaggttccagt

SEQ ID NO: 2206899 - DNA, 25 bp, Homo sapien
ccttagggaacgaaagccagtgtca

SEQ ID NO: 2206900 - DNA, 25 bp, Homo sapien
cccaagatgctgagtgtgatccaag

SEQ ID NO: 2206901 - DNA, 25 bp, Homo sapien
cacataagcccttgggaaatttctc

SEQ ID NO: 2206902 - DNA, 25 bp, Homo sapien
catatatgtacttccctggtaaggc

SEQ ID NO: 2206903 - DNA, 25 bp, Homo sapien
cccaggaccaagagggcaattcttg

SEQ ID NO: 2206904 - DNA, 25 bp, Homo sapien
gagataagtgctggtgagcagttgc

SEQ ID NO: 2206905 - DNA, 25 bp, Homo sapien
ttatttttctgtacttttgatatga

SEQ ID NO: 2206906 - DNA, 25 bp, Homo sapien
tatttttctgtacttttgatatgaa

SEQ ID NO: 2206907 - DNA, 25 bp, Homo sapien
tttctgtacttttgatatgaaaatt

SEQ ID NO: 2206908 - DNA, 25 bp, Homo sapien
tttttctgtacttttgatatgaaaa

SEQ ID NO: 2206909 - DNA, 25 bp, Homo sapien
accaaatggctactctgtttcaggt

SEQ ID NO: 2206910 - DNA, 25 bp, Homo sapien
gtattgtactgcctgctaaaatcag

SEQ ID NO: 2206911 - DNA, 25 bp, Homo sapien
tagtgttcttatcatacggatggga

SEQ ID NO: 2206912 - DNA, 25 bp, Homo sapien
gcgcctggccggatgaagttttaac

SEQ ID NO: 2206913 - DNA, 25 bp, Homo sapien
tattcattctcacttgtagactacg

SEQ ID NO: 2206914 - DNA, 25 bp, Homo sapien
gagagcctcaaggtcttctttttgg

SEQ ID NO: 2206915 - DNA, 25 bp, Homo sapien
gaatgctttataccaggggccagca

SEQ ID NO: 2206916 - DNA, 25 bp, Homo sapien
cacttgtagactacgatggttctct

SEQ ID NO: 2206917 - DNA, 25 bp, Homo sapien
tggaaaactagttagcaggccagat

SEQ ID NO: 2206918 - DNA, 25 bp, Homo sapien
catagatagatcagcatgcctgctc

SEQ ID NO: 2206919 - DNA, 25 bp, Homo sapien
taatacatggtaggacaacttcagt

SEQ ID NO: 2206920 - DNA, 25 bp, Homo sapien
actgtaaacatcttcctatccctgg

SEQ ID NO: 2206921 - DNA, 25 bp, Homo sapien
ggcatatgacattccattcagttta

SEQ ID NO: 2206922 - DNA, 25 bp, Homo sapien
tacacatcctcatgtagggaagtag

SEQ ID NO: 2206923 - DNA, 25 bp, Homo sapien
aaataactgatcaattttgggtaca

SEQ ID NO: 2206924 - DNA, 25 bp, Homo sapien
tcgtggtcacttaaattggcatatg

SEQ ID NO: 2206925 - DNA, 25 bp, Homo sapien
gccttcaccaataggggctgagatg

SEQ ID NO: 2206926 - DNA, 25 bp, Homo sapien
gcgggagccatataatggagtgcca

SEQ ID NO: 2206927 - DNA, 25 bp, Homo sapien
atgagggcctcttggcgggagccat

SEQ ID NO: 2206928 - DNA, 25 bp, Homo sapien
cttgagaatccggaaggagcctttg

SEQ ID NO: 2206929 - DNA, 25 bp, Homo sapien
tggagtgccattgatattcaccagc

SEQ ID NO: 2206930 - DNA, 25 bp, Homo sapien
cagaaagcaggtagtgagatgactt

SEQ ID NO: 2206931 - DNA, 25 bp, Homo sapien
aggtagtgagatgactttctcccca

SEQ ID NO: 2206932 - DNA, 25 bp, Homo sapien
gaaagcaggtagtgagatgactttc

SEQ ID NO: 2206933 - DNA, 25 bp, Homo sapien
agaaagcaggtagtgagatgacttt

SEQ ID NO: 2206934 - DNA, 25 bp, Homo sapien
gcacagactccttcttggactacag

SEQ ID NO: 2206935 - DNA, 25 bp, Homo sapien
cttcttggactacagcatcaggcca

SEQ ID NO: 2206936 - DNA, 25 bp, Homo sapien
tggactacagcatcaggccaactgt

SEQ ID NO: 2206937 - DNA, 25 bp, Homo sapien
tatctgagtccttgcacagactcct

SEQ ID NO: 2206938 - DNA, 25 bp, Homo sapien
tccatgccccttctcagtcaccagc

SEQ ID NO: 2206939 - DNA, 25 bp, Homo sapien
catgccccttctcagtcaccagcat

SEQ ID NO: 2206940 - DNA, 25 bp, Homo sapien
tttttctgttccatgccccttctca

SEQ ID NO: 2206941 - DNA, 25 bp, Homo sapien
cttttttctgttccatgccccttct

SEQ ID NO: 2206942 - DNA, 25 bp, Homo sapien
tttgctcctgccaagtcagatcgtc

SEQ ID NO: 2206943 - DNA, 25 bp, Homo sapien
agatcgtcctgctgtctctataagt

SEQ ID NO: 2206944 - DNA, 25 bp, Homo sapien
cctatgtcagcaaccaaaggcaaat

SEQ ID NO: 2206945 - DNA, 25 bp, Homo sapien
tcaagagcactgtcccctatgtcag

SEQ ID NO: 2206946 - DNA, 25 bp, Homo sapien
tctactaaacatttagcacgcccat

SEQ ID NO: 2206947 - DNA, 25 bp, Homo sapien
caattgcgtgctcaaaaatagtctc

SEQ ID NO: 2206948 - DNA, 25 bp, Homo sapien
aaattgttcacaattgcgtgctcaa

SEQ ID NO: 2206949 - DNA, 25 bp, Homo sapien
ttagcacgcccattagcacaagcca

SEQ ID NO: 2206950 - DNA, 25 bp, Homo sapien
ttccccttgatgcgtatcccatcat

SEQ ID NO: 2206951 - DNA, 25 bp, Homo sapien
acagaatcctgtcatttggaaaaca

SEQ ID NO: 2206952 - DNA, 25 bp, Homo sapien
cacttcctgagaggattctctcagc

SEQ ID NO: 2206953 - DNA, 25 bp, Homo sapien
gcactcttccccttgatgcgtatcc

SEQ ID NO: 2206954 - DNA, 25 bp, Homo sapien
caccccaggagataataaagcacag

SEQ ID NO: 2206955 - DNA, 25 bp, Homo sapien
tacgagcctgtttaacagcagagct

SEQ ID NO: 2206956 - DNA, 25 bp, Homo sapien
ctgccaggaaagcactgccaaactc

SEQ ID NO: 2206957 - DNA, 25 bp, Homo sapien
tttgaggtaacaggaaggttgactg

SEQ ID NO: 2206958 - DNA, 25 bp, Homo sapien
gttggcatatctctttaggctcttc

SEQ ID NO: 2206959 - DNA, 25 bp, Homo sapien
tcctcgattagtatttctctgctgg

SEQ ID NO: 2206960 - DNA, 25 bp, Homo sapien
ggatcccaaccagcatatgacatta

SEQ ID NO: 2206961 - DNA, 25 bp, Homo sapien
tgaccatgtcagtttccagtagtac

SEQ ID NO: 2206962 - DNA, 25 bp, Homo sapien
tgagggttaccaaagccacagtgaa

SEQ ID NO: 2206963 - DNA, 25 bp, Homo sapien
gaactggcttccactgatgaccgca

SEQ ID NO: 2206964 - DNA, 25 bp, Homo sapien
tgaccgcagactgggctgtgcgctt

SEQ ID NO: 2206965 - DNA, 25 bp, Homo sapien
tgtgcgcttgccactagaaatctgg

SEQ ID NO: 2206966 - DNA, 25 bp, Homo sapien
ttcttgaggacctcaacttgaccat

SEQ ID NO: 2206967 - DNA, 25 bp, Homo sapien
acagggaagcttcttgaggacctca

SEQ ID NO: 2206968 - DNA, 25 bp, Homo sapien
ggaattggacaacagggaagcttct

SEQ ID NO: 2206969 - DNA, 25 bp, Homo sapien
ctggaattggacaacagggaagctt

SEQ ID NO: 2206970 - DNA, 25 bp, Homo sapien
cagactgagggtatgcctgatacag

SEQ ID NO: 2206971 - DNA, 25 bp, Homo sapien
cctgatacagcttaagggctgaggg

SEQ ID NO: 2206972 - DNA, 25 bp, Homo sapien
tcatgaaaaatactactctaccatc

SEQ ID NO: 2206973 - DNA, 25 bp, Homo sapien
tcagattgccattacagtcagactg

SEQ ID NO: 2206974 - DNA, 25 bp, Homo sapien
atgatgcttggttttaagcagtagc

SEQ ID NO: 2206975 - DNA, 25 bp, Homo sapien
tgcttggttttaagcagtagccagg

SEQ ID NO: 2206976 - DNA, 25 bp, Homo sapien
tgatgcttggttttaagcagtagcc

SEQ ID NO: 2206977 - DNA, 25 bp, Homo sapien
gatgcttggttttaagcagtagcca

SEQ ID NO: 2206978 - DNA, 25 bp, Homo sapien
gaatgaataagtccaacatactgtg

SEQ ID NO: 2206979 - DNA, 25 bp, Homo sapien
gtttcaaggcagcagcatacataca

SEQ ID NO: 2206980 - DNA, 25 bp, Homo sapien
catacatacacagtcagcagtgaca

SEQ ID NO: 2206981 - DNA, 25 bp, Homo sapien
aaggtgaatgaataagtccaacata

SEQ ID NO: 2206982 - DNA, 25 bp, Homo sapien
aataaagttacgctcaagaggcact

SEQ ID NO: 2206983 - DNA, 25 bp, Homo sapien
aagttacgctcaagaggcactctgg

SEQ ID NO: 2206984 - DNA, 25 bp, Homo sapien
agttacgctcaagaggcactctggc

SEQ ID NO: 2206985 - DNA, 25 bp, Homo sapien
taaagttacgctcaagaggcactct

SEQ ID NO: 2206986 - DNA, 25 bp, Homo sapien
ctccccatgtgaacaatccttttgt

SEQ ID NO: 2206987 - DNA, 25 bp, Homo sapien
tctggatacttggttgggacctcca

SEQ ID NO: 2206988 - DNA, 25 bp, Homo sapien
gctgctttggatctgttccaagttt

SEQ ID NO: 2206989 - DNA, 25 bp, Homo sapien
gtggtgccaacaccctcctgatgct

SEQ ID NO: 2206990 - DNA, 25 bp, Homo sapien
ggatctgttccaagtttctggatac

SEQ ID NO: 2206991 - DNA, 25 bp, Homo sapien
ataccagtttgggcccagaatattt

SEQ ID NO: 2206992 - DNA, 25 bp, Homo sapien
gagtttagacagcagataccagttt

SEQ ID NO: 2206993 - DNA, 25 bp, Homo sapien
ctgagtttagacagcagataccagt

SEQ ID NO: 2206994 - DNA, 25 bp, Homo sapien
tttagacagcagataccagtttggg

SEQ ID NO: 2206995 - DNA, 25 bp, Homo sapien
ccagaatgaggagacccaagatcag

SEQ ID NO: 2206996 - DNA, 25 bp, Homo sapien
ggagcccagtgggagttcactgtat

SEQ ID NO: 2206997 - DNA, 25 bp, Homo sapien
gcaggagaattttccaagacattac

SEQ ID NO: 2206998 - DNA, 25 bp, Homo sapien
cagtgatgacactagaatgcaggag

SEQ ID NO: 2206999 - DNA, 25 bp, Homo sapien
tacactaacaatgtactacctcaaa

SEQ ID NO: 2207000 - DNA, 25 bp, Homo sapien
tttactatagcacctaaaataataa

SEQ ID NO: 2207001 - DNA, 25 bp, Homo sapien
gctaatgaatgcaagacttattgtt

SEQ ID NO: 2207002 - DNA, 25 bp, Homo sapien
tatacactaacaatgtactacctca

SEQ ID NO: 2207003 - DNA, 25 bp, Homo sapien
cttaaacacatagcaacaagtggga

SEQ ID NO: 2207004 - DNA, 25 bp, Homo sapien
cgtcccaacaccataggaaatgctg

SEQ ID NO: 2207005 - DNA, 25 bp, Homo sapien
ggaacacagcttacacacaggaact

SEQ ID NO: 2207006 - DNA, 25 bp, Homo sapien
agagtctcacagcaacgcgtcccaa

SEQ ID NO: 2207007 - DNA, 25 bp, Homo sapien
cactctcagtcagagtaagatgcca

SEQ ID NO: 2207008 - DNA, 25 bp, Homo sapien
cacactctcagtcagagtaagatgc

SEQ ID NO: 2207009 - DNA, 25 bp, Homo sapien
acactctcagtcagagtaagatgcc

SEQ ID NO: 2207010 - DNA, 25 bp, Homo sapien
gaagaatcagaaactctcttagtag

SEQ ID NO: 2207011 - DNA, 25 bp, Homo sapien
catccctgaaagttattgccctgtg

SEQ ID NO: 2207012 - DNA, 25 bp, Homo sapien
cttagtaggactgccattgactctc

SEQ ID NO: 2207013 - DNA, 25 bp, Homo sapien
tatgatagacataggtaagccactg

SEQ ID NO: 2207014 - DNA, 25 bp, Homo sapien
aactgccagatcatggagggctgca

SEQ ID NO: 2207015 - DNA, 25 bp, Homo sapien
tggaaattctgtgggcggtgtgagg

SEQ ID NO: 2207016 - DNA, 25 bp, Homo sapien
aaagggaggaactgccagatcatgg

SEQ ID NO: 2207017 - DNA, 25 bp, Homo sapien
catggagggctgcatatcccattgt

SEQ ID NO: 2207018 - DNA, 25 bp, Homo sapien
gggagaggaggagcttgattagaag

SEQ ID NO: 2207019 - DNA, 25 bp, Homo sapien
ggaggagcttgattagaagaaattc

SEQ ID NO: 2207020 - DNA, 25 bp, Homo sapien
cttggtggaaagagtggggagagga

SEQ ID NO: 2207021 - DNA, 25 bp, Homo sapien
gaggaggagcttgattagaagaaat

SEQ ID NO: 2207022 - DNA, 25 bp, Homo sapien
aagccgcgatgactgtcccttcagt

SEQ ID NO: 2207023 - DNA, 25 bp, Homo sapien
cacttccttcggcccaaactgaggg

SEQ ID NO: 2207024 - DNA, 25 bp, Homo sapien
cctcgcgagtgtgtctgcgcgcaag

SEQ ID NO: 2207025 - DNA, 25 bp, Homo sapien
tcagtccttcactgtcccgcaggga

SEQ ID NO: 2207026 - DNA, 25 bp, Homo sapien
tagacactgtgagcggctcacagtg

SEQ ID NO: 2207027 - DNA, 25 bp, Homo sapien
cttagacactgtgagcggctcacag

SEQ ID NO: 2207028 - DNA, 25 bp, Homo sapien
gacactgtgagcggctcacagtgtt

SEQ ID NO: 2207029 - DNA, 25 bp, Homo sapien
ttagacactgtgagcggctcacagt

SEQ ID NO: 2207030 - DNA, 25 bp, Homo sapien
tcctagccttgtgagtgctgaatac

SEQ ID NO: 2207031 - DNA, 25 bp, Homo sapien
tctaacaggcctgaagatggacctc

SEQ ID NO: 2207032 - DNA, 25 bp, Homo sapien
tcagaaagtcatgatctcctagcct

SEQ ID NO: 2207033 - DNA, 25 bp, Homo sapien
gatggacctcgattataggaccaga

SEQ ID NO: 2207034 - DNA, 25 bp, Homo sapien
ttttgcaattagtgtgatattcagt

SEQ ID NO: 2207035 - DNA, 25 bp, Homo sapien
tttgcaattagtgtgatattcagtt

SEQ ID NO: 2207036 - DNA, 25 bp, Homo sapien
ctatttcatataagctgcaccagag

SEQ ID NO: 2207037 - DNA, 25 bp, Homo sapien
acccctataccataccaggcagttt

SEQ ID NO: 2207038 - DNA, 25 bp, Homo sapien
tataccataccaggcagtttgtggc

SEQ ID NO: 2207039 - DNA, 25 bp, Homo sapien
cctataccataccaggcagtttgtg

SEQ ID NO: 2207040 - DNA, 25 bp, Homo sapien
taccataccaggcagtttgtggcca

SEQ ID NO: 2207041 - DNA, 25 bp, Homo sapien
tgggcaatcctcagaagagaacatg

SEQ ID NO: 2207042 - DNA, 25 bp, Homo sapien
catcactaattgataggccaggatg

SEQ ID NO: 2207043 - DNA, 25 bp, Homo sapien
tgcattgggatcttcgaacttcatt

SEQ ID NO: 2207044 - DNA, 25 bp, Homo sapien
gcatcaggttttcctttacctccaa

SEQ ID NO: 2207045 - DNA, 25 bp, Homo sapien
gagagtgggagccagatgcagcctc

SEQ ID NO: 2207046 - DNA, 25 bp, Homo sapien
gtgggagccagatgcagcctcctcg

SEQ ID NO: 2207047 - DNA, 25 bp, Homo sapien
tgtgagagtgggagccagatgcagc

SEQ ID NO: 2207048 - DNA, 25 bp, Homo sapien
tgcagtggctgtgagagtgggagcc

SEQ ID NO: 2207049 - DNA, 25 bp, Homo sapien
aagctcttggaaccaaaccgtccat

SEQ ID NO: 2207050 - DNA, 25 bp, Homo sapien
tgtttaacaaagttctgtatgtagc

SEQ ID NO: 2207051 - DNA, 25 bp, Homo sapien
gtgtcttttacattgctgcagtgca

SEQ ID NO: 2207052 - DNA, 25 bp, Homo sapien
aatgttaaagacaatcacagtaaaa

SEQ ID NO: 2207053 - DNA, 25 bp, Homo sapien
ctgttcagctgcatacatgttaacc

SEQ ID NO: 2207054 - DNA, 25 bp, Homo sapien
gctgcatacatgttaaccccatgta

SEQ ID NO: 2207055 - DNA, 25 bp, Homo sapien
cagctgcatacatgttaaccccatg

SEQ ID NO: 2207056 - DNA, 25 bp, Homo sapien
ttcagctgcatacatgttaacccca

SEQ ID NO: 2207057 - DNA, 25 bp, Homo sapien
aagtgagagttttgccaggtagaca

SEQ ID NO: 2207058 - DNA, 25 bp, Homo sapien
gagagttttgccaggtagacaagga

SEQ ID NO: 2207059 - DNA, 25 bp, Homo sapien
tgagagttttgccaggtagacaagg

SEQ ID NO: 2207060 - DNA, 25 bp, Homo sapien
agtgagagttttgccaggtagacaa

SEQ ID NO: 2207061 - DNA, 25 bp, Homo sapien
tatatgaacttaagggcccagtcag

SEQ ID NO: 2207062 - DNA, 25 bp, Homo sapien
tcaaaactctcctaataggcgatgg

SEQ ID NO: 2207063 - DNA, 25 bp, Homo sapien
tgtgcccaaggtagattaggaatcc

SEQ ID NO: 2207064 - DNA, 25 bp, Homo sapien
taggaatccaatactggagcaagtt

SEQ ID NO: 2207065 - DNA, 25 bp, Homo sapien
atgaccgcttcgtggccctttgccc

SEQ ID NO: 2207066 - DNA, 25 bp, Homo sapien
catgaccgcttcgtggccctttgcc

SEQ ID NO: 2207067 - DNA, 25 bp, Homo sapien
tgaccgcttcgtggccctttgccct

SEQ ID NO: 2207068 - DNA, 25 bp, Homo sapien
tcatgaccgcttcgtggccctttgc

SEQ ID NO: 2207069 - DNA, 25 bp, Homo sapien
gactagtctccagtgaaagtgggac

SEQ ID NO: 2207070 - DNA, 25 bp, Homo sapien
gacagtttgttccaaagtctccatg

SEQ ID NO: 2207071 - DNA, 25 bp, Homo sapien
gggtgtggttactaaaaagcattga

SEQ ID NO: 2207072 - DNA, 25 bp, Homo sapien
gatattatggactatgggagctttc

SEQ ID NO: 2207073 - DNA, 25 bp, Homo sapien
tgtgaaattggaactaccggacaac

SEQ ID NO: 2207074 - DNA, 25 bp, Homo sapien
cggacaacaggtggagcaacattca

SEQ ID NO: 2207075 - DNA, 25 bp, Homo sapien
tagggctggccatgacactattgca

SEQ ID NO: 2207076 - DNA, 25 bp, Homo sapien
caggccatggctatgaaagtgtgaa

SEQ ID NO: 2207077 - DNA, 25 bp, Homo sapien
ggttcattgagatgaggcgcaattt

SEQ ID NO: 2207078 - DNA, 25 bp, Homo sapien
gacagagccggccatttggttcatt

SEQ ID NO: 2207079 - DNA, 25 bp, Homo sapien
agtgttggatgtgtacttgccctaa

SEQ ID NO: 2207080 - DNA, 25 bp, Homo sapien
tgccctaagtcctgtaacaaagctt

SEQ ID NO: 2207081 - DNA, 25 bp, Homo sapien
aggaccagaagtcaacgtgaataat

SEQ ID NO: 2207082 - DNA, 25 bp, Homo sapien
tgtaggaccagaagtcaacgtgaat

SEQ ID NO: 2207083 - DNA, 25 bp, Homo sapien
taggaccagaagtcaacgtgaataa

SEQ ID NO: 2207084 - DNA, 25 bp, Homo sapien
ccctgaaatcctggcttggactttg

SEQ ID NO: 2207085 - DNA, 25 bp, Homo sapien
ggttcagtgtggtcatgagggcccc

SEQ ID NO: 2207086 - DNA, 25 bp, Homo sapien
tgggttcagtgtggtcatgagggcc

SEQ ID NO: 2207087 - DNA, 25 bp, Homo sapien
ttcagtgtggtcatgagggccccac

SEQ ID NO: 2207088 - DNA, 25 bp, Homo sapien
cagtgtggtcatgagggccccacag

SEQ ID NO: 2207089 - DNA, 25 bp, Homo sapien
gatgtcacattgcttcctggcatcc

SEQ ID NO: 2207090 - DNA, 25 bp, Homo sapien
acaatgagggtgaaattactagtgt

SEQ ID NO: 2207091 - DNA, 25 bp, Homo sapien
agggtgaaattactagtgtgctgcc

SEQ ID NO: 2207092 - DNA, 25 bp, Homo sapien
gtgtgctgccagtcatctgggttta

SEQ ID NO: 2207093 - DNA, 25 bp, Homo sapien
tgtgctgccagtcatctgggtttat

SEQ ID NO: 2207094 - DNA, 25 bp, Homo sapien
acttttgatgcctctccagctacag

SEQ ID NO: 2207095 - DNA, 25 bp, Homo sapien
cagctacagattcaagagtctgaag

SEQ ID NO: 2207096 - DNA, 25 bp, Homo sapien
tgtctgtaggaggatccatcagccc

SEQ ID NO: 2207097 - DNA, 25 bp, Homo sapien
ggtagaaatattcactaaggctaag

SEQ ID NO: 2207098 - DNA, 25 bp, Homo sapien
ggggatagggctctgacaaaccctg

SEQ ID NO: 2207099 - DNA, 25 bp, Homo sapien
cttctgcagggtctcatcactggct

SEQ ID NO: 2207100 - DNA, 25 bp, Homo sapien
catcactggctccacagccactgct

SEQ ID NO: 2207101 - DNA, 25 bp, Homo sapien
gccactgctggtccctcttctattc

SEQ ID NO: 2207102 - DNA, 25 bp, Homo sapien
caagttatgtaggagccacagcatg

SEQ ID NO: 2207103 - DNA, 25 bp, Homo sapien
gcaggcagcgtaaaatgtattggat

SEQ ID NO: 2207104 - DNA, 25 bp, Homo sapien
cactgggcaggcagcgtaaaatgta

SEQ ID NO: 2207105 - DNA, 25 bp, Homo sapien
gaaacactacagaagattagagaca

SEQ ID NO: 2207106 - DNA, 25 bp, Homo sapien
cagcccacaaatggtcctgaagagc

SEQ ID NO: 2207107 - DNA, 25 bp, Homo sapien
cacaaatggtcctgaagagccagcc

SEQ ID NO: 2207108 - DNA, 25 bp, Homo sapien
ggcagtggtcgtgttcccagaggcc

SEQ ID NO: 2207109 - DNA, 25 bp, Homo sapien
tgcagtagagcaagtagggcaatcc

SEQ ID NO: 2207110 - DNA, 25 bp, Homo sapien
atgcattaatatgatggacaaaaac

SEQ ID NO: 2207111 - DNA, 25 bp, Homo sapien
aatgcattaatatgatggacaaaaa

SEQ ID NO: 2207112 - DNA, 25 bp, Homo sapien
ccagagaagggatcggggcttattc

SEQ ID NO: 2207113 - DNA, 25 bp, Homo sapien
tattctggcttgcatgttctttgca

SEQ ID NO: 2207114 - DNA, 25 bp, Homo sapien
ggcttattctggcttgcatgttctt

SEQ ID NO: 2207115 - DNA, 25 bp, Homo sapien
tcctcatgggaaccaaataaggtcc

SEQ ID NO: 2207116 - DNA, 25 bp, Homo sapien
ttacagactttattaaccagatgcc

SEQ ID NO: 2207117 - DNA, 25 bp, Homo sapien
cagactttattaaccagatgccaca

SEQ ID NO: 2207118 - DNA, 25 bp, Homo sapien
agactttattaaccagatgccacag

SEQ ID NO: 2207119 - DNA, 25 bp, Homo sapien
acagactttattaaccagatgccac

SEQ ID NO: 2207120 - DNA, 25 bp, Homo sapien
ttgagaaggacaccacagagccctg

SEQ ID NO: 2207121 - DNA, 25 bp, Homo sapien
cttgagaaggacaccacagagccct

SEQ ID NO: 2207122 - DNA, 25 bp, Homo sapien
gagaaggacaccacagagccctggt

SEQ ID NO: 2207123 - DNA, 25 bp, Homo sapien
tgagaaggacaccacagagccctgg

SEQ ID NO: 2207124 - DNA, 25 bp, Homo sapien
gattctctatgcctggttgtccact

SEQ ID NO: 2207125 - DNA, 25 bp, Homo sapien
ggttgtccactagctggctcctgac

SEQ ID NO: 2207126 - DNA, 25 bp, Homo sapien
tatgcctggttgtccactagctggc

SEQ ID NO: 2207127 - DNA, 25 bp, Homo sapien
gggatgattctctatgcctggttgt

SEQ ID NO: 2207128 - DNA, 25 bp, Homo sapien
catctccctctgcgaggcttaaaca

SEQ ID NO: 2207129 - DNA, 25 bp, Homo sapien
ccctctgcgaggcttaaacacagag

SEQ ID NO: 2207130 - DNA, 25 bp, Homo sapien
tctccctctgcgaggcttaaacaca

SEQ ID NO: 2207131 - DNA, 25 bp, Homo sapien
ctccctctgcgaggcttaaacacag

SEQ ID NO: 2207132 - DNA, 25 bp, Homo sapien
cagttgtcgtaagcctttctttcag

SEQ ID NO: 2207133 - DNA, 25 bp, Homo sapien
gttgtcgtaagcctttctttcagaa

SEQ ID NO: 2207134 - DNA, 25 bp, Homo sapien
ccagttgtcgtaagcctttctttca

SEQ ID NO: 2207135 - DNA, 25 bp, Homo sapien
ttgtcgtaagcctttctttcagaag

SEQ ID NO: 2207136 - DNA, 25 bp, Homo sapien
gcatctgtagtagtcttctacccaa

SEQ ID NO: 2207137 - DNA, 25 bp, Homo sapien
tgtagtagtcttctacccaattctg

SEQ ID NO: 2207138 - DNA, 25 bp, Homo sapien
tctgtagtagtcttctacccaattc

SEQ ID NO: 2207139 - DNA, 25 bp, Homo sapien
tagtagtcttctacccaattctgct

SEQ ID NO: 2207140 - DNA, 25 bp, Homo sapien
cagtagtcgttctttgtctgtagat

SEQ ID NO: 2207141 - DNA, 25 bp, Homo sapien
cttcctcagtagtcgttctttgtct

SEQ ID NO: 2207142 - DNA, 25 bp, Homo sapien
tcttcctcagtagtcgttctttgtc

SEQ ID NO: 2207143 - DNA, 25 bp, Homo sapien
cctcagtagtcgttctttgtctgta

SEQ ID NO: 2207144 - DNA, 25 bp, Homo sapien
ccaacttttgcatataggatagaag

SEQ ID NO: 2207145 - DNA, 25 bp, Homo sapien
gcaaaacatgtaccaggatttcagt

SEQ ID NO: 2207146 - DNA, 25 bp, Homo sapien
ttcctgaggtattcattgaaataac

SEQ ID NO: 2207147 - DNA, 25 bp, Homo sapien
gatttcagtagatgcaccaaatggt

SEQ ID NO: 2207148 - DNA, 25 bp, Homo sapien
gatgtttctttgatccactgatcta

SEQ ID NO: 2207149 - DNA, 25 bp, Homo sapien
tacttaagcatttcatcagagagaa

SEQ ID NO: 2207150 - DNA, 25 bp, Homo sapien
tcagagagaatcttgtgttgtttct

SEQ ID NO: 2207151 - DNA, 25 bp, Homo sapien
ttcttagtttcttgaggatgtttct

SEQ ID NO: 2207152 - DNA, 25 bp, Homo sapien
atttcttgaaagatccaactagtac

SEQ ID NO: 2207153 - DNA, 25 bp, Homo sapien
gatctggaactggttcatctacttc

SEQ ID NO: 2207154 - DNA, 25 bp, Homo sapien
gaccggattggaaaatacatgcaaa

SEQ ID NO: 2207155 - DNA, 25 bp, Homo sapien
tacatgcaaagataggatctggaac

SEQ ID NO: 2207156 - DNA, 25 bp, Homo sapien
caaagagaatggcatcctgaatcat

SEQ ID NO: 2207157 - DNA, 25 bp, Homo sapien
ggcaaagagaatggcatcctgaatc

SEQ ID NO: 2207158 - DNA, 25 bp, Homo sapien
ctgcaggcaaagagaatggcatcct

SEQ ID NO: 2207159 - DNA, 25 bp, Homo sapien
caggcaaagagaatggcatcctgaa

SEQ ID NO: 2207160 - DNA, 25 bp, Homo sapien
tctgtctctctacttttgcataggg

SEQ ID NO: 2207161 - DNA, 25 bp, Homo sapien
gctggtacaagcaaagtagtatcct

SEQ ID NO: 2207162 - DNA, 25 bp, Homo sapien
cattatgacaacgtgaacccttggc

SEQ ID NO: 2207163 - DNA, 25 bp, Homo sapien
tatttgagcaacttccctcagaccc

SEQ ID NO: 2207164 - DNA, 25 bp, Homo sapien
ctctgcccagctgcttagtttttct

SEQ ID NO: 2207165 - DNA, 25 bp, Homo sapien
gcaaaccaccatggcacatgtatac

SEQ ID NO: 2207166 - DNA, 25 bp, Homo sapien
ctttgaagatgacgggttgatgggt

SEQ ID NO: 2207167 - DNA, 25 bp, Homo sapien
cagcaaaccaccatggcacatgtat

SEQ ID NO: 2207168 - DNA, 25 bp, Homo sapien
ttgaagatgacgggttgatgggttc

SEQ ID NO: 2207169 - DNA, 25 bp, Homo sapien
agcctttggccgtcctctcagtctt

SEQ ID NO: 2207170 - DNA, 25 bp, Homo sapien
ttagcagtctcccagcctttggccg

SEQ ID NO: 2207171 - DNA, 25 bp, Homo sapien
ttggccgtcctctcagtcttaggct

SEQ ID NO: 2207172 - DNA, 25 bp, Homo sapien
ctttggccgtcctctcagtcttagg

SEQ ID NO: 2207173 - DNA, 25 bp, Homo sapien
cttccaggaagatgtgatgagctag

SEQ ID NO: 2207174 - DNA, 25 bp, Homo sapien
cagtccaggcttttctataaggtgc

SEQ ID NO: 2207175 - DNA, 25 bp, Homo sapien
ccaggtcatgtaggtcatgcttcca

SEQ ID NO: 2207176 - DNA, 25 bp, Homo sapien
ccttagtctgcataagggaccttga

SEQ ID NO: 2207177 - DNA, 25 bp, Homo sapien
caaatcagtaaatgggatacactac

SEQ ID NO: 2207178 - DNA, 25 bp, Homo sapien
gcatctgacgagattcaacatcttt

SEQ ID NO: 2207179 - DNA, 25 bp, Homo sapien
tatgcctgggatgcaagcgtgtttc

SEQ ID NO: 2207180 - DNA, 25 bp, Homo sapien
taaagaccatctatgacaagctcac

SEQ ID NO: 2207181 - DNA, 25 bp, Homo sapien
tgaatgtcatcaacaaaggccgcaa

SEQ ID NO: 2207182 - DNA, 25 bp, Homo sapien
gaaatcaaagcctcgaatcgtgaag

SEQ ID NO: 2207183 - DNA, 25 bp, Homo sapien
aaggccgcaacaaccatagctgtgg

SEQ ID NO: 2207184 - DNA, 25 bp, Homo sapien
gaatgcagggcgtaacacaggacct

SEQ ID NO: 2207185 - DNA, 25 bp, Homo sapien
tttcccggcagagtatacgcccttg

SEQ ID NO: 2207186 - DNA, 25 bp, Homo sapien
agtgttacgcgtctgcctcaggagg

SEQ ID NO: 2207187 - DNA, 25 bp, Homo sapien
caaggcagctgtgagatactagaaa

SEQ ID NO: 2207188 - DNA, 25 bp, Homo sapien
gcctccagatggcagtatactacac

SEQ ID NO: 2207189 - DNA, 25 bp, Homo sapien
gtgttgggtcaacactagcttgaac

SEQ ID NO: 2207190 - DNA, 25 bp, Homo sapien
caaatttcatcaaggattctaggtc

SEQ ID NO: 2207191 - DNA, 25 bp, Homo sapien
caggacctgggttaagaggtagtgt

SEQ ID NO: 2207192 - DNA, 25 bp, Homo sapien
tcttttcttgaagcggggcaggacc

SEQ ID NO: 2207193 - DNA, 25 bp, Homo sapien
tgtccacagtaaacaccaaagctag

SEQ ID NO: 2207194 - DNA, 25 bp, Homo sapien
gtttgtccacagtaaacaccaaagc

SEQ ID NO: 2207195 - DNA, 25 bp, Homo sapien
ctgtttgtccacagtaaacaccaaa

SEQ ID NO: 2207196 - DNA, 25 bp, Homo sapien
ttgtccacagtaaacaccaaagcta

SEQ ID NO: 2207197 - DNA, 25 bp, Homo sapien
tgacatactcttctatgtcaatgtt

SEQ ID NO: 2207198 - DNA, 25 bp, Homo sapien
tcaatgttattagctgaagtgtatg

SEQ ID NO: 2207199 - DNA, 25 bp, Homo sapien
tattagctgaagtgtatgtggccag

SEQ ID NO: 2207200 - DNA, 25 bp, Homo sapien
tgttattagctgaagtgtatgtggc

SEQ ID NO: 2207201 - DNA, 25 bp, Homo sapien
tggatacaaacaaggcacaagggca

SEQ ID NO: 2207202 - DNA, 25 bp, Homo sapien
gatgtgaacccagtgatccatagaa

SEQ ID NO: 2207203 - DNA, 25 bp, Homo sapien
cccaggttaggtgtggttcaagcct

SEQ ID NO: 2207204 - DNA, 25 bp, Homo sapien
taagagatcgccttacagcagcttc

SEQ ID NO: 2207205 - DNA, 25 bp, Homo sapien
aggggaagatattctagcttcatgc

SEQ ID NO: 2207206 - DNA, 25 bp, Homo sapien
ggggaagatattctagcttcatgcc

SEQ ID NO: 2207207 - DNA, 25 bp, Homo sapien
tgaggttctaggagagatcacagcc

SEQ ID NO: 2207208 - DNA, 25 bp, Homo sapien
ttctgcgcagccatctcggtaacgg

SEQ ID NO: 2207209 - DNA, 25 bp, Homo sapien
gagcctggcggtagcaaagagcatc

SEQ ID NO: 2207210 - DNA, 25 bp, Homo sapien
accgaaaggaagctggtaggctagc

SEQ ID NO: 2207211 - DNA, 25 bp, Homo sapien
agatacacgcgctgctccgaactcg

SEQ ID NO: 2207212 - DNA, 25 bp, Homo sapien
tttgaagtctgagcccctacaggcc

SEQ ID NO: 2207213 - DNA, 25 bp, Homo sapien
ctggacaccttctggtacctgggcc

SEQ ID NO: 2207214 - DNA, 25 bp, Homo sapien
gccgaggcgcggttcaatttgaagt

SEQ ID NO: 2207215 - DNA, 25 bp, Homo sapien
tacctgggcctcgtgtattacacct

SEQ ID NO: 2207216 - DNA, 25 bp, Homo sapien
tggggtgaagagttgccacacagct

SEQ ID NO: 2207217 - DNA, 25 bp, Homo sapien
cgctgcgtagtttctgcagcaggtg

SEQ ID NO: 2207218 - DNA, 25 bp, Homo sapien
acccctcacttcctggacaaggcaa

SEQ ID NO: 2207219 - DNA, 25 bp, Homo sapien
tgacaccgggtgtacggcgtcaccc

SEQ ID NO: 2207220 - DNA, 25 bp, Homo sapien
gactgtttataaattaacgtgcaca

SEQ ID NO: 2207221 - DNA, 25 bp, Homo sapien
tgttaatgttagttgtgactgttta

SEQ ID NO: 2207222 - DNA, 25 bp, Homo sapien
ttgtgactgtttataaattaacgtg

SEQ ID NO: 2207223 - DNA, 25 bp, Homo sapien
taatgttagttgtgactgtttataa

SEQ ID NO: 2207224 - DNA, 25 bp, Homo sapien
cgatatgttcttaactcagtttaca

SEQ ID NO: 2207225 - DNA, 25 bp, Homo sapien
tacaaacaaggaatgatacaatctt

SEQ ID NO: 2207226 - DNA, 25 bp, Homo sapien
accacgcctggccgcgatatgttct

SEQ ID NO: 2207227 - DNA, 25 bp, Homo sapien
caaggaatgatacaatcttttatac

SEQ ID NO: 2207228 - DNA, 25 bp, Homo sapien
tattggtgcctgcaaataactgcat

SEQ ID NO: 2207229 - DNA, 25 bp, Homo sapien
tctttacttagcacaagtcaggaaa

SEQ ID NO: 2207230 - DNA, 25 bp, Homo sapien
gaaagtatggcaatccagttaaagc

SEQ ID NO: 2207231 - DNA, 25 bp, Homo sapien
gcatggattgagtgaatccctttcc

SEQ ID NO: 2207232 - DNA, 25 bp, Homo sapien
ttagcgagaccaagaacccaccgga

SEQ ID NO: 2207233 - DNA, 25 bp, Homo sapien
gcgagggtccacagcttcattcttg

SEQ ID NO: 2207234 - DNA, 25 bp, Homo sapien
agggtccacagcttcattcttgaag

SEQ ID NO: 2207235 - DNA, 25 bp, Homo sapien
agcgagaccaagaacccaccggaag

SEQ ID NO: 2207236 - DNA, 25 bp, Homo sapien
tctgcacttaagtctaggagagagg

SEQ ID NO: 2207237 - DNA, 25 bp, Homo sapien
ttctgggctgtggatctgtcttctg

SEQ ID NO: 2207238 - DNA, 25 bp, Homo sapien
gggcctacaagtaaactctgaagaa

SEQ ID NO: 2207239 - DNA, 25 bp, Homo sapien
tctgatcagccttctgcacttaagt

SEQ ID NO: 2207240 - DNA, 25 bp, Homo sapien
taccccacactcagatgattttgaa

SEQ ID NO: 2207241 - DNA, 25 bp, Homo sapien
aattaccaatttatggccaatcttg

SEQ ID NO: 2207242 - DNA, 25 bp, Homo sapien
gattttgaagcgaataccagtaaca

SEQ ID NO: 2207243 - DNA, 25 bp, Homo sapien
catctatgtactcaattaccccaca

SEQ ID NO: 2207244 - DNA, 25 bp, Homo sapien
tcttaaaattgttctggaggcagct

SEQ ID NO: 2207245 - DNA, 25 bp, Homo sapien
ggagtccaagcttttatcgatgcaa

SEQ ID NO: 2207246 - DNA, 25 bp, Homo sapien
taatttgtaaggagctgaagactgc

SEQ ID NO: 2207247 - DNA, 25 bp, Homo sapien
gagtgtcacactaaaatggagtcca

SEQ ID NO: 2207248 - DNA, 25 bp, Homo sapien
cactagagttgttacacgaaggact

SEQ ID NO: 2207249 - DNA, 25 bp, Homo sapien
tactctactagcaccagattggaag

SEQ ID NO: 2207250 - DNA, 25 bp, Homo sapien
gaaggagtgtcccaagatgcaggaa

SEQ ID NO: 2207251 - DNA, 25 bp, Homo sapien
tacaacaaccagagcaagagtcagt

SEQ ID NO: 2207252 - DNA, 25 bp, Homo sapien
cactgggttcacatcaatgtttctt

SEQ ID NO: 2207253 - DNA, 25 bp, Homo sapien
tacatacacgtacgttctgtgcttg

SEQ ID NO: 2207254 - DNA, 25 bp, Homo sapien
cagatattcggcgtgcacgggcttg

SEQ ID NO: 2207255 - DNA, 25 bp, Homo sapien
tgctactcactaacaggacctcgtc

SEQ ID NO: 2207256 - DNA, 25 bp, Homo sapien
ggttctgttcgaagacgcccaggag

SEQ ID NO: 2207257 - DNA, 25 bp, Homo sapien
gaggcagcctcctctcgcctctcgc

SEQ ID NO: 2207258 - DNA, 25 bp, Homo sapien
cctcgaggcagcctcctcgaggcag

SEQ ID NO: 2207259 - DNA, 25 bp, Homo sapien
ggcagcctcctctcgcctctcgctg

SEQ ID NO: 2207260 - DNA, 25 bp, Homo sapien
cgaggcagcctcctcgaggcagcct

SEQ ID NO: 2207261 - DNA, 25 bp, Homo sapien
cgccggggaacagccgaggtgctgg

SEQ ID NO: 2207262 - DNA, 25 bp, Homo sapien
gccgccggggaacagccgaggtgct

SEQ ID NO: 2207263 - DNA, 25 bp, Homo sapien
ccgccgccggggaacagccgaggtg

SEQ ID NO: 2207264 - DNA, 25 bp, Homo sapien
ccgccggggaacagccgaggtgctg

SEQ ID NO: 2207265 - DNA, 25 bp, Homo sapien
cctttgacccaaacgcgactgtagc

SEQ ID NO: 2207266 - DNA, 25 bp, Homo sapien
gcagccgttttacacacgacagagg

SEQ ID NO: 2207267 - DNA, 25 bp, Homo sapien
tacaccgcattgtgactttggccga

SEQ ID NO: 2207268 - DNA, 25 bp, Homo sapien
gaggcaagggcatcgtcgtcatcat

SEQ ID NO: 2207269 - DNA, 25 bp, Homo sapien
ggattcttggcagaatagccgcgca

SEQ ID NO: 2207270 - DNA, 25 bp, Homo sapien
gattcttggcagaatagccgcgcat

SEQ ID NO: 2207271 - DNA, 25 bp, Homo sapien
aaggtattcagtagctaagagtcac

SEQ ID NO: 2207272 - DNA, 25 bp, Homo sapien
aaataatatttgtgtcgcctccaca

SEQ ID NO: 2207273 - DNA, 25 bp, Homo sapien
cagctatggtttgttatggacttca

SEQ ID NO: 2207274 - DNA, 25 bp, Homo sapien
gttactttacgatttgaagctttga

SEQ ID NO: 2207275 - DNA, 25 bp, Homo sapien
ggaggatcttttatgcacagctagt

SEQ ID NO: 2207276 - DNA, 25 bp, Homo sapien
gaggatcttttatgcacagctagtc

SEQ ID NO: 2207277 - DNA, 25 bp, Homo sapien
aggatcttttatgcacagctagtcc

SEQ ID NO: 2207278 - DNA, 25 bp, Homo sapien
aggaggatcttttatgcacagctag

SEQ ID NO: 2207279 - DNA, 25 bp, Homo sapien
ctgcgtgagagaattccggtcttgg

SEQ ID NO: 2207280 - DNA, 25 bp, Homo sapien
ggtcttggaaggatgccttcccctc

SEQ ID NO: 2207281 - DNA, 25 bp, Homo sapien
gaattccggtcttggaaggatgcct

SEQ ID NO: 2207282 - DNA, 25 bp, Homo sapien
gagagaattccggtcttggaaggat

SEQ ID NO: 2207283 - DNA, 25 bp, Homo sapien
ggccacttttgtcagaagcagaaca

SEQ ID NO: 2207284 - DNA, 25 bp, Homo sapien
aggccacttttgtcagaagcagaac

SEQ ID NO: 2207285 - DNA, 25 bp, Homo sapien
gccacttttgtcagaagcagaacag

SEQ ID NO: 2207286 - DNA, 25 bp, Homo sapien
tataccaccaatgaaatcagccagt

SEQ ID NO: 2207287 - DNA, 25 bp, Homo sapien
agttctggagagattaccacatgat

SEQ ID NO: 2207288 - DNA, 25 bp, Homo sapien
gtaaaacataatataccaccaatga

SEQ ID NO: 2207289 - DNA, 25 bp, Homo sapien
tgatagagtgtttctgaccatgggc

SEQ ID NO: 2207290 - DNA, 25 bp, Homo sapien
caaatcctaaccaccggaacaccag

SEQ ID NO: 2207291 - DNA, 25 bp, Homo sapien
caacagtgagaatgccaaatcctaa

SEQ ID NO: 2207292 - DNA, 25 bp, Homo sapien
ccaggattgaatccgcaccacaaca

SEQ ID NO: 2207293 - DNA, 25 bp, Homo sapien
ccgcaccacaacagtgagaatgcca

SEQ ID NO: 2207294 - DNA, 25 bp, Homo sapien
cacagaccagttgccctgagggtac

SEQ ID NO: 2207295 - DNA, 25 bp, Homo sapien
gagggtacacatgtagttccaggaa

SEQ ID NO: 2207296 - DNA, 25 bp, Homo sapien
gagactccacagaccagttgccctg

SEQ ID NO: 2207297 - DNA, 25 bp, Homo sapien
tacacatgtagttccaggaatttca

SEQ ID NO: 2207298 - DNA, 25 bp, Homo sapien
tggctgacagcaagatattgtaaac

SEQ ID NO: 2207299 - DNA, 25 bp, Homo sapien
tacagaagcagaatctaaggttgtg

SEQ ID NO: 2207300 - DNA, 25 bp, Homo sapien
cagaatctaaggttgtgatttgcat

SEQ ID NO: 2207301 - DNA, 25 bp, Homo sapien
tcagaacacaatctttggctgacag

SEQ ID NO: 2207302 - DNA, 25 bp, Homo sapien
catttgcatttttgagccacacttg

SEQ ID NO: 2207303 - DNA, 25 bp, Homo sapien
ccattgtgacttttgccgtgtctgt

SEQ ID NO: 2207304 - DNA, 25 bp, Homo sapien
gccaacgttgatgagaatctccaca

SEQ ID NO: 2207305 - DNA, 25 bp, Homo sapien
gccacacttggatacagctgaacca

SEQ ID NO: 2207306 - DNA, 25 bp, Homo sapien
ccatgcacaccaaatgacctggtct

SEQ ID NO: 2207307 - DNA, 25 bp, Homo sapien
catcagaagggatggttagagaaaa

SEQ ID NO: 2207308 - DNA, 25 bp, Homo sapien
gttagagaaaatgggatataaggcc

SEQ ID NO: 2207309 - DNA, 25 bp, Homo sapien
aaaatgggatataaggccttgaagg

SEQ ID NO: 2207310 - DNA, 25 bp, Homo sapien
ctatgaccccagggtagaccaggtt

SEQ ID NO: 2207311 - DNA, 25 bp, Homo sapien
tatgaccccagggtagaccaggttc

SEQ ID NO: 2207312 - DNA, 25 bp, Homo sapien
ccatcagaggaggttgattacataa

SEQ ID NO: 2207313 - DNA, 25 bp, Homo sapien
tacagcacacagacgtttctcattc

SEQ ID NO: 2207314 - DNA, 25 bp, Homo sapien
gaacccaccactgattgtttgataa

SEQ ID NO: 2207315 - DNA, 25 bp, Homo sapien
aaaaaagctaaacatccatcagagg

SEQ ID NO: 2207316 - DNA, 25 bp, Homo sapien
ggtttcaggcgggcttgcggcccca

SEQ ID NO: 2207317 - DNA, 25 bp, Homo sapien
gtttcaggcgggcttgcggccccaa

SEQ ID NO: 2207318 - DNA, 25 bp, Homo sapien
gccggtttcaggcgggcttgcggcc

SEQ ID NO: 2207319 - DNA, 25 bp, Homo sapien
ggccggtttcaggcgggcttgcggc

SEQ ID NO: 2207320 - DNA, 25 bp, Homo sapien
cagctgcaatccacgacgcgcagat

SEQ ID NO: 2207321 - DNA, 25 bp, Homo sapien
tgcagcgccgggtgcgtgttggacc

SEQ ID NO: 2207322 - DNA, 25 bp, Homo sapien
tgttggaccgataggtgacgatgct

SEQ ID NO: 2207323 - DNA, 25 bp, Homo sapien
gtgacgatgctttctgcgccctgga

SEQ ID NO: 2207324 - DNA, 25 bp, Homo sapien
tactcgaaggtgtccagcaggacct

SEQ ID NO: 2207325 - DNA, 25 bp, Homo sapien
cggtgtgatgcacgaggcccgggta

SEQ ID NO: 2207326 - DNA, 25 bp, Homo sapien
ttggcggcgccctcgcagctgaggc

SEQ ID NO: 2207327 - DNA, 25 bp, Homo sapien
cagcccccggtgtgatgcacgaggc

SEQ ID NO: 2207328 - DNA, 25 bp, Homo sapien
ctccgccgctgagcagtggcgcggt

SEQ ID NO: 2207329 - DNA, 25 bp, Homo sapien
tgaccgcgatggccgcgcaggcggc

SEQ ID NO: 2207330 - DNA, 25 bp, Homo sapien
gagcagtggcgcggttcctcactct

SEQ ID NO: 2207331 - DNA, 25 bp, Homo sapien
gcgtggctcccgaccccgacttgga

SEQ ID NO: 2207332 - DNA, 25 bp, Homo sapien
ctccggagcgcgtgcccagcccgct

SEQ ID NO: 2207333 - DNA, 25 bp, Homo sapien
gagcgcgtgcccagcccgctacccc

SEQ ID NO: 2207334 - DNA, 25 bp, Homo sapien
cggagcgcgtgcccagcccgctacc

SEQ ID NO: 2207335 - DNA, 25 bp, Homo sapien
tccggagcgcgtgcccagcccgcta

SEQ ID NO: 2207336 - DNA, 25 bp, Homo sapien
gctgccctctgcagttgggtggagt

SEQ ID NO: 2207337 - DNA, 25 bp, Homo sapien
tcaggagacactggacttaggctgc

SEQ ID NO: 2207338 - DNA, 25 bp, Homo sapien
gagacactggacttaggctgccctc

SEQ ID NO: 2207339 - DNA, 25 bp, Homo sapien
aggagacactggacttaggctgccc

SEQ ID NO: 2207340 - DNA, 25 bp, Homo sapien
tcccggcagatcagccagctgctgc

SEQ ID NO: 2207341 - DNA, 25 bp, Homo sapien
tggtgcagctactcccggcagatca

SEQ ID NO: 2207342 - DNA, 25 bp, Homo sapien
tctgatcctgtcattgctgctggct

SEQ ID NO: 2207343 - DNA, 25 bp, Homo sapien
ggtccccctgttactgctgtgggta

SEQ ID NO: 2207344 - DNA, 25 bp, Homo sapien
ctgtggcgggtctgtttgggtccct

SEQ ID NO: 2207345 - DNA, 25 bp, Homo sapien
tccaatgtccactcgtgggtgtgaa

SEQ ID NO: 2207346 - DNA, 25 bp, Homo sapien
caatgtccactcgtgggtgtgaagt

SEQ ID NO: 2207347 - DNA, 25 bp, Homo sapien
gtccactcgtgggtgtgaagtcaat

SEQ ID NO: 2207348 - DNA, 25 bp, Homo sapien
cctccaatgtccactcgtgggtgtg

SEQ ID NO: 2207349 - DNA, 25 bp, Homo sapien
tatcaaaggataccatgcaggcatg

SEQ ID NO: 2207350 - DNA, 25 bp, Homo sapien
tacactgcatgggtgcaaatcctgg

SEQ ID NO: 2207351 - DNA, 25 bp, Homo sapien
ttgtctgtaatagcctaagcctggg

SEQ ID NO: 2207352 - DNA, 25 bp, Homo sapien
tacagcaatggcatagcaagcacgc

SEQ ID NO: 2207353 - DNA, 25 bp, Homo sapien
tctgggttggatgactgagcaatgc

SEQ ID NO: 2207354 - DNA, 25 bp, Homo sapien
tacgattgtccgtggtactggtctc

SEQ ID NO: 2207355 - DNA, 25 bp, Homo sapien
tgagcaatgctagagtactcagttg

SEQ ID NO: 2207356 - DNA, 25 bp, Homo sapien
tactggtctccggactcatctgact

SEQ ID NO: 2207357 - DNA, 25 bp, Homo sapien
ctgagagatagatctgcgtttgagg

SEQ ID NO: 2207358 - DNA, 25 bp, Homo sapien
tgagagatagatctgcgtttgaggt

SEQ ID NO: 2207359 - DNA, 25 bp, Homo sapien
gagagatagatctgcgtttgaggtg

SEQ ID NO: 2207360 - DNA, 25 bp, Homo sapien
gagacaacgtggctccgcctgagtt

SEQ ID NO: 2207361 - DNA, 25 bp, Homo sapien
gcgtgcggctcgacatgtctctttc

SEQ ID NO: 2207362 - DNA, 25 bp, Homo sapien
gctctcttccattgcattaggtcca

SEQ ID NO: 2207363 - DNA, 25 bp, Homo sapien
tctgtcttgcagatagctctcttcc

SEQ ID NO: 2207364 - DNA, 25 bp, Homo sapien
ctgaaactcacaggtgcgggagccc

SEQ ID NO: 2207365 - DNA, 25 bp, Homo sapien
taatcaatggaagacgtcctagcac

SEQ ID NO: 2207366 - DNA, 25 bp, Homo sapien
taaagagggcagacagtgcgcagat

SEQ ID NO: 2207367 - DNA, 25 bp, Homo sapien
caaactggttgtgtgttgccgtcct

SEQ ID NO: 2207368 - DNA, 25 bp, Homo sapien
agcaccaggaacgtacagtacacag

SEQ ID NO: 2207369 - DNA, 25 bp, Homo sapien
acaagcctgttcacaatagcaccag

SEQ ID NO: 2207370 - DNA, 25 bp, Homo sapien
atcatctgcaggtgatttgtgacaa

SEQ ID NO: 2207371 - DNA, 25 bp, Homo sapien
caggaatcatctgcaggtgatttgt

SEQ ID NO: 2207372 - DNA, 25 bp, Homo sapien
gcagaacagtaaaagcgagagatac

SEQ ID NO: 2207373 - DNA, 25 bp, Homo sapien
cagaacagtaaaagcgagagataca

SEQ ID NO: 2207374 - DNA, 25 bp, Homo sapien
ggcagaacagtaaaagcgagagata

SEQ ID NO: 2207375 - DNA, 25 bp, Homo sapien
tcactgctcctgttcgcggggacag

SEQ ID NO: 2207376 - DNA, 25 bp, Homo sapien
cagctgcaatccacgacgcgcagat

SEQ ID NO: 2207377 - DNA, 25 bp, Homo sapien
tgcagcgccgggtgcgtgttggacc

SEQ ID NO: 2207378 - DNA, 25 bp, Homo sapien
gtgacgatgctttctgcgccctgga

SEQ ID NO: 2207379 - DNA, 25 bp, Homo sapien
tgttggaccgataggtgacgatgct

SEQ ID NO: 2207380 - DNA, 25 bp, Homo sapien
tactcgaaggtgtccagcaggacct

SEQ ID NO: 2207381 - DNA, 25 bp, Homo sapien
cggtgtgatgcacgaggcccgggta

SEQ ID NO: 2207382 - DNA, 25 bp, Homo sapien
ttggcggcgccctcgcagctgaggc

SEQ ID NO: 2207383 - DNA, 25 bp, Homo sapien
cagcccccggtgtgatgcacgaggc

SEQ ID NO: 2207384 - DNA, 25 bp, Homo sapien
tgaccgcgatggccgcgcaggcggc

SEQ ID NO: 2207385 - DNA, 25 bp, Homo sapien
gcgtggctcccgaccccgacttgga

SEQ ID NO: 2207386 - DNA, 25 bp, Homo sapien
cttggccgccgcgtggctcccgacc

SEQ ID NO: 2207387 - DNA, 25 bp, Homo sapien
ccgctgagcagtggcgcggttcctc

SEQ ID NO: 2207388 - DNA, 25 bp, Homo sapien
cagagtgaggaaccgcgccactgct

SEQ ID NO: 2207389 - DNA, 25 bp, Homo sapien
caagaggtggctgggtaggtggcga

SEQ ID NO: 2207390 - DNA, 25 bp, Homo sapien
aagggaagggtctctttacatcgca

SEQ ID NO: 2207391 - DNA, 25 bp, Homo sapien
gggccaatcctgctggcgcaggcaa

SEQ ID NO: 2207392 - DNA, 25 bp, Homo sapien
ctgggagacgttcaggaagctgcgg

SEQ ID NO: 2207393 - DNA, 25 bp, Homo sapien
cgctgggagacgttcaggaagctgc

SEQ ID NO: 2207394 - DNA, 25 bp, Homo sapien
gctgggagacgttcaggaagctgcg

SEQ ID NO: 2207395 - DNA, 25 bp, Homo sapien
tgggagacgttcaggaagctgcggg

SEQ ID NO: 2207396 - DNA, 25 bp, Homo sapien
tgctccagggcgcagaaagcatcgt

SEQ ID NO: 2207397 - DNA, 25 bp, Homo sapien
ggaagaagcagcaccgccacttcct

SEQ ID NO: 2207398 - DNA, 25 bp, Homo sapien
gtccgctttgcggtctgggcccctg

SEQ ID NO: 2207399 - DNA, 25 bp, Homo sapien
gcagatctgcgcgtcgtggattgca

SEQ ID NO: 2207400 - DNA, 25 bp, Homo sapien
atgcttgttttctcaatttcaggcc

SEQ ID NO: 2207401 - DNA, 25 bp, Homo sapien
tctcaatttcaggcccccaaaactc

SEQ ID NO: 2207402 - DNA, 25 bp, Homo sapien
ctgatccatgaatgcttgttttctc

SEQ ID NO: 2207403 - DNA, 25 bp, Homo sapien
ttgttttctcaatttcaggccccca

SEQ ID NO: 2207404 - DNA, 25 bp, Homo sapien
tcctgagacttgactctgagccact

SEQ ID NO: 2207405 - DNA, 25 bp, Homo sapien
gggaatggcaccacagtttctgtga

SEQ ID NO: 2207406 - DNA, 25 bp, Homo sapien
tgagccactatcacagtctgcatgc

SEQ ID NO: 2207407 - DNA, 25 bp, Homo sapien
tcttcccaatgtgaggtgtgcggtt

SEQ ID NO: 2207408 - DNA, 25 bp, Homo sapien
ttaaatgaagtaccctggacttctc

SEQ ID NO: 2207409 - DNA, 25 bp, Homo sapien
aaatgaagtaccctggacttctctt

SEQ ID NO: 2207410 - DNA, 25 bp, Homo sapien
taaatgaagtaccctggacttctct

SEQ ID NO: 2207411 - DNA, 25 bp, Homo sapien
tcctaggtttaatctgcaggtcctg

SEQ ID NO: 2207412 - DNA, 25 bp, Homo sapien
gctttcatctctagcggtgtcacca

SEQ ID NO: 2207413 - DNA, 25 bp, Homo sapien
gcaggtcctgccttcccttaagaga

SEQ ID NO: 2207414 - DNA, 25 bp, Homo sapien
taagagatcctcactgtcctctgag

SEQ ID NO: 2207415 - DNA, 25 bp, Homo sapien
tgggggaagcgttggatatctctct

SEQ ID NO: 2207416 - DNA, 25 bp, Homo sapien
actgggggaagcgttggatatctct

SEQ ID NO: 2207417 - DNA, 25 bp, Homo sapien
ggaagcgttggatatctctcttcca

SEQ ID NO: 2207418 - DNA, 25 bp, Homo sapien
tctactgggggaagcgttggatatc

SEQ ID NO: 2207419 - DNA, 25 bp, Homo sapien
tgagacatcacagatacaccacctg

SEQ ID NO: 2207420 - DNA, 25 bp, Homo sapien
gtaaagtttgttcctgagacatcac

SEQ ID NO: 2207421 - DNA, 25 bp, Homo sapien
cagatacaccacctgcatagaaggg

SEQ ID NO: 2207422 - DNA, 25 bp, Homo sapien
tgtaaagtttgttcctgagacatca

SEQ ID NO: 2207423 - DNA, 25 bp, Homo sapien
tgcgaatgcagcatcggcgcttagc

SEQ ID NO: 2207424 - DNA, 25 bp, Homo sapien
gaggagatccgctcacacacaagag

SEQ ID NO: 2207425 - DNA, 25 bp, Homo sapien
cagctaaggttcgtgtcgctacccc

SEQ ID NO: 2207426 - DNA, 25 bp, Homo sapien
gaggagagtgttgagccgccatatc

SEQ ID NO: 2207427 - DNA, 25 bp, Homo sapien
gccagcagctcgtgatgatgccaaa

SEQ ID NO: 2207428 - DNA, 25 bp, Homo sapien
caaagatatgggcactgtggtcctg

SEQ ID NO: 2207429 - DNA, 25 bp, Homo sapien
tgatggaccaataagactgccaatt

SEQ ID NO: 2207430 - DNA, 25 bp, Homo sapien
ggataacttgccaaacttcaacaga

SEQ ID NO: 2207431 - DNA, 25 bp, Homo sapien
tggacgcacgtttgatgttcagata

SEQ ID NO: 2207432 - DNA, 25 bp, Homo sapien
tgttcagatagtgattattgagcac

SEQ ID NO: 2207433 - DNA, 25 bp, Homo sapien
tctgccattctggacgcacgtttga

SEQ ID NO: 2207434 - DNA, 25 bp, Homo sapien
gtgattattgagcacaaatccatca

SEQ ID NO: 2207435 - DNA, 25 bp, Homo sapien
atatttatgcacaagataacacatg

SEQ ID NO: 2207436 - DNA, 25 bp, Homo sapien
gtcacaattcccaatgaaggcaaaa

SEQ ID NO: 2207437 - DNA, 25 bp, Homo sapien
tccacttattaatgatgcaatagtt

SEQ ID NO: 2207438 - DNA, 25 bp, Homo sapien
gcctggccataattgacttagattt

SEQ ID NO: 2207439 - DNA, 25 bp, Homo sapien
aaagaagaggatgctggcagctcag

SEQ ID NO: 2207440 - DNA, 25 bp, Homo sapien
tgtatgagttaccatgacaacgaca

SEQ ID NO: 2207441 - DNA, 25 bp, Homo sapien
aagctgcctttggtgtgtcaagtct

SEQ ID NO: 2207442 - DNA, 25 bp, Homo sapien
gacaacgacacgatcaggatgcatc

SEQ ID NO: 2207443 - DNA, 25 bp, Homo sapien
aatccacatctaaagctacaccctg

SEQ ID NO: 2207444 - DNA, 25 bp, Homo sapien
ttgaatccacatctaaagctacacc

SEQ ID NO: 2207445 - DNA, 25 bp, Homo sapien
tccacatctaaagctacaccctggg

SEQ ID NO: 2207446 - DNA, 25 bp, Homo sapien
gaatccacatctaaagctacaccct

SEQ ID NO: 2207447 - DNA, 25 bp, Homo sapien
catactcagaagtgctgccatgctg

SEQ ID NO: 2207448 - DNA, 25 bp, Homo sapien
ctcagaagtgctgccatgctggtca

SEQ ID NO: 2207449 - DNA, 25 bp, Homo sapien
tactcagaagtgctgccatgctggt

SEQ ID NO: 2207450 - DNA, 25 bp, Homo sapien
tcagaagtgctgccatgctggtcat

SEQ ID NO: 2207451 - DNA, 25 bp, Homo sapien
atgtattctcaaacagtgcagatac

SEQ ID NO: 2207452 - DNA, 25 bp, Homo sapien
ggtgtcacattattaaacatgcttg

SEQ ID NO: 2207453 - DNA, 25 bp, Homo sapien
gctcaataatgtcccctaaaggtgt

SEQ ID NO: 2207454 - DNA, 25 bp, Homo sapien
tccaggttcccagattgtttttgtg

SEQ ID NO: 2207455 - DNA, 25 bp, Homo sapien
acatgagccagggtgtgacttctca

SEQ ID NO: 2207456 - DNA, 25 bp, Homo sapien
gaatggagctgccaggtcttctcat

SEQ ID NO: 2207457 - DNA, 25 bp, Homo sapien
ctgggagaatggagctgccaggtct

SEQ ID NO: 2207458 - DNA, 25 bp, Homo sapien
ggagaatggagctgccaggtcttct

SEQ ID NO: 2207459 - DNA, 25 bp, Homo sapien
gagaatggagctgccaggtcttctc

SEQ ID NO: 2207460 - DNA, 25 bp, Homo sapien
ggccatgtgctaatctctgcacggt

SEQ ID NO: 2207461 - DNA, 25 bp, Homo sapien
tcatctgtacaggggccatgtgcta

SEQ ID NO: 2207462 - DNA, 25 bp, Homo sapien
tgtgctaatctctgcacggttccaa

SEQ ID NO: 2207463 - DNA, 25 bp, Homo sapien
ttatgtgtcatctgtacaggggcca

SEQ ID NO: 2207464 - DNA, 25 bp, Homo sapien
gaagatgatgtattctctagggaac

SEQ ID NO: 2207465 - DNA, 25 bp, Homo sapien
aatcaacatggaggtaagttccctg

SEQ ID NO: 2207466 - DNA, 25 bp, Homo sapien
gatgctagagaaactggcaaactgg

SEQ ID NO: 2207467 - DNA, 25 bp, Homo sapien
ttttgctgcatacatcctagaccag

SEQ ID NO: 2207468 - DNA, 25 bp, Homo sapien
ggtatctctgaacctgacggtgcaa

SEQ ID NO: 2207469 - DNA, 25 bp, Homo sapien
ttcccaggctgacatagagaccgac

SEQ ID NO: 2207470 - DNA, 25 bp, Homo sapien
catcagcagatggttcccaggctca

SEQ ID NO: 2207471 - DNA, 25 bp, Homo sapien
caaccactggtgagttagctgctaa

SEQ ID NO: 2207472 - DNA, 25 bp, Homo sapien
aagagaccctcgtgactggactgca

SEQ ID NO: 2207473 - DNA, 25 bp, Homo sapien
caagaacccgcatgggaattggaga

SEQ ID NO: 2207474 - DNA, 25 bp, Homo sapien
catcactttggattgggcagttagg

SEQ ID NO: 2207475 - DNA, 25 bp, Homo sapien
tcctggtggtacagccagtgccaac

SEQ ID NO: 2207476 - DNA, 25 bp, Homo sapien
tatttgctgttccttgtctactgct

SEQ ID NO: 2207477 - DNA, 25 bp, Homo sapien
caatcgcagtagtctttcccctgtg

SEQ ID NO: 2207478 - DNA, 25 bp, Homo sapien
taaacacagctatctagagagccac

SEQ ID NO: 2207479 - DNA, 25 bp, Homo sapien
catgagctagaagtattaggaaact

SEQ ID NO: 2207480 - DNA, 25 bp, Homo sapien
atcttcccacttgcacaggaccggg

SEQ ID NO: 2207481 - DNA, 25 bp, Homo sapien
aggaccggggctgcctcctcgagac

SEQ ID NO: 2207482 - DNA, 25 bp, Homo sapien
gctgcctcctcgagacaggatctta

SEQ ID NO: 2207483 - DNA, 25 bp, Homo sapien
ggatcttatgggcagtgaaggaggc

SEQ ID NO: 2207484 - DNA, 25 bp, Homo sapien
gcacaggctttgactgtgactgtga

SEQ ID NO: 2207485 - DNA, 25 bp, Homo sapien
ctgagttctatgctggaagcaaggc

SEQ ID NO: 2207486 - DNA, 25 bp, Homo sapien
tacaaagtaagacaaagctccatgc

SEQ ID NO: 2207487 - DNA, 25 bp, Homo sapien
acaaaattaggcctaggccatgact

SEQ ID NO: 2207488 - DNA, 25 bp, Homo sapien
tggtgcaaaacacccaggctcggtg

SEQ ID NO: 2207489 - DNA, 25 bp, Homo sapien
gcatctccatgatgcctcaggtctg

SEQ ID NO: 2207490 - DNA, 25 bp, Homo sapien
tccaccttttggtgcaaaacaccca

SEQ ID NO: 2207491 - DNA, 25 bp, Homo sapien
caggtctgggctgtagttcctgcat

SEQ ID NO: 2207492 - DNA, 25 bp, Homo sapien
cctccacattcaggtggacggactc

SEQ ID NO: 2207493 - DNA, 25 bp, Homo sapien
aggtggacggactccaccttgcagc

SEQ ID NO: 2207494 - DNA, 25 bp, Homo sapien
cagccttggaaaagaacaatccatc

SEQ ID NO: 2207495 - DNA, 25 bp, Homo sapien
caccttgcagccttggaaaagaaca

SEQ ID NO: 2207496 - DNA, 25 bp, Homo sapien
ccccaaggtaggcacaggtcttcca

SEQ ID NO: 2207497 - DNA, 25 bp, Homo sapien
gtccccaaggtaggcacaggtcttc

SEQ ID NO: 2207498 - DNA, 25 bp, Homo sapien
aagtccccaaggtaggcacaggtct

SEQ ID NO: 2207499 - DNA, 25 bp, Homo sapien
cccaaggtaggcacaggtcttccat

SEQ ID NO: 2207500 - DNA, 25 bp, Homo sapien
acatccttccttgataaaaatgctg

SEQ ID NO: 2207501 - DNA, 25 bp, Homo sapien
catgtttgggtaattcacagatcca

SEQ ID NO: 2207502 - DNA, 25 bp, Homo sapien
tttgaaaattcatactgccaatctg

SEQ ID NO: 2207503 - DNA, 25 bp, Homo sapien
gatccagtgcaaggtaaagattccc

SEQ ID NO: 2207504 - DNA, 25 bp, Homo sapien
tcattaagactgtgtgagtcagagc

SEQ ID NO: 2207505 - DNA, 25 bp, Homo sapien
ctttgattggccagagttgctatgt

SEQ ID NO: 2207506 - DNA, 25 bp, Homo sapien
tcattttggacttatgggctgctct

SEQ ID NO: 2207507 - DNA, 25 bp, Homo sapien
ggccagagttgctatgtcttgtaac

SEQ ID NO: 2207508 - DNA, 25 bp, Homo sapien
ttcatcatcaatgattgtggaatag

SEQ ID NO: 2207509 - DNA, 25 bp, Homo sapien
cttcatcatcaatgattgtggaata

SEQ ID NO: 2207510 - DNA, 25 bp, Homo sapien
catcatcatcactgtcattcccgtg

SEQ ID NO: 2207511 - DNA, 25 bp, Homo sapien
atcatcatcactgtcattcccgtgt

SEQ ID NO: 2207512 - DNA, 25 bp, Homo sapien
tcatcatcactgtcattcccgtgtt

SEQ ID NO: 2207513 - DNA, 25 bp, Homo sapien
tcatcatcatcactgtcattcccgt

SEQ ID NO: 2207514 - DNA, 25 bp, Homo sapien
gactgatcagactggtcagaaagaa

SEQ ID NO: 2207515 - DNA, 25 bp, Homo sapien
actgatcagactggtcagaaagaag

SEQ ID NO: 2207516 - DNA, 25 bp, Homo sapien
gacagactgatcagactggtcagaa

SEQ ID NO: 2207517 - DNA, 25 bp, Homo sapien
cagactgatcagactggtcagaaag

SEQ ID NO: 2207518 - DNA, 25 bp, Homo sapien
cctgttcttcgagcgagtcttccat

SEQ ID NO: 2207519 - DNA, 25 bp, Homo sapien
caccatcgctgtgggcgtcctgttc

SEQ ID NO: 2207520 - DNA, 25 bp, Homo sapien
gcgtcctgttcttcgagcgagtctt

SEQ ID NO: 2207521 - DNA, 25 bp, Homo sapien
ctcaccatcgctgtgggcgtcctgt

SEQ ID NO: 2207522 - DNA, 25 bp, Homo sapien
cagggcgcggacgagatctaccagc

SEQ ID NO: 2207523 - DNA, 25 bp, Homo sapien
agatctaccagcacatcagcgaggg

SEQ ID NO: 2207524 - DNA, 25 bp, Homo sapien
gacgagatctaccagcacatcagcg

SEQ ID NO: 2207525 - DNA, 25 bp, Homo sapien
gcgcggacgagatctaccagcacat

SEQ ID NO: 2207526 - DNA, 25 bp, Homo sapien
caagacaacgaatattacatactgt

SEQ ID NO: 2207527 - DNA, 25 bp, Homo sapien
atttcagcaagtagaacacaaaatg

SEQ ID NO: 2207528 - DNA, 25 bp, Homo sapien
ttacccaggttggacgacattataa

SEQ ID NO: 2207529 - DNA, 25 bp, Homo sapien
tctcaagacaacgaatattacatac

SEQ ID NO: 2207530 - DNA, 25 bp, Homo sapien
cacatcaagtacactgtgtccccag

SEQ ID NO: 2207531 - DNA, 25 bp, Homo sapien
aaagtacttggtaatttccacatca

SEQ ID NO: 2207532 - DNA, 25 bp, Homo sapien
catcaagtacactgtgtccccagtc

SEQ ID NO: 2207533 - DNA, 25 bp, Homo sapien
tcaagtacactgtgtccccagtctg

SEQ ID NO: 2207534 - DNA, 25 bp, Homo sapien
catatacttgatgtctctcagtgac

SEQ ID NO: 2207535 - DNA, 25 bp, Homo sapien
aggtgttgccatgccctcatctaga

SEQ ID NO: 2207536 - DNA, 25 bp, Homo sapien
ttcggatagtcatgccctcaggtgt

SEQ ID NO: 2207537 - DNA, 25 bp, Homo sapien
gacattaaaatgtcacatataccca

SEQ ID NO: 2207538 - DNA, 25 bp, Homo sapien
gccctcgttgcaagcatcttcctgg

SEQ ID NO: 2207539 - DNA, 25 bp, Homo sapien
tatgatgaagggaggagcaatgacc

SEQ ID NO: 2207540 - DNA, 25 bp, Homo sapien
ccttttcaataacaagccctcgttg

SEQ ID NO: 2207541 - DNA, 25 bp, Homo sapien
tcctggcatctgagttactatgatg

SEQ ID NO: 2207542 - DNA, 25 bp, Homo sapien
caaatttatagtgtgggacgtctca

SEQ ID NO: 2207543 - DNA, 25 bp, Homo sapien
gagcagagcagtcaagcgaagcgtt

SEQ ID NO: 2207544 - DNA, 25 bp, Homo sapien
cacattgcagtgaagacgagtttac

SEQ ID NO: 2207545 - DNA, 25 bp, Homo sapien
aaattctggattcatgtcaggcccg

SEQ ID NO: 2207546 - DNA, 25 bp, Homo sapien
gccattagcccctgttgccatggga

SEQ ID NO: 2207547 - DNA, 25 bp, Homo sapien
ggccattagcccctgttgccatggg

SEQ ID NO: 2207548 - DNA, 25 bp, Homo sapien
ccattagcccctgttgccatgggaa

SEQ ID NO: 2207549 - DNA, 25 bp, Homo sapien
ctgagtgtctgatgcattcattggg

SEQ ID NO: 2207550 - DNA, 25 bp, Homo sapien
tcggagggcagtacatcctaaagtg

SEQ ID NO: 2207551 - DNA, 25 bp, Homo sapien
tgtttagctttcagcctcggagggc

SEQ ID NO: 2207552 - DNA, 25 bp, Homo sapien
tactgggcgtaacgtgggctctatg

SEQ ID NO: 2207553 - DNA, 25 bp, Homo sapien
taatccgcagttccttaagtggtac

SEQ ID NO: 2207554 - DNA, 25 bp, Homo sapien
atagtccttgttctgccatccacca

SEQ ID NO: 2207555 - DNA, 25 bp, Homo sapien
gatagtccttgttctgccatccacc

SEQ ID NO: 2207556 - DNA, 25 bp, Homo sapien
tcttcccaggtgctctcagcgctgc

SEQ ID NO: 2207557 - DNA, 25 bp, Homo sapien
tctcttcccaggtgctctcagcgct

SEQ ID NO: 2207558 - DNA, 25 bp, Homo sapien
ttcccaggtgctctcagcgctgccc

SEQ ID NO: 2207559 - DNA, 25 bp, Homo sapien
cctctcttcccaggtgctctcagcg

SEQ ID NO: 2207560 - DNA, 25 bp, Homo sapien
ctggagggctgcgaacatcactgcg

SEQ ID NO: 2207561 - DNA, 25 bp, Homo sapien
gccgccgttccgtcacaggcaaggg

SEQ ID NO: 2207562 - DNA, 25 bp, Homo sapien
gctgtgtacgcgtgcaccgtgcgtt

SEQ ID NO: 2207563 - DNA, 25 bp, Homo sapien
aagggctgcgaagctccaaacaggc

SEQ ID NO: 2207564 - DNA, 25 bp, Homo sapien
acctccgactgacaggaagaagccg

SEQ ID NO: 2207565 - DNA, 25 bp, Homo sapien
aatctgagaggaggcgctctggctt

SEQ ID NO: 2207566 - DNA, 25 bp, Homo sapien
ctctggcttggccagtaagatcgct

SEQ ID NO: 2207567 - DNA, 25 bp, Homo sapien
tgctgtgtcgagaaggaatctgaga

SEQ ID NO: 2207568 - DNA, 25 bp, Homo sapien
ggtgctggggccatctaggacgctg

SEQ ID NO: 2207569 - DNA, 25 bp, Homo sapien
ctggcagcatttctggtccggatgg

SEQ ID NO: 2207570 - DNA, 25 bp, Homo sapien
gggccatctaggacgctggtgctgg

SEQ ID NO: 2207571 - DNA, 25 bp, Homo sapien
tggcagcatttctggtccggatggt

SEQ ID NO: 2207572 - DNA, 25 bp, Homo sapien
aatgtactgatggtatctggcccag

SEQ ID NO: 2207573 - DNA, 25 bp, Homo sapien
ggcacggttgctattcagaatgtac

SEQ ID NO: 2207574 - DNA, 25 bp, Homo sapien
gcttcatccccgatattcatctggg

SEQ ID NO: 2207575 - DNA, 25 bp, Homo sapien
ggtcaggagctcgacttgtatgtca

SEQ ID NO: 2207576 - DNA, 25 bp, Homo sapien
atgagccttccattcccgggggtct

SEQ ID NO: 2207577 - DNA, 25 bp, Homo sapien
tgggttgctgttggggatcttcttg

SEQ ID NO: 2207578 - DNA, 25 bp, Homo sapien
gaattcatactcaggtgggttgctg

SEQ ID NO: 2207579 - DNA, 25 bp, Homo sapien
ttgctggtctcatggcgggctcgca

SEQ ID NO: 2207580 - DNA, 25 bp, Homo sapien
tcttgctggtctcatggcgggctcg

SEQ ID NO: 2207581 - DNA, 25 bp, Homo sapien
aaactttgctgctagccaagcagac

SEQ ID NO: 2207582 - DNA, 25 bp, Homo sapien
aggaaagtaaactttgctgctagcc

SEQ ID NO: 2207583 - DNA, 25 bp, Homo sapien
ggcatgagaggaaagtaaactttgc

SEQ ID NO: 2207584 - DNA, 25 bp, Homo sapien
aagtaaactttgctgctagccaagc

SEQ ID NO: 2207585 - DNA, 25 bp, Homo sapien
cctggaagaggactgtcctgcccct

SEQ ID NO: 2207586 - DNA, 25 bp, Homo sapien
ctgttgctgaacggatgggttccag

SEQ ID NO: 2207587 - DNA, 25 bp, Homo sapien
tcctcaacccgatgccgcagctcag

SEQ ID NO: 2207588 - DNA, 25 bp, Homo sapien
tccccggaagccatgcggaggtgca

SEQ ID NO: 2207589 - DNA, 25 bp, Homo sapien
gtttgtgcccctcatcacgatgacc

SEQ ID NO: 2207590 - DNA, 25 bp, Homo sapien
ccacaagtttgtgcccctcatcacg

SEQ ID NO: 2207591 - DNA, 25 bp, Homo sapien
aagtttgtgcccctcatcacgatga

SEQ ID NO: 2207592 - DNA, 25 bp, Homo sapien
caagtttgtgcccctcatcacgatg

SEQ ID NO: 2207593 - DNA, 25 bp, Homo sapien
acagaggagccattcttcaggcccc

SEQ ID NO: 2207594 - DNA, 25 bp, Homo sapien
tgttgtaaacagaggagccattctt

SEQ ID NO: 2207595 - DNA, 25 bp, Homo sapien
aaacagaggagccattcttcaggcc

SEQ ID NO: 2207596 - DNA, 25 bp, Homo sapien
tgtgttgtaaacagaggagccattc

SEQ ID NO: 2207597 - DNA, 25 bp, Homo sapien
cccggcggagccctggagaggccca

SEQ ID NO: 2207598 - DNA, 25 bp, Homo sapien
ccggcggagccctggagaggcccac

SEQ ID NO: 2207599 - DNA, 25 bp, Homo sapien
cctgaccctttgttggtgtgcatgc

SEQ ID NO: 2207600 - DNA, 25 bp, Homo sapien
cgcctgtgcgttggcaagtcctcca

SEQ ID NO: 2207601 - DNA, 25 bp, Homo sapien
agtcagccaggagaagcgtgctcca

SEQ ID NO: 2207602 - DNA, 25 bp, Homo sapien
tcagccaggagaagcgtgctccagg

SEQ ID NO: 2207603 - DNA, 25 bp, Homo sapien
aggagagttgggctgaggcccttac

SEQ ID NO: 2207604 - DNA, 25 bp, Homo sapien
aaatcaggagagttgggctgaggcc

SEQ ID NO: 2207605 - DNA, 25 bp, Homo sapien
ctgaaaatcaggagagttgggctga

SEQ ID NO: 2207606 - DNA, 25 bp, Homo sapien
atcaggagagttgggctgaggccct

SEQ ID NO: 2207607 - DNA, 25 bp, Homo sapien
gctcagaggcgtctcctctctgagc

SEQ ID NO: 2207608 - DNA, 25 bp, Homo sapien
catgctcagaggcgtctcctctctg

SEQ ID NO: 2207609 - DNA, 25 bp, Homo sapien
tgggagccatgctcagaggcgtctc

SEQ ID NO: 2207610 - DNA, 25 bp, Homo sapien
ctgggagccatgctcagaggcgtct

SEQ ID NO: 2207611 - DNA, 25 bp, Homo sapien
gtgatggcggccgttttcacacccc

SEQ ID NO: 2207612 - DNA, 25 bp, Homo sapien
tgctcgagtgagagccgcagttagc

SEQ ID NO: 2207613 - DNA, 25 bp, Homo sapien
gtgtcagtctacagggcaggtgctc

SEQ ID NO: 2207614 - DNA, 25 bp, Homo sapien
cgcagttagctcaggtgatacttac

SEQ ID NO: 2207615 - DNA, 25 bp, Homo sapien
atcgccgaggaatgggtgcctcacc

SEQ ID NO: 2207616 - DNA, 25 bp, Homo sapien
tcagatcgccgaggaatgggtgcct

SEQ ID NO: 2207617 - DNA, 25 bp, Homo sapien
cctcagatcgccgaggaatgggtgc

SEQ ID NO: 2207618 - DNA, 25 bp, Homo sapien
ttcctcagatcgccgaggaatgggt

SEQ ID NO: 2207619 - DNA, 25 bp, Homo sapien
caccaggctattgcaatcccaggac

SEQ ID NO: 2207620 - DNA, 25 bp, Homo sapien
tgatggaatccctgactctgactgt

SEQ ID NO: 2207621 - DNA, 25 bp, Homo sapien
aaaggaatccatgagcagagacggt

SEQ ID NO: 2207622 - DNA, 25 bp, Homo sapien
catccgccctggtgagatcctttgc

SEQ ID NO: 2207623 - DNA, 25 bp, Homo sapien
ctctttggccagaggatagcaccga

SEQ ID NO: 2207624 - DNA, 25 bp, Homo sapien
ctttggccagaggatagcaccgagg

SEQ ID NO: 2207625 - DNA, 25 bp, Homo sapien
gaggagctggagaggccaatcatac

SEQ ID NO: 2207626 - DNA, 25 bp, Homo sapien
gggaggagctggagaggccaatcat

SEQ ID NO: 2207627 - DNA, 25 bp, Homo sapien
gcagtcccatcttgcgtagtgcctc

SEQ ID NO: 2207628 - DNA, 25 bp, Homo sapien
ccagggcgcagtcccatcttgcgta

SEQ ID NO: 2207629 - DNA, 25 bp, Homo sapien
ggcgcagtcccatcttgcgtagtgc

SEQ ID NO: 2207630 - DNA, 25 bp, Homo sapien
agggcgcagtcccatcttgcgtagt

SEQ ID NO: 2207631 - DNA, 25 bp, Homo sapien
gaagatgacgcccagaatcaccaag

SEQ ID NO: 2207632 - DNA, 25 bp, Homo sapien
cattcatgaagatgacgcccagaat

SEQ ID NO: 2207633 - DNA, 25 bp, Homo sapien
agaatcaccaagaggagactcagcc

SEQ ID NO: 2207634 - DNA, 25 bp, Homo sapien
atcaccaagaggagactcagcctgg

SEQ ID NO: 2207635 - DNA, 25 bp, Homo sapien
ttccaaggaggcgagctgaggagtc

SEQ ID NO: 2207636 - DNA, 25 bp, Homo sapien
gttcttccttgtcgatctccttcag

SEQ ID NO: 2207637 - DNA, 25 bp, Homo sapien
ctgaggagtcccgtgtgcagacaag

SEQ ID NO: 2207638 - DNA, 25 bp, Homo sapien
gacaagaatatacaggtgttcttcc

SEQ ID NO: 2207639 - DNA, 25 bp, Homo sapien
tgtgagatccaaaccccatgctggg

SEQ ID NO: 2207640 - DNA, 25 bp, Homo sapien
caggaagcacgagtcaaactgccag

SEQ ID NO: 2207641 - DNA, 25 bp, Homo sapien
gattccgggttagaactgctcctca

SEQ ID NO: 2207642 - DNA, 25 bp, Homo sapien
aaggaatccaaactcgtgagcgagg

SEQ ID NO: 2207643 - DNA, 25 bp, Homo sapien
tccagggtgtacgttgctcgttcaa

SEQ ID NO: 2207644 - DNA, 25 bp, Homo sapien
tctctgatgacatccttcagcatgt

SEQ ID NO: 2207645 - DNA, 25 bp, Homo sapien
tttccagggtgtacgttgctcgttc

SEQ ID NO: 2207646 - DNA, 25 bp, Homo sapien
agggtgtacgttgctcgttcaatga

SEQ ID NO: 2207647 - DNA, 25 bp, Homo sapien
catagagctgtagccccttggtcag

SEQ ID NO: 2207648 - DNA, 25 bp, Homo sapien
agcaggggtcatagagctgtagccc

SEQ ID NO: 2207649 - DNA, 25 bp, Homo sapien
aagagttggagaaagcacctgggct

SEQ ID NO: 2207650 - DNA, 25 bp, Homo sapien
gggaagagttggagaaagcacctgg

SEQ ID NO: 2207651 - DNA, 25 bp, Homo sapien
cttgatggggatcttcttgtagtcc

SEQ ID NO: 2207652 - DNA, 25 bp, Homo sapien
ggatcttcttgtagtccttaatcat

SEQ ID NO: 2207653 - DNA, 25 bp, Homo sapien
ctgcgcgcttgatggggatcttctt

SEQ ID NO: 2207654 - DNA, 25 bp, Homo sapien
tggggatcttcttgtagtccttaat

SEQ ID NO: 2207655 - DNA, 25 bp, Homo sapien
gaggggccaactgagcccgcaccgt

SEQ ID NO: 2207656 - DNA, 25 bp, Homo sapien
caactgagcccgcaccgtcaatgag

SEQ ID NO: 2207657 - DNA, 25 bp, Homo sapien
caccgtcaatgagggctgtgatgct

SEQ ID NO: 2207658 - DNA, 25 bp, Homo sapien
tcctcgctgctctcatactcatcat

SEQ ID NO: 2207659 - DNA, 25 bp, Homo sapien
ggagagacccagggctaccaggctc

SEQ ID NO: 2207660 - DNA, 25 bp, Homo sapien
gggactacgtggagtgaaaacatgc

SEQ ID NO: 2207661 - DNA, 25 bp, Homo sapien
cacctcacccgtagcaggctcttgg

SEQ ID NO: 2207662 - DNA, 25 bp, Homo sapien
tgtgctgcgtgcttactaagtgcca

SEQ ID NO: 2207663 - DNA, 25 bp, Homo sapien
aaacttgtgttggagaaacatggac

SEQ ID NO: 2207664 - DNA, 25 bp, Homo sapien
tcagcaaacttgtgttggagaaaca

SEQ ID NO: 2207665 - DNA, 25 bp, Homo sapien
cttgtgttggagaaacatggactag

SEQ ID NO: 2207666 - DNA, 25 bp, Homo sapien
tgttggagaaacatggactagctga

SEQ ID NO: 2207667 - DNA, 25 bp, Homo sapien
tggtcctcttgcctcccatcctggc

SEQ ID NO: 2207668 - DNA, 25 bp, Homo sapien
cccagggctcagcactgtgctgagc

SEQ ID NO: 2207669 - DNA, 25 bp, Homo sapien
agggctcagcactgtgctgagcagt

SEQ ID NO: 2207670 - DNA, 25 bp, Homo sapien
cttggtcctcttgcctcccatcctg

SEQ ID NO: 2207671 - DNA, 25 bp, Homo sapien
agcagctgctgccacaacattctga

SEQ ID NO: 2207672 - DNA, 25 bp, Homo sapien
gctgctgccacaacattctgaggct

SEQ ID NO: 2207673 - DNA, 25 bp, Homo sapien
tgctgccacaacattctgaggctcc

SEQ ID NO: 2207674 - DNA, 25 bp, Homo sapien
ggctcagggatgctcgtggccatct

SEQ ID NO: 2207675 - DNA, 25 bp, Homo sapien
gtcttgggccgggtggctgccacct

SEQ ID NO: 2207676 - DNA, 25 bp, Homo sapien
gccctctgtggcagcctcttgggct

SEQ ID NO: 2207677 - DNA, 25 bp, Homo sapien
caggtcccgtctggggcacaccaga

SEQ ID NO: 2207678 - DNA, 25 bp, Homo sapien
agcgccttccccgacttggtggtct

SEQ ID NO: 2207679 - DNA, 25 bp, Homo sapien
aatcgaagacatcattctggcccag

SEQ ID NO: 2207680 - DNA, 25 bp, Homo sapien
cctgccggctgagtgaaatcgaaga

SEQ ID NO: 2207681 - DNA, 25 bp, Homo sapien
tactggtgactaacatctgggaggt

SEQ ID NO: 2207682 - DNA, 25 bp, Homo sapien
agagaaagcacaggcgctactaggg

SEQ ID NO: 2207683 - DNA, 25 bp, Homo sapien
ctgcggagaagcaaggggtggctca

SEQ ID NO: 2207684 - DNA, 25 bp, Homo sapien
gggtgggcccctgagcctcggcggc

SEQ ID NO: 2207685 - DNA, 25 bp, Homo sapien
tcgtgggctgggtatcctctcctga

SEQ ID NO: 2207686 - DNA, 25 bp, Homo sapien
agcctcggcggcgtaggtcgtgggc

SEQ ID NO: 2207687 - DNA, 25 bp, Homo sapien
gcacgggcggccgtctcattggcaa

SEQ ID NO: 2207688 - DNA, 25 bp, Homo sapien
ccagcacagggttttccagttccca

SEQ ID NO: 2207689 - DNA, 25 bp, Homo sapien
ttggcaagtgtttccggatccagct

SEQ ID NO: 2207690 - DNA, 25 bp, Homo sapien
cacctgactgaaggcggtacgggca

SEQ ID NO: 2207691 - DNA, 25 bp, Homo sapien
aacactgtagctttccgattgcacg

SEQ ID NO: 2207692 - DNA, 25 bp, Homo sapien
caaagctggtgagggtgccatagcc

SEQ ID NO: 2207693 - DNA, 25 bp, Homo sapien
gattgcacgctgaagcttccctcag

SEQ ID NO: 2207694 - DNA, 25 bp, Homo sapien
ataagatgcgaaggcctggacccaa

SEQ ID NO: 2207695 - DNA, 25 bp, Homo sapien
ctgcgggtcccagggagatgagagc

SEQ ID NO: 2207696 - DNA, 25 bp, Homo sapien
ggtcccagggagatgagagctcagc

SEQ ID NO: 2207697 - DNA, 25 bp, Homo sapien
cgggtcccagggagatgagagctca

SEQ ID NO: 2207698 - DNA, 25 bp, Homo sapien
gcgggtcccagggagatgagagctc

SEQ ID NO: 2207699 - DNA, 25 bp, Homo sapien
ggcgggatccaatgggaggcgggat

SEQ ID NO: 2207700 - DNA, 25 bp, Homo sapien
gggcgggatccaatgggaggcggga

SEQ ID NO: 2207701 - DNA, 25 bp, Homo sapien
gctccggtttcagtagggctcagat

SEQ ID NO: 2207702 - DNA, 25 bp, Homo sapien
tcagactcgagcactagaggcggat

SEQ ID NO: 2207703 - DNA, 25 bp, Homo sapien
caatcggagcgctgcagatctcaaa

SEQ ID NO: 2207704 - DNA, 25 bp, Homo sapien
gatctcaaacgcgaggactgggcac

SEQ ID NO: 2207705 - DNA, 25 bp, Homo sapien
ggcgcagcgtgtcgggttccactcg

SEQ ID NO: 2207706 - DNA, 25 bp, Homo sapien
ttgggctttgttcagatccggaggc

SEQ ID NO: 2207707 - DNA, 25 bp, Homo sapien
tccggttctgagtgcttgggctttg

SEQ ID NO: 2207708 - DNA, 25 bp, Homo sapien
tctaatggggttccggttctgagtg

SEQ ID NO: 2207709 - DNA, 25 bp, Homo sapien
cgggaactccaatggcgtccgtcct

SEQ ID NO: 2207710 - DNA, 25 bp, Homo sapien
tctcgggaactccaatggcgtccgt

SEQ ID NO: 2207711 - DNA, 25 bp, Homo sapien
ccccgcggctgggtagcctgcgcat

SEQ ID NO: 2207712 - DNA, 25 bp, Homo sapien
cttctcgggaactccaatggcgtcc

SEQ ID NO: 2207713 - DNA, 25 bp, Homo sapien
caggacccctgtgtatgaatggaag

SEQ ID NO: 2207714 - DNA, 25 bp, Homo sapien
tttactctccgctgaccagtatcca

SEQ ID NO: 2207715 - DNA, 25 bp, Homo sapien
gcagcttttactctccgctgaccag

SEQ ID NO: 2207716 - DNA, 25 bp, Homo sapien
ggtattgctaggacagcagctttta

SEQ ID NO: 2207717 - DNA, 25 bp, Homo sapien
ctggtttcccaataattacataatt

SEQ ID NO: 2207718 - DNA, 25 bp, Homo sapien
tgctggtttcccaataattacataa

SEQ ID NO: 2207719 - DNA, 25 bp, Homo sapien
gctggtttcccaataattacataat

SEQ ID NO: 2207720 - DNA, 25 bp, Homo sapien
tggcgtcagcagtggcaccaatgga

SEQ ID NO: 2207721 - DNA, 25 bp, Homo sapien
accgtgccaacaggagggccacgtg

SEQ ID NO: 2207722 - DNA, 25 bp, Homo sapien
caccatccggaccagaaatgctgcc

SEQ ID NO: 2207723 - DNA, 25 bp, Homo sapien
cattctgaatagcaaccgtgccaac

SEQ ID NO: 2207724 - DNA, 25 bp, Homo sapien
tatacctggccacgcttgggcttgt

SEQ ID NO: 2207725 - DNA, 25 bp, Homo sapien
cacgcttgggcttgtagcaaggaaa

SEQ ID NO: 2207726 - DNA, 25 bp, Homo sapien
tgcacacccattgctatacctggcc

SEQ ID NO: 2207727 - DNA, 25 bp, Homo sapien
gggcttgtagcaaggaaacttcttc

SEQ ID NO: 2207728 - DNA, 25 bp, Homo sapien
ccaaaaaggcccacagggacaggtg

SEQ ID NO: 2207729 - DNA, 25 bp, Homo sapien
aaggcccacagggacaggtgggatg

SEQ ID NO: 2207730 - DNA, 25 bp, Homo sapien
ctgccaaaaaggcccacagggacag

SEQ ID NO: 2207731 - DNA, 25 bp, Homo sapien
caaaaaggcccacagggacaggtgg

SEQ ID NO: 2207732 - DNA, 25 bp, Homo sapien
tctgacggacaatgaggtgggcccc

SEQ ID NO: 2207733 - DNA, 25 bp, Homo sapien
accccgtcctcggtacagagtctga

SEQ ID NO: 2207734 - DNA, 25 bp, Homo sapien
tgttcgcagccctccagtgggtaga

SEQ ID NO: 2207735 - DNA, 25 bp, Homo sapien
tgggccccgcagtgatgttcgcagc

SEQ ID NO: 2207736 - DNA, 25 bp, Homo sapien
gtgcacataccgctccccatctccc

SEQ ID NO: 2207737 - DNA, 25 bp, Homo sapien
cccacgtgcacataccgctccccat

SEQ ID NO: 2207738 - DNA, 25 bp, Homo sapien
tcgcacccacgtgcacataccgctc

SEQ ID NO: 2207739 - DNA, 25 bp, Homo sapien
accctcgcacccacgtgcacatacc

SEQ ID NO: 2207740 - DNA, 25 bp, Homo sapien
cagcatacagaatggaagatcaggc

SEQ ID NO: 2207741 - DNA, 25 bp, Homo sapien
acagcatacagaatggaagatcagg

SEQ ID NO: 2207742 - DNA, 25 bp, Homo sapien
caaaatctgcaccattggatatata

SEQ ID NO: 2207743 - DNA, 25 bp, Homo sapien
tctgcaccattggatatataagcca

SEQ ID NO: 2207744 - DNA, 25 bp, Homo sapien
tagggaaaagaataagtgaatcaat

SEQ ID NO: 2207745 - DNA, 25 bp, Homo sapien
ggtcacaaaactagagcaagttgtt

SEQ ID NO: 2207746 - DNA, 25 bp, Homo sapien
tcagggtccttgtgtgcgtgtctcc

SEQ ID NO: 2207747 - DNA, 25 bp, Homo sapien
gcttggcctgagatctctgcattga

SEQ ID NO: 2207748 - DNA, 25 bp, Homo sapien
cattgagggtcatgggaattggccc

SEQ ID NO: 2207749 - DNA, 25 bp, Homo sapien
aattggccccgtgaattatattcag

SEQ ID NO: 2207750 - DNA, 25 bp, Homo sapien
ttagaggtagcccagatgtcctgca

SEQ ID NO: 2207751 - DNA, 25 bp, Homo sapien
tgtgccaggggactaatacattcat

SEQ ID NO: 2207752 - DNA, 25 bp, Homo sapien
ctgtgccaggggactaatacattca

SEQ ID NO: 2207753 - DNA, 25 bp, Homo sapien
aggagatactgggacaatttaggca

SEQ ID NO: 2207754 - DNA, 25 bp, Homo sapien
gatactgggacaatttaggcagaag

SEQ ID NO: 2207755 - DNA, 25 bp, Homo sapien
tttaggagatactgggacaatttag

SEQ ID NO: 2207756 - DNA, 25 bp, Homo sapien
tactgggacaatttaggcagaagca

SEQ ID NO: 2207757 - DNA, 25 bp, Homo sapien
cggtcagacaggccccgacgaaccg

SEQ ID NO: 2207758 - DNA, 25 bp, Homo sapien
ccgacgaaccggccgtacaaggcag

SEQ ID NO: 2207759 - DNA, 25 bp, Homo sapien
acgaaccggccgtacaaggcagcct

SEQ ID NO: 2207760 - DNA, 25 bp, Homo sapien
cagacaggccccgacgaaccggccg

SEQ ID NO: 2207761 - DNA, 25 bp, Homo sapien
aagcaagacttatgcagtcattggg

SEQ ID NO: 2207762 - DNA, 25 bp, Homo sapien
ttattaagcagtttagcaatgcaac

SEQ ID NO: 2207763 - DNA, 25 bp, Homo sapien
gcagtttagcaatgcaacttatata

SEQ ID NO: 2207764 - DNA, 25 bp, Homo sapien
aataggttagtagccaagcaagact

SEQ ID NO: 2207765 - DNA, 25 bp, Homo sapien
tagttcataaacgtaaggagcagga

SEQ ID NO: 2207766 - DNA, 25 bp, Homo sapien
ttcaatagctcctaatgctgcagtt

SEQ ID NO: 2207767 - DNA, 25 bp, Homo sapien
catgcctgcctgtatgggccagtct

SEQ ID NO: 2207768 - DNA, 25 bp, Homo sapien
tggcagtggcgcctagattctacaa

SEQ ID NO: 2207769 - DNA, 25 bp, Homo sapien
ttgttgtccaaaatccgaccagtag

SEQ ID NO: 2207770 - DNA, 25 bp, Homo sapien
ctatatttgttgtttagagcatggg

SEQ ID NO: 2207771 - DNA, 25 bp, Homo sapien
taggaaggatttagaatctggtttc

SEQ ID NO: 2207772 - DNA, 25 bp, Homo sapien
ttttcaaatgggctatatttgttgt

SEQ ID NO: 2207773 - DNA, 25 bp, Homo sapien
tgtctccagtatccaaatacatctg

SEQ ID NO: 2207774 - DNA, 25 bp, Homo sapien
taaatgaagtatatgttgtctccag

SEQ ID NO: 2207775 - DNA, 25 bp, Homo sapien
ttattttatctaccactgtggtggg

SEQ ID NO: 2207776 - DNA, 25 bp, Homo sapien
tctattaatagtccatcccagtgat

SEQ ID NO: 2207777 - DNA, 25 bp, Homo sapien
catacagttaatatttccagtgctc

SEQ ID NO: 2207778 - DNA, 25 bp, Homo sapien
tccctgtatgtcttcacttgcattg

SEQ ID NO: 2207779 - DNA, 25 bp, Homo sapien
tcctctttgtaattaacgtgtcttg

SEQ ID NO: 2207780 - DNA, 25 bp, Homo sapien
cagtgctcttcattcgtttgtctag

SEQ ID NO: 2207781 - DNA, 25 bp, Homo sapien
gactccagcctatttactcccaagg

SEQ ID NO: 2207782 - DNA, 25 bp, Homo sapien
aatctgtggcatccaaaatctgcgg

SEQ ID NO: 2207783 - DNA, 25 bp, Homo sapien
aaatctgcgggataggctggtactc

SEQ ID NO: 2207784 - DNA, 25 bp, Homo sapien
catgattgtagaggctaccaagtcc

SEQ ID NO: 2207785 - DNA, 25 bp, Homo sapien
tacagccttgtggagaactttgcca

SEQ ID NO: 2207786 - DNA, 25 bp, Homo sapien
ttgccacagccttgcaagtattgcc

SEQ ID NO: 2207787 - DNA, 25 bp, Homo sapien
ctaggccagcatagcataaagacat

SEQ ID NO: 2207788 - DNA, 25 bp, Homo sapien
tccattgtggaggagcagtccagtt

SEQ ID NO: 2207789 - DNA, 25 bp, Homo sapien
tatttggctgccgaatcactggaat

SEQ ID NO: 2207790 - DNA, 25 bp, Homo sapien
ctatttggctgccgaatcactggaa

SEQ ID NO: 2207791 - DNA, 25 bp, Homo sapien
cagcatccgctgaactcaagagcaa

SEQ ID NO: 2207792 - DNA, 25 bp, Homo sapien
ctcttactctggtgttcaagagttg

SEQ ID NO: 2207793 - DNA, 25 bp, Homo sapien
tactctggtgttcaagagttgtcat

SEQ ID NO: 2207794 - DNA, 25 bp, Homo sapien
tgtcatttcagcatccgctgaactc

SEQ ID NO: 2207795 - DNA, 25 bp, Homo sapien
cagggtcaatatatagcaggttaaa

SEQ ID NO: 2207796 - DNA, 25 bp, Homo sapien
tatagcaggttaaaattgtcctggg

SEQ ID NO: 2207797 - DNA, 25 bp, Homo sapien
aactctcatcagtaactccactctg

SEQ ID NO: 2207798 - DNA, 25 bp, Homo sapien
agaggcaaggatgtcccaatcccct

SEQ ID NO: 2207799 - DNA, 25 bp, Homo sapien
tgataagacagtgggcagaggggga

SEQ ID NO: 2207800 - DNA, 25 bp, Homo sapien
gataagacagtgggcagagggggag

SEQ ID NO: 2207801 - DNA, 25 bp, Homo sapien
ctgataagacagtgggcagaggggg

SEQ ID NO: 2207802 - DNA, 25 bp, Homo sapien
atgccttctacacccccaaggctgg

SEQ ID NO: 2207803 - DNA, 25 bp, Homo sapien
catgccttctacacccccaaggctg

SEQ ID NO: 2207804 - DNA, 25 bp, Homo sapien
gagcagcttggtctttcccgaggcc

SEQ ID NO: 2207805 - DNA, 25 bp, Homo sapien
gaaatggacatcgtggagcagcttg

SEQ ID NO: 2207806 - DNA, 25 bp, Homo sapien
cgaccacagatagaggagacgtagg

SEQ ID NO: 2207807 - DNA, 25 bp, Homo sapien
ttaggattggattgggtgttgccca

SEQ ID NO: 2207808 - DNA, 25 bp, Homo sapien
tgaccacctaacatgaatcatgctt

SEQ ID NO: 2207809 - DNA, 25 bp, Homo sapien
gctgaccacctaacatgaatcatgc

SEQ ID NO: 2207810 - DNA, 25 bp, Homo sapien
cacctaacatgaatcatgcttttct

SEQ ID NO: 2207811 - DNA, 25 bp, Homo sapien
tggctgaccacctaacatgaatcat

SEQ ID NO: 2207812 - DNA, 25 bp, Homo sapien
cacagtcctttgcagaggttttccc

SEQ ID NO: 2207813 - DNA, 25 bp, Homo sapien
tccgcgactgtcaactctacttcta

SEQ ID NO: 2207814 - DNA, 25 bp, Homo sapien
tgcagaggttttcccagttctcctc

SEQ ID NO: 2207815 - DNA, 25 bp, Homo sapien
ctctgagcacagtcctttgcagagg

SEQ ID NO: 2207816 - DNA, 25 bp, Homo sapien
cagtgatacccacctttgccagcag

SEQ ID NO: 2207817 - DNA, 25 bp, Homo sapien
ccacggtgaggtcttggtgtctcta

SEQ ID NO: 2207818 - DNA, 25 bp, Homo sapien
tctaggcacagtgcatccatgttgc

SEQ ID NO: 2207819 - DNA, 25 bp, Homo sapien
cctgtggtcccacggtgaggtcttg

SEQ ID NO: 2207820 - DNA, 25 bp, Homo sapien
agggcctgaactctgggtctagaag

SEQ ID NO: 2207821 - DNA, 25 bp, Homo sapien
gcctgaactctgggtctagaagctc

SEQ ID NO: 2207822 - DNA, 25 bp, Homo sapien
gaactctgggtctagaagctccagg

SEQ ID NO: 2207823 - DNA, 25 bp, Homo sapien
cctgaactctgggtctagaagctcc

SEQ ID NO: 2207824 - DNA, 25 bp, Homo sapien
ccatggggagcctagagatgagccc

SEQ ID NO: 2207825 - DNA, 25 bp, Homo sapien
tgtgacccacatgcagtcattagag

SEQ ID NO: 2207826 - DNA, 25 bp, Homo sapien
gaggttgtctctatagtgttctggg

SEQ ID NO: 2207827 - DNA, 25 bp, Homo sapien
ggccagccgctgtgtcactgtttct

SEQ ID NO: 2207828 - DNA, 25 bp, Homo sapien
aatggtaggacaagagagagagaaa

SEQ ID NO: 2207829 - DNA, 25 bp, Homo sapien
tactacaaacatactggggattctg

SEQ ID NO: 2207830 - DNA, 25 bp, Homo sapien
acatactggggattctggttttggg

SEQ ID NO: 2207831 - DNA, 25 bp, Homo sapien
ctgactcagtgtgaacgccccttac

SEQ ID NO: 2207832 - DNA, 25 bp, Homo sapien
tgcccaagtcccttgttgcccatgc

SEQ ID NO: 2207833 - DNA, 25 bp, Homo sapien
aagtcccttgttgcccatgcgcctt

SEQ ID NO: 2207834 - DNA, 25 bp, Homo sapien
ccaagtcccttgttgcccatgcgcc

SEQ ID NO: 2207835 - DNA, 25 bp, Homo sapien
agtcccttgttgcccatgcgcctta

SEQ ID NO: 2207836 - DNA, 25 bp, Homo sapien
tcttgccgactaggagtcagccagt

SEQ ID NO: 2207837 - DNA, 25 bp, Homo sapien
cctagaagtttgagtgtgagtgagt

SEQ ID NO: 2207838 - DNA, 25 bp, Homo sapien
tctgcagttcagtagtcctagaagt

SEQ ID NO: 2207839 - DNA, 25 bp, Homo sapien
tgaggaggagcctgcgggcacgatc

SEQ ID NO: 2207840 - DNA, 25 bp, Homo sapien
aggtccccgtccttctaacacgcag

SEQ ID NO: 2207841 - DNA, 25 bp, Homo sapien
tccccgtccttctaacacgcagcga

SEQ ID NO: 2207842 - DNA, 25 bp, Homo sapien
tgaggtccccgtccttctaacacgc

SEQ ID NO: 2207843 - DNA, 25 bp, Homo sapien
gtccccgtccttctaacacgcagcg

SEQ ID NO: 2207844 - DNA, 25 bp, Homo sapien
aatttcagttgtaccctgatctctg

SEQ ID NO: 2207845 - DNA, 25 bp, Homo sapien
cagcaccttgaatttcagttgtacc

SEQ ID NO: 2207846 - DNA, 25 bp, Homo sapien
ctgtcatgaacaggtgtaggatcct

SEQ ID NO: 2207847 - DNA, 25 bp, Homo sapien
gactgcatgaagctgcaaaatatcc

SEQ ID NO: 2207848 - DNA, 25 bp, Homo sapien
ggccaggctttaacctcatgccaaa

SEQ ID NO: 2207849 - DNA, 25 bp, Homo sapien
tcacaaggacctggaatttaatgat

SEQ ID NO: 2207850 - DNA, 25 bp, Homo sapien
gccaaatgtgagcttcctcctgcca

SEQ ID NO: 2207851 - DNA, 25 bp, Homo sapien
tctgcttcacaaggacctggaattt

SEQ ID NO: 2207852 - DNA, 25 bp, Homo sapien
cgaggagatgtcgtgacttccttct

SEQ ID NO: 2207853 - DNA, 25 bp, Homo sapien
aactcccttgttgcccgtgcactgt

SEQ ID NO: 2207854 - DNA, 25 bp, Homo sapien
ggcgaggagatgtcgtgacttcctt

SEQ ID NO: 2207855 - DNA, 25 bp, Homo sapien
ttgttgcccgtgcactgtgctgtct

SEQ ID NO: 2207856 - DNA, 25 bp, Homo sapien
acaaataagtcggtagatgctcacg

SEQ ID NO: 2207857 - DNA, 25 bp, Homo sapien
ggaggagcccgtgggtgtggtccat

SEQ ID NO: 2207858 - DNA, 25 bp, Homo sapien
aatcctaccagaaagttgaagtgtg

SEQ ID NO: 2207859 - DNA, 25 bp, Homo sapien
tgtggtccatggcttcctagggaga

SEQ ID NO: 2207860 - DNA, 25 bp, Homo sapien
tggcgtgggcactaaggaaggagcc

SEQ ID NO: 2207861 - DNA, 25 bp, Homo sapien
gaaggagcctggaaactcggaacgc

SEQ ID NO: 2207862 - DNA, 25 bp, Homo sapien
ctgttgtgggtatctgagtgccaga

SEQ ID NO: 2207863 - DNA, 25 bp, Homo sapien
gaagagtttcaagttcatcgtcctc

SEQ ID NO: 2207864 - DNA, 25 bp, Homo sapien
ctattggacattgatgctcaggatg

SEQ ID NO: 2207865 - DNA, 25 bp, Homo sapien
gatgtttccttggtagtcatagttc

SEQ ID NO: 2207866 - DNA, 25 bp, Homo sapien
tagtcatagttctgagatcccagga

SEQ ID NO: 2207867 - DNA, 25 bp, Homo sapien
ggactgatgtccttctcggcaagga

SEQ ID NO: 2207868 - DNA, 25 bp, Homo sapien
ctaggttgtcaagctaccatggaca

SEQ ID NO: 2207869 - DNA, 25 bp, Homo sapien
taggttgtcaagctaccatggacag

SEQ ID NO: 2207870 - DNA, 25 bp, Homo sapien
ttacctcagactggagaaattgtgg

SEQ ID NO: 2207871 - DNA, 25 bp, Homo sapien
atagaagtgcaacacattgtttacc

SEQ ID NO: 2207872 - DNA, 25 bp, Homo sapien
tctagagggtcagaactaataagag

SEQ ID NO: 2207873 - DNA, 25 bp, Homo sapien
tagcagtgtgctatcttgaatacat

SEQ ID NO: 2207874 - DNA, 25 bp, Homo sapien
cagggctatattatgcgaagattta

SEQ ID NO: 2207875 - DNA, 25 bp, Homo sapien
aattatcagggctatattatgcgaa

SEQ ID NO: 2207876 - DNA, 25 bp, Homo sapien
tgtctcatttaaattatcagggcta

SEQ ID NO: 2207877 - DNA, 25 bp, Homo sapien
tatattatgcgaagatttagaagat

SEQ ID NO: 2207878 - DNA, 25 bp, Homo sapien
ctttggttgaagatgttcatggatc

SEQ ID NO: 2207879 - DNA, 25 bp, Homo sapien
tggtgacctgaaccctcacctctct

SEQ ID NO: 2207880 - DNA, 25 bp, Homo sapien
tctgattaggctatttctgctttgg

SEQ ID NO: 2207881 - DNA, 25 bp, Homo sapien
tcacctctcttctgattaggctatt

SEQ ID NO: 2207882 - DNA, 25 bp, Homo sapien
tttggcaagttagccttatgggcag

SEQ ID NO: 2207883 - DNA, 25 bp, Homo sapien
aacctgtaactatagtggatcctac

SEQ ID NO: 2207884 - DNA, 25 bp, Homo sapien
ccttgagcaagggatgaagccattt

SEQ ID NO: 2207885 - DNA, 25 bp, Homo sapien
cttgttttttgagtgctggccttcc

SEQ ID NO: 2207886 - DNA, 25 bp, Homo sapien
aagggaatctctgttgcagattcag

SEQ ID NO: 2207887 - DNA, 25 bp, Homo sapien
tctgttgcagattcagttttaagga

SEQ ID NO: 2207888 - DNA, 25 bp, Homo sapien
tctctgttgcagattcagttttaag

SEQ ID NO: 2207889 - DNA, 25 bp, Homo sapien
ttataagggaatctctgttgcagat

SEQ ID NO: 2207890 - DNA, 25 bp, Homo sapien
ttttaaattgctctgactttgtcag

SEQ ID NO: 2207891 - DNA, 25 bp, Homo sapien
aaattgctctgactttgtcagaatc

SEQ ID NO: 2207892 - DNA, 25 bp, Homo sapien
ctctgactttgtcagaatcttcccc

SEQ ID NO: 2207893 - DNA, 25 bp, Homo sapien
ggaccatctccgcattcatccccag

SEQ ID NO: 2207894 - DNA, 25 bp, Homo sapien
acataggtctcctcccccccataga

SEQ ID NO: 2207895 - DNA, 25 bp, Homo sapien
tcccacatgaccagagcttcccatc

SEQ ID NO: 2207896 - DNA, 25 bp, Homo sapien
catgaccagagcttcccatcctcca

SEQ ID NO: 2207897 - DNA, 25 bp, Homo sapien
ccacatgaccagagcttcccatcct

SEQ ID NO: 2207898 - DNA, 25 bp, Homo sapien
acatgaccagagcttcccatcctcc

SEQ ID NO: 2207899 - DNA, 25 bp, Homo sapien
ttcatattttgttccaaggtttgca

SEQ ID NO: 2207900 - DNA, 25 bp, Homo sapien
aacacttgactcatggaggaggaat

SEQ ID NO: 2207901 - DNA, 25 bp, Homo sapien
tcatattttgttccaaggtttgcat

SEQ ID NO: 2207902 - DNA, 25 bp, Homo sapien
acacttgactcatggaggaggaatt

SEQ ID NO: 2207903 - DNA, 25 bp, Homo sapien
tggaagctgatctccagaagctgtc

SEQ ID NO: 2207904 - DNA, 25 bp, Homo sapien
gactggggatgaatgtggagttggc

SEQ ID NO: 2207905 - DNA, 25 bp, Homo sapien
gtggagttggccctggtgtccaggg

SEQ ID NO: 2207906 - DNA, 25 bp, Homo sapien
tccagaagctgtctcagtcaaagac

SEQ ID NO: 2207907 - DNA, 25 bp, Homo sapien
tgcaacagcggtaacagcaacgggc

SEQ ID NO: 2207908 - DNA, 25 bp, Homo sapien
tgttcgtaggtatgttggattcccc

SEQ ID NO: 2207909 - DNA, 25 bp, Homo sapien
tgagggagatacacctgcaacagcg

SEQ ID NO: 2207910 - DNA, 25 bp, Homo sapien
caagaaggactttggagcctggtga

SEQ ID NO: 2207911 - DNA, 25 bp, Homo sapien
ctgggaccctgggactgatgtcctt

SEQ ID NO: 2207912 - DNA, 25 bp, Homo sapien
ggttctgtagtagtcatggctctgg

SEQ ID NO: 2207913 - DNA, 25 bp, Homo sapien
ccatgggacactgatgctaaggatg

SEQ ID NO: 2207914 - DNA, 25 bp, Homo sapien
tgggactgatgtccttccactcggg

SEQ ID NO: 2207915 - DNA, 25 bp, Homo sapien
agatcaggagaaggacagctgaaag

SEQ ID NO: 2207916 - DNA, 25 bp, Homo sapien
gagacgcactgctcaggcgaggggc

SEQ ID NO: 2207917 - DNA, 25 bp, Homo sapien
tgtctgctgtggaatggcagatgag

SEQ ID NO: 2207918 - DNA, 25 bp, Homo sapien
aggctacgagggacagctgtctgct

SEQ ID NO: 2207919 - DNA, 25 bp, Homo sapien
gctctgaggtcgctcttctcaactt

SEQ ID NO: 2207920 - DNA, 25 bp, Homo sapien
ctgaggtcgctcttctcaacttcat

SEQ ID NO: 2207921 - DNA, 25 bp, Homo sapien
tctgaggtcgctcttctcaacttca

SEQ ID NO: 2207922 - DNA, 25 bp, Homo sapien
tgctctgaggtcgctcttctcaact

SEQ ID NO: 2207923 - DNA, 25 bp, Homo sapien
tgtctgttatgagggtgggtccccc

SEQ ID NO: 2207924 - DNA, 25 bp, Homo sapien
tccctgcctttggaaacaaggagga

SEQ ID NO: 2207925 - DNA, 25 bp, Homo sapien
tatgacagctgtttcggcagtgagt

SEQ ID NO: 2207926 - DNA, 25 bp, Homo sapien
tctgatggctttccctgcctttgga

SEQ ID NO: 2207927 - DNA, 25 bp, Homo sapien
ttctgacccctccagaatgatcctg

SEQ ID NO: 2207928 - DNA, 25 bp, Homo sapien
cactcaattgatggggcaaggatgc

SEQ ID NO: 2207929 - DNA, 25 bp, Homo sapien
gcttccccgctgtagggttctgacc

SEQ ID NO: 2207930 - DNA, 25 bp, Homo sapien
cttcccacagcactcaattgatggg

SEQ ID NO: 2207931 - DNA, 25 bp, Homo sapien
tgagtcgacccccatgaggatctgc

SEQ ID NO: 2207932 - DNA, 25 bp, Homo sapien
ttgtctgacatagcctcattgggaa

SEQ ID NO: 2207933 - DNA, 25 bp, Homo sapien
ctgcaggatcttgtctgacatagcc

SEQ ID NO: 2207934 - DNA, 25 bp, Homo sapien
gagatgagtcgacccccatgaggat

SEQ ID NO: 2207935 - DNA, 25 bp, Homo sapien
tgtgcagagtgggtccccggcacta

SEQ ID NO: 2207936 - DNA, 25 bp, Homo sapien
tgcagagtgggtccccggcactaca

SEQ ID NO: 2207937 - DNA, 25 bp, Homo sapien
ctgtgcagagtgggtccccggcact

SEQ ID NO: 2207938 - DNA, 25 bp, Homo sapien
cagagtgggtccccggcactacaga

SEQ ID NO: 2207939 - DNA, 25 bp, Homo sapien
tctgctcactccaccagccatcagc

SEQ ID NO: 2207940 - DNA, 25 bp, Homo sapien
gctctgctcactccaccagccatca

SEQ ID NO: 2207941 - DNA, 25 bp, Homo sapien
gggatcccaataggctctgctcact

SEQ ID NO: 2207942 - DNA, 25 bp, Homo sapien
ctgggatcccaataggctctgctca

SEQ ID NO: 2207943 - DNA, 25 bp, Homo sapien
gcactgtccacacgaccctctgctc

SEQ ID NO: 2207944 - DNA, 25 bp, Homo sapien
cttgcactgtccacacgaccctctg

SEQ ID NO: 2207945 - DNA, 25 bp, Homo sapien
ctgtccacacgaccctctgctctgg

SEQ ID NO: 2207946 - DNA, 25 bp, Homo sapien
actgtccacacgaccctctgctctg

SEQ ID NO: 2207947 - DNA, 25 bp, Homo sapien
agctgccagcaccaacgccagagaa

SEQ ID NO: 2207948 - DNA, 25 bp, Homo sapien
agcaggggcgcctcactcacaagca

SEQ ID NO: 2207949 - DNA, 25 bp, Homo sapien
gcaccaacgccagagaacagcaggg

SEQ ID NO: 2207950 - DNA, 25 bp, Homo sapien
actggaggggttggtcccatctgtg

SEQ ID NO: 2207951 - DNA, 25 bp, Homo sapien
gccactagagacccccaaaactcca

SEQ ID NO: 2207952 - DNA, 25 bp, Homo sapien
ccaggggcccaggttcatgaggccc

SEQ ID NO: 2207953 - DNA, 25 bp, Homo sapien
tccaggggcccaggttcatgaggcc

SEQ ID NO: 2207954 - DNA, 25 bp, Homo sapien
tggacatcgccaggaccaatggaca

SEQ ID NO: 2207955 - DNA, 25 bp, Homo sapien
tggtttctacagtgcagctttgagc

SEQ ID NO: 2207956 - DNA, 25 bp, Homo sapien
catctgctctggacatcgccaggac

SEQ ID NO: 2207957 - DNA, 25 bp, Homo sapien
ggcatgctgaactcctattccttcc

SEQ ID NO: 2207958 - DNA, 25 bp, Homo sapien
tctggtggaatccttctctgctggt

SEQ ID NO: 2207959 - DNA, 25 bp, Homo sapien
gagtaatggtatccgccagatcacc

SEQ ID NO: 2207960 - DNA, 25 bp, Homo sapien
tctgctggtgattcaagatgaagcg

SEQ ID NO: 2207961 - DNA, 25 bp, Homo sapien
tctgctacagggtcattgtttccac

SEQ ID NO: 2207962 - DNA, 25 bp, Homo sapien
taaggcttattcctcagccagtaca

SEQ ID NO: 2207963 - DNA, 25 bp, Homo sapien
agcaactggccatgttctatcaggg

SEQ ID NO: 2207964 - DNA, 25 bp, Homo sapien
tcactactggacgtggctttcccca

SEQ ID NO: 2207965 - DNA, 25 bp, Homo sapien
catatctgcagtcacctttaaaggc

SEQ ID NO: 2207966 - DNA, 25 bp, Homo sapien
ttgggatgcatgtgctcccccgggc

SEQ ID NO: 2207967 - DNA, 25 bp, Homo sapien
gtttctctgagacatatctggcaca

SEQ ID NO: 2207968 - DNA, 25 bp, Homo sapien
gaaatcgacgtcctcccagttttgc

SEQ ID NO: 2207969 - DNA, 25 bp, Homo sapien
tctggcacagaatggagaaatcgac

SEQ ID NO: 2207970 - DNA, 25 bp, Homo sapien
tgactgatgatggataccctcacat

SEQ ID NO: 2207971 - DNA, 25 bp, Homo sapien
tgaaaacggatcacaacactctcct

SEQ ID NO: 2207972 - DNA, 25 bp, Homo sapien
cacttgtggacaatcgtatttagaa

SEQ ID NO: 2207973 - DNA, 25 bp, Homo sapien
agtgcatttgaaaacggatcacaac

SEQ ID NO: 2207974 - DNA, 25 bp, Homo sapien
ggcacatgatcagtagccggcacat

SEQ ID NO: 2207975 - DNA, 25 bp, Homo sapien
ccaggaggtggcacatgatcagtag

SEQ ID NO: 2207976 - DNA, 25 bp, Homo sapien
aggtggcacatgatcagtagccggc

SEQ ID NO: 2207977 - DNA, 25 bp, Homo sapien
tggcacatgatcagtagccggcaca

SEQ ID NO: 2207978 - DNA, 25 bp, Homo sapien
actttattgagatagtttaagtcaa

SEQ ID NO: 2207979 - DNA, 25 bp, Homo sapien
tgaaagctgcaaaactttattgaga

SEQ ID NO: 2207980 - DNA, 25 bp, Homo sapien
tatctaatataaaaccagcttgcgt

SEQ ID NO: 2207981 - DNA, 25 bp, Homo sapien
aaccagcttgcgttgtttcagcttg

SEQ ID NO: 2207982 - DNA, 25 bp, Homo sapien
ttctggcattttacagtgttcctct

SEQ ID NO: 2207983 - DNA, 25 bp, Homo sapien
ctgcttctggcattttacagtgttc

SEQ ID NO: 2207984 - DNA, 25 bp, Homo sapien
gcttctggcattttacagtgttcct

SEQ ID NO: 2207985 - DNA, 25 bp, Homo sapien
tgcttctggcattttacagtgttcc

SEQ ID NO: 2207986 - DNA, 25 bp, Homo sapien
gtttgactgatgcagctcttgcaga

SEQ ID NO: 2207987 - DNA, 25 bp, Homo sapien
ccaaatccagatttatccccggtgt

SEQ ID NO: 2207988 - DNA, 25 bp, Homo sapien
gtattatcttcaccttgacgccgga

SEQ ID NO: 2207989 - DNA, 25 bp, Homo sapien
ctcttgcagatcaccttccatgtcg

SEQ ID NO: 2207990 - DNA, 25 bp, Homo sapien
caaaggttatcgatttaagcattcc

SEQ ID NO: 2207991 - DNA, 25 bp, Homo sapien
ttcgcgttacgaaataaagcctgag

SEQ ID NO: 2207992 - DNA, 25 bp, Homo sapien
aatacaaaggttatcgatttaagca

SEQ ID NO: 2207993 - DNA, 25 bp, Homo sapien
taaggaaatgataatattctcttcc

SEQ ID NO: 2207994 - DNA, 25 bp, Homo sapien
ggatctcagctgtatcctgatcttc

SEQ ID NO: 2207995 - DNA, 25 bp, Homo sapien
gggatctcagctgtatcctgatctt

SEQ ID NO: 2207996 - DNA, 25 bp, Homo sapien
cctgggactggctgtgtggttctgt

SEQ ID NO: 2207997 - DNA, 25 bp, Homo sapien
tgggactggctgtgtggttctgtgt

SEQ ID NO: 2207998 - DNA, 25 bp, Homo sapien
ctgggactggctgtgtggttctgtg

SEQ ID NO: 2207999 - DNA, 25 bp, Homo sapien
gctgcggtcactagcccgcagcatg

SEQ ID NO: 2208000 - DNA, 25 bp, Homo sapien
gggctgcggtcactagcccgcagca

SEQ ID NO: 2208001 - DNA, 25 bp, Homo sapien
ctcggggctgcggtcactagcccgc

SEQ ID NO: 2208002 - DNA, 25 bp, Homo sapien
agcccgcagcatgccccgtctccag

SEQ ID NO: 2208003 - DNA, 25 bp, Homo sapien
cgctcatgccgtccctctcctggtc

SEQ ID NO: 2208004 - DNA, 25 bp, Homo sapien
catgccgtccctctcctggtcccgt

SEQ ID NO: 2208005 - DNA, 25 bp, Homo sapien
tcatgccgtccctctcctggtcccg

SEQ ID NO: 2208006 - DNA, 25 bp, Homo sapien
ctcatgccgtccctctcctggtccc

SEQ ID NO: 2208007 - DNA, 25 bp, Homo sapien
tccaggtgcttctgggactcggata

SEQ ID NO: 2208008 - DNA, 25 bp, Homo sapien
aacagcaccccagcttcgcctgagc

SEQ ID NO: 2208009 - DNA, 25 bp, Homo sapien
ggtgcttctgggactcggatacccc

SEQ ID NO: 2208010 - DNA, 25 bp, Homo sapien
tgggactcggatacccccaacagca

SEQ ID NO: 2208011 - DNA, 25 bp, Homo sapien
tatggccgtgacgagacaagaaggt

SEQ ID NO: 2208012 - DNA, 25 bp, Homo sapien
acaagaaggtccatgggcgtggcac

SEQ ID NO: 2208013 - DNA, 25 bp, Homo sapien
cgtgacgagacaagaaggtccatgg

SEQ ID NO: 2208014 - DNA, 25 bp, Homo sapien
ctagttatggccgtgacgagacaag

SEQ ID NO: 2208015 - DNA, 25 bp, Homo sapien
acttcaactcccagttggatctgcc

SEQ ID NO: 2208016 - DNA, 25 bp, Homo sapien
ttcgagggccttctcactctgagtc

SEQ ID NO: 2208017 - DNA, 25 bp, Homo sapien
gagtcactgaccacacaaccctccg

SEQ ID NO: 2208018 - DNA, 25 bp, Homo sapien
ggacgacgacttcgagggccttctc

SEQ ID NO: 2208019 - DNA, 25 bp, Homo sapien
cagtagcggagaaagaatccagacc

SEQ ID NO: 2208020 - DNA, 25 bp, Homo sapien
tctcagtagcggagaaagaatccag

SEQ ID NO: 2208021 - DNA, 25 bp, Homo sapien
agacctcagggacccgagtcgccgg

SEQ ID NO: 2208022 - DNA, 25 bp, Homo sapien
ccgccgtgtctcagtagcggagaaa

SEQ ID NO: 2208023 - DNA, 25 bp, Homo sapien
tgggaagacgcccagtgaacatgcg

SEQ ID NO: 2208024 - DNA, 25 bp, Homo sapien
agctccgccgcgttccccacactgg

SEQ ID NO: 2208025 - DNA, 25 bp, Homo sapien
gccttaagggctgtggtgcccctcc

SEQ ID NO: 2208026 - DNA, 25 bp, Homo sapien
tgaggttccctcgtgccttaagggc

SEQ ID NO: 2208027 - DNA, 25 bp, Homo sapien
aagggctgtggtgcccctccttatc

SEQ ID NO: 2208028 - DNA, 25 bp, Homo sapien
gcgcagtgaggttccctcgtgcctt

SEQ ID NO: 2208029 - DNA, 25 bp, Homo sapien
atggccctccttcgtcccatgcccg

SEQ ID NO: 2208030 - DNA, 25 bp, Homo sapien
cctccccgctatggccctccttcgt

SEQ ID NO: 2208031 - DNA, 25 bp, Homo sapien
cgggaccccacaacagcaaggccat

SEQ ID NO: 2208032 - DNA, 25 bp, Homo sapien
gcccgggaccccacaacagcaaggc

SEQ ID NO: 2208033 - DNA, 25 bp, Homo sapien
gaaagatgacgacctcagaggccat

SEQ ID NO: 2208034 - DNA, 25 bp, Homo sapien
gcagtatcgctgagttttagtagaa

SEQ ID NO: 2208035 - DNA, 25 bp, Homo sapien
tagtagaaagatgacgacctcagag

SEQ ID NO: 2208036 - DNA, 25 bp, Homo sapien
gttttagtagaaagatgacgacctc

SEQ ID NO: 2208037 - DNA, 25 bp, Homo sapien
gcaaggaactttcatagaaagggac

SEQ ID NO: 2208038 - DNA, 25 bp, Homo sapien
cacgaaagaaggaagtcacgacgtc

SEQ ID NO: 2208039 - DNA, 25 bp, Homo sapien
gaagtcacgacgtctcctttcacag

SEQ ID NO: 2208040 - DNA, 25 bp, Homo sapien
agttagagagcaaggcgcataggca

SEQ ID NO: 2208041 - DNA, 25 bp, Homo sapien
cctggattaacagctcagcggagga

SEQ ID NO: 2208042 - DNA, 25 bp, Homo sapien
tccctggattaacagctcagcggag

SEQ ID NO: 2208043 - DNA, 25 bp, Homo sapien
ccctggattaacagctcagcggagg

SEQ ID NO: 2208044 - DNA, 25 bp, Homo sapien
attcttcagaagggcaactcttccc

SEQ ID NO: 2208045 - DNA, 25 bp, Homo sapien
tgttggtggggatgttgcaatgtga

SEQ ID NO: 2208046 - DNA, 25 bp, Homo sapien
tgtgagggtatccatcatcagtcat

SEQ ID NO: 2208047 - DNA, 25 bp, Homo sapien
gggatgttgcaatgtgagggtatcc

SEQ ID NO: 2208048 - DNA, 25 bp, Homo sapien
atgtgagggtatccatcatcagtca

SEQ ID NO: 2208049 - DNA, 25 bp, Homo sapien
tgtaatgatatttcagagggtcttc

SEQ ID NO: 2208050 - DNA, 25 bp, Homo sapien
caatggccatgtgcttatcttcttg

SEQ ID NO: 2208051 - DNA, 25 bp, Homo sapien
ttcagggattccatccacactacac

SEQ ID NO: 2208052 - DNA, 25 bp, Homo sapien
ctacaccagttactgtgcaatggcc

SEQ ID NO: 2208053 - DNA, 25 bp, Homo sapien
cctgctgttctctggcgttggtgct

SEQ ID NO: 2208054 - DNA, 25 bp, Homo sapien
gtgttggctcgcacagatgggacca

SEQ ID NO: 2208055 - DNA, 25 bp, Homo sapien
ttgccgtcgtgacacacttggaggg

SEQ ID NO: 2208056 - DNA, 25 bp, Homo sapien
tgcttgtgagtgaggcgcccctgct

SEQ ID NO: 2208057 - DNA, 25 bp, Homo sapien
tgccctcaggacagttgaggtctgt

SEQ ID NO: 2208058 - DNA, 25 bp, Homo sapien
tggacagtgcaagtgctgccctcag

SEQ ID NO: 2208059 - DNA, 25 bp, Homo sapien
ggtcctcctgctaccttcaggcaca

SEQ ID NO: 2208060 - DNA, 25 bp, Homo sapien
ccagagcagagggtcgtgtggacag

SEQ ID NO: 2208061 - DNA, 25 bp, Homo sapien
tacattcactgaggacagcttgccc

SEQ ID NO: 2208062 - DNA, 25 bp, Homo sapien
ggctcacgtccaggccattctggtg

SEQ ID NO: 2208063 - DNA, 25 bp, Homo sapien
tggagcacgcatggtttctgaaggc

SEQ ID NO: 2208064 - DNA, 25 bp, Homo sapien
gatgctgtagcgctcttggagcacg

SEQ ID NO: 2208065 - DNA, 25 bp, Homo sapien
taactgggcgcctgacatggcatgg

SEQ ID NO: 2208066 - DNA, 25 bp, Homo sapien
tgtggtcgggccaaatgaggtattt

SEQ ID NO: 2208067 - DNA, 25 bp, Homo sapien
tgagaaaaccatggacagaagaagg

SEQ ID NO: 2208068 - DNA, 25 bp, Homo sapien
cttgaaaaccatcaggagtgaccac

SEQ ID NO: 2208069 - DNA, 25 bp, Homo sapien
ggtccggagttacagtccacaggaa

SEQ ID NO: 2208070 - DNA, 25 bp, Homo sapien
tcattcagcaggtccggagttacag

SEQ ID NO: 2208071 - DNA, 25 bp, Homo sapien
ggagttacagtccacaggaatggca

SEQ ID NO: 2208072 - DNA, 25 bp, Homo sapien
tcagcaggtccggagttacagtcca

SEQ ID NO: 2208073 - DNA, 25 bp, Homo sapien
tagtactgtgggagtagcgacacag

SEQ ID NO: 2208074 - DNA, 25 bp, Homo sapien
gagtatctccaattcagtgtagtac

SEQ ID NO: 2208075 - DNA, 25 bp, Homo sapien
tgttccgtctgcaagtaatcaacca

SEQ ID NO: 2208076 - DNA, 25 bp, Homo sapien
gcgacacagtgttgacacaatgccg

SEQ ID NO: 2208077 - DNA, 25 bp, Homo sapien
ggacaccagggccaactccacattc

SEQ ID NO: 2208078 - DNA, 25 bp, Homo sapien
caccagggccaactccacattcatc

SEQ ID NO: 2208079 - DNA, 25 bp, Homo sapien
acaccagggccaactccacattcat

SEQ ID NO: 2208080 - DNA, 25 bp, Homo sapien
cctggacaccagggccaactccaca

SEQ ID NO: 2208081 - DNA, 25 bp, Homo sapien
aactgcagaagttgtctcccttctc

SEQ ID NO: 2208082 - DNA, 25 bp, Homo sapien
cccttcactaacaggcacctgctcc

SEQ ID NO: 2208083 - DNA, 25 bp, Homo sapien
ccttcactaacaggcacctgctcct

SEQ ID NO: 2208084 - DNA, 25 bp, Homo sapien
ttccaggataagcttcccggcacac

SEQ ID NO: 2208085 - DNA, 25 bp, Homo sapien
tttccaggataagcttcccggcaca

SEQ ID NO: 2208086 - DNA, 25 bp, Homo sapien
ttgtgaacacactggctatgcccct

SEQ ID NO: 2208087 - DNA, 25 bp, Homo sapien
tgtgaacacactggctatgcccctt

SEQ ID NO: 2208088 - DNA, 25 bp, Homo sapien
gctgctgcaggtgtatctccctcac

SEQ ID NO: 2208089 - DNA, 25 bp, Homo sapien
tcacagtgatgagccacatggatgt

SEQ ID NO: 2208090 - DNA, 25 bp, Homo sapien
tgttactggtcatggcataagccat

SEQ ID NO: 2208091 - DNA, 25 bp, Homo sapien
gagatcctttcctcatgttttcttt

SEQ ID NO: 2208092 - DNA, 25 bp, Homo sapien
ttgagatcctttcctcatgttttct

SEQ ID NO: 2208093 - DNA, 25 bp, Homo sapien
tcctcctgttactggtcatggcata

SEQ ID NO: 2208094 - DNA, 25 bp, Homo sapien
cccatataggcctccttctcccaat

SEQ ID NO: 2208095 - DNA, 25 bp, Homo sapien
ttttctcctaacagtcagtgacgca

SEQ ID NO: 2208096 - DNA, 25 bp, Homo sapien
tcagtgacgcagctatggccttgct

SEQ ID NO: 2208097 - DNA, 25 bp, Homo sapien
cccgtttttctcctaacagtcagtg

SEQ ID NO: 2208098 - DNA, 25 bp, Homo sapien
taacagtcagtgacgcagctatggc

SEQ ID NO: 2208099 - DNA, 25 bp, Homo sapien
tttggacccagctggtagaacctca

SEQ ID NO: 2208100 - DNA, 25 bp, Homo sapien
gatccctttgccagcgtggtgaact

SEQ ID NO: 2208101 - DNA, 25 bp, Homo sapien
gagtgttgggcagcatagtccctga

SEQ ID NO: 2208102 - DNA, 25 bp, Homo sapien
tgctccttgaatgcccacctcaatg

SEQ ID NO: 2208103 - DNA, 25 bp, Homo sapien
cttgtgggacactcagaatgaagga

SEQ ID NO: 2208104 - DNA, 25 bp, Homo sapien
atagcattgccatgggccttgtggg

SEQ ID NO: 2208105 - DNA, 25 bp, Homo sapien
tgaaagcacctggaaccctcaacag

SEQ ID NO: 2208106 - DNA, 25 bp, Homo sapien
gaagacacattccagaccccttggt

SEQ ID NO: 2208107 - DNA, 25 bp, Homo sapien
aacaaatatttgccttttaaagatg

SEQ ID NO: 2208108 - DNA, 25 bp, Homo sapien
tctagaaacaaatatttgcctttta

SEQ ID NO: 2208109 - DNA, 25 bp, Homo sapien
aaatatttgccttttaaagatgtct

SEQ ID NO: 2208110 - DNA, 25 bp, Homo sapien
tatttgccttttaaagatgtcttac

SEQ ID NO: 2208111 - DNA, 25 bp, Homo sapien
gaagagaagacattggccctaagtc

SEQ ID NO: 2208112 - DNA, 25 bp, Homo sapien
tgcaggtaggtgtctgctagtgaag

SEQ ID NO: 2208113 - DNA, 25 bp, Homo sapien
taggtgtctgctagtgaagagaaga

SEQ ID NO: 2208114 - DNA, 25 bp, Homo sapien
cctaagtcctggcattgctccagat

SEQ ID NO: 2208115 - DNA, 25 bp, Homo sapien
gagcccataccctttgggtatctaa

SEQ ID NO: 2208116 - DNA, 25 bp, Homo sapien
gataggagcccataccctttgggta

SEQ ID NO: 2208117 - DNA, 25 bp, Homo sapien
ctgataggagcccataccctttggg

SEQ ID NO: 2208118 - DNA, 25 bp, Homo sapien
taggagcccataccctttgggtatc

SEQ ID NO: 2208119 - DNA, 25 bp, Homo sapien
ccctggacatcggactatctcccca

SEQ ID NO: 2208120 - DNA, 25 bp, Homo sapien
cctggacatcggactatctccccat

SEQ ID NO: 2208121 - DNA, 25 bp, Homo sapien
ctcctgaccatgtgtaggatcttga

SEQ ID NO: 2208122 - DNA, 25 bp, Homo sapien
tcctgaccatgtgtaggatcttgac

SEQ ID NO: 2208123 - DNA, 25 bp, Homo sapien
cctgaccatgtgtaggatcttgact

SEQ ID NO: 2208124 - DNA, 25 bp, Homo sapien
tactcatgacgtcgaaggctttcac

SEQ ID NO: 2208125 - DNA, 25 bp, Homo sapien
cttactcatgacgtcgaaggctttc

SEQ ID NO: 2208126 - DNA, 25 bp, Homo sapien
ctgtggtccaccttactcatgacgt

SEQ ID NO: 2208127 - DNA, 25 bp, Homo sapien
cactctgtggtccaccttactcatg

SEQ ID NO: 2208128 - DNA, 25 bp, Homo sapien
cagggactaggctgcctgaagctca

SEQ ID NO: 2208129 - DNA, 25 bp, Homo sapien
tcgaaggggccgactggaccatgcc

SEQ ID NO: 2208130 - DNA, 25 bp, Homo sapien
ccacggcattcaccatgtggtcgaa

SEQ ID NO: 2208131 - DNA, 25 bp, Homo sapien
caccatgtggtcgaaggggccgact

SEQ ID NO: 2208132 - DNA, 25 bp, Homo sapien
cggcattcaccatgtggtcgaaggg

SEQ ID NO: 2208133 - DNA, 25 bp, Homo sapien
ctgccttgtaggctgtggtaccctg

SEQ ID NO: 2208134 - DNA, 25 bp, Homo sapien
gagatgggtgcctgccttgtaggct

SEQ ID NO: 2208135 - DNA, 25 bp, Homo sapien
gccttgtaggctgtggtaccctgcc

SEQ ID NO: 2208136 - DNA, 25 bp, Homo sapien
tgtaggctgtggtaccctgcctcac

SEQ ID NO: 2208137 - DNA, 25 bp, Homo sapien
tccatcctttttgggcagttagttc

SEQ ID NO: 2208138 - DNA, 25 bp, Homo sapien
cctccaaggtatccactaaggactc

SEQ ID NO: 2208139 - DNA, 25 bp, Homo sapien
ctccaaggtatccactaaggactct

SEQ ID NO: 2208140 - DNA, 25 bp, Homo sapien
atccatcctttttgggcagttagtt

SEQ ID NO: 2208141 - DNA, 25 bp, Homo sapien
gagacagtgtaggtaggacccgtca

SEQ ID NO: 2208142 - DNA, 25 bp, Homo sapien
tgtatgccagtaagcacagtcaatg

SEQ ID NO: 2208143 - DNA, 25 bp, Homo sapien
agggagtttccatggcctctacggg

SEQ ID NO: 2208144 - DNA, 25 bp, Homo sapien
tagggactgccagacattggtcaac

SEQ ID NO: 2208145 - DNA, 25 bp, Homo sapien
ttgtgttgtttcagcttatcttcct

SEQ ID NO: 2208146 - DNA, 25 bp, Homo sapien
aaaaacagtttgtgttgtttcagct

SEQ ID NO: 2208147 - DNA, 25 bp, Homo sapien
acagtttgtgttgtttcagcttatc

SEQ ID NO: 2208148 - DNA, 25 bp, Homo sapien
agtttgtgttgtttcagcttatctt

SEQ ID NO: 2208149 - DNA, 25 bp, Homo sapien
ggtggaacattactagcagaactgt

SEQ ID NO: 2208150 - DNA, 25 bp, Homo sapien
tagacctctgtggagactttggaga

SEQ ID NO: 2208151 - DNA, 25 bp, Homo sapien
tggactaagaccataaacccaagag

SEQ ID NO: 2208152 - DNA, 25 bp, Homo sapien
gacagtccgaggtcagaacacatta

SEQ ID NO: 2208153 - DNA, 25 bp, Homo sapien
tatatatcatgaacagtatggcacg

SEQ ID NO: 2208154 - DNA, 25 bp, Homo sapien
tcaagggacaactagcaaatttcac

SEQ ID NO: 2208155 - DNA, 25 bp, Homo sapien
cacattagaagctgcatatgcgtgg

SEQ ID NO: 2208156 - DNA, 25 bp, Homo sapien
ggtatggtaaacatctgtccccagt

SEQ ID NO: 2208157 - DNA, 25 bp, Homo sapien
gctgttggttatactcagaagtaag

SEQ ID NO: 2208158 - DNA, 25 bp, Homo sapien
gagctgctactagaatctccttcag

SEQ ID NO: 2208159 - DNA, 25 bp, Homo sapien
tcacaaattgtcatagagctgctac

SEQ ID NO: 2208160 - DNA, 25 bp, Homo sapien
tcagcatatttcacacagtctggta

SEQ ID NO: 2208161 - DNA, 25 bp, Homo sapien
ccttcacatccatccccagtctttg

SEQ ID NO: 2208162 - DNA, 25 bp, Homo sapien
cattttaaagtgctctgcttttggt

SEQ ID NO: 2208163 - DNA, 25 bp, Homo sapien
tccccttgacatcagtaccaccttc

SEQ ID NO: 2208164 - DNA, 25 bp, Homo sapien
tctgacatagctcctggagatcggc

SEQ ID NO: 2208165 - DNA, 25 bp, Homo sapien
tccccctataggcattatttctttc

SEQ ID NO: 2208166 - DNA, 25 bp, Homo sapien
aggtgtaggattccgacttttagtg

SEQ ID NO: 2208167 - DNA, 25 bp, Homo sapien
tcttctgatcaggtgtaggattccg

SEQ ID NO: 2208168 - DNA, 25 bp, Homo sapien
tctttaggctcttcatcagtgggtt

SEQ ID NO: 2208169 - DNA, 25 bp, Homo sapien
ctttaggctcttcatcagtgggttc

SEQ ID NO: 2208170 - DNA, 25 bp, Homo sapien
tcaggaggctgtaaacttcttcttg

SEQ ID NO: 2208171 - DNA, 25 bp, Homo sapien
cagctcaggaggctgtaaacttctt

SEQ ID NO: 2208172 - DNA, 25 bp, Homo sapien
gctcaggaggctgtaaacttcttct

SEQ ID NO: 2208173 - DNA, 25 bp, Homo sapien
aggaggctgtaaacttcttcttggc

SEQ ID NO: 2208174 - DNA, 25 bp, Homo sapien
acactgaagtcggtgcctgcgttgt

SEQ ID NO: 2208175 - DNA, 25 bp, Homo sapien
tgtccaaggaacatgcacactgaag

SEQ ID NO: 2208176 - DNA, 25 bp, Homo sapien
gagaaagagtccagacggctggaac

SEQ ID NO: 2208177 - DNA, 25 bp, Homo sapien
tataggctgcgtctcagtaggagag

SEQ ID NO: 2208178 - DNA, 25 bp, Homo sapien
ctatcatgactatggagccagtccc

SEQ ID NO: 2208179 - DNA, 25 bp, Homo sapien
tgtgaaagcaacatcaatgacattg

SEQ ID NO: 2208180 - DNA, 25 bp, Homo sapien
tgggttctctggtttaactattaca

SEQ ID NO: 2208181 - DNA, 25 bp, Homo sapien
cattgattcttctactaatgggttc

SEQ ID NO: 2208182 - DNA, 25 bp, Homo sapien
ttacctcagactggagaaattgtgg

SEQ ID NO: 2208183 - DNA, 25 bp, Homo sapien
atagaagtgcaacacattgtttacc

SEQ ID NO: 2208184 - DNA, 25 bp, Homo sapien
tctagagggtcagaactaataagag

SEQ ID NO: 2208185 - DNA, 25 bp, Homo sapien
tagcagtgtgctatcttgaatacat

SEQ ID NO: 2208186 - DNA, 25 bp, Homo sapien
cagggctatattatgcgaagattta

SEQ ID NO: 2208187 - DNA, 25 bp, Homo sapien
tgtctcatttaaattatcagggcta

SEQ ID NO: 2208188 - DNA, 25 bp, Homo sapien
aattatcagggctatattatgcgaa

SEQ ID NO: 2208189 - DNA, 25 bp, Homo sapien
tatattatgcgaagatttagaagat

SEQ ID NO: 2208190 - DNA, 25 bp, Homo sapien
ctttggttgaagatgttcatggatc

SEQ ID NO: 2208191 - DNA, 25 bp, Homo sapien
tacttggtgacctgaaccctcacct

SEQ ID NO: 2208192 - DNA, 25 bp, Homo sapien
tctgattaggctatttctgctttgg

SEQ ID NO: 2208193 - DNA, 25 bp, Homo sapien
tcacctctcttctgattaggctatt

SEQ ID NO: 2208194 - DNA, 25 bp, Homo sapien
tttggcaagttagccttatgggcag

SEQ ID NO: 2208195 - DNA, 25 bp, Homo sapien
aacctgtaactatagtggatcctac

SEQ ID NO: 2208196 - DNA, 25 bp, Homo sapien
ccttgagcaagggatgaagccattt

SEQ ID NO: 2208197 - DNA, 25 bp, Homo sapien
cttgttttttgagtgctggccttcc

SEQ ID NO: 2208198 - DNA, 25 bp, Homo sapien
tctgttgcagattcagttttaagga

SEQ ID NO: 2208199 - DNA, 25 bp, Homo sapien
aagggaatctctgttgcagattcag

SEQ ID NO: 2208200 - DNA, 25 bp, Homo sapien
tctctgttgcagattcagttttaag

SEQ ID NO: 2208201 - DNA, 25 bp, Homo sapien
ttataagggaatctctgttgcagat

SEQ ID NO: 2208202 - DNA, 25 bp, Homo sapien
gcattttaaattgctctgactttgt

SEQ ID NO: 2208203 - DNA, 25 bp, Homo sapien
gctctgactttgtcagaatcttccc

SEQ ID NO: 2208204 - DNA, 25 bp, Homo sapien
gaccatctccgcattcatccccagt

SEQ ID NO: 2208205 - DNA, 25 bp, Homo sapien
atcaggaccatctccgcattcatcc

SEQ ID NO: 2208206 - DNA, 25 bp, Homo sapien
acataggtctcctcccccccataga

SEQ ID NO: 2208207 - DNA, 25 bp, Homo sapien
tgtgaaggagcccttgtgacaaaca

SEQ ID NO: 2208208 - DNA, 25 bp, Homo sapien
aggagcccttgtgacaaacaggaag

SEQ ID NO: 2208209 - DNA, 25 bp, Homo sapien
aaggatcataattgcgttggtattg

SEQ ID NO: 2208210 - DNA, 25 bp, Homo sapien
tcataattgcgttggtattgggaaa

SEQ ID NO: 2208211 - DNA, 25 bp, Homo sapien
tgtgagagggctcaatttcccacat

SEQ ID NO: 2208212 - DNA, 25 bp, Homo sapien
ctgtgagagggctcaatttcccaca

SEQ ID NO: 2208213 - DNA, 25 bp, Homo sapien
ccagagcttcccatcctccatgcat

SEQ ID NO: 2208214 - DNA, 25 bp, Homo sapien
gaccagagcttcccatcctccatgc

SEQ ID NO: 2208215 - DNA, 25 bp, Homo sapien
accagagcttcccatcctccatgca

SEQ ID NO: 2208216 - DNA, 25 bp, Homo sapien
ttcatattttgttccaaggtttgca

SEQ ID NO: 2208217 - DNA, 25 bp, Homo sapien
aacacttgactcatggaggaggaat

SEQ ID NO: 2208218 - DNA, 25 bp, Homo sapien
tcatattttgttccaaggtttgcat

SEQ ID NO: 2208219 - DNA, 25 bp, Homo sapien
acacttgactcatggaggaggaatt

SEQ ID NO: 2208220 - DNA, 25 bp, Homo sapien
tggaagctgatctccagaagctgtc

SEQ ID NO: 2208221 - DNA, 25 bp, Homo sapien
gactggggatgaatgtggagttggc

SEQ ID NO: 2208222 - DNA, 25 bp, Homo sapien
gtggagttggccctggtgtccaggg

SEQ ID NO: 2208223 - DNA, 25 bp, Homo sapien
tccagaagctgtctcagtcaaagac

SEQ ID NO: 2208224 - DNA, 25 bp, Homo sapien
aggctacgagggacagctgtctgct

SEQ ID NO: 2208225 - DNA, 25 bp, Homo sapien
tgtctgctgtggaatggcagatgag

SEQ ID NO: 2208226 - DNA, 25 bp, Homo sapien
gagacgcactgctcaggcgaggggc

SEQ ID NO: 2208227 - DNA, 25 bp, Homo sapien
ggagacgcactgctcaggcgagggg

SEQ ID NO: 2208228 - DNA, 25 bp, Homo sapien
gctctgaggtcgctcttctcaactt

SEQ ID NO: 2208229 - DNA, 25 bp, Homo sapien
ctgaggtcgctcttctcaacttcat

SEQ ID NO: 2208230 - DNA, 25 bp, Homo sapien
tctgaggtcgctcttctcaacttca

SEQ ID NO: 2208231 - DNA, 25 bp, Homo sapien
tgctctgaggtcgctcttctcaact

SEQ ID NO: 2208232 - DNA, 25 bp, Homo sapien
gcactgtccacacgaccctctgctc

SEQ ID NO: 2208233 - DNA, 25 bp, Homo sapien
cttgcactgtccacacgaccctctg

SEQ ID NO: 2208234 - DNA, 25 bp, Homo sapien
ctgtccacacgaccctctgctctgg

SEQ ID NO: 2208235 - DNA, 25 bp, Homo sapien
actgtccacacgaccctctgctctg

SEQ ID NO: 2208236 - DNA, 25 bp, Homo sapien
catatctgcagtcacctttaaaggc

SEQ ID NO: 2208237 - DNA, 25 bp, Homo sapien
tcactactggacgtggctttcccca

SEQ ID NO: 2208238 - DNA, 25 bp, Homo sapien
taaggcttattcctcagccagtaca

SEQ ID NO: 2208239 - DNA, 25 bp, Homo sapien
agcaactggccatgttctatcaggg

SEQ ID NO: 2208240 - DNA, 25 bp, Homo sapien
tgctgatgagcccatgggtggttaa

SEQ ID NO: 2208241 - DNA, 25 bp, Homo sapien
ggtgctgatgagcccatgggtggtt

SEQ ID NO: 2208242 - DNA, 25 bp, Homo sapien
aaaggtgctgatgagcccatgggtg

SEQ ID NO: 2208243 - DNA, 25 bp, Homo sapien
ctgatgagcccatgggtggttaatc

SEQ ID NO: 2208244 - DNA, 25 bp, Homo sapien
ccaggaggtggcacatgatcagtag

SEQ ID NO: 2208245 - DNA, 25 bp, Homo sapien
caggaggtggcacatgatcagtagc

SEQ ID NO: 2208246 - DNA, 25 bp, Homo sapien
aggtggcacatgatcagtagccggc

SEQ ID NO: 2208247 - DNA, 25 bp, Homo sapien
ggcacatgatcagtagccggcacat

SEQ ID NO: 2208248 - DNA, 25 bp, Homo sapien
gaaggaagtgaaccaaagatgagca

SEQ ID NO: 2208249 - DNA, 25 bp, Homo sapien
gaaccaaagatgagcaagacttctt

SEQ ID NO: 2208250 - DNA, 25 bp, Homo sapien
ctgggaaggaagtgaaccaaagatg

SEQ ID NO: 2208251 - DNA, 25 bp, Homo sapien
ggaaggaagtgaaccaaagatgagc

SEQ ID NO: 2208252 - DNA, 25 bp, Homo sapien
actttattgagatagtttaagtcaa

SEQ ID NO: 2208253 - DNA, 25 bp, Homo sapien
tgaaagctgcaaaactttattgaga

SEQ ID NO: 2208254 - DNA, 25 bp, Homo sapien
tatctaatataaaaccagcttgcgt

SEQ ID NO: 2208255 - DNA, 25 bp, Homo sapien
aaccagcttgcgttgtttcagcttg

SEQ ID NO: 2208256 - DNA, 25 bp, Homo sapien
aagagactttgacaacagtcgtcca

SEQ ID NO: 2208257 - DNA, 25 bp, Homo sapien
cagtcgtccaagtgtatgcattaaa

SEQ ID NO: 2208258 - DNA, 25 bp, Homo sapien
ctttgacaacagtcgtccaagtgta

SEQ ID NO: 2208259 - DNA, 25 bp, Homo sapien
tgacaacagtcgtccaagtgtatgc

SEQ ID NO: 2208260 - DNA, 25 bp, Homo sapien
ttctggcattttacagtgttcctct

SEQ ID NO: 2208261 - DNA, 25 bp, Homo sapien
gcttctggcattttacagtgttcct

SEQ ID NO: 2208262 - DNA, 25 bp, Homo sapien
ctgcttctggcattttacagtgttc

SEQ ID NO: 2208263 - DNA, 25 bp, Homo sapien
tgcttctggcattttacagtgttcc

SEQ ID NO: 2208264 - DNA, 25 bp, Homo sapien
ctcttgcagatcaccttccatgtcg

SEQ ID NO: 2208265 - DNA, 25 bp, Homo sapien
ttgacgccggaacccaaatccagat

SEQ ID NO: 2208266 - DNA, 25 bp, Homo sapien
tgtttgactgatgcagctcttgcag

SEQ ID NO: 2208267 - DNA, 25 bp, Homo sapien
ccaaatccagatttatccccggtgt

SEQ ID NO: 2208268 - DNA, 25 bp, Homo sapien
caaaggttatcgatttaagcattcc

SEQ ID NO: 2208269 - DNA, 25 bp, Homo sapien
aatacaaaggttatcgatttaagca

SEQ ID NO: 2208270 - DNA, 25 bp, Homo sapien
ttcgcgttacgaaataaagcctgag

SEQ ID NO: 2208271 - DNA, 25 bp, Homo sapien
taaggaaatgataatattctcttcc

SEQ ID NO: 2208272 - DNA, 25 bp, Homo sapien
gctcatggcataggccacaatgcac

SEQ ID NO: 2208273 - DNA, 25 bp, Homo sapien
catagaccttctcccgccccataga

SEQ ID NO: 2208274 - DNA, 25 bp, Homo sapien
ttgagcaaatgtttggtatcttttc

SEQ ID NO: 2208275 - DNA, 25 bp, Homo sapien
tgagcaaatgtttggtatcttttcc

SEQ ID NO: 2208276 - DNA, 25 bp, Homo sapien
ggatctcagctgtatcctgatcttc

SEQ ID NO: 2208277 - DNA, 25 bp, Homo sapien
gggatctcagctgtatcctgatctt

SEQ ID NO: 2208278 - DNA, 25 bp, Homo sapien
ctgggactggctgtgtggttctgtg

SEQ ID NO: 2208279 - DNA, 25 bp, Homo sapien
tgggactggctgtgtggttctgtgt

SEQ ID NO: 2208280 - DNA, 25 bp, Homo sapien
cctgggactggctgtgtggttctgt

SEQ ID NO: 2208281 - DNA, 25 bp, Homo sapien
ggtgcttctgggactcggatacccc

SEQ ID NO: 2208282 - DNA, 25 bp, Homo sapien
ccttcctccctagttatggccgtga

SEQ ID NO: 2208283 - DNA, 25 bp, Homo sapien
gccgtgacgagacaagaaggtccat

SEQ ID NO: 2208284 - DNA, 25 bp, Homo sapien
acaagaaggtccatgggcgtggcac

SEQ ID NO: 2208285 - DNA, 25 bp, Homo sapien
acttcaactcccagttggatctgcc

SEQ ID NO: 2208286 - DNA, 25 bp, Homo sapien
ggacgacgacttcgagggccttctc

SEQ ID NO: 2208287 - DNA, 25 bp, Homo sapien
gagtcactgaccacacaaccctccg

SEQ ID NO: 2208288 - DNA, 25 bp, Homo sapien
ttcgagggccttctcactctgagtc

SEQ ID NO: 2208289 - DNA, 25 bp, Homo sapien
tgggaagacgcccagtgaacatgcg

SEQ ID NO: 2208290 - DNA, 25 bp, Homo sapien
gtgaacatgcgcactgaggtgggca

SEQ ID NO: 2208291 - DNA, 25 bp, Homo sapien
cagtagcggagaaagaatccagacc

SEQ ID NO: 2208292 - DNA, 25 bp, Homo sapien
agacctcagggacccgagtcgccgg

SEQ ID NO: 2208293 - DNA, 25 bp, Homo sapien
gccttaagggctgtggtgcccctcc

SEQ ID NO: 2208294 - DNA, 25 bp, Homo sapien
tgaggttccctcgtgccttaagggc

SEQ ID NO: 2208295 - DNA, 25 bp, Homo sapien
aagggctgtggtgcccctccttatc

SEQ ID NO: 2208296 - DNA, 25 bp, Homo sapien
gcgcagtgaggttccctcgtgcctt

SEQ ID NO: 2208297 - DNA, 25 bp, Homo sapien
attcttcagaagggcaactcttccc

SEQ ID NO: 2208298 - DNA, 25 bp, Homo sapien
cagcggaggaccaacacaaactggt

SEQ ID NO: 2208299 - DNA, 25 bp, Homo sapien
tcagcggaggaccaacacaaactgg

SEQ ID NO: 2208300 - DNA, 25 bp, Homo sapien
agcggaggaccaacacaaactggtt

SEQ ID NO: 2208301 - DNA, 25 bp, Homo sapien
gcggaggaccaacacaaactggtta

SEQ ID NO: 2208302 - DNA, 25 bp, Homo sapien
gaaggaagtgaaccaaagatgagca

SEQ ID NO: 2208303 - DNA, 25 bp, Homo sapien
gaaccaaagatgagcaagacttctt

SEQ ID NO: 2208304 - DNA, 25 bp, Homo sapien
ctgggaaggaagtgaaccaaagatg

SEQ ID NO: 2208305 - DNA, 25 bp, Homo sapien
ggaaggaagtgaaccaaagatgagc

SEQ ID NO: 2208306 - DNA, 25 bp, Homo sapien
actttattgagatagtttaagtcaa

SEQ ID NO: 2208307 - DNA, 25 bp, Homo sapien
tgaaagctgcaaaactttattgaga

SEQ ID NO: 2208308 - DNA, 25 bp, Homo sapien
tatctaatataaaaccagcttgcgt

SEQ ID NO: 2208309 - DNA, 25 bp, Homo sapien
aaccagcttgcgttgtttcagcttg

SEQ ID NO: 2208310 - DNA, 25 bp, Homo sapien
cagtcgtccaagtgtatgcattaaa

SEQ ID NO: 2208311 - DNA, 25 bp, Homo sapien
aagagactttgacaacagtcgtcca

SEQ ID NO: 2208312 - DNA, 25 bp, Homo sapien
tgacaacagtcgtccaagtgtatgc

SEQ ID NO: 2208313 - DNA, 25 bp, Homo sapien
ctttgacaacagtcgtccaagtgta

SEQ ID NO: 2208314 - DNA, 25 bp, Homo sapien
tgcttctggcattttacagtgttcc

SEQ ID NO: 2208315 - DNA, 25 bp, Homo sapien
ctgcttctggcattttacagtgttc

SEQ ID NO: 2208316 - DNA, 25 bp, Homo sapien
ttctggcattttacagtgttcctct

SEQ ID NO: 2208317 - DNA, 25 bp, Homo sapien
gcttctggcattttacagtgttcct

SEQ ID NO: 2208318 - DNA, 25 bp, Homo sapien
ttgacgccggaacccaaatccagat

SEQ ID NO: 2208319 - DNA, 25 bp, Homo sapien
tgtttgactgatgcagctcttgcag

SEQ ID NO: 2208320 - DNA, 25 bp, Homo sapien
ccaaatccagatttatccccggtgt

SEQ ID NO: 2208321 - DNA, 25 bp, Homo sapien
gcagctcttgcagatcaccttccat

SEQ ID NO: 2208322 - DNA, 25 bp, Homo sapien
caaaggttatcgatttaagcattcc

SEQ ID NO: 2208323 - DNA, 25 bp, Homo sapien
ttcgcgttacgaaataaagcctgag

SEQ ID NO: 2208324 - DNA, 25 bp, Homo sapien
aatacaaaggttatcgatttaagca

SEQ ID NO: 2208325 - DNA, 25 bp, Homo sapien
taaggaaatgataatattctcttcc

SEQ ID NO: 2208326 - DNA, 25 bp, Homo sapien
ttgagcaaatgtttggtatcttttc

SEQ ID NO: 2208327 - DNA, 25 bp, Homo sapien
gctcatggcataggccacaatgcac

SEQ ID NO: 2208328 - DNA, 25 bp, Homo sapien
catagaccttctcccgccccataga

SEQ ID NO: 2208329 - DNA, 25 bp, Homo sapien
tgagcaaatgtttggtatcttttcc

SEQ ID NO: 2208330 - DNA, 25 bp, Homo sapien
ggatctcagctgtatcctgatcttc

SEQ ID NO: 2208331 - DNA, 25 bp, Homo sapien
gggatctcagctgtatcctgatctt

SEQ ID NO: 2208332 - DNA, 25 bp, Homo sapien
cctgggactggctgtgtggttctgt

SEQ ID NO: 2208333 - DNA, 25 bp, Homo sapien
tgggactggctgtgtggttctgtgt

SEQ ID NO: 2208334 - DNA, 25 bp, Homo sapien
ctgggactggctgtgtggttctgtg

SEQ ID NO: 2208335 - DNA, 25 bp, Homo sapien
ggtgcttctgggactcggatacccc

SEQ ID NO: 2208336 - DNA, 25 bp, Homo sapien
ccttcctccctagttatggccgtga

SEQ ID NO: 2208337 - DNA, 25 bp, Homo sapien
acaagaaggtccatgggcgtggcac

SEQ ID NO: 2208338 - DNA, 25 bp, Homo sapien
gccgtgacgagacaagaaggtccat

SEQ ID NO: 2208339 - DNA, 25 bp, Homo sapien
acttcaactcccagttggatctgcc

SEQ ID NO: 2208340 - DNA, 25 bp, Homo sapien
ttcgagggccttctcactctgagtc

SEQ ID NO: 2208341 - DNA, 25 bp, Homo sapien
gagtcactgaccacacaaccctccg

SEQ ID NO: 2208342 - DNA, 25 bp, Homo sapien
ggacgacgacttcgagggccttctc

SEQ ID NO: 2208343 - DNA, 25 bp, Homo sapien
tgggaagacgcccagtgaacatgcg

SEQ ID NO: 2208344 - DNA, 25 bp, Homo sapien
gtgaacatgcgcactgaggtgggca

SEQ ID NO: 2208345 - DNA, 25 bp, Homo sapien
cagtagcggagaaagaatccagacc

SEQ ID NO: 2208346 - DNA, 25 bp, Homo sapien
agacctcagggacccgagtcgccgg

SEQ ID NO: 2208347 - DNA, 25 bp, Homo sapien
gccttaagggctgtggtgcccctcc

SEQ ID NO: 2208348 - DNA, 25 bp, Homo sapien
gcgcagtgaggttccctcgtgcctt

SEQ ID NO: 2208349 - DNA, 25 bp, Homo sapien
tgaggttccctcgtgccttaagggc

SEQ ID NO: 2208350 - DNA, 25 bp, Homo sapien
aagggctgtggtgcccctccttatc

SEQ ID NO: 2208351 - DNA, 25 bp, Homo sapien
cctggattaacagctcagcggagga

SEQ ID NO: 2208352 - DNA, 25 bp, Homo sapien
ccctggattaacagctcagcggagg

SEQ ID NO: 2208353 - DNA, 25 bp, Homo sapien
tccctggattaacagctcagcggag

SEQ ID NO: 2208354 - DNA, 25 bp, Homo sapien
attcttcagaagggcaactcttccc

SEQ ID NO: 2208355 - DNA, 25 bp, Homo sapien
cagagggcttcccatgggttggacc

SEQ ID NO: 2208356 - DNA, 25 bp, Homo sapien
tcttgccaactgtgacatagcaggt

SEQ ID NO: 2208357 - DNA, 25 bp, Homo sapien
gctgtggaaggaaacgtcgtgactc

SEQ ID NO: 2208358 - DNA, 25 bp, Homo sapien
taggtctgcagatcagtcctcccag

SEQ ID NO: 2208359 - DNA, 25 bp, Homo sapien
tgtatagtgccctgcagaggtgccc

SEQ ID NO: 2208360 - DNA, 25 bp, Homo sapien
tttgcccatatggtgaacgctacgg

SEQ ID NO: 2208361 - DNA, 25 bp, Homo sapien
catcgtggtcggtgactccaaagga

SEQ ID NO: 2208362 - DNA, 25 bp, Homo sapien
agaggtgcccaaccagtgaggacca

SEQ ID NO: 2208363 - DNA, 25 bp, Homo sapien
gactaagtactggttttgcgtggat

SEQ ID NO: 2208364 - DNA, 25 bp, Homo sapien
ctaagtactggttttgcgtggattt

SEQ ID NO: 2208365 - DNA, 25 bp, Homo sapien
gaagactaagtactggttttgcgtg

SEQ ID NO: 2208366 - DNA, 25 bp, Homo sapien
ccaagaagactaagtactggttttg

SEQ ID NO: 2208367 - DNA, 25 bp, Homo sapien
cctgtcctgtatatctaagggatcc

SEQ ID NO: 2208368 - DNA, 25 bp, Homo sapien
gggatcctccctacccaggatgctg

SEQ ID NO: 2208369 - DNA, 25 bp, Homo sapien
agaaattgataacccaggcgaggaa

SEQ ID NO: 2208370 - DNA, 25 bp, Homo sapien
ggcgaggaagtcactttgacatgag

SEQ ID NO: 2208371 - DNA, 25 bp, Homo sapien
tcgaggaaccatggaaggcgtgtgc

SEQ ID NO: 2208372 - DNA, 25 bp, Homo sapien
ggaaccatggaaggcgtgtgcaggt

SEQ ID NO: 2208373 - DNA, 25 bp, Homo sapien
tcacttcgaggaaccatggaaggcg

SEQ ID NO: 2208374 - DNA, 25 bp, Homo sapien
cttcgaggaaccatggaaggcgtgt

SEQ ID NO: 2208375 - DNA, 25 bp, Homo sapien
acagaacatggtcaccattcacgaa

SEQ ID NO: 2208376 - DNA, 25 bp, Homo sapien
agaaacagaacatggtcaccattca

SEQ ID NO: 2208377 - DNA, 25 bp, Homo sapien
gaacatggtcaccattcacgaacgt

SEQ ID NO: 2208378 - DNA, 25 bp, Homo sapien
catggtcaccattcacgaacgtggg

SEQ ID NO: 2208379 - DNA, 25 bp, Homo sapien
atagccagaaaagccagaggggttg

SEQ ID NO: 2208380 - DNA, 25 bp, Homo sapien
gaaaatagccagaaaagccagaggg

SEQ ID NO: 2208381 - DNA, 25 bp, Homo sapien
ctgaaaatagccagaaaagccagag

SEQ ID NO: 2208382 - DNA, 25 bp, Homo sapien
gccagaaaagccagaggggttgttc

SEQ ID NO: 2208383 - DNA, 25 bp, Homo sapien
ctcttcttggggggcgcagctgttt

SEQ ID NO: 2208384 - DNA, 25 bp, Homo sapien
acacatagatgattttctccgaggc

SEQ ID NO: 2208385 - DNA, 25 bp, Homo sapien
agatgattttctccgaggctttcat

SEQ ID NO: 2208386 - DNA, 25 bp, Homo sapien
tagatgattttctccgaggctttca

SEQ ID NO: 2208387 - DNA, 25 bp, Homo sapien
catagatgattttctccgaggcttt

SEQ ID NO: 2208388 - DNA, 25 bp, Homo sapien
tcaacctacccagtcctcatcttcc

SEQ ID NO: 2208389 - DNA, 25 bp, Homo sapien
actcttcttcatcataggacccaaa

SEQ ID NO: 2208390 - DNA, 25 bp, Homo sapien
acctacccagtcctcatcttccaac

SEQ ID NO: 2208391 - DNA, 25 bp, Homo sapien
taggacccaaaagggggagacatgc

SEQ ID NO: 2208392 - DNA, 25 bp, Homo sapien
ttcgaggaaccatggaaggcgtgtc

SEQ ID NO: 2208393 - DNA, 25 bp, Homo sapien
gaaccatggaaggcgtgtccaggtc

SEQ ID NO: 2208394 - DNA, 25 bp, Homo sapien
tcacttcgaggaaccatggaaggcg

SEQ ID NO: 2208395 - DNA, 25 bp, Homo sapien
cgaggaaccatggaaggcgtgtcca

SEQ ID NO: 2208396 - DNA, 25 bp, Homo sapien
gaacatggtgacctttcacgaacat

SEQ ID NO: 2208397 - DNA, 25 bp, Homo sapien
tcgcctcagcctgggggatatgaca

SEQ ID NO: 2208398 - DNA, 25 bp, Homo sapien
atggtgacctttcacgaacatgggc

SEQ ID NO: 2208399 - DNA, 25 bp, Homo sapien
ttctcgcctcagcctgggggatatg

SEQ ID NO: 2208400 - DNA, 25 bp, Homo sapien
atgcatatttcggtttgtgtatcca

SEQ ID NO: 2208401 - DNA, 25 bp, Homo sapien
tacttaatgcatatttcggtttgtg

SEQ ID NO: 2208402 - DNA, 25 bp, Homo sapien
ttagatactatccttttcaatgatg

SEQ ID NO: 2208403 - DNA, 25 bp, Homo sapien
tatttcggtttgtgtatccatgcac

SEQ ID NO: 2208404 - DNA, 25 bp, Homo sapien
tcagtggtccaccagaaatattaag

SEQ ID NO: 2208405 - DNA, 25 bp, Homo sapien
cagtggtccaccagaaatattaagg

SEQ ID NO: 2208406 - DNA, 25 bp, Homo sapien
gtggtccaccagaaatattaaggca

SEQ ID NO: 2208407 - DNA, 25 bp, Homo sapien
ggtccaccagaaatattaaggcatt

SEQ ID NO: 2208408 - DNA, 25 bp, Homo sapien
gtgactgatacggggaatcagagga

SEQ ID NO: 2208409 - DNA, 25 bp, Homo sapien
gactgatacggggaatcagaggagg

SEQ ID NO: 2208410 - DNA, 25 bp, Homo sapien
tgatacggggaatcagaggagggga

SEQ ID NO: 2208411 - DNA, 25 bp, Homo sapien
tacggggaatcagaggaggggagta

SEQ ID NO: 2208412 - DNA, 25 bp, Homo sapien
caaaccgaaatacacattaagcatg

SEQ ID NO: 2208413 - DNA, 25 bp, Homo sapien
cacaaaccgaaatacacattaagca

SEQ ID NO: 2208414 - DNA, 25 bp, Homo sapien
acaaaccgaaatacacattaagcat

SEQ ID NO: 2208415 - DNA, 25 bp, Homo sapien
acacaaaccgaaatacacattaagc

SEQ ID NO: 2208416 - DNA, 25 bp, Homo sapien
acacttgctttcacttgctatgcac

SEQ ID NO: 2208417 - DNA, 25 bp, Homo sapien
ccgcagccatgcccatgttcgtgaa

SEQ ID NO: 2208418 - DNA, 25 bp, Homo sapien
gggtccgcagccatgcccatgttcg

SEQ ID NO: 2208419 - DNA, 25 bp, Homo sapien
gtccgcagccatgcccatgttcgtg

SEQ ID NO: 2208420 - DNA, 25 bp, Homo sapien
gcagccatgcccatgttcgtgaaag

SEQ ID NO: 2208421 - DNA, 25 bp, Homo sapien
gtcttcttcagggtcgctgatctct

SEQ ID NO: 2208422 - DNA, 25 bp, Homo sapien
ttcagggtcgctgatctcttcataa

SEQ ID NO: 2208423 - DNA, 25 bp, Homo sapien
tgctttctctcacgcagtctgtggg

SEQ ID NO: 2208424 - DNA, 25 bp, Homo sapien
tctgtgggtccaggcatgtttcccc

SEQ ID NO: 2208425 - DNA, 25 bp, Homo sapien
gatgtcttgttaatcttctcagagg

SEQ ID NO: 2208426 - DNA, 25 bp, Homo sapien
aggtgtttcccatcgttctgtgagc

SEQ ID NO: 2208427 - DNA, 25 bp, Homo sapien
tcagaggtacttggttttcctggag

SEQ ID NO: 2208428 - DNA, 25 bp, Homo sapien
cctggagggcacaggtgtttcccat

SEQ ID NO: 2208429 - DNA, 25 bp, Homo sapien
tcctttagatctgagagacactcac

SEQ ID NO: 2208430 - DNA, 25 bp, Homo sapien
gtcctttagatctgagagacactca

SEQ ID NO: 2208431 - DNA, 25 bp, Homo sapien
tctggtcctttagatctgagagaca

SEQ ID NO: 2208432 - DNA, 25 bp, Homo sapien
tggtcctttagatctgagagacact

SEQ ID NO: 2208433 - DNA, 25 bp, Homo sapien
ttctctggagcctgcaaaaagtcat

SEQ ID NO: 2208434 - DNA, 25 bp, Homo sapien
cgggaagattctctggagcctgcaa

SEQ ID NO: 2208435 - DNA, 25 bp, Homo sapien
cttcgggaagattctctggagcctg

SEQ ID NO: 2208436 - DNA, 25 bp, Homo sapien
ggaagattctctggagcctgcaaaa

SEQ ID NO: 2208437 - DNA, 25 bp, Homo sapien
ccctgtattatgcatgaaaggtggg

SEQ ID NO: 2208438 - DNA, 25 bp, Homo sapien
tgattcccttggttacggtcattat

SEQ ID NO: 2208439 - DNA, 25 bp, Homo sapien
tgtggcccctgtattatgcatgaaa

SEQ ID NO: 2208440 - DNA, 25 bp, Homo sapien
cctgattcccttggttacggtcatt

SEQ ID NO: 2208441 - DNA, 25 bp, Homo sapien
acatagctgattttctccaaggatt

SEQ ID NO: 2208442 - DNA, 25 bp, Homo sapien
agtatttggcaatatcatcgaagga

SEQ ID NO: 2208443 - DNA, 25 bp, Homo sapien
atacacatagctgattttctccaag

SEQ ID NO: 2208444 - DNA, 25 bp, Homo sapien
tagagaagtatttggcaatatcatc

SEQ ID NO: 2208445 - DNA, 25 bp, Homo sapien
tctggtatttgagcaccagccctag

SEQ ID NO: 2208446 - DNA, 25 bp, Homo sapien
tcttctctggtatttgagcaccagc

SEQ ID NO: 2208447 - DNA, 25 bp, Homo sapien
taggtctccttgcaaaggcgtcgtc

SEQ ID NO: 2208448 - DNA, 25 bp, Homo sapien
gtatttgagcaccagccctaggtct

SEQ ID NO: 2208449 - DNA, 25 bp, Homo sapien
tctgaaagatgtacagacccttgtt

SEQ ID NO: 2208450 - DNA, 25 bp, Homo sapien
ggaaggcagagatgtgactgtgtaa

SEQ ID NO: 2208451 - DNA, 25 bp, Homo sapien
gaaggcagagatgtgactgtgtaat

SEQ ID NO: 2208452 - DNA, 25 bp, Homo sapien
tacagacccttgttgggaaggcaga

SEQ ID NO: 2208453 - DNA, 25 bp, Homo sapien
tagccaatcccaggggatgctttag

SEQ ID NO: 2208454 - DNA, 25 bp, Homo sapien
agtcagagcatgcatactctgaact

SEQ ID NO: 2208455 - DNA, 25 bp, Homo sapien
aaagtcagagcatgcatactctgaa

SEQ ID NO: 2208456 - DNA, 25 bp, Homo sapien
caatcccaggggatgctttaggcgg

SEQ ID NO: 2208457 - DNA, 25 bp, Homo sapien
agcattaagccaggcgaccatgggt

SEQ ID NO: 2208458 - DNA, 25 bp, Homo sapien
tgagcattaagccaggcgaccatgg

SEQ ID NO: 2208459 - DNA, 25 bp, Homo sapien
gctgagcattaagccaggcgaccat

SEQ ID NO: 2208460 - DNA, 25 bp, Homo sapien
atgctgagcattaagccaggcgacc

SEQ ID NO: 2208461 - DNA, 25 bp, Homo sapien
cccaggcgaagaagtcactgtggca

SEQ ID NO: 2208462 - DNA, 25 bp, Homo sapien
acccaggcgaagaagtcactgtggc

SEQ ID NO: 2208463 - DNA, 25 bp, Homo sapien
aggcgaagaagtcactgtggcatga

SEQ ID NO: 2208464 - DNA, 25 bp, Homo sapien
ccaggcgaagaagtcactgtggcat

SEQ ID NO: 2208465 - DNA, 25 bp, Homo sapien
ggaaccgtggaaggcgtgtgcaggt

SEQ ID NO: 2208466 - DNA, 25 bp, Homo sapien
cacttcgaggaaccgtggaaggcgt

SEQ ID NO: 2208467 - DNA, 25 bp, Homo sapien
tcgaggaaccgtggaaggcgtgtgc

SEQ ID NO: 2208468 - DNA, 25 bp, Homo sapien
tcacttcgaggaaccgtggaaggcg

SEQ ID NO: 2208469 - DNA, 25 bp, Homo sapien
tgaggtaggacagaatcagagtgtg

SEQ ID NO: 2208470 - DNA, 25 bp, Homo sapien
gaggtaggacagaatcagagtgtgc

SEQ ID NO: 2208471 - DNA, 25 bp, Homo sapien
aggtaggacagaatcagagtgtgca

SEQ ID NO: 2208472 - DNA, 25 bp, Homo sapien
cgtggtgacctttcatgaacacggg

SEQ ID NO: 2208473 - DNA, 25 bp, Homo sapien
agaacgtggtgacctttcatgaaca

SEQ ID NO: 2208474 - DNA, 25 bp, Homo sapien
gagaagcagaacgtggtgacctttc

SEQ ID NO: 2208475 - DNA, 25 bp, Homo sapien
aacgtggtgacctttcatgaacacg

SEQ ID NO: 2208476 - DNA, 25 bp, Homo sapien
atccatcagatgcagacattcttgg

SEQ ID NO: 2208477 - DNA, 25 bp, Homo sapien
aaagagtcatggtaagccacagtca

SEQ ID NO: 2208478 - DNA, 25 bp, Homo sapien
tcagatccgcttcttggaatgggca

SEQ ID NO: 2208479 - DNA, 25 bp, Homo sapien
tgcccatcactagtgaggtccagtt

SEQ ID NO: 2208480 - DNA, 25 bp, Homo sapien
tgtattcatgaagcttgggaactcc

SEQ ID NO: 2208481 - DNA, 25 bp, Homo sapien
gtattcatgaagcttgggaactcca

SEQ ID NO: 2208482 - DNA, 25 bp, Homo sapien
tattcatgaagcttgggaactccat

SEQ ID NO: 2208483 - DNA, 25 bp, Homo sapien
ctgtattcatgaagcttgggaactc

SEQ ID NO: 2208484 - DNA, 25 bp, Homo sapien
gggataaagacaaccggcacaggtc

SEQ ID NO: 2208485 - DNA, 25 bp, Homo sapien
ggataaagacaaccggcacaggtcc

SEQ ID NO: 2208486 - DNA, 25 bp, Homo sapien
tgggataaagacaaccggcacaggt

SEQ ID NO: 2208487 - DNA, 25 bp, Homo sapien
catgggataaagacaaccggcacag

SEQ ID NO: 2208488 - DNA, 25 bp, Homo sapien
acacttgctttcacttgctatgcac

SEQ ID NO: 2208489 - DNA, 25 bp, Homo sapien
ccgcagccatgcccatgttcgtgaa

SEQ ID NO: 2208490 - DNA, 25 bp, Homo sapien
gtccgcagccatgcccatgttcgtg

SEQ ID NO: 2208491 - DNA, 25 bp, Homo sapien
gcagccatgcccatgttcgtgaaag

SEQ ID NO: 2208492 - DNA, 25 bp, Homo sapien
gggtccgcagccatgcccatgttcg

SEQ ID NO: 2208493 - DNA, 25 bp, Homo sapien
cttcctcagggtcgctgatctcttc

SEQ ID NO: 2208494 - DNA, 25 bp, Homo sapien
ctcagggtcgctgatctcttcataa

SEQ ID NO: 2208495 - DNA, 25 bp, Homo sapien
tcgtcatcttcctcagggtcgctga

SEQ ID NO: 2208496 - DNA, 25 bp, Homo sapien
atcttcctcagggtcgctgatctct

SEQ ID NO: 2208497 - DNA, 25 bp, Homo sapien
cagctgttttctctcacgcagtctg

SEQ ID NO: 2208498 - DNA, 25 bp, Homo sapien
tcaccagctgttttctctcacgcag

SEQ ID NO: 2208499 - DNA, 25 bp, Homo sapien
ctgttttctctcacgcagtctgtgg

SEQ ID NO: 2208500 - DNA, 25 bp, Homo sapien
tctgtgggtccaggcatgttccccc

SEQ ID NO: 2208501 - DNA, 25 bp, Homo sapien
gttgacaaactgaatcgaccaatgt

SEQ ID NO: 2208502 - DNA, 25 bp, Homo sapien
ttgacaaactgaatcgaccaatgtt

SEQ ID NO: 2208503 - DNA, 25 bp, Homo sapien
tgacaaactgaatcgaccaatgttg

SEQ ID NO: 2208504 - DNA, 25 bp, Homo sapien
agccagagggattgttcctgaattg

SEQ ID NO: 2208505 - DNA, 25 bp, Homo sapien
cagtccatatacctgaacatcgcca

SEQ ID NO: 2208506 - DNA, 25 bp, Homo sapien
tatacctgaacatcgccagggaagc

SEQ ID NO: 2208507 - DNA, 25 bp, Homo sapien
gagggattgttcctgaattgcttcc

SEQ ID NO: 2208508 - DNA, 25 bp, Homo sapien
gaatcttctcagaggtagttggttt

SEQ ID NO: 2208509 - DNA, 25 bp, Homo sapien
cggggggcacagctctttcccatca

SEQ ID NO: 2208510 - DNA, 25 bp, Homo sapien
gcttctggcacttcctccgaatcat

SEQ ID NO: 2208511 - DNA, 25 bp, Homo sapien
cccatcattttgtgggccagatgct

SEQ ID NO: 2208512 - DNA, 25 bp, Homo sapien
gaagccctagtgagcaacatctgaa

SEQ ID NO: 2208513 - DNA, 25 bp, Homo sapien
gtgtctcattggaagcaccagcagg

SEQ ID NO: 2208514 - DNA, 25 bp, Homo sapien
caaagtgattcctaagccatgcaag

SEQ ID NO: 2208515 - DNA, 25 bp, Homo sapien
tgttggtactatcaagccgtcggtg

SEQ ID NO: 2208516 - DNA, 25 bp, Homo sapien
tcctttagatctgagagacactcac

SEQ ID NO: 2208517 - DNA, 25 bp, Homo sapien
tcgcatccgtggagggacaaaggtt

SEQ ID NO: 2208518 - DNA, 25 bp, Homo sapien
cagtgttcgcatccgtggagggaca

SEQ ID NO: 2208519 - DNA, 25 bp, Homo sapien
tctggtcctttagatctgagagaca

SEQ ID NO: 2208520 - DNA, 25 bp, Homo sapien
gggagattccctggagcctgccgaa

SEQ ID NO: 2208521 - DNA, 25 bp, Homo sapien
attccctggagcctgccgaaagtca

SEQ ID NO: 2208522 - DNA, 25 bp, Homo sapien
ttccctggagcctgccgaaagtcat

SEQ ID NO: 2208523 - DNA, 25 bp, Homo sapien
agattccctggagcctgccgaaagt

SEQ ID NO: 2208524 - DNA, 25 bp, Homo sapien
agagagacttctgtcgcatcagggt

SEQ ID NO: 2208525 - DNA, 25 bp, Homo sapien
ctctagagagacttctgtcgcatca

SEQ ID NO: 2208526 - DNA, 25 bp, Homo sapien
tagagagacttctgtcgcatcaggg

SEQ ID NO: 2208527 - DNA, 25 bp, Homo sapien
aaggtttccaaactctagagagact

SEQ ID NO: 2208528 - DNA, 25 bp, Homo sapien
tcttcggcccgtttattacacatga

SEQ ID NO: 2208529 - DNA, 25 bp, Homo sapien
agtcttcggcccgtttattacacat

SEQ ID NO: 2208530 - DNA, 25 bp, Homo sapien
acggttagggtcattatccaaatca

SEQ ID NO: 2208531 - DNA, 25 bp, Homo sapien
tcccacggttagggtcattatccaa

SEQ ID NO: 2208532 - DNA, 25 bp, Homo sapien
tagaagattttctccgaggctttca

SEQ ID NO: 2208533 - DNA, 25 bp, Homo sapien
cacatagaagattttctccgaggct

SEQ ID NO: 2208534 - DNA, 25 bp, Homo sapien
agaagattttctccgaggctttcat

SEQ ID NO: 2208535 - DNA, 25 bp, Homo sapien
catagaagattttctccgaggcttt

SEQ ID NO: 2208536 - DNA, 25 bp, Homo sapien
tgagcaccaaccgtgggtctccttg

SEQ ID NO: 2208537 - DNA, 25 bp, Homo sapien
tatttgagcaccaaccgtgggtctc

SEQ ID NO: 2208538 - DNA, 25 bp, Homo sapien
ggtatttgagcaccaaccgtgggtc

SEQ ID NO: 2208539 - DNA, 25 bp, Homo sapien
tcttctctggtatttgagcaccaac

SEQ ID NO: 2208540 - DNA, 25 bp, Homo sapien
ctttccagccacagcagctttgatc

SEQ ID NO: 2208541 - DNA, 25 bp, Homo sapien
gcaagagaaatagcctgagtctttc

SEQ ID NO: 2208542 - DNA, 25 bp, Homo sapien
ctgcaagagaaatagcctgagtctt

SEQ ID NO: 2208543 - DNA, 25 bp, Homo sapien
agagaaatagcctgagtctttccag

SEQ ID NO: 2208544 - DNA, 25 bp, Homo sapien
ctgcatttctccatccggggcttat

SEQ ID NO: 2208545 - DNA, 25 bp, Homo sapien
gcatttctccatccggggcttatct

SEQ ID NO: 2208546 - DNA, 25 bp, Homo sapien
ttctccatccggggcttatctgtcc

SEQ ID NO: 2208547 - DNA, 25 bp, Homo sapien
atttctccatccggggcttatctgt

SEQ ID NO: 2208548 - DNA, 25 bp, Homo sapien
ctgaaagatgtacggaccctttttg

SEQ ID NO: 2208549 - DNA, 25 bp, Homo sapien
ctgtgtaattttattcagtgggggc

SEQ ID NO: 2208550 - DNA, 25 bp, Homo sapien
gtgtaattttattcagtgggggcat

SEQ ID NO: 2208551 - DNA, 25 bp, Homo sapien
gactgtgtaattttattcagtgggg

SEQ ID NO: 2208552 - DNA, 25 bp, Homo sapien
tgtgtaattttattcagtgggggca

SEQ ID NO: 2208553 - DNA, 25 bp, Homo sapien
gagaaaatcagaccgtgcgtactct

SEQ ID NO: 2208554 - DNA, 25 bp, Homo sapien
ttggaagaatccaaagagaaaatca

SEQ ID NO: 2208555 - DNA, 25 bp, Homo sapien
tttggaagaatccaaagagaaaatc

SEQ ID NO: 2208556 - DNA, 25 bp, Homo sapien
aagagaaaatcagaccgtgcgtact

SEQ ID NO: 2208557 - DNA, 25 bp, Homo sapien
ctgtgggacgatggcataatgctga

SEQ ID NO: 2208558 - DNA, 25 bp, Homo sapien
aggccctttctggaggttgatactc

SEQ ID NO: 2208559 - DNA, 25 bp, Homo sapien
gaaaatgtcagtcctgatatagtcc

SEQ ID NO: 2208560 - DNA, 25 bp, Homo sapien
ggaggttgatactctgtgtctgcag

SEQ ID NO: 2208561 - DNA, 25 bp, Homo sapien
gccaggggaacatgggtccacatac

SEQ ID NO: 2208562 - DNA, 25 bp, Homo sapien
attaagccaggggaacatgggtcca

SEQ ID NO: 2208563 - DNA, 25 bp, Homo sapien
aagccaggggaacatgggtccacat

SEQ ID NO: 2208564 - DNA, 25 bp, Homo sapien
taagccaggggaacatgggtccaca

SEQ ID NO: 2208565 - DNA, 25 bp, Homo sapien
gtggcaatccactaggctgctgagt

SEQ ID NO: 2208566 - DNA, 25 bp, Homo sapien
ggcaatccactaggctgctgagtga

SEQ ID NO: 2208567 - DNA, 25 bp, Homo sapien
caatccactaggctgctgagtgacc

SEQ ID NO: 2208568 - DNA, 25 bp, Homo sapien
ggtggcaatccactaggctgctgag

SEQ ID NO: 2208569 - DNA, 25 bp, Homo sapien
gatttcactggactctcgaatctca

SEQ ID NO: 2208570 - DNA, 25 bp, Homo sapien
tggacctcactagtgatgggcagct

SEQ ID NO: 2208571 - DNA, 25 bp, Homo sapien
gaactggatgccttcatgaagaacc

SEQ ID NO: 2208572 - DNA, 25 bp, Homo sapien
ccccagtgtctttgaccacatgatg

SEQ ID NO: 2208573 - DNA, 25 bp, Homo sapien
tgaagaaactggacctcactagtga

SEQ ID NO: 2208574 - DNA, 25 bp, Homo sapien
catgggacaaagacaaccggcccac

SEQ ID NO: 2208575 - DNA, 25 bp, Homo sapien
atgggacaaagacaaccggcccacg

SEQ ID NO: 2208576 - DNA, 25 bp, Homo sapien
gggtctacagtgcacgcatcttcct

SEQ ID NO: 2208577 - DNA, 25 bp, Homo sapien
gtgtctcctcctacatactcccaaa

SEQ ID NO: 2208578 - DNA, 25 bp, Homo sapien
tattccctgtgcatcacagggtcta

SEQ ID NO: 2208579 - DNA, 25 bp, Homo sapien
agatgacgatttcatctgtgtctcc

SEQ ID NO: 2208580 - DNA, 25 bp, Homo sapien
cactgttgtgaacacttgctttcac

SEQ ID NO: 2208581 - DNA, 25 bp, Homo sapien
tcactgttgtgaacacttgctttca

SEQ ID NO: 2208582 - DNA, 25 bp, Homo sapien
gtccacagccatgcccgtgttcatg

SEQ ID NO: 2208583 - DNA, 25 bp, Homo sapien
gggtccacagccatgcccgtgttca

SEQ ID NO: 2208584 - DNA, 25 bp, Homo sapien
ccacagccatgcccgtgttcatgaa

SEQ ID NO: 2208585 - DNA, 25 bp, Homo sapien
acagccatgcccgtgttcatgaaag

SEQ ID NO: 2208586 - DNA, 25 bp, Homo sapien
ctcagggtcgctgatctcttcataa

SEQ ID NO: 2208587 - DNA, 25 bp, Homo sapien
tgctttctctcacgcagtctgtggg

SEQ ID NO: 2208588 - DNA, 25 bp, Homo sapien
tctgtgggtccaggcatgtttcccc

SEQ ID NO: 2208589 - DNA, 25 bp, Homo sapien
atcttcctcagggtcgctgatctct

SEQ ID NO: 2208590 - DNA, 25 bp, Homo sapien
gaagattctctagagtctgccgaaa

SEQ ID NO: 2208591 - DNA, 25 bp, Homo sapien
gattctctagagtctgccgaaagtc

SEQ ID NO: 2208592 - DNA, 25 bp, Homo sapien
ttctctagagtctgccgaaagtcat

SEQ ID NO: 2208593 - DNA, 25 bp, Homo sapien
tcgggaagattctctagagtctgcc

SEQ ID NO: 2208594 - DNA, 25 bp, Homo sapien
tcagaaatcattgttggtatacagg

SEQ ID NO: 2208595 - DNA, 25 bp, Homo sapien
cagaaatcattgttggtatacaggt

SEQ ID NO: 2208596 - DNA, 25 bp, Homo sapien
gcgtaagtcatataacctttccgtg

SEQ ID NO: 2208597 - DNA, 25 bp, Homo sapien
tttccgtgtttcaggctactcaaga

SEQ ID NO: 2208598 - DNA, 25 bp, Homo sapien
gaatagtgcctgtcatgtggttaag

SEQ ID NO: 2208599 - DNA, 25 bp, Homo sapien
taaatgggcaagtacctgtaaagca

SEQ ID NO: 2208600 - DNA, 25 bp, Homo sapien
cgtggtgacctttcacgaacatagg

SEQ ID NO: 2208601 - DNA, 25 bp, Homo sapien
agaacgtggtgacctttcacgaaca

SEQ ID NO: 2208602 - DNA, 25 bp, Homo sapien
ggtgacctttcacgaacataggcat

SEQ ID NO: 2208603 - DNA, 25 bp, Homo sapien
tgcccatgatgagaagtagaacgtg

SEQ ID NO: 2208604 - DNA, 25 bp, Homo sapien
caggattctgtagcaggtggttggg

SEQ ID NO: 2208605 - DNA, 25 bp, Homo sapien
tcgtcatctggggaacgtggaagaa

SEQ ID NO: 2208606 - DNA, 25 bp, Homo sapien
gaataaggcagatgcgtgcaatgta

SEQ ID NO: 2208607 - DNA, 25 bp, Homo sapien
tgattttcggtttcaaggtctggga

SEQ ID NO: 2208608 - DNA, 25 bp, Homo sapien
tactagatattgaataccgtatcct

SEQ ID NO: 2208609 - DNA, 25 bp, Homo sapien
tgtattacccaaatgtaacattcgg

SEQ ID NO: 2208610 - DNA, 25 bp, Homo sapien
taccgtatcctccatgcaaatagag

SEQ ID NO: 2208611 - DNA, 25 bp, Homo sapien
cagaggaaacaaattcgattttatc

SEQ ID NO: 2208612 - DNA, 25 bp, Homo sapien
tattgtaatcatcaccgttggtggt

SEQ ID NO: 2208613 - DNA, 25 bp, Homo sapien
tcatcaccgttggtggtgaggattt

SEQ ID NO: 2208614 - DNA, 25 bp, Homo sapien
ccgttggtggtgaggatttgtccaa

SEQ ID NO: 2208615 - DNA, 25 bp, Homo sapien
ttattgtaatcatcaccgttggtgg

SEQ ID NO: 2208616 - DNA, 25 bp, Homo sapien
gaagatccttcaggtaattgtaggt

SEQ ID NO: 2208617 - DNA, 25 bp, Homo sapien
ttcagataaccctaggtcttcatcc

SEQ ID NO: 2208618 - DNA, 25 bp, Homo sapien
tcctccatcaaagatccttcagatg

SEQ ID NO: 2208619 - DNA, 25 bp, Homo sapien
tcctgctttgaagattctgcagatg

SEQ ID NO: 2208620 - DNA, 25 bp, Homo sapien
catcatttttgctgttggagtcaca

SEQ ID NO: 2208621 - DNA, 25 bp, Homo sapien
ctcatcatttttgctgttggagtca

SEQ ID NO: 2208622 - DNA, 25 bp, Homo sapien
tcatttttgctgttggagtcacagg

SEQ ID NO: 2208623 - DNA, 25 bp, Homo sapien
cattggtgcttgaagtgggcttttc

SEQ ID NO: 2208624 - DNA, 25 bp, Homo sapien
tttcagcatcccctgaagacgcatc

SEQ ID NO: 2208625 - DNA, 25 bp, Homo sapien
ccctgaagacgcatcccaaactgat

SEQ ID NO: 2208626 - DNA, 25 bp, Homo sapien
gctgttgtttcagcatcccctgaag

SEQ ID NO: 2208627 - DNA, 25 bp, Homo sapien
agacgcatcccaaactgatctgctg

SEQ ID NO: 2208628 - DNA, 25 bp, Homo sapien
cgtgattggtgactccgagtgagaa

SEQ ID NO: 2208629 - DNA, 25 bp, Homo sapien
tccttagtgcgcatgttcattgggc

SEQ ID NO: 2208630 - DNA, 25 bp, Homo sapien
gtgatcctgcacttcgggtccctga

SEQ ID NO: 2208631 - DNA, 25 bp, Homo sapien
tgatgtcgtcgtccttctcgtgcgg

SEQ ID NO: 2208632 - DNA, 25 bp, Homo sapien
agaattgtcccctgaacatcaggac

SEQ ID NO: 2208633 - DNA, 25 bp, Homo sapien
tttggcagaattgtcccctgaacat

SEQ ID NO: 2208634 - DNA, 25 bp, Homo sapien
tgtcccctgaacatcaggaccatct

SEQ ID NO: 2208635 - DNA, 25 bp, Homo sapien
tgattttggcagaattgtcccctga

SEQ ID NO: 2208636 - DNA, 25 bp, Homo sapien
aattcccaagaagtgtatccatctc

SEQ ID NO: 2208637 - DNA, 25 bp, Homo sapien
cacagtgaagagtatactcatgcac

SEQ ID NO: 2208638 - DNA, 25 bp, Homo sapien
catgtcccatagcttaaaaaattcc

SEQ ID NO: 2208639 - DNA, 25 bp, Homo sapien
tattgggttagtagatactacgttc

SEQ ID NO: 2208640 - DNA, 25 bp, Homo sapien
tgtcagccagcacactggaaggatt

SEQ ID NO: 2208641 - DNA, 25 bp, Homo sapien
cttttgccatcctcatggaactgtc

SEQ ID NO: 2208642 - DNA, 25 bp, Homo sapien
gaactgtcagccagcacactggaag

SEQ ID NO: 2208643 - DNA, 25 bp, Homo sapien
tcatggaactgtcagccagcacact

SEQ ID NO: 2208644 - DNA, 25 bp, Homo sapien
tggtagagattgaaggccaacagac

SEQ ID NO: 2208645 - DNA, 25 bp, Homo sapien
ggttttggtagagattgaaggccaa

SEQ ID NO: 2208646 - DNA, 25 bp, Homo sapien
ggtagagattgaaggccaacagacc

SEQ ID NO: 2208647 - DNA, 25 bp, Homo sapien
ttttggtagagattgaaggccaaca

SEQ ID NO: 2208648 - DNA, 25 bp, Homo sapien
caactttcagcaaatgtttgcgatc

SEQ ID NO: 2208649 - DNA, 25 bp, Homo sapien
cacttttccagccaactttcagcaa

SEQ ID NO: 2208650 - DNA, 25 bp, Homo sapien
aatgtttgcgatcctttcctaatgt

SEQ ID NO: 2208651 - DNA, 25 bp, Homo sapien
ttcagcaaatgtttgcgatcctttc

SEQ ID NO: 2208652 - DNA, 25 bp, Homo sapien
ttcagttggtggttcctctcgaggc

SEQ ID NO: 2208653 - DNA, 25 bp, Homo sapien
tggtggttcctctcgaggctcctca

SEQ ID NO: 2208654 - DNA, 25 bp, Homo sapien
tggttcctctcgaggctcctcatca

SEQ ID NO: 2208655 - DNA, 25 bp, Homo sapien
gttggtggttcctctcgaggctcct

SEQ ID NO: 2208656 - DNA, 25 bp, Homo sapien
gaacacggcttgaccctgatcagaa

SEQ ID NO: 2208657 - DNA, 25 bp, Homo sapien
ccagtccactttgggccttgagaaa

SEQ ID NO: 2208658 - DNA, 25 bp, Homo sapien
acctaggatgattgcttgccggagc

SEQ ID NO: 2208659 - DNA, 25 bp, Homo sapien
cctgcgtaatggtcggtgtctcata

SEQ ID NO: 2208660 - DNA, 25 bp, Homo sapien
ggatctctcatgaattttttggtca

SEQ ID NO: 2208661 - DNA, 25 bp, Homo sapien
catccttaaacccatggctcaacat

SEQ ID NO: 2208662 - DNA, 25 bp, Homo sapien
tagatttcatccttaaacccatggc

SEQ ID NO: 2208663 - DNA, 25 bp, Homo sapien
tttcatccttaaacccatggctcaa

SEQ ID NO: 2208664 - DNA, 25 bp, Homo sapien
catagatttcatccttaaacccatg

SEQ ID NO: 2208665 - DNA, 25 bp, Homo sapien
ttgatccattttggaaaaagatatc

SEQ ID NO: 2208666 - DNA, 25 bp, Homo sapien
caagtgtaccaacaacaatatgtgg

SEQ ID NO: 2208667 - DNA, 25 bp, Homo sapien
tccaccaatgcaggcatgacaagtt

SEQ ID NO: 2208668 - DNA, 25 bp, Homo sapien
tgcatttcagtttgaacatttgttc

SEQ ID NO: 2208669 - DNA, 25 bp, Homo sapien
catgacaagttgctcccatatagtc

SEQ ID NO: 2208670 - DNA, 25 bp, Homo sapien
tctccaactgttgcaggatggaaat

SEQ ID NO: 2208671 - DNA, 25 bp, Homo sapien
tgtggctgtcttgccagtacctgac

SEQ ID NO: 2208672 - DNA, 25 bp, Homo sapien
aatagcaaatgtggctgtcttgcca

SEQ ID NO: 2208673 - DNA, 25 bp, Homo sapien
caaatgtggctgtcttgccagtacc

SEQ ID NO: 2208674 - DNA, 25 bp, Homo sapien
gatctcattacagttgctctcaatg

SEQ ID NO: 2208675 - DNA, 25 bp, Homo sapien
aatagcagaagacttctcaaaatcg

SEQ ID NO: 2208676 - DNA, 25 bp, Homo sapien
atcataccctttcatacaggtaata

SEQ ID NO: 2208677 - DNA, 25 bp, Homo sapien
agaagacttctcaaaatcgtaagca

SEQ ID NO: 2208678 - DNA, 25 bp, Homo sapien
cctctgggctgccacgttctctgtt

SEQ ID NO: 2208679 - DNA, 25 bp, Homo sapien
tctgggctgccacgttctctgttat

SEQ ID NO: 2208680 - DNA, 25 bp, Homo sapien
catcagggtccattccctctgggct

SEQ ID NO: 2208681 - DNA, 25 bp, Homo sapien
tgggctgccacgttctctgttataa

SEQ ID NO: 2208682 - DNA, 25 bp, Homo sapien
gatccaaaaaaccactcagtgcccg

SEQ ID NO: 2208683 - DNA, 25 bp, Homo sapien
atccaaaaaaccactcagtgcccga

SEQ ID NO: 2208684 - DNA, 25 bp, Homo sapien
ttggtgaacacaccggctatgcccg

SEQ ID NO: 2208685 - DNA, 25 bp, Homo sapien
tagttgatgcggaaaatcaagtggg

SEQ ID NO: 2208686 - DNA, 25 bp, Homo sapien
tagtgtgatctctcattagttggtg

SEQ ID NO: 2208687 - DNA, 25 bp, Homo sapien
tatgcccgttgctgttactgcactg

SEQ ID NO: 2208688 - DNA, 25 bp, Homo sapien
gaaacatacccagtagatctctgtg

SEQ ID NO: 2208689 - DNA, 25 bp, Homo sapien
aaacatacccagtagatctctgtgt

SEQ ID NO: 2208690 - DNA, 25 bp, Homo sapien
ggaaacatacccagtagatctctgt

SEQ ID NO: 2208691 - DNA, 25 bp, Homo sapien
aacatacccagtagatctctgtgtc

SEQ ID NO: 2208692 - DNA, 25 bp, Homo sapien
gctgcaaaagtttatttcgatattt

SEQ ID NO: 2208693 - DNA, 25 bp, Homo sapien
ggtcatcaggaccatttccacattc

SEQ ID NO: 2208694 - DNA, 25 bp, Homo sapien
atttccacattcacccccagtcttt

SEQ ID NO: 2208695 - DNA, 25 bp, Homo sapien
tcttcccctggtcatcaggaccatt

SEQ ID NO: 2208696 - DNA, 25 bp, Homo sapien
agaatcttcccctggtcatcaggac

SEQ ID NO: 2208697 - DNA, 25 bp, Homo sapien
tgctgaggctcctcatcaccgggct

SEQ ID NO: 2208698 - DNA, 25 bp, Homo sapien
ctcttgctgaggctcctcatcaccg

SEQ ID NO: 2208699 - DNA, 25 bp, Homo sapien
ttgctgaggctcctcatcaccgggc

SEQ ID NO: 2208700 - DNA, 25 bp, Homo sapien
tctcctgaccaggtgcaggatcccg

SEQ ID NO: 2208701 - DNA, 25 bp, Homo sapien
aagttttgttatcgatacatttcaa

SEQ ID NO: 2208702 - DNA, 25 bp, Homo sapien
agaggttactctaagacagttgccc

SEQ ID NO: 2208703 - DNA, 25 bp, Homo sapien
taagctgggatgaatgtgtgtaatc

SEQ ID NO: 2208704 - DNA, 25 bp, Homo sapien
catttctccaacacgattccacata

SEQ ID NO: 2208705 - DNA, 25 bp, Homo sapien
ggtggtacacttctcctcggcctag

SEQ ID NO: 2208706 - DNA, 25 bp, Homo sapien
tggtacacttctcctcggcctaggc

SEQ ID NO: 2208707 - DNA, 25 bp, Homo sapien
tacacttctcctcggcctaggccta

SEQ ID NO: 2208708 - DNA, 25 bp, Homo sapien
gaggtggtacacttctcctcggcct

SEQ ID NO: 2208709 - DNA, 25 bp, Homo sapien
tgcaaacagaatactgtgaattggt

SEQ ID NO: 2208710 - DNA, 25 bp, Homo sapien
tactgtgaattggtaaatgcacttg

SEQ ID NO: 2208711 - DNA, 25 bp, Homo sapien
agacagctatatttgaccacttcca

SEQ ID NO: 2208712 - DNA, 25 bp, Homo sapien
aatgcacttgaaaagacagctatat

SEQ ID NO: 2208713 - DNA, 25 bp, Homo sapien
cacaactgaactctcctccgtggag

SEQ ID NO: 2208714 - DNA, 25 bp, Homo sapien
ccattaagttggtcaagctagctga

SEQ ID NO: 2208715 - DNA, 25 bp, Homo sapien
agctagctgagcaatttcttaaggc

SEQ ID NO: 2208716 - DNA, 25 bp, Homo sapien
caagtgtaagtatgtgtgccttctg

SEQ ID NO: 2208717 - DNA, 25 bp, Homo sapien
gtcgacacggaggagtctggaatcc

SEQ ID NO: 2208718 - DNA, 25 bp, Homo sapien
atccgtcctcggtcgagggttccag

SEQ ID NO: 2208719 - DNA, 25 bp, Homo sapien
tgctccttcccgggtcgacacggag

SEQ ID NO: 2208720 - DNA, 25 bp, Homo sapien
agggactcggatacctgccccagca

SEQ ID NO: 2208721 - DNA, 25 bp, Homo sapien
ttcaccacaacaaggcccatggcag

SEQ ID NO: 2208722 - DNA, 25 bp, Homo sapien
actcacacttcaacccttgggagga

SEQ ID NO: 2208723 - DNA, 25 bp, Homo sapien
tggcagtgccacctcacgaggagaa

SEQ ID NO: 2208724 - DNA, 25 bp, Homo sapien
ggacgatcaccttgagacccttcgg

SEQ ID NO: 2208725 - DNA, 25 bp, Homo sapien
gaaaaagtccagacagcaggaacgc

SEQ ID NO: 2208726 - DNA, 25 bp, Homo sapien
ccctcacaccctcacaactccaggg

SEQ ID NO: 2208727 - DNA, 25 bp, Homo sapien
cagctgcgtctcagtgggacagaaa

SEQ ID NO: 2208728 - DNA, 25 bp, Homo sapien
acgcgaccctcacaccctcacaact

SEQ ID NO: 2208729 - DNA, 25 bp, Homo sapien
ccacactgtacttactccaaaattt

SEQ ID NO: 2208730 - DNA, 25 bp, Homo sapien
tactccaaaatttaacacatagttg

SEQ ID NO: 2208731 - DNA, 25 bp, Homo sapien
tcctactctccaataaaacagactt

SEQ ID NO: 2208732 - DNA, 25 bp, Homo sapien
ttctcagcaccacactgtacttact

SEQ ID NO: 2208733 - DNA, 25 bp, Homo sapien
gagcaaatagccctgccctagggct

SEQ ID NO: 2208734 - DNA, 25 bp, Homo sapien
catgagcaaatagccctgccctagg

SEQ ID NO: 2208735 - DNA, 25 bp, Homo sapien
tccatgagcaaatagccctgcccta

SEQ ID NO: 2208736 - DNA, 25 bp, Homo sapien
gcaaatagccctgccctagggctgg

SEQ ID NO: 2208737 - DNA, 25 bp, Homo sapien
gacagacgcgttcatccaggtgttc

SEQ ID NO: 2208738 - DNA, 25 bp, Homo sapien
cttgacagacgcgttcatccaggtg

SEQ ID NO: 2208739 - DNA, 25 bp, Homo sapien
agacttgacagacgcgttcatccag

SEQ ID NO: 2208740 - DNA, 25 bp, Homo sapien
ccagacttgacagacgcgttcatcc

SEQ ID NO: 2208741 - DNA, 25 bp, Homo sapien
gcacattcccgagctgttggtacag

SEQ ID NO: 2208742 - DNA, 25 bp, Homo sapien
ggtagggtatcacaaatgattcact

SEQ ID NO: 2208743 - DNA, 25 bp, Homo sapien
tattcttggatgtgcttggactcag

SEQ ID NO: 2208744 - DNA, 25 bp, Homo sapien
gattcacttagacgggaagtctgtc

SEQ ID NO: 2208745 - DNA, 25 bp, Homo sapien
tacctggaggaatgtgacctggcca

SEQ ID NO: 2208746 - DNA, 25 bp, Homo sapien
ttcaccgaaggcaccgctgaatgga

SEQ ID NO: 2208747 - DNA, 25 bp, Homo sapien
cagcgacctgactgccttgggtgag

SEQ ID NO: 2208748 - DNA, 25 bp, Homo sapien
tatatatcatagcatgccctgggag

SEQ ID NO: 2208749 - DNA, 25 bp, Homo sapien
cagacccagtaggatagagatgatc

SEQ ID NO: 2208750 - DNA, 25 bp, Homo sapien
tgactacctgttcttttgttacaaa

SEQ ID NO: 2208751 - DNA, 25 bp, Homo sapien
agtgggcattgctggctttactgac

SEQ ID NO: 2208752 - DNA, 25 bp, Homo sapien
aaattgtatctcttccgctccagac

SEQ ID NO: 2208753 - DNA, 25 bp, Homo sapien
taagctggtgagatgtatgatctca

SEQ ID NO: 2208754 - DNA, 25 bp, Homo sapien
ttatcaccttgcgttgcagtctggg

SEQ ID NO: 2208755 - DNA, 25 bp, Homo sapien
tagatggcattaatattctaagctg

SEQ ID NO: 2208756 - DNA, 25 bp, Homo sapien
ggttgagtaagatgaataattctgt

SEQ ID NO: 2208757 - DNA, 25 bp, Homo sapien
tagtgtgaatgccttgtcgctgtcc

SEQ ID NO: 2208758 - DNA, 25 bp, Homo sapien
gggagtcctcccagcatgatgcttg

SEQ ID NO: 2208759 - DNA, 25 bp, Homo sapien
tctgagaagcagcactaggcctgtt

SEQ ID NO: 2208760 - DNA, 25 bp, Homo sapien
tcaagaatgggcaggtaaacgcagt

SEQ ID NO: 2208761 - DNA, 25 bp, Homo sapien
ctgtctcccttctgggctacgtcga

SEQ ID NO: 2208762 - DNA, 25 bp, Homo sapien
cctgtctcccttctgggctacgtcg

SEQ ID NO: 2208763 - DNA, 25 bp, Homo sapien
tagagagtctctgccaatacaaagc

SEQ ID NO: 2208764 - DNA, 25 bp, Homo sapien
gtctctaaatgatgggctcctactg

SEQ ID NO: 2208765 - DNA, 25 bp, Homo sapien
gagatacattacagggcccgggtct

SEQ ID NO: 2208766 - DNA, 25 bp, Homo sapien
tggctttttccagaggcttgcagca

SEQ ID NO: 2208767 - DNA, 25 bp, Homo sapien
cattgcaaagctccttaaactctct

SEQ ID NO: 2208768 - DNA, 25 bp, Homo sapien
gcagtctccgggtgtctacctgggt

SEQ ID NO: 2208769 - DNA, 25 bp, Homo sapien
agcccaggtgccgtcgggaactgaa

SEQ ID NO: 2208770 - DNA, 25 bp, Homo sapien
ctttgtcaaggaaactcgtcattgc

SEQ ID NO: 2208771 - DNA, 25 bp, Homo sapien
ccatgcgtgaggctggcgtaacttg

SEQ ID NO: 2208772 - DNA, 25 bp, Homo sapien
atgcgtgaggctggcgtaacttgca

SEQ ID NO: 2208773 - DNA, 25 bp, Homo sapien
cgtgaggctggcgtaacttgcattt

SEQ ID NO: 2208774 - DNA, 25 bp, Homo sapien
tgaggctggcgtaacttgcattttt

SEQ ID NO: 2208775 - DNA, 25 bp, Homo sapien
actagcgcggttgctatggttgcga

SEQ ID NO: 2208776 - DNA, 25 bp, Homo sapien
ttaccgacgccgtaagcacttcctg

SEQ ID NO: 2208777 - DNA, 25 bp, Homo sapien
gctgctgtggttgcgggaacgggac

SEQ ID NO: 2208778 - DNA, 25 bp, Homo sapien
cgggttgcgttttccggcgctacag

SEQ ID NO: 2208779 - DNA, 25 bp, Homo sapien
gttgagcttcttcagtaacccacag

SEQ ID NO: 2208780 - DNA, 25 bp, Homo sapien
cacagagctggattgccagaaaagc

SEQ ID NO: 2208781 - DNA, 25 bp, Homo sapien
gcttcttcagacagttcctgttgtt

SEQ ID NO: 2208782 - DNA, 25 bp, Homo sapien
ccagaaaagcctgcaacctgagacc

SEQ ID NO: 2208783 - DNA, 25 bp, Homo sapien
ctgtgatggatcatagcctagaaat

SEQ ID NO: 2208784 - DNA, 25 bp, Homo sapien
caagctccaattcagactggagagg

SEQ ID NO: 2208785 - DNA, 25 bp, Homo sapien
gcagtcttggtatctccattgccca

SEQ ID NO: 2208786 - DNA, 25 bp, Homo sapien
gactggagaggccaaacagcagtct

SEQ ID NO: 2208787 - DNA, 25 bp, Homo sapien
caaaattataaaccacagcatcggc

SEQ ID NO: 2208788 - DNA, 25 bp, Homo sapien
gcaaggtttctagtaaagctcgacc

SEQ ID NO: 2208789 - DNA, 25 bp, Homo sapien
tcggcacacatgcttgtctagctgt

SEQ ID NO: 2208790 - DNA, 25 bp, Homo sapien
aatataagtaccagcagcaggtagg

SEQ ID NO: 2208791 - DNA, 25 bp, Homo sapien
cctcataagagaacacggtgacagc

SEQ ID NO: 2208792 - DNA, 25 bp, Homo sapien
cagctgtctttggatcacgagttaa

SEQ ID NO: 2208793 - DNA, 25 bp, Homo sapien
tgcactggagttttacaggaacaca

SEQ ID NO: 2208794 - DNA, 25 bp, Homo sapien
aatggccaccgctgtgtgataggac

SEQ ID NO: 2208795 - DNA, 25 bp, Homo sapien
tatttcgcctcgcatgttctccagc

SEQ ID NO: 2208796 - DNA, 25 bp, Homo sapien
tctccagcaaggctgaacgccctac

SEQ ID NO: 2208797 - DNA, 25 bp, Homo sapien
ttttctttattctgcgttatttcgc

SEQ ID NO: 2208798 - DNA, 25 bp, Homo sapien
tctgcgttatttcgcctcgcatgtt

SEQ ID NO: 2208799 - DNA, 25 bp, Homo sapien
catcggaaaacgatgggcagcgttt

SEQ ID NO: 2208800 - DNA, 25 bp, Homo sapien
ctcttccatcggaaaacgatgggca

SEQ ID NO: 2208801 - DNA, 25 bp, Homo sapien
agcgttttttcgctcgcgaagggag

SEQ ID NO: 2208802 - DNA, 25 bp, Homo sapien
gatgggcagcgttttttcgctcgcg

SEQ ID NO: 2208803 - DNA, 25 bp, Homo sapien
tttcggcaccaagccctgagagatc

SEQ ID NO: 2208804 - DNA, 25 bp, Homo sapien
ttctccactacttttcggcaccaag

SEQ ID NO: 2208805 - DNA, 25 bp, Homo sapien
tgccggcgaaataaaccgaaagcca

SEQ ID NO: 2208806 - DNA, 25 bp, Homo sapien
actacttttcggcaccaagccctga

SEQ ID NO: 2208807 - DNA, 25 bp, Homo sapien
catccggacagaaagttcctgcgcc

SEQ ID NO: 2208808 - DNA, 25 bp, Homo sapien
cgcaataagttcctgcggcgccaga

SEQ ID NO: 2208809 - DNA, 25 bp, Homo sapien
tttgaacacgcttcccacgtggcac

SEQ ID NO: 2208810 - DNA, 25 bp, Homo sapien
tccctgcggttaggagctgacggct

SEQ ID NO: 2208811 - DNA, 25 bp, Homo sapien
cgcacccctccacgatgtgaaggaa

SEQ ID NO: 2208812 - DNA, 25 bp, Homo sapien
ttaatccgccgatcctccctggcga

SEQ ID NO: 2208813 - DNA, 25 bp, Homo sapien
agaacctctccgtcctcacgggtct

SEQ ID NO: 2208814 - DNA, 25 bp, Homo sapien
gtctcttctgccagcggtcatgccc

SEQ ID NO: 2208815 - DNA, 25 bp, Homo sapien
gtgtgaatctccagaccaagtgccc

SEQ ID NO: 2208816 - DNA, 25 bp, Homo sapien
tggacactcctcattctgtaggtga

SEQ ID NO: 2208817 - DNA, 25 bp, Homo sapien
gatggattcctgcatcacgaactcc

SEQ ID NO: 2208818 - DNA, 25 bp, Homo sapien
ggttccgtccttctccgcttgtgtg

SEQ ID NO: 2208819 - DNA, 25 bp, Homo sapien
aaatggaaaccctgatgattgctga

SEQ ID NO: 2208820 - DNA, 25 bp, Homo sapien
acagtcgacgtagcccagaagggag

SEQ ID NO: 2208821 - DNA, 25 bp, Homo sapien
atgactgtcactggcagcatggacc

SEQ ID NO: 2208822 - DNA, 25 bp, Homo sapien
gactgagaaggtccgcagagagcat

SEQ ID NO: 2208823 - DNA, 25 bp, Homo sapien
ttctgtcggcaggagatgtgtagac

SEQ ID NO: 2208824 - DNA, 25 bp, Homo sapien
tgtcggcaggagatgtgtagacttt

SEQ ID NO: 2208825 - DNA, 25 bp, Homo sapien
tctgtcggcaggagatgtgtagact

SEQ ID NO: 2208826 - DNA, 25 bp, Homo sapien
ctgtcggcaggagatgtgtagactt

SEQ ID NO: 2208827 - DNA, 25 bp, Homo sapien
tgcttccacgtctcctgtgcacagg

SEQ ID NO: 2208828 - DNA, 25 bp, Homo sapien
cgtgggcggcggactctgcttccac

SEQ ID NO: 2208829 - DNA, 25 bp, Homo sapien
tgggcggcggactctgcttccacgt

SEQ ID NO: 2208830 - DNA, 25 bp, Homo sapien
ggcggcggactctgcttccacgtct

SEQ ID NO: 2208831 - DNA, 25 bp, Homo sapien
cctgtaagggagactactactcgac

SEQ ID NO: 2208832 - DNA, 25 bp, Homo sapien
tttacctgcccattcttgaaactgg

SEQ ID NO: 2208833 - DNA, 25 bp, Homo sapien
acacaaatagtacagcggtgaacca

SEQ ID NO: 2208834 - DNA, 25 bp, Homo sapien
gtattgatgatgaggaaccccgtca

SEQ ID NO: 2208835 - DNA, 25 bp, Homo sapien
caaggcattcacactacacagacat

SEQ ID NO: 2208836 - DNA, 25 bp, Homo sapien
tcagaggcagtcaactcaatggtgc

SEQ ID NO: 2208837 - DNA, 25 bp, Homo sapien
gcacattgcatttcaacaggcctag

SEQ ID NO: 2208838 - DNA, 25 bp, Homo sapien
tggtgcaaaagcacaggacagcgac

SEQ ID NO: 2208839 - DNA, 25 bp, Homo sapien
gatcccgggtgggaaagcgacaaca

SEQ ID NO: 2208840 - DNA, 25 bp, Homo sapien
gtgatctcttactgacagcaggaag

SEQ ID NO: 2208841 - DNA, 25 bp, Homo sapien
gatctcttactgacagcaggaaggg

SEQ ID NO: 2208842 - DNA, 25 bp, Homo sapien
cgacaacatgcatcacaggagccat

SEQ ID NO: 2208843 - DNA, 25 bp, Homo sapien
tacgcagcgtcccttgccaaggaat

SEQ ID NO: 2208844 - DNA, 25 bp, Homo sapien
tgacaggcacgaaacatgaggacct

SEQ ID NO: 2208845 - DNA, 25 bp, Homo sapien
tcacagccatccgagaatgacaggc

SEQ ID NO: 2208846 - DNA, 25 bp, Homo sapien
tcctcgggtcagtcaagcatcatgc

SEQ ID NO: 2208847 - DNA, 25 bp, Homo sapien
gggccatgtgatcgcggtgtctcct

SEQ ID NO: 2208848 - DNA, 25 bp, Homo sapien
tgcctaggctgagagtcaagccact

SEQ ID NO: 2208849 - DNA, 25 bp, Homo sapien
gatcccagaaagattcggcctgtgg

SEQ ID NO: 2208850 - DNA, 25 bp, Homo sapien
ggctctggcagtatcgacattcaca

SEQ ID NO: 2208851 - DNA, 25 bp, Homo sapien
ccttcctgggaagtctctgcagctg

SEQ ID NO: 2208852 - DNA, 25 bp, Homo sapien
ctgttctgagtacgaaggctgagag

SEQ ID NO: 2208853 - DNA, 25 bp, Homo sapien
gatttggaaggcgatgctggattcc

SEQ ID NO: 2208854 - DNA, 25 bp, Homo sapien
gattccgtttctggagtggatccat

SEQ ID NO: 2208855 - DNA, 25 bp, Homo sapien
caggccctcgggtccagaaaaggag

SEQ ID NO: 2208856 - DNA, 25 bp, Homo sapien
tcagacaccaagaaggtggcgagga

SEQ ID NO: 2208857 - DNA, 25 bp, Homo sapien
ctggaagctccgccaggccctcggg

SEQ ID NO: 2208858 - DNA, 25 bp, Homo sapien
gtggcgaggaatgtgtgcgggcaga

SEQ ID NO: 2208859 - DNA, 25 bp, Homo sapien
aatgctgcaccaaacgcacctctca

SEQ ID NO: 2208860 - DNA, 25 bp, Homo sapien
ctgcaccaaacgcacctctcacact

SEQ ID NO: 2208861 - DNA, 25 bp, Homo sapien
tcctggccagttctgttcccatgcc

SEQ ID NO: 2208862 - DNA, 25 bp, Homo sapien
gttcccatgccagaaatgctgcacc

SEQ ID NO: 2208863 - DNA, 25 bp, Homo sapien
caaggagcaagtccgctctggcgag

SEQ ID NO: 2208864 - DNA, 25 bp, Homo sapien
cacagaaaagcagcgggagtacaac

SEQ ID NO: 2208865 - DNA, 25 bp, Homo sapien
ggtagtcagtaaagccagcaatgcc

SEQ ID NO: 2208866 - DNA, 25 bp, Homo sapien
ccagcaatgcccactttcaagaaag

SEQ ID NO: 2208867 - DNA, 25 bp, Homo sapien
aggcagtcaggtcgctgggttcaca

SEQ ID NO: 2208868 - DNA, 25 bp, Homo sapien
ggccgagtgactgctacacctttca

SEQ ID NO: 2208869 - DNA, 25 bp, Homo sapien
gctgggttcacaaggtcgatgctgt

SEQ ID NO: 2208870 - DNA, 25 bp, Homo sapien
tgctgtgggtgtaggccgagtgact

SEQ ID NO: 2208871 - DNA, 25 bp, Homo sapien
aaagaaaataacctcactggccagg

SEQ ID NO: 2208872 - DNA, 25 bp, Homo sapien
tccattcagcggtgccttcggtgaa

SEQ ID NO: 2208873 - DNA, 25 bp, Homo sapien
gatgctgcacagctatggtcccagc

SEQ ID NO: 2208874 - DNA, 25 bp, Homo sapien
caaggacgtgtcttaatctgaggaa

SEQ ID NO: 2208875 - DNA, 25 bp, Homo sapien
tctcccagggcatgctatgatatat

SEQ ID NO: 2208876 - DNA, 25 bp, Homo sapien
tattgtcacccgttttaattcgcat

SEQ ID NO: 2208877 - DNA, 25 bp, Homo sapien
gacaactatggcaggcatgagacgg

SEQ ID NO: 2208878 - DNA, 25 bp, Homo sapien
tcaccatagcccaggtggtcaggaa

SEQ ID NO: 2208879 - DNA, 25 bp, Homo sapien
ggctacacacggtatagatttcgtc

SEQ ID NO: 2208880 - DNA, 25 bp, Homo sapien
agatttcgtcttagcacatcaggcc

SEQ ID NO: 2208881 - DNA, 25 bp, Homo sapien
gaacctgaatttcccgtgcccggca

SEQ ID NO: 2208882 - DNA, 25 bp, Homo sapien
ttagtttcatattctcataagcggc

SEQ ID NO: 2208883 - DNA, 25 bp, Homo sapien
gacacactgcccgttttataggaag

SEQ ID NO: 2208884 - DNA, 25 bp, Homo sapien
caaagtgcttccctatgaaaagtat

SEQ ID NO: 2208885 - DNA, 25 bp, Homo sapien
gataagctcagccaaccaaggccat

SEQ ID NO: 2208886 - DNA, 25 bp, Homo sapien
tccactgctagtgccctgataagct

SEQ ID NO: 2208887 - DNA, 25 bp, Homo sapien
agggtcgcctgtactccagcaaggt

SEQ ID NO: 2208888 - DNA, 25 bp, Homo sapien
ggcctggaccattcattgcgcacga

SEQ ID NO: 2208889 - DNA, 25 bp, Homo sapien
cacatttctgatggcggagagggct

SEQ ID NO: 2208890 - DNA, 25 bp, Homo sapien
tgcgcacgaatgcagcaatcacacc

SEQ ID NO: 2208891 - DNA, 25 bp, Homo sapien
tgaacccgctgaacactgatcctag

SEQ ID NO: 2208892 - DNA, 25 bp, Homo sapien
tctgtcacacgtcggagaaagggtt

SEQ ID NO: 2208893 - DNA, 25 bp, Homo sapien
tatggacgacgtggaaaatcacccg

SEQ ID NO: 2208894 - DNA, 25 bp, Homo sapien
tgatcctagcccaagtgtagtcccg

SEQ ID NO: 2208895 - DNA, 25 bp, Homo sapien
ccgtccaagcgccaacgcggcgcct

SEQ ID NO: 2208896 - DNA, 25 bp, Homo sapien
gagccggttcccgccgtccaagcgc

SEQ ID NO: 2208897 - DNA, 25 bp, Homo sapien
tccaagcgccaacgcggcgcctcgt

SEQ ID NO: 2208898 - DNA, 25 bp, Homo sapien
gttcccgccgtccaagcgccaacgc

SEQ ID NO: 2208899 - DNA, 25 bp, Homo sapien
ggggcgccggcgaggatgtgctcac

SEQ ID NO: 2208900 - DNA, 25 bp, Homo sapien
ctagaggcgccgcagcgcggaaggg

SEQ ID NO: 2208901 - DNA, 25 bp, Homo sapien
atgcgacgccgctgagaaactgaac

SEQ ID NO: 2208902 - DNA, 25 bp, Homo sapien
acagggatgcgacgccgctgagaaa

SEQ ID NO: 2208903 - DNA, 25 bp, Homo sapien
ggatgcgacgccgctgagaaactga

SEQ ID NO: 2208904 - DNA, 25 bp, Homo sapien
tcacagggatgcgacgccgctgaga

SEQ ID NO: 2208905 - DNA, 25 bp, Homo sapien
ccggagccggaagacggagcggttg

SEQ ID NO: 2208906 - DNA, 25 bp, Homo sapien
ggagcggttgggtggcttctcgcga

SEQ ID NO: 2208907 - DNA, 25 bp, Homo sapien
aagacggagcggttgggtggcttct

SEQ ID NO: 2208908 - DNA, 25 bp, Homo sapien
ttgggtggcttctcgcgacccacgc

SEQ ID NO: 2208909 - DNA, 25 bp, Homo sapien
ggcgttcccggagcggcttctctga

SEQ ID NO: 2208910 - DNA, 25 bp, Homo sapien
ggcttgtggactgccgaatgcttcc

SEQ ID NO: 2208911 - DNA, 25 bp, Homo sapien
gactgccgaatgcttccggaggcca

SEQ ID NO: 2208912 - DNA, 25 bp, Homo sapien
aggcgtggaggtcatcccttccgga

SEQ ID NO: 2208913 - DNA, 25 bp, Homo sapien
cattgaaattattcaggctactgcc

SEQ ID NO: 2208914 - DNA, 25 bp, Homo sapien
gccttagggagagcgccccagaagt

SEQ ID NO: 2208915 - DNA, 25 bp, Homo sapien
tcataggaaggagtacaccggtttc

SEQ ID NO: 2208916 - DNA, 25 bp, Homo sapien
cccagaagtggaaatcacactgttg

SEQ ID NO: 2208917 - DNA, 25 bp, Homo sapien
acacatgtggctcgattctctccct

SEQ ID NO: 2208918 - DNA, 25 bp, Homo sapien
gacttcatccccttcgtgctgtgca

SEQ ID NO: 2208919 - DNA, 25 bp, Homo sapien
tacagatttcttccgccaactgaca

SEQ ID NO: 2208920 - DNA, 25 bp, Homo sapien
aatccaggtgtctgtgacttcatcc

SEQ ID NO: 2208921 - DNA, 25 bp, Homo sapien
catgccgaatggtggtgatacccaa

SEQ ID NO: 2208922 - DNA, 25 bp, Homo sapien
agagtgttagagatcctgggtccca

SEQ ID NO: 2208923 - DNA, 25 bp, Homo sapien
taagtcgttgagtcccatagcaagt

SEQ ID NO: 2208924 - DNA, 25 bp, Homo sapien
caagccactgtatgggcaagtcgag

SEQ ID NO: 2208925 - DNA, 25 bp, Homo sapien
tcagagtaccctagggcaagtgcat

SEQ ID NO: 2208926 - DNA, 25 bp, Homo sapien
caggcgtcctaatcgagtatgtggt

SEQ ID NO: 2208927 - DNA, 25 bp, Homo sapien
gacatgaacacctggatgaacgcgt

SEQ ID NO: 2208928 - DNA, 25 bp, Homo sapien
actattgattgggttcaggcgtcct

SEQ ID NO: 2208929 - DNA, 25 bp, Homo sapien
acaggatcccgtccttgtcaccgtg

SEQ ID NO: 2208930 - DNA, 25 bp, Homo sapien
ctggcctgacaggatcccgtccttg

SEQ ID NO: 2208931 - DNA, 25 bp, Homo sapien
gctggtgtgctagtgtccttgtggc

SEQ ID NO: 2208932 - DNA, 25 bp, Homo sapien
gccatgttggaacgactcagcctct

SEQ ID NO: 2208933 - DNA, 25 bp, Homo sapien
gggtgggtcagacatgcgtcattac

SEQ ID NO: 2208934 - DNA, 25 bp, Homo sapien
agggtgggtcagacatgcgtcatta

SEQ ID NO: 2208935 - DNA, 25 bp, Homo sapien
taagactgtggcaataagacaccaa

SEQ ID NO: 2208936 - DNA, 25 bp, Homo sapien
gagatcttaagactgtggcaataag

SEQ ID NO: 2208937 - DNA, 25 bp, Homo sapien
ttgtgcaaacggaaggagcccagac

SEQ ID NO: 2208938 - DNA, 25 bp, Homo sapien
cgagggtatccatgcttcttgcagg

SEQ ID NO: 2208939 - DNA, 25 bp, Homo sapien
tctaaatgcctgattctgctttaca

SEQ ID NO: 2208940 - DNA, 25 bp, Homo sapien
tgctttacaagagacagcacacgag

SEQ ID NO: 2208941 - DNA, 25 bp, Homo sapien
ccacagtaacggagcacgccattgt

SEQ ID NO: 2208942 - DNA, 25 bp, Homo sapien
cttttggcgaatcttcagaatgctc

SEQ ID NO: 2208943 - DNA, 25 bp, Homo sapien
cagtaggtgcagtcattcccgcaca

SEQ ID NO: 2208944 - DNA, 25 bp, Homo sapien
tcatagctttatgcgggcagtgccc

SEQ ID NO: 2208945 - DNA, 25 bp, Homo sapien
tcaatttgctttgtagtgctgcatg

SEQ ID NO: 2208946 - DNA, 25 bp, Homo sapien
gtatcaatttgctttgtagtgctgc

SEQ ID NO: 2208947 - DNA, 25 bp, Homo sapien
cagtatcaatttgctttgtagtgct

SEQ ID NO: 2208948 - DNA, 25 bp, Homo sapien
tatcaatttgctttgtagtgctgca

SEQ ID NO: 2208949 - DNA, 25 bp, Homo sapien
ccctgagtcctcaggatgggataga

SEQ ID NO: 2208950 - DNA, 25 bp, Homo sapien
aaacatgcccagtagatccctgagt

SEQ ID NO: 2208951 - DNA, 25 bp, Homo sapien
aggatgggatagaggacctcacaga

SEQ ID NO: 2208952 - DNA, 25 bp, Homo sapien
cttatggaattgtagtgatctctac

SEQ ID NO: 2208953 - DNA, 25 bp, Homo sapien
ccagtgtgtactaatctgaaatcaa

SEQ ID NO: 2208954 - DNA, 25 bp, Homo sapien
tgactctttccacatgtcaggtttt

SEQ ID NO: 2208955 - DNA, 25 bp, Homo sapien
cattgttagaaaaccagtgtgtact

SEQ ID NO: 2208956 - DNA, 25 bp, Homo sapien
gatatcatctcagtggatcatgcct

SEQ ID NO: 2208957 - DNA, 25 bp, Homo sapien
gccaagggtgcagcaaaccgtgatt

SEQ ID NO: 2208958 - DNA, 25 bp, Homo sapien
taagaaaacttagccgagtgtgctg

SEQ ID NO: 2208959 - DNA, 25 bp, Homo sapien
gttggaaacattggacatccaggat

SEQ ID NO: 2208960 - DNA, 25 bp, Homo sapien
ccttatttttgtggatagttcaaca

SEQ ID NO: 2208961 - DNA, 25 bp, Homo sapien
caaggtcgatcaccatcccagaagt

SEQ ID NO: 2208962 - DNA, 25 bp, Homo sapien
ccgtggcacaataggaggtcatccc

SEQ ID NO: 2208963 - DNA, 25 bp, Homo sapien
cagggtcccttctcaatcagtgtgt

SEQ ID NO: 2208964 - DNA, 25 bp, Homo sapien
ttcagtgtggatggcaccttccctc

SEQ ID NO: 2208965 - DNA, 25 bp, Homo sapien
gaactctactgtatcaaaagccaca

SEQ ID NO: 2208966 - DNA, 25 bp, Homo sapien
aatgactagggcgaactttgccggg

SEQ ID NO: 2208967 - DNA, 25 bp, Homo sapien
cctttgggactgtcagttggtgagt

SEQ ID NO: 2208968 - DNA, 25 bp, Homo sapien
tggtgagtaggccaaagaactctac

SEQ ID NO: 2208969 - DNA, 25 bp, Homo sapien
tgaacttcagctccgcaatcgtcgt

SEQ ID NO: 2208970 - DNA, 25 bp, Homo sapien
aatcgtcgtgcctgtcacaaactga

SEQ ID NO: 2208971 - DNA, 25 bp, Homo sapien
ctttgcggtccccagcgggatttga

SEQ ID NO: 2208972 - DNA, 25 bp, Homo sapien
tggagccaatcgcttgcccctttgc

SEQ ID NO: 2208973 - DNA, 25 bp, Homo sapien
aggctgggagaaccgagtggtgcga

SEQ ID NO: 2208974 - DNA, 25 bp, Homo sapien
aatgatgcctcgaacaggctgggag

SEQ ID NO: 2208975 - DNA, 25 bp, Homo sapien
tgaaaatgatgcctcgaacaggctg

SEQ ID NO: 2208976 - DNA, 25 bp, Homo sapien
ccgagtggtgcgagtaggaacggac

SEQ ID NO: 2208977 - DNA, 25 bp, Homo sapien
tgcccttggcctgggcctcagtcat

SEQ ID NO: 2208978 - DNA, 25 bp, Homo sapien
ctgcccttggcctgggcctcagtca

SEQ ID NO: 2208979 - DNA, 25 bp, Homo sapien
caacactgttatggggaggccttgg

SEQ ID NO: 2208980 - DNA, 25 bp, Homo sapien
cagtctgcagtcaccaccgttgttg

SEQ ID NO: 2208981 - DNA, 25 bp, Homo sapien
agctacaccctggtacacataccca

SEQ ID NO: 2208982 - DNA, 25 bp, Homo sapien
ccacaaagaatcagctcagggctgc

SEQ ID NO: 2208983 - DNA, 25 bp, Homo sapien
ctcaccactgaagatgttgccgatt

SEQ ID NO: 2208984 - DNA, 25 bp, Homo sapien
caccactgaagatgttgccgattcc

SEQ ID NO: 2208985 - DNA, 25 bp, Homo sapien
cactgaagatgttgccgattcccag

SEQ ID NO: 2208986 - DNA, 25 bp, Homo sapien
tcactcaccactgaagatgttgccg

SEQ ID NO: 2208987 - DNA, 25 bp, Homo sapien
ttgtggccttgtgcccagtagccgg

SEQ ID NO: 2208988 - DNA, 25 bp, Homo sapien
tcttgtggccttgtgcccagtagcc

SEQ ID NO: 2208989 - DNA, 25 bp, Homo sapien
tgttgtgtctgagaccccccggatc

SEQ ID NO: 2208990 - DNA, 25 bp, Homo sapien
ttgtgtctgagaccccccggatctt

SEQ ID NO: 2208991 - DNA, 25 bp, Homo sapien
tgttatcgattacttggaggaggga

SEQ ID NO: 2208992 - DNA, 25 bp, Homo sapien
catgattaatagtgttatcgattac

SEQ ID NO: 2208993 - DNA, 25 bp, Homo sapien
tattcatgattaatagtgttatcga

SEQ ID NO: 2208994 - DNA, 25 bp, Homo sapien
aatagtgttatcgattacttggagg

SEQ ID NO: 2208995 - DNA, 25 bp, Homo sapien
ggtctcaggataattcctgtcatta

SEQ ID NO: 2208996 - DNA, 25 bp, Homo sapien
cactcaagaagtgggcaccaatcat

SEQ ID NO: 2208997 - DNA, 25 bp, Homo sapien
tgtcattattcacactcaagaagtg

SEQ ID NO: 2208998 - DNA, 25 bp, Homo sapien
gccttgaccatgtactgggcttttg

SEQ ID NO: 2208999 - DNA, 25 bp, Homo sapien
gcagaaatctagatgtgagtgtgta

SEQ ID NO: 2209000 - DNA, 25 bp, Homo sapien
tgtgtgtgtagactggtatatctgg

SEQ ID NO: 2209001 - DNA, 25 bp, Homo sapien
actgagaggacccaaattatgccat

SEQ ID NO: 2209002 - DNA, 25 bp, Homo sapien
gagagaaaggatgtggtctgcatgt

SEQ ID NO: 2209003 - DNA, 25 bp, Homo sapien
tggtgcatgtggctttgagtggatc

SEQ ID NO: 2209004 - DNA, 25 bp, Homo sapien
tgcatgtggctttgagtggatctcc

SEQ ID NO: 2209005 - DNA, 25 bp, Homo sapien
gtgcatgtggctttgagtggatctc

SEQ ID NO: 2209006 - DNA, 25 bp, Homo sapien
catgtggctttgagtggatctccat

SEQ ID NO: 2209007 - DNA, 25 bp, Homo sapien
catcttgggcacactagagctgggc

SEQ ID NO: 2209008 - DNA, 25 bp, Homo sapien
gcagtggctccatccctatgacaag

SEQ ID NO: 2209009 - DNA, 25 bp, Homo sapien
aagtgttgccttagtgggagccctc

SEQ ID NO: 2209010 - DNA, 25 bp, Homo sapien
ccaggctgtccatgaaattctttga

SEQ ID NO: 2209011 - DNA, 25 bp, Homo sapien
tcaagatcctagcttgcctcaaagg

SEQ ID NO: 2209012 - DNA, 25 bp, Homo sapien
gcctctgaatagaatctggcttcct

SEQ ID NO: 2209013 - DNA, 25 bp, Homo sapien
tttagcagtctcttggtcacaccct

SEQ ID NO: 2209014 - DNA, 25 bp, Homo sapien
caaaagtagtcatgtggcatctcaa

SEQ ID NO: 2209015 - DNA, 25 bp, Homo sapien
gattggcgcggagggagtagagcgg

SEQ ID NO: 2209016 - DNA, 25 bp, Homo sapien
gcttcggcgattggcgcggagggag

SEQ ID NO: 2209017 - DNA, 25 bp, Homo sapien
gggcttcggcgattggcgcggaggg

SEQ ID NO: 2209018 - DNA, 25 bp, Homo sapien
agtgggcggggcttcggcgattggc

SEQ ID NO: 2209019 - DNA, 25 bp, Homo sapien
gtcccctgagctgtacgaacgcggt

SEQ ID NO: 2209020 - DNA, 25 bp, Homo sapien
cagcgacgcggctaaaagcgaaggg

SEQ ID NO: 2209021 - DNA, 25 bp, Homo sapien
cggcagcgacgcggctaaaagcgaa

SEQ ID NO: 2209022 - DNA, 25 bp, Homo sapien
tgagctgtacgaacgcggtcgccat

SEQ ID NO: 2209023 - DNA, 25 bp, Homo sapien
gggaagattgaggtgcccttatcaa

SEQ ID NO: 2209024 - DNA, 25 bp, Homo sapien
agctttgtgtccagagtagcattca

SEQ ID NO: 2209025 - DNA, 25 bp, Homo sapien
tccagagtagcattcagccaggacc

SEQ ID NO: 2209026 - DNA, 25 bp, Homo sapien
ggtgcccttatcaacgttcttcatg

SEQ ID NO: 2209027 - DNA, 25 bp, Homo sapien
ctgcagctagcttggataccattaa

SEQ ID NO: 2209028 - DNA, 25 bp, Homo sapien
cttggataccattaaaagggctcat

SEQ ID NO: 2209029 - DNA, 25 bp, Homo sapien
gctagcttggataccattaaaaggg

SEQ ID NO: 2209030 - DNA, 25 bp, Homo sapien
gcagctagcttggataccattaaaa

SEQ ID NO: 2209031 - DNA, 25 bp, Homo sapien
ctgtggtacttggtggtggtagggg

SEQ ID NO: 2209032 - DNA, 25 bp, Homo sapien
ctgcaggggatagcgtggaagctgg

SEQ ID NO: 2209033 - DNA, 25 bp, Homo sapien
tgcaggggatagcgtggaagctggc

SEQ ID NO: 2209034 - DNA, 25 bp, Homo sapien
caggggatagcgtggaagctggcat

SEQ ID NO: 2209035 - DNA, 25 bp, Homo sapien
gcaggggatagcgtggaagctggca

SEQ ID NO: 2209036 - DNA, 25 bp, Homo sapien
tagaaaatcctttagcatagatcac

SEQ ID NO: 2209037 - DNA, 25 bp, Homo sapien
cctttagcatagatcacttaattgg

SEQ ID NO: 2209038 - DNA, 25 bp, Homo sapien
gcatagatcacttaattggaaactc

SEQ ID NO: 2209039 - DNA, 25 bp, Homo sapien
cttaattggaaactcttagtctgtg

SEQ ID NO: 2209040 - DNA, 25 bp, Homo sapien
tgaggccaggatggaaccaccaatc

SEQ ID NO: 2209041 - DNA, 25 bp, Homo sapien
agtgaggccaggatggaaccaccaa

SEQ ID NO: 2209042 - DNA, 25 bp, Homo sapien
acagtgaggccaggatggaaccacc

SEQ ID NO: 2209043 - DNA, 25 bp, Homo sapien
gacagtgaggccaggatggaaccac

SEQ ID NO: 2209044 - DNA, 25 bp, Homo sapien
ctggatgccagcgtggtgatgccag

SEQ ID NO: 2209045 - DNA, 25 bp, Homo sapien
caccagaaccacttgttgccgatgg

SEQ ID NO: 2209046 - DNA, 25 bp, Homo sapien
ctgcagacaccagaaccacttgttg

SEQ ID NO: 2209047 - DNA, 25 bp, Homo sapien
cagacaccagaaccacttgttgccg

SEQ ID NO: 2209048 - DNA, 25 bp, Homo sapien
gacaccagaaccacttgttgccgat

SEQ ID NO: 2209049 - DNA, 25 bp, Homo sapien
accttctcgttgatgtcgcgcacaa

SEQ ID NO: 2209050 - DNA, 25 bp, Homo sapien
ccttctcgttgatgtcgcgcacaat

SEQ ID NO: 2209051 - DNA, 25 bp, Homo sapien
caccttctcgttgatgtcgcgcaca

SEQ ID NO: 2209052 - DNA, 25 bp, Homo sapien
ggccgtgatggtgaagcttggtgag

SEQ ID NO: 2209053 - DNA, 25 bp, Homo sapien
tggccgtgatggtgaagcttggtga

SEQ ID NO: 2209054 - DNA, 25 bp, Homo sapien
cttggccgtgatggtgaagcttggt

SEQ ID NO: 2209055 - DNA, 25 bp, Homo sapien
ctgcttggccgtgatggtgaagctt

SEQ ID NO: 2209056 - DNA, 25 bp, Homo sapien
caacacggcctggatggccacatac

SEQ ID NO: 2209057 - DNA, 25 bp, Homo sapien
ttagagggacaacacggcctggatg

SEQ ID NO: 2209058 - DNA, 25 bp, Homo sapien
gggacaacacggcctggatggccac

SEQ ID NO: 2209059 - DNA, 25 bp, Homo sapien
gacaacacggcctggatggccacat

SEQ ID NO: 2209060 - DNA, 25 bp, Homo sapien
gatctgagtcatcttttctctgttg

SEQ ID NO: 2209061 - DNA, 25 bp, Homo sapien
catgatctgagtcatcttttctctg

SEQ ID NO: 2209062 - DNA, 25 bp, Homo sapien
aacatgatctgagtcatcttttctc

SEQ ID NO: 2209063 - DNA, 25 bp, Homo sapien
tctgagtcatcttttctctgttggc

SEQ ID NO: 2209064 - DNA, 25 bp, Homo sapien
ttcagggtcaggatgtcgtgcttgc

SEQ ID NO: 2209065 - DNA, 25 bp, Homo sapien
cctcatggcccatgtaggagtcctt

SEQ ID NO: 2209066 - DNA, 25 bp, Homo sapien
tgctctgggcctcatggcccatgta

SEQ ID NO: 2209067 - DNA, 25 bp, Homo sapien
ctggggtcatgcacagctcgttgta

SEQ ID NO: 2209068 - DNA, 25 bp, Homo sapien
gatgagcgcggcgatctctatttcc

SEQ ID NO: 2209069 - DNA, 25 bp, Homo sapien
cggcgatctctatttccattgcaac

SEQ ID NO: 2209070 - DNA, 25 bp, Homo sapien
tcaatgatgagcgcggcgatctcta

SEQ ID NO: 2209071 - DNA, 25 bp, Homo sapien
gagcgcggcgatctctatttccatt

SEQ ID NO: 2209072 - DNA, 25 bp, Homo sapien
gattttgaagttaacaattagccaa

SEQ ID NO: 2209073 - DNA, 25 bp, Homo sapien
tattactggattttgaagttaacaa

SEQ ID NO: 2209074 - DNA, 25 bp, Homo sapien
gtgactgtattactggattttgaag

SEQ ID NO: 2209075 - DNA, 25 bp, Homo sapien
gtggcagcaagtgactgtattactg

SEQ ID NO: 2209076 - DNA, 25 bp, Homo sapien
tgcctgagcttaggaggcagagatt

SEQ ID NO: 2209077 - DNA, 25 bp, Homo sapien
atgagaattgcctgagcttaggagg

SEQ ID NO: 2209078 - DNA, 25 bp, Homo sapien
agcctggcagtagaaccagaccctg

SEQ ID NO: 2209079 - DNA, 25 bp, Homo sapien
ctccagcctggcagtagaaccagac

SEQ ID NO: 2209080 - DNA, 25 bp, Homo sapien
agcacaagaactatctgatgaatgc

SEQ ID NO: 2209081 - DNA, 25 bp, Homo sapien
aaccacagcacaagaactatctgat

SEQ ID NO: 2209082 - DNA, 25 bp, Homo sapien
agacaatcaaactactccaagctaa

SEQ ID NO: 2209083 - DNA, 25 bp, Homo sapien
ggatggagaatgacgagttgagaga

SEQ ID NO: 2209084 - DNA, 25 bp, Homo sapien
catggtcgcacgcacagtttgtcca

SEQ ID NO: 2209085 - DNA, 25 bp, Homo sapien
tagagctgtgtcgtgactcctatcg

SEQ ID NO: 2209086 - DNA, 25 bp, Homo sapien
agcaaacgttttggtggcaggacaa

SEQ ID NO: 2209087 - DNA, 25 bp, Homo sapien
tcacagcaggctttgaactacatgc

SEQ ID NO: 2209088 - DNA, 25 bp, Homo sapien
tcagttgaggtaacctctgcaagtc

SEQ ID NO: 2209089 - DNA, 25 bp, Homo sapien
gtaacctctgcaagtcacagctcca

SEQ ID NO: 2209090 - DNA, 25 bp, Homo sapien
tgaggtaacctctgcaagtcacagc

SEQ ID NO: 2209091 - DNA, 25 bp, Homo sapien
gttgaggtaacctctgcaagtcaca

SEQ ID NO: 2209092 - DNA, 25 bp, Homo sapien
catttttggttctcgtggaaaacat

SEQ ID NO: 2209093 - DNA, 25 bp, Homo sapien
gatgggaggatcaccctcgactggg

SEQ ID NO: 2209094 - DNA, 25 bp, Homo sapien
gaggatcaccctcgactggggaagt

SEQ ID NO: 2209095 - DNA, 25 bp, Homo sapien
ggatcaccctcgactggggaagttg

SEQ ID NO: 2209096 - DNA, 25 bp, Homo sapien
atcaccctcgactggggaagttgag

SEQ ID NO: 2209097 - DNA, 25 bp, Homo sapien
tgagacacagggaggtcttgcaccc

SEQ ID NO: 2209098 - DNA, 25 bp, Homo sapien
caatggttggttatgtagagggatc

SEQ ID NO: 2209099 - DNA, 25 bp, Homo sapien
tactgtattctctaacagcgcgtat

SEQ ID NO: 2209100 - DNA, 25 bp, Homo sapien
caagccaggctacaggttgagcagg

SEQ ID NO: 2209101 - DNA, 25 bp, Homo sapien
atcccaggaccaaacgggatgccat

SEQ ID NO: 2209102 - DNA, 25 bp, Homo sapien
tgatcccaggaccaaacgggatgcc

SEQ ID NO: 2209103 - DNA, 25 bp, Homo sapien
gagctgatcccaggaccaaacggga

SEQ ID NO: 2209104 - DNA, 25 bp, Homo sapien
gctgatcccaggaccaaacgggatg

SEQ ID NO: 2209105 - DNA, 25 bp, Homo sapien
ccagtaatgtcagccaggagatggg

SEQ ID NO: 2209106 - DNA, 25 bp, Homo sapien
aagaacagctttaatgccagtaatg

SEQ ID NO: 2209107 - DNA, 25 bp, Homo sapien
tgtctcaccgtaaccatatgcagga

SEQ ID NO: 2209108 - DNA, 25 bp, Homo sapien
tctctccaattgactaaagttaggg

SEQ ID NO: 2209109 - DNA, 25 bp, Homo sapien
cagtttagtgcaaaaactgggttga

SEQ ID NO: 2209110 - DNA, 25 bp, Homo sapien
agataaagcacagctatatgttaaa

SEQ ID NO: 2209111 - DNA, 25 bp, Homo sapien
aaaacgtggatcaatcttaaaagca

SEQ ID NO: 2209112 - DNA, 25 bp, Homo sapien
aactgggttgatttcaatactatac

SEQ ID NO: 2209113 - DNA, 25 bp, Homo sapien
tttcactcctgctttgaaaaaaata

SEQ ID NO: 2209114 - DNA, 25 bp, Homo sapien
taaactttcactcctgctttgaaaa

SEQ ID NO: 2209115 - DNA, 25 bp, Homo sapien
ctcttccaagttgtactttccttct

SEQ ID NO: 2209116 - DNA, 25 bp, Homo sapien
taaataaactttcactcctgctttg

SEQ ID NO: 2209117 - DNA, 25 bp, Homo sapien
gaaggaaacaggtctacttgtacac

SEQ ID NO: 2209118 - DNA, 25 bp, Homo sapien
ataggtgcacgctactctgctcagc

SEQ ID NO: 2209119 - DNA, 25 bp, Homo sapien
gaatgccctctaattgtaacaggaa

SEQ ID NO: 2209120 - DNA, 25 bp, Homo sapien
gaaacttctacctacagacactaag

SEQ ID NO: 2209121 - DNA, 25 bp, Homo sapien
ccaggacaccgacaataccaaatgc

SEQ ID NO: 2209122 - DNA, 25 bp, Homo sapien
ccaaaatccaggacaccgacaatac

SEQ ID NO: 2209123 - DNA, 25 bp, Homo sapien
tattagtatggccaaaatccaggac

SEQ ID NO: 2209124 - DNA, 25 bp, Homo sapien
gctgatgaggatatggagcaacggg

SEQ ID NO: 2209125 - DNA, 25 bp, Homo sapien
ttgctagtgtataaaagcacactgc

SEQ ID NO: 2209126 - DNA, 25 bp, Homo sapien
gtatcaacatcttatcagtattaag

SEQ ID NO: 2209127 - DNA, 25 bp, Homo sapien
ttatgtgttgatcttgcaccttgca

SEQ ID NO: 2209128 - DNA, 25 bp, Homo sapien
gcaccccgctagctttttcatttct

SEQ ID NO: 2209129 - DNA, 25 bp, Homo sapien
ccttctaagctagattgcgggccct

SEQ ID NO: 2209130 - DNA, 25 bp, Homo sapien
ctaagctagattgcgggcccttggc

SEQ ID NO: 2209131 - DNA, 25 bp, Homo sapien
ctccttctaagctagattgcgggcc

SEQ ID NO: 2209132 - DNA, 25 bp, Homo sapien
ttctaagctagattgcgggcccttg

SEQ ID NO: 2209133 - DNA, 25 bp, Homo sapien
gtttcagacaccaggtaaggcacag

SEQ ID NO: 2209134 - DNA, 25 bp, Homo sapien
tgtttcagacaccaggtaaggcaca

SEQ ID NO: 2209135 - DNA, 25 bp, Homo sapien
tcttatttaccactaggttcctatc

SEQ ID NO: 2209136 - DNA, 25 bp, Homo sapien
tagggtcccaactggaagactagat

SEQ ID NO: 2209137 - DNA, 25 bp, Homo sapien
tcccaccaatcaaagctgccagaag

SEQ ID NO: 2209138 - DNA, 25 bp, Homo sapien
tgccagaagagggcgggctttctta

SEQ ID NO: 2209139 - DNA, 25 bp, Homo sapien
gagagatctttccaactactatggg

SEQ ID NO: 2209140 - DNA, 25 bp, Homo sapien
ttttttcgaatgatggctgcacaac

SEQ ID NO: 2209141 - DNA, 25 bp, Homo sapien
gatggtccctgatttagtccagcac

SEQ ID NO: 2209142 - DNA, 25 bp, Homo sapien
gacgcctaagggatatggagtttct

SEQ ID NO: 2209143 - DNA, 25 bp, Homo sapien
ccatctgtttggacttgagggaaag

SEQ ID NO: 2209144 - DNA, 25 bp, Homo sapien
gaagcactgtcttccccgtctaaga

SEQ ID NO: 2209145 - DNA, 25 bp, Homo sapien
ggaggatcagaatgtcttgcccaag

SEQ ID NO: 2209146 - DNA, 25 bp, Homo sapien
ggataaactggagggcatcaactgg

SEQ ID NO: 2209147 - DNA, 25 bp, Homo sapien
aataggcttcagttggaaccaagtt

SEQ ID NO: 2209148 - DNA, 25 bp, Homo sapien
taggcttcagttggaaccaagtttc

SEQ ID NO: 2209149 - DNA, 25 bp, Homo sapien
aaaataggcttcagttggaaccaag

SEQ ID NO: 2209150 - DNA, 25 bp, Homo sapien
gcttcagttggaaccaagtttcttg

SEQ ID NO: 2209151 - DNA, 25 bp, Homo sapien
ctgggaatgctggttagaggctacc

SEQ ID NO: 2209152 - DNA, 25 bp, Homo sapien
taaaaaactgtgagcacggctatgt

SEQ ID NO: 2209153 - DNA, 25 bp, Homo sapien
tgtgaggacaagcaccaaaagcttt

SEQ ID NO: 2209154 - DNA, 25 bp, Homo sapien
ttttattacaacatgaacccaggag

SEQ ID NO: 2209155 - DNA, 25 bp, Homo sapien
gaatacaaaagtcaagggactcagg

SEQ ID NO: 2209156 - DNA, 25 bp, Homo sapien
tcagaatacaaaagtcaagggactc

SEQ ID NO: 2209157 - DNA, 25 bp, Homo sapien
aatacaaaagtcaagggactcaggg

SEQ ID NO: 2209158 - DNA, 25 bp, Homo sapien
cagaatacaaaagtcaagggactca

SEQ ID NO: 2209159 - DNA, 25 bp, Homo sapien
cccaagaagcaggcttgatggtcag

SEQ ID NO: 2209160 - DNA, 25 bp, Homo sapien
gggtctctgtcagggtctgtgctag

SEQ ID NO: 2209161 - DNA, 25 bp, Homo sapien
agggtctgtgctaggctcagccact

SEQ ID NO: 2209162 - DNA, 25 bp, Homo sapien
ccttccgccggttccaagccattct

SEQ ID NO: 2209163 - DNA, 25 bp, Homo sapien
tccgccggttccaagccattctggt

SEQ ID NO: 2209164 - DNA, 25 bp, Homo sapien
gcagatgcagccggggagtcagagt

SEQ ID NO: 2209165 - DNA, 25 bp, Homo sapien
agggcagatgcagccggggagtcag

SEQ ID NO: 2209166 - DNA, 25 bp, Homo sapien
tcgggctgggtcatcgccctcccca

SEQ ID NO: 2209167 - DNA, 25 bp, Homo sapien
ccgagcccgactcccgtgacgctct

SEQ ID NO: 2209168 - DNA, 25 bp, Homo sapien
cgactcccgtgacgctctgccttct

SEQ ID NO: 2209169 - DNA, 25 bp, Homo sapien
agctccgtaccctctttggctctag

SEQ ID NO: 2209170 - DNA, 25 bp, Homo sapien
caacacagggccagtcaactgtggc

SEQ ID NO: 2209171 - DNA, 25 bp, Homo sapien
aactgtggcaacagcgaggacagca

SEQ ID NO: 2209172 - DNA, 25 bp, Homo sapien
ctccagaagtgtgcggatcctctcc

SEQ ID NO: 2209173 - DNA, 25 bp, Homo sapien
gccatatgctgtggttctcatccag

SEQ ID NO: 2209174 - DNA, 25 bp, Homo sapien
ctgagccctcctccggggctacctt

SEQ ID NO: 2209175 - DNA, 25 bp, Homo sapien
gctaccttctcaggactggtcacac

SEQ ID NO: 2209176 - DNA, 25 bp, Homo sapien
cttctcaggactggtcacactgtct

SEQ ID NO: 2209177 - DNA, 25 bp, Homo sapien
gtctccattctccagtaagccctgg

SEQ ID NO: 2209178 - DNA, 25 bp, Homo sapien
gacaagaatctgaggacaagagctg

SEQ ID NO: 2209179 - DNA, 25 bp, Homo sapien
taggagacaagaatctgaggacaag

SEQ ID NO: 2209180 - DNA, 25 bp, Homo sapien
taggggctaggagacaagaatctga

SEQ ID NO: 2209181 - DNA, 25 bp, Homo sapien
gcagggccgagcctaaactggggta

SEQ ID NO: 2209182 - DNA, 25 bp, Homo sapien
tgcagggtagttaggaggctcctca

SEQ ID NO: 2209183 - DNA, 25 bp, Homo sapien
tcagccagccgtcccaaaagagcag

SEQ ID NO: 2209184 - DNA, 25 bp, Homo sapien
ccctctctgagggggtcagaagcag

SEQ ID NO: 2209185 - DNA, 25 bp, Homo sapien
agctcagccagccgtcccaaaagag

SEQ ID NO: 2209186 - DNA, 25 bp, Homo sapien
tgagcgcatacacagtggacacagg

SEQ ID NO: 2209187 - DNA, 25 bp, Homo sapien
tgaggaggcgaggcactgacacaca

SEQ ID NO: 2209188 - DNA, 25 bp, Homo sapien
ctgaggaggcgaggcactgacacac

SEQ ID NO: 2209189 - DNA, 25 bp, Homo sapien
cacacagatagaggttgtagaggag

SEQ ID NO: 2209190 - DNA, 25 bp, Homo sapien
ggaggccgtgctcgatgatgccagt

SEQ ID NO: 2209191 - DNA, 25 bp, Homo sapien
gaggaggccgtgctcgatgatgcca

SEQ ID NO: 2209192 - DNA, 25 bp, Homo sapien
acacacagatagaggttgtagagga

SEQ ID NO: 2209193 - DNA, 25 bp, Homo sapien
agccggcatctgcacatgggcagag

SEQ ID NO: 2209194 - DNA, 25 bp, Homo sapien
tctgagccggcatctgcacatgggc

SEQ ID NO: 2209195 - DNA, 25 bp, Homo sapien
cagctctgtgtcagatttgtacaac

SEQ ID NO: 2209196 - DNA, 25 bp, Homo sapien
tgtctgagccggcatctgcacatgg

SEQ ID NO: 2209197 - DNA, 25 bp, Homo sapien
tgcgctgtcagtacctgtagctcta

SEQ ID NO: 2209198 - DNA, 25 bp, Homo sapien
tccaggagtgcgctgtcagtacctg

SEQ ID NO: 2209199 - DNA, 25 bp, Homo sapien
ggagtgcgctgtcagtacctgtagc

SEQ ID NO: 2209200 - DNA, 25 bp, Homo sapien
cgctgtcagtacctgtagctctagc

SEQ ID NO: 2209201 - DNA, 25 bp, Homo sapien
cggattatggcctcaagtgtggctg

SEQ ID NO: 2209202 - DNA, 25 bp, Homo sapien
aacagggatgttttccgcttcacgg

SEQ ID NO: 2209203 - DNA, 25 bp, Homo sapien
atcaacatcagcaatccaggcccgg

SEQ ID NO: 2209204 - DNA, 25 bp, Homo sapien
atcagcaatccaggcccgggcctta

SEQ ID NO: 2209205 - DNA, 25 bp, Homo sapien
tttatccacagcagggctaggggct

SEQ ID NO: 2209206 - DNA, 25 bp, Homo sapien
ctaggggctacactggcacccgcga

SEQ ID NO: 2209207 - DNA, 25 bp, Homo sapien
gcgaccaacagtcctcgcatgacag

SEQ ID NO: 2209208 - DNA, 25 bp, Homo sapien
tcccagcgttcagcaatggtcagca

SEQ ID NO: 2209209 - DNA, 25 bp, Homo sapien
tttgaaaggagccaagcatggcctg

SEQ ID NO: 2209210 - DNA, 25 bp, Homo sapien
aaggagccaagcatggcctgctgct

SEQ ID NO: 2209211 - DNA, 25 bp, Homo sapien
ctcatcagcactccaagcgtcctca

SEQ ID NO: 2209212 - DNA, 25 bp, Homo sapien
tggtccccttgatccctcatcagca

SEQ ID NO: 2209213 - DNA, 25 bp, Homo sapien
aaaggcccggagctcagtcagggtc

SEQ ID NO: 2209214 - DNA, 25 bp, Homo sapien
aggcaggttgttcatctggtccaga

SEQ ID NO: 2209215 - DNA, 25 bp, Homo sapien
tccccaatctggtgcatggcgcaag

SEQ ID NO: 2209216 - DNA, 25 bp, Homo sapien
catggcgcaaggcaggttgttcatc

SEQ ID NO: 2209217 - DNA, 25 bp, Homo sapien
gcagggatcaggtctatacatcttt

SEQ ID NO: 2209218 - DNA, 25 bp, Homo sapien
acttttcctcggtgctggatcctca

SEQ ID NO: 2209219 - DNA, 25 bp, Homo sapien
tattcacagtctaccccttgcagca

SEQ ID NO: 2209220 - DNA, 25 bp, Homo sapien
caggccacttccaggtactgataaa

SEQ ID NO: 2209221 - DNA, 25 bp, Homo sapien
ctcacgggcttcagactctagtgcc

SEQ ID NO: 2209222 - DNA, 25 bp, Homo sapien
tagttgctgcagcagctcactatta

SEQ ID NO: 2209223 - DNA, 25 bp, Homo sapien
attaggaaacctccgctcacgggct

SEQ ID NO: 2209224 - DNA, 25 bp, Homo sapien
agagctcgggacacgcaagcctctg

SEQ ID NO: 2209225 - DNA, 25 bp, Homo sapien
aaggactcagcccgaaccttcagct

SEQ ID NO: 2209226 - DNA, 25 bp, Homo sapien
ggactcagcccgaaccttcagctta

SEQ ID NO: 2209227 - DNA, 25 bp, Homo sapien
aggactcagcccgaaccttcagctt

SEQ ID NO: 2209228 - DNA, 25 bp, Homo sapien
aagagggcaggcaagagcatgtctg

SEQ ID NO: 2209229 - DNA, 25 bp, Homo sapien
gagggcaggcaagagcatgtctggc

SEQ ID NO: 2209230 - DNA, 25 bp, Homo sapien
gcaagagcatgtctggcccagctct

SEQ ID NO: 2209231 - DNA, 25 bp, Homo sapien
caggcaagagcatgtctggcccagc

SEQ ID NO: 2209232 - DNA, 25 bp, Homo sapien
gacaggaaacacgtagtcttgcact

SEQ ID NO: 2209233 - DNA, 25 bp, Homo sapien
gcaggtactgccggctactggagca

SEQ ID NO: 2209234 - DNA, 25 bp, Homo sapien
ggaaacacgtagtcttgcacttgat

SEQ ID NO: 2209235 - DNA, 25 bp, Homo sapien
gctgacaggaaacacgtagtcttgc

SEQ ID NO: 2209236 - DNA, 25 bp, Homo sapien
aaagcctctcgctcagcctctgtga

SEQ ID NO: 2209237 - DNA, 25 bp, Homo sapien
gcctctcgctcagcctctgtgatac

SEQ ID NO: 2209238 - DNA, 25 bp, Homo sapien
tcgaaagcctctcgctcagcctctg

SEQ ID NO: 2209239 - DNA, 25 bp, Homo sapien
ctcgaaagcctctcgctcagcctct

SEQ ID NO: 2209240 - DNA, 25 bp, Homo sapien
tgtaaactataagtcctcttcccag

SEQ ID NO: 2209241 - DNA, 25 bp, Homo sapien
tccaagactatggtgtccagaatgc

SEQ ID NO: 2209242 - DNA, 25 bp, Homo sapien
tgcttctctgaggtaagggccaagt

SEQ ID NO: 2209243 - DNA, 25 bp, Homo sapien
tacaatctcttacaggattccaaga

SEQ ID NO: 2209244 - DNA, 25 bp, Homo sapien
accacgactgagaggccccagactt

SEQ ID NO: 2209245 - DNA, 25 bp, Homo sapien
tactgtagctatagttctccctata

SEQ ID NO: 2209246 - DNA, 25 bp, Homo sapien
tagctatagttctccctatagccca

SEQ ID NO: 2209247 - DNA, 25 bp, Homo sapien
cccacactcacaggaaagctataaa

SEQ ID NO: 2209248 - DNA, 25 bp, Homo sapien
tcttttcactatacgccaagagtag

SEQ ID NO: 2209249 - DNA, 25 bp, Homo sapien
tcgagatgcatctagttcttttcac

SEQ ID NO: 2209250 - DNA, 25 bp, Homo sapien
gtatgtggttttcaatcgagatgca

SEQ ID NO: 2209251 - DNA, 25 bp, Homo sapien
aatcgacttaaggttgctggtaaag

SEQ ID NO: 2209252 - DNA, 25 bp, Homo sapien
tagggtgcttgatctggggtactct

SEQ ID NO: 2209253 - DNA, 25 bp, Homo sapien
cagaatagggtgcttgatctggggt

SEQ ID NO: 2209254 - DNA, 25 bp, Homo sapien
aatagggtgcttgatctggggtact

SEQ ID NO: 2209255 - DNA, 25 bp, Homo sapien
agggtgcttgatctggggtactctc

SEQ ID NO: 2209256 - DNA, 25 bp, Homo sapien
cgctcttcttgcaccatgatgaaca

SEQ ID NO: 2209257 - DNA, 25 bp, Homo sapien
ggcctttcgtagacgccgctcttct

SEQ ID NO: 2209258 - DNA, 25 bp, Homo sapien
tcctcatgggagaagacgcagtatc

SEQ ID NO: 2209259 - DNA, 25 bp, Homo sapien
aacatctccttatgcacagctgccg

SEQ ID NO: 2209260 - DNA, 25 bp, Homo sapien
cctcggcaaagttgtagccttggtt

SEQ ID NO: 2209261 - DNA, 25 bp, Homo sapien
cacgggggaaggtgatgacaaactc

SEQ ID NO: 2209262 - DNA, 25 bp, Homo sapien
tgtagccttggttgaagccgctgtg

SEQ ID NO: 2209263 - DNA, 25 bp, Homo sapien
agcagtgcaaaagttgacagcctcg

SEQ ID NO: 2209264 - DNA, 25 bp, Homo sapien
ggccatggctgttgagatagagatt

SEQ ID NO: 2209265 - DNA, 25 bp, Homo sapien
ctgaagaacacaaaaggccatggct

SEQ ID NO: 2209266 - DNA, 25 bp, Homo sapien
aggccatggctgttgagatagagat

SEQ ID NO: 2209267 - DNA, 25 bp, Homo sapien
aagaacacaaaaggccatggctgtt

SEQ ID NO: 2209268 - DNA, 25 bp, Homo sapien
aaccttctgatctgtcccaatctgg

SEQ ID NO: 2209269 - DNA, 25 bp, Homo sapien
tcacttttaatcaagctggacaagc

SEQ ID NO: 2209270 - DNA, 25 bp, Homo sapien
tgtagcagtctcatgcaaccttctg

SEQ ID NO: 2209271 - DNA, 25 bp, Homo sapien
tgttataaaatcagccagccttgcc

SEQ ID NO: 2209272 - DNA, 25 bp, Homo sapien
cagtgccggtaagggaataaataca

SEQ ID NO: 2209273 - DNA, 25 bp, Homo sapien
cacagtgaagtaggtacagtgccgg

SEQ ID NO: 2209274 - DNA, 25 bp, Homo sapien
ttgaccatgtaatgcctcagctgag

SEQ ID NO: 2209275 - DNA, 25 bp, Homo sapien
catgcccacatgattaagccacagc

SEQ ID NO: 2209276 - DNA, 25 bp, Homo sapien
aaacagatgaatggttgactgggac

SEQ ID NO: 2209277 - DNA, 25 bp, Homo sapien
tcaaaaggttcatcaactggtgtat

SEQ ID NO: 2209278 - DNA, 25 bp, Homo sapien
gtcactttactatttcctatgtggt

SEQ ID NO: 2209279 - DNA, 25 bp, Homo sapien
tattactgggccatcaaaggaataa

SEQ ID NO: 2209280 - DNA, 25 bp, Homo sapien
tgttctgctgcaagtgagggcaccc

SEQ ID NO: 2209281 - DNA, 25 bp, Homo sapien
tcaaatagttcaggtgtcagcttct

SEQ ID NO: 2209282 - DNA, 25 bp, Homo sapien
ttccaaatgttctgctgcaagtgag

SEQ ID NO: 2209283 - DNA, 25 bp, Homo sapien
caaatgttctgctgcaagtgagggc

SEQ ID NO: 2209284 - DNA, 25 bp, Homo sapien
aaagggacacacacagtaaatcaca

SEQ ID NO: 2209285 - DNA, 25 bp, Homo sapien
aaaagggacacacacagtaaatcac

SEQ ID NO: 2209286 - DNA, 25 bp, Homo sapien
aagggacacacacagtaaatcacac

SEQ ID NO: 2209287 - DNA, 25 bp, Homo sapien
agtacagactgttccaacaccggca

SEQ ID NO: 2209288 - DNA, 25 bp, Homo sapien
ggaggtagttaatggagtaactcca

SEQ ID NO: 2209289 - DNA, 25 bp, Homo sapien
tccaacaccggcatcacatttaggt

SEQ ID NO: 2209290 - DNA, 25 bp, Homo sapien
gcattgatgtggcacagtacagact

SEQ ID NO: 2209291 - DNA, 25 bp, Homo sapien
gtcagctccatactcaacagtcaca

SEQ ID NO: 2209292 - DNA, 25 bp, Homo sapien
ctgacagggaaaccgctgccaaatt

SEQ ID NO: 2209293 - DNA, 25 bp, Homo sapien
ggttaggtgccgtttactgtcactg

SEQ ID NO: 2209294 - DNA, 25 bp, Homo sapien
aatgctatttaccagcctccagaac

SEQ ID NO: 2209295 - DNA, 25 bp, Homo sapien
catgttgaagtagtcagctttaaag

SEQ ID NO: 2209296 - DNA, 25 bp, Homo sapien
tgtattcccgggtagcctgctcaaa

SEQ ID NO: 2209297 - DNA, 25 bp, Homo sapien
aggagtcggccatctcgccaaagct

SEQ ID NO: 2209298 - DNA, 25 bp, Homo sapien
agctttaaaggagtcggccatctcg

SEQ ID NO: 2209299 - DNA, 25 bp, Homo sapien
gcttagagaaggttttttatgccca

SEQ ID NO: 2209300 - DNA, 25 bp, Homo sapien
tatgcccagactagaactgtaaggc

SEQ ID NO: 2209301 - DNA, 25 bp, Homo sapien
ggcattgaatattccagtaccttga

SEQ ID NO: 2209302 - DNA, 25 bp, Homo sapien
gcctggcctctaaaatgtggttcta

SEQ ID NO: 2209303 - DNA, 25 bp, Homo sapien
taagactatggctgagctaagaggc

SEQ ID NO: 2209304 - DNA, 25 bp, Homo sapien
cagaagcaaaggctgaatctcctgc

SEQ ID NO: 2209305 - DNA, 25 bp, Homo sapien
agaggctgccctcaataaggccaga

SEQ ID NO: 2209306 - DNA, 25 bp, Homo sapien
taattatgatgcttacctctccagg

SEQ ID NO: 2209307 - DNA, 25 bp, Homo sapien
cctcgagaacacatccggcagacat

SEQ ID NO: 2209308 - DNA, 25 bp, Homo sapien
cacatccggcagacatatgactcaa

SEQ ID NO: 2209309 - DNA, 25 bp, Homo sapien
atgacacactttgggcaccgccaga

SEQ ID NO: 2209310 - DNA, 25 bp, Homo sapien
catcctcatcccctcgagaacacat

SEQ ID NO: 2209311 - DNA, 25 bp, Homo sapien
ggaatgcttattgaagggacaagaa

SEQ ID NO: 2209312 - DNA, 25 bp, Homo sapien
gaatgcttattgaagggacaagaag

SEQ ID NO: 2209313 - DNA, 25 bp, Homo sapien
atgcttattgaagggacaagaagca

SEQ ID NO: 2209314 - DNA, 25 bp, Homo sapien
ggggaatgcttattgaagggacaag

SEQ ID NO: 2209315 - DNA, 25 bp, Homo sapien
ggtcttaggcgatgttgactccacc

SEQ ID NO: 2209316 - DNA, 25 bp, Homo sapien
ccaggaaggtcttaggcgatgttga

SEQ ID NO: 2209317 - DNA, 25 bp, Homo sapien
tccgtagcctcatggtcatcttggt

SEQ ID NO: 2209318 - DNA, 25 bp, Homo sapien
caccactactgtggggggacactca

SEQ ID NO: 2209319 - DNA, 25 bp, Homo sapien
tgccccatagatctgtagctttttc

SEQ ID NO: 2209320 - DNA, 25 bp, Homo sapien
agctttttcagctctggattcttct

SEQ ID NO: 2209321 - DNA, 25 bp, Homo sapien
gccccatagatctgtagctttttca

SEQ ID NO: 2209322 - DNA, 25 bp, Homo sapien
cattatcaaatggacgtgtgttaca

SEQ ID NO: 2209323 - DNA, 25 bp, Homo sapien
atagctgttgaacttggaaggctgc

SEQ ID NO: 2209324 - DNA, 25 bp, Homo sapien
cctcattatcaaatggacgtgtgtt

SEQ ID NO: 2209325 - DNA, 25 bp, Homo sapien
tcttggcccgccggccatagctgtt

SEQ ID NO: 2209326 - DNA, 25 bp, Homo sapien
tgcgttcgtagtgggagcgtagcaa

SEQ ID NO: 2209327 - DNA, 25 bp, Homo sapien
ggagcgtagcaaggagccaatattt

SEQ ID NO: 2209328 - DNA, 25 bp, Homo sapien
atagttgaggcgctgggctacccga

SEQ ID NO: 2209329 - DNA, 25 bp, Homo sapien
acggtccttgcagatagcttcataa

SEQ ID NO: 2209330 - DNA, 25 bp, Homo sapien
aaacaagtaggaaaagacatggatg

SEQ ID NO: 2209331 - DNA, 25 bp, Homo sapien
catggatgtgccacgtgtatttata

SEQ ID NO: 2209332 - DNA, 25 bp, Homo sapien
taggaaaagacatggatgtgccacg

SEQ ID NO: 2209333 - DNA, 25 bp, Homo sapien
aaagacatggatgtgccacgtgtat

SEQ ID NO: 2209334 - DNA, 25 bp, Homo sapien
ggaatctttaaggaggagccctgga

SEQ ID NO: 2209335 - DNA, 25 bp, Homo sapien
ccgccgttctacattgggaatcttt

SEQ ID NO: 2209336 - DNA, 25 bp, Homo sapien
gaatttggcaatctggtccaagtag

SEQ ID NO: 2209337 - DNA, 25 bp, Homo sapien
tagaggtccaagatccgccgttcta

SEQ ID NO: 2209338 - DNA, 25 bp, Homo sapien
agaagaaatggctcaaagaggctgg

SEQ ID NO: 2209339 - DNA, 25 bp, Homo sapien
cagggtttctcccaatgaaccggat

SEQ ID NO: 2209340 - DNA, 25 bp, Homo sapien
ccaatgaaccggatcccagactcta

SEQ ID NO: 2209341 - DNA, 25 bp, Homo sapien
ccagactctaggcagtgcttagccc

SEQ ID NO: 2209342 - DNA, 25 bp, Homo sapien
agactctaggcagtgcttagcccca

SEQ ID NO: 2209343 - DNA, 25 bp, Homo sapien
tctagctcattcagcctctggattc

SEQ ID NO: 2209344 - DNA, 25 bp, Homo sapien
ttgtccacttccacagcaaagggtg

SEQ ID NO: 2209345 - DNA, 25 bp, Homo sapien
ctgaagttgtccacttccacagcaa

SEQ ID NO: 2209346 - DNA, 25 bp, Homo sapien
tcagcctctggattcggggggtaaa

SEQ ID NO: 2209347 - DNA, 25 bp, Homo sapien
aaggcttcctgtagatcctctctca

SEQ ID NO: 2209348 - DNA, 25 bp, Homo sapien
ggcttcctgtagatcctctctcata

SEQ ID NO: 2209349 - DNA, 25 bp, Homo sapien
gaaggcttcctgtagatcctctctc

SEQ ID NO: 2209350 - DNA, 25 bp, Homo sapien
gcttcctgtagatcctctctcatac

SEQ ID NO: 2209351 - DNA, 25 bp, Homo sapien
gggtgggggtaagtgctgggatgcc

SEQ ID NO: 2209352 - DNA, 25 bp, Homo sapien
cgggatgatgtgcagaaaaggcctt

SEQ ID NO: 2209353 - DNA, 25 bp, Homo sapien
gctgaccggtccaaacatctccata

SEQ ID NO: 2209354 - DNA, 25 bp, Homo sapien
acatctccataggaagtcaagtctg

SEQ ID NO: 2209355 - DNA, 25 bp, Homo sapien
ccttgacattgccttcaacgaggaa

SEQ ID NO: 2209356 - DNA, 25 bp, Homo sapien
cggatcttgcaaatgcccgatttct

SEQ ID NO: 2209357 - DNA, 25 bp, Homo sapien
cccgatttctctgcgatgggcctga

SEQ ID NO: 2209358 - DNA, 25 bp, Homo sapien
cctgattttcgcgatgtagccaaga

SEQ ID NO: 2209359 - DNA, 25 bp, Homo sapien
gccaagagggtctcggaactcggcc

SEQ ID NO: 2209360 - DNA, 25 bp, Homo sapien
ttggaccgcccttaaggactcatgg

SEQ ID NO: 2209361 - DNA, 25 bp, Homo sapien
aaatagttcattgcaacggcggagg

SEQ ID NO: 2209362 - DNA, 25 bp, Homo sapien
tgtggccgtcgtgctctgagagtct

SEQ ID NO: 2209363 - DNA, 25 bp, Homo sapien
gaaaccttcatatagtggagaccga

SEQ ID NO: 2209364 - DNA, 25 bp, Homo sapien
gatcttaggccgaaggaagttcagc

SEQ ID NO: 2209365 - DNA, 25 bp, Homo sapien
gaaagatgtaggtgaatttacccag

SEQ ID NO: 2209366 - DNA, 25 bp, Homo sapien
cacaggaagttgctgactctggtca

SEQ ID NO: 2209367 - DNA, 25 bp, Homo sapien
ccagtctgtagatgaggaaccaagt

SEQ ID NO: 2209368 - DNA, 25 bp, Homo sapien
gaaggctcgtctgggctcaaaacca

SEQ ID NO: 2209369 - DNA, 25 bp, Homo sapien
tgttttgtggatcaactgggctgac

SEQ ID NO: 2209370 - DNA, 25 bp, Homo sapien
taagagtctcagatggtgctcccca

SEQ ID NO: 2209371 - DNA, 25 bp, Homo sapien
tctgactgccgtacaattctgcctg

SEQ ID NO: 2209372 - DNA, 25 bp, Homo sapien
tcaagcccatcttgcaagggttggg

SEQ ID NO: 2209373 - DNA, 25 bp, Homo sapien
tggagatgattcagaccagtgtcac

SEQ ID NO: 2209374 - DNA, 25 bp, Homo sapien
tctggcatgaggtaggcacttcaca

SEQ ID NO: 2209375 - DNA, 25 bp, Homo sapien
tgtggaacacctcccatgtcaagat

SEQ ID NO: 2209376 - DNA, 25 bp, Homo sapien
gcaagttcctgaagccgaagaggtc

SEQ ID NO: 2209377 - DNA, 25 bp, Homo sapien
gtttggccacaactctacagagcgc

SEQ ID NO: 2209378 - DNA, 25 bp, Homo sapien
tgtctatactgcagcccatggtgga

SEQ ID NO: 2209379 - DNA, 25 bp, Homo sapien
ggcttcaagtggcaaggatcctcga

SEQ ID NO: 2209380 - DNA, 25 bp, Homo sapien
gatgggtgagtgtggtgacaatggt

SEQ ID NO: 2209381 - DNA, 25 bp, Homo sapien
agaccacggtgctgatccggcttgg

SEQ ID NO: 2209382 - DNA, 25 bp, Homo sapien
cacggtgctgatccggcttggcttg

SEQ ID NO: 2209383 - DNA, 25 bp, Homo sapien
tcagaccacggtgctgatccggctt

SEQ ID NO: 2209384 - DNA, 25 bp, Homo sapien
cctgcctggccggcccaaggtatag

SEQ ID NO: 2209385 - DNA, 25 bp, Homo sapien
ctggccggcccaaggtatagtgttg

SEQ ID NO: 2209386 - DNA, 25 bp, Homo sapien
tgaagtgcttagggccctgtttgtg

SEQ ID NO: 2209387 - DNA, 25 bp, Homo sapien
tggaagtggcgatgtggccccacag

SEQ ID NO: 2209388 - DNA, 25 bp, Homo sapien
gcgggaggcggtggaatggagccca

SEQ ID NO: 2209389 - DNA, 25 bp, Homo sapien
ggcggtggaatggagcccagctggg

SEQ ID NO: 2209390 - DNA, 25 bp, Homo sapien
ctgaggcgggaggcggtggaatgga

SEQ ID NO: 2209391 - DNA, 25 bp, Homo sapien
aggcggtggaatggagcccagctgg

SEQ ID NO: 2209392 - DNA, 25 bp, Homo sapien
agggcctggagcttggactgcccat

SEQ ID NO: 2209393 - DNA, 25 bp, Homo sapien
cccgcttgcttccaaatagggagcc

SEQ ID NO: 2209394 - DNA, 25 bp, Homo sapien
ctggaagggccccttgccccgcttg

SEQ ID NO: 2209395 - DNA, 25 bp, Homo sapien
ggtggtgcgtggaagaagcagatga

SEQ ID NO: 2209396 - DNA, 25 bp, Homo sapien
ggcctgttggcggtggtggcatctg

SEQ ID NO: 2209397 - DNA, 25 bp, Homo sapien
gtgagggcgtggactgctaataaca

SEQ ID NO: 2209398 - DNA, 25 bp, Homo sapien
agggcgtggactgctaataacagac

SEQ ID NO: 2209399 - DNA, 25 bp, Homo sapien
ggcgtggactgctaataacagaccc

SEQ ID NO: 2209400 - DNA, 25 bp, Homo sapien
gagggcgtggactgctaataacaga

SEQ ID NO: 2209401 - DNA, 25 bp, Homo sapien
gagggggcacgggagagtggaagac

SEQ ID NO: 2209402 - DNA, 25 bp, Homo sapien
ggggcacgggagagtggaagacaga

SEQ ID NO: 2209403 - DNA, 25 bp, Homo sapien
ggttgagagggggcacgggagagtg

SEQ ID NO: 2209404 - DNA, 25 bp, Homo sapien
tcgccgtcggccctggggttgagag

SEQ ID NO: 2209405 - DNA, 25 bp, Homo sapien
gatggagagagtggttggctgggag

SEQ ID NO: 2209406 - DNA, 25 bp, Homo sapien
agatggagagagtggttggctggga

SEQ ID NO: 2209407 - DNA, 25 bp, Homo sapien
gttgaggacagatggagagagtggt

SEQ ID NO: 2209408 - DNA, 25 bp, Homo sapien
tgaggacagatggagagagtggttg

SEQ ID NO: 2209409 - DNA, 25 bp, Homo sapien
tggtgctgtccagcgatcccacgct

SEQ ID NO: 2209410 - DNA, 25 bp, Homo sapien
ttcgatggtgctgtccagcgatccc

SEQ ID NO: 2209411 - DNA, 25 bp, Homo sapien
gatggtgctgtccagcgatcccacg

SEQ ID NO: 2209412 - DNA, 25 bp, Homo sapien
gctgtccagcgatcccacgctgtta

SEQ ID NO: 2209413 - DNA, 25 bp, Homo sapien
tcagagaggtctcgcagggaactgc

SEQ ID NO: 2209414 - DNA, 25 bp, Homo sapien
gcgggccatcgtcccattcactgag

SEQ ID NO: 2209415 - DNA, 25 bp, Homo sapien
gtaagtgtcctccaggctactgcgg

SEQ ID NO: 2209416 - DNA, 25 bp, Homo sapien
gctgtgaggcgttaggccgcatcat

SEQ ID NO: 2209417 - DNA, 25 bp, Homo sapien
taaagcgcagccggtcctggaggct

SEQ ID NO: 2209418 - DNA, 25 bp, Homo sapien
ctgcagacagcaacttgatcccaaa

SEQ ID NO: 2209419 - DNA, 25 bp, Homo sapien
aatggactcgcgcaggtcggatgta

SEQ ID NO: 2209420 - DNA, 25 bp, Homo sapien
tgatgaggacttttcgctccccacc

SEQ ID NO: 2209421 - DNA, 25 bp, Homo sapien
caagtaggtgctttggagaccctta

SEQ ID NO: 2209422 - DNA, 25 bp, Homo sapien
gggccatgacatagactctcaggag

SEQ ID NO: 2209423 - DNA, 25 bp, Homo sapien
ccctcatcctgggaccaagtaggtg

SEQ ID NO: 2209424 - DNA, 25 bp, Homo sapien
taagggactccgaaaactggagctg

SEQ ID NO: 2209425 - DNA, 25 bp, Homo sapien
gactgacggaaactgtacgtcacca

SEQ ID NO: 2209426 - DNA, 25 bp, Homo sapien
cggaaactgtacgtcaccaagatct

SEQ ID NO: 2209427 - DNA, 25 bp, Homo sapien
gaaagactgacggaaactgtacgtc

SEQ ID NO: 2209428 - DNA, 25 bp, Homo sapien
aactgtacgtcaccaagatcttctt

SEQ ID NO: 2209429 - DNA, 25 bp, Homo sapien
tgaatcctgcttcctccaggaagcc

SEQ ID NO: 2209430 - DNA, 25 bp, Homo sapien
ggcacctcgtagagctggcagcagc

SEQ ID NO: 2209431 - DNA, 25 bp, Homo sapien
cggtttggatctggcacctcgtaga

SEQ ID NO: 2209432 - DNA, 25 bp, Homo sapien
cgctgatgcaaccctagcctctggg

SEQ ID NO: 2209433 - DNA, 25 bp, Homo sapien
ggcagcagcaaaccagtcgacggtg

SEQ ID NO: 2209434 - DNA, 25 bp, Homo sapien
ttctttccaacaatcatgcgctcca

SEQ ID NO: 2209435 - DNA, 25 bp, Homo sapien
tctttccaacaatcatgcgctccac

SEQ ID NO: 2209436 - DNA, 25 bp, Homo sapien
tttccaacaatcatgcgctccacag

SEQ ID NO: 2209437 - DNA, 25 bp, Homo sapien
tccaacaatcatgcgctccacagcc

SEQ ID NO: 2209438 - DNA, 25 bp, Homo sapien
gtcatcgttggtccgcagttcacgc

SEQ ID NO: 2209439 - DNA, 25 bp, Homo sapien
gaggtctcgggggatgtcttcacca

SEQ ID NO: 2209440 - DNA, 25 bp, Homo sapien
ctggtagatgcccaccaggaggtct

SEQ ID NO: 2209441 - DNA, 25 bp, Homo sapien
ccctggatgcgctggtagatgccca

SEQ ID NO: 2209442 - DNA, 25 bp, Homo sapien
gaaaagagtaagataaattgcatgt

SEQ ID NO: 2209443 - DNA, 25 bp, Homo sapien
ttaacaatagaggatagtatatcca

SEQ ID NO: 2209444 - DNA, 25 bp, Homo sapien
agaacgcaccaaaacattaactatg

SEQ ID NO: 2209445 - DNA, 25 bp, Homo sapien
tgcatgtgtggtatgatctgaacta

SEQ ID NO: 2209446 - DNA, 25 bp, Homo sapien
cggaactggcgcacgagggctgggt

SEQ ID NO: 2209447 - DNA, 25 bp, Homo sapien
agctttgacgctgggactgtacatg

SEQ ID NO: 2209448 - DNA, 25 bp, Homo sapien
ttcatctttcgttcagctttgacgc

SEQ ID NO: 2209449 - DNA, 25 bp, Homo sapien
tgggttacagacacagtaccgctgg

SEQ ID NO: 2209450 - DNA, 25 bp, Homo sapien
gaaggcttcgatgagtcgctccact

SEQ ID NO: 2209451 - DNA, 25 bp, Homo sapien
ggactggaacttccggagcgcatca

SEQ ID NO: 2209452 - DNA, 25 bp, Homo sapien
ttccggagcgcatcatccagatcca

SEQ ID NO: 2209453 - DNA, 25 bp, Homo sapien
cctcaccctgaacccggatatggga

SEQ ID NO: 2209454 - DNA, 25 bp, Homo sapien
ccgctcgatcagatactggataccc

SEQ ID NO: 2209455 - DNA, 25 bp, Homo sapien
tgcttctgccggttccctaggaatt

SEQ ID NO: 2209456 - DNA, 25 bp, Homo sapien
aggaagccccgctcgatcagatact

SEQ ID NO: 2209457 - DNA, 25 bp, Homo sapien
gagccactcccaccggtgtgtctga

SEQ ID NO: 2209458 - DNA, 25 bp, Homo sapien
tatgccttgtctcccgctggtaagt

SEQ ID NO: 2209459 - DNA, 25 bp, Homo sapien
agtgccgcctctggaccacatcatt

SEQ ID NO: 2209460 - DNA, 25 bp, Homo sapien
ttgaggccgattcggtagtgccgcc

SEQ ID NO: 2209461 - DNA, 25 bp, Homo sapien
cattgttgaaagctggcgagtccca

SEQ ID NO: 2209462 - DNA, 25 bp, Homo sapien
ctgcttgcacaggccggtagccgga

SEQ ID NO: 2209463 - DNA, 25 bp, Homo sapien
gctggagctctcaaggctctcgtta

SEQ ID NO: 2209464 - DNA, 25 bp, Homo sapien
gctcccttagactgtcccgagaaga

SEQ ID NO: 2209465 - DNA, 25 bp, Homo sapien
ttatctccaccatcagagttctcgc

SEQ ID NO: 2209466 - DNA, 25 bp, Homo sapien
gtgcttcagggtcccatgggggctg

SEQ ID NO: 2209467 - DNA, 25 bp, Homo sapien
tgtgcttcagggtcccatgggggct

SEQ ID NO: 2209468 - DNA, 25 bp, Homo sapien
ggctgggtagtggcggtgtgggatc

SEQ ID NO: 2209469 - DNA, 25 bp, Homo sapien
tgggtagtggcggtgtgggatcggg

SEQ ID NO: 2209470 - DNA, 25 bp, Homo sapien
gacagagccgcgatctgagcggtca

SEQ ID NO: 2209471 - DNA, 25 bp, Homo sapien
cgtcttcccgggttcctgatggcac

SEQ ID NO: 2209472 - DNA, 25 bp, Homo sapien
tcagggcttcgtcgatggattcagc

SEQ ID NO: 2209473 - DNA, 25 bp, Homo sapien
cactaggaggctcaatggtaagcag

SEQ ID NO: 2209474 - DNA, 25 bp, Homo sapien
actgcatccgcatgttggaaaggat

SEQ ID NO: 2209475 - DNA, 25 bp, Homo sapien
caaagttcttgttcatgcggtactg

SEQ ID NO: 2209476 - DNA, 25 bp, Homo sapien
gaaggagtcctcaagttctgtgatg

SEQ ID NO: 2209477 - DNA, 25 bp, Homo sapien
tccagatgtggtgacggagcttcca

SEQ ID NO: 2209478 - DNA, 25 bp, Homo sapien
ttcccaaccagatgcctctgttgca

SEQ ID NO: 2209479 - DNA, 25 bp, Homo sapien
tcccattcccaaccagatgcctctg

SEQ ID NO: 2209480 - DNA, 25 bp, Homo sapien
ttgcatcccgactcccattcccaac

SEQ ID NO: 2209481 - DNA, 25 bp, Homo sapien
cctcccctggcgctctcttgcatcc

SEQ ID NO: 2209482 - DNA, 25 bp, Homo sapien
gagagttcatagctgtccgataggg

SEQ ID NO: 2209483 - DNA, 25 bp, Homo sapien
tggctggctggaggcgtgcccgctg

SEQ ID NO: 2209484 - DNA, 25 bp, Homo sapien
tagggccttggagcgctttatctcc

SEQ ID NO: 2209485 - DNA, 25 bp, Homo sapien
ctgcttcctcagggcgacactggct

SEQ ID NO: 2209486 - DNA, 25 bp, Homo sapien
ggctcccaggactatcaaccgctgt

SEQ ID NO: 2209487 - DNA, 25 bp, Homo sapien
caggactatcaaccgctgtgctcag

SEQ ID NO: 2209488 - DNA, 25 bp, Homo sapien
gttggctcccaggactatcaaccgc

SEQ ID NO: 2209489 - DNA, 25 bp, Homo sapien
tcccaggactatcaaccgctgtgct

SEQ ID NO: 2209490 - DNA, 25 bp, Homo sapien
gagcagccctgcggggcagcttcct

SEQ ID NO: 2209491 - DNA, 25 bp, Homo sapien
ccctgcggggcagcttcctttttct

SEQ ID NO: 2209492 - DNA, 25 bp, Homo sapien
agccctgcggggcagcttccttttt

SEQ ID NO: 2209493 - DNA, 25 bp, Homo sapien
aggtaaagagcagccctgcggggca

SEQ ID NO: 2209494 - DNA, 25 bp, Homo sapien
cattttagtcggacctagggctcca

SEQ ID NO: 2209495 - DNA, 25 bp, Homo sapien
gaggatccaggttccaagctccaag

SEQ ID NO: 2209496 - DNA, 25 bp, Homo sapien
gaacaaacgacagggaactaggcag

SEQ ID NO: 2209497 - DNA, 25 bp, Homo sapien
tgtacacagcaacacgcactctgag

SEQ ID NO: 2209498 - DNA, 25 bp, Homo sapien
aggaaggggcacgatgcttgcccat

SEQ ID NO: 2209499 - DNA, 25 bp, Homo sapien
ggaggaaggggcacgatgcttgccc

SEQ ID NO: 2209500 - DNA, 25 bp, Homo sapien
gaaggggcacgatgcttgcccatct

SEQ ID NO: 2209501 - DNA, 25 bp, Homo sapien
ggaaggggcacgatgcttgcccatc

SEQ ID NO: 2209502 - DNA, 25 bp, Homo sapien
tttgcttctgcatagaaaatggccc

SEQ ID NO: 2209503 - DNA, 25 bp, Homo sapien
tgcttctgcatagaaaatggccctt

SEQ ID NO: 2209504 - DNA, 25 bp, Homo sapien
ttgcttctgcatagaaaatggccct

SEQ ID NO: 2209505 - DNA, 25 bp, Homo sapien
gagggactactgcactcggaggccg

SEQ ID NO: 2209506 - DNA, 25 bp, Homo sapien
gaggagggactactgcactcggagg

SEQ ID NO: 2209507 - DNA, 25 bp, Homo sapien
ggactactgcactcggaggccggac

SEQ ID NO: 2209508 - DNA, 25 bp, Homo sapien
ctactgcactcggaggccggacagc

SEQ ID NO: 2209509 - DNA, 25 bp, Homo sapien
ccagtttaggccttccagctggttt

SEQ ID NO: 2209510 - DNA, 25 bp, Homo sapien
ttctctgccaataccccagtttagg

SEQ ID NO: 2209511 - DNA, 25 bp, Homo sapien
tggagtcgtgcaacaccgtagccct

SEQ ID NO: 2209512 - DNA, 25 bp, Homo sapien
tggtttccctgcatacaacccattt

SEQ ID NO: 2209513 - DNA, 25 bp, Homo sapien
tttcctaatgttgaacaatccctgc

SEQ ID NO: 2209514 - DNA, 25 bp, Homo sapien
tgctagaatttccatcataccagaa

SEQ ID NO: 2209515 - DNA, 25 bp, Homo sapien
gaataccaactggacctggtaccat

SEQ ID NO: 2209516 - DNA, 25 bp, Homo sapien
tactagccttatgggatgaactggg

SEQ ID NO: 2209517 - DNA, 25 bp, Homo sapien
aaagaatgtctaccaaactaggtag

SEQ ID NO: 2209518 - DNA, 25 bp, Homo sapien
gaatgtctaccaaactaggtagagc

SEQ ID NO: 2209519 - DNA, 25 bp, Homo sapien
gtctaccaaactaggtagagctggt

SEQ ID NO: 2209520 - DNA, 25 bp, Homo sapien
tagaatctatggttaaatccccttc

SEQ ID NO: 2209521 - DNA, 25 bp, Homo sapien
taggaccaaccactcaggccttttg

SEQ ID NO: 2209522 - DNA, 25 bp, Homo sapien
caaagatatgggcagattgttccct

SEQ ID NO: 2209523 - DNA, 25 bp, Homo sapien
gctggattatcacatagtctaggac

SEQ ID NO: 2209524 - DNA, 25 bp, Homo sapien
tcctcagtctatccaactggcaaac

SEQ ID NO: 2209525 - DNA, 25 bp, Homo sapien
ggcactctcctcatacactcggaca

SEQ ID NO: 2209526 - DNA, 25 bp, Homo sapien
tctcctcatacactcggacacccat

SEQ ID NO: 2209527 - DNA, 25 bp, Homo sapien
tcatacactcggacacccattccac

SEQ ID NO: 2209528 - DNA, 25 bp, Homo sapien
ccaggcactctcctcatacactcgg

SEQ ID NO: 2209529 - DNA, 25 bp, Homo sapien
ggggagggatgggtctagctcttac

SEQ ID NO: 2209530 - DNA, 25 bp, Homo sapien
ttgggggagggatgggtctagctct

SEQ ID NO: 2209531 - DNA, 25 bp, Homo sapien
tgggggagggatgggtctagctctt

SEQ ID NO: 2209532 - DNA, 25 bp, Homo sapien
aattgggggagggatgggtctagct

SEQ ID NO: 2209533 - DNA, 25 bp, Homo sapien
gggtaagcttcatggagtcaaggac

SEQ ID NO: 2209534 - DNA, 25 bp, Homo sapien
gagggggtaagcttcatggagtcaa

SEQ ID NO: 2209535 - DNA, 25 bp, Homo sapien
ctgagggggtaagcttcatggagtc

SEQ ID NO: 2209536 - DNA, 25 bp, Homo sapien
gggggtaagcttcatggagtcaagg

SEQ ID NO: 2209537 - DNA, 25 bp, Homo sapien
cagcaatactggtgtagagtatgag

SEQ ID NO: 2209538 - DNA, 25 bp, Homo sapien
taggacagcaatactggtgtagagt

SEQ ID NO: 2209539 - DNA, 25 bp, Homo sapien
tactggtgtagagtatgagacgctg

SEQ ID NO: 2209540 - DNA, 25 bp, Homo sapien
ctgagtaggacagcaatactggtgt

SEQ ID NO: 2209541 - DNA, 25 bp, Homo sapien
agtagcccagggactgggtccaggc

SEQ ID NO: 2209542 - DNA, 25 bp, Homo sapien
tcagtagcccagggactgggtccag

SEQ ID NO: 2209543 - DNA, 25 bp, Homo sapien
cagtagcccagggactgggtccagg

SEQ ID NO: 2209544 - DNA, 25 bp, Homo sapien
gtctggacctgtcccaagggcaggc

SEQ ID NO: 2209545 - DNA, 25 bp, Homo sapien
ccccctggcctagccggtgtctcca

SEQ ID NO: 2209546 - DNA, 25 bp, Homo sapien
ggtgtctccaccgtgtcaccacccc

SEQ ID NO: 2209547 - DNA, 25 bp, Homo sapien
ggtctggacctgtcccaagggcagg

SEQ ID NO: 2209548 - DNA, 25 bp, Homo sapien
cctgacccagccacgggacactggc

SEQ ID NO: 2209549 - DNA, 25 bp, Homo sapien
agcctgacccagccacgggacactg

SEQ ID NO: 2209550 - DNA, 25 bp, Homo sapien
tctgttgtcccgctgtgcccccact

SEQ ID NO: 2209551 - DNA, 25 bp, Homo sapien
ctgttgtcccgctgtgcccccactg

SEQ ID NO: 2209552 - DNA, 25 bp, Homo sapien
ctctgttgtcccgctgtgcccccac

SEQ ID NO: 2209553 - DNA, 25 bp, Homo sapien
tgttgtcccgctgtgcccccactgt

SEQ ID NO: 2209554 - DNA, 25 bp, Homo sapien
gacaggtgccttcctaagtgctagg

SEQ ID NO: 2209555 - DNA, 25 bp, Homo sapien
tcaacaagtagcaggcacatcaccg

SEQ ID NO: 2209556 - DNA, 25 bp, Homo sapien
gattgcattaaagctggcctcagca

SEQ ID NO: 2209557 - DNA, 25 bp, Homo sapien
caaacccacggtgggacactgagat

SEQ ID NO: 2209558 - DNA, 25 bp, Homo sapien
ctgactgttctggaattctcaccat

SEQ ID NO: 2209559 - DNA, 25 bp, Homo sapien
tgttctggaattctcaccatcagat

SEQ ID NO: 2209560 - DNA, 25 bp, Homo sapien
gactgttctggaattctcaccatca

SEQ ID NO: 2209561 - DNA, 25 bp, Homo sapien
actgttctggaattctcaccatcag

SEQ ID NO: 2209562 - DNA, 25 bp, Homo sapien
tgggcttcactatcaaattactggg

SEQ ID NO: 2209563 - DNA, 25 bp, Homo sapien
ggctggtgttcctagattagttccc

SEQ ID NO: 2209564 - DNA, 25 bp, Homo sapien
cctggcccagtgtactgaggtttag

SEQ ID NO: 2209565 - DNA, 25 bp, Homo sapien
tgcttggaaactctgtgtgcaggtg

SEQ ID NO: 2209566 - DNA, 25 bp, Homo sapien
tctttgctcctttcagaacagaaga

SEQ ID NO: 2209567 - DNA, 25 bp, Homo sapien
gtttgatggataaataagcaacttc

SEQ ID NO: 2209568 - DNA, 25 bp, Homo sapien
cacaggtcctgtgcaggcctctttg

SEQ ID NO: 2209569 - DNA, 25 bp, Homo sapien
tggcatcgagggtcaggaccacagc

SEQ ID NO: 2209570 - DNA, 25 bp, Homo sapien
tggagtagctctgatgtctttaaag

SEQ ID NO: 2209571 - DNA, 25 bp, Homo sapien
ctggagtagctctgatgtctttaaa

SEQ ID NO: 2209572 - DNA, 25 bp, Homo sapien
ggcctttactctgcgcccagcaaat

SEQ ID NO: 2209573 - DNA, 25 bp, Homo sapien
caggcctttactctgcgcccagcaa

SEQ ID NO: 2209574 - DNA, 25 bp, Homo sapien
ccaggcctttactctgcgcccagca

SEQ ID NO: 2209575 - DNA, 25 bp, Homo sapien
aggcctttactctgcgcccagcaaa

SEQ ID NO: 2209576 - DNA, 25 bp, Homo sapien
agatgataacaaccccattcttgcc

SEQ ID NO: 2209577 - DNA, 25 bp, Homo sapien
tgtagatgataacaaccccattctt

SEQ ID NO: 2209578 - DNA, 25 bp, Homo sapien
aatgtttgtagatgataacaacccc

SEQ ID NO: 2209579 - DNA, 25 bp, Homo sapien
agccaagaaatgtttgtagatgata

SEQ ID NO: 2209580 - DNA, 25 bp, Homo sapien
agcagaagggatactggcatcctgg

SEQ ID NO: 2209581 - DNA, 25 bp, Homo sapien
cagaagggatactggcatcctggaa

SEQ ID NO: 2209582 - DNA, 25 bp, Homo sapien
gcagaagggatactggcatcctgga

SEQ ID NO: 2209583 - DNA, 25 bp, Homo sapien
ctggatgcgccacggctcagctggc

SEQ ID NO: 2209584 - DNA, 25 bp, Homo sapien
gcctccgccggcgccgggactggag

SEQ ID NO: 2209585 - DNA, 25 bp, Homo sapien
tccgccggcgccgggactggagctc

SEQ ID NO: 2209586 - DNA, 25 bp, Homo sapien
ctcctggatgcgccacggctcagct

SEQ ID NO: 2209587 - DNA, 25 bp, Homo sapien
cttctcgcggcccgggtgcgccggc

SEQ ID NO: 2209588 - DNA, 25 bp, Homo sapien
tgcgccggcccggcctcccgcccgc

SEQ ID NO: 2209589 - DNA, 25 bp, Homo sapien
ctcgcggcccgggtgcgccggcccg

SEQ ID NO: 2209590 - DNA, 25 bp, Homo sapien
ttctcgcggcccgggtgcgccggcc

SEQ ID NO: 2209591 - DNA, 25 bp, Homo sapien
agggctgggttctcgtggtgcaggt

SEQ ID NO: 2209592 - DNA, 25 bp, Homo sapien
cagggctgggttctcgtggtgcagg

SEQ ID NO: 2209593 - DNA, 25 bp, Homo sapien
aggttctggtactggctctcgcggc

SEQ ID NO: 2209594 - DNA, 25 bp, Homo sapien
gatacacagcctcccgattctggta

SEQ ID NO: 2209595 - DNA, 25 bp, Homo sapien
tggtggaactggctctcccgcagct

SEQ ID NO: 2209596 - DNA, 25 bp, Homo sapien
gctgtgtaaccggtagtgtcctgga

SEQ ID NO: 2209597 - DNA, 25 bp, Homo sapien
ccgaccccgcctccatcctggcggc

SEQ ID NO: 2209598 - DNA, 25 bp, Homo sapien
ggcgcgcaccgggcttgagggcccg

SEQ ID NO: 2209599 - DNA, 25 bp, Homo sapien
ggcgggacgcgagggcgcgcaccgg

SEQ ID NO: 2209600 - DNA, 25 bp, Homo sapien
cccgaccccgcctccatcctggcgg

SEQ ID NO: 2209601 - DNA, 25 bp, Homo sapien
gggccggcggcacggggagcaggag

SEQ ID NO: 2209602 - DNA, 25 bp, Homo sapien
ctagggggcccgggagacagcgctg

SEQ ID NO: 2209603 - DNA, 25 bp, Homo sapien
tagggggcccgggagacagcgctgg

SEQ ID NO: 2209604 - DNA, 25 bp, Homo sapien
ggggccggcggcacggggagcagga

SEQ ID NO: 2209605 - DNA, 25 bp, Homo sapien
gaactgtggcatgggttcagctgct

SEQ ID NO: 2209606 - DNA, 25 bp, Homo sapien
tgcaagggaggctaagaaagtatct

SEQ ID NO: 2209607 - DNA, 25 bp, Homo sapien
gccaaagccaggtcacgtagtcatc

SEQ ID NO: 2209608 - DNA, 25 bp, Homo sapien
gctccagacggcttgactatattca

SEQ ID NO: 2209609 - DNA, 25 bp, Homo sapien
gcttttcacgagtccgtctgtagtg

SEQ ID NO: 2209610 - DNA, 25 bp, Homo sapien
ggaaagggtattctctcatctaaca

SEQ ID NO: 2209611 - DNA, 25 bp, Homo sapien
ttctcatagcaggacatcaatgggt

SEQ ID NO: 2209612 - DNA, 25 bp, Homo sapien
tactagaagcaggacggagttgaac

SEQ ID NO: 2209613 - DNA, 25 bp, Homo sapien
ctgcgcctggcaaatgtactttttt

SEQ ID NO: 2209614 - DNA, 25 bp, Homo sapien
caaacgattctgatgcgcagccaag

SEQ ID NO: 2209615 - DNA, 25 bp, Homo sapien
gaattgtgctcgtccataaaggcca

SEQ ID NO: 2209616 - DNA, 25 bp, Homo sapien
tagttcctccaacaagccctaggga

SEQ ID NO: 2209617 - DNA, 25 bp, Homo sapien
tatggcacacagtaccaccagtggt

SEQ ID NO: 2209618 - DNA, 25 bp, Homo sapien
gaagctacaggtttcctcaggccct

SEQ ID NO: 2209619 - DNA, 25 bp, Homo sapien
cacccggttaccagacatgattgaa

SEQ ID NO: 2209620 - DNA, 25 bp, Homo sapien
gaacctcacaggtgttaggctggga

SEQ ID NO: 2209621 - DNA, 25 bp, Homo sapien
tgaaactttcccagtcagcagggca

SEQ ID NO: 2209622 - DNA, 25 bp, Homo sapien
tcagaggccagaatactccctgtcg

SEQ ID NO: 2209623 - DNA, 25 bp, Homo sapien
gacagcttagggatccagacagggc

SEQ ID NO: 2209624 - DNA, 25 bp, Homo sapien
gattagcagtgcctaaatcccatga

SEQ ID NO: 2209625 - DNA, 25 bp, Homo sapien
tgtgtgtgatgaacagatggccctg

SEQ ID NO: 2209626 - DNA, 25 bp, Homo sapien
ctttgctgatcacacagtccccttg

SEQ ID NO: 2209627 - DNA, 25 bp, Homo sapien
tgaggtcgaaggtcaggactttgct

SEQ ID NO: 2209628 - DNA, 25 bp, Homo sapien
catctgggtacttggtgaggtcgaa

SEQ ID NO: 2209629 - DNA, 25 bp, Homo sapien
tggcatctgggtacttggtgaggtc

SEQ ID NO: 2209630 - DNA, 25 bp, Homo sapien
tcaggatagactccaatgaggctct

SEQ ID NO: 2209631 - DNA, 25 bp, Homo sapien
tccttgagagagatgacgatggcct

SEQ ID NO: 2209632 - DNA, 25 bp, Homo sapien
gaggctctcggccttggtgtagaac

SEQ ID NO: 2209633 - DNA, 25 bp, Homo sapien
tggaagttgcaagtcgactgctcct

SEQ ID NO: 2209634 - DNA, 25 bp, Homo sapien
gttatccaaggcagcatcaatctca

SEQ ID NO: 2209635 - DNA, 25 bp, Homo sapien
ttgccaatgttggtgttatccaagg

SEQ ID NO: 2209636 - DNA, 25 bp, Homo sapien
tatccaaggcagcatcaatctcatc

SEQ ID NO: 2209637 - DNA, 25 bp, Homo sapien
ccaatgttggtgttatccaaggcag

SEQ ID NO: 2209638 - DNA, 25 bp, Homo sapien
ctgggagggaaccagtaggtgagct

SEQ ID NO: 2209639 - DNA, 25 bp, Homo sapien
gagggaaccagtaggtgagctgaca

SEQ ID NO: 2209640 - DNA, 25 bp, Homo sapien
ggagggaaccagtaggtgagctgac

SEQ ID NO: 2209641 - DNA, 25 bp, Homo sapien
tgggagggaaccagtaggtgagctg

SEQ ID NO: 2209642 - DNA, 25 bp, Homo sapien
caagcaatataagctgcgggagtca

SEQ ID NO: 2209643 - DNA, 25 bp, Homo sapien
ggattattagccagcaacctcgtga

SEQ ID NO: 2209644 - DNA, 25 bp, Homo sapien
cctggaggcggaactaaatacatgc

SEQ ID NO: 2209645 - DNA, 25 bp, Homo sapien
aaggtcagggtatgccacagtgatc

SEQ ID NO: 2209646 - DNA, 25 bp, Homo sapien
ctctgtgtatccttgggccccagag

SEQ ID NO: 2209647 - DNA, 25 bp, Homo sapien
ccaggagccacacagttgtagttga

SEQ ID NO: 2209648 - DNA, 25 bp, Homo sapien
gccatccaagtagggctcttcaggg

SEQ ID NO: 2209649 - DNA, 25 bp, Homo sapien
tccccgcctgacaagttgtccatag

SEQ ID NO: 2209650 - DNA, 25 bp, Homo sapien
cataggccggaagcgtttcccagga

SEQ ID NO: 2209651 - DNA, 25 bp, Homo sapien
gatctgttcgaatgcctgcttggcc

SEQ ID NO: 2209652 - DNA, 25 bp, Homo sapien
cattgaagcggtcaaagcgctcctt

SEQ ID NO: 2209653 - DNA, 25 bp, Homo sapien
ctttgctcgctttcgggctgcttca

SEQ ID NO: 2209654 - DNA, 25 bp, Homo sapien
tggtagccacagattcaaaacaagc

SEQ ID NO: 2209655 - DNA, 25 bp, Homo sapien
ccctcagtgccctggcaagaaggac

SEQ ID NO: 2209656 - DNA, 25 bp, Homo sapien
agaaagacaggagacccctcagtgc

SEQ ID NO: 2209657 - DNA, 25 bp, Homo sapien
aaagacaggagacccctcagtgccc

SEQ ID NO: 2209658 - DNA, 25 bp, Homo sapien
aaagaaagacaggagacccctcagt

SEQ ID NO: 2209659 - DNA, 25 bp, Homo sapien
tcttgtcctcatcgtaggcccaagt

SEQ ID NO: 2209660 - DNA, 25 bp, Homo sapien
gtcctcatcgtaggcccaagtagaa

SEQ ID NO: 2209661 - DNA, 25 bp, Homo sapien
ttgtcctcatcgtaggcccaagtag

SEQ ID NO: 2209662 - DNA, 25 bp, Homo sapien
ctcttgtcctcatcgtaggcccaag

SEQ ID NO: 2209663 - DNA, 25 bp, Homo sapien
cctggaacttgtctcggacactttc

SEQ ID NO: 2209664 - DNA, 25 bp, Homo sapien
gcggcaatacgctgaagcacactct

SEQ ID NO: 2209665 - DNA, 25 bp, Homo sapien
tctcggacactttccagcttttcca

SEQ ID NO: 2209666 - DNA, 25 bp, Homo sapien
ggcggcaatacgctgaagcacactc

SEQ ID NO: 2209667 - DNA, 25 bp, Homo sapien
caagatattcataagatgccaaagc

SEQ ID NO: 2209668 - DNA, 25 bp, Homo sapien
tacatttagcgttgaaaaacctagc

SEQ ID NO: 2209669 - DNA, 25 bp, Homo sapien
gatgccaaagcatcactctaaagat

SEQ ID NO: 2209670 - DNA, 25 bp, Homo sapien
ggttatctatcgagaaagagaggtg

SEQ ID NO: 2209671 - DNA, 25 bp, Homo sapien
gatcctcacacagatcaccgtagtc

SEQ ID NO: 2209672 - DNA, 25 bp, Homo sapien
tagtcaatctcaatgagggcctctc

SEQ ID NO: 2209673 - DNA, 25 bp, Homo sapien
cagatcaccgtagtcaatctcaatg

SEQ ID NO: 2209674 - DNA, 25 bp, Homo sapien
gggcctctcgtgcatagatactgga

SEQ ID NO: 2209675 - DNA, 25 bp, Homo sapien
tcaagcttggtctcaatggctgtca

SEQ ID NO: 2209676 - DNA, 25 bp, Homo sapien
cagtggcaacttaatgtcctgcatc

SEQ ID NO: 2209677 - DNA, 25 bp, Homo sapien
gtcctgcatcttacaggcctgtagc

SEQ ID NO: 2209678 - DNA, 25 bp, Homo sapien
cctgtagcaagttgtgacggtcact

SEQ ID NO: 2209679 - DNA, 25 bp, Homo sapien
tggtctcatctatgatcttcatgtg

SEQ ID NO: 2209680 - DNA, 25 bp, Homo sapien
tgtcattcacttccgacttcttggc

SEQ ID NO: 2209681 - DNA, 25 bp, Homo sapien
ccgagtttcttacgaatctcctcca

SEQ ID NO: 2209682 - DNA, 25 bp, Homo sapien
tcaggtcttgtagctgagccatggt

SEQ ID NO: 2209683 - DNA, 25 bp, Homo sapien
gtggtcagccaaaggggattatagc

SEQ ID NO: 2209684 - DNA, 25 bp, Homo sapien
tatagccttatgtataatgttctga

SEQ ID NO: 2209685 - DNA, 25 bp, Homo sapien
tcacctctggcaagacgaaggggac

SEQ ID NO: 2209686 - DNA, 25 bp, Homo sapien
actaggatgaagagtggtcagccaa

SEQ ID NO: 2209687 - DNA, 25 bp, Homo sapien
cacataaaggggacatatctgcaac

SEQ ID NO: 2209688 - DNA, 25 bp, Homo sapien
tctgcactctaaacagggcgacagg

SEQ ID NO: 2209689 - DNA, 25 bp, Homo sapien
tgcaaaagataatgcggcaacatgt

SEQ ID NO: 2209690 - DNA, 25 bp, Homo sapien
ggcaacatgttgatgaccgatgaat

SEQ ID NO: 2209691 - DNA, 25 bp, Homo sapien
agaatactggtctcctataccatgg

SEQ ID NO: 2209692 - DNA, 25 bp, Homo sapien
atttgaaagtcttcttgaactgttt

SEQ ID NO: 2209693 - DNA, 25 bp, Homo sapien
taccatggctggtattgagcattgt

SEQ ID NO: 2209694 - DNA, 25 bp, Homo sapien
tatgtgtttagggactatttgaaag

SEQ ID NO: 2209695 - DNA, 25 bp, Homo sapien
aaatccaactgaatgcccaagcgag

SEQ ID NO: 2209696 - DNA, 25 bp, Homo sapien
caactgaatgcccaagcgagtcttc

SEQ ID NO: 2209697 - DNA, 25 bp, Homo sapien
ctgaatgcccaagcgagtcttctga

SEQ ID NO: 2209698 - DNA, 25 bp, Homo sapien
atccaactgaatgcccaagcgagtc

SEQ ID NO: 2209699 - DNA, 25 bp, Homo sapien
tactgtatgggcaaagggctaaact

SEQ ID NO: 2209700 - DNA, 25 bp, Homo sapien
cagtactctatatgtttcctgagga

SEQ ID NO: 2209701 - DNA, 25 bp, Homo sapien
gaagcccagggtacaagggatgacc

SEQ ID NO: 2209702 - DNA, 25 bp, Homo sapien
cctccttcagcaaagactgtgttgt

SEQ ID NO: 2209703 - DNA, 25 bp, Homo sapien
gcttcttggcgatttcattctgccg

SEQ ID NO: 2209704 - DNA, 25 bp, Homo sapien
gatgttgcgcacaccaatctcccga

SEQ ID NO: 2209705 - DNA, 25 bp, Homo sapien
ctcaaactcccggatgttgcgcaca

SEQ ID NO: 2209706 - DNA, 25 bp, Homo sapien
cgcttcttggcgatttcattctgcc

SEQ ID NO: 2209707 - DNA, 25 bp, Homo sapien
ggctctgaatgatcctcttgatatc

SEQ ID NO: 2209708 - DNA, 25 bp, Homo sapien
gaggcccaaagttggctagctcact

SEQ ID NO: 2209709 - DNA, 25 bp, Homo sapien
ctctctcggctctgaatgatcctct

SEQ ID NO: 2209710 - DNA, 25 bp, Homo sapien
tcttgatatcattaatgcgaggccc

SEQ ID NO: 2209711 - DNA, 25 bp, Homo sapien
cagattcagggctagatgtcgtgtc

SEQ ID NO: 2209712 - DNA, 25 bp, Homo sapien
gttctaggtcactctgggagtactt

SEQ ID NO: 2209713 - DNA, 25 bp, Homo sapien
tgggagtacttgagccgcatctgca

SEQ ID NO: 2209714 - DNA, 25 bp, Homo sapien
gagactgcacctgacgcagctctgc

SEQ ID NO: 2209715 - DNA, 25 bp, Homo sapien
tggaatagggttccatccagtgcca

SEQ ID NO: 2209716 - DNA, 25 bp, Homo sapien
tctctttcaacttgtctactgcttt

SEQ ID NO: 2209717 - DNA, 25 bp, Homo sapien
aacttgtctactgctttctcatccc

SEQ ID NO: 2209718 - DNA, 25 bp, Homo sapien
cctgacttctggaatagggttccat

SEQ ID NO: 2209719 - DNA, 25 bp, Homo sapien
aagagggggagaagctgaacaaatg

SEQ ID NO: 2209720 - DNA, 25 bp, Homo sapien
gggagaagctgaacaaatgaatctc

SEQ ID NO: 2209721 - DNA, 25 bp, Homo sapien
agggggagaagctgaacaaatgaat

SEQ ID NO: 2209722 - DNA, 25 bp, Homo sapien
gaacaaatgaatctccagtactgag

SEQ ID NO: 2209723 - DNA, 25 bp, Homo sapien
tccaaaggcaatgcggcgggcatct

SEQ ID NO: 2209724 - DNA, 25 bp, Homo sapien
ttgtcacagacaagggcattgccac

SEQ ID NO: 2209725 - DNA, 25 bp, Homo sapien
tgaggtggctcatagcgaatcacat

SEQ ID NO: 2209726 - DNA, 25 bp, Homo sapien
gccacaagcatactgcagggccttt

SEQ ID NO: 2209727 - DNA, 25 bp, Homo sapien
tatactgaatacagtcccggcctgt

SEQ ID NO: 2209728 - DNA, 25 bp, Homo sapien
ggcctgtcttctccgagtccacaat

SEQ ID NO: 2209729 - DNA, 25 bp, Homo sapien
gatacttcttttgtgtgggctggca

SEQ ID NO: 2209730 - DNA, 25 bp, Homo sapien
agaggcaagaaggtctcaggctccc

SEQ ID NO: 2209731 - DNA, 25 bp, Homo sapien
gggtaaaggcgcttgatgctttcca

SEQ ID NO: 2209732 - DNA, 25 bp, Homo sapien
tcgatgcgggcatcccctagctgct

SEQ ID NO: 2209733 - DNA, 25 bp, Homo sapien
ttgatttcatcaatacgccgcttgg

SEQ ID NO: 2209734 - DNA, 25 bp, Homo sapien
cggctgctctcctggcggtcgatgc

SEQ ID NO: 2209735 - DNA, 25 bp, Homo sapien
ctccagtttctcaatccgcttctga

SEQ ID NO: 2209736 - DNA, 25 bp, Homo sapien
cagtttctcaatccgcttctgattc

SEQ ID NO: 2209737 - DNA, 25 bp, Homo sapien
gctagtggtgatgtattcctccagt

SEQ ID NO: 2209738 - DNA, 25 bp, Homo sapien
tctcttcaatttcccgcagcttttg

SEQ ID NO: 2209739 - DNA, 25 bp, Homo sapien
tggtctcgattgaatttctccagct

SEQ ID NO: 2209740 - DNA, 25 bp, Homo sapien
gttcttccagatccagacggtcctg

SEQ ID NO: 2209741 - DNA, 25 bp, Homo sapien
cagacggtcctggtcagctttctgg

SEQ ID NO: 2209742 - DNA, 25 bp, Homo sapien
tgtctctactttcttccgttcttcc

SEQ ID NO: 2209743 - DNA, 25 bp, Homo sapien
gattctcctccaacgtcaaatctct

SEQ ID NO: 2209744 - DNA, 25 bp, Homo sapien
gttcttcaaactcctgccgagcctt

SEQ ID NO: 2209745 - DNA, 25 bp, Homo sapien
cctgactctgactctcttcttccat

SEQ ID NO: 2209746 - DNA, 25 bp, Homo sapien
cttctgagcattctgcagagacttc

SEQ ID NO: 2209747 - DNA, 25 bp, Homo sapien
cagaggggtgggggaaaccagtgag

SEQ ID NO: 2209748 - DNA, 25 bp, Homo sapien
tgcttaaatattctatttgtctaaa

SEQ ID NO: 2209749 - DNA, 25 bp, Homo sapien
tccaccttgtccatacgcttcttgt

SEQ ID NO: 2209750 - DNA, 25 bp, Homo sapien
cccgcatcattttgcccagctcctt

SEQ ID NO: 2209751 - DNA, 25 bp, Homo sapien
cctccaccttgtccatacgcttctt

SEQ ID NO: 2209752 - DNA, 25 bp, Homo sapien
gctcccgcatcattttgcccagctc

SEQ ID NO: 2209753 - DNA, 25 bp, Homo sapien
cttctcgatctccttgttctttgag

SEQ ID NO: 2209754 - DNA, 25 bp, Homo sapien
tgttctttgaggccagttccttgtt

SEQ ID NO: 2209755 - DNA, 25 bp, Homo sapien
ttgttctttgaggccagttccttgt

SEQ ID NO: 2209756 - DNA, 25 bp, Homo sapien
cttgttctttgaggccagttccttg

SEQ ID NO: 2209757 - DNA, 25 bp, Homo sapien
ggtaaagcttaaagagctgcagctg

SEQ ID NO: 2209758 - DNA, 25 bp, Homo sapien
aaagcttaaagagctgcagctgtac

SEQ ID NO: 2209759 - DNA, 25 bp, Homo sapien
ttcattatggtaaagcttaaagagc

SEQ ID NO: 2209760 - DNA, 25 bp, Homo sapien
tggtaaagcttaaagagctgcagct

SEQ ID NO: 2209761 - DNA, 25 bp, Homo sapien
atccttcaggcgctggtaccggtca

SEQ ID NO: 2209762 - DNA, 25 bp, Homo sapien
ccttcaggcgctggtaccggtcagc

SEQ ID NO: 2209763 - DNA, 25 bp, Homo sapien
gagcccgtactacctcatccttcag

SEQ ID NO: 2209764 - DNA, 25 bp, Homo sapien
cctcatccttcaggcgctggtaccg

SEQ ID NO: 2209765 - DNA, 25 bp, Homo sapien
ttcttgcgatggtaattaaactgtg

SEQ ID NO: 2209766 - DNA, 25 bp, Homo sapien
tctcttcaaatagagctgtcctctc

SEQ ID NO: 2209767 - DNA, 25 bp, Homo sapien
gcgttcagccgcaatatttttcttg

SEQ ID NO: 2209768 - DNA, 25 bp, Homo sapien
ccttctttcgcttgtcatactcctg

SEQ ID NO: 2209769 - DNA, 25 bp, Homo sapien
gggctttgaggacaaattccttgcc

SEQ ID NO: 2209770 - DNA, 25 bp, Homo sapien
ctcccatgcccctgctgccacattt

SEQ ID NO: 2209771 - DNA, 25 bp, Homo sapien
tgttgatcttgtactcagaagaacc

SEQ ID NO: 2209772 - DNA, 25 bp, Homo sapien
tctctaattcctcactgtactcatg

SEQ ID NO: 2209773 - DNA, 25 bp, Homo sapien
ctggaaaacgaggaagttacgagct

SEQ ID NO: 2209774 - DNA, 25 bp, Homo sapien
ttacgagctttgatgagaatgccca

SEQ ID NO: 2209775 - DNA, 25 bp, Homo sapien
tttcacctagcacaaagctgatggc

SEQ ID NO: 2209776 - DNA, 25 bp, Homo sapien
tgacacgggcaaaggtacggtcctc

SEQ ID NO: 2209777 - DNA, 25 bp, Homo sapien
gagtagaccatgctgacaaaggccc

SEQ ID NO: 2209778 - DNA, 25 bp, Homo sapien
cacaggagctccatggatcaggtcc

SEQ ID NO: 2209779 - DNA, 25 bp, Homo sapien
tcactaccacttagctgaccttcca

SEQ ID NO: 2209780 - DNA, 25 bp, Homo sapien
tttcactaccacttagctgaccttc

SEQ ID NO: 2209781 - DNA, 25 bp, Homo sapien
accacttagctgaccttccattccc

SEQ ID NO: 2209782 - DNA, 25 bp, Homo sapien
actaccacttagctgaccttccatt

SEQ ID NO: 2209783 - DNA, 25 bp, Homo sapien
cagaagtgcaccgtttgggaccgaa

SEQ ID NO: 2209784 - DNA, 25 bp, Homo sapien
ggagcgctgggtctgaaattcaaaa

SEQ ID NO: 2209785 - DNA, 25 bp, Homo sapien
gacgctgggctgaaacagaagtgca

SEQ ID NO: 2209786 - DNA, 25 bp, Homo sapien
aaattcaaaagtgccgcctccagag

SEQ ID NO: 2209787 - DNA, 25 bp, Homo sapien
tggtccgataatctgtcgacccttg

SEQ ID NO: 2209788 - DNA, 25 bp, Homo sapien
ggtgaacctctgaaatggtccgata

SEQ ID NO: 2209789 - DNA, 25 bp, Homo sapien
cagagccattgggtccaatgatggc

SEQ ID NO: 2209790 - DNA, 25 bp, Homo sapien
ccttgtacgacttaaagttctcaat

SEQ ID NO: 2209791 - DNA, 25 bp, Homo sapien
gtacgcccgagaactgaggtagccc

SEQ ID NO: 2209792 - DNA, 25 bp, Homo sapien
caaatgtcgcgagaatacgtccagg

SEQ ID NO: 2209793 - DNA, 25 bp, Homo sapien
tgcaagccgggcgaccggcaaatgt

SEQ ID NO: 2209794 - DNA, 25 bp, Homo sapien
ccgcgcgggaaacgccgcagtgcaa

SEQ ID NO: 2209795 - DNA, 25 bp, Homo sapien
aaaaagagactttattaggcacaga

SEQ ID NO: 2209796 - DNA, 25 bp, Homo sapien
gggcgactggtaggcagttacaaaa

SEQ ID NO: 2209797 - DNA, 25 bp, Homo sapien
aagggcagaggagcgtgtgttttct

SEQ ID NO: 2209798 - DNA, 25 bp, Homo sapien
aagctggagagtagtaccccaggga

SEQ ID NO: 2209799 - DNA, 25 bp, Homo sapien
tgggcttcctcccaagctggagagt

SEQ ID NO: 2209800 - DNA, 25 bp, Homo sapien
gggttctcgatgatggcctgtacga

SEQ ID NO: 2209801 - DNA, 25 bp, Homo sapien
gcctgtacgaggtgagcatactcag

SEQ ID NO: 2209802 - DNA, 25 bp, Homo sapien
aaggctgcatacgaatggccccatc

SEQ ID NO: 2209803 - DNA, 25 bp, Homo sapien
gaagttgcacactttctctgggagg

SEQ ID NO: 2209804 - DNA, 25 bp, Homo sapien
caatcccaggtatgatggagagagg

SEQ ID NO: 2209805 - DNA, 25 bp, Homo sapien
ttactttagccctacttcttggtgc

SEQ ID NO: 2209806 - DNA, 25 bp, Homo sapien
gctgctgcttaggtggtggatacct

SEQ ID NO: 2209807 - DNA, 25 bp, Homo sapien
cagagactcacccttgctttcatga

SEQ ID NO: 2209808 - DNA, 25 bp, Homo sapien
tggggcaatggtcatcacccggata

SEQ ID NO: 2209809 - DNA, 25 bp, Homo sapien
ctggggcaatggtcatcacccggat

SEQ ID NO: 2209810 - DNA, 25 bp, Homo sapien
ggggcaatggtcatcacccggatac

SEQ ID NO: 2209811 - DNA, 25 bp, Homo sapien
gccagatcccgagcaatgggcagtg

SEQ ID NO: 2209812 - DNA, 25 bp, Homo sapien
ccgagcaatgggcagtgtcatgccc

SEQ ID NO: 2209813 - DNA, 25 bp, Homo sapien
aagcagagtatgcagcttgtccaac

SEQ ID NO: 2209814 - DNA, 25 bp, Homo sapien
ccttggaagcagagtatgcagcttg

SEQ ID NO: 2209815 - DNA, 25 bp, Homo sapien
agaaagagtagaagtcataggtggg

SEQ ID NO: 2209816 - DNA, 25 bp, Homo sapien
aaagagtagaagtcataggtgggag

SEQ ID NO: 2209817 - DNA, 25 bp, Homo sapien
tcataggtgggagggccccaacaag

SEQ ID NO: 2209818 - DNA, 25 bp, Homo sapien
taggtgggagggccccaacaagtca

SEQ ID NO: 2209819 - DNA, 25 bp, Homo sapien
tgttgatgatgaccccacgttggcc

SEQ ID NO: 2209820 - DNA, 25 bp, Homo sapien
agccaccaggcggatcacattgaag

SEQ ID NO: 2209821 - DNA, 25 bp, Homo sapien
gcggatcacattgaaggtgcccatg

SEQ ID NO: 2209822 - DNA, 25 bp, Homo sapien
cagccacactggcagtgttgatgat

SEQ ID NO: 2209823 - DNA, 25 bp, Homo sapien
tactaccactatccctggagaactt

SEQ ID NO: 2209824 - DNA, 25 bp, Homo sapien
gccagatacttcttactaccactat

SEQ ID NO: 2209825 - DNA, 25 bp, Homo sapien
cacagccagatacttcttactacca

SEQ ID NO: 2209826 - DNA, 25 bp, Homo sapien
tacttcttactaccactatccctgg

SEQ ID NO: 2209827 - DNA, 25 bp, Homo sapien
caccgcgatgcctgcacagttgaca

SEQ ID NO: 2209828 - DNA, 25 bp, Homo sapien
gttgtacgtcttgctagccaccgcg

SEQ ID NO: 2209829 - DNA, 25 bp, Homo sapien
tcttccaaggtatgggtctggccct

SEQ ID NO: 2209830 - DNA, 25 bp, Homo sapien
caagaactcgctggaagtcttccaa

SEQ ID NO: 2209831 - DNA, 25 bp, Homo sapien
ctaatgcaaccctgttgtgaggctg

SEQ ID NO: 2209832 - DNA, 25 bp, Homo sapien
gataaattcacatgctcctgaagat

SEQ ID NO: 2209833 - DNA, 25 bp, Homo sapien
tcacatgctcctgaagattcttaat

SEQ ID NO: 2209834 - DNA, 25 bp, Homo sapien
aattgctgtggatcagagcactaat

SEQ ID NO: 2209835 - DNA, 25 bp, Homo sapien
cccacccgagttgggcaggtccaga

SEQ ID NO: 2209836 - DNA, 25 bp, Homo sapien
gctggggcgaaaacgcagttgtttc

SEQ ID NO: 2209837 - DNA, 25 bp, Homo sapien
tgtttcctaacttcttggcttgggc

SEQ ID NO: 2209838 - DNA, 25 bp, Homo sapien
gaggctcctccggttattaccgcca

SEQ ID NO: 2209839 - DNA, 25 bp, Homo sapien
tagttccacggccgcgctgtcccgg

SEQ ID NO: 2209840 - DNA, 25 bp, Homo sapien
ctcttgagcccaacggccacaatac

SEQ ID NO: 2209841 - DNA, 25 bp, Homo sapien
gcctacataagcatgaccctttccc

SEQ ID NO: 2209842 - DNA, 25 bp, Homo sapien
tccctcgaaaccgatctctttctcc

SEQ ID NO: 2209843 - DNA, 25 bp, Homo sapien
cttcacgctccgacacgctgctgcc

SEQ ID NO: 2209844 - DNA, 25 bp, Homo sapien
ttcacgctccgacacgctgctgcca

SEQ ID NO: 2209845 - DNA, 25 bp, Homo sapien
tcacgctccgacacgctgctgccat

SEQ ID NO: 2209846 - DNA, 25 bp, Homo sapien
ttggccgaggcgaagcggcggaagg

SEQ ID NO: 2209847 - DNA, 25 bp, Homo sapien
ttgtcgccggccactccacgggatg

SEQ ID NO: 2209848 - DNA, 25 bp, Homo sapien
gcggaaggggcggatgcgacgggcc

SEQ ID NO: 2209849 - DNA, 25 bp, Homo sapien
gggcgcgggcgctcgttgattggcc

SEQ ID NO: 2209850 - DNA, 25 bp, Homo sapien
gccgcatgagacgtgggggcgtggc

SEQ ID NO: 2209851 - DNA, 25 bp, Homo sapien
ctgccgcatgagacgtgggggcgtg

SEQ ID NO: 2209852 - DNA, 25 bp, Homo sapien
tgccgcatgagacgtgggggcgtgg

SEQ ID NO: 2209853 - DNA, 25 bp, Homo sapien
cagtgcggttggagtgtctccagtg

SEQ ID NO: 2209854 - DNA, 25 bp, Homo sapien
ccagtgcggttggagtgtctccagt

SEQ ID NO: 2209855 - DNA, 25 bp, Homo sapien
ttacctttgaattttgccttatcaa

SEQ ID NO: 2209856 - DNA, 25 bp, Homo sapien
tgtcaataaaatcctcaaactgcag

SEQ ID NO: 2209857 - DNA, 25 bp, Homo sapien
tcaataaaatcctcaaactgcagtt

SEQ ID NO: 2209858 - DNA, 25 bp, Homo sapien
tttacctttgaattttgccttatca

SEQ ID NO: 2209859 - DNA, 25 bp, Homo sapien
ttaatctgtgagcatccagctcgga

SEQ ID NO: 2209860 - DNA, 25 bp, Homo sapien
aatctgtgagcatccagctcggata

SEQ ID NO: 2209861 - DNA, 25 bp, Homo sapien
tctgtgagcatccagctcggatata

SEQ ID NO: 2209862 - DNA, 25 bp, Homo sapien
gtgagcatccagctcggatatattt

SEQ ID NO: 2209863 - DNA, 25 bp, Homo sapien
ggaggtacaggaacaagtgctccac

SEQ ID NO: 2209864 - DNA, 25 bp, Homo sapien
agtttcatcttctacatgctcataa

SEQ ID NO: 2209865 - DNA, 25 bp, Homo sapien
aaagtttcatcttctacatgctcat

SEQ ID NO: 2209866 - DNA, 25 bp, Homo sapien
aagtttcatcttctacatgctcata

SEQ ID NO: 2209867 - DNA, 25 bp, Homo sapien
acttcaccttcagtccagtccattc

SEQ ID NO: 2209868 - DNA, 25 bp, Homo sapien
cttcaccttcagtccagtccattct

SEQ ID NO: 2209869 - DNA, 25 bp, Homo sapien
tgacttcaccttcagtccagtccat

SEQ ID NO: 2209870 - DNA, 25 bp, Homo sapien
gacttcaccttcagtccagtccatt

SEQ ID NO: 2209871 - DNA, 25 bp, Homo sapien
ggctggaaccatcgaagtccttaga

SEQ ID NO: 2209872 - DNA, 25 bp, Homo sapien
ccctcggttgggtcaagtgagctct

SEQ ID NO: 2209873 - DNA, 25 bp, Homo sapien
caagactactagaaaggctcaccaa

SEQ ID NO: 2209874 - DNA, 25 bp, Homo sapien
caaaaataatggtcttctggcgacc

SEQ ID NO: 2209875 - DNA, 25 bp, Homo sapien
aagagtgctctttatttgaaacctc

SEQ ID NO: 2209876 - DNA, 25 bp, Homo sapien
gaagagtgctctttatttgaaacct

SEQ ID NO: 2209877 - DNA, 25 bp, Homo sapien
ttatttgaaacctccacaacacaga

SEQ ID NO: 2209878 - DNA, 25 bp, Homo sapien
tttatttgaaacctccacaacacag

SEQ ID NO: 2209879 - DNA, 25 bp, Homo sapien
cgccaatcttgtctcgcattgaatc

SEQ ID NO: 2209880 - DNA, 25 bp, Homo sapien
tcttgtctcgcattgaatcattagc

SEQ ID NO: 2209881 - DNA, 25 bp, Homo sapien
tctcgcattgaatcattagctgtgc

SEQ ID NO: 2209882 - DNA, 25 bp, Homo sapien
gccaatcttgtctcgcattgaatca

SEQ ID NO: 2209883 - DNA, 25 bp, Homo sapien
cagacaggtccctgcaaaggctact

SEQ ID NO: 2209884 - DNA, 25 bp, Homo sapien
tctgaggagcacactgttcaaacag

SEQ ID NO: 2209885 - DNA, 25 bp, Homo sapien
acagacaggtccctgcaaaggctac

SEQ ID NO: 2209886 - DNA, 25 bp, Homo sapien
cacagaatctgaggagcacactgtt

SEQ ID NO: 2209887 - DNA, 25 bp, Homo sapien
catttattggtttttgacaatttct

SEQ ID NO: 2209888 - DNA, 25 bp, Homo sapien
atttcatttattggtttttgacaat

SEQ ID NO: 2209889 - DNA, 25 bp, Homo sapien
attggtttttgacaatttctttctg

SEQ ID NO: 2209890 - DNA, 25 bp, Homo sapien
ggatttcatttattggtttttgaca

SEQ ID NO: 2209891 - DNA, 25 bp, Homo sapien
ttcagagcactcctggatagccaac

SEQ ID NO: 2209892 - DNA, 25 bp, Homo sapien
ctcataggcaggcagatccagctga

SEQ ID NO: 2209893 - DNA, 25 bp, Homo sapien
acagtagcatgtggcggagcttctc

SEQ ID NO: 2209894 - DNA, 25 bp, Homo sapien
ggcaggcagatccagctgattaaaa

SEQ ID NO: 2209895 - DNA, 25 bp, Homo sapien
caatcttgtctcagcccagtatgtc

SEQ ID NO: 2209896 - DNA, 25 bp, Homo sapien
cctcactcgcccataggctaaagtg

SEQ ID NO: 2209897 - DNA, 25 bp, Homo sapien
gctaaagtgcaaacttgaaggtggt

SEQ ID NO: 2209898 - DNA, 25 bp, Homo sapien
tgcttcttgatgactcccaatcttg

SEQ ID NO: 2209899 - DNA, 25 bp, Homo sapien
gctgagctctttagacttttgctcc

SEQ ID NO: 2209900 - DNA, 25 bp, Homo sapien
tttagacttttgctccctgcaactc

SEQ ID NO: 2209901 - DNA, 25 bp, Homo sapien
gctctttagacttttgctccctgca

SEQ ID NO: 2209902 - DNA, 25 bp, Homo sapien
tctgctgagctctttagacttttgc

SEQ ID NO: 2209903 - DNA, 25 bp, Homo sapien
aatacaccatgctctcttgtggtgc

SEQ ID NO: 2209904 - DNA, 25 bp, Homo sapien
ggaatacaccatgctctcttgtggt

SEQ ID NO: 2209905 - DNA, 25 bp, Homo sapien
tggaatacaccatgctctcttgtgg

SEQ ID NO: 2209906 - DNA, 25 bp, Homo sapien
ctggaatacaccatgctctcttgtg

SEQ ID NO: 2209907 - DNA, 25 bp, Homo sapien
gaaacaccaaattgtgagttaccca

SEQ ID NO: 2209908 - DNA, 25 bp, Homo sapien
gtgtctagcacatctcatctcaaac

SEQ ID NO: 2209909 - DNA, 25 bp, Homo sapien
tgtgtctagcacatctcatctcaaa

SEQ ID NO: 2209910 - DNA, 25 bp, Homo sapien
caccaaattgtgagttacccaaggt

SEQ ID NO: 2209911 - DNA, 25 bp, Homo sapien
gaaaacatcaagtatgcaagctcaa

SEQ ID NO: 2209912 - DNA, 25 bp, Homo sapien
ctgaaaacatcaagtatgcaagctc

SEQ ID NO: 2209913 - DNA, 25 bp, Homo sapien
aaacatcaagtatgcaagctcaacc

SEQ ID NO: 2209914 - DNA, 25 bp, Homo sapien
acatcaagtatgcaagctcaaccta

SEQ ID NO: 2209915 - DNA, 25 bp, Homo sapien
atgtgtgagctgaaggcaggcgatc

SEQ ID NO: 2209916 - DNA, 25 bp, Homo sapien
gtgtgagctgaaggcaggcgatctg

SEQ ID NO: 2209917 - DNA, 25 bp, Homo sapien
gtgagctgaaggcaggcgatctgtg

SEQ ID NO: 2209918 - DNA, 25 bp, Homo sapien
gagctgaaggcaggcgatctgtgga

SEQ ID NO: 2209919 - DNA, 25 bp, Homo sapien
aaactggaggaacttggcacggtca

SEQ ID NO: 2209920 - DNA, 25 bp, Homo sapien
ttggaagtacccgtgacaaactgga

SEQ ID NO: 2209921 - DNA, 25 bp, Homo sapien
gcaatgctctccagaaccactggat

SEQ ID NO: 2209922 - DNA, 25 bp, Homo sapien
tgatcgaaagaacgcaatgctctcc

SEQ ID NO: 2209923 - DNA, 25 bp, Homo sapien
taagaaagccgccaactgcttgcgg

SEQ ID NO: 2209924 - DNA, 25 bp, Homo sapien
tgggcagtcctgatataagcagctc

SEQ ID NO: 2209925 - DNA, 25 bp, Homo sapien
catcgatgtcaatggtgggcagtcc

SEQ ID NO: 2209926 - DNA, 25 bp, Homo sapien
gaaatgaggcgctttggaatgatct

SEQ ID NO: 2209927 - DNA, 25 bp, Homo sapien
ttctcatctggcataccaggtgtac

SEQ ID NO: 2209928 - DNA, 25 bp, Homo sapien
tctcctctgttaccaagatgttggc

SEQ ID NO: 2209929 - DNA, 25 bp, Homo sapien
ccattgggtttgaggtcacgaactt

SEQ ID NO: 2209930 - DNA, 25 bp, Homo sapien
caggtgtacatactccttcttattc

SEQ ID NO: 2209931 - DNA, 25 bp, Homo sapien
tgatgtcactcacaaacacctgcta

SEQ ID NO: 2209932 - DNA, 25 bp, Homo sapien
tctaaggtgaacctggaatggatct

SEQ ID NO: 2209933 - DNA, 25 bp, Homo sapien
tatgagaaggtcacgcagtgctagt

SEQ ID NO: 2209934 - DNA, 25 bp, Homo sapien
gaatggatcttccagattggctggg

SEQ ID NO: 2209935 - DNA, 25 bp, Homo sapien
gaggtcatagcctagtgtggagaca

SEQ ID NO: 2209936 - DNA, 25 bp, Homo sapien
ccagaccttggtagaagtggtaatc

SEQ ID NO: 2209937 - DNA, 25 bp, Homo sapien
tgaaggtgaggtcatagcctagtgt

SEQ ID NO: 2209938 - DNA, 25 bp, Homo sapien
ggtaatcttcactctccatatctgt

SEQ ID NO: 2209939 - DNA, 25 bp, Homo sapien
tacggaacaaggcatacatagggtt

SEQ ID NO: 2209940 - DNA, 25 bp, Homo sapien
gatcaccaggtgaggtacggaacaa

SEQ ID NO: 2209941 - DNA, 25 bp, Homo sapien
taaagtagcactccagaagacggtt

SEQ ID NO: 2209942 - DNA, 25 bp, Homo sapien
agctttggccacaatgcgtccgaca

SEQ ID NO: 2209943 - DNA, 25 bp, Homo sapien
caccagcatcctgcccttcttctcc

SEQ ID NO: 2209944 - DNA, 25 bp, Homo sapien
ataccactcccgcaggagcccacca

SEQ ID NO: 2209945 - DNA, 25 bp, Homo sapien
cccgcaggagcccaccagcatcctg

SEQ ID NO: 2209946 - DNA, 25 bp, Homo sapien
actcccgcaggagcccaccagcatc

SEQ ID NO: 2209947 - DNA, 25 bp, Homo sapien
ccactgacagaggagatgtcccaaa

SEQ ID NO: 2209948 - DNA, 25 bp, Homo sapien
ccagtcatttgtgtgagtgagagac

SEQ ID NO: 2209949 - DNA, 25 bp, Homo sapien
gatgaagaggtaaacagagagtgcc

SEQ ID NO: 2209950 - DNA, 25 bp, Homo sapien
gcagaaaacccaggatacatccagt

SEQ ID NO: 2209951 - DNA, 25 bp, Homo sapien
aatttgaggctagagcaagccatcg

SEQ ID NO: 2209952 - DNA, 25 bp, Homo sapien
ggaattcctattagggagggcagca

SEQ ID NO: 2209953 - DNA, 25 bp, Homo sapien
caagccatcgctactgtgcaggagg

SEQ ID NO: 2209954 - DNA, 25 bp, Homo sapien
tagcttagctaaagggccagccagc

SEQ ID NO: 2209955 - DNA, 25 bp, Homo sapien
tcgattcttcatttcttcgggggat

SEQ ID NO: 2209956 - DNA, 25 bp, Homo sapien
aatcgattcttcatttcttcggggg

SEQ ID NO: 2209957 - DNA, 25 bp, Homo sapien
cgattcttcatttcttcgggggatt

SEQ ID NO: 2209958 - DNA, 25 bp, Homo sapien
attcttcatttcttcgggggatttg

SEQ ID NO: 2209959 - DNA, 25 bp, Homo sapien
acagccatgtcttctttccggagcc

SEQ ID NO: 2209960 - DNA, 25 bp, Homo sapien
gtcacgacggacatgcacagccatg

SEQ ID NO: 2209961 - DNA, 25 bp, Homo sapien
cgatgcagctcacgataggagtctt

SEQ ID NO: 2209962 - DNA, 25 bp, Homo sapien
taaacgctccagctcttggcggaaa

SEQ ID NO: 2209963 - DNA, 25 bp, Homo sapien
cattccaagtgctgtcaccaaagga

SEQ ID NO: 2209964 - DNA, 25 bp, Homo sapien
cagaactttagaaactgtgtggttc

SEQ ID NO: 2209965 - DNA, 25 bp, Homo sapien
caggagtatttaggtatgatggcca

SEQ ID NO: 2209966 - DNA, 25 bp, Homo sapien
tgtgtgttctatggccacctgtgcc

SEQ ID NO: 2209967 - DNA, 25 bp, Homo sapien
tcgtggactgccgtaggatctggtt

SEQ ID NO: 2209968 - DNA, 25 bp, Homo sapien
gcttgacatcaaagtcgaggacacg

SEQ ID NO: 2209969 - DNA, 25 bp, Homo sapien
ccatcagcaaggtgggtcgtggact

SEQ ID NO: 2209970 - DNA, 25 bp, Homo sapien
cacgaatgtagtctaccaggacagc

SEQ ID NO: 2209971 - DNA, 25 bp, Homo sapien
tcggacaggaggcttgctctcccgc

SEQ ID NO: 2209972 - DNA, 25 bp, Homo sapien
gcaaagcgaaggaacttctgtgtgt

SEQ ID NO: 2209973 - DNA, 25 bp, Homo sapien
tgtgcatagatgagggctcccggga

SEQ ID NO: 2209974 - DNA, 25 bp, Homo sapien
gctcgtccttgatgtgtgccagctg

SEQ ID NO: 2209975 - DNA, 25 bp, Homo sapien
gtggcatggaccagaaagaaggcct

SEQ ID NO: 2209976 - DNA, 25 bp, Homo sapien
ggaccagaaagaaggcctcgacagc

SEQ ID NO: 2209977 - DNA, 25 bp, Homo sapien
ccagaaagaaggcctcgacagcagg

SEQ ID NO: 2209978 - DNA, 25 bp, Homo sapien
ctgtggcatggaccagaaagaaggc

SEQ ID NO: 2209979 - DNA, 25 bp, Homo sapien
tcctttagacactccccaagcatgt

SEQ ID NO: 2209980 - DNA, 25 bp, Homo sapien
tcatgggattcctctagttccttta

SEQ ID NO: 2209981 - DNA, 25 bp, Homo sapien
ctagcaccgcatgctggtcatggga

SEQ ID NO: 2209982 - DNA, 25 bp, Homo sapien
aagcatgtcccacagctcgtccaaa

SEQ ID NO: 2209983 - DNA, 25 bp, Homo sapien
cttgagcactgggagatggctggtc

SEQ ID NO: 2209984 - DNA, 25 bp, Homo sapien
caatggattgagtatcttgagcact

SEQ ID NO: 2209985 - DNA, 25 bp, Homo sapien
tggtccacatccatgggtgattcct

SEQ ID NO: 2209986 - DNA, 25 bp, Homo sapien
ggacagacgcctctgactggctaga

SEQ ID NO: 2209987 - DNA, 25 bp, Homo sapien
tccttagagacaggctagaggttgg

SEQ ID NO: 2209988 - DNA, 25 bp, Homo sapien
tgtgaccagtcagaactagcctcct

SEQ ID NO: 2209989 - DNA, 25 bp, Homo sapien
ggaaaactgtagctatccaggacaa

SEQ ID NO: 2209990 - DNA, 25 bp, Homo sapien
aatcacataagggtgcaactctgct

SEQ ID NO: 2209991 - DNA, 25 bp, Homo sapien
gcttgttgctgtctccgcgcccttt

SEQ ID NO: 2209992 - DNA, 25 bp, Homo sapien
ttgttgctgtctccgcgccctttga

SEQ ID NO: 2209993 - DNA, 25 bp, Homo sapien
cttgttgctgtctccgcgccctttg

SEQ ID NO: 2209994 - DNA, 25 bp, Homo sapien
tgttgctgtctccgcgccctttgac

SEQ ID NO: 2209995 - DNA, 25 bp, Homo sapien
ttgtataatggcatcagcctcagcc

SEQ ID NO: 2209996 - DNA, 25 bp, Homo sapien
cagctgccgaacagctgcctggatg

SEQ ID NO: 2209997 - DNA, 25 bp, Homo sapien
gctgccgaacagctgcctggatgct

SEQ ID NO: 2209998 - DNA, 25 bp, Homo sapien
catttgtataatggcatcagcctca

SEQ ID NO: 2209999 - DNA, 25 bp, Homo sapien
ttagcccggcgcgtgtcgtcccgga

SEQ ID NO: 2210000 - DNA, 25 bp, Homo sapien
gatgtcttggatgtcaacatggaca

SEQ ID NO: 2210001 - DNA, 25 bp, Homo sapien
tgacctgtagtaccctcaagaagaa

SEQ ID NO: 2210002 - DNA, 25 bp, Homo sapien
tggctttcttgttagcccggcgcgt

SEQ ID NO: 2210003 - DNA, 25 bp, Homo sapien
ccaggaaaccagcaagagccatctt

SEQ ID NO: 2210004 - DNA, 25 bp, Homo sapien
tataggaaagatacgaaaatcaccc

SEQ ID NO: 2210005 - DNA, 25 bp, Homo sapien
tagaggtggcttgcgtatattgaca

SEQ ID NO: 2210006 - DNA, 25 bp, Homo sapien
gacagcatcaaagtataaacaccca

SEQ ID NO: 2210007 - DNA, 25 bp, Homo sapien
tgcccttcagcttggtggtctgtgg

SEQ ID NO: 2210008 - DNA, 25 bp, Homo sapien
tgctcgaggttgtattcccgcagct

SEQ ID NO: 2210009 - DNA, 25 bp, Homo sapien
cgaggttgtattcccgcagctcggc

SEQ ID NO: 2210010 - DNA, 25 bp, Homo sapien
gctgctgctcgaggttgtattcccg

SEQ ID NO: 2210011 - DNA, 25 bp, Homo sapien
agagctgcagtagtacgttggctgc

SEQ ID NO: 2210012 - DNA, 25 bp, Homo sapien
gatggcgggctccattcagtagcag

SEQ ID NO: 2210013 - DNA, 25 bp, Homo sapien
acaaagggtataacccagatggcgg

SEQ ID NO: 2210014 - DNA, 25 bp, Homo sapien
gttggctgcatcctctaagccttcc

SEQ ID NO: 2210015 - DNA, 25 bp, Homo sapien
acaccatcttaaagtctgtactgct

SEQ ID NO: 2210016 - DNA, 25 bp, Homo sapien
accatcttaaagtctgtactgctgc

SEQ ID NO: 2210017 - DNA, 25 bp, Homo sapien
ccatcttaaagtctgtactgctgct

SEQ ID NO: 2210018 - DNA, 25 bp, Homo sapien
catcttaaagtctgtactgctgctg

SEQ ID NO: 2210019 - DNA, 25 bp, Homo sapien
ttgctgcccttagtagtgggagaaa

SEQ ID NO: 2210020 - DNA, 25 bp, Homo sapien
gatttgctgcccttagtagtgggag

SEQ ID NO: 2210021 - DNA, 25 bp, Homo sapien
tggagatttgctgcccttagtagtg

SEQ ID NO: 2210022 - DNA, 25 bp, Homo sapien
ctggagatttgctgcccttagtagt

SEQ ID NO: 2210023 - DNA, 25 bp, Homo sapien
tcaccataaactcaaagaggactct

SEQ ID NO: 2210024 - DNA, 25 bp, Homo sapien
ggactcttatgactgtaacttctaa

SEQ ID NO: 2210025 - DNA, 25 bp, Homo sapien
catggcccactctattctttaaaac

SEQ ID NO: 2210026 - DNA, 25 bp, Homo sapien
ttcttactaatctgtggcagggctc

SEQ ID NO: 2210027 - DNA, 25 bp, Homo sapien
tacgacaatggtggaaatagccgtg

SEQ ID NO: 2210028 - DNA, 25 bp, Homo sapien
ggaaatagccgtggcagcaaccagg

SEQ ID NO: 2210029 - DNA, 25 bp, Homo sapien
cgaagcagctacgacaatggtggaa

SEQ ID NO: 2210030 - DNA, 25 bp, Homo sapien
tagtcactgtggtcgaagcagctac

SEQ ID NO: 2210031 - DNA, 25 bp, Homo sapien
ctggagcagaagtgacaggggtggg

SEQ ID NO: 2210032 - DNA, 25 bp, Homo sapien
tggagcagaagtgacaggggtgggt

SEQ ID NO: 2210033 - DNA, 25 bp, Homo sapien
gcagaagtgacaggggtgggtgcag

SEQ ID NO: 2210034 - DNA, 25 bp, Homo sapien
gagcagaagtgacaggggtgggtgc

SEQ ID NO: 2210035 - DNA, 25 bp, Homo sapien
ggaggcggcagtggtggtggtggta

SEQ ID NO: 2210036 - DNA, 25 bp, Homo sapien
gtggtggaggcggcagtggtggtgg

SEQ ID NO: 2210037 - DNA, 25 bp, Homo sapien
tggtggaggcggcagtggtggtggt

SEQ ID NO: 2210038 - DNA, 25 bp, Homo sapien
ggcggcagtggtggtggtggtagat

SEQ ID NO: 2210039 - DNA, 25 bp, Homo sapien
gtggttgaggtggcagtggtggtgg

SEQ ID NO: 2210040 - DNA, 25 bp, Homo sapien
tggttgaggtggcagtggtggtgga

SEQ ID NO: 2210041 - DNA, 25 bp, Homo sapien
aggtggcagtggtggtggaggaagc

SEQ ID NO: 2210042 - DNA, 25 bp, Homo sapien
cgaggctgtatggagaggtttcccc

SEQ ID NO: 2210043 - DNA, 25 bp, Homo sapien
agaattagcctgtgcttctgacacc

SEQ ID NO: 2210044 - DNA, 25 bp, Homo sapien
cggatgactgggtgtgacaacatgt

SEQ ID NO: 2210045 - DNA, 25 bp, Homo sapien
ttaagagagagctccggcggatgac

SEQ ID NO: 2210046 - DNA, 25 bp, Homo sapien
tttaccaataagtcccagaagtctg

SEQ ID NO: 2210047 - DNA, 25 bp, Homo sapien
gctcactggcactgacttcacggag

SEQ ID NO: 2210048 - DNA, 25 bp, Homo sapien
tctttggtccgctgctgtgtgaagt

SEQ ID NO: 2210049 - DNA, 25 bp, Homo sapien
ggagttcttgcctttccggctgaca

SEQ ID NO: 2210050 - DNA, 25 bp, Homo sapien
tcagtactcggtgtagacggctagt

SEQ ID NO: 2210051 - DNA, 25 bp, Homo sapien
gagtgtatccaaaacgtgtctgcag

SEQ ID NO: 2210052 - DNA, 25 bp, Homo sapien
tccatcttgtgtagcaggtccaggg

SEQ ID NO: 2210053 - DNA, 25 bp, Homo sapien
aatatattagtcctgcagcctaggg

SEQ ID NO: 2210054 - DNA, 25 bp, Homo sapien
gagtatactggaccccacggttgcc

SEQ ID NO: 2210055 - DNA, 25 bp, Homo sapien
tgttatggctgctgctaccccccat

SEQ ID NO: 2210056 - DNA, 25 bp, Homo sapien
tctgcacagcaaggcgagtatactg

SEQ ID NO: 2210057 - DNA, 25 bp, Homo sapien
gttgccacttaagcgactggtgaaa

SEQ ID NO: 2210058 - DNA, 25 bp, Homo sapien
tcctctaggacactacggcgcaggt

SEQ ID NO: 2210059 - DNA, 25 bp, Homo sapien
tgtcaggtggcatcacagctaacac

SEQ ID NO: 2210060 - DNA, 25 bp, Homo sapien
tctgtgctagttctcgtcgctgctg

SEQ ID NO: 2210061 - DNA, 25 bp, Homo sapien
tcatgcatgagctgtcgctgccggg

SEQ ID NO: 2210062 - DNA, 25 bp, Homo sapien
ttcctcctgaatggctggaggcagg

SEQ ID NO: 2210063 - DNA, 25 bp, Homo sapien
ggcagggcagccagaaactcagggc

SEQ ID NO: 2210064 - DNA, 25 bp, Homo sapien
cagggcagccagaaactcagggctc

SEQ ID NO: 2210065 - DNA, 25 bp, Homo sapien
gggcagccagaaactcagggctcac

SEQ ID NO: 2210066 - DNA, 25 bp, Homo sapien
cagccagaaaagaggggtccacacc

SEQ ID NO: 2210067 - DNA, 25 bp, Homo sapien
ctggttctgtagaacttcccgacgg

SEQ ID NO: 2210068 - DNA, 25 bp, Homo sapien
ccactgcaggcgctgagctatttgt

SEQ ID NO: 2210069 - DNA, 25 bp, Homo sapien
ttggtggacgaatgcctagctggtt

SEQ ID NO: 2210070 - DNA, 25 bp, Homo sapien
tccagaaatggccacggcagaatct

SEQ ID NO: 2210071 - DNA, 25 bp, Homo sapien
gcttgttgaaggcaacggctcttct

SEQ ID NO: 2210072 - DNA, 25 bp, Homo sapien
aacggctcttctaggattcctcggg

SEQ ID NO: 2210073 - DNA, 25 bp, Homo sapien
aggattcctcgggaatctgctccag

SEQ ID NO: 2210074 - DNA, 25 bp, Homo sapien
gtcagtgcatcagaatcctcagctc

SEQ ID NO: 2210075 - DNA, 25 bp, Homo sapien
cacagcctcctctaaggtacaggaa

SEQ ID NO: 2210076 - DNA, 25 bp, Homo sapien
tatccataggagagccttctagctg

SEQ ID NO: 2210077 - DNA, 25 bp, Homo sapien
ctgactgctgacagccgtcagtgca

SEQ ID NO: 2210078 - DNA, 25 bp, Homo sapien
tctccttggactcagatgtagctgc

SEQ ID NO: 2210079 - DNA, 25 bp, Homo sapien
tgtgggacccaattcctctggctct

SEQ ID NO: 2210080 - DNA, 25 bp, Homo sapien
catcaatagctgtgtagagctgccc

SEQ ID NO: 2210081 - DNA, 25 bp, Homo sapien
gtagctgtcaggcataggcgtccca

SEQ ID NO: 2210082 - DNA, 25 bp, Homo sapien
gcaacactgctaagactaagtgtga

SEQ ID NO: 2210083 - DNA, 25 bp, Homo sapien
gtctgatggaggcaacactgctaag

SEQ ID NO: 2210084 - DNA, 25 bp, Homo sapien
gaacatctacaactttgtctgatgg

SEQ ID NO: 2210085 - DNA, 25 bp, Homo sapien
tgcctcaccctaaacaccatctgtc

SEQ ID NO: 2210086 - DNA, 25 bp, Homo sapien
acaacaatacaacttactacctcac

SEQ ID NO: 2210087 - DNA, 25 bp, Homo sapien
taccccacaacaatacaacttacta

SEQ ID NO: 2210088 - DNA, 25 bp, Homo sapien
tctaattggggcctaatatccctac

SEQ ID NO: 2210089 - DNA, 25 bp, Homo sapien
gtatagttatcttctaattggggcc

SEQ ID NO: 2210090 - DNA, 25 bp, Homo sapien
aaggcatctaccctacttcactgct

SEQ ID NO: 2210091 - DNA, 25 bp, Homo sapien
aaaaggccattttacatggtgacag

SEQ ID NO: 2210092 - DNA, 25 bp, Homo sapien
gctagattaagggtaccaaggcatc

SEQ ID NO: 2210093 - DNA, 25 bp, Homo sapien
caactcaagtgcgaaaggagacagg

SEQ ID NO: 2210094 - DNA, 25 bp, Homo sapien
caagatggggtatgaccctaaaact

SEQ ID NO: 2210095 - DNA, 25 bp, Homo sapien
ttatctccaagatggggtatgaccc

SEQ ID NO: 2210096 - DNA, 25 bp, Homo sapien
gtagactgtatagttatctccaaga

SEQ ID NO: 2210097 - DNA, 25 bp, Homo sapien
tagactgtatagttatctccaagat

SEQ ID NO: 2210098 - DNA, 25 bp, Homo sapien
gagagattctgttcagtggagtcat

SEQ ID NO: 2210099 - DNA, 25 bp, Homo sapien
tgagagattctgttcagtggagtca

SEQ ID NO: 2210100 - DNA, 25 bp, Homo sapien
agagattctgttcagtggagtcatt

SEQ ID NO: 2210101 - DNA, 25 bp, Homo sapien
tgtttcctgcgcttctctcgccttt

SEQ ID NO: 2210102 - DNA, 25 bp, Homo sapien
cttcctcagccagttgtttcctgcg

SEQ ID NO: 2210103 - DNA, 25 bp, Homo sapien
ttgtttcctgcgcttctctcgcctt

SEQ ID NO: 2210104 - DNA, 25 bp, Homo sapien
cctcagccagttgtttcctgcgctt

SEQ ID NO: 2210105 - DNA, 25 bp, Homo sapien
gaattccaggtgattgacaatggac

SEQ ID NO: 2210106 - DNA, 25 bp, Homo sapien
tgattgacaatggacactttaacca

SEQ ID NO: 2210107 - DNA, 25 bp, Homo sapien
caggtgattgacaatggacacttta

SEQ ID NO: 2210108 - DNA, 25 bp, Homo sapien
ggaattccaggtgattgacaatgga

SEQ ID NO: 2210109 - DNA, 25 bp, Homo sapien
tttcaaagaggcaaaaatcaaaggc

SEQ ID NO: 2210110 - DNA, 25 bp, Homo sapien
aaagaggcaaaaatcaaaggctgct

SEQ ID NO: 2210111 - DNA, 25 bp, Homo sapien
tcaaagaggcaaaaatcaaaggctg

SEQ ID NO: 2210112 - DNA, 25 bp, Homo sapien
ctgtttcaaagaggcaaaaatcaaa

SEQ ID NO: 2210113 - DNA, 25 bp, Homo sapien
agtcatgcatgctctcagcatcgag

SEQ ID NO: 2210114 - DNA, 25 bp, Homo sapien
tctcagcatcgagaactttgcattc

SEQ ID NO: 2210115 - DNA, 25 bp, Homo sapien
tgcatgctctcagcatcgagaactt

SEQ ID NO: 2210116 - DNA, 25 bp, Homo sapien
tgctctcagcatcgagaactttgca

SEQ ID NO: 2210117 - DNA, 25 bp, Homo sapien
tccaaaaattgcagtatttccctaa

SEQ ID NO: 2210118 - DNA, 25 bp, Homo sapien
acaatgtttagaacataacaagtac

SEQ ID NO: 2210119 - DNA, 25 bp, Homo sapien
aggacccaaggtctatcacaatgtt

SEQ ID NO: 2210120 - DNA, 25 bp, Homo sapien
tgcagtatttccctaaaaggaccca

SEQ ID NO: 2210121 - DNA, 25 bp, Homo sapien
cagctcatcatcagaacgggcgatg

SEQ ID NO: 2210122 - DNA, 25 bp, Homo sapien
aacgggcgatgatgtggacgtcatc

SEQ ID NO: 2210123 - DNA, 25 bp, Homo sapien
gctctgatcatggaaaaagtcatcc

SEQ ID NO: 2210124 - DNA, 25 bp, Homo sapien
gtcatcgttgcctaccaggaggcgg

SEQ ID NO: 2210125 - DNA, 25 bp, Homo sapien
gacgagttgttgaagagccactgcc

SEQ ID NO: 2210126 - DNA, 25 bp, Homo sapien
catgaatggtgtggccagtattggc

SEQ ID NO: 2210127 - DNA, 25 bp, Homo sapien
agagaactgtggtctgcatggcgca

SEQ ID NO: 2210128 - DNA, 25 bp, Homo sapien
ttagggtcctctgactgcgcccgat

SEQ ID NO: 2210129 - DNA, 25 bp, Homo sapien
gaccaagggagaagcgttcatatca

SEQ ID NO: 2210130 - DNA, 25 bp, Homo sapien
ggagaacatgttgtcaaactcaatg

SEQ ID NO: 2210131 - DNA, 25 bp, Homo sapien
cggtcaaagcgctcaaatcggacca

SEQ ID NO: 2210132 - DNA, 25 bp, Homo sapien
tctcagagccatcgtcgtcatcgtc

SEQ ID NO: 2210133 - DNA, 25 bp, Homo sapien
taagggaaaataggagatggagaat

SEQ ID NO: 2210134 - DNA, 25 bp, Homo sapien
agggaaaataggagatggagaattg

SEQ ID NO: 2210135 - DNA, 25 bp, Homo sapien
ttaagggaaaataggagatggagaa

SEQ ID NO: 2210136 - DNA, 25 bp, Homo sapien
cttaagggaaaataggagatggaga

SEQ ID NO: 2210137 - DNA, 25 bp, Homo sapien
ctgatcatcttcctcatcttcctcc

SEQ ID NO: 2210138 - DNA, 25 bp, Homo sapien
tcttcctcatcttcctcctcctcct

SEQ ID NO: 2210139 - DNA, 25 bp, Homo sapien
tcagggtccaggatattcatggaat

SEQ ID NO: 2210140 - DNA, 25 bp, Homo sapien
cactgctgtcctcttcctgagtgtg

SEQ ID NO: 2210141 - DNA, 25 bp, Homo sapien
cctcagggtccaggatattcatgga

SEQ ID NO: 2210142 - DNA, 25 bp, Homo sapien
ttcctgagtgtgctcctcctcatcc

SEQ ID NO: 2210143 - DNA, 25 bp, Homo sapien
aaaacaaagggagcacattggagga

SEQ ID NO: 2210144 - DNA, 25 bp, Homo sapien
ctaaaacaaagggagcacattggag

SEQ ID NO: 2210145 - DNA, 25 bp, Homo sapien
taaaacaaagggagcacattggagg

SEQ ID NO: 2210146 - DNA, 25 bp, Homo sapien
ttgctattgactatatcctgttggc

SEQ ID NO: 2210147 - DNA, 25 bp, Homo sapien
aacctggagcgatgatagcaggtgg

SEQ ID NO: 2210148 - DNA, 25 bp, Homo sapien
gctattgactatatcctgttggcaa

SEQ ID NO: 2210149 - DNA, 25 bp, Homo sapien
attgactatatcctgttggcaagag

SEQ ID NO: 2210150 - DNA, 25 bp, Homo sapien
gaggcctttctggcctcggcactct

SEQ ID NO: 2210151 - DNA, 25 bp, Homo sapien
aggcctttctggcctcggcactctc

SEQ ID NO: 2210152 - DNA, 25 bp, Homo sapien
gcctttctggcctcggcactctcac

SEQ ID NO: 2210153 - DNA, 25 bp, Homo sapien
ggcctttctggcctcggcactctca

SEQ ID NO: 2210154 - DNA, 25 bp, Homo sapien
gcttcatccatcagcacgtcctctt

SEQ ID NO: 2210155 - DNA, 25 bp, Homo sapien
ccatcagcacgtcctcttgtgattc

SEQ ID NO: 2210156 - DNA, 25 bp, Homo sapien
cggttggcctgcaaggtggaagctt

SEQ ID NO: 2210157 - DNA, 25 bp, Homo sapien
tctcggttggcctgcaaggtggaag

SEQ ID NO: 2210158 - DNA, 25 bp, Homo sapien
cagatccgccatccctctcaagcaa

SEQ ID NO: 2210159 - DNA, 25 bp, Homo sapien
aactcatctatcaggtcctccagct

SEQ ID NO: 2210160 - DNA, 25 bp, Homo sapien
caagcaactcatctatcaggtcctc

SEQ ID NO: 2210161 - DNA, 25 bp, Homo sapien
tataattgtactgttcccagatccg

SEQ ID NO: 2210162 - DNA, 25 bp, Homo sapien
tcctttagggtctttagaagactgc

SEQ ID NO: 2210163 - DNA, 25 bp, Homo sapien
aatttcttacccaatgctaccagct

SEQ ID NO: 2210164 - DNA, 25 bp, Homo sapien
taaagccagcagcttaggaccacag

SEQ ID NO: 2210165 - DNA, 25 bp, Homo sapien
cataatagatctctttaaagccagc

SEQ ID NO: 2210166 - DNA, 25 bp, Homo sapien
actgagtcggtttcagcctccccat

SEQ ID NO: 2210167 - DNA, 25 bp, Homo sapien
tctcttgtgaactgagcacctcagg

SEQ ID NO: 2210168 - DNA, 25 bp, Homo sapien
tgtgaactgagcacctcaggctgcc

SEQ ID NO: 2210169 - DNA, 25 bp, Homo sapien
tcaggctgcccagcaatcaccactg

SEQ ID NO: 2210170 - DNA, 25 bp, Homo sapien
gtcctgctggttgctactggaatct

SEQ ID NO: 2210171 - DNA, 25 bp, Homo sapien
gagaggctccttgggcatcctgctc

SEQ ID NO: 2210172 - DNA, 25 bp, Homo sapien
tgggtcctgctggttgctactggaa

SEQ ID NO: 2210173 - DNA, 25 bp, Homo sapien
ctgggtcctgctggttgctactgga

SEQ ID NO: 2210174 - DNA, 25 bp, Homo sapien
gaagcactcttgctgccaaaaaggc

SEQ ID NO: 2210175 - DNA, 25 bp, Homo sapien
ctagaagcactcttgctgccaaaaa

SEQ ID NO: 2210176 - DNA, 25 bp, Homo sapien
agcactcttgctgccaaaaaggcta

SEQ ID NO: 2210177 - DNA, 25 bp, Homo sapien
tagaagcactcttgctgccaaaaag

SEQ ID NO: 2210178 - DNA, 25 bp, Homo sapien
tgggctggttcacaatccgggaaag

SEQ ID NO: 2210179 - DNA, 25 bp, Homo sapien
tcacaatccgggaaagtgtttccaa

SEQ ID NO: 2210180 - DNA, 25 bp, Homo sapien
aaggcttcagagcagcattgactgt

SEQ ID NO: 2210181 - DNA, 25 bp, Homo sapien
cttcagagcagcattgactgtgttg

SEQ ID NO: 2210182 - DNA, 25 bp, Homo sapien
caggtctaagctgtgaggtactctg

SEQ ID NO: 2210183 - DNA, 25 bp, Homo sapien
tgtgaggtactctggccaggtcatt

SEQ ID NO: 2210184 - DNA, 25 bp, Homo sapien
aaagccgaatgatgttgttcatgcc

SEQ ID NO: 2210185 - DNA, 25 bp, Homo sapien
ggtcattaaccagtcccttcttcag

SEQ ID NO: 2210186 - DNA, 25 bp, Homo sapien
tccatgatagtactgatgatacaca

SEQ ID NO: 2210187 - DNA, 25 bp, Homo sapien
gatagtactgatgatacacatcact

SEQ ID NO: 2210188 - DNA, 25 bp, Homo sapien
gcaggactccatgatagtactgatg

SEQ ID NO: 2210189 - DNA, 25 bp, Homo sapien
tactgatgatacacatcactgcctg

SEQ ID NO: 2210190 - DNA, 25 bp, Homo sapien
ccagtgcccgtccaagggctgcttt

SEQ ID NO: 2210191 - DNA, 25 bp, Homo sapien
ttctctgtactctcagccatagcca

SEQ ID NO: 2210192 - DNA, 25 bp, Homo sapien
agcagccaggcttgcgaggaacagg

SEQ ID NO: 2210193 - DNA, 25 bp, Homo sapien
ttgcgaggaacaggcgggccaaggc

SEQ ID NO: 2210194 - DNA, 25 bp, Homo sapien
gcaggtggtccagaacaaaagctag

SEQ ID NO: 2210195 - DNA, 25 bp, Homo sapien
ggagcaggtggtccagaacaaaagc

SEQ ID NO: 2210196 - DNA, 25 bp, Homo sapien
ggtggtccagaacaaaagctagcac

SEQ ID NO: 2210197 - DNA, 25 bp, Homo sapien
ggtccagaacaaaagctagcacact

SEQ ID NO: 2210198 - DNA, 25 bp, Homo sapien
tctgccagaagacgaaggatagtgg

SEQ ID NO: 2210199 - DNA, 25 bp, Homo sapien
cacagtgtagctgtagttggcaatc

SEQ ID NO: 2210200 - DNA, 25 bp, Homo sapien
gggtagcaataccaacataggacct

SEQ ID NO: 2210201 - DNA, 25 bp, Homo sapien
tctttgatcagttcagactggccca

SEQ ID NO: 2210202 - DNA, 25 bp, Homo sapien
ggtcccagatgcggaagtctcagtg

SEQ ID NO: 2210203 - DNA, 25 bp, Homo sapien
tcccagatgcggaagtctcagtgga

SEQ ID NO: 2210204 - DNA, 25 bp, Homo sapien
gtcccagatgcggaagtctcagtgg

SEQ ID NO: 2210205 - DNA, 25 bp, Homo sapien
cccagatgcggaagtctcagtggag

SEQ ID NO: 2210206 - DNA, 25 bp, Homo sapien
accccaggtttaggatcagatttat

SEQ ID NO: 2210207 - DNA, 25 bp, Homo sapien
tgctctgacgcgtaagtgaccggta

SEQ ID NO: 2210208 - DNA, 25 bp, Homo sapien
ggaaaaacctgactgcgtatcaaag

SEQ ID NO: 2210209 - DNA, 25 bp, Homo sapien
caggagctggccaacctcttgggtc

SEQ ID NO: 2210210 - DNA, 25 bp, Homo sapien
ttcctctggagcatggtatgcagcc

SEQ ID NO: 2210211 - DNA, 25 bp, Homo sapien
gatcacttccttgatagtatcaggg

SEQ ID NO: 2210212 - DNA, 25 bp, Homo sapien
tcaccagctgtacagcattagggcc

SEQ ID NO: 2210213 - DNA, 25 bp, Homo sapien
gcattcagcatatcatagatcactt

SEQ ID NO: 2210214 - DNA, 25 bp, Homo sapien
ctctggcagggattacaacagggca

SEQ ID NO: 2210215 - DNA, 25 bp, Homo sapien
aaggccaggagcaagcgaaacttac

SEQ ID NO: 2210216 - DNA, 25 bp, Homo sapien
taaggaggctcttcaagttacagac

SEQ ID NO: 2210217 - DNA, 25 bp, Homo sapien
tatttcgcactgtgttacacgagac

SEQ ID NO: 2210218 - DNA, 25 bp, Homo sapien
aatatgtctggattgcggcatgcgg

SEQ ID NO: 2210219 - DNA, 25 bp, Homo sapien
cgatgcggatacagcagttggccac

SEQ ID NO: 2210220 - DNA, 25 bp, Homo sapien
tgccagacacaacaccagaggtagt

SEQ ID NO: 2210221 - DNA, 25 bp, Homo sapien
tggcccaaggacacgaaggatgtag

SEQ ID NO: 2210222 - DNA, 25 bp, Homo sapien
ccatgaaagcacgaagaaaataact

SEQ ID NO: 2210223 - DNA, 25 bp, Homo sapien
gaaactgggagatgtgtcaagacta

SEQ ID NO: 2210224 - DNA, 25 bp, Homo sapien
tctgagataatgatagccactggag

SEQ ID NO: 2210225 - DNA, 25 bp, Homo sapien
tgtttgccttgataacacagggctt

SEQ ID NO: 2210226 - DNA, 25 bp, Homo sapien
ggtggcatgcaaagtatctgggtcc

SEQ ID NO: 2210227 - DNA, 25 bp, Homo sapien
tttccatggtatgacgaagggtaca

SEQ ID NO: 2210228 - DNA, 25 bp, Homo sapien
tgggtcaaattcaagatcatgcggg

SEQ ID NO: 2210229 - DNA, 25 bp, Homo sapien
tcatggcatatttgtggtcccgggt

SEQ ID NO: 2210230 - DNA, 25 bp, Homo sapien
cgcaggcccggattaaaacagtcac

SEQ ID NO: 2210231 - DNA, 25 bp, Homo sapien
cagtcaccatatcttctgtcaagcc

SEQ ID NO: 2210232 - DNA, 25 bp, Homo sapien
tgtcaagccctggatcaggatctcc

SEQ ID NO: 2210233 - DNA, 25 bp, Homo sapien
agggactcccagcatgctcacgcag

SEQ ID NO: 2210234 - DNA, 25 bp, Homo sapien
gtcttctctagttcctgtccattgc

SEQ ID NO: 2210235 - DNA, 25 bp, Homo sapien
cagcgtcttctctagttcctgtcca

SEQ ID NO: 2210236 - DNA, 25 bp, Homo sapien
tcttccagcgtcttctctagttcct

SEQ ID NO: 2210237 - DNA, 25 bp, Homo sapien
tacgtttgatatccatttctttgct

SEQ ID NO: 2210238 - DNA, 25 bp, Homo sapien
gcatcacagggcgtcggttccctgt

SEQ ID NO: 2210239 - DNA, 25 bp, Homo sapien
atcacagggcgtcggttccctgttt

SEQ ID NO: 2210240 - DNA, 25 bp, Homo sapien
tcagcatcacagggcgtcggttccc

SEQ ID NO: 2210241 - DNA, 25 bp, Homo sapien
gcgtcggttccctgtttcctcatta

SEQ ID NO: 2210242 - DNA, 25 bp, Homo sapien
cgatcatcaaaccagcgccagttgt

SEQ ID NO: 2210243 - DNA, 25 bp, Homo sapien
tgcaccattgtagtgaattggaccg

SEQ ID NO: 2210244 - DNA, 25 bp, Homo sapien
tcttcggcctgcagtgaatcgcacg

SEQ ID NO: 2210245 - DNA, 25 bp, Homo sapien
cgccagttgttgctgttggattgca

SEQ ID NO: 2210246 - DNA, 25 bp, Homo sapien
aaatcaatcaggagcaacactggtg

SEQ ID NO: 2210247 - DNA, 25 bp, Homo sapien
cctttttgaggagatggctgtcttt

SEQ ID NO: 2210248 - DNA, 25 bp, Homo sapien
tttcatagaaatcaatcaggagcaa

SEQ ID NO: 2210249 - DNA, 25 bp, Homo sapien
tcctttttgaggagatggctgtctt

SEQ ID NO: 2210250 - DNA, 25 bp, Homo sapien
caagagtttgattaggacattaagg

SEQ ID NO: 2210251 - DNA, 25 bp, Homo sapien
cccaagcacaaggtagcttcaactc

SEQ ID NO: 2210252 - DNA, 25 bp, Homo sapien
tcaaccacccaagcacaaggtagct

SEQ ID NO: 2210253 - DNA, 25 bp, Homo sapien
taaggatgccacttgattcaaccac

SEQ ID NO: 2210254 - DNA, 25 bp, Homo sapien
gctttgatcaatacatcagcagctt

SEQ ID NO: 2210255 - DNA, 25 bp, Homo sapien
cacggtttttgtgtcacttgttgtc

SEQ ID NO: 2210256 - DNA, 25 bp, Homo sapien
gattctagtagccaaattggaggcc

SEQ ID NO: 2210257 - DNA, 25 bp, Homo sapien
gacttatccactctgacacggtttt

SEQ ID NO: 2210258 - DNA, 25 bp, Homo sapien
tgtctggcagctcatcaagaaggtg

SEQ ID NO: 2210259 - DNA, 25 bp, Homo sapien
tatctgtgaaagtgtggagctcatc

SEQ ID NO: 2210260 - DNA, 25 bp, Homo sapien
ttgttccaacgggtcagcatcctgg

SEQ ID NO: 2210261 - DNA, 25 bp, Homo sapien
gattgctgtcatgatcaggtcacac

SEQ ID NO: 2210262 - DNA, 25 bp, Homo sapien
cctgtcccagagacatagcaattgc

SEQ ID NO: 2210263 - DNA, 25 bp, Homo sapien
tgccctttgatccattggaatatcc

SEQ ID NO: 2210264 - DNA, 25 bp, Homo sapien
cctttgatccattggaatatcctgt

SEQ ID NO: 2210265 - DNA, 25 bp, Homo sapien
ctgtcccagagacatagcaattgct

SEQ ID NO: 2210266 - DNA, 25 bp, Homo sapien
ggtgttcaacagtgcctccattgca

SEQ ID NO: 2210267 - DNA, 25 bp, Homo sapien
ggttaaaaggtactctgtggcctgc

SEQ ID NO: 2210268 - DNA, 25 bp, Homo sapien
ccattgcatgttcccttgtgaagcc

SEQ ID NO: 2210269 - DNA, 25 bp, Homo sapien
tactctgtggcctgctccatggtgc

SEQ ID NO: 2210270 - DNA, 25 bp, Homo sapien
tagaatggccagcatcgattcagcc

SEQ ID NO: 2210271 - DNA, 25 bp, Homo sapien
tctcctcggaggatgtggcatagaa

SEQ ID NO: 2210272 - DNA, 25 bp, Homo sapien
tgctggttgacttgaggttcccggc

SEQ ID NO: 2210273 - DNA, 25 bp, Homo sapien
gcttagtctctctcgaatcacaggt

SEQ ID NO: 2210274 - DNA, 25 bp, Homo sapien
gagtgttccaatccctcagaaacag

SEQ ID NO: 2210275 - DNA, 25 bp, Homo sapien
taccacaaggaagcgcagtgcactg

SEQ ID NO: 2210276 - DNA, 25 bp, Homo sapien
caggaactttacctcccatggacag

SEQ ID NO: 2210277 - DNA, 25 bp, Homo sapien
tccaggcaatttggcaggcagcgaa

SEQ ID NO: 2210278 - DNA, 25 bp, Homo sapien
caaaaagagcattgtggcctccgga

SEQ ID NO: 2210279 - DNA, 25 bp, Homo sapien
cctctcatcaaacagcattggggat

SEQ ID NO: 2210280 - DNA, 25 bp, Homo sapien
agcattgtggcctccggagcagaga

SEQ ID NO: 2210281 - DNA, 25 bp, Homo sapien
tgaggtggtagggatacttcctctc

SEQ ID NO: 2210282 - DNA, 25 bp, Homo sapien
ccttagtcaagagcttagtgagagc

SEQ ID NO: 2210283 - DNA, 25 bp, Homo sapien
caagtgctcggcctaatctggagga

SEQ ID NO: 2210284 - DNA, 25 bp, Homo sapien
agtttaacaagaagtccaaatagct

SEQ ID NO: 2210285 - DNA, 25 bp, Homo sapien
ggagatcccacacaaagtttaacaa

SEQ ID NO: 2210286 - DNA, 25 bp, Homo sapien
gatttgcccttagagtctgaagcag

SEQ ID NO: 2210287 - DNA, 25 bp, Homo sapien
tgctggtgtgattttagatttgccc

SEQ ID NO: 2210288 - DNA, 25 bp, Homo sapien
tctgaagcagtaggttcatctgtct

SEQ ID NO: 2210289 - DNA, 25 bp, Homo sapien
gtctccatgggagccaatgtgtcac

SEQ ID NO: 2210290 - DNA, 25 bp, Homo sapien
tgccttctaataagccctgggtaga

SEQ ID NO: 2210291 - DNA, 25 bp, Homo sapien
caatgccttctaataagccctgggt

SEQ ID NO: 2210292 - DNA, 25 bp, Homo sapien
gcccaatgccttctaataagccctg

SEQ ID NO: 2210293 - DNA, 25 bp, Homo sapien
tagcccaatgccttctaataagccc

SEQ ID NO: 2210294 - DNA, 25 bp, Homo sapien
ctatggtttttgttactctttcaat

SEQ ID NO: 2210295 - DNA, 25 bp, Homo sapien
tacctaacattaagtgaagaaagag

SEQ ID NO: 2210296 - DNA, 25 bp, Homo sapien
tcagagaaaaaagacgggcagacac

SEQ ID NO: 2210297 - DNA, 25 bp, Homo sapien
aagacactggcaaatgtattcagag

SEQ ID NO: 2210298 - DNA, 25 bp, Homo sapien
ttggtggcagaaatacgggtaattc

SEQ ID NO: 2210299 - DNA, 25 bp, Homo sapien
tgatctttttccgccctgggtcgta

SEQ ID NO: 2210300 - DNA, 25 bp, Homo sapien
ctgatctttttccgccctgggtcgt

SEQ ID NO: 2210301 - DNA, 25 bp, Homo sapien
atcctttggaaccagtttctgcata

SEQ ID NO: 2210302 - DNA, 25 bp, Homo sapien
cctttggaaccagtttctgcatatc

SEQ ID NO: 2210303 - DNA, 25 bp, Homo sapien
tcctttggaaccagtttctgcatat

SEQ ID NO: 2210304 - DNA, 25 bp, Homo sapien
ggccaaattcacacccagatggtag

SEQ ID NO: 2210305 - DNA, 25 bp, Homo sapien
gccaaattcacacccagatggtagg

SEQ ID NO: 2210306 - DNA, 25 bp, Homo sapien
ccgtgtccagccacaactcaatttt

SEQ ID NO: 2210307 - DNA, 25 bp, Homo sapien
accgtgtccagccacaactcaattt

SEQ ID NO: 2210308 - DNA, 25 bp, Homo sapien
ttttgtatctggctaataacaggaa

SEQ ID NO: 2210309 - DNA, 25 bp, Homo sapien
tatctggctaataacaggaacacat

SEQ ID NO: 2210310 - DNA, 25 bp, Homo sapien
cgacaaagcatttgtcatcaagttc

SEQ ID NO: 2210311 - DNA, 25 bp, Homo sapien
tctaccatgacgacaaagcatttgt

SEQ ID NO: 2210312 - DNA, 25 bp, Homo sapien
aacatctaccatgacgacaaagcat

SEQ ID NO: 2210313 - DNA, 25 bp, Homo sapien
ccatgacgacaaagcatttgtcatc

SEQ ID NO: 2210314 - DNA, 25 bp, Homo sapien
tcctatccccaaccaaagcaatcct

SEQ ID NO: 2210315 - DNA, 25 bp, Homo sapien
aatcctccaggctcaccgaacttag

SEQ ID NO: 2210316 - DNA, 25 bp, Homo sapien
agataacaaagtaataagagagaga

SEQ ID NO: 2210317 - DNA, 25 bp, Homo sapien
ggctcaccgaacttagataacaaag

SEQ ID NO: 2210318 - DNA, 25 bp, Homo sapien
tgagagccccactggtttacggaga

SEQ ID NO: 2210319 - DNA, 25 bp, Homo sapien
ggctcagcttgctcaaaacactcag

SEQ ID NO: 2210320 - DNA, 25 bp, Homo sapien
cccacaccagggaacagtataactg

SEQ ID NO: 2210321 - DNA, 25 bp, Homo sapien
tttacggagatggaacgaatttcac

SEQ ID NO: 2210322 - DNA, 25 bp, Homo sapien
agagggtagcatcagcaacattgcc

SEQ ID NO: 2210323 - DNA, 25 bp, Homo sapien
agtccaactgaaggagaccctcttg

SEQ ID NO: 2210324 - DNA, 25 bp, Homo sapien
gcaagccagttctcgcaacaacact

SEQ ID NO: 2210325 - DNA, 25 bp, Homo sapien
tatgaacaaacatcatgatgtaggc

SEQ ID NO: 2210326 - DNA, 25 bp, Homo sapien
gacaattaaatggaagcctctcaga

SEQ ID NO: 2210327 - DNA, 25 bp, Homo sapien
ggtggaacccaaatatgaagtcagg

SEQ ID NO: 2210328 - DNA, 25 bp, Homo sapien
tacggcaaggattctacactatagg

SEQ ID NO: 2210329 - DNA, 25 bp, Homo sapien
tggccatggtctctcacctggtaaa

SEQ ID NO: 2210330 - DNA, 25 bp, Homo sapien
gaattacttatcactctgcagccca

SEQ ID NO: 2210331 - DNA, 25 bp, Homo sapien
tagagagcccagaattaaatcttca

SEQ ID NO: 2210332 - DNA, 25 bp, Homo sapien
taccaagaccatgcaataggaaagg

SEQ ID NO: 2210333 - DNA, 25 bp, Homo sapien
aaagctgcaaaacatcggatttggc

SEQ ID NO: 2210334 - DNA, 25 bp, Homo sapien
tcaatgggcagattgggaagaccca

SEQ ID NO: 2210335 - DNA, 25 bp, Homo sapien
tattgttgctcagaatagattccac

SEQ ID NO: 2210336 - DNA, 25 bp, Homo sapien
tgcagacacctgcaacagcctgaca

SEQ ID NO: 2210337 - DNA, 25 bp, Homo sapien
aggcagcagatgtgggaaagtcaat

SEQ ID NO: 2210338 - DNA, 25 bp, Homo sapien
tgataacgaaacacattttccagaa

SEQ ID NO: 2210339 - DNA, 25 bp, Homo sapien
acggtaattactggactctgataac

SEQ ID NO: 2210340 - DNA, 25 bp, Homo sapien
tatacatctttactcagtttgccct

SEQ ID NO: 2210341 - DNA, 25 bp, Homo sapien
aaagcacatatacatctttactcag

SEQ ID NO: 2210342 - DNA, 25 bp, Homo sapien
ggaatacgttcctctgtaccaacaa

SEQ ID NO: 2210343 - DNA, 25 bp, Homo sapien
cacattaaggatgtaatccatgagg

SEQ ID NO: 2210344 - DNA, 25 bp, Homo sapien
gggaataggaatacgttcctctgta

SEQ ID NO: 2210345 - DNA, 25 bp, Homo sapien
ccatgaggggaataggaatacgttc

SEQ ID NO: 2210346 - DNA, 25 bp, Homo sapien
gaaaagagtgagttacacagaaatt

SEQ ID NO: 2210347 - DNA, 25 bp, Homo sapien
taccaatattaagagaacagaggag

SEQ ID NO: 2210348 - DNA, 25 bp, Homo sapien
ggaggcactgtataaaattctaggc

SEQ ID NO: 2210349 - DNA, 25 bp, Homo sapien
tacacagaaattcacaataccaata

SEQ ID NO: 2210350 - DNA, 25 bp, Homo sapien
caagcctgaccaaggttgaaagcat

SEQ ID NO: 2210351 - DNA, 25 bp, Homo sapien
caaagattcatacacctgaggtctc

SEQ ID NO: 2210352 - DNA, 25 bp, Homo sapien
taacaattggtatttgcagcatgac

SEQ ID NO: 2210353 - DNA, 25 bp, Homo sapien
tatctttggcaaactactgttaggg

SEQ ID NO: 2210354 - DNA, 25 bp, Homo sapien
catttcagggaacaactgcgtctct

SEQ ID NO: 2210355 - DNA, 25 bp, Homo sapien
gtgatgcaccaactacaaaccctgg

SEQ ID NO: 2210356 - DNA, 25 bp, Homo sapien
taactgctaagtatattcatcccca

SEQ ID NO: 2210357 - DNA, 25 bp, Homo sapien
ggtggtaagctaggcacactaatgc

SEQ ID NO: 2210358 - DNA, 25 bp, Homo sapien
tgatggcttctgacagatgtatttg

SEQ ID NO: 2210359 - DNA, 25 bp, Homo sapien
cttcttctgcggcatgattagacct

SEQ ID NO: 2210360 - DNA, 25 bp, Homo sapien
tgctgggtagaattaaagctctgca

SEQ ID NO: 2210361 - DNA, 25 bp, Homo sapien
tcatcctcactagaggcttcttctg

SEQ ID NO: 2210362 - DNA, 25 bp, Homo sapien
cttgatgatggcagtcgttgcatct

SEQ ID NO: 2210363 - DNA, 25 bp, Homo sapien
tgttttaagggtgggctgatgtctc

SEQ ID NO: 2210364 - DNA, 25 bp, Homo sapien
tctcatgagctcatcgacagcactc

SEQ ID NO: 2210365 - DNA, 25 bp, Homo sapien
gatggcagtcgttgcatctgtttta

SEQ ID NO: 2210366 - DNA, 25 bp, Homo sapien
gatgtacaaaccattaaccctctgg

SEQ ID NO: 2210367 - DNA, 25 bp, Homo sapien
tactctggcaatctttgctgtcaag

SEQ ID NO: 2210368 - DNA, 25 bp, Homo sapien
taatgaatttacacccagcccctat

SEQ ID NO: 2210369 - DNA, 25 bp, Homo sapien
tttaaagtaactatgtgtgctgcac

SEQ ID NO: 2210370 - DNA, 25 bp, Homo sapien
ctccgcatggctgggaggtaatctg

SEQ ID NO: 2210371 - DNA, 25 bp, Homo sapien
gaagaggcgttcaaaaggctgacac

SEQ ID NO: 2210372 - DNA, 25 bp, Homo sapien
caaaagactgaagacctcgggcatt

SEQ ID NO: 2210373 - DNA, 25 bp, Homo sapien
gccaaggacttcacgggtagcagga

SEQ ID NO: 2210374 - DNA, 25 bp, Homo sapien
aggagagcagtgatggttcttgaaa

SEQ ID NO: 2210375 - DNA, 25 bp, Homo sapien
gtgaggagagcagtgatggttcttg

SEQ ID NO: 2210376 - DNA, 25 bp, Homo sapien
tccattgtcctggagtgaggagagc

SEQ ID NO: 2210377 - DNA, 25 bp, Homo sapien
ccattgtcctggagtgaggagagca

SEQ ID NO: 2210378 - DNA, 25 bp, Homo sapien
caggcacccaacacgcctggctgat

SEQ ID NO: 2210379 - DNA, 25 bp, Homo sapien
atttttccatttttagtagagatgg

SEQ ID NO: 2210380 - DNA, 25 bp, Homo sapien
aggcacccaacacgcctggctgatt

SEQ ID NO: 2210381 - DNA, 25 bp, Homo sapien
agagatggggtttttaccagattgg

SEQ ID NO: 2210382 - DNA, 25 bp, Homo sapien
ctgtccaggtagacagtagagatgg

SEQ ID NO: 2210383 - DNA, 25 bp, Homo sapien
agagagctctgccaggttatcccaa

SEQ ID NO: 2210384 - DNA, 25 bp, Homo sapien
tattgacatttgtctactgtccagg

SEQ ID NO: 2210385 - DNA, 25 bp, Homo sapien
tatccttgcaggattttactattga

SEQ ID NO: 2210386 - DNA, 25 bp, Homo sapien
gaagagtgatgggccatagtattct

SEQ ID NO: 2210387 - DNA, 25 bp, Homo sapien
ggaggtaggcagagaaccatccatc

SEQ ID NO: 2210388 - DNA, 25 bp, Homo sapien
gatgggccatagtattctgcattgc

SEQ ID NO: 2210389 - DNA, 25 bp, Homo sapien
cattgctgatgatgtgtttcaggga

SEQ ID NO: 2210390 - DNA, 25 bp, Homo sapien
catggatttcagaagtgctgctcgt

SEQ ID NO: 2210391 - DNA, 25 bp, Homo sapien
cagggtcttggatggccttcttgag

SEQ ID NO: 2210392 - DNA, 25 bp, Homo sapien
gatggccttcttgaggaaattcaac

SEQ ID NO: 2210393 - DNA, 25 bp, Homo sapien
gaagtgctgctcgttgtggaataca

SEQ ID NO: 2210394 - DNA, 25 bp, Homo sapien
gctgctggaacctgatgcccttaat

SEQ ID NO: 2210395 - DNA, 25 bp, Homo sapien
agagatggatgagcctggactgctt

SEQ ID NO: 2210396 - DNA, 25 bp, Homo sapien
gggccagaagagatgttagtgctgc

SEQ ID NO: 2210397 - DNA, 25 bp, Homo sapien
gatggatgagcctggactgctttcc

SEQ ID NO: 2210398 - DNA, 25 bp, Homo sapien
ttcttttcggcacaaatctacttca

SEQ ID NO: 2210399 - DNA, 25 bp, Homo sapien
tcttgtgtagtattgggtctctgga

SEQ ID NO: 2210400 - DNA, 25 bp, Homo sapien
catccatatcagtttccatttcctc

SEQ ID NO: 2210401 - DNA, 25 bp, Homo sapien
tggcttgatcacaaacggacattct

SEQ ID NO: 2210402 - DNA, 25 bp, Homo sapien
tgataaggtcaaccactctgacggc

SEQ ID NO: 2210403 - DNA, 25 bp, Homo sapien
cctgttcatcgccaagaaactttat

SEQ ID NO: 2210404 - DNA, 25 bp, Homo sapien
tccactatgggattgaaaagctgcc

SEQ ID NO: 2210405 - DNA, 25 bp, Homo sapien
tctggtgacaaatgttatctggtcc

SEQ ID NO: 2210406 - DNA, 25 bp, Homo sapien
gcaaactggtgagggtatggatcca

SEQ ID NO: 2210407 - DNA, 25 bp, Homo sapien
tagctggccagatggtataaaaaag

SEQ ID NO: 2210408 - DNA, 25 bp, Homo sapien
accaccagcatcgtagctggccaga

SEQ ID NO: 2210409 - DNA, 25 bp, Homo sapien
ccacaggagaccaaggcttcaccac

SEQ ID NO: 2210410 - DNA, 25 bp, Homo sapien
ggatacagttccttacaagcactgg

SEQ ID NO: 2210411 - DNA, 25 bp, Homo sapien
gaggcagttccagtacagtcaataa

SEQ ID NO: 2210412 - DNA, 25 bp, Homo sapien
tgttaatgttcgtaaagaagctgct

SEQ ID NO: 2210413 - DNA, 25 bp, Homo sapien
ctggcaaaaatccatggtaggaggc

SEQ ID NO: 2210414 - DNA, 25 bp, Homo sapien
tatcaagccattatacaagatactg

SEQ ID NO: 2210415 - DNA, 25 bp, Homo sapien
tacaagatactgtttgctgattcct

SEQ ID NO: 2210416 - DNA, 25 bp, Homo sapien
gacatctaccaactcctctatcaag

SEQ ID NO: 2210417 - DNA, 25 bp, Homo sapien
cataagctgcttatccgttatctga

SEQ ID NO: 2210418 - DNA, 25 bp, Homo sapien
ggcctgaactgcctgcaatcgcttc

SEQ ID NO: 2210419 - DNA, 25 bp, Homo sapien
catgggccagtcgtatgtgtgtaaa

SEQ ID NO: 2210420 - DNA, 25 bp, Homo sapien
cctgcaatcgcttcctgtgattaga

SEQ ID NO: 2210421 - DNA, 25 bp, Homo sapien
tattgcatgcagtctggcctgaact

SEQ ID NO: 2210422 - DNA, 25 bp, Homo sapien
gattccatgatttcagaagggcttt

SEQ ID NO: 2210423 - DNA, 25 bp, Homo sapien
tgtacattttggtaagagattccat

SEQ ID NO: 2210424 - DNA, 25 bp, Homo sapien
tatccttaggaatgctgtacatttt

SEQ ID NO: 2210425 - DNA, 25 bp, Homo sapien
tgcttatccttaggaatgctgtaca

SEQ ID NO: 2210426 - DNA, 25 bp, Homo sapien
caagttgctctatgtgaatataatg

SEQ ID NO: 2210427 - DNA, 25 bp, Homo sapien
ctctatgtgaatataatgtagtgtg

SEQ ID NO: 2210428 - DNA, 25 bp, Homo sapien
gttgctctatgtgaatataatgtag

SEQ ID NO: 2210429 - DNA, 25 bp, Homo sapien
cttgtcaagttgctctatgtgaata

SEQ ID NO: 2210430 - DNA, 25 bp, Homo sapien
tttctcaattttgacctcggcccca

SEQ ID NO: 2210431 - DNA, 25 bp, Homo sapien
caaagtgtagtgtagttgcactggg

SEQ ID NO: 2210432 - DNA, 25 bp, Homo sapien
ggccccaggatctgcatagaattca

SEQ ID NO: 2210433 - DNA, 25 bp, Homo sapien
ctcaattttgacctcggccccagga

SEQ ID NO: 2210434 - DNA, 25 bp, Homo sapien
ctgcaacattctgcaagtccaaagc

SEQ ID NO: 2210435 - DNA, 25 bp, Homo sapien
gtctctgcaacattctgcaagtcca

SEQ ID NO: 2210436 - DNA, 25 bp, Homo sapien
tctgcaacattctgcaagtccaaag

SEQ ID NO: 2210437 - DNA, 25 bp, Homo sapien
catcatatgcaagtctctgcaacat

SEQ ID NO: 2210438 - DNA, 25 bp, Homo sapien
ttgtcagatcccagacgagtgatgt

SEQ ID NO: 2210439 - DNA, 25 bp, Homo sapien
gactgccagcaccacttgcatatca

SEQ ID NO: 2210440 - DNA, 25 bp, Homo sapien
ccaaatgttgtagccgagttagcag

SEQ ID NO: 2210441 - DNA, 25 bp, Homo sapien
taaatacatataggagattgaggac

SEQ ID NO: 2210442 - DNA, 25 bp, Homo sapien
tctttctggcctatcacatacgagc

SEQ ID NO: 2210443 - DNA, 25 bp, Homo sapien
ggaactgtacagatgccgggaaaag

SEQ ID NO: 2210444 - DNA, 25 bp, Homo sapien
tgaagttcaacacagccaagagaag

SEQ ID NO: 2210445 - DNA, 25 bp, Homo sapien
agcatctgccagtattccatcgaag

SEQ ID NO: 2210446 - DNA, 25 bp, Homo sapien
atgttccatgttttgatctgctgca

SEQ ID NO: 2210447 - DNA, 25 bp, Homo sapien
gctcatcattacaaactttgagttt

SEQ ID NO: 2210448 - DNA, 25 bp, Homo sapien
catcattacaaactttgagtttgtc

SEQ ID NO: 2210449 - DNA, 25 bp, Homo sapien
aatgttccatgttttgatctgctgc

SEQ ID NO: 2210450 - DNA, 25 bp, Homo sapien
ggtagatgcagacaaactatttgga

SEQ ID NO: 2210451 - DNA, 25 bp, Homo sapien
taatgcttggaaagaccatgcccac

SEQ ID NO: 2210452 - DNA, 25 bp, Homo sapien
tagcatggtttcctaatactgtccc

SEQ ID NO: 2210453 - DNA, 25 bp, Homo sapien
gcagtagattcttacattggttcca

SEQ ID NO: 2210454 - DNA, 25 bp, Homo sapien
tctaggtcttctattctcgtagcag

SEQ ID NO: 2210455 - DNA, 25 bp, Homo sapien
gtcttcttcagtttagtcctgtcta

SEQ ID NO: 2210456 - DNA, 25 bp, Homo sapien
tgtcttcttcagtttagtcctgtct

SEQ ID NO: 2210457 - DNA, 25 bp, Homo sapien
tcttcttcagtttagtcctgtctac

SEQ ID NO: 2210458 - DNA, 25 bp, Homo sapien
tactcagtactatggaaatagcgtg

SEQ ID NO: 2210459 - DNA, 25 bp, Homo sapien
gcctagatttagtccaatatactca

SEQ ID NO: 2210460 - DNA, 25 bp, Homo sapien
aattacagtataaattttaggcagc

SEQ ID NO: 2210461 - DNA, 25 bp, Homo sapien
aatagcgtgtatttgcctgtacgac

SEQ ID NO: 2210462 - DNA, 25 bp, Homo sapien
atggtcaggaactaggagcattccc

SEQ ID NO: 2210463 - DNA, 25 bp, Homo sapien
aaagctacaactaatatcttaatgg

SEQ ID NO: 2210464 - DNA, 25 bp, Homo sapien
aactaatatcttaatggtcaggaac

SEQ ID NO: 2210465 - DNA, 25 bp, Homo sapien
gaaaagtcaaacaatctcagtaaac

SEQ ID NO: 2210466 - DNA, 25 bp, Homo sapien
caaagtagctccattacagaatggg

SEQ ID NO: 2210467 - DNA, 25 bp, Homo sapien
tcagatccagagaatggaagaaacc

SEQ ID NO: 2210468 - DNA, 25 bp, Homo sapien
gaatgggaatacatccacccctact

SEQ ID NO: 2210469 - DNA, 25 bp, Homo sapien
gcaaccagtaccacatcagatccag

SEQ ID NO: 2210470 - DNA, 25 bp, Homo sapien
ctctggatcactaacccactcaggt

SEQ ID NO: 2210471 - DNA, 25 bp, Homo sapien
ggtttctctggatcactaacccact

SEQ ID NO: 2210472 - DNA, 25 bp, Homo sapien
agcttcccgaaccttcctgaccaag

SEQ ID NO: 2210473 - DNA, 25 bp, Homo sapien
tgctccaacagcttcccgaaccttc

SEQ ID NO: 2210474 - DNA, 25 bp, Homo sapien
aacactaaggacgtatttgtttcat

SEQ ID NO: 2210475 - DNA, 25 bp, Homo sapien
tttagacaagtttataccctcaata

SEQ ID NO: 2210476 - DNA, 25 bp, Homo sapien
cactaaggacgtatttgtttcattg

SEQ ID NO: 2210477 - DNA, 25 bp, Homo sapien
gacaagtttataccctcaatataaa

SEQ ID NO: 2210478 - DNA, 25 bp, Homo sapien
ccatattgggagacaaacgataaac

SEQ ID NO: 2210479 - DNA, 25 bp, Homo sapien
tgccattgaaccttagacaaagttt

SEQ ID NO: 2210480 - DNA, 25 bp, Homo sapien
aacatcctggcaactcaggttgaac

SEQ ID NO: 2210481 - DNA, 25 bp, Homo sapien
tttggtattgtcactccttcctctc

SEQ ID NO: 2210482 - DNA, 25 bp, Homo sapien
ggttcttgacaggaacattatggct

SEQ ID NO: 2210483 - DNA, 25 bp, Homo sapien
tgggaatcacgttcaaacatcatga

SEQ ID NO: 2210484 - DNA, 25 bp, Homo sapien
gtgattacgcactgaaattcctaga

SEQ ID NO: 2210485 - DNA, 25 bp, Homo sapien
gctggtggtcattccaggatagtga

SEQ ID NO: 2210486 - DNA, 25 bp, Homo sapien
tctaaaaccgcgagagttggcgaag

SEQ ID NO: 2210487 - DNA, 25 bp, Homo sapien
ttagctctaaaaccgcgagagttgg

SEQ ID NO: 2210488 - DNA, 25 bp, Homo sapien
cgagagttggcgaagatgaccccac

SEQ ID NO: 2210489 - DNA, 25 bp, Homo sapien
taagccttagctctaaaaccgcgag

SEQ ID NO: 2210490 - DNA, 25 bp, Homo sapien
ctcgagaaaaaccagggtattcatc

SEQ ID NO: 2210491 - DNA, 25 bp, Homo sapien
cgagaaaaaccagggtattcatccg

SEQ ID NO: 2210492 - DNA, 25 bp, Homo sapien
cagggtattcatccgggtcgtcgga

SEQ ID NO: 2210493 - DNA, 25 bp, Homo sapien
accagggtattcatccgggtcgtcg

SEQ ID NO: 2210494 - DNA, 25 bp, Homo sapien
tactgcagtcagtaaccgagccacc

SEQ ID NO: 2210495 - DNA, 25 bp, Homo sapien
gaattctccggcttagaacggcacg

SEQ ID NO: 2210496 - DNA, 25 bp, Homo sapien
acgtaaccctgctcccgcgagaatt

SEQ ID NO: 2210497 - DNA, 25 bp, Homo sapien
gccaacgaatcccacgaggacgtaa

SEQ ID NO: 2210498 - DNA, 25 bp, Homo sapien
ccgcgcctcgcctttaggaaacatg

SEQ ID NO: 2210499 - DNA, 25 bp, Homo sapien
ttagcctcggcgagaccttcttaat

SEQ ID NO: 2210500 - DNA, 25 bp, Homo sapien
gcccgcgcctcgcctttaggaaaca

SEQ ID NO: 2210501 - DNA, 25 bp, Homo sapien
gagaccttcttaattcaccgcagga

SEQ ID NO: 2210502 - DNA, 25 bp, Homo sapien
caaatctcggccatgtcctgaaaac

SEQ ID NO: 2210503 - DNA, 25 bp, Homo sapien
gcttccgggcaaggctgtaccaatt

SEQ ID NO: 2210504 - DNA, 25 bp, Homo sapien
acctgtttattctcacgcttccggg

SEQ ID NO: 2210505 - DNA, 25 bp, Homo sapien
acgaggtttccgacccactgcggag

SEQ ID NO: 2210506 - DNA, 25 bp, Homo sapien
tacagaaatactcatacatggcatg

SEQ ID NO: 2210507 - DNA, 25 bp, Homo sapien
gatcaatttcgccagtaatcaggga

SEQ ID NO: 2210508 - DNA, 25 bp, Homo sapien
gacccagcggttactcttctaagaa

SEQ ID NO: 2210509 - DNA, 25 bp, Homo sapien
ggaaaaataggcactctcgcacaac

SEQ ID NO: 2210510 - DNA, 25 bp, Homo sapien
cacttggccatggctaatgccggta

SEQ ID NO: 2210511 - DNA, 25 bp, Homo sapien
acttggccatggctaatgccggtac

SEQ ID NO: 2210512 - DNA, 25 bp, Homo sapien
tctctctttagggccacttggccat

SEQ ID NO: 2210513 - DNA, 25 bp, Homo sapien
tctctttagggccacttggccatgg

SEQ ID NO: 2210514 - DNA, 25 bp, Homo sapien
tcgcatcccctctgtcagccgctct

SEQ ID NO: 2210515 - DNA, 25 bp, Homo sapien
cgggctgcccccgaagatgcggcta

SEQ ID NO: 2210516 - DNA, 25 bp, Homo sapien
ctctgtcagccgctctctcgccgcg

SEQ ID NO: 2210517 - DNA, 25 bp, Homo sapien
gatgcggctagctctccgctggcgc

SEQ ID NO: 2210518 - DNA, 25 bp, Homo sapien
ccgcaggagcgtgcggggtccgcgg

SEQ ID NO: 2210519 - DNA, 25 bp, Homo sapien
gcccgcaggagcgtgcggggtccgc

SEQ ID NO: 2210520 - DNA, 25 bp, Homo sapien
gggcccgcaggagcgtgcggggtcc

SEQ ID NO: 2210521 - DNA, 25 bp, Homo sapien
gggtccgcggccctgcttcagccct

SEQ ID NO: 2210522 - DNA, 25 bp, Homo sapien
ctccagccctgctccagccctgctc

SEQ ID NO: 2210523 - DNA, 25 bp, Homo sapien
ccctgctccagccctgctccagccg

SEQ ID NO: 2210524 - DNA, 25 bp, Homo sapien
ctgctccagccctgctccagccgtg

SEQ ID NO: 2210525 - DNA, 25 bp, Homo sapien
ccagccctgctccagccctgctcca

SEQ ID NO: 2210526 - DNA, 25 bp, Homo sapien
tagccctcagtcgaaagcctcctcg

SEQ ID NO: 2210527 - DNA, 25 bp, Homo sapien
cctcagtcgaaagcctcctcgcttc

SEQ ID NO: 2210528 - DNA, 25 bp, Homo sapien
ctcccctcgctagccctcagtcgaa

SEQ ID NO: 2210529 - DNA, 25 bp, Homo sapien
ctcgctagccctcagtcgaaagcct

SEQ ID NO: 2210530 - DNA, 25 bp, Homo sapien
cctcccgatggatggtcagattctt

SEQ ID NO: 2210531 - DNA, 25 bp, Homo sapien
caaacaacctctagtgctggccaat

SEQ ID NO: 2210532 - DNA, 25 bp, Homo sapien
agattcttggcatacacctccctgg

SEQ ID NO: 2210533 - DNA, 25 bp, Homo sapien
cactcacagagatggatgatttgca

SEQ ID NO: 2210534 - DNA, 25 bp, Homo sapien
ttgtgaagagagcttcccgcagccc

SEQ ID NO: 2210535 - DNA, 25 bp, Homo sapien
cacgaaataggaacttctgctcttt

SEQ ID NO: 2210536 - DNA, 25 bp, Homo sapien
ctgtccacgaaataggaacttctgc

SEQ ID NO: 2210537 - DNA, 25 bp, Homo sapien
tctgctctttcagaagtattgtgaa

SEQ ID NO: 2210538 - DNA, 25 bp, Homo sapien
caacagtacttggatcagcgagagt

SEQ ID NO: 2210539 - DNA, 25 bp, Homo sapien
gctgacaacagtacttggatcagcg

SEQ ID NO: 2210540 - DNA, 25 bp, Homo sapien
cagaagcacaaaattgagtctcacc

SEQ ID NO: 2210541 - DNA, 25 bp, Homo sapien
cttggatcagcgagagtacagaagc

SEQ ID NO: 2210542 - DNA, 25 bp, Homo sapien
aatggaaacaatatgctgtctgtgc

SEQ ID NO: 2210543 - DNA, 25 bp, Homo sapien
tggaaacaatatgctgtctgtgctt

SEQ ID NO: 2210544 - DNA, 25 bp, Homo sapien
gctttgagaccttgtaccacagtca

SEQ ID NO: 2210545 - DNA, 25 bp, Homo sapien
gctgtctgtgctttgagaccttgta

SEQ ID NO: 2210546 - DNA, 25 bp, Homo sapien
gaatcaggagctaagtaaacctcct

SEQ ID NO: 2210547 - DNA, 25 bp, Homo sapien
aagggaaagtgctcccttagactgg

SEQ ID NO: 2210548 - DNA, 25 bp, Homo sapien
gaagccagggctacgccatggaact

SEQ ID NO: 2210549 - DNA, 25 bp, Homo sapien
tgttataaagccagggcaccccttc

SEQ ID NO: 2210550 - DNA, 25 bp, Homo sapien
ttcagcatcacctggtcagtgcatt

SEQ ID NO: 2210551 - DNA, 25 bp, Homo sapien
cagcatcacctggtcagtgcattta

SEQ ID NO: 2210552 - DNA, 25 bp, Homo sapien
catcacctggtcagtgcatttatta

SEQ ID NO: 2210553 - DNA, 25 bp, Homo sapien
gcatcacctggtcagtgcatttatt

SEQ ID NO: 2210554 - DNA, 25 bp, Homo sapien
ttctccccttgcaattcactgcctc

SEQ ID NO: 2210555 - DNA, 25 bp, Homo sapien
gttccttctccccttgcaattcact

SEQ ID NO: 2210556 - DNA, 25 bp, Homo sapien
ttgttccttctccccttgcaattca

SEQ ID NO: 2210557 - DNA, 25 bp, Homo sapien
tccttctccccttgcaattcactgc

SEQ ID NO: 2210558 - DNA, 25 bp, Homo sapien
catgacctagggttaggcaaagaat

SEQ ID NO: 2210559 - DNA, 25 bp, Homo sapien
tgctccatgaaagacactgataaga

SEQ ID NO: 2210560 - DNA, 25 bp, Homo sapien
cacaggtcctagaagagccaaacaa

SEQ ID NO: 2210561 - DNA, 25 bp, Homo sapien
cagaaatggacccatacaagtatgg

SEQ ID NO: 2210562 - DNA, 25 bp, Homo sapien
gtcagtagacggaattcctgggcca

SEQ ID NO: 2210563 - DNA, 25 bp, Homo sapien
cacacacaaaatagggcagcactga

SEQ ID NO: 2210564 - DNA, 25 bp, Homo sapien
tataatccaggcctacatcagtcag

SEQ ID NO: 2210565 - DNA, 25 bp, Homo sapien
cactgagatcaggaccacagctctg

SEQ ID NO: 2210566 - DNA, 25 bp, Homo sapien
cccaaaaaagatgaggcttagtagg

SEQ ID NO: 2210567 - DNA, 25 bp, Homo sapien
cattacactgaattgtgactgtcag

SEQ ID NO: 2210568 - DNA, 25 bp, Homo sapien
tggttatagccctgaccctggtacg

SEQ ID NO: 2210569 - DNA, 25 bp, Homo sapien
tacctccagggaacttttcatggct

SEQ ID NO: 2210570 - DNA, 25 bp, Homo sapien
taagtaaaatccctagcccaatgcc

SEQ ID NO: 2210571 - DNA, 25 bp, Homo sapien
gactgaagttgggtgcctcgtttcc

SEQ ID NO: 2210572 - DNA, 25 bp, Homo sapien
gatgacccacagacagtaagcagcc

SEQ ID NO: 2210573 - DNA, 25 bp, Homo sapien
gttactttgtttcttcgctggcagg

SEQ ID NO: 2210574 - DNA, 25 bp, Homo sapien
ggaaatgcctgacaacttgctgagg

SEQ ID NO: 2210575 - DNA, 25 bp, Homo sapien
cattgaacttgttaggcccctttga

SEQ ID NO: 2210576 - DNA, 25 bp, Homo sapien
tcaggtgtgtgaagcgtgtccctcc

SEQ ID NO: 2210577 - DNA, 25 bp, Homo sapien
caagtccagattgcacaacaagtgc

SEQ ID NO: 2210578 - DNA, 25 bp, Homo sapien
tctttggaaaagcataactctgagg

SEQ ID NO: 2210579 - DNA, 25 bp, Homo sapien
caggcagttgcctatacaggacaga

SEQ ID NO: 2210580 - DNA, 25 bp, Homo sapien
gatcttggttacagcagtcaccgca

SEQ ID NO: 2210581 - DNA, 25 bp, Homo sapien
tagacatgtacagaagcggtgggct

SEQ ID NO: 2210582 - DNA, 25 bp, Homo sapien
ccacttgggtagtgccaaatggagg

SEQ ID NO: 2210583 - DNA, 25 bp, Homo sapien
tgtggcctgcatggtagctattaaa

SEQ ID NO: 2210584 - DNA, 25 bp, Homo sapien
tcgagtccagattgccagtgaggca

SEQ ID NO: 2210585 - DNA, 25 bp, Homo sapien
tggaaagggcaagggtacactccac

SEQ ID NO: 2210586 - DNA, 25 bp, Homo sapien
tggagacaatccacgaaggaaggac

SEQ ID NO: 2210587 - DNA, 25 bp, Homo sapien
gacaatccacgaaggaaggacaggg

SEQ ID NO: 2210588 - DNA, 25 bp, Homo sapien
gacaatggagacaatccacgaagga

SEQ ID NO: 2210589 - DNA, 25 bp, Homo sapien
aggatcggatggatggtctgctcct

SEQ ID NO: 2210590 - DNA, 25 bp, Homo sapien
ttctcttcaacttgggctcgtgaat

SEQ ID NO: 2210591 - DNA, 25 bp, Homo sapien
tgcattctgcttgaacgatgacctg

SEQ ID NO: 2210592 - DNA, 25 bp, Homo sapien
ttctgcttgaacgatgacctgtcgt

SEQ ID NO: 2210593 - DNA, 25 bp, Homo sapien
cgtgaatggcctgtctgcattctgc

SEQ ID NO: 2210594 - DNA, 25 bp, Homo sapien
aagttcccgatggaggacccaggtg

SEQ ID NO: 2210595 - DNA, 25 bp, Homo sapien
tggagctcaccctaaaacaagtggc

SEQ ID NO: 2210596 - DNA, 25 bp, Homo sapien
gaaaagagggttctagtcagctgga

SEQ ID NO: 2210597 - DNA, 25 bp, Homo sapien
gcagataggatccaggagtgcccca

SEQ ID NO: 2210598 - DNA, 25 bp, Homo sapien
atttctgtggattttcaggatacgg

SEQ ID NO: 2210599 - DNA, 25 bp, Homo sapien
gattttcaggatacggccgagtctc

SEQ ID NO: 2210600 - DNA, 25 bp, Homo sapien
caggatacggccgagtctctgcttt

SEQ ID NO: 2210601 - DNA, 25 bp, Homo sapien
tacggccgagtctctgctttgctgt

SEQ ID NO: 2210602 - DNA, 25 bp, Homo sapien
gcattgggacgagcggtgtactcat

SEQ ID NO: 2210603 - DNA, 25 bp, Homo sapien
tactcatggtcagcgagacttcctg

SEQ ID NO: 2210604 - DNA, 25 bp, Homo sapien
ctctgggagccaactgaagggcgcc

SEQ ID NO: 2210605 - DNA, 25 bp, Homo sapien
cgccgctgggtcaagaagacaccgg

SEQ ID NO: 2210606 - DNA, 25 bp, Homo sapien
tacctgcaccaagtctagcctggat

SEQ ID NO: 2210607 - DNA, 25 bp, Homo sapien
taatgaggtagaccttggacacgtc

SEQ ID NO: 2210608 - DNA, 25 bp, Homo sapien
tcacagctgaaaagtagttgggacc

SEQ ID NO: 2210609 - DNA, 25 bp, Homo sapien
cacaagccaagtaggaggagagatt

SEQ ID NO: 2210610 - DNA, 25 bp, Homo sapien
tcagggagatgactagagaccaaat

SEQ ID NO: 2210611 - DNA, 25 bp, Homo sapien
tttgtgtgctatacgaaggaagtcc

SEQ ID NO: 2210612 - DNA, 25 bp, Homo sapien
tggcccctaccagaagcttagcttg

SEQ ID NO: 2210613 - DNA, 25 bp, Homo sapien
tctcaatgggtaaaaggaacatctt

SEQ ID NO: 2210614 - DNA, 25 bp, Homo sapien
cagccaaacctgtctcaatagaggc

SEQ ID NO: 2210615 - DNA, 25 bp, Homo sapien
tcacgcacaggacggtcctgcttcg

SEQ ID NO: 2210616 - DNA, 25 bp, Homo sapien
caggacggtcctgcttcggcagagt

SEQ ID NO: 2210617 - DNA, 25 bp, Homo sapien
tgtctcaatagaggctacccgggtc

SEQ ID NO: 2210618 - DNA, 25 bp, Homo sapien
tatccgaaggctagccatattccct

SEQ ID NO: 2210619 - DNA, 25 bp, Homo sapien
tgcttctagctttttatgaagccag

SEQ ID NO: 2210620 - DNA, 25 bp, Homo sapien
ttttgcttgccatcacataagaacc

SEQ ID NO: 2210621 - DNA, 25 bp, Homo sapien
gaaggtgtcactaagacatttatcc

SEQ ID NO: 2210622 - DNA, 25 bp, Homo sapien
caacccatgatacgtatgagtcagt

SEQ ID NO: 2210623 - DNA, 25 bp, Homo sapien
gaatccccttagtagaatgccttag

SEQ ID NO: 2210624 - DNA, 25 bp, Homo sapien
tgaacaccagttgatgcatctgtgc

SEQ ID NO: 2210625 - DNA, 25 bp, Homo sapien
tggatgtgcctcaaacaacccatga

SEQ ID NO: 2210626 - DNA, 25 bp, Homo sapien
cagtgcaacctccgctttccgaggt

SEQ ID NO: 2210627 - DNA, 25 bp, Homo sapien
gactaaacgcacatgccaccacatg

SEQ ID NO: 2210628 - DNA, 25 bp, Homo sapien
ggactaaacgcacatgccaccacat

SEQ ID NO: 2210629 - DNA, 25 bp, Homo sapien
tccgctttccgaggttcaagcaatt

SEQ ID NO: 2210630 - DNA, 25 bp, Homo sapien
aaagaaacatttactgattaactca

SEQ ID NO: 2210631 - DNA, 25 bp, Homo sapien
gaaacatttactgattaactcacta

SEQ ID NO: 2210632 - DNA, 25 bp, Homo sapien
caccattcccggctgattttctatt

SEQ ID NO: 2210633 - DNA, 25 bp, Homo sapien
accattcccggctgattttctattt

SEQ ID NO: 2210634 - DNA, 25 bp, Homo sapien
tctttttcttgggtcgagatttcaa

SEQ ID NO: 2210635 - DNA, 25 bp, Homo sapien
ggactccatggagcatcatctgaat

SEQ ID NO: 2210636 - DNA, 25 bp, Homo sapien
tgggtcgagatttcaaagcagggtc

SEQ ID NO: 2210637 - DNA, 25 bp, Homo sapien
ccatggagcatcatctgaattcttc

SEQ ID NO: 2210638 - DNA, 25 bp, Homo sapien
gttctccagtatgctggccgcttga

SEQ ID NO: 2210639 - DNA, 25 bp, Homo sapien
tgcatccttgaagcacgctcccaag

SEQ ID NO: 2210640 - DNA, 25 bp, Homo sapien
ccatgcacagcatgccctggatggc

SEQ ID NO: 2210641 - DNA, 25 bp, Homo sapien
acgatgaggactgcaggttggccat

SEQ ID NO: 2210642 - DNA, 25 bp, Homo sapien
agttccttaggagtggtttcatgcc

SEQ ID NO: 2210643 - DNA, 25 bp, Homo sapien
tccctgtttaggcatgctgcattct

SEQ ID NO: 2210644 - DNA, 25 bp, Homo sapien
tattctttcacccaaatgccctgga

SEQ ID NO: 2210645 - DNA, 25 bp, Homo sapien
tcctaagtgcccaaaattgattcct

SEQ ID NO: 2210646 - DNA, 25 bp, Homo sapien
tgggcgggagcgggggttgctgtct

SEQ ID NO: 2210647 - DNA, 25 bp, Homo sapien
ttgggcgggagcgggggttgctgtc

SEQ ID NO: 2210648 - DNA, 25 bp, Homo sapien
cttgggcgggagcgggggttgctgt

SEQ ID NO: 2210649 - DNA, 25 bp, Homo sapien
ccttgggcgggagcgggggttgctg

SEQ ID NO: 2210650 - DNA, 25 bp, Homo sapien
tggaaaggggagataaaagccagta

SEQ ID NO: 2210651 - DNA, 25 bp, Homo sapien
ctggaaaggggagataaaagccagt

SEQ ID NO: 2210652 - DNA, 25 bp, Homo sapien
aggggagataaaagccagtactcac

SEQ ID NO: 2210653 - DNA, 25 bp, Homo sapien
aaggggagataaaagccagtactca

SEQ ID NO: 2210654 - DNA, 25 bp, Homo sapien
cagcatagtcaggtccccccacctg

SEQ ID NO: 2210655 - DNA, 25 bp, Homo sapien
agggcagcatagtcaggtcccccca

SEQ ID NO: 2210656 - DNA, 25 bp, Homo sapien
gcagcatagtcaggtccccccacct

SEQ ID NO: 2210657 - DNA, 25 bp, Homo sapien
gtgagggcagcatagtcaggtcccc

SEQ ID NO: 2210658 - DNA, 25 bp, Homo sapien
ctggccttgagcagatcaagaatgc

SEQ ID NO: 2210659 - DNA, 25 bp, Homo sapien
gccaccagcgccactaccattccca

SEQ ID NO: 2210660 - DNA, 25 bp, Homo sapien
gagcagatcaagaatgccaccagcg

SEQ ID NO: 2210661 - DNA, 25 bp, Homo sapien
ccttgagcagatcaagaatgccacc

SEQ ID NO: 2210662 - DNA, 25 bp, Homo sapien
ttccaccatgtcctcatctgttgta

SEQ ID NO: 2210663 - DNA, 25 bp, Homo sapien
cttccaccatgtcctcatctgttgt

SEQ ID NO: 2210664 - DNA, 25 bp, Homo sapien
gaatgagcagaagactagatccagg

SEQ ID NO: 2210665 - DNA, 25 bp, Homo sapien
agaatgagcagaagactagatccag

SEQ ID NO: 2210666 - DNA, 25 bp, Homo sapien
cagaatgagcagaagactagatcca

SEQ ID NO: 2210667 - DNA, 25 bp, Homo sapien
cacgaactcggttggggtcagagca

SEQ ID NO: 2210668 - DNA, 25 bp, Homo sapien
aacttctcctggttcacgaactcgg

SEQ ID NO: 2210669 - DNA, 25 bp, Homo sapien
caatgtcaaactcaacttctcctgg

SEQ ID NO: 2210670 - DNA, 25 bp, Homo sapien
caaggcttcgcacggggcaatttcc

SEQ ID NO: 2210671 - DNA, 25 bp, Homo sapien
tggtcttattatcagggtcgccttc

SEQ ID NO: 2210672 - DNA, 25 bp, Homo sapien
caatctctcgtcaatctgcagctca

SEQ ID NO: 2210673 - DNA, 25 bp, Homo sapien
gctcatcatctgaatccaagtcaaa

SEQ ID NO: 2210674 - DNA, 25 bp, Homo sapien
tctttgctatcttggttcgccgaga

SEQ ID NO: 2210675 - DNA, 25 bp, Homo sapien
tgagtcattcaagcaggcaccagtg

SEQ ID NO: 2210676 - DNA, 25 bp, Homo sapien
aaggtccaagtctggtgagtcgtca

SEQ ID NO: 2210677 - DNA, 25 bp, Homo sapien
ctgccgttagacatcaatagggcca

SEQ ID NO: 2210678 - DNA, 25 bp, Homo sapien
tcaatagggccaatgggctctcatt

SEQ ID NO: 2210679 - DNA, 25 bp, Homo sapien
catgggaatcacgatggcaagttcc

SEQ ID NO: 2210680 - DNA, 25 bp, Homo sapien
gactcagccgttacctgtctgggac

SEQ ID NO: 2210681 - DNA, 25 bp, Homo sapien
ctgtagaagtaggagactcagccgt

SEQ ID NO: 2210682 - DNA, 25 bp, Homo sapien
gttccctctggtttcactggttcag

SEQ ID NO: 2210683 - DNA, 25 bp, Homo sapien
acactgaagtggaatgggctggcct

SEQ ID NO: 2210684 - DNA, 25 bp, Homo sapien
ttatagctcaactggccagcaggcc

SEQ ID NO: 2210685 - DNA, 25 bp, Homo sapien
gagccggctgggaagatcctctgca

SEQ ID NO: 2210686 - DNA, 25 bp, Homo sapien
aaagatattgctcgtcttcccaacg

SEQ ID NO: 2210687 - DNA, 25 bp, Homo sapien
tgtaatcatcttcaccccgagagaa

SEQ ID NO: 2210688 - DNA, 25 bp, Homo sapien
cactataccttactgcctcgtggta

SEQ ID NO: 2210689 - DNA, 25 bp, Homo sapien
gcctcgtggtatatgccacctgttg

SEQ ID NO: 2210690 - DNA, 25 bp, Homo sapien
ttgtaatcatcttcaccccgagaga

SEQ ID NO: 2210691 - DNA, 25 bp, Homo sapien
ggttcgcactgtctccgggatctca

SEQ ID NO: 2210692 - DNA, 25 bp, Homo sapien
ggatctcatcctcatggtctggcag

SEQ ID NO: 2210693 - DNA, 25 bp, Homo sapien
tctttaatgagctgtacggttcgca

SEQ ID NO: 2210694 - DNA, 25 bp, Homo sapien
cctggccagatctttaatgagctgt

SEQ ID NO: 2210695 - DNA, 25 bp, Homo sapien
cacaagtgttaatagcagttcccgc

SEQ ID NO: 2210696 - DNA, 25 bp, Homo sapien
tcccgctgagtgtaaaaatcatagg

SEQ ID NO: 2210697 - DNA, 25 bp, Homo sapien
ccagaaggaaatgtacacaagtgtt

SEQ ID NO: 2210698 - DNA, 25 bp, Homo sapien
aaatcataggtgataattttccttc

SEQ ID NO: 2210699 - DNA, 25 bp, Homo sapien
aagttcaaggctttgccaccatgga

SEQ ID NO: 2210700 - DNA, 25 bp, Homo sapien
ggccaagttcaaggctttgccacca

SEQ ID NO: 2210701 - DNA, 25 bp, Homo sapien
ccaagttcaaggctttgccaccatg

SEQ ID NO: 2210702 - DNA, 25 bp, Homo sapien
aggccaagttcaaggctttgccacc

SEQ ID NO: 2210703 - DNA, 25 bp, Homo sapien
gctttcccacataccaacagatggt

SEQ ID NO: 2210704 - DNA, 25 bp, Homo sapien
accaacagatggtctcaaagttggg

SEQ ID NO: 2210705 - DNA, 25 bp, Homo sapien
gatgtgctttcccacataccaacag

SEQ ID NO: 2210706 - DNA, 25 bp, Homo sapien
cacataccaacagatggtctcaaag

SEQ ID NO: 2210707 - DNA, 25 bp, Homo sapien
gcatctcgatgttaaggctgtgtaa

SEQ ID NO: 2210708 - DNA, 25 bp, Homo sapien
gtgtaagaagttccctccaaaggca

SEQ ID NO: 2210709 - DNA, 25 bp, Homo sapien
ggctgtgtaagaagttccctccaaa

SEQ ID NO: 2210710 - DNA, 25 bp, Homo sapien
ttgagctgcatctcgatgttaaggc

SEQ ID NO: 2210711 - DNA, 25 bp, Homo sapien
cctggacatactgataaatgctgta

SEQ ID NO: 2210712 - DNA, 25 bp, Homo sapien
aaaaaaagatgcactcgccagggag

SEQ ID NO: 2210713 - DNA, 25 bp, Homo sapien
caatgaacattcgggccgggcacag

SEQ ID NO: 2210714 - DNA, 25 bp, Homo sapien
cagggagcaggagtagctcacgcct

SEQ ID NO: 2210715 - DNA, 25 bp, Homo sapien
gtgtctgtccttgcttcacggaaca

SEQ ID NO: 2210716 - DNA, 25 bp, Homo sapien
cagcactcaaagagagtcagattgg

SEQ ID NO: 2210717 - DNA, 25 bp, Homo sapien
ggaacacttgtagcacttgtccacc

SEQ ID NO: 2210718 - DNA, 25 bp, Homo sapien
cattctgattagaggaactgctcca

SEQ ID NO: 2210719 - DNA, 25 bp, Homo sapien
cagaggtgccaccaaagtcaatgtg

SEQ ID NO: 2210720 - DNA, 25 bp, Homo sapien
gaaagtctgtatagctatctcgcac

SEQ ID NO: 2210721 - DNA, 25 bp, Homo sapien
gccacaagttttcgacccatgacag

SEQ ID NO: 2210722 - DNA, 25 bp, Homo sapien
gcacactcatgaggcagtacttctg

SEQ ID NO: 2210723 - DNA, 25 bp, Homo sapien
aactaatgacattgaggactttctc

SEQ ID NO: 2210724 - DNA, 25 bp, Homo sapien
ggtatcagagaattccaaactaatg

SEQ ID NO: 2210725 - DNA, 25 bp, Homo sapien
ctcttcccgctgtaatagtatttca

SEQ ID NO: 2210726 - DNA, 25 bp, Homo sapien
ttgcagtcagcctggcgggtcacat

SEQ ID NO: 2210727 - DNA, 25 bp, Homo sapien
tagtgttcaacatccctcacagtga

SEQ ID NO: 2210728 - DNA, 25 bp, Homo sapien
aattccacggtcagttgatttccag

SEQ ID NO: 2210729 - DNA, 25 bp, Homo sapien
ctcacagtgaatgatggcgagggca

SEQ ID NO: 2210730 - DNA, 25 bp, Homo sapien
ccaggatgggcacactgaagctatt

SEQ ID NO: 2210731 - DNA, 25 bp, Homo sapien
ctctgacgaacgtagggctcccggt

SEQ ID NO: 2210732 - DNA, 25 bp, Homo sapien
tttgaagatccacggcgttttttca

SEQ ID NO: 2210733 - DNA, 25 bp, Homo sapien
tgtgtgtatcatgcccctttgaaga

SEQ ID NO: 2210734 - DNA, 25 bp, Homo sapien
ctgtcaaaagtcctactccggagct

SEQ ID NO: 2210735 - DNA, 25 bp, Homo sapien
agtggtagaggtcaatgtcagcagc

SEQ ID NO: 2210736 - DNA, 25 bp, Homo sapien
agggcccatgcaagacttcacagtt

SEQ ID NO: 2210737 - DNA, 25 bp, Homo sapien
tcacagttggggcagtggtagaggt

SEQ ID NO: 2210738 - DNA, 25 bp, Homo sapien
ggcccatgcaagacttcacagttgg

SEQ ID NO: 2210739 - DNA, 25 bp, Homo sapien
taacagtggattgtgccagacagta

SEQ ID NO: 2210740 - DNA, 25 bp, Homo sapien
taatcagcactcatatcaagatgca

SEQ ID NO: 2210741 - DNA, 25 bp, Homo sapien
tcaaaagatgggagttaatgcaaca

SEQ ID NO: 2210742 - DNA, 25 bp, Homo sapien
aaagtacaatgtccaaccataaagg

SEQ ID NO: 2210743 - DNA, 25 bp, Homo sapien
gaaaccagtcctggcacatgtcaca

SEQ ID NO: 2210744 - DNA, 25 bp, Homo sapien
tcatgaagcgggtcacatcgtaagg

SEQ ID NO: 2210745 - DNA, 25 bp, Homo sapien
ggcacatgtcacactcgatcatgaa

SEQ ID NO: 2210746 - DNA, 25 bp, Homo sapien
agccggcagaggcaatacaccggca

SEQ ID NO: 2210747 - DNA, 25 bp, Homo sapien
agcacgcgtcctctctggacgatag

SEQ ID NO: 2210748 - DNA, 25 bp, Homo sapien
ttctgcggccggccaggttcgtcgt

SEQ ID NO: 2210749 - DNA, 25 bp, Homo sapien
ccggccaggttcgtcgtgtcaagag

SEQ ID NO: 2210750 - DNA, 25 bp, Homo sapien
gaggcggcagcacgcgtcctctctg

SEQ ID NO: 2210751 - DNA, 25 bp, Homo sapien
cttcggccccgttgtcagtgataac

SEQ ID NO: 2210752 - DNA, 25 bp, Homo sapien
cttcttcggccccgttgtcagtgat

SEQ ID NO: 2210753 - DNA, 25 bp, Homo sapien
tcttcggccccgttgtcagtgataa

SEQ ID NO: 2210754 - DNA, 25 bp, Homo sapien
ttcttcggccccgttgtcagtgata

SEQ ID NO: 2210755 - DNA, 25 bp, Homo sapien
ctgaagccttttcgggaagcttctt

SEQ ID NO: 2210756 - DNA, 25 bp, Homo sapien
aagcttctttcatctctcactgaac

SEQ ID NO: 2210757 - DNA, 25 bp, Homo sapien
ggaagcttctttcatctctcactga

SEQ ID NO: 2210758 - DNA, 25 bp, Homo sapien
cgggaagcttctttcatctctcact

SEQ ID NO: 2210759 - DNA, 25 bp, Homo sapien
atcttaacgcttccccaactgacag

SEQ ID NO: 2210760 - DNA, 25 bp, Homo sapien
aggaatcttaacgcttccccaactg

SEQ ID NO: 2210761 - DNA, 25 bp, Homo sapien
aactgacaggaacctcctcacgccc

SEQ ID NO: 2210762 - DNA, 25 bp, Homo sapien
gaatcttaacgcttccccaactgac

SEQ ID NO: 2210763 - DNA, 25 bp, Homo sapien
tacagggacctcctcatgctttggg

SEQ ID NO: 2210764 - DNA, 25 bp, Homo sapien
tcagcggaggctcgtccggtagttc

SEQ ID NO: 2210765 - DNA, 25 bp, Homo sapien
gcgacgcgcgtcgaattctgggata

SEQ ID NO: 2210766 - DNA, 25 bp, Homo sapien
gtcttcagtccagaatcctacaggg

SEQ ID NO: 2210767 - DNA, 25 bp, Homo sapien
ccttcgataggctgggctctttccc

SEQ ID NO: 2210768 - DNA, 25 bp, Homo sapien
tctgcgttgttggttcttccccctg

SEQ ID NO: 2210769 - DNA, 25 bp, Homo sapien
ggctctttcccacggtctctgcgtt

SEQ ID NO: 2210770 - DNA, 25 bp, Homo sapien
tcattgagcaccttcgataggctgg

SEQ ID NO: 2210771 - DNA, 25 bp, Homo sapien
aacatattgatgctctacacattca

SEQ ID NO: 2210772 - DNA, 25 bp, Homo sapien
acttttcttacttaacatattgatg

SEQ ID NO: 2210773 - DNA, 25 bp, Homo sapien
ttcttacttaacatattgatgctct

SEQ ID NO: 2210774 - DNA, 25 bp, Homo sapien
ttacttaacatattgatgctctaca

SEQ ID NO: 2210775 - DNA, 25 bp, Homo sapien
gaaagtcgagtaagatgccaaagtc

SEQ ID NO: 2210776 - DNA, 25 bp, Homo sapien
taccaacacggacaaaaagagcatc

SEQ ID NO: 2210777 - DNA, 25 bp, Homo sapien
cagaagtttgtcaggcctggtccag

SEQ ID NO: 2210778 - DNA, 25 bp, Homo sapien
gaataggtgcactgagctctctacc

SEQ ID NO: 2210779 - DNA, 25 bp, Homo sapien
tgccttactaggctcccagaggaga

SEQ ID NO: 2210780 - DNA, 25 bp, Homo sapien
caatgcactggttgagaggcaggaa

SEQ ID NO: 2210781 - DNA, 25 bp, Homo sapien
tataggaccttatgtgatgataccc

SEQ ID NO: 2210782 - DNA, 25 bp, Homo sapien
tagggagtgaatgaactgtgccaca

SEQ ID NO: 2210783 - DNA, 25 bp, Homo sapien
tattcatagggaggtagcggttacc

SEQ ID NO: 2210784 - DNA, 25 bp, Homo sapien
gctcttgtaagtggttcttctccct

SEQ ID NO: 2210785 - DNA, 25 bp, Homo sapien
tcagtcctctttccgttgtgccaca

SEQ ID NO: 2210786 - DNA, 25 bp, Homo sapien
tccttgatcaatgcgccactgtttc

SEQ ID NO: 2210787 - DNA, 25 bp, Homo sapien
gagcgagaccgaccttgatgaagct

SEQ ID NO: 2210788 - DNA, 25 bp, Homo sapien
ctgggagcgagaccgaccttgatga

SEQ ID NO: 2210789 - DNA, 25 bp, Homo sapien
tgggagcgagaccgaccttgatgaa

SEQ ID NO: 2210790 - DNA, 25 bp, Homo sapien
ggagcgagaccgaccttgatgaagc

SEQ ID NO: 2210791 - DNA, 25 bp, Homo sapien
tggcctcactcggaaaagggtaaga

SEQ ID NO: 2210792 - DNA, 25 bp, Homo sapien
tcggaaaagggtaagactcgcagcc

SEQ ID NO: 2210793 - DNA, 25 bp, Homo sapien
tcactcggaaaagggtaagactcgc

SEQ ID NO: 2210794 - DNA, 25 bp, Homo sapien
tcttgtggcctcactcggaaaaggg

SEQ ID NO: 2210795 - DNA, 25 bp, Homo sapien
tgtgtcccttggatcctctaccagt

SEQ ID NO: 2210796 - DNA, 25 bp, Homo sapien
ggatcctctaccagtctgttctttt

SEQ ID NO: 2210797 - DNA, 25 bp, Homo sapien
gtcccttggatcctctaccagtctg

SEQ ID NO: 2210798 - DNA, 25 bp, Homo sapien
ttttttgtgtcccttggatcctcta

SEQ ID NO: 2210799 - DNA, 25 bp, Homo sapien
gccgaaggatcctcggcccctggag

SEQ ID NO: 2210800 - DNA, 25 bp, Homo sapien
acaaccatcccagcaatctccagtt

SEQ ID NO: 2210801 - DNA, 25 bp, Homo sapien
cacttgcatgccgaaggatcctcgg

SEQ ID NO: 2210802 - DNA, 25 bp, Homo sapien
agaaaccacttgcatgccgaaggat

SEQ ID NO: 2210803 - DNA, 25 bp, Homo sapien
gcactggccgtttactctcactgat

SEQ ID NO: 2210804 - DNA, 25 bp, Homo sapien
gtttactctcactgatcttcctgca

SEQ ID NO: 2210805 - DNA, 25 bp, Homo sapien
tggccgtttactctcactgatcttc

SEQ ID NO: 2210806 - DNA, 25 bp, Homo sapien
tactctcactgatcttcctgcaagc

SEQ ID NO: 2210807 - DNA, 25 bp, Homo sapien
catagctcgggaataaagtgaaaca

SEQ ID NO: 2210808 - DNA, 25 bp, Homo sapien
ttttccactttggttgccaggtcag

SEQ ID NO: 2210809 - DNA, 25 bp, Homo sapien
aagtggcatggagcccatagctcgg

SEQ ID NO: 2210810 - DNA, 25 bp, Homo sapien
caaaagtaggtgacggaagtagagc

SEQ ID NO: 2210811 - DNA, 25 bp, Homo sapien
tgaagagggcagcaagctggatccc

SEQ ID NO: 2210812 - DNA, 25 bp, Homo sapien
tggccatcacagagctcaaccagag

SEQ ID NO: 2210813 - DNA, 25 bp, Homo sapien
gatccctcgggcatccagtttctca

SEQ ID NO: 2210814 - DNA, 25 bp, Homo sapien
taaatccatggacagcaatgctccc

SEQ ID NO: 2210815 - DNA, 25 bp, Homo sapien
aaaccaccacagatgaaatattact

SEQ ID NO: 2210816 - DNA, 25 bp, Homo sapien
ggtaacatttactcttattcctgtc

SEQ ID NO: 2210817 - DNA, 25 bp, Homo sapien
tactattaagaaactactattcttg

SEQ ID NO: 2210818 - DNA, 25 bp, Homo sapien
ccacagatgaaatattactattaag

SEQ ID NO: 2210819 - DNA, 25 bp, Homo sapien
tggagtcgatctggttcataaagct

SEQ ID NO: 2210820 - DNA, 25 bp, Homo sapien
gtagacactgcctgtgcaaggaagg

SEQ ID NO: 2210821 - DNA, 25 bp, Homo sapien
gcgatgcaggattcggccaccaggc

SEQ ID NO: 2210822 - DNA, 25 bp, Homo sapien
caaggaaggtgtctagctcatggcg

SEQ ID NO: 2210823 - DNA, 25 bp, Homo sapien
acgggtcactgcagtattgagtatt

SEQ ID NO: 2210824 - DNA, 25 bp, Homo sapien
cacgggtcactgcagtattgagtat

SEQ ID NO: 2210825 - DNA, 25 bp, Homo sapien
tcacgggtcactgcagtattgagta

SEQ ID NO: 2210826 - DNA, 25 bp, Homo sapien
ctacaggctcatgtcacaatacctt

SEQ ID NO: 2210827 - DNA, 25 bp, Homo sapien
gattgagcatactgggcgtgtccga

SEQ ID NO: 2210828 - DNA, 25 bp, Homo sapien
ggcaagtccattcccgaaatgtcag

SEQ ID NO: 2210829 - DNA, 25 bp, Homo sapien
ggagtacacaacacatgagcagcag

SEQ ID NO: 2210830 - DNA, 25 bp, Homo sapien
cgtgtccgacttcatacaggccagg

SEQ ID NO: 2210831 - DNA, 25 bp, Homo sapien
tacactcatcctcaatacatacggg

SEQ ID NO: 2210832 - DNA, 25 bp, Homo sapien
tatacatattgacgagctgaccgga

SEQ ID NO: 2210833 - DNA, 25 bp, Homo sapien
tgaccggaataagagagcagctgga

SEQ ID NO: 2210834 - DNA, 25 bp, Homo sapien
tctctgccagactaaaaagaactcc

SEQ ID NO: 2210835 - DNA, 25 bp, Homo sapien
taagggtggaatggtgatatccatg

SEQ ID NO: 2210836 - DNA, 25 bp, Homo sapien
gttcagcaactctcaagacttctgg

SEQ ID NO: 2210837 - DNA, 25 bp, Homo sapien
tatatgggtacataagacccctccg

SEQ ID NO: 2210838 - DNA, 25 bp, Homo sapien
acccctccggtgtctgtgttcagca

SEQ ID NO: 2210839 - DNA, 25 bp, Homo sapien
tgcccaggaccctctgtcacgattg

SEQ ID NO: 2210840 - DNA, 25 bp, Homo sapien
tagacatagacagcagagatgggat

SEQ ID NO: 2210841 - DNA, 25 bp, Homo sapien
catcacctaggctcgcttctgaaac

SEQ ID NO: 2210842 - DNA, 25 bp, Homo sapien
tccagtatcaacaggctgtgcccag

SEQ ID NO: 2210843 - DNA, 25 bp, Homo sapien
ggtgatgaaatgcttctgtgatatg

SEQ ID NO: 2210844 - DNA, 25 bp, Homo sapien
tggtgatgaaatgcttctgtgatat

SEQ ID NO: 2210845 - DNA, 25 bp, Homo sapien
ctggtgatgaaatgcttctgtgata

SEQ ID NO: 2210846 - DNA, 25 bp, Homo sapien
gtgatgaaatgcttctgtgatatga

SEQ ID NO: 2210847 - DNA, 25 bp, Homo sapien
aaaagcatgggattcccccaaagca

SEQ ID NO: 2210848 - DNA, 25 bp, Homo sapien
tgcagaagagtcataggagacagcc

SEQ ID NO: 2210849 - DNA, 25 bp, Homo sapien
caggtaattgggaaactgggatgca

SEQ ID NO: 2210850 - DNA, 25 bp, Homo sapien
agatgagttgggtcccactgggaat

SEQ ID NO: 2210851 - DNA, 25 bp, Homo sapien
cattggctttccagcagaaatggtg

SEQ ID NO: 2210852 - DNA, 25 bp, Homo sapien
gaggatttccaagcctattattccg

SEQ ID NO: 2210853 - DNA, 25 bp, Homo sapien
cccacttgatttcgtggaaggggag

SEQ ID NO: 2210854 - DNA, 25 bp, Homo sapien
ccagcagaaatggtgcccacttgat

SEQ ID NO: 2210855 - DNA, 25 bp, Homo sapien
ggacccactggcagcgaagagagtt

SEQ ID NO: 2210856 - DNA, 25 bp, Homo sapien
caactgctttcttgaatcgctctat

SEQ ID NO: 2210857 - DNA, 25 bp, Homo sapien
gagtttggttgtgactgaataatac

SEQ ID NO: 2210858 - DNA, 25 bp, Homo sapien
ttgaatcgctctattttatcttctg

SEQ ID NO: 2210859 - DNA, 25 bp, Homo sapien
cttgatcaccacgtcacagggagga

SEQ ID NO: 2210860 - DNA, 25 bp, Homo sapien
ttgagggatctttgatggaactgac

SEQ ID NO: 2210861 - DNA, 25 bp, Homo sapien
actgacatactcagaaacagccttg

SEQ ID NO: 2210862 - DNA, 25 bp, Homo sapien
ccttcccaactacatccaggtttga

SEQ ID NO: 2210863 - DNA, 25 bp, Homo sapien
taagtgatgcaagaggatgttctgg

SEQ ID NO: 2210864 - DNA, 25 bp, Homo sapien
ttaagtgatgcaagaggatgttctg

SEQ ID NO: 2210865 - DNA, 25 bp, Homo sapien
cttaagtgatgcaagaggatgttct

SEQ ID NO: 2210866 - DNA, 25 bp, Homo sapien
ctgcagtcttttctttggatgacct

SEQ ID NO: 2210867 - DNA, 25 bp, Homo sapien
gcagtcttttctttggatgacctac

SEQ ID NO: 2210868 - DNA, 25 bp, Homo sapien
tcactgcagtcttttctttggatga

SEQ ID NO: 2210869 - DNA, 25 bp, Homo sapien
caatcactgcagtcttttctttgga

SEQ ID NO: 2210870 - DNA, 25 bp, Homo sapien
ggctacttcttgcatcaggaactgg

SEQ ID NO: 2210871 - DNA, 25 bp, Homo sapien
gaaggccatggaagccattttccct

SEQ ID NO: 2210872 - DNA, 25 bp, Homo sapien
cttccaaatggtggtcttcaaggct

SEQ ID NO: 2210873 - DNA, 25 bp, Homo sapien
gcatactcggagtcatgggcaagaa

SEQ ID NO: 2210874 - DNA, 25 bp, Homo sapien
tgtagaattcggcatttcaatgaca

SEQ ID NO: 2210875 - DNA, 25 bp, Homo sapien
cagaattgagccttgaatgctttca

SEQ ID NO: 2210876 - DNA, 25 bp, Homo sapien
ttttcagtaccatggcacagtaatt

SEQ ID NO: 2210877 - DNA, 25 bp, Homo sapien
tgtgccaagaggtcaatgttagttc

SEQ ID NO: 2210878 - DNA, 25 bp, Homo sapien
ggtgaatgccctttggatgccaaat

SEQ ID NO: 2210879 - DNA, 25 bp, Homo sapien
caatctctgcgggtgtggtgaatgc

SEQ ID NO: 2210880 - DNA, 25 bp, Homo sapien
gtcagccagtttatctcttgccaaa

SEQ ID NO: 2210881 - DNA, 25 bp, Homo sapien
tagggcagatttccataacatgcac

SEQ ID NO: 2210882 - DNA, 25 bp, Homo sapien
taacataatttctgttgtactcaac

SEQ ID NO: 2210883 - DNA, 25 bp, Homo sapien
gccatcgatgtttgacatcctgaac

SEQ ID NO: 2210884 - DNA, 25 bp, Homo sapien
taactttttgactaaatctggccca

SEQ ID NO: 2210885 - DNA, 25 bp, Homo sapien
gcccaagaatgtttagccatcgatg

SEQ ID NO: 2210886 - DNA, 25 bp, Homo sapien
aggtctcctacaggcttcaatcaag

SEQ ID NO: 2210887 - DNA, 25 bp, Homo sapien
ctggctcaaggtctcctacaggctt

SEQ ID NO: 2210888 - DNA, 25 bp, Homo sapien
aagctcactcacgtacgtggctgtt

SEQ ID NO: 2210889 - DNA, 25 bp, Homo sapien
gctcaaggtctcctacaggcttcaa

SEQ ID NO: 2210890 - DNA, 25 bp, Homo sapien
ttggttggaggcttccctcagtttc

SEQ ID NO: 2210891 - DNA, 25 bp, Homo sapien
tggttggaggcttccctcagtttct

SEQ ID NO: 2210892 - DNA, 25 bp, Homo sapien
agtgatcaagcaagaagagccagag

SEQ ID NO: 2210893 - DNA, 25 bp, Homo sapien
cagagtgatcaagcaagaagagcca

SEQ ID NO: 2210894 - DNA, 25 bp, Homo sapien
tcatcagagtgatcaagcaagaaga

SEQ ID NO: 2210895 - DNA, 25 bp, Homo sapien
tcagagtgatcaagcaagaagagcc

SEQ ID NO: 2210896 - DNA, 25 bp, Homo sapien
tgtcaagtcctagagcaaatctccg

SEQ ID NO: 2210897 - DNA, 25 bp, Homo sapien
gaggctggctaggaaagattctata

SEQ ID NO: 2210898 - DNA, 25 bp, Homo sapien
aaaatactatgagagaggacacggt

SEQ ID NO: 2210899 - DNA, 25 bp, Homo sapien
cctgtaaagccctctgtagtgattc

SEQ ID NO: 2210900 - DNA, 25 bp, Homo sapien
gacagaagccttgagggcaccaaca

SEQ ID NO: 2210901 - DNA, 25 bp, Homo sapien
tctgacgtagaactcaaaggatccg

SEQ ID NO: 2210902 - DNA, 25 bp, Homo sapien
cagcaatatggcagatggagtccgg

SEQ ID NO: 2210903 - DNA, 25 bp, Homo sapien
gatccgatgaccaagtaaatgtggg

SEQ ID NO: 2210904 - DNA, 25 bp, Homo sapien
tgctgagaacgagtctagcatgact

SEQ ID NO: 2210905 - DNA, 25 bp, Homo sapien
tagcatgactggactctagccacaa

SEQ ID NO: 2210906 - DNA, 25 bp, Homo sapien
tataatctaggcactctaggcacag

SEQ ID NO: 2210907 - DNA, 25 bp, Homo sapien
tccagccgacaccacttcttaagtg

SEQ ID NO: 2210908 - DNA, 25 bp, Homo sapien
tgagtgctagcctcacgcagtggct

SEQ ID NO: 2210909 - DNA, 25 bp, Homo sapien
cgtgtcccacgatcagttgcgctgt

SEQ ID NO: 2210910 - DNA, 25 bp, Homo sapien
caggataggcacaagcctggcacag

SEQ ID NO: 2210911 - DNA, 25 bp, Homo sapien
caagtagcccagcatggcgttccat

SEQ ID NO: 2210912 - DNA, 25 bp, Homo sapien
tctggtagccgccatagagccgcgg

SEQ ID NO: 2210913 - DNA, 25 bp, Homo sapien
gccacacacccaatccgtctggtag

SEQ ID NO: 2210914 - DNA, 25 bp, Homo sapien
ccaatccgtctggtagccgccatag

SEQ ID NO: 2210915 - DNA, 25 bp, Homo sapien
tagccgccatagagccgcggcagcg

SEQ ID NO: 2210916 - DNA, 25 bp, Homo sapien
ggtgatggtgccgaatcggccccgc

SEQ ID NO: 2210917 - DNA, 25 bp, Homo sapien
tgcgcgcgagttttaggaggtccac

SEQ ID NO: 2210918 - DNA, 25 bp, Homo sapien
tgctgctggcgcgagaccgtgcgcg

SEQ ID NO: 2210919 - DNA, 25 bp, Homo sapien
ggcgctagggctgcagtcggcggca

SEQ ID NO: 2210920 - DNA, 25 bp, Homo sapien
cgatagcggctgcgcaagcaggata

SEQ ID NO: 2210921 - DNA, 25 bp, Homo sapien
gataggcgacgatctgggcgcgaag

SEQ ID NO: 2210922 - DNA, 25 bp, Homo sapien
cgcaagcaggataggcgacgatctg

SEQ ID NO: 2210923 - DNA, 25 bp, Homo sapien
tcgtcggtgggcagacgcgatagcg

SEQ ID NO: 2210924 - DNA, 25 bp, Homo sapien
gcagcattttaataagataacatac

SEQ ID NO: 2210925 - DNA, 25 bp, Homo sapien
cccaattaagaaaggagagttcaca

SEQ ID NO: 2210926 - DNA, 25 bp, Homo sapien
ggtatgttctggaccgcaaacctca

SEQ ID NO: 2210927 - DNA, 25 bp, Homo sapien
ctttaggtgattgagcatgacagac

SEQ ID NO: 2210928 - DNA, 25 bp, Homo sapien
aaggcagatcacttggtttaccaaa

SEQ ID NO: 2210929 - DNA, 25 bp, Homo sapien
aaaatggcctgcataccacctcaga

SEQ ID NO: 2210930 - DNA, 25 bp, Homo sapien
taggagctattggtttgtacactcg

SEQ ID NO: 2210931 - DNA, 25 bp, Homo sapien
ctatttccagggtgacctgaaggca

SEQ ID NO: 2210932 - DNA, 25 bp, Homo sapien
catatattggctgtcagggttcctg

SEQ ID NO: 2210933 - DNA, 25 bp, Homo sapien
gccctttaggcacacagacgagaaa

SEQ ID NO: 2210934 - DNA, 25 bp, Homo sapien
gataggccattgctgaaggatttgt

SEQ ID NO: 2210935 - DNA, 25 bp, Homo sapien
aatatttcgctgtggtagttaaagc

SEQ ID NO: 2210936 - DNA, 25 bp, Homo sapien
caaagttataggcactggattgtct

SEQ ID NO: 2210937 - DNA, 25 bp, Homo sapien
tacaagcaggatggttaagtacaac

SEQ ID NO: 2210938 - DNA, 25 bp, Homo sapien
aacatggtggctggacatacagact

SEQ ID NO: 2210939 - DNA, 25 bp, Homo sapien
acttgtgcacccaaaacagcactga

SEQ ID NO: 2210940 - DNA, 25 bp, Homo sapien
gatgttacacccaacttcacagaca

SEQ ID NO: 2210941 - DNA, 25 bp, Homo sapien
ggagacagcagtacactattcacca

SEQ ID NO: 2210942 - DNA, 25 bp, Homo sapien
tgtatggctcggtgtaattacacaa

SEQ ID NO: 2210943 - DNA, 25 bp, Homo sapien
ccccacagtgatgagaataacattg

SEQ ID NO: 2210944 - DNA, 25 bp, Homo sapien
gataacccggttactgcagtcagca

SEQ ID NO: 2210945 - DNA, 25 bp, Homo sapien
gaatacggaggaaaatctgttaaca

SEQ ID NO: 2210946 - DNA, 25 bp, Homo sapien
tgtttactagtagacagaactccta

SEQ ID NO: 2210947 - DNA, 25 bp, Homo sapien
cacagactgagcattaggtaaccct

SEQ ID NO: 2210948 - DNA, 25 bp, Homo sapien
taagttttcgtcattacctggcaag

SEQ ID NO: 2210949 - DNA, 25 bp, Homo sapien
gaagatcccataagactctggctga

SEQ ID NO: 2210950 - DNA, 25 bp, Homo sapien
tctctgagaaccctgtaaagccagt

SEQ ID NO: 2210951 - DNA, 25 bp, Homo sapien
tagggtctactatctcactgcagga

SEQ ID NO: 2210952 - DNA, 25 bp, Homo sapien
cctactgctgtgatgacgggaaatc

SEQ ID NO: 2210953 - DNA, 25 bp, Homo sapien
tatactgacaaacgtgaggcattcc

SEQ ID NO: 2210954 - DNA, 25 bp, Homo sapien
aaggaagttgggacagctccacgga

SEQ ID NO: 2210955 - DNA, 25 bp, Homo sapien
cactgatgaagttggaaatgcctgc

SEQ ID NO: 2210956 - DNA, 25 bp, Homo sapien
gatgtgtagcccatagtagacggag

SEQ ID NO: 2210957 - DNA, 25 bp, Homo sapien
aatataatttgctcaaagacataat

SEQ ID NO: 2210958 - DNA, 25 bp, Homo sapien
aaaatataatttgctcaaagacata

SEQ ID NO: 2210959 - DNA, 25 bp, Homo sapien
tataatttgctcaaagacataatga

SEQ ID NO: 2210960 - DNA, 25 bp, Homo sapien
taatttgctcaaagacataatgaat

SEQ ID NO: 2210961 - DNA, 25 bp, Homo sapien
gctgcattactctccacacacagtg

SEQ ID NO: 2210962 - DNA, 25 bp, Homo sapien
aataagagaatttcctactgcttcc

SEQ ID NO: 2210963 - DNA, 25 bp, Homo sapien
cagcttgtgtaagtcatctgtgaac

SEQ ID NO: 2210964 - DNA, 25 bp, Homo sapien
ctggagactgttggcatgatgctgc

SEQ ID NO: 2210965 - DNA, 25 bp, Homo sapien
gcaagaagatcattggtccagactg

SEQ ID NO: 2210966 - DNA, 25 bp, Homo sapien
ggactgccaaatagctacacaactg

SEQ ID NO: 2210967 - DNA, 25 bp, Homo sapien
taagctggcctataaggacagacca

SEQ ID NO: 2210968 - DNA, 25 bp, Homo sapien
gaagaaagttgccagagggatgtct

SEQ ID NO: 2210969 - DNA, 25 bp, Homo sapien
tggtggaagccatcagaaccaatga

SEQ ID NO: 2210970 - DNA, 25 bp, Homo sapien
ccatcagaaccaatgacaatgacag

SEQ ID NO: 2210971 - DNA, 25 bp, Homo sapien
tggaagccatcagaaccaatgacaa

SEQ ID NO: 2210972 - DNA, 25 bp, Homo sapien
acagacaggatgagatccactgtca

SEQ ID NO: 2210973 - DNA, 25 bp, Homo sapien
tgggtccaaaatctctggctctcat

SEQ ID NO: 2210974 - DNA, 25 bp, Homo sapien
ctagggaggcaatatcctgggtcca

SEQ ID NO: 2210975 - DNA, 25 bp, Homo sapien
tagggaggcaatatcctgggtccaa

SEQ ID NO: 2210976 - DNA, 25 bp, Homo sapien
atatcctgggtccaaaatctctggc

SEQ ID NO: 2210977 - DNA, 25 bp, Homo sapien
tttccaactcatttataaggcagct

SEQ ID NO: 2210978 - DNA, 25 bp, Homo sapien
ttccaactcatttataaggcagctt

SEQ ID NO: 2210979 - DNA, 25 bp, Homo sapien
ccaactcatttataaggcagctttt

SEQ ID NO: 2210980 - DNA, 25 bp, Homo sapien
aactcatttataaggcagcttttcc

SEQ ID NO: 2210981 - DNA, 25 bp, Homo sapien
gggcggcttcgaagtttgcttttga

SEQ ID NO: 2210982 - DNA, 25 bp, Homo sapien
tatctttaattgaccgaaggcgttc

SEQ ID NO: 2210983 - DNA, 25 bp, Homo sapien
gaaggcgttcatagagctcctgcag

SEQ ID NO: 2210984 - DNA, 25 bp, Homo sapien
agatcttggtcgacgtggtgatgca

SEQ ID NO: 2210985 - DNA, 25 bp, Homo sapien
acagcattctattgacaaaatatat

SEQ ID NO: 2210986 - DNA, 25 bp, Homo sapien
aaaacagcattctattgacaaaata

SEQ ID NO: 2210987 - DNA, 25 bp, Homo sapien
caaaacagcattctattgacaaaat

SEQ ID NO: 2210988 - DNA, 25 bp, Homo sapien
aacagcattctattgacaaaatata

SEQ ID NO: 2210989 - DNA, 25 bp, Homo sapien
ctcgtaatctttgaagctccacctt

SEQ ID NO: 2210990 - DNA, 25 bp, Homo sapien
gattcatcatcactgctcattgggg

SEQ ID NO: 2210991 - DNA, 25 bp, Homo sapien
ttttctcgtaatctttgaagctcca

SEQ ID NO: 2210992 - DNA, 25 bp, Homo sapien
gaagatggcgaatagaagagtgaac

SEQ ID NO: 2210993 - DNA, 25 bp, Homo sapien
cagactgcatgctacttcctgtggc

SEQ ID NO: 2210994 - DNA, 25 bp, Homo sapien
cagtctcacaagctgcgctgaaaga

SEQ ID NO: 2210995 - DNA, 25 bp, Homo sapien
cactatcagagctaggctgtttccc

SEQ ID NO: 2210996 - DNA, 25 bp, Homo sapien
tagaatggtttgtctcactgaacac

SEQ ID NO: 2210997 - DNA, 25 bp, Homo sapien
gaaatgatccactcatcgctttaca

SEQ ID NO: 2210998 - DNA, 25 bp, Homo sapien
tattcaaagccctagtatcagctgt

SEQ ID NO: 2210999 - DNA, 25 bp, Homo sapien
gaatgggatcaggagcaattgctga

SEQ ID NO: 2211000 - DNA, 25 bp, Homo sapien
gaaccgaccccgctgaaatgatcca

SEQ ID NO: 2211001 - DNA, 25 bp, Homo sapien
ctgcaagttttgccaaattgtaagt

SEQ ID NO: 2211002 - DNA, 25 bp, Homo sapien
gcaagttttgccaaattgtaagtaa

SEQ ID NO: 2211003 - DNA, 25 bp, Homo sapien
tgcaagttttgccaaattgtaagta

SEQ ID NO: 2211004 - DNA, 25 bp, Homo sapien
tgccaaattgtaagtaaaaaagaga

SEQ ID NO: 2211005 - DNA, 25 bp, Homo sapien
tagtctatgtccctgactgtaagca

SEQ ID NO: 2211006 - DNA, 25 bp, Homo sapien
tctatgtccctgactgtaagcacac

SEQ ID NO: 2211007 - DNA, 25 bp, Homo sapien
ctagtctatgtccctgactgtaagc

SEQ ID NO: 2211008 - DNA, 25 bp, Homo sapien
gtctatgtccctgactgtaagcaca

SEQ ID NO: 2211009 - DNA, 25 bp, Homo sapien
tttttgagactaggacaagtaaagc

SEQ ID NO: 2211010 - DNA, 25 bp, Homo sapien
caagtaaagcttaggccaaaatatc

SEQ ID NO: 2211011 - DNA, 25 bp, Homo sapien
tgaaaaagctggttgactgccgtag

SEQ ID NO: 2211012 - DNA, 25 bp, Homo sapien
agctttttaatttgcgagtccagga

SEQ ID NO: 2211013 - DNA, 25 bp, Homo sapien
gatgaatggctccaccgcttgacac

SEQ ID NO: 2211014 - DNA, 25 bp, Homo sapien
agcaggataggcctctggatcccct

SEQ ID NO: 2211015 - DNA, 25 bp, Homo sapien
ggataggcctctggatcccctggaa

SEQ ID NO: 2211016 - DNA, 25 bp, Homo sapien
cctgtctgcagatgaatggctccac

SEQ ID NO: 2211017 - DNA, 25 bp, Homo sapien
atcagcctgtcgtggtggtgcctgc

SEQ ID NO: 2211018 - DNA, 25 bp, Homo sapien
tacagggctatctttaattccacag

SEQ ID NO: 2211019 - DNA, 25 bp, Homo sapien
gatatattagcaggctgacttgcag

SEQ ID NO: 2211020 - DNA, 25 bp, Homo sapien
gtaaacacaattcgctgggtacaga

SEQ ID NO: 2211021 - DNA, 25 bp, Homo sapien
gactgtcttaggagaacttgcttca

SEQ ID NO: 2211022 - DNA, 25 bp, Homo sapien
cacttgataaagtatagctggctgc

SEQ ID NO: 2211023 - DNA, 25 bp, Homo sapien
cataagtgcatcagcctgactggca

SEQ ID NO: 2211024 - DNA, 25 bp, Homo sapien
gcttgcttgtttggtgagtccctca

SEQ ID NO: 2211025 - DNA, 25 bp, Homo sapien
tctgagttgattcgccaggatggga

SEQ ID NO: 2211026 - DNA, 25 bp, Homo sapien
gtgcacggtggcatggattattttc

SEQ ID NO: 2211027 - DNA, 25 bp, Homo sapien
gatttggaggtgaaaagtgcacggt

SEQ ID NO: 2211028 - DNA, 25 bp, Homo sapien
tttctatagtgagcaatgtgtcccg

SEQ ID NO: 2211029 - DNA, 25 bp, Homo sapien
caatgtgtcccgtgatatttcctta

SEQ ID NO: 2211030 - DNA, 25 bp, Homo sapien
gatgtcggccaggaaccgcagacat

SEQ ID NO: 2211031 - DNA, 25 bp, Homo sapien
ggccaggaaccgcagacatggaatg

SEQ ID NO: 2211032 - DNA, 25 bp, Homo sapien
aagtggatgtcggccaggaaccgca

SEQ ID NO: 2211033 - DNA, 25 bp, Homo sapien
taggaagtggatgtcggccaggaac

SEQ ID NO: 2211034 - DNA, 25 bp, Homo sapien
tatcgtctgattgatacagaatcgc

SEQ ID NO: 2211035 - DNA, 25 bp, Homo sapien
gagtctcacggtttcttatcgtctg

SEQ ID NO: 2211036 - DNA, 25 bp, Homo sapien
acagaatcgccaccgaccaactggg

SEQ ID NO: 2211037 - DNA, 25 bp, Homo sapien
accaactggggatgactgaggagca

SEQ ID NO: 2211038 - DNA, 25 bp, Homo sapien
tatctgtacttgttcagatgaccct

SEQ ID NO: 2211039 - DNA, 25 bp, Homo sapien
ttatctgtacttgttcagatgaccc

SEQ ID NO: 2211040 - DNA, 25 bp, Homo sapien
tctgtggcaaagtggacatgaagga

SEQ ID NO: 2211041 - DNA, 25 bp, Homo sapien
ggctactgttggagtccacagtaat

SEQ ID NO: 2211042 - DNA, 25 bp, Homo sapien
ttctgtggcaaagtggacatgaagg

SEQ ID NO: 2211043 - DNA, 25 bp, Homo sapien
ccacagtaatagaatcaactccagt

SEQ ID NO: 2211044 - DNA, 25 bp, Homo sapien
tatagtctgcaatatcctctggcgc

SEQ ID NO: 2211045 - DNA, 25 bp, Homo sapien
atcaccatcaacatcaaacttgaag

SEQ ID NO: 2211046 - DNA, 25 bp, Homo sapien
tccagctgacactctaccatgttat

SEQ ID NO: 2211047 - DNA, 25 bp, Homo sapien
gaccatcttgttgttgtgtgtctcc

SEQ ID NO: 2211048 - DNA, 25 bp, Homo sapien
ctgacgttttccttcgtagttgcca

SEQ ID NO: 2211049 - DNA, 25 bp, Homo sapien
gccatttccacttgggttatcaggg

SEQ ID NO: 2211050 - DNA, 25 bp, Homo sapien
ggaagctcttctctgtttgatccga

SEQ ID NO: 2211051 - DNA, 25 bp, Homo sapien
gctgaaatttagtccccttctctgg

SEQ ID NO: 2211052 - DNA, 25 bp, Homo sapien
atctggttttagaagagctgcttgt

SEQ ID NO: 2211053 - DNA, 25 bp, Homo sapien
gaacaaactgaacgtagagaatctt

SEQ ID NO: 2211054 - DNA, 25 bp, Homo sapien
tctgaacaaactgaacgtagagaat

SEQ ID NO: 2211055 - DNA, 25 bp, Homo sapien
agtgttatacacatcaacagagtcc

SEQ ID NO: 2211056 - DNA, 25 bp, Homo sapien
gaatcttttgccaattaatgtcagt

SEQ ID NO: 2211057 - DNA, 25 bp, Homo sapien
tctgctcagggttttgaagctgtcc

SEQ ID NO: 2211058 - DNA, 25 bp, Homo sapien
tagctgctggtgtccaaaactgaca

SEQ ID NO: 2211059 - DNA, 25 bp, Homo sapien
gatataatgctagttgcctgggcct

SEQ ID NO: 2211060 - DNA, 25 bp, Homo sapien
tctgcttgggatggagtcgctgaaa

SEQ ID NO: 2211061 - DNA, 25 bp, Homo sapien
ggagaacataatcctgctgaacatt

SEQ ID NO: 2211062 - DNA, 25 bp, Homo sapien
gactcttggagaacataatcctgct

SEQ ID NO: 2211063 - DNA, 25 bp, Homo sapien
gttgctgacttgcaagagcttcaga

SEQ ID NO: 2211064 - DNA, 25 bp, Homo sapien
aagagcttcagactcttggagaaca

SEQ ID NO: 2211065 - DNA, 25 bp, Homo sapien
gcttggaaacaatactccttgcaca

SEQ ID NO: 2211066 - DNA, 25 bp, Homo sapien
tgctgaatacaagcttggaaacaat

SEQ ID NO: 2211067 - DNA, 25 bp, Homo sapien
caatactccttgcacagtctggctt

SEQ ID NO: 2211068 - DNA, 25 bp, Homo sapien
gaatacaagcttggaaacaatactc

SEQ ID NO: 2211069 - DNA, 25 bp, Homo sapien
gattcccatttctaggatcacgctc

SEQ ID NO: 2211070 - DNA, 25 bp, Homo sapien
aacaaagcttgagggtgattaaccg

SEQ ID NO: 2211071 - DNA, 25 bp, Homo sapien
agaccaactgttggatgctgggaag

SEQ ID NO: 2211072 - DNA, 25 bp, Homo sapien
ctaggatcacgctcaagttgaagac

SEQ ID NO: 2211073 - DNA, 25 bp, Homo sapien
tggactgaccttgaaccaaaggcaa

SEQ ID NO: 2211074 - DNA, 25 bp, Homo sapien
caaaatctgcggctgagtcagcttt

SEQ ID NO: 2211075 - DNA, 25 bp, Homo sapien
tgtgaaacaactgtcggtccaagga

SEQ ID NO: 2211076 - DNA, 25 bp, Homo sapien
ctttatctgtgggaccttctgaaca

SEQ ID NO: 2211077 - DNA, 25 bp, Homo sapien
gaatgtataactgatgcagctcctg

SEQ ID NO: 2211078 - DNA, 25 bp, Homo sapien
gaataggctacactgggctgacttg

SEQ ID NO: 2211079 - DNA, 25 bp, Homo sapien
tcagcctgcgggatattagaaacca

SEQ ID NO: 2211080 - DNA, 25 bp, Homo sapien
ttagaaaccatttgagagcccatcg

SEQ ID NO: 2211081 - DNA, 25 bp, Homo sapien
tagacttgcactgagaatccctgcg

SEQ ID NO: 2211082 - DNA, 25 bp, Homo sapien
tcactttcatggaagaacccagact

SEQ ID NO: 2211083 - DNA, 25 bp, Homo sapien
cattcagccccagtttgctgagcgg

SEQ ID NO: 2211084 - DNA, 25 bp, Homo sapien
tgtcttctttattggcgtcacccgg

SEQ ID NO: 2211085 - DNA, 25 bp, Homo sapien
aagtcttaagtaggagcacgctgca

SEQ ID NO: 2211086 - DNA, 25 bp, Homo sapien
tctacaatgtgcacagtactaggca

SEQ ID NO: 2211087 - DNA, 25 bp, Homo sapien
tgtatgagcacactatcaggtggtg

SEQ ID NO: 2211088 - DNA, 25 bp, Homo sapien
gcacgctgcatctctgaaggtaata

SEQ ID NO: 2211089 - DNA, 25 bp, Homo sapien
ttattctttatactctacatacaaa

SEQ ID NO: 2211090 - DNA, 25 bp, Homo sapien
ggtagatattactcatggtgatgag

SEQ ID NO: 2211091 - DNA, 25 bp, Homo sapien
gcgatatagttcacaacaacataac

SEQ ID NO: 2211092 - DNA, 25 bp, Homo sapien
tacactgtcacagcgatatagttca

SEQ ID NO: 2211093 - DNA, 25 bp, Homo sapien
tcctcaggtgtatctgtttctaagt

SEQ ID NO: 2211094 - DNA, 25 bp, Homo sapien
catatgctacttcctcaggtgtatc

SEQ ID NO: 2211095 - DNA, 25 bp, Homo sapien
caggtgtatctgtttctaagttgaa

SEQ ID NO: 2211096 - DNA, 25 bp, Homo sapien
gctacttcctcaggtgtatctgttt

SEQ ID NO: 2211097 - DNA, 25 bp, Homo sapien
aaatgcatggtttaataggtccctg

SEQ ID NO: 2211098 - DNA, 25 bp, Homo sapien
cttaaagcaagggatgaatttgagc

SEQ ID NO: 2211099 - DNA, 25 bp, Homo sapien
tcttcttctgctaactccaccctca

SEQ ID NO: 2211100 - DNA, 25 bp, Homo sapien
ggatgaatttgagcaatcatcttct

SEQ ID NO: 2211101 - DNA, 25 bp, Homo sapien
gatcagtgactttattgaagctggc

SEQ ID NO: 2211102 - DNA, 25 bp, Homo sapien
caggatcagtgactttattgaagct

SEQ ID NO: 2211103 - DNA, 25 bp, Homo sapien
ctttcagatttgttttgacgaatac

SEQ ID NO: 2211104 - DNA, 25 bp, Homo sapien
gacgaatacatccttcaatgatttc

SEQ ID NO: 2211105 - DNA, 25 bp, Homo sapien
gcagggacccaaatactgtatctat

SEQ ID NO: 2211106 - DNA, 25 bp, Homo sapien
atgtaagctctttagggtagcaaac

SEQ ID NO: 2211107 - DNA, 25 bp, Homo sapien
caaaaatttactcatagcagggacc

SEQ ID NO: 2211108 - DNA, 25 bp, Homo sapien
gagctgcccaactggatatgaagca

SEQ ID NO: 2211109 - DNA, 25 bp, Homo sapien
tgacactcagaataaggatactccg

SEQ ID NO: 2211110 - DNA, 25 bp, Homo sapien
tccgatgtggccatttccagcatac

SEQ ID NO: 2211111 - DNA, 25 bp, Homo sapien
gaataaggatactccgatgtggcca

SEQ ID NO: 2211112 - DNA, 25 bp, Homo sapien
taaacatctacggattcatcatagt

SEQ ID NO: 2211113 - DNA, 25 bp, Homo sapien
ctctggagccataaactcaggagtt

SEQ ID NO: 2211114 - DNA, 25 bp, Homo sapien
tctggagccataaactcaggagttc

SEQ ID NO: 2211115 - DNA, 25 bp, Homo sapien
tacaaaataacaccaccaccacatt

SEQ ID NO: 2211116 - DNA, 25 bp, Homo sapien
ctacaaaataacaccaccaccacat

SEQ ID NO: 2211117 - DNA, 25 bp, Homo sapien
caatgacactcttagcaaatgaggt

SEQ ID NO: 2211118 - DNA, 25 bp, Homo sapien
aaatgaggtacgcattaaggtggct

SEQ ID NO: 2211119 - DNA, 25 bp, Homo sapien
cactcttagcaaatgaggtacgcat

SEQ ID NO: 2211120 - DNA, 25 bp, Homo sapien
cattaaggtggctaatcctagatca

SEQ ID NO: 2211121 - DNA, 25 bp, Homo sapien
agatcccggtgaataataggaggag

SEQ ID NO: 2211122 - DNA, 25 bp, Homo sapien
atcccggtgaataataggaggagtc

SEQ ID NO: 2211123 - DNA, 25 bp, Homo sapien
cagatcccggtgaataataggagga

SEQ ID NO: 2211124 - DNA, 25 bp, Homo sapien
gatcccggtgaataataggaggagt

SEQ ID NO: 2211125 - DNA, 25 bp, Homo sapien
gtgtgcaagaactgcaaccccttta

SEQ ID NO: 2211126 - DNA, 25 bp, Homo sapien
gtgcaagaactgcaacccctttaaa

SEQ ID NO: 2211127 - DNA, 25 bp, Homo sapien
tgtgcaagaactgcaacccctttaa

SEQ ID NO: 2211128 - DNA, 25 bp, Homo sapien
aatcgaactatattggggtgctgga

SEQ ID NO: 2211129 - DNA, 25 bp, Homo sapien
tgctggagacccttcaacatctctg

SEQ ID NO: 2211130 - DNA, 25 bp, Homo sapien
tctttaaggtcccagatgtcattag

SEQ ID NO: 2211131 - DNA, 25 bp, Homo sapien
tagttcagtcactaatacaatacat

SEQ ID NO: 2211132 - DNA, 25 bp, Homo sapien
tattacaagcacactcaaatacatt

SEQ ID NO: 2211133 - DNA, 25 bp, Homo sapien
tcaaatctctatgatgtttctatat

SEQ ID NO: 2211134 - DNA, 25 bp, Homo sapien
atctgaccacagagtgaggcttatt

SEQ ID NO: 2211135 - DNA, 25 bp, Homo sapien
aagtacacaatcacatatctgacca

SEQ ID NO: 2211136 - DNA, 25 bp, Homo sapien
attataaccaagaagattatatacc

SEQ ID NO: 2211137 - DNA, 25 bp, Homo sapien
ataaccaagaagattatatacctac

SEQ ID NO: 2211138 - DNA, 25 bp, Homo sapien
ttataaccaagaagattatatacct

SEQ ID NO: 2211139 - DNA, 25 bp, Homo sapien
tataaccaagaagattatataccta

SEQ ID NO: 2211140 - DNA, 25 bp, Homo sapien
ggctggatcccctgaatcagtggcc

SEQ ID NO: 2211141 - DNA, 25 bp, Homo sapien
tcaacccatgtttcagtgtccagtc

SEQ ID NO: 2211142 - DNA, 25 bp, Homo sapien
tactgtcaaagttgcagcgacctgg

SEQ ID NO: 2211143 - DNA, 25 bp, Homo sapien
tgccactaggagaagtagctacagc

SEQ ID NO: 2211144 - DNA, 25 bp, Homo sapien
catctcaggtatcagaattatcaga

SEQ ID NO: 2211145 - DNA, 25 bp, Homo sapien
ggtatcagaattatcagaatggact

SEQ ID NO: 2211146 - DNA, 25 bp, Homo sapien
tcagaatggacttccttttgcgtgg

SEQ ID NO: 2211147 - DNA, 25 bp, Homo sapien
ttcagtccagttacatctcaggtat

SEQ ID NO: 2211148 - DNA, 25 bp, Homo sapien
aatagagatcatctctatcttgagg

SEQ ID NO: 2211149 - DNA, 25 bp, Homo sapien
tagagatcatctctatcttgaggtt

SEQ ID NO: 2211150 - DNA, 25 bp, Homo sapien
agagatcatctctatcttgaggttc

SEQ ID NO: 2211151 - DNA, 25 bp, Homo sapien
gagatcatctctatcttgaggttca

SEQ ID NO: 2211152 - DNA, 25 bp, Homo sapien
tccactatctctaatctacaccaaa

SEQ ID NO: 2211153 - DNA, 25 bp, Homo sapien
tgtccacatctctccgtctccacta

SEQ ID NO: 2211154 - DNA, 25 bp, Homo sapien
taatctacaccaaaccaccattgtc

SEQ ID NO: 2211155 - DNA, 25 bp, Homo sapien
caccattgtctcttgtttgaacttt

SEQ ID NO: 2211156 - DNA, 25 bp, Homo sapien
gtttgttcatattgaccatgctggt

SEQ ID NO: 2211157 - DNA, 25 bp, Homo sapien
tttgttcatattgaccatgctggtc

SEQ ID NO: 2211158 - DNA, 25 bp, Homo sapien
gcatattcccctgggcctttagtta

SEQ ID NO: 2211159 - DNA, 25 bp, Homo sapien
tacagtgtcttttgggtgcggtcat

SEQ ID NO: 2211160 - DNA, 25 bp, Homo sapien
agttaacatccgagtgacgaagccg

SEQ ID NO: 2211161 - DNA, 25 bp, Homo sapien
cgaagccgggttccccagtacagtg

SEQ ID NO: 2211162 - DNA, 25 bp, Homo sapien
tagttgccaccccacgtggagttgt

SEQ ID NO: 2211163 - DNA, 25 bp, Homo sapien
taattcaggtaggactggcaacggc

SEQ ID NO: 2211164 - DNA, 25 bp, Homo sapien
cccagcattcgggattgaaagtgcc

SEQ ID NO: 2211165 - DNA, 25 bp, Homo sapien
tgggtctggacgataaaatactggg

SEQ ID NO: 2211166 - DNA, 25 bp, Homo sapien
ggtcccacctcgaagccaatgaggg

SEQ ID NO: 2211167 - DNA, 25 bp, Homo sapien
atccagcgtcgctgtagttcctctg

SEQ ID NO: 2211168 - DNA, 25 bp, Homo sapien
gcacagccatccagcgtcgctgtag

SEQ ID NO: 2211169 - DNA, 25 bp, Homo sapien
tgtctcagggctgaagtaccagctg

SEQ ID NO: 2211170 - DNA, 25 bp, Homo sapien
caaattggacctagcagttccccat

SEQ ID NO: 2211171 - DNA, 25 bp, Homo sapien
tactcttacccactccaaattggac

SEQ ID NO: 2211172 - DNA, 25 bp, Homo sapien
tttcctcttagagataggctcacct

SEQ ID NO: 2211173 - DNA, 25 bp, Homo sapien
ctgaaaggacccgaaggagtaggat

SEQ ID NO: 2211174 - DNA, 25 bp, Homo sapien
gaccacgaaccatgccttgtgccat

SEQ ID NO: 2211175 - DNA, 25 bp, Homo sapien
tatacagcaccaagggttcattttc

SEQ ID NO: 2211176 - DNA, 25 bp, Homo sapien
tcattttcagggaccacgaaccatg

SEQ ID NO: 2211177 - DNA, 25 bp, Homo sapien
gggctccgtagatatacagcaccaa

SEQ ID NO: 2211178 - DNA, 25 bp, Homo sapien
aggcaccccgtgcaaggccacatag

SEQ ID NO: 2211179 - DNA, 25 bp, Homo sapien
acatagcaatcagtgcacacacggt

SEQ ID NO: 2211180 - DNA, 25 bp, Homo sapien
cacacggttggagcggttgttgtca

SEQ ID NO: 2211181 - DNA, 25 bp, Homo sapien
ttgttgtcatagacgaggcgggccc

SEQ ID NO: 2211182 - DNA, 25 bp, Homo sapien
ctagctctgcccctgcctcccaaca

SEQ ID NO: 2211183 - DNA, 25 bp, Homo sapien
agctctgcccctgcctcccaacact

SEQ ID NO: 2211184 - DNA, 25 bp, Homo sapien
tctgcccctgcctcccaacactcac

SEQ ID NO: 2211185 - DNA, 25 bp, Homo sapien
ctctgcccctgcctcccaacactca

SEQ ID NO: 2211186 - DNA, 25 bp, Homo sapien
gtaggtgcccgcttcccaagatcca

SEQ ID NO: 2211187 - DNA, 25 bp, Homo sapien
tgcctgcgtttggtgatagaattga

SEQ ID NO: 2211188 - DNA, 25 bp, Homo sapien
gatgggcgtaggtgcccgcttccca

SEQ ID NO: 2211189 - DNA, 25 bp, Homo sapien
caggccttgcagtggtgcctgcgtt

SEQ ID NO: 2211190 - DNA, 25 bp, Homo sapien
catgcattgcctctctggtcattac

SEQ ID NO: 2211191 - DNA, 25 bp, Homo sapien
caatggaagactgcttctgaagtca

SEQ ID NO: 2211192 - DNA, 25 bp, Homo sapien
ctgaagtcatgcattgcctctctgg

SEQ ID NO: 2211193 - DNA, 25 bp, Homo sapien
ctgcttctgaagtcatgcattgcct

SEQ ID NO: 2211194 - DNA, 25 bp, Homo sapien
ctgtttgttgagttcaacagtttga

SEQ ID NO: 2211195 - DNA, 25 bp, Homo sapien
gtttgaaagtctccagcgtctgttc

SEQ ID NO: 2211196 - DNA, 25 bp, Homo sapien
tgagttcaacagtttgaaagtctcc

SEQ ID NO: 2211197 - DNA, 25 bp, Homo sapien
gtctccagcgtctgttcatgcttca

SEQ ID NO: 2211198 - DNA, 25 bp, Homo sapien
cttatacaccctcagagaaaccagc

SEQ ID NO: 2211199 - DNA, 25 bp, Homo sapien
tatacaccctcagagaaaccagctt

SEQ ID NO: 2211200 - DNA, 25 bp, Homo sapien
atacaccctcagagaaaccagcttc

SEQ ID NO: 2211201 - DNA, 25 bp, Homo sapien
ttatacaccctcagagaaaccagct

SEQ ID NO: 2211202 - DNA, 25 bp, Homo sapien
ggacccagtctttcttctcctcctc

SEQ ID NO: 2211203 - DNA, 25 bp, Homo sapien
acccagtctttcttctcctcctcag

SEQ ID NO: 2211204 - DNA, 25 bp, Homo sapien
ccagtctttcttctcctcctcagtc

SEQ ID NO: 2211205 - DNA, 25 bp, Homo sapien
ctggacccagtctttcttctcctcc

SEQ ID NO: 2211206 - DNA, 25 bp, Homo sapien
agggagcgctgctttcctgacacca

SEQ ID NO: 2211207 - DNA, 25 bp, Homo sapien
gagctcgagggagcgctgctttcct

SEQ ID NO: 2211208 - DNA, 25 bp, Homo sapien
cagattgaggttggagctctccttt

SEQ ID NO: 2211209 - DNA, 25 bp, Homo sapien
caggaaggttcgaggcagattgagg

SEQ ID NO: 2211210 - DNA, 25 bp, Homo sapien
tgccccactccaagttcccatttcc

SEQ ID NO: 2211211 - DNA, 25 bp, Homo sapien
agactcggggtcaaagccagcatct

SEQ ID NO: 2211212 - DNA, 25 bp, Homo sapien
catttcccacctcttggatgcttac

SEQ ID NO: 2211213 - DNA, 25 bp, Homo sapien
atctttgttcctcccaacaccaatg

SEQ ID NO: 2211214 - DNA, 25 bp, Homo sapien
tccatgccatctacatcaatgcgtg

SEQ ID NO: 2211215 - DNA, 25 bp, Homo sapien
ccgcacgctaaacttctggccaagg

SEQ ID NO: 2211216 - DNA, 25 bp, Homo sapien
tgcgtgcccgcacgctaaacttctg

SEQ ID NO: 2211217 - DNA, 25 bp, Homo sapien
tacatcaatgcgtgcccgcacgcta

SEQ ID NO: 2211218 - DNA, 25 bp, Homo sapien
ctgggcacgcagtaaaggaggcggt

SEQ ID NO: 2211219 - DNA, 25 bp, Homo sapien
cacgcagtaaaggaggcggtcgttg

SEQ ID NO: 2211220 - DNA, 25 bp, Homo sapien
ggcacgcagtaaaggaggcggtcgt

SEQ ID NO: 2211221 - DNA, 25 bp, Homo sapien
cgcagtaaaggaggcggtcgttgaa

SEQ ID NO: 2211222 - DNA, 25 bp, Homo sapien
taacagctcatataccttcagcagc

SEQ ID NO: 2211223 - DNA, 25 bp, Homo sapien
taccttcagcagcttatgcattcgc

SEQ ID NO: 2211224 - DNA, 25 bp, Homo sapien
tgctgacagcttaaggatgtggcct

SEQ ID NO: 2211225 - DNA, 25 bp, Homo sapien
tagtatgaggtatcggtcttgagtg

SEQ ID NO: 2211226 - DNA, 25 bp, Homo sapien
tgcggatggcagcattcgagtgctc

SEQ ID NO: 2211227 - DNA, 25 bp, Homo sapien
tgctgctgtggcgatcagctccaga

SEQ ID NO: 2211228 - DNA, 25 bp, Homo sapien
gctgtggcgatcagctccagagact

SEQ ID NO: 2211229 - DNA, 25 bp, Homo sapien
gcagcattcgagtgctctgctgctg

SEQ ID NO: 2211230 - DNA, 25 bp, Homo sapien
taacagatagtccttgagaagaagc

SEQ ID NO: 2211231 - DNA, 25 bp, Homo sapien
gccatggggcagctttaacagatag

SEQ ID NO: 2211232 - DNA, 25 bp, Homo sapien
tggtgctgcaatgtcaggttgccac

SEQ ID NO: 2211233 - DNA, 25 bp, Homo sapien
ctcatagcgggggatgcgctgcaca

SEQ ID NO: 2211234 - DNA, 25 bp, Homo sapien
gcaggatgtctccaatgcgtggata

SEQ ID NO: 2211235 - DNA, 25 bp, Homo sapien
tggagcgctctgtccaggtgttgac

SEQ ID NO: 2211236 - DNA, 25 bp, Homo sapien
tccacggcccggtcaaagttcttca

SEQ ID NO: 2211237 - DNA, 25 bp, Homo sapien
tgactttaaactgggtggagcgctc

SEQ ID NO: 2211238 - DNA, 25 bp, Homo sapien
tcctccatgcgcttctctagctcag

SEQ ID NO: 2211239 - DNA, 25 bp, Homo sapien
catgcgcttctctagctcaggcagc

SEQ ID NO: 2211240 - DNA, 25 bp, Homo sapien
cattcctccatgcgcttctctagct

SEQ ID NO: 2211241 - DNA, 25 bp, Homo sapien
gcgcttctctagctcaggcagcagg

SEQ ID NO: 2211242 - DNA, 25 bp, Homo sapien
aagatgccgtggacaacgtcggccg

SEQ ID NO: 2211243 - DNA, 25 bp, Homo sapien
agatgttagagaagatgccgtggac

SEQ ID NO: 2211244 - DNA, 25 bp, Homo sapien
ctgcggttccgagcttcttccagca

SEQ ID NO: 2211245 - DNA, 25 bp, Homo sapien
gaaggaactgcggttccgagcttct

SEQ ID NO: 2211246 - DNA, 25 bp, Homo sapien
agatggagcctggaaacgtaggcct

SEQ ID NO: 2211247 - DNA, 25 bp, Homo sapien
tggagcctggaaacgtaggccttct

SEQ ID NO: 2211248 - DNA, 25 bp, Homo sapien
ttgcaggagctcattggcaatgtga

SEQ ID NO: 2211249 - DNA, 25 bp, Homo sapien
gaaacaccttttgctgcacagtcaa

SEQ ID NO: 2211250 - DNA, 25 bp, Homo sapien
actatcagcaagggcttgctgagta

SEQ ID NO: 2211251 - DNA, 25 bp, Homo sapien
ctatcagcaagggcttgctgagtac

SEQ ID NO: 2211252 - DNA, 25 bp, Homo sapien
ttggtcctagcagagcaagtattcc

SEQ ID NO: 2211253 - DNA, 25 bp, Homo sapien
catgccggcagtccctggctttggc

SEQ ID NO: 2211254 - DNA, 25 bp, Homo sapien
aactcaagtgcgatggtgccttctg

SEQ ID NO: 2211255 - DNA, 25 bp, Homo sapien
cggctgagatctaactcaagtgcga

SEQ ID NO: 2211256 - DNA, 25 bp, Homo sapien
ctccacagactcctgtctctccatc

SEQ ID NO: 2211257 - DNA, 25 bp, Homo sapien
acagactcctgtctctccatcaggg

SEQ ID NO: 2211258 - DNA, 25 bp, Homo sapien
ccacagactcctgtctctccatcag

SEQ ID NO: 2211259 - DNA, 25 bp, Homo sapien
cagactcctgtctctccatcagggg

SEQ ID NO: 2211260 - DNA, 25 bp, Homo sapien
tcgtcgtcctcctcctccaggtcac

SEQ ID NO: 2211261 - DNA, 25 bp, Homo sapien
tcctcgtcgtcctcctcctccaggt

SEQ ID NO: 2211262 - DNA, 25 bp, Homo sapien
ctgggatttctctgtccttctcttc

SEQ ID NO: 2211263 - DNA, 25 bp, Homo sapien
ttcctcctcctcctcgtcgtcctcc

SEQ ID NO: 2211264 - DNA, 25 bp, Homo sapien
gggtcggccaaggcaacaggcacac

SEQ ID NO: 2211265 - DNA, 25 bp, Homo sapien
gagccaggccggtgggggtcggcca

SEQ ID NO: 2211266 - DNA, 25 bp, Homo sapien
ctcttgggagccaggccggtggggg

SEQ ID NO: 2211267 - DNA, 25 bp, Homo sapien
gtgggggtcggccaaggcaacaggc

SEQ ID NO: 2211268 - DNA, 25 bp, Homo sapien
ggctggggggcccgtcatcactgac

SEQ ID NO: 2211269 - DNA, 25 bp, Homo sapien
tggctggggggcccgtcatcactga

SEQ ID NO: 2211270 - DNA, 25 bp, Homo sapien
tgtggctggggggcccgtcatcact

SEQ ID NO: 2211271 - DNA, 25 bp, Homo sapien
gctgtggctggggggcccgtcatca

SEQ ID NO: 2211272 - DNA, 25 bp, Homo sapien
tctcctcgctgttggatggcgagct

SEQ ID NO: 2211273 - DNA, 25 bp, Homo sapien
caggagccagcagaaacaggcagcg

SEQ ID NO: 2211274 - DNA, 25 bp, Homo sapien
gctgtcccggttgggcaccttctca

SEQ ID NO: 2211275 - DNA, 25 bp, Homo sapien
tgatgctatcaatgccgctgtcccg

SEQ ID NO: 2211276 - DNA, 25 bp, Homo sapien
gtggctgcgaggttggctgtggcaa

SEQ ID NO: 2211277 - DNA, 25 bp, Homo sapien
ggctgcgaggttggctgtggcaaca

SEQ ID NO: 2211278 - DNA, 25 bp, Homo sapien
ctggtggctgcgaggttggctgtgg

SEQ ID NO: 2211279 - DNA, 25 bp, Homo sapien
tggtggctgcgaggttggctgtggc

SEQ ID NO: 2211280 - DNA, 25 bp, Homo sapien
ctatccgaggcgacaatcacaggct

SEQ ID NO: 2211281 - DNA, 25 bp, Homo sapien
tatccgaggcgacaatcacaggctc

SEQ ID NO: 2211282 - DNA, 25 bp, Homo sapien
aagcagggtatgagcttgactgaga

SEQ ID NO: 2211283 - DNA, 25 bp, Homo sapien
ctgaggtgggtggtggacacacatg

SEQ ID NO: 2211284 - DNA, 25 bp, Homo sapien
gaagcagggtatgagcttgactgag

SEQ ID NO: 2211285 - DNA, 25 bp, Homo sapien
ggtggtggacacacatggaagcagg

SEQ ID NO: 2211286 - DNA, 25 bp, Homo sapien
tctcaatcagtgaggatactgctgc

SEQ ID NO: 2211287 - DNA, 25 bp, Homo sapien
caggcccttggccactcgggggtcg

SEQ ID NO: 2211288 - DNA, 25 bp, Homo sapien
aggcagtgggcgtgatggtggaggg

SEQ ID NO: 2211289 - DNA, 25 bp, Homo sapien
ttcaaacttctcaatcagtgaggat

SEQ ID NO: 2211290 - DNA, 25 bp, Homo sapien
cagtggtgaaggacgctggctaggg

SEQ ID NO: 2211291 - DNA, 25 bp, Homo sapien
cccggtgcccgcttcagtggtgaag

SEQ ID NO: 2211292 - DNA, 25 bp, Homo sapien
gctctaggctttggccagggtcaag

SEQ ID NO: 2211293 - DNA, 25 bp, Homo sapien
ggacctgggtctgagcgaagccgct

SEQ ID NO: 2211294 - DNA, 25 bp, Homo sapien
tatctttggctctagaggagatgat

SEQ ID NO: 2211295 - DNA, 25 bp, Homo sapien
tctttggctctagaggagatgatgg

SEQ ID NO: 2211296 - DNA, 25 bp, Homo sapien
ctctatctttggctctagaggagat

SEQ ID NO: 2211297 - DNA, 25 bp, Homo sapien
tttggctctagaggagatgatggtc

SEQ ID NO: 2211298 - DNA, 25 bp, Homo sapien
acgatcacacagcctcgcagtatca

SEQ ID NO: 2211299 - DNA, 25 bp, Homo sapien
acacacgatcacacagcctcgcagt

SEQ ID NO: 2211300 - DNA, 25 bp, Homo sapien
acacgatcacacagcctcgcagtat

SEQ ID NO: 2211301 - DNA, 25 bp, Homo sapien
gatcacacagcctcgcagtatcaca

SEQ ID NO: 2211302 - DNA, 25 bp, Homo sapien
ttctctctgcctccttgcaggcagc

SEQ ID NO: 2211303 - DNA, 25 bp, Homo sapien
gaaccttctgtaactccctactgtc

SEQ ID NO: 2211304 - DNA, 25 bp, Homo sapien
ccttctgtaactccctactgtccat

SEQ ID NO: 2211305 - DNA, 25 bp, Homo sapien
accttctgtaactccctactgtcca

SEQ ID NO: 2211306 - DNA, 25 bp, Homo sapien
tagctctgcagatcagggcaggatt

SEQ ID NO: 2211307 - DNA, 25 bp, Homo sapien
caggatagctctgcagatcagggca

SEQ ID NO: 2211308 - DNA, 25 bp, Homo sapien
agctctgcagatcagggcaggattc

SEQ ID NO: 2211309 - DNA, 25 bp, Homo sapien
gatagctctgcagatcagggcagga

SEQ ID NO: 2211310 - DNA, 25 bp, Homo sapien
tgacccttgcctcaaccccagggac

SEQ ID NO: 2211311 - DNA, 25 bp, Homo sapien
gctggctgagattccccttcctgtg

SEQ ID NO: 2211312 - DNA, 25 bp, Homo sapien
acgctggctgagattccccttcctg

SEQ ID NO: 2211313 - DNA, 25 bp, Homo sapien
cgctagggggatggtccctctgacc

SEQ ID NO: 2211314 - DNA, 25 bp, Homo sapien
tagcaggccctggcgggcggaaggg

SEQ ID NO: 2211315 - DNA, 25 bp, Homo sapien
gcgggcggaagggcttctatgccag

SEQ ID NO: 2211316 - DNA, 25 bp, Homo sapien
ctagcaggccctggcgggcggaagg

SEQ ID NO: 2211317 - DNA, 25 bp, Homo sapien
agaatggcaactgccttccaatttg

SEQ ID NO: 2211318 - DNA, 25 bp, Homo sapien
ttcctctgcctagagtcccagaatg

SEQ ID NO: 2211319 - DNA, 25 bp, Homo sapien
ttccttagggccagatcctgcactg

SEQ ID NO: 2211320 - DNA, 25 bp, Homo sapien
tgccaaatggtagccattcacgaga

SEQ ID NO: 2211321 - DNA, 25 bp, Homo sapien
caaggtcatgaaggcaccaaaaggc

SEQ ID NO: 2211322 - DNA, 25 bp, Homo sapien
ccaaggtgttaagggcctgttgcca

SEQ ID NO: 2211323 - DNA, 25 bp, Homo sapien
actactgctacctggtgcaaggcca

SEQ ID NO: 2211324 - DNA, 25 bp, Homo sapien
agaggttccatgactagcccaaggt

SEQ ID NO: 2211325 - DNA, 25 bp, Homo sapien
gcagggcagatgtgcgctgctcttc

SEQ ID NO: 2211326 - DNA, 25 bp, Homo sapien
tgtgcgctgctcttcttctgtggct

SEQ ID NO: 2211327 - DNA, 25 bp, Homo sapien
gatgtgcgctgctcttcttctgtgg

SEQ ID NO: 2211328 - DNA, 25 bp, Homo sapien
ccaagggcttaacaactccttcagt

SEQ ID NO: 2211329 - DNA, 25 bp, Homo sapien
cctacaaaatgggactaatggtatc

SEQ ID NO: 2211330 - DNA, 25 bp, Homo sapien
cctggtacaatgtaggcgcttggca

SEQ ID NO: 2211331 - DNA, 25 bp, Homo sapien
gcgcttggcaaatgtaaggctcctt

SEQ ID NO: 2211332 - DNA, 25 bp, Homo sapien
gaatcgtggctccatactagctgtg

SEQ ID NO: 2211333 - DNA, 25 bp, Homo sapien
accgcagggcaagacccggtggcct

SEQ ID NO: 2211334 - DNA, 25 bp, Homo sapien
tggtgtccgagggtccgacaaactg

SEQ ID NO: 2211335 - DNA, 25 bp, Homo sapien
tgggccgccaagagccgaacctgag

SEQ ID NO: 2211336 - DNA, 25 bp, Homo sapien
ggtggtgctgtggactgggaccgca

SEQ ID NO: 2211337 - DNA, 25 bp, Homo sapien
gttccgaggctccagggtccgagtc

SEQ ID NO: 2211338 - DNA, 25 bp, Homo sapien
cgagtcggcacaggccggcggagcg

SEQ ID NO: 2211339 - DNA, 25 bp, Homo sapien
tccagggtccgagtcggcacaggcc

SEQ ID NO: 2211340 - DNA, 25 bp, Homo sapien
tcgtggccgggtgttcgggctccga

SEQ ID NO: 2211341 - DNA, 25 bp, Homo sapien
cgagaagtcggtcggatccaagtgc

SEQ ID NO: 2211342 - DNA, 25 bp, Homo sapien
tgggaatagatctgggctctcctgg

SEQ ID NO: 2211343 - DNA, 25 bp, Homo sapien
cttcagccagtagtcccagacgatg

SEQ ID NO: 2211344 - DNA, 25 bp, Homo sapien
ctcctggctggttgggaagcgttct

SEQ ID NO: 2211345 - DNA, 25 bp, Homo sapien
ccactgcgcccatccacatatgata

SEQ ID NO: 2211346 - DNA, 25 bp, Homo sapien
cactgcgcccatccacatatgatat

SEQ ID NO: 2211347 - DNA, 25 bp, Homo sapien
cctgctccagctcgggttgggtatg

SEQ ID NO: 2211348 - DNA, 25 bp, Homo sapien
ccagctcgggttgggtatggccata

SEQ ID NO: 2211349 - DNA, 25 bp, Homo sapien
ctgcagacgctgctccgggattgag

SEQ ID NO: 2211350 - DNA, 25 bp, Homo sapien
ggcttctagtcgttctggctcctgc

SEQ ID NO: 2211351 - DNA, 25 bp, Homo sapien
tccctgaagcatctgcatattgaaa

SEQ ID NO: 2211352 - DNA, 25 bp, Homo sapien
gtgaaatagtttggttctccctgaa

SEQ ID NO: 2211353 - DNA, 25 bp, Homo sapien
gaataccagtgaaatagtttggttc

SEQ ID NO: 2211354 - DNA, 25 bp, Homo sapien
gcatattgaaagaacgctttcccca

SEQ ID NO: 2211355 - DNA, 25 bp, Homo sapien
tctgggagatcctaccccatcagac

SEQ ID NO: 2211356 - DNA, 25 bp, Homo sapien
tataccctgggcatagcattactgc

SEQ ID NO: 2211357 - DNA, 25 bp, Homo sapien
cattactgcagtcttggatgtctac

SEQ ID NO: 2211358 - DNA, 25 bp, Homo sapien
tagggtagatgattgcaactgaaac

SEQ ID NO: 2211359 - DNA, 25 bp, Homo sapien
cagctgcatcttaaccttacctttg

SEQ ID NO: 2211360 - DNA, 25 bp, Homo sapien
gcagggaagtacaagaccactcttg

SEQ ID NO: 2211361 - DNA, 25 bp, Homo sapien
tacatcctaagagtggaaccatgtg

SEQ ID NO: 2211362 - DNA, 25 bp, Homo sapien
caaggactggagtgccattggctgt

SEQ ID NO: 2211363 - DNA, 25 bp, Homo sapien
ggccagacccaagtgggcgtattaa

SEQ ID NO: 2211364 - DNA, 25 bp, Homo sapien
aaaagttgacaggatggccagaccc

SEQ ID NO: 2211365 - DNA, 25 bp, Homo sapien
tggtggtgctaggattggaacccaa

SEQ ID NO: 2211366 - DNA, 25 bp, Homo sapien
tgccagtctctgttatcaagtccgt

SEQ ID NO: 2211367 - DNA, 25 bp, Homo sapien
ggcgggggtttctccacactggcca

SEQ ID NO: 2211368 - DNA, 25 bp, Homo sapien
ttctgacctcaaaagatccacccac

SEQ ID NO: 2211369 - DNA, 25 bp, Homo sapien
ctggccaggctggtcttgaacttct

SEQ ID NO: 2211370 - DNA, 25 bp, Homo sapien
tagaggcgggggtttctccacactg

SEQ ID NO: 2211371 - DNA, 25 bp, Homo sapien
tgtagcattttgagagcgacttctt

SEQ ID NO: 2211372 - DNA, 25 bp, Homo sapien
cttttgaagactgttatatacatga

SEQ ID NO: 2211373 - DNA, 25 bp, Homo sapien
tgtccggccatatattttcgtcttt

SEQ ID NO: 2211374 - DNA, 25 bp, Homo sapien
gctatgagtaatacatttgagattc

SEQ ID NO: 2211375 - DNA, 25 bp, Homo sapien
ttctcattctgtaaacggtgtcttt

SEQ ID NO: 2211376 - DNA, 25 bp, Homo sapien
ctcattctgtaaacggtgtcttttt

SEQ ID NO: 2211377 - DNA, 25 bp, Homo sapien
tatggtacaaggtatgaatctatgc

SEQ ID NO: 2211378 - DNA, 25 bp, Homo sapien
tgaatatgggtatggagatctctcc

SEQ ID NO: 2211379 - DNA, 25 bp, Homo sapien
cagaggagtctttgcttaacatgag

SEQ ID NO: 2211380 - DNA, 25 bp, Homo sapien
caaggtatgaatctatgctttttaa

SEQ ID NO: 2211381 - DNA, 25 bp, Homo sapien
tgctacatatagaatttaagttgat

SEQ ID NO: 2211382 - DNA, 25 bp, Homo sapien
tttttgcattgtgagtctattgggc

SEQ ID NO: 2211383 - DNA, 25 bp, Homo sapien
cattgtgagtctattgggcaatgaa

SEQ ID NO: 2211384 - DNA, 25 bp, Homo sapien
ttatgttgtttctaagatgtcatcc

SEQ ID NO: 2211385 - DNA, 25 bp, Homo sapien
tttaagactgaatcataccccattg

SEQ ID NO: 2211386 - DNA, 25 bp, Homo sapien
taccccagcttttgaagtgtaattg

SEQ ID NO: 2211387 - DNA, 25 bp, Homo sapien
tgtgaaccatcagtgcatctatctc

SEQ ID NO: 2211388 - DNA, 25 bp, Homo sapien
tattcaaggtgtacagtgtggtgct

SEQ ID NO: 2211389 - DNA, 25 bp, Homo sapien
ggccttgactcaggccccattacag

SEQ ID NO: 2211390 - DNA, 25 bp, Homo sapien
acagctccggtctcaatcttggtgc

SEQ ID NO: 2211391 - DNA, 25 bp, Homo sapien
gaaacatttcttatgaggcactcag

SEQ ID NO: 2211392 - DNA, 25 bp, Homo sapien
gctgtactggataactgtgctgatc

SEQ ID NO: 2211393 - DNA, 25 bp, Homo sapien
tgtgttggggtgaatgaaattatct

SEQ ID NO: 2211394 - DNA, 25 bp, Homo sapien
aattatcttgggtgatgagagatgc

SEQ ID NO: 2211395 - DNA, 25 bp, Homo sapien
aatgaaattatcttgggtgatgaga

SEQ ID NO: 2211396 - DNA, 25 bp, Homo sapien
gggtgatgagagatgctacttccat

SEQ ID NO: 2211397 - DNA, 25 bp, Homo sapien
caagtccgaaatcaaacctggtgga

SEQ ID NO: 2211398 - DNA, 25 bp, Homo sapien
gctttcctgaaagggatcatacccg

SEQ ID NO: 2211399 - DNA, 25 bp, Homo sapien
ttaggctcttgtcgacccgctttcc

SEQ ID NO: 2211400 - DNA, 25 bp, Homo sapien
gttgacatcagaagccaagtccgaa

SEQ ID NO: 2211401 - DNA, 25 bp, Homo sapien
cagcaatgcagaagtttattattag

SEQ ID NO: 2211402 - DNA, 25 bp, Homo sapien
caatgcagaagtttattattagttc

SEQ ID NO: 2211403 - DNA, 25 bp, Homo sapien
ctgcagcaatgcagaagtttattat

SEQ ID NO: 2211404 - DNA, 25 bp, Homo sapien
gcagcaatgcagaagtttattatta

SEQ ID NO: 2211405 - DNA, 25 bp, Homo sapien
gttcggggacaactttagcaactgc

SEQ ID NO: 2211406 - DNA, 25 bp, Homo sapien
cggggacaactttagcaactgcaac

SEQ ID NO: 2211407 - DNA, 25 bp, Homo sapien
gggacaactttagcaactgcaacag

SEQ ID NO: 2211408 - DNA, 25 bp, Homo sapien
tcggggacaactttagcaactgcaa

SEQ ID NO: 2211409 - DNA, 25 bp, Homo sapien
tcgtaaacggccagacaacatgagc

SEQ ID NO: 2211410 - DNA, 25 bp, Homo sapien
cttactgggtgctggattgtcctgc

SEQ ID NO: 2211411 - DNA, 25 bp, Homo sapien
tgttggcgtcagtacagatcctctg

SEQ ID NO: 2211412 - DNA, 25 bp, Homo sapien
cacaacgatgttctgccttactggg

SEQ ID NO: 2211413 - DNA, 25 bp, Homo sapien
aacctgtgtctaagcaccagctgac

SEQ ID NO: 2211414 - DNA, 25 bp, Homo sapien
ccaggtcggtataggtcattccaga

SEQ ID NO: 2211415 - DNA, 25 bp, Homo sapien
tcaacctgtgtctaagcaccagctg

SEQ ID NO: 2211416 - DNA, 25 bp, Homo sapien
tctcaggccctaaaccaggtcggta

SEQ ID NO: 2211417 - DNA, 25 bp, Homo sapien
ccaaataaagacaatctgtaaattg

SEQ ID NO: 2211418 - DNA, 25 bp, Homo sapien
tctgtaaattgttcagacgactgtc

SEQ ID NO: 2211419 - DNA, 25 bp, Homo sapien
aattgttcagacgactgtctttctg

SEQ ID NO: 2211420 - DNA, 25 bp, Homo sapien
gacaatctgtaaattgttcagacga

SEQ ID NO: 2211421 - DNA, 25 bp, Homo sapien
catttagtggtgactcattgctgac

SEQ ID NO: 2211422 - DNA, 25 bp, Homo sapien
caagggcatagcgaagagaggacat

SEQ ID NO: 2211423 - DNA, 25 bp, Homo sapien
gcccctgttcagaaccatttagtgg

SEQ ID NO: 2211424 - DNA, 25 bp, Homo sapien
gctgacagagtaatatccgcattct

SEQ ID NO: 2211425 - DNA, 25 bp, Homo sapien
tctgggttcccatgactgttgacat

SEQ ID NO: 2211426 - DNA, 25 bp, Homo sapien
tctctgtttgcgtctggtgtctggt

SEQ ID NO: 2211427 - DNA, 25 bp, Homo sapien
tttctgtgtcactctgcccctggtt

SEQ ID NO: 2211428 - DNA, 25 bp, Homo sapien
gtcagggtgtctttccgcatctgtt

SEQ ID NO: 2211429 - DNA, 25 bp, Homo sapien
caaactcaatctagggcaggcatca

SEQ ID NO: 2211430 - DNA, 25 bp, Homo sapien
gatctcccaaattcaggtctcctgg

SEQ ID NO: 2211431 - DNA, 25 bp, Homo sapien
gaacatgcgtgagtctgtgtgtccc

SEQ ID NO: 2211432 - DNA, 25 bp, Homo sapien
gaccatgaagatgcaggagtccctg

SEQ ID NO: 2211433 - DNA, 25 bp, Homo sapien
tcggatgtctgcgtgctggaactgc

SEQ ID NO: 2211434 - DNA, 25 bp, Homo sapien
tacatgagagcgcttcaccagccag

SEQ ID NO: 2211435 - DNA, 25 bp, Homo sapien
tgccttcgtaagcatggccccatag

SEQ ID NO: 2211436 - DNA, 25 bp, Homo sapien
taggtcctgtcaccagtcggatgtc

SEQ ID NO: 2211437 - DNA, 25 bp, Homo sapien
attggccacgtagaaccccaggtgg

SEQ ID NO: 2211438 - DNA, 25 bp, Homo sapien
ggtaccctcgcctcgcaaagatata

SEQ ID NO: 2211439 - DNA, 25 bp, Homo sapien
caaagatatagaactgcggctgatg

SEQ ID NO: 2211440 - DNA, 25 bp, Homo sapien
tgtcggaggactaggaactcaaggt

SEQ ID NO: 2211441 - DNA, 25 bp, Homo sapien
cattcagtgtgaagcagatcttctc

SEQ ID NO: 2211442 - DNA, 25 bp, Homo sapien
gagtgtgggatttggatcacaaagt

SEQ ID NO: 2211443 - DNA, 25 bp, Homo sapien
tctcttctgagtgtgggatttggat

SEQ ID NO: 2211444 - DNA, 25 bp, Homo sapien
aagtccccagggtgcccattcagtg

SEQ ID NO: 2211445 - DNA, 25 bp, Homo sapien
aaggtgaagatgctaggcaatgtgc

SEQ ID NO: 2211446 - DNA, 25 bp, Homo sapien
gaacttccttgagattccatgctgc

SEQ ID NO: 2211447 - DNA, 25 bp, Homo sapien
ttgctaaccccacagaacttccttg

SEQ ID NO: 2211448 - DNA, 25 bp, Homo sapien
tcctcccaggatctcctcagaattg

SEQ ID NO: 2211449 - DNA, 25 bp, Homo sapien
gaattgccatcccagtttggacttc

SEQ ID NO: 2211450 - DNA, 25 bp, Homo sapien
ctggtgggttcaaggactccacgaa

SEQ ID NO: 2211451 - DNA, 25 bp, Homo sapien
aacttggattccaccattgattcag

SEQ ID NO: 2211452 - DNA, 25 bp, Homo sapien
ttcaaggactccacgaacttggatt

SEQ ID NO: 2211453 - DNA, 25 bp, Homo sapien
aggtatagaaagctggtgggttcaa

SEQ ID NO: 2211454 - DNA, 25 bp, Homo sapien
gggagaaggagcagactgatggcct

SEQ ID NO: 2211455 - DNA, 25 bp, Homo sapien
gagaaggagcagactgatggcctca

SEQ ID NO: 2211456 - DNA, 25 bp, Homo sapien
agaaggagcagactgatggcctcag

SEQ ID NO: 2211457 - DNA, 25 bp, Homo sapien
aaggagcagactgatggcctcaggg

SEQ ID NO: 2211458 - DNA, 25 bp, Homo sapien
gcaagattggcaggtttggagggct

SEQ ID NO: 2211459 - DNA, 25 bp, Homo sapien
ctggagctgttgagtaggctcattg

SEQ ID NO: 2211460 - DNA, 25 bp, Homo sapien
tgttgagtaggctcattgttggaac

SEQ ID NO: 2211461 - DNA, 25 bp, Homo sapien
gagtaggctcattgttggaactcct

SEQ ID NO: 2211462 - DNA, 25 bp, Homo sapien
cattgacagggtatgagggctctct

SEQ ID NO: 2211463 - DNA, 25 bp, Homo sapien
cagagtaccagaatttgagggcaca

SEQ ID NO: 2211464 - DNA, 25 bp, Homo sapien
taggtgcctgtgatgtgagtgcccc

SEQ ID NO: 2211465 - DNA, 25 bp, Homo sapien
tagagagccgggcttcagaggcaac

SEQ ID NO: 2211466 - DNA, 25 bp, Homo sapien
caccaaggctggctgagctgtgctt

SEQ ID NO: 2211467 - DNA, 25 bp, Homo sapien
ggcaccaaggctggctgagctgtgc

SEQ ID NO: 2211468 - DNA, 25 bp, Homo sapien
ccaaggctggctgagctgtgcttac

SEQ ID NO: 2211469 - DNA, 25 bp, Homo sapien
cttgggcaccaaggctggctgagct

SEQ ID NO: 2211470 - DNA, 25 bp, Homo sapien
tggatgagggcatgatggtgtctgg

SEQ ID NO: 2211471 - DNA, 25 bp, Homo sapien
gatgagggcatgatggtgtctggcc

SEQ ID NO: 2211472 - DNA, 25 bp, Homo sapien
tgagggcatgatggtgtctggccca

SEQ ID NO: 2211473 - DNA, 25 bp, Homo sapien
atgagggcatgatggtgtctggccc

SEQ ID NO: 2211474 - DNA, 25 bp, Homo sapien
gaagtgtgcatccagcagttctcca

SEQ ID NO: 2211475 - DNA, 25 bp, Homo sapien
agtgtcctcatatatgcgccgggct

SEQ ID NO: 2211476 - DNA, 25 bp, Homo sapien
gacaggttgaggactttggcagcca

SEQ ID NO: 2211477 - DNA, 25 bp, Homo sapien
caatggtgacataggcccagaggcg

SEQ ID NO: 2211478 - DNA, 25 bp, Homo sapien
aaagggataccctgtggcctagcgc

SEQ ID NO: 2211479 - DNA, 25 bp, Homo sapien
tgaaaagggataccctgtggcctag

SEQ ID NO: 2211480 - DNA, 25 bp, Homo sapien
ctgaaaagggataccctgtggccta

SEQ ID NO: 2211481 - DNA, 25 bp, Homo sapien
aaaagggataccctgtggcctagcg

SEQ ID NO: 2211482 - DNA, 25 bp, Homo sapien
caggaagatgataagagggatcctc

SEQ ID NO: 2211483 - DNA, 25 bp, Homo sapien
ctgacggacattggagaggatcaca

SEQ ID NO: 2211484 - DNA, 25 bp, Homo sapien
cggacattggagaggatcacactgg

SEQ ID NO: 2211485 - DNA, 25 bp, Homo sapien
gatgataagagggatcctccccaca

SEQ ID NO: 2211486 - DNA, 25 bp, Homo sapien
taattggggaatagattgtgagacc

SEQ ID NO: 2211487 - DNA, 25 bp, Homo sapien
ctaattggggaatagattgtgagac

SEQ ID NO: 2211488 - DNA, 25 bp, Homo sapien
attggggaatagattgtgagaccat

SEQ ID NO: 2211489 - DNA, 25 bp, Homo sapien
ggggaatagattgtgagaccatctt

SEQ ID NO: 2211490 - DNA, 25 bp, Homo sapien
tttgctcaggctgtatccactgttt

SEQ ID NO: 2211491 - DNA, 25 bp, Homo sapien
ttgctcaggctgtatccactgtttc

SEQ ID NO: 2211492 - DNA, 25 bp, Homo sapien
tgctcaggctgtatccactgtttct

SEQ ID NO: 2211493 - DNA, 25 bp, Homo sapien
attggggcccacatgtccttggctt

SEQ ID NO: 2211494 - DNA, 25 bp, Homo sapien
cattggggcccacatgtccttggct

SEQ ID NO: 2211495 - DNA, 25 bp, Homo sapien
catgtccttggcttttatcactctc

SEQ ID NO: 2211496 - DNA, 25 bp, Homo sapien
gagccagactggcaggctcccaagg

SEQ ID NO: 2211497 - DNA, 25 bp, Homo sapien
tcattcccgagccagactggcaggc

SEQ ID NO: 2211498 - DNA, 25 bp, Homo sapien
tggcaggctcccaaggctagcaccc

SEQ ID NO: 2211499 - DNA, 25 bp, Homo sapien
tcgaggggggagatgtctcattccc

SEQ ID NO: 2211500 - DNA, 25 bp, Homo sapien
agccatcggcttccatgcaatgcag

SEQ ID NO: 2211501 - DNA, 25 bp, Homo sapien
gattgagcctccagctttccaaaca

SEQ ID NO: 2211502 - DNA, 25 bp, Homo sapien
tgcaggtagtccttggcactgtgga

SEQ ID NO: 2211503 - DNA, 25 bp, Homo sapien
tggattgagcctccagctttccaaa

SEQ ID NO: 2211504 - DNA, 25 bp, Homo sapien
ctagcttgagggtcctatatgaccc

SEQ ID NO: 2211505 - DNA, 25 bp, Homo sapien
ggctttcgtggttgagggtctcaat

SEQ ID NO: 2211506 - DNA, 25 bp, Homo sapien
tatgaccctgggctttcgtggttga

SEQ ID NO: 2211507 - DNA, 25 bp, Homo sapien
ctcaatggtttcacagtgaccaatg

SEQ ID NO: 2211508 - DNA, 25 bp, Homo sapien
ttggtaccaaacatggagctgctta

SEQ ID NO: 2211509 - DNA, 25 bp, Homo sapien
ggagctgcttacgtcaataacaaaa

SEQ ID NO: 2211510 - DNA, 25 bp, Homo sapien
taccaaacatggagctgcttacgtc

SEQ ID NO: 2211511 - DNA, 25 bp, Homo sapien
catggagctgcttacgtcaataaca

SEQ ID NO: 2211512 - DNA, 25 bp, Homo sapien
tggatgtgattggctgctgactccc

SEQ ID NO: 2211513 - DNA, 25 bp, Homo sapien
ctggatgtgattggctgctgactcc

SEQ ID NO: 2211514 - DNA, 25 bp, Homo sapien
cctggatgtgattggctgctgactc

SEQ ID NO: 2211515 - DNA, 25 bp, Homo sapien
aatcatgcttatctttccccgatcc

SEQ ID NO: 2211516 - DNA, 25 bp, Homo sapien
tcatgcttatctttccccgatccca

SEQ ID NO: 2211517 - DNA, 25 bp, Homo sapien
aaatcatgcttatctttccccgatc

SEQ ID NO: 2211518 - DNA, 25 bp, Homo sapien
catgcttatctttccccgatcccat

SEQ ID NO: 2211519 - DNA, 25 bp, Homo sapien
tccatagctgctggattgggctgct

SEQ ID NO: 2211520 - DNA, 25 bp, Homo sapien
tgcgatctgcgacagtgaactctcc

SEQ ID NO: 2211521 - DNA, 25 bp, Homo sapien
catgcttgagggaatcggtaccgtg

SEQ ID NO: 2211522 - DNA, 25 bp, Homo sapien
caaaagtcgtttcccctgcgatctg

SEQ ID NO: 2211523 - DNA, 25 bp, Homo sapien
actcactgttggacatgtgccccag

SEQ ID NO: 2211524 - DNA, 25 bp, Homo sapien
cacactcactgttggacatgtgccc

SEQ ID NO: 2211525 - DNA, 25 bp, Homo sapien
ggtgcacactcactgttggacatgt

SEQ ID NO: 2211526 - DNA, 25 bp, Homo sapien
gatgtttcaagaagcctctgatgca

SEQ ID NO: 2211527 - DNA, 25 bp, Homo sapien
cctgcccaagcagtgaattcgttgt

SEQ ID NO: 2211528 - DNA, 25 bp, Homo sapien
gcccttttatgccttcctggtcagg

SEQ ID NO: 2211529 - DNA, 25 bp, Homo sapien
tgttgccttcaatcctcgggtggcc

SEQ ID NO: 2211530 - DNA, 25 bp, Homo sapien
tggtcactctggagacaaatctgag

SEQ ID NO: 2211531 - DNA, 25 bp, Homo sapien
catttgatgaccgacaaggctctgt

SEQ ID NO: 2211532 - DNA, 25 bp, Homo sapien
gagtacaggactggcctagttcaca

SEQ ID NO: 2211533 - DNA, 25 bp, Homo sapien
tcacctgactgactgacttgcagat

SEQ ID NO: 2211534 - DNA, 25 bp, Homo sapien
aactcctttaggatgacggccctga

SEQ ID NO: 2211535 - DNA, 25 bp, Homo sapien
gacaaacgaattgttggtggactgg

SEQ ID NO: 2211536 - DNA, 25 bp, Homo sapien
ggcagacaaacgaattgttggtgga

SEQ ID NO: 2211537 - DNA, 25 bp, Homo sapien
ggtggactggagtcatcaaggagga

SEQ ID NO: 2211538 - DNA, 25 bp, Homo sapien
acgaattgttggtggactggagtca

SEQ ID NO: 2211539 - DNA, 25 bp, Homo sapien
ggcaggcttgggtgttttggagaaa

SEQ ID NO: 2211540 - DNA, 25 bp, Homo sapien
tatgaacaaatcctcacacagagga

SEQ ID NO: 2211541 - DNA, 25 bp, Homo sapien
tggagaaaggtgtgatatggtgtgg

SEQ ID NO: 2211542 - DNA, 25 bp, Homo sapien
agggcagcggccactatgaacaaat

SEQ ID NO: 2211543 - DNA, 25 bp, Homo sapien
tcgggcagtaggtgattcggacaca

SEQ ID NO: 2211544 - DNA, 25 bp, Homo sapien
cctgacccagagatggacgactggt

SEQ ID NO: 2211545 - DNA, 25 bp, Homo sapien
cagagatggacgactggtcttgcaa

SEQ ID NO: 2211546 - DNA, 25 bp, Homo sapien
tcccctctcgatcctggtggatggg

SEQ ID NO: 2211547 - DNA, 25 bp, Homo sapien
atgctcctctcccagtcccacagcc

SEQ ID NO: 2211548 - DNA, 25 bp, Homo sapien
ctcctctctgcatcctccattgagc

SEQ ID NO: 2211549 - DNA, 25 bp, Homo sapien
ctgccccatgctcctctcccagtcc

SEQ ID NO: 2211550 - DNA, 25 bp, Homo sapien
gctcctctctgcatcctccattgag

SEQ ID NO: 2211551 - DNA, 25 bp, Homo sapien
gcttcattttccgtgcaacctgggg

SEQ ID NO: 2211552 - DNA, 25 bp, Homo sapien
ctgcttcattttccgtgcaacctgg

SEQ ID NO: 2211553 - DNA, 25 bp, Homo sapien
cctgcttcattttccgtgcaacctg

SEQ ID NO: 2211554 - DNA, 25 bp, Homo sapien
ttcattttccgtgcaacctggggcc

SEQ ID NO: 2211555 - DNA, 25 bp, Homo sapien
cggccggtcctcaggggtggtatgt

SEQ ID NO: 2211556 - DNA, 25 bp, Homo sapien
cattggtgcgcagacggccggtcct

SEQ ID NO: 2211557 - DNA, 25 bp, Homo sapien
ggcattggtgcgcagacggccggtc

SEQ ID NO: 2211558 - DNA, 25 bp, Homo sapien
ttggtgcgcagacggccggtcctca

SEQ ID NO: 2211559 - DNA, 25 bp, Homo sapien
tcagcctcttcaccaattggccagg

SEQ ID NO: 2211560 - DNA, 25 bp, Homo sapien
ataggagatgcctgtcctttctgac

SEQ ID NO: 2211561 - DNA, 25 bp, Homo sapien
gtcctttctgacactgtaacctcta

SEQ ID NO: 2211562 - DNA, 25 bp, Homo sapien
gacactgtaacctctatgctcagcc

SEQ ID NO: 2211563 - DNA, 25 bp, Homo sapien
tactggccctggtgccgctgaagca

SEQ ID NO: 2211564 - DNA, 25 bp, Homo sapien
gctggtggagatgcggaacttctct

SEQ ID NO: 2211565 - DNA, 25 bp, Homo sapien
aggctggtggagatgcggaacttct

SEQ ID NO: 2211566 - DNA, 25 bp, Homo sapien
tggagatgcggaacttctctgattc

SEQ ID NO: 2211567 - DNA, 25 bp, Homo sapien
gatgggcttcttcatagattttctt

SEQ ID NO: 2211568 - DNA, 25 bp, Homo sapien
tgatgggcttcttcatagattttct

SEQ ID NO: 2211569 - DNA, 25 bp, Homo sapien
tgtggattaaacaggacagaggtga

SEQ ID NO: 2211570 - DNA, 25 bp, Homo sapien
ccaaggtgtgggcatagcgagacac

SEQ ID NO: 2211571 - DNA, 25 bp, Homo sapien
gacaccaccgtggagcgcatagaat

SEQ ID NO: 2211572 - DNA, 25 bp, Homo sapien
tcaaagatggcttcatgggcttcag

SEQ ID NO: 2211573 - DNA, 25 bp, Homo sapien
tcaagaagaatggtcagcaaaaagc

SEQ ID NO: 2211574 - DNA, 25 bp, Homo sapien
gggtccctggtatgtcagttcaaga

SEQ ID NO: 2211575 - DNA, 25 bp, Homo sapien
aagctgacacagatgaggtacctcc

SEQ ID NO: 2211576 - DNA, 25 bp, Homo sapien
agatgaggtacctccacccagacat

SEQ ID NO: 2211577 - DNA, 25 bp, Homo sapien
tgccacctctggcctggatctgttg

SEQ ID NO: 2211578 - DNA, 25 bp, Homo sapien
cacctctggcctggatctgttgttc

SEQ ID NO: 2211579 - DNA, 25 bp, Homo sapien
gccacctctggcctggatctgttgt

SEQ ID NO: 2211580 - DNA, 25 bp, Homo sapien
gatgccacctctggcctggatctgt

SEQ ID NO: 2211581 - DNA, 25 bp, Homo sapien
caaaggtcaatacaaaggctcagga

SEQ ID NO: 2211582 - DNA, 25 bp, Homo sapien
gagaatcaggatactcggcccaagg

SEQ ID NO: 2211583 - DNA, 25 bp, Homo sapien
cagcagatgaacctgagcctgagag

SEQ ID NO: 2211584 - DNA, 25 bp, Homo sapien
gccatgtggctgatacaaaggtcaa

SEQ ID NO: 2211585 - DNA, 25 bp, Homo sapien
tcaggtacaaaagaaggatcccaag

SEQ ID NO: 2211586 - DNA, 25 bp, Homo sapien
acgaagctgatatcggaccctgggc

SEQ ID NO: 2211587 - DNA, 25 bp, Homo sapien
aatgggcagctcagtaccgagaggc

SEQ ID NO: 2211588 - DNA, 25 bp, Homo sapien
agtaccaataacagtgccagtgcca

SEQ ID NO: 2211589 - DNA, 25 bp, Homo sapien
taggtatctgccttggtttcagtgg

SEQ ID NO: 2211590 - DNA, 25 bp, Homo sapien
gagctggatgattctaggaaggccc

SEQ ID NO: 2211591 - DNA, 25 bp, Homo sapien
gaaacctactcaacacagcactcta

SEQ ID NO: 2211592 - DNA, 25 bp, Homo sapien
ctgtttgctggatgtcaattgaccc

SEQ ID NO: 2211593 - DNA, 25 bp, Homo sapien
gactctcagtgggtactgtgtctag

SEQ ID NO: 2211594 - DNA, 25 bp, Homo sapien
tctcagtgggtactgtgtctagggc

SEQ ID NO: 2211595 - DNA, 25 bp, Homo sapien
aaggactctcagtgggtactgtgtc

SEQ ID NO: 2211596 - DNA, 25 bp, Homo sapien
cagtgggtactgtgtctagggcccc

SEQ ID NO: 2211597 - DNA, 25 bp, Homo sapien
aaatgagttccaagtgtttgataga

SEQ ID NO: 2211598 - DNA, 25 bp, Homo sapien
ttaagtgtgacccatagtcatgcag

SEQ ID NO: 2211599 - DNA, 25 bp, Homo sapien
tgggcttgaagagcacccgcctctt

SEQ ID NO: 2211600 - DNA, 25 bp, Homo sapien
cactgggcttgaagagcacccgcct

SEQ ID NO: 2211601 - DNA, 25 bp, Homo sapien
aagcacaggcacgtatggaagggac

SEQ ID NO: 2211602 - DNA, 25 bp, Homo sapien
tagaaagaccttctcctatggtggg

SEQ ID NO: 2211603 - DNA, 25 bp, Homo sapien
cagtggtgcctagggtgcagatacc

SEQ ID NO: 2211604 - DNA, 25 bp, Homo sapien
caacctccggatgtttacagtagca

SEQ ID NO: 2211605 - DNA, 25 bp, Homo sapien
tattagcttcaatggtgcacccagc

SEQ ID NO: 2211606 - DNA, 25 bp, Homo sapien
tttcaggtgcagaagaaagacccca

SEQ ID NO: 2211607 - DNA, 25 bp, Homo sapien
tatagcacgtaagtcagcagagctg

SEQ ID NO: 2211608 - DNA, 25 bp, Homo sapien
tggatatcgactgcctaacaaggga

SEQ ID NO: 2211609 - DNA, 25 bp, Homo sapien
agctttggttgtgcacacagcacca

SEQ ID NO: 2211610 - DNA, 25 bp, Homo sapien
tagctttggttgtgcacacagcacc

SEQ ID NO: 2211611 - DNA, 25 bp, Homo sapien
ttagctttggttgtgcacacagcac

SEQ ID NO: 2211612 - DNA, 25 bp, Homo sapien
acagtcttcagtagtgcgcttagca

SEQ ID NO: 2211613 - DNA, 25 bp, Homo sapien
gaggcatactcagcaccagtgtctg

SEQ ID NO: 2211614 - DNA, 25 bp, Homo sapien
actttggcggtacactaagcaccag

SEQ ID NO: 2211615 - DNA, 25 bp, Homo sapien
cagtaccagtatctgcttcggtggc

SEQ ID NO: 2211616 - DNA, 25 bp, Homo sapien
tcagtggtggcctaagcacaagttc

SEQ ID NO: 2211617 - DNA, 25 bp, Homo sapien
cagcctctgttttggtggagctccc

SEQ ID NO: 2211618 - DNA, 25 bp, Homo sapien
tgacttcggtggtactcccagcaac

SEQ ID NO: 2211619 - DNA, 25 bp, Homo sapien
taccggtttcagctttggcaatggg

SEQ ID NO: 2211620 - DNA, 25 bp, Homo sapien
ttgcaaaatgaattggagttttttc

SEQ ID NO: 2211621 - DNA, 25 bp, Homo sapien
aatgaattggagttttttctgtctt

SEQ ID NO: 2211622 - DNA, 25 bp, Homo sapien
ggccaatcagctgagggtgtcatgt

SEQ ID NO: 2211623 - DNA, 25 bp, Homo sapien
gccaatcagctgagggtgtcatgtg

SEQ ID NO: 2211624 - DNA, 25 bp, Homo sapien
gcttttggctcaaaggcaaatatga

SEQ ID NO: 2211625 - DNA, 25 bp, Homo sapien
ggagatcagcatagctctttggaga

SEQ ID NO: 2211626 - DNA, 25 bp, Homo sapien
tagttgtggagtggcatcttgggtt

SEQ ID NO: 2211627 - DNA, 25 bp, Homo sapien
catcttgggttcgtagaagagctgg

SEQ ID NO: 2211628 - DNA, 25 bp, Homo sapien
cccatctttggaggtgctactgtag

SEQ ID NO: 2211629 - DNA, 25 bp, Homo sapien
tagatagctccttggttgcggccag

SEQ ID NO: 2211630 - DNA, 25 bp, Homo sapien
tagcatttcctaaaggtggaaggcg

SEQ ID NO: 2211631 - DNA, 25 bp, Homo sapien
caggattagggtcagtaccttgaga

SEQ ID NO: 2211632 - DNA, 25 bp, Homo sapien
caggttcccgggtgatgtccacatt

SEQ ID NO: 2211633 - DNA, 25 bp, Homo sapien
ctcaggttcccgggtgatgtccaca

SEQ ID NO: 2211634 - DNA, 25 bp, Homo sapien
tcaggttcccgggtgatgtccacat

SEQ ID NO: 2211635 - DNA, 25 bp, Homo sapien
cctcaggttcccgggtgatgtccac

SEQ ID NO: 2211636 - DNA, 25 bp, Homo sapien
tctcccggtgtgtgttcacggcctc

SEQ ID NO: 2211637 - DNA, 25 bp, Homo sapien
ttctcccggtgtgtgttcacggcct

SEQ ID NO: 2211638 - DNA, 25 bp, Homo sapien
agagggcacttgagatatggaagct

SEQ ID NO: 2211639 - DNA, 25 bp, Homo sapien
cctgcaggggcagcactgagagcac

SEQ ID NO: 2211640 - DNA, 25 bp, Homo sapien
gaaaggccctactatcacctgatgg

SEQ ID NO: 2211641 - DNA, 25 bp, Homo sapien
gaaattacccctatagcaaggacag

SEQ ID NO: 2211642 - DNA, 25 bp, Homo sapien
ggatcatgaagctatgaaaggccct

SEQ ID NO: 2211643 - DNA, 25 bp, Homo sapien
gccccagtttgcagttcagcctatg

SEQ ID NO: 2211644 - DNA, 25 bp, Homo sapien
catcaaacattcccaaagcagagat

SEQ ID NO: 2211645 - DNA, 25 bp, Homo sapien
cccaaagcagagatgagggtagtac

SEQ ID NO: 2211646 - DNA, 25 bp, Homo sapien
cattcccaaagcagagatgagggta

SEQ ID NO: 2211647 - DNA, 25 bp, Homo sapien
ttcccaaagcagagatgagggtagt

SEQ ID NO: 2211648 - DNA, 25 bp, Homo sapien
gttctagctccattatcactggctc

SEQ ID NO: 2211649 - DNA, 25 bp, Homo sapien
ttttatccaggaaataggccaggag

SEQ ID NO: 2211650 - DNA, 25 bp, Homo sapien
atccaggaaataggccaggaggcac

SEQ ID NO: 2211651 - DNA, 25 bp, Homo sapien
gcagatcaccagtacattctcctgt

SEQ ID NO: 2211652 - DNA, 25 bp, Homo sapien
cgtacggaagtagaagacaaggcct

SEQ ID NO: 2211653 - DNA, 25 bp, Homo sapien
taaatgcactgctgacctttcacaa

SEQ ID NO: 2211654 - DNA, 25 bp, Homo sapien
ggccaaatctttacgctctaagtgc

SEQ ID NO: 2211655 - DNA, 25 bp, Homo sapien
ggagttaagactgagactctcacat

SEQ ID NO: 2211656 - DNA, 25 bp, Homo sapien
ctctcccttgggatagcggtagcga

SEQ ID NO: 2211657 - DNA, 25 bp, Homo sapien
gatttcttcataggtcatctcctca

SEQ ID NO: 2211658 - DNA, 25 bp, Homo sapien
tcttggtctcgcagtgcaaattctt

SEQ ID NO: 2211659 - DNA, 25 bp, Homo sapien
agcggtagcgatatttatcttggtc

SEQ ID NO: 2211660 - DNA, 25 bp, Homo sapien
tgtctggatggtcctcttcatgtga

SEQ ID NO: 2211661 - DNA, 25 bp, Homo sapien
atcaatctcattcagggccttccac

SEQ ID NO: 2211662 - DNA, 25 bp, Homo sapien
ccctgggactgaatgaagttggcca

SEQ ID NO: 2211663 - DNA, 25 bp, Homo sapien
tcttcatgtgactggtccacacctt

SEQ ID NO: 2211664 - DNA, 25 bp, Homo sapien
ccatgtcggcaaaggtagatggagc

SEQ ID NO: 2211665 - DNA, 25 bp, Homo sapien
gagcgaggtgtgacatggatattca

SEQ ID NO: 2211666 - DNA, 25 bp, Homo sapien
tgcttgccgcgaactgagaggccag

SEQ ID NO: 2211667 - DNA, 25 bp, Homo sapien
gcggcctctgatgttgagttcactc

SEQ ID NO: 2211668 - DNA, 25 bp, Homo sapien
ctgggccagacccaagcaggagcaa

SEQ ID NO: 2211669 - DNA, 25 bp, Homo sapien
cagacccaagcaggagcaagggcag

SEQ ID NO: 2211670 - DNA, 25 bp, Homo sapien
gccagacccaagcaggagcaagggc

SEQ ID NO: 2211671 - DNA, 25 bp, Homo sapien
gggccagacccaagcaggagcaagg

SEQ ID NO: 2211672 - DNA, 25 bp, Homo sapien
tatgttcctacagcccagttggttt

SEQ ID NO: 2211673 - DNA, 25 bp, Homo sapien
tagtctgcctattgggtaatccagc

SEQ ID NO: 2211674 - DNA, 25 bp, Homo sapien
gctggtaacctcagtgtagtctgcc

SEQ ID NO: 2211675 - DNA, 25 bp, Homo sapien
tgatgacataaagctgaccttctag

SEQ ID NO: 2211676 - DNA, 25 bp, Homo sapien
cctcatccaagggttggtagttgac

SEQ ID NO: 2211677 - DNA, 25 bp, Homo sapien
ctgtccagttcctcatccaagggtt

SEQ ID NO: 2211678 - DNA, 25 bp, Homo sapien
tccagttcctcatccaagggttggt

SEQ ID NO: 2211679 - DNA, 25 bp, Homo sapien
agttcctcatccaagggttggtagt

SEQ ID NO: 2211680 - DNA, 25 bp, Homo sapien
cagaaccttttcccggtcacagtct

SEQ ID NO: 2211681 - DNA, 25 bp, Homo sapien
ccttttcccggtcacagtctatata

SEQ ID NO: 2211682 - DNA, 25 bp, Homo sapien
tataatcagggctgccaagtttcac

SEQ ID NO: 2211683 - DNA, 25 bp, Homo sapien
cacagtctatataatcagggctgcc

SEQ ID NO: 2211684 - DNA, 25 bp, Homo sapien
aatggccaagaccaggtatatagtc

SEQ ID NO: 2211685 - DNA, 25 bp, Homo sapien
ggcagattccagcttgactggaccg

SEQ ID NO: 2211686 - DNA, 25 bp, Homo sapien
tagactgtgcgctcaagggaaggac

SEQ ID NO: 2211687 - DNA, 25 bp, Homo sapien
gactggaccgcatttgttgaaagca

SEQ ID NO: 2211688 - DNA, 25 bp, Homo sapien
gttttctgcaattatgccagggtca

SEQ ID NO: 2211689 - DNA, 25 bp, Homo sapien
tgttttctgcaattatgccagggtc

SEQ ID NO: 2211690 - DNA, 25 bp, Homo sapien
ttttctgcaattatgccagggtcat

SEQ ID NO: 2211691 - DNA, 25 bp, Homo sapien
ttctgcaattatgccagggtcatta

SEQ ID NO: 2211692 - DNA, 25 bp, Homo sapien
tgtaaccatgttcttttgcaaactg

SEQ ID NO: 2211693 - DNA, 25 bp, Homo sapien
cttgtaaccatgttcttttgcaaac

SEQ ID NO: 2211694 - DNA, 25 bp, Homo sapien
gaccgtcgttctctggtagtgttgg

SEQ ID NO: 2211695 - DNA, 25 bp, Homo sapien
tgcaggatcagtgaccgtcgttctc

SEQ ID NO: 2211696 - DNA, 25 bp, Homo sapien
cttcctcatggctgagatagttgtg

SEQ ID NO: 2211697 - DNA, 25 bp, Homo sapien
cctcatggctgagatagttgtgaac

SEQ ID NO: 2211698 - DNA, 25 bp, Homo sapien
gctgagatagttgtgaacatccttc

SEQ ID NO: 2211699 - DNA, 25 bp, Homo sapien
catggctgagatagttgtgaacatc

SEQ ID NO: 2211700 - DNA, 25 bp, Homo sapien
actgcctctcgtcgatactggccta

SEQ ID NO: 2211701 - DNA, 25 bp, Homo sapien
ctctcgtcgatactggcctaaatta

SEQ ID NO: 2211702 - DNA, 25 bp, Homo sapien
tcttgtagctcactgcctctcgtcg

SEQ ID NO: 2211703 - DNA, 25 bp, Homo sapien
agctcactgcctctcgtcgatactg

SEQ ID NO: 2211704 - DNA, 25 bp, Homo sapien
tggagatataggtcttgcctcgagc

SEQ ID NO: 2211705 - DNA, 25 bp, Homo sapien
tgttcctatccagttgagatatcgt

SEQ ID NO: 2211706 - DNA, 25 bp, Homo sapien
agatatcgtgtgagctttgtggaga

SEQ ID NO: 2211707 - DNA, 25 bp, Homo sapien
tgcctcgagctggtaaacccaccat

SEQ ID NO: 2211708 - DNA, 25 bp, Homo sapien
gaattggtaaactggggtatggatg

SEQ ID NO: 2211709 - DNA, 25 bp, Homo sapien
gggaacatcttacccacagaagaac

SEQ ID NO: 2211710 - DNA, 25 bp, Homo sapien
gaagataggtcaatagagatcacac

SEQ ID NO: 2211711 - DNA, 25 bp, Homo sapien
tatacgtatttagaacacaagaagg

SEQ ID NO: 2211712 - DNA, 25 bp, Homo sapien
tcaacatcagcagactgtcttacag

SEQ ID NO: 2211713 - DNA, 25 bp, Homo sapien
ggttttagactgaaagatacaaggc

SEQ ID NO: 2211714 - DNA, 25 bp, Homo sapien
caaacaagatccaactgcatgctgc

SEQ ID NO: 2211715 - DNA, 25 bp, Homo sapien
tgcatgctgcctacagaagataggt

SEQ ID NO: 2211716 - DNA, 25 bp, Homo sapien
ggtagagaatatctaactgaataca

SEQ ID NO: 2211717 - DNA, 25 bp, Homo sapien
tcctcacgtttttgacactagcctc

SEQ ID NO: 2211718 - DNA, 25 bp, Homo sapien
ttcctcacgtttttgacactagcct

SEQ ID NO: 2211719 - DNA, 25 bp, Homo sapien
tttcctcacgtttttgacactagcc

SEQ ID NO: 2211720 - DNA, 25 bp, Homo sapien
ctgtgtggaatccagatcttctgca

SEQ ID NO: 2211721 - DNA, 25 bp, Homo sapien
tgctgtgtggaatccagatcttctg

SEQ ID NO: 2211722 - DNA, 25 bp, Homo sapien
tgtgtggaatccagatcttctgcaa

SEQ ID NO: 2211723 - DNA, 25 bp, Homo sapien
tgtggaatccagatcttctgcaacc

SEQ ID NO: 2211724 - DNA, 25 bp, Homo sapien
ttaggagtcgcaccgaatgacatca

SEQ ID NO: 2211725 - DNA, 25 bp, Homo sapien
cttaggagtcgcaccgaatgacatc

SEQ ID NO: 2211726 - DNA, 25 bp, Homo sapien
gagtcgcaccgaatgacatcactgc

SEQ ID NO: 2211727 - DNA, 25 bp, Homo sapien
aggagtcgcaccgaatgacatcact

SEQ ID NO: 2211728 - DNA, 25 bp, Homo sapien
tccaacgattggctatgaagaagct

SEQ ID NO: 2211729 - DNA, 25 bp, Homo sapien
tggggacagaaatttccaatccctg

SEQ ID NO: 2211730 - DNA, 25 bp, Homo sapien
aatgctctcagttccactttgcctt

SEQ ID NO: 2211731 - DNA, 25 bp, Homo sapien
tgggctacacaagggcaatctcttg

SEQ ID NO: 2211732 - DNA, 25 bp, Homo sapien
ggatttgtgcaactcctgcctactt

SEQ ID NO: 2211733 - DNA, 25 bp, Homo sapien
tggatgtggatttgtgcaactcctg

SEQ ID NO: 2211734 - DNA, 25 bp, Homo sapien
tgcacacgacaaccaaccatctatg

SEQ ID NO: 2211735 - DNA, 25 bp, Homo sapien
tcccatgccctttaatgcacacgac

SEQ ID NO: 2211736 - DNA, 25 bp, Homo sapien
tgagaaggctgaggacgtacccttg

SEQ ID NO: 2211737 - DNA, 25 bp, Homo sapien
gaaatatcagctgttgtagttgcca

SEQ ID NO: 2211738 - DNA, 25 bp, Homo sapien
tgttcgttggttccctgagaaggct

SEQ ID NO: 2211739 - DNA, 25 bp, Homo sapien
tagttgccaaagacgttcctgagcc

SEQ ID NO: 2211740 - DNA, 25 bp, Homo sapien
gagctgcctagcctaccactgatga

SEQ ID NO: 2211741 - DNA, 25 bp, Homo sapien
tgggccgccgcttctacatgtgtgc

SEQ ID NO: 2211742 - DNA, 25 bp, Homo sapien
gcacaacaatcaaacccgggtacag

SEQ ID NO: 2211743 - DNA, 25 bp, Homo sapien
ggagttacggacctcattctggaag

SEQ ID NO: 2211744 - DNA, 25 bp, Homo sapien
tagggaatttggttagggctgactc

SEQ ID NO: 2211745 - DNA, 25 bp, Homo sapien
taaatcctgttctgtgggatgccgt

SEQ ID NO: 2211746 - DNA, 25 bp, Homo sapien
tccagggcccggattaccagtgaag

SEQ ID NO: 2211747 - DNA, 25 bp, Homo sapien
cagtgaagcgtcaatccctggattt

SEQ ID NO: 2211748 - DNA, 25 bp, Homo sapien
gggtgtgaatcctaggcagctggct

SEQ ID NO: 2211749 - DNA, 25 bp, Homo sapien
ctggacccaagtgaagcgcaggtgg

SEQ ID NO: 2211750 - DNA, 25 bp, Homo sapien
tcagctagaggcacacaacaaagca

SEQ ID NO: 2211751 - DNA, 25 bp, Homo sapien
gctagaggcacacaacaaagcagaa

SEQ ID NO: 2211752 - DNA, 25 bp, Homo sapien
catgagctcaaagtgtacaggacgg

SEQ ID NO: 2211753 - DNA, 25 bp, Homo sapien
ggaacgttcccactcactcatgagc

SEQ ID NO: 2211754 - DNA, 25 bp, Homo sapien
tcaggcataggtggtgacatactgg

SEQ ID NO: 2211755 - DNA, 25 bp, Homo sapien
tacaggacggcgacagaaattgcag

SEQ ID NO: 2211756 - DNA, 25 bp, Homo sapien
ctctagtggtcatcatcgagaaagg

SEQ ID NO: 2211757 - DNA, 25 bp, Homo sapien
taagcaagggagcaatatagtcaga

SEQ ID NO: 2211758 - DNA, 25 bp, Homo sapien
tgttgacatggattaaagaagtggc

SEQ ID NO: 2211759 - DNA, 25 bp, Homo sapien
aatcattttgcataccccttggagg

SEQ ID NO: 2211760 - DNA, 25 bp, Homo sapien
aagcgcaggagctcttcaccccggg

SEQ ID NO: 2211761 - DNA, 25 bp, Homo sapien
gggagggtgccaagcgcaggagctc

SEQ ID NO: 2211762 - DNA, 25 bp, Homo sapien
gtgccaagcgcaggagctcttcacc

SEQ ID NO: 2211763 - DNA, 25 bp, Homo sapien
aggagctcttcaccccgggggacag

SEQ ID NO: 2211764 - DNA, 25 bp, Homo sapien
tgctgttgagtgctgcattgcccac

SEQ ID NO: 2211765 - DNA, 25 bp, Homo sapien
gcaggagatcacagagcttgctgtt

SEQ ID NO: 2211766 - DNA, 25 bp, Homo sapien
caggagatcacagagcttgctgttg

SEQ ID NO: 2211767 - DNA, 25 bp, Homo sapien
gagcttgctgttgagtgctgcattg

SEQ ID NO: 2211768 - DNA, 25 bp, Homo sapien
gaatttctatcaaggaggagctcag

SEQ ID NO: 2211769 - DNA, 25 bp, Homo sapien
atttggtttgaaaaggatggagcag

SEQ ID NO: 2211770 - DNA, 25 bp, Homo sapien
ctaggttagtctaaagagcagtgac

SEQ ID NO: 2211771 - DNA, 25 bp, Homo sapien
aggagctcagagctagcaatttggt

SEQ ID NO: 2211772 - DNA, 25 bp, Homo sapien
gcactcgctattgttagggttagga

SEQ ID NO: 2211773 - DNA, 25 bp, Homo sapien
tggctgatgcaaggaaaagactggt

SEQ ID NO: 2211774 - DNA, 25 bp, Homo sapien
cgtgaggctcccagaataaataggt

SEQ ID NO: 2211775 - DNA, 25 bp, Homo sapien
caaagctggcaataaagggaatggt

SEQ ID NO: 2211776 - DNA, 25 bp, Homo sapien
ggatgacaggaaggcccctgtccat

SEQ ID NO: 2211777 - DNA, 25 bp, Homo sapien
aaggcccctgtccatgagtagctgg

SEQ ID NO: 2211778 - DNA, 25 bp, Homo sapien
aggaaggcccctgtccatgagtagc

SEQ ID NO: 2211779 - DNA, 25 bp, Homo sapien
acaggaaggcccctgtccatgagta

SEQ ID NO: 2211780 - DNA, 25 bp, Homo sapien
tgagcagccgcacagattctagagc

SEQ ID NO: 2211781 - DNA, 25 bp, Homo sapien
tgaagcctgcagcataggagcgcac

SEQ ID NO: 2211782 - DNA, 25 bp, Homo sapien
accatgtccaccaagtcacgggtgc

SEQ ID NO: 2211783 - DNA, 25 bp, Homo sapien
tgggctcgcctcagggcttggccct

SEQ ID NO: 2211784 - DNA, 25 bp, Homo sapien
gagcaacaggatcatgtgccagata

SEQ ID NO: 2211785 - DNA, 25 bp, Homo sapien
caatgactagataggcaggagctgg

SEQ ID NO: 2211786 - DNA, 25 bp, Homo sapien
tgtccatgacaaggcagtcgtagct

SEQ ID NO: 2211787 - DNA, 25 bp, Homo sapien
gatcccataatcagtcccagagcaa

SEQ ID NO: 2211788 - DNA, 25 bp, Homo sapien
catacagtcctacagcatggacctc

SEQ ID NO: 2211789 - DNA, 25 bp, Homo sapien
ggacacatcacacaactcctcgagg

SEQ ID NO: 2211790 - DNA, 25 bp, Homo sapien
cagggccccatactggtgggacaca

SEQ ID NO: 2211791 - DNA, 25 bp, Homo sapien
gagttccagagatgatgtcaatctt

SEQ ID NO: 2211792 - DNA, 25 bp, Homo sapien
tcatggaagcatggttgcctgcgtc

SEQ ID NO: 2211793 - DNA, 25 bp, Homo sapien
ggtatcttagggttagacttctcta

SEQ ID NO: 2211794 - DNA, 25 bp, Homo sapien
tacggataccttggatcatggaagc

SEQ ID NO: 2211795 - DNA, 25 bp, Homo sapien
tcattgtgcctgaagacaaacttgg

SEQ ID NO: 2211796 - DNA, 25 bp, Homo sapien
aagagagtagagtcattggcaacaa

SEQ ID NO: 2211797 - DNA, 25 bp, Homo sapien
tgctcaagctccacatgaaacttac

SEQ ID NO: 2211798 - DNA, 25 bp, Homo sapien
agagtcattggcaacaaagcaggag

SEQ ID NO: 2211799 - DNA, 25 bp, Homo sapien
tcctgctcaagctccacatgaaact

SEQ ID NO: 2211800 - DNA, 25 bp, Homo sapien
gctccagcaccatgacgctgcaggg

SEQ ID NO: 2211801 - DNA, 25 bp, Homo sapien
agcaccatgacgctgcagggtctcc

SEQ ID NO: 2211802 - DNA, 25 bp, Homo sapien
gatgttgcgggtgccaccagctcca

SEQ ID NO: 2211803 - DNA, 25 bp, Homo sapien
tggtgcctgagatgttgcgggtgcc

SEQ ID NO: 2211804 - DNA, 25 bp, Homo sapien
tgatggctgaaagcctactactcac

SEQ ID NO: 2211805 - DNA, 25 bp, Homo sapien
actgctgatggctgaaagcctacta

SEQ ID NO: 2211806 - DNA, 25 bp, Homo sapien
tggccactgctgatggctgaaagcc

SEQ ID NO: 2211807 - DNA, 25 bp, Homo sapien
tgctgatggctgaaagcctactact

SEQ ID NO: 2211808 - DNA, 25 bp, Homo sapien
aaagggatatgcatcagcccagcgg

SEQ ID NO: 2211809 - DNA, 25 bp, Homo sapien
taatcattactacaccagacggaca

SEQ ID NO: 2211810 - DNA, 25 bp, Homo sapien
tcacagtcttgaacacacggtaggt

SEQ ID NO: 2211811 - DNA, 25 bp, Homo sapien
cagacggacacatcctttgaggcca

SEQ ID NO: 2211812 - DNA, 25 bp, Homo sapien
tgttagacaacttgaccagggtcat

SEQ ID NO: 2211813 - DNA, 25 bp, Homo sapien
tctcttcccgggttggtgtggcagc

SEQ ID NO: 2211814 - DNA, 25 bp, Homo sapien
aactggtaacatccttgctgcagag

SEQ ID NO: 2211815 - DNA, 25 bp, Homo sapien
tgtggcagcctccttactagaatca

SEQ ID NO: 2211816 - DNA, 25 bp, Homo sapien
gaatcaggtgtgtgaccttcccaga

SEQ ID NO: 2211817 - DNA, 25 bp, Homo sapien
caggcatattgttctgaatcaggtg

SEQ ID NO: 2211818 - DNA, 25 bp, Homo sapien
tattgttctgaatcaggtgtgtgac

SEQ ID NO: 2211819 - DNA, 25 bp, Homo sapien
tgctcctggggaccggaaaatggct

SEQ ID NO: 2211820 - DNA, 25 bp, Homo sapien
tgagacggaatgtgagattcattgg

SEQ ID NO: 2211821 - DNA, 25 bp, Homo sapien
gagacggaatgtgagattcattggc

SEQ ID NO: 2211822 - DNA, 25 bp, Homo sapien
ctgagacggaatgtgagattcattg

SEQ ID NO: 2211823 - DNA, 25 bp, Homo sapien
tatgaaagatgtcaacagtgtggcc

SEQ ID NO: 2211824 - DNA, 25 bp, Homo sapien
cagcctgttgggatcagtttagcca

SEQ ID NO: 2211825 - DNA, 25 bp, Homo sapien
taaggtaagggcagcttctacagcg

SEQ ID NO: 2211826 - DNA, 25 bp, Homo sapien
tctgcaccctggttaaaggaggtac

SEQ ID NO: 2211827 - DNA, 25 bp, Homo sapien
tttgtattagcctagctcaggactg

SEQ ID NO: 2211828 - DNA, 25 bp, Homo sapien
tagctcaggactgtgacgtagtgtg

SEQ ID NO: 2211829 - DNA, 25 bp, Homo sapien
cgtagtgtgttcaagcattaggagt

SEQ ID NO: 2211830 - DNA, 25 bp, Homo sapien
actggctgcttttgtattagcctag

SEQ ID NO: 2211831 - DNA, 25 bp, Homo sapien
ggagttccgacagcatgaagggaca

SEQ ID NO: 2211832 - DNA, 25 bp, Homo sapien
tcctggagttccgacagcatgaagg

SEQ ID NO: 2211833 - DNA, 25 bp, Homo sapien
gggacagtggcccttcgcccaagat

SEQ ID NO: 2211834 - DNA, 25 bp, Homo sapien
tggcccttcgcccaagatggagaat

SEQ ID NO: 2211835 - DNA, 25 bp, Homo sapien
ccaccttgcctaggaggcttgtggg

SEQ ID NO: 2211836 - DNA, 25 bp, Homo sapien
gaacagtttggtccttgggtagcca

SEQ ID NO: 2211837 - DNA, 25 bp, Homo sapien
tgggacagcgtccaataccaaacag

SEQ ID NO: 2211838 - DNA, 25 bp, Homo sapien
caagcactgggcagcactgtagcag

SEQ ID NO: 2211839 - DNA, 25 bp, Homo sapien
tctccccctctcatgggctgtcaca

SEQ ID NO: 2211840 - DNA, 25 bp, Homo sapien
tgtcacagcagcctgggttggtatg

SEQ ID NO: 2211841 - DNA, 25 bp, Homo sapien
tgttccatcccagagcaacctctcc

SEQ ID NO: 2211842 - DNA, 25 bp, Homo sapien
ttttcttgttccatcccagagcaac

SEQ ID NO: 2211843 - DNA, 25 bp, Homo sapien
taacacacatcattactagggggct

SEQ ID NO: 2211844 - DNA, 25 bp, Homo sapien
aacaggagaaattaacacacatcat

SEQ ID NO: 2211845 - DNA, 25 bp, Homo sapien
caggagaaattaacacacatcatta

SEQ ID NO: 2211846 - DNA, 25 bp, Homo sapien
acatcattactagggggcttttggc

SEQ ID NO: 2211847 - DNA, 25 bp, Homo sapien
cactgaggacgaacgaatgacaggt

SEQ ID NO: 2211848 - DNA, 25 bp, Homo sapien
tgccctgcactgaggacgaacgaat

SEQ ID NO: 2211849 - DNA, 25 bp, Homo sapien
tgcactgaggacgaacgaatgacag

SEQ ID NO: 2211850 - DNA, 25 bp, Homo sapien
cctgcactgaggacgaacgaatgac

SEQ ID NO: 2211851 - DNA, 25 bp, Homo sapien
agcttcccatcacgggtttcaatct

SEQ ID NO: 2211852 - DNA, 25 bp, Homo sapien
tcacatcggcaggacatcagaggac

SEQ ID NO: 2211853 - DNA, 25 bp, Homo sapien
ccagcttcccatcacgggtttcaat

SEQ ID NO: 2211854 - DNA, 25 bp, Homo sapien
caccagcttcccatcacgggtttca

SEQ ID NO: 2211855 - DNA, 25 bp, Homo sapien
cttgtagtagtgaatttcttccctg

SEQ ID NO: 2211856 - DNA, 25 bp, Homo sapien
ctgccactatggattctagaagtag

SEQ ID NO: 2211857 - DNA, 25 bp, Homo sapien
tctagaagtagtgccagatttcttc

SEQ ID NO: 2211858 - DNA, 25 bp, Homo sapien
gtagtagtgaatttcttccctgtcc

SEQ ID NO: 2211859 - DNA, 25 bp, Homo sapien
caccgtgggacttgtcgtcgtggct

SEQ ID NO: 2211860 - DNA, 25 bp, Homo sapien
cacgtgtctgttgttgcgcatgcgc

SEQ ID NO: 2211861 - DNA, 25 bp, Homo sapien
cgcagagcggtcttcctgggaattt

SEQ ID NO: 2211862 - DNA, 25 bp, Homo sapien
tctcgaaaactcctggaaccctctg

SEQ ID NO: 2211863 - DNA, 25 bp, Homo sapien
tgtgttactgctcttttgtaggggt

SEQ ID NO: 2211864 - DNA, 25 bp, Homo sapien
tactttgctaagtataatgacctcc

SEQ ID NO: 2211865 - DNA, 25 bp, Homo sapien
acagaacagtttatatccctttggc

SEQ ID NO: 2211866 - DNA, 25 bp, Homo sapien
gtgaacatatgcgtacatgggtctt

SEQ ID NO: 2211867 - DNA, 25 bp, Homo sapien
tctggccacggagataatgtcattt

SEQ ID NO: 2211868 - DNA, 25 bp, Homo sapien
tccactcaagcagttggtaatgttg

SEQ ID NO: 2211869 - DNA, 25 bp, Homo sapien
tatgccagggtgatgctaaaatact

SEQ ID NO: 2211870 - DNA, 25 bp, Homo sapien
gacagatgctgatgccacaattgga

SEQ ID NO: 2211871 - DNA, 25 bp, Homo sapien
gatgctgttactcctcctgaccatg

SEQ ID NO: 2211872 - DNA, 25 bp, Homo sapien
aattaatgtttatatctggaatgaa

SEQ ID NO: 2211873 - DNA, 25 bp, Homo sapien
tcaattaatgtttatatctggaatg

SEQ ID NO: 2211874 - DNA, 25 bp, Homo sapien
taatgtttatatctggaatgaatga

SEQ ID NO: 2211875 - DNA, 25 bp, Homo sapien
ctgagtgaactacagcctttattat

SEQ ID NO: 2211876 - DNA, 25 bp, Homo sapien
tgctctgggccccatactagagtca

SEQ ID NO: 2211877 - DNA, 25 bp, Homo sapien
ggccccatactagagtcataacagt

SEQ ID NO: 2211878 - DNA, 25 bp, Homo sapien
gtcataacagtgctgttcatagtca

SEQ ID NO: 2211879 - DNA, 25 bp, Homo sapien
cattttgaaatggcgcagtggtgct

SEQ ID NO: 2211880 - DNA, 25 bp, Homo sapien
ccaggcacagtgtgcatgacttttc

SEQ ID NO: 2211881 - DNA, 25 bp, Homo sapien
tccttcatagcggagataagtagtt

SEQ ID NO: 2211882 - DNA, 25 bp, Homo sapien
gggaagaaaacacaggcgcaaattc

SEQ ID NO: 2211883 - DNA, 25 bp, Homo sapien
ggatctcacgggattttacaaattg

SEQ ID NO: 2211884 - DNA, 25 bp, Homo sapien
cttataaccttgcagcgggatggca

SEQ ID NO: 2211885 - DNA, 25 bp, Homo sapien
accagtttatgacataaacaggttt

SEQ ID NO: 2211886 - DNA, 25 bp, Homo sapien
aaccagtttatgacataaacaggtt

SEQ ID NO: 2211887 - DNA, 25 bp, Homo sapien
aaaggacataaaccagtttatgaca

SEQ ID NO: 2211888 - DNA, 25 bp, Homo sapien
aggacataaaccagtttatgacata

SEQ ID NO: 2211889 - DNA, 25 bp, Homo sapien
tatttactaggacaagagatttaca

SEQ ID NO: 2211890 - DNA, 25 bp, Homo sapien
gagatttacactgaccactctggaa

SEQ ID NO: 2211891 - DNA, 25 bp, Homo sapien
tagttcaactaagtactgaaaagtc

SEQ ID NO: 2211892 - DNA, 25 bp, Homo sapien
gaccactctggaataagactgtgct

SEQ ID NO: 2211893 - DNA, 25 bp, Homo sapien
aactggtggctaggtatcctttctc

SEQ ID NO: 2211894 - DNA, 25 bp, Homo sapien
taattgactcatgcctactccctaa

SEQ ID NO: 2211895 - DNA, 25 bp, Homo sapien
agcactggccatagaaaaaatgttc

SEQ ID NO: 2211896 - DNA, 25 bp, Homo sapien
tactccctaagtttgaggccaatgt

SEQ ID NO: 2211897 - DNA, 25 bp, Homo sapien
tatggcttcaatgcacaggagaagt

SEQ ID NO: 2211898 - DNA, 25 bp, Homo sapien
cctactaagtctgaagtgcacactc

SEQ ID NO: 2211899 - DNA, 25 bp, Homo sapien
tacaactagagagcaatttcaacag

SEQ ID NO: 2211900 - DNA, 25 bp, Homo sapien
tgttcatagtctaaactgggtctga

SEQ ID NO: 2211901 - DNA, 25 bp, Homo sapien
taaacaactgcccattaacttgtta

SEQ ID NO: 2211902 - DNA, 25 bp, Homo sapien
acaactgcccattaacttgttactt

SEQ ID NO: 2211903 - DNA, 25 bp, Homo sapien
gttggaataaggaagtcctaattca

SEQ ID NO: 2211904 - DNA, 25 bp, Homo sapien
tataaacacagtttaggttggaata

SEQ ID NO: 2211905 - DNA, 25 bp, Homo sapien
tctggttgatatgggagtaaagacc

SEQ ID NO: 2211906 - DNA, 25 bp, Homo sapien
caggctgttgaagtgagcctccttc

SEQ ID NO: 2211907 - DNA, 25 bp, Homo sapien
tatgggagtaaagaccttggcatgg

SEQ ID NO: 2211908 - DNA, 25 bp, Homo sapien
caaggtctggttgatatgggagtaa

SEQ ID NO: 2211909 - DNA, 25 bp, Homo sapien
tctctctgggatattaatgcggctg

SEQ ID NO: 2211910 - DNA, 25 bp, Homo sapien
catcgggttcagtaacaatctggtt

SEQ ID NO: 2211911 - DNA, 25 bp, Homo sapien
gggaaagtttgcatcgggttcagta

SEQ ID NO: 2211912 - DNA, 25 bp, Homo sapien
atattaatgcggctgctgctccttt

SEQ ID NO: 2211913 - DNA, 25 bp, Homo sapien
catatatctacgaagtggcagggtg

SEQ ID NO: 2211914 - DNA, 25 bp, Homo sapien
taatgaagttgggattaacagcccc

SEQ ID NO: 2211915 - DNA, 25 bp, Homo sapien
aacacaggccttgcaattccaaatc

SEQ ID NO: 2211916 - DNA, 25 bp, Homo sapien
gcataaaactctataatgggcttaa

SEQ ID NO: 2211917 - DNA, 25 bp, Homo sapien
tgtgcctttaagttacagggcgttg

SEQ ID NO: 2211918 - DNA, 25 bp, Homo sapien
cagggcgttgactcctggatataaa

SEQ ID NO: 2211919 - DNA, 25 bp, Homo sapien
actgtgttcataaggcacaaggcca

SEQ ID NO: 2211920 - DNA, 25 bp, Homo sapien
taaatcaaggttactatatccacgt

SEQ ID NO: 2211921 - DNA, 25 bp, Homo sapien
atagcctatattatgcaacctgggc

SEQ ID NO: 2211922 - DNA, 25 bp, Homo sapien
taaacatagcctatattatgcaacc

SEQ ID NO: 2211923 - DNA, 25 bp, Homo sapien
aacatagcctatattatgcaacctg

SEQ ID NO: 2211924 - DNA, 25 bp, Homo sapien
ttaataaacatagcctatattatgc

SEQ ID NO: 2211925 - DNA, 25 bp, Homo sapien
tatggttttgacacttgaaactgct

SEQ ID NO: 2211926 - DNA, 25 bp, Homo sapien
gaaactgctatcttagtacagaagc

SEQ ID NO: 2211927 - DNA, 25 bp, Homo sapien
gtgagatcccacttaatggaccgtt

SEQ ID NO: 2211928 - DNA, 25 bp, Homo sapien
cagaagcattaaccttaatacactt

SEQ ID NO: 2211929 - DNA, 25 bp, Homo sapien
aaccaaagaaactttgaggccagca

SEQ ID NO: 2211930 - DNA, 25 bp, Homo sapien
tgtaaccaaagaaactttgaggcca

SEQ ID NO: 2211931 - DNA, 25 bp, Homo sapien
aggccagcagggatttgctataata

SEQ ID NO: 2211932 - DNA, 25 bp, Homo sapien
gccagcagggatttgctataataca

SEQ ID NO: 2211933 - DNA, 25 bp, Homo sapien
cccaggctagagtgctagagtgcag

SEQ ID NO: 2211934 - DNA, 25 bp, Homo sapien
ccaggctagagtgctagagtgcagt

SEQ ID NO: 2211935 - DNA, 25 bp, Homo sapien
ccttggaattgtagcattagggcac

SEQ ID NO: 2211936 - DNA, 25 bp, Homo sapien
aaataacaggattcatagacctcta

SEQ ID NO: 2211937 - DNA, 25 bp, Homo sapien
tcctactctatacagtagggaagag

SEQ ID NO: 2211938 - DNA, 25 bp, Homo sapien
tacttaaaatgataacctgacaagg

SEQ ID NO: 2211939 - DNA, 25 bp, Homo sapien
tgatggttgccctctttactgccat

SEQ ID NO: 2211940 - DNA, 25 bp, Homo sapien
atgatggttgccctctttactgcca

SEQ ID NO: 2211941 - DNA, 25 bp, Homo sapien
ggaatgatggttgccctctttactg

SEQ ID NO: 2211942 - DNA, 25 bp, Homo sapien
gaatgatggttgccctctttactgc

SEQ ID NO: 2211943 - DNA, 25 bp, Homo sapien
gcctcaccgaggaaatgccaatttg

SEQ ID NO: 2211944 - DNA, 25 bp, Homo sapien
ctagcagcctcaccgaggaaatgcc

SEQ ID NO: 2211945 - DNA, 25 bp, Homo sapien
ctgagttttcgcgagggaccacatc

SEQ ID NO: 2211946 - DNA, 25 bp, Homo sapien
tgctattgtccactgactgagtttt

SEQ ID NO: 2211947 - DNA, 25 bp, Homo sapien
accagcatgttctttcggagaaggc

SEQ ID NO: 2211948 - DNA, 25 bp, Homo sapien
atgttctttcggagaaggcttcgcg

SEQ ID NO: 2211949 - DNA, 25 bp, Homo sapien
caaagaaccagcatgttctttcgga

SEQ ID NO: 2211950 - DNA, 25 bp, Homo sapien
tttttcaagcacgaagggcggggca

SEQ ID NO: 2211951 - DNA, 25 bp, Homo sapien
atatccgctgcgtttccgccctgag

SEQ ID NO: 2211952 - DNA, 25 bp, Homo sapien
ctgcaggtcatgagagccgagcgcc

SEQ ID NO: 2211953 - DNA, 25 bp, Homo sapien
ccctgagccccgagatcttggctga

SEQ ID NO: 2211954 - DNA, 25 bp, Homo sapien
aagaaaatacatatccgctgcgttt

SEQ ID NO: 2211955 - DNA, 25 bp, Homo sapien
ctcggaaccatagcaaccgcgcagg

SEQ ID NO: 2211956 - DNA, 25 bp, Homo sapien
tcggaaccatagcaaccgcgcagga

SEQ ID NO: 2211957 - DNA, 25 bp, Homo sapien
gaaccatagcaaccgcgcaggaagt

SEQ ID NO: 2211958 - DNA, 25 bp, Homo sapien
catagcaaccgcgcaggaagttcct

SEQ ID NO: 2211959 - DNA, 25 bp, Homo sapien
tactgaaacatagcgggtaggtccg

SEQ ID NO: 2211960 - DNA, 25 bp, Homo sapien
tagttcttctcatgcggcaccacgg

SEQ ID NO: 2211961 - DNA, 25 bp, Homo sapien
ccatgggccttctggtcttggcaag

SEQ ID NO: 2211962 - DNA, 25 bp, Homo sapien
caagcttctgaatgggtcaggcggc

SEQ ID NO: 2211963 - DNA, 25 bp, Homo sapien
cttgtaacaccctgagtaaagccca

SEQ ID NO: 2211964 - DNA, 25 bp, Homo sapien
ttgtaacaccctgagtaaagcccat

SEQ ID NO: 2211965 - DNA, 25 bp, Homo sapien
ttaagtgtaatcttcatgctttgaa

SEQ ID NO: 2211966 - DNA, 25 bp, Homo sapien
taagtgtaatcttcatgctttgaag

SEQ ID NO: 2211967 - DNA, 25 bp, Homo sapien
tagtatgggaagggtgtaaccaaca

SEQ ID NO: 2211968 - DNA, 25 bp, Homo sapien
cgatagcttatttagctgaccttac

SEQ ID NO: 2211969 - DNA, 25 bp, Homo sapien
gtgtaaccaacattttcggagtatg

SEQ ID NO: 2211970 - DNA, 25 bp, Homo sapien
caacattttcggagtatgggcccga

SEQ ID NO: 2211971 - DNA, 25 bp, Homo sapien
gtagttcttttgtcagacatatttc

SEQ ID NO: 2211972 - DNA, 25 bp, Homo sapien
aataagaggattttaacctctgttg

SEQ ID NO: 2211973 - DNA, 25 bp, Homo sapien
acctctgttgtttactctatcaaag

SEQ ID NO: 2211974 - DNA, 25 bp, Homo sapien
agaaataagaggattttaacctctg

SEQ ID NO: 2211975 - DNA, 25 bp, Homo sapien
agttttaagtcttatgcaattgccg

SEQ ID NO: 2211976 - DNA, 25 bp, Homo sapien
tgttaatgagaggagttgaacctct

SEQ ID NO: 2211977 - DNA, 25 bp, Homo sapien
tttaagtcttatgcaattgccgggc

SEQ ID NO: 2211978 - DNA, 25 bp, Homo sapien
taagtcttatgcaattgccgggctc

SEQ ID NO: 2211979 - DNA, 25 bp, Homo sapien
cggccattgaacgtatgtcactggg

SEQ ID NO: 2211980 - DNA, 25 bp, Homo sapien
gatactgcggccattgaacgtatgt

SEQ ID NO: 2211981 - DNA, 25 bp, Homo sapien
gcacagtcaggatactgcggccatt

SEQ ID NO: 2211982 - DNA, 25 bp, Homo sapien
ccattgaacgtatgtcactgggcag

SEQ ID NO: 2211983 - DNA, 25 bp, Homo sapien
accaggctcggtaggcttgtcactg

SEQ ID NO: 2211984 - DNA, 25 bp, Homo sapien
ttaagatcccatcttggacaaccag

SEQ ID NO: 2211985 - DNA, 25 bp, Homo sapien
cggtaggcttgtcactgctacttat

SEQ ID NO: 2211986 - DNA, 25 bp, Homo sapien
cactgctacttatgaatcttctcac

SEQ ID NO: 2211987 - DNA, 25 bp, Homo sapien
gggaacttggctataattctctgtg

SEQ ID NO: 2211988 - DNA, 25 bp, Homo sapien
tatgcagaagatataagggtttgtc

SEQ ID NO: 2211989 - DNA, 25 bp, Homo sapien
tgctttttgatgcttgatacagttc

SEQ ID NO: 2211990 - DNA, 25 bp, Homo sapien
acataggtaagtgtgctctttcagc

SEQ ID NO: 2211991 - DNA, 25 bp, Homo sapien
gatcaggtcgtgatgaaatcttccg

SEQ ID NO: 2211992 - DNA, 25 bp, Homo sapien
ctcaaagtgatcaggtcgtgatgaa

SEQ ID NO: 2211993 - DNA, 25 bp, Homo sapien
ggtcgtgatgaaatcttccgggtgt

SEQ ID NO: 2211994 - DNA, 25 bp, Homo sapien
ttccgggtgtaagccagatgctttg

SEQ ID NO: 2211995 - DNA, 25 bp, Homo sapien
caacttcgttggagtttagctttat

SEQ ID NO: 2211996 - DNA, 25 bp, Homo sapien
ttaaacactctttataccgagctct

SEQ ID NO: 2211997 - DNA, 25 bp, Homo sapien
cgagctctattagctcgggttaatc

SEQ ID NO: 2211998 - DNA, 25 bp, Homo sapien
ggcagaccttaaacactctttatac

SEQ ID NO: 2211999 - DNA, 25 bp, Homo sapien
gtcgtgtggacccatctaggtattt

SEQ ID NO: 2212000 - DNA, 25 bp, Homo sapien
gtgtcgtgtggacccatctaggtat

SEQ ID NO: 2212001 - DNA, 25 bp, Homo sapien
ctgtttatggtgtcgtgtggaccca

SEQ ID NO: 2212002 - DNA, 25 bp, Homo sapien
gtgtggacccatctaggtattttca

SEQ ID NO: 2212003 - DNA, 25 bp, Homo sapien
tgcagattcaatcggagatagttct

SEQ ID NO: 2212004 - DNA, 25 bp, Homo sapien
catgagtgtacgatttttccagtga

SEQ ID NO: 2212005 - DNA, 25 bp, Homo sapien
gaggagggatttgcagattcaatcg

SEQ ID NO: 2212006 - DNA, 25 bp, Homo sapien
gatagttcttgaaatcatacatgca

SEQ ID NO: 2212007 - DNA, 25 bp, Homo sapien
tcacgtggcaaataccccactgagt

SEQ ID NO: 2212008 - DNA, 25 bp, Homo sapien
tgcgcatgctgcacagatctgttgc

SEQ ID NO: 2212009 - DNA, 25 bp, Homo sapien
taccccactgagtgcgcatgctgca

SEQ ID NO: 2212010 - DNA, 25 bp, Homo sapien
cagatctgttgctgcgcatgcgcct

SEQ ID NO: 2212011 - DNA, 25 bp, Homo sapien
gcaaggagaggttgtgtcttcgttc

SEQ ID NO: 2212012 - DNA, 25 bp, Homo sapien
cttctgtctaggcagagctctgcaa

SEQ ID NO: 2212013 - DNA, 25 bp, Homo sapien
tttccgccatcttcgttctttccaa

SEQ ID NO: 2212014 - DNA, 25 bp, Homo sapien
ctgcaaggagaggttgtgtcttcgt

SEQ ID NO: 2212015 - DNA, 25 bp, Homo sapien
cttaggacaggtcccgtggcacagt

SEQ ID NO: 2212016 - DNA, 25 bp, Homo sapien
agggcctcgcggtggtcctccgcct

SEQ ID NO: 2212017 - DNA, 25 bp, Homo sapien
ctgcagagtggtcttcctggtaatt

SEQ ID NO: 2212018 - DNA, 25 bp, Homo sapien
ccccaggtcctgatgcaggcgccat

SEQ ID NO: 2212019 - DNA, 25 bp, Homo sapien
tttctggactcttcgttagggatgc

SEQ ID NO: 2212020 - DNA, 25 bp, Homo sapien
ttaactctgtgtcgcaacttctcat

SEQ ID NO: 2212021 - DNA, 25 bp, Homo sapien
ggtgtccagtgaggaacataacctt

SEQ ID NO: 2212022 - DNA, 25 bp, Homo sapien
gatcgcctgaagatggtgcgagtcc

SEQ ID NO: 2212023 - DNA, 25 bp, Homo sapien
tgttgcttggtaccagacagctcag

SEQ ID NO: 2212024 - DNA, 25 bp, Homo sapien
ttggtaccagacagctcagatcgat

SEQ ID NO: 2212025 - DNA, 25 bp, Homo sapien
gctcagatcgatcagggtcataggc

SEQ ID NO: 2212026 - DNA, 25 bp, Homo sapien
gcccctccatgttgcttggtaccag

SEQ ID NO: 2212027 - DNA, 25 bp, Homo sapien
ttgtgtgagtattcataagaaatat

SEQ ID NO: 2212028 - DNA, 25 bp, Homo sapien
tactgagattatcatataacatgca

SEQ ID NO: 2212029 - DNA, 25 bp, Homo sapien
aactaacaggataggtgtatatgtg

SEQ ID NO: 2212030 - DNA, 25 bp, Homo sapien
gaaggaaccctgaattttcaatata

SEQ ID NO: 2212031 - DNA, 25 bp, Homo sapien
cactttcagaagcatatactttaag

SEQ ID NO: 2212032 - DNA, 25 bp, Homo sapien
cagcataaaaacatgagcaggtggc

SEQ ID NO: 2212033 - DNA, 25 bp, Homo sapien
atcagcataaaaacatgagcaggtg

SEQ ID NO: 2212034 - DNA, 25 bp, Homo sapien
agagtgacagcatcattagaggcat

SEQ ID NO: 2212035 - DNA, 25 bp, Homo sapien
tcatttaaaccgatggttgcccttc

SEQ ID NO: 2212036 - DNA, 25 bp, Homo sapien
catttaaaccgatggttgcccttca

SEQ ID NO: 2212037 - DNA, 25 bp, Homo sapien
tgcatgtatggtttcagcttgtctt

SEQ ID NO: 2212038 - DNA, 25 bp, Homo sapien
tttccaacataaagactgcatgtat

SEQ ID NO: 2212039 - DNA, 25 bp, Homo sapien
gcagtagtggtacctctatattata

SEQ ID NO: 2212040 - DNA, 25 bp, Homo sapien
gtggctttgacccaatgtggtagga

SEQ ID NO: 2212041 - DNA, 25 bp, Homo sapien
tagagcctacttaattgcctcagca

SEQ ID NO: 2212042 - DNA, 25 bp, Homo sapien
tgaaaacagaaaccccataatttgc

SEQ ID NO: 2212043 - DNA, 25 bp, Homo sapien
aaattctcccttgacattaggacca

SEQ ID NO: 2212044 - DNA, 25 bp, Homo sapien
gtctttgaccgagtcagttcccaga

SEQ ID NO: 2212045 - DNA, 25 bp, Homo sapien
ccccagtctttgaccgagtcagttc

SEQ ID NO: 2212046 - DNA, 25 bp, Homo sapien
ttctcccttgacattaggaccatct

SEQ ID NO: 2212047 - DNA, 25 bp, Homo sapien
cacaactgccccagacagattagtt

SEQ ID NO: 2212048 - DNA, 25 bp, Homo sapien
tacacgcaatgcataagaatttcaa

SEQ ID NO: 2212049 - DNA, 25 bp, Homo sapien
gaatgataatattcactccctcaat

SEQ ID NO: 2212050 - DNA, 25 bp, Homo sapien
gcctataggctagtgtggtaataca

SEQ ID NO: 2212051 - DNA, 25 bp, Homo sapien
taggcattcttcctctcccacgctt

SEQ ID NO: 2212052 - DNA, 25 bp, Homo sapien
cataggcattcttcctctcccacgc

SEQ ID NO: 2212053 - DNA, 25 bp, Homo sapien
ccccctccattcataggcattcttc

SEQ ID NO: 2212054 - DNA, 25 bp, Homo sapien
gcattcttcctctcccacgcttcac

SEQ ID NO: 2212055 - DNA, 25 bp, Homo sapien
tgttgaagctggtcattactgggca

SEQ ID NO: 2212056 - DNA, 25 bp, Homo sapien
tccagtgctccctcgtctctctctt

SEQ ID NO: 2212057 - DNA, 25 bp, Homo sapien
ttctctagatctggatcttgttctt

SEQ ID NO: 2212058 - DNA, 25 bp, Homo sapien
ccctactggatgattagagtcttga

SEQ ID NO: 2212059 - DNA, 25 bp, Homo sapien
acagcccctactggatgattagagt

SEQ ID NO: 2212060 - DNA, 25 bp, Homo sapien
atcttgttctttgatgtccactcat

SEQ ID NO: 2212061 - DNA, 25 bp, Homo sapien
gtgattcctcccctctacggtccac

SEQ ID NO: 2212062 - DNA, 25 bp, Homo sapien
gggcgtcgcgacctgggaggagccg

SEQ ID NO: 2212063 - DNA, 25 bp, Homo sapien
gtcctggcccagaaacgacgacaaa

SEQ ID NO: 2212064 - DNA, 25 bp, Homo sapien
cgtcgacggcgaggcccttttctct

SEQ ID NO: 2212065 - DNA, 25 bp, Homo sapien
aaaagggagggccagtgacacaagt

SEQ ID NO: 2212066 - DNA, 25 bp, Homo sapien
tgctagaactcctctggcaaaaggg

SEQ ID NO: 2212067 - DNA, 25 bp, Homo sapien
tgacacaagtgggaacaagtagact

SEQ ID NO: 2212068 - DNA, 25 bp, Homo sapien
tagctgattcatgccgtcaacctag

SEQ ID NO: 2212069 - DNA, 25 bp, Homo sapien
ttgaaagccacctagcaatagtaac

SEQ ID NO: 2212070 - DNA, 25 bp, Homo sapien
tacatagcattcattgaaagccacc

SEQ ID NO: 2212071 - DNA, 25 bp, Homo sapien
ctcccacaacctgtgagagaggtgg

SEQ ID NO: 2212072 - DNA, 25 bp, Homo sapien
ttctcccacaacctgtgagagaggt

SEQ ID NO: 2212073 - DNA, 25 bp, Homo sapien
caggagacattgtttcgcaagaccc

SEQ ID NO: 2212074 - DNA, 25 bp, Homo sapien
acattgtttcgcaagaccctttcag

SEQ ID NO: 2212075 - DNA, 25 bp, Homo sapien
aagtcaggagacattgtttcgcaag

SEQ ID NO: 2212076 - DNA, 25 bp, Homo sapien
tcgcaagaccctttcaggctagagt

SEQ ID NO: 2212077 - DNA, 25 bp, Homo sapien
gacattatagctagaaggatccact

SEQ ID NO: 2212078 - DNA, 25 bp, Homo sapien
tatgtagggtagacttccacactcg

SEQ ID NO: 2212079 - DNA, 25 bp, Homo sapien
tgtaaatcagaagacataagcctca

SEQ ID NO: 2212080 - DNA, 25 bp, Homo sapien
catatcagttaaggacagtgtacaa

SEQ ID NO: 2212081 - DNA, 25 bp, Homo sapien
gtggggctcaactctatttgaatgg

SEQ ID NO: 2212082 - DNA, 25 bp, Homo sapien
aatgtggtcccagtatttggagagt

SEQ ID NO: 2212083 - DNA, 25 bp, Homo sapien
gtggtcccagtatttggagagtgta

SEQ ID NO: 2212084 - DNA, 25 bp, Homo sapien
tggggctcaactctatttgaatggc

SEQ ID NO: 2212085 - DNA, 25 bp, Homo sapien
taccttgcttcccaaggtagtattc

SEQ ID NO: 2212086 - DNA, 25 bp, Homo sapien
gtattcaaggcaacttcatggaact

SEQ ID NO: 2212087 - DNA, 25 bp, Homo sapien
gcttcccaaggtagtattcaaggca

SEQ ID NO: 2212088 - DNA, 25 bp, Homo sapien
aaggtagtattcaaggcaacttcat

SEQ ID NO: 2212089 - DNA, 25 bp, Homo sapien
ctttgtgtctgctgttgtgtgaaga

SEQ ID NO: 2212090 - DNA, 25 bp, Homo sapien
tcatatctgacgtttctgaaaccct

SEQ ID NO: 2212091 - DNA, 25 bp, Homo sapien
tccttagttactgcagaacatagag

SEQ ID NO: 2212092 - DNA, 25 bp, Homo sapien
cataatctatgatcttgtacagcac

SEQ ID NO: 2212093 - DNA, 25 bp, Homo sapien
gatgttgacattacccctgatcagc

SEQ ID NO: 2212094 - DNA, 25 bp, Homo sapien
aagggcaatctgcacactacaggca

SEQ ID NO: 2212095 - DNA, 25 bp, Homo sapien
tgcccaaagggcgatacaagtcact

SEQ ID NO: 2212096 - DNA, 25 bp, Homo sapien
acacgacgttgatgagattcccaca

SEQ ID NO: 2212097 - DNA, 25 bp, Homo sapien
atggactctgaagccgctctgccaa

SEQ ID NO: 2212098 - DNA, 25 bp, Homo sapien
cccgtatccaatcatggactctgaa

SEQ ID NO: 2212099 - DNA, 25 bp, Homo sapien
cgctctgccaaacccacactgtccc

SEQ ID NO: 2212100 - DNA, 25 bp, Homo sapien
agccgctctgccaaacccacactgt

SEQ ID NO: 2212101 - DNA, 25 bp, Homo sapien
aagattagcatgcaaggcagtggcc

SEQ ID NO: 2212102 - DNA, 25 bp, Homo sapien
agggaatagaagattagcatgcaag

SEQ ID NO: 2212103 - DNA, 25 bp, Homo sapien
aatagaagattagcatgcaaggcag

SEQ ID NO: 2212104 - DNA, 25 bp, Homo sapien
tagaagattagcatgcaaggcagtg

SEQ ID NO: 2212105 - DNA, 25 bp, Homo sapien
cctgcaaagaacctgtgggcagcag

SEQ ID NO: 2212106 - DNA, 25 bp, Homo sapien
tgcaaagaacctgtgggcagcagta

SEQ ID NO: 2212107 - DNA, 25 bp, Homo sapien
gcagcagtagccttccccttcttcc

SEQ ID NO: 2212108 - DNA, 25 bp, Homo sapien
tgtgggcagcagtagccttcccctt

SEQ ID NO: 2212109 - DNA, 25 bp, Homo sapien
tgttcatggcctttggacaccacca

SEQ ID NO: 2212110 - DNA, 25 bp, Homo sapien
ccctactgttgcagtaaggaatcac

SEQ ID NO: 2212111 - DNA, 25 bp, Homo sapien
tactgcgtactgcaccctactgttg

SEQ ID NO: 2212112 - DNA, 25 bp, Homo sapien
gacaccaccagtgggagcagtctca

SEQ ID NO: 2212113 - DNA, 25 bp, Homo sapien
cagggagatctgtgcacagtgagca

SEQ ID NO: 2212114 - DNA, 25 bp, Homo sapien
taagccttgggcatatcagacactg

SEQ ID NO: 2212115 - DNA, 25 bp, Homo sapien
tgtggaagcaccatagattgcactg

SEQ ID NO: 2212116 - DNA, 25 bp, Homo sapien
taatggtactaatccccgggctgtg

SEQ ID NO: 2212117 - DNA, 25 bp, Homo sapien
attgccagagacttaattctccggt

SEQ ID NO: 2212118 - DNA, 25 bp, Homo sapien
tttcctcaaggggatatcctctggg

SEQ ID NO: 2212119 - DNA, 25 bp, Homo sapien
gagacttaattctccggtataatgt

SEQ ID NO: 2212120 - DNA, 25 bp, Homo sapien
gccagagacttaattctccggtata

SEQ ID NO: 2212121 - DNA, 25 bp, Homo sapien
ccactgaaatagttgaagttgactc

SEQ ID NO: 2212122 - DNA, 25 bp, Homo sapien
cgcgtaaggtttggtacatgatttc

SEQ ID NO: 2212123 - DNA, 25 bp, Homo sapien
tcaacccattcttatggctacacac

SEQ ID NO: 2212124 - DNA, 25 bp, Homo sapien
tacacacagcatgtacgcgtaaggt

SEQ ID NO: 2212125 - DNA, 25 bp, Homo sapien
cataaactgtggtaggcctgtggga

SEQ ID NO: 2212126 - DNA, 25 bp, Homo sapien
caaatcagtattggaccacttgggt

SEQ ID NO: 2212127 - DNA, 25 bp, Homo sapien
gatttataaacacataggtccggcc

SEQ ID NO: 2212128 - DNA, 25 bp, Homo sapien
aaataggacatgaagtcacctgctg

SEQ ID NO: 2212129 - DNA, 25 bp, Homo sapien
gaaggcctcagatatgggtccctgc

SEQ ID NO: 2212130 - DNA, 25 bp, Homo sapien
tatacctgcctagagcattcaggga

SEQ ID NO: 2212131 - DNA, 25 bp, Homo sapien
tactatcaccgaggtatggacaaag

SEQ ID NO: 2212132 - DNA, 25 bp, Homo sapien
ctcagagatgtaggtaaggccaggt

SEQ ID NO: 2212133 - DNA, 25 bp, Homo sapien
tctctaaaatctgaattgcattcca

SEQ ID NO: 2212134 - DNA, 25 bp, Homo sapien
tgtcttgaattattctaaacttgcc

SEQ ID NO: 2212135 - DNA, 25 bp, Homo sapien
tctgaattgcattccattctgtatt

SEQ ID NO: 2212136 - DNA, 25 bp, Homo sapien
cttaatcattatagtagtaattttg

SEQ ID NO: 2212137 - DNA, 25 bp, Homo sapien
tttttcttccgacagacccatgggc

SEQ ID NO: 2212138 - DNA, 25 bp, Homo sapien
caagatactagctgtcacataggtg

SEQ ID NO: 2212139 - DNA, 25 bp, Homo sapien
ggaatactccctgacttcacaagat

SEQ ID NO: 2212140 - DNA, 25 bp, Homo sapien
ccatgggccatgctaaaataggttc

SEQ ID NO: 2212141 - DNA, 25 bp, Homo sapien
gacatgtgacatctgattgcaggcc

SEQ ID NO: 2212142 - DNA, 25 bp, Homo sapien
ttagtagaggccaaaaacggagtca

SEQ ID NO: 2212143 - DNA, 25 bp, Homo sapien
gaatacttattctcattgggcacac

SEQ ID NO: 2212144 - DNA, 25 bp, Homo sapien
gagtaagtcctcaatggtagccttg

SEQ ID NO: 2212145 - DNA, 25 bp, Homo sapien
gaatgtgaggagttcggctcccaga

SEQ ID NO: 2212146 - DNA, 25 bp, Homo sapien
ggctcccagagtacatagcatgaaa

SEQ ID NO: 2212147 - DNA, 25 bp, Homo sapien
aaagcgaagacatttcacagaccag

SEQ ID NO: 2212148 - DNA, 25 bp, Homo sapien
ggaatatgggtaagtgcctggacaa

SEQ ID NO: 2212149 - DNA, 25 bp, Homo sapien
gaaacatctgttgaggtggaagtta

SEQ ID NO: 2212150 - DNA, 25 bp, Homo sapien
ttctttggcaatctgttctatgtct

SEQ ID NO: 2212151 - DNA, 25 bp, Homo sapien
ctttggcaatctgttctatgtcttt

SEQ ID NO: 2212152 - DNA, 25 bp, Homo sapien
gaggtggaagttaataatctcaaaa

SEQ ID NO: 2212153 - DNA, 25 bp, Homo sapien
gataaaggtctacagctaaatggtg

SEQ ID NO: 2212154 - DNA, 25 bp, Homo sapien
cgctggtagatcaacctcaggttct

SEQ ID NO: 2212155 - DNA, 25 bp, Homo sapien
tgctttacgtttcctagtctctggg

SEQ ID NO: 2212156 - DNA, 25 bp, Homo sapien
tgggtactacatacgtgacagatgc

SEQ ID NO: 2212157 - DNA, 25 bp, Homo sapien
ctgtgggaccctgaccaaactcgac

SEQ ID NO: 2212158 - DNA, 25 bp, Homo sapien
accaaactcgacctccagcaaccag

SEQ ID NO: 2212159 - DNA, 25 bp, Homo sapien
ccagtcccctaagccgccaggatcc

SEQ ID NO: 2212160 - DNA, 25 bp, Homo sapien
ctgaccaaactcgacctccagcaac

SEQ ID NO: 2212161 - DNA, 25 bp, Homo sapien
aaacgggcgaggagctgctgtgaca

SEQ ID NO: 2212162 - DNA, 25 bp, Homo sapien
cagcgaagggggattgaagggagca

SEQ ID NO: 2212163 - DNA, 25 bp, Homo sapien
gatctgcgccgggatccacgccagg

SEQ ID NO: 2212164 - DNA, 25 bp, Homo sapien
ttgcggcgcgggcaaacgggcgagg

SEQ ID NO: 2212165 - DNA, 25 bp, Homo sapien
gtcaagttctcctccggcgcgggct

SEQ ID NO: 2212166 - DNA, 25 bp, Homo sapien
tccacgtcaagttctcctccggcgc

SEQ ID NO: 2212167 - DNA, 25 bp, Homo sapien
tgctgctccacgtcaagttctcctc

SEQ ID NO: 2212168 - DNA, 25 bp, Homo sapien
ctccggcgcgggctcacgctcttgt

SEQ ID NO: 2212169 - DNA, 25 bp, Homo sapien
ttctcaaccgcctcctcaggagagg

SEQ ID NO: 2212170 - DNA, 25 bp, Homo sapien
cctccggagatccagcggaccccag

SEQ ID NO: 2212171 - DNA, 25 bp, Homo sapien
agggcaaagaagtttctcgaacctg

SEQ ID NO: 2212172 - DNA, 25 bp, Homo sapien
tcggcttcacgtctcgaagacgcct

SEQ ID NO: 2212173 - DNA, 25 bp, Homo sapien
caaggcgtctggaaaacagctgcga

SEQ ID NO: 2212174 - DNA, 25 bp, Homo sapien
ggagcaaggcgtctggaaaacagct

SEQ ID NO: 2212175 - DNA, 25 bp, Homo sapien
gcaaggcgtctggaaaacagctgcg

SEQ ID NO: 2212176 - DNA, 25 bp, Homo sapien
ctgaggagcaaggcgtctggaaaac

SEQ ID NO: 2212177 - DNA, 25 bp, Homo sapien
gtagatgaaaggagacagagacttc

SEQ ID NO: 2212178 - DNA, 25 bp, Homo sapien
aaggagacagagacttctgtgaatg

SEQ ID NO: 2212179 - DNA, 25 bp, Homo sapien
ctgtagatgaaaggagacagagact

SEQ ID NO: 2212180 - DNA, 25 bp, Homo sapien
ggagacagagacttctgtgaatgat

SEQ ID NO: 2212181 - DNA, 25 bp, Homo sapien
accccggattctgccctcctgcagt

SEQ ID NO: 2212182 - DNA, 25 bp, Homo sapien
tcagggctggtcacaagggggccgc

SEQ ID NO: 2212183 - DNA, 25 bp, Homo sapien
cgcaggcaggcaaacctcttcctga

SEQ ID NO: 2212184 - DNA, 25 bp, Homo sapien
ggcccctcccctctcgacgtgcggc

SEQ ID NO: 2212185 - DNA, 25 bp, Homo sapien
cctccgcacaatggatatcactgat

SEQ ID NO: 2212186 - DNA, 25 bp, Homo sapien
caaaacctcacgattaggattcagc

SEQ ID NO: 2212187 - DNA, 25 bp, Homo sapien
gctctcttaacttggcagtggcatc

SEQ ID NO: 2212188 - DNA, 25 bp, Homo sapien
ggcatctagtggatacctccgcaca

SEQ ID NO: 2212189 - DNA, 25 bp, Homo sapien
gcagggagggtgccatggactgggt

SEQ ID NO: 2212190 - DNA, 25 bp, Homo sapien
gcccacatttgtctgcccagcctcc

SEQ ID NO: 2212191 - DNA, 25 bp, Homo sapien
atggactgggttccagtcctttggg

SEQ ID NO: 2212192 - DNA, 25 bp, Homo sapien
ggggcccacatttgtctgcccagcc

SEQ ID NO: 2212193 - DNA, 25 bp, Homo sapien
aacagcctcagacaccactggagtg

SEQ ID NO: 2212194 - DNA, 25 bp, Homo sapien
aagcaacagcctcagacaccactgg

SEQ ID NO: 2212195 - DNA, 25 bp, Homo sapien
tgtgctccagctcgtagctggtctg

SEQ ID NO: 2212196 - DNA, 25 bp, Homo sapien
tcgtagctggtctgcctccaacctt

SEQ ID NO: 2212197 - DNA, 25 bp, Homo sapien
tgccacaaccagtccaaacttgctt

SEQ ID NO: 2212198 - DNA, 25 bp, Homo sapien
tgagcaccctctatagtctgccagg

SEQ ID NO: 2212199 - DNA, 25 bp, Homo sapien
tccacactcttgatgacatgggaaa

SEQ ID NO: 2212200 - DNA, 25 bp, Homo sapien
ctatccctatcctcatttcgagttg

SEQ ID NO: 2212201 - DNA, 25 bp, Homo sapien
tacacggtgatttgtttgcagatga

SEQ ID NO: 2212202 - DNA, 25 bp, Homo sapien
catgtacctccacgcagaatgcagc

SEQ ID NO: 2212203 - DNA, 25 bp, Homo sapien
gcttcagagtccatgattggatacg

SEQ ID NO: 2212204 - DNA, 25 bp, Homo sapien
tgcagatgaacttgattggaaggaa

SEQ ID NO: 2212205 - DNA, 25 bp, Homo sapien
agagcagttcagcagcctttatgga

SEQ ID NO: 2212206 - DNA, 25 bp, Homo sapien
tctctgacttggtgagaaagcaggc

SEQ ID NO: 2212207 - DNA, 25 bp, Homo sapien
gcctcagactcagaatcgagctcat

SEQ ID NO: 2212208 - DNA, 25 bp, Homo sapien
tctgttttaagcaagacaaggtcac

SEQ ID NO: 2212209 - DNA, 25 bp, Homo sapien
aaaagtcagtggaagggcagttctg

SEQ ID NO: 2212210 - DNA, 25 bp, Homo sapien
acctccaccacgactccaaaataat

SEQ ID NO: 2212211 - DNA, 25 bp, Homo sapien
tcagcacatcttcgtaagaatcacc

SEQ ID NO: 2212212 - DNA, 25 bp, Homo sapien
cctccaccacgactccaaaataatt

SEQ ID NO: 2212213 - DNA, 25 bp, Homo sapien
caacactgggcccaaggaggatgcc

SEQ ID NO: 2212214 - DNA, 25 bp, Homo sapien
tccctttggtcatggccattgtctg

SEQ ID NO: 2212215 - DNA, 25 bp, Homo sapien
tgagcccaggccgaatccaaatctc

SEQ ID NO: 2212216 - DNA, 25 bp, Homo sapien
tcatgggcagatgcccactgtttgc

SEQ ID NO: 2212217 - DNA, 25 bp, Homo sapien
tgttgtttgcttggtccaccgtggg

SEQ ID NO: 2212218 - DNA, 25 bp, Homo sapien
ttggcaacagtatcggagcaatgtc

SEQ ID NO: 2212219 - DNA, 25 bp, Homo sapien
gagcaatgtcacaggctcagaaaca

SEQ ID NO: 2212220 - DNA, 25 bp, Homo sapien
ttggtccaccgtgggaaagccagga

SEQ ID NO: 2212221 - DNA, 25 bp, Homo sapien
ccaaatgtccacgctaccttcagtg

SEQ ID NO: 2212222 - DNA, 25 bp, Homo sapien
aaatgtccacgctaccttcagtgcc

SEQ ID NO: 2212223 - DNA, 25 bp, Homo sapien
tgtccacgctaccttcagtgcctcc

SEQ ID NO: 2212224 - DNA, 25 bp, Homo sapien
aatgtccacgctaccttcagtgcct

SEQ ID NO: 2212225 - DNA, 25 bp, Homo sapien
ttttgacacgcctagagcctctgag

SEQ ID NO: 2212226 - DNA, 25 bp, Homo sapien
taagaattattccagccatgagagc

SEQ ID NO: 2212227 - DNA, 25 bp, Homo sapien
gattttgaaccactagggacctcag

SEQ ID NO: 2212228 - DNA, 25 bp, Homo sapien
gcctctgaagtactgggaacctcga

SEQ ID NO: 2212229 - DNA, 25 bp, Homo sapien
tgcatgctcttctgcgacttcagtg

SEQ ID NO: 2212230 - DNA, 25 bp, Homo sapien
gattcaacgcattaaataaggctgc

SEQ ID NO: 2212231 - DNA, 25 bp, Homo sapien
cgacatgccccaagtgacatcagag

SEQ ID NO: 2212232 - DNA, 25 bp, Homo sapien
gaggtaatctgaacaaaaggtgcca

SEQ ID NO: 2212233 - DNA, 25 bp, Homo sapien
tgtttctgtatctgatagtgtttaa

SEQ ID NO: 2212234 - DNA, 25 bp, Homo sapien
caggcatttggggtcggaacaactt

SEQ ID NO: 2212235 - DNA, 25 bp, Homo sapien
gtgtttaagtcttccagtcaggcat

SEQ ID NO: 2212236 - DNA, 25 bp, Homo sapien
tctgtatctgatagtgtttaagtct

SEQ ID NO: 2212237 - DNA, 25 bp, Homo sapien
tgctctaaatttagcagaattttct

SEQ ID NO: 2212238 - DNA, 25 bp, Homo sapien
tctaaatttagcagaattttctcct

SEQ ID NO: 2212239 - DNA, 25 bp, Homo sapien
taaattgctctaaatttagcagaat

SEQ ID NO: 2212240 - DNA, 25 bp, Homo sapien
taaatttagcagaattttctcctgg

SEQ ID NO: 2212241 - DNA, 25 bp, Homo sapien
gctgcaccctgatctctctcctgac

SEQ ID NO: 2212242 - DNA, 25 bp, Homo sapien
gaatctcagctgcaccctgatctct

SEQ ID NO: 2212243 - DNA, 25 bp, Homo sapien
cttgaatctcagctgcaccctgatc

SEQ ID NO: 2212244 - DNA, 25 bp, Homo sapien
agctgcaccctgatctctctcctga

SEQ ID NO: 2212245 - DNA, 25 bp, Homo sapien
ggttcttgttgttgaggctcctcat

SEQ ID NO: 2212246 - DNA, 25 bp, Homo sapien
caactttcagttggtggttcttgtt

SEQ ID NO: 2212247 - DNA, 25 bp, Homo sapien
ttgttgttgaggctcctcatcactg

SEQ ID NO: 2212248 - DNA, 25 bp, Homo sapien
tgtaggatcccaactttcagttggt

SEQ ID NO: 2212249 - DNA, 25 bp, Homo sapien
ccgatcccctttgcgccaaggccct

SEQ ID NO: 2212250 - DNA, 25 bp, Homo sapien
cagcacccacaacacgtgccccatt

SEQ ID NO: 2212251 - DNA, 25 bp, Homo sapien
cacccacaacacgtgccccatttta

SEQ ID NO: 2212252 - DNA, 25 bp, Homo sapien
aacagcacccacaacacgtgcccca

SEQ ID NO: 2212253 - DNA, 25 bp, Homo sapien
tggacctatctgatgtgttatagtt

SEQ ID NO: 2212254 - DNA, 25 bp, Homo sapien
tgggaggactgatctatggacctat

SEQ ID NO: 2212255 - DNA, 25 bp, Homo sapien
gactgatctatggacctatctgatg

SEQ ID NO: 2212256 - DNA, 25 bp, Homo sapien
gatctatggacctatctgatgtgtt

SEQ ID NO: 2212257 - DNA, 25 bp, Homo sapien
cccttcactaacagactccagccct

SEQ ID NO: 2212258 - DNA, 25 bp, Homo sapien
tggatatgcgacaaggcaaactaac

SEQ ID NO: 2212259 - DNA, 25 bp, Homo sapien
cagcactggtgaaccttgtagccat

SEQ ID NO: 2212260 - DNA, 25 bp, Homo sapien
ggcaaactaacaacagcactggtga

SEQ ID NO: 2212261 - DNA, 25 bp, Homo sapien
cggccaatctatggatatgcgacaa

SEQ ID NO: 2212262 - DNA, 25 bp, Homo sapien
cttgtcatcgggaccatctctgcat

SEQ ID NO: 2212263 - DNA, 25 bp, Homo sapien
tcgtatccagggacggcatgaagct

SEQ ID NO: 2212264 - DNA, 25 bp, Homo sapien
aaaagagaagattcatcgtatccag

SEQ ID NO: 2212265 - DNA, 25 bp, Homo sapien
tcatctgatttagcaaggactgtat

SEQ ID NO: 2212266 - DNA, 25 bp, Homo sapien
gcatgcaaaataaacgtcgaagaaa

SEQ ID NO: 2212267 - DNA, 25 bp, Homo sapien
tcagctgcacccctgatcttctctc

SEQ ID NO: 2212268 - DNA, 25 bp, Homo sapien
tgcacccctgatcttctctctcctc

SEQ ID NO: 2212269 - DNA, 25 bp, Homo sapien
gctgcacccctgatcttctctctcc

SEQ ID NO: 2212270 - DNA, 25 bp, Homo sapien
agctgcacccctgatcttctctctc

SEQ ID NO: 2212271 - DNA, 25 bp, Homo sapien
tggtggttcctcttgctgaggttcc

SEQ ID NO: 2212272 - DNA, 25 bp, Homo sapien
cttgctgaggttcctcatcactggg

SEQ ID NO: 2212273 - DNA, 25 bp, Homo sapien
cctcttgctgaggttcctcatcact

SEQ ID NO: 2212274 - DNA, 25 bp, Homo sapien
ttcctcttgctgaggttcctcatca

SEQ ID NO: 2212275 - DNA, 25 bp, Homo sapien
cataggcccaatcagctcaggaggt

SEQ ID NO: 2212276 - DNA, 25 bp, Homo sapien
taggcccaatcagctcaggaggtgg

SEQ ID NO: 2212277 - DNA, 25 bp, Homo sapien
agcataggcccaatcagctcaggag

SEQ ID NO: 2212278 - DNA, 25 bp, Homo sapien
cagcataggcccaatcagctcagga

SEQ ID NO: 2212279 - DNA, 25 bp, Homo sapien
acgcttctccttggtctaggcctat

SEQ ID NO: 2212280 - DNA, 25 bp, Homo sapien
tacgcttctccttggtctaggccta

SEQ ID NO: 2212281 - DNA, 25 bp, Homo sapien
cgcttctccttggtctaggcctata

SEQ ID NO: 2212282 - DNA, 25 bp, Homo sapien
caagttttgttggaacgcagagccc

SEQ ID NO: 2212283 - DNA, 25 bp, Homo sapien
gttttgttggaacgcagagccccac

SEQ ID NO: 2212284 - DNA, 25 bp, Homo sapien
aatcaagttttgttggaacgcagag

SEQ ID NO: 2212285 - DNA, 25 bp, Homo sapien
aaaatcaagttttgttggaacgcag

SEQ ID NO: 2212286 - DNA, 25 bp, Homo sapien
cagtggagttgagaagttgccacac

SEQ ID NO: 2212287 - DNA, 25 bp, Homo sapien
agtggagttgagaagttgccacaca

SEQ ID NO: 2212288 - DNA, 25 bp, Homo sapien
gtggagttgagaagttgccacacag

SEQ ID NO: 2212289 - DNA, 25 bp, Homo sapien
caaggacctccccgtcggaggccat

SEQ ID NO: 2212290 - DNA, 25 bp, Homo sapien
tcaaggacctccccgtcggaggcca

SEQ ID NO: 2212291 - DNA, 25 bp, Homo sapien
gttaggagaaggacaggaacctcaa

SEQ ID NO: 2212292 - DNA, 25 bp, Homo sapien
gaaggacaggaacctcaaggacctc

SEQ ID NO: 2212293 - DNA, 25 bp, Homo sapien
aattcttgagcccttgaactagggt

SEQ ID NO: 2212294 - DNA, 25 bp, Homo sapien
ctgcagtttccgtctccaggtgctt

SEQ ID NO: 2212295 - DNA, 25 bp, Homo sapien
ggttttctcatagtactgccttttg

SEQ ID NO: 2212296 - DNA, 25 bp, Homo sapien
ggtgcttcaggtactcccgaacata

SEQ ID NO: 2212297 - DNA, 25 bp, Homo sapien
agcatcaaagaaggtcatcatctgg

SEQ ID NO: 2212298 - DNA, 25 bp, Homo sapien
agaagcatcaaagaaggtcatcatc

SEQ ID NO: 2212299 - DNA, 25 bp, Homo sapien
aagagaagcatcaaagaaggtcatc

SEQ ID NO: 2212300 - DNA, 25 bp, Homo sapien
ctgaagagaagcatcaaagaaggtc

SEQ ID NO: 2212301 - DNA, 25 bp, Homo sapien
tggttactaatattaccatagcagt

SEQ ID NO: 2212302 - DNA, 25 bp, Homo sapien
ttgtcttccctagtggtctccctcc

SEQ ID NO: 2212303 - DNA, 25 bp, Homo sapien
gttactaatattaccatagcagttg

SEQ ID NO: 2212304 - DNA, 25 bp, Homo sapien
actaatattaccatagcagttgtct

SEQ ID NO: 2212305 - DNA, 25 bp, Homo sapien
tactaatcggctgaggtcacagtca

SEQ ID NO: 2212306 - DNA, 25 bp, Homo sapien
gcttctactaatcggctgaggtcac

SEQ ID NO: 2212307 - DNA, 25 bp, Homo sapien
gagcagcttctactaatcggctgag

SEQ ID NO: 2212308 - DNA, 25 bp, Homo sapien
gaggtcacagtcatgctctctgaga

SEQ ID NO: 2212309 - DNA, 25 bp, Homo sapien
ggcctctgatagatgcaataaccag

SEQ ID NO: 2212310 - DNA, 25 bp, Homo sapien
tcaggggggcctctgatagatgcaa

SEQ ID NO: 2212311 - DNA, 25 bp, Homo sapien
ttggaaagaatttgcctttgaggtc

SEQ ID NO: 2212312 - DNA, 25 bp, Homo sapien
gaggtctgattcgacctttttcact

SEQ ID NO: 2212313 - DNA, 25 bp, Homo sapien
ctgaccaagcaagggtaacaaggag

SEQ ID NO: 2212314 - DNA, 25 bp, Homo sapien
ccaagcaagggtaacaaggagtaag

SEQ ID NO: 2212315 - DNA, 25 bp, Homo sapien
caagcaagggtaacaaggagtaagg

SEQ ID NO: 2212316 - DNA, 25 bp, Homo sapien
gaccaagcaagggtaacaaggagta

SEQ ID NO: 2212317 - DNA, 25 bp, Homo sapien
gtgccacttgcacaaagaggaaagt

SEQ ID NO: 2212318 - DNA, 25 bp, Homo sapien
ggaaagtgtctttgtcacagcaagc

SEQ ID NO: 2212319 - DNA, 25 bp, Homo sapien
tggcagcttctgtccactagaaaga

SEQ ID NO: 2212320 - DNA, 25 bp, Homo sapien
caaagctgctttgtgccttgtgcca

SEQ ID NO: 2212321 - DNA, 25 bp, Homo sapien
acagctgcaactgcttggggacaga

SEQ ID NO: 2212322 - DNA, 25 bp, Homo sapien
ctacagctgcaactgcttggggaca

SEQ ID NO: 2212323 - DNA, 25 bp, Homo sapien
cagctgcaactgcttggggacagac

SEQ ID NO: 2212324 - DNA, 25 bp, Homo sapien
tacagctgcaactgcttggggacag

SEQ ID NO: 2212325 - DNA, 25 bp, Homo sapien
ccatagtcctagctgaacaaactgt

SEQ ID NO: 2212326 - DNA, 25 bp, Homo sapien
caatccatgattgagcaagatgagc

SEQ ID NO: 2212327 - DNA, 25 bp, Homo sapien
gttttgtaacttcgtggatcttgcg

SEQ ID NO: 2212328 - DNA, 25 bp, Homo sapien
tgcgttttagaccaggaaactggtc

SEQ ID NO: 2212329 - DNA, 25 bp, Homo sapien
accaagttgtgcgatgcagctttaa

SEQ ID NO: 2212330 - DNA, 25 bp, Homo sapien
ctaagtgggacgaacaaccaagttg

SEQ ID NO: 2212331 - DNA, 25 bp, Homo sapien
tgacagaatggtgtagtagtagatg

SEQ ID NO: 2212332 - DNA, 25 bp, Homo sapien
gctttaaaggggctggtgattgaca

SEQ ID NO: 2212333 - DNA, 25 bp, Homo sapien
ctcaccacactcattgtgtgactca

SEQ ID NO: 2212334 - DNA, 25 bp, Homo sapien
cgtgcaagggatgatgccattaaga

SEQ ID NO: 2212335 - DNA, 25 bp, Homo sapien
tgtgtgactcagctgcctgtccact

SEQ ID NO: 2212336 - DNA, 25 bp, Homo sapien
atcacaatgttattcgtgcaaggga

SEQ ID NO: 2212337 - DNA, 25 bp, Homo sapien
gtattttggctctttatgaatagtc

SEQ ID NO: 2212338 - DNA, 25 bp, Homo sapien
agtattttggctctttatgaatagt

SEQ ID NO: 2212339 - DNA, 25 bp, Homo sapien
attttggctctttatgaatagtcat

SEQ ID NO: 2212340 - DNA, 25 bp, Homo sapien
tattttggctctttatgaatagtca

SEQ ID NO: 2212341 - DNA, 25 bp, Homo sapien
cttctgcagtgttccagaggaacac

SEQ ID NO: 2212342 - DNA, 25 bp, Homo sapien
ggaacactgccttccaaagtctggc

SEQ ID NO: 2212343 - DNA, 25 bp, Homo sapien
aggaacactgccttccaaagtctgg

SEQ ID NO: 2212344 - DNA, 25 bp, Homo sapien
tatgtccttctgcagtgttccagag

SEQ ID NO: 2212345 - DNA, 25 bp, Homo sapien
caataagtaccatcagttggtgtca

SEQ ID NO: 2212346 - DNA, 25 bp, Homo sapien
aataagtaccatcagttggtgtcat

SEQ ID NO: 2212347 - DNA, 25 bp, Homo sapien
attgcccagggacgggcaggagaca

SEQ ID NO: 2212348 - DNA, 25 bp, Homo sapien
gggacgggcaggagacagatgcctt

SEQ ID NO: 2212349 - DNA, 25 bp, Homo sapien
cagggacgggcaggagacagatgcc

SEQ ID NO: 2212350 - DNA, 25 bp, Homo sapien
gacgggcaggagacagatgccttcc

SEQ ID NO: 2212351 - DNA, 25 bp, Homo sapien
caaacactcctttgattgttgcaag

SEQ ID NO: 2212352 - DNA, 25 bp, Homo sapien
tcttagcagacttttcaatggatgt

SEQ ID NO: 2212353 - DNA, 25 bp, Homo sapien
ccaaagtggctgtgctaacatcaga

SEQ ID NO: 2212354 - DNA, 25 bp, Homo sapien
caaccacgtgctttctatgagacaa

SEQ ID NO: 2212355 - DNA, 25 bp, Homo sapien
ccatcaatgcctagagatacgtgct

SEQ ID NO: 2212356 - DNA, 25 bp, Homo sapien
ttcaaataccgtgatcatgggagga

SEQ ID NO: 2212357 - DNA, 25 bp, Homo sapien
gctctagagagcgttttcgaacctc

SEQ ID NO: 2212358 - DNA, 25 bp, Homo sapien
ttccaagtagcccagatgacacaag

SEQ ID NO: 2212359 - DNA, 25 bp, Homo sapien
cagaggcccagaatttgcaagttcc

SEQ ID NO: 2212360 - DNA, 25 bp, Homo sapien
gaggcccagaatttgcaagttcctg

SEQ ID NO: 2212361 - DNA, 25 bp, Homo sapien
tctgccagaaatcagtgttatagcc

SEQ ID NO: 2212362 - DNA, 25 bp, Homo sapien
cagttgagagctaattctgaagtct

SEQ ID NO: 2212363 - DNA, 25 bp, Homo sapien
tctaagaacttccaaaatctcagcg

SEQ ID NO: 2212364 - DNA, 25 bp, Homo sapien
gccagtagcagttgctgttgtccct

SEQ ID NO: 2212365 - DNA, 25 bp, Homo sapien
tccctgggtgagtgtatgactatgg

SEQ ID NO: 2212366 - DNA, 25 bp, Homo sapien
tgcccgtagggagtttgatcaagat

SEQ ID NO: 2212367 - DNA, 25 bp, Homo sapien
ggcagtatcggtcccagagttcttt

SEQ ID NO: 2212368 - DNA, 25 bp, Homo sapien
cccagagttctttactgcgcaaaga

SEQ ID NO: 2212369 - DNA, 25 bp, Homo sapien
gcagtatcggtcccagagttcttta

SEQ ID NO: 2212370 - DNA, 25 bp, Homo sapien
gttggtaagctattaactattgctt

SEQ ID NO: 2212371 - DNA, 25 bp, Homo sapien
tggtaagctattaactattgcttca

SEQ ID NO: 2212372 - DNA, 25 bp, Homo sapien
ggttggtaagctattaactattgct

SEQ ID NO: 2212373 - DNA, 25 bp, Homo sapien
gtaagctattaactattgcttcaat

SEQ ID NO: 2212374 - DNA, 25 bp, Homo sapien
taccagcccctccttgtacatctcg

SEQ ID NO: 2212375 - DNA, 25 bp, Homo sapien
cagcccctccttgtacatctcgtag

SEQ ID NO: 2212376 - DNA, 25 bp, Homo sapien
ccctccttgtacatctcgtagaatt

SEQ ID NO: 2212377 - DNA, 25 bp, Homo sapien
gcccctccttgtacatctcgtagaa

SEQ ID NO: 2212378 - DNA, 25 bp, Homo sapien
tctacccactcaggttgcccagaga

SEQ ID NO: 2212379 - DNA, 25 bp, Homo sapien
tgccatttttcgctgaagcccctgc

SEQ ID NO: 2212380 - DNA, 25 bp, Homo sapien
gaaagacggaatcactctacccact

SEQ ID NO: 2212381 - DNA, 25 bp, Homo sapien
gacccgcacgagttgctgccatttt

SEQ ID NO: 2212382 - DNA, 25 bp, Homo sapien
tcaggagtatgagcctcccggagga

SEQ ID NO: 2212383 - DNA, 25 bp, Homo sapien
tttaggaagtctactctgccggccc

SEQ ID NO: 2212384 - DNA, 25 bp, Homo sapien
tcaggagtcctcagctagtgacatg

SEQ ID NO: 2212385 - DNA, 25 bp, Homo sapien
ttcccttgttccgagagtggcccag

SEQ ID NO: 2212386 - DNA, 25 bp, Homo sapien
ggagccagtcgaacgtatgccttct

SEQ ID NO: 2212387 - DNA, 25 bp, Homo sapien
ttgtaatcaggagccagtcgaacgt

SEQ ID NO: 2212388 - DNA, 25 bp, Homo sapien
gccagtcgaacgtatgccttcttct

SEQ ID NO: 2212389 - DNA, 25 bp, Homo sapien
agcattgtaatcaggagccagtcga

SEQ ID NO: 2212390 - DNA, 25 bp, Homo sapien
ggtcaaatcagggtgttgatttgcc

SEQ ID NO: 2212391 - DNA, 25 bp, Homo sapien
tcaaatcagggtgttgatttgccac

SEQ ID NO: 2212392 - DNA, 25 bp, Homo sapien
tcaggtcaaatcagggtgttgattt

SEQ ID NO: 2212393 - DNA, 25 bp, Homo sapien
caggtcaaatcagggtgttgatttg

SEQ ID NO: 2212394 - DNA, 25 bp, Homo sapien
gggggcactcctccgaggatatttg

SEQ ID NO: 2212395 - DNA, 25 bp, Homo sapien
cctgggggcactcctccgaggatat

SEQ ID NO: 2212396 - DNA, 25 bp, Homo sapien
ctcctgggggcactcctccgaggat

SEQ ID NO: 2212397 - DNA, 25 bp, Homo sapien
ttctcctgggggcactcctccgagg

SEQ ID NO: 2212398 - DNA, 25 bp, Homo sapien
ctggaaggtgaggggtgtgtggatc

SEQ ID NO: 2212399 - DNA, 25 bp, Homo sapien
ggccgctggaaggtgaggggtgtgt

SEQ ID NO: 2212400 - DNA, 25 bp, Homo sapien
ggaaggtgaggggtgtgtggatctt

SEQ ID NO: 2212401 - DNA, 25 bp, Homo sapien
agagtcgcagtgacttgggccgctg

SEQ ID NO: 2212402 - DNA, 25 bp, Homo sapien
tgtgtgtgtggttgtggacaccttt

SEQ ID NO: 2212403 - DNA, 25 bp, Homo sapien
tgtgtgtggttgtggacacctttca

SEQ ID NO: 2212404 - DNA, 25 bp, Homo sapien
tttgtgtgtgtggttgtggacacct

SEQ ID NO: 2212405 - DNA, 25 bp, Homo sapien
ttttgtgtgtgtggttgtggacacc

SEQ ID NO: 2212406 - DNA, 25 bp, Homo sapien
tttgctttggctttgactttaggag

SEQ ID NO: 2212407 - DNA, 25 bp, Homo sapien
cctttgctttggctttgactttagg

SEQ ID NO: 2212408 - DNA, 25 bp, Homo sapien
gcttccttcttccctttccgcgcca

SEQ ID NO: 2212409 - DNA, 25 bp, Homo sapien
tgctttggctttgactttaggaggg

SEQ ID NO: 2212410 - DNA, 25 bp, Homo sapien
gaagctgcgctggtatctttcctgg

SEQ ID NO: 2212411 - DNA, 25 bp, Homo sapien
aagccttttcggtgcacagactgca

SEQ ID NO: 2212412 - DNA, 25 bp, Homo sapien
tataaatgcacctgggatggctgct

SEQ ID NO: 2212413 - DNA, 25 bp, Homo sapien
cacaggtcacactagagaagctgcg

SEQ ID NO: 2212414 - DNA, 25 bp, Homo sapien
ttttcaacctccacatgggttgaat

SEQ ID NO: 2212415 - DNA, 25 bp, Homo sapien
ttttttcaacctccacatgggttga

SEQ ID NO: 2212416 - DNA, 25 bp, Homo sapien
gttgaattccagtgtggcacccatg

SEQ ID NO: 2212417 - DNA, 25 bp, Homo sapien
gaattccagtgtggcacccatggct

SEQ ID NO: 2212418 - DNA, 25 bp, Homo sapien
gctccacagtttgctaattcttgta

SEQ ID NO: 2212419 - DNA, 25 bp, Homo sapien
ccacagtttgctaattcttgtatga

SEQ ID NO: 2212420 - DNA, 25 bp, Homo sapien
cagtttgctaattcttgtatgaggt

SEQ ID NO: 2212421 - DNA, 25 bp, Homo sapien
tgatgctccacagtttgctaattct

SEQ ID NO: 2212422 - DNA, 25 bp, Homo sapien
caagtctgttatgcacctggagata

SEQ ID NO: 2212423 - DNA, 25 bp, Homo sapien
caagatttgcctctgttagcatggc

SEQ ID NO: 2212424 - DNA, 25 bp, Homo sapien
tagcatggccacttagagattactc

SEQ ID NO: 2212425 - DNA, 25 bp, Homo sapien
ggctttgaggctagaatcatgagca

SEQ ID NO: 2212426 - DNA, 25 bp, Homo sapien
gtaatacttgtgggctgtctctctt

SEQ ID NO: 2212427 - DNA, 25 bp, Homo sapien
taatacttgtgggctgtctctcttc

SEQ ID NO: 2212428 - DNA, 25 bp, Homo sapien
aatacttgtgggctgtctctcttcc

SEQ ID NO: 2212429 - DNA, 25 bp, Homo sapien
gggtcaatgtcaattagttccattg

SEQ ID NO: 2212430 - DNA, 25 bp, Homo sapien
tgtttgaagttgtcctgccatcatg

SEQ ID NO: 2212431 - DNA, 25 bp, Homo sapien
tcaggggtcaatgtcaattagttcc

SEQ ID NO: 2212432 - DNA, 25 bp, Homo sapien
ttagttccattgtttgaagttgtcc

SEQ ID NO: 2212433 - DNA, 25 bp, Homo sapien
tgtttttcccatccctatatgattc

SEQ ID NO: 2212434 - DNA, 25 bp, Homo sapien
tttttcagttgtctcaacttcttag

SEQ ID NO: 2212435 - DNA, 25 bp, Homo sapien
ttttcagttgtctcaacttcttagc

SEQ ID NO: 2212436 - DNA, 25 bp, Homo sapien
tttcagttgtctcaacttcttagcc

SEQ ID NO: 2212437 - DNA, 25 bp, Homo sapien
tagcctggcattcataactttccat

SEQ ID NO: 2212438 - DNA, 25 bp, Homo sapien
tcttgcttcttatgaccaggaccca

SEQ ID NO: 2212439 - DNA, 25 bp, Homo sapien
gacacactgtggtattggaccccag

SEQ ID NO: 2212440 - DNA, 25 bp, Homo sapien
gccacaagctttgctgttagacaca

SEQ ID NO: 2212441 - DNA, 25 bp, Homo sapien
tattggaccccagttcagtaacttg

SEQ ID NO: 2212442 - DNA, 25 bp, Homo sapien
ggcgtaacagaatataggccagcat

SEQ ID NO: 2212443 - DNA, 25 bp, Homo sapien
cttaaataagaagagttgggccttg

SEQ ID NO: 2212444 - DNA, 25 bp, Homo sapien
tttccagagggcgtaacagaatata

SEQ ID NO: 2212445 - DNA, 25 bp, Homo sapien
aatacagtctcaggggttcccagca

SEQ ID NO: 2212446 - DNA, 25 bp, Homo sapien
tggctttggacatgagatgtgtctc

SEQ ID NO: 2212447 - DNA, 25 bp, Homo sapien
catagtctcacttctctgtgtactt

SEQ ID NO: 2212448 - DNA, 25 bp, Homo sapien
tagtggctggcaacagattttcctt

SEQ ID NO: 2212449 - DNA, 25 bp, Homo sapien
ctagtatcattatgtgtgaatttta

SEQ ID NO: 2212450 - DNA, 25 bp, Homo sapien
tttcagatacccaatcagtcgtagc

SEQ ID NO: 2212451 - DNA, 25 bp, Homo sapien
caaaactactattctggctatcagc

SEQ ID NO: 2212452 - DNA, 25 bp, Homo sapien
ttcagaaggatagtctttgagctct

SEQ ID NO: 2212453 - DNA, 25 bp, Homo sapien
caggttggttatgtttctctcaaaa

SEQ ID NO: 2212454 - DNA, 25 bp, Homo sapien
agctgggatatgtgttgttggcaca

SEQ ID NO: 2212455 - DNA, 25 bp, Homo sapien
tgtgttgttggcacactgcttgtcc

SEQ ID NO: 2212456 - DNA, 25 bp, Homo sapien
tgttgttggcacactgcttgtccat

SEQ ID NO: 2212457 - DNA, 25 bp, Homo sapien
gggatatgtgttgttggcacactgc

SEQ ID NO: 2212458 - DNA, 25 bp, Homo sapien
cgctcgtagaaatttgttattactg

SEQ ID NO: 2212459 - DNA, 25 bp, Homo sapien
tatggtcttatctaccctgtttatt

SEQ ID NO: 2212460 - DNA, 25 bp, Homo sapien
catagtcccgtattttctaggaggc

SEQ ID NO: 2212461 - DNA, 25 bp, Homo sapien
tgaacatgctcctttcgctcgtaga

SEQ ID NO: 2212462 - DNA, 25 bp, Homo sapien
tatgtgcttacatagagttcatact

SEQ ID NO: 2212463 - DNA, 25 bp, Homo sapien
catgttgtgctaatatagatatgtg

SEQ ID NO: 2212464 - DNA, 25 bp, Homo sapien
tttgcatgtccatccactaaataca

SEQ ID NO: 2212465 - DNA, 25 bp, Homo sapien
gcagaagtctcataagtatctacaa

SEQ ID NO: 2212466 - DNA, 25 bp, Homo sapien
ttacaggagagacaagatacacata

SEQ ID NO: 2212467 - DNA, 25 bp, Homo sapien
tacaggagagacaagatacacatac

SEQ ID NO: 2212468 - DNA, 25 bp, Homo sapien
cagttattgctagcaaaactaaaag

SEQ ID NO: 2212469 - DNA, 25 bp, Homo sapien
aggtacccacacacccgcggagtgg

SEQ ID NO: 2212470 - DNA, 25 bp, Homo sapien
cggagtggagcagaggtttttatct

SEQ ID NO: 2212471 - DNA, 25 bp, Homo sapien
cttgttgtctctgagagaacctgag

SEQ ID NO: 2212472 - DNA, 25 bp, Homo sapien
gggctccttgaggaggataagccat

SEQ ID NO: 2212473 - DNA, 25 bp, Homo sapien
ggaactaacactacctcggcgtcga

SEQ ID NO: 2212474 - DNA, 25 bp, Homo sapien
caagataccttgatccagcatggca

SEQ ID NO: 2212475 - DNA, 25 bp, Homo sapien
cagctagtgctgatttttgccggaa

SEQ ID NO: 2212476 - DNA, 25 bp, Homo sapien
ttcatcacagaggtaccgtgctccg

SEQ ID NO: 2212477 - DNA, 25 bp, Homo sapien
gattcagaatatgctgtcggcgccc

SEQ ID NO: 2212478 - DNA, 25 bp, Homo sapien
gaatagcccgctgtttactgcaaat

SEQ ID NO: 2212479 - DNA, 25 bp, Homo sapien
gcatgatgcagtcgctgagccagaa

SEQ ID NO: 2212480 - DNA, 25 bp, Homo sapien
tctttagtaccccaggcatgcagag

SEQ ID NO: 2212481 - DNA, 25 bp, Homo sapien
cataggccccataggccctatagtc

SEQ ID NO: 2212482 - DNA, 25 bp, Homo sapien
gattccgagcttcactccaggtgtg

SEQ ID NO: 2212483 - DNA, 25 bp, Homo sapien
tgctgggaaccgctataggccctgt

SEQ ID NO: 2212484 - DNA, 25 bp, Homo sapien
cataggccccattgggcccatagga

SEQ ID NO: 2212485 - DNA, 25 bp, Homo sapien
gcaacaggaggcgacatcaatgcag

SEQ ID NO: 2212486 - DNA, 25 bp, Homo sapien
aactggaacagctcaacgcaatggg

SEQ ID NO: 2212487 - DNA, 25 bp, Homo sapien
gaaaccacgagtcctacatcagaat

SEQ ID NO: 2212488 - DNA, 25 bp, Homo sapien
gaagcaaacttgcaggccctaatag

SEQ ID NO: 2212489 - DNA, 25 bp, Homo sapien
gaatagagagcttggatttgcatgt

SEQ ID NO: 2212490 - DNA, 25 bp, Homo sapien
aattcagacgcttctgcatttgagg

SEQ ID NO: 2212491 - DNA, 25 bp, Homo sapien
catttgaggtggtgatgcgcatgtc

SEQ ID NO: 2212492 - DNA, 25 bp, Homo sapien
gctggatattcaaggtaactattcc

SEQ ID NO: 2212493 - DNA, 25 bp, Homo sapien
gatgcgcatgtctctgtgtgtcctt

SEQ ID NO: 2212494 - DNA, 25 bp, Homo sapien
gttcttctttcgctaattctttcag

SEQ ID NO: 2212495 - DNA, 25 bp, Homo sapien
tcttttttatgtgagtatttagtgc

SEQ ID NO: 2212496 - DNA, 25 bp, Homo sapien
ttcagttgccatgttaagttgttaa

SEQ ID NO: 2212497 - DNA, 25 bp, Homo sapien
gatttgttcttctttcgctaattct

SEQ ID NO: 2212498 - DNA, 25 bp, Homo sapien
acctggaaacgcacgggaagccaag

SEQ ID NO: 2212499 - DNA, 25 bp, Homo sapien
tcgctccgcgttgggattatccgga

SEQ ID NO: 2212500 - DNA, 25 bp, Homo sapien
tcccaacggaggtagtaccactcta

SEQ ID NO: 2212501 - DNA, 25 bp, Homo sapien
cctcctccggagaagtagagaaata

SEQ ID NO: 2212502 - DNA, 25 bp, Homo sapien
tcctgatggccataaacctctaagg

SEQ ID NO: 2212503 - DNA, 25 bp, Homo sapien
atggccataaacctctaaggtgttg

SEQ ID NO: 2212504 - DNA, 25 bp, Homo sapien
tctcctgatggccataaacctctaa

SEQ ID NO: 2212505 - DNA, 25 bp, Homo sapien
ctgatggccataaacctctaaggtg

SEQ ID NO: 2212506 - DNA, 25 bp, Homo sapien
ggtcaggtccaatgcactcttaatg

SEQ ID NO: 2212507 - DNA, 25 bp, Homo sapien
ctcttgcacatacagttcaaggtag

SEQ ID NO: 2212508 - DNA, 25 bp, Homo sapien
gaataacctcttgcacatacagttc

SEQ ID NO: 2212509 - DNA, 25 bp, Homo sapien
cccgaataacctcttgcacatacag

SEQ ID NO: 2212510 - DNA, 25 bp, Homo sapien
ccttgtgtaagccagctgggtggct

SEQ ID NO: 2212511 - DNA, 25 bp, Homo sapien
actttctgcactagaagcagccaca

SEQ ID NO: 2212512 - DNA, 25 bp, Homo sapien
tactttctgcactagaagcagccac

SEQ ID NO: 2212513 - DNA, 25 bp, Homo sapien
catcccttgttgtctggctgcccaa

SEQ ID NO: 2212514 - DNA, 25 bp, Homo sapien
gcagggttcttcagcttcccggttc

SEQ ID NO: 2212515 - DNA, 25 bp, Homo sapien
cctctgtgcacatgcagtgcagacc

SEQ ID NO: 2212516 - DNA, 25 bp, Homo sapien
cccaatatttgctggcggagggtgc

SEQ ID NO: 2212517 - DNA, 25 bp, Homo sapien
cactgtctttacttctcgtccactt

SEQ ID NO: 2212518 - DNA, 25 bp, Homo sapien
gttgattcttagtatacttttggag

SEQ ID NO: 2212519 - DNA, 25 bp, Homo sapien
ttcttcactgtctttacttctcgtc

SEQ ID NO: 2212520 - DNA, 25 bp, Homo sapien
ttcactgtctttacttctcgtccac

SEQ ID NO: 2212521 - DNA, 25 bp, Homo sapien
tcagatcttggcgagacaaatgttc

SEQ ID NO: 2212522 - DNA, 25 bp, Homo sapien
gggatgtccctctgcgtgctaggca

SEQ ID NO: 2212523 - DNA, 25 bp, Homo sapien
tcttggcgagacaaatgttctatgg

SEQ ID NO: 2212524 - DNA, 25 bp, Homo sapien
ccctctgcgtgctaggcaaggagaa

SEQ ID NO: 2212525 - DNA, 25 bp, Homo sapien
tgaaggtcacatgttcagttcctct

SEQ ID NO: 2212526 - DNA, 25 bp, Homo sapien
gtgaaatgtcattctgaatgcactt

SEQ ID NO: 2212527 - DNA, 25 bp, Homo sapien
taagtgaaatgtcattctgaatgca

SEQ ID NO: 2212528 - DNA, 25 bp, Homo sapien
ctggtcctctaaaaaaccacccatg

SEQ ID NO: 2212529 - DNA, 25 bp, Homo sapien
ccttgaagacgatctaataatgtaa

SEQ ID NO: 2212530 - DNA, 25 bp, Homo sapien
cttgaagacgatctaataatgtaat

SEQ ID NO: 2212531 - DNA, 25 bp, Homo sapien
ctccttgaagacgatctaataatgt

SEQ ID NO: 2212532 - DNA, 25 bp, Homo sapien
tctccttgaagacgatctaataatg

SEQ ID NO: 2212533 - DNA, 25 bp, Homo sapien
tcagtgtatacaggcaggctgtctc

SEQ ID NO: 2212534 - DNA, 25 bp, Homo sapien
agtttacccactctcacacaggaag

SEQ ID NO: 2212535 - DNA, 25 bp, Homo sapien
tccagtcaagccatgtgaacacaac

SEQ ID NO: 2212536 - DNA, 25 bp, Homo sapien
gaacacaactatccggatttcagtg

SEQ ID NO: 2212537 - DNA, 25 bp, Homo sapien
cgtttgtggagccatactgccatca

SEQ ID NO: 2212538 - DNA, 25 bp, Homo sapien
ggaggccctggagttgaagtggcag

SEQ ID NO: 2212539 - DNA, 25 bp, Homo sapien
tacagttgtagttggcgtttgtgga

SEQ ID NO: 2212540 - DNA, 25 bp, Homo sapien
tactgccatcaagcggaaactgtat

SEQ ID NO: 2212541 - DNA, 25 bp, Homo sapien
tgaggcactttgcattgcagttcgc

SEQ ID NO: 2212542 - DNA, 25 bp, Homo sapien
caggagcagactggaaggcagggtc

SEQ ID NO: 2212543 - DNA, 25 bp, Homo sapien
tgcagttcgctgtcaatctcattgc

SEQ ID NO: 2212544 - DNA, 25 bp, Homo sapien
tgccagctgtccatctgaggcactt

SEQ ID NO: 2212545 - DNA, 25 bp, Homo sapien
ccatgagaagctgtggtacttggtg

SEQ ID NO: 2212546 - DNA, 25 bp, Homo sapien
tgccatgagaagctgtggtacttgg

SEQ ID NO: 2212547 - DNA, 25 bp, Homo sapien
tcaagctgcttaaaaagggccccca

SEQ ID NO: 2212548 - DNA, 25 bp, Homo sapien
gccatgagaagctgtggtacttggt

SEQ ID NO: 2212549 - DNA, 25 bp, Homo sapien
cttgagtgagttgctgaatgtcccc

SEQ ID NO: 2212550 - DNA, 25 bp, Homo sapien
tgagttgctgaatgtccccgctgag

SEQ ID NO: 2212551 - DNA, 25 bp, Homo sapien
tgagtgagttgctgaatgtccccgc

SEQ ID NO: 2212552 - DNA, 25 bp, Homo sapien
gagtgagttgctgaatgtccccgct

SEQ ID NO: 2212553 - DNA, 25 bp, Homo sapien
tcccaaggtggtaaactctaactgc

SEQ ID NO: 2212554 - DNA, 25 bp, Homo sapien
gtgatcccagtccttctgccgtttt

SEQ ID NO: 2212555 - DNA, 25 bp, Homo sapien
tgccgttttccagtagccatgatta

SEQ ID NO: 2212556 - DNA, 25 bp, Homo sapien
tctaactgcaactccaggctttggg

SEQ ID NO: 2212557 - DNA, 25 bp, Homo sapien
ggtcccaatggcaggtccgctttgt

SEQ ID NO: 2212558 - DNA, 25 bp, Homo sapien
actggtcttcgggatgcctggctga

SEQ ID NO: 2212559 - DNA, 25 bp, Homo sapien
gctgcccacaaaagcgaccagagta

SEQ ID NO: 2212560 - DNA, 25 bp, Homo sapien
tatgcgtatctcaaaatggctgccg

SEQ ID NO: 2212561 - DNA, 25 bp, Homo sapien
ccctaggtagcactcttcctcttgg

SEQ ID NO: 2212562 - DNA, 25 bp, Homo sapien
cacttgtccctaggtagcactcttc

SEQ ID NO: 2212563 - DNA, 25 bp, Homo sapien
tgtccctaggtagcactcttcctct

SEQ ID NO: 2212564 - DNA, 25 bp, Homo sapien
cacacttgtccctaggtagcactct

SEQ ID NO: 2212565 - DNA, 25 bp, Homo sapien
actgtgagtgtcagaggtcctcggt

SEQ ID NO: 2212566 - DNA, 25 bp, Homo sapien
tgcctagggagaacgcgagaagaaa

SEQ ID NO: 2212567 - DNA, 25 bp, Homo sapien
tctggactgcgtctttagggttggc

SEQ ID NO: 2212568 - DNA, 25 bp, Homo sapien
gggccggtcatctaggcaactctca

SEQ ID NO: 2212569 - DNA, 25 bp, Homo sapien
tcccaatatgtgctgacggagtgtg

SEQ ID NO: 2212570 - DNA, 25 bp, Homo sapien
cttccttgtcgctttctgcctggct

SEQ ID NO: 2212571 - DNA, 25 bp, Homo sapien
ccaatatgtgctgacggagtgtgcg

SEQ ID NO: 2212572 - DNA, 25 bp, Homo sapien
ttctgcctggcttcccaatatgtgc

SEQ ID NO: 2212573 - DNA, 25 bp, Homo sapien
tccacttcgctctcaacctcattgc

SEQ ID NO: 2212574 - DNA, 25 bp, Homo sapien
ttccacttcgctctcaacctcattg

SEQ ID NO: 2212575 - DNA, 25 bp, Homo sapien
cacttcgctctcaacctcattgctc

SEQ ID NO: 2212576 - DNA, 25 bp, Homo sapien
cttcgctctcaacctcattgctcac

SEQ ID NO: 2212577 - DNA, 25 bp, Homo sapien
ctgattctttgtgtactttcggagt

SEQ ID NO: 2212578 - DNA, 25 bp, Homo sapien
tgattctttgtgtactttcggagtt

SEQ ID NO: 2212579 - DNA, 25 bp, Homo sapien
tctgattctttgtgtactttcggag

SEQ ID NO: 2212580 - DNA, 25 bp, Homo sapien
gactctagctgacccctgtgaggag

SEQ ID NO: 2212581 - DNA, 25 bp, Homo sapien
tattgccgtgggtggccgattacct

SEQ ID NO: 2212582 - DNA, 25 bp, Homo sapien
ctggaaggcagggtcgactgggcgc

SEQ ID NO: 2212583 - DNA, 25 bp, Homo sapien
tggtgtctgattcctccccgtttat

SEQ ID NO: 2212584 - DNA, 25 bp, Homo sapien
ggttcggtgacccttgcagtcggct

SEQ ID NO: 2212585 - DNA, 25 bp, Homo sapien
caggaaagatcccatcgacaagaag

SEQ ID NO: 2212586 - DNA, 25 bp, Homo sapien
ggatcaaagtttcggtcccactcag

SEQ ID NO: 2212587 - DNA, 25 bp, Homo sapien
tctgtaggccgatttgtggatcaaa

SEQ ID NO: 2212588 - DNA, 25 bp, Homo sapien
gtggcatggacctccctctttcttg

SEQ ID NO: 2212589 - DNA, 25 bp, Homo sapien
agtggcatggacctccctctttctt

SEQ ID NO: 2212590 - DNA, 25 bp, Homo sapien
actggctcgaaagcgcccacaacct

SEQ ID NO: 2212591 - DNA, 25 bp, Homo sapien
ctcgaaagcgcccacaacctcttcc

SEQ ID NO: 2212592 - DNA, 25 bp, Homo sapien
ctacacaccgccactggctcgaaag

SEQ ID NO: 2212593 - DNA, 25 bp, Homo sapien
gcccacaacctcttccacgctggct

SEQ ID NO: 2212594 - DNA, 25 bp, Homo sapien
ggtatgaaactggatcatcctgggt

SEQ ID NO: 2212595 - DNA, 25 bp, Homo sapien
tcagataggcccaagcagcaggtat

SEQ ID NO: 2212596 - DNA, 25 bp, Homo sapien
tcatcctgggttatgctgcttaaaa

SEQ ID NO: 2212597 - DNA, 25 bp, Homo sapien
gcagcaggtatgaaactggatcatc

SEQ ID NO: 2212598 - DNA, 25 bp, Homo sapien
ggctgcctgttgagccttcggcccc

SEQ ID NO: 2212599 - DNA, 25 bp, Homo sapien
tgcctgttgagccttcggccccgtt

SEQ ID NO: 2212600 - DNA, 25 bp, Homo sapien
gagccttcggccccgttctggtgac

SEQ ID NO: 2212601 - DNA, 25 bp, Homo sapien
ctgttgagccttcggccccgttctg

SEQ ID NO: 2212602 - DNA, 25 bp, Homo sapien
gggcggcagccctatgatcccagtc

SEQ ID NO: 2212603 - DNA, 25 bp, Homo sapien
tcccagaggcggtgattatgtgtcc

SEQ ID NO: 2212604 - DNA, 25 bp, Homo sapien
aaatccttgtgtaagccagctgggt

SEQ ID NO: 2212605 - DNA, 25 bp, Homo sapien
cttcctgcaccagcgggagccaaaa

SEQ ID NO: 2212606 - DNA, 25 bp, Homo sapien
gctgcccacaaaagcgaccagagta

SEQ ID NO: 2212607 - DNA, 25 bp, Homo sapien
ggtcccaatggcaggtccgctttgt

SEQ ID NO: 2212608 - DNA, 25 bp, Homo sapien
actggtcttcgggatgcctggctga

SEQ ID NO: 2212609 - DNA, 25 bp, Homo sapien
tatgcgtatctcaaaatggctgccg

SEQ ID NO: 2212610 - DNA, 25 bp, Homo sapien
actgtgagtgtcagaggtcctcggt

SEQ ID NO: 2212611 - DNA, 25 bp, Homo sapien
gggccggtcatctaggcaactctca

SEQ ID NO: 2212612 - DNA, 25 bp, Homo sapien
tgcctagggagaacgcgagaagaaa

SEQ ID NO: 2212613 - DNA, 25 bp, Homo sapien
tctggactgcgtctttagggttggc

SEQ ID NO: 2212614 - DNA, 25 bp, Homo sapien
cttccttgtcgctttctgcctggct

SEQ ID NO: 2212615 - DNA, 25 bp, Homo sapien
tcccaatatgtgctgacggagtgtg

SEQ ID NO: 2212616 - DNA, 25 bp, Homo sapien
ccaatatgtgctgacggagtgtgcg

SEQ ID NO: 2212617 - DNA, 25 bp, Homo sapien
ttctgcctggcttcccaatatgtgc

SEQ ID NO: 2212618 - DNA, 25 bp, Homo sapien
cacttcgctctcaacctcattgctc

SEQ ID NO: 2212619 - DNA, 25 bp, Homo sapien
tccacttcgctctcaacctcattgc

SEQ ID NO: 2212620 - DNA, 25 bp, Homo sapien
ttccacttcgctctcaacctcattg

SEQ ID NO: 2212621 - DNA, 25 bp, Homo sapien
cttcgctctcaacctcattgctcac

SEQ ID NO: 2212622 - DNA, 25 bp, Homo sapien
ctgattctttgtgtactttcggagt

SEQ ID NO: 2212623 - DNA, 25 bp, Homo sapien
tgattctttgtgtactttcggagtt

SEQ ID NO: 2212624 - DNA, 25 bp, Homo sapien
tctgattctttgtgtactttcggag

SEQ ID NO: 2212625 - DNA, 25 bp, Homo sapien
gactctagctgacccctgtgaggag

SEQ ID NO: 2212626 - DNA, 25 bp, Homo sapien
tattgccgtgggtggccgattacct

SEQ ID NO: 2212627 - DNA, 25 bp, Homo sapien
tggtgtctgattcctccccgtttat

SEQ ID NO: 2212628 - DNA, 25 bp, Homo sapien
ctggaaggcagggtcgactgggcgc

SEQ ID NO: 2212629 - DNA, 25 bp, Homo sapien
tgccttggccttgtagacttggggt

SEQ ID NO: 2212630 - DNA, 25 bp, Homo sapien
gcagtcggctgatggcatcctcagg

SEQ ID NO: 2212631 - DNA, 25 bp, Homo sapien
tgacccttgcagtcggctgatggca

SEQ ID NO: 2212632 - DNA, 25 bp, Homo sapien
ggttcggtgacccttgcagtcggct

SEQ ID NO: 2212633 - DNA, 25 bp, Homo sapien
caggaaagatcccatcgacaagaag

SEQ ID NO: 2212634 - DNA, 25 bp, Homo sapien
ggatcaaagtttcggtcccactcag

SEQ ID NO: 2212635 - DNA, 25 bp, Homo sapien
tgttcgtcctttaagcgggacgtga

SEQ ID NO: 2212636 - DNA, 25 bp, Homo sapien
tctgtaggccgatttgtggatcaaa

SEQ ID NO: 2212637 - DNA, 25 bp, Homo sapien
gtggcatggacctccctctttcttg

SEQ ID NO: 2212638 - DNA, 25 bp, Homo sapien
agtggcatggacctccctctttctt

SEQ ID NO: 2212639 - DNA, 25 bp, Homo sapien
tcccagaggcggtgattatgtgtcc

SEQ ID NO: 2212640 - DNA, 25 bp, Homo sapien
cttcctgcaccagcgggagccaaaa

SEQ ID NO: 2212641 - DNA, 25 bp, Homo sapien
gggcggcagccctatgatcccagtc

SEQ ID NO: 2212642 - DNA, 25 bp, Homo sapien
aaatccttgtgtaagccagctgggt

SEQ ID NO: 2212643 - DNA, 25 bp, Homo sapien
gctgcccacaaaagcgaccagagta

SEQ ID NO: 2212644 - DNA, 25 bp, Homo sapien
ggtcccaatggcaggtccgctttgt

SEQ ID NO: 2212645 - DNA, 25 bp, Homo sapien
actggtcttcgggatgcctggctga

SEQ ID NO: 2212646 - DNA, 25 bp, Homo sapien
tatgcgtatctcaaaatggctgccg

SEQ ID NO: 2212647 - DNA, 25 bp, Homo sapien
catatgtaggtagcatgcaccaggg

SEQ ID NO: 2212648 - DNA, 25 bp, Homo sapien
tcatatgtaggtagcatgcaccagg

SEQ ID NO: 2212649 - DNA, 25 bp, Homo sapien
tcctgttctgttcgtggatgcacta

SEQ ID NO: 2212650 - DNA, 25 bp, Homo sapien
tgaaggtcaccagtttagtctctct

SEQ ID NO: 2212651 - DNA, 25 bp, Homo sapien
agtgaaatgtcatggtgaacagatc

SEQ ID NO: 2212652 - DNA, 25 bp, Homo sapien
tagtctctctggtataccaaaaacc

SEQ ID NO: 2212653 - DNA, 25 bp, Homo sapien
gaccaggccgtatgctgaggtgcac

SEQ ID NO: 2212654 - DNA, 25 bp, Homo sapien
gcacattgttgacccatggagcagc

SEQ ID NO: 2212655 - DNA, 25 bp, Homo sapien
tcttgtatggaatgcagtccggtcc

SEQ ID NO: 2212656 - DNA, 25 bp, Homo sapien
gaaagccacttgttatgtctgactg

SEQ ID NO: 2212657 - DNA, 25 bp, Homo sapien
tcctgttctgcgtgtggaagtagag

SEQ ID NO: 2212658 - DNA, 25 bp, Homo sapien
gaagtagaggtggatcctggaatgt

SEQ ID NO: 2212659 - DNA, 25 bp, Homo sapien
ccaggttccagacagtgctcgcctt

SEQ ID NO: 2212660 - DNA, 25 bp, Homo sapien
atggtggtagggcaactgtgccttg

SEQ ID NO: 2212661 - DNA, 25 bp, Homo sapien
gtttccaggcagacgtaagaaatcc

SEQ ID NO: 2212662 - DNA, 25 bp, Homo sapien
tgccggctctttagggtttccaggc

SEQ ID NO: 2212663 - DNA, 25 bp, Homo sapien
gagtcggtcgaggacaaattttgcc

SEQ ID NO: 2212664 - DNA, 25 bp, Homo sapien
gtaagaaatcctgacgcgggccatc

SEQ ID NO: 2212665 - DNA, 25 bp, Homo sapien
gtgcctgggcagcagcatggaacac

SEQ ID NO: 2212666 - DNA, 25 bp, Homo sapien
ccatgccgctcagtgcctgggcagc

SEQ ID NO: 2212667 - DNA, 25 bp, Homo sapien
gcctgggcagcagcatggaacacac

SEQ ID NO: 2212668 - DNA, 25 bp, Homo sapien
atgccgctcagtgcctgggcagcag

SEQ ID NO: 2212669 - DNA, 25 bp, Homo sapien
tcttcctggatgtgtaggccgcact

SEQ ID NO: 2212670 - DNA, 25 bp, Homo sapien
gaacatcaatctcgggtgtgggcct

SEQ ID NO: 2212671 - DNA, 25 bp, Homo sapien
catgccacgggtaatgattctcaca

SEQ ID NO: 2212672 - DNA, 25 bp, Homo sapien
atgagcagagtttcataggacagaa

SEQ ID NO: 2212673 - DNA, 25 bp, Homo sapien
agacagccgagtggccagcgcctcg

SEQ ID NO: 2212674 - DNA, 25 bp, Homo sapien
ccttgtataagacagccgagtggcc

SEQ ID NO: 2212675 - DNA, 25 bp, Homo sapien
tataagacagccgagtggccagcgc

SEQ ID NO: 2212676 - DNA, 25 bp, Homo sapien
aatccttgtataagacagccgagtg

SEQ ID NO: 2212677 - DNA, 25 bp, Homo sapien
ttcagaaacatcttcctctgggtgg

SEQ ID NO: 2212678 - DNA, 25 bp, Homo sapien
ctggcagaaggcgagtgtccctgca

SEQ ID NO: 2212679 - DNA, 25 bp, Homo sapien
aatggcagtcacgtcttttccttcc

SEQ ID NO: 2212680 - DNA, 25 bp, Homo sapien
gcaaatggcagtcacgtcttttcct

SEQ ID NO: 2212681 - DNA, 25 bp, Homo sapien
ctgccaacggaataaaacaaatgcc

SEQ ID NO: 2212682 - DNA, 25 bp, Homo sapien
caaagcaagagaccaggcctcatga

SEQ ID NO: 2212683 - DNA, 25 bp, Homo sapien
cctgcaacagtaggaggttctttgc

SEQ ID NO: 2212684 - DNA, 25 bp, Homo sapien
gatccccacctacgtggtcactttg

SEQ ID NO: 2212685 - DNA, 25 bp, Homo sapien
ttctgcgtgtcgaaatggaggttga

SEQ ID NO: 2212686 - DNA, 25 bp, Homo sapien
cttcccatgtgcatgggtagccaga

SEQ ID NO: 2212687 - DNA, 25 bp, Homo sapien
tcccatgtgcatgggtagccagagc

SEQ ID NO: 2212688 - DNA, 25 bp, Homo sapien
tgttcctgttctgcgtgtcgaaatg

SEQ ID NO: 2212689 - DNA, 25 bp, Homo sapien
actctggtgcttgccggatattcat

SEQ ID NO: 2212690 - DNA, 25 bp, Homo sapien
tgaggtcctcaagctaaactctggt

SEQ ID NO: 2212691 - DNA, 25 bp, Homo sapien
caagctaaactctggtgcttgccgg

SEQ ID NO: 2212692 - DNA, 25 bp, Homo sapien
ctctctgaggtcctcaagctaaact

SEQ ID NO: 2212693 - DNA, 25 bp, Homo sapien
gagactccgggattctggtgacctc

SEQ ID NO: 2212694 - DNA, 25 bp, Homo sapien
gactccgggattctggtgacctcca

SEQ ID NO: 2212695 - DNA, 25 bp, Homo sapien
agtgtcccccgtgagggagactccg

SEQ ID NO: 2212696 - DNA, 25 bp, Homo sapien
ctccgggattctggtgacctccatg

SEQ ID NO: 2212697 - DNA, 25 bp, Homo sapien
tttgtaatccagctgagtggccagc

SEQ ID NO: 2212698 - DNA, 25 bp, Homo sapien
ttttgtaatccagctgagtggccag

SEQ ID NO: 2212699 - DNA, 25 bp, Homo sapien
cagaaggcaagtgtttccgcagcct

SEQ ID NO: 2212700 - DNA, 25 bp, Homo sapien
ctgcgactccacaaatggcagtcat

SEQ ID NO: 2212701 - DNA, 25 bp, Homo sapien
caagtgtttccgcagcctgttgtca

SEQ ID NO: 2212702 - DNA, 25 bp, Homo sapien
tgctggatggcactgcgactccaca

SEQ ID NO: 2212703 - DNA, 25 bp, Homo sapien
aagtgcatgggtagctcgctttcac

SEQ ID NO: 2212704 - DNA, 25 bp, Homo sapien
tggcatcttggtcattctgccaaag

SEQ ID NO: 2212705 - DNA, 25 bp, Homo sapien
accagttagttgttctggcatcttg

SEQ ID NO: 2212706 - DNA, 25 bp, Homo sapien
tggaacgtggtggttcaccagttag

SEQ ID NO: 2212707 - DNA, 25 bp, Homo sapien
gccttggtttgatacagagctctct

SEQ ID NO: 2212708 - DNA, 25 bp, Homo sapien
tgccttggtttgatacagagctctc

SEQ ID NO: 2212709 - DNA, 25 bp, Homo sapien
gaacggcagccctttaatcccaagc

SEQ ID NO: 2212710 - DNA, 25 bp, Homo sapien
tgtcttttactttctgcaggagcag

SEQ ID NO: 2212711 - DNA, 25 bp, Homo sapien
tcttgtgtcccagtgcccatgatta

SEQ ID NO: 2212712 - DNA, 25 bp, Homo sapien
cttgtcttggaacggcagcccttta

SEQ ID NO: 2212713 - DNA, 25 bp, Homo sapien
tgtgggtgtttaggcctgtgtgtgg

SEQ ID NO: 2212714 - DNA, 25 bp, Homo sapien
gagcctatcctcaagaaatgctatg

SEQ ID NO: 2212715 - DNA, 25 bp, Homo sapien
cagggggtcccagtaatccagagga

SEQ ID NO: 2212716 - DNA, 25 bp, Homo sapien
tgtgggccgctgcagattcttctat

SEQ ID NO: 2212717 - DNA, 25 bp, Homo sapien
tgttcgctcattttggtgacctcca

SEQ ID NO: 2212718 - DNA, 25 bp, Homo sapien
cagtcctgcagcaaaaccttgggta

SEQ ID NO: 2212719 - DNA, 25 bp, Homo sapien
gcccaaggtggtaaactctatctgg

SEQ ID NO: 2212720 - DNA, 25 bp, Homo sapien
cagttgctgagtatcccctctgagg

SEQ ID NO: 2212721 - DNA, 25 bp, Homo sapien
tttcttcgcttgttacaagtcttcc

SEQ ID NO: 2212722 - DNA, 25 bp, Homo sapien
tattcagagggcaagattttgcctg

SEQ ID NO: 2212723 - DNA, 25 bp, Homo sapien
ttatgtactagggacttgatggccc

SEQ ID NO: 2212724 - DNA, 25 bp, Homo sapien
caaggctacttgtggatcagagccc

SEQ ID NO: 2212725 - DNA, 25 bp, Homo sapien
agagcccttgatcccactcagaaag

SEQ ID NO: 2212726 - DNA, 25 bp, Homo sapien
cacagggatgaagctcagttgatca

SEQ ID NO: 2212727 - DNA, 25 bp, Homo sapien
gatgatgggcttttctaggtgtaca

SEQ ID NO: 2212728 - DNA, 25 bp, Homo sapien
tggctgtcattttgtcatagatagc

SEQ ID NO: 2212729 - DNA, 25 bp, Homo sapien
tgctggtttacgtttactgattttc

SEQ ID NO: 2212730 - DNA, 25 bp, Homo sapien
gaatccataacaatttcttccgcac

SEQ ID NO: 2212731 - DNA, 25 bp, Homo sapien
ccataacaatttcttccgcactggt

SEQ ID NO: 2212732 - DNA, 25 bp, Homo sapien
tgaatccataacaatttcttccgca

SEQ ID NO: 2212733 - DNA, 25 bp, Homo sapien
atccataacaatttcttccgcactg

SEQ ID NO: 2212734 - DNA, 25 bp, Homo sapien
acagactgttgcatctgttttgtct

SEQ ID NO: 2212735 - DNA, 25 bp, Homo sapien
ccttgtgggcctgccattgtgtatc

SEQ ID NO: 2212736 - DNA, 25 bp, Homo sapien
gaatggatgcagtctcctgaacaaa

SEQ ID NO: 2212737 - DNA, 25 bp, Homo sapien
ccattgtgtatccacattgctgacc

SEQ ID NO: 2212738 - DNA, 25 bp, Homo sapien
ttgcatagaggtgattgtagtaatc

SEQ ID NO: 2212739 - DNA, 25 bp, Homo sapien
gcatagaggtgattgtagtaatctc

SEQ ID NO: 2212740 - DNA, 25 bp, Homo sapien
catagaggtgattgtagtaatctct

SEQ ID NO: 2212741 - DNA, 25 bp, Homo sapien
atttgcatagaggtgattgtagtaa

SEQ ID NO: 2212742 - DNA, 25 bp, Homo sapien
tattttgtgatataaatttccctct

SEQ ID NO: 2212743 - DNA, 25 bp, Homo sapien
tttctcttgtgggtattttgtgata

SEQ ID NO: 2212744 - DNA, 25 bp, Homo sapien
gctttctcttgtgggtattttgtga

SEQ ID NO: 2212745 - DNA, 25 bp, Homo sapien
tctcttgtgggtattttgtgatata

SEQ ID NO: 2212746 - DNA, 25 bp, Homo sapien
tttatttggtgtgtagagttctgta

SEQ ID NO: 2212747 - DNA, 25 bp, Homo sapien
ggtgtcaaagtctcctattattatc

SEQ ID NO: 2212748 - DNA, 25 bp, Homo sapien
tctgtttatttggtgtgtagagttc

SEQ ID NO: 2212749 - DNA, 25 bp, Homo sapien
caaagtctcctattattatcgtgtg

SEQ ID NO: 2212750 - DNA, 25 bp, Homo sapien
acagaaaaaacctaggtgtctatag

SEQ ID NO: 2212751 - DNA, 25 bp, Homo sapien
aattctggtttattgtggacacaaa

SEQ ID NO: 2212752 - DNA, 25 bp, Homo sapien
ttatttacaacagccaatatacaga

SEQ ID NO: 2212753 - DNA, 25 bp, Homo sapien
tcctatcaaatttcaatgggatttt

SEQ ID NO: 2212754 - DNA, 25 bp, Homo sapien
cagtcaaatgatcaggcccaatgtc

SEQ ID NO: 2212755 - DNA, 25 bp, Homo sapien
tgagacttaatagagacctattcat

SEQ ID NO: 2212756 - DNA, 25 bp, Homo sapien
tcctcagtcaaatgatcaggcccaa

SEQ ID NO: 2212757 - DNA, 25 bp, Homo sapien
gcccaatgtcaacacaactgagact

SEQ ID NO: 2212758 - DNA, 25 bp, Homo sapien
gatacacattgattcggtccagaaa

SEQ ID NO: 2212759 - DNA, 25 bp, Homo sapien
tgctttcaatttataggtagattta

SEQ ID NO: 2212760 - DNA, 25 bp, Homo sapien
gattggcaactggttattatcaata

SEQ ID NO: 2212761 - DNA, 25 bp, Homo sapien
attatcaataaaatgcgatgtctgg

SEQ ID NO: 2212762 - DNA, 25 bp, Homo sapien
tcttttgaggatagcaatggcccat

SEQ ID NO: 2212763 - DNA, 25 bp, Homo sapien
ccaggtcaaaggaggatgttgagca

SEQ ID NO: 2212764 - DNA, 25 bp, Homo sapien
gagaattgtacacctccttaccaga

SEQ ID NO: 2212765 - DNA, 25 bp, Homo sapien
tgtcctaatgaccagcagaagaggg

SEQ ID NO: 2212766 - DNA, 25 bp, Homo sapien
cagtattcagaggtatggcctttaa

SEQ ID NO: 2212767 - DNA, 25 bp, Homo sapien
tacaacttcgtatatgtgcacatag

SEQ ID NO: 2212768 - DNA, 25 bp, Homo sapien
taacaggtgattggaacatgagggt

SEQ ID NO: 2212769 - DNA, 25 bp, Homo sapien
caggtgtatatatgcgttttctgcc

SEQ ID NO: 2212770 - DNA, 25 bp, Homo sapien
aaacacttccagtggttggaaggtg

SEQ ID NO: 2212771 - DNA, 25 bp, Homo sapien
ctcctttcagtatctggagctggtg

SEQ ID NO: 2212772 - DNA, 25 bp, Homo sapien
ataaacacttccagtggttggaagg

SEQ ID NO: 2212773 - DNA, 25 bp, Homo sapien
tggagctggtgaaaaatttggcctt

SEQ ID NO: 2212774 - DNA, 25 bp, Homo sapien
tagaaaagaggccatcctgttggtt

SEQ ID NO: 2212775 - DNA, 25 bp, Homo sapien
tgttggtttcacagcagtcacccat

SEQ ID NO: 2212776 - DNA, 25 bp, Homo sapien
cagcagtcacccatgaagaacagct

SEQ ID NO: 2212777 - DNA, 25 bp, Homo sapien
agaggccatcctgttggtttcacag

SEQ ID NO: 2212778 - DNA, 25 bp, Homo sapien
taggagagatgattgcccagggttt

SEQ ID NO: 2212779 - DNA, 25 bp, Homo sapien
tgctaccgtcacaagactggagcag

SEQ ID NO: 2212780 - DNA, 25 bp, Homo sapien
acatgctaccgtcacaagactggag

SEQ ID NO: 2212781 - DNA, 25 bp, Homo sapien
ctaccgtcacaagactggagcagaa

SEQ ID NO: 2212782 - DNA, 25 bp, Homo sapien
ttgctggtgctcacaccggtggaca

SEQ ID NO: 2212783 - DNA, 25 bp, Homo sapien
ggtgaaggaaaccatattgtccctc

SEQ ID NO: 2212784 - DNA, 25 bp, Homo sapien
ccggtggacacattactttgataca

SEQ ID NO: 2212785 - DNA, 25 bp, Homo sapien
tctaggtgtttgctgttggtctgct

SEQ ID NO: 2212786 - DNA, 25 bp, Homo sapien
caatctgtgccggtagtctggactc

SEQ ID NO: 2212787 - DNA, 25 bp, Homo sapien
catcttgctgtgtggaacgaactca

SEQ ID NO: 2212788 - DNA, 25 bp, Homo sapien
tcaagatccaagagtggcctaagct

SEQ ID NO: 2212789 - DNA, 25 bp, Homo sapien
gactctggtcaacaaacagggctgt

SEQ ID NO: 2212790 - DNA, 25 bp, Homo sapien
tgcagaactccatggccttattagg

SEQ ID NO: 2212791 - DNA, 25 bp, Homo sapien
tgattgtactgccttgagtcccagc

SEQ ID NO: 2212792 - DNA, 25 bp, Homo sapien
gagagaccctaatgccactgatgac

SEQ ID NO: 2212793 - DNA, 25 bp, Homo sapien
taccagccagagctattggagacaa

SEQ ID NO: 2212794 - DNA, 25 bp, Homo sapien
tcaatgagtgtagagtccaagtgcc

SEQ ID NO: 2212795 - DNA, 25 bp, Homo sapien
ttaaattgcggagaggaaccagtga

SEQ ID NO: 2212796 - DNA, 25 bp, Homo sapien
catgggatatctcagcaagcttcac

SEQ ID NO: 2212797 - DNA, 25 bp, Homo sapien
tccaagtgccaaaaagagtgaggtg

SEQ ID NO: 2212798 - DNA, 25 bp, Homo sapien
taggaaggacttcaagtgatgacac

SEQ ID NO: 2212799 - DNA, 25 bp, Homo sapien
gatacagagagggatttacaggtac

SEQ ID NO: 2212800 - DNA, 25 bp, Homo sapien
tatttctgccaagtgtgtatcactg

SEQ ID NO: 2212801 - DNA, 25 bp, Homo sapien
gccagttctcttggagccatcgtct

SEQ ID NO: 2212802 - DNA, 25 bp, Homo sapien
ttccactgtgttagaggttcatctc

SEQ ID NO: 2212803 - DNA, 25 bp, Homo sapien
cactgtgttagaggttcatctccat

SEQ ID NO: 2212804 - DNA, 25 bp, Homo sapien
actgtgttagaggttcatctccatc

SEQ ID NO: 2212805 - DNA, 25 bp, Homo sapien
gtgggtcggctcctatgcttcttgt

SEQ ID NO: 2212806 - DNA, 25 bp, Homo sapien
cctctttatcatggtaacagacaca

SEQ ID NO: 2212807 - DNA, 25 bp, Homo sapien
gcagctgcctttccaaacggggtct

SEQ ID NO: 2212808 - DNA, 25 bp, Homo sapien
tcatggtaacagacacactgccgtg

SEQ ID NO: 2212809 - DNA, 25 bp, Homo sapien
gtttttcccgaaagctagatagcaa

SEQ ID NO: 2212810 - DNA, 25 bp, Homo sapien
cctgtttttcccgaaagctagatag

SEQ ID NO: 2212811 - DNA, 25 bp, Homo sapien
tcccgaaagctagatagcaaagctg

SEQ ID NO: 2212812 - DNA, 25 bp, Homo sapien
aagctagatagcaaagctggaaatc

SEQ ID NO: 2212813 - DNA, 25 bp, Homo sapien
cccagctcagtctggctaagatctg

SEQ ID NO: 2212814 - DNA, 25 bp, Homo sapien
tctgcggttcggtgaaatacgaagc

SEQ ID NO: 2212815 - DNA, 25 bp, Homo sapien
tgaaatacgaagcgtttccccattc

SEQ ID NO: 2212816 - DNA, 25 bp, Homo sapien
tcagtctggctaagatctgcggttc

SEQ ID NO: 2212817 - DNA, 25 bp, Homo sapien
cggccaggaggcgcagattccccac

SEQ ID NO: 2212818 - DNA, 25 bp, Homo sapien
ccggccaggaggcgcagattcccca

SEQ ID NO: 2212819 - DNA, 25 bp, Homo sapien
tgcgggcctcaagtgcacaaatcgg

SEQ ID NO: 2212820 - DNA, 25 bp, Homo sapien
gtgcacaaatcggacacctcgccgt

SEQ ID NO: 2212821 - DNA, 25 bp, Homo sapien
cgtcccggattgcgggcctcaagtg

SEQ ID NO: 2212822 - DNA, 25 bp, Homo sapien
gcacaaatcggacacctcgccgttg

SEQ ID NO: 2212823 - DNA, 25 bp, Homo sapien
gcgagcagcccggtgcttgcaaaag

SEQ ID NO: 2212824 - DNA, 25 bp, Homo sapien
gagcagcccggtgcttgcaaaagct

SEQ ID NO: 2212825 - DNA, 25 bp, Homo sapien
aaaatcagcgggcgagcagcccggt

SEQ ID NO: 2212826 - DNA, 25 bp, Homo sapien
agcccggtgcttgcaaaagctggga

SEQ ID NO: 2212827 - DNA, 25 bp, Homo sapien
gaagatgaccgtggcggcgtccctt

SEQ ID NO: 2212828 - DNA, 25 bp, Homo sapien
cttctttttctagcgcagcttccgg

SEQ ID NO: 2212829 - DNA, 25 bp, Homo sapien
cagcttccggtcagtagagaggcct

SEQ ID NO: 2212830 - DNA, 25 bp, Homo sapien
caatgagtgtctctaagagggcggc

SEQ ID NO: 2212831 - DNA, 25 bp, Homo sapien
caggcatgcaatgcgaaataattac

SEQ ID NO: 2212832 - DNA, 25 bp, Homo sapien
aacaatctaattatactctttttag

SEQ ID NO: 2212833 - DNA, 25 bp, Homo sapien
gcgaaataattacatcatggaaaac

SEQ ID NO: 2212834 - DNA, 25 bp, Homo sapien
aattacatcatggaaaacgggtatc

SEQ ID NO: 2212835 - DNA, 25 bp, Homo sapien
tcacgacatagtctttcaaggcttc

SEQ ID NO: 2212836 - DNA, 25 bp, Homo sapien
tcttgctggcattcccggagacact

SEQ ID NO: 2212837 - DNA, 25 bp, Homo sapien
ggtcgtgtagtcacccatgggaatt

SEQ ID NO: 2212838 - DNA, 25 bp, Homo sapien
cccaaatggcttcccggtcgtgtag

SEQ ID NO: 2212839 - DNA, 25 bp, Homo sapien
gttctgtgggtcaaccttgaagcca

SEQ ID NO: 2212840 - DNA, 25 bp, Homo sapien
tgtcattaaagctggctgcagtagt

SEQ ID NO: 2212841 - DNA, 25 bp, Homo sapien
gcatttgagcaggtacacgatcccc

SEQ ID NO: 2212842 - DNA, 25 bp, Homo sapien
ctgggattgcagaggtctcaggaaa

SEQ ID NO: 2212843 - DNA, 25 bp, Homo sapien
taggccaccttttgtggagcactgg

SEQ ID NO: 2212844 - DNA, 25 bp, Homo sapien
gagcactggatggagtcacctgtag

SEQ ID NO: 2212845 - DNA, 25 bp, Homo sapien
cagtcttgtgggtgcctagccagaa

SEQ ID NO: 2212846 - DNA, 25 bp, Homo sapien
gagtccacagacaccagtcttgtgg

SEQ ID NO: 2212847 - DNA, 25 bp, Homo sapien
tcaggctatctataaatccttctgg

SEQ ID NO: 2212848 - DNA, 25 bp, Homo sapien
tggatgagacacacttgattctggc

SEQ ID NO: 2212849 - DNA, 25 bp, Homo sapien
gatgaaatacacaggtttggcttta

SEQ ID NO: 2212850 - DNA, 25 bp, Homo sapien
catgtttatctatcaggctatctat

SEQ ID NO: 2212851 - DNA, 25 bp, Homo sapien
caggctttcatgataggtgcttggg

SEQ ID NO: 2212852 - DNA, 25 bp, Homo sapien
tccctttacactgggtgatgggctc

SEQ ID NO: 2212853 - DNA, 25 bp, Homo sapien
tgcaaggcagaaatccctgacttgt

SEQ ID NO: 2212854 - DNA, 25 bp, Homo sapien
cctgacttgtgagaatggcacctta

SEQ ID NO: 2212855 - DNA, 25 bp, Homo sapien
ccagtgtggtgacctatggcttccc

SEQ ID NO: 2212856 - DNA, 25 bp, Homo sapien
gcttcattggagatgtctttttctt

SEQ ID NO: 2212857 - DNA, 25 bp, Homo sapien
ttggcttcattggagatgtcttttt

SEQ ID NO: 2212858 - DNA, 25 bp, Homo sapien
agtgtggtgacctatggcttccctg

SEQ ID NO: 2212859 - DNA, 25 bp, Homo sapien
ctctctttcctgtctcttcctggta

SEQ ID NO: 2212860 - DNA, 25 bp, Homo sapien
tctctttcctgtctcttcctggtaa

SEQ ID NO: 2212861 - DNA, 25 bp, Homo sapien
tttcctgtctcttcctggtaaactc

SEQ ID NO: 2212862 - DNA, 25 bp, Homo sapien
cctgtctcttcctggtaaactccat

SEQ ID NO: 2212863 - DNA, 25 bp, Homo sapien
ccaaatccacaggtaccaggtccaa

SEQ ID NO: 2212864 - DNA, 25 bp, Homo sapien
ctcctgctaggttcaacgttttcat

SEQ ID NO: 2212865 - DNA, 25 bp, Homo sapien
tccctctcctgctaggttcaacgtt

SEQ ID NO: 2212866 - DNA, 25 bp, Homo sapien
cctctcctgctaggttcaacgtttt

SEQ ID NO: 2212867 - DNA, 25 bp, Homo sapien
tctgtaagtacatcctagaagaaga

SEQ ID NO: 2212868 - DNA, 25 bp, Homo sapien
ggcatccatggaacaatacatttaa

SEQ ID NO: 2212869 - DNA, 25 bp, Homo sapien
taatagttacattgtcagcaagcct

SEQ ID NO: 2212870 - DNA, 25 bp, Homo sapien
gaatgtctctgtatacttgtaccag

SEQ ID NO: 2212871 - DNA, 25 bp, Homo sapien
taccagcaatacctgaaagttctat

SEQ ID NO: 2212872 - DNA, 25 bp, Homo sapien
gagtgggattggtgggttctatgtt

SEQ ID NO: 2212873 - DNA, 25 bp, Homo sapien
gggtaaatacatatgagtgggattg

SEQ ID NO: 2212874 - DNA, 25 bp, Homo sapien
tcttcattctcgtcagtatttggaa

SEQ ID NO: 2212875 - DNA, 25 bp, Homo sapien
gagttccgtgtagattctgaatacc

SEQ ID NO: 2212876 - DNA, 25 bp, Homo sapien
tgactctccatactgtgttccatgg

SEQ ID NO: 2212877 - DNA, 25 bp, Homo sapien
tggcttcaggtgtcagatttaagtc

SEQ ID NO: 2212878 - DNA, 25 bp, Homo sapien
tagtgacattgctggatcaagttgt

SEQ ID NO: 2212879 - DNA, 25 bp, Homo sapien
gaatagacattgtacttttagtcta

SEQ ID NO: 2212880 - DNA, 25 bp, Homo sapien
agtctattaataggacttcaagttg

SEQ ID NO: 2212881 - DNA, 25 bp, Homo sapien
tattaataggacttcaagttgattg

SEQ ID NO: 2212882 - DNA, 25 bp, Homo sapien
tttagtctattaataggacttcaag

SEQ ID NO: 2212883 - DNA, 25 bp, Homo sapien
gctgtacacctacaaccacttaatc

SEQ ID NO: 2212884 - DNA, 25 bp, Homo sapien
ccaaaatagaatggtattgatacaa

SEQ ID NO: 2212885 - DNA, 25 bp, Homo sapien
taggtaactaggcatatgcaaaaga

SEQ ID NO: 2212886 - DNA, 25 bp, Homo sapien
taacaaattatggtaagataggtaa

SEQ ID NO: 2212887 - DNA, 25 bp, Homo sapien
agcaaattaagatccactggttaga

SEQ ID NO: 2212888 - DNA, 25 bp, Homo sapien
caaccccatggatcccagcaaatta

SEQ ID NO: 2212889 - DNA, 25 bp, Homo sapien
tagggggttttatgctcaaagtata

SEQ ID NO: 2212890 - DNA, 25 bp, Homo sapien
agcagcaggctgagatcgacctggg

SEQ ID NO: 2212891 - DNA, 25 bp, Homo sapien
gtaaaacacaataaggtaacatatc

SEQ ID NO: 2212892 - DNA, 25 bp, Homo sapien
tggaattcctcaaacagacatagaa

SEQ ID NO: 2212893 - DNA, 25 bp, Homo sapien
aataaggtaacatatcagacacact

SEQ ID NO: 2212894 - DNA, 25 bp, Homo sapien
gaaattggactcttcatatactgca

SEQ ID NO: 2212895 - DNA, 25 bp, Homo sapien
accattgtaggtattaagttgaaat

SEQ ID NO: 2212896 - DNA, 25 bp, Homo sapien
tgaaattgatcaaccccaaacagga

SEQ ID NO: 2212897 - DNA, 25 bp, Homo sapien
cctccatggttcaggtgttcagttc

SEQ ID NO: 2212898 - DNA, 25 bp, Homo sapien
caaacaggaatgtcaggctggagag

SEQ ID NO: 2212899 - DNA, 25 bp, Homo sapien
aatgtggattcttgggacagcaggc

SEQ ID NO: 2212900 - DNA, 25 bp, Homo sapien
gtaggcaagactggccaacaggtgc

SEQ ID NO: 2212901 - DNA, 25 bp, Homo sapien
gagctgaccagaattccatcacagg

SEQ ID NO: 2212902 - DNA, 25 bp, Homo sapien
tctaaccagaatgtggattcttggg

SEQ ID NO: 2212903 - DNA, 25 bp, Homo sapien
ttgtcggaaccacctgtggtttcag

SEQ ID NO: 2212904 - DNA, 25 bp, Homo sapien
tgtcggaaccacctgtggtttcagg

SEQ ID NO: 2212905 - DNA, 25 bp, Homo sapien
tttgtcggaaccacctgtggtttca

SEQ ID NO: 2212906 - DNA, 25 bp, Homo sapien
ggagagaaacactaggctcaatctt

SEQ ID NO: 2212907 - DNA, 25 bp, Homo sapien
gctcaatcttctgatgcccctcgtc

SEQ ID NO: 2212908 - DNA, 25 bp, Homo sapien
ctggagagaaacactaggctcaatc

SEQ ID NO: 2212909 - DNA, 25 bp, Homo sapien
agagaaacactaggctcaatcttct

SEQ ID NO: 2212910 - DNA, 25 bp, Homo sapien
ctgctgggtaggagcgtcctgaact

SEQ ID NO: 2212911 - DNA, 25 bp, Homo sapien
tgctgggtaggagcgtcctgaactc

SEQ ID NO: 2212912 - DNA, 25 bp, Homo sapien
tcagaatgcccttctagggaacctc

SEQ ID NO: 2212913 - DNA, 25 bp, Homo sapien
ccttgtcagaatgcccttctaggga

SEQ ID NO: 2212914 - DNA, 25 bp, Homo sapien
ccttctagggaacctccaatgtatc

SEQ ID NO: 2212915 - DNA, 25 bp, Homo sapien
gaatgcccttctagggaacctccaa

SEQ ID NO: 2212916 - DNA, 25 bp, Homo sapien
cacacatgtgccaaattttacccta

SEQ ID NO: 2212917 - DNA, 25 bp, Homo sapien
agatgtttagttatcagggattcca

SEQ ID NO: 2212918 - DNA, 25 bp, Homo sapien
ttttgcatgtctacaaattatacat

SEQ ID NO: 2212919 - DNA, 25 bp, Homo sapien
tagttatcagggattccataagctt

SEQ ID NO: 2212920 - DNA, 25 bp, Homo sapien
gattctggcatgatgcggaggtcac

SEQ ID NO: 2212921 - DNA, 25 bp, Homo sapien
gccgatccttttggagccatcttct

SEQ ID NO: 2212922 - DNA, 25 bp, Homo sapien
tattccacatgcttacctattaggc

SEQ ID NO: 2212923 - DNA, 25 bp, Homo sapien
ttccacttggtgaatgaccatgccg

SEQ ID NO: 2212924 - DNA, 25 bp, Homo sapien
taggtgcttgagctaagaccatccc

SEQ ID NO: 2212925 - DNA, 25 bp, Homo sapien
aaaaccaggctttcatgataggtgc

SEQ ID NO: 2212926 - DNA, 25 bp, Homo sapien
tgatgccaccctgtcagaaagaatt

SEQ ID NO: 2212927 - DNA, 25 bp, Homo sapien
tttcaccagataaagagagggattt

SEQ ID NO: 2212928 - DNA, 25 bp, Homo sapien
ccatgagaaattctgcagcccacga

SEQ ID NO: 2212929 - DNA, 25 bp, Homo sapien
tctttgtcatgtttgcagacccagt

SEQ ID NO: 2212930 - DNA, 25 bp, Homo sapien
cctttccactgcgtgatgggctcat

SEQ ID NO: 2212931 - DNA, 25 bp, Homo sapien
tgggatgaaggtcggcctctctgct

SEQ ID NO: 2212932 - DNA, 25 bp, Homo sapien
cttcaaatccttgtctggctcccgt

SEQ ID NO: 2212933 - DNA, 25 bp, Homo sapien
gctaccactggcgtccacttccaat

SEQ ID NO: 2212934 - DNA, 25 bp, Homo sapien
acttccaatccccttgcaaagaggc

SEQ ID NO: 2212935 - DNA, 25 bp, Homo sapien
ttgcaaagaggccttgaccggcacc

SEQ ID NO: 2212936 - DNA, 25 bp, Homo sapien
cattctggcgcccactaatggcctt

SEQ ID NO: 2212937 - DNA, 25 bp, Homo sapien
ttgcctggcgcccaactccacccca

SEQ ID NO: 2212938 - DNA, 25 bp, Homo sapien
ccacccttgcctggcgcccaactcc

SEQ ID NO: 2212939 - DNA, 25 bp, Homo sapien
cctctccattctggcgcccactaat

SEQ ID NO: 2212940 - DNA, 25 bp, Homo sapien
ctggcgtccaccgccggggatcgcg

SEQ ID NO: 2212941 - DNA, 25 bp, Homo sapien
tggcgtccaccgccggggatcgcgg

SEQ ID NO: 2212942 - DNA, 25 bp, Homo sapien
gcgtccaccgccggggatcgcgggc

SEQ ID NO: 2212943 - DNA, 25 bp, Homo sapien
ctcacccgtttcagggccacttggt

SEQ ID NO: 2212944 - DNA, 25 bp, Homo sapien
tagccccggcggagctatgggctct

SEQ ID NO: 2212945 - DNA, 25 bp, Homo sapien
cgaccggccgagtgaatgcttgcaa

SEQ ID NO: 2212946 - DNA, 25 bp, Homo sapien
caaatccggagtagttcgtgccaca

SEQ ID NO: 2212947 - DNA, 25 bp, Homo sapien
ttctaagcaggagggcggcattatc

SEQ ID NO: 2212948 - DNA, 25 bp, Homo sapien
caccgaggatcaaacatagtcagtc

SEQ ID NO: 2212949 - DNA, 25 bp, Homo sapien
cagtaggtacacaaaggccacttct

SEQ ID NO: 2212950 - DNA, 25 bp, Homo sapien
gatctagcgcatgcagaataaggca

SEQ ID NO: 2212951 - DNA, 25 bp, Homo sapien
tcaaataggaaaacatgcagcgtgt

SEQ ID NO: 2212952 - DNA, 25 bp, Homo sapien
cagaaaacgtggtgtagtccttgac

SEQ ID NO: 2212953 - DNA, 25 bp, Homo sapien
aatctaggcgttgagtatagagccc

SEQ ID NO: 2212954 - DNA, 25 bp, Homo sapien
cactgcacagcgttatcaaatagga

SEQ ID NO: 2212955 - DNA, 25 bp, Homo sapien
ttatctagcgcaggacaaatgtgag

SEQ ID NO: 2212956 - DNA, 25 bp, Homo sapien
gatggcacatctcttaagttctgag

SEQ ID NO: 2212957 - DNA, 25 bp, Homo sapien
catgttagcgtgtttaggctgagca

SEQ ID NO: 2212958 - DNA, 25 bp, Homo sapien
gatgcccctcatctctagatagaaa

SEQ ID NO: 2212959 - DNA, 25 bp, Homo sapien
gtcaacatgctcttctagtgaacct

SEQ ID NO: 2212960 - DNA, 25 bp, Homo sapien
tcttctagtgaacctccaatgcatc

SEQ ID NO: 2212961 - DNA, 25 bp, Homo sapien
gaaaagccttatgggcataaacttg

SEQ ID NO: 2212962 - DNA, 25 bp, Homo sapien
tcctgattaacttgactgagtcatt

SEQ ID NO: 2212963 - DNA, 25 bp, Homo sapien
tgactgattatgattctagctgaac

SEQ ID NO: 2212964 - DNA, 25 bp, Homo sapien
gaccagaccagctaaatccagtgcc

SEQ ID NO: 2212965 - DNA, 25 bp, Homo sapien
ggaccctcttctaagcttctttgtg

SEQ ID NO: 2212966 - DNA, 25 bp, Homo sapien
tattcacagccgaaattgacagctg

SEQ ID NO: 2212967 - DNA, 25 bp, Homo sapien
gattctggcatgatgcggaggtcac

SEQ ID NO: 2212968 - DNA, 25 bp, Homo sapien
gccgatccttttggagccatcttct

SEQ ID NO: 2212969 - DNA, 25 bp, Homo sapien
tattccacatgcttacctattaggc

SEQ ID NO: 2212970 - DNA, 25 bp, Homo sapien
ttccacttggtgaatgaccatgccg

SEQ ID NO: 2212971 - DNA, 25 bp, Homo sapien
tttcaccagataaagagagggattt

SEQ ID NO: 2212972 - DNA, 25 bp, Homo sapien
taggtgcttgagctaagaccatccc

SEQ ID NO: 2212973 - DNA, 25 bp, Homo sapien
aaaaccaggctttcatgataggtgc

SEQ ID NO: 2212974 - DNA, 25 bp, Homo sapien
tgatgccaccctgtcagaaagaatt

SEQ ID NO: 2212975 - DNA, 25 bp, Homo sapien
ccatgagaaattctgcagcccacga

SEQ ID NO: 2212976 - DNA, 25 bp, Homo sapien
cctttccactgcgtgatgggctcat

SEQ ID NO: 2212977 - DNA, 25 bp, Homo sapien
tgggatgaaggtcggcctctctgct

SEQ ID NO: 2212978 - DNA, 25 bp, Homo sapien
cttccatccatgagaaattctgcag

SEQ ID NO: 2212979 - DNA, 25 bp, Homo sapien
gtttgttgcccttcggcttcctgtg

SEQ ID NO: 2212980 - DNA, 25 bp, Homo sapien
agacccagtggcccgtcctgcagct

SEQ ID NO: 2212981 - DNA, 25 bp, Homo sapien
tggtttgttgcccttcggcttcctg

SEQ ID NO: 2212982 - DNA, 25 bp, Homo sapien
ttgcagacccagtggcccgtcctgc

SEQ ID NO: 2212983 - DNA, 25 bp, Homo sapien
cagtgtgccacaaggcaaacttttc

SEQ ID NO: 2212984 - DNA, 25 bp, Homo sapien
ccctaggagcctggaagcaatgctg

SEQ ID NO: 2212985 - DNA, 25 bp, Homo sapien
gtctgcgctagtgcctaagtttccc

SEQ ID NO: 2212986 - DNA, 25 bp, Homo sapien
ccatgtctggatgtagtctgcgcta

SEQ ID NO: 2212987 - DNA, 25 bp, Homo sapien
aaggagggtcaacaggcgactcgct

SEQ ID NO: 2212988 - DNA, 25 bp, Homo sapien
ggtcaacaggcgactcgctgagtga

SEQ ID NO: 2212989 - DNA, 25 bp, Homo sapien
ctgtggcgaaggagggtcaacaggc

SEQ ID NO: 2212990 - DNA, 25 bp, Homo sapien
acaggcgactcgctgagtgactgct

SEQ ID NO: 2212991 - DNA, 25 bp, Homo sapien
aaagagcactgcagcggtgtcccca

SEQ ID NO: 2212992 - DNA, 25 bp, Homo sapien
gctggccgtctacctccctgttggt

SEQ ID NO: 2212993 - DNA, 25 bp, Homo sapien
ttctaatcacagagcagatctgcct

SEQ ID NO: 2212994 - DNA, 25 bp, Homo sapien
ccaccagtccctgatgcagtggctg

SEQ ID NO: 2212995 - DNA, 25 bp, Homo sapien
ataaaatcagtttcttagttacagt

SEQ ID NO: 2212996 - DNA, 25 bp, Homo sapien
tggtgggatctttagattttttcta

SEQ ID NO: 2212997 - DNA, 25 bp, Homo sapien
aatcagtttcttagttacagttcgt

SEQ ID NO: 2212998 - DNA, 25 bp, Homo sapien
cctaattgctcttgttagaatttcc

SEQ ID NO: 2212999 - DNA, 25 bp, Homo sapien
ggtgcacgtatcacccgagcagttt

SEQ ID NO: 2213000 - DNA, 25 bp, Homo sapien
ttctggatctcgtaagcacacttca

SEQ ID NO: 2213001 - DNA, 25 bp, Homo sapien
cctctgtaaagcaagtaactctgtg

SEQ ID NO: 2213002 - DNA, 25 bp, Homo sapien
tcccctacttgaggcaattttctgg

SEQ ID NO: 2213003 - DNA, 25 bp, Homo sapien
aggatataatctcttggtgtcccat

SEQ ID NO: 2213004 - DNA, 25 bp, Homo sapien
tataatctcttggtgtcccattttt

SEQ ID NO: 2213005 - DNA, 25 bp, Homo sapien
gcaggatataatctcttggtgtccc

SEQ ID NO: 2213006 - DNA, 25 bp, Homo sapien
taatctcttggtgtcccatttttta

SEQ ID NO: 2213007 - DNA, 25 bp, Homo sapien
tatagggcatctgaaaaactttacc

SEQ ID NO: 2213008 - DNA, 25 bp, Homo sapien
atagggcatctgaaaaactttacct

SEQ ID NO: 2213009 - DNA, 25 bp, Homo sapien
caggaattggaacttgtgctctcca

SEQ ID NO: 2213010 - DNA, 25 bp, Homo sapien
tttcagggctgtatgattgctcagg

SEQ ID NO: 2213011 - DNA, 25 bp, Homo sapien
gctgtatgattgctcaggaattgga

SEQ ID NO: 2213012 - DNA, 25 bp, Homo sapien
gattgctcaggaattggaacttgtg

SEQ ID NO: 2213013 - DNA, 25 bp, Homo sapien
tgaactggcacctcaggtacaagac

SEQ ID NO: 2213014 - DNA, 25 bp, Homo sapien
cagggagtgtctagaaatttcaccc

SEQ ID NO: 2213015 - DNA, 25 bp, Homo sapien
ggctgacctggtacccaaaatgcaa

SEQ ID NO: 2213016 - DNA, 25 bp, Homo sapien
tgatgattctgacccatggtgccct

SEQ ID NO: 2213017 - DNA, 25 bp, Homo sapien
gccataagctttttagcctggagtt

SEQ ID NO: 2213018 - DNA, 25 bp, Homo sapien
tcaaggttatttagggccccatagc

SEQ ID NO: 2213019 - DNA, 25 bp, Homo sapien
ttttctcagtaggtcatctgcgcca

SEQ ID NO: 2213020 - DNA, 25 bp, Homo sapien
gatgccagcacttttttagctacca

SEQ ID NO: 2213021 - DNA, 25 bp, Homo sapien
cattgttactatacagaaagtttcg

SEQ ID NO: 2213022 - DNA, 25 bp, Homo sapien
gaaaactccagcataagatccaaat

SEQ ID NO: 2213023 - DNA, 25 bp, Homo sapien
tagtcacatacacatagaaaatgct

SEQ ID NO: 2213024 - DNA, 25 bp, Homo sapien
cagtcttatctctaacactcgtcag

SEQ ID NO: 2213025 - DNA, 25 bp, Homo sapien
aaaactttgctccatgattccggta

SEQ ID NO: 2213026 - DNA, 25 bp, Homo sapien
catgattccggtaacaaaactcttt

SEQ ID NO: 2213027 - DNA, 25 bp, Homo sapien
taatctgacaggatatcaaaccagg

SEQ ID NO: 2213028 - DNA, 25 bp, Homo sapien
caggttcgtccagctttcctgtctg

SEQ ID NO: 2213029 - DNA, 25 bp, Homo sapien
gaagaagcaacatctaagatgacgg

SEQ ID NO: 2213030 - DNA, 25 bp, Homo sapien
cagactctacagacacatcacttct

SEQ ID NO: 2213031 - DNA, 25 bp, Homo sapien
taattctgactctgatttggattca

SEQ ID NO: 2213032 - DNA, 25 bp, Homo sapien
tctaagatgacggaaattatttcag

SEQ ID NO: 2213033 - DNA, 25 bp, Homo sapien
aggagatagagacacacaacaaacc

SEQ ID NO: 2213034 - DNA, 25 bp, Homo sapien
gagatagagacacacaacaaaccct

SEQ ID NO: 2213035 - DNA, 25 bp, Homo sapien
agaactaaaggagatagagacacac

SEQ ID NO: 2213036 - DNA, 25 bp, Homo sapien
actaaaggagatagagacacacaac

SEQ ID NO: 2213037 - DNA, 25 bp, Homo sapien
gcataataatcgcttcatggaaaat

SEQ ID NO: 2213038 - DNA, 25 bp, Homo sapien
ccatcattattgaaacaaactctgc

SEQ ID NO: 2213039 - DNA, 25 bp, Homo sapien
tcattacctcattataactggtggc

SEQ ID NO: 2213040 - DNA, 25 bp, Homo sapien
actgcttctcaatacttaccattca

SEQ ID NO: 2213041 - DNA, 25 bp, Homo sapien
aacaggcctgctgttctataatctg

SEQ ID NO: 2213042 - DNA, 25 bp, Homo sapien
caggcctgctgttctataatctgtc

SEQ ID NO: 2213043 - DNA, 25 bp, Homo sapien
caacaggcctgctgttctataatct

SEQ ID NO: 2213044 - DNA, 25 bp, Homo sapien
aggcctgctgttctataatctgtca

SEQ ID NO: 2213045 - DNA, 25 bp, Homo sapien
ctgaaaatgacatccgggaaaactc

SEQ ID NO: 2213046 - DNA, 25 bp, Homo sapien
taacgtaaatagacatgtgcatgat

SEQ ID NO: 2213047 - DNA, 25 bp, Homo sapien
tgacatccgggaaaactcctactat

SEQ ID NO: 2213048 - DNA, 25 bp, Homo sapien
cgtcactaacgtaaatagacatgtg

SEQ ID NO: 2213049 - DNA, 25 bp, Homo sapien
aagccctgctttgtgtagacttcag

SEQ ID NO: 2213050 - DNA, 25 bp, Homo sapien
tggcatggatgttgcgaatgggcag

SEQ ID NO: 2213051 - DNA, 25 bp, Homo sapien
ctggcatggatgttgcgaatgggca

SEQ ID NO: 2213052 - DNA, 25 bp, Homo sapien
gctggcatggatgttgcgaatgggc

SEQ ID NO: 2213053 - DNA, 25 bp, Homo sapien
agctgctgggtgcttgtcctgctct

SEQ ID NO: 2213054 - DNA, 25 bp, Homo sapien
tgaggtcataaaggagttggaagct

SEQ ID NO: 2213055 - DNA, 25 bp, Homo sapien
cttgaggtcataaaggagttggaag

SEQ ID NO: 2213056 - DNA, 25 bp, Homo sapien
gaagctgctgggtgcttgtcctgct

SEQ ID NO: 2213057 - DNA, 25 bp, Homo sapien
ttgaatgcattcacggccactacta

SEQ ID NO: 2213058 - DNA, 25 bp, Homo sapien
gagtgcacttcacggcatcaaaagc

SEQ ID NO: 2213059 - DNA, 25 bp, Homo sapien
cactactactggaattccaaacatt

SEQ ID NO: 2213060 - DNA, 25 bp, Homo sapien
ccagtgagtgcacttcacggcatca

SEQ ID NO: 2213061 - DNA, 25 bp, Homo sapien
aggcattccagcagtgaccataggg

SEQ ID NO: 2213062 - DNA, 25 bp, Homo sapien
tgtgcatctttagagcgctgacagt

SEQ ID NO: 2213063 - DNA, 25 bp, Homo sapien
gaggcattccagcagtgaccatagg

SEQ ID NO: 2213064 - DNA, 25 bp, Homo sapien
cacccctgtgcatctttagagcgct

SEQ ID NO: 2213065 - DNA, 25 bp, Homo sapien
tggagaccggaatactgggatttga

SEQ ID NO: 2213066 - DNA, 25 bp, Homo sapien
gagaccggaatactgggatttgatg

SEQ ID NO: 2213067 - DNA, 25 bp, Homo sapien
gaccggaatactgggatttgatgtt

SEQ ID NO: 2213068 - DNA, 25 bp, Homo sapien
gagggtggagaccggaatactggga

SEQ ID NO: 2213069 - DNA, 25 bp, Homo sapien
ctccaaatcccgcctccgtcactac

SEQ ID NO: 2213070 - DNA, 25 bp, Homo sapien
tccaaatcccgcctccgtcactaca

SEQ ID NO: 2213071 - DNA, 25 bp, Homo sapien
ccaaatcccgcctccgtcactacaa

SEQ ID NO: 2213072 - DNA, 25 bp, Homo sapien
caaatcccgcctccgtcactacaaa

SEQ ID NO: 2213073 - DNA, 25 bp, Homo sapien
gtgcgatgatggcaaatgggcctgc

SEQ ID NO: 2213074 - DNA, 25 bp, Homo sapien
cgtgtgcgatgatggcaaatgggcc

SEQ ID NO: 2213075 - DNA, 25 bp, Homo sapien
atagaggaattgccgtgtgcgatga

SEQ ID NO: 2213076 - DNA, 25 bp, Homo sapien
attgccgtgtgcgatgatggcaaat

SEQ ID NO: 2213077 - DNA, 25 bp, Homo sapien
ccctccaatctctgcatgagattgg

SEQ ID NO: 2213078 - DNA, 25 bp, Homo sapien
tctgtttaacctttgtatgtggata

SEQ ID NO: 2213079 - DNA, 25 bp, Homo sapien
tgtgtgacttttcttcgttggagcc

SEQ ID NO: 2213080 - DNA, 25 bp, Homo sapien
caaagtggaccgtctgtgtgtgact

SEQ ID NO: 2213081 - DNA, 25 bp, Homo sapien
acagagatatcaaagtggaccgtct

SEQ ID NO: 2213082 - DNA, 25 bp, Homo sapien
tagccgcagcaacaaggttattaga

SEQ ID NO: 2213083 - DNA, 25 bp, Homo sapien
caaggttattagatacagtgatggc

SEQ ID NO: 2213084 - DNA, 25 bp, Homo sapien
ggcaccaaatgagtaaaggtagcct

SEQ ID NO: 2213085 - DNA, 25 bp, Homo sapien
ctgagcatcaatagccgcagcaaca

SEQ ID NO: 2213086 - DNA, 25 bp, Homo sapien
gccctgagaaggctgtcgcacacac

SEQ ID NO: 2213087 - DNA, 25 bp, Homo sapien
tccataggaatgacctgggagtagc

SEQ ID NO: 2213088 - DNA, 25 bp, Homo sapien
tagtgctgacagcagaactttggcc

SEQ ID NO: 2213089 - DNA, 25 bp, Homo sapien
gacctgggagtagccgcctcctgca

SEQ ID NO: 2213090 - DNA, 25 bp, Homo sapien
gcttcggtttacaagatcgtgatat

SEQ ID NO: 2213091 - DNA, 25 bp, Homo sapien
tttacaagatcgtgatatatcaatg

SEQ ID NO: 2213092 - DNA, 25 bp, Homo sapien
cggtttacaagatcgtgatatatca

SEQ ID NO: 2213093 - DNA, 25 bp, Homo sapien
caatgggcttcggtttacaagatcg

SEQ ID NO: 2213094 - DNA, 25 bp, Homo sapien
tccactttcctggcttaaatttctc

SEQ ID NO: 2213095 - DNA, 25 bp, Homo sapien
ggttaaggttgttatactgaatcat

SEQ ID NO: 2213096 - DNA, 25 bp, Homo sapien
tgtcttgaggttaaggttgttatac

SEQ ID NO: 2213097 - DNA, 25 bp, Homo sapien
ccaggaaacgcttggcactctctac

SEQ ID NO: 2213098 - DNA, 25 bp, Homo sapien
caccaggaacgggcctcgtcgtatg

SEQ ID NO: 2213099 - DNA, 25 bp, Homo sapien
tattgctaggtttgatccattcccc

SEQ ID NO: 2213100 - DNA, 25 bp, Homo sapien
accaggaacgggcctcgtcgtatgc

SEQ ID NO: 2213101 - DNA, 25 bp, Homo sapien
ccacagttgatgactattgctaggt

SEQ ID NO: 2213102 - DNA, 25 bp, Homo sapien
aaccaccaggatgtcgcctttattt

SEQ ID NO: 2213103 - DNA, 25 bp, Homo sapien
tgcaaccaccaggatgtcgccttta

SEQ ID NO: 2213104 - DNA, 25 bp, Homo sapien
cagttgcaaccaccaggatgtcgcc

SEQ ID NO: 2213105 - DNA, 25 bp, Homo sapien
gttgcaaccaccaggatgtcgcctt

SEQ ID NO: 2213106 - DNA, 25 bp, Homo sapien
catcagggccctgactattttactg

SEQ ID NO: 2213107 - DNA, 25 bp, Homo sapien
cttctggcaatctgcacccctgtct

SEQ ID NO: 2213108 - DNA, 25 bp, Homo sapien
aagcaagtcacgcatcagggccctg

SEQ ID NO: 2213109 - DNA, 25 bp, Homo sapien
ggccctgactattttactgcaccca

SEQ ID NO: 2213110 - DNA, 25 bp, Homo sapien
ctttaggcatacaaggaatgaaaca

SEQ ID NO: 2213111 - DNA, 25 bp, Homo sapien
ggcatacaaggaatgaaacagtcat

SEQ ID NO: 2213112 - DNA, 25 bp, Homo sapien
taggcatacaaggaatgaaacagtc
